United States Patent Application Publication US 2025/0084491 A1 - sequence listing, part 6

SEQ ID NO: 97253 - DNA, 75 bp, synthetic construct
  source 1..75: mol_type = other DNA
acaaacagcccctgccgggcagtttcctgtaagagagtgtttgccttctctgcatgatcttccaggagcagaaga

SEQ ID NO: 97254 - DNA, 75 bp, synthetic construct
  source 1..75: mol_type = other DNA
tgggtggtgcggcagcaaaaaactaccgtgaaaaatccgtggatgtggtctgttatgacgagctttcctcgttcg

SEQ ID NO: 97255 - DNA, 75 bp, synthetic construct
  source 1..75: mol_type = other DNA
gccagacgagttaacttccatgcaaaatatgcttggacagcaaggagagcctgtttttgatttcaacgtgcaaaa

SEQ ID NO: 97256 - DNA, 75 bp, synthetic construct
  source 1..75: mol_type = other DNA
cctggcaaagaaatctctcctgacgcctacaacaacctgattatgactggtgtatgcgcaccagtctggacaaaa

SEQ ID NO: 97257 - DNA, 75 bp, synthetic construct
  source 1..75: mol_type = other DNA
tgcctgttccatggccttcagccacaccgccaacaggctggctgaaatgcaacggtgcggctttttctgctgaag

SEQ ID NO: 97258 - DNA, 75 bp, synthetic construct
  source 1..75: mol_type = other DNA
aggagataatttatttccacgataaattgcttagcgttacaccaggtgtaacaggaatgtccgatccagggcgag

SEQ ID NO: 97259 - DNA, 75 bp, synthetic construct
  source 1..75: mol_type = other DNA
tacagcgaatacctggactaatcgacaaacattcagcggtggcctttctggtgaactatccggcaatgcttctac

SEQ ID NO: 97260 - DNA, 75 bp, synthetic construct
  source 1..75: mol_type = other DNA
atgaaataaacgcgtggcgtaatgcgatggaggcggcgaactacacgtttgagcacaatggccggaaatgggact

SEQ ID NO: 97261 - DNA, 75 bp, synthetic construct
  source 1..75: mol_type = other DNA
gcgcagaaagcgggtgataatggcgttacaggcggttatagccagttttttggcctgaaacatcagatgtcgttc

SEQ ID NO: 97262 - DNA, 75 bp, synthetic construct
  source 1..75: mol_type = other DNA
tgaaggtatgaacggtaacaacggtaatagcagcgaagtgcattatggcgactatacgttgccggatgtgccgaa

SEQ ID NO: 97263 - DNA, 75 bp, synthetic construct
  source 1..75: mol_type = other DNA
atgaacacattattcgtactcattctgactgtacatctcaatactggtgagtcgcttgatgcaatcaccggcatg

SEQ ID NO: 97264 - DNA, 75 bp, synthetic construct
  source 1..75: mol_type = other DNA
ccgtcatggacagctgaaaaactggggcggaaactgggggaatatcagcctgtaccgacagatattttcagtcag

SEQ ID NO: 97265 - DNA, 75 bp, synthetic construct
  source 1..75: mol_type = other DNA
gtggcatggtggcgactttgcagcgtaatggcagtgtgcgtttccgtgatgcgacaacaggagagtacgtctgta

SEQ ID NO: 97266 - DNA, 75 bp, synthetic construct
  source 1..75: mol_type = other DNA
atgaatacagctctttccatcatcgacgataccaactcaaacactgctatcgattatcgtcaggaaatgaacgtc

SEQ ID NO: 97267 - DNA, 75 bp, synthetic construct
  source 1..75: mol_type = other DNA
atataaatcaactggaatagacgtactgagtattgctgccgattatgctgatttcgtgacagaagttattttaag

SEQ ID NO: 97268 - DNA, 75 bp, synthetic construct
  source 1..75: mol_type = other DNA
atcatgccggagaatgcttgtgtcagcttgccgcattaaacagtcgattaaattgcgcacacgaaatggcgcagc

SEQ ID NO: 97269 - DNA, 75 bp, synthetic construct
  source 1..75: mol_type = other DNA
tatctgggcaaaatcgtttcttacgctcagggcttctctcagctacgcgccgcgtctgaagagtacaactgggat

SEQ ID NO: 97270 - DNA, 75 bp, synthetic construct
  source 1..75: mol_type = other DNA
gccgcaaaaacaacccgattctggtgggagaaccgggcgtgggcaaaaccgcgctggtggaagggctggcgctgc

SEQ ID NO: 97271 - DNA, 75 bp, synthetic construct
  source 1..75: mol_type = other DNA
tctgccggttacgccgaatctgctgaatcagaactttacgcccacagcacctaatcaggtctgggtcgcagatat

SEQ ID NO: 97272 - DNA, 75 bp, synthetic construct
  source 1..75: mol_type = other DNA
gggtgggttactctcatcagttggagcctatgcttcggtttcacttgacggtggtaaaagcgcagaagaaattgc

SEQ ID NO: 97273 - DNA, 75 bp, synthetic construct
  source 1..75: mol_type = other DNA
gttccggccaacgccaaagtgtcgaaagaagagacgttcggccccctcgccccgctgttccgctttaaagatgaa

SEQ ID NO: 97274 - DNA, 75 bp, synthetic construct
  source 1..75: mol_type = other DNA
gtaaataactggtatcccacagcaagtatcagcgatttgctggttgtggtgatgaagaaagccactgcaggcatc

SEQ ID NO: 97275 - DNA, 75 bp, synthetic construct
  source 1..75: mol_type = other DNA
tcccaatcaggacggcacattcaccgccatgacgtataccaaaagcaaatcgtttaaaaccgaagctggcgcacg

SEQ ID NO: 97276 - DNA, 75 bp, synthetic construct
  source 1..75: mol_type = other DNA
aaggaccaggccgagggccgcagcggcgttgcgcttcccgacgcccttgagcggaagtatccgcgcgccgggcat

SEQ ID NO: 97277 - DNA, 75 bp, synthetic construct
  source 1..75: mol_type = other DNA
acgaccgactggcgtgaagagaatacgccagtggtaatggcaggaatggtcggcagcaatgtcggctggaaagtt

SEQ ID NO: 97278 - DNA, 75 bp, synthetic construct
  source 1..75: mol_type = other DNA
tggtattgaccaggacattgtgtatcagcgatccagaaaacacggcactttttttgtgctccccatcaaaggggc

SEQ ID NO: 97279 - DNA, 75 bp, synthetic construct
  source 1..75: mol_type = other DNA
cggtgctgaaatttataaccgtaccgcgctggataatacgctgatttacagtggcgttattgatatgcctgccgg

SEQ ID NO: 97280 - DNA, 75 bp, synthetic construct
  source 1..75: mol_type = other DNA
gttaaaaaacagtttgattatcaggagccagtacagaatacgccagcgcaacaacctactactggcagtaatttt

SEQ ID NO: 97281 - DNA, 75 bp, synthetic construct
  source 1..75: mol_type = other DNA
gtgaaagcgatggataaggcattcacccgtgtggatgaaacctttgaggccatccgcgacagcctgaatcagcag

SEQ ID NO: 97282 - DNA, 75 bp, synthetic construct
  source 1..75: mol_type = other DNA
ataaaacggattcggcagcactgttgccctgtattgaacaggcgcgacaggatgtccgaactctgcgccatctgc

SEQ ID NO: 97283 - DNA, 75 bp, synthetic construct
  source 1..75: mol_type = other DNA
ctgactgctttgcaaggcctttcaggtattgcgggggtgtttcagcaggaaaagcaggctcagcggcagaaagaa

SEQ ID NO: 97284 - DNA, 75 bp, synthetic construct
  source 1..75: mol_type = other DNA
atgaacggtctgaaaacggggctggggatcacgcctggtgagcacattatcagtgcggcctcagcccttagcaga

SEQ ID NO: 97285 - DNA, 75 bp, synthetic construct
  source 1..75: mol_type = other DNA
gttgttggtctgttggtgatgcaaaatgccattggcattggtatggctagcctgttagggcttgatccgctgatg

SEQ ID NO: 97286 - DNA, 75 bp, synthetic construct
  source 1..75: mol_type = other DNA
gattgaaactatcgcgctgattgctatctgcctgacggtggggaaaattgttgcgcaacttttggctggcactgc

SEQ ID NO: 97287 - DNA, 75 bp, synthetic construct
  source 1..75: mol_type = other DNA
atatggttacgctggtcgtcttacacgatatcaatatcgcactgcggcatgccgcccaggtcatcatgctgaaag

SEQ ID NO: 97288 - DNA, 75 bp, synthetic construct
  source 1..75: mol_type = other DNA
taaatcattggaagagtttctgcttggaaaatatttgcgtggtagtgcggcaacggccaatcgagtcaaacataa

SEQ ID NO: 97289 - DNA, 75 bp, synthetic construct
  source 1..75: mol_type = other DNA
tctgtgtcgcaaaatagagatcaatccccattggtgttttgcaagtccgatacaacggttagccagcttctggtc

SEQ ID NO: 97290 - DNA, 75 bp, synthetic construct
  source 1..75: mol_type = other DNA
agatgattgctggatttgggatgacaaaagtgaagagtatttcgacgctgctgactgtatgccagaaaccccagc

SEQ ID NO: 97291 - DNA, 75 bp, synthetic construct
  source 1..75: mol_type = other DNA
cactgcttgagcgcgcacggaataaagtgcagagcattgagttcgccttaacacagagtgcattcgctgagattc

SEQ ID NO: 97292 - DNA, 75 bp, synthetic construct
  source 1..75: mol_type = other DNA
cacccgggctctgacattcctgtcagagctgggactgattacctaccagacggaatatgacccgcttatcgggtg

SEQ ID NO: 97293 - DNA, 75 bp, synthetic construct
  source 1..75: mol_type = other DNA
tcgctgcaatcgtgcctcgacaagcgtgcggcaaaaggcggcgtctcaccgcagcaggtggcgcaggcgattgct

SEQ ID NO: 97294 - DNA, 75 bp, synthetic construct
  source 1..75: mol_type = other DNA
cacacaagacgcacttgaagccttgcgcaatggcgtaaccttaaatgatggccctaccctgcccgcaggcgcgga

SEQ ID NO: 97295 - DNA, 75 bp, synthetic construct
  source 1..75: mol_type = other DNA
ctggaagttgagccagatgaacgcgcagcctatgaattatttatggaaaagcgtttcggtaaaacagtcgatcgt

SEQ ID NO: 97296 - DNA, 75 bp, synthetic construct
  source 1..75: mol_type = other DNA
gctttatgatgatgaaggcgtactcattgcggtggcaaactgcccggaaacgtacaaaccgcagttgcaggaagg

SEQ ID NO: 97297 - DNA, 75 bp, synthetic construct
  source 1..75: mol_type = other DNA
gtgcgtatattgttgatattgccactcaggttggttgctctgagcggactgtcagacggtacctgaaatacccgg

SEQ ID NO: 97298 - DNA, 75 bp, synthetic construct
  source 1..75: mol_type = other DNA
agaaaatcgatgagcgtctctatcgtgtctgcgtctgggtaaaaaaatatcacgctgatgcgattaaccgcgttg

SEQ ID NO: 97299 - DNA, 75 bp, synthetic construct
  source 1..75: mol_type = other DNA
accgccaggtaaagaacccgaatccggtattcacaccccgtgaaggtgccgggacgctgaagttctgcgaaaaac

SEQ ID NO: 97300 - DNA, 75 bp, synthetic construct
  source 1..75: mol_type = other DNA
attccatgcaatgatagctgttccgtagtagggaaagttatcgccagccagtggcctgaagagacatttagttaa

SEQ ID NO: 97301 - DNA, 75 bp, synthetic construct
  source 1..75: mol_type = other DNA
aatgctggcagccctggatatgtcggaacgtgcagtgatgagttatgagcgtgtttgcaggctgtatgaaaaatc

SEQ ID NO: 97302 - DNA, 75 bp, synthetic construct
  source 1..75: mol_type = other DNA
ttttttcatgggaagaagttctgtgaggcctgtggtacggggatttattgcagagcggtatgtacgaagtctgtt

SEQ ID NO: 97303 - DNA, 75 bp, synthetic construct
  source 1..75: mol_type = other DNA
gccgttattgcagggatacggtattccggccatgtgcatcatgataacggcgaaggcagtaagacaggagtgccg

SEQ ID NO: 97304 - DNA, 75 bp, synthetic construct
  source 1..75: mol_type = other DNA
gaacagtcgctggacttatctcggcgcgcgctcgcggcaggaaaggggggcgccccttcaagatgaccgccgcca

SEQ ID NO: 97305 - DNA, 75 bp, synthetic construct
  source 1..75: mol_type = other DNA
accacggggggacattacgcatctggtttgtttataaaggcgtaagagtcagggaaaacctcggtgtccctgaca

SEQ ID NO: 97306 - DNA, 75 bp, synthetic construct
  source 1..75: mol_type = other DNA
gctgagtatgggcggtaatctggaaacagcttttgcgctgcccgccatctattcgaatcagttcgcaccaccgtc

SEQ ID NO: 97307 - DNA, 75 bp, synthetic construct
  source 1..75: mol_type = other DNA
atgaatcagcctcccgttcacttcacttaccgcctgctgagttacctggtcagtgcgattatcgccgggcagccg

SEQ ID NO: 97308 - DNA, 75 bp, synthetic construct
  source 1..75: mol_type = other DNA
agcaggtgaaactgtcgatgcaacaactggatgaactgcttactgcaatggttcaggcacaggtcgatcgcaatg

SEQ ID NO: 97309 - DNA, 75 bp, synthetic construct
  source 1..75: mol_type = other DNA
tgccctggcaataggatatctggtcgttgccaaagaaaaatggacttccacagctatcgttactcaacctgatgt

SEQ ID NO: 97310 - DNA, 75 bp, synthetic construct
  source 1..75: mol_type = other DNA
ctggcggtgctgctgggtggcatggttggcgcggggattgtgctggggcgtaatgctctacgcaattacaacgcg

SEQ ID NO: 97311 - DNA, 75 bp, synthetic construct
  source 1..75: mol_type = other DNA
tgatgcgggtctcggcagcgatgaccgcgcagcgggacgccgccccgctgcgacatgcaactgtctatgagcaga

SEQ ID NO: 97312 - DNA, 75 bp, synthetic construct
  source 1..75: mol_type = other DNA
ttgccgacgggcatgagatggcttcggaactgaaagcagaatgtggtgccgttgatatgcgcagtgtggcaaagc

SEQ ID NO: 97313 - DNA, 75 bp, synthetic construct
  source 1..75: mol_type = other DNA
tgcggccaatggtggtgatctgcaagtaaccataaaagaggcagacggcagtattcagacattatatgttcctta

SEQ ID NO: 97314 - DNA, 75 bp, synthetic construct
  source 1..75: mol_type = other DNA
accggtatccgccgtaaccagaccaccgggcgtctggaagccctgacctgctcaactggagggcagacaatcaaa

SEQ ID NO: 97315 - DNA, 75 bp, synthetic construct
  source 1..75: mol_type = other DNA
accggctggccgcgcttcaaagctccgcaactggaggcgagcggcctgaggatcggctacctgatcgatcccgac

SEQ ID NO: 97316 - DNA, 75 bp, synthetic construct
  source 1..75: mol_type = other DNA
ctaatacagtacggatgactccgcttctctcactggactttatcattgagaatgagtttggcgagtttctggttg

SEQ ID NO: 97317 - DNA, 75 bp, synthetic construct
  source 1..75: mol_type = other DNA
ggcattctgcgatgttgttggcgacaacaccgaggttatcgctgaggtggttgggcgagatggcgttctggttat

SEQ ID NO: 97318 - DNA, 75 bp, synthetic construct
  source 1..75: mol_type = other DNA
ccgcaatggtcgtccgtcgtcgtcagttgaaccatatgctggtcgctgagcgtaatcgtctctatccttctcatc

SEQ ID NO: 97319 - DNA, 75 bp, synthetic construct
  source 1..75: mol_type = other DNA
tgagtttattttcacgtttgatggccgtcgttttgatggcggaaaaacctcgcagtcacgccttgcgcccgtggt

SEQ ID NO: 97320 - DNA, 75 bp, synthetic construct
  source 1..75: mol_type = other DNA
ggtagatttaccagtcaatacagaacggaatcctcagaggggaatgaaacccgcccacgcaatattgccttcaat

SEQ ID NO: 97321 - DNA, 75 bp, synthetic construct
  source 1..75: mol_type = other DNA
tgcccgtgcgcgtcgtgatgcgaacagggaacgtcaggatatcgtcaccctggtgaaacggcagctgacgcgtga

SEQ ID NO: 97322 - DNA, 75 bp, synthetic construct
  source 1..75: mol_type = other DNA
ctggacgttcgcgctgagcgggaggaattgaaaacggaactggcgaagctggaaacagagatggcaggttatctg

SEQ ID NO: 97323 - DNA, 75 bp, synthetic construct
  source 1..75: mol_type = other DNA
tgctgctcatgtcaatgatgttaataaactattgtttttaggttcttcctgtatatatcctaaacttgctaatca

SEQ ID NO: 97324 - DNA, 75 bp, synthetic construct
  source 1..75: mol_type = other DNA
acgcaccaacggaaatcatcagtcagtcatggaaacggctggtgattaacaaggaaaaacatatcacccgaaggg

SEQ ID NO: 97325 - DNA, 75 bp, synthetic construct
  source 1..75: mol_type = other DNA
ataagtttggtcgcttccgtcgtggtgtaccgccgaagaccaaaggcgattacgcctttatctcacatatgatag

SEQ ID NO: 97326 - DNA, 75 bp, synthetic construct
  source 1..75: mol_type = other DNA
aaagacccgccacaaaatggttaagctgaaaccgtttatggattacatcgacatgcgcctggcagagaatgtctg

SEQ ID NO: 97327 - DNA, 75 bp, synthetic construct
  source 1..75: mol_type = other DNA
gcgttattctgttggtggaaggattcccgccgtcacatgccgggaccatcacagtgtatgaagattcccgacccg

SEQ ID NO: 97328 - DNA, 75 bp, synthetic construct
  source 1..75: mol_type = other DNA
tcgatagaagaatacagaaatgaatatcgcaaactgcgttctgatgatattccattggttaaggctcagaaattt

SEQ ID NO: 97329 - DNA, 75 bp, synthetic construct
  source 1..75: mol_type = other DNA
aaggcccggcaccagatggtagtggtgttcctgttctgggagtattcagggtaaaaagtggcacgcttgcgagaa

SEQ ID NO: 97330 - DNA, 75 bp, synthetic construct
  source 1..75: mol_type = other DNA
ccacgctactggcggggtttctggcggtattaattggctacgccagttcagcggcaataatctggcaagcagcga

SEQ ID NO: 97331 - DNA, 75 bp, synthetic construct
  source 1..75: mol_type = other DNA
ccaaaagacagtgccctgcgtaaaacactgacaaataagttaggttcagttcgggcacgtaagattctggccgaa

SEQ ID NO: 97332 - DNA, 75 bp, synthetic construct
  source 1..75: mol_type = other DNA
ccaacaatgcgatgatgatgaaggaatcatgattgacagctgtgttgcgcgattgcggaaatataagcccgaaga

SEQ ID NO: 97333 - DNA, 75 bp, synthetic construct
  source 1..75: mol_type = other DNA
agctgggacactgacgggctcggatatgaccagggcatctggcaagggccatatgatcctgattctggctatacg

SEQ ID NO: 97334 - DNA, 75 bp, synthetic construct
  source 1..75: mol_type = other DNA
gacggctcccaccattaccagcggcggtaatcctccggcattttccctgacaccggacgggcggctgacggcgaa

SEQ ID NO: 97335 - DNA, 75 bp, synthetic construct
  source 1..75: mol_type = other DNA
aaaagaaagcagaatggcttattaccggttcctgtttatgaagagtatggcgatgtatcagaagtcattaagcgc

SEQ ID NO: 97336 - DNA, 75 bp, synthetic construct
  source 1..75: mol_type = other DNA
agctggcgagttatacctggtaaacattctgtggatgagcagccgattgttgattactggttgaagcgtatggct

SEQ ID NO: 97337 - DNA, 75 bp, synthetic construct
  source 1..75: mol_type = other DNA
gtcgcttcagaacgttactggaagcgcagcttggcagtactcatcaacaaatgcagatgtttaatcaacgaatgg

SEQ ID NO: 97338 - DNA, 75 bp, synthetic construct
  source 1..75: mol_type = other DNA
ttttaaatgaaagtgatttgataatttcacaaaaggatgctggtgctattttatttaataacgcagaatattttg

SEQ ID NO: 97339 - DNA, 75 bp, synthetic construct
  source 1..75: mol_type = other DNA
caaaacggtattgcgggcttaaccaataaatggctggcgaagattgccaccaaagtgatgcaggcgtttccaggt

SEQ ID NO: 97340 - DNA, 75 bp, synthetic construct
  source 1..75: mol_type = other DNA
cctcagcccgggatgcgtcggcttcaaaagaggcggcaaaatcatcagaaacgaacgcatcctcgagcgccagta

SEQ ID NO: 97341 - DNA, 75 bp, synthetic construct
  source 1..75: mol_type = other DNA
cgctcagcaagaaatgtgcttcgaggtttacattttcaaaaaaataatcctcaaggtaaattagtaagtgtcatc

SEQ ID NO: 97342 - DNA, 75 bp, synthetic construct
  source 1..75: mol_type = other DNA
actgggtgatgattatccaacaaaagatggtacaggtgtgagggattatattcatgttcaagatttagcattggg

SEQ ID NO: 97343 - DNA, 75 bp, synthetic construct
  source 1..75: mol_type = other DNA
aagacctgatgaatcttaaatgggatgctctgtatgttcttgttaaagcccttttcagcagtgaagtaaaaatat

SEQ ID NO: 97344 - DNA, 75 bp, synthetic construct
  source 1..75: mol_type = other DNA
tcgctcttaaacgtattaaccaacttgatcaggaggttaagacaaaagtttatgatgaactgcataacgcccggg

SEQ ID NO: 97345 - DNA, 75 bp, synthetic construct
  source 1..75: mol_type = other DNA
tggacgccctgcaagggaatttcccgtatgcaacagacccggcaggaaaccggctgccggacccggaactgcacc

SEQ ID NO: 97346 - DNA, 75 bp, synthetic construct
  source 1..75: mol_type = other DNA
cggcacagcacaccgcgtaactggcaaccccacctgcctgaagatgcccagccagcgggatatcgctggactgac

SEQ ID NO: 97347 - DNA, 75 bp, synthetic construct
  source 1..75: mol_type = other DNA
acgtccgagacgaacgccaaggcttctgaaacggcagcgggacagagtgcctcagctgcggcaggctcaaaaaca

SEQ ID NO: 97348 - DNA, 75 bp, synthetic construct
  source 1..75: mol_type = other DNA
gcgccactaacagcgtgtctgaaacgcaggctgcaacgccgaaagcggttaaggccgcgtatgacctggctaacg

SEQ ID NO: 97349 - DNA, 75 bp, synthetic construct
  source 1..75: mol_type = other DNA
tgaagtagatggcgatgatgaagccatcttcaggccgatacaaaaatacatcaatggcacatggtataacgttgc

SEQ ID NO: 97350 - DNA, 75 bp, synthetic construct
  source 1..75: mol_type = other DNA
gccaggcgcaacagcaccacggtggtggtgaacacagtggcctcagaaaacccggatgaagccgggcgttacaca

SEQ ID NO: 97351 - DNA, 75 bp, synthetic construct
  source 1..75: mol_type = other DNA
acaaaacggtatatcaagctatcaaaagaatgcgaaggctggagcgtggaaaatatcaaatgcaactgtttaagg

SEQ ID NO: 97352 - DNA, 75 bp, synthetic construct
  source 1..75: mol_type = other DNA
gtggaggcatccggtgccagcctggagaaggggcggcacgaccagctgcttaccgcgcttagtgcgctactgtta

SEQ ID NO: 97353 - DNA, 75 bp, synthetic construct
  source 1..75: mol_type = other DNA
tttcccgtgtctgctgggataccggtggtatcgaccaggacattgtgtatcagcgttcaaggaaacacggcactt

SEQ ID NO: 97354 - DNA, 75 bp, synthetic construct
  source 1..75: mol_type = other DNA
gcaccaccattgagctggtgaatgccggggatcagaccattctgagcggtgccgctgtggtggttggcagcatgg

SEQ ID NO: 97355 - DNA, 75 bp, synthetic construct
  source 1..75: mol_type = other DNA
atgctggatattaaaggaaaaatcatcaaaaccgatgcgatgggttgccagaaagatattgcagagaagatacaa

SEQ ID NO: 97356 - DNA, 75 bp, synthetic construct
  source 1..75: mol_type = other DNA
gtctgtggatacccgcctgctgacggagacccttgaactgaccgccacggctgacatgcctgatgaagtgcgcgc

SEQ ID NO: 97357 - DNA, 75 bp, synthetic construct
  source 1..75: mol_type = other DNA
ggcaccgaagagatctatttcgccacgttccatctcggcgtggatggcggcattgaagttaccgccagccataac

SEQ ID NO: 97358 - DNA, 75 bp, synthetic construct
  source 1..75: mol_type = other DNA
ggttagtgcagaagatttgttgagtgctcatagggtaccaccacaaatgatgggaattatgcctaacaatgttgg

SEQ ID NO: 97359 - DNA, 75 bp, synthetic construct
  source 1..75: mol_type = other DNA
atgcgtacagagtttgttttgccctggccgccgacggtgaacacttactggcgacgtcgtggcagcacatatttt

SEQ ID NO: 97360 - DNA, 75 bp, synthetic construct
  source 1..75: mol_type = other DNA
ggaacgctgaagttctgcgaaaaactgatggaaaaggcggtgggcttcacctcccgttttgatttcgctattcat

SEQ ID NO: 97361 - DNA, 75 bp, synthetic construct
  source 1..75: mol_type = other DNA
ctccatcaccacgctggccattgagtgcggactggcgacagagtccggtgcaggaaaactctccatcacccgtgc

SEQ ID NO: 97362 - DNA, 75 bp, synthetic construct
  source 1..75: mol_type = other DNA
ttttggttcctactttggcttggttctttctgcagaattaaataatcaactttatataccgccaggttttgctca

SEQ ID NO: 97363 - DNA, 75 bp, synthetic construct
  source 1..75: mol_type = other DNA
ataaaacggattcggcagcattgttgccctgtatcgaacaggtcagggaagatgtccgtaccctgcgccaactgc

SEQ ID NO: 97364 - DNA, 75 bp, synthetic construct
  source 1..75: mol_type = other DNA
ccgggaaattggtgtgtttgatgagcacggcgatttaatcgcggtgggcaatactgccgaaagttacaagccaac

SEQ ID NO: 97365 - DNA, 75 bp, synthetic construct
  source 1..75: mol_type = other DNA
atggcgaagacctgtatctcaaagaggtaacccactggatgccgctaccagaaccgccgcaggaggttaaccgtg

SEQ ID NO: 97366 - DNA, 75 bp, synthetic construct
  source 1..75: mol_type = other DNA
ttccggtaactccggatggttggataagctgtagtgagcaaatgccagaaatgggagagcgacaatgctatgtgt

SEQ ID NO: 97367 - DNA, 75 bp, synthetic construct
  source 1..75: mol_type = other DNA
atgcacccgacagaacgtggtaaagtcatcacggctgcggggctcgttgttgccgcgcgggttatggtcaccaag

SEQ ID NO: 97368 - DNA, 75 bp, synthetic construct
  source 1..75: mol_type = other DNA
agccagcaggcgataaagcagagttcatcgaaaaagttcgccgtgcgctttatctgggtaagattgtttcttacg

SEQ ID NO: 97369 - DNA, 75 bp, synthetic construct
  source 1..75: mol_type = other DNA
tgccttacccgccgacggtgaacacttactggcgacgccgtggcagcacatattttgtatcaaaagccggggagc

SEQ ID NO: 97370 - DNA, 75 bp, synthetic construct
  source 1..75: mol_type = other DNA
ctgtccgcctgctgattcagttgcagcgtaacggtaactgggtgacggaaaaggatgtcaccattaacggcaaga

SEQ ID NO: 97371 - DNA, 75 bp, synthetic construct
  source 1..75: mol_type = other DNA
gattgccgagaacccgggcaagaaactggtgccttactacacggtgaaagagttcgttgaatccctcgaaacgcc

SEQ ID NO: 97372 - DNA, 75 bp, synthetic construct
  source 1..75: mol_type = other DNA
ctggtacgtggggtaacacggaaacaccaaacgggacggttacagtcaccatcagcgatgatcataactttgacc

SEQ ID NO: 97373 - DNA, 75 bp, synthetic construct
  source 1..75: mol_type = other DNA
cgatgcaggcgggggcgcattacgtcggcgggctggacccgaccagtgttgatggcgcgatggaaaaatccctcg

SEQ ID NO: 97374 - DNA, 75 bp, synthetic construct
  source 1..75: mol_type = other DNA
cctgatggtgacatgtggtatccattccatggacagccagatgctcaatgggcatgggatatccatgcaacttca

SEQ ID NO: 97375 - DNA, 75 bp, synthetic construct
  source 1..75: mol_type = other DNA
cccaccgttcgttgtttgcacagcaccctgaattacgcccggcaggaaataatcgtcatcgctgggcagagctgg

SEQ ID NO: 97376 - DNA, 75 bp, synthetic construct
  source 1..75: mol_type = other DNA
tcggtaccagcggtgaaaagatccccctgttgagcacggctaacacatggagtgcacgccagactttcaacggcg

SEQ ID NO: 97377 - DNA, 75 bp, synthetic construct
  source 1..75: mol_type = other DNA
gccggtaaaaatctcagcgtgaaacaaagtaacggtgattttacattctctgttgttgatactccgtcattcagc

SEQ ID NO: 97378 - DNA, 75 bp, synthetic construct
  source 1..75: mol_type = other DNA
agcttggcgacctagttactttcctttccggagggacaccatctaaaagtaataaagattactggaatggagaaa

SEQ ID NO: 97379 - DNA, 75 bp, synthetic construct
  source 1..75: mol_type = other DNA
gtatagccatatcacttgttcttaatccgttccctgcatcactggcagcacaaaacactaatgtagttgaagttg

SEQ ID NO: 97380 - DNA, 75 bp, synthetic construct
  source 1..75: mol_type = other DNA
atgtcgctcgtttgttctgttatatttattcatcatgccttcaacgctaacattttagataaagattacgccttc

SEQ ID NO: 97381 - DNA, 75 bp, synthetic construct
  source 1..75: mol_type = other DNA
attgtttacgatgaaaataatattattgtcgctatcaccagagatgcttcaacgcttaatcctgaaggttttagc

SEQ ID NO: 97382 - DNA, 75 bp, synthetic construct
  source 1..75: mol_type = other DNA
caaactggccaacgcactgcaaaacgccggtgaaagccagagcttcccgccgtacaacattgagaaaagcgacga

SEQ ID NO: 97383 - DNA, 75 bp, synthetic construct
  source 1..75: mol_type = other DNA
tgcgaccgatagcaattctttactttggaaagatgtaagtaaatttttgggtgataaatcaaagtctcatgcatt

SEQ ID NO: 97384 - DNA, 75 bp, synthetic construct
  source 1..75: mol_type = other DNA
ggatgagttacgggcagagattgcatttgctcagaagggcgaaaagccatggccttatcgttcctgcctgatgcg

SEQ ID NO: 97385 - DNA, 75 bp, synthetic construct
  source 1..75: mol_type = other DNA
catcaggggctaatcaattatttgcagggcgatgcttcaagaggaagtgaagtatatgaagctagatatctaaaa

SEQ ID NO: 97386 - DNA, 75 bp, synthetic construct
  source 1..75: mol_type = other DNA
gggaagggatgccggtcaggctgagtcaaaatatggtgttgccataggtaagagcgctgaggtatttaattcaca

SEQ ID NO: 97387 - DNA, 75 bp, synthetic construct
  source 1..75: mol_type = other DNA
taacaacaccgggatgctggaagttaataataattcagctttcaataaccgcggcgagtttattcttgataacga

SEQ ID NO: 97388 - DNA, 75 bp, synthetic construct
  source 1..75: mol_type = other DNA
ttatctggccgttcattttcaaaaactattccgtgcgcgatctggctgaatttctggaggtgtacggcctgccga

SEQ ID NO: 97389 - DNA, 75 bp, synthetic construct
  source 1..75: mol_type = other DNA
gtggatgatggccaccgtaaataccgaaagtaaaaatcctcgaaatgtgtgttatgcggtgaatgcgcaaacgcc

SEQ ID NO: 97390 - DNA, 75 bp, synthetic construct
  source 1..75: mol_type = other DNA
tagccgcttttgcaaaaagccctcttgataatcccttgtctcgtagtgagcaaatggagctggcaaggctttttc

SEQ ID NO: 97391 - DNA, 75 bp, synthetic construct
  source 1..75: mol_type = other DNA
ggtgattttctgtgttgtacagaaaaagtaaaccttggtctggataacaatacctggggcggtggtttttccaaa

SEQ ID NO: 97392 - DNA, 75 bp, synthetic construct
  source 1..75: mol_type = other DNA
aaaacaatagaatgaaactgttgagacgtgttcagatctatcttgtcattccgttgtctattgctttactggtgc

SEQ ID NO: 97393 - DNA, 75 bp, synthetic construct
  source 1..75: mol_type = other DNA
tctgcggagatcaaatacagcaaggcaggtcattcctatcatctcgttaatccgggccagttggataaaaagacc

SEQ ID NO: 97394 - DNA, 75 bp, synthetic construct
  source 1..75: mol_type = other DNA
tgagtccacagggaaggtcgtactcgataaggataaaaaaacagccgtgtcattatcgctacgcatgcggattct

SEQ ID NO: 97395 - DNA, 75 bp, synthetic construct
  source 1..75: mol_type = other DNA
tccgggccagctggataaaaagacccttcgccggatgaatgaagcgctcgcacagaatgctgaactgaaaaccgg

SEQ ID NO: 97396 - DNA, 75 bp, synthetic construct
  source 1..75: mol_type = other DNA
ccggaaaaacgcacctacagcggtatctgggacgggagtctgaaaccggcatacagcaataacccggcctggtgc

SEQ ID NO: 97397 - DNA, 75 bp, synthetic construct
  source 1..75: mol_type = other DNA
aattatcgacctgctggttgggcgcgagaaagcccatgaagtggcatcacaactggtgatggcggcagggattta

SEQ ID NO: 97398 - DNA, 75 bp, synthetic construct
  source 1..75: mol_type = other DNA
aattatcgatctgctggttgggcgtgagaaggcccatgaggtggcatcacaactggtgatggcggcagggattta

SEQ ID NO: 97399 - DNA, 75 bp, synthetic construct
  source 1..75: mol_type = other DNA
ataaaacagattcggcagcactgttgccctgtatcgcacaggccagggagggtatccgtaccctgcgccaacagt

SEQ ID NO: 97400 - DNA, 75 bp, synthetic construct
  source 1..75: mol_type = other DNA
cgtgacgataattatcaaccggatacgattgtggtcaccggagagaaagtggcccggacgctttacgataccagc

SEQ ID NO: 97401 - DNA, 75 bp, synthetic construct
  source 1..75: mol_type = other DNA
ggcggttggtggctgacccgcagttaaaaaccaccagcaagggaacaccaatggcgctggtgagtatggctgttc

SEQ ID NO: 97402 - DNA, 75 bp, synthetic construct
  source 1..75: mol_type = other DNA
atgaaatcattaaccacggaaaccgcactggatattctgattgcatggctgcaggacaatatcgactgtgaatcg

SEQ ID NO: 97403 - DNA, 75 bp, synthetic construct
  source 1..75: mol_type = other DNA
ataaaacggattcggcagcactactgccctgcattgaacaggccagggaagatatccgtacactgcgccagttgc

SEQ ID NO: 97404 - DNA, 75 bp, synthetic construct
  source 1..75: mol_type = other DNA
gaacgtgaacgcctgaaaggggcgtgtgacagcacggccaccgcctaccggaaggcacatcatcaccttctgagt

SEQ ID NO: 97405 - DNA, 75 bp, synthetic construct
  source 1..75: mol_type = other DNA
gaccattgagggaagcgattttaaggttatggataccgacccactgaaaccaagaatagaaagccgcgaggatgg

SEQ ID NO: 97406 - DNA, 75 bp, synthetic construct
  source 1..75: mol_type = other DNA
tgactcaatgcgaagcgaccatcgcttctgcggtttctgccgtgacggcggtctactctaccgaaacggcaatgg

SEQ ID NO: 97407 - DNA, 75 bp, synthetic construct
  source 1..75: mol_type = other DNA
ttccgatggattttaatatttatgaaattccgggcagcgtttatcgtcgcgcaaaagaaatcgtcctgaaaaaag

SEQ ID NO: 97408 - DNA, 75 bp, synthetic construct
  source 1..75: mol_type = other DNA
caaggcagaccggcttatcacggaacgtctggtacaggcactgggcctggtggatatccgggtgccggaccatct

SEQ ID NO: 97409 - DNA, 75 bp, synthetic construct
  source 1..75: mol_type = other DNA
gcatgaattaccgcgagcaccgtcattaacggcaaaccttggcgcgaaatatatgctgatgcccggactggaagt

SEQ ID NO: 97410 - DNA, 75 bp, synthetic construct
  source 1..75: mol_type = other DNA
tgtggatccggaaggcccatcagtttatcgcccggaggccggaagctatatcagcaacattgccgcagccaactc

SEQ ID NO: 97411 - DNA, 75 bp, synthetic construct
  source 1..75: mol_type = other DNA
agataatcaggatgttgttgccgcactcattgtgaatgagtatcgggagcagggcggcggcaccatcgatttccc

SEQ ID NO: 97412 - DNA, 75 bp, synthetic construct
  source 1..75: mol_type = other DNA
agctatcagaccggatggattaagtgtggttgaagtggcggatattactgctaaccgacgggcggacatttcagg

SEQ ID NO: 97413 - DNA, 75 bp, synthetic construct
  source 1..75: mol_type = other DNA
tagtgagtatgccttcgcaactcttcactatggcgcgttcttttaaagccgtagccaatggcaaaatttatatcg

SEQ ID NO: 97414 - DNA, 75 bp, synthetic construct
  source 1..75: mol_type = other DNA
accagatggacccggtatacacgccggcgcgaaaaattcacctgtaccactgcgaccatcgcggcctgccgctgg

SEQ ID NO: 97415 - DNA, 75 bp, synthetic construct
  source 1..75: mol_type = other DNA
atggcaactttgacaaaaaaagaacaagcatggttgagcgaattacaggacgttcttgatcgctgcccatcaccg

SEQ ID NO: 97416 - DNA, 75 bp, synthetic construct
  source 1..75: mol_type = other DNA
atccgcagccggatctggtgattattggcaacgccatgacccgtggaaatccgtgtgtggaagcggtactggaaa

SEQ ID NO: 97417 - DNA, 75 bp, synthetic construct
  source 1..75: mol_type = other DNA
gcgcagtctgtttataacgcatacacaacagacatgaaaaaagcggttggcgcaaaactaggtgcgaaggaagcg

SEQ ID NO: 97418 - DNA, 75 bp, synthetic construct
  source 1..75: mol_type = other DNA
ttattgcgcttcatgatgcgaatataagccgctacggcggcctgccgggaatgtcagatccgggtagggcagagg

SEQ ID NO: 97419 - DNA, 75 bp, synthetic construct
  source 1..75: mol_type = other DNA
ggagaacactggcggcaatcagcatcacgatagcgataatgaaactggcgagacggcagatcactcaattaaggt

SEQ ID NO: 97420 - DNA, 75 bp, synthetic construct
  source 1..75: mol_type = other DNA
aacaaacaagactacaggcgcggatggatgagttacgggcagagattgcatttgctcagaagggcgaaaaaccat

SEQ ID NO: 97421 - DNA, 75 bp, synthetic construct
  source 1..75: mol_type = other DNA
ttagaagtcgtttgactttaggtgaaggctattctcctgcggatatttttgacagtgttcctttccggggaggaa

SEQ ID NO: 97422 - DNA, 75 bp, synthetic construct
  source 1..75: mol_type = other DNA
gtggattcgcgctatttcgttgaggtggaagcccgtgcgcaaggctaccagctgcatttgcttgacgcgacgaac

SEQ ID NO: 97423 - DNA, 75 bp, synthetic construct
  source 1..75: mol_type = other DNA
ggtgcaaggcaccgaggggctgtggatggacgtcaacaagtcgatctatctggagggcaagagcccacagccgca

SEQ ID NO: 97424 - DNA, 75 bp, synthetic construct
  source 1..75: mol_type = other DNA
ggagcgaataactggacaccaacaaccagtatcagcgatctgctggttgtggtgatgaaaaaatccacagcaggt

SEQ ID NO: 97425 - DNA, 75 bp, synthetic construct
  source 1..75: mol_type = other DNA
aagagagcaaaatcctgttcacagattaaatgaagcattgccaagaaaggtagaaggcccaaaaagaaagaggaa

SEQ ID NO: 97426 - DNA, 75 bp, synthetic construct
  source 1..75: mol_type = other DNA
acagcaggaagccttcatgactctggagcaacaacaacgggtaaaaacccgtacggcagagcagagtgccagtat

SEQ ID NO: 97427 - DNA, 75 bp, synthetic construct
  source 1..75: mol_type = other DNA
gctctcttgcagatggtccggaaattctcgccggagacaaaggcactcttattcgccttgataccccccataacc

SEQ ID NO: 97428 - DNA, 75 bp, synthetic construct
  source 1..75: mol_type = other DNA
ttgatgtggtaaaaacaatttgtagcatccttgaagaactcgtaccaaacaaaccgaataatattgagaattata

SEQ ID NO: 97429 - DNA, 75 bp, synthetic construct
  source 1..75: mol_type = other DNA
atgcaggtaagccagtggacaggccagaacggcgaaacgcggcagggctggcaggttattgcagacagcgtaatc

SEQ ID NO: 97430 - DNA, 75 bp, synthetic construct
  source 1..75: mol_type = other DNA
ccgttattggctggtcaatgtcgccacgcatgacggcgcaactggcctgcgatgccctgcagatggcgctgtggc

SEQ ID NO: 97431 - DNA, 75 bp, synthetic construct
  source 1..75: mol_type = other DNA
ctttgccatgcagtcaggcacaggacggacaggcagcgttatggctatcagtcctggcatttggtaagcaggccg

SEQ ID NO: 97432 - DNA, 75 bp, synthetic construct
  source 1..75: mol_type = other DNA
gataccaatctacaagcgttagtgaatctctgctcccgacggctgcaaaaacgctttgaaacgcgcgatattcat

SEQ ID NO: 97433 - DNA, 75 bp, synthetic construct
  source 1..75: mol_type = other DNA
cgcatatagaacgggcgggaccgttggtaaaccaacatcatcaaacaagagaatagtgtccaaccctggtaatac

SEQ ID NO: 97434 - DNA, 75 bp, synthetic construct
  source 1..75: mol_type = other DNA
caagcagaaggaagcagtgaaaatcctctgatttcttctctcgatgcattggcgcaagtggaaaaaattggtatt

SEQ ID NO: 97435 - DNA, 75 bp, synthetic construct
  source 1..75: mol_type = other DNA
tttttccggggcgctgaatcgttttcagcgaatcagtcagacggtggacagattaattcctttttacctgtcaga

SEQ ID NO: 97436 - DNA, 75 bp, synthetic construct
  source 1..75: mol_type = other DNA
gcaagtgatggtgcattggcattgatatcagggcgctcaatggtggagcttgacgcactggcaaaaccttatcgc

SEQ ID NO: 97437 - DNA, 75 bp, synthetic construct
  source 1..75: mol_type = other DNA
tgtggcgcaggggaatcagttgttcatgaacgatgtgttcctgaagcggctgtttgcggtgagtatcacctcgtc

SEQ ID NO: 97438 - DNA, 75 bp, synthetic construct
  source 1..75: mol_type = other DNA
ggttacacccgaaaagaagcctgtgagcgacacagtgtttctccggggtatttttccggggcgctgaatcgtttt

SEQ ID NO: 97439 - DNA, 75 bp, synthetic construct
  source 1..75: mol_type = other DNA
ttttatgaggagcatgcttacaaaagtaccgaccagagcctggtgctgtgcgacacagtccgccatctgcccgaa

SEQ ID NO: 97440 - DNA, 75 bp, synthetic construct
  source 1..75: mol_type = other DNA
ctgaactatccgcgaaatatgcctggttttttgatcttgatggaacgctggcggaaatcaaaccgcatcccgatc

SEQ ID NO: 97441 - DNA, 75 bp, synthetic construct
  source 1..75: mol_type = other DNA
gcgaggcggcggaacaggcaacgcaagatgaatgggtagcatatattttgccggggcaaaacggcacttatcctg

SEQ ID NO: 97442 - DNA, 75 bp, synthetic construct
  source 1..75: mol_type = other DNA
cgaatatcgccatcgaattgcagcgtgggattggtcatcaggatcgttttcagcgcctgatcaccacgctacgtc

SEQ ID NO: 97443 - DNA, 75 bp, synthetic construct
  source 1..75: mol_type = other DNA
ggatgatgcccgtgaccaaactatcgtgcgggcggtgatccagctcgcgcacgggctgggcatggatgtcatttt

SEQ ID NO: 97444 - DNA, 75 bp, synthetic construct
  source 1..75: mol_type = other DNA
cagcgtgcagctgacggcgacggtgaaagatccgtcgaatcatccggtggcgggaataacggtgaacttcaccat

SEQ ID NO: 97445 - DNA, 75 bp, synthetic construct
  source 1..75: mol_type = other DNA
atgattgcggttaccaacaatcagatacagacggtgggtgttaaccagataccgggatggtggaccgcttcgggc

SEQ ID NO: 97446 - DNA, 75 bp, synthetic construct
  source 1..75: mol_type = other DNA
tagagaagtccacagaaccaatgaaatccattgacggtattaaaatcattcaggtggatggtctgaatggcggtg

SEQ ID NO: 97447 - DNA, 75 bp, synthetic construct
  source 1..75: mol_type = other DNA
aacactatgacacgtttgataatatatcaaagatttattctgataaattccctcaaggaaaagatttagagctat

SEQ ID NO: 97448 - DNA, 75 bp, synthetic construct
  source 1..75: mol_type = other DNA
gttatccagcagctgccatcactttgattggtagcggggcacttcgtggtgcagggaatacgaaaataccgctac

SEQ ID NO: 97449 - DNA, 75 bp, synthetic construct
  source 1..75: mol_type = other DNA
tgaaaaaactgaacgtgataatgtctacaacgggatgaccctgcgtgaatatgcccgtatgtcactgactgaacg

SEQ ID NO: 97450 - DNA, 75 bp, synthetic construct
  source 1..75: mol_type = other DNA
gattccccggtacgtatcacccgcgccgctcaggcgacagaactctggggacgcggctccatgattgcccggatg

SEQ ID NO: 97451 - DNA, 75 bp, synthetic construct
  source 1..75: mol_type = other DNA
attgctgttgaagagctggcacagctgggcattcgcaccttcctgcgtatcggtacaacgggcgctattcagccg

SEQ ID NO: 97452 - DNA, 75 bp, synthetic construct
  source 1..75: mol_type = other DNA
tggaagagtggcaggcgatgggcgtaatgaactatgaaatggaatctgcaaccctgctgaccatgtgtgcaagtc

SEQ ID NO: 97453 - DNA, 75 bp, synthetic construct
  source 1..75: mol_type = other DNA
atgactcaaaactatgaactgattgtgaaagggatccgcaattttgagaataaagttacggtaactttagcatta

SEQ ID NO: 97454 - DNA, 75 bp, synthetic construct
  source 1..75: mol_type = other DNA
gccttacgtgatgaatatctctcctttctggcaaatggtgttgatccccaaatccataacaacgataaggcgaag

SEQ ID NO: 97455 - DNA, 75 bp, synthetic construct
  source 1..75: mol_type = other DNA
cgataaatggcacgctgaaagcggagaacattattggtgatcttgtgaaatgtgcaggggtggcttttccggtgg

SEQ ID NO: 97456 - DNA, 75 bp, synthetic construct
  source 1..75: mol_type = other DNA
tctgaacgaattacgcctgcgtgatgcgtcttatcacgggctggagctgcaaccgttcggctggtttatgcaccg

SEQ ID NO: 97457 - DNA, 75 bp, synthetic construct
  source 1..75: mol_type = other DNA
atgactcaaaactataaactgattgtgaaagggatccgcaattttgagaataaagttacggtaactttagcgtta

SEQ ID NO: 97458 - DNA, 75 bp, synthetic construct
  source 1..75: mol_type = other DNA
ttaagggagtccgcaattttgagaataaagttgcggtaactttagccttacggaacaaagaacgctttgacggtg

SEQ ID NO: 97459 - DNA, 75 bp, synthetic construct
  source 1..75: mol_type = other DNA
tatttcatctttgatttacaatgctctccctctcacagatgcacatattactcccccaggagagtcatcactacc

SEQ ID NO: 97460 - DNA, 75 bp, synthetic construct
  source 1..75: mol_type = other DNA
acgctggcaggctgaaaatcaggaagggatggcagaggtcgccaggtttattgaaatgaatggctcttttgccga

SEQ ID NO: 97461 - DNA, 75 bp, synthetic construct
  source 1..75: mol_type = other DNA
tgcagattatccagcagtttgaacaggcaggttctcacgctaaccgttatgacgtaactatcctggttaatggct

SEQ ID NO: 97462 - DNA, 75 bp, synthetic construct
  source 1..75: mol_type = other DNA
ggaacagacgcaaaaccacaggcacacagggtaatcagccaccagcgggaggcgatgacccttacggtgatgata

SEQ ID NO: 97463 - DNA, 75 bp, synthetic construct
  source 1..75: mol_type = other DNA
acttgacggacatctggtcagctcacttttggggggggcgggtgaatccccctgccttatctggcagggggattc

SEQ ID NO: 97464 - DNA, 75 bp, synthetic construct
  source 1..75: mol_type = other DNA
acggcctgaaagggcagccgtgcggggaagtgaagccacaggagcagaaagaggcagaaacccggctgatgatgc

SEQ ID NO: 97465 - DNA, 75 bp, synthetic construct
  source 1..75: mol_type = other DNA
accgtgagtggcgggacgctctggtatcttggcgggatgatacaggcgaacctggaagaaatcaggaagcagaac

SEQ ID NO: 97466 - DNA, 75 bp, synthetic construct
  source 1..75: mol_type = other DNA
gcaatatattctgaataatttccgccagaaaactcaccgtaccttccctggctcaaaaggttttaatgctatgtt

SEQ ID NO: 97467 - DNA, 75 bp, synthetic construct
  source 1..75: mol_type = other DNA
ggatcgtctgacccgtgaagagcgaaacagcctgctgtggagcggtatcgctacagtaaccgtcgcaaccggtga

SEQ ID NO: 97468 - DNA, 75 bp, synthetic construct
  source 1..75: mol_type = other DNA
gcaccggaacccgattatctgtgggcagcctcggtgtgtgcgacatgcgcaccgtcattatcttcggatccggca

SEQ ID NO: 97469 - DNA, 75 bp, synthetic construct
  source 1..75: mol_type = other DNA
gcaaatcactatatatacaaaaactactctactgctgccttaattgaaaaacttaaagggttcgactcatttact

SEQ ID NO: 97470 - DNA, 75 bp, synthetic construct
  source 1..75: mol_type = other DNA
tggcgggtttgccgtggatcgcggcgatggccttcttcatgcaggcacttgatgccactattctgaataccgcct

SEQ ID NO: 97471 - DNA, 75 bp, synthetic construct
  source 1..75: mol_type = other DNA
ggcgcgtggctatcatctggcgcagggcaatccggcgcgtgaaatcaaaccgaccaccattttgcatgttgcggc

SEQ ID NO: 97472 - DNA, 75 bp, synthetic construct
  source 1..75: mol_type = other DNA
aaacctccctcctctgttgaaaaccagtggatcacgggagcaacttctggagcaaattgaaactgtagatccaga

SEQ ID NO: 97473 - DNA, 75 bp, synthetic construct
  source 1..75: mol_type = other DNA
agcggtaatggaaaggatactatatccagtggtctggagggagcttggtcaacctccccaacacagtttacaatg

SEQ ID NO: 97474 - DNA, 75 bp, synthetic construct
  source 1..75: mol_type = other DNA
aaccgtacctgctctgatgacccgctgttcctctttgaaaactacacccgcaccgcgcaggtactggccgacacg

SEQ ID NO: 97475 - DNA, 75 bp, synthetic construct
  source 1..75: mol_type = other DNA
ctgtactggaatccctgagctcaatacagtcagaatttaataaaaaacagcaagataataagaaggtttctctgg

SEQ ID NO: 97476 - DNA, 75 bp, synthetic construct
  source 1..75: mol_type = other DNA
aaaaagcaaaagccataattcaccagtagatagtctggttgataaggccagtaaactcaatttgactgttcctga

SEQ ID NO: 97477 - DNA, 75 bp, synthetic construct
  source 1..75: mol_type = other DNA
ctgactcagaacattacctgatggcactggacgccggaactggcagcgtccgcgccgtgattttcgacctggaag

SEQ ID NO: 97478 - DNA, 75 bp, synthetic construct
  source 1..75: mol_type = other DNA
ggtgccgccactcgaacacctgaccttacgccagcgcattactgataaatatctggcgaatcttatctcgtccgt

SEQ ID NO: 97479 - DNA, 75 bp, synthetic construct
  source 1..75: mol_type = other DNA
acggcaaaaccttccggatgaacgcggctcaggtactgcatgataaatatatgatctggtgcggtgagcagttat

SEQ ID NO: 97480 - DNA, 75 bp, synthetic construct
  source 1..75: mol_type = other DNA
ctggtcgacggcaaatttgtgcaggatttaaaagatccgtccctgatctggcgcggtagcagcaaccaggtggtg

SEQ ID NO: 97481 - DNA, 75 bp, synthetic construct
  source 1..75: mol_type = other DNA
agctctggagacaaacaactggccagcaccgattaccgaaagttataccgacgaattaaacgactttgatcttcg

SEQ ID NO: 97482 - DNA, 75 bp, synthetic construct
  source 1..75: mol_type = other DNA
gcatcacgattacagtgatgaaactggtgaagcgtcagctcctgtagcaactgaaatcatgtggccgtcatattt

SEQ ID NO: 97483 - DNA, 75 bp, synthetic construct
  source 1..75: mol_type = other DNA
cgctctggtcgccctgatcccgataatattcttcttcgttgcactcgcggtattacgtctgaaaggacatgtcgc

SEQ ID NO: 97484 - DNA, 75 bp, synthetic construct
  source 1..75: mol_type = other DNA
tggatatccgcgtacctgaccatctgattgtcggcggcaggcaaatctattcattcgcagaacacggtctgctgt

SEQ ID NO: 97485 - DNA, 75 bp, synthetic construct
  source 1..75: mol_type = other DNA
cccggggatggggaataagcttagtcagccgttgtctccgggtgtcgcgtgcgcagttgcacgtcattctcagac

SEQ ID NO: 97486 - DNA, 75 bp, synthetic construct
  source 1..75: mol_type = other DNA
gtaccgctggttttttagttactgccgcaaaaggcgagatcaaacgccgccagcggcgcaaggccaaagaacagg

SEQ ID NO: 97487 - DNA, 75 bp, synthetic construct
  source 1..75: mol_type = other DNA
agcctggtgctgatgccgtcggcagattatgcccgtcagatttgtggagcggggagccagctggcgcgtatggtc

SEQ ID NO: 97488 - DNA, 75 bp, synthetic construct
  source 1..75: mol_type = other DNA
atggtgcctaaggggtggatgcttctccaagtgtcagatatctgtaagttacaaaatggtaatagttttaagcca

SEQ ID NO: 97489 - DNA, 75 bp, synthetic construct
  source 1..75: mol_type = other DNA
gtaaacgtaagatttcggaactgaagacaaaggatctactcgccccgataaaggtagtcgaagcgagtgggcggt

SEQ ID NO: 97490 - DNA, 75 bp, synthetic construct
  source 1..75: mol_type = other DNA
tcagcaggctgcttgcacagcaacggtgactggaatagatgggaatgtatccggcgaaactatttacatgctcca

SEQ ID NO: 97491 - DNA, 75 bp, synthetic construct
  source 1..75: mol_type = other DNA
gctgcagtggtgggctgattttcttgatgcaaatcgtgagaaggcgatgagtccatttgattttgccaaacttag

SEQ ID NO: 97492 - DNA, 75 bp, synthetic construct
  source 1..75: mol_type = other DNA
cgtggaagcctcgcaggaactccttgaacttggtcgacaggaatatcgccggacgctacgccagataaacgaagc

SEQ ID NO: 97493 - DNA, 75 bp, synthetic construct
  source 1..75: mol_type = other DNA
agggctgatcgggcacaatggattctggaagccgacattcgcagttgttttgatgagatttcacatgaatggcta

SEQ ID NO: 97494 - DNA, 75 bp, synthetic construct
  source 1..75: mol_type = other DNA
cagccgaagggtattgaagagcttagaggacaatttgttctcggcaattggcagacgaagtatcgaagagctaaa

SEQ ID NO: 97495 - DNA, 75 bp, synthetic construct
  source 1..75: mol_type = other DNA
ttgaagttgcttctcgccttcagcagagaaccacagcaatcatgcgctatgcggtacaaagtgggctgattgatt

SEQ ID NO: 97496 - DNA, 75 bp, synthetic construct
  source 1..75: mol_type = other DNA
ctgatgtacgcccccgacagcgccctgccagtcggtcttatcgaacagcagcgctggagtcgtgccacggacacc

SEQ ID NO: 97497 - DNA, 75 bp, synthetic construct
  source 1..75: mol_type = other DNA
aatcagtgaaaacaccgtaaataaggcactgaggggtatgggatatgacacaacccaggatgtctgtgggcatgg

SEQ ID NO: 97498 - DNA, 75 bp, synthetic construct
  source 1..75: mol_type = other DNA
atatggctatcgtcgtgtctgggccattctcagacgacagtcccgtaacaaaggagtgccgttcgtgaatgcaaa

SEQ ID NO: 97499 - DNA, 75 bp, synthetic construct
  source 1..75: mol_type = other DNA
aaatgtgcgcagtctgtgtggatatattatctaaatcaacctgcggataatattcctcgttatgaaagtggatac

SEQ ID NO: 97500 - DNA, 75 bp, synthetic construct
  source 1..75: mol_type = other DNA
ccaagatcgtacaaatatgggggaacagtttattaccggttctcaataatggagatcttgttgccgttgatattt

SEQ ID NO: 97501 - DNA, 75 bp, synthetic construct
  source 1..75: mol_type = other DNA
ccctcccgcgcgacaaaatggaggaggccatcatctttgctggaacgggagcatggaaagccgctcaggattacc

SEQ ID NO: 97502 - DNA, 75 bp, synthetic construct
  source 1..75: mol_type = other DNA
atccgcacaatgagaatgctggcagcgatctgcatcgcgattgcggtgatgaaactggtgaagcgacagcacctg

SEQ ID NO: 97503 - DNA, 75 bp, synthetic construct
  source 1..75: mol_type = other DNA
atgaaaaatattgcgacaggcgatgttcttgaacgtatccgcagactggccccgtcacatgtaaccgcgccattc

SEQ ID NO: 97504 - DNA, 75 bp, synthetic construct
  source 1..75: mol_type = other DNA
ttcatacgcgctcaacgcctttctggaataaacaaactgcgcctgccggaatattcgaacgtcatcttgataaag

SEQ ID NO: 97505 - DNA, 75 bp, synthetic construct
  source 1..75: mol_type = other DNA
ggaagcgcgtcagcaatctcctgatggctgcgtgatggtattcgctgcccgtattcgccagggggtgagtcatgc

SEQ ID NO: 97506 - DNA, 75 bp, synthetic construct
  source 1..75: mol_type = other DNA
cctgagcacgtggacaactcacgtggtgaggtaacaaaaaccataagcatatcctgtacgtataagagtggctca

SEQ ID NO: 97507 - DNA, 75 bp, synthetic construct
  source 1..75: mol_type = other DNA
atgaaaaacatttcgacaggagggattcttgaacgggtgcgccgtctggttccaccgcacgttacagcaccgttc

SEQ ID NO: 97508 - DNA, 75 bp, synthetic construct
  source 1..75: mol_type = other DNA
caggcagaaggaagtggagaaaatcccctggtttcttcgctcgatgcactggcgcaggtggaaaaactcggaatc

SEQ ID NO: 97509 - DNA, 75 bp, synthetic construct
  source 1..75: mol_type = other DNA
ttcagttggtactaaacgattccggtcgtctaaccatgcctgtttattatagagatcaacagtattgcccgactt

SEQ ID NO: 97510 - DNA, 75 bp, synthetic construct
  source 1..75: mol_type = other DNA
gagctgccgcttattaaggactcggagatccagaacttctgtctgcacggtaccgtcggggccggtaaatcagaa

SEQ ID NO: 97511 - DNA, 75 bp, synthetic construct
  source 1..75: mol_type = other DNA
actgggatatggacgcgatatggcagtcgctgctcggctggctggataaccagccccgtagcgtacgcagtcgcc

SEQ ID NO: 97512 - DNA, 75 bp, synthetic construct
  source 1..75: mol_type = other DNA
caacagccgcaacagccggtgtctcctgccatcaacgataagaagtcagattcaggtgtgaatgttccggcaggg

SEQ ID NO: 97513 - DNA, 75 bp, synthetic construct
  source 1..75: mol_type = other DNA
gaaggcatcgccatttttaatgcgctgaaaacacatggtgcgtccattaccgtttatgtcgacggtgtggcggcg

SEQ ID NO: 97514 - DNA, 75 bp, synthetic construct
  source 1..75: mol_type = other DNA
ctggtcgacggcaaatttgtgcaggatttaaaagacccttccctgatctggcgcggcagcagcaatcaggtggtg

SEQ ID NO: 97515 - DNA, 75 bp, synthetic construct
  source 1..75: mol_type = other DNA
tcggtgtgccggggctcgatactcaggaggtggcgaccgcgcttgtctccgtggctcagaagctgcgcgctttcg

SEQ ID NO: 97516 - DNA, 75 bp, synthetic construct
  source 1..75: mol_type = other DNA
ggggatcggaaatacctgcatcatgccacccgtgaacaacgcaaacacattactgctcttgagatggatcaggaa

SEQ ID NO: 97517 - DNA, 75 bp, synthetic construct
  source 1..75: mol_type = other DNA
tacggtgttaagcaccagcgaaaagaacgtccctgtgaagaaaaagaaagttaccgctggcagcaggcttcggag

SEQ ID NO: 97518 - DNA, 75 bp, synthetic construct
  source 1..75: mol_type = other DNA
cgtgctgaccaactacgtcaaggctatccgctacctgcagggcatcgaaaataacggcgagtcattcaccatacg

SEQ ID NO: 97519 - DNA, 75 bp, synthetic construct
  source 1..75: mol_type = other DNA
gcagagatggtccgtatgcagacagccaccggcacagccatcaaccagagttcagagaagctggcctctgtcatc

SEQ ID NO: 97520 - DNA, 75 bp, synthetic construct
  source 1..75: mol_type = other DNA
tggctaaagtcaaaaataagaaagtatttccggacaagagtctgtgtgatgaaactgtcgatgtggcaaccttaa

SEQ ID NO: 97521 - DNA, 75 bp, synthetic construct
  source 1..75: mol_type = other DNA
gccttcacctccacccgtgcggcacgagaatggctgattctgaacatggcgggactggagcgtgaagagttccgg

SEQ ID NO: 97522 - DNA, 75 bp, synthetic construct
  source 1..75: mol_type = other DNA
cgggccaggggtaaacaccagataacctcaatgtctgatattgtcagggacctgtcacgcctgggctggacggat

SEQ ID NO: 97523 - DNA, 75 bp, synthetic construct
  source 1..75: mol_type = other DNA
cctgcaaaagttggtgcatggcttatatattaccgaccggattctgtaacacaatattccaaagatattgcatgg

SEQ ID NO: 97524 - DNA, 75 bp, synthetic construct
  source 1..75: mol_type = other DNA
tgtcgtacaacattgccacgcttaagcgcgtcaaaaaccaaccaggcattaatggcgttaagaacattatcgccg

SEQ ID NO: 97525 - DNA, 75 bp, synthetic construct
  source 1..75: mol_type = other DNA
aattcaattacaagaattacccgcagaagcgccggacacactcaagttttcgcgatccggtaactatatcaatgt

SEQ ID NO: 97526 - DNA, 75 bp, synthetic construct
  source 1..75: mol_type = other DNA
gcgccgccgggatgaccgtcggccttgccgtttgtgcattgattgtcgggctggcgctggcgatgttctttgcgg

SEQ ID NO: 97527 - DNA, 75 bp, synthetic construct
  source 1..75: mol_type = other DNA
accggccggggtcaggatgtggcggaaggtcgtgccaccgttccgggtgtgaagaaaccacgcgcaagggggtaa

SEQ ID NO: 97528 - DNA, 75 bp, synthetic construct
  source 1..75: mol_type = other DNA
gggggatattctgttcgatcatgattcatcagtgctgacagaaaaaggacgtgaacaactgatgatcgttgcaga

SEQ ID NO: 97529 - DNA, 75 bp, synthetic construct
  source 1..75: mol_type = other DNA
atgcaacagatttcctttctgtccggagagatgacacccggtgagcgcagtctcattcagcgggccctgaaaacc

SEQ ID NO: 97530 - DNA, 75 bp, synthetic construct
  source 1..75: mol_type = other DNA
agttcagcattcggtgcgcttgcgcagcttcggccatatgctgcgtcttggactcccctggcatgaaaagcatgc

SEQ ID NO: 97531 - DNA, 75 bp, synthetic construct
  source 1..75: mol_type = other DNA
taatcagagcccgtgcagcagcgaaacgagacagcagagttgcccgacagcgaattctgagcatgctattgcgaa

SEQ ID NO: 97532 - DNA, 75 bp, synthetic construct
  source 1..75: mol_type = other DNA
agcgcgcgtgtgctgggaacgtaagaaacttagtgtcatcgtggtggtagcgtcagtatcgactattttgctggc

SEQ ID NO: 97533 - DNA, 75 bp, synthetic construct
  source 1..75: mol_type = other DNA
atggatgtagccgacgccgggcaggtggcgcaagtgtgtcagcggctgttagcggaaacggaacgactggacgtg

SEQ ID NO: 97534 - DNA, 75 bp, synthetic construct
  source 1..75: mol_type = other DNA
atgttaatcgccctgatcgtcatctttttaaccgtcatagtgacgacactggtaacgaggaaagacctctgcgag

SEQ ID NO: 97535 - DNA, 75 bp, synthetic construct
  source 1..75: mol_type = other DNA
aggaaagacctctgcgaggtacgaatccgaacctgccagacggaggtcgctgtcttcgtagactacgaatctgag

SEQ ID NO: 97536 - DNA, 75 bp, synthetic construct
  source 1..75: mol_type = other DNA
tgcagtaagaaatataattgatgacactaatgaagtgaccattgatttatcaggacttaatttaaccactcaacc

SEQ ID NO: 97537 - DNA, 75 bp, synthetic construct
  source 1..75: mol_type = other DNA
atgatatttaaccgtaataaaaaacgagatgaacaacataattctgctgttgttttgccatcagctgaaaatgta

SEQ ID NO: 97538 - DNA, 75 bp, synthetic construct
  source 1..75: mol_type = other DNA
ctcgcctctgacctcgccagccatatcaccctacaggatattgtggtcgatggcggctcaacgctgggggcataa

SEQ ID NO: 97539 - DNA, 75 bp, synthetic construct
  source 1..75: mol_type = other DNA
aacgttaaaaacgccctggtactcaaggcctacgacattatcagtcaccgccgtctggagtttgacgccggacac

SEQ ID NO: 97540 - DNA, 75 bp, synthetic construct
  source 1..75: mol_type = other DNA
gaggaaacgacgatcctgatagaataaatatcaataattcttcagttacttatattaatattggttccaatgata

SEQ ID NO: 97541 - DNA, 75 bp, synthetic construct
  source 1..75: mol_type = other DNA
gcgttactggggaaaaatgcctggcttttaagtgcagtaggtggtgatttttatgggcaatcattactggcgcaa

SEQ ID NO: 97542 - DNA, 75 bp, synthetic construct
  source 1..75: mol_type = other DNA
atgtctgacaacatcaggatagcctcttaccgcgctttgcgcaaggagaagaaggccatgaaactaccacgaagc

SEQ ID NO: 97543 - DNA, 75 bp, synthetic construct
  source 1..75: mol_type = other DNA
aaggaatcagtgctgacacttgataaagctcccgccctgtcggaatggaacggcggcttccacaccggacaactg

SEQ ID NO: 97544 - DNA, 75 bp, synthetic construct
  source 1..75: mol_type = other DNA
aatggcggcaacgaagccgacttaaatcctaacgtcgccaaccgcaacaagggcccgcgccgtcagccggaaaag

SEQ ID NO: 97545 - DNA, 75 bp, synthetic construct
  source 1..75: mol_type = other DNA
aagtcacaatcatgatgaataatctgcatatcagggttgctctggcggcggcagacaccctgacacaacctctca

SEQ ID NO: 97546 - DNA, 75 bp, synthetic construct
  source 1..75: mol_type = other DNA
aggaagaaaaatttatccagttgattgataaatatatcactcagcatcgtgatgatgctattaatgctgtgtttt

SEQ ID NO: 97547 - DNA, 75 bp, synthetic construct
  source 1..75: mol_type = other DNA
atcgaccggtaaggatatggagcgccagacgctggtcagttattccgacattcagtctctgccggatctgacctg

SEQ ID NO: 97548 - DNA, 75 bp, synthetic construct
  source 1..75: mol_type = other DNA
ccagtgccgtggagtatggtcggcaacttattgaacaaccagcgaaaagcgtcattatcctcgtgagcgattttt

SEQ ID NO: 97549 - DNA, 75 bp, synthetic construct
  source 1..75: mol_type = other DNA
atgaatattgaacttcgtcatctgcgttactttgttgctgttgcggaagagctgcatttcgggcgcgccgctgcc

SEQ ID NO: 97550 - DNA, 75 bp, synthetic construct
  source 1..75: mol_type = other DNA
ggctcgctggggcggcctgacgcgtctgctgcttaacatcaccttattcgaccgccagccgctgcacccggcggt

SEQ ID NO: 97551 - DNA, 75 bp, synthetic construct
  source 1..75: mol_type = other DNA
agttttgcggcggcgtcggccaaactctacaagacgccgtccgctctgagttacaccgttcacaagctggaaagc

SEQ ID NO: 97552 - DNA, 75 bp, synthetic construct
  source 1..75: mol_type = other DNA
tgataaagcgaccggcgagatgaaagaacagactgaatggcaccgcgttgtgctgttcggcaaactggcagaagt

SEQ ID NO: 97553 - DNA, 75 bp, synthetic construct
  source 1..75: mol_type = other DNA
cgtcgaatacgctggtgccgttgttctacgccgagatggacaattctgcggcaaatacagcggtgaccagcgcgc

SEQ ID NO: 97554 - DNA, 75 bp, synthetic construct
  source 1..75: mol_type = other DNA
ctttaaagtctccgattcccacggtctgtatctgctggtcaagccgggtggctcacgtcactggtatctcaagta

SEQ ID NO: 97555 - DNA, 75 bp, synthetic construct
  source 1..75: mol_type = other DNA
atgacatcattaaccccggaagcagcactggatattctgattgcgtggctgcaggacaatatcgacagcgaatcc

SEQ ID NO: 97556 - DNA, 75 bp, synthetic construct
  source 1..75: mol_type = other DNA
ctgacgctggttaatgtcggcgcacaaatagccgcgatgacgccgggcgaactcgctacctggcttgcggagaat

SEQ ID NO: 97557 - DNA, 75 bp, synthetic construct
  source 1..75: mol_type = other DNA
cccacgccatgacgcttcatggcgatacgcgcatcgataattactactggctgcgggacgatacgcgttctcagc

SEQ ID NO: 97558 - DNA, 75 bp, synthetic construct
  source 1..75: mol_type = other DNA
tgcctgcaccggaaagtgccgacgtggcgctcttaccttccattcatctgggtaacgcccgcgcggatgatctgg

SEQ ID NO: 97559 - DNA, 75 bp, synthetic construct
  source 1..75: mol_type = other DNA
taagagtgagcagttggtggtgaactttactgcggatacgctcactgcgcaggttaatcttaacgttaccgagga

SEQ ID NO: 97560 - DNA, 75 bp, synthetic construct
  source 1..75: mol_type = other DNA
tatttggcacaagatgtttatcttaacactaaataatattgtttctgcatcggcggccgaacaggaaagatatat

SEQ ID NO: 97561 - DNA, 75 bp, synthetic construct
  source 1..75: mol_type = other DNA
taccccgccagggctacgttgggtatcgccgccctgccgcagggggctgttattgaaattgaagccatcatggtg

SEQ ID NO: 97562 - DNA, 75 bp, synthetic construct
  source 1..75: mol_type = other DNA
gcctgagtgccgtgcttgccgcaagggaagcagaaggtcgccagatggccagcctcttcgaaccggatgtgccgg

SEQ ID NO: 97563 - DNA, 75 bp, synthetic construct
  source 1..75: mol_type = other DNA
aacaaatcatgtcagttccggcgccggtgatggtagcccgcgaaacattgcatttaactacattgtgagggctgc

SEQ ID NO: 97564 - DNA, 75 bp, synthetic construct
  source 1..75: mol_type = other DNA
tgaacggacacatctacagagtaccaaatcgtcgtaagcgtaaacctgagctgaagccatccgaaataccaacac

SEQ ID NO: 97565 - DNA, 75 bp, synthetic construct
  source 1..75: mol_type = other DNA
gttaagccgtccgacatcccgacactgaagggctacaccgcccgtctggtggatcagaaatggctgcgtctcgcg

SEQ ID NO: 97566 - DNA, 75 bp, synthetic construct
  source 1..75: mol_type = other DNA
tcgcaaacagtgacacattactgcattgcctgaattcgctcgtgaattatatttcaggcaatctggatgaagcag

SEQ ID NO: 97567 - DNA, 75 bp, synthetic construct
  source 1..75: mol_type = other DNA
atgcagcagctttcctttctgcccggagaaatgacgcccggcgagcgcagtctcattcaacgggccctgaaaacc

SEQ ID NO: 97568 - DNA, 75 bp, synthetic construct
  source 1..75: mol_type = other DNA
cggttcggctacaaaatggagcagcaactggcccgtgttcgtgcggcaactgaagcagccaggctgatggctcgt

SEQ ID NO: 97569 - DNA, 75 bp, synthetic construct
  source 1..75: mol_type = other DNA
tgacacgcccactggtcatgcctgccccggaaaaggttccggatgtcagcgaaccggtaaccgctccggataccc

SEQ ID NO: 97570 - DNA, 75 bp, synthetic construct
  source 1..75: mol_type = other DNA
cccccgacagatcacaaagcagactggaatgattaccaccaaaaacacggcattaaatgcgccacagaagcgttc

SEQ ID NO: 97571 - DNA, 75 bp, synthetic construct
  source 1..75: mol_type = other DNA
tcatacaggagtgggggtaagaaattcgttatatttaatagcggaaatattaatgattttgaaattaatactgtc

SEQ ID NO: 97572 - DNA, 75 bp, synthetic construct
  source 1..75: mol_type = other DNA
cagccaacccgcaatcacggctacgacgttattgtaggtggtgagctattcacggattactccgatcatcctcgc

SEQ ID NO: 97573 - DNA, 75 bp, synthetic construct
  source 1..75: mol_type = other DNA
gtggcaaaaataggggcaaattccgggcagcaagtaaaaatcaaaattatgccgaataaactgcccactaataaa

SEQ ID NO: 97574 - DNA, 75 bp, synthetic construct
  source 1..75: mol_type = other DNA
atcgcggcctgccgctggcgctcatcagcacggaaggggcaacagcgtggtgcgcagaatatgatgaatggggca

SEQ ID NO: 97575 - DNA, 75 bp, synthetic construct
  source 1..75: mol_type = other DNA
gcactctgcatcagcctggtggctaatggcatacagtactggcatgccaccggcgtgacgcgcgaatactttgcc

SEQ ID NO: 97576 - DNA, 75 bp, synthetic construct
  source 1..75: mol_type = other DNA
gtgagtgtaccagaggagctcatagtggactgcctttttatcgggtggatggaccgttgcagacgatgaaaataa

SEQ ID NO: 97577 - DNA, 75 bp, synthetic construct
  source 1..75: mol_type = other DNA
gttccccgccgtgagatcgcggaaaaactcgaaatgcccctgggcatgattaatcagtacgtttatttcgaaagg

SEQ ID NO: 97578 - DNA, 75 bp, synthetic construct
  source 1..75: mol_type = other DNA
ctgattaaaacggagctgctggaaacgcagaccgtggacttcagcgtgggtgcagaagggcttcgccatgtaccg

SEQ ID NO: 97579 - DNA, 75 bp, synthetic construct
  source 1..75: mol_type = other DNA
gttagatttaattcgaataatatggcgatatattggaatagtagagcatctttattttgttcaactgaattaaac

SEQ ID NO: 97580 - DNA, 75 bp, synthetic construct
  source 1..75: mol_type = other DNA
gcagtattaccttcttgataaggaaaatttcatggctcttttaagccgaacagataagaaatatgagaataaaga

SEQ ID NO: 97581 - DNA, 75 bp, synthetic construct
  source 1..75: mol_type = other DNA
caacgtcacggatgcagatcgttatccccagctgaatgcctcatccgggataacatacagcggtggtctgaaagg

SEQ ID NO: 97582 - DNA, 75 bp, synthetic construct
  source 1..75: mol_type = other DNA
acgccgccactttgcagaaaatacgcgccgccgactactgatcgacaccatcaagcctatcgaggtgaagcatgt

SEQ ID NO: 97583 - DNA, 75 bp, synthetic construct
  source 1..75: mol_type = other DNA
caggatacgggctggcgtaacttttttgtcgatccccaggttacccggttgatcggtgaagctctgactaataac

SEQ ID NO: 97584 - DNA, 75 bp, synthetic construct
  source 1..75: mol_type = other DNA
tggtaccggaactcggtctggttatcgttaagccaggccgtgaatccatgcgggtatttcatggcggcagggtgc

SEQ ID NO: 97585 - DNA, 75 bp, synthetic construct
  source 1..75: mol_type = other DNA
tgctatggcatggtcaacggctggcgccggaagactggaaagacctgttcactgccctgtggcttaagaccaaaa

SEQ ID NO: 97586 - DNA, 75 bp, synthetic construct
  source 1..75: mol_type = other DNA
catcgagacagaaagcaaggtgatcggcagcgtagaattcagcaagccaacctatgttagcgccggaccggtcac

SEQ ID NO: 97587 - DNA, 75 bp, synthetic construct
  source 1..75: mol_type = other DNA
ttgatattgctttttcacatgtcattgagccatatatcacgatgttaaaggattcttacactactcaggttttga

SEQ ID NO: 97588 - DNA, 75 bp, synthetic construct
  source 1..75: mol_type = other DNA
aacatccgcaatgaaaactttcatgaagctatgtttcatggtcaaccacttggctttaccactattaacaattat

SEQ ID NO: 97589 - DNA, 75 bp, synthetic construct
  source 1..75: mol_type = other DNA
aagaagaaggcctcgaattactgggggccacctattccggcatgaccgatgttatcaagggcacacagtttgatc

SEQ ID NO: 97590 - DNA, 75 bp, synthetic construct
  source 1..75: mol_type = other DNA
ctgggtgaacaggtacaacatgtgctggatgagaaccccttctccggtcacctgtttatctttcgcggccgacgg

SEQ ID NO: 97591 - DNA, 75 bp, synthetic construct
  source 1..75: mol_type = other DNA
tggccgctggaacagcttgccgcccagcatccggaactgaaagagcaaatcaacgccagccagaaacaactgctt

SEQ ID NO: 97592 - DNA, 75 bp, synthetic construct
  source 1..75: mol_type = other DNA
gccgttctacttcctcttcaccgacaaggatggcgaaaaatacggtcgcgcaaacaaactttctggtctggataa

SEQ ID NO: 97593 - DNA, 75 bp, synthetic construct
  source 1..75: mol_type = other DNA
tggcgaaaccattaattgataccgggcaatatcgcagagctattacccatgttgtgagggataaaaatgccgact

SEQ ID NO: 97594 - DNA, 75 bp, synthetic construct
  source 1..75: mol_type = other DNA
caccctgagttttaccgtaagttcacgacgtcagaacgggagttttggcagttcacgtatcagtaaccttcaggc

SEQ ID NO: 97595 - DNA, 75 bp, synthetic construct
  source 1..75: mol_type = other DNA
gaatgttggtggttcaggcgctaatacgctgaatagtattgaagttattcatgttgatggtaatgcagctaacgc

SEQ ID NO: 97596 - DNA, 75 bp, synthetic construct
  source 1..75: mol_type = other DNA
cgctggtgcgcgtttggtttgctctccagccatagccgtttacatggcagcaaatcttatcgtgtgccgtgggcc

SEQ ID NO: 97597 - DNA, 75 bp, synthetic construct
  source 1..75: mol_type = other DNA
gctggcgaatctcccggaaccgatctggcgaaaccattaattgataccgggcaatatcgcagagctattacccat

SEQ ID NO: 97598 - DNA, 75 bp, synthetic construct
  source 1..75: mol_type = other DNA
acattaattttattacgtatgcattgatgctttctctggccggtgtgcctgcttatgctgtcgattttaatacag

SEQ ID NO: 97599 - DNA, 75 bp, synthetic construct
  source 1..75: mol_type = other DNA
gcggcctgaccgtggagcagatgcaaaaccagatggacccggtgtacacgccggcgcgaaaaatccacctgtacc

SEQ ID NO: 97600 - DNA, 75 bp, synthetic construct
  source 1..75: mol_type = other DNA
catgacggcgaaaaccattcttcacgccgggccgccggtcacctgggaaaaaatgtgcggcgcgatgaaaggcgc

SEQ ID NO: 97601 - DNA, 75 bp, synthetic construct
  source 1..75: mol_type = other DNA
ttttccacacttcatattggtaatggatataatggtgctgttgatgttattaatggtgctgctttacatatggat

SEQ ID NO: 97602 - DNA, 75 bp, synthetic construct
  source 1..75: mol_type = other DNA
actataatgttctggagcaggatttatccccttccggacccttaagcccgtttcggggacatgtttcaaaaaaaa

SEQ ID NO: 97603 - DNA, 75 bp, synthetic construct
  source 1..75: mol_type = other DNA
tcagcaatgcccggcgtgtaaaagcggtcgtaccaattgctgtgaaaaaatttcagtcattggcgtgcatcagga

SEQ ID NO: 97604 - DNA, 75 bp, synthetic construct
  source 1..75: mol_type = other DNA
ctcgataaagcgctgaaggcacagaaaaataacgacgaagcaaccgccatccgcgaatttgaatatatacaccag

SEQ ID NO: 97605 - DNA, 75 bp, synthetic construct
  source 1..75: mol_type = other DNA
ttcaactgaattaaactcgaaatcacaatcgcctgcattaggtttgggacatgagtttgctcatgcgcagtatta

SEQ ID NO: 97606 - DNA, 75 bp, synthetic construct
  source 1..75: mol_type = other DNA
accgaaaagcaacgagtattaaataaaattaatgcatgtatccataataccggagccgaagtcattcgccatata

SEQ ID NO: 97607 - DNA, 75 bp, synthetic construct
  source 1..75: mol_type = other DNA
tggtgaaaccgctaatcgacaccgggcaatatcgcagagctattacccatattgtgagggataaagatgccgact

SEQ ID NO: 97608 - DNA, 75 bp, synthetic construct
  source 1..75: mol_type = other DNA
cgcgtacaaaaagttgcccgctttcttcagacagagataaggcaataactcagttccacgacctgttattaaaat

SEQ ID NO: 97609 - DNA, 75 bp, synthetic construct
  source 1..75: mol_type = other DNA
gctggcggaggtgctgcttatgacaccgctttttcaggagtgctaaaagccggtggaacaggagcgcctgggatc

SEQ ID NO: 97610 - DNA, 75 bp, synthetic construct
  source 1..75: mol_type = other DNA
cgtacctggaattttgaggacggtgccgggtactggatgaaccatgtcatccgtgatttcgggattcttaagtaa

SEQ ID NO: 97611 - DNA, 75 bp, synthetic construct
  source 1..75: mol_type = other DNA
ggatccgactgaacccagtcagagcagtgtgggaaaatggagccagcacgtaggcggttttttagccagttttaa

SEQ ID NO: 97612 - DNA, 75 bp, synthetic construct
  source 1..75: mol_type = other DNA
agaagctaaaagaaatttttcagattgatcgaccagaactggatttcggtatttatcgtattttaaatgcacgtg

SEQ ID NO: 97613 - DNA, 75 bp, synthetic construct
  source 1..75: mol_type = other DNA
taacgtatgcatctccggcaccggggcatctgaaagataaatttattgagccattagttaaacgtgtgaaggatg

SEQ ID NO: 97614 - DNA, 75 bp, synthetic construct
  source 1..75: mol_type = other DNA
cggaaggtcagcgacgctggcgctgccggaattctgaacccgatgccggaaaggtgcttaatacgcggctcgcca

SEQ ID NO: 97615 - DNA, 75 bp, synthetic construct
  source 1..75: mol_type = other DNA
tgtataaatatccattaaaccctgttcggtttatagattctttgggtttaaaattccatgttaacggtgatccaa

SEQ ID NO: 97616 - DNA, 75 bp, synthetic construct
  source 1..75: mol_type = other DNA
aggatgaccacggcgaacagtttcgcctggttgtccgtaataacggtgcaatggtctggcgtacctggaattttg

SEQ ID NO: 97617 - DNA, 75 bp, synthetic construct
  source 1..75: mol_type = other DNA
cgaagcggcaagcacctgacgcaggtaacgccagcagggcaagaaataattcgtatcgctcgcgaagtcctgtcg

SEQ ID NO: 97618 - DNA, 75 bp, synthetic construct
  source 1..75: mol_type = other DNA
cgatgacagtcgaaagcatcggcagtctgattggccgtagtggggctgccgtcaggacgaaagcgcgggaactgg

SEQ ID NO: 97619 - DNA, 75 bp, synthetic construct
  source 1..75: mol_type = other DNA
ctccttcagctttattaacagcgatcagttgcagcgtttcgccaagcagattatgtccaatgcggccggatactt

SEQ ID NO: 97620 - DNA, 75 bp, synthetic construct
  source 1..75: mol_type = other DNA
gtcagagggaacggataacgggcgacaaccgacacgtaaccacggttatgatgttattgttggtggtgaactgtt

SEQ ID NO: 97621 - DNA, 75 bp, synthetic construct
  source 1..75: mol_type = other DNA
aggttcactgtatatcgccaccacgcatacccaggcacgctacgcattaccaaacgtcatcaaaggctttattga

SEQ ID NO: 97622 - DNA, 75 bp, synthetic construct
  source 1..75: mol_type = other DNA
atgaaagcgttgtgtcaggagtaccgcaatggcaccaggcgcaatgagaagagaaatagagagaatgatacctac

SEQ ID NO: 97623 - DNA, 75 bp, synthetic construct
  source 1..75: mol_type = other DNA
ttgtggtgactgttacgaatgatgagacagaagtatttatggaaatggcgatcaataactttagaaaacatcttc

SEQ ID NO: 97624 - DNA, 75 bp, synthetic construct
  source 1..75: mol_type = other DNA
cgtcaccaggaactctcactggcaacggttacagcccgggtggcaaccctattcccttcatcatttccggtactc

SEQ ID NO: 97625 - DNA, 75 bp, synthetic construct
  source 1..75: mol_type = other DNA
gttccacacgcggatacagcatggcgagccactggtcgagagccgctacctctacgacccgctgggacggcgaat

SEQ ID NO: 97626 - DNA, 75 bp, synthetic construct
  source 1..75: mol_type = other DNA
atgaagcgtaaagcaaataaggatgagcaatatttttcacttctttatttgtggttaaagacaagaggtaatgcg

SEQ ID NO: 97627 - DNA, 75 bp, synthetic construct
  source 1..75: mol_type = other DNA
tgcagggagtggagcatttcggataatgccatgtataccgattttaactgtacctttgaagaggtcactcactga

SEQ ID NO: 97628 - DNA, 75 bp, synthetic construct
  source 1..75: mol_type = other DNA
ttaacgaagaccctactgcccaaaacctgaaatatcatattactggtctggaaaacattcgcgtgctggattgca

SEQ ID NO: 97629 - DNA, 75 bp, synthetic construct
  source 1..75: mol_type = other DNA
cagaggcactaaatgatatacgtgttaacgatatatccggcctggcctttaataatgaaagtctgatgattctgt

SEQ ID NO: 97630 - DNA, 75 bp, synthetic construct
  source 1..75: mol_type = other DNA
cctatcattccgctaaattggtcgaaagcttcaatgactctcatgttgaaagagatgtccaaccttatcaatgat

SEQ ID NO: 97631 - DNA, 75 bp, synthetic construct
  source 1..75: mol_type = other DNA
gtgagcgcagatggcgcaacgaagtggcaatataatcacaacggtgagcttgttattacgggtgataatgccaca

SEQ ID NO: 97632 - DNA, 75 bp, synthetic construct
  source 1..75: mol_type = other DNA
atgtcattcagccattcttccctctctgcacaagtgaaatcatatctgacgtttcttcctgaagaaattcgccag

SEQ ID NO: 97633 - DNA, 75 bp, synthetic construct
  source 1..75: mol_type = other DNA
acgtcggtgttgctgcaccgtttggcccggtcaacgtacaaaagcagcatccgcgtgaatacagcggtagccact

SEQ ID NO: 97634 - DNA, 75 bp, synthetic construct
  source 1..75: mol_type = other DNA
agcatgtgggctgtgaagctgcagcagatgcaggacggacgcctttatatcgcgggtattggtgccggtattgag

SEQ ID NO: 97635 - DNA, 75 bp, synthetic construct
  source 1..75: mol_type = other DNA
ccgcctgcccgacccggagctgcacccggacagcaccctcagcatgtggccggataaccgtatcgcccgtgacgc

SEQ ID NO: 97636 - DNA, 75 bp, synthetic construct
  source 1..75: mol_type = other DNA
ccgcacacgtaaagtcacatctgacctttcttcctgaagaaattcgccagaaaatccttgaacatcttcgcagcg

SEQ ID NO: 97637 - DNA, 75 bp, synthetic construct
  source 1..75: mol_type = other DNA
gtgacacaggcacagcgtacccagtatgccgcagcagccactaagctaaaggctcagaagggcgggaatgctcct

SEQ ID NO: 97638 - DNA, 75 bp, synthetic construct
  source 1..75: mol_type = other DNA
tcagacaggcgctcgttggactatagatattcgtaataaccaaaagcttactgaactggggaataaatattcacg

SEQ ID NO: 97639 - DNA, 75 bp, synthetic construct
  source 1..75: mol_type = other DNA
gagctaacggcggcagatttaaatcttgagcaaactgtagaattagccgcaggagcattacagaaaaaccagaac

SEQ ID NO: 97640 - DNA, 75 bp, synthetic construct
  source 1..75: mol_type = other DNA
cgaccgttgcagcaatatttgggcttcattgcccggtgctggctacggtcagtatgaacacaagatcgatagtct

SEQ ID NO: 97641 - DNA, 75 bp, synthetic construct
  source 1..75: mol_type = other DNA
ggcgctggctggatgaatttttatcgtggcatggtggttaccgtgcctttttgtggcgaccgccgaaacataacc

SEQ ID NO: 97642 - DNA, 75 bp, synthetic construct
  source 1..75: mol_type = other DNA
gtgatgccgtcaggactaaagcgcgggagttggggatcagcatgattctgaaaggagactttcatccgtcagcca

SEQ ID NO: 97643 - DNA, 75 bp, synthetic construct
  source 1..75: mol_type = other DNA
gaggcatatgaacttgccaccgcctggaataccagcggccagctccggagcaggcacctgaaccttccgcagctt

SEQ ID NO: 97644 - DNA, 75 bp, synthetic construct
  source 1..75: mol_type = other DNA
cccgtctgctgacggccataaaccgcgaccagttacagcaggatttcgcagcatggacaaaagaatccgccgaat

SEQ ID NO: 97645 - DNA, 75 bp, synthetic construct
  source 1..75: mol_type = other DNA
gggtgaacgtaaacgtgcggctgataacaaatctctggggcagttcaacctggatggtatcaacccggcaccgcg

SEQ ID NO: 97646 - DNA, 75 bp, synthetic construct
  source 1..75: mol_type = other DNA
gtatctggctcgtggccgggataaccgatatgcgtaagtctttcaacgggctgggtgaacaggtacagcatgtgt

SEQ ID NO: 97647 - DNA, 75 bp, synthetic construct
  source 1..75: mol_type = other DNA
agactttcaacggcgggatcaccggggcactgacagggaacgccgacaccgcgacgaaattgaaaacagcacgca

SEQ ID NO: 97648 - DNA, 75 bp, synthetic construct
  source 1..75: mol_type = other DNA
caaccaaaaagtgaggagcagcaacaccatgacgcatctcaacaagtttgccccttatctcgcgaagctcttctg

SEQ ID NO: 97649 - DNA, 75 bp, synthetic construct
  source 1..75: mol_type = other DNA
cccgcactgctttaatgctgggcatcagtcgccgtgcattgatgtataaactccaggaatacggtatcgatccgg

SEQ ID NO: 97650 - DNA, 75 bp, synthetic construct
  source 1..75: mol_type = other DNA
cacaacagccacaacagccacaacagccacaacagccacaacagccacaacagccacaacagccacaacagccac

SEQ ID NO: 97651 - DNA, 75 bp, synthetic construct
  source 1..75: mol_type = other DNA
ttaccacttcctgcatctggcggaaagaacgtgaaatgggctgcgatcaatgattatggcggcagttccgggaca

SEQ ID NO: 97652 - DNA, 75 bp, synthetic construct
  source 1..75: mol_type = other DNA
gatcccagatattggcgcatgggcatcaaacaatgcgggtaaaaaagaccgcaatacagactatacagagaacag

SEQ ID NO: 97653 - DNA, 75 bp, synthetic construct
  source 1..75: mol_type = other DNA
cgtggtgtcacagggcgcacagtgattgcagaagtcatctctcctgacgccagattttttcagttataccgggaa

SEQ ID NO: 97654 - DNA, 75 bp, synthetic construct
  source 1..75: mol_type = other DNA
tttattattatgtctaataattattatatcgcaaggtgaaactatggaatggtcaacagcgctgggttcattacg

SEQ ID NO: 97655 - DNA, 75 bp, synthetic construct
  source 1..75: mol_type = other DNA
agacgttatattgaagaagtgattgctaaagtgattgagcgaacaaaacaagagtttgctgaatcaatgaaagat

SEQ ID NO: 97656 - DNA, 75 bp, synthetic construct
  source 1..75: mol_type = other DNA
cgagcttgacttcgccagtggagaattacgtcgcaatgtcgtctggtcttcagccagcggcgcacgttatgccat

SEQ ID NO: 97657 - DNA, 75 bp, synthetic construct
  source 1..75: mol_type = other DNA
cgtcagcagtcgctctcactggcgacggtgacagcccgggtggcaaccctgttcccttcatcatttccggtactc

SEQ ID NO: 97658 - DNA, 75 bp, synthetic construct
  source 1..75: mol_type = other DNA
aagtggagagggcgaccggcgttgatttgccgagttatggcggtgtcgtagcgaactcttatctgccatcaaact

SEQ ID NO: 97659 - DNA, 75 bp, synthetic construct
  source 1..75: mol_type = other DNA
gggcaaccgaatctatcggtggtatgggcctcgacggtcgtaccctggttaccaaaaacagcttccgtttcctga

SEQ ID NO: 97660 - DNA, 75 bp, synthetic construct
  source 1..75: mol_type = other DNA
caaaagctattgccctaatcgaagagctccagaagaccatcgactatatggacgcaggaatcgatcgacaatcag

SEQ ID NO: 97661 - DNA, 75 bp, synthetic construct
  source 1..75: mol_type = other DNA
caacagtcgaacagcgcgccacctctgcaaaggtacatcctcagcaagaccctaacaacccgtttgcacaactgg

SEQ ID NO: 97662 - DNA, 75 bp, synthetic construct
  source 1..75: mol_type = other DNA
aataatccatttgctcagattgagcagcaggcagccagtcagcagccacctcaacccgtaagttctgtcgcaccg

SEQ ID NO: 97663 - DNA, 75 bp, synthetic construct
  source 1..75: mol_type = other DNA
atgaggtttttattgggcgtgctgatgctgatgatctccggctcagcgctggcgaccatcgacgtgttgcagttt

SEQ ID NO: 97664 - DNA, 75 bp, synthetic construct
  source 1..75: mol_type = other DNA
atgaaatcattaaccacggaaacagcgctggatattctgattgcgtggctgcaggacaatatcgactgtgaatcc

SEQ ID NO: 97665 - DNA, 75 bp, synthetic construct
  source 1..75: mol_type = other DNA
atgcaggagtttacattaaacgaaattgcggaaagagcgcagcaggttgaaatcatttgccgccttcttgaggta

SEQ ID NO: 97666 - DNA, 75 bp, synthetic construct
  source 1..75: mol_type = other DNA
catgtggattcatatgcgtgaccagaatgttatttttggacgtaatgcggtatccactgatggtgctcaggcttt

SEQ ID NO: 97667 - DNA, 75 bp, synthetic construct
  source 1..75: mol_type = other DNA
tgcgctaggttatgacgcgatagctgaaggtgagtacagctcagctataggctcacgaactcatgcgattggtgg

SEQ ID NO: 97668 - DNA, 75 bp, synthetic construct
  source 1..75: mol_type = other DNA
cgtcgctgggcggaatcctgccttgaatttcaggtagcgcaggaaattggacgccactggcagcgtcgggcgctc

SEQ ID NO: 97669 - DNA, 75 bp, synthetic construct
  source 1..75: mol_type = other DNA
ggcagggagcggggacggcgctggagaaccattttgcggtgatcccggcagacagaacatggcgaccaggggtat

SEQ ID NO: 97670 - DNA, 75 bp, synthetic construct
  source 1..75: mol_type = other DNA
cagaacaaccagaccgggacattgttaccagcaagtaataagcacgcatggatgtgcgccctgaatgattttttt

SEQ ID NO: 97671 - DNA, 75 bp, synthetic construct
  source 1..75: mol_type = other DNA
atgtacgcaaaatcctttctcgcacttgatggcaacgggcgtctgactggtgcccgtaccgcacagactgcacct

SEQ ID NO: 97672 - DNA, 75 bp, synthetic construct
  source 1..75: mol_type = other DNA
ttatcaggggtggtctgaaggtatcagtgttgttcctgcctcaatcattagtaaaataattgaagtggatataat

SEQ ID NO: 97673 - DNA, 75 bp, synthetic construct
  source 1..75: mol_type = other DNA
caggcacaggcacaggcggcgagcacgttagtgaatacgctgatgggccagaagatccagatggaagcggacctg

SEQ ID NO: 97674 - DNA, 75 bp, synthetic construct
  source 1..75: mol_type = other DNA
tgccattggggtacaagctgaagcaaatgtagggagtacagcattaggttttaaaagcttagctacgggtgaaaa

SEQ ID NO: 97675 - DNA, 75 bp, synthetic construct
  source 1..75: mol_type = other DNA
gttcaatcctggttagatacaggagatgcgacggttacaccagattcagtacgagtcccctttattattactccg

SEQ ID NO: 97676 - DNA, 75 bp, synthetic construct
  source 1..75: mol_type = other DNA
tcagcaacggcggcaccggcacgcagattaatggcgatgaagccactgtaaacaataacggtaacaccaccgttg

SEQ ID NO: 97677 - DNA, 75 bp, synthetic construct
  source 1..75: mol_type = other DNA
tggcttatgcgctacctgagaagcagtacctgcagcgcgtgacgctgcaggagggcgcgacggttgaagaagcta

SEQ ID NO: 97678 - DNA, 75 bp, synthetic construct
  source 1..75: mol_type = other DNA
tcaattctcgtactgatggtggttcgtcttttgttaaggctgaaatacccaaccccgccgattatacctaagcca

SEQ ID NO: 97679 - DNA, 75 bp, synthetic construct
  source 1..75: mol_type = other DNA
tgaagctaaagatgagcttcgtcttttaggtggatggagtcataatagccgcatgccagaattttatgcccggcg

SEQ ID NO: 97680 - DNA, 75 bp, synthetic construct
  source 1..75: mol_type = other DNA
tacaggaaaccggctttgacggccgcacacagcgttatcaccacgacctgaccggcaaacttatccgcagcgagg

SEQ ID NO: 97681 - DNA, 75 bp, synthetic construct
  source 1..75: mol_type = other DNA
aagcatgtgacggtggatgaggtgcgccctgttctgcaggcgatgatgaatgacgccgtgggggccattccggta

SEQ ID NO: 97682 - DNA, 75 bp, synthetic construct
  source 1..75: mol_type = other DNA
gcgtaccccacaatgcgctggacgatgcccgtcaccaggcaaaacaagtttcagcaatctggcaaaaactgttcc

SEQ ID NO: 97683 - DNA, 75 bp, synthetic construct
  source 1..75: mol_type = other DNA
tcatgcgacaagcactggtctggctggaagggcattcatgcagcaacgacagacagggtaaagccgagaatcaac

SEQ ID NO: 97684 - DNA, 75 bp, synthetic construct
  source 1..75: mol_type = other DNA
ctggtaaatgagaaacgccgggctgctctgaatatgctctatatcgacccgcagaacagcagccagattattgct

SEQ ID NO: 97685 - DNA, 75 bp, synthetic construct
  source 1..75: mol_type = other DNA
agctcagtttgaagaattatctcaacgtgatatgaagaagtacctgggagagatgaagcatctggcggaccgggg

SEQ ID NO: 97686 - DNA, 75 bp, synthetic construct
  source 1..75: mol_type = other DNA
atcccggtgcagaaggctttctgaatcgcctgggcgtacagacccgtgatgccagcggtaacatgcgtgacatgg

SEQ ID NO: 97687 - DNA, 75 bp, synthetic construct
  source 1..75: mol_type = other DNA
gcgtatggctgcgtgccgacgatcccctgatcgacatgaactacatcaccagtttcaccggcatgaccgataaat

SEQ ID NO: 97688 - DNA, 75 bp, synthetic construct
  source 1..75: mol_type = other DNA
gtgacgctgccatcattgccgaagctgcccgtaccctgcctcacgcgctacgcacgctgaaactggctgacgagt

SEQ ID NO: 97689 - DNA, 75 bp, synthetic construct
  source 1..75: mol_type = other DNA
taacgggaaatacactgcgcaggatgccaccacggcgcgaaaaggccttgtccagctcagtagcgccaccaacag

SEQ ID NO: 97690 - DNA, 75 bp, synthetic construct
  source 1..75: mol_type = other DNA
atgaaccacgatatcccgctaaaatattttgatattgccgatgagtacgcgaccgaatgcgcagaggctgaacgc

SEQ ID NO: 97691 - DNA, 75 bp, synthetic construct
  source 1..75: mol_type = other DNA
cgtacaaaccgcagttgcaggaaggcagtggacgcacccagactatccgcatgattctggttgtcacgaacaccg

SEQ ID NO: 97692 - DNA, 75 bp, synthetic construct
  source 1..75: mol_type = other DNA
atgagttcacgcattgatctcgctgatgcgctcaggaaagaatcatcgctcagtgcattcacatttgatggtcct

SEQ ID NO: 97693 - DNA, 75 bp, synthetic construct
  source 1..75: mol_type = other DNA
tcaaactatcgcgggctttcacaaaaagattatcgatcccaactcgccatttcttgaatgtgaactccctattga

SEQ ID NO: 97694 - DNA, 75 bp, synthetic construct
  source 1..75: mol_type = other DNA
gtggcggtggcgcatacgatgccggttatagcggaaccagtatgacaggcgggaaaggtgccgctgggatttgta

SEQ ID NO: 97695 - DNA, 75 bp, synthetic construct
  source 1..75: mol_type = other DNA
aatggaagaagtgaacaaaaaaccgtggttaggagaaaaggatgatcggcgacacctatcagaattaattgagct

SEQ ID NO: 97696 - DNA, 75 bp, synthetic construct
  source 1..75: mol_type = other DNA
aacccagcaggagattgtgcgcctgacccgcgatgtcgagtctggtcagcaggtctatatgcaactgctgaataa

SEQ ID NO: 97697 - DNA, 75 bp, synthetic construct
  source 1..75: mol_type = other DNA
tgactgaagtaatccccggtcttcatgacgtgaccggggctattgaattaccggaggacaactggttttttacta

SEQ ID NO: 97698 - DNA, 75 bp, synthetic construct
  source 1..75: mol_type = other DNA
atatggcagccttgtgcctgatttgattgacgaacccatgaataacaccacgcgtctgcaatgcatgagtgctgc

SEQ ID NO: 97699 - DNA, 75 bp, synthetic construct
  source 1..75: mol_type = other DNA
aataactggacaccaacaaccagtatcagcgatctgctggttgtggtgatgaaaaaatccacagcaggtatcagt

SEQ ID NO: 97700 - DNA, 75 bp, synthetic construct
  source 1..75: mol_type = other DNA
aaaccgatgatgacgggactggcgcatttgggacatttggtgatttatctcctgtttattgcgctgccagtgatt

SEQ ID NO: 97701 - DNA, 75 bp, synthetic construct
  source 1..75: mol_type = other DNA
caatggcacctgaagaagcgcctgcaatgcttcggtttcgtcgcagcggtagcaaactcacgcttattaatccaa

SEQ ID NO: 97702 - DNA, 75 bp, synthetic construct
  source 1..75: mol_type = other DNA
tcacggagcagtatctggacaacccgagcgatggcattctggataagacccgtaaaatccatatcgactatattt

SEQ ID NO: 97703 - DNA, 75 bp, synthetic construct
  source 1..75: mol_type = other DNA
ggcagtgagcagcgtggatgctgcaaaagcctattacgcggcgtttaaacggttacaagaggaagccgctaataa

SEQ ID NO: 97704 - DNA, 75 bp, synthetic construct
  source 1..75: mol_type = other DNA
caaatcttatcgtgtgccgtgggcctacgatgatgagtcctgtgatgtggtgcgcttcttcacgcaactgaaatg

SEQ ID NO: 97705 - DNA, 75 bp, synthetic construct
  source 1..75: mol_type = other DNA
tcggagcttattacggacttttgagtcgaaagggatgcttaatatttgctcgatggggaagaaatttagcctgtt

SEQ ID NO: 97706 - DNA, 75 bp, synthetic construct
  source 1..75: mol_type = other DNA
acacgccggtagaggcaaaggacaatcttaagtccacgcagatgatgagcgtgattgatgcgattggtgagggac

SEQ ID NO: 97707 - DNA, 75 bp, synthetic construct
  source 1..75: mol_type = other DNA
gatgtccgataccgtcgactacggcgagtggtgcaatggtaaacgcctgaccgggatcagttttgctggcacgct

SEQ ID NO: 97708 - DNA, 75 bp, synthetic construct
  source 1..75: mol_type = other DNA
tgatccggaaatcgtggatattgcctgcggtcgctcctctgccccgataccgcagcgtgtaacagaagaagaaaa

SEQ ID NO: 97709 - DNA, 75 bp, synthetic construct
  source 1..75: mol_type = other DNA
gcgccgcagcctggcggatgcgcttcagcagtccggcggcgaagacggtggcagtgtggtgttcccgccggtgct

SEQ ID NO: 97710 - DNA, 75 bp, synthetic construct
  source 1..75: mol_type = other DNA
gagcactccgtgatcctgatccgtggtggtcgtgttaaagacctcccgggtgttcgttaccacaccgtacgtggt

SEQ ID NO: 97711 - DNA, 75 bp, synthetic construct
  source 1..75: mol_type = other DNA
accaccatattttagtaaaaatgatggcgctaatatctacgatacctgcagattaattgtgcgcaaaaatggcaa

SEQ ID NO: 97712 - DNA, 75 bp, synthetic construct
  source 1..75: mol_type = other DNA
tcgatggcaatggacatctgaccggtgcccgtactgcacagactgcgccatacgatcgttatacctgccatcttt

SEQ ID NO: 97713 - DNA, 75 bp, synthetic construct
  source 1..75: mol_type = other DNA
gattggcattatgcgaattatcgaagcgctgaaaaatatcgaatctttatttactggcgaagaacgccgtaaata

SEQ ID NO: 97714 - DNA, 75 bp, synthetic construct
  source 1..75: mol_type = other DNA
gtgctaatgcaggcggcgggaaccttaccgatcgcggcgaaggtttcgttcatgatcaggcgtcgctggcccgcg

SEQ ID NO: 97715 - DNA, 75 bp, synthetic construct
  source 1..75: mol_type = other DNA
ttgtaaactctgttactggaaaggaaattcctgggtttgtttatgattattggggaggggttgcttcagagtttt

SEQ ID NO: 97716 - DNA, 75 bp, synthetic construct
  source 1..75: mol_type = other DNA
gtacaagatacacgggttatggttttgaagttcgcaaaaacggtgtattaatcgcatccagagaaactaaagggg

SEQ ID NO: 97717 - DNA, 75 bp, synthetic construct
  source 1..75: mol_type = other DNA
actgactcctgtaatgaggttgtgcgtcgtggatatgcttcgggtgtaatggtttcaggaaaagttttttatgat

SEQ ID NO: 97718 - DNA, 75 bp, synthetic construct
  source 1..75: mol_type = other DNA
atccctcttaatacatgcaaaaagatgttggctgacggtcgaattattatccgccccaaacgcgccaaaatggaa

SEQ ID NO: 97719 - DNA, 75 bp, synthetic construct
  source 1..75: mol_type = other DNA
atgaacaaaatatttaaagttatctggaaccctgcgacagggaattatactgttaccagcgaaacggcaaaaagc

SEQ ID NO: 97720 - DNA, 75 bp, synthetic construct
  source 1..75: mol_type = other DNA
gagacacactgtattacaatcctgtgactaatgtctttgcttcaaaagatataaatggtgtaccgcgtacaatgt

SEQ ID NO: 97721 - DNA, 75 bp, synthetic construct
  source 1..75: mol_type = other DNA
gctggcgcgtattgatagcgtcgagcgtgagccgtttatctggtcacaactgcccactgagttcactatccgcca

SEQ ID NO: 97722 - DNA, 75 bp, synthetic construct
  source 1..75: mol_type = other DNA
tttgaacacactgacgaagggctgacggcgcacggtcagcagtgtccttatgtcagaccagaacgcagggaggta

SEQ ID NO: 97723 - DNA, 75 bp, synthetic construct
  source 1..75: mol_type = other DNA
cctgtacgctccagtttgtgacgcattcggcacaaatagcgacagatttaagttgcagagtgagcaagaaagtgc

SEQ ID NO: 97724 - DNA, 75 bp, synthetic construct
  source 1..75: mol_type = other DNA
ttcacagtttcttgcatattcaggtaatgcagatgaagtgccatcgaatggtgcaggttttcaggctgcgtataa

SEQ ID NO: 97725 - DNA, 75 bp, synthetic construct
  source 1..75: mol_type = other DNA
acatgcgaaaaacggattgctaattggttagctgttgctgagtatgccctatatattcacatgcgtgaatcattt

SEQ ID NO: 97726 - DNA, 75 bp, synthetic construct
  source 1..75: mol_type = other DNA
atgccggcacgcgaccgggcgcaccgcagatggaaacggccgacgcgcagcttcgcttcctctgcgaggcgggtt

SEQ ID NO: 97727 - DNA, 75 bp, synthetic construct
  source 1..75: mol_type = other DNA
actgaatatggggcgaattgtcgttgacattgatggtgttaatctcgctgaactgattaacatggtctgcgataa

SEQ ID NO: 97728 - DNA, 75 bp, synthetic construct
  source 1..75: mol_type = other DNA
gcaagtgacctggtacggctgggacggcgaccggctgaccacgatacagaacgacaggagccgcatccagacgat

SEQ ID NO: 97729 - DNA, 75 bp, synthetic construct
  source 1..75: mol_type = other DNA
cagaatgaggatgtgacagagagaatgacagagtttagtcgttcttatatggacaaattaaaggatgtatcgggg

SEQ ID NO: 97730 - DNA, 75 bp, synthetic construct
  source 1..75: mol_type = other DNA
acagcaaactgacaagtagtgatactcgtcgccgcatttgggcaattgttggggcctcttcaggtaatctggtcg

SEQ ID NO: 97731 - DNA, 75 bp, synthetic construct
  source 1..75: mol_type = other DNA
cagttgattaaacgtctgcagcaattcgtaccggatgccttacccgtggtgcgtaaagccagctggcactgcaga

SEQ ID NO: 97732 - DNA, 75 bp, synthetic construct
  source 1..75: mol_type = other DNA
aaaaggcaatggcaagagacctaaataaaaagcatcctgaatggtgtttgcgaacctgtgaaagccggattgatg

SEQ ID NO: 97733 - DNA, 75 bp, synthetic construct
  source 1..75: mol_type = other DNA
ttgaattgttcattaaaaatccgcttggaaacggacttacccgtggcgaacaaatggaactggcacgaattgcac

SEQ ID NO: 97734 - DNA, 75 bp, synthetic construct
  source 1..75: mol_type = other DNA
ccggtaaggctgagaccgccacggattctgctccgctcgaaatgatggaaaccaccatccaactgaaacctgagg

SEQ ID NO: 97735 - DNA, 75 bp, synthetic construct
  source 1..75: mol_type = other DNA
cggcaatcccccggcattctccctgacgccggacggcaggctgacggcccgtaatgccgatatcagcgggaatat

SEQ ID NO: 97736 - DNA, 75 bp, synthetic construct
  source 1..75: mol_type = other DNA
ctgccggtgatgctctaccgcggtgtgttcagagccggtgaaacctaccaccccggcgatacggtgacgtggggg

SEQ ID NO: 97737 - DNA, 75 bp, synthetic construct
  source 1..75: mol_type = other DNA
atggcaattaagcattttcccgtcgttcgctttacctccagaggacgtgaatacgaagtcgacgaacgcctgatt

SEQ ID NO: 97738 - DNA, 75 bp, synthetic construct
  source 1..75: mol_type = other DNA
acgccagccataaagattggctgcatgatgtttatcgctcacctgtatgaaaatcgccagattgtcgcggataac

SEQ ID NO: 97739 - DNA, 75 bp, synthetic construct
  source 1..75: mol_type = other DNA
gcacgggatctgttcccgactgggggcaccagaaagaaaggccagtatcattgttgaccagcagtcacagttcaa

SEQ ID NO: 97740 - DNA, 75 bp, synthetic construct
  source 1..75: mol_type = other DNA
gataagagtaaaattcggatccatgacccggttctgttttacctgaaatcctatacagacgattttgataccgca

SEQ ID NO: 97741 - DNA, 75 bp, synthetic construct
  source 1..75: mol_type = other DNA
gcgggaggtccagatttccaaaaacgccagcagatatgagccggtatattctgatgttggcggaagtgcgtcagg

SEQ ID NO: 97742 - DNA, 75 bp, synthetic construct
  source 1..75: mol_type = other DNA
ctatgatgccaccaaaaccttcggcaatatcgtgacgttcagggacctggagcgtccgaccattgatgccatcac

SEQ ID NO: 97743 - DNA, 75 bp, synthetic construct
  source 1..75: mol_type = other DNA
gaagaggctgcaaggcgctatatccgcacatcactaaaacgggaatatgctaccgaaaatgggacggagttaaac

SEQ ID NO: 97744 - DNA, 75 bp, synthetic construct
  source 1..75: mol_type = other DNA
ttctctcctcacgccagattctggtggcctttagcggcggccttgattctactgtcttactgcatcaactggtgc

SEQ ID NO: 97745 - DNA, 75 bp, synthetic construct
  source 1..75: mol_type = other DNA
ccaagagtttcgtagcgcactgacagtagcagatataatgatcaccctgactaaaccgtcttctgatttcgagag

SEQ ID NO: 97746 - DNA, 75 bp, synthetic construct
  source 1..75: mol_type = other DNA
agaattaccaaagctgatgcgttctttgttcatgtcaaatctgtctgttccgactcgctgtctcattgaatggca

SEQ ID NO: 97747 - DNA, 75 bp, synthetic construct
  source 1..75: mol_type = other DNA
gccgcttaactgcgggtatctgcctgataactcaacttgcgttccctatggctgcggcagcacaaggtgtggtaa

SEQ ID NO: 97748 - DNA, 75 bp, synthetic construct
  source 1..75: mol_type = other DNA
gctgtttggtgacaaaaacaccaaaaatgtggtgttagaaaagagttatgcagagtatatggaaggctttactga

SEQ ID NO: 97749 - DNA, 75 bp, synthetic construct
  source 1..75: mol_type = other DNA
gcaccgcagcgggcaaaagaggctcgtcctttccgcctcgccgttattcagctaggcacttacgacggtacgatt

SEQ ID NO: 97750 - DNA, 75 bp, synthetic construct
  source 1..75: mol_type = other DNA
gaactgataacggatgcgctgtcttgggcgatgatgaattttgataaattggggtacaattgcaaaactaacaaa

SEQ ID NO: 97751 - DNA, 75 bp, synthetic construct
  source 1..75: mol_type = other DNA
ctccagaagcaatgcaatcatggctgcaaaacaacgccaatgagctggcgcgcgtcggtgttgaccctaataacg

SEQ ID NO: 97752 - DNA, 75 bp, synthetic construct
  source 1..75: mol_type = other DNA
atgtcaggtataaccatcaatatcaatgtgaatgccccctatgtatccctgcagaaatatgcagagataacaggt

SEQ ID NO: 97753 - DNA, 75 bp, synthetic construct
  source 1..75: mol_type = other DNA
agttttgatattgacgataccagacatcatcgtacatcatcttcgcttagtcccgcatcaagaagtggccttcat

SEQ ID NO: 97754 - DNA, 75 bp, synthetic construct
  source 1..75: mol_type = other DNA
aactccaggcattacacattgcacgggctgaggaactaccagctgttacagccctggctgtttcccacaaaacca

SEQ ID NO: 97755 - DNA, 75 bp, synthetic construct
  source 1..75: mol_type = other DNA
gtgattacgatccggaagtactgaagcaggcggttctggaggcggtgaatgcccttccggctccgcaggacgggc

SEQ ID NO: 97756 - DNA, 75 bp, synthetic construct
  source 1..75: mol_type = other DNA
aagcagctgatcaccgatgccctgaactgggcgtcagccaattttgaacagttgggctataactgtaaaaccaac

SEQ ID NO: 97757 - DNA, 75 bp, synthetic construct
  source 1..75: mol_type = other DNA
gccagactggccgaaacctttttgacaaaacccagccagtcctctcctacggagtgctgtcgtctgatgctaatc

SEQ ID NO: 97758 - DNA, 75 bp, synthetic construct
  source 1..75: mol_type = other DNA
aacttgcttcaaacgcatggacggcaaggctggaggcgcatgatgagcgtgcgtcggaacttttttgtaccgtca

SEQ ID NO: 97759 - DNA, 75 bp, synthetic construct
  source 1..75: mol_type = other DNA
atgaatgaacgtgaactgtccattattcgtgccctgggagaagaattcgccacggtgctggcggatttacagcgc

SEQ ID NO: 97760 - DNA, 75 bp, synthetic construct
  source 1..75: mol_type = other DNA
ggcgtgacaggggaaaatggtgaattttcttttagctggggcgaaaccatctcctttggtatcgatacctttgaa

SEQ ID NO: 97761 - DNA, 75 bp, synthetic construct
  source 1..75: mol_type = other DNA
ctgtgatggaaaaaacaaaagacgctgtagttcttccgatagatattggctggaatgacgtgggttcttggtcat

SEQ ID NO: 97762 - DNA, 75 bp, synthetic construct
  source 1..75: mol_type = other DNA
cagcaatcagccgctggcgcacacggttgtgctgctcaatagcggtggtgacgctacccagacggccgctatttt

SEQ ID NO: 97763 - DNA, 75 bp, synthetic construct
  source 1..75: mol_type = other DNA
aacgggcagaggatattgcatccgccgtggcgcttgaggatgcgagcacgacgaaaaaggggatagtacagctca

SEQ ID NO: 97764 - DNA, 75 bp, synthetic construct
  source 1..75: mol_type = other DNA
gctggtaaaacgcgcccgtgagcagggttttgaggtgctggttgagcactgcgcctacacctggtttaaccgctt

SEQ ID NO: 97765 - DNA, 75 bp, synthetic construct
  source 1..75: mol_type = other DNA
tcttacttgctgatcctgaaatgacagttggtgcagttgctaagcgcttcaacgtttctcgcatgactatttatc

SEQ ID NO: 97766 - DNA, 75 bp, synthetic construct
  source 1..75: mol_type = other DNA
cgcacttgagaaaggaacaacgtcggtcgtggtcatgagtgataacggtaattttgtcgctctggcgacagtaac

SEQ ID NO: 97767 - DNA, 75 bp, synthetic construct
  source 1..75: mol_type = other DNA
tgccatagctttagctgcttttatcgctcagaagaataatcctaatgacgaccctttattattagtacttgcggc

SEQ ID NO: 97768 - DNA, 75 bp, synthetic construct
  source 1..75: mol_type = other DNA
agccacgcaagcaccttaaaatcaccatcatacactaaatcagtaagttggcagcattaccggctgccggagctg

SEQ ID NO: 97769 - DNA, 75 bp, synthetic construct
  source 1..75: mol_type = other DNA
tggcgtcgctaacacgcctgtatggcagcgaattttctgggcctcgctcatagggattgtggcaatcgcactgct

SEQ ID NO: 97770 - DNA, 75 bp, synthetic construct
  source 1..75: mol_type = other DNA
aaataaacctgagcctacagcagagaaaatggctcaggtacgtgagctgcgtgaattagaagaggccagacgtat

SEQ ID NO: 97771 - DNA, 75 bp, synthetic construct
  source 1..75: mol_type = other DNA
taccagtccacccacgttagtgtggccagttccacttctgcacggtttttccagctcttacggtgtattacctcc

SEQ ID NO: 97772 - DNA, 75 bp, synthetic construct
  source 1..75: mol_type = other DNA
atgcggtgatggagcgcacggcggatgcggtggtggtgccgatggatgcaggctggagcgatgttggctcctggt

SEQ ID NO: 97773 - DNA, 75 bp, synthetic construct
  source 1..75: mol_type = other DNA
aaatggctttcccatggaaacattgatcctgaactggcacacttcatcatttatcttcttgattacctaaccacc

SEQ ID NO: 97774 - DNA, 75 bp, synthetic construct
  source 1..75: mol_type = other DNA
ggccatcctccggctgaaaacagcacggagaatgagcctcagcccgtagagcaaccagagccggttcagcccgga

SEQ ID NO: 97775 - DNA, 75 bp, synthetic construct
  source 1..75: mol_type = other DNA
atgcagcagctttcctttctgcccggcgcgatgacgcccggcgagcgcagtcttattctgcgggccctgaaaacc

SEQ ID NO: 97776 - DNA, 75 bp, synthetic construct
  source 1..75: mol_type = other DNA
cagtaatgataaaggcgattggtcagaagctggcggcggcaggcgtacaggatgcaaatttttatcctgagggta

SEQ ID NO: 97777 - DNA, 75 bp, synthetic construct
  source 1..75: mol_type = other DNA
aaaagcctgggaggttgtgcacgatgagcaggtgaaaaatctgtatctggtaaaccgccccatctttccggctgc

SEQ ID NO: 97778 - DNA, 75 bp, synthetic construct
  source 1..75: mol_type = other DNA
taaatgtattacccgaagagatgagggttaatcctggtgatatggttattgctatgtctggagcaacaacaggga

SEQ ID NO: 97779 - DNA, 75 bp, synthetic construct
  source 1..75: mol_type = other DNA
aagccatattccgtgtccgtcagagtggcaatgaaccggctcagaccgacagggaaacaccaccggaaaaacagg

SEQ ID NO: 97780 - DNA, 75 bp, synthetic construct
  source 1..75: mol_type = other DNA
agagcaagtcggaatcaaattgcgtttcgaaggtacgggcgttgaagaaaagggcattgtggtttctattactgg

SEQ ID NO: 97781 - DNA, 75 bp, synthetic construct
  source 1..75: mol_type = other DNA
tcctacagcaacatgaaagagctgcgggtccaaagcaaaggagatcctatcagggcattctttgcgttcgatcca

SEQ ID NO: 97782 - DNA, 75 bp, synthetic construct
  source 1..75: mol_type = other DNA
tgattgctgatgcccgcccggtcagccgccacatgacagggctgaatatcattcaggagattccgggggatattt

SEQ ID NO: 97783 - DNA, 75 bp, synthetic construct
  source 1..75: mol_type = other DNA
cgatctggtgtatccgctgtatgccctgaacaccgcccacgccattgatatccgtcgcctgccgcgtatctgttt

SEQ ID NO: 97784 - DNA, 75 bp, synthetic construct
  source 1..75: mol_type = other DNA
aatattataatccagcttctgaaagtggtattcaatggaatgacccaacattaaaaatcaactggccaatttcaa

SEQ ID NO: 97785 - DNA, 75 bp, synthetic construct
  source 1..75: mol_type = other DNA
ctggcaaagctgcgaaaactgaccgacgttaagcgaacaggtgtacttaaggcaatatttggtgatgatgccgaa

SEQ ID NO: 97786 - DNA, 75 bp, synthetic construct
  source 1..75: mol_type = other DNA
tcagatccagcagaagatgaataaacaggccagcctgaataaacgtgttcaggcacagcttggtacgctgtccaa

SEQ ID NO: 97787 - DNA, 75 bp, synthetic construct
  source 1..75: mol_type = other DNA
ctggcagccgtggcgctggtactgggcaccgttgtactgattaagatgaagcgcacccaatacatctgggttacc

SEQ ID NO: 97788 - DNA, 75 bp, synthetic construct
  source 1..75: mol_type = other DNA
cacacaaaacggcctgtcttattgcacaacacggtaaaaattacatgcatattgcctgcttgtttctgcgtaaag

SEQ ID NO: 97789 - DNA, 75 bp, synthetic construct
  source 1..75: mol_type = other DNA
tttggctgcattaactgcaatttatttggcaaaagatagagaatctaaccctcttatattagttctggcagctga

SEQ ID NO: 97790 - DNA, 75 bp, synthetic construct
  source 1..75: mol_type = other DNA
tactgagacaaacagcgaggggcagcggttacaggcatatgtggttcgaaacgcccaaaacccggaattactaca

SEQ ID NO: 97791 - DNA, 75 bp, synthetic construct
  source 1..75: mol_type = other DNA
ccggagagataaaagaccgtcaggatgtgattcaggcactcacagatgtgggagttgaggttgtcagggtgacgc

SEQ ID NO: 97792 - DNA, 75 bp, synthetic construct
  source 1..75: mol_type = other DNA
tcattggcactgacgagctgaagcttgagctattcaaaattcacttccagtcaggtggcgctaattcagatatca

SEQ ID NO: 97793 - DNA, 75 bp, synthetic construct
  source 1..75: mol_type = other DNA
aatgagaaaaaggacgcggaaatgctcgacgaatatctgcattccgccgactggtttgatgccatgctgtttgat

SEQ ID NO: 97794 - DNA, 75 bp, synthetic construct
  source 1..75: mol_type = other DNA
aactcttcggcttagttcaggaaatcccgcagcgagaaacaacaccattctaccctcgttcgccttatgctgttg

SEQ ID NO: 97795 - DNA, 75 bp, synthetic construct
  source 1..75: mol_type = other DNA
gatggcactaaaccacttcgcccagatgttcagaaggccgtttggcacaactcgcttcgattacccgatggtgaa

SEQ ID NO: 97796 - DNA, 75 bp, synthetic construct
  source 1..75: mol_type = other DNA
atgaaggccatctggtcaccttcggtatcgtgccgaacgccccggaaaccggctacggctacatccagcgcggcg

SEQ ID NO: 97797 - DNA, 75 bp, synthetic construct
  source 1..75: mol_type = other DNA
cgatcattatggggcgcacctaccaccaggaaaaccgcacccccggcagcctgccgggaacaaagacgcagatga

SEQ ID NO: 97798 - DNA, 75 bp, synthetic construct
  source 1..75: mol_type = other DNA
gcgtggctatccggaagatatccccgatgagcaggaaaatgatttggggagtaaagatattccatcatggcgaag

SEQ ID NO: 97799 - DNA, 75 bp, synthetic construct
  source 1..75: mol_type = other DNA
ggtcgttgcctgcggcaacgctctctcgctggcgctcgagtcgaaccttggtcgaagcttctcatccttccccgc

SEQ ID NO: 97800 - DNA, 75 bp, synthetic construct
  source 1..75: mol_type = other DNA
tcacctccacccgtgcggcacgagaatggctgattctgaacatggcgggactggagcgtgaagagttccgggtgc

SEQ ID NO: 97801 - DNA, 75 bp, synthetic construct
  source 1..75: mol_type = other DNA
tcggctccgcgccacgtgcccgggccgactcccgctcagcttttgcttgagcaatacaaagcgcgtaaagcagtc

SEQ ID NO: 97802 - DNA, 75 bp, synthetic construct
  source 1..75: mol_type = other DNA
acgaataacactggtgcgcatacccatagtttaagtggcagcacgaatgcagctggtaatcacagccatagagat

SEQ ID NO: 97803 - DNA, 75 bp, synthetic construct
  source 1..75: mol_type = other DNA
cttatgctccctttcggtttttgacgctttccgcttattacagaatctgttgaatgtaccgaaggaagaacgaga

SEQ ID NO: 97804 - DNA, 75 bp, synthetic construct
  source 1..75: mol_type = other DNA
tggccgatcacgccgacgcctttgccgagctggattacaacatattccgcggcctggcgtttgcttccggcaacc

SEQ ID NO: 97805 - DNA, 75 bp, synthetic construct
  source 1..75: mol_type = other DNA
ctggttaacttctataccggagtcggaagttgccggaccttgcagatgaaggcgcattacagaaatggtggtctg

SEQ ID NO: 97806 - DNA, 75 bp, synthetic construct
  source 1..75: mol_type = other DNA
catgtaaccacttttaagcgtgtagatagtgagcaatttgttaagttgtttactgcgaatattgggttaacgttt

SEQ ID NO: 97807 - DNA, 75 bp, synthetic construct
  source 1..75: mol_type = other DNA
acccgtccggtgaagtcacccccagtaaggcagatcgccttatcacggaacgcctggtacaggcactggccctgg

SEQ ID NO: 97808 - DNA, 75 bp, synthetic construct
  source 1..75: mol_type = other DNA
tgcgcatggatttttaaccttaaaagataatactgaaatattgtacaagactacaagttattattcacctgagta

SEQ ID NO: 97809 - DNA, 75 bp, synthetic construct
  source 1..75: mol_type = other DNA
aagaaaaatcacgcttaatactaaggttatttgatgatgttaagttgctatttaatgaagtgcctgtcagcattt

SEQ ID NO: 97810 - DNA, 75 bp, synthetic construct
  source 1..75: mol_type = other DNA
gcgcgtttatcggataatgagcgaaaataacctgttgttacatgacaaaccttcacggccgcagcgggaacataa

SEQ ID NO: 97811 - DNA, 75 bp, synthetic construct
  source 1..75: mol_type = other DNA
ggcctcatcacgcgcatcaccacgccggatggcagggcatcggcgttttactataaccaccacagccagttaacg

SEQ ID NO: 97812 - DNA, 75 bp, synthetic construct
  source 1..75: mol_type = other DNA
atgagcaccgctttgcttgacgccgtggtgaagaaaaaccgcgcgcgtttaattccgtttatgttggcgctgtat

SEQ ID NO: 97813 - DNA, 75 bp, synthetic construct
  source 1..75: mol_type = other DNA
gaaggcttgtggagttagcgaaagggctgtctataagtggctcaaaaacggcttcctccctaagactgagttttt

SEQ ID NO: 97814 - DNA, 75 bp, synthetic construct
  source 1..75: mol_type = other DNA
ccgcctgttaagcccggctacggaatcttcgcaggtttcctttaataacctctctttcaccgaaacaccgccaaa

SEQ ID NO: 97815 - DNA, 75 bp, synthetic construct
  source 1..75: mol_type = other DNA
ctacaaactattatcatcctgaaagcgattgtggaatatgttggaatgatgaacgcattgcaattgattggcccc

SEQ ID NO: 97816 - DNA, 75 bp, synthetic construct
  source 1..75: mol_type = other DNA
aagaaccagcaattaccattgactgtttcttatgttgggcaaactgcagagggcgcacaaatgaagttggcccaa

SEQ ID NO: 97817 - DNA, 75 bp, synthetic construct
  source 1..75: mol_type = other DNA
ctgggcaaaaccatgacccggaacagattgatttgattgatttactggtgcagttgtggcgtggcaagatgacaa

SEQ ID NO: 97818 - DNA, 75 bp, synthetic construct
  source 1..75: mol_type = other DNA
aaagcgacaggtaaaaaacagttaattattgccggtgtggtaaccgaagtttgcgtggcattcccggcgctttca

SEQ ID NO: 97819 - DNA, 75 bp, synthetic construct
  source 1..75: mol_type = other DNA
ttctcttgctgcggttattgcaggtgtccctccggaggttgctttaggggctttggctggggcggtaatttttgt

SEQ ID NO: 97820 - DNA, 75 bp, synthetic construct
  source 1..75: mol_type = other DNA
atgcgacaccgtatgcggaaagcggaaagctggtcacctttggtatcgtgcctgatctgccggaaaccggctatg

SEQ ID NO: 97821 - DNA, 75 bp, synthetic construct
  source 1..75: mol_type = other DNA
gacatccgggtgccggaccatctgataatcggtggcagccaggttttctcctttgcggaacacggtctgctttaa

SEQ ID NO: 97822 - DNA, 75 bp, synthetic construct
  source 1..75: mol_type = other DNA
cctctcgatttaattgaagtgcgctccggcgcgtatctggaagaggacgatattgtccgtttccaggaccgctac

SEQ ID NO: 97823 - DNA, 75 bp, synthetic construct
  source 1..75: mol_type = other DNA
gcagaacagcagcggatacaactccatcaatcacagggctcatttgaagcattgattcatggttatgttaacaaa

SEQ ID NO: 97824 - DNA, 75 bp, synthetic construct
  source 1..75: mol_type = other DNA
gagagatgacacccggcgagcgcagcctcattcagcgggccctgaaagccctggaccgccatcttcatgaacccg

SEQ ID NO: 97825 - DNA, 75 bp, synthetic construct
  source 1..75: mol_type = other DNA
acaagctcaagcgggcgataattatttcagcagtgctgcatgccatcttatttgcggcgctgatctggagttcgt

SEQ ID NO: 97826 - DNA, 75 bp, synthetic construct
  source 1..75: mol_type = other DNA
acgaaccggtttcgttatatctgcccggtggtatccgactgtgctgccgggcagcgcaactggctgatgtattca

SEQ ID NO: 97827 - DNA, 75 bp, synthetic construct
  source 1..75: mol_type = other DNA
tgattcatatggtcattgggttggtataatcctttcctcggaaaataaacggcaattgtggataccagaaggatt

SEQ ID NO: 97828 - DNA, 75 bp, synthetic construct
  source 1..75: mol_type = other DNA
cagacgtattaattttcgaaccgaaaatttttggtgacgagcgcggtttctttttcgagagctttaaccagaagg

SEQ ID NO: 97829 - DNA, 75 bp, synthetic construct
  source 1..75: mol_type = other DNA
tttttagcgaaagagaaatggacctctaccgcgaccatcactcgcccggatgcggcgcagattgcgacctaccat

SEQ ID NO: 97830 - DNA, 75 bp, synthetic construct
  source 1..75: mol_type = other DNA
ggttttttgaacataaattggcctcagttagatgaaattaaactttcattgaaagataagcagtggggtgggata

SEQ ID NO: 97831 - DNA, 75 bp, synthetic construct
  source 1..75: mol_type = other DNA
ccaggtgattaaccgctttaactctgcatttatcgcattgacggaagcgttggataatcagcaagagcctgagaa

SEQ ID NO: 97832 - DNA, 75 bp, synthetic construct
  source 1..75: mol_type = other DNA
ctatcgccagtacagcccttaatgaacaaggctttccgcctgatgccattgaggcagcacttgcccatgtagaca

SEQ ID NO: 97833 - DNA, 75 bp, synthetic construct
  source 1..75: mol_type = other DNA
tgtcatgctggaaactatggctttttccgggcgcccgtggcccctgatagaaggcacgggcaggatctacggcat

SEQ ID NO: 97834 - DNA, 75 bp, synthetic construct
  source 1..75: mol_type = other DNA
gatctggctgctcgccggggtggttctcgccggtgcggtgcaggatttcatggtgctgtttgtttctacgcgccg

SEQ ID NO: 97835 - DNA, 75 bp, synthetic construct
  source 1..75: mol_type = other DNA
tggaagaagatggcagcatcaacgacgactaccgcattgactacctgcgcgcccatatcgaagagatgaaaaaag

SEQ ID NO: 97836 - DNA, 75 bp, synthetic construct
  source 1..75: mol_type = other DNA
cggaaggcaaccagatggcacgccgtgataacgccgatccgtctggcctcggtaacacgctgggctgggcatggg

SEQ ID NO: 97837 - DNA, 75 bp, synthetic construct
  source 1..75: mol_type = other DNA
ggcgtcagaacataatctgtcgcgagtgccggaagagtgaagttatgcagcgtgtactggcgttttatcggggaa

SEQ ID NO: 97838 - DNA, 75 bp, synthetic construct
  source 1..75: mol_type = other DNA
acggagtacatctcacaggaggaggaggcgtatgcggtggagcgtctggcgaaaatccgccgacagaaccggata

SEQ ID NO: 97839 - DNA, 75 bp, synthetic construct
  source 1..75: mol_type = other DNA
tgctctggcaggtgatcaaagggcgggtactgtttccggcgctgaccgcgctcagcgtcacgggcggcattttcc

SEQ ID NO: 97840 - DNA, 75 bp, synthetic construct
  source 1..75: mol_type = other DNA
atgcacactgctttttcttccccgtcttctgcccctgccgcgccgctgatgccggtttctgataccgttcacgag

SEQ ID NO: 97841 - DNA, 75 bp, synthetic construct
  source 1..75: mol_type = other DNA
tttatctggcctgcggtgcgtgacggtaagatatccattacccgctcgcagctggcaatgctcctcgataagctg

SEQ ID NO: 97842 - DNA, 75 bp, synthetic construct
  source 1..75: mol_type = other DNA
tgacactgaagcgaaagacagagggaacagcgcctgtccgcagccggaaaaccatcatcaatgtcaccacgccac

SEQ ID NO: 97843 - DNA, 75 bp, synthetic construct
  source 1..75: mol_type = other DNA
caccattccacaaattggcggcatgtatcgcggtgaccgggcgcgtaaagagacactggtggagtacggcttccg

SEQ ID NO: 97844 - DNA, 75 bp, synthetic construct
  source 1..75: mol_type = other DNA
gccccggaacgcgtcatgaacgaaggtgtggaaggttccggcaaaatcatcattggcaaaggcggcgactatgag

SEQ ID NO: 97845 - DNA, 75 bp, synthetic construct
  source 1..75: mol_type = other DNA
catggccgcttaaccgccgcattctgtataaccgcgcctccgcagatccgcagggtaacccgtgggatccgaagc

SEQ ID NO: 97846 - DNA, 75 bp, synthetic construct
  source 1..75: mol_type = other DNA
cgatcggtgtcggcttcggcgccacaaaaacactggccaaatcggcgcagtgggcgtcaaaggaatggccacaat

SEQ ID NO: 97847 - DNA, 75 bp, synthetic construct
  source 1..75: mol_type = other DNA
tgctggctgtcggtgaagatattcaccagcttgcgcaggttgaagtatgtggtatcaagcgcgacgtgaatatcg

SEQ ID NO: 97848 - DNA, 75 bp, synthetic construct
  source 1..75: mol_type = other DNA
cccgaagaggggctgaaacggatgctgggcgaaacccggcactacggtatacccgccacactgcggggcatggtg

SEQ ID NO: 97849 - DNA, 75 bp, synthetic construct
  source 1..75: mol_type = other DNA
atgagccggaaaatatttgaactttttgccctgacagcaggactgtttatttctgcccacgcttcggaaaatgtg

SEQ ID NO: 97850 - DNA, 75 bp, synthetic construct
  source 1..75: mol_type = other DNA
aactggcactgggcgggttgatcgtgggtctgctttccctgttcacacctgcagtgtggggcaacggctatagca

SEQ ID NO: 97851 - DNA, 75 bp, synthetic construct
  source 1..75: mol_type = other DNA
caacgatggcacgcaatggtgttgagttcggtcttcgtattagcggtttgccgggccagtggtttaccggtccgg

SEQ ID NO: 97852 - DNA, 75 bp, synthetic construct
  source 1..75: mol_type = other DNA
acaaggctggcgcgcttggcagcgttgtttccgcgatgggatgcgctgcctgtttcccggctatcgccagcctgg

SEQ ID NO: 97853 - DNA, 75 bp, synthetic construct
  source 1..75: mol_type = other DNA
gacgacattgccgcttcaccactggcagacaaaattgcagctgctaatcagctggcgctggaacgcattatccag

SEQ ID NO: 97854 - DNA, 75 bp, synthetic construct
  source 1..75: mol_type = other DNA
gaagtgattgcccatctggtgaactgggagctgaaacagggcggtactctgcgtgaggctgttctgcgtgctatc

SEQ ID NO: 97855 - DNA, 75 bp, synthetic construct
  source 1..75: mol_type = other DNA
agattgattcttttgatgcgaaatttttagatataaatacattaagcaagcttatctatgaacgtaagagttttg

SEQ ID NO: 97856 - DNA, 75 bp, synthetic construct
  source 1..75: mol_type = other DNA
tcttaccgtgcaaattgcaaggaggagtaaaccatgaaactaccgggagacgcccttatctggtgcgtattaatc

SEQ ID NO: 97857 - DNA, 75 bp, synthetic construct
  source 1..75: mol_type = other DNA
tcgccgtaatggcgcatctcttggtgagatgatcaaagaagagatgggaccagtaccggggactatcgcgctgtt

SEQ ID NO: 97858 - DNA, 75 bp, synthetic construct
  source 1..75: mol_type = other DNA
tcggcagatttgcgcaaaattcttatggagctggctaaagacggaacagtatccaaagatacccatgccagccgg

SEQ ID NO: 97859 - DNA, 75 bp, synthetic construct
  source 1..75: mol_type = other DNA
aggtttcagctctaaaaaataaaatatttattagttggctggttgttgttcttgttctgtatgtatataaacact

SEQ ID NO: 97860 - DNA, 75 bp, synthetic construct
  source 1..75: mol_type = other DNA
gccacaattatgcgcactactggcgtgatatgtgcgacatttttaagaacctcgacaacgaatctttgatttata

SEQ ID NO: 97861 - DNA, 75 bp, synthetic construct
  source 1..75: mol_type = other DNA
aacaccgttcctcgcattatttccctttcttcttcgacggtttatccccgctggcgcggggaacacgtcggcaga

SEQ ID NO: 97862 - DNA, 75 bp, synthetic construct
  source 1..75: mol_type = other DNA
tcagatcgcgataacgcagtgggtgtggaatgaatttaaaacccggtacggcaccagaaaaattgcagggaaaac

SEQ ID NO: 97863 - DNA, 75 bp, synthetic construct
  source 1..75: mol_type = other DNA
aagcgtatgcggcagcgcgtctggagaaaatccgtcgccagaaccggataaaggcagaactacaggccgtgctca

SEQ ID NO: 97864 - DNA, 75 bp, synthetic construct
  source 1..75: mol_type = other DNA
gccagatgacgcccgccgacctggcgaagttcgagccgcagcggcgttacgcgaccctggtggcgctcgccatcg

SEQ ID NO: 97865 - DNA, 75 bp, synthetic construct
  source 1..75: mol_type = other DNA
gccgcagtgggcttcgcaaattaccggtatcccggtagaccgtatcatcaaactggcgcgtgaaattggcacagc

SEQ ID NO: 97866 - DNA, 75 bp, synthetic construct
  source 1..75: mol_type = other DNA
ggacgtgatatcggtgatagtgcaattaccgaaacctacggcgttggcggtttcgctatggcgacggcaccagct

SEQ ID NO: 97867 - DNA, 75 bp, synthetic construct
  source 1..75: mol_type = other DNA
ccagcggcacgtattgtattgatgggcttctccagtgaaccgtctgaagtgattcagcaaggaattaccggaaaa

SEQ ID NO: 97868 - DNA, 75 bp, synthetic construct
  source 1..75: mol_type = other DNA
tgaatgcacagcttgcccgggtgggcggccttgccacttccagtctccgtacagcgcagatggcgcaggataacc

SEQ ID NO: 97869 - DNA, 75 bp, synthetic construct
  source 1..75: mol_type = other DNA
tattatggctctgccaacacatccactgagcggcagagcgcctaccccgtcatgcgtctggtggcgttaatgaat

SEQ ID NO: 97870 - DNA, 75 bp, synthetic construct
  source 1..75: mol_type = other DNA
gaaagaaatcgtgatcagcgcgccggacggcgcggtgttccgctacgacgcggacgcaggcgcactgagcgccag

SEQ ID NO: 97871 - DNA, 75 bp, synthetic construct
  source 1..75: mol_type = other DNA
gggagcgagcggatttatctaaggtggaaatagaaattacacttgcctcagcttttaataatgggattcgtgaag

SEQ ID NO: 97872 - DNA, 75 bp, synthetic construct
  source 1..75: mol_type = other DNA
cggggcttgccgaatatggcccctttttacctcacgggctgccggtggagctgccggacattccgcccaccacca

SEQ ID NO: 97873 - DNA, 75 bp, synthetic construct
  source 1..75: mol_type = other DNA
cgcgtgggagatgaccccggagttcttggcgatgagcgggaaggtgaacgacatcgaacgtgaggggaatgcgct

SEQ ID NO: 97874 - DNA, 75 bp, synthetic construct
  source 1..75: mol_type = other DNA
gtcgccagtggtgatgtttacaattcaggctacggattattcccgtctgagcaggcgcgtaaagactggcaaaac

SEQ ID NO: 97875 - DNA, 75 bp, synthetic construct
  source 1..75: mol_type = other DNA
agaaccctgttacagcaatgccgctgtggaaaagctttcattgccacacaggacagccgggacattattgccgcc

SEQ ID NO: 97876 - DNA, 75 bp, synthetic construct
  source 1..75: mol_type = other DNA
ggtgcttatgatgcttatgggacgggaataccggcgcggggatacacaccttatccggcggtagatccggctcag

SEQ ID NO: 97877 - DNA, 75 bp, synthetic construct
  source 1..75: mol_type = other DNA
gcaggcgctggagcgcattatccagtcgcatccggtgctgattggttttgatcaggcgattaacgtggtgccggg

SEQ ID NO: 97878 - DNA, 75 bp, synthetic construct
  source 1..75: mol_type = other DNA
caaagatggttttgcttatgtctttggtaattactggtgcccacgccagccctgagcaacccctaataaaagata

SEQ ID NO: 97879 - DNA, 75 bp, synthetic construct
  source 1..75: mol_type = other DNA
ctaaaactggggcaacaagatatctgatgagcgttctggccagagagctggttgccagtggcgatgtatacaatt

SEQ ID NO: 97880 - DNA, 75 bp, synthetic construct
  source 1..75: mol_type = other DNA
caatcgtcccgaccttaacaggatgcatacggcgattgatatgaacagcaacaatctgaacaacgtcggcacttt

SEQ ID NO: 97881 - DNA, 75 bp, synthetic construct
  source 1..75: mol_type = other DNA
atggcaaaaattcacgaggtaaagctgcacgcaaaatatttcgaccttgtgctggaaggaaagaaacgtgcagag

SEQ ID NO: 97882 - DNA, 75 bp, synthetic construct
  source 1..75: mol_type = other DNA
tgagtattcgtgaaaccgcagatgcaacaggttacagtgcttcgcaggtatgtcggatacaagcgctgtataaaa

SEQ ID NO: 97883 - DNA, 75 bp, synthetic construct
  source 1..75: mol_type = other DNA
cgcccgtcgtggaatgcacaaaccttctgagaacagcgacgcttgacgtcacaaaagggggaaagatgagcggca

SEQ ID NO: 97884 - DNA, 75 bp, synthetic construct
  source 1..75: mol_type = other DNA
aggaaaatatcgacaattataagaggagatactacacatagcgatataatgggactgaataaaatacataacata

SEQ ID NO: 97885 - DNA, 75 bp, synthetic construct
  source 1..75: mol_type = other DNA
cacctgttatcacttaacccattactggcctgctgccgcagatattcccgtggcgagcgataacccagtgcacta

SEQ ID NO: 97886 - DNA, 75 bp, synthetic construct
  source 1..75: mol_type = other DNA
ctgtattatcggcaggttaagaaattgagtattcgtgaaaccgcagatgcaacaggttacagtgcttcgcaggta

SEQ ID NO: 97887 - DNA, 75 bp, synthetic construct
  source 1..75: mol_type = other DNA
ggtgccgttaacgcggcgggcaaccgtaccggtatgaagctgcttaacgacagcttcaacctgtttggttacttc

SEQ ID NO: 97888 - DNA, 75 bp, synthetic construct
  source 1..75: mol_type = other DNA
gggaacatccatgcgtctgtcatggtcgctgggccgggagaacgccagaaacgaagcgcaggccagcaccctgaa

SEQ ID NO: 97889 - DNA, 75 bp, synthetic construct
  source 1..75: mol_type = other DNA
aagtaccgtcgacaccctgaatatcatcagcaccggggtacaggatatgcagcaggtgctggcgcaactccgcgt

SEQ ID NO: 97890 - DNA, 75 bp, synthetic construct
  source 1..75: mol_type = other DNA
actgcctggcctcgcgtgaatacgacgcagtgatatttgttggcccggcacgaaccggcaagactatcggcctga

SEQ ID NO: 97891 - DNA, 75 bp, synthetic construct
  source 1..75: mol_type = other DNA
atggtagatcaggtaaaagtcgttgccgatgatcaggctccggctgaacagtcgctacggcgcaatctcacaaac

SEQ ID NO: 97892 - DNA, 75 bp, synthetic construct
  source 1..75: mol_type = other DNA
ccgttgatgccggaactggcgttgttacatgcccgacggttaacgcaggcgacacgctgtttgccacatatcgtt

SEQ ID NO: 97893 - DNA, 75 bp, synthetic construct
  source 1..75: mol_type = other DNA
agaaagacaaaccacagcagggggccgtgtattttgtgtcgttctccattcccgaagagggactgaaacggatgc

SEQ ID NO: 97894 - DNA, 75 bp, synthetic construct
  source 1..75: mol_type = other DNA
atgccgaacatcattctgtctgacaccagtgcaagtgtcagcgaactgaaaaaaaatccgatggcgacagtcagt

SEQ ID NO: 97895 - DNA, 75 bp, synthetic construct
  source 1..75: mol_type = other DNA
tcggtaaacaggcggagtcgctcatcggtaagactggcagtatggcgaccagattcacgggtatgacgggggcag

SEQ ID NO: 97896 - DNA, 75 bp, synthetic construct
  source 1..75: mol_type = other DNA
gccatccgtctgtgaccggaacggttacgcgtacggctgtccggaatttcagccgaatatcattcatccctgata

SEQ ID NO: 97897 - DNA, 75 bp, synthetic construct
  source 1..75: mol_type = other DNA
atatggctcgcttctgtcggcgctgattgatatgccgcaaaacccggcgctcaggctgcaaattatggtggcgtg

SEQ ID NO: 97898 - DNA, 75 bp, synthetic construct
  source 1..75: mol_type = other DNA
ttgcttcttacttactgatgccattcaatgacttccggaaacagttgacgccagacgttgatattgaagtattac

SEQ ID NO: 97899 - DNA, 75 bp, synthetic construct
  source 1..75: mol_type = other DNA
ttctgacccttgtttttattgagataggcgtaatagagatctatttgtttcgcaagttaacgggacatgaagaac

SEQ ID NO: 97900 - DNA, 75 bp, synthetic construct
  source 1..75: mol_type = other DNA
tatcactcaggacccgatagggctggagggggggatggagtctgtatgcgtacccgctgaatccggtgaatggta

SEQ ID NO: 97901 - DNA, 75 bp, synthetic construct
  source 1..75: mol_type = other DNA
gctgccaggtgcggcaattatgattagcgtgctgttggttaacctccttggcgacggtgtccgtcgtgcaattat

SEQ ID NO: 97902 - DNA, 75 bp, synthetic construct
  source 1..75: mol_type = other DNA
atgaaaatcgcgcgaaatttaaacctgattattcctgtccagaccgagaaaggtaaagcctggattcacgccacg

SEQ ID NO: 97903 - DNA, 75 bp, synthetic construct
  source 1..75: mol_type = other DNA
cctggcagacgctggtgaatcaccattacgggctgcatgacccgaacgccccggagaaccgcaggacgctgacac

SEQ ID NO: 97904 - DNA, 75 bp, synthetic construct
  source 1..75: mol_type = other DNA
cgcgggttccggcgatgaaaaatgcgcaaaaaactctgaaaaaaactgcgcaaattcggcagaaacgaaacggat

SEQ ID NO: 97905 - DNA, 75 bp, synthetic construct
  source 1..75: mol_type = other DNA
gaagcagtatcagcattgcagacccgaacggcgggaagaatatcaggctgaaaggagcattttatgagcaatctt

SEQ ID NO: 97906 - DNA, 75 bp, synthetic construct
  source 1..75: mol_type = other DNA
cagctatcagcactttctacgtttcggcaacgccatgctcgacaaaatcgccagctggcgcggcgagctacaact

SEQ ID NO: 97907 - DNA, 75 bp, synthetic construct
  source 1..75: mol_type = other DNA
caactgacacagccctcaaaccatgcctgcgccgatctactgcctgccgtattagtctcaccgccctggctttcg

SEQ ID NO: 97908 - DNA, 75 bp, synthetic construct
  source 1..75: mol_type = other DNA
cgtttccgccgcgctggagctggaatcggaaccccttaacgttatcgctcaaaccatgtcgtttcgtgaaatgct

SEQ ID NO: 97909 - DNA, 75 bp, synthetic construct
  source 1..75: mol_type = other DNA
atgctgaccacgttcaacgaagtcaatatgaagccgattatggatctgcgtaagcagtacggtgaagcgtttgaa

SEQ ID NO: 97910 - DNA, 75 bp, synthetic construct
  source 1..75: mol_type = other DNA
cgctgaaacgtctgttcacggccaaccagtgctggacgtccttcctggatgcgggcggtctgcgcgatatcgagg

SEQ ID NO: 97911 - DNA, 75 bp, synthetic construct
  source 1..75: mol_type = other DNA
tccagcaccgctggctgggtgctgccgggacaccggaagacaccacaatgctgtatgtggtgacggcaggccgcc

SEQ ID NO: 97912 - DNA, 75 bp, synthetic construct
  source 1..75: mol_type = other DNA
ccacttaacccgccgtctgatttggggtgtttatagcgccgaaaaccagctgctggcgtgctttcgcgtggcgga

SEQ ID NO: 97913 - DNA, 75 bp, synthetic construct
  source 1..75: mol_type = other DNA
ccaactacgcctatttacgcggtgaagtggagctggttcgtctgccggatgcagaaggccgtatcgctgccgaag

SEQ ID NO: 97914 - DNA, 75 bp, synthetic construct
  source 1..75: mol_type = other DNA
tctgcgccagcgcattaacgaagccgcgcaggctgtgatggtggcttacgcgaattgcggcgatcttgaccagct

SEQ ID NO: 97915 - DNA, 75 bp, synthetic construct
  source 1..75: mol_type = other DNA
aggaacaacaggctgaattactggagcgtcagattaacgcggcaagggtaaaacattgcggtgcttctgcgctgg

SEQ ID NO: 97916 - DNA, 75 bp, synthetic construct
  source 1..75: mol_type = other DNA
tatttgcattagtttctgttaatgcaatggcggcggattgtgctaaaggtaaaattgagttttccaagtataatg

SEQ ID NO: 97917 - DNA, 75 bp, synthetic construct
  source 1..75: mol_type = other DNA
cttggcgacatgacaaaacttgccaaaaaagtcctggcaggggaaatcgaatcccctgatgtgctggtgggaggg

SEQ ID NO: 97918 - DNA, 75 bp, synthetic construct
  source 1..75: mol_type = other DNA
acgatgcatgatgactaatggtaaatcttacaaatgtctacagataagaatagatagagttaataaagcaccatt

SEQ ID NO: 97919 - DNA, 75 bp, synthetic construct
  source 1..75: mol_type = other DNA
ggggagtggcatctcaactcacttccctttttacctatgcaaaaagcgattaagctatgggaatttctcagcaaa

SEQ ID NO: 97920 - DNA, 75 bp, synthetic construct
  source 1..75: mol_type = other DNA
tcatgccagcaacaactgacacaaccttcagtttatgcgaacgctgatatgctgcctgccgtattagtctcaccg

SEQ ID NO: 97921 - DNA, 75 bp, synthetic construct
  source 1..75: mol_type = other DNA
atggtcaggttgagatcctgccgatgatgtacctggcgctgtcctacgatcaccgtctgatcgatggtcgcgaat

SEQ ID NO: 97922 - DNA, 75 bp, synthetic construct
  source 1..75: mol_type = other DNA
gacattatccggcgtaatgccattacgcatcccggctttgtgccggtgatccctctgaaggtgccagtgcaatga

SEQ ID NO: 97923 - DNA, 75 bp, synthetic construct
  source 1..75: mol_type = other DNA
tggatggattcctgaaaggtaaatgcatcccaagcgatttaaaggttaacgaaacaaacgctgaatatctggtgc

SEQ ID NO: 97924 - DNA, 75 bp, synthetic construct
  source 1..75: mol_type = other DNA
gatcgggtgattgcgctggttaacaatcttggcgcaactccgctttctgagctgtacggcgtctataaccgcctg

SEQ ID NO: 97925 - DNA, 75 bp, synthetic construct
  source 1..75: mol_type = other DNA
cattggttcttccgaggcctgtatgctcggcgggatggcgatgaaatggcgttggcgcaagcgtatggaagccgc

SEQ ID NO: 97926 - DNA, 75 bp, synthetic construct
  source 1..75: mol_type = other DNA
tgtaccgtgctctggggatggataagccggaaccagtggcgaaagtgtgctatgcacaaatggtgaaacagttcc

SEQ ID NO: 97927 - DNA, 75 bp, synthetic construct
  source 1..75: mol_type = other DNA
ctggattgaggacggcgatccggcgattgagtacgtgcagacgcacagcgcaccgcagccggtaccggcagatat

SEQ ID NO: 97928 - DNA, 75 bp, synthetic construct
  source 1..75: mol_type = other DNA
cggtcctgttagcagacagctttaaagccggtggcaaagtgctttcctgtggcaacggcggctcccattgcgacg

SEQ ID NO: 97929 - DNA, 75 bp, synthetic construct
  source 1..75: mol_type = other DNA
ccgctggcggatgtggtcctgaacaaaacacaggcggcatcatgtacgcagtggagcgtaaccaacggaggaacg

SEQ ID NO: 97930 - DNA, 75 bp, synthetic construct
  source 1..75: mol_type = other DNA
agtatcggtaaggccgtaacggcgaaggaagtgatcacccgtacggtgaaagtgaccaacgtgggtaaaccttct

SEQ ID NO: 97931 - DNA, 75 bp, synthetic construct
  source 1..75: mol_type = other DNA
ttaaactcaatgaacatgctgaaactgtacgcttgattttcaaactgctgttagatggtgaaagtctgcataaca

SEQ ID NO: 97932 - DNA, 75 bp, synthetic construct
  source 1..75: mol_type = other DNA
attcctacggtgtggacccggtacgcgacggtacctcggtcggcaaggacatggagcgcgtcaccctggtgagtt

SEQ ID NO: 97933 - DNA, 75 bp, synthetic construct
  source 1..75: mol_type = other DNA
agactgatatttctgatgtgtctctcgaactgatcgccgctatcaaacagggctatctcaccgttaaagccgctg

SEQ ID NO: 97934 - DNA, 75 bp, synthetic construct
  source 1..75: mol_type = other DNA
acgatatcggtttgggtattccccgagactgatatttctgatgtgtctcttgaactgattgccgctatcaaacag

SEQ ID NO: 97935 - DNA, 75 bp, synthetic construct
  source 1..75: mol_type = other DNA
gctttacagctttgacgggcgttacaagattcagcgcgccatgcaggaccgtatcgcgtttgatgaacgcattca

SEQ ID NO: 97936 - DNA, 75 bp, synthetic construct
  source 1..75: mol_type = other DNA
aggctggcgcaacaccagtttatctggaaaccgcacgcaacccgtatggctttatcggtggtattgatgcccact

SEQ ID NO: 97937 - DNA, 75 bp, synthetic construct
  source 1..75: mol_type = other DNA
aggagaacgcttaccgtgagttgcttctgcgccagcgtattaacgaagccgcgcaggcggtgatggtggcttacg

SEQ ID NO: 97938 - DNA, 75 bp, synthetic construct
  source 1..75: mol_type = other DNA
tgcctgcgccgcagattgtcgatgtgccggactttgaggcgctgcttgccgaacgcaaggccgaatttgttgcgc

SEQ ID NO: 97939 - DNA, 75 bp, synthetic construct
  source 1..75: mol_type = other DNA
ggtaatggatgttaccggaaacgcgaccaataccataatcaatggtggtacacagaatattaataatcatggtat

SEQ ID NO: 97940 - DNA, 75 bp, synthetic construct
  source 1..75: mol_type = other DNA
ttcctggatgcgggcggtctgcgcgatatcgaggttgaggctgtcacaaaaatgctggcctgcggcacgcggata

SEQ ID NO: 97941 - DNA, 75 bp, synthetic construct
  source 1..75: mol_type = other DNA
aaagtaattcgccctggctatatgaagccaaaaagtagtatcgacccaaataaaatagccgttcgtcaaccaggc

SEQ ID NO: 97942 - DNA, 75 bp, synthetic construct
  source 1..75: mol_type = other DNA
tgtacgcgcagaaagctggctacccgcctggccgcaccttggcggtaaactggtctatgaacagtattatggcga

SEQ ID NO: 97943 - DNA, 75 bp, synthetic construct
  source 1..75: mol_type = other DNA
gacgggaagccaggatgattactattactcaacgcaggccatgagtgaaaactacgcggcgatgtctttgcaagt

SEQ ID NO: 97944 - DNA, 75 bp, synthetic construct
  source 1..75: mol_type = other DNA
tgtgtggtgcaattatgaatcagggcgcagcaatggttgttccaatggttattggctcattaccgaacgttacga

SEQ ID NO: 97945 - DNA, 75 bp, synthetic construct
  source 1..75: mol_type = other DNA
ttatcctgcacgatggcacattttgtctgcgcccgcagacggcacaactgtggctgaatcaggcaaaagtcacag

SEQ ID NO: 97946 - DNA, 75 bp, synthetic construct
  source 1..75: mol_type = other DNA
gctgggcagaccgtcgaaaatcgcaccagaagcccgtagggcgattatagagaaaaagaatagcgggaccagtat

SEQ ID NO: 97947 - DNA, 75 bp, synthetic construct
  source 1..75: mol_type = other DNA
ctgacgggctggatgtcgctgtcacggaaaccgcaagtgacctggtacggctgggacggcgaccggctgaccacg

SEQ ID NO: 97948 - DNA, 75 bp, synthetic construct
  source 1..75: mol_type = other DNA
tctcacctgcggtagctggctggtgggcgaagttcagagacgacgacggcacggaatggtacagcccgattgctg

SEQ ID NO: 97949 - DNA, 75 bp, synthetic construct
  source 1..75: mol_type = other DNA
acccggcggcagaagtggcgaaagcgcgtgattgggtgaaagcgcgcatggcgaaagcgggcatggtggaggcgg

SEQ ID NO: 97950 - DNA, 75 bp, synthetic construct
  source 1..75: mol_type = other DNA
gtttttccctcctgaccggatcaatgaatgctgtcagggtcctgccagcactatggggaatggtgacgggttccg

SEQ ID NO: 97951 - DNA, 75 bp, synthetic construct
  source 1..75: mol_type = other DNA
tttaaactatcactggttttattctgaactaaaacgtcacaatgtctcacattacatttactatttagctacaga

SEQ ID NO: 97952 - DNA, 75 bp, synthetic construct
  source 1..75: mol_type = other DNA
acagaaaaatgaagtggcagggacgggcaatattacttcccggaataccactatggttaatcatgctgggaagca

SEQ ID NO: 97953 - DNA, 75 bp, synthetic construct
  source 1..75: mol_type = other DNA
cgactactggcgcgcgctacaaaaccgtatccgtgacgggcatgtggaagatgtttatgcgtatcggcgcaggca

SEQ ID NO: 97954 - DNA, 75 bp, synthetic construct
  source 1..75: mol_type = other DNA
aacctggtgtgcggtccggtacaaatctgctggcataaattcgcccgctactgggatgtggagttgcgtgagatc

SEQ ID NO: 97955 - DNA, 75 bp, synthetic construct
  source 1..75: mol_type = other DNA
tctgccgggctggatttcccgtccgtcggcccgcaacatgcgtatctcaacagcactggacgcgctgattacgtg

SEQ ID NO: 97956 - DNA, 75 bp, synthetic construct
  source 1..75: mol_type = other DNA
agcagactgccggtgctgatgcttctgcaaacaacgcgaaagatgacgatgttgtcgacgctgaatttgaagaag

SEQ ID NO: 97957 - DNA, 75 bp, synthetic construct
  source 1..75: mol_type = other DNA
tggatggctttacgctattagccattcccttcttcgtgttagccggaaacattatgaataccggtggtatagcca

SEQ ID NO: 97958 - DNA, 75 bp, synthetic construct
  source 1..75: mol_type = other DNA
atcgtccgttaccggcagattatgttacgcactgccagaatggttctgtaaagatcattacacctgattcagaag

SEQ ID NO: 97959 - DNA, 75 bp, synthetic construct
  source 1..75: mol_type = other DNA
gcgcttatatcgttttcctggttctgttttgaccgattaccggatactgaagaattacgccaaaaccctgacagg

SEQ ID NO: 97960 - DNA, 75 bp, synthetic construct
  source 1..75: mol_type = other DNA
ttggtgagtttggcggcatgtacgtgccacaaatcctgatgcctgctctgcgccagctggaagaagcttttgtca

SEQ ID NO: 97961 - DNA, 75 bp, synthetic construct
  source 1..75: mol_type = other DNA
ccgcatcagttcgttgcaggagagacgtttacgtcttccggtgcggcggatacttgacatcatgcatcgttcgga

SEQ ID NO: 97962 - DNA, 75 bp, synthetic construct
  source 1..75: mol_type = other DNA
cagccagcactgacaataccaacgtcaatggcgaagacatggctgagattgaggataatatgctcctgccgattt

SEQ ID NO: 97963 - DNA, 75 bp, synthetic construct
  source 1..75: mol_type = other DNA
tgctgattaattttgcccttattaacatcacagacagaaagaacgagggtaccaataccattgatggtaactggc

SEQ ID NO: 97964 - DNA, 75 bp, synthetic construct
  source 1..75: mol_type = other DNA
gctggatattgacccttcggcaacggctgaaatttacggtgattatgatgcatctgatgcagggtatgacgccgg

SEQ ID NO: 97965 - DNA, 75 bp, synthetic construct
  source 1..75: mol_type = other DNA
cgaactggcatcaagggtcattatcaccacggcaacgcgagccgcaggcgatccgatgaataactgcgagtttaa

SEQ ID NO: 97966 - DNA, 75 bp, synthetic construct
  source 1..75: mol_type = other DNA
gataacatcgatcgtgggcccgagagtcttaacgtgctgcgcctgttaaaccagccctggtttatctccgtcaaa

SEQ ID NO: 97967 - DNA, 75 bp, synthetic construct
  source 1..75: mol_type = other DNA
cttacttcggctacctggctgctgttaagtctcagaacggtgctgcaatgtccttcggtcgtacctccaccttcc

SEQ ID NO: 97968 - DNA, 75 bp, synthetic construct
  source 1..75: mol_type = other DNA
ggatgggatttatcagacgctaaggaagtaaatcaaaatattatcagtgagtttatggctgaaccgccacaagga

SEQ ID NO: 97969 - DNA, 75 bp, synthetic construct
  source 1..75: mol_type = other DNA
acaatcgtaaaagggggagactggatatatccagagcggcacgtaagaagaaacaaacgttgccgtcaaaagacc

SEQ ID NO: 97970 - DNA, 75 bp, synthetic construct
  source 1..75: mol_type = other DNA
tccagtacggatttggggacgaaaaccacatcgtcgtttgattacggcactaaatccacgaataacactggtgcg

SEQ ID NO: 97971 - DNA, 75 bp, synthetic construct
  source 1..75: mol_type = other DNA
gtctgcctgctcgtcaggatctgtttaataagctgctcgcctcccgcgccattgccaaagcggtagaagatgaag

SEQ ID NO: 97972 - DNA, 75 bp, synthetic construct
  source 1..75: mol_type = other DNA
gtcagtcacagattcacctgacaccagtcccccgtcagaaaacccgatcgccagtaagcctgaatccccgggacg

SEQ ID NO: 97973 - DNA, 75 bp, synthetic construct
  source 1..75: mol_type = other DNA
atggggaaccatgagcggctgatgattgatgcgttaagtccagatggcaacgtgaataactggctaatgaatggc

SEQ ID NO: 97974 - DNA, 75 bp, synthetic construct
  source 1..75: mol_type = other DNA
tcaccgtcggtatttgtgcagggctttggcagttagtgtcttcacatgtcgggctctctcagggatgggaattat

SEQ ID NO: 97975 - DNA, 75 bp, synthetic construct
  source 1..75: mol_type = other DNA
agtatgtgcggttgtctaatccgttaacttttgacaaccctgccctgaccgtacctgtgcgactcattccagagg

SEQ ID NO: 97976 - DNA, 75 bp, synthetic construct
  source 1..75: mol_type = other DNA
gtacctgtgcgactcattccagaggagcttgaacttttcaactggataaaaagctattgcattgagaaggggatc

SEQ ID NO: 97977 - DNA, 75 bp, synthetic construct
  source 1..75: mol_type = other DNA
tgagttcccacaaccgctgcacgatgcgctggataaattccaggccgataccggtatcgacatcgacatgcacat

SEQ ID NO: 97978 - DNA, 75 bp, synthetic construct
  source 1..75: mol_type = other DNA
tttaaactatcaatggttttattctgagctaaaacgtcacaatgtctcacattacatttactatttagctacaga

SEQ ID NO: 97979 - DNA, 75 bp, synthetic construct
  source 1..75: mol_type = other DNA
accgcgcccgctttatagcgttgcgtgaagaaaaagggatcactgtaaaggaatactgtgaggagcatggcctta

SEQ ID NO: 97980 - DNA, 75 bp, synthetic construct
  source 1..75: mol_type = other DNA
ggccattctccggctgaaaacagcacggagaatgagcctcaagccgtagagcaaccagagccggttcagcccgga

SEQ ID NO: 97981 - DNA, 75 bp, synthetic construct
  source 1..75: mol_type = other DNA
tgcccgctgtgccgcctgggatttgtggaaggagtgcctgacacagccggattttgataataccgcgaacacgct

SEQ ID NO: 97982 - DNA, 75 bp, synthetic construct
  source 1..75: mol_type = other DNA
ggctgcgctgaaatatctcggcgttgatttgccggcgaagttcaccgacttcggtggtcatcttatcgacgggct

SEQ ID NO: 97983 - DNA, 75 bp, synthetic construct
  source 1..75: mol_type = other DNA
caatctttcgtatgatgatggtcaaacatttacccaaggaaaaacattaaccgtaaaaggtaattatgtcggtaa

SEQ ID NO: 97984 - DNA, 75 bp, synthetic construct
  source 1..75: mol_type = other DNA
aatatataacgcgcagggttaaaggacttacgcaaaccaatgtgacaacaacagaggattgcgacgcgtttttat

SEQ ID NO: 97985 - DNA, 75 bp, synthetic construct
  source 1..75: mol_type = other DNA
attacgccagatggtttaacattagtgggatttgccatcggcgtgctggcactgccttttctggcgctgggctgg

SEQ ID NO: 97986 - DNA, 75 bp, synthetic construct
  source 1..75: mol_type = other DNA
ggcgatggtggattgtctctggggcagggggttattgctgcggcgcgctggttagcgggtgaagtccagaacgga

SEQ ID NO: 97987 - DNA, 75 bp, synthetic construct
  source 1..75: mol_type = other DNA
aagaattaatgtccctctgcgaccaactggaacagcaatccctgaccagtctggacgcacatcaacaactggttg

SEQ ID NO: 97988 - DNA, 75 bp, synthetic construct
  source 1..75: mol_type = other DNA
cggagatggcggagtctctggggatgttcacccagaaggggagttttgaggcggagttgttcaaccgtgagggcg

SEQ ID NO: 97989 - DNA, 75 bp, synthetic construct
  source 1..75: mol_type = other DNA
cagcagcgatcatagattgcccacattcgacgcctaaatggacagaacaaggttttatttgtgtaagaaccaacc

SEQ ID NO: 97990 - DNA, 75 bp, synthetic construct
  source 1..75: mol_type = other DNA
caccattatattcgtgcggtcttagtgcgctgtaatatccaacgatatagtccgttattgcgtgagctgcatcgc

SEQ ID NO: 97991 - DNA, 75 bp, synthetic construct
  source 1..75: mol_type = other DNA
tatgccattccgtgtacgttatgggcgctggcatccggttttttttgttgcgggttatctgctgcctttatgtgc

SEQ ID NO: 97992 - DNA, 75 bp, synthetic construct
  source 1..75: mol_type = other DNA
ttaataaacggggggatcagaatattccggctgaaacgccgtatgcgccgggagaacaaattaagggagggtggc

SEQ ID NO: 97993 - DNA, 75 bp, synthetic construct
  source 1..75: mol_type = other DNA
gccaacgtgaacacggctagtgctaactccggtgctggtagtgcatcaacaagattgtctgttgtgcataatcaa

SEQ ID NO: 97994 - DNA, 75 bp, synthetic construct
  source 1..75: mol_type = other DNA
aacagtacgtctgaaacgctggcggcaacgccaaaggcagtaaaatcagcctatgacaatgcagagaaacgtctg

SEQ ID NO: 97995 - DNA, 75 bp, synthetic construct
  source 1..75: mol_type = other DNA
tcctgccgggaacaccgttatatgacacgattgtgattgtcactggtgagagtgtgcgcagggattatatgtcgg

SEQ ID NO: 97996 - DNA, 75 bp, synthetic construct
  source 1..75: mol_type = other DNA
acgccgttgaagcgttaaaagttattgccgaaccaatgggcgagccgtccggcgatttgctgccgttcgccaatg

SEQ ID NO: 97997 - DNA, 75 bp, synthetic construct
  source 1..75: mol_type = other DNA
aagtgcgctgctgggctggaccagcttcctcggcacaccggaagaacgaccctcagtcaccatcagggtacggtc

SEQ ID NO: 97998 - DNA, 75 bp, synthetic construct
  source 1..75: mol_type = other DNA
gccggtactcacgtcatttcgccatgctttacttttctggccttgggctgtcggtcagcgacagtgccaatcctg

SEQ ID NO: 97999 - DNA, 75 bp, synthetic construct
  source 1..75: mol_type = other DNA
gagaatacggagtccatccgggcacgtcaggatgtgaaggtggtgaaggagttgctgggtaaccggcataaactc

SEQ ID NO: 98000 - DNA, 75 bp, synthetic construct
  source 1..75: mol_type = other DNA
gaacagatttccgctttacaggagaaagtgtcgcgggcgaaaagactcccctggacggcatcatcttctcaggtt

SEQ ID NO: 98001 - DNA, 75 bp, synthetic construct
  source 1..75: mol_type = other DNA
gtcagctggcaacggggaacccgctggtttggtgcacagccggcaccggaggaaatcttcggtgaggcaacggcg

SEQ ID NO: 98002 - DNA, 75 bp, synthetic construct
  source 1..75: mol_type = other DNA
tgaccggcctggtggaccgcttcgggcgtaccctgaccttccggcgtgaggcagttggcgaatttaccggggaaa

SEQ ID NO: 98003 - DNA, 75 bp, synthetic construct
  source 1..75: mol_type = other DNA
tattgataacgaccatagctcatgtgtatatcaaggaaaaaacaaagcatgtgccatgaaacccactctgttgag

SEQ ID NO: 98004 - DNA, 75 bp, synthetic construct
  source 1..75: mol_type = other DNA
cacggtaacgctccgggatgcgttcgataatctggtaaccggtgcagcttcacagttagccgctaatggtgtgct

SEQ ID NO: 98005 - DNA, 75 bp, synthetic construct
  source 1..75: mol_type = other DNA
ctggcaccgggccatgcctacgggatgtttatggaacgctttaacgagttatcggagttacgcaaatgcgcatga

SEQ ID NO: 98006 - DNA, 75 bp, synthetic construct
  source 1..75: mol_type = other DNA
cacctccacccgtgcggcacgagaatggctgattctgaacatggcgggactggagcgtgaagagttccgggtgct

SEQ ID NO: 98007 - DNA, 75 bp, synthetic construct
  source 1..75: mol_type = other DNA
acatcgaatttcacaaaggcgcgctggatgatgaacaattaaaagaatccatccgcgatgcccacttcatcggcc

SEQ ID NO: 98008 - DNA, 75 bp, synthetic construct
  source 1..75: mol_type = other DNA
tcgatctgggtaaaaactcttttcatattcattgccaggatcgtcgcgggaaggctgtttaccgtaaaaaattta

SEQ ID NO: 98009 - DNA, 75 bp, synthetic construct
  source 1..75: mol_type = other DNA
ccgatataaaaatgacgatgatttacgcccacttttcgccggatcatcttgaagatgcagttactaaaaaccctt

SEQ ID NO: 98010 - DNA, 75 bp, synthetic construct
  source 1..75: mol_type = other DNA
cggctactggaaggtgatgtaccgcacgccggaaggctggaagatgaaagcgctcgcgctggcactgcgccgctg

SEQ ID NO: 98011 - DNA, 75 bp, synthetic construct
  source 1..75: mol_type = other DNA
cggctactggaaggtgatgtaccgcacgccggaaggctggaagatgaagtcgcttgcgctggcactgcgccgctg

SEQ ID NO: 98012 - DNA, 75 bp, synthetic construct
  source 1..75: mol_type = other DNA
atgtttatggctccaatggagttgtaggtacacacaatgaagcatgtattaaatcaccatgtattattattggca

SEQ ID NO: 98013 - DNA, 75 bp, synthetic construct
  source 1..75: mol_type = other DNA
agaagccaggattttcctaaaccatctccagtcctccatcatttttttcaatatactcatctgagagatgcacat

SEQ ID NO: 98014 - DNA, 75 bp, synthetic construct
  source 1..75: mol_type = other DNA
ttcatcatgatggtcatgtgcaggggggctacagcgttcccctgattattaccgccagtgacatcacgtctcatc

SEQ ID NO: 98015 - DNA, 75 bp, synthetic construct
  source 1..75: mol_type = other DNA
cgtgaatccctggttcaggataaggtgaaaacaactaatcagatgcatgcttttctgctggaatttggtatcagc

SEQ ID NO: 98016 - DNA, 75 bp, synthetic construct
  source 1..75: mol_type = other DNA
cttaattttgtttgatgactttttcagaagccaggattttcctaaaccatctccagtcctccatcatttttttca

SEQ ID NO: 98017 - DNA, 75 bp, synthetic construct
  source 1..75: mol_type = other DNA
aatctgatcggtgtcccgctgtgctacttcatcattcgggtagtgcgaaatccattttatttacgtagctattat

SEQ ID NO: 98018 - DNA, 75 bp, synthetic construct
  source 1..75: mol_type = other DNA
tggagtggtttggtgaagagttcgagtctattaacaacagcgaagaacttcacgttcaggccatcaagatgattg

SEQ ID NO: 98019 - DNA, 75 bp, synthetic construct
  source 1..75: mol_type = other DNA
cggtgatggcgaagacctgtatctcaaagaggtaacccactggatgccgctaccggaaccgccgcaggaggtgaa

SEQ ID NO: 98020 - DNA, 75 bp, synthetic construct
  source 1..75: mol_type = other DNA
gctgctggttcgtgaagcgggcggcatcgtcagcgacttcaccggtggtcataactatatgctgaccggtaacat

SEQ ID NO: 98021 - DNA, 75 bp, synthetic construct
  source 1..75: mol_type = other DNA
tctgatgcagtcctcgcagatcggtttgcataaatcgttgagggtcgggctgggttatgacgtcaaagtcggaaa

SEQ ID NO: 98022 - DNA, 75 bp, synthetic construct
  source 1..75: mol_type = other DNA
atgagcggtaagcgttatcccgaagagtttaaaactgaagcagtcaaacaggttattgatcgcggttattctgtt

SEQ ID NO: 98023 - DNA, 75 bp, synthetic construct
  source 1..75: mol_type = other DNA
acctggatgatgaagacgcagactggaccgcgaccgggcaggggcagaaatctgcaggtgataccagttttacgc

SEQ ID NO: 98024 - DNA, 75 bp, synthetic construct
  source 1..75: mol_type = other DNA
tctgtcgctttgcaggacatctttcacacttctacagtgtcgcccagcatgcggtgctttgcagccagctggtgc

SEQ ID NO: 98025 - DNA, 75 bp, synthetic construct
  source 1..75: mol_type = other DNA
ctgcaaaagaagaatatcagcttgttacgcagctttttaaaaatgaaattttagataagctaagacaaacaacag

SEQ ID NO: 98026 - DNA, 75 bp, synthetic construct
  source 1..75: mol_type = other DNA
atgcttgaacaggggaaagccagttatctgtataccggtcatgaccacaggggtcatttccgtcagggcgttttc

SEQ ID NO: 98027 - DNA, 75 bp, synthetic construct
  source 1..75: mol_type = other DNA
agcagattaacaaagtgcagtcagccattatggcacttaaggcgacgaatacggatatacagagcatcaccatca

SEQ ID NO: 98028 - DNA, 75 bp, synthetic construct
  source 1..75: mol_type = other DNA
ttggggttgtggttattgtgggtgtagctcgctacatcattaaagggtattccgccactggtgtgttatttgtcg

SEQ ID NO: 98029 - DNA, 75 bp, synthetic construct
  source 1..75: mol_type = other DNA
ggtctgcattcgttctggcgtctgtcgtggccctggttatttgcctgatcaccttctttgttgtctcctggattc

SEQ ID NO: 98030 - DNA, 75 bp, synthetic construct
  source 1..75: mol_type = other DNA
gtggcggaagaacgcagcgaaattacgccggccactgcaattaaggtgacaccgacatccggtacggtggcaaaa

SEQ ID NO: 98031 - DNA, 75 bp, synthetic construct
  source 1..75: mol_type = other DNA
ggtggtactgactgtcctgagccgtgaaggcgacggaacagcagaaaaagatttgctggatgtggtggagaaagc

SEQ ID NO: 98032 - DNA, 75 bp, synthetic construct
  source 1..75: mol_type = other DNA
tacgacatcgctggcagggaatccttcagtagagttaccctatttaatttctccattaacttcagataattcatc

SEQ ID NO: 98033 - DNA, 75 bp, synthetic construct
  source 1..75: mol_type = other DNA
atcagagtaaagacggtaatatctggttgcgcagttatgggggaagcctggactcctttgccagtggcaaactga

SEQ ID NO: 98034 - DNA, 75 bp, synthetic construct
  source 1..75: mol_type = other DNA
tggtgttttcaccaccaccagaagctggagtaagcagggaagacgctctgaaagctacggtagaatttcttaaag

SEQ ID NO: 98035 - DNA, 75 bp, synthetic construct
  source 1..75: mol_type = other DNA
gcggtgcgggtaagtcgacgctgattaagctgattgccgggttgtatttccccacgcacggcaacatcagaatcg

SEQ ID NO: 98036 - DNA, 75 bp, synthetic construct
  source 1..75: mol_type = other DNA
gtattttagccctggtggagcagcgtggggcggtaagcattaacgagctgacggagatcctcggcgtgtcccata

SEQ ID NO: 98037 - DNA, 75 bp, synthetic construct
  source 1..75: mol_type = other DNA
tggcgaagatcctctgtgtaatcgtcggcatttcatttttagtcatgctggttgccattttcttttccaccgcct

SEQ ID NO: 98038 - DNA, 75 bp, synthetic construct
  source 1..75: mol_type = other DNA
acagccacaacagcctgtgtcttctgtcatcaatgataagaagtcagatgcaggtgtgagtgttccggcaggggg

SEQ ID NO: 98039 - DNA, 75 bp, synthetic construct
  source 1..75: mol_type = other DNA
ggtcaccaatgtgggccgtccgtcaatggcagaagatcgcagtacggtgacggcggcaaccggtatgaccgtgac

SEQ ID NO: 98040 - DNA, 75 bp, synthetic construct
  source 1..75: mol_type = other DNA
aaaggcagcatgggggttaacgcccgctttatcggtgaatgctcagctcatgatttacgggtgaactattatgac

SEQ ID NO: 98041 - DNA, 75 bp, synthetic construct
  source 1..75: mol_type = other DNA
cgccggtcactgcgattaaggtgacgccgacatccggtacggtggcaaaagggaaaacaaccaccctgacggttt

SEQ ID NO: 98042 - DNA, 75 bp, synthetic construct
  source 1..75: mol_type = other DNA
agagaagataccagcagtgcggttataagacatagtgctgattttggtattgcatttgatggtgattttgatagg

SEQ ID NO: 98043 - DNA, 75 bp, synthetic construct
  source 1..75: mol_type = other DNA
tggcaaagaccatttgtgtgattgtcggcgtttcattttcgctaatgatggttgctctttttctttccatagcct

SEQ ID NO: 98044 - DNA, 75 bp, synthetic construct
  source 1..75: mol_type = other DNA
aagtttgaagcacgccgcaaaaaaatgattgccgatgggcaagcagacttccttgagatggaagtgttctaccag

SEQ ID NO: 98045 - DNA, 75 bp, synthetic construct
  source 1..75: mol_type = other DNA
cgttatacagcgggagcaatgtgcttcatgctgtttgtgtggctgggtggtgtggtgacactctgtgccgttgct

SEQ ID NO: 98046 - DNA, 75 bp, synthetic construct
  source 1..75: mol_type = other DNA
actggccccgatacaagaaagcctgaaagagttaaacgactggctggggatcgacgtggtgcgcttcaaccctta

SEQ ID NO: 98047 - DNA, 75 bp, synthetic construct
  source 1..75: mol_type = other DNA
cgctggtatgagccacccgtaagttttgacggactggcgcgaacattccgcgccgccgtacaccacagttcaccg

SEQ ID NO: 98048 - DNA, 75 bp, synthetic construct
  source 1..75: mol_type = other DNA
ggcttaacgacaatggctgttcagcggatattcccgccattgccgaggcgctaaccaaccatgcagaatggcttt

SEQ ID NO: 98049 - DNA, 75 bp, synthetic construct
  source 1..75: mol_type = other DNA
cgctggtatgagccgcccgtcagctttgacggactggcgcgcaccttccgcgctgccgtgcatcatagttccccg

SEQ ID NO: 98050 - DNA, 75 bp, synthetic construct
  source 1..75: mol_type = other DNA
ggcgtgaataatctggcgttattaggtaaggagttaattacccggccttatttaacgttaggaattatcagctgg

SEQ ID NO: 98051 - DNA, 75 bp, synthetic construct
  source 1..75: mol_type = other DNA
gcgacacagtccgccatctgcccgaatcttttgaaatcccatggaacccgaacacccgtaccgaggtgagcaccc

SEQ ID NO: 98052 - DNA, 75 bp, synthetic construct
  source 1..75: mol_type = other DNA
gtaaaaatttattcaatgaagcggaaatagctcatgccataaaatatgttgagggattgagagaaaaattcatga

SEQ ID NO: 98053 - DNA, 75 bp, synthetic construct
  source 1..75: mol_type = other DNA
tttgaacttactacacccaaaaaatcatgtggtgactattgggagcattattttgagtcagggcttttgaataac

SEQ ID NO: 98054 - DNA, 75 bp, synthetic construct
  source 1..75: mol_type = other DNA
gcggccacaaaaggacagatggacaacgccattgcagatgctgtacgggtgtcgggggatgccctgcgcggtgag

SEQ ID NO: 98055 - DNA, 75 bp, synthetic construct
  source 1..75: mol_type = other DNA
tgaaaataaatttcttatggaaaaaaatccgatgtacgaacgaccaagatcattacgtgagttggggcgagatct

SEQ ID NO: 98056 - DNA, 75 bp, synthetic construct
  source 1..75: mol_type = other DNA
atggataagaagcaagtaacggatttaaggtcggaactactcgattcacgttttggcgctaagtccatttcgact

SEQ ID NO: 98057 - DNA, 75 bp, synthetic construct
  source 1..75: mol_type = other DNA
ataatctggttaaattactgcaaactaaaagtgctaacgaaacacctggactctatatctccatgttgtatggat

SEQ ID NO: 98058 - DNA, 75 bp, synthetic construct
  source 1..75: mol_type = other DNA
caagatcgtcactcgaaggtattcaggcatggtacatcagggatgaaacttattcagcggcactggccgagctgg

SEQ ID NO: 98059 - DNA, 75 bp, synthetic construct
  source 1..75: mol_type = other DNA
ggagagaccggtctgacgggaaatgcaggtccacagggtccaaagggagataccggtgcggcaggcccggcaggc

SEQ ID NO: 98060 - DNA, 75 bp, synthetic construct
  source 1..75: mol_type = other DNA
atcaaaaatagataaaagacatccatataataaaaaagaaaatggctgctggtatgtatcacctgaagggaatga

SEQ ID NO: 98061 - DNA, 75 bp, synthetic construct
  source 1..75: mol_type = other DNA
aaaacttgctgagtgggttcgggagcaactcaacaagaagcattcgaatgtggttacctgcgctctggcaaataa

SEQ ID NO: 98062 - DNA, 75 bp, synthetic construct
  source 1..75: mol_type = other DNA
atgaacaatttaattattacgacccgacaatcgccagtacgtttactggttgattatgttgccacaaccatcttg

SEQ ID NO: 98063 - DNA, 75 bp, synthetic construct
  source 1..75: mol_type = other DNA
gaaatctcagcgtgatgccctgactcaacgtctcaaggatattgttaatgacgctttacgtgctaatgccgctcg

SEQ ID NO: 98064 - DNA, 75 bp, synthetic construct
  source 1..75: mol_type = other DNA
atgcagaacatcacacttattggtatcgatctcggaaagcactccttccacattcattgtcaagacaagtctggt

SEQ ID NO: 98065 - DNA, 75 bp, synthetic construct
  source 1..75: mol_type = other DNA
tatgggaactgaaaaaagctggtttcgttgataaaagcgcgtacacctggcgtgtggctgataacaacgttcagc

SEQ ID NO: 98066 - DNA, 75 bp, synthetic construct
  source 1..75: mol_type = other DNA
ctacaccgccaccgtagcgggcgatggcagctggacaaccagtgtacctgctgccgatctcgccgcattacgcga

SEQ ID NO: 98067 - DNA, 75 bp, synthetic construct
  source 1..75: mol_type = other DNA
ttcggcggagactggcaggtgcgccagcagctgcctgtcggagtcgggcctgacgaccggatgccgccaggcagc

SEQ ID NO: 98068 - DNA, 75 bp, synthetic construct
  source 1..75: mol_type = other DNA
gtttgacaattgcatttatcgccggttttgctgttgccagaaaattgacactccgaaaagttgcctcatcggtaa

SEQ ID NO: 98069 - DNA, 75 bp, synthetic construct
  source 1..75: mol_type = other DNA
caaggagggggctaaaacgtgtgaggaactggcgggtaagttcggtgtcagcattcgcaaggttgcttccacgct

SEQ ID NO: 98070 - DNA, 75 bp, synthetic construct
  source 1..75: mol_type = other DNA
aaccatgaatgaatcagccgagccatcaccttcccctgatgcagtcaaagaggaaatgaccgtgatgacggagcc

SEQ ID NO: 98071 - DNA, 75 bp, synthetic construct
  source 1..75: mol_type = other DNA
atggcaactttaacaaaaaaagaacgggcatggttgaacgaattacaggacgttcttgatcgctgtccatcaccg

SEQ ID NO: 98072 - DNA, 75 bp, synthetic construct
  source 1..75: mol_type = other DNA
cagcaactacgcgcaagatctgaccatgttggacatgtgcctgtacgatggttttaacggtaatgccatcagtta

SEQ ID NO: 98073 - DNA, 75 bp, synthetic construct
  source 1..75: mol_type = other DNA
atgagaaatcgattcattgcggcgatattgggcttgtttggcgcggttactggcgttcaggcggctcctaacgtg

SEQ ID NO: 98074 - DNA, 75 bp, synthetic construct
  source 1..75: mol_type = other DNA
ccagcatgggctgcgggtattattgatacagcctggaactgtgaacgagaaaacatacgcaacaagctcagtagc

SEQ ID NO: 98075 - DNA, 75 bp, synthetic construct
  source 1..75: mol_type = other DNA
aatccgttttcgtctggggccggcgagcattattgagacaaacagcaatggctggttcccggatacagatggcgc

SEQ ID NO: 98076 - DNA, 75 bp, synthetic construct
  source 1..75: mol_type = other DNA
gtcgctaaaatttcggagtgcgatttaactgcgacggttgaacaacgcggaccacaaacggctgatgagctggct

SEQ ID NO: 98077 - DNA, 75 bp, synthetic construct
  source 1..75: mol_type = other DNA
gcgcggggaacacatcaacgttatcgattacaactgacagggagccggtttatccccgctggcgcggggaacacc

SEQ ID NO: 98078 - DNA, 75 bp, synthetic construct
  source 1..75: mol_type = other DNA
gtggtgctgtttgaccgctcgggccatcgcaccaaattcaccaatgtcgggaggatgttgctggagcgagggcgc

SEQ ID NO: 98079 - DNA, 75 bp, synthetic construct
  source 1..75: mol_type = other DNA
taggggacgtttctcgtgtagttcaggaggatgttgctctacaggaaccgcaggccaaatcaactacgcgaaagg

SEQ ID NO: 98080 - DNA, 75 bp, synthetic construct
  source 1..75: mol_type = other DNA
atgactccagtaaaagtgtggcaagagcgcgttgagatcccgacctatgaaaccgggccgcaggatatacatccc

SEQ ID NO: 98081 - DNA, 75 bp, synthetic construct
  source 1..75: mol_type = other DNA
tgattctggaactcaccgttcgcaaccatccgggcgtaatgacccacgtttgtggcctttttgcccgccgcgctt

SEQ ID NO: 98082 - DNA, 75 bp, synthetic construct
  source 1..75: mol_type = other DNA
aaagccactggtatcatgaaacgcaatccagtactgcggagtatgacgttctgcctctggtcccggaagccgcaa

SEQ ID NO: 98083 - DNA, 75 bp, synthetic construct
  source 1..75: mol_type = other DNA
caaagctgttcagaaaaattacgaattctgaaattgatgcggagggtaacgctcatgttgttttatctcctgctg

SEQ ID NO: 98084 - DNA, 75 bp, synthetic construct
  source 1..75: mol_type = other DNA
actcggtttcaccctcttatttgtacgatgtcggtccttatctgatttccagtgacgaatgtattcaggtaaagg

SEQ ID NO: 98085 - DNA, 75 bp, synthetic construct
  source 1..75: mol_type = other DNA
gcactgacgctgctggatgcaaaacagcaggagctgcagaagcagacggcgctgaatgacctgaagaaaaaatcc

SEQ ID NO: 98086 - DNA, 75 bp, synthetic construct
  source 1..75: mol_type = other DNA
cggggagagaccggtctgacgggaaatgcaggtccacagggtccaaagggagataccggtgcggcaggcccggca

SEQ ID NO: 98087 - DNA, 75 bp, synthetic construct
  source 1..75: mol_type = other DNA
gagcataagcgggctgtagctcacctgacactgtctgagcgcgaggagatacgagctggtttgtcagccaaaatg

SEQ ID NO: 98088 - DNA, 75 bp, synthetic construct
  source 1..75: mol_type = other DNA
gccgtgttgatctgcgcgatttaccgctggtcaccattgatggcgaagacgcccgtgactttgacgatgcagttt

SEQ ID NO: 98089 - DNA, 75 bp, synthetic construct
  source 1..75: mol_type = other DNA
acaacccagccgtatcagttcacgaaaggcagcatttttcatctgatggaaccggacattaaccaggagatctac

SEQ ID NO: 98090 - DNA, 75 bp, synthetic construct
  source 1..75: mol_type = other DNA
ttcaatttgaatatctcagaaatagaaaataatatagtatcacttcttgaacgctcagacaggaaagttgtcata

SEQ ID NO: 98091 - DNA, 75 bp, synthetic construct
  source 1..75: mol_type = other DNA
aggagttgaaggagagagcagctaagacagatgtaattcagtctgaggctgatgcaaatagaaatatttctacag

SEQ ID NO: 98092 - DNA, 75 bp, synthetic construct
  source 1..75: mol_type = other DNA
cggaaagcaatccgtttggtctggcgctggactgctatgacgggacgcctcagcgtctggaagcggcagatcaga

SEQ ID NO: 98093 - DNA, 75 bp, synthetic construct
  source 1..75: mol_type = other DNA
ggttcactcggtgatgttgagaaggtggcaaaggtatttgtgcgcaacgagctgtcgccgctacaggacaggttc

SEQ ID NO: 98094 - DNA, 75 bp, synthetic construct
  source 1..75: mol_type = other DNA
gacaccggccctgtcggggcaaccggcgaacggggaccgggaggagatacaggtccggcaggtccgcaggggccg

SEQ ID NO: 98095 - DNA, 75 bp, synthetic construct
  source 1..75: mol_type = other DNA
aaaacattcgaatatggtgaaaaaacactcaaggaatatcggagcgagccaaagaaaactcgacacgatattgtg

SEQ ID NO: 98096 - DNA, 75 bp, synthetic construct
  source 1..75: mol_type = other DNA
taaaatggtgcttaacctggataggtcccgcattcctgcggagtgtatagagaaaatagaagccattcttaagga

SEQ ID NO: 98097 - DNA, 75 bp, synthetic construct
  source 1..75: mol_type = other DNA
tcgctagagaagttgatggagaagtcatccatcttcgcaccaaagacggatacatcaatgccaccgcgatgtgca

SEQ ID NO: 98098 - DNA, 75 bp, synthetic construct
  source 1..75: mol_type = other DNA
actgaaggcacagtggggaatgaatagccattgctatgcaaactaccgccttcctgtaaaaaaaggaccagcagg

SEQ ID NO: 98099 - DNA, 75 bp, synthetic construct
  source 1..75: mol_type = other DNA
aaacaagccctgcgagttgccgcgcgcgagtcaaaagcggtccgccgttcgctgatcgacaaactggaggaattg

SEQ ID NO: 98100 - DNA, 75 bp, synthetic construct
  source 1..75: mol_type = other DNA
ggcgttgagctggagactgaacgttttgagcagacggttcgggaagttcaggatttagtcagtcagaacggatga

SEQ ID NO: 98101 - DNA, 75 bp, synthetic construct
  source 1..75: mol_type = other DNA
taaacggacgtgcctttgaccagaagctatactgggacatccgtgaacagatagtgcctggtagcaagtatgatg

SEQ ID NO: 98102 - DNA, 75 bp, synthetic construct
  source 1..75: mol_type = other DNA
gagcaggtgtaccagtgtcaggtggcatttgtattgccgggtgagcgggtcatgatggccttcacctacgccaga

SEQ ID NO: 98103 - DNA, 75 bp, synthetic construct
  source 1..75: mol_type = other DNA
gactggtaaccagaaacaacatgaaatcattaaccacggaaacagcgctggatattctgattgcatggctgcagg

SEQ ID NO: 98104 - DNA, 75 bp, synthetic construct
  source 1..75: mol_type = other DNA
atgaaaaagatccttgtatcatttgttgccattatggctgtcgcttcatccgccatggctgcagagacaatgaac

SEQ ID NO: 98105 - DNA, 75 bp, synthetic construct
  source 1..75: mol_type = other DNA
tggtttatctatcttatcccggcgctggtggcgtttgcgctgccaccacgtgcaggggcgacagcgtctcgctcc

SEQ ID NO: 98106 - DNA, 75 bp, synthetic construct
  source 1..75: mol_type = other DNA
aagcaaccggataccggcttctggtaagtttcgtcggctaagaccagctaaagtcgaaaggtcaaaaaacagcct

SEQ ID NO: 98107 - DNA, 75 bp, synthetic construct
  source 1..75: mol_type = other DNA
ctgtcgttctcaaaatcggtggaactgcatgaaaaggtcatcgggcattatctgaacatcaaacactatcagtaa

SEQ ID NO: 98108 - DNA, 75 bp, synthetic construct
  source 1..75: mol_type = other DNA
ggacccgctgcgctataacctcgctgccatggtcgcccgttttaacgagaccggccgcagtcaggtgctggcgaa

SEQ ID NO: 98109 - DNA, 75 bp, synthetic construct
  source 1..75: mol_type = other DNA
aaaaagcagagctggaacgccttcacgataccagtcgtaacaagcgggtctgcgatcgtattaaagccattcttc

SEQ ID NO: 98110 - DNA, 75 bp, synthetic construct
  source 1..75: mol_type = other DNA
cactatcgatgcatatacccgtctgaatcggtacgaagaagcggctgtagggattaaaaaatccatcgaagccgg

SEQ ID NO: 98111 - DNA, 75 bp, synthetic construct
  source 1..75: mol_type = other DNA
agaaagacggcagaaagtgcagccggtaatgcagccagggatgcaacgaccgcagcagaaaaagcccgggagtca

SEQ ID NO: 98112 - DNA, 75 bp, synthetic construct
  source 1..75: mol_type = other DNA
tgcgagatcgcgtcagtcgtaagggaccggaggtgcgttacgcagagcgtcgccttctgggtgtaaatgatgatg

SEQ ID NO: 98113 - DNA, 75 bp, synthetic construct
  source 1..75: mol_type = other DNA
gtcatggaaggcaggctgcagcaaatccgggcggaaggcgctgaccttcctggccgcaccctgaagatggttttt

SEQ ID NO: 98114 - DNA, 75 bp, synthetic construct
  source 1..75: mol_type = other DNA
aaaacattcgaatatggtgaaaaaacactcaaggaatatcggaacgagtcaaagaaaacacgacacgatattgtg

SEQ ID NO: 98115 - DNA, 75 bp, synthetic construct
  source 1..75: mol_type = other DNA
atgcataagcgtgaagatggtttcgtggtggttgatgaagatgtttgtatcggctgccgctactgccacatggct

SEQ ID NO: 98116 - DNA, 75 bp, synthetic construct
  source 1..75: mol_type = other DNA
catggataaccacatggtcagctcactactgagtgggcccggtgagtctccgtgcctcatatgggcagagtcgga

SEQ ID NO: 98117 - DNA, 75 bp, synthetic construct
  source 1..75: mol_type = other DNA
gacataattttgctttccagaattcaacgaatacacaggaatttacaggtacgctggcattgtctgatacactct

SEQ ID NO: 98118 - DNA, 75 bp, synthetic construct
  source 1..75: mol_type = other DNA
aacgctggacggtacgcgcggacgagccgcaagcgttccatattgaaggcgtgatgttccagatccgtaacgtga

SEQ ID NO: 98119 - DNA, 75 bp, synthetic construct
  source 1..75: mol_type = other DNA
ttgttaatggcattgttgaaataaggactgctcccgaagaatatcaaaacaagccagttctggttggttcacaaa

SEQ ID NO: 98120 - DNA, 75 bp, synthetic construct
  source 1..75: mol_type = other DNA
cgtgttgggtgggattgtggcagggttattagtcgccagcatgtataaaaagatcgttaacttacgtattcctga

SEQ ID NO: 98121 - DNA, 75 bp, synthetic construct
  source 1..75: mol_type = other DNA
acgccggaacagcgcttcgcgctggagcaggaacatctgcagccgttaccggatacggacttcgataccagttac

SEQ ID NO: 98122 - DNA, 75 bp, synthetic construct
  source 1..75: mol_type = other DNA
aacgcactgctgatgtgcgatgagtccccctgcgtaatagcaccagccagtccggtttcttcgccgtcaggcgca

SEQ ID NO: 98123 - DNA, 75 bp, synthetic construct
  source 1..75: mol_type = other DNA
aggattttatccagtaccagacaaatgccctgacgatgtttttaatctgtatgaggggctggcactggaaccaat

SEQ ID NO: 98124 - DNA, 75 bp, synthetic construct
  source 1..75: mol_type = other DNA
ttccccatccgggtgaatcatggctaccgttcagcggggtatagtgccagtgatgaaatcttaaaaggtctggtt

SEQ ID NO: 98125 - DNA, 75 bp, synthetic construct
  source 1..75: mol_type = other DNA
gggatttgccagtgaagaactacgtcatgagaaagctgcaattgaggtaatgaacaaaaagcgggcattttggtc

SEQ ID NO: 98126 - DNA, 75 bp, synthetic construct
  source 1..75: mol_type = other DNA
cctcagtatgtggttaccgccaaacatgtcagtggttctgacacgatgagcttcggatacgccaaaaacacctat

SEQ ID NO: 98127 - DNA, 75 bp, synthetic construct
  source 1..75: mol_type = other DNA
tgatgcgatctatcgctcgcacgacactatcggtccgtactatgtggttggccctggtattgcgatgcctcatgc

SEQ ID NO: 98128 - DNA, 75 bp, synthetic construct
  source 1..75: mol_type = other DNA
gaagaacgtacgctcgatctctacgtcaaaatgggcgagcaatatcaactgctcgacagctataaaatctgtaaa

SEQ ID NO: 98129 - DNA, 75 bp, synthetic construct
  source 1..75: mol_type = other DNA
gttctggctgcaatatctatatttagtagtgcaaacagcgataaggaaggagcaattaatgcccttaagcaaaac

SEQ ID NO: 98130 - DNA, 75 bp, synthetic construct
  source 1..75: mol_type = other DNA
gtgtgtgatgctggtttacccatccccaaaagtacaacgcgtatcgatatggcattaacccagggtgtaccttct

SEQ ID NO: 98131 - DNA, 75 bp, synthetic construct
  source 1..75: mol_type = other DNA
acgacaaaaaccagatgctgtacagcatgaaggtgtgcccgccgctgtggcgcacagggctgcgccagaacttcc

SEQ ID NO: 98132 - DNA, 75 bp, synthetic construct
  source 1..75: mol_type = other DNA
gccaatgataccgcgtttgttgataccggcatcggtccgctcatcgtcaatggtcgagtccgcaaagtgattgct

SEQ ID NO: 98133 - DNA, 75 bp, synthetic construct
  source 1..75: mol_type = other DNA
tgtgggccggaaggctgcaaaaaatgggctgcccgagggaaaaaatcgccgtatcgcgtatgggcgtggacatga

SEQ ID NO: 98134 - DNA, 75 bp, synthetic construct
  source 1..75: mol_type = other DNA
agcgctggggggcatgggcggcaaataactatgaggatgttacatggtcgcccattgctgccggatttaagggac

SEQ ID NO: 98135 - DNA, 75 bp, synthetic construct
  source 1..75: mol_type = other DNA
acagcgtattgctgcgtgctgacgatcccctgatcgacatgaactacatcaccagtttcaccggtatgaccgata

SEQ ID NO: 98136 - DNA, 75 bp, synthetic construct
  source 1..75: mol_type = other DNA
ggttcgaggcttgaccggcctgaattattcaggttgctcaaggactgccggcacaacgatattctcttaattgag

SEQ ID NO: 98137 - DNA, 75 bp, synthetic construct
  source 1..75: mol_type = other DNA
atgtcgcagacagaaaatgcagtgacttcctcattgagtcaaaagcggtttgtgcgcagaggtaagcctatgtct

SEQ ID NO: 98138 - DNA, 75 bp, synthetic construct
  source 1..75: mol_type = other DNA
gcgtgttgctgcgtgccgacgatcccctgatcgacatgaactacatcaccagtttcaccggtatgaccgataaat

SEQ ID NO: 98139 - DNA, 75 bp, synthetic construct
  source 1..75: mol_type = other DNA
tgatgggcttattggtaaaaggctttataaagcggaaggtattattgaaggaatgcttatggctctgaatgtccg

SEQ ID NO: 98140 - DNA, 75 bp, synthetic construct
  source 1..75: mol_type = other DNA
tggcggatgaggaaggtattacccaggcgcagatgcttgaaaaactgattgaatcagagctgaaacgcagagcga

SEQ ID NO: 98141 - DNA, 75 bp, synthetic construct
  source 1..75: mol_type = other DNA
cttcctcatcaggtacaaagcgagcatacagaaaaggcaatcctctgacgctcgcagaacgtcaacaagcatcct

SEQ ID NO: 98142 - DNA, 75 bp, synthetic construct
  source 1..75: mol_type = other DNA
tacctgtataggaaagagactccagaaagctgagggggttgtagatggcatgctgatgctgctgggggggaagct

SEQ ID NO: 98143 - DNA, 75 bp, synthetic construct
  source 1..75: mol_type = other DNA
ttaccagttcgacctgctggcgaacggagaaacggttctgcaggatgcatccggagagaaacgttttgaaggtga

SEQ ID NO: 98144 - DNA, 75 bp, synthetic construct
  source 1..75: mol_type = other DNA
actgtatggctctgatgcgatgggcggtgtggtgaatatcattaccagaaagaatgcagacaaatggctctcttc

SEQ ID NO: 98145 - DNA, 75 bp, synthetic construct
  source 1..75: mol_type = other DNA
gatcaaagatcctgctacgttcaaaactggctgggttgttttactgcttctgctggtgggatttttcgtcctgga

SEQ ID NO: 98146 - DNA, 75 bp, synthetic construct
  source 1..75: mol_type = other DNA
ttctaatgacccagggcaccttggtggatgccaccatcattcaagcccccagctctaccaaaaacaaacacaaca

SEQ ID NO: 98147 - DNA, 75 bp, synthetic construct
  source 1..75: mol_type = other DNA
aaaatgccgtcggtgccatgctgacccccgggaccggccggatggtgcttgccaccggctttctcaccgtcaccg

SEQ ID NO: 98148 - DNA, 75 bp, synthetic construct
  source 1..75: mol_type = other DNA
cgttgatctacaagatccgattgaagttattcctcttctgattgaaaaatggcaagcaggtgcagatgtggttct

SEQ ID NO: 98149 - DNA, 75 bp, synthetic construct
  source 1..75: mol_type = other DNA
gacctttcttgaccccaaagatgccacacgggttcagggtttttttcagcatttgcaggtcaggtttggtgacgg

SEQ ID NO: 98150 - DNA, 75 bp, synthetic construct
  source 1..75: mol_type = other DNA
gcggcagatagcccagcgcatcaccggaagctgcggtatccccgtgaccatcaccgccgacgtctggcaggcgct

SEQ ID NO: 98151 - DNA, 75 bp, synthetic construct
  source 1..75: mol_type = other DNA
cgtccgacagttgtgctttccgacgcacagcaggttaatccggacaatatttcttggggataccgtggtggacgt

SEQ ID NO: 98152 - DNA, 75 bp, synthetic construct
  source 1..75: mol_type = other DNA
aagagtttgtcttattgctaccaagaaccccactggataccgcgctttcgctggctgaaactatccgcgtaagcg

SEQ ID NO: 98153 - DNA, 75 bp, synthetic construct
  source 1..75: mol_type = other DNA
ttgctctcaatgatgaacagaatttattctgtactattacttttcaacacgttatcgatgaaaacaaaacatata

SEQ ID NO: 98154 - DNA, 75 bp, synthetic construct
  source 1..75: mol_type = other DNA
cacgaaaaaatggtaaatgcagacgagctggcgcgactgaatgttgaacgtcatggggcgattcgcgttgggact

SEQ ID NO: 98155 - DNA, 75 bp, synthetic construct
  source 1..75: mol_type = other DNA
gacggcagcgcaaggtacaaatagcacgcagatcgcaaatacagcctttgttaaggcagctataacggcacttat

SEQ ID NO: 98156 - DNA, 75 bp, synthetic construct
  source 1..75: mol_type = other DNA
cggctcccccctgtttgcttatgattcctggcaaaaaaaatgggtgctgattggtgtcacctcctcaaagacaga

SEQ ID NO: 98157 - DNA, 75 bp, synthetic construct
  source 1..75: mol_type = other DNA
atgtggagatggtatcagaatgaggacatcggtgagtattattggcaaacagaactgggcacatgtaaaaataat

SEQ ID NO: 98158 - DNA, 75 bp, synthetic construct
  source 1..75: mol_type = other DNA
tggagtggcacaaatggcgctcatgcaccagctttcattcgatccaaaagagatagcactgctgcggcatggtcc

SEQ ID NO: 98159 - DNA, 75 bp, synthetic construct
  source 1..75: mol_type = other DNA
taccgttttctgacgtccgcgaggaactgccgcgcggcacgtttgcttatacccgtgttccgacgatgattattc

SEQ ID NO: 98160 - DNA, 75 bp, synthetic construct
  source 1..75: mol_type = other DNA
gatggttctgtggacatttcgataccaacaattacgtccagagggcgtgttactgcgctcaccggtacaacacaa

SEQ ID NO: 98161 - DNA, 75 bp, synthetic construct
  source 1..75: mol_type = other DNA
ccaatgccttagtcgaagccagctacaagctcacgttacaggagcagcgtttcctgttgctgtgcattagtcgat

SEQ ID NO: 98162 - DNA, 75 bp, synthetic construct
  source 1..75: mol_type = other DNA
aggtattgtcctggatgaaaaaaggacccggcttcatggcacgcctgtttataagatttgtgggcgttgcaatgg

SEQ ID NO: 98163 - DNA, 75 bp, synthetic construct
  source 1..75: mol_type = other DNA
agcgagcgccgcaaatgctgatacttcagcagaggatgcatcggagtcagcccggcaggcggcagaaagtgcagc

SEQ ID NO: 98164 - DNA, 75 bp, synthetic construct
  source 1..75: mol_type = other DNA
acggaaaatgatggtaaagcctttcctcagccagcaggtgttgcgttaccagtacaggaagctgcaacacaggaa

SEQ ID NO: 98165 - DNA, 75 bp, synthetic construct
  source 1..75: mol_type = other DNA
aatcagcaaaggacgcctgattcgcgtaaatcagaacggtaaatttcgttactgcataccgggcaataatttacc

SEQ ID NO: 98166 - DNA, 75 bp, synthetic construct
  source 1..75: mol_type = other DNA
gcctgcctgaaagacgagaaaaaagccctgatgcaacagctactgactggcaaacgtcgtgttaaggtcgatgag

SEQ ID NO: 98167 - DNA, 75 bp, synthetic construct
  source 1..75: mol_type = other DNA
taaccgcgacgattgaacaacgcggaccacaaacggctgatgagctggctacattgtttggtaccacatcacgca

SEQ ID NO: 98168 - DNA, 75 bp, synthetic construct
  source 1..75: mol_type = other DNA
cagcgtgcagagggtgtaagggtaaagggattgttctggatgaaaaaagaacccggtttcatggcgtaccggtat

SEQ ID NO: 98169 - DNA, 75 bp, synthetic construct
  source 1..75: mol_type = other DNA
agctggtcgcgaggctgaaacaacacatcccggagaagttttttaagatggtgaggtacttcaggttccttgcca

SEQ ID NO: 98170 - DNA, 75 bp, synthetic construct
  source 1..75: mol_type = other DNA
ccggcatatcagccagtcaggcagaagagagcgcggcaaatgctgacacttcagcaggggaggcatcggagtcag

SEQ ID NO: 98171 - DNA, 75 bp, synthetic construct
  source 1..75: mol_type = other DNA
gtcagtgcaacaaaagccgcagaactgacaggaggaacggtcatctttcctgcgttcaccgatgccgaaaaagcg

SEQ ID NO: 98172 - DNA, 75 bp, synthetic construct
  source 1..75: mol_type = other DNA
gaacggggaccggcaggtgatgctggtccggcaggcccgcaggggccgaaaggtgacaggggagagcggggagag

SEQ ID NO: 98173 - DNA, 75 bp, synthetic construct
  source 1..75: mol_type = other DNA
caatgatgggggctggtggtctccttggcattgccattcatgcgtcggtcggcgcccggatatcagcgcagaact

SEQ ID NO: 98174 - DNA, 75 bp, synthetic construct
  source 1..75: mol_type = other DNA
acagattcggcagcactgttgccctgtatcgaacaggcgagggaggatatccataccctgcgccagctgcagctt

SEQ ID NO: 98175 - DNA, 75 bp, synthetic construct
  source 1..75: mol_type = other DNA
cgcggctctggcgggcgttgccggaagcggtccgtctgagtccacacatctatatgatggctgccagcacaaccg

SEQ ID NO: 98176 - DNA, 75 bp, synthetic construct
  source 1..75: mol_type = other DNA
aactggtaaccagaaacaacatgaaatcattaaccacggaaacagcgctggatattctgattgcgtggctgcagg

SEQ ID NO: 98177 - DNA, 75 bp, synthetic construct
  source 1..75: mol_type = other DNA
aagaacgagaaagcgaacgttgaaagtgtctttacggttaacggctttagcttcagcggccaggcacaaaacgcc

SEQ ID NO: 98178 - DNA, 75 bp, synthetic construct
  source 1..75: mol_type = other DNA
tccgcaatggtgatgaatttttcgaaacacagagtcgcaatgtaaccgactggatgccactaccagaaccgccgc

SEQ ID NO: 98179 - DNA, 75 bp, synthetic construct
  source 1..75: mol_type = other DNA
agaaggggcgaaacgaccagttgcttaccgcgcttcgtgcgctgctgttaagccgcaagaatccgtttggtgata

SEQ ID NO: 98180 - DNA, 75 bp, synthetic construct
  source 1..75: mol_type = other DNA
acgcctcattagaaaaaatcgattttcgtaaagttcgtcacttgcttaatataaattttacaaatgcaaatctac

SEQ ID NO: 98181 - DNA, 75 bp, synthetic construct
  source 1..75: mol_type = other DNA
gcagatggtcactgtgacaatggcctcacgcaacgaagcacagtgcgaatggactatgcagtctgcaggaaaagc

SEQ ID NO: 98182 - DNA, 75 bp, synthetic construct
  source 1..75: mol_type = other DNA
atgaataaaatatactccctgaaatattgccatataactaaaagtctgattgctgtatccgaactggcccacagg

SEQ ID NO: 98183 - DNA, 75 bp, synthetic construct
  source 1..75: mol_type = other DNA
aaagcagagggaataatcgaaggtatgttaatggcattagacatttgcttagagatggatattgatgttactaag

SEQ ID NO: 98184 - DNA, 75 bp, synthetic construct
  source 1..75: mol_type = other DNA
tttacgatgactcgttgcctgaaaaaggacgcggtaatgttcgctggcgtacgcttatcgagcaaatgctcagtc

SEQ ID NO: 98185 - DNA, 75 bp, synthetic construct
  source 1..75: mol_type = other DNA
aacttaggttttcaaaagctacccttcgtcggatcggcgcaaactctgacggaagtggagtgctatgttttccgg

SEQ ID NO: 98186 - DNA, 75 bp, synthetic construct
  source 1..75: mol_type = other DNA
atgcggaaaaatataacgagtgggtgaggaaattttctgagcagatttttaaaattactggtgacgagaatgcgg

SEQ ID NO: 98187 - DNA, 75 bp, synthetic construct
  source 1..75: mol_type = other DNA
ttgtcagagcttacttacgcgcatccacgactgaacaggatgcaacacgcgccctggacacgataaataccttcg

SEQ ID NO: 98188 - DNA, 75 bp, synthetic construct
  source 1..75: mol_type = other DNA
gcttcgcttataccactttcccggctctgtgctaacggactaccggatactgaagaattacgtgaaaacttatgc

SEQ ID NO: 98189 - DNA, 75 bp, synthetic construct
  source 1..75: mol_type = other DNA
tactgaaaggctggcaggacagcggcgaaacgttccagaaatggacgcgtaccggttcgctttcaaactttcatg

SEQ ID NO: 98190 - DNA, 75 bp, synthetic construct
  source 1..75: mol_type = other DNA
gccctggaaactatcgaggcttttgccagggaaagaggcctgatcatttgcagctactatattgagaatgaatcc

SEQ ID NO: 98191 - DNA, 75 bp, synthetic construct
  source 1..75: mol_type = other DNA
ggtagtggcggcccgccttggaatcagccgtgaagatgcggtcaacgaactgtggaaactgaagcgccgcggtga

SEQ ID NO: 98192 - DNA, 75 bp, synthetic construct
  source 1..75: mol_type = other DNA
atggcatgggatatggcgcttggctggattatctggtgtcaccgcgccgccatgcttcagggtagccaacctgta

SEQ ID NO: 98193 - DNA, 75 bp, synthetic construct
  source 1..75: mol_type = other DNA
tgatttacgcgcgctgggcgaaaccatgaagtataccggtccggttgccgcaaaacttggtatcagtcttgaaga

SEQ ID NO: 98194 - DNA, 75 bp, synthetic construct
  source 1..75: mol_type = other DNA
ccggtggtccttaaatccgataacgcctttgctgcctatgggctggctggtaaatacgatgctgacggttttttc

SEQ ID NO: 98195 - DNA, 75 bp, synthetic construct
  source 1..75: mol_type = other DNA
cttaaccgctgcatccgagaaaacattgcgctggcctgtccgggcatcgcaatggagagaatcattgctgcctcc

SEQ ID NO: 98196 - DNA, 75 bp, synthetic construct
  source 1..75: mol_type = other DNA
cattgacgccagaaccaaacagccaatgtttacaccgtatttaattaaagacaccgaagtggtcgataaagacgg

SEQ ID NO: 98197 - DNA, 75 bp, synthetic construct
  source 1..75: mol_type = other DNA
taatgcagccagggatgcaacgaccgcaacagaaaaagcccgggagtcagcagaaagcgcacagtcagcggaaca

SEQ ID NO: 98198 - DNA, 75 bp, synthetic construct
  source 1..75: mol_type = other DNA
agttattgtggcgataccagatcagacagagtatgagccggcgcggaaactgctgggataacagcccaatggaac

SEQ ID NO: 98199 - DNA, 75 bp, synthetic construct
  source 1..75: mol_type = other DNA
gatttcattgcaaggctggccgccctggtaccgaagcccagagtcaacctaacccgcttccacggggtgttcgca

SEQ ID NO: 98200 - DNA, 75 bp, synthetic construct
  source 1..75: mol_type = other DNA
ggccggaacctggggacccgttgcctcagtggcgatgattacccgtgatggtcgttcctggaatgagtttgagta

SEQ ID NO: 98201 - DNA, 75 bp, synthetic construct
  source 1..75: mol_type = other DNA
agaacgacaggagccgcatccagacgatttatcagccggggagcttcacgccactcatcagggtcgaaactgcca

SEQ ID NO: 98202 - DNA, 75 bp, synthetic construct
  source 1..75: mol_type = other DNA
cgctttttgcgatcaggatgatatatgggaacctcttaaattgattgcagctacaactgagattattaaatataa

SEQ ID NO: 98203 - DNA, 75 bp, synthetic construct
  source 1..75: mol_type = other DNA
cgttacgccatcgtaaccggtcgtgcggaatacaatcctgcagcggatcttaccagcgcgatgtcagggcatgaa

SEQ ID NO: 98204 - DNA, 75 bp, synthetic construct
  source 1..75: mol_type = other DNA
agactgccaagcccaaagataaaccctacaagatggctgatggtggtggcctctacttattggttaaaactaacg

SEQ ID NO: 98205 - DNA, 75 bp, synthetic construct
  source 1..75: mol_type = other DNA
gtaaccgcctggacggaacgcgaagcgcgtaaccgttgcccgtcaggttgcgttgctgtattcgccgcccgtatc

SEQ ID NO: 98206 - DNA, 75 bp, synthetic construct
  source 1..75: mol_type = other DNA
attacgtattcgtgattacttccagaaacgttggctggatgcgccatttatcgataaagaatttggcgttcaacc

SEQ ID NO: 98207 - DNA, 75 bp, synthetic construct
  source 1..75: mol_type = other DNA
atggctacttggcaaggatcaaatggcggattattggctggtatcggcggcgtcaactcaaacgctccgaacgta

SEQ ID NO: 98208 - DNA, 75 bp, synthetic construct
  source 1..75: mol_type = other DNA
attacccgaaaaaaagcggggcgggtaatacgctattaccgcaaattaattatgttctgcaaggtcagatttggc

SEQ ID NO: 98209 - DNA, 75 bp, synthetic construct
  source 1..75: mol_type = other DNA
ctgaccgaacaccatctggaaattcagggagaagccttgcgcgatgccccactggtaacgggcggttctggtctg

SEQ ID NO: 98210 - DNA, 75 bp, synthetic construct
  source 1..75: mol_type = other DNA
caatgatgtcaaatccctgcccttccacctttttggataaaaatagaattattgctgctgagcttaatatcacaa

SEQ ID NO: 98211 - DNA, 75 bp, synthetic construct
  source 1..75: mol_type = other DNA
gctttggttaaaaaagacacaagtggtaatgatgtagctgaaggtgctttctcagcagttgcgaatttcaacctg

SEQ ID NO: 98212 - DNA, 75 bp, synthetic construct
  source 1..75: mol_type = other DNA
ttgtcgctgggtgtttatcctgaggtgtccctttctgatgccaggacggcaagggatgaggccaaaaggcttatc

SEQ ID NO: 98213 - DNA, 75 bp, synthetic construct
  source 1..75: mol_type = other DNA
atgcgtatcggcatgcggttgttgctgggctattttttactggtggcggtggcagcctggttcgtactggccatt

SEQ ID NO: 98214 - DNA, 75 bp, synthetic construct
  source 1..75: mol_type = other DNA
aggcaattaccctcttatgtttcccgggcgcaatgatccaaggaaaacaatgagtgaggccagcataaaccaagt

SEQ ID NO: 98215 - DNA, 75 bp, synthetic construct
  source 1..75: mol_type = other DNA
ttctgggcgcacttttctaccgttttatcagcgaaaatttttccagctatattgaagccggtgatgacagtatct

SEQ ID NO: 98216 - DNA, 75 bp, synthetic construct
  source 1..75: mol_type = other DNA
cgacttacaaagctggtgacaacactctgcactacagtgcttgggtcaaaaaatccagtgctgataatgcagcga

SEQ ID NO: 98217 - DNA, 75 bp, synthetic construct
  source 1..75: mol_type = other DNA
atcaatgcagccgtccagaccgcgcagatacagtaacaaacgaactgacagcagtaagatggagcgtttcttttg

SEQ ID NO: 98218 - DNA, 75 bp, synthetic construct
  source 1..75: mol_type = other DNA
atgcgtaatattgaaaccctcacgaccaaaaccggaccggatgacgcagggcttaatattttactgacagaggct

SEQ ID NO: 98219 - DNA, 75 bp, synthetic construct
  source 1..75: mol_type = other DNA
acggactgggttcagacacggaacagatgcggtatctgatggataacgcggccagacaacagaaaggactgggat

SEQ ID NO: 98220 - DNA, 75 bp, synthetic construct
  source 1..75: mol_type = other DNA
aaacggatatttatttcattcaggagagtgtttatggcaaaatcgggttgccagcttttggtaatacaataggac

SEQ ID NO: 98221 - DNA, 75 bp, synthetic construct
  source 1..75: mol_type = other DNA
aacataggggataaactagcaagaaaattcgaagccgcacttgggttacctaatgggtggcttgatttggtacat

SEQ ID NO: 98222 - DNA, 75 bp, synthetic construct
  source 1..75: mol_type = other DNA
cagtacggctgcaaccgttaccggcataaaccgccttggagcattctcggttgtggagggtaaagctgataatgt

SEQ ID NO: 98223 - DNA, 75 bp, synthetic construct
  source 1..75: mol_type = other DNA
tgggcagccacaacgatatgacctttggtgaaggcacctcatcccgtgacaccctgcgcgacagtgcaaaacaca

SEQ ID NO: 98224 - DNA, 75 bp, synthetic construct
  source 1..75: mol_type = other DNA
gtagatgttgaagagaaaacagttaatgatttctttaaaaacaacacactctcacctttttctgtaagaaggttt

SEQ ID NO: 98225 - DNA, 75 bp, synthetic construct
  source 1..75: mol_type = other DNA
catgttcgtacctgctgaaagaagaaacaccggacgaatcgattcgtgctgaggtgttcagctacatcccaaggc

SEQ ID NO: 98226 - DNA, 75 bp, synthetic construct
  source 1..75: mol_type = other DNA
ctggcatctggcgtgaaaaaagcgacactggcgacgggggctgccgcaaccgttgccgcgccagtcttcagtctg

SEQ ID NO: 98227 - DNA, 75 bp, synthetic construct
  source 1..75: mol_type = other DNA
atgtctgactggaacccctctttatatttgcacttttccgctgaacgatcgcgtccggcggtggagctgcttgcc

SEQ ID NO: 98228 - DNA, 75 bp, synthetic construct
  source 1..75: mol_type = other DNA
aaaagctctaaaaaacgggcggttacaaacgagcgagtaacaaaaatacgcgaactgaaacgaaaaggtaacgct

SEQ ID NO: 98229 - DNA, 75 bp, synthetic construct
  source 1..75: mol_type = other DNA
cgcgtgagaaggggatgaaagtgatcaccctgaccggtaaagacggcggcaaaatggctggcacggcggatatcg

SEQ ID NO: 98230 - DNA, 75 bp, synthetic construct
  source 1..75: mol_type = other DNA
tagctttatcgatctgtttgcagggataggtggactgcgaagcggatttgatgccatcggtggtaaatgtctttt

SEQ ID NO: 98231 - DNA, 75 bp, synthetic construct
  source 1..75: mol_type = other DNA
tcgtggctcactacatgacgctctgggcggcagatagccgggcaatgctcgtcggcggcccgggtggctcaacca

SEQ ID NO: 98232 - DNA, 75 bp, synthetic construct
  source 1..75: mol_type = other DNA
cgcaaaagttgcaggactggatgatgccgataccgtaacgcttaaggaagtgacagaagcattgttgcattgtgc

SEQ ID NO: 98233 - DNA, 75 bp, synthetic construct
  source 1..75: mol_type = other DNA
ggatggtcctgaacaactgcaggctcgtttttttggtgcattgcccgccgatgccggtgaggccgaagaaagggt

SEQ ID NO: 98234 - DNA, 75 bp, synthetic construct
  source 1..75: mol_type = other DNA
ttccgataacgccggttacgccaaccccgttcagttcaccaccagcgaaattggcgtttccggtggtgaaggtaa

SEQ ID NO: 98235 - DNA, 75 bp, synthetic construct
  source 1..75: mol_type = other DNA
gcatcggaatcggtcatccgggcgataaaaataaagttgtcggctttgtgttaggcaaaccgcctgttagtgaac

SEQ ID NO: 98236 - DNA, 75 bp, synthetic construct
  source 1..75: mol_type = other DNA
atccgttgatgaactccatcagcaaggcgctgggctacgcgcactatctcaacaatccgtggttccagctctacc

SEQ ID NO: 98237 - DNA, 75 bp, synthetic construct
  source 1..75: mol_type = other DNA
actgagaacacaaactaaaggtacaggctgctcaatgattcaggtcttgagcgataaggtttgcaagcttgctga

SEQ ID NO: 98238 - DNA, 75 bp, synthetic construct
  source 1..75: mol_type = other DNA
acaactcgcagcttggagatacccactataaccgccaggttatctttaccgataagcaacaagaaagcgtgatgg

SEQ ID NO: 98239 - DNA, 75 bp, synthetic construct
  source 1..75: mol_type = other DNA
gccacaatacgcagcagctgggaatgcggctggtgctggatggcgtgtttaaccacagtggcgattcccatgcct

SEQ ID NO: 98240 - DNA, 75 bp, synthetic construct
  source 1..75: mol_type = other DNA
ggcgtcataatataatttgtagtgagtgccgtaaaagagaagttatgcagcgtgtactggcgttttatcggggaa

SEQ ID NO: 98241 - DNA, 75 bp, synthetic construct
  source 1..75: mol_type = other DNA
ggtgcgttctttatcgatatcgtcaatgcgctggtaattaagttgtatttgatgttgccgatttttgccggttaa

SEQ ID NO: 98242 - DNA, 75 bp, synthetic construct
  source 1..75: mol_type = other DNA
atactatgaagagttagatatttgcctcagagcaaaagcaaagaactttaaattaggtatttgctcagaaagttt

SEQ ID NO: 98243 - DNA, 75 bp, synthetic construct
  source 1..75: mol_type = other DNA
gacgactttataatcttgcgactgtgggcgtattactttgcttgttctatggcctgattattatgggactggcga

SEQ ID NO: 98244 - DNA, 75 bp, synthetic construct
  source 1..75: mol_type = other DNA
ctgaaaatgataccgttctggtttatggtgccggtccaatcggcctgacgatcgttcaggtattaaaaggcgtct

SEQ ID NO: 98245 - DNA, 75 bp, synthetic construct
  source 1..75: mol_type = other DNA
gcatctatgaaaaagcgctccccgccggggagtgctggctggaacggctgcaactggcaaaaacgttaggcttcg

SEQ ID NO: 98246 - DNA, 75 bp, synthetic construct
  source 1..75: mol_type = other DNA
acagcgttgctcagatgtatcagcagaacccttcaggatttggtgagtttgttgatcaccttgggatggctgctc

SEQ ID NO: 98247 - DNA, 75 bp, synthetic construct
  source 1..75: mol_type = other DNA
ggtaaaccgtacaaccggacaaaatttttatgggacggaatgcggctggcgcaggagagcaggccggagggaaca

SEQ ID NO: 98248 - DNA, 75 bp, synthetic construct
  source 1..75: mol_type = other DNA
caccaccggatgaaacacccggaaacggcgctggtggtggtcgattacctcggcctgattaaaacccgcagcacg

SEQ ID NO: 98249 - DNA, 75 bp, synthetic construct
  source 1..75: mol_type = other DNA
gattgactgcggcgatcttccgctggcgctgcgtattggtgcatatgtggtccgtcacaacctcatcatgccgga

SEQ ID NO: 98250 - DNA, 75 bp, synthetic construct
  source 1..75: mol_type = other DNA
cattcgatttatctcaagcctgagcaattttcttagcaagtcggctacgaaggataagcagctgtataaaccggt

SEQ ID NO: 98251 - DNA, 75 bp, synthetic construct
  source 1..75: mol_type = other DNA
aacaactgggaaaagctgcagaaagctctggcaccagcgctcaatcagcgtatcagagataaaactgattatgga

SEQ ID NO: 98252 - DNA, 75 bp, synthetic construct
  source 1..75: mol_type = other DNA
ggcgacaactggcagcaccagaacgcccaccggggccaacgccaattgagttgctgaaacaggaatatgagcgcc

SEQ ID NO: 98253 - DNA, 75 bp, synthetic construct
  source 1..75: mol_type = other DNA
aaggctgattgatgaatgtccggagccattaaagtctgttgttgaatttgcactggcaacaggcttaagacgctc

SEQ ID NO: 98254 - DNA, 75 bp, synthetic construct
  source 1..75: mol_type = other DNA
gtgaactggcgctctctatccctcgcgcttcggctctgtttcgtaaatatgatatggattactgctgcggcggta

SEQ ID NO: 98255 - DNA, 75 bp, synthetic construct
  source 1..75: mol_type = other DNA
ctggaagcatggaaaaagtatcgggtattgctgaaccgtgttgatacgtcaactgcacaggatattgaatggcca

SEQ ID NO: 98256 - DNA, 75 bp, synthetic construct
  source 1..75: mol_type = other DNA
ggatcacttttcatccgtcgttgacacaacactggctctggtatgcgtacaacactaaaactggcggtgtgttgg

SEQ ID NO: 98257 - DNA, 75 bp, synthetic construct
  source 1..75: mol_type = other DNA
cggcatggagcccggcgacctggtatttattgctgctcgtccttcgatgggtaaaaccgaactggcgctggatat

SEQ ID NO: 98258 - DNA, 75 bp, synthetic construct
  source 1..75: mol_type = other DNA
tgctggccagcgacaatgtgcatgacaacagtcgtgcctatttcctggccgatcgtcagtctgaggtgccgggac

SEQ ID NO: 98259 - DNA, 75 bp, synthetic construct
  source 1..75: mol_type = other DNA
aaattatccagccggacactgaccattgccctgaatgtgacgagccgctgcactatatccgcgatgcggtgagtg

SEQ ID NO: 98260 - DNA, 75 bp, synthetic construct
  source 1..75: mol_type = other DNA
gcactgacgctgctggatgcaaaacagcaggagctgcagaagcagactgccctcaatgacctgaagaaaaagacc

SEQ ID NO: 98261 - DNA, 75 bp, synthetic construct
  source 1..75: mol_type = other DNA
gctcatcctgtcatcgcgcgccattggcgggctggatgtattccttgcgccgttcttcccggatgcaacgatgct

SEQ ID NO: 98262 - DNA, 75 bp, synthetic construct
  source 1..75: mol_type = other DNA
tgaacaactggcaaacatggaacttccagtgcccttcaggtcatgtattgtctggtataaatgttcaggatacag

SEQ ID NO: 98263 - DNA, 75 bp, synthetic construct
  source 1..75: mol_type = other DNA
tgtagcaaacaacgatccggttacagattcttttatggtggcaaaagcatttggaaagctgccgaagaacgtggt

SEQ ID NO: 98264 - DNA, 75 bp, synthetic construct
  source 1..75: mol_type = other DNA
taatgaaatttcgtaagtgctcttctttcgacacactggaaaaagtattcgaacgactctgtgaaaaaaatgcag

SEQ ID NO: 98265 - DNA, 75 bp, synthetic construct
  source 1..75: mol_type = other DNA
gaatcagggactggagaaatccagaacgctgatgaccggtattgatgaactggacgcaaaaacaggggggatgga

SEQ ID NO: 98266 - DNA, 75 bp, synthetic construct
  source 1..75: mol_type = other DNA
ttcgttttattgatgcctgtcaccatcaacaaacaaaaaacctgtggtccttagcagtatacacaggcattcgtc

SEQ ID NO: 98267 - DNA, 75 bp, synthetic construct
  source 1..75: mol_type = other DNA
gaacatcatcaaccttgaatggcaacaaatagacatgcagcgccgggtggcatggataaacccggaagagagtaa

SEQ ID NO: 98268 - DNA, 75 bp, synthetic construct
  source 1..75: mol_type = other DNA
ctgggaatgccggtacaaactcaccctgatgcgcaattcgctggtgcaattggcgcggcggtgatcggtcagcgg

SEQ ID NO: 98269 - DNA, 75 bp, synthetic construct
  source 1..75: mol_type = other DNA
gtgacgtgatcgcccgttaccagcgcatgctgggcaaaaacgttctgcagccgatcggctgggacgcgtttggtc

SEQ ID NO: 98270 - DNA, 75 bp, synthetic construct
  source 1..75: mol_type = other DNA
ggcatatgaccatcgaaaagctgaactgacaatgaagaaactctacgataaagtacccgcaagcgtatggacact

SEQ ID NO: 98271 - DNA, 75 bp, synthetic construct
  source 1..75: mol_type = other DNA
gaacctctggttgtctgtgaaaatacgggggatgaggttatgaaggagtgtcttcgtccaaaccgaagagtggtg

SEQ ID NO: 98272 - DNA, 75 bp, synthetic construct
  source 1..75: mol_type = other DNA
ctttggaaccggtcatcacttaatcaatgatggcagcattgtcaaaggatttgggcttaaaacaactcttaatag

SEQ ID NO: 98273 - DNA, 75 bp, synthetic construct
  source 1..75: mol_type = other DNA
gtgctgacaacgcaaaaacgaaaatttgcgctggcgctcatgtccgggaaaaacaaaacagcgtcagccattgcc

SEQ ID NO: 98274 - DNA, 75 bp, synthetic construct
  source 1..75: mol_type = other DNA
cactggaagcatggtttgatgttgaacgctatgaggcgatagagaaactcaccttacagcatttttatgttgagg

SEQ ID NO: 98275 - DNA, 75 bp, synthetic construct
  source 1..75: mol_type = other DNA
tggagatctaatatcattaggtggtcatgcaggacttggcgttgcgtttgctaaaaagaaaggtgaaatgttatc

SEQ ID NO: 98276 - DNA, 75 bp, synthetic construct
  source 1..75: mol_type = other DNA
gttgggcttatttagccgttgtgcttgatctgttttcccgtaaaccggttggctgggcgatgtcatttttcccgg

SEQ ID NO: 98277 - DNA, 75 bp, synthetic construct
  source 1..75: mol_type = other DNA
cggcgacggcgcgcccgcgctgtggtttgataatattcgcggctttaccgatgcccgcgtggcgatgaataccat

SEQ ID NO: 98278 - DNA, 75 bp, synthetic construct
  source 1..75: mol_type = other DNA
gttaccgctgccactgagcgcgaagcacgcgcccggctgccgcacgcacatctgatttttgtcgcccgtatccgt

SEQ ID NO: 98279 - DNA, 75 bp, synthetic construct
  source 1..75: mol_type = other DNA
acgcactgcaacagtggcatcatttgtttgaagctgaaggggcgaaacgctccccgcaagcacagcagcatttac

SEQ ID NO: 98280 - DNA, 75 bp, synthetic construct
  source 1..75: mol_type = other DNA
tctggcccccggcctgctgtgcgcagacgggcagtaccgccagatagtcaccgtggaagatgcagtgcgcggcgg

SEQ ID NO: 98281 - DNA, 75 bp, synthetic construct
  source 1..75: mol_type = other DNA
tgccgctggcgcttatcagtgaagacggcaatacggcgtggagcgcggaatatgatgaatggggcaaccagctta

SEQ ID NO: 98282 - DNA, 75 bp, synthetic construct
  source 1..75: mol_type = other DNA
atggaatgtcggtccctgagcatccggctaaccggattttttatgtcagaaatgaacaaaaaaacaaactctata

SEQ ID NO: 98283 - DNA, 75 bp, synthetic construct
  source 1..75: mol_type = other DNA
cgacatggataactacggttcaactgatgttcgtaaggcattaattaataaatgggtcagcgaagtgaagatggg

SEQ ID NO: 98284 - DNA, 75 bp, synthetic construct
  source 1..75: mol_type = other DNA
caacgccagccagaaacaactgcttccggcgctgaccgaagcatgggccaaaaatccgtctctggatcacctgcc

SEQ ID NO: 98285 - DNA, 75 bp, synthetic construct
  source 1..75: mol_type = other DNA
tctggacggtatcgtgaagctgaaccgctttgaaagtaacgtagccggtaaaatgagcagcggtggagccgccaa

SEQ ID NO: 98286 - DNA, 75 bp, synthetic construct
  source 1..75: mol_type = other DNA
ctgaggttcaacgccgtactggttacagcaaagcgtggatttatcggctcatcaaagaacagcgattccctcaat

SEQ ID NO: 98287 - DNA, 75 bp, synthetic construct
  source 1..75: mol_type = other DNA
gtctgccggggcagcagcatgatgaggaatcagggctgtactataaccggaaccggtactatgacccgctacagg

SEQ ID NO: 98288 - DNA, 75 bp, synthetic construct
  source 1..75: mol_type = other DNA
tccggatattctcgacgcctgtaaaaaagcgatgagcgccgttgagccagatcttaattttattcgtgtagatga

SEQ ID NO: 98289 - DNA, 75 bp, synthetic construct
  source 1..75: mol_type = other DNA
gggaaaagtgctgcccgcgttgtggtactggggtatacagcagggaggggggggctgcaggaaggcaactggaag

SEQ ID NO: 98290 - DNA, 75 bp, synthetic construct
  source 1..75: mol_type = other DNA
ccctcttaccgtcagtgggtcgaaattcaggctgctcagggagacagggctgctgtatcgcagctgagaggctgg

SEQ ID NO: 98291 - DNA, 75 bp, synthetic construct
  source 1..75: mol_type = other DNA
tgctggaagcctggaaaaagtatcgggtgttgctgaaccgtgttaatacaacaactgcaccggatattgaatggc

SEQ ID NO: 98292 - DNA, 75 bp, synthetic construct
  source 1..75: mol_type = other DNA
tgaacgcgtcgaactctcgtcgctatcaactacagatgagcgatggtcgcccgttacatgtgatttctggcgatc

SEQ ID NO: 98293 - DNA, 75 bp, synthetic construct
  source 1..75: mol_type = other DNA
gaaactgttcagtaccaacccgcagatggaaggcttcttctacatggcaagccagtacaaagagaagattgctaa

SEQ ID NO: 98294 - DNA, 75 bp, synthetic construct
  source 1..75: mol_type = other DNA
atgagcaagaaaaaagggaaaacaccgcgaccagcggcaaaaaaaatgaccgccagcgctccgaaaatggaggca

SEQ ID NO: 98295 - DNA, 75 bp, synthetic construct
  source 1..75: mol_type = other DNA
cagtcattatacgagcaggcagttccggcagttattgtggcgataccagatcagacagagtatgagccggcgcgg

SEQ ID NO: 98296 - DNA, 75 bp, synthetic construct
  source 1..75: mol_type = other DNA
gctgaagcaatcgctacagcaagggccaaatgccgtgcggcgattgcagagcaggccaaagaagaagttaaggaa

SEQ ID NO: 98297 - DNA, 75 bp, synthetic construct
  source 1..75: mol_type = other DNA
atgaaactaaagaccacattgttcagcaatgtatatcagtttaaggatgtaaaagaggtgctggctaaagccaac

SEQ ID NO: 98298 - DNA, 75 bp, synthetic construct
  source 1..75: mol_type = other DNA
ggtgttctacacgcggatacagcacggcgaaccacaggtggagagccggtacctctatgacccgctgggccgccg

SEQ ID NO: 98299 - DNA, 75 bp, synthetic construct
  source 1..75: mol_type = other DNA
gaaaaagtatcgggtgttgctgaaccgtgttgatacatcaactgcacctgatattgagtggcctgtaatacctga

SEQ ID NO: 98300 - DNA, 75 bp, synthetic construct
  source 1..75: mol_type = other DNA
tttccggcagcctgcaacaggctgaacggtttgtacagctgggctacaaaatcggcgtaggcggtactatcacct

SEQ ID NO: 98301 - DNA, 75 bp, synthetic construct
  source 1..75: mol_type = other DNA
tacagtctataatattgactctttgaatgagccatattcattaataaaagccatacttatagcacaaagggcaaa

SEQ ID NO: 98302 - DNA, 75 bp, synthetic construct
  source 1..75: mol_type = other DNA
gtacagcgccgggtgaaaggtgtggtgacctggtttgaactgggggagaacgacaaaaaccagatgctgtacagc

SEQ ID NO: 98303 - DNA, 75 bp, synthetic construct
  source 1..75: mol_type = other DNA
aatcgaaaaggaagaaacagcgaaacttgatcagcttgtccgctctaatcctcgcttaagtcattttggcaacga

SEQ ID NO: 98304 - DNA, 75 bp, synthetic construct
  source 1..75: mol_type = other DNA
ggcgctggtcttggcgcggttggggcttatgcaatgcataaggctggcggtagcggaagtggaggctctaaaacg

SEQ ID NO: 98305 - DNA, 75 bp, synthetic construct
  source 1..75: mol_type = other DNA
gaccaaccagagccgctggtttggcctgccactggatgaactgatccccgcagcaatctgtattggctggggtat

SEQ ID NO: 98306 - DNA, 75 bp, synthetic construct
  source 1..75: mol_type = other DNA
aggggcgaaatcttctggtgaatataaaagacatcagtttcgttcttcagaagggtgttttttgtgaacttcata

SEQ ID NO: 98307 - DNA, 75 bp, synthetic construct
  source 1..75: mol_type = other DNA
ggacaggattcgggaaataaacggctggctcggccaggaggtcatccgctttaaaaactactcactggacactga

SEQ ID NO: 98308 - DNA, 75 bp, synthetic construct
  source 1..75: mol_type = other DNA
tgggagcagagattaagcaacctatcgtgaaggacagttcaacgggaaaaggcaagcctaaacaaactctgaact

SEQ ID NO: 98309 - DNA, 75 bp, synthetic construct
  source 1..75: mol_type = other DNA
tatcggcattggtgctcatgcccattctgtcattattggtccccacggacacaccatcaccgttaacgctacggg

SEQ ID NO: 98310 - DNA, 75 bp, synthetic construct
  source 1..75: mol_type = other DNA
atgagcaaagtacgcgttatttttgaatttaatcatgtttcgcatgacgaaaagttggcaggcaatgactgtgtt

SEQ ID NO: 98311 - DNA, 75 bp, synthetic construct
  source 1..75: mol_type = other DNA
ctcttgaacggttcaaattttatctggaacaacgcggctggatagttgcccgtaaagagcaactggtggaaaggc

SEQ ID NO: 98312 - DNA, 75 bp, synthetic construct
  source 1..75: mol_type = other DNA
gccttcctgtcgctggtttacgacttggtacagtagttgaacagtgccgcatggtaagtaggggggattatctaa

SEQ ID NO: 98313 - DNA, 75 bp, synthetic construct
  source 1..75: mol_type = other DNA
gccaaattacaacaagccgaacagcgcgtacaaattctgctgtctgacaatgaagacgcctctctaacccctttt

SEQ ID NO: 98314 - DNA, 75 bp, synthetic construct
  source 1..75: mol_type = other DNA
ccgtagaggtgctcttagaacatctgaataaacgcgatgttcagcttcgtgacgttaaccgaactattgttacta

SEQ ID NO: 98315 - DNA, 75 bp, synthetic construct
  source 1..75: mol_type = other DNA
aggcgaggtatcggtgattgtctggatgaggctgagcaagagcttatcgttaccattaacaaatatgccagtcag

SEQ ID NO: 98316 - DNA, 75 bp, synthetic construct
  source 1..75: mol_type = other DNA
agcgcctgctcgacaagaaaacgatggaaaatgaactcctcaaagaatcaaagaagccgttgaatatggacgggc

SEQ ID NO: 98317 - DNA, 75 bp, synthetic construct
  source 1..75: mol_type = other DNA
tacatggatatctgcatggcgatgatacgttgcgtggatgcgatttacatgctgaaaggctggcagcggtcggca

SEQ ID NO: 98318 - DNA, 75 bp, synthetic construct
  source 1..75: mol_type = other DNA
tatatggcaggacaggtacaaggggaatacgtggagttgagcgacggcactttatcgtggttagggaacgccttg

SEQ ID NO: 98319 - DNA, 75 bp, synthetic construct
  source 1..75: mol_type = other DNA
ttctctaccttaacctgtctggaagtgatggcgggcggcgtgtcgaaaggccatgcgctggaagcggtggcgaag

SEQ ID NO: 98320 - DNA, 75 bp, synthetic construct
  source 1..75: mol_type = other DNA
gccccggcgtatcgacaaatcatcaacgcgatagataatatgacagacattgagcaggaaaaagtcgcgcaattt

SEQ ID NO: 98321 - DNA, 75 bp, synthetic construct
  source 1..75: mol_type = other DNA
agctcaatgtttgacgaccatcctgcatccgccgaacgcgcccagcatattcgcgatcgcatgagcgcggatggg

SEQ ID NO: 98322 - DNA, 75 bp, synthetic construct
  source 1..75: mol_type = other DNA
cgttgtaaggtcacgagctctcgtgtcatcgacaccctatgcgctttaccatgatggctataaagggtttactga

SEQ ID NO: 98323 - DNA, 75 bp, synthetic construct
  source 1..75: mol_type = other DNA
cgcgcactttcgctggcgaatatcgctaaattgtccgaagaagagttgctattcatcagtggcgaaagccaggtt

SEQ ID NO: 98324 - DNA, 75 bp, synthetic construct
  source 1..75: mol_type = other DNA
atgccatacgcaatggtgtatggacgtataacagcgttgcccgtccgctgacgatgtcagagatggtggtgatgt

SEQ ID NO: 98325 - DNA, 75 bp, synthetic construct
  source 1..75: mol_type = other DNA
atgaaatctaatgcttttgacgtcatggggaaggttgcatggctatgggcctgttctccgttgcataaaaaatgg

SEQ ID NO: 98326 - DNA, 75 bp, synthetic construct
  source 1..75: mol_type = other DNA
aggggaacgttcatttacgtttatggtccgccccagtgccgatctttttttagagacgacagacttgccctgctg

SEQ ID NO: 98327 - DNA, 75 bp, synthetic construct
  source 1..75: mol_type = other DNA
atgaaggtgattctggctaccaggaatcgctatctggagtatggtctgcaggcgttactgaaggaacacagtgtg

SEQ ID NO: 98328 - DNA, 75 bp, synthetic construct
  source 1..75: mol_type = other DNA
gaagtgggctggtcacacgtcttcttctttatgggcggtctggggattgtcatcagctttatctggttgaaagtc

SEQ ID NO: 98329 - DNA, 75 bp, synthetic construct
  source 1..75: mol_type = other DNA
tgattcatttgcggtaaatgtttatcatttattgcatgcaacacaggtattacatatgtccagtaatcacgaaac

SEQ ID NO: 98330 - DNA, 75 bp, synthetic construct
  source 1..75: mol_type = other DNA
atcaggaaacaatacagcagtggtaaaaagacatttttcgacattgaagtagatgtattaaaggatgaacttgaa

SEQ ID NO: 98331 - DNA, 75 bp, synthetic construct
  source 1..75: mol_type = other DNA
atgacagaaacaacctcacaacaagatgattatgaaggcatttgtctggagcctgactcatttgcggtaaatgtt

SEQ ID NO: 98332 - DNA, 75 bp, synthetic construct
  source 1..75: mol_type = other DNA
tatgtctacggccttatgttcaggcaccagaggcggcaaaaaatatctcagaaagtttcgtggtggagaaggaga

SEQ ID NO: 98333 - DNA, 75 bp, synthetic construct
  source 1..75: mol_type = other DNA
tatatcagacagcagacccgtttatcggagagccatgatgataattatacgttacggcaggagaaaacatgggag

SEQ ID NO: 98334 - DNA, 75 bp, synthetic construct
  source 1..75: mol_type = other DNA
aacgaaaacactcggcagcgaaattctgagttttgcatgtgagtatacaaaagctgctgccgaaaaagaattagc

SEQ ID NO: 98335 - DNA, 75 bp, synthetic construct
  source 1..75: mol_type = other DNA
taatcacgaaacgaaaacactcggcagcgaaattctgaattttgcatgtgagtatgcaaaagctgctgccgaaaa

SEQ ID NO: 98336 - DNA, 75 bp, synthetic construct
  source 1..75: mol_type = other DNA
gggctgttatttcgctgtcgttgatgaccggatggctaactactggacagccgttgaagacaagctgctctacca

SEQ ID NO: 98337 - DNA, 75 bp, synthetic construct
  source 1..75: mol_type = other DNA
agtaatattaactttctgttgatgaaagcgttacctacattccgtgcttttagtcgtgatgcaattttgaaaaat

SEQ ID NO: 98338 - DNA, 75 bp, synthetic construct
  source 1..75: mol_type = other DNA
caacggagcacagcaatggctgaaacaacatcgctacgtccgcagtgggctggtctggctgtatgcacatgacct

SEQ ID NO: 98339 - DNA, 75 bp, synthetic construct
  source 1..75: mol_type = other DNA
ataccgatggcatctattatcagttcagaactctggatagcactatccctgtctcaacaacaataggacaatggc

SEQ ID NO: 98340 - DNA, 75 bp, synthetic construct
  source 1..75: mol_type = other DNA
aatgcggcaatgcgccgctacttgcaggcggtgacgcatccgcaatgggcgtgggatgtgggcctgaacggtcgt

SEQ ID NO: 98341 - DNA, 75 bp, synthetic construct
  source 1..75: mol_type = other DNA
tctgaacttgctgccgccatgaagcagattaaagaactccagcgcctgctcggcaagaaaacgatggaaaatgaa

SEQ ID NO: 98342 - DNA, 75 bp, synthetic construct
  source 1..75: mol_type = other DNA
tattgcagatgcggtgaaaggtgatatcgccattctggcggatagcggaattcgtaacgggcttgatgtcgtgcg

SEQ ID NO: 98343 - DNA, 75 bp, synthetic construct
  source 1..75: mol_type = other DNA
ttacgtcgatttaacagcgccacttaattcagacgatgagctcatgatgaagtataacttcaggttcctgaccga

SEQ ID NO: 98344 - DNA, 75 bp, synthetic construct
  source 1..75: mol_type = other DNA
taacttcgttcgtcacgggctgcgtgcccgcctgaaacgtatcgcccgtgtgaatgaacgctttgccaccccggc

SEQ ID NO: 98345 - DNA, 75 bp, synthetic construct
  source 1..75: mol_type = other DNA
gggtgcggtcatgcgcctttcctgtgcgacatggtggaacagtcagttaagacacctccgggacatctggcgtga

SEQ ID NO: 98346 - DNA, 75 bp, synthetic construct
  source 1..75: mol_type = other DNA
tttctgatccagaatggttacgacgccagattggtgttgtattgcaggaaaatactctattaaatcgtagtatta

SEQ ID NO: 98347 - DNA, 75 bp, synthetic construct
  source 1..75: mol_type = other DNA
tgcagcgttccggtgatgaggccggggccttacaggcggcgaacgatatcgccacgaaaggctttgatgagcaga

SEQ ID NO: 98348 - DNA, 75 bp, synthetic construct
  source 1..75: mol_type = other DNA
agccgctgtttacggctgaagcggattacggcctggtgctgctggcgcatcagcaaaatattcttgtccagatgc

SEQ ID NO: 98349 - DNA, 75 bp, synthetic construct
  source 1..75: mol_type = other DNA
cgaatcagtcgcggcgtgaggcattacagggaataagtgatgccgacagacgacgtgaagaaattgaggccgcga

SEQ ID NO: 98350 - DNA, 75 bp, synthetic construct
  source 1..75: mol_type = other DNA
aaggccgcgtatgaccttgctaacgcaaaatataccgctcaggacgccacgacggcacaaaaagggatagtccag

SEQ ID NO: 98351 - DNA, 75 bp, synthetic construct
  source 1..75: mol_type = other DNA
cgcagcagggcagtcgccctaaaacaaagttagccattacgggggttgaattgaaaatttcattgatttctgcaa

SEQ ID NO: 98352 - DNA, 75 bp, synthetic construct
  source 1..75: mol_type = other DNA
tatcctattgatatgaattggaaggggggggttacatggagaatagtgaccgattatggtgggatcagtaaccaa

SEQ ID NO: 98353 - DNA, 75 bp, synthetic construct
  source 1..75: mol_type = other DNA
aagacgtactggacgaacaactggcaggactagcgaaggcgcatccatcgctgacactgcatcaggatccggtgt

SEQ ID NO: 98354 - DNA, 75 bp, synthetic construct
  source 1..75: mol_type = other DNA
gctgctgacaggacacgctttccaccctgcgcctaagtctcatgaaccgtttaaccggcgggaggctgaacgcta

SEQ ID NO: 98355 - DNA, 75 bp, synthetic construct
  source 1..75: mol_type = other DNA
gtccagcgtctggcagaagccaacgactttcctcccgtcgatgaaaccaaacgcggtcgctatcagcaaatcaat

SEQ ID NO: 98356 - DNA, 75 bp, synthetic construct
  source 1..75: mol_type = other DNA
acggtgttgggttcgattttaggtcttatcgctctgcaactggagttaatctcgttaccgctgatgttagtctgg

SEQ ID NO: 98357 - DNA, 75 bp, synthetic construct
  source 1..75: mol_type = other DNA
ggcaccgaagagatttatttcgccacgttccatctcggcgtggatggcggcattgaagttaccgccagccataat

SEQ ID NO: 98358 - DNA, 75 bp, synthetic construct
  source 1..75: mol_type = other DNA
gcgattgaaggcgaggccctggatgatatcactgtcgccggcgtggtgacacacaccatcatcgatgtgagaagt

SEQ ID NO: 98359 - DNA, 75 bp, synthetic construct
  source 1..75: mol_type = other DNA
gaactttcccgaattgacgaggcgatgaataatcacattaaaactcatttcaaagagcttgcagctcgtttgagc

SEQ ID NO: 98360 - DNA, 75 bp, synthetic construct
  source 1..75: mol_type = other DNA
taaaacagttgaaaatcttttcgcaacagcctcttcggcatctgcgggaacggctgataaacaaattgctgatgc

SEQ ID NO: 98361 - DNA, 75 bp, synthetic construct
  source 1..75: mol_type = other DNA
atgatttatacgcatgaaatgctatgcgatgcccgccgggcgttacatgaactgatgatcggacgtgctgtggtt

SEQ ID NO: 98362 - DNA, 75 bp, synthetic construct
  source 1..75: mol_type = other DNA
atacctcgcgaaaactgatagtattgatgccagagtgctttcccagatggctgaggttctcaaccggcatccgga

SEQ ID NO: 98363 - DNA, 75 bp, synthetic construct
  source 1..75: mol_type = other DNA
gacagcaggcttaccatgaaagcactggaaatggcatgggaaacccgtggtaagcccgtcggggtgatgttccaa

SEQ ID NO: 98364 - DNA, 75 bp, synthetic construct
  source 1..75: mol_type = other DNA
cccggggatggggactaagcttagtcagccgctgtctccgggggtcgcgtgcgcagttgcacgtcattctcagac

SEQ ID NO: 98365 - DNA, 75 bp, synthetic construct
  source 1..75: mol_type = other DNA
gacagaaataaaaacacaatggtttactatgacgtggctgaaaatctccgtttgcgcctgggtgatcaggttgca

SEQ ID NO: 98366 - DNA, 75 bp, synthetic construct
  source 1..75: mol_type = other DNA
tagctaacgaagcagaagcacacaatcacggactccttccactggacgagatagggcaggcaggaagcccccgtg

SEQ ID NO: 98367 - DNA, 75 bp, synthetic construct
  source 1..75: mol_type = other DNA
attacccttcgtgaagttatatctcagtgcagggatgctgttgttagtaaatatctggtccattaccgtcacaca

SEQ ID NO: 98368 - DNA, 75 bp, synthetic construct
  source 1..75: mol_type = other DNA
ggatgtctggaacaatccgggctttgtgtcaccgggcgcatcaaagcagtaccacccgggatgtggcgctgttcc

SEQ ID NO: 98369 - DNA, 75 bp, synthetic construct
  source 1..75: mol_type = other DNA
agtttacgtttaaaactggcagggaaagttctggatatactagagtgggtaagtaaaagaaatgaaaaaaaggat

SEQ ID NO: 98370 - DNA, 75 bp, synthetic construct
  source 1..75: mol_type = other DNA
cggggatctaattccgttcttgaaacggccctgaaaaatcttggggattctgtaagcttcaagggttacgttggc

SEQ ID NO: 98371 - DNA, 75 bp, synthetic construct
  source 1..75: mol_type = other DNA
cgtggatgaatttggcgtaagttttgatggttgtgcggtagtaagccatgaacagcatattcaggcgtacagctc

SEQ ID NO: 98372 - DNA, 75 bp, synthetic construct
  source 1..75: mol_type = other DNA
ggggaccggtaaaaccgagttcatcgcggcctttgttcactacctgatcgagaaacagaataccaaacgcatttt

SEQ ID NO: 98373 - DNA, 75 bp, synthetic construct
  source 1..75: mol_type = other DNA
atactggaggccgcgcttgtgctttccggtcatgtaactggctggtccgtgcaggaatgccgcgatgcaattcag

SEQ ID NO: 98374 - DNA, 75 bp, synthetic construct
  source 1..75: mol_type = other DNA
ctcagaagccggtgtctacgcgtgggtaaaaagttcgctgggcggacgttgggcatttattactgcctataccta

SEQ ID NO: 98375 - DNA, 75 bp, synthetic construct
  source 1..75: mol_type = other DNA
cagagccgaaggtagcaattgagcgtgtggaacagtatttttctcatgaggcgctgtcggtggacagaacggacg

SEQ ID NO: 98376 - DNA, 75 bp, synthetic construct
  source 1..75: mol_type = other DNA
ggactttttcagccttggcgatcagcattatctgatgttttccccgcagggaatgaatgccgagggatacagtta

SEQ ID NO: 98377 - DNA, 75 bp, synthetic construct
  source 1..75: mol_type = other DNA
accagaggagtagctgaactaaaacaggaagaatttgttaacgagaaagccagacggttttcttatatgaagact

SEQ ID NO: 98378 - DNA, 75 bp, synthetic construct
  source 1..75: mol_type = other DNA
cacagagtcattcatgaacaagccgaaagacattctttcaccggatgcaccgtttatccagaccggcagggatgt

SEQ ID NO: 98379 - DNA, 75 bp, synthetic construct
  source 1..75: mol_type = other DNA
gacgggcagcacccggcagatgacgtggagccgctacgggcagttgctggcgttcactgactgctcgggctacca

SEQ ID NO: 98380 - DNA, 75 bp, synthetic construct
  source 1..75: mol_type = other DNA
gatatcaccgcttccagcgatggccgtgtggtagataaaagctgggtatctcgcgtggcggaagtgatcgacatt

SEQ ID NO: 98381 - DNA, 75 bp, synthetic construct
  source 1..75: mol_type = other DNA
gccggagcgagaaaaatctggagggtgtcagaccacagctggttgctgtagttcgccgtgcccttgaactgacgg

SEQ ID NO: 98382 - DNA, 75 bp, synthetic construct
  source 1..75: mol_type = other DNA
ggcggcgatgctgaccggtgcagaggcagactggcggggattcacccgttcggtgctgtccatgctgacagagat

SEQ ID NO: 98383 - DNA, 75 bp, synthetic construct
  source 1..75: mol_type = other DNA
tacgaattgaaaacagtgtttacgctatcggtagtggtttcagaatatacaaacgtgttgatcaccaaatttggc

SEQ ID NO: 98384 - DNA, 75 bp, synthetic construct
  source 1..75: mol_type = other DNA
actcggcacggtctcggcggtgatgctgtcagcctcgcccatggttatgcttgcggccggcgcgtttgtcgacct

SEQ ID NO: 98385 - DNA, 75 bp, synthetic construct
  source 1..75: mol_type = other DNA
gcgctgtatcacatcgcagaagcgctggttcgctggatggcaccaatcctctccttcaccgctgatgaagtgtgg

SEQ ID NO: 98386 - DNA, 75 bp, synthetic construct
  source 1..75: mol_type = other DNA
tgcgccaacgctcgggctgacggcgttctgctccgtccttgcaggtctgctcggcgcgtgggtgcttcccgcgcg

SEQ ID NO: 98387 - DNA, 75 bp, synthetic construct
  source 1..75: mol_type = other DNA
atgaccagcaagttgatactaaagcgattgaagcagatatttcagctcaggcatcgcaaggggcaacgcctgtgc

SEQ ID NO: 98388 - DNA, 75 bp, synthetic construct
  source 1..75: mol_type = other DNA
atgaatcaaatcgaccgtttgctcaccatcatgcagcgcctgcgcgacccggaaaacggctgcccgtgggataaa

SEQ ID NO: 98389 - DNA, 75 bp, synthetic construct
  source 1..75: mol_type = other DNA
gagctgggtgtcgccatcgaatggggcggagactggaaaacgctgaaagacgggcctcatttccagttaaaacgc

SEQ ID NO: 98390 - DNA, 75 bp, synthetic construct
  source 1..75: mol_type = other DNA
aggcagaactgattaaagatgtttacggcattgatgacgcactgcgcgcgattgccggtgacagcgtttcaggcc

SEQ ID NO: 98391 - DNA, 75 bp, synthetic construct
  source 1..75: mol_type = other DNA
atggaagtgattctgaaatcaaaaaatggtgtacacgtacatttagatgctaatgattctagaggcttgttaaat

SEQ ID NO: 98392 - DNA, 75 bp, synthetic construct
  source 1..75: mol_type = other DNA
cgttgcaggggcggtatatcactcaggacccgatagggctggaggggggatggagtctgtatgcgtatccgctga

SEQ ID NO: 98393 - DNA, 75 bp, synthetic construct
  source 1..75: mol_type = other DNA
atggcccgctactgccatccgccctgcgccagtcttcagcccgtaaccgcaagaactggctgttcgcgcgttccg

SEQ ID NO: 98394 - DNA, 75 bp, synthetic construct
  source 1..75: mol_type = other DNA
tgagtgaggcgagtataaatcaggttatcaaaaggattggttatggcggaaaacttactggacacggatttaggc

SEQ ID NO: 98395 - DNA, 75 bp, synthetic construct
  source 1..75: mol_type = other DNA
aataaaaacctggcaacggctaaaatcaacttctgtgctaagcgcattctgatgcgtaatcaaatgagtaaaata

SEQ ID NO: 98396 - DNA, 75 bp, synthetic construct
  source 1..75: mol_type = other DNA
cctttctgccagtaaggcacaggctcacgtctttaagcagtacatcatcgatttcgccaaagaagtcgaggtgga

SEQ ID NO: 98397 - DNA, 75 bp, synthetic construct
  source 1..75: mol_type = other DNA
ccgtgaaaaatcgtggcacaagaccactgtcggggaagtggtgaaggaaatagctgcgcgtcacaaactgaagat

SEQ ID NO: 98398 - DNA, 75 bp, synthetic construct
  source 1..75: mol_type = other DNA
tacgtgtctgtatcgctcgaagaaagatgggcgcaaccgtaccagcactatgcgttacggtgaggaagttgtctg

SEQ ID NO: 98399 - DNA, 75 bp, synthetic construct
  source 1..75: mol_type = other DNA
atgagtgtgctcattaatgaaaaactgcattcgcggcggctgaaatggcgctggccgctctcgcgtcaggtgacc

SEQ ID NO: 98400 - DNA, 75 bp, synthetic construct
  source 1..75: mol_type = other DNA
aagatgaaaataacgtcgtatatgcctacgatgcgtatggcacacaggatgcttttatcaaagaagggcttgtgc

SEQ ID NO: 98401 - DNA, 75 bp, synthetic construct
  source 1..75: mol_type = other DNA
cggtgcactggtgcgtagactgccgttctgcactggcagaagcggaagttgagtattacgacaaaacttctccgt

SEQ ID NO: 98402 - DNA, 75 bp, synthetic construct
  source 1..75: mol_type = other DNA
cttattaggcgaaaaacgaggctctacgaaggtacaaatgattctgaaaggtttatgtgctgctggtgttcttga

SEQ ID NO: 98403 - DNA, 75 bp, synthetic construct
  source 1..75: mol_type = other DNA
caaccggccctgacatgatcaaaatgttgcggggacggatctccggtgcgcagttcatcaggaatcttgccgtgg

SEQ ID NO: 98404 - DNA, 75 bp, synthetic construct
  source 1..75: mol_type = other DNA
tttctcagggaccggaagcctacagtaaattcattactgacaacaaggacaggttaaatcgcgttggtgctaatg

SEQ ID NO: 98405 - DNA, 75 bp, synthetic construct
  source 1..75: mol_type = other DNA
agtcggggctgtactacaaccgcaaccggtactatgatccgttgcaggggagatatatcacccaggacccgatag

SEQ ID NO: 98406 - DNA, 75 bp, synthetic construct
  source 1..75: mol_type = other DNA
tagccgtacgtcacaagctgaagatggcactgggtaaagacctgtcggataagcctgtggagcatatagaccaga

SEQ ID NO: 98407 - DNA, 75 bp, synthetic construct
  source 1..75: mol_type = other DNA
gcagacggaaactggttactgaacaatgcctggtatgaaagaaacatggcagggtttaacgaacagttgaaagag

SEQ ID NO: 98408 - DNA, 75 bp, synthetic construct
  source 1..75: mol_type = other DNA
gcgatacggcatcaggacagtaacgcagcagaacaggcggcgctgacgatgatcgccagctcaaccacaaggtta

SEQ ID NO: 98409 - DNA, 75 bp, synthetic construct
  source 1..75: mol_type = other DNA
aatacaactgtttctcgaagataaattaggtgcgctgattgcaggaaatcagtggtctgatcctgaaactatcga

SEQ ID NO: 98410 - DNA, 75 bp, synthetic construct
  source 1..75: mol_type = other DNA
ccggagcggcaatggcgctctcgtcgattaccgtagtgagtaacgccaaccggttgctgcggtttaaaccgaagg

SEQ ID NO: 98411 - DNA, 75 bp, synthetic construct
  source 1..75: mol_type = other DNA
cgggttatgacgcatctgtaagccacccaaaggctaaaccgctggcggagtcatcaatcccgtcggaagcactga

SEQ ID NO: 98412 - DNA, 75 bp, synthetic construct
  source 1..75: mol_type = other DNA
cttaatcgcacttatgccaaccgaagcaacgctgaacgggcagcgaaaatgcagtgggaacgcctgcaacgcggc

SEQ ID NO: 98413 - DNA, 75 bp, synthetic construct
  source 1..75: mol_type = other DNA
cgcctttcttgccattgtcgcggtcacgcttatcttcctggcatggggtggtaactgggtttatcgcaatatcct

SEQ ID NO: 98414 - DNA, 75 bp, synthetic construct
  source 1..75: mol_type = other DNA
aaccaaacaaccgctccagtctggcgatcgggtgattgcgctggttaacaatcttggcgcaactccgctttctga

SEQ ID NO: 98415 - DNA, 75 bp, synthetic construct
  source 1..75: mol_type = other DNA
cattgaagcgacggaagtggatatcgccagcaaaattgccgggcgtatcgacaccattctggtgaaagaaggcca

SEQ ID NO: 98416 - DNA, 75 bp, synthetic construct
  source 1..75: mol_type = other DNA
accatgttcaggcggtgctccgcaagtcagagcagtgcatgaaggctgcagaaaagcgcattttcaggctgaaat

SEQ ID NO: 98417 - DNA, 75 bp, synthetic construct
  source 1..75: mol_type = other DNA
gatgagggacccccgcgccagtgagatgacgcgaaagtttatgctcgggtatcgttcagacaaattacaggccgg

SEQ ID NO: 98418 - DNA, 75 bp, synthetic construct
  source 1..75: mol_type = other DNA
tcatccatattgcccgcaatgacctccagatggatgaggacacctaccgccagatgctacaggggctgaccggca

SEQ ID NO: 98419 - DNA, 75 bp, synthetic construct
  source 1..75: mol_type = other DNA
ggtgaaggtcaccgatgctaacggcaatgcgcttgccgggcagacggtcagcgtgttggcggacaacggcgcaac

SEQ ID NO: 98420 - DNA, 75 bp, synthetic construct
  source 1..75: mol_type = other DNA
cgtcagttccgataaccgttctgctgacgactatgattctcgcggtgtgacggcctctgttgagggtgggtatac

SEQ ID NO: 98421 - DNA, 75 bp, synthetic construct
  source 1..75: mol_type = other DNA
tatttctgagagggtgagctggtttgacggtcgcccggtttttattgatgaacaggaactgcctgctgttgctgt

SEQ ID NO: 98422 - DNA, 75 bp, synthetic construct
  source 1..75: mol_type = other DNA
tgaagaagtgctgcaccatcgacgaaggctggaagctgctcaacttcaaaaatgagaaggtcggtgagtttattg

SEQ ID NO: 98423 - DNA, 75 bp, synthetic construct
  source 1..75: mol_type = other DNA
ctacaaaaagctgagaagaaaaaaacattgtctggcgttatgaaaatttttcactggagtggcagtccgccatca

SEQ ID NO: 98424 - DNA, 75 bp, synthetic construct
  source 1..75: mol_type = other DNA
gctgttttccccgacctatatgcagttccgcaactggatagcgatgatccccttcattcatgcggaagggctctg

SEQ ID NO: 98425 - DNA, 75 bp, synthetic construct
  source 1..75: mol_type = other DNA
atgaaaagcaattatctaattacaaaaatccagacaatgacccacgaggtgtatggttagcaacaccgttaacaa

SEQ ID NO: 98426 - DNA, 75 bp, synthetic construct
  source 1..75: mol_type = other DNA
agtcagcaccggctggtgcactacacgcggacacaatatgcagagccgctggtcgaaagtcgctatctttacgac

SEQ ID NO: 98427 - DNA, 75 bp, synthetic construct
  source 1..75: mol_type = other DNA
cctgaacaaataattactccccgtcgttgggaggataaacagaacgatctctggacaacctggcagcgggttcag

SEQ ID NO: 98428 - DNA, 75 bp, synthetic construct
  source 1..75: mol_type = other DNA
gaaaaatcgtgctgccgcgccgtggtgcggtcattacgctggcgctgggctggaaggggcagccgcttttcccta

SEQ ID NO: 98429 - DNA, 75 bp, synthetic construct
  source 1..75: mol_type = other DNA
tccgtacccgtagctgggaagataacggtattacccgttacgtcactgaaatccttgtgaaaaccacgggcacca

SEQ ID NO: 98430 - DNA, 75 bp, synthetic construct
  source 1..75: mol_type = other DNA
aaatgactatgatacgattgatggcacaggtatgcgtgattatatccatgttgttgatttggctgacggacatat

SEQ ID NO: 98431 - DNA, 75 bp, synthetic construct
  source 1..75: mol_type = other DNA
gcaaatgtttccgcagcaaattatgagttagagtggttcgctaaaaagacattaactgatatgttacgagatgca

SEQ ID NO: 98432 - DNA, 75 bp, synthetic construct
  source 1..75: mol_type = other DNA
aggggcggggcttcgttcggcctgaaaaacagaatctgcaaaatttcgctgaaattattccggttatttccggcg

SEQ ID NO: 98433 - DNA, 75 bp, synthetic construct
  source 1..75: mol_type = other DNA
atgagtcttctttttgctgaacgcccactggttataaacacgcagctggcaatgaaaattggcttaaacgaagcc

SEQ ID NO: 98434 - DNA, 75 bp, synthetic construct
  source 1..75: mol_type = other DNA
gtgcgtgccgataagtcattaagcccgtttgaaatccgggtataccgccattaccgcattgtgcatggtactcgg

SEQ ID NO: 98435 - DNA, 75 bp, synthetic construct
  source 1..75: mol_type = other DNA
cgtctggggaacggtatggaagttgagccgtggctgaaggcggctgtgcgcaaagaatttgtcgatgataaccgg

SEQ ID NO: 98436 - DNA, 75 bp, synthetic construct
  source 1..75: mol_type = other DNA
atgatctcactcccgtcaggcacccgcatctggctcattgccggcgttaccgatatgcgtaaatccttcaacggt

SEQ ID NO: 98437 - DNA, 75 bp, synthetic construct
  source 1..75: mol_type = other DNA
cgacaaccggctgtgtcaggggggactgctgacaccgtcctaccgtaaccagctggccttcctcgatatctacgg

SEQ ID NO: 98438 - DNA, 75 bp, synthetic construct
  source 1..75: mol_type = other DNA
tatcgagctactcgggaaatactgctcctggggaatttacggtgaatatttcaacagcgatgagccgtcactgac

SEQ ID NO: 98439 - DNA, 75 bp, synthetic construct
  source 1..75: mol_type = other DNA
aagaagcgctcaccatgtcagacaggattgtggtgatgcgcgagggtcgtattgagcaagatggtacaccgcgcg

SEQ ID NO: 98440 - DNA, 75 bp, synthetic construct
  source 1..75: mol_type = other DNA
agaccggctaccgcactgtgcgacgtcaccgtggcgcgttcatcaccataagtcagaacatcaaggactttgatg

SEQ ID NO: 98441 - DNA, 75 bp, synthetic construct
  source 1..75: mol_type = other DNA
agaggccggttcagcgacgcggatgcgtaccatctggaccaggcctttccgctactgatgaaacaactggaactc

SEQ ID NO: 98442 - DNA, 75 bp, synthetic construct
  source 1..75: mol_type = other DNA
gatgacggtggaaaaagcccgcccgatcctggctgcttcaccgcaggcggatgccggaccatcactccgtgatca

SEQ ID NO: 98443 - DNA, 75 bp, synthetic construct
  source 1..75: mol_type = other DNA
tcgccttacttagcgctcttggcattgccgcaatctctatgaatgtgcaggccgcagagcgtattgcatttattc

SEQ ID NO: 98444 - DNA, 75 bp, synthetic construct
  source 1..75: mol_type = other DNA
catttcagcacggcagcccgtcggggggttatttctgacaggtttgtagaagcaattttgcagttttggcgcgaa

SEQ ID NO: 98445 - DNA, 75 bp, synthetic construct
  source 1..75: mol_type = other DNA
ctggcaacacaacggcgacaacatcaatatcgacgtcaacaatttcaaccgtatcaccggtgagcatcttactga

SEQ ID NO: 98446 - DNA, 75 bp, synthetic construct
  source 1..75: mol_type = other DNA
ctggaagcgcgcccgacagccgatctgtgcatcgactgcaaaacgctggctgaaattcgcgaaaaacagatggct

SEQ ID NO: 98447 - DNA, 75 bp, synthetic construct
  source 1..75: mol_type = other DNA
ccggtattgctgatggaaatcatgggttttgagcgcggagaatacgccaccattatggcgctgaccgctggcgtc

SEQ ID NO: 98448 - DNA, 75 bp, synthetic construct
  source 1..75: mol_type = other DNA
tgacggcgctaatcagcatgaccacacaggccattgtggcaaccaacggaaaggcggctgccctgcaggtactga

SEQ ID NO: 98449 - DNA, 75 bp, synthetic construct
  source 1..75: mol_type = other DNA
gctggcgttattgcacaggaagtaatggaggcgataccagaagctgtgggatcgtttactcattatggtgaagag

SEQ ID NO: 98450 - DNA, 75 bp, synthetic construct
  source 1..75: mol_type = other DNA
gatcgcgcgtgtggcaaccatggtgcgcaaaatgcatgcagcagggattaatcaccgtgattgttatatctgcca

SEQ ID NO: 98451 - DNA, 75 bp, synthetic construct
  source 1..75: mol_type = other DNA
gtttcgggccgtccacgctgattagtgcgataaaagtgattgcccttgtggttctgataaccatcagtgccgtgg

SEQ ID NO: 98452 - DNA, 75 bp, synthetic construct
  source 1..75: mol_type = other DNA
ttccgctaataaagttaatctcaaatttgaagaagccaaacccgttcttgaagatcaactggcgaaatcagttgc

SEQ ID NO: 98453 - DNA, 75 bp, synthetic construct
  source 1..75: mol_type = other DNA
cagtgtttatgtcaacgatcaacctattattaaccaaagcattacatttattgaaattgaaggaaaaaaaaacgc

SEQ ID NO: 98454 - DNA, 75 bp, synthetic construct
  source 1..75: mol_type = other DNA
gccaggtatgttgctgcgcctgacgaccggcgatcgcgtgccggtagatggcgagattacccagggcgaagcatg

SEQ ID NO: 98455 - DNA, 75 bp, synthetic construct
  source 1..75: mol_type = other DNA
agcgagacgctaaagttggcgctggcgaaaggactacaggatgcgggcgtcgatgtgctggatataggcatgtcg

SEQ ID NO: 98456 - DNA, 75 bp, synthetic construct
  source 1..75: mol_type = other DNA
gtcatgcaactggtggagacagacaaggaacggcatcaggttacgatgcgacggctggaatgttccaggaaggca

SEQ ID NO: 98457 - DNA, 75 bp, synthetic construct
  source 1..75: mol_type = other DNA
cgtgggaaatctctaccggctgatgcgcggctatgccaccggcggttatgtcggtggcaccggaagtccggcgca

SEQ ID NO: 98458 - DNA, 75 bp, synthetic construct
  source 1..75: mol_type = other DNA
gggtacgaaaccagcacgattaaacctggctacatgaagccaaagcacgaaatcgatccaacgaaaaccatcatg

SEQ ID NO: 98459 - DNA, 75 bp, synthetic construct
  source 1..75: mol_type = other DNA
acttcggagacctgagaaaggcagtcgatcgcacttatgctgaaatgggtatagatggtgtaagcgatgaaatat

SEQ ID NO: 98460 - DNA, 75 bp, synthetic construct
  source 1..75: mol_type = other DNA
cggggcgaagtgcctccgggaaaaataccaggacaagagccattacaggtattgatggtgatataagaatcaaca

SEQ ID NO: 98461 - DNA, 75 bp, synthetic construct
  source 1..75: mol_type = other DNA
tgctgcgtctgcggcgggccggagagataaacggagaacatgtccctgaaattattctgctcaactctcatgacg

SEQ ID NO: 98462 - DNA, 75 bp, synthetic construct
  source 1..75: mol_type = other DNA
attgccgactgcgcgcgtcgttttatggcgcatcctcaggtgaaaggacgtcgggtatatggacaggttgggttc

SEQ ID NO: 98463 - DNA, 75 bp, synthetic construct
  source 1..75: mol_type = other DNA
tcagtgtgctggcagccttttcagtgggtgccgcgcatgcggaaagtacgctgacagtgggggccggggtcggcg

SEQ ID NO: 98464 - DNA, 75 bp, synthetic construct
  source 1..75: mol_type = other DNA
gcctgtaaccgcacgcggagatacttggtttaaaggtgataagaacatggggcgctcgccagtaagcgtgactcg

SEQ ID NO: 98465 - DNA, 75 bp, synthetic construct
  source 1..75: mol_type = other DNA
tgtgtttgccctgatgtggctgcagacctggccgttgttgtatgccattctgaacagtgccatgacattctatgc

SEQ ID NO: 98466 - DNA, 75 bp, synthetic construct
  source 1..75: mol_type = other DNA
gctatgtcgggagagcgagtgaacctggacgagttttattcgcgctccaggcagttagtggctggcacatgcgtt

SEQ ID NO: 98467 - DNA, 75 bp, synthetic construct
  source 1..75: mol_type = other DNA
atgctgacgcaggtaccaggcagcgccgctgatggtcgatatatactcaagctgaactacagcggcacgatgaac

SEQ ID NO: 98468 - DNA, 75 bp, synthetic construct
  source 1..75: mol_type = other DNA
gtttctcctgtctggctgtggtgcgatgagcaccgcaattaaaaagcgtaatctggaagtcaaaacccagatgag

SEQ ID NO: 98469 - DNA, 75 bp, synthetic construct
  source 1..75: mol_type = other DNA
atgcgtaaaatcattcatgtggatatggactgctttttcgcagcggtggagatgcgcgacaatcccgccctgcgc

SEQ ID NO: 98470 - DNA, 75 bp, synthetic construct
  source 1..75: mol_type = other DNA
cgtcggcgtggaacgcacgatggcggaagatattcatcactggtctgaatgtgaagcgattatcgagcggctgta

SEQ ID NO: 98471 - DNA, 75 bp, synthetic construct
  source 1..75: mol_type = other DNA
tggactgctttttcgccgcagtggagatgcgcgacaatcccgccctgcgcgatatccctattgctattggcggca

SEQ ID NO: 98472 - DNA, 75 bp, synthetic construct
  source 1..75: mol_type = other DNA
gaatgataagattgaaccaggtaagggagcaaacagggttgatggtggcagtgggtatgacacgctgcttcttag

SEQ ID NO: 98473 - DNA, 75 bp, synthetic construct
  source 1..75: mol_type = other DNA
ctggattcaggcgaatgtgctgaaggctgataagatggatctgcgggagtctcagggatggctgaaccgtggtta

SEQ ID NO: 98474 - DNA, 75 bp, synthetic construct
  source 1..75: mol_type = other DNA
ttttccattcagaacggggagccggtctgactgaggcaacaggtattgaaggtatctctttttctggtgactgga

SEQ ID NO: 98475 - DNA, 75 bp, synthetic construct
  source 1..75: mol_type = other DNA
attgtctggataatgctgtggtggagtgtttctttggaaccttaaagtcggagtgtttttatcttgatgagttca

SEQ ID NO: 98476 - DNA, 75 bp, synthetic construct
  source 1..75: mol_type = other DNA
gccgctggctggccgggctcgccctgctgcttgcgctgcccgcgacctcggccgtcgcccaggacttcgaactgc

SEQ ID NO: 98477 - DNA, 75 bp, synthetic construct
  source 1..75: mol_type = other DNA
atatattgaatactacaacagcagaagaattagcctgaaattaaaaggtctgactccaattgaatatcggaatca

SEQ ID NO: 98478 - DNA, 75 bp, synthetic construct
  source 1..75: mol_type = other DNA
ttatggcaattatcaaaataatgttttagccaatattattttcgtcgacttccagcaacaaggtgaaagaggact

SEQ ID NO: 98479 - DNA, 75 bp, synthetic construct
  source 1..75: mol_type = other DNA
agtaccgtcaagagttggcacagattatcagcttcaatgattttctgagtgttccacgagaatttagcaaggctg

SEQ ID NO: 98480 - DNA, 75 bp, synthetic construct
  source 1..75: mol_type = other DNA
acccgtgtggtctcaaatgcgaacaaggttaacctgaaatttgaagaggcgaagcctgttctcgaagaccagctg

SEQ ID NO: 98481 - DNA, 75 bp, synthetic construct
  source 1..75: mol_type = other DNA
acagcaatcaagaagcgtaaccttgaggtgaagactcagatgagtgagaccatctggcttgaacccgccagcgaa

SEQ ID NO: 98482 - DNA, 75 bp, synthetic construct
  source 1..75: mol_type = other DNA
acactaaccagctttttgcgtacctgaatcgcggggatattgcggaatttaaattcagtccgctgtttaccacgc

SEQ ID NO: 98483 - DNA, 75 bp, synthetic construct
  source 1..75: mol_type = other DNA
ccactttcactgacgacccgtatcgggcatgcgatggtggccggctatgagatggtgttcgctcagcctgacagc

SEQ ID NO: 98484 - DNA, 75 bp, synthetic construct
  source 1..75: mol_type = other DNA
tgcgaacaaggttaacctgaaatttgaagaggcgaagcctgttctcgaagaccagctggccaaatcaatcgcaaa

SEQ ID NO: 98485 - DNA, 75 bp, synthetic construct
  source 1..75: mol_type = other DNA
ggtggatatcagcaagaaccgacttattgctaccattccgctgatggagaaggtgatttttgagcaacgttacca

SEQ ID NO: 98486 - DNA, 75 bp, synthetic construct
  source 1..75: mol_type = other DNA
acaatacgctgaccaccagtgaactttccggcagcggtaatttctacctgcataccaacgttgcaggctcccggg

SEQ ID NO: 98487 - DNA, 75 bp, synthetic construct
  source 1..75: mol_type = other DNA
atgtcgggtaaattcagatttagtcgtcgcagcgaaaagaatctggagggcgttaaaccacagctggttgctgta

SEQ ID NO: 98488 - DNA, 75 bp, synthetic construct
  source 1..75: mol_type = other DNA
tgtatgatcaggataattggaggcattctgtaaaatacgctggtgagagggggttctggctggaagtgcacggag

SEQ ID NO: 98489 - DNA, 75 bp, synthetic construct
  source 1..75: mol_type = other DNA
tggatatgatgcactgcgctctgccgtgctgatgcgaacgttcgttttcatgattggcaatactgccaaagaaaa

SEQ ID NO: 98490 - DNA, 75 bp, synthetic construct
  source 1..75: mol_type = other DNA
gccgatagaatcattggtaatgagcgccggattacgcgcgcttgaacaacaggctgactgggtgttagtggaagg

SEQ ID NO: 98491 - DNA, 75 bp, synthetic construct
  source 1..75: mol_type = other DNA
aaatcgggctggagccagtgggctgaaagtgcgatggacagtttttcgcaggtaaaaagtgttgccacgcagacc

SEQ ID NO: 98492 - DNA, 75 bp, synthetic construct
  source 1..75: mol_type = other DNA
ctcattggctggaaaggggaaccgctgacagaaaaaggcacttacattgttgatgaaatcgctcacgaaggaccg

SEQ ID NO: 98493 - DNA, 75 bp, synthetic construct
  source 1..75: mol_type = other DNA
gtcgcgtgcacgggcatggtggctgaaggaccaggccgagggccgcagcggcgttgcgcttcccgacgcccttga

SEQ ID NO: 98494 - DNA, 75 bp, synthetic construct
  source 1..75: mol_type = other DNA
gccgggtgtgccattccgcagtccatgcaactggagatgcaggaaaccgccagccggaataacggcggcgcactg

SEQ ID NO: 98495 - DNA, 75 bp, synthetic construct
  source 1..75: mol_type = other DNA
cgccaggagaacgccgcgcgcaaggcgggtatttcaataggccagtataacgcagcaatgcgtatgcttccggcg

SEQ ID NO: 98496 - DNA, 75 bp, synthetic construct
  source 1..75: mol_type = other DNA
gcaaaaggggatgataagtttatcaccaccgactatttgcaacagtgcccgctccacggtttataaaattcttga

SEQ ID NO: 98497 - DNA, 75 bp, synthetic construct
  source 1..75: mol_type = other DNA
aattgcagtaatgaaagctatcagagccgctggaattaaagagaagaatttcgatgaagcaaacaatcttcctcc

SEQ ID NO: 98498 - DNA, 75 bp, synthetic construct
  source 1..75: mol_type = other DNA
cctggttgtccgtcaggatggcacgttgatctggcgctcctggaattttgaggacggtgccgggtactggatgaa

SEQ ID NO: 98499 - DNA, 75 bp, synthetic construct
  source 1..75: mol_type = other DNA
agcggaacggcaagccgtggctgatggtttgctcattgaacccttgatcggtaaatgcccaaacatcatggctgc

SEQ ID NO: 98500 - DNA, 75 bp, synthetic construct
  source 1..75: mol_type = other DNA
atgaatattcgccgtaaaaaccgcttgtggattgcctgtgccgtgctggcggggctggcgctgactatcggtctg

SEQ ID NO: 98501 - DNA, 75 bp, synthetic construct
  source 1..75: mol_type = other DNA
aggatgatcagggaacgcattttcgcctggttgtccgtcaggatggcacgttgatctggcgctcctggaattttg

SEQ ID NO: 98502 - DNA, 75 bp, synthetic construct
  source 1..75: mol_type = other DNA
gcctgctgactgacgatgaaccggtggatggcgtaccgctgacaccgggaaaattcattgttcaccagccgcgcc

SEQ ID NO: 98503 - DNA, 75 bp, synthetic construct
  source 1..75: mol_type = other DNA
ttaatgaaccgttaaaaaaccaggaaatatccacaggtaatatcaatattaattgcccattaaaagatatttaca

SEQ ID NO: 98504 - DNA, 75 bp, synthetic construct
  source 1..75: mol_type = other DNA
gactttttactgggtggcactccccctgactacggtaaacggtgtctctcagtttcagccggaatggatatgctg

SEQ ID NO: 98505 - DNA, 75 bp, synthetic construct
  source 1..75: mol_type = other DNA
tggcaggcatcgcgagcagctatcgagattgagcttcctgaaagctttaccatgcatagtgggcgaaccccatat

SEQ ID NO: 98506 - DNA, 75 bp, synthetic construct
  source 1..75: mol_type = other DNA
ggatttccgtcgggcagtataaagctgccatgcgtatgctgcctgcgcagttcactgacgtggccacgcagcttg

SEQ ID NO: 98507 - DNA, 75 bp, synthetic construct
  source 1..75: mol_type = other DNA
cctcagcatgtggccggataaccgtatcgcccgtgacgcgcactatctttaccggtatgaccgtcacggcaggct

SEQ ID NO: 98508 - DNA, 75 bp, synthetic construct
  source 1..75: mol_type = other DNA
ggtgcccccaccggcgtggcctgttcggtgtgccccggcggggtgacgtccggccatccggtcaatccgctgctc

SEQ ID NO: 98509 - DNA, 75 bp, synthetic construct
  source 1..75: mol_type = other DNA
gcaacctcgcttttcgaaatgcgccgtaagcccggtaaagaagccattctgatggcgtggaatgttgaagagaga

SEQ ID NO: 98510 - DNA, 75 bp, synthetic construct
  source 1..75: mol_type = other DNA
aatgcgctgggtattgctacaaagctggtaaaccgtgttcatagcaaaattgttattggtgatgatggtttgcta

SEQ ID NO: 98511 - DNA, 75 bp, synthetic construct
  source 1..75: mol_type = other DNA
tttcattcagtgacctacctagttctttggcaggtctgcacaaaaaagcaaagagggaagcgtggaaaacgcggc

SEQ ID NO: 98512 - DNA, 75 bp, synthetic construct
  source 1..75: mol_type = other DNA
ggtaataccatcacctgtactggatcatgacacctggcagcgtatccgactgctgatgggcgagatgatggatgc

SEQ ID NO: 98513 - DNA, 75 bp, synthetic construct
  source 1..75: mol_type = other DNA
accttgaaagaatgagtaacttccggcgctggctttttgatgcccgtcagggcatggaaggctacactcagcaac

SEQ ID NO: 98514 - DNA, 75 bp, synthetic construct
  source 1..75: mol_type = other DNA
ggtcgtggaaggggattgtacgtggccgcagtacgatcgacaaaagcatgatcctgttgaagatgcgttgcacgt

SEQ ID NO: 98515 - DNA, 75 bp, synthetic construct
  source 1..75: mol_type = other DNA
tggttgttctcactcagcgttcaaagcgtcggggggaaattatctcgggtgtccacattcgtggacggaacctgc

SEQ ID NO: 98516 - DNA, 75 bp, synthetic construct
  source 1..75: mol_type = other DNA
acaggaagtggatgtggttgtcaccctgccactgagcgaatatttcgacacaaacgcacagccggacatggccaa

SEQ ID NO: 98517 - DNA, 75 bp, synthetic construct
  source 1..75: mol_type = other DNA
atggccagaaaacgcaaatcaagaaataacagtaaaattggtcacggagcgatcagtcgcattggtagaccgaat

SEQ ID NO: 98518 - DNA, 75 bp, synthetic construct
  source 1..75: mol_type = other DNA
tatcgttttgggaaaagcacattcagaaaaattattgaatatcgtcttatcccgatgatggacctgatcttctgg

SEQ ID NO: 98519 - DNA, 75 bp, synthetic construct
  source 1..75: mol_type = other DNA
gtgaacaacgtttttaccgcgatacaaaaccgtgacggagaagccctttctcgcatgtcaggttatgagcatcag

SEQ ID NO: 98520 - DNA, 75 bp, synthetic construct
  source 1..75: mol_type = other DNA
gatggttcttggcgtcaccattgacgatgtgatggcggagtttcaccggtacagcaaggaaaaaagtttatatcc

SEQ ID NO: 98521 - DNA, 75 bp, synthetic construct
  source 1..75: mol_type = other DNA
gcacagtaccggaacgtctttatcgaggatgaccacggcgaacagtttcgcctggttgtccgtaataacggaaca

SEQ ID NO: 98522 - DNA, 75 bp, synthetic construct
  source 1..75: mol_type = other DNA
tactgtcagcccggataacggttttacgaccagtttggagcttgaagtgaagattgatgatttcgaaatggaatg

SEQ ID NO: 98523 - DNA, 75 bp, synthetic construct
  source 1..75: mol_type = other DNA
atcctgggtgtgagactcaaaacacgtaccttcaccaccaccggtggcagatcccacgaaaaagcctgtatctgg

SEQ ID NO: 98524 - DNA, 75 bp, synthetic construct
  source 1..75: mol_type = other DNA
cctttagtgcctatttttttattggcgtggctatggtgattatttttctgtttatctactccaaaattacaccgc

SEQ ID NO: 98525 - DNA, 75 bp, synthetic construct
  source 1..75: mol_type = other DNA
acccatggtaatggcccgcaggtaggctttattctgcgccgctctgaacttgccagtaacgaagtttctccggtt

SEQ ID NO: 98526 - DNA, 75 bp, synthetic construct
  source 1..75: mol_type = other DNA
gcacaaattgtcgcgatgcaagtgacaacgggtaacccggatgtgctggcgaatggcagcgatcgacatacggtg

SEQ ID NO: 98527 - DNA, 75 bp, synthetic construct
  source 1..75: mol_type = other DNA
ggcagtggcaccagcaaaacggtactaacccgttatgcgacggtgcttaatcgggttttgccagtgccgacgcag

SEQ ID NO: 98528 - DNA, 75 bp, synthetic construct
  source 1..75: mol_type = other DNA
atggtcaggtaggatgggagctgcagcgtgcattggcgcctctggggcacatcactgccgttgattttgactcca

SEQ ID NO: 98529 - DNA, 75 bp, synthetic construct
  source 1..75: mol_type = other DNA
gaacagcttgaacatttacctgcagaatgtagagatcttaaagacagtgccgttttaccctgggccaccgctggg

SEQ ID NO: 98530 - DNA, 75 bp, synthetic construct
  source 1..75: mol_type = other DNA
atgaagagcgttctgcttgttggattactcatgcttagctctccggttattgctcaggactgttttgaactggct

SEQ ID NO: 98531 - DNA, 75 bp, synthetic construct
  source 1..75: mol_type = other DNA
atgacagaagccgaactactgggattaatccgccgcgttaccggaatcagccagcagcatgacgaacaggccaca

SEQ ID NO: 98532 - DNA, 75 bp, synthetic construct
  source 1..75: mol_type = other DNA
gctggctttaaggcactggctgacatgagtccgtttgaatccctgctgattgtggatttgggcggaaccacgctg

SEQ ID NO: 98533 - DNA, 75 bp, synthetic construct
  source 1..75: mol_type = other DNA
gtaaagaaagaactgggtgaaaccagtgaccttgcggatttgatggccgggcgtgtcagccagtcttttaagaaa

SEQ ID NO: 98534 - DNA, 75 bp, synthetic construct
  source 1..75: mol_type = other DNA
acaggaggtggatgtggttgtcaccctgccactgagcgagtatttcgacacaaacgcacagccggacatggccaa

SEQ ID NO: 98535 - DNA, 75 bp, synthetic construct
  source 1..75: mol_type = other DNA
ggacggtgcgggacgtgtggccgcccatgccgtggtgaatgccgcactggcggtggcacagggtaataacgctct

SEQ ID NO: 98536 - DNA, 75 bp, synthetic construct
  source 1..75: mol_type = other DNA
tggcgtaggtgttagaggtggtggtcgggcaagtattgactggagtgatgaggatgcgcatcaggccagcagtgg

SEQ ID NO: 98537 - DNA, 75 bp, synthetic construct
  source 1..75: mol_type = other DNA
aaactgacgctgtctgtcctgaaaggttatgtgtttgccctgatgtggctgcagtcatggccactcttgtacgcc

SEQ ID NO: 98538 - DNA, 75 bp, synthetic construct
  source 1..75: mol_type = other DNA
gctggatggtgcgctggataatacgtccggcagactgctttcacagaaaacgctgtctgtgtcaggcagcgaact

SEQ ID NO: 98539 - DNA, 75 bp, synthetic construct
  source 1..75: mol_type = other DNA
taatgtgccggtcggactggcgatgccactttcactgacgacccgtatcgggcatgcaatggtggtcagctacga

SEQ ID NO: 98540 - DNA, 75 bp, synthetic construct
  source 1..75: mol_type = other DNA
actctggtactgagcgatagtcagcaaatgaacccggataatatcaaatgggggtatcgtggcggcaaactcgat

SEQ ID NO: 98541 - DNA, 75 bp, synthetic construct
  source 1..75: mol_type = other DNA
atacgttcgccgtaggctcggtgttgatggttcagcaattcttacatctgaacattatgcaaaaatttttaatct

SEQ ID NO: 98542 - DNA, 75 bp, synthetic construct
  source 1..75: mol_type = other DNA
tgttaacccatcgctatccgttcgccacgctggcagaaacctacgagcgcgatgtgattaacaatcgtgagttga

SEQ ID NO: 98543 - DNA, 75 bp, synthetic construct
  source 1..75: mol_type = other DNA
tatttgcctgtaccggtgttgttgccggtaatatgatggggagcggtattgcattattacctgcgaacctagcaa

SEQ ID NO: 98544 - DNA, 75 bp, synthetic construct
  source 1..75: mol_type = other DNA
agggattatggctttaccatgttctggagcctgaaacttgggccagaatgtgtgcccgggtctcaggagcagcca

SEQ ID NO: 98545 - DNA, 75 bp, synthetic construct
  source 1..75: mol_type = other DNA
aaagtgaccgaactgctgaagcagaaacagtatgcgccgatgtctgttgcgcaacagtctctggttctgttcgca

SEQ ID NO: 98546 - DNA, 75 bp, synthetic construct
  source 1..75: mol_type = other DNA
tgcccgaaggccctttctcacgcgaacaggctgttgccgtcaaaacagcttaccgcaatgtgcttattgaagatg

SEQ ID NO: 98547 - DNA, 75 bp, synthetic construct
  source 1..75: mol_type = other DNA
caaactcatcaccattctgaataccatgctcagaaaaggggaagagtggaacgcctcatttcaatcacaggtaat

SEQ ID NO: 98548 - DNA, 75 bp, synthetic construct
  source 1..75: mol_type = other DNA
agagtacggcgaccgtgattgatgagctggtcgatctgcacgaccgcatcctggtcaagctgtttagcagcgcca

SEQ ID NO: 98549 - DNA, 75 bp, synthetic construct
  source 1..75: mol_type = other DNA
gctgggcttccgcttcgcaccgcgcatccgcgacctcggcgaaaccaagctgtatgttccgaatagcgtccagga

SEQ ID NO: 98550 - DNA, 75 bp, synthetic construct
  source 1..75: mol_type = other DNA
gcgtgtggtccggaatcattaatcagggctgcaggccaaattgattgctcccgtaactttctcaatcctccgtac

SEQ ID NO: 98551 - DNA, 75 bp, synthetic construct
  source 1..75: mol_type = other DNA
ttttctttccctcatcctcaaaaattgccagcacacatctggtgccaaaagtgcttctcgcgcacagtcatggtg

SEQ ID NO: 98552 - DNA, 75 bp, synthetic construct
  source 1..75: mol_type = other DNA
tccctgggcagaccgaagcgatatattgccagcagggcagcgactggcagtgcgtggtgcattacgattcagaag

SEQ ID NO: 98553 - DNA, 75 bp, synthetic construct
  source 1..75: mol_type = other DNA
ccacagacaaattggccaacaactcaattaccaccaggatatacttgtgcagaaccctatttattcccagacatt

SEQ ID NO: 98554 - DNA, 75 bp, synthetic construct
  source 1..75: mol_type = other DNA
agagacaaagaaaaattcgtggcgaagtaaatgacgtatatcaatataacaatattccacatgcactcagggtgc

SEQ ID NO: 98555 - DNA, 75 bp, synthetic construct
  source 1..75: mol_type = other DNA
ctgaccggcagcgaacagaactggcgtggtttcacccgttccgtgctctccatgctgacagagatttttctgaag

SEQ ID NO: 98556 - DNA, 75 bp, synthetic construct
  source 1..75: mol_type = other DNA
acggatgctgaatacctggtgcgtaaattcgatgcgcttgaagctaaatgtgcagcacaggaaaacaaagtaata

SEQ ID NO: 98557 - DNA, 75 bp, synthetic construct
  source 1..75: mol_type = other DNA
ttggccctagttgggggtggagtgcaactgaaattaaaggtgtagacgttaatggcacttcaacaaatgagattt

SEQ ID NO: 98558 - DNA, 75 bp, synthetic construct
  source 1..75: mol_type = other DNA
caaaaagatcaaatatttgagaatgcatataacatagaaagatattttgaaataagattaattgaaagtgagata

SEQ ID NO: 98559 - DNA, 75 bp, synthetic construct
  source 1..75: mol_type = other DNA
aggcgctggcgtggctgaaggcgaagaagctgcgccccggttttgattaccgggatgtgtggcgggaagaacacc

SEQ ID NO: 98560 - DNA, 75 bp, synthetic construct
  source 1..75: mol_type = other DNA
acaaaggcaacaaaactccggcattcagcatcagtattgaaggcaaggatatcaccactgtgctggacaaccgcc

SEQ ID NO: 98561 - DNA, 75 bp, synthetic construct
  source 1..75: mol_type = other DNA
ggaaaactactgctcaattcgcactcgcatatttattaaaaaagaccttcagtcaattcttcaattgcgagggaa

SEQ ID NO: 98562 - DNA, 75 bp, synthetic construct
  source 1..75: mol_type = other DNA
ctgttccattaagccccggtgaacgcctgaatggacttaaccatattgcggagttaagggcgaaagtatttggcc

SEQ ID NO: 98563 - DNA, 75 bp, synthetic construct
  source 1..75: mol_type = other DNA
aacaggtgattactgccacgcgtaaccctgaagtcaaatttatgcactgcctgcccgccttccataatgagcaca

SEQ ID NO: 98564 - DNA, 75 bp, synthetic construct
  source 1..75: mol_type = other DNA
gttgctataagtttttaccaagagctcagcctcaagataaaatcgatagctataattcagcactgcaagcttttt

SEQ ID NO: 98565 - DNA, 75 bp, synthetic construct
  source 1..75: mol_type = other DNA
agaccccacgccttaagaaccttaatggagcgcaattatgggcctacgggatgttgttcgctaatcacgatgagg

SEQ ID NO: 98566 - DNA, 75 bp, synthetic construct
  source 1..75: mol_type = other DNA
tgctctgtttaccgtctgcctgcatcccacattttatgtggtgataatatttgcttttgtcattggttttacctc

SEQ ID NO: 98567 - DNA, 75 bp, synthetic construct
  source 1..75: mol_type = other DNA
ctgagctggatggattgctgacggcgattttatcaggtccaaatatggtttcacccaatatctggctgagtgcta

SEQ ID NO: 98568 - DNA, 75 bp, synthetic construct
  source 1..75: mol_type = other DNA
atgacggcccgaggcacgcctgaccaggcacttaccagttttcggaatgcccgtattctgtgggccggacatagt

SEQ ID NO: 98569 - DNA, 75 bp, synthetic construct
  source 1..75: mol_type = other DNA
gcgatgcttgcagaatttggtatgtcaccggcaagccgggcgaaagtaaataccgccggaccggatgatgttgat

SEQ ID NO: 98570 - DNA, 75 bp, synthetic construct
  source 1..75: mol_type = other DNA
atcccgcaggtcaccataacccgcagcgacggcgaccgccatcattttgcgattgctgaccgtggagcctatacc

SEQ ID NO: 98571 - DNA, 75 bp, synthetic construct
  source 1..75: mol_type = other DNA
gacgtatttctcgtagaatgcctccaactattgtaggccctacagtatcacaatcttttccggcctctccgactc

SEQ ID NO: 98572 - DNA, 75 bp, synthetic construct
  source 1..75: mol_type = other DNA
tgatgccgcaggcgcgcggtctgaacgtcggcagtaaattactggcatgggcagaagaagaagcccgccaggccg

SEQ ID NO: 98573 - DNA, 75 bp, synthetic construct
  source 1..75: mol_type = other DNA
gtaaaaagtgctgccacgcagacctttgacggtattgcacagaatatggcagcgatgctgaccggcagcgaacag

SEQ ID NO: 98574 - DNA, 75 bp, synthetic construct
  source 1..75: mol_type = other DNA
atcaatatgatcccgaactggctcgtggtatgtacctatatgaacaccgccggtgcttcgataatattattggat

SEQ ID NO: 98575 - DNA, 75 bp, synthetic construct
  source 1..75: mol_type = other DNA
gaatacccgtgtggatatgtctttcgctcgcggcctgcgcgccatacttcgccaggacccggatgtcgtcatggt

SEQ ID NO: 98576 - DNA, 75 bp, synthetic construct
  source 1..75: mol_type = other DNA
gcaaatcacggggcggcgggtcgtgagtgggttaaatggctggcaggccaccagcaggaggcaaaggacacggta

SEQ ID NO: 98577 - DNA, 75 bp, synthetic construct
  source 1..75: mol_type = other DNA
atgtcaggacctccgaaaaccccgccacgcctgcatttgattcgaggcaacccctcaaagcgccccgttaaagac

SEQ ID NO: 98578 - DNA, 75 bp, synthetic construct
  source 1..75: mol_type = other DNA
gtgcaacttgacattctgggattgtggatcggacgtagccgtgttgtcagccagcctatctcaggtgtctatttc

SEQ ID NO: 98579 - DNA, 75 bp, synthetic construct
  source 1..75: mol_type = other DNA
tttttgccgccgccgcaacaggtactggaaaaactactcaccattgccggaccgcaaggctttatggacgccacg

SEQ ID NO: 98580 - DNA, 75 bp, synthetic construct
  source 1..75: mol_type = other DNA
ttgcatccaagagccttgagaaggttcaggaatccatactctacagaaaaactttattgggaaaaacacctgatg

SEQ ID NO: 98581 - DNA, 75 bp, synthetic construct
  source 1..75: mol_type = other DNA
tgttaccgaaagataaaggcgaggatgcagtgatttttgcgggggatgacgcatacagccacgcagagcattaca

SEQ ID NO: 98582 - DNA, 75 bp, synthetic construct
  source 1..75: mol_type = other DNA
ccaggacgaagcgaaaagactactttatgagcagcaaaaatcagaagaagcactgttgataaagcgtgaaggtga

SEQ ID NO: 98583 - DNA, 75 bp, synthetic construct
  source 1..75: mol_type = other DNA
aggtcatgtaaatcgcctgaagatgctaaaacgccagatgtatggtagagccggatttgaactactcaggcagag

SEQ ID NO: 98584 - DNA, 75 bp, synthetic construct
  source 1..75: mol_type = other DNA
tacgctgctgggtatcattttttcgggtatgttcgcctccggactgattttgtatgtctcagtccgtccggatgt

SEQ ID NO: 98585 - DNA, 75 bp, synthetic construct
  source 1..75: mol_type = other DNA
aaataaacttaagtgattatggctttctaaaatgtaagattttaccagcatatgcttataactatgagatggaaa

SEQ ID NO: 98586 - DNA, 75 bp, synthetic construct
  source 1..75: mol_type = other DNA
actgataaagttttgccagctgaatctttatacggaatgctcttcagtatgcgtacacgaattgactatctggcg

SEQ ID NO: 98587 - DNA, 75 bp, synthetic construct
  source 1..75: mol_type = other DNA
ctgatgaaggcggtgtatgacatggcccgcaagggggcgcaggatgagattcaggcgcagatgcgtgatggcggc

SEQ ID NO: 98588 - DNA, 75 bp, synthetic construct
  source 1..75: mol_type = other DNA
cgtaaagaccagaccgcagcgttaaaggtggattccagaattgcccgcgctatgagcggaaattttggagatcat

SEQ ID NO: 98589 - DNA, 75 bp, synthetic construct
  source 1..75: mol_type = other DNA
gaggagcagcttcgtggaagctggatggccgggatgaagtccggctggggcgagtgggcggaaagtgcgacggac

SEQ ID NO: 98590 - DNA, 75 bp, synthetic construct
  source 1..75: mol_type = other DNA
cagaagggcgggcagatctctacacggaaatgtctgtgaaggtcagtggttttaaacagccgatagatgatgcgg

SEQ ID NO: 98591 - DNA, 75 bp, synthetic construct
  source 1..75: mol_type = other DNA
agcagctaaacttgcgaagatcccgaaaccaccaagccaggcagtatatgaagtgttcaaaaacgcgccattgga

SEQ ID NO: 98592 - DNA, 75 bp, synthetic construct
  source 1..75: mol_type = other DNA
aaaccggaggagacctggtacgggtgggacggtgacaggctgaccactgtacagacccaacagacaagaatccag

SEQ ID NO: 98593 - DNA, 75 bp, synthetic construct
  source 1..75: mol_type = other DNA
cagttgctattacgatttgaaggcgttacccgtggtgagtttgggcggaaagatggtgaaacagcaatacgcact

SEQ ID NO: 98594 - DNA, 75 bp, synthetic construct
  source 1..75: mol_type = other DNA
ccgtcgaattcccgttcccgacagtaatccgcactgtggtgtgcagcgatcttgatgaaacttatattccttcgg

SEQ ID NO: 98595 - DNA, 75 bp, synthetic construct
  source 1..75: mol_type = other DNA
tgagccggaacgtgacgtttgtcgccgatgtcaggacggcgcagatcgcggtgctggaagtgacgcaggattacg

SEQ ID NO: 98596 - DNA, 75 bp, synthetic construct
  source 1..75: mol_type = other DNA
tacagatgaattttcagcaaataattagaaaatacccgaaagaaacaggaatgtgtttcgttgttggtgttttat

SEQ ID NO: 98597 - DNA, 75 bp, synthetic construct
  source 1..75: mol_type = other DNA
taagcctcgccgattcaacgctttctgtcgatctgcaaatcctgcttgctgatggaaaatcaacctcaacgctga

SEQ ID NO: 98598 - DNA, 75 bp, synthetic construct
  source 1..75: mol_type = other DNA
ttactatggatggtatgaatactgcattacgtgttatgtatgcgggtagttatatctttactgagtctggcgatg

SEQ ID NO: 98599 - DNA, 75 bp, synthetic construct
  source 1..75: mol_type = other DNA
cagcgccaactttgccacggcattactgttattactcggtggtgcgggcattattggcagcgtgattttcggtaa

SEQ ID NO: 98600 - DNA, 75 bp, synthetic construct
  source 1..75: mol_type = other DNA
caaagacggctgtttctcaggttccgccgtggtggacggcgatacgctggcgctcatctataccggacataaatt

SEQ ID NO: 98601 - DNA, 75 bp, synthetic construct
  source 1..75: mol_type = other DNA
aacaggtgcttgaaaaagcacaatccgggattaatccgcgctggtatccgcgctatcacctcgcccctcgcgcag

SEQ ID NO: 98602 - DNA, 75 bp, synthetic construct
  source 1..75: mol_type = other DNA
ggcggattatgttccccaggatgaagtgcttagcgtcgaagacgaagcgcaggttgatgaagctctggcatggct

SEQ ID NO: 98603 - DNA, 75 bp, synthetic construct
  source 1..75: mol_type = other DNA
actccgcaggtcaatggaaggtgatgagtaaggaggatatgaagaaaaaactcaacctgcactcaccagaccatt

SEQ ID NO: 98604 - DNA, 75 bp, synthetic construct
  source 1..75: mol_type = other DNA
acgatgtcgaaacggtcgatgtcatcttgcgcccaaaagtttatttccggttactgcagcatggtaaggaccgtt

SEQ ID NO: 98605 - DNA, 75 bp, synthetic construct
  source 1..75: mol_type = other DNA
gaatcaccgctggtaacgccagcatttatcaaaatgaagctggcggagtacggcgggcgtgataaccctatgtac

SEQ ID NO: 98606 - DNA, 75 bp, synthetic construct
  source 1..75: mol_type = other DNA
ggagtctggtgtgaagtgggttcgccagccaccggagggggccattacagatatggcgtattttcccttttaccg

SEQ ID NO: 98607 - DNA, 75 bp, synthetic construct
  source 1..75: mol_type = other DNA
aacacgctgcgggcgagggtcaccgatgtgttcgggaatgcacttgccgggcagacggttagcgtgttggcaggc

SEQ ID NO: 98608 - DNA, 75 bp, synthetic construct
  source 1..75: mol_type = other DNA
ggtgctgttaaagccgccgttgacgccggtagcgccgcggcgagcgcggttggcgaggtgaaatcctgccatgta

SEQ ID NO: 98609 - DNA, 75 bp, synthetic construct
  source 1..75: mol_type = other DNA
ggggcaaaggacggcggcaacagagagctgaaaaactggcggaccgttgctatcagcaccggagaggtggatatc

SEQ ID NO: 98610 - DNA, 75 bp, synthetic construct
  source 1..75: mol_type = other DNA
gctttggtatcaccgttgatgaattacgtcgcctgaatcagttccgtacctttgcgcggggctttgacaatgtgc

SEQ ID NO: 98611 - DNA, 75 bp, synthetic construct
  source 1..75: mol_type = other DNA
caggcacaaagcaccggagaaacaacagcacttcggcaggaagtggaagagcataaaaatacacttggcgctctc

SEQ ID NO: 98612 - DNA, 75 bp, synthetic construct
  source 1..75: mol_type = other DNA
ttcagcaagtgctggaacgtgctgactatctggcgaaggagcataccaaagttcactgcaccggtgagcgcaact

SEQ ID NO: 98613 - DNA, 75 bp, synthetic construct
  source 1..75: mol_type = other DNA
gatggtgagcactacacaaaaagtgtagtggaaaaaatgaacaaaacatcaatgcttgtcataaccatgactttc

SEQ ID NO: 98614 - DNA, 75 bp, synthetic construct
  source 1..75: mol_type = other DNA
tttttacacgttcccgcatgtgtttgaaggtgagatcgcacagggatttaacccgtcgcattttgcaagagcgct

SEQ ID NO: 98615 - DNA, 75 bp, synthetic construct
  source 1..75: mol_type = other DNA
agcaatccgatgcgtatgccatccgcgaaagcggagctgtgctggcttattcctccatcgttaccgacaaaacga

SEQ ID NO: 98616 - DNA, 75 bp, synthetic construct
  source 1..75: mol_type = other DNA
tttgaaagccagcatgacgttatgccggcctttgaagcgggtttgctggaccgcgattgtgtcgttgttgtccgt

SEQ ID NO: 98617 - DNA, 75 bp, synthetic construct
  source 1..75: mol_type = other DNA
ggcgaactgacgctgctggtagacgaagcggaactggctgctcgcgaaccgcacattcctgacctgagcgcgtca

SEQ ID NO: 98618 - DNA, 75 bp, synthetic construct
  source 1..75: mol_type = other DNA
gctgacctccaccatcaagacggacgatgtgtcatacactgcgggtggcaagataaaagtgtccgtcacccttat

SEQ ID NO: 98619 - DNA, 75 bp, synthetic construct
  source 1..75: mol_type = other DNA
ctggttaccggcctggccgcagctgggcggcaagctggtctatgaacaatattatggcgatgaagtggcgctgtt

SEQ ID NO: 98620 - DNA, 75 bp, synthetic construct
  source 1..75: mol_type = other DNA
gcaaatactgtgtggacgtgcggcctgctggatctgaaggaagaagatttcggcggcgatttcctacccgtggtg

SEQ ID NO: 98621 - DNA, 75 bp, synthetic construct
  source 1..75: mol_type = other DNA
tcccgcgtggaaaataccggtcaggtgcgcctgtaccgttccaccgatctccgcgaatggcatgacgaaggtatt

SEQ ID NO: 98622 - DNA, 75 bp, synthetic construct
  source 1..75: mol_type = other DNA
ttggctcagttgcgctgtttggtttgttctcactggcaacggcgattgcctgggatttcccctcactggtctttg

SEQ ID NO: 98623 - DNA, 75 bp, synthetic construct
  source 1..75: mol_type = other DNA
caatcagaccgactatacagctaacagtcgccaggcttttgctgatatagcacgcgaagcgtttgcaaacagcgt

SEQ ID NO: 98624 - DNA, 75 bp, synthetic construct
  source 1..75: mol_type = other DNA
gaagagagaaatgccgtaatgctggagtacatgaaagagaaggatgttgccagcatgtcaggccgcctgcttaat

SEQ ID NO: 98625 - DNA, 75 bp, synthetic construct
  source 1..75: mol_type = other DNA
caagccctgcgagtcgccgcgcgcgagtcaaaagcggtccgccgttcgctgatcgacaaactggaagaattgcag

SEQ ID NO: 98626 - DNA, 75 bp, synthetic construct
  source 1..75: mol_type = other DNA
cggataaatacagttttacagagctgaatgaatccccccgtcttcgccggcagtggcaggatgttctggaggagt

SEQ ID NO: 98627 - DNA, 75 bp, synthetic construct
  source 1..75: mol_type = other DNA
gcagacggtcagcgtgttggcggacaacggcgcaacggtcgctccgacggtgattacagagccggacggcacagt

SEQ ID NO: 98628 - DNA, 75 bp, synthetic construct
  source 1..75: mol_type = other DNA
aggtaaaacagcagccggaagaagaggcgctgatcctctttacctccggttctgaaggccatccgaaaggcgtcg

SEQ ID NO: 98629 - DNA, 75 bp, synthetic construct
  source 1..75: mol_type = other DNA
tcgacgctgccagcggtggcttcctggcaccgttcgtcgccccggatatcgtctgggacttccgcctgccgcgtg

SEQ ID NO: 98630 - DNA, 75 bp, synthetic construct
  source 1..75: mol_type = other DNA
aatccacgtccggcagcgcaccatgaagaaagagctggaaaagctgaccagtgcggatgagatactggcatacag

SEQ ID NO: 98631 - DNA, 75 bp, synthetic construct
  source 1..75: mol_type = other DNA
gatatggcagcggactgatgcaggtagattcccagcattttaacgaactggcccgctacggaattaagccggaac

SEQ ID NO: 98632 - DNA, 75 bp, synthetic construct
  source 1..75: mol_type = other DNA
tcgcaaagaagcagaagtgttctgatgggaccatccgaaaagaattacagactgcaatgggattcatcgatggct

SEQ ID NO: 98633 - DNA, 75 bp, synthetic construct
  source 1..75: mol_type = other DNA
tacaaaaagagcttggcgtcgccacattcaaagtggatcaggaagtcagaaagctggtggaggctggccgtaaat

SEQ ID NO: 98634 - DNA, 75 bp, synthetic construct
  source 1..75: mol_type = other DNA
cggaagtacagaccattcgtcgtctggtgaccgaaagtgaagtggcggtggcggggaacactaaattccgctttg

SEQ ID NO: 98635 - DNA, 75 bp, synthetic construct
  source 1..75: mol_type = other DNA
ctcttttgcttctaccgagactatatcgtttactcctgacaacataaatgcggacattagtcttggaactctgag

SEQ ID NO: 98636 - DNA, 75 bp, synthetic construct
  source 1..75: mol_type = other DNA
ctccctgccttatctggctaccggcaccggatatcactacaacattccccgaatgtttctcgcaactcattctgg

SEQ ID NO: 98637 - DNA, 75 bp, synthetic construct
  source 1..75: mol_type = other DNA
attgggcgcgctgttcagcggcggcaatattgcagcgggcatagcaggaacgctggccggcggattgctgatgaa

SEQ ID NO: 98638 - DNA, 75 bp, synthetic construct
  source 1..75: mol_type = other DNA
tcgccgactggcagcactcaacatgctggcagagcgtggcatcattccggctgactggcctgtccgtgtgaaggt

SEQ ID NO: 98639 - DNA, 75 bp, synthetic construct
  source 1..75: mol_type = other DNA
aaagctacaaacccgagctggcggaaggatcaggtcgtgcgcagacgctgcgtatggtgatcatggtgagtgata

SEQ ID NO: 98640 - DNA, 75 bp, synthetic construct
  source 1..75: mol_type = other DNA
tgaaaaatttctcagtatccaatataccaatgttgagggcttccctcttacatctcaaaaggataactatcatgg

SEQ ID NO: 98641 - DNA, 75 bp, synthetic construct
  source 1..75: mol_type = other DNA
ttgttgctggccccgtttttcttcttcacctatggatctcttaatcagttcaccgcggttcaggacagtaatagc

SEQ ID NO: 98642 - DNA, 75 bp, synthetic construct
  source 1..75: mol_type = other DNA
actgacgcatataatgctgcatcttctcatatcgaatactggataggtgctggcgtctcatttatctcgatgatg

SEQ ID NO: 98643 - DNA, 75 bp, synthetic construct
  source 1..75: mol_type = other DNA
tccgcgtggttgacattgccgcagggcatgggcgctatgtactggatgcgctggcaaacgagcctgccgtaagcg

SEQ ID NO: 98644 - DNA, 75 bp, synthetic construct
  source 1..75: mol_type = other DNA
cgatcggcctggctggcgtcgcgatttgctatttagggttatctggttatgtgtggtaccacgataataaacgca

SEQ ID NO: 98645 - DNA, 75 bp, synthetic construct
  source 1..75: mol_type = other DNA
gcggtcactatcgagtttgtggcggataccggcgaagtccacatgatgacgaaggcctggagcagtgaaccggcc

SEQ ID NO: 98646 - DNA, 75 bp, synthetic construct
  source 1..75: mol_type = other DNA
attgaatacgtgcagacgcacagcgccccgcagccagtacccgtggatattggtcgctttgttaccgtcgaagtg

SEQ ID NO: 98647 - DNA, 75 bp, synthetic construct
  source 1..75: mol_type = other DNA
aatgcgaaaaggattttatttcataaatcctaactttgtatttaatggcgatagaatagcgtttacaactctgat

SEQ ID NO: 98648 - DNA, 75 bp, synthetic construct
  source 1..75: mol_type = other DNA
atgcccagcattcgaccggatcagctacctcaactgatgcagacaatgcgaacagccagcattagcctttccaca

SEQ ID NO: 98649 - DNA, 75 bp, synthetic construct
  source 1..75: mol_type = other DNA
tgaattcgacaaaaacagtgccggtattgaaaactacaatttcataactacagcgggtcttaaatattatttctg

SEQ ID NO: 98650 - DNA, 75 bp, synthetic construct
  source 1..75: mol_type = other DNA
tgcgcatctgtttgaaggtactactcagattgtctttgtttgcgtgacctacatcctctggggcatgacttacac

SEQ ID NO: 98651 - DNA, 75 bp, synthetic construct
  source 1..75: mol_type = other DNA
cggtgcctgcgaagcgtgaggcagtgaagggtgtgcggtttgcagagcgtggcgcaaagatgaaggatgagcatc

SEQ ID NO: 98652 - DNA, 75 bp, synthetic construct
  source 1..75: mol_type = other DNA
tcgacgggctggcgcgaaccttccgcgctgccgtacatcacagctccccgattgcagtaaagtgcaacattctgt

SEQ ID NO: 98653 - DNA, 75 bp, synthetic construct
  source 1..75: mol_type = other DNA
ttgatggatttatccattaacaaaaactggatcgacaaagaagaatatccgcaatccgcagccatcgacctgcgt

SEQ ID NO: 98654 - DNA, 75 bp, synthetic construct
  source 1..75: mol_type = other DNA
ggagaagacagctatatggatggtcctggcggtagtgtaacagctgtaaacattaacggaacgagctggatagaa

SEQ ID NO: 98655 - DNA, 75 bp, synthetic construct
  source 1..75: mol_type = other DNA
atgagcctgccttttttacgcacgctgcaaggcgatcgtttttttcagttattaattcttgttggtatcggatta

SEQ ID NO: 98656 - DNA, 75 bp, synthetic construct
  source 1..75: mol_type = other DNA
ctttcatatcgctggccccatataccaaatcttggtgatatggctttgcttgcgcctcgtatcagggatgggctt

SEQ ID NO: 98657 - DNA, 75 bp, synthetic construct
  source 1..75: mol_type = other DNA
ggaggctgaccgcacgcgcattaacagtgaagtggtgatcaatggtggcattacccagggcggcggagcgatgag

SEQ ID NO: 98658 - DNA, 75 bp, synthetic construct
  source 1..75: mol_type = other DNA
cgagctgcaccttaaatcaggtgtggtaaaactgtttgaccctctcactccggaaatgttacgggcgctaatccg

SEQ ID NO: 98659 - DNA, 75 bp, synthetic construct
  source 1..75: mol_type = other DNA
ggcaaagggctggcaaaaaaactggccttaatggcaatggagcaggcgcgagaaatgggtttcaaacgctgctat

SEQ ID NO: 98660 - DNA, 75 bp, synthetic construct
  source 1..75: mol_type = other DNA
ttccgtcagccctgctcaacgagtccgccacgctgttccgtcgaaagtattacattaacggcagtcatgcaggct

SEQ ID NO: 98661 - DNA, 75 bp, synthetic construct
  source 1..75: mol_type = other DNA
tgacattgctgcgggtacggatgaggcaggtgaatatgaagacggacgtaatagtatcggtggggcaatcattgg

SEQ ID NO: 98662 - DNA, 75 bp, synthetic construct
  source 1..75: mol_type = other DNA
gaaggcctggagcagtgaaccggcctcacttgacggtggcggggagatctccgcgaagttcgccagtgccaccag

SEQ ID NO: 98663 - DNA, 75 bp, synthetic construct
  source 1..75: mol_type = other DNA
attaccgcagcaaagaccttaccccgaaaaaatccaggctgctggctgagacgatttctgcggtttatctcgatg

SEQ ID NO: 98664 - DNA, 75 bp, synthetic construct
  source 1..75: mol_type = other DNA
gaaaaaaggtggcgcaaaaacgaaaggccgtggacgtaaggccgcgcagcccgagcctcagccgcaaccgccgga

SEQ ID NO: 98665 - DNA, 75 bp, synthetic construct
  source 1..75: mol_type = other DNA
gatgatccgctctttgccttcgaaaactacacccgaaccgcgcaggtactgacggacacgatggcagaagcgcac

SEQ ID NO: 98666 - DNA, 75 bp, synthetic construct
  source 1..75: mol_type = other DNA
cacgcggatcaacagtgttcgagaaagccatgcagcaggcgcaaaaggccattaacgctatgacgcagggggcta

SEQ ID NO: 98667 - DNA, 75 bp, synthetic construct
  source 1..75: mol_type = other DNA
aggtcgccacgtcggaaacctggcgtgacaaacagacaggggagatgcgggagcagacagaatggcatcgcgtgg

SEQ ID NO: 98668 - DNA, 75 bp, synthetic construct
  source 1..75: mol_type = other DNA
tggttcaggatcagccgctaagcctataaatgcttttaaaggaaatgttgtcgtggcatcagccgatacagggcc

SEQ ID NO: 98669 - DNA, 75 bp, synthetic construct
  source 1..75: mol_type = other DNA
aaagcaagaaaggtttctcactactcgaactattacttgttttaggcatcattgctgcattagtggtagcggctt

SEQ ID NO: 98670 - DNA, 75 bp, synthetic construct
  source 1..75: mol_type = other DNA
catcaatgacaccatcagccagcagcgtcaggagctgtggcgtcagcagtcccgctttacggttctggaagaggc

SEQ ID NO: 98671 - DNA, 75 bp, synthetic construct
  source 1..75: mol_type = other DNA
gtgattacttcgatttgctggtgatttccgaagaagttggcgttgccaaaccgaataagaaaattttcgattatg

SEQ ID NO: 98672 - DNA, 75 bp, synthetic construct
  source 1..75: mol_type = other DNA
gcccagccctgaccggaacgccaacggctccgactgcggcgcagactgtgaacaatacgcagattgccactacag

SEQ ID NO: 98673 - DNA, 75 bp, synthetic construct
  source 1..75: mol_type = other DNA
gtgggcatttgggcttaacgccacagtcagtgaatattttcggtggttataaagtgcaagggcgtggcgatgcag

SEQ ID NO: 98674 - DNA, 75 bp, synthetic construct
  source 1..75: mol_type = other DNA
cagttgtatgggccgtttggcagtgaacccttttccacagccggcagtgacgaagggatgatcagtggtcaggtg

SEQ ID NO: 98675 - DNA, 75 bp, synthetic construct
  source 1..75: mol_type = other DNA
agcttatgctgccgcattagcgacaagtagtgtttcgctgttacctagaagcgcacaagccatgtgggctcttgg

SEQ ID NO: 98676 - DNA, 75 bp, synthetic construct
  source 1..75: mol_type = other DNA
gtgactgccgaagaggtgaataacgcacttaaacaagcaaccaccaataacgagtcatttggttataccgatgaa

SEQ ID NO: 98677 - DNA, 75 bp, synthetic construct
  source 1..75: mol_type = other DNA
acgtgaagttcagcgtaatcgtggtaggcgctattacaaagccgttgatgcgaataaccgggccaacaggatggc

SEQ ID NO: 98678 - DNA, 75 bp, synthetic construct
  source 1..75: mol_type = other DNA
gaatacctatcacgaatgccgcatcaacgatgaatggggcggagtggaaattattaaacgccctgactgggcacg

SEQ ID NO: 98679 - DNA, 75 bp, synthetic construct
  source 1..75: mol_type = other DNA
ttacgtctcgccaccatgtttagcagcgtagtagcgagactccttaaaattcatctgggagcctttcacatggct

SEQ ID NO: 98680 - DNA, 75 bp, synthetic construct
  source 1..75: mol_type = other DNA
caaaatggcgatttgagaaggacaggccgcgtaaaggcgtgaagaaaacgtttatctttagtccttctgcaccct

SEQ ID NO: 98681 - DNA, 75 bp, synthetic construct
  source 1..75: mol_type = other DNA
tgcgttacggaccgcagagcgtgggcggcgtggtgaactttgttacccgtgccattccgcaggactttggtatcg

SEQ ID NO: 98682 - DNA, 75 bp, synthetic construct
  source 1..75: mol_type = other DNA
ttacggacacactggggctggtgacgtccttcagctatgccaatgctgaggatgagcaaaaaacgcgctacagcg

SEQ ID NO: 98683 - DNA, 75 bp, synthetic construct
  source 1..75: mol_type = other DNA
atggcgctaacacaccgcgaactctgtcagattgcgtacaagttccttaagcgcaacgggttcaaggtttgtttt

SEQ ID NO: 98684 - DNA, 75 bp, synthetic construct
  source 1..75: mol_type = other DNA
atacggggatcgcacggatacttccgctccggaacggacgactgataacctgtcttaccgacaaccaggagccct

SEQ ID NO: 98685 - DNA, 75 bp, synthetic construct
  source 1..75: mol_type = other DNA
gccgcttatctggcggatgaaatcgccaaactggggccgtatgagttcatctgtacgggtcgcccggacgaaggc

SEQ ID NO: 98686 - DNA, 75 bp, synthetic construct
  source 1..75: mol_type = other DNA
gcacagtactatgaattcctgcgcctcggtcgtgaaggctataccaaagtacagaacgcttcctaccaggttgcc

SEQ ID NO: 98687 - DNA, 75 bp, synthetic construct
  source 1..75: mol_type = other DNA
aaagttataagcccgaactggcggaagggtcaggccgcgcacagacgctgcgcatggtgatcatggtgagcgata

SEQ ID NO: 98688 - DNA, 75 bp, synthetic construct
  source 1..75: mol_type = other DNA
gatgggtcagcacaaccaaaaaagccagtgattgtgcgttttggcttgaagttgaaggtaattccatgaccgcac

SEQ ID NO: 98689 - DNA, 75 bp, synthetic construct
  source 1..75: mol_type = other DNA
atatcaggacgctgtatgggagtgtctggtctgcctggacaaaacaatacgacggggcaaataagcccactccgg

SEQ ID NO: 98690 - DNA, 75 bp, synthetic construct
  source 1..75: mol_type = other DNA
ggcgcggggtaatagaacgagcaaacaaaggaatacccaaagatgtggctctgagtttccagacgtactgctcaa

SEQ ID NO: 98691 - DNA, 75 bp, synthetic construct
  source 1..75: mol_type = other DNA
acaacctgaaaggcacacatgagcaggtcagctacaatgcgccgcttcctgctctaaatgtgctttatcacctca

SEQ ID NO: 98692 - DNA, 75 bp, synthetic construct
  source 1..75: mol_type = other DNA
aggaagaagaaacagccatgactagcgtcattgctcggtgtgagtcagccgtcacatcaccttctgcttatttcg

SEQ ID NO: 98693 - DNA, 75 bp, synthetic construct
  source 1..75: mol_type = other DNA
tcgtgttaattgtaaagtaaataaagatataaaccacattaacgttggcattcgtattcgcaataaagaaggcgt

SEQ ID NO: 98694 - DNA, 75 bp, synthetic construct
  source 1..75: mol_type = other DNA
tgcgtgtggaagacggcaccggcgacgacgaggaaacgaaactcgcgcagaccgtttccaatatcatcggcacca

SEQ ID NO: 98695 - DNA, 75 bp, synthetic construct
  source 1..75: mol_type = other DNA
cttatcggaatgttccaagtgttactttgggtaggctggctttggacaagtcccttcaaggtcaaggatttggct

SEQ ID NO: 98696 - DNA, 75 bp, synthetic construct
  source 1..75: mol_type = other DNA
ctgattgtgcagatggtttccggaaaaaccgtggcggcggatatgttcagcctgttgccttcagagacagaagcg

SEQ ID NO: 98697 - DNA, 75 bp, synthetic construct
  source 1..75: mol_type = other DNA
gagcaatatcatggaaagaatcccgttaccgggttaatgccatcggtattaatccggtaacgggatatggcagcg

SEQ ID NO: 98698 - DNA, 75 bp, synthetic construct
  source 1..75: mol_type = other DNA
agacgtcttgcctacgcatcagatgtttaccggatttataccgggataaaaagcagtaaaggtatccggcttccg

SEQ ID NO: 98699 - DNA, 75 bp, synthetic construct
  source 1..75: mol_type = other DNA
ggacatcaacgccaccagccggataaaggtcagtacggggccgctggcggggcgtgtactgaatatcatcgggca

SEQ ID NO: 98700 - DNA, 75 bp, synthetic construct
  source 1..75: mol_type = other DNA
cccccgacgtcataacggaacaggggatacgccgaatgttgatacaaatacagagattactacagagattacaac

SEQ ID NO: 98701 - DNA, 75 bp, synthetic construct
  source 1..75: mol_type = other DNA
gcagccagccattgcaggtgaatgtgcggttggtatgcgcgacgaatgccgatctcccggcgatggtcaatgaag

SEQ ID NO: 98702 - DNA, 75 bp, synthetic construct
  source 1..75: mol_type = other DNA
taaaagccagactacagccgaagcattcagcttcggcgatcccgttcctgttctggaccgccgagaattactgga

SEQ ID NO: 98703 - DNA, 75 bp, synthetic construct
  source 1..75: mol_type = other DNA
gtaaaaataacacccccgtcacaacgcccgggatgcttgcggaagagctggggttgtcatacgacacctataccg

SEQ ID NO: 98704 - DNA, 75 bp, synthetic construct
  source 1..75: mol_type = other DNA
aatctttcccgcacgctggatgaagttcagttgacgctggatgataaagggcgcggcgaagtttctacagaaagc

SEQ ID NO: 98705 - DNA, 75 bp, synthetic construct
  source 1..75: mol_type = other DNA
tcctgtatgctcctgatggtatcgctgtgcatgtagattgtaatgatgagataaaaagtcttgaaaatggtgcga

SEQ ID NO: 98706 - DNA, 75 bp, synthetic construct
  source 1..75: mol_type = other DNA
ggtacgcgttttgtcggtgccgccaaatacccaaatcggaaatgccgcctgatcccgttccagttctcgacggtt

SEQ ID NO: 98707 - DNA, 75 bp, synthetic construct
  source 1..75: mol_type = other DNA
acgccattaaatttgccgtagacacaatgaaattgagcctgcctgttatgggcggggcagacaggaatcttattg

SEQ ID NO: 98708 - DNA, 75 bp, synthetic construct
  source 1..75: mol_type = other DNA
ccagtgaattaccgttcagcccgccagaagagggggaaacgctggcaacacatgcgccgaatttctggaagtggt

SEQ ID NO: 98709 - DNA, 75 bp, synthetic construct
  source 1..75: mol_type = other DNA
tgcgtcagggtgctggctgagtctgttggtatgctgccctgcagtctctacaaaatcagcggcacccttaaaaca

SEQ ID NO: 98710 - DNA, 75 bp, synthetic construct
  source 1..75: mol_type = other DNA
tttacaagaacaaatgaaagagctaaacaaatggtgtgctaaagaagtaattaattttagaagctatgaattaac

SEQ ID NO: 98711 - DNA, 75 bp, synthetic construct
  source 1..75: mol_type = other DNA
tgcaaatcattctggatgaagtccgcagcgctaaaaaagcgggcatcaacatgcagcaaaccgaccactatctgg

SEQ ID NO: 98712 - DNA, 75 bp, synthetic construct
  source 1..75: mol_type = other DNA
tctgcagaaacgcctacaggaacttaacaactggctgggcgatgaagttatacgtttcgagccgtacactttaga

SEQ ID NO: 98713 - DNA, 75 bp, synthetic construct
  source 1..75: mol_type = other DNA
gggggcagatgtgcgccgtcagaattcctggctactgcaatcacgatccggaaacgtctgtgctggcgcattacc

SEQ ID NO: 98714 - DNA, 75 bp, synthetic construct
  source 1..75: mol_type = other DNA
ccgctcgatttaattgaagtgcgctccggctcttatctcgaagaggatgatgtggtgcgtttcgcggatcgctac

SEQ ID NO: 98715 - DNA, 75 bp, synthetic construct
  source 1..75: mol_type = other DNA
aggaaggggaaaatgatttaccctcgaccgccagtcgcgagatcttatttatgcaattattgctcttgctgcgta

SEQ ID NO: 98716 - DNA, 75 bp, synthetic construct
  source 1..75: mol_type = other DNA
ggttggataagctgtagtgagcgaatgcccgctcaagatgattggattttaatttattcaaagcacggtgagtat

SEQ ID NO: 98717 - DNA, 75 bp, synthetic construct
  source 1..75: mol_type = other DNA
gacaaagccacacgatatgcaggctgcaattgcctgtagctcatgccacgatttaatcgacgggagagtaaaaac

SEQ ID NO: 98718 - DNA, 75 bp, synthetic construct
  source 1..75: mol_type = other DNA
ggcggcagaaaaacaccagcgcggtgaactggagcagccacaccaccagctggtcagcacatacagcgaactgaa

SEQ ID NO: 98719 - DNA, 75 bp, synthetic construct
  source 1..75: mol_type = other DNA
atggattttccacaaagggttaatggttgggcgctatatgctcatccctgttttcaggaaacctacgacgcttta

SEQ ID NO: 98720 - DNA, 75 bp, synthetic construct
  source 1..75: mol_type = other DNA
gcatggccgcgcaatttgctttgctgatggatggtatgagtggaaaaaggaaggcgaccaaaaacaaccctactt

SEQ ID NO: 98721 - DNA, 75 bp, synthetic construct
  source 1..75: mol_type = other DNA
ttttgaaaaggtttcgctaaagtttcctcattttgaagaacaacaaaaaatcgctgacgtcctgtccgcagccga

SEQ ID NO: 98722 - DNA, 75 bp, synthetic construct
  source 1..75: mol_type = other DNA
gggctgggatttatcaactattcactggtgccgtatctgacccgcatcgaacagcggatcaacaccggactggta

SEQ ID NO: 98723 - DNA, 75 bp, synthetic construct
  source 1..75: mol_type = other DNA
gaaaggctgcttcgggccagagctgaactgacagaagaacaggccgtagctcaaaaacttaaaaatcaggtaacc

SEQ ID NO: 98724 - DNA, 75 bp, synthetic construct
  source 1..75: mol_type = other DNA
aacgtatgcagccttctgaaagcctgctacgcgccgttttgcacaccaaacatctgatgaatcccgaagtactgg

SEQ ID NO: 98725 - DNA, 75 bp, synthetic construct
  source 1..75: mol_type = other DNA
attggtcaacaaggaatacagttaatacaaaagactgttatgatcatcaacctgtggttgggagcacacctggtt

SEQ ID NO: 98726 - DNA, 75 bp, synthetic construct
  source 1..75: mol_type = other DNA
tacccgccgcgatggccgttctgccagaaaaacaaacaggacgctggcatttgcaacacgtgtcacacctgcttt

SEQ ID NO: 98727 - DNA, 75 bp, synthetic construct
  source 1..75: mol_type = other DNA
cgagcaacagcgcgaagtgtttgagtttgtcgccagcagcgactacttctccggcccgacgtggatggcgatgtg

SEQ ID NO: 98728 - DNA, 75 bp, synthetic construct
  source 1..75: mol_type = other DNA
atgccgatctggcctggattcgccagcaactggtcgatgccgcctggtttgtccgtgccacactggaagcgcatg

SEQ ID NO: 98729 - DNA, 75 bp, synthetic construct
  source 1..75: mol_type = other DNA
tgctggcgcagacggaggaagtgagcgtgccgctggcctcactgattaagtcaccgctgaatgtgcgcacggtgc

SEQ ID NO: 98730 - DNA, 75 bp, synthetic construct
  source 1..75: mol_type = other DNA
gatctgtggcatgcgcctgcaccgaaaaatggtcaggccgttggcaccaacaccattggttcttccgaggcctgt

SEQ ID NO: 98731 - DNA, 75 bp, synthetic construct
  source 1..75: mol_type = other DNA
atggctacttattcttttatggacgttacggcgtccctctccggcccgaccggcgagattgatcttggctacggt

SEQ ID NO: 98732 - DNA, 75 bp, synthetic construct
  source 1..75: mol_type = other DNA
cacttacggtcaatccattaccgacccgtgtctgggctgggaagataccgaacgcctggtcgaaaaactcgcctc

SEQ ID NO: 98733 - DNA, 75 bp, synthetic construct
  source 1..75: mol_type = other DNA
ttacagccctctctgtgccgggtaaaaccgtgtcagatgattttatgcatgctgttctcagtaactgcaccacaa

SEQ ID NO: 98734 - DNA, 75 bp, synthetic construct
  source 1..75: mol_type = other DNA
tataccgcagacgtcgatgcgatgggtacgctgcgcctgctcgaggcgatccgcttcctcggtctggaaaagaaa

SEQ ID NO: 98735 - DNA, 75 bp, synthetic construct
  source 1..75: mol_type = other DNA
cgcataacaatattctcgccagtgagcgggcttattgcgcgcggctgaatctgacctggcaggatgtctttatga

SEQ ID NO: 98736 - DNA, 75 bp, synthetic construct
  source 1..75: mol_type = other DNA
ggaaagcctgcgggcgtattttcccgccacagagcgtattctgtttgctgaacattatcaggggccataccagcc

SEQ ID NO: 98737 - DNA, 75 bp, synthetic construct
  source 1..75: mol_type = other DNA
gcatcaacccggatgttgttgagcagtttctggcccttatgaacacacattgtaaatcctcagaagaggcactcg

SEQ ID NO: 98738 - DNA, 75 bp, synthetic construct
  source 1..75: mol_type = other DNA
ccgacctggcttgggttatcgttttacgatagccgcaccacgtcgttgttgcatcctgctcgccagatccagctt

SEQ ID NO: 98739 - DNA, 75 bp, synthetic construct
  source 1..75: mol_type = other DNA
atgcgaattgagatctgtatcgctaaagaaaaaatcagcaaaatgccaaaaggttctgttcctgccctacagcaa

SEQ ID NO: 98740 - DNA, 75 bp, synthetic construct
  source 1..75: mol_type = other DNA
ggtgcgggtgctggatctggcgggaaataccggtccggtggtgtcgaaaacggtggtggtcgatacgattaaccc

SEQ ID NO: 98741 - DNA, 75 bp, synthetic construct
  source 1..75: mol_type = other DNA
ataaagaagatgagctggcgcgtctggcaaaagaagtggcgaagatcgaaggcgaaatcagccgcatcgagaaca

SEQ ID NO: 98742 - DNA, 75 bp, synthetic construct
  source 1..75: mol_type = other DNA
ttaaagggataaatcattacccggataagattactgttactgtggcactggaaattggtgggtatccgtcactgt

SEQ ID NO: 98743 - DNA, 75 bp, synthetic construct
  source 1..75: mol_type = other DNA
atgagttcgctgttcagcaaggccaggcgcaaccatgctgagcgctttcaacaatccggcaaggctatcaatgac

SEQ ID NO: 98744 - DNA, 75 bp, synthetic construct
  source 1..75: mol_type = other DNA
acggcttcccccaactccggcgttacacaccactcctgttgagtacgctgaccatgaaggccgcaccggcagcat

SEQ ID NO: 98745 - DNA, 75 bp, synthetic construct
  source 1..75: mol_type = other DNA
cgacctggattgttgccaccctgaacccgagcatcctgggtatgattgaaaccctgggcggcccaatcatcgcga

SEQ ID NO: 98746 - DNA, 75 bp, synthetic construct
  source 1..75: mol_type = other DNA
gggtgcaaacatgaatgtgcagcgcctggttatcaccgaagcaacggagaccacaccggcggtaatggaaagtga

SEQ ID NO: 98747 - DNA, 75 bp, synthetic construct
  source 1..75: mol_type = other DNA
cgcagcccttgagtctgtgaagctgtctgatatatcgtctaatctgaacagattcagtcggggactgggatatgc

SEQ ID NO: 98748 - DNA, 75 bp, synthetic construct
  source 1..75: mol_type = other DNA
gtacgctggcgctggctatcgccggtgttacagctatgtcgggctttatggcaattccggaggctcgcgccgaag

SEQ ID NO: 98749 - DNA, 75 bp, synthetic construct
  source 1..75: mol_type = other DNA
cgctggtatgagccgcccgtcagctttgacgggctggcacgaaccttccgtgccgccgtgcatcacagctcaccg

SEQ ID NO: 98750 - DNA, 75 bp, synthetic construct
  source 1..75: mol_type = other DNA
gaatttaccgaatccgatccggaagaaattaaagaccgtctggaaaaacaggtggatttgattattcacggcggc

SEQ ID NO: 98751 - DNA, 75 bp, synthetic construct
  source 1..75: mol_type = other DNA
gcagtaaaactggaatttatccagccgggtaagccgacgcagaacgctttcattgagcgctttaaccggacatac

SEQ ID NO: 98752 - DNA, 75 bp, synthetic construct
  source 1..75: mol_type = other DNA
ctccgcaatgcgatgaaaagcgccaaaggtccaggcaacttccgcaacctgtttatgtactcgcctaacggcaaa

SEQ ID NO: 98753 - DNA, 75 bp, synthetic construct
  source 1..75: mol_type = other DNA
tctgggatgcatgtgcagcatatggcatcaaaggtgcaaaactgatgattatggcgcgcttggcggattattcga

SEQ ID NO: 98754 - DNA, 75 bp, synthetic construct
  source 1..75: mol_type = other DNA
aggtaaatgaacaaactaatgaagatttgcatctggattttgataatatggattttcatcgtactaatcctgcaa

SEQ ID NO: 98755 - DNA, 75 bp, synthetic construct
  source 1..75: mol_type = other DNA
aaggtttacgaagcactcactgcgtctctcaccgattttcaccgtcgcgaactggatggcttgctgactatccgt

SEQ ID NO: 98756 - DNA, 75 bp, synthetic construct
  source 1..75: mol_type = other DNA
tatctcgggcagaaaccaacaacggttattgatctcaccgatgatacgccggtcgtggtgcgtgaaggcgtaggt

SEQ ID NO: 98757 - DNA, 75 bp, synthetic construct
  source 1..75: mol_type = other DNA
tcttttacgcgtggaaatcggcgaaacgtttgattttcagctgacgctcttgccggacaatcgccaccgcctcca

SEQ ID NO: 98758 - DNA, 75 bp, synthetic construct
  source 1..75: mol_type = other DNA
tatctcgggcagaaaccaacaacggttattgatcttactgatgatacgccggtcgtggtgcgtgaaggcgtaggt

SEQ ID NO: 98759 - DNA, 75 bp, synthetic construct
  source 1..75: mol_type = other DNA
gacgacaacgggcgcggtagctttatctgcaaccagtgtggcgctggtgacgggctggatttaatcaagcgggtt

SEQ ID NO: 98760 - DNA, 75 bp, synthetic construct
  source 1..75: mol_type = other DNA
tcaggatccgattgggctgaaagggggatggaatttttatcagtatccgttgaatccgatctcaaatatagatcc

SEQ ID NO: 98761 - DNA, 75 bp, synthetic construct
  source 1..75: mol_type = other DNA
ttgacaaagatagcaaattatttgtaaatgagatggcagatagagagttttgctcaatattaaaaagtttgcggg

SEQ ID NO: 98762 - DNA, 75 bp, synthetic construct
  source 1..75: mol_type = other DNA
ggtgaaaaccccggttatcagaccggacgcctggctcgttcgattggttacatggtgccgagagccagtaaaaag

SEQ ID NO: 98763 - DNA, 75 bp, synthetic construct
  source 1..75: mol_type = other DNA
tggtcagcacatacagtgagctgaaccggcagtatacggaactgcagagtgaatataagcatctgcggcggtatt

SEQ ID NO: 98764 - DNA, 75 bp, synthetic construct
  source 1..75: mol_type = other DNA
gtatataatcagtcaggatgtttttataaagcctatatggccatacacaataaaatcgaacagatacttccatat

SEQ ID NO: 98765 - DNA, 75 bp, synthetic construct
  source 1..75: mol_type = other DNA
tagtggctcttccgatcgtacccgcggtatacgcaacaataaccccggcaatcttgaatacagcaaaactaatcc

SEQ ID NO: 98766 - DNA, 75 bp, synthetic construct
  source 1..75: mol_type = other DNA
gagtttaaagaagcaacagcaaaagcaactgctcaaaatgctattggagcaaactatcttcaggtaagacagcaa

SEQ ID NO: 98767 - DNA, 75 bp, synthetic construct
  source 1..75: mol_type = other DNA
cagcactggcgctcggactggcgttaatggggaatgcacaggcagtgacgaccattccgttctggcattctatgg

SEQ ID NO: 98768 - DNA, 75 bp, synthetic construct
  source 1..75: mol_type = other DNA
gcacatgacccacgtaaaccaatcagtgaaaacaccgtaaataaagccctgagggttatggggtatgacacaacc

SEQ ID NO: 98769 - DNA, 75 bp, synthetic construct
  source 1..75: mol_type = other DNA
gcctgcaatccgggaaaccggaccaggaaaaaacttgcaggccataacagtatctatcaatctgcattctcaccg

SEQ ID NO: 98770 - DNA, 75 bp, synthetic construct
  source 1..75: mol_type = other DNA
atgcatgatgaccgttattttaaatcaatgagccatgcagaaaatgcactgactaacagtgaatgcttgcggcaa

SEQ ID NO: 98771 - DNA, 75 bp, synthetic construct
  source 1..75: mol_type = other DNA
cggcacgagccgctctttatgacaacgttgtgtcggctgcaagtcaggtgataaagcagcgacaggctgatcctg

SEQ ID NO: 98772 - DNA, 75 bp, synthetic construct
  source 1..75: mol_type = other DNA
atgcctgtaacgaagtgtgaaccagaaaccacccgcaaagcaagccgtaaatctgtaaaaacgcaggaaacagtc

SEQ ID NO: 98773 - DNA, 75 bp, synthetic construct
  source 1..75: mol_type = other DNA
ctggcttatatacctacagggattgcttatgctatctggtcaggagtcggtatcgttctgattagtttgctttcc

SEQ ID NO: 98774 - DNA, 75 bp, synthetic construct
  source 1..75: mol_type = other DNA
taccacactaaataacatggggattgcaccacatgttgttgaacagcttctcggtcacacattaggtggtgtaat

SEQ ID NO: 98775 - DNA, 75 bp, synthetic construct
  source 1..75: mol_type = other DNA
atgtcaggagaacacacgttaaaagcggtacgaggcagttttattgatgtcacccgtacggtcgataacccggaa

SEQ ID NO: 98776 - DNA, 75 bp, synthetic construct
  source 1..75: mol_type = other DNA
cggggtcaatgtggagaccatccggttctaccagcgcaagggcctgctgccggagccagacaagccctatggcag

SEQ ID NO: 98777 - DNA, 75 bp, synthetic construct
  source 1..75: mol_type = other DNA
ctgatgtccagtcagctggttggtgacaggattgaatacggcctgcgggagttctcctggtccggtgagcaggct

SEQ ID NO: 98778 - DNA, 75 bp, synthetic construct
  source 1..75: mol_type = other DNA
gccactggttaatttaattggtggtgataataaaccactcggtttccagggcggtatcgcggtcctttccgtggt

SEQ ID NO: 98779 - DNA, 75 bp, synthetic construct
  source 1..75: mol_type = other DNA
aaagatagagtaaaaaaactaattcttgatttacagaaacaatttggtgaaaaccgcatttcaattaaagatgtt

SEQ ID NO: 98780 - DNA, 75 bp, synthetic construct
  source 1..75: mol_type = other DNA
acacgctcgacacgttatgtcagcgccattacgggcgcactgaaggtgtggtcgaggcggtattgctggctaatc

SEQ ID NO: 98781 - DNA, 75 bp, synthetic construct
  source 1..75: mol_type = other DNA
gaaaacacatcattgccatttcagcagattgcccgggaagtgaaagcgccccgtgaacgactgaagtatgcgctg

SEQ ID NO: 98782 - DNA, 75 bp, synthetic construct
  source 1..75: mol_type = other DNA
tctggcaaccaagggagcagaggccggaggtaattgacaggagccttgcgccgggttacgtatgttctccccgga

SEQ ID NO: 98783 - DNA, 75 bp, synthetic construct
  source 1..75: mol_type = other DNA
tctcagtggctgtatgccgtcgatgtgctgattgaaacacagggcgaggtctgcctccttccccttcccggcgat

SEQ ID NO: 98784 - DNA, 75 bp, synthetic construct
  source 1..75: mol_type = other DNA
atccgacgacttacgggaatgtacttcacctgaagggagctgcatccactggtgaaggcgagttgctcattggct

SEQ ID NO: 98785 - DNA, 75 bp, synthetic construct
  source 1..75: mol_type = other DNA
ctcggcggttctgctgacctggcgccgtctaacctgaccctgtggtctggttctaaagcaatcaacgaagatgct

SEQ ID NO: 98786 - DNA, 75 bp, synthetic construct
  source 1..75: mol_type = other DNA
gggagacacgccgctgatgctggttgtctggtccccggaagagattcaggccctcgctgacggaatggatatttc

SEQ ID NO: 98787 - DNA, 75 bp, synthetic construct
  source 1..75: mol_type = other DNA
tttacgcgtatgacaggatacggaggacggttgtggcgcacgtcttcggtgaacgcactctggccacactggaac

SEQ ID NO: 98788 - DNA, 75 bp, synthetic construct
  source 1..75: mol_type = other DNA
agtcaatacgctggaaaaaattattcataaaaacagagacagtttatcaaacagtgaacgtgagtcatttaatta

SEQ ID NO: 98789 - DNA, 75 bp, synthetic construct
  source 1..75: mol_type = other DNA
ctgtggcagggatagttttactcgcttcaaatgctcaggcacaaaccgtaccggaaggctatcagctacagcaag

SEQ ID NO: 98790 - DNA, 75 bp, synthetic construct
  source 1..75: mol_type = other DNA
aacggcgaagatcgctgatctggtggtcattaaggacggctcagtggcagacggcgcaatggcgaacacgctgca

SEQ ID NO: 98791 - DNA, 75 bp, synthetic construct
  source 1..75: mol_type = other DNA
atggatagccatacgctggttcaggcgctgatctacctcggatcggcggcgctgattgtacccattgcggtacgt

SEQ ID NO: 98792 - DNA, 75 bp, synthetic construct
  source 1..75: mol_type = other DNA
cccgcctcgccgatgacctggggcgagcaaaccgacgtaccggaatctgccgactggtataactccagttacatc

SEQ ID NO: 98793 - DNA, 75 bp, synthetic construct
  source 1..75: mol_type = other DNA
gattacattgacgcggtgacggcaacagataccagcacagcgccggacgtcatctggcctgaactgccggaggcg

SEQ ID NO: 98794 - DNA, 75 bp, synthetic construct
  source 1..75: mol_type = other DNA
ttgttcagtcattcgatcccgacgcggtgacggcggttgtgcagccagctatccgttcggttgaaaaggataacg

SEQ ID NO: 98795 - DNA, 75 bp, synthetic construct
  source 1..75: mol_type = other DNA
tatcgcccgatctcttggcccatgtttcgccgctcggatgggaacacatcaatctcaccggagaatatcgctggc

SEQ ID NO: 98796 - DNA, 75 bp, synthetic construct
  source 1..75: mol_type = other DNA
tactggcggcgtttacccgctgctgaccaccgcgctggggcaatggtggtttccctggcaggccaacggttcgtt

SEQ ID NO: 98797 - DNA, 75 bp, synthetic construct
  source 1..75: mol_type = other DNA
aaggggcagacctgggcggagggcgatccggtcaaactggagtttgtcaaagcgactgccgccaatatgccagcc

SEQ ID NO: 98798 - DNA, 75 bp, synthetic construct
  source 1..75: mol_type = other DNA
caggacgtaaacgccgccgtacagaagcgcaatcaggtcagtgaagagaacaaagtggctgaggctggattaaaa

SEQ ID NO: 98799 - DNA, 75 bp, synthetic construct
  source 1..75: mol_type = other DNA
tccgtacccgtagctgggacgacaacaacggcgtcacccgttacatcactgaaatccttgttaaaaccacgggca

SEQ ID NO: 98800 - DNA, 75 bp, synthetic construct
  source 1..75: mol_type = other DNA
ctcaccactgagatggcattccgtctggcgaaagtttttgataccacagtcgatttttggctaaacctccaggcg

SEQ ID NO: 98801 - DNA, 75 bp, synthetic construct
  source 1..75: mol_type = other DNA
caatgacgatataccgccagcatcctgagtcccgaatctttcgctactgcaccggaaaatatcagtggcacggta

SEQ ID NO: 98802 - DNA, 75 bp, synthetic construct
  source 1..75: mol_type = other DNA
ctcgaactcttcgtcggccaaccggctgctcgaccggctcgaatatctgcaacgcatcgatctccccgaggatct

SEQ ID NO: 98803 - DNA, 75 bp, synthetic construct
  source 1..75: mol_type = other DNA
taatgaacgtgctgttctggttgatcgtgaagcatgttgctccggaatggtatggttcccctggttattatgcag

SEQ ID NO: 98804 - DNA, 75 bp, synthetic construct
  source 1..75: mol_type = other DNA
gaaaatacatcatcaccctatcagcaggttgcccgggaagtgaaagctccccgcgaacggcttaagtatgcactg

SEQ ID NO: 98805 - DNA, 75 bp, synthetic construct
  source 1..75: mol_type = other DNA
cccgacgaagcaacactttgtgtgttaggcgctggcggcggtattctggaagccaccacgttaattactgctctt

SEQ ID NO: 98806 - DNA, 75 bp, synthetic construct
  source 1..75: mol_type = other DNA
atggtcacgggacatgacgacgttcctgtcactcagtcaggaggtgctgttatccctgctcagtttctgcaccgc

SEQ ID NO: 98807 - DNA, 75 bp, synthetic construct
  source 1..75: mol_type = other DNA
cctgtccgatcatgaaatcagaaccgtcctggcgcgcctggaggacatcccggaagaccagcggactgaatccgg

SEQ ID NO: 98808 - DNA, 75 bp, synthetic construct
  source 1..75: mol_type = other DNA
atgtacggaacatgcgaaacgctatgccgggcgctggcagcaaagtatccgggagacacgccgctgatgctggtt

SEQ ID NO: 98809 - DNA, 75 bp, synthetic construct
  source 1..75: mol_type = other DNA
tagcagcggaagcgatcaagaacggcggtaatgctcaggctgcgagggatgaatttttagctgcgcatggtttac

SEQ ID NO: 98810 - DNA, 75 bp, synthetic construct
  source 1..75: mol_type = other DNA
cggataaatactcttttaccgaacggaatgaatctccacgccttcgccggcagtggcaggatgttctggaggagt

SEQ ID NO: 98811 - DNA, 75 bp, synthetic construct
  source 1..75: mol_type = other DNA
atgaaacctgtaaaaccacctcgtattaatggacgagtgccggtcctgtcggcacaggaagcggtgaattatatt

SEQ ID NO: 98812 - DNA, 75 bp, synthetic construct
  source 1..75: mol_type = other DNA
gggcaaaagcgccactggtaaacctctgccagtgatcactctcacacgcaaggacggcgacagtcaccgatttac

SEQ ID NO: 98813 - DNA, 75 bp, synthetic construct
  source 1..75: mol_type = other DNA
cgctgtctaagctgtctccggaaatggtgagcgccagcaccctggcaggtgacccgatcaccgcgcgcctgacgg

SEQ ID NO: 98814 - DNA, 75 bp, synthetic construct
  source 1..75: mol_type = other DNA
cttaatcgcacctatgccaaccggagcaacgccgaacgggcggcaaaaatgcagtgggaacgcctgcaacgcggc

SEQ ID NO: 98815 - DNA, 75 bp, synthetic construct
  source 1..75: mol_type = other DNA
ttgtcacaggggctctgctctgttcgtatgcaggagctgcgtcttttggcccccgagaaagcacgcttatcttcg

SEQ ID NO: 98816 - DNA, 75 bp, synthetic construct
  source 1..75: mol_type = other DNA
ctacagctcgcaggggctgattgacgaaatcccgctggtcaccttcctgacgatcatgttcaagaagaacccgct

SEQ ID NO: 98817 - DNA, 75 bp, synthetic construct
  source 1..75: mol_type = other DNA
gacagcgaggcggtcgggattatccgctcactgcttgccggtgaggaaaacgccaggctgcgtgcagcccactgg

SEQ ID NO: 98818 - DNA, 75 bp, synthetic construct
  source 1..75: mol_type = other DNA
gccctgctcgcacagctcggcttgtctcgcgtgcgtgagttcgacgctgaccgccttgcggcggaactgactggc

SEQ ID NO: 98819 - DNA, 75 bp, synthetic construct
  source 1..75: mol_type = other DNA
gaccagctggctgtgctggcaagccctaacggtacgctggatgaagtccaccacagcctgctgttgcgcggggtt

SEQ ID NO: 98820 - DNA, 75 bp, synthetic construct
  source 1..75: mol_type = other DNA
aaataaatagtgaaaatgaattcttatccattttcaaatcattcatgattgaagaaacagatagatttactaaat

SEQ ID NO: 98821 - DNA, 75 bp, synthetic construct
  source 1..75: mol_type = other DNA
tgaatgataatcccttctccggtcacctgtttatcttccgtggccgacggggtgacaccgtcaaaattctttggg

SEQ ID NO: 98822 - DNA, 75 bp, synthetic construct
  source 1..75: mol_type = other DNA
atccattttcaaatcattcatgattgaagaaacagatagatttactaaatcaggtgttcatactcgcattgatag

SEQ ID NO: 98823 - DNA, 75 bp, synthetic construct
  source 1..75: mol_type = other DNA
aatgtccgcatcagaaatcatgatgtgggcagaatttgacaggttcagcccgctgggggacgaacgggctgatat

SEQ ID NO: 98824 - DNA, 75 bp, synthetic construct
  source 1..75: mol_type = other DNA
gtcagctattactcctgctgaggcggcaactgtatgtgcgaagactgattcaactaataccgtaacgtattttat

SEQ ID NO: 98825 - DNA, 75 bp, synthetic construct
  source 1..75: mol_type = other DNA
taccgtcagcccggataacggttttacgaccagtctggagcttgaagtgaagattgatgatttcgaaatggaatg

SEQ ID NO: 98826 - DNA, 75 bp, synthetic construct
  source 1..75: mol_type = other DNA
gaggtgcgtcaggacatgcagcagcgggttgatgcggcgcaccggatgtttgccgaaaaagtggcgatgtatacg

SEQ ID NO: 98827 - DNA, 75 bp, synthetic construct
  source 1..75: mol_type = other DNA
atcctggctgcttcaccgcaggcggatgccggaccctcactccgtgatcagatcatggcactggatgaggcaaaa

SEQ ID NO: 98828 - DNA, 75 bp, synthetic construct
  source 1..75: mol_type = other DNA
aacttgaaagaggttacgttcccccggaaagttgggatcgcggcattgatgctttttatacctcctataatttaa

SEQ ID NO: 98829 - DNA, 75 bp, synthetic construct
  source 1..75: mol_type = other DNA
acagaactgaccatggacgaatggctctgtgcagtgtcctgcatcacatcccgccgcgtatatctgcagcggaca

SEQ ID NO: 98830 - DNA, 75 bp, synthetic construct
  source 1..75: mol_type = other DNA
ccagtggaacaccttgctaagcctgcataacgcacagttttatttgctgcaacgcacacctgaggttgcccgcag

SEQ ID NO: 98831 - DNA, 75 bp, synthetic construct
  source 1..75: mol_type = other DNA
tgagaaatgggtgacggataccgagacacagcatagcgccgcagtagatgcagcagaagcacagcgccagtcgct

SEQ ID NO: 98832 - DNA, 75 bp, synthetic construct
  source 1..75: mol_type = other DNA
gttatgcaatctgccgttcagtagatttaaactcatgggaatatatgccagaccatcgcggtgaaattatctata

SEQ ID NO: 98833 - DNA, 75 bp, synthetic construct
  source 1..75: mol_type = other DNA
ccgtgctggagaggcagcgcgtagccaatggcgtgctgccattcaagaaatctaaggtgaggtcacgtgatgagc

SEQ ID NO: 98834 - DNA, 75 bp, synthetic construct
  source 1..75: mol_type = other DNA
gtgaaagcgcgcgtggtgtccatgccgtctaccgacgcatttgacaagcaggatgctgcttaccgtgaatccgta

SEQ ID NO: 98835 - DNA, 75 bp, synthetic construct
  source 1..75: mol_type = other DNA
tggaagaagtcagggccggagatggcttcgctggaagcctggctggaagaacatgagaaatacaggagtgttgca

SEQ ID NO: 98836 - DNA, 75 bp, synthetic construct
  source 1..75: mol_type = other DNA
tcgcgcagcgtaacaaactgacggccagcgtggctgataccctgaaagctgttgctgtgccgcatattgaccagt

SEQ ID NO: 98837 - DNA, 75 bp, synthetic construct
  source 1..75: mol_type = other DNA
tccgctgccaactccctgttagggttttgcgtggccagcgctctgattggttgcatcatcggcggtgccctcggt

SEQ ID NO: 98838 - DNA, 75 bp, synthetic construct
  source 1..75: mol_type = other DNA
gctcactgcttgccggtgaggaaaacgcaaggctgcgtgcagcccactggttacatgagaggggcctgaaagtat

SEQ ID NO: 98839 - DNA, 75 bp, synthetic construct
  source 1..75: mol_type = other DNA
tacacagcctcaacgggagcggcttcacgacgggcttagagcttgaggttaaggtttctgatgtggagtatgaaa

SEQ ID NO: 98840 - DNA, 75 bp, synthetic construct
  source 1..75: mol_type = other DNA
gcgggctggacggtgatttctgacggaatgcacgatgtccaggcaatgaccgaaaccatcagcgataaggtgtcc

SEQ ID NO: 98841 - DNA, 75 bp, synthetic construct
  source 1..75: mol_type = other DNA
ccagggtttagcggtttcgtccggtggatctgcgaatcacgacattattatgtggatggatcatcgtgcaactgt

SEQ ID NO: 98842 - DNA, 75 bp, synthetic construct
  source 1..75: mol_type = other DNA
atcacttataccaagacgaagggcaagaaaaaccgtaccgtgccgatatctcaggatctgtatgacgaactcccc

SEQ ID NO: 98843 - DNA, 75 bp, synthetic construct
  source 1..75: mol_type = other DNA
cgtgaatttttagagcgtaaataccgggtttacctgacgctttgggagcaacaacaggcggttaaccaactgatg

SEQ ID NO: 98844 - DNA, 75 bp, synthetic construct
  source 1..75: mol_type = other DNA
gatgccagactggcactgacagaggatctgaatacacggggagttcagctacccggtgcaacagtagtgactgta

SEQ ID NO: 98845 - DNA, 75 bp, synthetic construct
  source 1..75: mol_type = other DNA
atggccatatcagaccagactcgtagcggtgaccttgccgaaacattcaagtccgagcgggaaacaacaaagaac

SEQ ID NO: 98846 - DNA, 75 bp, synthetic construct
  source 1..75: mol_type = other DNA
ctgtctgccctgctggcgcagacggaggaagtgagcgtgccgctggcctcgctgattaagtcaccgctgaatgtg

SEQ ID NO: 98847 - DNA, 75 bp, synthetic construct
  source 1..75: mol_type = other DNA
atgtgtccagcgtggtgtgcagttgcgcagtgaggatgacgtggctgacgacgctgaccgcacggaacaggtgca

SEQ ID NO: 98848 - DNA, 75 bp, synthetic construct
  source 1..75: mol_type = other DNA
gttgcgctcgatgccgccctgctggaaaaactccaggctgttgcagagtaccttcgggaagccgagggctgggga

SEQ ID NO: 98849 - DNA, 75 bp, synthetic construct
  source 1..75: mol_type = other DNA
gaaagacaaccgctgggtgcctggctggatgtgtgcaccacgcccacagacggatgccactgaacgcaccgataa

SEQ ID NO: 98850 - DNA, 75 bp, synthetic construct
  source 1..75: mol_type = other DNA
cccgggtgttgatcctggatgaaataggctatctgccgatgaacagagaggaagccagcctgttcttccggctac

SEQ ID NO: 98851 - DNA, 75 bp, synthetic construct
  source 1..75: mol_type = other DNA
aaaacgcaaagcgggagtgctggcaaaaaacgccacgccaatcagtgatgatgaaatggcggaaagcggacaaca

SEQ ID NO: 98852 - DNA, 75 bp, synthetic construct
  source 1..75: mol_type = other DNA
gacatcgttatataacggtgatctccgatcgcgatggtcgtgcgctggccttaacggacgatcgtggcacagaga

SEQ ID NO: 98853 - DNA, 75 bp, synthetic construct
  source 1..75: mol_type = other DNA
tcattggcactgacgaactgaagcttgagctattcaaaattcacttccagtcaggcggcgctaattcagatatca

SEQ ID NO: 98854 - DNA, 75 bp, synthetic construct
  source 1..75: mol_type = other DNA
cctcttatttctataaccactccagccagtggcgttatgaaaccgtgactgcggaagaactgctgtcgccgatgg

SEQ ID NO: 98855 - DNA, 75 bp, synthetic construct
  source 1..75: mol_type = other DNA
aggttttgcggttgctaattattttgccgcaacggaactggcacctgccgtcgcccgcgccttcaacaaactcaa

SEQ ID NO: 98856 - DNA, 75 bp, synthetic construct
  source 1..75: mol_type = other DNA
ctggtcgtgcatgccctgccaggtgaccgccacggtgtcgccgcaggtggtcgcagactggcagcactcaatatg

SEQ ID NO: 98857 - DNA, 75 bp, synthetic construct
  source 1..75: mol_type = other DNA
gctgagcgcgcgtctgcaacagcgtgaaagccgttatgccgtgctgtttgatctgctgctgaaactggcgaatac

SEQ ID NO: 98858 - DNA, 75 bp, synthetic construct
  source 1..75: mol_type = other DNA
gttgcgctcgatgctgccctgctggaaaaactccaggctgtcgctgaacaccttcgggaagccgaaggctgggaa

SEQ ID NO: 98859 - DNA, 75 bp, synthetic construct
  source 1..75: mol_type = other DNA
acttataaatcagctcaactcaaatacatacctcttaaggctaacggtatttccagtataccttatgatattatt

SEQ ID NO: 98860 - DNA, 75 bp, synthetic construct
  source 1..75: mol_type = other DNA
cgtcagctacagcaactgagttatgcccgggtgttgatcctggatgaaataggctatctgccgatgaacagagag

SEQ ID NO: 98861 - DNA, 75 bp, synthetic construct
  source 1..75: mol_type = other DNA
gccattgtcggcatggtctgcacggccagcgatgcggatgcggaaaccttccccctcaataaaccggtgctgatt

SEQ ID NO: 98862 - DNA, 75 bp, synthetic construct
  source 1..75: mol_type = other DNA
aaaaagccctgatgcagcagttactgaccgggaaacgtcgtgtcaaagtagaagctgaagaagccgtgagcgctt

SEQ ID NO: 98863 - DNA, 75 bp, synthetic construct
  source 1..75: mol_type = other DNA
ggagtcattgatcgggacgcgatcaagtggtggctgaagcaatcacgcgaagcgcaatctgccattctgaccgat

SEQ ID NO: 98864 - DNA, 75 bp, synthetic construct
  source 1..75: mol_type = other DNA
atttgagggtgagcgccataatgccctgcacgatgcgcgttaccaggcaaaatacgtttcagctatctggcaaaa

SEQ ID NO: 98865 - DNA, 75 bp, synthetic construct
  source 1..75: mol_type = other DNA
cgttacaaaatttacaacgtcaactgggattaatcgccggaggtgaggccgggaaacgggcagcaacggcagtgg

SEQ ID NO: 98866 - DNA, 75 bp, synthetic construct
  source 1..75: mol_type = other DNA
taccgcgacaacgccatcacctacaaagaccagcgcgataaagccacaaagaacctccgcctggctaatgccacc

SEQ ID NO: 98867 - DNA, 75 bp, synthetic construct
  source 1..75: mol_type = other DNA
tccacggaaaacgcaaaacagcacaatgtcctgaatgctttaagcgtagcgactctgttcatagttgtcgtcggc

SEQ ID NO: 98868 - DNA, 75 bp, synthetic construct
  source 1..75: mol_type = other DNA
gtggtgttgttgcggcaacgactaaacctgctggtgcgaatgaaacacgcccacgaaatgtcgcttttaactata

SEQ ID NO: 98869 - DNA, 75 bp, synthetic construct
  source 1..75: mol_type = other DNA
tcgttgtatggcgaattcgggcaggaacccttttccaacggagcagtggaggagggcttcatcagcggggatatt

SEQ ID NO: 98870 - DNA, 75 bp, synthetic construct
  source 1..75: mol_type = other DNA
ataccctgcctggtgaccgttacggtgtcgccgcaggtggtcgccgactggcagcactcaacatgctggcagagc

SEQ ID NO: 98871 - DNA, 75 bp, synthetic construct
  source 1..75: mol_type = other DNA
gagctgcaacatgaaggtggcgatacctttatggggcatcaggaaattttaggcacgcgcccgttaccgccgctg

SEQ ID NO: 98872 - DNA, 75 bp, synthetic construct
  source 1..75: mol_type = other DNA
cgacgaggaatcgaacgataaggaaaccctcaaggccgggaaactgtatatcgactacgactatacaccggttcc

SEQ ID NO: 98873 - DNA, 75 bp, synthetic construct
  source 1..75: mol_type = other DNA
cgcactcgtattgtgtttaacgctaatgataaagctaccagtctgcgggtggataatcgtagcgataaactcccc

SEQ ID NO: 98874 - DNA, 75 bp, synthetic construct
  source 1..75: mol_type = other DNA
cgtatggctgcaagacggtacaggaggcgatcacttaccgtgaaaacttcagtcagcgtgaaggaatgctgatct

SEQ ID NO: 98875 - DNA, 75 bp, synthetic construct
  source 1..75: mol_type = other DNA
tgacggggacggttatgtcgaccgcgtggcgctcgatgccgccctgctggaaaaactccaggctgtcgctgaaca

SEQ ID NO: 98876 - DNA, 75 bp, synthetic construct
  source 1..75: mol_type = other DNA
cgaatgatccgaaatgggtgaaggggattgaaacccgcgattctgtgaaccagaaccagcacgaatcggaacaaa

SEQ ID NO: 98877 - DNA, 75 bp, synthetic construct
  source 1..75: mol_type = other DNA
atgtttcactgcccgttctgcaaaaagaccgcgcacgtccgtaccagccgttatctgtcggaaaacgtcaaacag

SEQ ID NO: 98878 - DNA, 75 bp, synthetic construct
  source 1..75: mol_type = other DNA
accgccatattgttgttgccaatgatggttacgacacaaaagatgaatgggaactggctacgattttcaaaaaga

SEQ ID NO: 98879 - DNA, 75 bp, synthetic construct
  source 1..75: mol_type = other DNA
taaaaaataatgccagttatcaattaaataacgcattacctaacaaagaaaccatctccagcaatttttgtgaac

SEQ ID NO: 98880 - DNA, 75 bp, synthetic construct
  source 1..75: mol_type = other DNA
agtcaggcgtcacaacgctgattcgccgtgacggtttccgcttctggggtaaccgtacctgctctgatgacccgc

SEQ ID NO: 98881 - DNA, 75 bp, synthetic construct
  source 1..75: mol_type = other DNA
acaacatttgatttcgatatgtcaagggtggcaaataccgccaatgaaactcgcccggtgaacgttgcatttaac

SEQ ID NO: 98882 - DNA, 75 bp, synthetic construct
  source 1..75: mol_type = other DNA
ccgtcatcctcgatgcgctggcagaagaccgcatcaccacagagcactgtcaggcgctggcgctggagaacgaca

SEQ ID NO: 98883 - DNA, 75 bp, synthetic construct
  source 1..75: mol_type = other DNA
cagctacgctgaccagtttgaaaaatggtgattatagggttacggcctctgtgagctctggttcccaggctaatc

SEQ ID NO: 98884 - DNA, 75 bp, synthetic construct
  source 1..75: mol_type = other DNA
agtggggtgagcgttttccgtcactggccggaatggaacgctggcagtggcaggatatgccattctggcaggtta

SEQ ID NO: 98885 - DNA, 75 bp, synthetic construct
  source 1..75: mol_type = other DNA
tgatgacggtcatgctgtggcgtctggataccggcgatattgccggtgcgctggagattgcccgttatgccctga

SEQ ID NO: 98886 - DNA, 75 bp, synthetic construct
  source 1..75: mol_type = other DNA
atatgccgtttattggttctgttggcccggctttcttccagaaagaaaccatggaagaggtggctgccatcaagg

SEQ ID NO: 98887 - DNA, 75 bp, synthetic construct
  source 1..75: mol_type = other DNA
gtaaatcgcctgaagatgctgaaacgccagatgtatggtcgagcaggatttgaactactcaggcagagggtaatg

SEQ ID NO: 98888 - DNA, 75 bp, synthetic construct
  source 1..75: mol_type = other DNA
atagaagaatacattcctgctggggacgagtggaatgagttagaaaatgctttaggtgaaattgattatgagctt

SEQ ID NO: 98889 - DNA, 75 bp, synthetic construct
  source 1..75: mol_type = other DNA
tctgcaaatcagcggcagcggggggacagtgattggcagtaatgatgtcgttgatatcagcagtggcgatgattt

SEQ ID NO: 98890 - DNA, 75 bp, synthetic construct
  source 1..75: mol_type = other DNA
accaaaactgttgccgtcacaccagactacgctgaaatcgccaaactgtgcgatctgtggctggcaccgaaacag

SEQ ID NO: 98891 - DNA, 75 bp, synthetic construct
  source 1..75: mol_type = other DNA
atgctgaaacagcaggatatgaccgaaaccgccagggcagtgtttaatgaattaagcgtcaccgaaccggcgaca

SEQ ID NO: 98892 - DNA, 75 bp, synthetic construct
  source 1..75: mol_type = other DNA
tcagactctttgccgtgccgcatttccagatcgaagggatggacgtcaacctttctctggtttcccagatgccaa

SEQ ID NO: 98893 - DNA, 75 bp, synthetic construct
  source 1..75: mol_type = other DNA
caggaaggcaaaacgcctgcacaaatcggtgatttgctgggctattcaccccgccacgttcagcgaatgctgaaa

SEQ ID NO: 98894 - DNA, 75 bp, synthetic construct
  source 1..75: mol_type = other DNA
ccgtaagcggctgcagctcaacgcaaactgtcccgcgaacggaacgaccagcaccggcggcctgggcgatgttac

SEQ ID NO: 98895 - DNA, 75 bp, synthetic construct
  source 1..75: mol_type = other DNA
atggttttcactcgctcgaatttacgaagacattaaaaaaataaaggaatataaaaccaaccatgacaactatat

SEQ ID NO: 98896 - DNA, 75 bp, synthetic construct
  source 1..75: mol_type = other DNA
ggagccgcagcccaaagcggccacccgcactccgcgtaagacccggagcgtgacaccggcaaaacgtggacgccc

SEQ ID NO: 98897 - DNA, 75 bp, synthetic construct
  source 1..75: mol_type = other DNA
tacctggtcgacagtcagggaaatgatgaaaagctgaggcagtgggcccgggagcacagtatcccggcagaccgt

SEQ ID NO: 98898 - DNA, 75 bp, synthetic construct
  source 1..75: mol_type = other DNA
gagcttcagaaggaagccagcaaagtagtggctcaggcgatcaaggatggccgtgatgctcaggctgcgaatgat

SEQ ID NO: 98899 - DNA, 75 bp, synthetic construct
  source 1..75: mol_type = other DNA
gagatacgtgccggaagcggtgtggtggtgtcctggcgttatggcaacgtatgtgtccagcgtggtgtgcagttg

SEQ ID NO: 98900 - DNA, 75 bp, synthetic construct
  source 1..75: mol_type = other DNA
ctgacgaaaacggtcagtacaccggactgaaagccctgatgggggctgagtcggttaccggcgttaaaccgcgca

SEQ ID NO: 98901 - DNA, 75 bp, synthetic construct
  source 1..75: mol_type = other DNA
aaatatttctctctatgcaaaacttggatataaaggaaatatacagaatttgcgggcgggaacattttctgcaac

SEQ ID NO: 98902 - DNA, 75 bp, synthetic construct
  source 1..75: mol_type = other DNA
atgggcattttgagattattaatgaactcaattgcatttcaaagttatctgctttagacgatgttcagataatag

SEQ ID NO: 98903 - DNA, 75 bp, synthetic construct
  source 1..75: mol_type = other DNA
tcacgggagtagggcagtctaaaaatattactctttacgcaaaacttggatataaaggggatatgagaaagctgc

SEQ ID NO: 98904 - DNA, 75 bp, synthetic construct
  source 1..75: mol_type = other DNA
gaaaacctgaccctgcgccagcgtattacttccagatacctggcaagtctggtcacttcggttaacagcaattaa

SEQ ID NO: 98905 - DNA, 75 bp, synthetic construct
  source 1..75: mol_type = other DNA
ggccgtgggtgcatcggccggcaccttgcgcaggttgtcggcgttcatctcacgcagggtctgcacggctgccag

SEQ ID NO: 98906 - DNA, 75 bp, synthetic construct
  source 1..75: mol_type = other DNA
gatgcagccaaaatacagcaggaagaactcgaagctggtaaagaagcggtcgcagccggaattacgttgtttggt

SEQ ID NO: 98907 - DNA, 75 bp, synthetic construct
  source 1..75: mol_type = other DNA
cagcaatcccgccagaatccgcctggaatgtgagcattattcgctgaccagcgatgcgccgtcggggaaggaagg

SEQ ID NO: 98908 - DNA, 75 bp, synthetic construct
  source 1..75: mol_type = other DNA
gatttgaggcgcttaataataaaggagaatatatttttatcagaaatagtgtcccgggattgagttcagtatgca

SEQ ID NO: 98909 - DNA, 75 bp, synthetic construct
  source 1..75: mol_type = other DNA
actattaacgccccggaaatcgtccttaacggcaacgtgacgatcaacggcaacctgtcgcaaggaatgggtgag

SEQ ID NO: 98910 - DNA, 75 bp, synthetic construct
  source 1..75: mol_type = other DNA
tggagagtgttgacgaagttcgcatcatcactgatggacggattaattttatcgaaccatcgacagggctggaga

SEQ ID NO: 98911 - DNA, 75 bp, synthetic construct
  source 1..75: mol_type = other DNA
cgcgatgatggcaaaagaggaccgcattgtcgctgaccggcttagccatgcctcattgctggaggctgccagttt

SEQ ID NO: 98912 - DNA, 75 bp, synthetic construct
  source 1..75: mol_type = other DNA
gagtgtttctcgcaactcatcctggcaataagacagtgcatccacatctcgctggtgactgagcgatggtatccg

SEQ ID NO: 98913 - DNA, 75 bp, synthetic construct
  source 1..75: mol_type = other DNA
atttgaatgtgctaaatcacctagggatgagtctctattccaatactcccgcggtactaactgagattatatcaa

SEQ ID NO: 98914 - DNA, 75 bp, synthetic construct
  source 1..75: mol_type = other DNA
caacgcataaacgagataatgatttatgcggttaacaccggtttgattgatgccaatcctgcatctggtgtaggg

SEQ ID NO: 98915 - DNA, 75 bp, synthetic construct
  source 1..75: mol_type = other DNA
gcagatggtgatttgcggcggcctgctggggctgttttgtatgttacttgggctgcgctggcaggtcgcagaatt

SEQ ID NO: 98916 - DNA, 75 bp, synthetic construct
  source 1..75: mol_type = other DNA
acaaaagcaaaaagctcgcttcccgatatcaccctggaacaggcaaaagaaattaatgctgataacaccgttatt

SEQ ID NO: 98917 - DNA, 75 bp, synthetic construct
  source 1..75: mol_type = other DNA
ctggcagaccttgctccggttatcctcgatgcgctggcagaagaccgcatcaccacagagcactgtcaggcgctg

SEQ ID NO: 98918 - DNA, 75 bp, synthetic construct
  source 1..75: mol_type = other DNA
tcaattctcgtactgatggtggttcgtcttttgttaagactgaaatacccaaccccgccgattacacctaagcca

SEQ ID NO: 98919 - DNA, 75 bp, synthetic construct
  source 1..75: mol_type = other DNA
atgtggcgttaccggataacgcgattactgtcccggaaatacccggagctggtgataccggcggagctggcagca

SEQ ID NO: 98920 - DNA, 75 bp, synthetic construct
  source 1..75: mol_type = other DNA
atcaagaattgccacggcattaataacgcttcttgagcctgtaataatggaactgcaagaaatagatctattgca

SEQ ID NO: 98921 - DNA, 75 bp, synthetic construct
  source 1..75: mol_type = other DNA
ttaactttgacaatggacgttccgattcacctgatttttgtgaattatggccaatacatagcgacctgaacaaaa

SEQ ID NO: 98922 - DNA, 75 bp, synthetic construct
  source 1..75: mol_type = other DNA
tcacagtgaaaacatgctggaaatattgcgcatatggcttgaaacacttggcgacaatgaacgcgacaaacaaaa

SEQ ID NO: 98923 - DNA, 75 bp, synthetic construct
  source 1..75: mol_type = other DNA
ggcaaaaaatatctcagaaagtttcgtggtggagaaggagacactatctggcatgaaacagtacagggcggggta

SEQ ID NO: 98924 - DNA, 75 bp, synthetic construct
  source 1..75: mol_type = other DNA
acttcttgtttcggtctcggatcggaactaaccggcacatatcaacccggcaatacaaccgaatttttcatggat

SEQ ID NO: 98925 - DNA, 75 bp, synthetic construct
  source 1..75: mol_type = other DNA
atttttatgagtgttgctataagtttttaccaagagcgcagcctcaagataaaatcgatagctataattcagcac

SEQ ID NO: 98926 - DNA, 75 bp, synthetic construct
  source 1..75: mol_type = other DNA
tgtcagcggcgatattcacaacatcgaactggccggtattttcgtccagattggtctgctgccgaacaccaactg

SEQ ID NO: 98927 - DNA, 75 bp, synthetic construct
  source 1..75: mol_type = other DNA
aaaagcgcctggacgagcattttctccttacgcatctgtgcggcatttcacacccggcatggtgcacttttcata

SEQ ID NO: 98928 - DNA, 75 bp, synthetic construct
  source 1..75: mol_type = other DNA
cgctggcgctcatcagcgaagacggcaatacggcgtggcgcggggagtatgatgaatggggcaaccagcttaatg

SEQ ID NO: 98929 - DNA, 75 bp, synthetic construct
  source 1..75: mol_type = other DNA
tgtctctattttctggttcggtattggggatggagcgagtgaatgaattgtgtggaatagatagcgtgaaaacga

SEQ ID NO: 98930 - DNA, 75 bp, synthetic construct
  source 1..75: mol_type = other DNA
acgacgggcgcaagattgacgaggggcgtaagttgctttcatggcagaaaggtacactggtcggcggtcatgacg

SEQ ID NO: 98931 - DNA, 75 bp, synthetic construct
  source 1..75: mol_type = other DNA
tctgttccggtcacaccacatacgttccgccattcctatgcgatgcacatgctgtatgccggtataccgctgaag

SEQ ID NO: 98932 - DNA, 75 bp, synthetic construct
  source 1..75: mol_type = other DNA
gaccggtctgacgggaaatgcaggtccacagggtccaaagggagataccggtgcggcaggcccggcaggcccaca

SEQ ID NO: 98933 - DNA, 75 bp, synthetic construct
  source 1..75: mol_type = other DNA
agcgggcatattgccagacgctgcagtgagcagaagcgggtgcgtatccctgccatgaaagtcagcgagtggggg

SEQ ID NO: 98934 - DNA, 75 bp, synthetic construct
  source 1..75: mol_type = other DNA
cgagagctgcattgaggcattccatgaagctgaaaccagcctgaatcatacagctttccgctgtaatcaatggga

SEQ ID NO: 98935 - DNA, 75 bp, synthetic construct
  source 1..75: mol_type = other DNA
cgcatgaagattatctcgaatatcagcaactggaaggggcggaaacgctcgccagcctggacgaactgctgaacg

SEQ ID NO: 98936 - DNA, 75 bp, synthetic construct
  source 1..75: mol_type = other DNA
accgtatcataggccaaaaaagaccacttcagatatctcatatctggggtatccgaatccgacttgaactggaag

SEQ ID NO: 98937 - DNA, 75 bp, synthetic construct
  source 1..75: mol_type = other DNA
cggcgtggtggaaaactgcagtaccgtggcagtgtgctgaaggtgggtaaatatcttttccgggatgcgtttatt

SEQ ID NO: 98938 - DNA, 75 bp, synthetic construct
  source 1..75: mol_type = other DNA
aattccggcacccgacaccaccccgaccagcatcgctgcttatccgccacatgtcgtgcgcggcggcctcgctgt

SEQ ID NO: 98939 - DNA, 75 bp, synthetic construct
  source 1..75: mol_type = other DNA
accacggcgttatgaatcaggtagcagtgtgagaggggcgagccggatgagtaaggccggacatgtgtcgcttcg

SEQ ID NO: 98940 - DNA, 75 bp, synthetic construct
  source 1..75: mol_type = other DNA
atgtacctggcttgacccggcagagaaagaggcccgtcgtttgcatctgcagggcatgacggttccggattatac

SEQ ID NO: 98941 - DNA, 75 bp, synthetic construct
  source 1..75: mol_type = other DNA
atgaataaagcatttgaacgatgggtccaccagcgttacggcaatcgctatgacctgacgcgagatgttgacggc

SEQ ID NO: 98942 - DNA, 75 bp, synthetic construct
  source 1..75: mol_type = other DNA
cacaccacaagctcaaaattcgcggcctgcaaagtccggtggatgtgctgacctttgaaggccgcgagcaactga

SEQ ID NO: 98943 - DNA, 75 bp, synthetic construct
  source 1..75: mol_type = other DNA
acaacgtaaagcccagccgccagtgccgccgatgacgcgtccggtgcagcgcccggtggaaattacccagtggga

SEQ ID NO: 98944 - DNA, 75 bp, synthetic construct
  source 1..75: mol_type = other DNA
tgatagccagcgtggatataaaaacaggtcagaaaagtgtatttcagtacctgattaaaccaatcaccagaatga

SEQ ID NO: 98945 - DNA, 75 bp, synthetic construct
  source 1..75: mol_type = other DNA
cgccagaaccagaggcgtcttgcctacgcatcagatgtttaccggatttataccgggataaaaagcagtaaaggt

SEQ ID NO: 98946 - DNA, 75 bp, synthetic construct
  source 1..75: mol_type = other DNA
acggcaacgaatcgcagactcttgaggcgcaccgccacgccattttcggcagcctgcgcgtggctttgccgggga

SEQ ID NO: 98947 - DNA, 75 bp, synthetic construct
  source 1..75: mol_type = other DNA
ctttcattgaggtctatttttatgcacatggtgcaatgggagttttgcatattttaattgaaaaatataaaagcc

SEQ ID NO: 98948 - DNA, 75 bp, synthetic construct
  source 1..75: mol_type = other DNA
gtatctggctcgttgccggcgttaccgatatgtgtaaatccttcaacggactgggagaacaggtacaacatgtgc

SEQ ID NO: 98949 - DNA, 75 bp, synthetic construct
  source 1..75: mol_type = other DNA
acggggactacaccttcggccagggcgatgacacctttctggtcaactcacccgagtgcgtggcccaggccgtta

SEQ ID NO: 98950 - DNA, 75 bp, synthetic construct
  source 1..75: mol_type = other DNA
atgaaaaagtggatgttagcaatctgcctgatgtttataaatgggatctgcgaagccgccgattgctttgatctt

SEQ ID NO: 98951 - DNA, 75 bp, synthetic construct
  source 1..75: mol_type = other DNA
cgaacagtacaacaaccagcttgaacgcgaacggcaggcgcttgcgcgtgtaacgcgggcgcgtgagcggtattc

SEQ ID NO: 98952 - DNA, 75 bp, synthetic construct
  source 1..75: mol_type = other DNA
acttcatctgtttggtgaaattctttcccgaaagctggatgaactggaaaagctggtagaagaagctgacacctc

SEQ ID NO: 98953 - DNA, 75 bp, synthetic construct
  source 1..75: mol_type = other DNA
caaggctggtgattgctttgatctggctggcagagattataaaattgaccctgacttgctgagagcaatatcatg

SEQ ID NO: 98954 - DNA, 75 bp, synthetic construct
  source 1..75: mol_type = other DNA
aaaatttcagatctgttagagagcggcaggaaattgattttgcacctgtaacattactattggggccaaacagcg

SEQ ID NO: 98955 - DNA, 75 bp, synthetic construct
  source 1..75: mol_type = other DNA
tgaacaaacaataggtgtagaatataaaacatatttagaagaacttggtgatattttcgatattcattttataaa

SEQ ID NO: 98956 - DNA, 75 bp, synthetic construct
  source 1..75: mol_type = other DNA
tcgcgagcaggtgctggctgtctatggtccggtgcatgcccggttgctgcgtcaggcactggaactgatcaccga

SEQ ID NO: 98957 - DNA, 75 bp, synthetic construct
  source 1..75: mol_type = other DNA
ttcgtctggccagtcacccgtgacggcaaggtgcaccttactccggctcagttatccatgcttcttgaaggtatc

SEQ ID NO: 98958 - DNA, 75 bp, synthetic construct
  source 1..75: mol_type = other DNA
tatgggatggttgcgctgcgtcaggcatgaagttatccagcgtggcaattatggcccgcctggctgatttcagta

SEQ ID NO: 98959 - DNA, 75 bp, synthetic construct
  source 1..75: mol_type = other DNA
gccagctatgatggcgagatcactagaccgaaagaacccaactggacagcatgggccaatgacgttcgcacaatg

SEQ ID NO: 98960 - DNA, 75 bp, synthetic construct
  source 1..75: mol_type = other DNA
atggtgggcagattttctggatgcaaacagggaggagtgtatcagtccgtttgaatatgcaaaagttaacaatcc

SEQ ID NO: 98961 - DNA, 75 bp, synthetic construct
  source 1..75: mol_type = other DNA
agcaccatcgcatatgataaacgcgggcgtccggtgagtgtgacggaaggcggtcttacgcgcagcatggggtat

SEQ ID NO: 98962 - DNA, 75 bp, synthetic construct
  source 1..75: mol_type = other DNA
gcgtgggatgtgttcgaaaaactggaagactgctatttcagccagtgcgagaaaaatactggcaaacaagagaag

SEQ ID NO: 98963 - DNA, 75 bp, synthetic construct
  source 1..75: mol_type = other DNA
ccgcgacaaattcatcgccatgcctggtgggctggattattcccgtgccatcgtggttgcggccgtgaaagaagc

SEQ ID NO: 98964 - DNA, 75 bp, synthetic construct
  source 1..75: mol_type = other DNA
catgcagggcgcggacgatgtgttcaccacgccggatatccgctacgtgcgtgaggcgctgttccagaccgcccg

SEQ ID NO: 98965 - DNA, 75 bp, synthetic construct
  source 1..75: mol_type = other DNA
gtttatggtgaccgcatggggaataacagccagggtgacggctggaaatatcgcggtcgtggcctgcttcaaatc

SEQ ID NO: 98966 - DNA, 75 bp, synthetic construct
  source 1..75: mol_type = other DNA
catactggcagaacttcagacatgggctggtgaaaatggtctgatctttacgggagcacatgacccacgtaaacc

SEQ ID NO: 98967 - DNA, 75 bp, synthetic construct
  source 1..75: mol_type = other DNA
cactctgcgcaatgtgcatgaagtcttttcgtcagacaatcaaccgtctgctgaaggaagccatctgacacttaa

SEQ ID NO: 98968 - DNA, 75 bp, synthetic construct
  source 1..75: mol_type = other DNA
ccttttttattgtttcaaccatcatcactctgcgcaatgtgcatgaagtcttttcgtcagacaatcaaccgtctg

SEQ ID NO: 98969 - DNA, 75 bp, synthetic construct
  source 1..75: mol_type = other DNA
ggagctttactggttacactgtttgctggtttcaccgaatatatgcccggtagaaatcgcggaacgtggtccagt

SEQ ID NO: 98970 - DNA, 75 bp, synthetic construct
  source 1..75: mol_type = other DNA
attccgcgtaaaacaatgggtgtggggctattaatcctgattgcggtgctcggatatatctattcactgcaaacc

SEQ ID NO: 98971 - DNA, 75 bp, synthetic construct
  source 1..75: mol_type = other DNA
aatcggtacaccagagttgctgacgcaggagaagcatgctgcccgttctgctgcttggtttttcacgttacgtgg

SEQ ID NO: 98972 - DNA, 75 bp, synthetic construct
  source 1..75: mol_type = other DNA
tccttgcccctgttttttctccgctggcgcatgaatttactcacgctttccgacgacgaagcccgttcgctggga

SEQ ID NO: 98973 - DNA, 75 bp, synthetic construct
  source 1..75: mol_type = other DNA
gcacagtctatttcagtcagttttctgcgcaacgaaaagaagaacgcacgataggtaatataggtttaggtgtaa

SEQ ID NO: 98974 - DNA, 75 bp, synthetic construct
  source 1..75: mol_type = other DNA
atgaaaaaatggatgttagcaatctgcctaatgtttataaatgggatctgcgaagccgccgattgctttgatctt

SEQ ID NO: 98975 - DNA, 75 bp, synthetic construct
  source 1..75: mol_type = other DNA
tatgccggaatgggcgcgagataatccctcccatttctggcaggcggctgaccagtttgaacgtgcgaacggttc

SEQ ID NO: 98976 - DNA, 75 bp, synthetic construct
  source 1..75: mol_type = other DNA
tgtcgttgatggagcaaatgaaaggggaattgcggctggcatcaacgatgaccaggaatgcctgtgtggtactgc

SEQ ID NO: 98977 - DNA, 75 bp, synthetic construct
  source 1..75: mol_type = other DNA
atgatctcactcccatccggtacccgtatctggctcgtggccgggataaccgatatgcgtaagtctttcaacggg

SEQ ID NO: 98978 - DNA, 75 bp, synthetic construct
  source 1..75: mol_type = other DNA
gaaggctggttaaagtgcgacgggcgcgcctttacaaaagaacaatatcctgttctggccagagcctacccgacc

SEQ ID NO: 98979 - DNA, 75 bp, synthetic construct
  source 1..75: mol_type = other DNA
ctatggggaatggtaacaggttccatctcgttgctgggtggcgctatcggggcgctgttcagtccggtcggattg

SEQ ID NO: 98980 - DNA, 75 bp, synthetic construct
  source 1..75: mol_type = other DNA
atatccgtaatgatgtaaaacatcaggttgataatatggtcacagaatataaagggaatataggtgatactcaga

SEQ ID NO: 98981 - DNA, 75 bp, synthetic construct
  source 1..75: mol_type = other DNA
gctgatcctgacgaaggatagttatcctgtcactatcggcgcaggtggggccggcggcgttagtgcgacgaacgg

SEQ ID NO: 98982 - DNA, 75 bp, synthetic construct
  source 1..75: mol_type = other DNA
attgctctgtatggcgtttatcgtcatcagcgccaccgtggctggacgcggtttaggctacgccgccatcgtgct

SEQ ID NO: 98983 - DNA, 75 bp, synthetic construct
  source 1..75: mol_type = other DNA
gattctaatcacttttcttgcccggagtcatttttgacatgcccgataacgctggacacacctgagaatggagtg

SEQ ID NO: 98984 - DNA, 75 bp, synthetic construct
  source 1..75: mol_type = other DNA
atgagtaaaatctttatttgcgctgctattcctgacgaacaggccataaaagaagatagcgctgtggctgtagct

SEQ ID NO: 98985 - DNA, 75 bp, synthetic construct
  source 1..75: mol_type = other DNA
aagcacaaagccgaaaccagcgggaccagggcgttacccgaaagccgggcgccaccggctgagctgctcctgggt

SEQ ID NO: 98986 - DNA, 75 bp, synthetic construct
  source 1..75: mol_type = other DNA
tcggatcgcgtgcgctattactggccggacagccagattgatgacgctttcgctcatctggttcgtaatctggcg

SEQ ID NO: 98987 - DNA, 75 bp, synthetic construct
  source 1..75: mol_type = other DNA
aagacgcgatgcgttcgcggtggatgtggaatatgcggcaacggcttctgaaagcgtggtcagaggggctggcga

SEQ ID NO: 98988 - DNA, 75 bp, synthetic construct
  source 1..75: mol_type = other DNA
cctgaccgaagcaggcgtgcacgttatcttctctgcgccggggctgaaaattcacgccaaactgttcctgatttc

SEQ ID NO: 98989 - DNA, 75 bp, synthetic construct
  source 1..75: mol_type = other DNA
gcaggggaggtatatcactcaggatccgattgggctgaaggggggatggaatttttatcagtatccgctgaatcc

SEQ ID NO: 98990 - DNA, 75 bp, synthetic construct
  source 1..75: mol_type = other DNA
gtgctgaaagccggaggaaagtactggcatgtgtacatgtcgaaaaaaacggccggcgggaggaatacggcgcgc

SEQ ID NO: 98991 - DNA, 75 bp, synthetic construct
  source 1..75: mol_type = other DNA
gtggagtgggttaaattatttacggataaagtcaccagaggtggaaaaataaaatggatgttagccatctgcctg

SEQ ID NO: 98992 - DNA, 75 bp, synthetic construct
  source 1..75: mol_type = other DNA
gagagatttcgattaaattataatggtgttattgcactgttagttgaaggaataaaaaatctgcgtaaagagatt

SEQ ID NO: 98993 - DNA, 75 bp, synthetic construct
  source 1..75: mol_type = other DNA
attccggagccagataccgcgagaatgttctttaccgatgcagttgtggcaatagctaaggttcaaggctggaac

SEQ ID NO: 98994 - DNA, 75 bp, synthetic construct
  source 1..75: mol_type = other DNA
gttcatcggacccattcaatgagcggatataagaccccattactcaatgatttctgtggtgagccattaaaacgg

SEQ ID NO: 98995 - DNA, 75 bp, synthetic construct
  source 1..75: mol_type = other DNA
acaaccattaatcctgatgttgaaggagatctttccacactttcccaattgctttctggttttagcggcactgcg

SEQ ID NO: 98996 - DNA, 75 bp, synthetic construct
  source 1..75: mol_type = other DNA
tgatggaagatgattatgatattgcagctctgttgcggcttaatctgcaggatgaagggtatcagatagttcatg

SEQ ID NO: 98997 - DNA, 75 bp, synthetic construct
  source 1..75: mol_type = other DNA
ctgtacagggaaatcactaccccgtttctggtacggggatattttcccggcgttctatgcctgtcatctggctgt

SEQ ID NO: 98998 - DNA, 75 bp, synthetic construct
  source 1..75: mol_type = other DNA
taccggtatgggcgagcaaatgcaggaatatgctgtcagtcaggtgctgcattggtttcgacgttttgacgatta

SEQ ID NO: 98999 - DNA, 75 bp, synthetic construct
  source 1..75: mol_type = other DNA
gtggactgatttgctgtcacgatctgtgcatcaatccattttcacgtgaagttcatttgcataataaacaggttg

SEQ ID NO: 99000 - DNA, 75 bp, synthetic construct
  source 1..75: mol_type = other DNA
gctgatatgcatatccgtgcaggacgactggataatgaggcatcgtttattctcgccggtggcggtatgaccctg

SEQ ID NO: 99001 - DNA, 75 bp, synthetic construct
  source 1..75: mol_type = other DNA
cacgtaacgattcactggctgcccggaccgatacctggttgcagtcgttgctggtctggtcccccggacagcggg

SEQ ID NO: 99002 - DNA, 75 bp, synthetic construct
  source 1..75: mol_type = other DNA
atgcatctgtcagcagccggaaaaaccaaaaaagtggcgctggttgactgtatgcgtaaattgctgaccatcctg

SEQ ID NO: 99003 - DNA, 75 bp, synthetic construct
  source 1..75: mol_type = other DNA
cgcgcttataactaccagtgcgcgatatgtggctttaatatgcgccacgacgacaccaccgtcgcgttggaagcg

SEQ ID NO: 99004 - DNA, 75 bp, synthetic construct
  source 1..75: mol_type = other DNA
tgtttaccgtctttgtggacggtgacaacaagctgggaaaggtgacgtcttttaccccgccaaaactgacccgta

SEQ ID NO: 99005 - DNA, 75 bp, synthetic construct
  source 1..75: mol_type = other DNA
atttacattttggtgctgatgaactgctggagccagcgtcacggatagaacgggcaattctggaacatgccgggc

SEQ ID NO: 99006 - DNA, 75 bp, synthetic construct
  source 1..75: mol_type = other DNA
tgtgccgctgattagcgcggcaattgcctattctattgccgatcgtcccggatttgccccgggcctgattgtcgg

SEQ ID NO: 99007 - DNA, 75 bp, synthetic construct
  source 1..75: mol_type = other DNA
cggccattaaccggctgtggggatggggaattattgcccagttcgcatattatctggcaggctttccctggtatg

SEQ ID NO: 99008 - DNA, 75 bp, synthetic construct
  source 1..75: mol_type = other DNA
cggataaaaatctggtgctgtcttcatccgggcagattgtacagaacggtggtgaactgactgccggacagaacg

SEQ ID NO: 99009 - DNA, 75 bp, synthetic construct
  source 1..75: mol_type = other DNA
ctcccagatcatttttggagtttttggctaagatatttaccctgggttatgtggattttagcaaacgctccaacg

SEQ ID NO: 99010 - DNA, 75 bp, synthetic construct
  source 1..75: mol_type = other DNA
ctcagttctggttaggcgatacagggcgaaaactaaggaagtctggtccggaatgtatggtagtggcgttgtata

SEQ ID NO: 99011 - DNA, 75 bp, synthetic construct
  source 1..75: mol_type = other DNA
gccagtgacaatgttcacgctaacagccgcgcctattttctcgctgagaagcgtgccggagtacccggattatga

SEQ ID NO: 99012 - DNA, 75 bp, synthetic construct
  source 1..75: mol_type = other DNA
accgcctgaatgtcgggctattggcaagagcattgcgaaatacacgcacaggaacttcacgccggaaactttcgc

SEQ ID NO: 99013 - DNA, 75 bp, synthetic construct
  source 1..75: mol_type = other DNA
ggaagatggttttctgcgttcatccggacttggctctgacctgctgccgccgctatcgctggtgctggataaacg

SEQ ID NO: 99014 - DNA, 75 bp, synthetic construct
  source 1..75: mol_type = other DNA
aaagatgaaatagctgtaagcgtgaaggcgttagatatgaacgccatctttcaggggggacacgggacagccgga

SEQ ID NO: 99015 - DNA, 75 bp, synthetic construct
  source 1..75: mol_type = other DNA
gactccatcccccgctcacggctttacgggcgctgggtcacccacgtctgggtatggatcgaaacgctctccctg

SEQ ID NO: 99016 - DNA, 75 bp, synthetic construct
  source 1..75: mol_type = other DNA
gtgatccacgaccggtttaactgtttttttcatccgcttatagggttgccgccggtgtatgccgccgggctggcg

SEQ ID NO: 99017 - DNA, 75 bp, synthetic construct
  source 1..75: mol_type = other DNA
gggcaccctggtggtggcctccgaactggcccgctcacggggaaaaggcgccggtgtggcggttgctctgtctct

SEQ ID NO: 99018 - DNA, 75 bp, synthetic construct
  source 1..75: mol_type = other DNA
gggattataactggcgcaagcagggaggctcgtcccgcatgattgaaatcagcaaacgcgaacaattctatcagc

SEQ ID NO: 99019 - DNA, 75 bp, synthetic construct
  source 1..75: mol_type = other DNA
agctgcacgtactgcccggataatgcgagagcaacttgctgcaggtgatgatcctctggagattaaaaaggctga

SEQ ID NO: 99020 - DNA, 75 bp, synthetic construct
  source 1..75: mol_type = other DNA
tttgcatttcatttgataccgctgaaaaacgccgatacgcaacttatttgatactaaatcggcgcttttcttttg

SEQ ID NO: 99021 - DNA, 75 bp, synthetic construct
  source 1..75: mol_type = other DNA
gatgtttgccccgcagtacaacatcgagatcaataacgatggcacgaacgggcagataggtccggctgccctgaa

SEQ ID NO: 99022 - DNA, 75 bp, synthetic construct
  source 1..75: mol_type = other DNA
acaacatatacgcgaggccatcgtggcgatggaacgtaataatcagagcaattattgggaagcgttgggtaaggt

SEQ ID NO: 99023 - DNA, 75 bp, synthetic construct
  source 1..75: mol_type = other DNA
cccgacaagaatgaagccagtacgactgatatgacagagcagcaaatcatgcaacttaagcaaaagacctataaa

SEQ ID NO: 99024 - DNA, 75 bp, synthetic construct
  source 1..75: mol_type = other DNA
tctgctttctgccccaccgcagggcgtacgtatcagcctgtgcgtgggatcgctggaaggttcgacagtgcctca

SEQ ID NO: 99025 - DNA, 75 bp, synthetic construct
  source 1..75: mol_type = other DNA
gatgcggtcactgaacgaggtcagaaacaccttcgggagttgatgagcgtagcggctgaaggccagcgtgcggtt

SEQ ID NO: 99026 - DNA, 75 bp, synthetic construct
  source 1..75: mol_type = other DNA
aaaaaagttatcctggtgccgggtcaggtagaggacgatgcctctattaaaacaggcactgtctcgattaagagc

SEQ ID NO: 99027 - DNA, 75 bp, synthetic construct
  source 1..75: mol_type = other DNA
ttacccttatcggcgacgactgcagcatctccggctcggcgatcggtaacccatccgaactgcgcacgctgagga

SEQ ID NO: 99028 - DNA, 75 bp, synthetic construct
  source 1..75: mol_type = other DNA
gacccggagttacagctacagcaccaccggcaggctgaccagcgttcacaccaccgcagcgaatctggatatccg

SEQ ID NO: 99029 - DNA, 75 bp, synthetic construct
  source 1..75: mol_type = other DNA
ccgtatcgagtcaattgaacgctcattgctgacgctggacgttctggcggaaacagcaccaaaacttcgtgctga

SEQ ID NO: 99030 - DNA, 75 bp, synthetic construct
  source 1..75: mol_type = other DNA
atgtgcaataaaaccacaccggacgcagccgccgccgcgctcactacgctgatgcacgcgcttattgatatttct

SEQ ID NO: 99031 - DNA, 75 bp, synthetic construct
  source 1..75: mol_type = other DNA
ctcgaaggtttgctggtggcgtttctcaatatcgacgaagtgattgagatcattcgtaatgaagatgaaccgaaa

SEQ ID NO: 99032 - DNA, 75 bp, synthetic construct
  source 1..75: mol_type = other DNA
ataacaaacgcagttactacgccattgataatacgcttttatatattgaagatgtagaaaataataaaccattaa

SEQ ID NO: 99033 - DNA, 75 bp, synthetic construct
  source 1..75: mol_type = other DNA
atgcacaataaaaccacaccggacgcaaccgccgccgcactcactacactgatgcacgcgctgattgatatttct

SEQ ID NO: 99034 - DNA, 75 bp, synthetic construct
  source 1..75: mol_type = other DNA
gaccagatggaagcggaagcagaaagccacagcttcggtaaacaaaaatcgctggacgatcagtttgccgaactg

SEQ ID NO: 99035 - DNA, 75 bp, synthetic construct
  source 1..75: mol_type = other DNA
gccaatataactaaactcagcattgataaagactccataaaaaaactgaatagtgattactggtcttttatacta

SEQ ID NO: 99036 - DNA, 75 bp, synthetic construct
  source 1..75: mol_type = other DNA
agcttctttgaatatgcgctgggtgctgctgaagatattgctaataagatcaagcagaccactgacgaatatatc

SEQ ID NO: 99037 - DNA, 75 bp, synthetic construct
  source 1..75: mol_type = other DNA
cgtaagtcattaaaagataatgatgaagatagtcctgtctatatcgctactgtaccaaagcgcggctataaatta

SEQ ID NO: 99038 - DNA, 75 bp, synthetic construct
  source 1..75: mol_type = other DNA
tccggaagaattcggcaaagtgaccctgcgcgtaaacagtgacggctcggtggtacgcctgaaagatgtcgcacg

SEQ ID NO: 99039 - DNA, 75 bp, synthetic construct
  source 1..75: mol_type = other DNA
acagcaggtctggacacagcacgttcaacgttcacctttacttcagtgccctttcgtaatggcagcaggacactg

SEQ ID NO: 99040 - DNA, 75 bp, synthetic construct
  source 1..75: mol_type = other DNA
gcggtatttattccgatggcattcttcggtggctcaacaggggcaatttatcgacagttctctatcactattgtt

SEQ ID NO: 99041 - DNA, 75 bp, synthetic construct
  source 1..75: mol_type = other DNA
tgtactccaggtacagataagaataattcagaaatattcaaaattataagtgttgatggtgtttcaaaaaaagaa

SEQ ID NO: 99042 - DNA, 75 bp, synthetic construct
  source 1..75: mol_type = other DNA
tgacgctgacggatattaccaaaaatgcaacgtatggcgttgagatagaaagtctggtgctggaaataaatagtc

SEQ ID NO: 99043 - DNA, 75 bp, synthetic construct
  source 1..75: mol_type = other DNA
ggcacggtgtctgtaaaaggcaacagtctgaagaccacgaccactgcgcagacgcaaggcaacagtgtcagcgtg

SEQ ID NO: 99044 - DNA, 75 bp, synthetic construct
  source 1..75: mol_type = other DNA
gcaccattaataacgggcagaatattgttgttgattttgggaatattaatcctgagcacgtggacaactcacgtg

SEQ ID NO: 99045 - DNA, 75 bp, synthetic construct
  source 1..75: mol_type = other DNA
aatggacatgaatgtaggctatataagggcaacgcgcatccacttacccaatgtggttgagcaaatagacttcga

SEQ ID NO: 99046 - DNA, 75 bp, synthetic construct
  source 1..75: mol_type = other DNA
gtgaattattaggtgagattgttcaatcatccccagaatttacctacgcgagagcagaaaaagcattagttgata

SEQ ID NO: 99047 - DNA, 75 bp, synthetic construct
  source 1..75: mol_type = other DNA
agcaatatcagctcagtcatcagcggtaaaaccgtatccctggaaagcgccaccggaaacatcagtaacctaacc

SEQ ID NO: 99048 - DNA, 75 bp, synthetic construct
  source 1..75: mol_type = other DNA
tatggttggggagcgcattgaggtattggacggatcacgtcgccgcgctgcgtgtatcttcaatgaaacgaaatt

SEQ ID NO: 99049 - DNA, 75 bp, synthetic construct
  source 1..75: mol_type = other DNA
ggatggcagttccatcgattattttgttccctggtacgataatcaaaccactgtttatttcagccaattttctgc

SEQ ID NO: 99050 - DNA, 75 bp, synthetic construct
  source 1..75: mol_type = other DNA
aagtttcttcggtgagcttggctttaccgtggcaaccgggccggaaatcgaagacgattatcataacttcgatgc

SEQ ID NO: 99051 - DNA, 75 bp, synthetic construct
  source 1..75: mol_type = other DNA
catatgagattgtgaactggaaagaacttagtgagcgtggtctggtattcagaattaatcatgaaattatgcatc

SEQ ID NO: 99052 - DNA, 75 bp, synthetic construct
  source 1..75: mol_type = other DNA
agaatatacactcaaaaaatcaggacagaatatctgtagccatggtatatgacacgttatcaaaagaagcccaca

SEQ ID NO: 99053 - DNA, 75 bp, synthetic construct
  source 1..75: mol_type = other DNA
ggcgtcagatgttgccgcgttagataatgtgcgcgtcgaatatttgggtaaaaaagggcacttaacccttcagat

SEQ ID NO: 99054 - DNA, 75 bp, synthetic construct
  source 1..75: mol_type = other DNA
ctcggtcttgatgatggtgcactggatctctcctttgcggttggtggcgtcgatcgtcacatctttgccaaatac

SEQ ID NO: 99055 - DNA, 75 bp, synthetic construct
  source 1..75: mol_type = other DNA
caagcaaagatcagtaacagaactgatggaaaaagttcagcatcggttgaagaccatgccagattatccggcaat

SEQ ID NO: 99056 - DNA, 75 bp, synthetic construct
  source 1..75: mol_type = other DNA
tgtgctggaaggaaagaaacgcgcagagtttcggaaaaatgaccgtaattatgagcgcggggacacgttgatttt

SEQ ID NO: 99057 - DNA, 75 bp, synthetic construct
  source 1..75: mol_type = other DNA
atgacgagcaaagaaacctttactcattaccagccgctgggcggcagtgacccggcacatacggcaaccgcgccc

SEQ ID NO: 99058 - DNA, 75 bp, synthetic construct
  source 1..75: mol_type = other DNA
atgacagaaaaaatggaacggaataaagcgtcgtcagaagtggtcaggcagtcagacctggcgctgttgacagat

SEQ ID NO: 99059 - DNA, 75 bp, synthetic construct
  source 1..75: mol_type = other DNA
tggttttgaactcgtttgatatccggcttggtaaagaaaaaatctctctaaaaaaaggaagtgttgttgctatag

SEQ ID NO: 99060 - DNA, 75 bp, synthetic construct
  source 1..75: mol_type = other DNA
ctgataggtattggagtgctcggcgaatacattggccgcatttacatcgaaacaaagaacagaccaagatacatt

SEQ ID NO: 99061 - DNA, 75 bp, synthetic construct
  source 1..75: mol_type = other DNA
gatctgatgactaccgtatatacaaaaaagagttttcttcggcagctaggaagttaataaatgaaggggtctgca

SEQ ID NO: 99062 - DNA, 75 bp, synthetic construct
  source 1..75: mol_type = other DNA
ggttggagtgcaactgaaattaaaggcgttgacgttaatggcacttcaacaagtgaggtttatcgatatgatttt

SEQ ID NO: 99063 - DNA, 75 bp, synthetic construct
  source 1..75: mol_type = other DNA
tcaccggaagcgaaaagcaagtcggaagagctggaagatgaacccagtgccaatattgcttttgtaccactggca

SEQ ID NO: 99064 - DNA, 75 bp, synthetic construct
  source 1..75: mol_type = other DNA
gtttcaacgcgtattctgaaagaaaccgaaagagcaagtacaattcgcgttaactatttcattaaagatttgtgg

SEQ ID NO: 99065 - DNA, 75 bp, synthetic construct
  source 1..75: mol_type = other DNA
cgaaccagaagtgggcgggagacatcacgtattgtgtgcccggagttcagggcgagcatggaggctcaaatgaac

SEQ ID NO: 99066 - DNA, 75 bp, synthetic construct
  source 1..75: mol_type = other DNA
atggccagtatcaataccattgtgaaacgcaagcagtacctgtggctggggattgtggttgtcggtacagcctcc

SEQ ID NO: 99067 - DNA, 75 bp, synthetic construct
  source 1..75: mol_type = other DNA
gtgctgcgtatatccataaagccgaacatctggaagaacgtcgacttatgctacagtggtgggcagattttctgg

SEQ ID NO: 99068 - DNA, 75 bp, synthetic construct
  source 1..75: mol_type = other DNA
gcaaatgtgttgcagatagccctgcagacaaaaataaaactgttttatcggcctgaatccattaaagcaaagccc

SEQ ID NO: 99069 - DNA, 75 bp, synthetic construct
  source 1..75: mol_type = other DNA
tcagccaacaggctgtagccatactggcagaacttcagacatgggcaggtgaaaatggtctgatctttacgggag

SEQ ID NO: 99070 - DNA, 75 bp, synthetic construct
  source 1..75: mol_type = other DNA
tatctctcaagccatctcccgctatgagaaattattgaaccgtactcagaaggccgcgacggatatcaaacgcct

SEQ ID NO: 99071 - DNA, 75 bp, synthetic construct
  source 1..75: mol_type = other DNA
gtacagtctggcatcatcagatataacccggctctggatatggctggggcattgaccacggtaaaacgccagcat

SEQ ID NO: 99072 - DNA, 75 bp, synthetic construct
  source 1..75: mol_type = other DNA
agacacacagaacaggctcagtgtgaataccctgatggtgaacacgtattatgatttcagaaacagcagtgcatt

SEQ ID NO: 99073 - DNA, 75 bp, synthetic construct
  source 1..75: mol_type = other DNA
ccgccagatcgatattcgtggtatggggccggaaaacaccttaattttaattgatggtgtaccggtgacgtcacg

SEQ ID NO: 99074 - DNA, 75 bp, synthetic construct
  source 1..75: mol_type = other DNA
acggaataagcagcacgatgctgaaggatgcccgtatcagcctgatgtattaccacgggcggcacattgccggaa

SEQ ID NO: 99075 - DNA, 75 bp, synthetic construct
  source 1..75: mol_type = other DNA
catcttgttctggagctggggcggataagctgttgtgcagcagggaaagataaaacataccacatcatttcatcg

SEQ ID NO: 99076 - DNA, 75 bp, synthetic construct
  source 1..75: mol_type = other DNA
aatcggtaaaaagcaatttaccgaatcagtcaaacacaaaagacaatatacaaaagacaataaatacaaataccc

SEQ ID NO: 99077 - DNA, 75 bp, synthetic construct
  source 1..75: mol_type = other DNA
ctacagcgtaccttcccggcttgtaggtcaactgttacgggtccggttatgggacgatcgtctgagctgttacgt

SEQ ID NO: 99078 - DNA, 75 bp, synthetic construct
  source 1..75: mol_type = other DNA
gctgaggatgcaacaaaagtcctgaagatgtttactacatctcaaagcaatgaagaggtaacaaacgaagttcgt

SEQ ID NO: 99079 - DNA, 75 bp, synthetic construct
  source 1..75: mol_type = other DNA
ataaaacggattcggcagcactgttgccctgtattgaacaggccagggaggatatccgtaccctgcgccagctgc

SEQ ID NO: 99080 - DNA, 75 bp, synthetic construct
  source 1..75: mol_type = other DNA
ttaccgccagcggattatactcagtcagcgttgctgaggcttagcaacaacaaatcacccgtgctaggtaacgtt

SEQ ID NO: 99081 - DNA, 75 bp, synthetic construct
  source 1..75: mol_type = other DNA
cttgtgctgttcggcgcataccaggtgctggatgcatggattgcccgtgtcagccgggaagagcgtgaggcactg

SEQ ID NO: 99082 - DNA, 75 bp, synthetic construct
  source 1..75: mol_type = other DNA
gtacttttaccccggcccggaatccgaacctattctggccgcggcggaatcgtcgttcaggaagtggctggctga

SEQ ID NO: 99083 - DNA, 75 bp, synthetic construct
  source 1..75: mol_type = other DNA
attattgccactccgccagtacagcgtctggaacccggctcaaagagtatggttcgtctgaccagtacacctgac

SEQ ID NO: 99084 - DNA, 75 bp, synthetic construct
  source 1..75: mol_type = other DNA
ggccattgtttttaaggatgacaatgcggttagttttcatgaggatgttcaggaggggatagaagagtatataac

SEQ ID NO: 99085 - DNA, 75 bp, synthetic construct
  source 1..75: mol_type = other DNA
aagcaggcgtttaacgaaggcgacaccgtcgtagtgcctgcagggctcacctgcaaagacatcaacacgggcatt

SEQ ID NO: 99086 - DNA, 75 bp, synthetic construct
  source 1..75: mol_type = other DNA
gtacgctgaatgattttctcggtgccatgtcggaggatgacgtccggccggaggcactgcgccgttttgaactga

SEQ ID NO: 99087 - DNA, 75 bp, synthetic construct
  source 1..75: mol_type = other DNA
gtgccgctcactgggcatcgacctgatagcgcacaagccgcataacgcccgcgccaccggacaggtggaaaaggc

SEQ ID NO: 99088 - DNA, 75 bp, synthetic construct
  source 1..75: mol_type = other DNA
tatcaaaccgaccatgacgaagccgggcgtgcaacctcgtgtgggccgcgtacctcaaggttaatggtgaaagtg

SEQ ID NO: 99089 - DNA, 75 bp, synthetic construct
  source 1..75: mol_type = other DNA
ccaggcgcatttcgcccaggggatcaccataataaaatgctgaggcctggcctttgcgtagtgcacgcatcacct

SEQ ID NO: 99090 - DNA, 75 bp, synthetic construct
  source 1..75: mol_type = other DNA
gctctggttaagaaagacacaagtggcaatgatgtagctgaaggtgccttctcagcagttgcgaatttcaacctg

SEQ ID NO: 99091 - DNA, 75 bp, synthetic construct
  source 1..75: mol_type = other DNA
gctctatgccgaagcagaacagaccagtgcactgctgagacaacgacaacaccggattgaggaactgaaacgtga

SEQ ID NO: 99092 - DNA, 75 bp, synthetic construct
  source 1..75: mol_type = other DNA
atgacatgcataaacgtcgttattttaatgacacaatggatattattaattataatcgaaaaacaataagatata

SEQ ID NO: 99093 - DNA, 75 bp, synthetic construct
  source 1..75: mol_type = other DNA
cgtggttctaattccgaactggaaacggcccttaaagaccttggtgattcggtgagttttaaagggtatatgggc

SEQ ID NO: 99094 - DNA, 75 bp, synthetic construct
  source 1..75: mol_type = other DNA
actgtcggggaagtggtgaaggaaatagccgtacgtcacaagctgaagatggcactgggtaaagacctgtcggat

SEQ ID NO: 99095 - DNA, 75 bp, synthetic construct
  source 1..75: mol_type = other DNA
ccggcttggcggctttgacgctatcaagcctgcttacatggcccaggtgcaattcagcatgtgggttacagacaa

SEQ ID NO: 99096 - DNA, 75 bp, synthetic construct
  source 1..75: mol_type = other DNA
caacgtgcgctaccagctcaagacgccgtaccgggacggcaccacgcacgtcattttcgaaccattggatttcat

SEQ ID NO: 99097 - DNA, 75 bp, synthetic construct
  source 1..75: mol_type = other DNA
tggaaggggcagccgcttttcccgaaaggggcattcacggtggacgagattgaacacacaggcgcaccggaccgc

SEQ ID NO: 99098 - DNA, 75 bp, synthetic construct
  source 1..75: mol_type = other DNA
gtttctctgctcgacggtcaccgggattttatttggatggttacccgcacgaaatgcggcacgactggatccagt

SEQ ID NO: 99099 - DNA, 75 bp, synthetic construct
  source 1..75: mol_type = other DNA
ggcgattgtttttaaaaatagctatattattggttattatgagaatgttcaaagtggtatagatgagtataaaat

SEQ ID NO: 99100 - DNA, 75 bp, synthetic construct
  source 1..75: mol_type = other DNA
tgagtttgtaaactggtatataaaaaacgttttctcattcgatttcgcttcattttttaatcaccctatacaatt

SEQ ID NO: 99101 - DNA, 75 bp, synthetic construct
  source 1..75: mol_type = other DNA
tgccggtgcgtactgaagtggagttttatggccgcggtaacgctgaatcaaaatatcgtctgagttattgggaaa

SEQ ID NO: 99102 - DNA, 75 bp, synthetic construct
  source 1..75: mol_type = other DNA
tgatttaattcgtaatgagcctgaacccatcgcagcgcagcgtatcgctatcagcgaacgtcccgcgttaaatag

SEQ ID NO: 99103 - DNA, 75 bp, synthetic construct
  source 1..75: mol_type = other DNA
gctaccggtatgatgataccggtcgggtgacggagcaggtcaacccggaggggctggactaccgctttgagtacg

SEQ ID NO: 99104 - DNA, 75 bp, synthetic construct
  source 1..75: mol_type = other DNA
tggttgatgacgacactgctatgatggtgcaaagcttcactgatgcaggtattagtattgactttgacaggctgt

SEQ ID NO: 99105 - DNA, 75 bp, synthetic construct
  source 1..75: mol_type = other DNA
taaagaagggctggctattcatgtcattgcccaaaagatggaattaagcaatcgtgctgtatccagcattgtata

SEQ ID NO: 99106 - DNA, 75 bp, synthetic construct
  source 1..75: mol_type = other DNA
ctcgccgttatgctgaatttactggtttttattcgttccagtgaactcagataagcccgttggtctgaaattgat

SEQ ID NO: 99107 - DNA, 75 bp, synthetic construct
  source 1..75: mol_type = other DNA
ttcctgttagtaattgtccttttaacagcgatcgcgtatttcgtctcgctcaggcgcaatcacgaatgaataacg

SEQ ID NO: 99108 - DNA, 75 bp, synthetic construct
  source 1..75: mol_type = other DNA
gcagcattcttgcagacccttacggtaagatctcacataaaacgctggatattattaccacaacattaacaccgc

SEQ ID NO: 99109 - DNA, 75 bp, synthetic construct
  source 1..75: mol_type = other DNA
acggtggcagtgtggtgttcccgccggtgctggtgcagatgctcgaccggctggaaagtgaaatcctggctgacc

SEQ ID NO: 99110 - DNA, 75 bp, synthetic construct
  source 1..75: mol_type = other DNA
tttttcatcgaatggctaataaatgtagtcttaaatctatctccatacctgaacttaatttaactattgatgata

SEQ ID NO: 99111 - DNA, 75 bp, synthetic construct
  source 1..75: mol_type = other DNA
cccgcgaacactccaaaaaacgactcgccagaacgtttcgcgtcagcccggaagtggtcagtcgcctgagtccga

SEQ ID NO: 99112 - DNA, 75 bp, synthetic construct
  source 1..75: mol_type = other DNA
gtatcttccagaatgaggacatcgaaagcatcctcgcgacgatcctgaaagaaaacggtgtgaccgagtggagtc

SEQ ID NO: 99113 - DNA, 75 bp, synthetic construct
  source 1..75: mol_type = other DNA
cagacttattaattagtaataagggatatcactttcgttacctgaaaggtgcaagtaaccctatcacagttgttg

SEQ ID NO: 99114 - DNA, 75 bp, synthetic construct
  source 1..75: mol_type = other DNA
acatgcgttatccctggagcgtgagcgccagccggaaatacaggaacgcacactggatggtccttcgctgggatg

SEQ ID NO: 99115 - DNA, 75 bp, synthetic construct
  source 1..75: mol_type = other DNA
gcaggtggctatgaaaatgcaatgatatctgcaatgcgatacaatcctaagtatatttttcttggtgaaatacgt

SEQ ID NO: 99116 - DNA, 75 bp, synthetic construct
  source 1..75: mol_type = other DNA
cagcatttgcaggtcaggtttggtgacgggccgtggcaggatgttaaggggctggatgaagtgggcagtgataca

SEQ ID NO: 99117 - DNA, 75 bp, synthetic construct
  source 1..75: mol_type = other DNA
gaaagaaatatggacggctgaataaagatacctggcgtgatgatttgcggcagggatttaaagaagcctttcgtg

SEQ ID NO: 99118 - DNA, 75 bp, synthetic construct
  source 1..75: mol_type = other DNA
ctgacgaaccggtattctggggcctcttcggggccggtggtatgtggagcgccatcattgcgccggtgatgatcc

SEQ ID NO: 99119 - DNA, 75 bp, synthetic construct
  source 1..75: mol_type = other DNA
actggctgcctctcgcggagaatttgttgaagggattagcgacccgaatgatccgaaatgggttaaggggatcca

SEQ ID NO: 99120 - DNA, 75 bp, synthetic construct
  source 1..75: mol_type = other DNA
tctcccctgagaaattctatagctgattctgtcgattccagagatattccaggacttcctgtacacccatcgagg

SEQ ID NO: 99121 - DNA, 75 bp, synthetic construct
  source 1..75: mol_type = other DNA
gttggcagatgaccagggcggtttaaaacaggatgcagcgccaccgccgcctcatgcaatagaagatggctatcg

SEQ ID NO: 99122 - DNA, 75 bp, synthetic construct
  source 1..75: mol_type = other DNA
agaagtccttcctgaagggattcgcgtgttacaggctgccgctgagcgctggggcttcgccttgagttttgagca

SEQ ID NO: 99123 - DNA, 75 bp, synthetic construct
  source 1..75: mol_type = other DNA
atccgcgaaaaagtagagcgacagaatttttgtttctcattctgtttatcgtgttgatgataccgatatccccgt

SEQ ID NO: 99124 - DNA, 75 bp, synthetic construct
  source 1..75: mol_type = other DNA
caaggagtgcaccgaaggcgatcaacatgccaatggcaataatgaaacaggcgagacagcaaatcccttaattaa

SEQ ID NO: 99125 - DNA, 75 bp, synthetic construct
  source 1..75: mol_type = other DNA
agtgaagaggcattcagtaactacctgttcgtcggtcttgatgtgctgatggatggcgatcagattcgccaggtg

SEQ ID NO: 99126 - DNA, 75 bp, synthetic construct
  source 1..75: mol_type = other DNA
catactgacagaacttcagacatgggcaggtgaaaatggtctgatatttacgggtgcacatgacccgcgtaaacc

SEQ ID NO: 99127 - DNA, 75 bp, synthetic construct
  source 1..75: mol_type = other DNA
cagacccgcgattctgtaaaccagaaccagcatgaatcggaacggaactaccaaaaagcggaacaaaacagccca

SEQ ID NO: 99128 - DNA, 75 bp, synthetic construct
  source 1..75: mol_type = other DNA
ggaattatctttgacaacgatgaagataaaacggattcggcagcactgttgccctgtattgaacaggccagggag

SEQ ID NO: 99129 - DNA, 75 bp, synthetic construct
  source 1..75: mol_type = other DNA
cctatcctgccgaacagcgtgaagccgtctccgccgcgctggagctggaatcggaacccctgaacgttatcgccc

SEQ ID NO: 99130 - DNA, 75 bp, synthetic construct
  source 1..75: mol_type = other DNA
ataaaacggattcggcagcactgttgccctgtatcgaacaggcgcgacaggatgtccgaactctgcgccatctgc

SEQ ID NO: 99131 - DNA, 75 bp, synthetic construct
  source 1..75: mol_type = other DNA
ccgccaacggaataagcagcacgatgctgaaggatgcccgtatcagcctgatgtattaccacgggcggcacattg

SEQ ID NO: 99132 - DNA, 75 bp, synthetic construct
  source 1..75: mol_type = other DNA
cgcgggtactggtgcagggcattaccggcaaaaacggcacatttcatacagagcaggctattgcgtatggcacgc

SEQ ID NO: 99133 - DNA, 75 bp, synthetic construct
  source 1..75: mol_type = other DNA
gtacgcccagtggtaattttaaagcaatagataaccacgggaaggaaataacaaacagaaaaggattacctaatg

SEQ ID NO: 99134 - DNA, 75 bp, synthetic construct
  source 1..75: mol_type = other DNA
tcaatggacgtggacatctataaccttcatccggcacacgctaaacgcattgaggaaattatcgctgaaaataaa

SEQ ID NO: 99135 - DNA, 75 bp, synthetic construct
  source 1..75: mol_type = other DNA
gttttggtcttagtatggcatttgattttgattattatttggttgatgaggtaacagctgttggtgacatgagat

SEQ ID NO: 99136 - DNA, 75 bp, synthetic construct
  source 1..75: mol_type = other DNA
ctgccctgtattgaacaggccagggaagatatccgtaccctgcaccagttgcagtttctgcaacagaactggtga

SEQ ID NO: 99137 - DNA, 75 bp, synthetic construct
  source 1..75: mol_type = other DNA
aaagtcactactgaagaagccagtacgcaatgcaaggcagataatggcagcactggtacaaacaaacttatcttc

SEQ ID NO: 99138 - DNA, 75 bp, synthetic construct
  source 1..75: mol_type = other DNA
cgtggtatggatgcagggggaatttgattttaacggaacgccagcgaatcatgcagcccgttttacagaagtggt

SEQ ID NO: 99139 - DNA, 75 bp, synthetic construct
  source 1..75: mol_type = other DNA
gcgttcacagctggagatgctgctggggccaactgattgcagccgcctgtctttactggaatcactgaaaaaagg

SEQ ID NO: 99140 - DNA, 75 bp, synthetic construct
  source 1..75: mol_type = other DNA
ctgacactgcatcaggatccggtgtatgtcacccgagctgatgcccccgttgcagggaaagtcgccctgctgtcg

SEQ ID NO: 99141 - DNA, 75 bp, synthetic construct
  source 1..75: mol_type = other DNA
ctggtaatccgttcctgatgtcttacttcactcagaccactgacggcagagtgaatctgatgcatcacaggaaag

SEQ ID NO: 99142 - DNA, 75 bp, synthetic construct
  source 1..75: mol_type = other DNA
tatcaacagaattacctcataaaccatcaatgatgttgtggtttatgacaggggcatttatggctgttgttggtg

SEQ ID NO: 99143 - DNA, 75 bp, synthetic construct
  source 1..75: mol_type = other DNA
ctggcattgatgttttcactaccgtcaacgttcagcatctggaaagtctgaatgatgtggtcagcggcgtcaccg

SEQ ID NO: 99144 - DNA, 75 bp, synthetic construct
  source 1..75: mol_type = other DNA
ggtttaccagcggttctgcaacggacactttgttgcatgtgaccaggatgaagccagacagatttgcacagcatc

SEQ ID NO: 99145 - DNA, 75 bp, synthetic construct
  source 1..75: mol_type = other DNA
ggcggtttcggctatcgtggcgtagaaggcatgattacgaccgcgcgttttgcgcgtgagaacaatattccgtat

SEQ ID NO: 99146 - DNA, 75 bp, synthetic construct
  source 1..75: mol_type = other DNA
tcgaagcactgaaacacggtgggctgaagaatcgtgtcagcgtcaacatcaaactgatcgattcacaagatgttg

SEQ ID NO: 99147 - DNA, 75 bp, synthetic construct
  source 1..75: mol_type = other DNA
gaataaatatccttcagggattggttttaaaattaatcagccggaacacttagctcaacttgacggatattcgca

SEQ ID NO: 99148 - DNA, 75 bp, synthetic construct
  source 1..75: mol_type = other DNA
ccatgctggcgggtaaggccaatacagtatcggcgagcatgaaggcgctggaagacgcgagggaacgagcgttag

SEQ ID NO: 99149 - DNA, 75 bp, synthetic construct
  source 1..75: mol_type = other DNA
tcgcaccggtttacgcggcggtgggccgatgaccactctgattgaattacaggaatatcagggcaatcaacaaac

SEQ ID NO: 99150 - DNA, 75 bp, synthetic construct
  source 1..75: mol_type = other DNA
tccggacgggctgacacagccgcactacatggatatttgcatggcaatgattcgttgtgtggatgcgatttacat

SEQ ID NO: 99151 - DNA, 75 bp, synthetic construct
  source 1..75: mol_type = other DNA
tgggcgttttcggtcgacaggtgggatgaaaagtggccggaagcgacaaaacgcgccgttatccgcgatgcgtat

SEQ ID NO: 99152 - DNA, 75 bp, synthetic construct
  source 1..75: mol_type = other DNA
caaccgcgaggcgtttcacagggcggaagaagcactgaaacgggaagggcataccgttttaaacccggcagtact

SEQ ID NO: 99153 - DNA, 75 bp, synthetic construct
  source 1..75: mol_type = other DNA
tccaacgcttgacggcatgacaggtcacgctggcgagctcccgaattgtcgctgttataaagaaatcgtttttcc

SEQ ID NO: 99154 - DNA, 75 bp, synthetic construct
  source 1..75: mol_type = other DNA
atgaatatattacgcggagagttaagggagtaacgcagaccaacgcaattacaactgatgattgcgacgcgtttt

SEQ ID NO: 99155 - DNA, 75 bp, synthetic construct
  source 1..75: mol_type = other DNA
tgggcaattaccttgcttgttggggccgtattgtgctgccattttcatccgttcagaacgtgaatatttttttag

SEQ ID NO: 99156 - DNA, 75 bp, synthetic construct
  source 1..75: mol_type = other DNA
atggctaatgaaaaaaagacatcccgcaaaaagtttcgcgtggctgtctccggatcaactgttgatggccgtgaa

SEQ ID NO: 99157 - DNA, 75 bp, synthetic construct
  source 1..75: mol_type = other DNA
tggtggaagaggcagcgcgtcacgctgaggaggcgaagaagaatgccggagaggcggagacgtcagcgaggaatg

SEQ ID NO: 99158 - DNA, 75 bp, synthetic construct
  source 1..75: mol_type = other DNA
atgagtaattcactgttaccgccatcagccagcagtttcatgcgttgtgccgaagctgtcggaacgcgcattaca

SEQ ID NO: 99159 - DNA, 75 bp, synthetic construct
  source 1..75: mol_type = other DNA
ggcgccaagccttttgagaaaactatttatgatcctaaaatatttacagatgagaaaatgttgcaacttggtcaa

SEQ ID NO: 99160 - DNA, 75 bp, synthetic construct
  source 1..75: mol_type = other DNA
atgtgtaatgacacattacacacaatcaacacaaaaagcaaagccccgcactgtaggagcagtaacggggcttct

SEQ ID NO: 99161 - DNA, 75 bp, synthetic construct
  source 1..75: mol_type = other DNA
cactcaggatccgattgggctgaaggggggatggaatttttatcagtatccgctgaatccggttcagtatataga

SEQ ID NO: 99162 - DNA, 75 bp, synthetic construct
  source 1..75: mol_type = other DNA
ctgaaatgaatccaaccgaggtgtttcatattgatcaccttcacccaagaaatcatttttcaaagaaatatcttg

SEQ ID NO: 99163 - DNA, 75 bp, synthetic construct
  source 1..75: mol_type = other DNA
acacacgtattcccctttatcggcaatcgggatatcacaacactcaataccccggacctgcttatccctgttcgt

SEQ ID NO: 99164 - DNA, 75 bp, synthetic construct
  source 1..75: mol_type = other DNA
gcacgaacgttcaagggccggtgacggtcagctaaatactcaggctaaccgctatgtattgcagctaggcggcga

SEQ ID NO: 99165 - DNA, 75 bp, synthetic construct
  source 1..75: mol_type = other DNA
acgttcaacgcgacgctgggcggcgataattcgcccaccgataaaatgaacgtgaaaggcgatacccaagggaac

SEQ ID NO: 99166 - DNA, 75 bp, synthetic construct
  source 1..75: mol_type = other DNA
gcctgctcgacccgctggagattcgcgatcttcacagactggttcgtgatactgacaaagttttccctaatcctg

SEQ ID NO: 99167 - DNA, 75 bp, synthetic construct
  source 1..75: mol_type = other DNA
ttgaatcggcagcggaaaaagcagtaccactggcgaaggcctgggggaacgctgttatcaccctgacggacagca

SEQ ID NO: 99168 - DNA, 75 bp, synthetic construct
  source 1..75: mol_type = other DNA
cacatgctttcacgtatgccatccagtgaattcagtgccgtgggcgatgtgatttcactgtccaccgaagaaatc

SEQ ID NO: 99169 - DNA, 75 bp, synthetic construct
  source 1..75: mol_type = other DNA
gacagaacatggcgaccacagccgttgctgaaaccgctggtcgacggcccgcagagcgctgtcgtgacaggaccg

SEQ ID NO: 99170 - DNA, 75 bp, synthetic construct
  source 1..75: mol_type = other DNA
tgatggggtatgacacaaccaaggaagtctgtggccatggattccgggcgatggcgtgcagtgcattgattgaat

SEQ ID NO: 99171 - DNA, 75 bp, synthetic construct
  source 1..75: mol_type = other DNA
cgttgtcactgaacttgcctggtgggcaaacaatattggcgtgacgggcggcgcgtttgacagctatctgctgct

SEQ ID NO: 99172 - DNA, 75 bp, synthetic construct
  source 1..75: mol_type = other DNA
gcgtttatcgcgtgggggatcatcaccgcgttatttattccaacagggtggttaccgaacgagacgctggcgaag

SEQ ID NO: 99173 - DNA, 75 bp, synthetic construct
  source 1..75: mol_type = other DNA
tgcacagccagaagtgtgagaactggcgtgaataccttgcccgtgagcgtaaaaacattgatgacggactgatta

SEQ ID NO: 99174 - DNA, 75 bp, synthetic construct
  source 1..75: mol_type = other DNA
ctaacaacgagatccttaaagctaaaccccgagaaaaagatttcactctgcatgatggggacggcctgttcttac

SEQ ID NO: 99175 - DNA, 75 bp, synthetic construct
  source 1..75: mol_type = other DNA
gctaaacgcctgctgtatgagcagcagaaatcagaagaagctctggtgataaaacgcgagggcgattcgctggtg

SEQ ID NO: 99176 - DNA, 75 bp, synthetic construct
  source 1..75: mol_type = other DNA
actggatacccgtcgcggctcaaattcacaactcgaaacggcagtgaaagacctgggagcggtggtgtctttcaa

SEQ ID NO: 99177 - DNA, 75 bp, synthetic construct
  source 1..75: mol_type = other DNA
atcgccatcttatttgcgacgaaattttgcagctcgctcccgcaggtgcatttaatctgcatggttcgctgttac

SEQ ID NO: 99178 - DNA, 75 bp, synthetic construct
  source 1..75: mol_type = other DNA
ggcagactgaagaattagcaactaacggcggtacgggcacagctattgtagttcaggctgcaggcaaaaacgttt

SEQ ID NO: 99179 - DNA, 75 bp, synthetic construct
  source 1..75: mol_type = other DNA
gatgctttcgggggcctgtccgggcgaaattttcacctcaccgacgcccgataaaatctttgaatgcgccatgca

SEQ ID NO: 99180 - DNA, 75 bp, synthetic construct
  source 1..75: mol_type = other DNA
actgatgaatcccctaatgatttttatcaaaatcattaggggattcatcaggactcagtataaatccaagacaaa

SEQ ID NO: 99181 - DNA, 75 bp, synthetic construct
  source 1..75: mol_type = other DNA
cactgttgtgcagaaataaccagaccgggcaggtttctgacgccggagattttgagtttcgggttcatgtttctc

SEQ ID NO: 99182 - DNA, 75 bp, synthetic construct
  source 1..75: mol_type = other DNA
accagaaccagcccgaatcggaacaaaacgaccagaaagcggaacataacagcccaaatgcgttacaaaacgagc

SEQ ID NO: 99183 - DNA, 75 bp, synthetic construct
  source 1..75: mol_type = other DNA
gtttttgaatatcaagaacgtgagtcgggatgacatgatggcagcacatcgtgtgccgccgcaaatgatggggat

SEQ ID NO: 99184 - DNA, 75 bp, synthetic construct
  source 1..75: mol_type = other DNA
gtttcatgtcagaatgaagacagctctggaaataactatgactatatgtatgttgaagcaggaacagcactttcc

SEQ ID NO: 99185 - DNA, 75 bp, synthetic construct
  source 1..75: mol_type = other DNA
gggcaattgccctgatggacagcaaaaagatgtggcggagtaattatgctcctcctctgctgcgtattctctggc

SEQ ID NO: 99186 - DNA, 75 bp, synthetic construct
  source 1..75: mol_type = other DNA
tctcaataacccgctgatcaagcacgatctggaaaacccgactgcgccgaagtccgcgattggttacatcgtaga

SEQ ID NO: 99187 - DNA, 75 bp, synthetic construct
  source 1..75: mol_type = other DNA
atgaaaaagattattgctgtttcagcgcttgctatggtgggcgtattttcagcccaggctctggctgatgagaac

SEQ ID NO: 99188 - DNA, 75 bp, synthetic construct
  source 1..75: mol_type = other DNA
gatgaggaagaaacatcaaagtataaaggcggcgatgaccatgatacggtattcagtggcggtattgcggccggt

SEQ ID NO: 99189 - DNA, 75 bp, synthetic construct
  source 1..75: mol_type = other DNA
gacccccgcatgaaacgcgaaggcattcatcatgtcgtcgttgagcgggatccgcagtacatgtccgatttcaac

SEQ ID NO: 99190 - DNA, 75 bp, synthetic construct
  source 1..75: mol_type = other DNA
ccacaggggcagggtagagtaacctttaacggaactgttgttgatgctccatgcagcatttctcagaaatcagct

SEQ ID NO: 99191 - DNA, 75 bp, synthetic construct
  source 1..75: mol_type = other DNA
aaccaagcaatacaactcaattgcaggaaggtaacaatactctgagatattctacttgggttaaaaaatccagcg

SEQ ID NO: 99192 - DNA, 75 bp, synthetic construct
  source 1..75: mol_type = other DNA
cagtctattgattttggccagatctccaaagcacatctggaagctaatggtatttctgtaaagaaaaacttggat

SEQ ID NO: 99193 - DNA, 75 bp, synthetic construct
  source 1..75: mol_type = other DNA
cgctgccgtgcatcacagctcaccaattgcagtaaaatgcaacattctgaccagtacctacatccctcacccgct

SEQ ID NO: 99194 - DNA, 75 bp, synthetic construct
  source 1..75: mol_type = other DNA
aaaaacctgttcgcgtcaatttgcccgttgttgatgacctcccgccagaaggcgtatttgatacggaattctgca

SEQ ID NO: 99195 - DNA, 75 bp, synthetic construct
  source 1..75: mol_type = other DNA
accactataaagcagattccatcagagattcctgggcatctgcattaaggcgagcaggactgcggcacagaaaag

SEQ ID NO: 99196 - DNA, 75 bp, synthetic construct
  source 1..75: mol_type = other DNA
aaggacgggcttcagatcatcccgctgtcagaagtggcggcaaaggatgagtttctgaacatcaagaacgtaagc

SEQ ID NO: 99197 - DNA, 75 bp, synthetic construct
  source 1..75: mol_type = other DNA
atgctggtactgaagcagcaactgaaagaggcccgtattccacaggcggtggtggcgagagctgtcgatgtttct

SEQ ID NO: 99198 - DNA, 75 bp, synthetic construct
  source 1..75: mol_type = other DNA
tgtggtcgccggacacctgcccggtgcatctgctgccttatctcgcctgggcattttccgttgaccgctgggatc

SEQ ID NO: 99199 - DNA, 75 bp, synthetic construct
  source 1..75: mol_type = other DNA
aagtatcagccagtgaaatcgccaggcgtattggtgtcagtcgcgcggtattgtataaatggaaagatgaaatta

SEQ ID NO: 99200 - DNA, 75 bp, synthetic construct
  source 1..75: mol_type = other DNA
tattgaatttggtatgcgcagtgatgagatagtttcagatgcaaaactaaagcttgaatatactccgtcaccgtc

SEQ ID NO: 99201 - DNA, 75 bp, synthetic construct
  source 1..75: mol_type = other DNA
gtgggtggggaacaggttgtgatgccgccggatgagaagccgtcaccggacacaccatcaacaccgtcaacggac

SEQ ID NO: 99202 - DNA, 75 bp, synthetic construct
  source 1..75: mol_type = other DNA
tgagaagcgattcacgacggtaataagggcggtggtactggcgaccaacaacaacccgatgatattcaccgagcg

SEQ ID NO: 99203 - DNA, 75 bp, synthetic construct
  source 1..75: mol_type = other DNA
ataaaacggattcggcagcactgttgccctgtattgaacaggctagggaggatatccgtatcctgcgccaactgc

SEQ ID NO: 99204 - DNA, 75 bp, synthetic construct
  source 1..75: mol_type = other DNA
ataaaacggattcggcagcactactgccctgcattgaacaggccagggaagatatccgtaccctgcgccaactgc

SEQ ID NO: 99205 - DNA, 75 bp, synthetic construct
  source 1..75: mol_type = other DNA
tggcagcagccttaaactacctgaagtcccgttccctgacttttcacctgttgcaaacaaaggttcaacaacatc

SEQ ID NO: 99206 - DNA, 75 bp, synthetic construct
  source 1..75: mol_type = other DNA
atcaggcttctggcgcattacagaaaaaccagaacggcgcagatattccgggaaaagataccttcaccaaaaaca

SEQ ID NO: 99207 - DNA, 75 bp, synthetic construct
  source 1..75: mol_type = other DNA
ttaatcatggtgatgcttacgctcctggctggcgacgagactacaacacgaaaaaccagcagcctgcatttgctt

SEQ ID NO: 99208 - DNA, 75 bp, synthetic construct
  source 1..75: mol_type = other DNA
aaacataatggggcccgtttaatttatattccgcttaaagccaatggatggcagagcattgcgtatgacataatt

SEQ ID NO: 99209 - DNA, 75 bp, synthetic construct
  source 1..75: mol_type = other DNA
gtttcgactacgccgcgcagttccctaattcccctaacctgaaacactttggcttggggaaaagagagataacag

SEQ ID NO: 99210 - DNA, 75 bp, synthetic construct
  source 1..75: mol_type = other DNA
cgaatgtcgtggccgatgcatgggctatgggtggacaaattccgcgcagcaatctcaccacacagggtttaggaa

SEQ ID NO: 99211 - DNA, 75 bp, synthetic construct
  source 1..75: mol_type = other DNA
gaaatggccgagtacatcgcgctgctgatccgccaggatgatgcacgtgtgcgcgggcgtataaaatcgatcagc

SEQ ID NO: 99212 - DNA, 75 bp, synthetic construct
  source 1..75: mol_type = other DNA
tgtccatagcaatgttgctatggtttttaagtacgctaagacgtaaacccagtcaaaagaaaggctgtattgacg

SEQ ID NO: 99213 - DNA, 75 bp, synthetic construct
  source 1..75: mol_type = other DNA
cgttacattgcgacgcgaaaaatgagggcgcaagaaaacgcctcggcatcaaaggcggctttttctggacagagg

SEQ ID NO: 99214 - DNA, 75 bp, synthetic construct
  source 1..75: mol_type = other DNA
ttcctgtaattgcttatgggacaaaagtcatgcctgcctccaaaaaaaacgactcttcaataaattatcactcaa

SEQ ID NO: 99215 - DNA, 75 bp, synthetic construct
  source 1..75: mol_type = other DNA
cttcaacaactgaaacataatataaacgaatggattaatgaagaattcagttcctgtaattgcttatgggacaaa

SEQ ID NO: 99216 - DNA, 75 bp, synthetic construct
  source 1..75: mol_type = other DNA
gcgcaggcggtgatggtggcttacgcgatgggcggcgatcttgaccagctcgctgccaactacaacgtgacacgc

SEQ ID NO: 99217 - DNA, 75 bp, synthetic construct
  source 1..75: mol_type = other DNA
ttagccatccggtcacggtcgatctcgcggccgtggcgattaccattaacaccctttccactgacgatgtgatta

SEQ ID NO: 99218 - DNA, 75 bp, synthetic construct
  source 1..75: mol_type = other DNA
caatctgcctggcttgcgggtcgataccgtggcgggcgatgatgttattaacagcattgagcacaatcaggcgct

SEQ ID NO: 99219 - DNA, 75 bp, synthetic construct
  source 1..75: mol_type = other DNA
tggaaaggtatcttcttctgcttgatcgattcgttgataaactcgctgaatcaggtttctcagagcaacgaatta

SEQ ID NO: 99220 - DNA, 75 bp, synthetic construct
  source 1..75: mol_type = other DNA
gggatgcgcagggcgaaacgcaggtggtgcgtatttcctccctggacagcagctggtcgctgttccggccggaaa

SEQ ID NO: 99221 - DNA, 75 bp, synthetic construct
  source 1..75: mol_type = other DNA
tcgcgcaacggcatattcatatgtctccgctggatgccctgatttatggcgttacgcatggcgataaagtggcgg

SEQ ID NO: 99222 - DNA, 75 bp, synthetic construct
  source 1..75: mol_type = other DNA
tgcctgcaccgcagattgtggatgtgccggactttgaaacgctgtttgcagaacgtaaggcagaatttgtggcgc

SEQ ID NO: 99223 - DNA, 75 bp, synthetic construct
  source 1..75: mol_type = other DNA
tctcctagagcatttttggagtttttggcaaagatatttaccctgggttatgtggattttagcaaacgctccaac

SEQ ID NO: 99224 - DNA, 75 bp, synthetic construct
  source 1..75: mol_type = other DNA
gttgcggagagtcgagttccgctctccacaatcacaactttgtcacgatttattgaacggtcgaccgatcaacgc

SEQ ID NO: 99225 - DNA, 75 bp, synthetic construct
  source 1..75: mol_type = other DNA
aacaccgtctccggcgatgacattattaacgccgccgaacacggacaggcgctggtgatctccggttccagcact

SEQ ID NO: 99226 - DNA, 75 bp, synthetic construct
  source 1..75: mol_type = other DNA
tcgagaagcatctcgtcgccgaagtgaaaaaggctggtggggtcgcctttaagttcatatcacctggtcgccgct

SEQ ID NO: 99227 - DNA, 75 bp, synthetic construct
  source 1..75: mol_type = other DNA
aactcgattgctgggacaacgtgccggagtacgccttcgatgtaacgccgtataaaaatcgcgtctatcaaggct

SEQ ID NO: 99228 - DNA, 75 bp, synthetic construct
  source 1..75: mol_type = other DNA
gacgccgacagagtggaaactgctgtgggttaagctggaaggaaagccgcttccggcgcaggcactgaccctgaa

SEQ ID NO: 99229 - DNA, 75 bp, synthetic construct
  source 1..75: mol_type = other DNA
aaaggcaccaccattgcccgcagccactgcaatatcgaaccggtttccggcctgaaaaatctgcaaaatttgcag

SEQ ID NO: 99230 - DNA, 75 bp, synthetic construct
  source 1..75: mol_type = other DNA
tgcagtggcgggtgtgaaggaggcgcgttgctaccgcagctttgttgatcagcagccggaggactggacaccgcg

SEQ ID NO: 99231 - DNA, 75 bp, synthetic construct
  source 1..75: mol_type = other DNA
cgggcggtatgctggaaaccgcctttcagggagtgaatgcggttattggcagcatcagtaatctgttcaaaggcg

SEQ ID NO: 99232 - DNA, 75 bp, synthetic construct
  source 1..75: mol_type = other DNA
ttaccaaaggaaatttagttgtcgatgcccatatgggtggcttttttgcagcgcaaatgaaattcgctggatacg

SEQ ID NO: 99233 - DNA, 75 bp, synthetic construct
  source 1..75: mol_type = other DNA
caccaccacgaccgacgcctccggcaactggagcgtgacggttccggcattggcggtaaccgcactgggtcaggc

SEQ ID NO: 99234 - DNA, 75 bp, synthetic construct
  source 1..75: mol_type = other DNA
acccggaatcgcctgtgcgaagtccggctgaaggacggatacagggaagttacggcaacaatggcttacgaatcc

SEQ ID NO: 99235 - DNA, 75 bp, synthetic construct
  source 1..75: mol_type = other DNA
gaacaccacgtcttaagcacatgaagggggcacgactaagggtgtacggccttttacttgcacaggatcatgatg

SEQ ID NO: 99236 - DNA, 75 bp, synthetic construct
  source 1..75: mol_type = other DNA
gagcggttccgatcgcattctgaacctgatgggccgtacccatacggcgctggagtacaaagcgatcatccgtaa

SEQ ID NO: 99237 - DNA, 75 bp, synthetic construct
  source 1..75: mol_type = other DNA
cgccactcgccgcctgggtgaatgggctgtcgcctggggtgtgcgtaactttattcatatctcttctccctccct

SEQ ID NO: 99238 - DNA, 75 bp, synthetic construct
  source 1..75: mol_type = other DNA
ggctgggtggaaacgcccgggcattccgtcagtgacagtgcgaaggtttttgcctccgtcacacagatggcaatg

SEQ ID NO: 99239 - DNA, 75 bp, synthetic construct
  source 1..75: mol_type = other DNA
gaactccgaagtcgatgcactgattaaggtgctgccgcgcatgacggcaccgatgctgaccgagcaggaagtcgc

SEQ ID NO: 99240 - DNA, 75 bp, synthetic construct
  source 1..75: mol_type = other DNA
tgacatggcggctgaatgcaaaactgtacttttaccccggcccggaatccgaacctattctggcggcggctgaat

SEQ ID NO: 99241 - DNA, 75 bp, synthetic construct
  source 1..75: mol_type = other DNA
attgcgcgcaccggagcgccgctggtcgatacctccagcggcgtcgaaagcgcgccgggcgtcaaggataccgac

SEQ ID NO: 99242 - DNA, 75 bp, synthetic construct
  source 1..75: mol_type = other DNA
ctgggagaacaggtacaacatgtgctggatgagacccccttctcaggtcacctgtttatctttcgtggccgacgg

SEQ ID NO: 99243 - DNA, 75 bp, synthetic construct
  source 1..75: mol_type = other DNA
tgaacggtaaaaactacaccacaacgctggacgcctccggtaactggagtgtgggtattccggcggcggatgtca

SEQ ID NO: 99244 - DNA, 75 bp, synthetic construct
  source 1..75: mol_type = other DNA
atgatggggaaagtattcctgaatcagaaatctggagtgaacatcctgatcgaaacaaacacggtgttgttcttg

SEQ ID NO: 99245 - DNA, 75 bp, synthetic construct
  source 1..75: mol_type = other DNA
agatgataatctaagacattcaacaagcctttttattttggcatatggatgttattttcttctttttattccccc

SEQ ID NO: 99246 - DNA, 75 bp, synthetic construct
  source 1..75: mol_type = other DNA
ccgccagccataacgtgctggtcgacagcgcgctgcccggcgtgaccattaacccggtggcaaccgacgatatta

SEQ ID NO: 99247 - DNA, 75 bp, synthetic construct
  source 1..75: mol_type = other DNA
tcgtctccgtaaggataaaaagcgagaaaaggtgatgatcaatatcgcagcaatgactgttgatgcactcgctga

SEQ ID NO: 99248 - DNA, 75 bp, synthetic construct
  source 1..75: mol_type = other DNA
tggccacggaagttggatatattattcaatgactgtttcttttctgtctttaagttatgccatatataactggcg

SEQ ID NO: 99249 - DNA, 75 bp, synthetic construct
  source 1..75: mol_type = other DNA
gtgtcactttcgctttggcagcagtgtcttgcccgattgcaggatgagttaccagccacagaattcagtatgtgg

SEQ ID NO: 99250 - DNA, 75 bp, synthetic construct
  source 1..75: mol_type = other DNA
gaactttcaggatgacactataaaaattgcttacacatcagatggaattattgtggctatagataaagacgtatc

SEQ ID NO: 99251 - DNA, 75 bp, synthetic construct
  source 1..75: mol_type = other DNA
tggggataatacaatccattttactgccctagttaagaaagacacaagtggcaatgatgtagctgaaggtgcctt

SEQ ID NO: 99252 - DNA, 75 bp, synthetic construct
  source 1..75: mol_type = other DNA
atggcgacgactccggcggttgagctggaattgcaaattcttaatgccatcttccttggtattctctgtggtatc

SEQ ID NO: 99253 - DNA, 75 bp, synthetic construct
  source 1..75: mol_type = other DNA
taaggagtggtcaaaacaggatcgtgacacgttcgatcctacacatgatattgacctctactgcgacctggccag

SEQ ID NO: 99254 - DNA, 75 bp, synthetic construct
  source 1..75: mol_type = other DNA
cggcgagaccagaatggtgttcaccacctggtgctgtctgtgctggctggccgggttggggatgctgctggaaga

SEQ ID NO: 99255 - DNA, 75 bp, synthetic construct
  source 1..75: mol_type = other DNA
gttgccgacagcagctcgtggcaatgggtgacttcaatgcccataccctgctgcccggagaggagtggaccaggc

SEQ ID NO: 99256 - DNA, 75 bp, synthetic construct
  source 1..75: mol_type = other DNA
tttttctggttttcctgtttattagcgtaagtcctgacacaaacgccgccactgtaaatcagccccttaaatgcg

SEQ ID NO: 99257 - DNA, 75 bp, synthetic construct
  source 1..75: mol_type = other DNA
gaacagttagaaaagctgccagcagagtgtaaatcagctgaagatagtgagttgttaccctgggctgcagtgggc

SEQ ID NO: 99258 - DNA, 75 bp, synthetic construct
  source 1..75: mol_type = other DNA
caaatcgccgggctgatatttcgggtaaatggatgttcaaagatggcgtagtgataaagcgaacttataccgggg

SEQ ID NO: 99259 - DNA, 75 bp, synthetic construct
  source 1..75: mol_type = other DNA
cgctggcgcatctgggtaaagtgcttattccgtggccgaaccggatcgccaacggctgttaccgctatcaggggc

SEQ ID NO: 99260 - DNA, 75 bp, synthetic construct
  source 1..75: mol_type = other DNA
tctgtgttgcaatggcgttaagcagccagacctgggcagcagatacgtcgatagcggaaacatcggatgagtctc

SEQ ID NO: 99261 - DNA, 75 bp, synthetic construct
  source 1..75: mol_type = other DNA
gaaagtggtgctacgtaccgtgcgtgatgtagtggtgtcagttgcgcggaccatctgggactggattttcttctg

SEQ ID NO: 99262 - DNA, 75 bp, synthetic construct
  source 1..75: mol_type = other DNA
agcgggattcctggagcgccaaactccagggtttactggcaagttgccagcccgcagccattatcactggtgatg

SEQ ID NO: 99263 - DNA, 75 bp, synthetic construct
  source 1..75: mol_type = other DNA
gccgggacaggctctgaatgatttgcttctctccggcggctcctccgggcagttcgatgcgctgtacgaaaaata

SEQ ID NO: 99264 - DNA, 75 bp, synthetic construct
  source 1..75: mol_type = other DNA
gtaagaactggtacgaagaacaaaagtattttgctgatgacacgataaaaatagcgtacgacaaagataatatca

SEQ ID NO: 99265 - DNA, 75 bp, synthetic construct
  source 1..75: mol_type = other DNA
gtgaaacctttgccatcgcgcttgaaggcacggaaggtaaccggaaacagatggccggctttgagtcagcctacg

SEQ ID NO: 99266 - DNA, 75 bp, synthetic construct
  source 1..75: mol_type = other DNA
atttgcgattagtgtgctccagagtgatccggatgaagttgtcaaaatgctggggatgtatatcccttatctatg

SEQ ID NO: 99267 - DNA, 75 bp, synthetic construct
  source 1..75: mol_type = other DNA
cacggcgtcaatattagtgatctgactactgacgaaaagcgggaactggtgaaagcaatgaatcattttcgtgca

SEQ ID NO: 99268 - DNA, 75 bp, synthetic construct
  source 1..75: mol_type = other DNA
tgacgatccgttctggaaaacacactacccgcccaatggctggaactgccgctgccgtgtgcggccattgtctca

SEQ ID NO: 99269 - DNA, 75 bp, synthetic construct
  source 1..75: mol_type = other DNA
agtcgaagaggctccgaccgagtggcatgactggaaaaatcgcattagttacagcaaatcaagacatggccgtgc

SEQ ID NO: 99270 - DNA, 75 bp, synthetic construct
  source 1..75: mol_type = other DNA
gttgttacggtgccattcaggatgcgcaggcgttgtccgaaggtgtggtggcttcttcccgttacccgaaacact

SEQ ID NO: 99271 - DNA, 75 bp, synthetic construct
  source 1..75: mol_type = other DNA
agggtatgccacttccaatctatctggtgcatacaatatgttttctgagttctggaatgttgctgtctcagctgc

SEQ ID NO: 99272 - DNA, 75 bp, synthetic construct
  source 1..75: mol_type = other DNA
tgatatgcagtttctgttgtgggatgcacagcgccgtgctggcatcagcgatgctgaaattaccgctgctatgga

SEQ ID NO: 99273 - DNA, 75 bp, synthetic construct
  source 1..75: mol_type = other DNA
gaaaatgcgtagaccacacattgttcccttatctacacaggtaattaccctatttaaacaactcaaacctattac

SEQ ID NO: 99274 - DNA, 75 bp, synthetic construct
  source 1..75: mol_type = other DNA
tcacgcacaatatttttctcaaaggaaaacgatgattcaatggtactctgattatcttttaggggatttgctatg

SEQ ID NO: 99275 - DNA, 75 bp, synthetic construct
  source 1..75: mol_type = other DNA
tgtgattttgtggcgaatcagcaggcggttttcctcggtggtcactacatccttcagggcagcaggcacaggtga

SEQ ID NO: 99276 - DNA, 75 bp, synthetic construct
  source 1..75: mol_type = other DNA
tctgcaattcgttatccgaaacactggttagaggtgggggacccggggtgcgaatataccatgacgcagtctgcg

SEQ ID NO: 99277 - DNA, 75 bp, synthetic construct
  source 1..75: mol_type = other DNA
tcggtaagtggtgtcgaccaaattacaactcctttgttgcaactttttgtcataggatagcaaacgatcaagata

SEQ ID NO: 99278 - DNA, 75 bp, synthetic construct
  source 1..75: mol_type = other DNA
tcactctgtaatgctctctttcagggagaggtaacacctgtcagtaatgttgactcttgcacccgtgatgttctg

SEQ ID NO: 99279 - DNA, 75 bp, synthetic construct
  source 1..75: mol_type = other DNA
tcctgtacagcggagcgacgcagcacctcacaccacggcgctgatggttgttattcgttttatggagtcaaagaa

SEQ ID NO: 99280 - DNA, 75 bp, synthetic construct
  source 1..75: mol_type = other DNA
gcgggccggtgagacatcgctggaaacggctatcagtcatcagaagtccgcacttcacacgccggcacagcaggc

SEQ ID NO: 99281 - DNA, 75 bp, synthetic construct
  source 1..75: mol_type = other DNA
ttaccgggttatcaatatggataagctgaaatcggatatccggggcggaatgcttgaggtgctggaaggacaaat

SEQ ID NO: 99282 - DNA, 75 bp, synthetic construct
  source 1..75: mol_type = other DNA
tgataaaaatgaagtacgtgatgctgcattgattgctgcagcacaaaaagtagagcactatgaaattgccagtta

SEQ ID NO: 99283 - DNA, 75 bp, synthetic construct
  source 1..75: mol_type = other DNA
gctggtgagctggctgaaaggtcacaagattgaccatgcgcatatctgcatcgaagcgaccggcacctatatgga

SEQ ID NO: 99284 - DNA, 75 bp, synthetic construct
  source 1..75: mol_type = other DNA
tggagccgccggatgctcggcaccacccagcgtattctggtagaagggacttcgcgtaagagcatcatggagctt

SEQ ID NO: 99285 - DNA, 75 bp, synthetic construct
  source 1..75: mol_type = other DNA
ttcgtgagcaactcatgattgccactgcggatctcagtggggcgacaaaaggtcaactggaagcctggcaggaaa

SEQ ID NO: 99286 - DNA, 75 bp, synthetic construct
  source 1..75: mol_type = other DNA
catgaacagtaagcaatggcccggtaaagccgctattggtcgtctgaaagatgacgaactggcgcaatataattt

SEQ ID NO: 99287 - DNA, 75 bp, synthetic construct
  source 1..75: mol_type = other DNA
ttatatcgtgccggacccgcagaaaaagcgcggccttgaacggctgtttgacagcatcagacacgttatcgttaa

SEQ ID NO: 99288 - DNA, 75 bp, synthetic construct
  source 1..75: mol_type = other DNA
aaaggtactggtaaaaccgcatactctatctatctctcaaataacaatattaacaatacgctagctacaactaaa

SEQ ID NO: 99289 - DNA, 75 bp, synthetic construct
  source 1..75: mol_type = other DNA
gctggattatctggacgcactggaactggttgatccctccagtgctccagatattgaatggcctacgcctccggc

SEQ ID NO: 99290 - DNA, 75 bp, synthetic construct
  source 1..75: mol_type = other DNA
agcgttgcgcgtactgtggtcatacagcgaaagagaaccgcctgtcacaaagtaaattcagatgccaggtatgtg

SEQ ID NO: 99291 - DNA, 75 bp, synthetic construct
  source 1..75: mol_type = other DNA
gcactttggcctcattccacagtgggtcaccctggagccccgtatcttcggctggatggaccgtctttgcgaaaa

SEQ ID NO: 99292 - DNA, 75 bp, synthetic construct
  source 1..75: mol_type = other DNA
gaatattactatgtgatcgcgcttgctggtcagtccaatggtatgtcatacggtgagggactgccattaccggat

SEQ ID NO: 99293 - DNA, 75 bp, synthetic construct
  source 1..75: mol_type = other DNA
caaagtgctgggtaaccagggattaatcagcgcgaagacgctggaagtgaatggcgattcgctcagcaacagtgg

SEQ ID NO: 99294 - DNA, 75 bp, synthetic construct
  source 1..75: mol_type = other DNA
caaacagatcattgagcaggcagaggcgtttcttgctgcctacggcatgagccgttttgcgcccgttgattatga

SEQ ID NO: 99295 - DNA, 75 bp, synthetic construct
  source 1..75: mol_type = other DNA
tgtgggtcaacgctgtacatgcggaaattgctctcagcggttgtgggatttattactcgacgccacacagcaagg

SEQ ID NO: 99296 - DNA, 75 bp, synthetic construct
  source 1..75: mol_type = other DNA
catcatatttcagccctggtatcagtaggactcgtcacacaaaaccgggagagtcgaacgctcatgtgcgtctct

SEQ ID NO: 99297 - DNA, 75 bp, synthetic construct
  source 1..75: mol_type = other DNA
tggctcgcggctcaggacgtgaaagcagagctggcagggcgtgagacgtacgaatatcaggcgctggcgtcgctg

SEQ ID NO: 99298 - DNA, 75 bp, synthetic construct
  source 1..75: mol_type = other DNA
tgtagtgatgaagagaaggggctggctctgcagtgggtttctgaactgacagatgaactcatggcaaaaatcaga

SEQ ID NO: 99299 - DNA, 75 bp, synthetic construct
  source 1..75: mol_type = other DNA
aatacatatgaccttgaagtaatatataaaaacaacgatgacagctatcgttttgaatattacttgccaatatgt

SEQ ID NO: 99300 - DNA, 75 bp, synthetic construct
  source 1..75: mol_type = other DNA
ccagaagaacaggttgatccgcgcaaagcggcagttgccgcggctattgcccgcgttcaggccaaaaaagccgcc

SEQ ID NO: 99301 - DNA, 75 bp, synthetic construct
  source 1..75: mol_type = other DNA
ggtgacaccctccgggttcaggcagacaaactgagtaccgcagcgggcgcacaacttcagagcggcaaaaatctc

SEQ ID NO: 99302 - DNA, 75 bp, synthetic construct
  source 1..75: mol_type = other DNA
tttaaaagctggcaaagatactgtctgctatttccttgatgacgcatttgaaaataatgttgctaaaacaaatct

SEQ ID NO: 99303 - DNA, 75 bp, synthetic construct
  source 1..75: mol_type = other DNA
tggatgagaaccccttctcaggtcacctgtttatctttcgtgaccgacggggtgacactgttaaaatactctggg

SEQ ID NO: 99304 - DNA, 75 bp, synthetic construct
  source 1..75: mol_type = other DNA
tcgcttgcggcaaagatgctggtagacctggccccggatgagttagtccgtaaacgcctgcggcagtggtttgaa

SEQ ID NO: 99305 - DNA, 75 bp, synthetic construct
  source 1..75: mol_type = other DNA
cgggattatttcatcctcagagaacggttgatgaccatgcagaagcagctggaaggggcacaggactatatccgc

SEQ ID NO: 99306 - DNA, 75 bp, synthetic construct
  source 1..75: mol_type = other DNA
aggtgatcgacgaaatctgttattacatgagctgccagaacgcagttttcctttgcggccagtttatccggcagg

SEQ ID NO: 99307 - DNA, 75 bp, synthetic construct
  source 1..75: mol_type = other DNA
gtcagttaaaaacggctattgagcaaggggaactgaaacctggcgcaaggctaccttccagccgaacctggtcgc

SEQ ID NO: 99308 - DNA, 75 bp, synthetic construct
  source 1..75: mol_type = other DNA
tgaggccaccagcgaacaggaagcgcgtcagcaatctcctgatggctgcgtgatggtattcgctgcccgtattcg

SEQ ID NO: 99309 - DNA, 75 bp, synthetic construct
  source 1..75: mol_type = other DNA
gtgaacggcgacccggcagagcagtggcagtatgatgagcacgggtggttaaccaccctcagccataccagtgaa

SEQ ID NO: 99310 - DNA, 75 bp, synthetic construct
  source 1..75: mol_type = other DNA
ctgaaacagtgggaggccctgaacgtatactgcagtaatggttgggtggaaatcgacaacaacatcgcagagaac

SEQ ID NO: 99311 - DNA, 75 bp, synthetic construct
  source 1..75: mol_type = other DNA
accggcaaataccgctggcacggcagtgctgaagcgtataccggtcgtgaagtgcaggatattcccggtgtgctg

SEQ ID NO: 99312 - DNA, 75 bp, synthetic construct
  source 1..75: mol_type = other DNA
tgagctgaagcagtcgatcgccaccatcgctgacatgcagcagcgtcagcgtgatgttgctgcactcgatgcaaa

SEQ ID NO: 99313 - DNA, 75 bp, synthetic construct
  source 1..75: mol_type = other DNA
tatttctgagcgggtgagctggtttgacggccgcccggtttttattgatgaacaggaactgcctgctgttgctgt

SEQ ID NO: 99314 - DNA, 75 bp, synthetic construct
  source 1..75: mol_type = other DNA
acggaagcgttatacgcggcgattaccgcactggtgcgcaatggcgatgaagtgatttgttttgatcccagctat

SEQ ID NO: 99315 - DNA, 75 bp, synthetic construct
  source 1..75: mol_type = other DNA
aagccgccggtattgccgcctgtctgatgacgtacagccatcatgcctgtcgtacggagaattatgccatgacgg

SEQ ID NO: 99316 - DNA, 75 bp, synthetic construct
  source 1..75: mol_type = other DNA
atcctttcaccgcacccggacagcgccttcgcggcgatgggggatgtggtggcactgagcgcagaggacatcact

SEQ ID NO: 99317 - DNA, 75 bp, synthetic construct
  source 1..75: mol_type = other DNA
cccgcctcagattgaaggttacatcctcaccggctctggcgacacatggatcaacagcaaacctgccgcgcgggc

SEQ ID NO: 99318 - DNA, 75 bp, synthetic construct
  source 1..75: mol_type = other DNA
ttgtaaaaacacatggttgttgtatcgctttttatcgatggcttatggagaggagatggcctttttattgaataa

SEQ ID NO: 99319 - DNA, 75 bp, synthetic construct
  source 1..75: mol_type = other DNA
aacgctggcgaaagccttgcgtgagtttgctgacgttcaggtggtcgcccccgatcgtaaccgcagcggcgcttc

SEQ ID NO: 99320 - DNA, 75 bp, synthetic construct
  source 1..75: mol_type = other DNA
tctccggatctgtgggaagaaggaataaatgctgggctactaaactatagttttaatggtaattctattaataat

SEQ ID NO: 99321 - DNA, 75 bp, synthetic construct
  source 1..75: mol_type = other DNA
ttatccatatgcatcacctggtgccgctttcagccattaaagaggattaccagctggatccagttaatgatttgc

SEQ ID NO: 99322 - DNA, 75 bp, synthetic construct
  source 1..75: mol_type = other DNA
aaaaccgggcgtcatttatcctggcgaatggggatatcgcactctcgggcagagagttaagcaatcagagctggc

SEQ ID NO: 99323 - DNA, 75 bp, synthetic construct
  source 1..75: mol_type = other DNA
tctgcatttgacgttctgattagcgatcgtccgttaccggcagattatgttacgcactgccggaatgcttctgta

SEQ ID NO: 99324 - DNA, 75 bp, synthetic construct
  source 1..75: mol_type = other DNA
ttcaggtgttacaggagtggtgtccaacttttcctgggtattatctttactaccccagccgcaagcagcatccgc

SEQ ID NO: 99325 - DNA, 75 bp, synthetic construct
  source 1..75: mol_type = other DNA
aaccgctgggggaaagcatctctgaacaactggatattatcaacaccgcgttcagggtaatcgaaacggtccgtc

SEQ ID NO: 99326 - DNA, 75 bp, synthetic construct
  source 1..75: mol_type = other DNA
gatgattcgggccgatcaaattaatgaagcctatgagcgaatgctgcgtggtgatgtgaaatatcgttttgttat

SEQ ID NO: 99327 - DNA, 75 bp, synthetic construct
  source 1..75: mol_type = other DNA
aacgaactcaaaggggaaagactgagagaacctaacgaagcttttaatccttcaaatctagcaagaggatatcaa

SEQ ID NO: 99328 - DNA, 75 bp, synthetic construct
  source 1..75: mol_type = other DNA
ggacgtagcggctggccgtgccgttctccgtcaggcaggactggccgggggagacagtccggcacggtttattgc

SEQ ID NO: 99329 - DNA, 75 bp, synthetic construct
  source 1..75: mol_type = other DNA
gatgtgaacctggtggcagagtctgccggcgcaggcgacagctatacgtcgaagaaaaagaaagagattaacgag

SEQ ID NO: 99330 - DNA, 75 bp, synthetic construct
  source 1..75: mol_type = other DNA
ccgcagggtgatgtggtgctggataagacgcaggcggcatcctgtactgaatggagcatcatcaacgggggcacg

SEQ ID NO: 99331 - DNA, 75 bp, synthetic construct
  source 1..75: mol_type = other DNA
gctgttcctcgccgctagttgcccgagagtgcaatcaacgaccattaccaccagcctggatgatgctaccgcccc

SEQ ID NO: 99332 - DNA, 75 bp, synthetic construct
  source 1..75: mol_type = other DNA
atcagccagccgacaaaatgacggaggttatcatttttgcgggtagtgatgcctgggcacatgcgaagcagtggc

SEQ ID NO: 99333 - DNA, 75 bp, synthetic construct
  source 1..75: mol_type = other DNA
gagaccattgggattacatggccggaaatcgacagcgagatcctcacctccgccaaagacagcgttgccaaatcc

SEQ ID NO: 99334 - DNA, 75 bp, synthetic construct
  source 1..75: mol_type = other DNA
gtgcaaccagcccggcacctgcagaggtggtgcttacggtcctaagccgtgaaggcgacggaacagcagaaaaag

SEQ ID NO: 99335 - DNA, 75 bp, synthetic construct
  source 1..75: mol_type = other DNA
attactgagatgcagcagcgccagcgtgatgtttctgcgctcgatgcgaaatacaccggagaacttgcaaatgct

SEQ ID NO: 99336 - DNA, 75 bp, synthetic construct
  source 1..75: mol_type = other DNA
aaatcggtcacccacagcgatgctgcgatgacgctgaatgtgacaacagtggcgctggacggggaaaacagtgcc

SEQ ID NO: 99337 - DNA, 75 bp, synthetic construct
  source 1..75: mol_type = other DNA
tgaaaattcattcgctgaaaatggaatgtctccacggagaacactattatccatcgggaaatagtgcgggcaaca

SEQ ID NO: 99338 - DNA, 75 bp, synthetic construct
  source 1..75: mol_type = other DNA
gaccttggtgagaacaacagcctgatgaatgcacagcttgcccgggtgggcggccttgccacttccagtctccgt

SEQ ID NO: 99339 - DNA, 75 bp, synthetic construct
  source 1..75: mol_type = other DNA
acagcgcagatggcgcaggataaccagatggcacgatatggcgttaaccgacctgataatcccaacagtaatacg

SEQ ID NO: 99340 - DNA, 75 bp, synthetic construct
  source 1..75: mol_type = other DNA
accagccagccgacaaaatgacggaggttatcatctttgcgggtagtgatgcgtggagccatgcgaaagagtggc

SEQ ID NO: 99341 - DNA, 75 bp, synthetic construct
  source 1..75: mol_type = other DNA
cgatctgtggctggcaccgaaacagggcaccgatgcggcaatggcgctggcgatgggccacgtaatgctgcgtga

SEQ ID NO: 99342 - DNA, 75 bp, synthetic construct
  source 1..75: mol_type = other DNA
tctcccactatgtttttgtcgattatgcaaaacagtaatgggttgcagcattttctggtgggaataagtaaagcc

SEQ ID NO: 99343 - DNA, 75 bp, synthetic construct
  source 1..75: mol_type = other DNA
ccatgatggcgtcaatcactccgaatcttgcttcagctgcggagatgatccagaccaagtacgcttgcgaaggtg

SEQ ID NO: 99344 - DNA, 75 bp, synthetic construct
  source 1..75: mol_type = other DNA
caatgcaggaatatatggatcgcggctatttcacagtgaaagaaacagcggtcaacacaaatcacggaatacaga

SEQ ID NO: 99345 - DNA, 75 bp, synthetic construct
  source 1..75: mol_type = other DNA
attgagcgaaataaggatttatttgaaaaacgtagccagcaaattgcctgcatcacctttactaacgtggcgaag

SEQ ID NO: 99346 - DNA, 75 bp, synthetic construct
  source 1..75: mol_type = other DNA
tcggtgaaaaaatcttgatgatccggaaaagtgagaggcttacaaggaagcaattctttgagcttacagggattc

SEQ ID NO: 99347 - DNA, 75 bp, synthetic construct
  source 1..75: mol_type = other DNA
gcttcatccatggcaatcgctgaactttcagcattgacaagtttatcttttgatgcagttccgaatgtatttgct

SEQ ID NO: 99348 - DNA, 75 bp, synthetic construct
  source 1..75: mol_type = other DNA
ttgccctgaatgtgacgaaccgctgcgccatatccgcgatgcggtgagtgaaaaactggagtatatccccgcgca

SEQ ID NO: 99349 - DNA, 75 bp, synthetic construct
  source 1..75: mol_type = other DNA
ggctgtgctgacgaaaatcaaagagatcagtggtgaccatgaactcgtatttattggcgatcataatttccgcaa

SEQ ID NO: 99350 - DNA, 75 bp, synthetic construct
  source 1..75: mol_type = other DNA
gatatgcgggagaggcttcagtctgcttctgcaggtgatttactgaacacgcttaaagacaaaatggcgatagcg

SEQ ID NO: 99351 - DNA, 75 bp, synthetic construct
  source 1..75: mol_type = other DNA
aggcgttacagattgaaaccctgctggcagtggctggtgttaaggaagccagtttttgtgacgagaacggtgaac

SEQ ID NO: 99352 - DNA, 75 bp, synthetic construct
  source 1..75: mol_type = other DNA
atgcgagggaaaaaacgcattgggttattgtttttgctgatagcggttgtggttggtggcggcgggttattgctg

SEQ ID NO: 99353 - DNA, 75 bp, synthetic construct
  source 1..75: mol_type = other DNA
cgaccaactactatgcgccacagtctgagcgcagtattctctggaatgacccagagataaatattgaatggccaa

SEQ ID NO: 99354 - DNA, 75 bp, synthetic construct
  source 1..75: mol_type = other DNA
gccggacgcgcaacggctgacctggtacggtacagcgttaggcatcgccaacgaggcagaggcgcacaatgacgg

SEQ ID NO: 99355 - DNA, 75 bp, synthetic construct
  source 1..75: mol_type = other DNA
aaattacaggtggcgaagtgtcgctgtcgctgctgaccacgcaggcgtatacaggacgcccctggcctctgattg

SEQ ID NO: 99356 - DNA, 75 bp, synthetic construct
  source 1..75: mol_type = other DNA
ctgtaccaggccggagaactggatttggtggagaccaaaaagattggtcagaagctggcggcggcagatattcag

SEQ ID NO: 99357 - DNA, 75 bp, synthetic construct
  source 1..75: mol_type = other DNA
agacactaccagtggtcattgccatcaatcttcttgcgcttattggtattttaagtagcgcctttagtgttgtcc

SEQ ID NO: 99358 - DNA, 75 bp, synthetic construct
  source 1..75: mol_type = other DNA
tggaccgcgtccgcaggtcaaagaggggattggcccgcagttgccacgaccgaaacgtatccgcgtgccaactcg

SEQ ID NO: 99359 - DNA, 75 bp, synthetic construct
  source 1..75: mol_type = other DNA
gtgaaggccgtccgtggaatcccggtgccatcaccggtggccgcgtgtggggggatatcccggacaacagcgtcc

SEQ ID NO: 99360 - DNA, 75 bp, synthetic construct
  source 1..75: mol_type = other DNA
atccattagttattcaaccatttatcgtggtatttattcagggttgtttgatataggcgaacgcaaagccagtcg

SEQ ID NO: 99361 - DNA, 75 bp, synthetic construct
  source 1..75: mol_type = other DNA
ggatggcaacgggcgcaccagtcgggcgctgttttactggtatatgctgaaatcgggctacgatgtctttaaata

SEQ ID NO: 99362 - DNA, 75 bp, synthetic construct
  source 1..75: mol_type = other DNA
gtcgcggtcagtacctgacgccgagcgagcataatccggttggcttgctggaagaggcgctggtggatgtgattg

SEQ ID NO: 99363 - DNA, 75 bp, synthetic construct
  source 1..75: mol_type = other DNA
cgttcgcgcagcgattgccgatggcgcaaaaccgtcagatctgaatcgtcctggccacgttttcccacttcgcgc

SEQ ID NO: 99364 - DNA, 75 bp, synthetic construct
  source 1..75: mol_type = other DNA
gcaaacagagtcagagaacgccttcgaaaagatagccagagagtggcatcaacttaaatctgctaaatggtcggc

SEQ ID NO: 99365 - DNA, 75 bp, synthetic construct
  source 1..75: mol_type = other DNA
cgttcgcgcagcgattgccgatggcgcaaaaccttctgatctgaatcgcccgggccacgttttcccacttcgcgc

SEQ ID NO: 99366 - DNA, 75 bp, synthetic construct
  source 1..75: mol_type = other DNA
tacactcagcgcattgagcgacataacctgaatctgagactacatctggcaaggctgggcaggaagtcactgtcg

SEQ ID NO: 99367 - DNA, 75 bp, synthetic construct
  source 1..75: mol_type = other DNA
aactcgaacgcggcgatgtacttccccatgacatagttgaatcctcagcgactgcatggcgggataaaatgagca

SEQ ID NO: 99368 - DNA, 75 bp, synthetic construct
  source 1..75: mol_type = other DNA
ctttcatccagaacactcatgaatgagatctttgatgctgaaattattgatgataatgaaaacttcaaagattcc

SEQ ID NO: 99369 - DNA, 75 bp, synthetic construct
  source 1..75: mol_type = other DNA
gctgaaatggctattttgcaggaaattatcaatgcccggtacgaaagcatcctgcccaccatcctgatcagcaac

SEQ ID NO: 99370 - DNA, 75 bp, synthetic construct
  source 1..75: mol_type = other DNA
cgccagaaaaagaaaattaacaatgccattatttacccggtactttctttatatccgacaggaatgaacaaaaag

SEQ ID NO: 99371 - DNA, 75 bp, synthetic construct
  source 1..75: mol_type = other DNA
cagaagaagattgctatgcaggctgatattgagcagttagtgaagatttcaacgaagtacgcaaaggtgctttaa

SEQ ID NO: 99372 - DNA, 75 bp, synthetic construct
  source 1..75: mol_type = other DNA
attctttgcggattattcgctttatccaggcagcaagagaatcatcgccgtcctgttgttgtgccttttccatct

SEQ ID NO: 99373 - DNA, 75 bp, synthetic construct
  source 1..75: mol_type = other DNA
ctttcgtttttgtgtgttgacacgttaattacacctcatgtaatgtatttatgtgtaatgacacattacacacaa

SEQ ID NO: 99374 - DNA, 75 bp, synthetic construct
  source 1..75: mol_type = other DNA
cggaagccctttatcttggtcgccagaacgaacacacgacgcagcgccagcacatgctcgcctggctggaaagcc

SEQ ID NO: 99375 - DNA, 75 bp, synthetic construct
  source 1..75: mol_type = other DNA
ctccgatccaaaaggtgcaaggggtgatttcagttttgtggatatcgacttctggaacaaaactcagcatcgctt

SEQ ID NO: 99376 - DNA, 75 bp, synthetic construct
  source 1..75: mol_type = other DNA
gggaacatttttgctgcagtagacgaaaagacttctgaactattcttttttacagttacaaaagatatgcatatc

SEQ ID NO: 99377 - DNA, 75 bp, synthetic construct
  source 1..75: mol_type = other DNA
gtggatagctatgcagatcctgtgtaccccaagatgcgctatttttgcggttcgcgaaggtcaactgactcgctg

SEQ ID NO: 99378 - DNA, 75 bp, synthetic construct
  source 1..75: mol_type = other DNA
ggtgatgtgcaaaagtgtgatctggtgactctgctcaaacgttttggcaaatttggccgcattttgtgggagcgt

SEQ ID NO: 99379 - DNA, 75 bp, synthetic construct
  source 1..75: mol_type = other DNA
cgcgagccgcaaaatctgtttccgctttatcatcacaacgtagagcgcagcctgctgtgggatgttctacagcgt

SEQ ID NO: 99380 - DNA, 75 bp, synthetic construct
  source 1..75: mol_type = other DNA
gtggctgaattgcagaaggtggacgactggttgagtgccttgctggcgaatctggagccagccgcaagaagccgt

SEQ ID NO: 99381 - DNA, 75 bp, synthetic construct
  source 1..75: mol_type = other DNA
ggtggatttcagggaagtttaaccggacgcgaaaacgtaaaatttgttgcgcggttatacgcgaagcaagaagaa

SEQ ID NO: 99382 - DNA, 75 bp, synthetic construct
  source 1..75: mol_type = other DNA
tctgcaacgggtattctgctgatttgcagtggtttactactcatccctcggcaaaaaacattacctatccaggtg

SEQ ID NO: 99383 - DNA, 75 bp, synthetic construct
  source 1..75: mol_type = other DNA
ctttttctacatcatcatggcggcgggctgttttgtctcttgaagaacatcataaagcctggttgttgtggtgtt

SEQ ID NO: 99384 - DNA, 75 bp, synthetic construct
  source 1..75: mol_type = other DNA
gccctttcgcctgaccttgctgcgctgaccgctatcagcaaacagattggctgcaatggtttcttcccgttccag

SEQ ID NO: 99385 - DNA, 75 bp, synthetic construct
  source 1..75: mol_type = other DNA
ggtggtggcaagtgaactgcacggcgaacagccacaggcggtgccaggacggcagggagcggggacggcgctgga

SEQ ID NO: 99386 - DNA, 75 bp, synthetic construct
  source 1..75: mol_type = other DNA
ttggccacctgaacagaggtgatatgctcacctcagaacaacacaggtgccataatgaaaaaaagaaatttcagc

SEQ ID NO: 99387 - DNA, 75 bp, synthetic construct
  source 1..75: mol_type = other DNA
gaacgacgatgaggacgggcatgacattgattatcttgatccatctgaagtttacgcgcttgggcgaacagctgg

SEQ ID NO: 99388 - DNA, 75 bp, synthetic construct
  source 1..75: mol_type = other DNA
agctgtcatactgttctggcctgtgaccctgccggctgcaactgacattgctgctggcagactgaaaaagcgggg

SEQ ID NO: 99389 - DNA, 75 bp, synthetic construct
  source 1..75: mol_type = other DNA
gcgctggcggcggagaatgcaaagctgaagaagttctgcaaagacgctgcattcgatgccgattacgaagcagag

SEQ ID NO: 99390 - DNA, 75 bp, synthetic construct
  source 1..75: mol_type = other DNA
acgctgaactcaacgcaattgctgatgaaagaatgaaaaatccagacattgtaagggttaacctggatgatttat

SEQ ID NO: 99391 - DNA, 75 bp, synthetic construct
  source 1..75: mol_type = other DNA
tggacgccattgagctcagaatgggcgaactgcgtcgctatgtcatcaccatgatcgacgaatgcagcaattacg

SEQ ID NO: 99392 - DNA, 75 bp, synthetic construct
  source 1..75: mol_type = other DNA
ttagctgaaaagaatctacttgagcgtcatagcaaaaaattaaacagatttaagcaagagcttgctaaccagctt

SEQ ID NO: 99393 - DNA, 75 bp, synthetic construct
  source 1..75: mol_type = other DNA
cagagcatttagatgagcgtaggctgatggtgcagtggtgggctgattatttagatataaatagaatgcaatatg

SEQ ID NO: 99394 - DNA, 75 bp, synthetic construct
  source 1..75: mol_type = other DNA
aaccttgagttattacgcacagtacgcgagcgcaatccgcacgcctacattatttataaaccgcacccggatgta

SEQ ID NO: 99395 - DNA, 75 bp, synthetic construct
  source 1..75: mol_type = other DNA
agcaaagcgcgacgaagctaaaaagctgttagtgcagggcattgacccaaaagccgaacagaaagaagctcaggc

SEQ ID NO: 99396 - DNA, 75 bp, synthetic construct
  source 1..75: mol_type = other DNA
aattaagggtgtacgttattcgtaccgtggtatgaagatgaaagaagagcatatcgttcctctcagtcggcaggc

SEQ ID NO: 99397 - DNA, 75 bp, synthetic construct
  source 1..75: mol_type = other DNA
acatttccctgaactatgtctgtggagaatcatctgaagagattatggcctggtgttatgccagttacttcacat

SEQ ID NO: 99398 - DNA, 75 bp, synthetic construct
  source 1..75: mol_type = other DNA
atgcccggcagtgcttttgccgttacgcaccacgccttcagtagcggagcaggaaggacatctgatggaaatgga

SEQ ID NO: 99399 - DNA, 75 bp, synthetic construct
  source 1..75: mol_type = other DNA
ctggagtggcatcaggcgctgctgcgcggtgaaatgccgcagaccatcggcggcggtatcggccagtctcgtttg

SEQ ID NO: 99400 - DNA, 75 bp, synthetic construct
  source 1..75: mol_type = other DNA
ccagtaacaagcgatggagtgaagaccatcgatcgcgcgttcttcgctatcttgagctttatatcttccctcata

SEQ ID NO: 99401 - DNA, 75 bp, synthetic construct
  source 1..75: mol_type = other DNA
cagatggtgaaggaggcggtaagccatattcctgttccgcgtgatggtcgtgactacgatccggatgttctgcag

SEQ ID NO: 99402 - DNA, 75 bp, synthetic construct
  source 1..75: mol_type = other DNA
aactgtccattattcgtgcactgggagaagaattctccacagtgctggcggatttacagcgcacatttgagggga

SEQ ID NO: 99403 - DNA, 75 bp, synthetic construct
  source 1..75: mol_type = other DNA
tgcgcagaagagctctttacctcttcaggttcagcaatgtgtagatgatttactggaacacgttgatcgcattga

SEQ ID NO: 99404 - DNA, 75 bp, synthetic construct
  source 1..75: mol_type = other DNA
tgggacgcacgggatatgtcgcggcaaatcgagttaaatatcggcaaagatctccagtttatccgtgtcaacggt

SEQ ID NO: 99405 - DNA, 75 bp, synthetic construct
  source 1..75: mol_type = other DNA
tccgatcatttctcgtcatacggcgattatcccgcgtaataaagaccggattggcgaaaatctcggccagttcgt

SEQ ID NO: 99406 - DNA, 75 bp, synthetic construct
  source 1..75: mol_type = other DNA
gatgcagataaagctaattctttattggactggaaagccgaacaaactctagaacagatgttattggactcgtgg

SEQ ID NO: 99407 - DNA, 75 bp, synthetic construct
  source 1..75: mol_type = other DNA
gaattctttgcttgatgatatcagccgcgatcgtgcgcatcagatccgccatgcgtttgatcgcgccacctttgc

SEQ ID NO: 99408 - DNA, 75 bp, synthetic construct
  source 1..75: mol_type = other DNA
gtaattgtctgcgcatcaactgcgctttgccgctcagcgaaacctatcgcgaagcactgaagcaaattggcgagg

SEQ ID NO: 99409 - DNA, 75 bp, synthetic construct
  source 1..75: mol_type = other DNA
aacgcccagcctgaaaccgctgtggcgggagctaagccgggtggtgcagcataatctgcaaaccgttctcggtta

SEQ ID NO: 99410 - DNA, 75 bp, synthetic construct
  source 1..75: mol_type = other DNA
gaaagtgatcttctgcgactatgccggattctcaacgctggattcggtagtgcgtgccaaaaaggtttttggtga

SEQ ID NO: 99411 - DNA, 75 bp, synthetic construct
  source 1..75: mol_type = other DNA
atatcatcaaaacggtggcactggtgctgatggtactggaccacatcaatctgatattccagctgaagcaggaat

SEQ ID NO: 99412 - DNA, 75 bp, synthetic construct
  source 1..75: mol_type = other DNA
tagcagacttgatctatcaggcgttgattgtttacccaacatatattcacccaacacggctacagcctattacgg

SEQ ID NO: 99413 - DNA, 75 bp, synthetic construct
  source 1..75: mol_type = other DNA
cattattcattgctggcctggctgcattcagcacatcttctctggcggcacaatctttacgtttcggttatgaaa

SEQ ID NO: 99414 - DNA, 75 bp, synthetic construct
  source 1..75: mol_type = other DNA
gaatcgacgctgaactgaaggatgcttttatggccgctgcaaaaagcatggaccgtaatggctcccagttaatcc

SEQ ID NO: 99415 - DNA, 75 bp, synthetic construct
  source 1..75: mol_type = other DNA
ctctgcgactctcgaccacagaccagaaacgaaaacagactgttgaacaaagcatttctctcagaccggaacagt

SEQ ID NO: 99416 - DNA, 75 bp, synthetic construct
  source 1..75: mol_type = other DNA
gttcatcggacccattcaatgagcggatataagaccccattacttaatgatttctgtggtgagccattaaaacgg

SEQ ID NO: 99417 - DNA, 75 bp, synthetic construct
  source 1..75: mol_type = other DNA
ctttcattttatacacaccatcaaattacctgaaccagaaaagtattgaatggaccacactactcgaaaaagatg

SEQ ID NO: 99418 - DNA, 75 bp, synthetic construct
  source 1..75: mol_type = other DNA
ttgtctttctggcgactaattcaggccattaccgggcgcaggcgggtaacgctgattgccgaggagcagcgctgt

SEQ ID NO: 99419 - DNA, 75 bp, synthetic construct
  source 1..75: mol_type = other DNA
gatcggtggtactggaataacagtatccaacggggccgaagtacggcggtcagagaaaaactggcagtggaaacc

SEQ ID NO: 99420 - DNA, 75 bp, synthetic construct
  source 1..75: mol_type = other DNA
gcttgaagtccagagctagtaacgtcttgaatctcttaagcgtaatagcgaatgggggaaaaggtggagagaaat

SEQ ID NO: 99421 - DNA, 75 bp, synthetic construct
  source 1..75: mol_type = other DNA
atggctaacctgcaacttgctgttaaaagtgaatacttcgatgccatgattcgcggagagaaaacggaagagtat

SEQ ID NO: 99422 - DNA, 75 bp, synthetic construct
  source 1..75: mol_type = other DNA
taatatgcaggatcttcagaaatggcggaagtcaggtaatcgactattccgttgttttgtcaatgcgacgaaaga

SEQ ID NO: 99423 - DNA, 75 bp, synthetic construct
  source 1..75: mol_type = other DNA
gggaatattttccctgcgaaatctgtattacgcgcccgaaaggcggatttttactgtggatagaattgcctgaac

SEQ ID NO: 99424 - DNA, 75 bp, synthetic construct
  source 1..75: mol_type = other DNA
caggggcaacagttggtagaggatgtggggtatgtgccgctgtatgaagcatcccccgaatcatcaggacaataa

SEQ ID NO: 99425 - DNA, 75 bp, synthetic construct
  source 1..75: mol_type = other DNA
ttacctgcaacctgtcggcctgaggggtatcttgccgcgcaacgtaatggcacgctgattcaggttgcaccgcag

SEQ ID NO: 99426 - DNA, 75 bp, synthetic construct
  source 1..75: mol_type = other DNA
agattgttcgctggctggagagtgagcatccactgaaagccaaaattctccccaccgaatggttgggcgaacata

SEQ ID NO: 99427 - DNA, 75 bp, synthetic construct
  source 1..75: mol_type = other DNA
atgattaagattgaaaatttgacgaagtcatatcgcacgccaacgggtcgacactatgtgtttaaggatttaaat

SEQ ID NO: 99428 - DNA, 75 bp, synthetic construct
  source 1..75: mol_type = other DNA
tggtcgaatcttccagataccggaagagacgattaagtgtcagccgttcgagtgtcctgatcacttctacgtaat

SEQ ID NO: 99429 - DNA, 75 bp, synthetic construct
  source 1..75: mol_type = other DNA
taaagtgccaaccgcatggcctcatgacggaaaccagcatgagaagggcggcggtgagcagctcaaagggcagta

SEQ ID NO: 99430 - DNA, 75 bp, synthetic construct
  source 1..75: mol_type = other DNA
atgaactggaaaatatttgcgctttttgccctggctgcagggatgcatatcactgttcatgcctcagacaatgtg

SEQ ID NO: 99431 - DNA, 75 bp, synthetic construct
  source 1..75: mol_type = other DNA
aatctcttgagtggcttaatcgcctgcgtgcgaatccgaaaattccattgattgttaccggttccgcggcagtgg

SEQ ID NO: 99432 - DNA, 75 bp, synthetic construct
  source 1..75: mol_type = other DNA
ccctgatggctactcaacaggcacaaagtgcgatcgactgggaaatgaaccggcggtacggacgttcaaaacagc

SEQ ID NO: 99433 - DNA, 75 bp, synthetic construct
  source 1..75: mol_type = other DNA
aggcgctgggctatgaaactgaagtggtcggtaagcacggtatgtgggaaatgccgggcgtaccggtggaggcct

SEQ ID NO: 99434 - DNA, 75 bp, synthetic construct
  source 1..75: mol_type = other DNA
catcaattatgtatatcatggcccacagtcgatgagtatcaactttcacctaaagatacaagacaaccatttttt

SEQ ID NO: 99435 - DNA, 75 bp, synthetic construct
  source 1..75: mol_type = other DNA
aacacacctgaaaaccgccagttcctgaagcagcaggaaaatttaagcagacaactgcgtgaaaaacctgaccat

SEQ ID NO: 99436 - DNA, 75 bp, synthetic construct
  source 1..75: mol_type = other DNA
atcatccggggaaatctgcgcgtcaggcaggcgctggagaaagtggccaccgcaggagactgccggcaggtggcc

SEQ ID NO: 99437 - DNA, 75 bp, synthetic construct
  source 1..75: mol_type = other DNA
taatggcagcgcaggggatggtgcagtcgaaagcaccacttgggttggccttatttctggcaaaagttggtgttc

SEQ ID NO: 99438 - DNA, 75 bp, synthetic construct
  source 1..75: mol_type = other DNA
actgaagctacaccgtgaacacatctcaagcaatattgaaaagctggtacagctatcacttgaaattgaagactt

SEQ ID NO: 99439 - DNA, 75 bp, synthetic construct
  source 1..75: mol_type = other DNA
atatgaagtgagtgccatggatgaagaaatctccgtggagtgtgatctgaattcaaatatggcggagattgtatc

SEQ ID NO: 99440 - DNA, 75 bp, synthetic construct
  source 1..75: mol_type = other DNA
gggccggaaaacaccttaattttaattgatggtgtaccggtgacgtcacgtaactccgtgcgttatagctggcgt

SEQ ID NO: 99441 - DNA, 75 bp, synthetic construct
  source 1..75: mol_type = other DNA
ccacagatgtggctgcgcagtgcttcctgaatgccttgattcgtgaaaccaaagactggcaactggcggaatacc

SEQ ID NO: 99442 - DNA, 75 bp, synthetic construct
  source 1..75: mol_type = other DNA
gggcgctacgcgtcgcgccaatttcagccttagtgggcctctggctggtgatgctcttaccacgcgtttgtatgg

SEQ ID NO: 99443 - DNA, 75 bp, synthetic construct
  source 1..75: mol_type = other DNA
ttgtctccctgacagtgggcggaaaaatcattgaaggatgggactctgtgcgggtgacccgtggcattgagcgtt

SEQ ID NO: 99444 - DNA, 75 bp, synthetic construct
  source 1..75: mol_type = other DNA
gcatcaactttttctgccagttcccctctgcgaaactttccaccaacgcgtgctggaaagctacgcccatacgca

SEQ ID NO: 99445 - DNA, 75 bp, synthetic construct
  source 1..75: mol_type = other DNA
tctgggagattgtcagaactcttaatgatgaaggtcaccagtcgatgagccagtataagccgggtaagtttggtc

SEQ ID NO: 99446 - DNA, 75 bp, synthetic construct
  source 1..75: mol_type = other DNA
tgtgtgagaatccggttttatcggaaaaagatgctaatttaaataaactgagagttgaatttatacaaaatgcaa

SEQ ID NO: 99447 - DNA, 75 bp, synthetic construct
  source 1..75: mol_type = other DNA
tcattggtaaacgaccaatagctgaaattaaacccctagaactgcttgaagtacttaaacgcatagaaaaacgtg

SEQ ID NO: 99448 - DNA, 75 bp, synthetic construct
  source 1..75: mol_type = other DNA
gccggaccgcgccgccagcccggtggcgacacaactgcacgggaggctcagcacggagccggtaaagtcgcaggc

SEQ ID NO: 99449 - DNA, 75 bp, synthetic construct
  source 1..75: mol_type = other DNA
ttaccagcagcaggtactgtttgtgctgaaccaggccgacaaaatcgaaccctgccacgaatgggatacccgcac

SEQ ID NO: 99450 - DNA, 75 bp, synthetic construct
  source 1..75: mol_type = other DNA
cggcaccccctcgccacagcagcaggctaacctgaaggcgaagcaggccgccattaccacgatattcactccccg

SEQ ID NO: 99451 - DNA, 75 bp, synthetic construct
  source 1..75: mol_type = other DNA
tcaaaatctagtaaaggcgtactacgtgggttacattatcaattagcaccgtatgcacaggctaaattagttcga

SEQ ID NO: 99452 - DNA, 75 bp, synthetic construct
  source 1..75: mol_type = other DNA
tccggacaccggtgaataacggcggagccgatctgtccgcaggtcagcgccagttgattgcgctggcccgcgcgc

SEQ ID NO: 99453 - DNA, 75 bp, synthetic construct
  source 1..75: mol_type = other DNA
ctggtgtgcttatttttgagccaaaagtatttggagatgagcgtggttttttctttgagagttttaatcacaagt

SEQ ID NO: 99454 - DNA, 75 bp, synthetic construct
  source 1..75: mol_type = other DNA
tgataaggggttacttgcggaatacggaacccacgaacagctgttatctgcaggcggcctctatacccgcttatg

SEQ ID NO: 99455 - DNA, 75 bp, synthetic construct
  source 1..75: mol_type = other DNA
tatattaatgaacagcgtttaaataaactaaatccaccggaaaatttacgtatagcaatagaaaaatttgggtgg

SEQ ID NO: 99456 - DNA, 75 bp, synthetic construct
  source 1..75: mol_type = other DNA
tccaaatccatgcaaggtgttttgagaggattgcactatcaattatctccttttgctcaagggaaattagttaga

SEQ ID NO: 99457 - DNA, 75 bp, synthetic construct
  source 1..75: mol_type = other DNA
gcttctggcccatgttgtcaccgggaaatatgcagaccatctgccgttataccgccagtcagaaatataccttcg

SEQ ID NO: 99458 - DNA, 75 bp, synthetic construct
  source 1..75: mol_type = other DNA
ttactgctgccgtcagaaaagatggtagtggcaaccctgtaacagaaggtgctttctcagcagttgcgaatttca

SEQ ID NO: 99459 - DNA, 75 bp, synthetic construct
  source 1..75: mol_type = other DNA
cgacagctttttataataaagattatgaatgtggtatatcatgggaggatgaacttataaatataaaatggccca

SEQ ID NO: 99460 - DNA, 75 bp, synthetic construct
  source 1..75: mol_type = other DNA
gcgtcaaagatgcggtgaggtttatcgctatgcaatcataactggccgtgctgagtacaatcctgcacctgattt

SEQ ID NO: 99461 - DNA, 75 bp, synthetic construct
  source 1..75: mol_type = other DNA
tcatggtgcctgtcctgaacacagcgaatatacgtgacggggagctgcgtcgtctctccacctgggagaataacc

SEQ ID NO: 99462 - DNA, 75 bp, synthetic construct
  source 1..75: mol_type = other DNA
gttgcccgggaaaatctgctgcaggagcgtctgcagcagatggagcgggatatggttcgtgacctgcagaaagag

SEQ ID NO: 99463 - DNA, 75 bp, synthetic construct
  source 1..75: mol_type = other DNA
atagtgatagaatagcgtttccaatcgaagatgacataaacccagatgacctggtagggtattggaattacttct

SEQ ID NO: 99464 - DNA, 75 bp, synthetic construct
  source 1..75: mol_type = other DNA
ccgggcagtaccgttatcgttgaccagggcgaaaaactctccctgaaagagacgttaaccctgctggacggtgcc

SEQ ID NO: 99465 - DNA, 75 bp, synthetic construct
  source 1..75: mol_type = other DNA
aaacggtgccgccggaggtgctggcacagcaggcccgggaggctgaggtgcagcgggagctggataagcgtgccg

SEQ ID NO: 99466 - DNA, 75 bp, synthetic construct
  source 1..75: mol_type = other DNA
gctgacgtcgccgtccgggatgtggtgcgggatatggatcggataaaagaaacgccggcatctcccctcacgctg

SEQ ID NO: 99467 - DNA, 75 bp, synthetic construct
  source 1..75: mol_type = other DNA
cacctggtgatgctgaaggatgcgcagggcaacacccgcagcctgtcgcccgcgcaggcggcgacagagggcgtc

SEQ ID NO: 99468 - DNA, 75 bp, synthetic construct
  source 1..75: mol_type = other DNA
agcaggcagagcagcacatcgacctggcctatgccgtcaccgttgaaggctcacagggtgcgagcgagcccttct

SEQ ID NO: 99469 - DNA, 75 bp, synthetic construct
  source 1..75: mol_type = other DNA
tggtacggctgggacggcgacaggctgacgacggtacagaccgacaccacgcgtatccagacggtataccagccg

SEQ ID NO: 99470 - DNA, 75 bp, synthetic construct
  source 1..75: mol_type = other DNA
acatcgacctgatcgaagcagtcggaaatcaccctgacattattgccggaagcaacaacggtgatggatacgact

SEQ ID NO: 99471 - DNA, 75 bp, synthetic construct
  source 1..75: mol_type = other DNA
tgagacaacatctggcaaggctgggacggaagttactgtcgttctcaaaatcggtggagttgcatgacaaggtca

SEQ ID NO: 99472 - DNA, 75 bp, synthetic construct
  source 1..75: mol_type = other DNA
attggtggtatagatcgtcctgatagtgggaacattattacagaacataaaatttcatggcccgttggattggct

SEQ ID NO: 99473 - DNA, 75 bp, synthetic construct
  source 1..75: mol_type = other DNA
cagcatggcgagccactggtcgagagccgctacctctacgacccgctgggacggcgaatggcgaaacgggtatgg

SEQ ID NO: 99474 - DNA, 75 bp, synthetic construct
  source 1..75: mol_type = other DNA
cagcggtgagacaacgcggtacagctatgatgacccggcgagtgagctgccgacagggatacaggacgcgacggg

SEQ ID NO: 99475 - DNA, 75 bp, synthetic construct
  source 1..75: mol_type = other DNA
cggctcagtcatggatagttcgcctggcgcgcgtgtgctgggaacgtaagaaacttagtgtcatcgtggtggtag

SEQ ID NO: 99476 - DNA, 75 bp, synthetic construct
  source 1..75: mol_type = other DNA
acaagcctgaatgccgttactttgaggtgaacgtgcacgggcagttcggcggcattgtttactatcaggagattc

SEQ ID NO: 99477 - DNA, 75 bp, synthetic construct
  source 1..75: mol_type = other DNA
atggagttcagccgcgaacgggaggaggccattgcgaaagccgtggcggccggcgacctgatgcccggcgggcag

SEQ ID NO: 99478 - DNA, 75 bp, synthetic construct
  source 1..75: mol_type = other DNA
agaggcgcaggcgcagaccatcgttatcaccgccctgaacgccgaccgccgccaggtgaacgccatgattcatga

SEQ ID NO: 99479 - DNA, 75 bp, synthetic construct
  source 1..75: mol_type = other DNA
atgagcacgctgtcgcgtcactcggatacggcgaaagcgttcacctatctgctgaagcaatgggacgccctgaac

SEQ ID NO: 99480 - DNA, 75 bp, synthetic construct
  source 1..75: mol_type = other DNA
aatcctggacgcgggtgatggatgcgctgagtaatccaccgtcaccaggtgaaaagctaaaacgtgcggcaaaac

SEQ ID NO: 99481 - DNA, 75 bp, synthetic construct
  source 1..75: mol_type = other DNA
ccggcctctagggataaacttttgcagcaggctctggctcaggttgcaagggacctgtctgaaggagacgttaac

SEQ ID NO: 99482 - DNA, 75 bp, synthetic construct
  source 1..75: mol_type = other DNA
ggcttttgttttttatgatgagaatcgtgtgatccgttttgataacatagatgaagccatatgtgaatataaaaa

SEQ ID NO: 99483 - DNA, 75 bp, synthetic construct
  source 1..75: mol_type = other DNA
ggcatataaggagtattacgcgctacatattacggaaaccaattctttcttataaaaactatagaaaaattacat

SEQ ID NO: 99484 - DNA, 75 bp, synthetic construct
  source 1..75: mol_type = other DNA
tagctgttgatattcgtaaatcgtcaccaacttttggcaaatgggttggggtgaatttatctgctgagaataagc

SEQ ID NO: 99485 - DNA, 75 bp, synthetic construct
  source 1..75: mol_type = other DNA
tcaattcctctggtcagtccggttgagttttcgacatcatcgtggcggcgggctgttctgtctcttgaagaacat

SEQ ID NO: 99486 - DNA, 75 bp, synthetic construct
  source 1..75: mol_type = other DNA
caggcgaattgccggacgaatctgagaaagatgctcaggcctactttaatcgcaaatatgcaccgattgacgaaa

SEQ ID NO: 99487 - DNA, 75 bp, synthetic construct
  source 1..75: mol_type = other DNA
gtcaaccagcgcttttgctgccgccgaatatgctgtcgtattgaaaacactctccaacccattttgggtagatat

SEQ ID NO: 99488 - DNA, 75 bp, synthetic construct
  source 1..75: mol_type = other DNA
gtgctgtttgcagtcagcgtcattgcgacctgggctgcaggcttcattagccatgtgtcgctggtcgaaatcctg

SEQ ID NO: 99489 - DNA, 75 bp, synthetic construct
  source 1..75: mol_type = other DNA
gtctggggagtaggacgcagactgacggaaaagctgaatgcgctgggtattaacacagcactgcaactggcgcag

SEQ ID NO: 99490 - DNA, 75 bp, synthetic construct
  source 1..75: mol_type = other DNA
actgatagcgcctaatcacgtgcggcgtgaatttactgtagtgaagcccaatcaggtgtgggtcaccgacatcac

SEQ ID NO: 99491 - DNA, 75 bp, synthetic construct
  source 1..75: mol_type = other DNA
cccggatgaagccgggcgttacacaatggacgtcgagtatggtcagtacagcgtcagtctgttggtggagggatt

SEQ ID NO: 99492 - DNA, 75 bp, synthetic construct
  source 1..75: mol_type = other DNA
gcctgcaggtggcatccgtcagtgaagatgcgatgacggttgttgtgccggggcgggctgaaccggccaccctgc

SEQ ID NO: 99493 - DNA, 75 bp, synthetic construct
  source 1..75: mol_type = other DNA
aagccaaagagctgggcggcacctgcgtaaatgttggctgtgtgccgaaaaaagtgatgtggcacgcggcgcaaa

SEQ ID NO: 99494 - DNA, 75 bp, synthetic construct
  source 1..75: mol_type = other DNA
cgtcttattgatgcacataaccaggccgtggattttgctgtccgtcaggtggaggcgctggcttccacacgggtg

SEQ ID NO: 99495 - DNA, 75 bp, synthetic construct
  source 1..75: mol_type = other DNA
agcgagtacagctcttaatgaaaatggttttaatccagatgtaattgaagcagcattagcacattcggataagaa

SEQ ID NO: 99496 - DNA, 75 bp, synthetic construct
  source 1..75: mol_type = other DNA
gcgctttgatatgtccgagtatatggaacgccataccgtcagccgtctgattggtgcgcctccgggatacgttgg

SEQ ID NO: 99497 - DNA, 75 bp, synthetic construct
  source 1..75: mol_type = other DNA
tactgcagataaatatggctgccatttgttatcacgtattggtgcttattgctcgttgatgctgattttctcgtc

SEQ ID NO: 99498 - DNA, 75 bp, synthetic construct
  source 1..75: mol_type = other DNA
cgactcgctgtctaattgaatggcaactcctgactcttgtgcgcccttctgaagcctccagtactcggtgggaag

SEQ ID NO: 99499 - DNA, 75 bp, synthetic construct
  source 1..75: mol_type = other DNA
aacccggcaggcctgagttaccgctaccagtatgagcaggatcgcatcaccgtcacggacagcctgaaccggcgt

SEQ ID NO: 99500 - DNA, 75 bp, synthetic construct
  source 1..75: mol_type = other DNA
acgctaactacgaatcaatggcggaaagcctgcgcggtggtttgtctattggcctttcaggttttggcttctgga

SEQ ID NO: 99501 - DNA, 75 bp, synthetic construct
  source 1..75: mol_type = other DNA
acagcggcggtgtatcagaaagttgtgacactggaagataaactggtggagaaacctgtcacggggaagagccgg

SEQ ID NO: 99502 - DNA, 75 bp, synthetic construct
  source 1..75: mol_type = other DNA
tttgcccctatatttccagacatctgttatcacttaacccattacaagcccgctgccgcagatattcccgtggcg

SEQ ID NO: 99503 - DNA, 75 bp, synthetic construct
  source 1..75: mol_type = other DNA
tctcagagcaaaactgctgctgaatccgctgcgacccgtgcggaagctgctgctgatcgtgctgaagagattgcc

SEQ ID NO: 99504 - DNA, 75 bp, synthetic construct
  source 1..75: mol_type = other DNA
cgcagctctatattcgtcctaacgaacagaacctctcccgctcgctgtttttagccactggcgatgtattgccgc

SEQ ID NO: 99505 - DNA, 75 bp, synthetic construct
  source 1..75: mol_type = other DNA
ctgctgtcaattctggtcggcgtctgccttgccgtcgtaccggaactgatgggcagcggacagaaaacgctcggt

SEQ ID NO: 99506 - DNA, 75 bp, synthetic construct
  source 1..75: mol_type = other DNA
agcatggctgagaaaaatgccaagtttgactacgacggcaaggacacaggctggtcgccggagttttctaactgg

SEQ ID NO: 99507 - DNA, 75 bp, synthetic construct
  source 1..75: mol_type = other DNA
atttcattcccgaccgggacgctgggcgatttgctcggctggtttccttatgcggaacgcttccagtccctgcat

SEQ ID NO: 99508 - DNA, 75 bp, synthetic construct
  source 1..75: mol_type = other DNA
gttaaaattctgtcaacctgggatgaggcgatttcggtgacggaaaagcttctcaccaacagccagcagcagaaa

SEQ ID NO: 99509 - DNA, 75 bp, synthetic construct
  source 1..75: mol_type = other DNA
acctggttgctgacttaccagcagctggcgcgcatggcaataaaactgggcgtgaacccaccatactggccgtca

SEQ ID NO: 99510 - DNA, 75 bp, synthetic construct
  source 1..75: mol_type = other DNA
aattaatgagccgcgatttgagtgtgatggcctgcttattgagggacaaagaacgaactacatgctcaattcgga

SEQ ID NO: 99511 - DNA, 75 bp, synthetic construct
  source 1..75: mol_type = other DNA
atgcttctgacaatggaagagattaaagcccaactccggctggatgaggatttcgatgctgatgaccgccatctg

SEQ ID NO: 99512 - DNA, 75 bp, synthetic construct
  source 1..75: mol_type = other DNA
tttgatgatgtcggcattaggcacgttgctggtcgtgcaatcttcctcgccagcccaggcggtagcgtttatctc

SEQ ID NO: 99513 - DNA, 75 bp, synthetic construct
  source 1..75: mol_type = other DNA
gtgaatttgaagcgcgccaacgggctgcgcttacccgtgagacaacatatacggttcagggctggcggcagggca

SEQ ID NO: 99514 - DNA, 75 bp, synthetic construct
  source 1..75: mol_type = other DNA
gatatggcattacacgcagacgcgctgagacgattgcacgcgatcagaacaacaaagctacagcggtaattcagt

SEQ ID NO: 99515 - DNA, 75 bp, synthetic construct
  source 1..75: mol_type = other DNA
cggtaaacggtttgacctgcgaaaggggatgtttctggatggtaagtgggtactgccgggcgaagaaatcaactg

SEQ ID NO: 99516 - DNA, 75 bp, synthetic construct
  source 1..75: mol_type = other DNA
ggagcggttattacgaccgggtacagcatgccccctcagacagaaaacaaagtgatgagcggctaaaactggaga

SEQ ID NO: 99517 - DNA, 75 bp, synthetic construct
  source 1..75: mol_type = other DNA
gggtggaaaggtgttttcgggttgcccggggtgatacatccggtcagtatgttgcgttaaaaacagtcgcattgt

SEQ ID NO: 99518 - DNA, 75 bp, synthetic construct
  source 1..75: mol_type = other DNA
ctaaagagttcaaagccgaagctgtcagaacggttcttgaaaatcaactttcgatcagcgaaggcgcttcccgat

SEQ ID NO: 99519 - DNA, 75 bp, synthetic construct
  source 1..75: mol_type = other DNA
tccgccatgaggccatcagccgtctgttcgagctcggcacactgaacgttatggagattgcagccatttccggtc

SEQ ID NO: 99520 - DNA, 75 bp, synthetic construct
  source 1..75: mol_type = other DNA
caattaccacacggatgcggtttaccgttcaatgattgccggtgttgccgggctgagtattgaccggattttctt

SEQ ID NO: 99521 - DNA, 75 bp, synthetic construct
  source 1..75: mol_type = other DNA
ataccgaaaaggcctttgaatatatcgcgggggcaccgcagggtcagcaggataatccgcttattaatattctgg

SEQ ID NO: 99522 - DNA, 75 bp, synthetic construct
  source 1..75: mol_type = other DNA
atcagaccctgccacactcccgtctggtgtatgttgtttctgaaacaaaagcagagccccaccctcccttcagaa

SEQ ID NO: 99523 - DNA, 75 bp, synthetic construct
  source 1..75: mol_type = other DNA
aaaaaagtcaattttgcggtgatggccgtcggggacggtggcggtaagctgcccgaaccagacgccagtcagaca

SEQ ID NO: 99524 - DNA, 75 bp, synthetic construct
  source 1..75: mol_type = other DNA
gaaagggattgtccagctcagtagcgccaccgacagtgtgtctgagactctcgccgcgacgccgaaagcagtcaa

SEQ ID NO: 99525 - DNA, 75 bp, synthetic construct
  source 1..75: mol_type = other DNA
tcgccgcaacgccaaaagcggtgaaagcggcgaatgataatgctgatggccgcgttccttcctcgcgcaaaatta

SEQ ID NO: 99526 - DNA, 75 bp, synthetic construct
  source 1..75: mol_type = other DNA
gcgggcgacacggtaaccgtcacgctcggcggggcgacttacactgccacggtgcaggcgaatttaagctggagt

SEQ ID NO: 99527 - DNA, 75 bp, synthetic construct
  source 1..75: mol_type = other DNA
tcaaagcccgtactctggtcacgctcttatttcatcggttcatgtggtggagcaccgctggaagttgtgaaaaag

SEQ ID NO: 99528 - DNA, 75 bp, synthetic construct
  source 1..75: mol_type = other DNA
aggcggcgtatcactctatactggcccggtgatcaccagctaccgctatacccattatgactccagcgatgcagg

SEQ ID NO: 99529 - DNA, 75 bp, synthetic construct
  source 1..75: mol_type = other DNA
gtgggacagccagcctgccccgatggtgggcggtcgccagtacatcatcgaagactctgaaattaaccgttaccg

SEQ ID NO: 99530 - DNA, 75 bp, synthetic construct
  source 1..75: mol_type = other DNA
ggcaggtaaagtgtggttcaacaccccaaccgatgattataacggtctgcaacttgcagcccacctgatctggaa

SEQ ID NO: 99531 - DNA, 75 bp, synthetic construct
  source 1..75: mol_type = other DNA
gtgcaaataaccgaagccttaatttcagagccgggggaaatccggcgttttgttcagcaggcggtggaccactgg

SEQ ID NO: 99532 - DNA, 75 bp, synthetic construct
  source 1..75: mol_type = other DNA
ccggtgatcaccagctaccgctatacccattatgactccagcgatgcaggtggtagttatagcaatatgatttcc

SEQ ID NO: 99533 - DNA, 75 bp, synthetic construct
  source 1..75: mol_type = other DNA
ttacagccctgattgaagcggagttattctttggtgagcaccctatcagagggacaaaaaggcttaaggaggaaa

SEQ ID NO: 99534 - DNA, 75 bp, synthetic construct
  source 1..75: mol_type = other DNA
cccgttgccattcccggcattgcatccgtggtgaaccgggaagactggctgaccgtaccgggtgccgatgaggaa

SEQ ID NO: 99535 - DNA, 75 bp, synthetic construct
  source 1..75: mol_type = other DNA
ctgaactacggcgaaatcgcgaagattttccgtgctggctgcatcatccgtgcgcagttcctgcagaaaatcacc

SEQ ID NO: 99536 - DNA, 75 bp, synthetic construct
  source 1..75: mol_type = other DNA
ttcctgagagcgccatcggaaacaggcatgcctccgtttaatgatgcggatgctggcgtacagacctggcaaacc

SEQ ID NO: 99537 - DNA, 75 bp, synthetic construct
  source 1..75: mol_type = other DNA
cagctgtttacccagaatctggcgcggatggcggagcaggcgggggttaaattccgctttaatacgcccgttgac

SEQ ID NO: 99538 - DNA, 75 bp, synthetic construct
  source 1..75: mol_type = other DNA
tctgcaactgcgtaaggcgttaaatgaagctcgccttgagcgagatatattaaaaaaagcaacagcgtattttgc

SEQ ID NO: 99539 - DNA, 75 bp, synthetic construct
  source 1..75: mol_type = other DNA
aagtgagtatgcatatattagttttttaacagtcagtcagcgccgtactttatttatgcatgccggattgactga

SEQ ID NO: 99540 - DNA, 75 bp, synthetic construct
  source 1..75: mol_type = other DNA
tggcgtaaaagcggtggatgcgggacatcgggtactgtttatgccactggacagactgatcgcgacactgatgaa

SEQ ID NO: 99541 - DNA, 75 bp, synthetic construct
  source 1..75: mol_type = other DNA
cagaatccgattttgaggaggcgctgatcaaccacctgatggatttcatgctggaacttggggatgattttgcct

SEQ ID NO: 99542 - DNA, 75 bp, synthetic construct
  source 1..75: mol_type = other DNA
actatcttaaattttaactggaaatataatgtcttggttaaaaatatatatgaggctggtatggttttatcagcc

SEQ ID NO: 99543 - DNA, 75 bp, synthetic construct
  source 1..75: mol_type = other DNA
gctaatttgttttttgtatctctggcagaggagtcattgtttagaggatatattcagtcacggttatcagaagta

SEQ ID NO: 99544 - DNA, 75 bp, synthetic construct
  source 1..75: mol_type = other DNA
gggctcggtactcctggttcccgcacggtggctgaactggaatctgaaattctacaacagcgtattttgcacagg

SEQ ID NO: 99545 - DNA, 75 bp, synthetic construct
  source 1..75: mol_type = other DNA
ctgttaatgagtggttcaacattgaaaattacagcgtcctgcaaaatttgacagtggaacagcttttccaagaga

SEQ ID NO: 99546 - DNA, 75 bp, synthetic construct
  source 1..75: mol_type = other DNA
tttacccgacaactgagcaggctgagcttttagctcagacgtttggctgtgtgcgcttcgtctacaattccatcc

SEQ ID NO: 99547 - DNA, 75 bp, synthetic construct
  source 1..75: mol_type = other DNA
atgagtatggagctgatggttaaagcgatgaaaattcgagtgggtaatccattgcgaaaactggttctgatcaag

SEQ ID NO: 99548 - DNA, 75 bp, synthetic construct
  source 1..75: mol_type = other DNA
ccgcgaccatgaaagacgttgccctcaaggcaaaagtctctacagcgaccgtctcccgagcattaatgaatcccg

SEQ ID NO: 99549 - DNA, 75 bp, synthetic construct
  source 1..75: mol_type = other DNA
aaaacggtcggcattgatgtgggcttaaaagatttattcgtcaccgataccggattcaaaaccgacaatccccgc

SEQ ID NO: 99550 - DNA, 75 bp, synthetic construct
  source 1..75: mol_type = other DNA
aagccatgcgcacccgtcccgccacacgacggcaggcagaacgccttctttctctgggctttcgcgcccccgtcg

SEQ ID NO: 99551 - DNA, 75 bp, synthetic construct
  source 1..75: mol_type = other DNA
atcgtaaaaatacctggcaggcgcttaacctcaaacgctatggtgccgagtcgcggaacctgattttgtctgcca

SEQ ID NO: 99552 - DNA, 75 bp, synthetic construct
  source 1..75: mol_type = other DNA
ccgaactgcttgtttcggaagtcacgtttactcaggaccagaacggcaccctgacggaaatccgtgtcggcccac

SEQ ID NO: 99553 - DNA, 75 bp, synthetic construct
  source 1..75: mol_type = other DNA
aaaagaattcaatcagccatactggcgaattaatgaagaatcatgttactggcgtgatgctttattccgtgcatt

SEQ ID NO: 99554 - DNA, 75 bp, synthetic construct
  source 1..75: mol_type = other DNA
cgattaacatagtgaacggaacaccaattcaccgagtaggcagcctggcggctgcggcttgtcatggcctgaaat

SEQ ID NO: 99555 - DNA, 75 bp, synthetic construct
  source 1..75: mol_type = other DNA
gatatgctgaaaaatgcacttgctcacggagagttcagaccttattttcagcccatcatttccgctaaaaatcac

SEQ ID NO: 99556 - DNA, 75 bp, synthetic construct
  source 1..75: mol_type = other DNA
aggttccggcacgggtgagcgcggtccccggcgatcgcttcctgaaggtggaatttattccggtcggggagggag

SEQ ID NO: 99557 - DNA, 75 bp, synthetic construct
  source 1..75: mol_type = other DNA
gaagacgaagccgcaaaattcacctcggtgattctggcaaccacggaagacacctggggacagcagttcgagaag

SEQ ID NO: 99558 - DNA, 75 bp, synthetic construct
  source 1..75: mol_type = other DNA
cgacggtccagtaaagaacaacgtccttaatcagctggcagcgatcgaagagaagcgcatcaagacgccagcaga

SEQ ID NO: 99559 - DNA, 75 bp, synthetic construct
  source 1..75: mol_type = other DNA
cctccagagcggggcgcgacttctcagagttcatgaaaggcgagaagggcatgatggaagcattggcctcggtgg

SEQ ID NO: 99560 - DNA, 75 bp, synthetic construct
  source 1..75: mol_type = other DNA
tccgccttcacatgccgggaccatcaccgtgtatgaggattctaagccggggacgctgaatgattttctgggtgc

SEQ ID NO: 99561 - DNA, 75 bp, synthetic construct
  source 1..75: mol_type = other DNA
gtacgtttacagcaaatgggagtcgcccgctggatgctctcatcggcgcttacgctggtaatagcccagcgtctg

SEQ ID NO: 99562 - DNA, 75 bp, synthetic construct
  source 1..75: mol_type = other DNA
tggtgaacacggtggcctcagaaaatccggatgaagccggacgttacagcatggatgttgagtatggccagtaca

SEQ ID NO: 99563 - DNA, 75 bp, synthetic construct
  source 1..75: mol_type = other DNA
acgacaagagccagtgatttggttagtatccccaccagaaataatctttataagttaccatttacttttttactt

SEQ ID NO: 99564 - DNA, 75 bp, synthetic construct
  source 1..75: mol_type = other DNA
atgtctgattcatcagtactgaaagccagagaccaggcatctgttgttggtgatattatttctgataaacaggcc

SEQ ID NO: 99565 - DNA, 75 bp, synthetic construct
  source 1..75: mol_type = other DNA
gagtattcactggatgcgttgatggccggtgttactaacgaaaatattcatgaggaaatctctttcggatctcct

SEQ ID NO: 99566 - DNA, 75 bp, synthetic construct
  source 1..75: mol_type = other DNA
aatatgagaataaagaagaggcaagggttattacaataattgaatcgcgtgcggcgaaaactttaggtgagtgta

SEQ ID NO: 99567 - DNA, 75 bp, synthetic construct
  source 1..75: mol_type = other DNA
ttgaaacaaataagtcgaactatacggttggagagacaatcaccatcacggtaacgctccgggatgcgttcgata

SEQ ID NO: 99568 - DNA, 75 bp, synthetic construct
  source 1..75: mol_type = other DNA
ggcacagcgtgactatttcggtgcgcatacttataagcgcattgataaagaaggtgtgttccatactgaatggct

SEQ ID NO: 99569 - DNA, 75 bp, synthetic construct
  source 1..75: mol_type = other DNA
tggcgacgggcgattaacctgatgacggaaagcggcgaactgttaacgctgcatcgtcagggtagtggtttcggc

SEQ ID NO: 99570 - DNA, 75 bp, synthetic construct
  source 1..75: mol_type = other DNA
ccatgaatataaaggttggcaacccactgagaaaactggttctgattaaacttgccgataacgccaatgataatg

SEQ ID NO: 99571 - DNA, 75 bp, synthetic construct
  source 1..75: mol_type = other DNA
acaatgtgaacatccaatggatgattccgggtaatgggcgttggttagggatggattttgtggccagaaatggca

SEQ ID NO: 99572 - DNA, 75 bp, synthetic construct
  source 1..75: mol_type = other DNA
aacatgcctggtttcgcgaggcgctgaacaaagaaagcccttaccgccagttttatatctggcgcgatggagaac

SEQ ID NO: 99573 - DNA, 75 bp, synthetic construct
  source 1..75: mol_type = other DNA
tgatgctccggatgtgcaggaacatcagaccctgccgcactcccgtctggtgtatgttgtttctgaaacaaaagc

SEQ ID NO: 99574 - DNA, 75 bp, synthetic construct
  source 1..75: mol_type = other DNA
gtggtgcaggtagtcgcctttggccactttcccgcttactttaccccaaacagtttttatgtctgaaaggcgagc

SEQ ID NO: 99575 - DNA, 75 bp, synthetic construct
  source 1..75: mol_type = other DNA
caaaagtcattaccgcgcatgtgccattacctatggctgataaagtcgaccagatggccgccagactggaacgct

SEQ ID NO: 99576 - DNA, 75 bp, synthetic construct
  source 1..75: mol_type = other DNA
tttcacgtaagcggatagcgattatcttcgatgttaccttatccacgctttaccgcaggtttccggctgggaatc

SEQ ID NO: 99577 - DNA, 75 bp, synthetic construct
  source 1..75: mol_type = other DNA
ttaaggccgcgtatgacctggctaacgggaaatacaccgcacaggatgcaacgacagcacagaaagggataatcc

SEQ ID NO: 99578 - DNA, 75 bp, synthetic construct
  source 1..75: mol_type = other DNA
cttaacccatgcagttaaattgttcgaaggagacaaggatgcagctcagcactggcttaacgaaaataacagggc

SEQ ID NO: 99579 - DNA, 75 bp, synthetic construct
  source 1..75: mol_type = other DNA
atggatgtcgagtatggccagtacagcgttatcctgctggttgaaggttttccgccttcacatgccgggaccatc

SEQ ID NO: 99580 - DNA, 75 bp, synthetic construct
  source 1..75: mol_type = other DNA
gcaggatttggcgggcaaatggcggagtggttgccaccggcgcagagtgccgatgcggccctgttgcccgcgttg

SEQ ID NO: 99581 - DNA, 75 bp, synthetic construct
  source 1..75: mol_type = other DNA
acagtgccaggcgacaagattgttaagtttaaacgagcttcaacagcaacgtatatcaataagtcaggctcgttt

SEQ ID NO: 99582 - DNA, 75 bp, synthetic construct
  source 1..75: mol_type = other DNA
ataccactattaataatggttggcaggatatatccagtggtggctctgcaactcagacgatcattagcgggggta

SEQ ID NO: 99583 - DNA, 75 bp, synthetic construct
  source 1..75: mol_type = other DNA
aaagcgaaaacaccagttatagccaaataatcaccacctgccgcatgcgttatgccgtaaatgaattaatgatgg

SEQ ID NO: 99584 - DNA, 75 bp, synthetic construct
  source 1..75: mol_type = other DNA
aatcgtaatatggcaaggagtcgaggttatccagagcgagcagcttgcttcaatgaagcactcaagattattgat

SEQ ID NO: 99585 - DNA, 75 bp, synthetic construct
  source 1..75: mol_type = other DNA
tgtttcttcatgcctgtcatttgtctgttactgatgttgttgttcctgctactgctactgctactgctactgcta

SEQ ID NO: 99586 - DNA, 75 bp, synthetic construct
  source 1..75: mol_type = other DNA
gacacagatagcaacagccagggcgcgtgcggcggtttatcgtgcgcaacaggcggttgttgctgctcgcggtac

SEQ ID NO: 99587 - DNA, 75 bp, synthetic construct
  source 1..75: mol_type = other DNA
gcgacaggctgccggtcttccccgccccatctggataaaggatacgtttcagcagcagatccgacagacaacggg

SEQ ID NO: 99588 - DNA, 75 bp, synthetic construct
  source 1..75: mol_type = other DNA
gtacgacgacagccatccggaagccctggctcgtaatacccagaaaattttccgctgggtggagaaggacacgtc

SEQ ID NO: 99589 - DNA, 75 bp, synthetic construct
  source 1..75: mol_type = other DNA
tgtcgcagtggcgatcgctggtttcaatcagatgaatcgtggtggcccggcaggaaacactctggctgtgcatta

SEQ ID NO: 99590 - DNA, 75 bp, synthetic construct
  source 1..75: mol_type = other DNA
atgaaaatcaagcatgaacacatccgcatggcgatgaatgcctgggcgcgtcctgatggcgaaaaagttccggca

SEQ ID NO: 99591 - DNA, 75 bp, synthetic construct
  source 1..75: mol_type = other DNA
gttatccagagcgtgaaaaatgctttgacgatgcactaaaaattattgatgaactgcgtaaggcagaagcagaga

SEQ ID NO: 99592 - DNA, 75 bp, synthetic construct
  source 1..75: mol_type = other DNA
gttccccggccatcctctgatctggccgaggttcacatagtgttgtatccgccggatcagcgccgtcgggatatc

SEQ ID NO: 99593 - DNA, 75 bp, synthetic construct
  source 1..75: mol_type = other DNA
gcgaacggatcagttatgacgggaaaagcatcccggaatcagaaatctggagtgaacatcctgagcgaaacagac

SEQ ID NO: 99594 - DNA, 75 bp, synthetic construct
  source 1..75: mol_type = other DNA
cgggcacgttttgatttttatcaggcgcgttcagcctggtcacgggctgagtggattggtgccggaagaatggcc

SEQ ID NO: 99595 - DNA, 75 bp, synthetic construct
  source 1..75: mol_type = other DNA
tgaatatcctgatattaaagtcgagctcacaactgacgactctcttgtcgatatcgtccaacagggctttgacgc

SEQ ID NO: 99596 - DNA, 75 bp, synthetic construct
  source 1..75: mol_type = other DNA
gtactctgccctggatcctgttaaaaacaccttacaaaaacggtacggtcattaccgccacggattattatttta

SEQ ID NO: 99597 - DNA, 75 bp, synthetic construct
  source 1..75: mol_type = other DNA
ggagaacctgtctgtatccggaatgatggttattttgtcaacattcgcattcttgatgacttgtttgatgtttct

SEQ ID NO: 99598 - DNA, 75 bp, synthetic construct
  source 1..75: mol_type = other DNA
ttttatggggcggcgaaaatttattgcggcccggctggccacgcagatgttttcctgctggctggaagaggcact

SEQ ID NO: 99599 - DNA, 75 bp, synthetic construct
  source 1..75: mol_type = other DNA
caacaatgttgaggccggggaagaggttgaaatcacccgcagaggccgtgagccagcagtaattgtcagcaaggc

SEQ ID NO: 99600 - DNA, 75 bp, synthetic construct
  source 1..75: mol_type = other DNA
ggctggaggaagcccttattcgtggtgtgatccgtccgccgaaatcccgtttctcattctgggaggcccgttccg

SEQ ID NO: 99601 - DNA, 75 bp, synthetic construct
  source 1..75: mol_type = other DNA
tgcctaaatcagtgctggaaaactggtattacgaagcaaaagaattcctgagtgaagaggcattcagtaactacc

SEQ ID NO: 99602 - DNA, 75 bp, synthetic construct
  source 1..75: mol_type = other DNA
cactgcaacagtatgaccggtgataaacccggagaagctcattcatcaggctggaccctggctgcaaaacgtgga

SEQ ID NO: 99603 - DNA, 75 bp, synthetic construct
  source 1..75: mol_type = other DNA
cctactatggcacaaatgtataatgatcaaactctggaagctgatgatcctactatggagttatcagccggcgat

SEQ ID NO: 99604 - DNA, 75 bp, synthetic construct
  source 1..75: mol_type = other DNA
tattctggaccgcactgctgacaggcatttcccttcctgcacaggctgaaagcggacacggtgcattttccgtgg

SEQ ID NO: 99605 - DNA, 75 bp, synthetic construct
  source 1..75: mol_type = other DNA
tgccccatcctatccgcgaaaatatgccgcgccaacaaggttggtgctttggcctaccgccaggcataacgcccg

SEQ ID NO: 99606 - DNA, 75 bp, synthetic construct
  source 1..75: mol_type = other DNA
tcgaacccgctgagttcgtttattcagagttacgtgacgtactacaacggcgcaaatatcaagctcggtggtgtg

SEQ ID NO: 99607 - DNA, 75 bp, synthetic construct
  source 1..75: mol_type = other DNA
cgttatttatttctgaactcggctcattaccggaaaatgttacctggttatccccggaaggggagtttcagaagt

SEQ ID NO: 99608 - DNA, 75 bp, synthetic construct
  source 1..75: mol_type = other DNA
cagggcaaaaatgagcgtgatgaccttcagaaggctaatggcgacgggtatggtttctcggccagctatgagttt

SEQ ID NO: 99609 - DNA, 75 bp, synthetic construct
  source 1..75: mol_type = other DNA
atgacttctgaagtgaaactgaaaaccggtggtgacccccggtcattaccggattatgctgccctgcgcgatgaa

SEQ ID NO: 99610 - DNA, 75 bp, synthetic construct
  source 1..75: mol_type = other DNA
gaacacaatggcgtggaattacagacggcatcctggtacaccatcgcccggatgcatacaacagggttaagtggc

SEQ ID NO: 99611 - DNA, 75 bp, synthetic construct
  source 1..75: mol_type = other DNA
ccgtttaatgatcgtgagctggtggcacgtattcgcgcgatcctgcgccgttcgcactggagcgagcaacagcaa

SEQ ID NO: 99612 - DNA, 75 bp, synthetic construct
  source 1..75: mol_type = other DNA
cctgcgcatgcgcatgtcgcgacaccccttttacgtgcagaaacggtcgttcgcaggccgtaaatatgccttccg

SEQ ID NO: 99613 - DNA, 75 bp, synthetic construct
  source 1..75: mol_type = other DNA
gatgtttatcatcagccatccagcgtgttttttgttattaaaccgtctgcgtggggaaaaccacgtattaattaa

SEQ ID NO: 99614 - DNA, 75 bp, synthetic construct
  source 1..75: mol_type = other DNA
ccggcggacggtaaaagtctcaccccggatgatgtgcgtccgatgcttgaacagatggtgaaggaggcggtaagc

SEQ ID NO: 99615 - DNA, 75 bp, synthetic construct
  source 1..75: mol_type = other DNA
aagacacttaaggaaataagcgagaggacatatataagttgctggcattgtaacgaacatgaatctgaagctatg

SEQ ID NO: 99616 - DNA, 75 bp, synthetic construct
  source 1..75: mol_type = other DNA
cagacggcatctttcctgaaagacctcggcgttaatgaaggtgaaaactatgctgtaatggatccatggtctgca

SEQ ID NO: 99617 - DNA, 75 bp, synthetic construct
  source 1..75: mol_type = other DNA
accctccgtataacgttgaactggtagacgaaaaccattaccgcattgctatcgctgtggctggttttgctgaga

SEQ ID NO: 99618 - DNA, 75 bp, synthetic construct
  source 1..75: mol_type = other DNA
ttaaaggtggggagatcgcaccagtaaaattgccaccaaatctgtcgtcacaaatattgctgcagcgtccggata

SEQ ID NO: 99619 - DNA, 75 bp, synthetic construct
  source 1..75: mol_type = other DNA
caacatctggattcaacctcttaaaacccggatatccgagctggatgtgtatgaaagcgcctgtaatgaaggggc

SEQ ID NO: 99620 - DNA, 75 bp, synthetic construct
  source 1..75: mol_type = other DNA
caatagcatttacacgtttacctatatcacgaagtcgaaacattgcccgtacagcaaaagcttcgacacggctga

SEQ ID NO: 99621 - DNA, 75 bp, synthetic construct
  source 1..75: mol_type = other DNA
agtggttgccaccggcgcagagtgccgatgcagccctgctgcctgcgttgcgtctggggaatgcccgggcagatg

SEQ ID NO: 99622 - DNA, 75 bp, synthetic construct
  source 1..75: mol_type = other DNA
tcagtaccatattcatcctggctggttgtgtttctctggcacctgaatatcagcgtccgccagctccggttcccc

SEQ ID NO: 99623 - DNA, 75 bp, synthetic construct
  source 1..75: mol_type = other DNA
atgtctacgagaagagaagtcattctttcctggttgcgtgagaaacgtcagacctggcgtctgtgctatttgttg

SEQ ID NO: 99624 - DNA, 75 bp, synthetic construct
  source 1..75: mol_type = other DNA
gctggtatctgcagcgtactcaggacgcactgaaacaccggcgtgagaaagcggccgcgcgtaagcgtgctaacc

SEQ ID NO: 99625 - DNA, 75 bp, synthetic construct
  source 1..75: mol_type = other DNA
actggagtcagttatctcccgaagaccagatccgtttctgggaagagtacgaagctggcaggagggcgtctttcc

SEQ ID NO: 99626 - DNA, 75 bp, synthetic construct
  source 1..75: mol_type = other DNA
gaagcgataggcagcctgattgtcactaaagagggcgataccctggattgccgtcagtggcagcgggtgattgcc

SEQ ID NO: 99627 - DNA, 75 bp, synthetic construct
  source 1..75: mol_type = other DNA
atccatcaaagggaacttgctacttctatataggtttgaaaaaaaaaggagagtcgctgaaaggactaaatgata

SEQ ID NO: 99628 - DNA, 75 bp, synthetic construct
  source 1..75: mol_type = other DNA
gaaggcaatggcggatgacggaaaactgacagcggataaagtggtccctgcgttaatcagccagctggggatatt

SEQ ID NO: 99629 - DNA, 75 bp, synthetic construct
  source 1..75: mol_type = other DNA
tctgtcttttcagacctgtcatttgtctgttactgatgatgttgttcctgctactgctcctgttcttcttttttc

SEQ ID NO: 99630 - DNA, 75 bp, synthetic construct
  source 1..75: mol_type = other DNA
gatatacctggcgttattgccaactacttcatgatcaccaaacaactttaccggagaaaggacaagaacgcggtt

SEQ ID NO: 99631 - DNA, 75 bp, synthetic construct
  source 1..75: mol_type = other DNA
agggatgtctggcgagatcgacgtggaaggaaaacgcacgttcacggaatttatccgtgaaggtgtgggcgttca

SEQ ID NO: 99632 - DNA, 75 bp, synthetic construct
  source 1..75: mol_type = other DNA
caggttgccacatctgatgttaaaaaagaaatttacttgggtgaacttagccaagctgcgttaacgcagggacga

SEQ ID NO: 99633 - DNA, 75 bp, synthetic construct
  source 1..75: mol_type = other DNA
catattcaagcactagatcttgcaactatagcatcgcggttgatagagcttgagcatgaggttgagaagttaaaa

SEQ ID NO: 99634 - DNA, 75 bp, synthetic construct
  source 1..75: mol_type = other DNA
aaggcgcgaaagaagcaggcaaaatgcgtgcagaaggtaaagattacatcgttaaagatggcgatgtgatgaact

SEQ ID NO: 99635 - DNA, 75 bp, synthetic construct
  source 1..75: mol_type = other DNA
cgctttgaggaaggtaaacattactttctactaactggttcaaaattaagagaattgaaggacaaggttactcaa

SEQ ID NO: 99636 - DNA, 75 bp, synthetic construct
  source 1..75: mol_type = other DNA
cgcctcagcttcggaaattgcccgcgtgctggaaagcctgactaaaaacagcggcgagaaccaaccagcaacact

SEQ ID NO: 99637 - DNA, 75 bp, synthetic construct
  source 1..75: mol_type = other DNA
ttgcacatacgtttgggataacattggaagagcaaactgacgccctcgcttttcacgataacgatggtcatgagt

SEQ ID NO: 99638 - DNA, 75 bp, synthetic construct
  source 1..75: mol_type = other DNA
aagtacttgacaaaaagaataatagagctataaccctatataaagtaataaataactccatagaaaaatatggta

SEQ ID NO: 99639 - DNA, 75 bp, synthetic construct
  source 1..75: mol_type = other DNA
gccagtgtacggaaaaaacattttccctgccggtgatgctctaccgcggtgtgttcagagccggtgaaacctacc

SEQ ID NO: 99640 - DNA, 75 bp, synthetic construct
  source 1..75: mol_type = other DNA
atctggtgcgcaataacggaatagcggccaatgcggtggcactgcataaggatcacattgtcgggcatatgtttc

SEQ ID NO: 99641 - DNA, 75 bp, synthetic construct
  source 1..75: mol_type = other DNA
gtgattacgatccggaagtactgaagcaggcggtgaatgatgcggtcgggagaattccggtaccggcggacggca

SEQ ID NO: 99642 - DNA, 75 bp, synthetic construct
  source 1..75: mol_type = other DNA
cagagcaacatgtacgaagtctgtttacagctaccagccagacttgtttcaggactgcggaggcgcgagtactta

SEQ ID NO: 99643 - DNA, 75 bp, synthetic construct
  source 1..75: mol_type = other DNA
atggaaacaacagaaaacaaaccgattgtaattggtgccgctactgtcccgtttaagtttgagttgtctcaactg

SEQ ID NO: 99644 - DNA, 75 bp, synthetic construct
  source 1..75: mol_type = other DNA
agcctgctttatgagtgactgttcaccgcactggggtacacagcagtttatgtcctggccgttctataccgcgtt

SEQ ID NO: 99645 - DNA, 75 bp, synthetic construct
  source 1..75: mol_type = other DNA
aaacgggtgaaatggttcgtcttcgtactctggaaagtatctgggttcagggtaagctccgcatgtggggacgct

SEQ ID NO: 99646 - DNA, 75 bp, synthetic construct
  source 1..75: mol_type = other DNA
gctccaaaggttttaatgccatgctggcagtgagcagcgtggatgccgcgaaagcctattacgcgacgtttaaac

SEQ ID NO: 99647 - DNA, 75 bp, synthetic construct
  source 1..75: mol_type = other DNA
gcgttatcttgttctttagcattcttaacatccatgtcgggatggctgggcctgaacaagttagtatgcatattt

SEQ ID NO: 99648 - DNA, 75 bp, synthetic construct
  source 1..75: mol_type = other DNA
tatgattccatcaaaccatccttattttgaagtcatctcaaaagcatgtataaatggagtgcgtgactttgttcg

SEQ ID NO: 99649 - DNA, 75 bp, synthetic construct
  source 1..75: mol_type = other DNA
gagattggctatacgccaggcgttgaaaccaccaccggcccgcttggacaaggtttggcgaacgccgtcgggctg

SEQ ID NO: 99650 - DNA, 75 bp, synthetic construct
  source 1..75: mol_type = other DNA
aacgctgggttcacctggcgaaccggaaacaccggaagcaatacagcgcgagttattacaacgcatcaataacgt

SEQ ID NO: 99651 - DNA, 75 bp, synthetic construct
  source 1..75: mol_type = other DNA
tttattggcaagtttatagccaacatccttatgacacgttttaatccggaaaaagtcctaattctctattccgtt

SEQ ID NO: 99652 - DNA, 75 bp, synthetic construct
  source 1..75: mol_type = other DNA
caaaaaaagaagaaaaaatcgcgcaacaaatgagtttgaaaaatacgttcgaggccattgctcgcgaatggcatc

SEQ ID NO: 99653 - DNA, 75 bp, synthetic construct
  source 1..75: mol_type = other DNA
cggtactgagcggcctgccgctggatgcgattgcccgttatgccgggcaacctgcagtgcttgatgcccagtgcg

SEQ ID NO: 99654 - DNA, 75 bp, synthetic construct
  source 1..75: mol_type = other DNA
cactgtccgtcctgccggtattgcgattggtgtaaaccaggcgggtaagggggtctggttaactccttcccttcc

SEQ ID NO: 99655 - DNA, 75 bp, synthetic construct
  source 1..75: mol_type = other DNA
gtgcgctgcgcggcacgcgcctgcaggccattatggatatggatgtgaacgcgatgatgaccgtgatcccccgca

SEQ ID NO: 99656 - DNA, 75 bp, synthetic construct
  source 1..75: mol_type = other DNA
gtcgggctgggttatgacgtcaaagtcggaaataacgttaccttcaccgttggtaaaacgaaaaaggatgatacc

SEQ ID NO: 99657 - DNA, 75 bp, synthetic construct
  source 1..75: mol_type = other DNA
gaaacgccggaagcaatacagcaagagctgctgcaacgtattgacaaggtttttgatttttttctgaaccagtaa

SEQ ID NO: 99658 - DNA, 75 bp, synthetic construct
  source 1..75: mol_type = other DNA
aagtcagagttcatgccgattaccacgtggaaatcgacaaacattactactcggttccatgttcgctgttaggcc

SEQ ID NO: 99659 - DNA, 75 bp, synthetic construct
  source 1..75: mol_type = other DNA
catacagttcaatgatcggtccaaaagcctatgccacattgcggctcaatatcagccagaccttttatccgattg

SEQ ID NO: 99660 - DNA, 75 bp, synthetic construct
  source 1..75: mol_type = other DNA
tcagtacacgccccgatgctgaactggtcaacactatgctggatagcgctgtcgaaacgttaaatgctggcgaac

SEQ ID NO: 99661 - DNA, 75 bp, synthetic construct
  source 1..75: mol_type = other DNA
acgtacgatgctgacagatatatttaacagtaattaccagtgttatggctatcgtcgcctgcatgcgatgctcag

SEQ ID NO: 99662 - DNA, 75 bp, synthetic construct
  source 1..75: mol_type = other DNA
tgcagagcttgagactaatctcgcggcgctggtggcagagaacgccgggctgaaacacgcaatggccgtaactct

SEQ ID NO: 99663 - DNA, 75 bp, synthetic construct
  source 1..75: mol_type = other DNA
ggttggggcagggacagcctggaacgtaacagctaatggtgtgttgccggggatgatcgtcattggccccgacaa

SEQ ID NO: 99664 - DNA, 75 bp, synthetic construct
  source 1..75: mol_type = other DNA
atatgctgatcttctgcggttgtgtcgggcaaagcggtggcggctgggcacactatgtcggtcaggaaaaactgc

SEQ ID NO: 99665 - DNA, 75 bp, synthetic construct
  source 1..75: mol_type = other DNA
tttcccatcctttcagccgtggactcatccgatttttgtcttgaatgcctgctgaatgccatcaaaaacgatgac

SEQ ID NO: 99666 - DNA, 75 bp, synthetic construct
  source 1..75: mol_type = other DNA
cgacaaagaccgtcttgatgtgctgtgcggcccgaatctgattaaccagttccgcattttcgcggcacaagttca

SEQ ID NO: 99667 - DNA, 75 bp, synthetic construct
  source 1..75: mol_type = other DNA
tgatgctggttgacccgaaacagggcagtgttcgcccgttatcatacggctttatttcgcaggacgacctggcaa

SEQ ID NO: 99668 - DNA, 75 bp, synthetic construct
  source 1..75: mol_type = other DNA
cagaaggagggggaggtgtttaatcgtcagctggcgttgacagggcattatgcgggcatcactaccggacagctg

SEQ ID NO: 99669 - DNA, 75 bp, synthetic construct
  source 1..75: mol_type = other DNA
gtgacagaacagctaaacccggcaggcttaagttacacgtatcagtatgaaaaagaccgcatcaccatcaccgac

SEQ ID NO: 99670 - DNA, 75 bp, synthetic construct
  source 1..75: mol_type = other DNA
cctgcagtcgtttcctgtcgattacatcaaactcgataaagggtttgtacaaatggtcggcgtggatgaaatctc

SEQ ID NO: 99671 - DNA, 75 bp, synthetic construct
  source 1..75: mol_type = other DNA
atcccgtctcgacgaaattgaccgcgtatccggtcagacccagttcaacggcgtgaacgtactggcaaaagacgg

SEQ ID NO: 99672 - DNA, 75 bp, synthetic construct
  source 1..75: mol_type = other DNA
tttgcttctgaataactgtaacgcagatactcagcgtgaattaagcaatctgctgctgaagcgcccccaacttcg

SEQ ID NO: 99673 - DNA, 75 bp, synthetic construct
  source 1..75: mol_type = other DNA
gcagctggcacagcagtacggcttttccgtttttccctacaccctggatggtcagggggataccgcctttccgga

SEQ ID NO: 99674 - DNA, 75 bp, synthetic construct
  source 1..75: mol_type = other DNA
acaaatagatccagatatgtcacacatttggggcggttctctttttgggtgtctaaatggttgtctacctgctcg

SEQ ID NO: 99675 - DNA, 75 bp, synthetic construct
  source 1..75: mol_type = other DNA
taccccggctggatattacggggatgtgggtattttccctgggtgtctggttccatattgttgcccgtctggtta

SEQ ID NO: 99676 - DNA, 75 bp, synthetic construct
  source 1..75: mol_type = other DNA
ctgtcggtacagggcaaaaaggtaaagcgcttgtggaagcacttgtgaaggtcattaacgccgatgttgatgcac

SEQ ID NO: 99677 - DNA, 75 bp, synthetic construct
  source 1..75: mol_type = other DNA
taaactggctgatgacgggacgcccgttcgtgccggtcagaatatcgtgacaccggagatcatgaaacttcagtt

SEQ ID NO: 99678 - DNA, 75 bp, synthetic construct
  source 1..75: mol_type = other DNA
cgctgctgcttcttggcagcgtttttaccgccacaggaaaagatgccggctggcagtggtacaacgaaacgcgca

SEQ ID NO: 99679 - DNA, 75 bp, synthetic construct
  source 1..75: mol_type = other DNA
ctgacgcgcagtatggaatacgatgctgccggacgggtcatccgcctgaccagtgaaaacggcagccacaccacc

SEQ ID NO: 99680 - DNA, 75 bp, synthetic construct
  source 1..75: mol_type = other DNA
gcaccagacgtgcctgtccgtatccgttccggctcacaggccagtgcggcgtttggtcagggttccatgctggca

SEQ ID NO: 99681 - DNA, 75 bp, synthetic construct
  source 1..75: mol_type = other DNA
tgagctggagcacgccagaaccatggctccagccattcgcctgacgctccatcatgaaatcgctgatttctgcgc

SEQ ID NO: 99682 - DNA, 75 bp, synthetic construct
  source 1..75: mol_type = other DNA
ttaatccgctgttgccggattcccggactgaccaggggcaggcgcagcgcctcggcgtgaaatatttcccggcca

SEQ ID NO: 99683 - DNA, 75 bp, synthetic construct
  source 1..75: mol_type = other DNA
aatggagaaagccggaaacaccacacattcgctgggactgaaaagtgcggcagcccgtcgggagctgggggtcat

SEQ ID NO: 99684 - DNA, 75 bp, synthetic construct
  source 1..75: mol_type = other DNA
cttcctgaaagcactctcttcccagggagatgtcagtgtggtaacccggaattccgccgtgaccaaaaacctgac

SEQ ID NO: 99685 - DNA, 75 bp, synthetic construct
  source 1..75: mol_type = other DNA
attgcacgccgattaaggtgtactgtctgccagaagaaaaattgcaaatagaagcaaatgccgctgcgacaggtt

SEQ ID NO: 99686 - DNA, 75 bp, synthetic construct
  source 1..75: mol_type = other DNA
ggacaaaagcggaaatcgcattgcaaaaagcgaacgaaaaattcgagcgtcgttttcgcgaagtggagcgtattg

SEQ ID NO: 99687 - DNA, 75 bp, synthetic construct
  source 1..75: mol_type = other DNA
aaaccaaatccaccattgacaattatatatcaaaaatacaggataatcataatacgccatggatattaaacaatg

SEQ ID NO: 99688 - DNA, 75 bp, synthetic construct
  source 1..75: mol_type = other DNA
atggaacaccagttaccgttgtttgcccgtgaattatcccctgccgaccagcaaaccatcagggaggcattaacc

SEQ ID NO: 99689 - DNA, 75 bp, synthetic construct
  source 1..75: mol_type = other DNA
gccatgatgacagtgatcccgcgtatttccaccccaacgctgaccgcacaggaaatggctgaactggaccccgcc

SEQ ID NO: 99690 - DNA, 75 bp, synthetic construct
  source 1..75: mol_type = other DNA
atggattatacgctcacccgcatagatcccaacggtgagaacgaccgttaccccctgcaaaagcaggagatcgta

SEQ ID NO: 99691 - DNA, 75 bp, synthetic construct
  source 1..75: mol_type = other DNA
tccgtgcagaagcttattccgaatcactgacatttccggataacgttcctgaggatttgcgggagcgggaaagta

SEQ ID NO: 99692 - DNA, 75 bp, synthetic construct
  source 1..75: mol_type = other DNA
tgaggaggcgaagaagaatgccggagaggcggagacgtccgcgaggaatgccggcatatcagccagtcaggcaga

SEQ ID NO: 99693 - DNA, 75 bp, synthetic construct
  source 1..75: mol_type = other DNA
acctgcttttttcatatctgcatctgactctttccggtgttttcctccttctgttcctgcgttctcattacctgt

SEQ ID NO: 99694 - DNA, 75 bp, synthetic construct
  source 1..75: mol_type = other DNA
tattcaatgaagaagctacaataccgattttttataaaacggtgcgagaatatgaggaattaaagaattatgatg

SEQ ID NO: 99695 - DNA, 75 bp, synthetic construct
  source 1..75: mol_type = other DNA
cgtagtcgtgaagcgctacaccacctgaacgtacagcacctgcgccgatcgcacagcctccgtcatggcaggcgc

SEQ ID NO: 99696 - DNA, 75 bp, synthetic construct
  source 1..75: mol_type = other DNA
tctcgctgaacggttgctggaaaccgaagagagcgtgcgccgtgatgtggcacgtgagctgcacgatgatatcgg

SEQ ID NO: 99697 - DNA, 75 bp, synthetic construct
  source 1..75: mol_type = other DNA
taaaaataacactgacgcgattgatgctgctggcgacaaagctcgtgaggcggcggccagtgctgccgcagcagc

SEQ ID NO: 99698 - DNA, 75 bp, synthetic construct
  source 1..75: mol_type = other DNA
ttgcccctaaggctggtgacaaatgggctgaagcaagagatcagttttatgcagcataccctccgcctcagcagc

SEQ ID NO: 99699 - DNA, 75 bp, synthetic construct
  source 1..75: mol_type = other DNA
atctggacctcttgctcttgcttacaaagagcttacacctgcgattatgcgcaaccatatcgctgtattcgaacg

SEQ ID NO: 99700 - DNA, 75 bp, synthetic construct
  source 1..75: mol_type = other DNA
aaactgtattgtcgattacaagcttcctgcagtctctcctggaaccttgctgaaccagcagacagcaatctgtcg

SEQ ID NO: 99701 - DNA, 75 bp, synthetic construct
  source 1..75: mol_type = other DNA
ccgatcaggctgtcagggatgcggcgatacaacgtgaaaatgaacgttacgagaaagccctggcatccggtaaga

SEQ ID NO: 99702 - DNA, 75 bp, synthetic construct
  source 1..75: mol_type = other DNA
atgacaaaggtccggtttccgttactaagatagtcgacggggctgaattgctgatcccgatggctggcctcatca

SEQ ID NO: 99703 - DNA, 75 bp, synthetic construct
  source 1..75: mol_type = other DNA
caggtttcattggttcacatatggtaacatttttagaatcaatgaataaagaatgtttctgccctgacagagact

SEQ ID NO: 99704 - DNA, 75 bp, synthetic construct
  source 1..75: mol_type = other DNA
taacagagaccagttatagtttcggtgctgtgtttttttacaatattgtgataacacattgctggcgggagtttt

SEQ ID NO: 99705 - DNA, 75 bp, synthetic construct
  source 1..75: mol_type = other DNA
gctgcacggcgaagcgaaccataatgccgaagaaggcacggtcgatattgaatttcacggtgaagaaggggatta

SEQ ID NO: 99706 - DNA, 75 bp, synthetic construct
  source 1..75: mol_type = other DNA
ggatgcggccatgaacattggtcgggaagattcccttgatgcgcagattgcgtcgctgcaggaaaaaattcagcg

SEQ ID NO: 99707 - DNA, 75 bp, synthetic construct
  source 1..75: mol_type = other DNA
ttcaaacgtttttaactgaaccggcaattttaattggtttgctggtgggtattggttatgcccttgataagaaat

SEQ ID NO: 99708 - DNA, 75 bp, synthetic construct
  source 1..75: mol_type = other DNA
tatggcgattgcataaataattacgataatgttattgacgctaatgttttgttattaagaaaaatacttaataat

SEQ ID NO: 99709 - DNA, 75 bp, synthetic construct
  source 1..75: mol_type = other DNA
atctgaaacaggttgtaatatacagtggcacaagaatgatacatgcgaaacatttcctgttatcacgatgcaaaa

SEQ ID NO: 99710 - DNA, 75 bp, synthetic construct
  source 1..75: mol_type = other DNA
ctggttaaatcgcttgcctctctgctggtagtaaccagcggcagtgcaattggtcgcgaaggtgcgatgattctt

SEQ ID NO: 99711 - DNA, 75 bp, synthetic construct
  source 1..75: mol_type = other DNA
aaccgtctggatgaacagcggggaaaatacatgacggtcagtgaactgaaaacggaggtgtttggcatcatgcag

SEQ ID NO: 99712 - DNA, 75 bp, synthetic construct
  source 1..75: mol_type = other DNA
atgaaatttattgggaagctgcttctctacattctcatcgctctgttagtggtgatcgctggcctctattttctt

SEQ ID NO: 99713 - DNA, 75 bp, synthetic construct
  source 1..75: mol_type = other DNA
aaacccgccacaaggagacttcgcttattttcccggttctggcgctggtagtgctgttcctgtggggaagcagcc

SEQ ID NO: 99714 - DNA, 75 bp, synthetic construct
  source 1..75: mol_type = other DNA
cacggctcctgggacgcatatttcaatgcgccagaacataaagaggaaggtgccaccaaacgcactaactttagc

SEQ ID NO: 99715 - DNA, 75 bp, synthetic construct
  source 1..75: mol_type = other DNA
gaagaaattataagaagttttgaagattcaaggattgtttatatcaaaaatgattataatataggtgtggccgaa

SEQ ID NO: 99716 - DNA, 75 bp, synthetic construct
  source 1..75: mol_type = other DNA
gcaactcagggcactgctgacaccaccaccggatgtgctttcagcagaccagatggcacagctcagcagaacacc

SEQ ID NO: 99717 - DNA, 75 bp, synthetic construct
  source 1..75: mol_type = other DNA
tggaccggaccggaattttgaaaacccctggttgctcccggtaagcggcacgaacaaccagcgttgtgtgaatca

SEQ ID NO: 99718 - DNA, 75 bp, synthetic construct
  source 1..75: mol_type = other DNA
ctaccaatgaaagcgcagggcaaaaagtcgatagctctatgaataaagtcggtaatttcatggatgacagcgcca

SEQ ID NO: 99719 - DNA, 75 bp, synthetic construct
  source 1..75: mol_type = other DNA
ctggcgtttcgcgcaatgctctcgccgtctgctgtgctggcgctgctggatgagctggagcacgccagaaccaca

SEQ ID NO: 99720 - DNA, 75 bp, synthetic construct
  source 1..75: mol_type = other DNA
ctgccactgtaggtgctaagacttatagcgtaacaacaggttctgctgctgcagacaccgcttatatgagcaatg

SEQ ID NO: 99721 - DNA, 75 bp, synthetic construct
  source 1..75: mol_type = other DNA
tcattcagcggtggtgctggttggttcaaattagcaacggtaaccatgccacaggcgagttctgttgtttcaatt

SEQ ID NO: 99722 - DNA, 75 bp, synthetic construct
  source 1..75: mol_type = other DNA
gagaatgctccgccaggtatgaagataattgatgtaccgggcaaagccgatcccctgatgaaaatcacgcacgat

SEQ ID NO: 99723 - DNA, 75 bp, synthetic construct
  source 1..75: mol_type = other DNA
cagcatattgaagctggcatttcactgtgcgatgcagtgaactttcttgttgaaaaatacgcactggtgcgtacc

SEQ ID NO: 99724 - DNA, 75 bp, synthetic construct
  source 1..75: mol_type = other DNA
gcagaaggaaagaaccctagtgaggttcgaaaagagcaaaagctggctctgcaaacagagtcagagaacgccttc

SEQ ID NO: 99725 - DNA, 75 bp, synthetic construct
  source 1..75: mol_type = other DNA
catcgtctggtggccgaagagcagcacaacgcgctgtccagggacgacattgccgttcactggcaggagagtttc

SEQ ID NO: 99726 - DNA, 75 bp, synthetic construct
  source 1..75: mol_type = other DNA
tattctcaggcaccggaggtggtgcgctatgaccgttacctgctggtcagcacagagccgcaggctgtacagcgt

SEQ ID NO: 99727 - DNA, 75 bp, synthetic construct
  source 1..75: mol_type = other DNA
gggcggaaacggtgctgttctattacgctctgattggcgatgcaaacacggtatccggccatatggcgattggcg

SEQ ID NO: 99728 - DNA, 75 bp, synthetic construct
  source 1..75: mol_type = other DNA
gctgctgtccaaagtggaagcgcgccactggaaagcctggctggaaggcaaactgtctcattccctgtcgcgagg

SEQ ID NO: 99729 - DNA, 75 bp, synthetic construct
  source 1..75: mol_type = other DNA
cgctgtctgcctgtgtgttgctggcggggtgccagagtccgcaaaaactgcagcagagggcggctgccgtcccgg

SEQ ID NO: 99730 - DNA, 75 bp, synthetic construct
  source 1..75: mol_type = other DNA
ttcccggacaaaaacaaagtggtgagctgcctgagcaagctgaagtacatggtggttatcgatccgctggtgact

SEQ ID NO: 99731 - DNA, 75 bp, synthetic construct
  source 1..75: mol_type = other DNA
cgccgataaagcgaaaagctttaagcaggcgcgtggacgcggtggttttgttcgttcttcctggcaggaagtgaa

SEQ ID NO: 99732 - DNA, 75 bp, synthetic construct
  source 1..75: mol_type = other DNA
cagactgcgctgctctacctgatgacccgtgagcagcgggcggtcaggcatcagggcgagagcgatatggcagga

SEQ ID NO: 99733 - DNA, 75 bp, synthetic construct
  source 1..75: mol_type = other DNA
gcgccaggcgctgacggtggagaactacacaaccgcccgttctgcggacagctacccggcgttttccccgatgct

SEQ ID NO: 99734 - DNA, 75 bp, synthetic construct
  source 1..75: mol_type = other DNA
tgaatcagaagctgacagattatgtcccaatgatgccccatagtcaccaaagtgacaccagaggcttattaaaat

SEQ ID NO: 99735 - DNA, 75 bp, synthetic construct
  source 1..75: mol_type = other DNA
cacgtctgctgaccggcattaaccgcgatcgtctgcaacaggactttgcgcagtggacgcgcgagtcggcagaaa

SEQ ID NO: 99736 - DNA, 75 bp, synthetic construct
  source 1..75: mol_type = other DNA
atatcaggaaagatttgctgaccgggtatcagaattcaatgaaaaacaaagcagcaaaaggacggagcgttgtta

SEQ ID NO: 99737 - DNA, 75 bp, synthetic construct
  source 1..75: mol_type = other DNA
tattcatcttgcaggttgcgttattgaggttatgggtaataaaggtgccatgaccatccgtgtaacaacaccaag

SEQ ID NO: 99738 - DNA, 75 bp, synthetic construct
  source 1..75: mol_type = other DNA
taccaacagcatcgctgccatggggacgcgccagtataactatattgtgatgccctataaggatgcggcgaatct

SEQ ID NO: 99739 - DNA, 75 bp, synthetic construct
  source 1..75: mol_type = other DNA
tacgggaggcatcgagctgcccgtctcccgtcaccatctggcagactctgctctcccgactactgggccagcatt

SEQ ID NO: 99740 - DNA, 75 bp, synthetic construct
  source 1..75: mol_type = other DNA
ggctggagtatcacgataatcaactcacttccttaattaacaatgcactacagaacgcaccggatatgcaggtgg

SEQ ID NO: 99741 - DNA, 75 bp, synthetic construct
  source 1..75: mol_type = other DNA
gcttatctgcctgaacccgaagaccccggcgcgcggaaaaagaaaaaagccagagtacaggaggacccgttctga

SEQ ID NO: 99742 - DNA, 75 bp, synthetic construct
  source 1..75: mol_type = other DNA
aaaacttcctcgtcgagaaaatgcgtaccctcggtactgcagcctgcccgccgtaccatatcgcgtttgtgattg

SEQ ID NO: 99743 - DNA, 75 bp, synthetic construct
  source 1..75: mol_type = other DNA
caggcgtttaaagacaacgtcaaaaatgaagtgactggcgctgatggaggaccagtcagaacagaaattaccaac

SEQ ID NO: 99744 - DNA, 75 bp, synthetic construct
  source 1..75: mol_type = other DNA
gctgcagtggtgggcggattttctggatgcaaatcgcgagaaagggattagcccgtttgactatgcgaaagcgta

SEQ ID NO: 99745 - DNA, 75 bp, synthetic construct
  source 1..75: mol_type = other DNA
gggtgaaacatttttctctcgggcgcacattaggcatgaccattattgcgatgggcgtgacttttttactgttac

SEQ ID NO: 99746 - DNA, 75 bp, synthetic construct
  source 1..75: mol_type = other DNA
aagttttcggctatgataatactgaggataatgatgaggcggcatctgattatgcattaaaaataaatgaaaact

SEQ ID NO: 99747 - DNA, 75 bp, synthetic construct
  source 1..75: mol_type = other DNA
gctgacggtaacctgacgaaaaaccaggccggcggcccagccgcggcaacgttggacggtattttcaacggtgcg

SEQ ID NO: 99748 - DNA, 75 bp, synthetic construct
  source 1..75: mol_type = other DNA
tatccgccgaagatatgaacactgcgttaaccggtcaggcttataccgtagctaacggcgcacagtcttatgacg

SEQ ID NO: 99749 - DNA, 75 bp, synthetic construct
  source 1..75: mol_type = other DNA
gctataagccgcaactggctgaaggcagtgggcgtacccagaccgtgcgcatggtgctgattaccagtagtacgg

SEQ ID NO: 99750 - DNA, 75 bp, synthetic construct
  source 1..75: mol_type = other DNA
gtgctgcgtaaaatcgaaaagcgcggtgcattagaaaaaatgcgcaaagttcggcagcgatgctcagaagttttc

SEQ ID NO: 99751 - DNA, 75 bp, synthetic construct
  source 1..75: mol_type = other DNA
tcccgtcaccatctggcagactctgctctcccgactactgggccagcattacggccttaccctgaatgacacacc

SEQ ID NO: 99752 - DNA, 75 bp, synthetic construct
  source 1..75: mol_type = other DNA
ccatgacagtcacagccagtactgcacttactcagcagaggtttgtgggagcagataacggcgcatgtaagcagg

SEQ ID NO: 99753 - DNA, 75 bp, synthetic construct
  source 1..75: mol_type = other DNA
cagacgcacaatttatcgttactgccatgcgcggcgaaatcaaacgccgccagcgtcgcaaggccaaagaatcag

SEQ ID NO: 99754 - DNA, 75 bp, synthetic construct
  source 1..75: mol_type = other DNA
atgcagaaccaaagaatccgtatccgcctgaaagcgtttgatcatcgtctgatcgatcaagcaaccgcggaaatc

SEQ ID NO: 99755 - DNA, 75 bp, synthetic construct
  source 1..75: mol_type = other DNA
ggggaggggtcagcagtaaacccatccgggaacgtctctcccgggctgcggactccccggtccgcgaggcgtatg

SEQ ID NO: 99756 - DNA, 75 bp, synthetic construct
  source 1..75: mol_type = other DNA
tactggtgcccgaatcagcgctgaagctatgcagtctgctaccaaaacgactggtttcacaactggcacaacgac

SEQ ID NO: 99757 - DNA, 75 bp, synthetic construct
  source 1..75: mol_type = other DNA
ggtggcagacacaccggtgaccatcagccgggataatgcactgaagtctcagattactaaacttctggccagcat

SEQ ID NO: 99758 - DNA, 75 bp, synthetic construct
  source 1..75: mol_type = other DNA
agactggcagatggtgtaaaacaattgcgtcaggaggaacgggaaagacggaaaaatatagaaaagttaattcag

SEQ ID NO: 99759 - DNA, 75 bp, synthetic construct
  source 1..75: mol_type = other DNA
aacagcgacatgaatcagttctttaataagctgggatttgcgtccaatgtcacccaggcgggcgtctggcagggg

SEQ ID NO: 99760 - DNA, 75 bp, synthetic construct
  source 1..75: mol_type = other DNA
tatctgacaatgtcaatggcatgcataaatgtcgttattataatgacactatggatgtcattgataataaaatag

SEQ ID NO: 99761 - DNA, 75 bp, synthetic construct
  source 1..75: mol_type = other DNA
agaacggggaaacgcggcagggttatcaggttattgcagacagcgtaatcagtgcccgtgcggcacgtcctggcg

SEQ ID NO: 99762 - DNA, 75 bp, synthetic construct
  source 1..75: mol_type = other DNA
atgaaaacattacccgatacacacgtacgggaggcatcgcgctgcccgtctcccgtcatcatctggcagacactg

SEQ ID NO: 99763 - DNA, 75 bp, synthetic construct
  source 1..75: mol_type = other DNA
tctatgccgcgcttcacgtcgagggcgtgcagcgtgtcgaacttgtcgcgccggtcgctgacatcgtactcaatg

SEQ ID NO: 99764 - DNA, 75 bp, synthetic construct
  source 1..75: mol_type = other DNA
aggggcacaccagacccgcatcaccgcactgccactggctgatatccggggtgtcacgcttcatcccgacacttt

SEQ ID NO: 99765 - DNA, 75 bp, synthetic construct
  source 1..75: mol_type = other DNA
gacaatatgaatgatgccacccggcagattgcggcgtttcagtcacaggtgcaggtacagcaggatgcgctgctg

SEQ ID NO: 99766 - DNA, 75 bp, synthetic construct
  source 1..75: mol_type = other DNA
cagcatattgaggcaggcatttcactgtgtgacgcggtgaactttctcgttgaaaaatacgcgctggtacgtacc

SEQ ID NO: 99767 - DNA, 75 bp, synthetic construct
  source 1..75: mol_type = other DNA
atgaaaacattacccgacacacacgtacggaaggcatcgcgctgcccgtctcccgtcaccatctggcagacactg

SEQ ID NO: 99768 - DNA, 75 bp, synthetic construct
  source 1..75: mol_type = other DNA
caatggtggcaacgggaaactatgaccaggcggttatcgacagcatcaataataacctcaacgaagccacgcggc

SEQ ID NO: 99769 - DNA, 75 bp, synthetic construct
  source 1..75: mol_type = other DNA
acaggaagccgatcgccggaaaggcaaaaagagctggcaggcggaacgctatgcacgcggaaccctgcgcaaaat

SEQ ID NO: 99770 - DNA, 75 bp, synthetic construct
  source 1..75: mol_type = other DNA
gaagtggtggcacaagagcaaaaaacgctgcgtatccgtcagattcaggaagcgttgcagtatgcgaatcaggcg

SEQ ID NO: 99771 - DNA, 75 bp, synthetic construct
  source 1..75: mol_type = other DNA
ggcgttttactcagtgagctacatcgtctgggcgaaagccggctggcaaacaggctgaacagcctgctccggcgt

SEQ ID NO: 99772 - DNA, 75 bp, synthetic construct
  source 1..75: mol_type = other DNA
agactggcagatgatgtaaggctattgcgtcaggaggaacgggaaagacggaaaaatatagaaaagctaattcag

SEQ ID NO: 99773 - DNA, 75 bp, synthetic construct
  source 1..75: mol_type = other DNA
taagtaatattgttttatttccggtaaaagaggatgacccacgtaatcaggttaattttctttatgaaccatcgg

SEQ ID NO: 99774 - DNA, 75 bp, synthetic construct
  source 1..75: mol_type = other DNA
ggcggctggtggctgacccgcagttaaaaaccaccagcaagggaacaccaatggcgctggtgagtatggctgttc

SEQ ID NO: 99775 - DNA, 75 bp, synthetic construct
  source 1..75: mol_type = other DNA
gcatatttcatggaaagactacgttattaccgcgagcagagcgtgaaactaccaaaaggaagtgatccggtatat

SEQ ID NO: 99776 - DNA, 75 bp, synthetic construct
  source 1..75: mol_type = other DNA
aaaagttgatcaggcagctttcgataaagctgtatcaacctctggaaacaatgttgatttcactaccgcaggtta

SEQ ID NO: 99777 - DNA, 75 bp, synthetic construct
  source 1..75: mol_type = other DNA
acctatggtttaccaaccatcgtaacaaactgctctaataactatggtccattccactaccctgaaaaactgatc

SEQ ID NO: 99778 - DNA, 75 bp, synthetic construct
  source 1..75: mol_type = other DNA
taggttgtggtaaatcgacgctgctgaaaatgatggtggggctgtaccgtcagaacaggggacaaattactcttg

SEQ ID NO: 99779 - DNA, 75 bp, synthetic construct
  source 1..75: mol_type = other DNA
tcaggttattgcagacagcgtaatcagtgcccgcgcggcacgtccaggcgggaacagacgcaaaaccacaggcac

SEQ ID NO: 99780 - DNA, 75 bp, synthetic construct
  source 1..75: mol_type = other DNA
tcacctggtcagtttaggtttagtctcgtttatctttacccttttctcgcttgagctttcgcagtttggcaccca

SEQ ID NO: 99781 - DNA, 75 bp, synthetic construct
  source 1..75: mol_type = other DNA
cttcaacaaatcagcaccacactgaaccgtatactgcagtccccggtggatccggatgataaaaaaataagcaaa

SEQ ID NO: 99782 - DNA, 75 bp, synthetic construct
  source 1..75: mol_type = other DNA
tgatacagcggtaccgtgaagcggaaatggctgtactggaggggaagtctgtcaccttcaacgggcagcaactga

SEQ ID NO: 99783 - DNA, 75 bp, synthetic construct
  source 1..75: mol_type = other DNA
gggtatctaccatcacctgcgcgagctgtaccaggccgaaggtggtaaaggcgtagaaccgctgatgaagatgag

SEQ ID NO: 99784 - DNA, 75 bp, synthetic construct
  source 1..75: mol_type = other DNA
gaattgacggttgatgtggcggcgggaaaagtatcgttagaagatatcgttacccgcttgcgtcaacgcggtacc

SEQ ID NO: 99785 - DNA, 75 bp, synthetic construct
  source 1..75: mol_type = other DNA
gcgtgaacgtactggcgaaagacggttcaatgaaaattcaggttggtgcgaatgacggccagactatcactattg

SEQ ID NO: 99786 - DNA, 75 bp, synthetic construct
  source 1..75: mol_type = other DNA
ccgcgacgcaataaaggatgcatatgaatcgtattgtgggattgatgattgcccacaatgctcaaaatacattga

SEQ ID NO: 99787 - DNA, 75 bp, synthetic construct
  source 1..75: mol_type = other DNA
accgactacccgcgcactcgccctgacctgcccaatcatgaacctcgcggctgcccgcgtggcgcaagttactcc

SEQ ID NO: 99788 - DNA, 75 bp, synthetic construct
  source 1..75: mol_type = other DNA
gtgaagaagatgatttttgtggcggcattgctgaccattacccaacaggcgcaggcttcagcagttattgtggca

SEQ ID NO: 99789 - DNA, 75 bp, synthetic construct
  source 1..75: mol_type = other DNA
tctaccgccgcgaccacggctgctgtagctgctgcgaactctgcgaatatcgcaaaccaacagtcacagcgtgct

SEQ ID NO: 99790 - DNA, 75 bp, synthetic construct
  source 1..75: mol_type = other DNA
tgagtgtaccagaacagcatataatggagtgtattatcgtgtgaatacaccaacgcagacggcaacaataaatgg

SEQ ID NO: 99791 - DNA, 75 bp, synthetic construct
  source 1..75: mol_type = other DNA
gtggtcatcggcccttttatcaacgctagtgcagtattactgggtggcgttctcggcgcactgctcagccaacgc

SEQ ID NO: 99792 - DNA, 75 bp, synthetic construct
  source 1..75: mol_type = other DNA
ccgtaccatatcgcgtttgtgattggcggtacgtctgcggaaaccaacctgaaaaccgtcaagttagcaagcgct

SEQ ID NO: 99793 - DNA, 75 bp, synthetic construct
  source 1..75: mol_type = other DNA
ttatcaggaaagatttactgaccggggaaaagggaagcaggaaaaccagcacgtcccaaaaaggaagaaccgtac

SEQ ID NO: 99794 - DNA, 75 bp, synthetic construct
  source 1..75: mol_type = other DNA
gcagaaataaatattcattttggcaaaatgtctttatatgacgtggacggacagaaaaatgcgcagacgaagacc

SEQ ID NO: 99795 - DNA, 75 bp, synthetic construct
  source 1..75: mol_type = other DNA
atgttcggtaaattgttcggcaagaaagtcgcttctgcaaaagtagagctgaaaaaagttgagaatcgcgatctg

SEQ ID NO: 99796 - DNA, 75 bp, synthetic construct
  source 1..75: mol_type = other DNA
gcagtgttacgacacaacaccagtacgcaactcaatggcgaaaacagcacgctgcggatcaatagcctggcgatg

SEQ ID NO: 99797 - DNA, 75 bp, synthetic construct
  source 1..75: mol_type = other DNA
ataaggcaccggaaaacatgaaagaccaggtgatgaaagaccgtaatctgatgtgggatatcctgcagaagaacg

SEQ ID NO: 99798 - DNA, 75 bp, synthetic construct
  source 1..75: mol_type = other DNA
gctgggatgaggaatccgcttcctttattccagtcgaaccagaatccgatccgatgaacgtcaattttgacaagc

SEQ ID NO: 99799 - DNA, 75 bp, synthetic construct
  source 1..75: mol_type = other DNA
ttattcatgcagatgaaacgtccctgaggctccttgatacccggaaaggcggtaaatcctgctccggctggctgt

SEQ ID NO: 99800 - DNA, 75 bp, synthetic construct
  source 1..75: mol_type = other DNA
atacatctactgagctgttctatgatctggcaaagcgttctttcgaagcaagctggaaaacaatgcaagatatgt

SEQ ID NO: 99801 - DNA, 75 bp, synthetic construct
  source 1..75: mol_type = other DNA
gttgtcgaacgtcagatgagctacatgcgtcagcagctttccgcccgtatgctcagccgttaccagaacaactat

SEQ ID NO: 99802 - DNA, 75 bp, synthetic construct
  source 1..75: mol_type = other DNA
atgcgtgtcaaacatgcagtagttctactcatgcttatttcgccattaagttgggctggaaccatgactttccag

SEQ ID NO: 99803 - DNA, 75 bp, synthetic construct
  source 1..75: mol_type = other DNA
ggcgatgttgaaggcgggggatgtggtgtattgcgatccgccgtatgacggcacgttttccggttatcacactga

SEQ ID NO: 99804 - DNA, 75 bp, synthetic construct
  source 1..75: mol_type = other DNA
gcaaacatcggtgacgaatgcgccctgtttgaagccacccacggtactgcgccgaaatatgccggtcaggacaaa

SEQ ID NO: 99805 - DNA, 75 bp, synthetic construct
  source 1..75: mol_type = other DNA
cctttattctgcagcttattgctgagcaggagcgggtttgggggcttattttaaccaatgatggttattcatggc

SEQ ID NO: 99806 - DNA, 75 bp, synthetic construct
  source 1..75: mol_type = other DNA
tgctgccgtgcatcacagctcaccgatttacgtcaaacgtaatattctggcctcgacatttatcccgcatccgtg

SEQ ID NO: 99807 - DNA, 75 bp, synthetic construct
  source 1..75: mol_type = other DNA
agccagaaaaatgcactgaaaaatcagataaaagacatcctttccagcattcagaataaagccgttgccgatcta

SEQ ID NO: 99808 - DNA, 75 bp, synthetic construct
  source 1..75: mol_type = other DNA
tttccaaaaacagaatgtttgacggcaacaaagagctgaaagagtttgtgatgacgctgaccggctcactggtgt

SEQ ID NO: 99809 - DNA, 75 bp, synthetic construct
  source 1..75: mol_type = other DNA
cacgacaacctgaaaacacaggtcgccagtctgtcggcagagctggaaaccgcaaaaggcacaccggctggcggc

SEQ ID NO: 99810 - DNA, 75 bp, synthetic construct
  source 1..75: mol_type = other DNA
caacgatcgcgatgtacgcacaatcgttgagctggggaaagccatagacttcgatgccagaacggctatcccatt

SEQ ID NO: 99811 - DNA, 75 bp, synthetic construct
  source 1..75: mol_type = other DNA
atgagtaataccgacgcttcaggtgagaagcgagtgacaggcaccagtgagcgacgagagcagatcattcaacgc

SEQ ID NO: 99812 - DNA, 75 bp, synthetic construct
  source 1..75: mol_type = other DNA
tgaacaaattcttcaacaagctgggcttcgagggcaatgccacccgcgcagctgtctggcaggggcaggcggcag

SEQ ID NO: 99813 - DNA, 75 bp, synthetic construct
  source 1..75: mol_type = other DNA
tatatcagttctgctgatttaaccgcagagaagttcgccacagcaatccgaaaccactggcacgtggagaataag

SEQ ID NO: 99814 - DNA, 75 bp, synthetic construct
  source 1..75: mol_type = other DNA
cggtgcatgtgaaagacaccaaaccgggcgtcttcaaaaacgtgccgtttggcgaaggtgtagtggatttcgaac

SEQ ID NO: 99815 - DNA, 75 bp, synthetic construct
  source 1..75: mol_type = other DNA
cacacacgagatgttgatattaatgagccagacggaccaacgaatctttccgcatgggtaaggcttaagaacaaa

SEQ ID NO: 99816 - DNA, 75 bp, synthetic construct
  source 1..75: mol_type = other DNA
gggctatgacgtttactatcaggaagccaataacgaaacgcgtcgtcgtttccgtgacggcctgaaagagagcgt

SEQ ID NO: 99817 - DNA, 75 bp, synthetic construct
  source 1..75: mol_type = other DNA
accctgtgctggcgaaagtgtttccggcgctggcattacctgacgcacgcggtgatttcattcgtgtctgggatg

SEQ ID NO: 99818 - DNA, 75 bp, synthetic construct
  source 1..75: mol_type = other DNA
tatttgtcgtcgctaaacgcggtcatgcgattaatacgggtaaagtcctgcgcggtgccccctggcagattgtca

SEQ ID NO: 99819 - DNA, 75 bp, synthetic construct
  source 1..75: mol_type = other DNA
ataatctgcaaaccgttctcggttatgacttgttagccggtcagcgagtgttgcgagagcagattgcccgcctga

SEQ ID NO: 99820 - DNA, 75 bp, synthetic construct
  source 1..75: mol_type = other DNA
caaccggacgagttgacggctgaacaggcgtttttaacccgccatcctgatgctgttgtgttcagcgtgaaaaaa

SEQ ID NO: 99821 - DNA, 75 bp, synthetic construct
  source 1..75: mol_type = other DNA
aactgtttgaatcaacggttgcggagagtacttcgcaaatgcaaccggacagttgggcgacgctgttagcgcagt

SEQ ID NO: 99822 - DNA, 75 bp, synthetic construct
  source 1..75: mol_type = other DNA
cggtcattgctgccactcatcgcgaatacaagcagacatggaaaacactggatgacgaactggcctacgctctct

SEQ ID NO: 99823 - DNA, 75 bp, synthetic construct
  source 1..75: mol_type = other DNA
aaactggcctgaaccttacattaagatcaacggtaattgctctataattggtacagtaattttctcaggaaaacc

SEQ ID NO: 99824 - DNA, 75 bp, synthetic construct
  source 1..75: mol_type = other DNA
ggcggctggtggacgacccgcaggtaaaacagaccagcaagggcacaccaatgacgctggcacgtatggcggtat

SEQ ID NO: 99825 - DNA, 75 bp, synthetic construct
  source 1..75: mol_type = other DNA
ttatttccagtaccaccatccccgtcttcaaatacctggttgacccgcagatgctcggtgtttccaacagtatga

SEQ ID NO: 99826 - DNA, 75 bp, synthetic construct
  source 1..75: mol_type = other DNA
aagccagagaccaggcatctgttgttggtgatattatttctgataaacaggccacaatcagcttcggaactgaat

SEQ ID NO: 99827 - DNA, 75 bp, synthetic construct
  source 1..75: mol_type = other DNA
ccaaagtgcctcaggccttgcatctgtggggtacaaatcatttttgagtgaggtcaacaacctgaataaacgtat

SEQ ID NO: 99828 - DNA, 75 bp, synthetic construct
  source 1..75: mol_type = other DNA
tcagggcggcatcgccgtcagaccttgctgatgcacttgcgcaaaaaattcgtgaaggatggcagccatacggcg

SEQ ID NO: 99829 - DNA, 75 bp, synthetic construct
  source 1..75: mol_type = other DNA
ccgaggaaatcatcctcctttgctacatgcagctctggatggaaaaagcccagaacatcagcaaacacctgtatc

SEQ ID NO: 99830 - DNA, 75 bp, synthetic construct
  source 1..75: mol_type = other DNA
gctggggagtgttgctgccgggattgctgattgcagggctgatgtatgcggatttatcgccggatcagtggcgga

SEQ ID NO: 99831 - DNA, 75 bp, synthetic construct
  source 1..75: mol_type = other DNA
ttctttgtgccgccttactgacggccatgcccacagcgtcagcggatgtgaacagcgacatgaatcagttcttta

SEQ ID NO: 99832 - DNA, 75 bp, synthetic construct
  source 1..75: mol_type = other DNA
aggtgaacgccataacgctctgaacgatgcacgttaccaggcgaaatacgtttcagccatctggcaaaaactgct

SEQ ID NO: 99833 - DNA, 75 bp, synthetic construct
  source 1..75: mol_type = other DNA
gtgatcgagccacgtaatattaatctggaggttgaacaagcctggacagcattaacgttacaagaatggcagcag

SEQ ID NO: 99834 - DNA, 75 bp, synthetic construct
  source 1..75: mol_type = other DNA
tttagagaattaccagttcgagtgtgaaggcggaaatctaaacatgtgcagtgattggcaggagtttcgccgttg

SEQ ID NO: 99835 - DNA, 75 bp, synthetic construct
  source 1..75: mol_type = other DNA
ccagccggggcagtgtctggcttaacagcaataattcctgtgcaggtaccagcaactgcgaatatagagtaaaca

SEQ ID NO: 99836 - DNA, 75 bp, synthetic construct
  source 1..75: mol_type = other DNA
tttacggggaatgatgtcgccagcctggcaactctgacaaaagtagggcgggatattcttgcgaaatcgaccgtt

SEQ ID NO: 99837 - DNA, 75 bp, synthetic construct
  source 1..75: mol_type = other DNA
aacaccaactgcacaacagggaacgaataatacccaaatcgcaagcacggctttcgttatggccgcgattgccgc

SEQ ID NO: 99838 - DNA, 75 bp, synthetic construct
  source 1..75: mol_type = other DNA
gtgtgctcagaaacctgcgtgggtcgcatccggtatctgggcgtgctgctttacgacgccgaccgcatcgaggaa

SEQ ID NO: 99839 - DNA, 75 bp, synthetic construct
  source 1..75: mol_type = other DNA
ggagccgcagcccaaagcggccccccgcactccgcgtaagacccggagcgtgacaccggcaaaacgtggacgccc

SEQ ID NO: 99840 - DNA, 75 bp, synthetic construct
  source 1..75: mol_type = other DNA
gcagaatcaggaggatgtgaacaatctccgcaacgcgatgaaaagtgccaaaggtcctggtaacttccgcaacct

SEQ ID NO: 99841 - DNA, 75 bp, synthetic construct
  source 1..75: mol_type = other DNA
gcaattcctggaacattatccggctgctcaggactgcgcttataaatttattgtctgcgaggataaacccggcat

SEQ ID NO: 99842 - DNA, 75 bp, synthetic construct
  source 1..75: mol_type = other DNA
tgagcttttgggtgccattatatcttgcaaaagcatatggcatggaccttaaacaaatagctctgtttgcatggt

SEQ ID NO: 99843 - DNA, 75 bp, synthetic construct
  source 1..75: mol_type = other DNA
tgatgcgcttaaaaagcaacttgctcagccgggcacataccaggagctgggcttcgaagaacgcctgtcattact

SEQ ID NO: 99844 - DNA, 75 bp, synthetic construct
  source 1..75: mol_type = other DNA
agttacgttcagatgtgccggctgacctggaaattcccgtgaattatcgcggaaatattcagattgcattacagg

SEQ ID NO: 99845 - DNA, 75 bp, synthetic construct
  source 1..75: mol_type = other DNA
gaggctgactggtcagagttttataccacatcacgaaagccaacacctgcggatattcttgctctggcattatca

SEQ ID NO: 99846 - DNA, 75 bp, synthetic construct
  source 1..75: mol_type = other DNA
cgatatggccacactcagtaatgctctgctaagaagggctcacagtaataatgccgatgtcagtctttaccacca

SEQ ID NO: 99847 - DNA, 75 bp, synthetic construct
  source 1..75: mol_type = other DNA
tgctttccggcggcattttttgcctaagctcgtggattggtatcaacaacggtttgcaacgtctgagcaaaatgg

SEQ ID NO: 99848 - DNA, 75 bp, synthetic construct
  source 1..75: mol_type = other DNA
ggcgaacgtcagcgggcgtggatcgccatgctggtggcgcaggatagccgttgtctgttgctcgacgaaccgacc

SEQ ID NO: 99849 - DNA, 75 bp, synthetic construct
  source 1..75: mol_type = other DNA
ggtttgggagaaggctctgcattacccgttggtgtccctgttccatggccttccgccactccgccaacaggctgg

SEQ ID NO: 99850 - DNA, 75 bp, synthetic construct
  source 1..75: mol_type = other DNA
atggcggaactgactgattttttaccgtatgtccgtcgccatatcagtggtccgctgaacattatgatgacggat

SEQ ID NO: 99851 - DNA, 75 bp, synthetic construct
  source 1..75: mol_type = other DNA
aggatattgagccgatgcaactgctggaagtaatccgcagatttgaagatcgcggtgcaatggagcgagccaaca

SEQ ID NO: 99852 - DNA, 75 bp, synthetic construct
  source 1..75: mol_type = other DNA
atgaccaccccagtttcgctgatggatgaccagatggtcgatatggcgtttatcactcagctgaccggcctgacc

SEQ ID NO: 99853 - DNA, 75 bp, synthetic construct
  source 1..75: mol_type = other DNA
cgtcagatgagctacatgcgtcagcagctttccgcccgcatgctcagtcgttaccagaacaactatcacttcgga

SEQ ID NO: 99854 - DNA, 75 bp, synthetic construct
  source 1..75: mol_type = other DNA
tatggagcatatgcagtcgagcggttcgttaacatttggagattgctacatatcacttaacgagttcgccgcaga

SEQ ID NO: 99855 - DNA, 75 bp, synthetic construct
  source 1..75: mol_type = other DNA
caggccgcgggctacgccacgggcggctcactctacgcgcgcacgcaggtgaaaaccgtccagcttatctccatg

SEQ ID NO: 99856 - DNA, 75 bp, synthetic construct
  source 1..75: mol_type = other DNA
gaattcagcaaaactatcgatctggaaaccgcaggtggggtcatcgatcgggacaccattaagtggtggctgaaa

SEQ ID NO: 99857 - DNA, 75 bp, synthetic construct
  source 1..75: mol_type = other DNA
gcacccgtttcgcatcatcaagcggctgttcggcttcgtgaaagccagatacaggggggtgctgaaaaacgataa

SEQ ID NO: 99858 - DNA, 75 bp, synthetic construct
  source 1..75: mol_type = other DNA
ctgatttgggggcgatgattaatgacggacttccttcatgggccatgattatggcgatctttggggtgtcttatg

SEQ ID NO: 99859 - DNA, 75 bp, synthetic construct
  source 1..75: mol_type = other DNA
cagatacaacttaccgagagttgaataaagcagcacagcgtagcattacagcgccagacaggataggagaaagaa

SEQ ID NO: 99860 - DNA, 75 bp, synthetic construct
  source 1..75: mol_type = other DNA
tcccctctcagggtatttgatgaacgttttggtaccagaccattagatgccataaccgtaaaagatgtggtatcg

SEQ ID NO: 99861 - DNA, 75 bp, synthetic construct
  source 1..75: mol_type = other DNA
gctcagttgtatctgtaaggtgatggagccgcttttgttggaaccgcagaatgtcagccagatgcggcgtaaaat

SEQ ID NO: 99862 - DNA, 75 bp, synthetic construct
  source 1..75: mol_type = other DNA
aaagccgcttcattatatccgcagatggatgatgcagaacttatcgacatgctgacccgtgccatttttgttgcc

SEQ ID NO: 99863 - DNA, 75 bp, synthetic construct
  source 1..75: mol_type = other DNA
tggatggattcctgaaaggtaaatgcatcccacgagatttaaaggttaacgaaacaaacgctgaatatcttgtcc

SEQ ID NO: 99864 - DNA, 75 bp, synthetic construct
  source 1..75: mol_type = other DNA
cagctgatttccatgacgctgccggatatcaatgccggatgtggcggcatcgacgcctatctcggctcgttcagt

SEQ ID NO: 99865 - DNA, 75 bp, synthetic construct
  source 1..75: mol_type = other DNA
tctcctgaaatcacacaactttatataggtaagaaaattcctgatgatctcagaaagaaaggtgctatgtctcct

SEQ ID NO: 99866 - DNA, 75 bp, synthetic construct
  source 1..75: mol_type = other DNA
tgaaactattgaaaatctgttatatatcgatgctgatgtcatctgtaaaggctcattagctggattgcttgatat

SEQ ID NO: 99867 - DNA, 75 bp, synthetic construct
  source 1..75: mol_type = other DNA
gggttggactgaagcggctgacctgattgttaaaggtatggaaggcgcaatcaatgccaagaccgtaacctatga

SEQ ID NO: 99868 - DNA, 75 bp, synthetic construct
  source 1..75: mol_type = other DNA
atgaacaggaccagtccctattattttcgccgctcagtactttccttattgatatctgccttgatatatgccccg

SEQ ID NO: 99869 - DNA, 75 bp, synthetic construct
  source 1..75: mol_type = other DNA
cagaggcgggattatggatggggattcagcacgggcatctggtactgcatgatggatttgaaccacagcagacgc

SEQ ID NO: 99870 - DNA, 75 bp, synthetic construct
  source 1..75: mol_type = other DNA
agcagatgcagcgtcgtgaagaggtgaacattaatgtgcaccgggagcgcggggaggatgttgagccgggagatg

SEQ ID NO: 99871 - DNA, 75 bp, synthetic construct
  source 1..75: mol_type = other DNA
gaggcgctggcgggcgggccgattggcaagctgcgcgataacgacatcatcgagattgccgtggatcgtctgacg

SEQ ID NO: 99872 - DNA, 75 bp, synthetic construct
  source 1..75: mol_type = other DNA
tcagggcggcttcaccgtcagagcttgcggagcgactgtcacaaaaactgaaggaaggctggcagccgtttggca

SEQ ID NO: 99873 - DNA, 75 bp, synthetic construct
  source 1..75: mol_type = other DNA
gtggccgcatattggaactgggttgtaaatccaattgattacaaaaaatatagagctttcacgtatttatcagga

SEQ ID NO: 99874 - DNA, 75 bp, synthetic construct
  source 1..75: mol_type = other DNA
agcacggctttcgttatggctgcgattgccgcccttgtagattcgtcacctgatgcactgaacacgctgaacgag

SEQ ID NO: 99875 - DNA, 75 bp, synthetic construct
  source 1..75: mol_type = other DNA
tgcacttgatgacgcccgttaccaggcaaaatacgtttcagctatctggcaaaaactgatcccgagtcaggctga

SEQ ID NO: 99876 - DNA, 75 bp, synthetic construct
  source 1..75: mol_type = other DNA
aaatctatttatccaccagatggaacatgctggcgtcgcccaaaagatatattaagtgagttacaggaagaagat

SEQ ID NO: 99877 - DNA, 75 bp, synthetic construct
  source 1..75: mol_type = other DNA
atgaaagcgttgattgggataacaccaagaacctcatgatcgagggtgataaccttgaagtattgaagcttcttc

SEQ ID NO: 99878 - DNA, 75 bp, synthetic construct
  source 1..75: mol_type = other DNA
gcagcgggtttaatgaactgaagtttgacgatgcgacagggaaagaacaggtctacatccacgcgcagaagaaca

SEQ ID NO: 99879 - DNA, 75 bp, synthetic construct
  source 1..75: mol_type = other DNA
tccagaaactgactgaaagagttgatgaacttgagtcagaattaaagttgttatcaacttcccgaagcgatatcg

SEQ ID NO: 99880 - DNA, 75 bp, synthetic construct
  source 1..75: mol_type = other DNA
ccataccattatcggtgcgggtaatcaggcaggcggcgcggatgcggcgaacctgctgaaaccggcgctggcaag

SEQ ID NO: 99881 - DNA, 75 bp, synthetic construct
  source 1..75: mol_type = other DNA
aaacgctgacggggaaacaggatgacgccctgctggcggtgcttaaccgctttaccgaagacgtgacggaaaaag

SEQ ID NO: 99882 - DNA, 75 bp, synthetic construct
  source 1..75: mol_type = other DNA
acattctgaccggggaaacccgcaacctgtccggcagtgtcccggctgatggtggctataccgttattcccgagc

SEQ ID NO: 99883 - DNA, 75 bp, synthetic construct
  source 1..75: mol_type = other DNA
aacccggcaactctccggtaattccggatggtttatccacggtatgcgctgaggcttatcaggttgtaggagtta

SEQ ID NO: 99884 - DNA, 75 bp, synthetic construct
  source 1..75: mol_type = other DNA
cgccgtccgggcaggcggtgtggctggagatcgcccgccagtcggcgcgcgcggtcagcgagctggatagccgcg

SEQ ID NO: 99885 - DNA, 75 bp, synthetic construct
  source 1..75: mol_type = other DNA
aagcacgcctaacgattcattcgaccatgttgtgggtaacgttccgttcggtggtcgtgataacacacgcaacat

SEQ ID NO: 99886 - DNA, 75 bp, synthetic construct
  source 1..75: mol_type = other DNA
tgagctattcaaaattcacttccagtcaggtggcgctaattcagatatcacgacccgcactatcgaagcggtgcg

SEQ ID NO: 99887 - DNA, 75 bp, synthetic construct
  source 1..75: mol_type = other DNA
accactgtctgcatgacgtcattgatatgagtggattcaaccacccacgggccgacctgacaaaggggcagtatg

SEQ ID NO: 99888 - DNA, 75 bp, synthetic construct
  source 1..75: mol_type = other DNA
gcattgaccacggtaaaacgccagcatcgccctgctcttgatctttctcgcctgcctgaacttatgtcgcgtatt

SEQ ID NO: 99889 - DNA, 75 bp, synthetic construct
  source 1..75: mol_type = other DNA
acaaagcaaatggcgatggccatggtttatctgtaacttacactattgacggtttctcatttgctggtgcttacg

SEQ ID NO: 99890 - DNA, 75 bp, synthetic construct
  source 1..75: mol_type = other DNA
ggccccggctggaaaatgcctgcggatatccgcttacagctgcgcgataacacactgatactcagtgataacggc

SEQ ID NO: 99891 - DNA, 75 bp, synthetic construct
  source 1..75: mol_type = other DNA
aggcgtgactggggattctatggattgattgccgaggaagtaggagaaattgcccctcagtttgttcactggcga

SEQ ID NO: 99892 - DNA, 75 bp, synthetic construct
  source 1..75: mol_type = other DNA
acatgcattatccctggagcgggaacgccagctggaaatacaggaacgcacactggatggtccttcgttgtcgct

SEQ ID NO: 99893 - DNA, 75 bp, synthetic construct
  source 1..75: mol_type = other DNA
cttcacagtcgaaggaaagcgctgctgccagtgcgaagactgcatcagaaagcgcgaaggctgcgacaagcaaag

SEQ ID NO: 99894 - DNA, 75 bp, synthetic construct
  source 1..75: mol_type = other DNA
gtgattagtctattcgacatgtttaaggtggggattggtccctcatcttcccataccgtagggcctatgaaggcg

SEQ ID NO: 99895 - DNA, 75 bp, synthetic construct
  source 1..75: mol_type = other DNA
gccctcaactggtggttctaccgttctaaattcggctcagttgtcgttatttttgccgcgacaacgctgttaatg

SEQ ID NO: 99896 - DNA, 75 bp, synthetic construct
  source 1..75: mol_type = other DNA
tccggctcgaacctggctaagcactgtagaaaacggtcaaccagagaagtctattgcagttaattttcattcgat

SEQ ID NO: 99897 - DNA, 75 bp, synthetic construct
  source 1..75: mol_type = other DNA
ggacgcggctacccgattggcgcagcgttcttctccgcaggccgtttttacccggcactggtcggcaatgatatc

SEQ ID NO: 99898 - DNA, 75 bp, synthetic construct
  source 1..75: mol_type = other DNA
tgcaggtaaagtctggctatcaccgctcgtggactgcttcgatggaaaagttgtgagctggtctctcagtacacg

SEQ ID NO: 99899 - DNA, 75 bp, synthetic construct
  source 1..75: mol_type = other DNA
gtggaagttattggcactcgcggcgcaatgaccatacgcgttactacgccgagcacgtccagcggtggcggaatt

SEQ ID NO: 99900 - DNA, 75 bp, synthetic construct
  source 1..75: mol_type = other DNA
cagtctattttacagcggcatattgcctcgttttcgcatcatggtttgcctgaaggcagtgacgacgcgctacgg

SEQ ID NO: 99901 - DNA, 75 bp, synthetic construct
  source 1..75: mol_type = other DNA
tcagggagattcaggagcgtgcgataaaggctgtcatccatggtgagcgtccagatcagctttacgagatgatca

SEQ ID NO: 99902 - DNA, 75 bp, synthetic construct
  source 1..75: mol_type = other DNA
ggcgcggcggtggcgccggtccggtggattatctgctggggaaagaccgacagcgcgacggcgccaccgttttgc

SEQ ID NO: 99903 - DNA, 75 bp, synthetic construct
  source 1..75: mol_type = other DNA
gcattgaccacggtaaaacgccagcatcgccctgctcttgatctttcacgcctgcctgaacttttgtcgcgtatt

SEQ ID NO: 99904 - DNA, 75 bp, synthetic construct
  source 1..75: mol_type = other DNA
atggatattttatcagcgatttttcgccagcaatcccggcgaattggcctgctgatccccagcgtggtcgtctcc

SEQ ID NO: 99905 - DNA, 75 bp, synthetic construct
  source 1..75: mol_type = other DNA
acgaggggcatcgtatcaggctgacaaaggacggacgctgcatcattacctgtaaaacggttgaggtttacgctg

SEQ ID NO: 99906 - DNA, 75 bp, synthetic construct
  source 1..75: mol_type = other DNA
gtagaaccatatcataagcgtgcaatagataactggtacgatacaaccgtagactgttcagaagattcgttttgg

SEQ ID NO: 99907 - DNA, 75 bp, synthetic construct
  source 1..75: mol_type = other DNA
ctcgccctggctaatgcgttgaagtgttcccctgactatctgatgaaaggagaggaaagtctttcaaacattgcc

SEQ ID NO: 99908 - DNA, 75 bp, synthetic construct
  source 1..75: mol_type = other DNA
cagctctgtctttatttccatgcagtaacatttatgcaaacaatataaccactcagaaattcgaagctatattgg

SEQ ID NO: 99909 - DNA, 75 bp, synthetic construct
  source 1..75: mol_type = other DNA
gttgcgacaatcttctcctttgccgccaatgaagaacaaaatgccattggtgaaatttccgatgaaacttttgat

SEQ ID NO: 99910 - DNA, 75 bp, synthetic construct
  source 1..75: mol_type = other DNA
cctgcgtgccattaacctcaatgatccatgacgctactgcgcaactggatgtgggtcagcagcgactcaacctga

SEQ ID NO: 99911 - DNA, 75 bp, synthetic construct
  source 1..75: mol_type = other DNA
gtcatgggagtaccgctacaccctgaacgtggtgatagaggatttcagtggtgaccagaatctgttgatggcccc

SEQ ID NO: 99912 - DNA, 75 bp, synthetic construct
  source 1..75: mol_type = other DNA
tccagcagggaaaccgctggcttaactggctggagaagcagccggaagattcagtgcgtccggtggtgattgagt

SEQ ID NO: 99913 - DNA, 75 bp, synthetic construct
  source 1..75: mol_type = other DNA
acatgggcgcaacggctcaagcgtgttttcaatatcgacatcgagacctgcagcggctgcggcggcgccatgaaa

SEQ ID NO: 99914 - DNA, 75 bp, synthetic construct
  source 1..75: mol_type = other DNA
gattttcaaaaagcagaaagttgatgacaaggtgctgtttatcgacgccagccgtgaatttaaggctggaaaaaa

SEQ ID NO: 99915 - DNA, 75 bp, synthetic construct
  source 1..75: mol_type = other DNA
atggctacatcgacagtaattcctgatgacatcaaaacgctaaagggagatgtcagtaaggcaaaggaagatatt

SEQ ID NO: 99916 - DNA, 75 bp, synthetic construct
  source 1..75: mol_type = other DNA
tatgacccgtaacactatccttcacgccgggccgccaatccactgggaaaaaatgtgcggcgcaatgaagggcgc

SEQ ID NO: 99917 - DNA, 75 bp, synthetic construct
  source 1..75: mol_type = other DNA
tccgggaaaaatgggatgaactggttatccgcctggggcgttcgcccgcgcagcgttgcgtgaatcacatttctg

SEQ ID NO: 99918 - DNA, 75 bp, synthetic construct
  source 1..75: mol_type = other DNA
attcttactgctgctgcgatggaaccagattcaactgctggtcagcttctggcagcgttgaataaactctatgcc

SEQ ID NO: 99919 - DNA, 75 bp, synthetic construct
  source 1..75: mol_type = other DNA
aatcgtgagtctttacgagcaggcggccagctatgatggcgagatcactagaccgaaagaacccaactggacagc

SEQ ID NO: 99920 - DNA, 75 bp, synthetic construct
  source 1..75: mol_type = other DNA
atgacggaacaggaaattatgtcattccggaggaaggtacctctgtcccggacaccgtgaatgacaggagccagt

SEQ ID NO: 99921 - DNA, 75 bp, synthetic construct
  source 1..75: mol_type = other DNA
gatgatggctaacgaacgcttcgtgctgccgaaaaatgctagtttttatgcactgtatgagcgccgtcatgagcc

SEQ ID NO: 99922 - DNA, 75 bp, synthetic construct
  source 1..75: mol_type = other DNA
agcgttatctcaaagcattaaacccaaactggcctgagccttacattaagattaacggtaattgctctataattg

SEQ ID NO: 99923 - DNA, 75 bp, synthetic construct
  source 1..75: mol_type = other DNA
aggatcacgccagcgatagtgaaactggcgagacggcagatcccttaattacgatgaacggtcatcacgttatca

SEQ ID NO: 99924 - DNA, 75 bp, synthetic construct
  source 1..75: mol_type = other DNA
agtcaggattcggctcgctggggagtgggtaagccgttatatcaggatctgcttttccgcacgaaggcagcattg

SEQ ID NO: 99925 - DNA, 75 bp, synthetic construct
  source 1..75: mol_type = other DNA
gtatatcgaaacggtctatggtcgtggataccgttttactgtacctattgtgattgtgaccgataatgaaccggt

SEQ ID NO: 99926 - DNA, 75 bp, synthetic construct
  source 1..75: mol_type = other DNA
tgcacagctgattgttgataagggctattcgtatcgacaagccagtgaggcgatgaatgtcggttctaccacgct

SEQ ID NO: 99927 - DNA, 75 bp, synthetic construct
  source 1..75: mol_type = other DNA
gcgcgcaggaattgttgcaggaagacatggcaacattcgacggacatatcgttgaagcgttgatgaaaatgccag

SEQ ID NO: 99928 - DNA, 75 bp, synthetic construct
  source 1..75: mol_type = other DNA
cagaaaaagtcgcccgcgctcacggatatcgcggcgatatgcgtgacctgacgcgcgggcaggcgctggaaatac

SEQ ID NO: 99929 - DNA, 75 bp, synthetic construct
  source 1..75: mol_type = other DNA
atgtggccggataaccgtatcgcccgtgacgcgcactatctttaccggtatgaccgtcacggcagactgacagag

SEQ ID NO: 99930 - DNA, 75 bp, synthetic construct
  source 1..75: mol_type = other DNA
caatctcacccaagtgtacaccaatggggggtttctggtggggggaaccgtcggtgcgcttaactcctatcataa

SEQ ID NO: 99931 - DNA, 75 bp, synthetic construct
  source 1..75: mol_type = other DNA
tgtcgttttaaacttgatggcgcgcttacggctaatcagtacgcactggcgctgtactggccggtttctgccctg

SEQ ID NO: 99932 - DNA, 75 bp, synthetic construct
  source 1..75: mol_type = other DNA
gcgaccagaatctgctgatggccccggttttgctgtggctgcgtgataaccagcccgatgccatcaataacccgg

SEQ ID NO: 99933 - DNA, 75 bp, synthetic construct
  source 1..75: mol_type = other DNA
gtctgtgatatcagccttaacctgcaactgacggaacgtgtgctggtcagtactgacggcagtgtgtcgagcgtt

SEQ ID NO: 99934 - DNA, 75 bp, synthetic construct
  source 1..75: mol_type = other DNA
atcaagatgtaggaagtcataacaattttgtggggcaggctaataatacaaccattaacgggggcagacagtcaa

SEQ ID NO: 99935 - DNA, 75 bp, synthetic construct
  source 1..75: mol_type = other DNA
gttctaccgcaggggcgggggaactccaagtgatatccatcatcgcatccagtgcgcccggtttatccccgctga

SEQ ID NO: 99936 - DNA, 75 bp, synthetic construct
  source 1..75: mol_type = other DNA
ctgtcactactgccattcgtcgcgaatacaagcagacatggaaaaccctggatgaagagctggcttacgctctct

SEQ ID NO: 99937 - DNA, 75 bp, synthetic construct
  source 1..75: mol_type = other DNA
gcagcggatgtgatactggaaatctgccatcaggcagatgtggagccggggatattcacggtgatccacacatgg

SEQ ID NO: 99938 - DNA, 75 bp, synthetic construct
  source 1..75: mol_type = other DNA
tacctgaaaaaaccgccggtgccgatgagccgtctggagcactatgctggtcaggatgaaattggtctgcgttac

SEQ ID NO: 99939 - DNA, 75 bp, synthetic construct
  source 1..75: mol_type = other DNA
acggaggacggttgtggcgcacgtcttcggtgaacgcactctggccacactggaacgtcttctgagcctgctgtc

SEQ ID NO: 99940 - DNA, 75 bp, synthetic construct
  source 1..75: mol_type = other DNA
tgtcaaaacgtggcagggatggtgagttggtgattctgacagcgctaaactgtacgcagggagatcgctaccttg

SEQ ID NO: 99941 - DNA, 75 bp, synthetic construct
  source 1..75: mol_type = other DNA
acgaagtaaacaaaattatgcaggcagccaatatcagccagcctgacgccgataagttgcttgctgcatcacgtg

SEQ ID NO: 99942 - DNA, 75 bp, synthetic construct
  source 1..75: mol_type = other DNA
atgatgctggcgcaaaaacaaaactttatgaatcaattttataaaaaatctcattacagtatacaaaaacatcag

SEQ ID NO: 99943 - DNA, 75 bp, synthetic construct
  source 1..75: mol_type = other DNA
tatagcgcgaaaaggccttgttcagctcagtagcgccaccaacagcgattctgaaacgctggcggcaacaccaaa

SEQ ID NO: 99944 - DNA, 75 bp, synthetic construct
  source 1..75: mol_type = other DNA
ggcatcaggtatggcctcacagagtcacctgcgttcgacctatttctccaccccgtccacgctggcgcacgacgc

SEQ ID NO: 99945 - DNA, 75 bp, synthetic construct
  source 1..75: mol_type = other DNA
gattattacggttacgatctgaatactaatgtcaaagtaggtatcgcttttgctactgctgattctgttataact

SEQ ID NO: 99946 - DNA, 75 bp, synthetic construct
  source 1..75: mol_type = other DNA
gggcgatgacggtacataaatcgcagggatcggagttcgaccatgcggcgttgattttaccgagccaacgcacgc

SEQ ID NO: 99947 - DNA, 75 bp, synthetic construct
  source 1..75: mol_type = other DNA
tatccccgctggcgcggggaacacctgtgctcctgttttgtgccgtagttaccgatcggtttatccccgctggcg

SEQ ID NO: 99948 - DNA, 75 bp, synthetic construct
  source 1..75: mol_type = other DNA
gttaaaattgtagcacaataccttcccgcaattgtaattagtgcgtcaacagcaacaatttcagggttaatgttt

SEQ ID NO: 99949 - DNA, 75 bp, synthetic construct
  source 1..75: mol_type = other DNA
gtggtctgggacggacagaaggcaggccatgcggttggcatactggtactgccgcttgaaggtacagagacggtg

SEQ ID NO: 99950 - DNA, 75 bp, synthetic construct
  source 1..75: mol_type = other DNA
gggcggtaacgctgctgaagcgcatcccgtcggtttccgctgggcgatggaagcgaaaaacaacaacgatgcaac

SEQ ID NO: 99951 - DNA, 75 bp, synthetic construct
  source 1..75: mol_type = other DNA
atgatgaaaaatacaggctatatcttagctctttgtctggctgcatcgtgccagaccctggcccacgatgtctgg

SEQ ID NO: 99952 - DNA, 75 bp, synthetic construct
  source 1..75: mol_type = other DNA
ggggggatggaatttttatcagtatccgctgaatccggttcagtatatagattcaatgggactggcatcaaaata

SEQ ID NO: 99953 - DNA, 75 bp, synthetic construct
  source 1..75: mol_type = other DNA
aaaggtcaggacgcgccgggcgaagcgcgtaacgacggcgaaattctggcgggtatctaccatcatctgcgcgag

SEQ ID NO: 99954 - DNA, 75 bp, synthetic construct
  source 1..75: mol_type = other DNA
taactgaagctaatggcgatggtttcggtttctcaactacttatgagtatgaaggattcggcgtgggtgcaacct

SEQ ID NO: 99955 - DNA, 75 bp, synthetic construct
  source 1..75: mol_type = other DNA
atgaaacttaacgacagtaacttattccgccagcaggcgttgattaacggggaatggctggacgccaacaatggc

SEQ ID NO: 99956 - DNA, 75 bp, synthetic construct
  source 1..75: mol_type = other DNA
tggcgatccgatattaaccagcggcgaaacgggcattgcgtacggttcatcgaccggcagtaccggtccggtgag

SEQ ID NO: 99957 - DNA, 75 bp, synthetic construct
  source 1..75: mol_type = other DNA
gtccggatgtggactggcgttacgtggaaacgctctgcctgcgtctgtatgaacacaatggcgtggaattacaga

SEQ ID NO: 99958 - DNA, 75 bp, synthetic construct
  source 1..75: mol_type = other DNA
ttcgctggtattacctgaagcccgcggtgatttcattcgtatctgggatgacgggcgaggtgcagatggtggtcg

SEQ ID NO: 99959 - DNA, 75 bp, synthetic construct
  source 1..75: mol_type = other DNA
ttgatatggccctgaacaccggcctggcacttcttggttatttctacatcatgttctgcagcggacgatggctgt

SEQ ID NO: 99960 - DNA, 75 bp, synthetic construct
  source 1..75: mol_type = other DNA
ttttgaagtgggagcggagaaagtctccaaagtgcagttcagcgttgagagtgaatatctcgaatactttgttat

SEQ ID NO: 99961 - DNA, 75 bp, synthetic construct
  source 1..75: mol_type = other DNA
gtgcacagcctgtaatgcctgcagatgttaaagcgggtgaatatacaggggctttgtcttttgttgtgacgtatc

SEQ ID NO: 99962 - DNA, 75 bp, synthetic construct
  source 1..75: mol_type = other DNA
aatccatatgggccggactttaattatgctgccagatttaataatctggatatggaagcactgaaaaaagatata

SEQ ID NO: 99963 - DNA, 75 bp, synthetic construct
  source 1..75: mol_type = other DNA
ctatggtcctttcttcattcgaatggcttggcatggtgctggaacataccgtacatacgatggtcgaggtggtgc

SEQ ID NO: 99964 - DNA, 75 bp, synthetic construct
  source 1..75: mol_type = other DNA
aaggcgggggtaaacctagaaataccgttcacaccaggaagaacggatgcatctcaggagcagacagatattgtt

SEQ ID NO: 99965 - DNA, 75 bp, synthetic construct
  source 1..75: mol_type = other DNA
tattatcgactgcattcgtgctgaactgggtaccggaactacaaaaaactccgtttttcagcatatccagagcct

SEQ ID NO: 99966 - DNA, 75 bp, synthetic construct
  source 1..75: mol_type = other DNA
gggcgcagcagccgctggtacaaaagtgaagtggagcagtggatgcaacaacgaattgaggaatcacgaggagca

SEQ ID NO: 99967 - DNA, 75 bp, synthetic construct
  source 1..75: mol_type = other DNA
ggcgacagctggcggcaccaaaacgcccgtcgggaccaacgccaattgagttgctgaaacaggagtatgaacgcc

SEQ ID NO: 99968 - DNA, 75 bp, synthetic construct
  source 1..75: mol_type = other DNA
ggcgacaactggcggcacccaaacgcccgtcggggccaacaccgattgagttactgaaacaggagtatgaacgcc

SEQ ID NO: 99969 - DNA, 75 bp, synthetic construct
  source 1..75: mol_type = other DNA
atttcaaacaggcgcgtaatcccgcgtttcggtttatccccgctggcgcggggaacacactaagcatacataact

SEQ ID NO: 99970 - DNA, 75 bp, synthetic construct
  source 1..75: mol_type = other DNA
atcgttgaggcggttctgcaagtcgatcgctttgaaaaatacatgctgtggctaataaaagataagacgctacct

SEQ ID NO: 99971 - DNA, 75 bp, synthetic construct
  source 1..75: mol_type = other DNA
tcagcagaacaccctcactgttaaatcatgcgtcagagtggataaccctttccggtcagcagataacgcgactga

SEQ ID NO: 99972 - DNA, 75 bp, synthetic construct
  source 1..75: mol_type = other DNA
aacagcgaatggcgcagtttacgcagcagaaagcatccacgttacagtcagaacagaagctgaaaacagggatta

SEQ ID NO: 99973 - DNA, 75 bp, synthetic construct
  source 1..75: mol_type = other DNA
ggatgatgtgcgtccgatgcttgaacagatggtgaaggaggcggtaagccatattcctgttccgcgtgatggtcg

SEQ ID NO: 99974 - DNA, 75 bp, synthetic construct
  source 1..75: mol_type = other DNA
gtcgggagatcgtcaaaacaaaagccactgcgacaggcacgacgctcactggcggtgaacaaatcgtcgagggtg

SEQ ID NO: 99975 - DNA, 75 bp, synthetic construct
  source 1..75: mol_type = other DNA
ccggtggtgacccccggtcattaccggattatgctgccctgcgtgatgaaatcagcaaactgacccacccggcac

SEQ ID NO: 99976 - DNA, 75 bp, synthetic construct
  source 1..75: mol_type = other DNA
tgatgaatttttcgaaacacatagccgcaatgtaaccaactggatgcagctaccagagccgccgcaggaggtgaa

SEQ ID NO: 99977 - DNA, 75 bp, synthetic construct
  source 1..75: mol_type = other DNA
gaaggtgagcgccataatgcacttgatgacgcccgttaccaggcaaaatacgtttcagttatctggcaaaaactg

SEQ ID NO: 99978 - DNA, 75 bp, synthetic construct
  source 1..75: mol_type = other DNA
tgccatacgtaatatctatggtgagttcaagactgtaaacaccgaaaattattcaatatgggaatcagtaggctc

SEQ ID NO: 99979 - DNA, 75 bp, synthetic construct
  source 1..75: mol_type = other DNA
gatatatctcccgcgaagtttacacgttactgcgcaatcaaaacaggcggatcaacagtatcccgataacagctt

SEQ ID NO: 99980 - DNA, 75 bp, synthetic construct
  source 1..75: mol_type = other DNA
atgaaaataggcacacagaatcaggcgttctttccggaaaatattctggagaaatttcgttatatcaaagagatg

SEQ ID NO: 99981 - DNA, 75 bp, synthetic construct
  source 1..75: mol_type = other DNA
ttatccgcacggatgatgagcgcacccaccggtaccattacgacagtcagcaccggctggtgcactacacgcgga

SEQ ID NO: 99982 - DNA, 75 bp, synthetic construct
  source 1..75: mol_type = other DNA
gtacacaaagcattatggttgggccggacggtgagttgtacggcgcatccgacccgcgctcggtggatgatttaa

SEQ ID NO: 99983 - DNA, 75 bp, synthetic construct
  source 1..75: mol_type = other DNA
cgctccattcggctgaagaaaacatcaacgggcaacgggttcagacattctgtacttccttttaccggcaggtac

SEQ ID NO: 99984 - DNA, 75 bp, synthetic construct
  source 1..75: mol_type = other DNA
cccgtagagacggtggttattgaccttgcttatgaaggttccggcagtggcgactggcgcactgacggcttcatc

SEQ ID NO: 99985 - DNA, 75 bp, synthetic construct
  source 1..75: mol_type = other DNA
gtatcccgccataacccttcagcacaaaacgttattgcaggccttaacgattatgtgatggatctctctgtgaga

SEQ ID NO: 99986 - DNA, 75 bp, synthetic construct
  source 1..75: mol_type = other DNA
aaataactgccctgatttctgtttttatctcgctgaaacgctgatggtgattgaccatcagaaaaaaagcacccg

SEQ ID NO: 99987 - DNA, 75 bp, synthetic construct
  source 1..75: mol_type = other DNA
ttatcgctctgcttctggaggatgcaaaacgcctccagcaactggaaccaaatgcaggcactgaagcccgcatct

SEQ ID NO: 99988 - DNA, 75 bp, synthetic construct
  source 1..75: mol_type = other DNA
ctccccatggtgaaaggctgtttcaccaatgccgggcaatttcaggtggtgattggcaccaatgtgggtgattac

SEQ ID NO: 99989 - DNA, 75 bp, synthetic construct
  source 1..75: mol_type = other DNA
cgccctgccctcgccttaaatcgcatttctgaactacttgaacgactggatacctacagaggtcaacctctcacc

SEQ ID NO: 99990 - DNA, 75 bp, synthetic construct
  source 1..75: mol_type = other DNA
ctagttatggaaaactagtgacttttggtatcgttccattcaaacctgaaactgggtatggctatattcgtcgcg

SEQ ID NO: 99991 - DNA, 75 bp, synthetic construct
  source 1..75: mol_type = other DNA
ttatcagctaccgcccgaactggcgctggttggggatgcgggagaccgcgacaaaaagttttgtcgatgaggtgg

SEQ ID NO: 99992 - DNA, 75 bp, synthetic construct
  source 1..75: mol_type = other DNA
aataaacgacgtagttcagtgaataaagtcgccaaatcgctacggcaaaataatggagatctggctattaccgtt

SEQ ID NO: 99993 - DNA, 75 bp, synthetic construct
  source 1..75: mol_type = other DNA
tatccgcaacgacctggcctggcgtacgccactgccggagcaggcgttatatctgggaatggattacggcgaggt

SEQ ID NO: 99994 - DNA, 75 bp, synthetic construct
  source 1..75: mol_type = other DNA
ggtggtcttgacggcggtaacatggccgggacagacgcgttcggctggattggcggcaacgagatcgagatggaa

SEQ ID NO: 99995 - DNA, 75 bp, synthetic construct
  source 1..75: mol_type = other DNA
ggaactggcgcgacgcgtctataacagtcctttcccgctggtggatatcactatcacaccggatgacgaaatcat

SEQ ID NO: 99996 - DNA, 75 bp, synthetic construct
  source 1..75: mol_type = other DNA
tttctatccttgctggttgttcatcaccgccagagccaacacccgtgcagtttgaaaaggcaaatgaagtgatca

SEQ ID NO: 99997 - DNA, 75 bp, synthetic construct
  source 1..75: mol_type = other DNA
acccggctctggatatggctggtgcattgaccacggtaaaacgccagcatcgccccgctctgaatctttcacgcc

SEQ ID NO: 99998 - DNA, 75 bp, synthetic construct
  source 1..75: mol_type = other DNA
attgccgataagtttaaacgtgccaataaaatagaggagtattcacaacgattcaaaaaacttggatacgatggt

SEQ ID NO: 99999 - DNA, 75 bp, synthetic construct
  source 1..75: mol_type = other DNA
attacacaccggcagagccggatgtggcgggtgcgatatacctgaaatctgaggatggtcaggactggtatgaat

SEQ ID NO: 100000 - DNA, 75 bp, synthetic construct
  source 1..75: mol_type = other DNA
ataccggcgatattgccggtgcgctggagattgcccgttatgccctgaagtacggtctgaccatgccgggtaaac

SEQ ID NO: 100001 - DNA, 75 bp, synthetic construct
  source 1..75: mol_type = other DNA
acaaggagctgaaaaagtttgccgcccgtatctcatcgcagcttttcatgatgtatgaggaactctgcgatgcct

SEQ ID NO: 100002 - DNA, 75 bp, synthetic construct
  source 1..75: mol_type = other DNA
gtgcaccgaaggcgatcaacatgccaatggcaataatgaaacaggcgagacagcaaatcccttaattaaggtgaa

SEQ ID NO: 100003 - DNA, 75 bp, synthetic construct
  source 1..75: mol_type = other DNA
tgcatcgctgaccgcaaaaggttttactcagttaagcagcgcaaccaacagcacgtctgaaacactggccgcaac

SEQ ID NO: 100004 - DNA, 75 bp, synthetic construct
  source 1..75: mol_type = other DNA
ggctctcgaaaaccttggttttggagaaggtgctaactgggttatgttacctggaggaatgataattcagcgtgt

SEQ ID NO: 100005 - DNA, 75 bp, synthetic construct
  source 1..75: mol_type = other DNA
aaaaagctgtctctggcgtataacgcgcaaagccagtcctctgccacctggggcaataacgtgatcgtcattcgc

SEQ ID NO: 100006 - DNA, 75 bp, synthetic construct
  source 1..75: mol_type = other DNA
tggatgacctcgtttgggacattaaagcgaattggtgttgagtgcacaggtacctatggttccggtttgcttcgt

SEQ ID NO: 100007 - DNA, 75 bp, synthetic construct
  source 1..75: mol_type = other DNA
gatgcggtcgcaaatattccacagccggcggacggtaaaagtctcaccccggatgatgtgcgtccgatgcttgaa

SEQ ID NO: 100008 - DNA, 75 bp, synthetic construct
  source 1..75: mol_type = other DNA
ccgttttccgggaacaccatattaatcgagtaggcagcctggcggctgcggcttgtcatggcctgaaattaccgt

SEQ ID NO: 100009 - DNA, 75 bp, synthetic construct
  source 1..75: mol_type = other DNA
ttcaggacgccctgaaatcctgtggcttaccggcgggtgccgtgcaggcgattgataatcctgaccgtgcgctgg

SEQ ID NO: 100010 - DNA, 75 bp, synthetic construct
  source 1..75: mol_type = other DNA
gcgaagcgatgcttgaccgtctggcactgacgcccgcacggctgaaaggcattgccgacgatgtgcgccaggtgt

SEQ ID NO: 100011 - DNA, 75 bp, synthetic construct
  source 1..75: mol_type = other DNA
ctgccggtggtttccgtgccgcatatgcgttgtgaatgtaatcagagcgatgaagagttcggtggcgtagtgcgt

SEQ ID NO: 100012 - DNA, 75 bp, synthetic construct
  source 1..75: mol_type = other DNA
ctggggaaagccatagacttcgatgccagaacggctattccattcgaaggtgagcgccataatgcacttgatgac

SEQ ID NO: 100013 - DNA, 75 bp, synthetic construct
  source 1..75: mol_type = other DNA
cgctggaatcggcccaaagcgttgccgaacgcttcggtatttcggtggctgagttacgcaaactcaaccagtttc

SEQ ID NO: 100014 - DNA, 75 bp, synthetic construct
  source 1..75: mol_type = other DNA
gcgtgtagccgaaggacatacaaaaatggaagcgatacgctgtctaaagcgatatatctcccgcgaagtttacac

SEQ ID NO: 100015 - DNA, 75 bp, synthetic construct
  source 1..75: mol_type = other DNA
ctgggaaaacagataaatgcccgcattgacgaagattttttgaaagagctgatgcgtcttggtcgcctgcagaaa

SEQ ID NO: 100016 - DNA, 75 bp, synthetic construct
  source 1..75: mol_type = other DNA
taacgttcctctggagtgtcgtggctctggcgacatcgtccacttttcctccgccgggaatgacgctgcctgaat

SEQ ID NO: 100017 - DNA, 75 bp, synthetic construct
  source 1..75: mol_type = other DNA
ccagttacgaatacagatcctctggggttagaagtttttcctagaccattccccttgccaattccatggcccaaa

SEQ ID NO: 100018 - DNA, 75 bp, synthetic construct
  source 1..75: mol_type = other DNA
atgaccgaacgcatagaatttgttttgccttacccgccgacggtgaacacttactggcgacgccgtggcagcaca

SEQ ID NO: 100019 - DNA, 75 bp, synthetic construct
  source 1..75: mol_type = other DNA
tagggattacagttcttcttactgcattgcaagtacaggctagtgttgttcttggtggtacacgcattatctatc

SEQ ID NO: 100020 - DNA, 75 bp, synthetic construct
  source 1..75: mol_type = other DNA
cggacgctaatccagctcaccaatgaggagctggacttcgactcgcccgcgacggtgaaaactgaggtggtggac

SEQ ID NO: 100021 - DNA, 75 bp, synthetic construct
  source 1..75: mol_type = other DNA
cttcagcaccggaactggcacatctgctgaaatcaacagaaaaagacccggcagtaaacgccattgctcacgcca

SEQ ID NO: 100022 - DNA, 75 bp, synthetic construct
  source 1..75: mol_type = other DNA
gtttatgcaagtattctccagtatcacagtcctgcaattattcagtttctctcagcggaatttcaggcatctgca

SEQ ID NO: 100023 - DNA, 75 bp, synthetic construct
  source 1..75: mol_type = other DNA
ctattagtacaggtgcagggaactggacaacggcacaattgattgaatggctggattctcaaggggcattcaatc

SEQ ID NO: 100024 - DNA, 75 bp, synthetic construct
  source 1..75: mol_type = other DNA
tatacaggtctatttatatcacatactaatttaaatggctcaaactcaatggttaatagtgatacaaaatcatat

SEQ ID NO: 100025 - DNA, 75 bp, synthetic construct
  source 1..75: mol_type = other DNA
cgcagataacctcgacaacggagcagacgacgcagaacgaggtggttttgatgatgccgttaagtttctacgcag

SEQ ID NO: 100026 - DNA, 75 bp, synthetic construct
  source 1..75: mol_type = other DNA
gtttgatgaaattcatgtggtgcgtggtcagcccgttacgggtgggcgacttggcgtgaagatttaccaaataat

SEQ ID NO: 100027 - DNA, 75 bp, synthetic construct
  source 1..75: mol_type = other DNA
ccttcgcgtccctgatgttctctgccggttcagcggttgccgccgattacaaaattgacaaagaaggtcagcacg

SEQ ID NO: 100028 - DNA, 75 bp, synthetic construct
  source 1..75: mol_type = other DNA
atgaaaaatatttataagattattgcgtgtgcagttattgggacgagcatggtagccatgccagcacatgcagca

SEQ ID NO: 100029 - DNA, 75 bp, synthetic construct
  source 1..75: mol_type = other DNA
ctcccggtgggcagatgccaacggttttggcgacctgacgctgcagttcaccacctatgccgttcgtctggccag

SEQ ID NO: 100030 - DNA, 75 bp, synthetic construct
  source 1..75: mol_type = other DNA
gcgcgttatctggtgcaaagctgggtaagtaatattgatggctctaaagccccttttctcattacgcctccagtt

SEQ ID NO: 100031 - DNA, 75 bp, synthetic construct
  source 1..75: mol_type = other DNA
atcggcattgatatttcagactctgtaaccagtagcagaagtgatgttgcggcaagttcgctggcagttaaaaaa

SEQ ID NO: 100032 - DNA, 75 bp, synthetic construct
  source 1..75: mol_type = other DNA
acggtacagaccgacaccacgcgtatccagacggtataccagccggggagcttcgcgccgctcatccgcatcgaa

SEQ ID NO: 100033 - DNA, 75 bp, synthetic construct
  source 1..75: mol_type = other DNA
atgcttcgcattaagcctctttttattctttgtgccgccttactgacggtgacgcctgcagcgtcagcggatgtg

SEQ ID NO: 100034 - DNA, 75 bp, synthetic construct
  source 1..75: mol_type = other DNA
taacccagtgcactatgcggatgccattcgttataatgctcgaacgcctctgcaaggttctttgctgccgttaac

SEQ ID NO: 100035 - DNA, 75 bp, synthetic construct
  source 1..75: mol_type = other DNA
atgccagttagccgttatctctgcattttcataaacgttggtttgggagaaggctctgcattaccggttggggtg

SEQ ID NO: 100036 - DNA, 75 bp, synthetic construct
  source 1..75: mol_type = other DNA
aattttgaaaacccctggttgctcccggtaagcggcacgaacaaccagcgttgtgtgaatcatatttctgaaccg

SEQ ID NO: 100037 - DNA, 75 bp, synthetic construct
  source 1..75: mol_type = other DNA
cagaagagattaaattccggattcaatatcttcaggatgaagaacaaaagagagttttaagtgagttggtaaatg

SEQ ID NO: 100038 - DNA, 75 bp, synthetic construct
  source 1..75: mol_type = other DNA
tgtaattctggatgcggaagaggtcgatgcaatcgttaatcaattactgaagattggtgatgactcgttaactgc

SEQ ID NO: 100039 - DNA, 75 bp, synthetic construct
  source 1..75: mol_type = other DNA
atgaaagtattagtgattggtaacggcgggcgcgagcacgcgctggcctggaaagcggcccagtcgccgctggtt

SEQ ID NO: 100040 - DNA, 75 bp, synthetic construct
  source 1..75: mol_type = other DNA
cggaggtgccgatgataaaggcgaatccgttatttaacatagcccagtgtgatgacctgccggcgcatttttacg

SEQ ID NO: 100041 - DNA, 75 bp, synthetic construct
  source 1..75: mol_type = other DNA
gcccgtggcgttactacaacgatcgcgatgtacgcacaatcgttgagctggggaaagccatagacttcgatgcca

SEQ ID NO: 100042 - DNA, 75 bp, synthetic construct
  source 1..75: mol_type = other DNA
gaaatgtcgcactcatagaaaaatgcgtcatgagtagtatcggtattgagagtttattcagaaagtttgcgggta

SEQ ID NO: 100043 - DNA, 75 bp, synthetic construct
  source 1..75: mol_type = other DNA
caccatcatcccgtaacaggctatacgtggcctgctcacgggcgcggggcaacatctattttattccggaaagcc

SEQ ID NO: 100044 - DNA, 75 bp, synthetic construct
  source 1..75: mol_type = other DNA
cggtgaatttattcgcggctgggatgacgggcgtggggttgattcgggccgaactatattgaactctcagggaga

SEQ ID NO: 100045 - DNA, 75 bp, synthetic construct
  source 1..75: mol_type = other DNA
attgacggggatgtgttattcagtcggcagtgctacgcgccaggggagcagttcgccgacccggtttatcggcca

SEQ ID NO: 100046 - DNA, 75 bp, synthetic construct
  source 1..75: mol_type = other DNA
cgggctgtggcgcttattgttcgccagcagcggctgaaattaagcctgtccggaaggctggcgataaaggtgatt

SEQ ID NO: 100047 - DNA, 75 bp, synthetic construct
  source 1..75: mol_type = other DNA
attgcacgcgaagaagaactgcgtcgtcaggatcaggcgtacattgaaagcaatgaggaagagcagcgtcagaat

SEQ ID NO: 100048 - DNA, 75 bp, synthetic construct
  source 1..75: mol_type = other DNA
ctaaagagttcaaagccgaagctgtcagaacggttcttgaaaatcaactttcgatcagtgaaggtgcttcccgat

SEQ ID NO: 100049 - DNA, 75 bp, synthetic construct
  source 1..75: mol_type = other DNA
ataacacaccaatgttgatggaagctgaagagagaattgctgaatacgctcctggagcacgcgccccggcgtatc

SEQ ID NO: 100050 - DNA, 75 bp, synthetic construct
  source 1..75: mol_type = other DNA
acccgtcaggaactggcaacccttccaccgtcgtcccgtaacaggctgtacgtggcatgctcacgggcgcgcggc

SEQ ID NO: 100051 - DNA, 75 bp, synthetic construct
  source 1..75: mol_type = other DNA
atgaactgcttgtcgatgaagtccaggactttgccggacatgactttaattttctgctggagctctgccgcgcgg

SEQ ID NO: 100052 - DNA, 75 bp, synthetic construct
  source 1..75: mol_type = other DNA
ggcattcgccgcggattcaccgttagtctatttaggcgacaactggtacaaaattaatgactatcttgccgccaa

SEQ ID NO: 100053 - DNA, 75 bp, synthetic construct
  source 1..75: mol_type = other DNA
gtactggcagtatgtcgccgttatggacagcagaacgcgcccggaacatgcccggctgcataatatgattttccg

SEQ ID NO: 100054 - DNA, 75 bp, synthetic construct
  source 1..75: mol_type = other DNA
gttctgtcggtaaacagatcggtttacttttcattgctgaaaaaactggttcaggccatgaacctctgccagatc

SEQ ID NO: 100055 - DNA, 75 bp, synthetic construct
  source 1..75: mol_type = other DNA
aatcggacaacccgaagcgtatcgttaacggaagcgggttctaatctctatgaacgattgcgcccagctttcgac

SEQ ID NO: 100056 - DNA, 75 bp, synthetic construct
  source 1..75: mol_type = other DNA
ctgaatgagcttgcagcagcactgggcaatgacccgaactttgcgacaacaatgacaaatgcgctggcaggcaaa

SEQ ID NO: 100057 - DNA, 75 bp, synthetic construct
  source 1..75: mol_type = other DNA
ccctgacaaatctgtcagccagtttctctgccgtggagaacggatacagctcattcgggatgagtgcatcggggg

SEQ ID NO: 100058 - DNA, 75 bp, synthetic construct
  source 1..75: mol_type = other DNA
gtggtttttactgagcgcggtgtacacggtggaacatatggcgggaagtttgttgcttatgattatgcagcatgg

SEQ ID NO: 100059 - DNA, 75 bp, synthetic construct
  source 1..75: mol_type = other DNA
gatgcaacgattaagccgggtaatggtattgagcaagcaactcactggatgccgctaccggaaccgccgcaggag

SEQ ID NO: 100060 - DNA, 75 bp, synthetic construct
  source 1..75: mol_type = other DNA
tgggtggcggtcggtatcgctgtgtctccgatgctgtatgggctggcaaaactggtcattgcgttgaaatcgtga

SEQ ID NO: 100061 - DNA, 75 bp, synthetic construct
  source 1..75: mol_type = other DNA
ccggaggctctggtagtcgtttatggccgctttctcgtgttctctatccaaaacaatttctttgtctggaaggtg

SEQ ID NO: 100062 - DNA, 75 bp, synthetic construct
  source 1..75: mol_type = other DNA
ccgctggcgcggggaacaccccttgtatttatgcacccagtcgtttaccgacggtttatccccgctggcgcgggg

SEQ ID NO: 100063 - DNA, 75 bp, synthetic construct
  source 1..75: mol_type = other DNA
gcgcgcgcttctctcggcgcagtccgatttatttaaagcgcaccaccactcatttacgttttttacaggctatgc

SEQ ID NO: 100064 - DNA, 75 bp, synthetic construct
  source 1..75: mol_type = other DNA
agatgattggattttaatttattcaaagcacggcgagtatatggcaggacaggtacaaggggaatacgtggagtt

SEQ ID NO: 100065 - DNA, 75 bp, synthetic construct
  source 1..75: mol_type = other DNA
gtgagaggctggaactcctgccgcgcctccatgcttcatggtgccgaacctgtaagccaaacttacaagttgaac

SEQ ID NO: 100066 - DNA, 75 bp, synthetic construct
  source 1..75: mol_type = other DNA
ctgggtaccggggacacgcgaagaggtcattgagggaatcagactgctcggtgacgcacaacgtgaactggtcag

SEQ ID NO: 100067 - DNA, 75 bp, synthetic construct
  source 1..75: mol_type = other DNA
atctggcagattatcaatttcaccagatgggagcgggttggttggctgatcttatgctcccctggctgggcgttt

SEQ ID NO: 100068 - DNA, 75 bp, synthetic construct
  source 1..75: mol_type = other DNA
attgcaacgccaaaagagtcaaatccggttcagccgcatcctcataaatttaaacaggtgggtttgccgatttaa

SEQ ID NO: 100069 - DNA, 75 bp, synthetic construct
  source 1..75: mol_type = other DNA
caacccgactatcaggttgctgacaaagctggagttcagtttgtatcaattgaagatatctttatgcagtcgcat

SEQ ID NO: 100070 - DNA, 75 bp, synthetic construct
  source 1..75: mol_type = other DNA
tcatcaacgccgcccatgagcgaatcctcacggacagagaatggcagatataccgtcaccgtctcaaatggcagc

SEQ ID NO: 100071 - DNA, 75 bp, synthetic construct
  source 1..75: mol_type = other DNA
aggataaggagcgggtgaccaaaaacattaacatcatgtggaatgcgctttccaaaaacagaatgtttgacggca

SEQ ID NO: 100072 - DNA, 75 bp, synthetic construct
  source 1..75: mol_type = other DNA
ttgcggcaacgactaaacctgcaggtgcgaatgaaacacgcccacgaaatgtcgcttttaactatattgtgaggg

SEQ ID NO: 100073 - DNA, 75 bp, synthetic construct
  source 1..75: mol_type = other DNA
atgccagttgcccgttatctctgcattttcataaacgttggtttgggagaaggttcggcattacccgttggcgtg

SEQ ID NO: 100074 - DNA, 75 bp, synthetic construct
  source 1..75: mol_type = other DNA
aagatgtggtatcagtactggaagagtacaaggccagaggacataacagaatgggacaaattttcaggaaagtac

SEQ ID NO: 100075 - DNA, 75 bp, synthetic construct
  source 1..75: mol_type = other DNA
gtttgatgaaatcaatattgtacgtggaaagccagtatctggtggtcggttgggtgtgaagatttacaaaattga

SEQ ID NO: 100076 - DNA, 75 bp, synthetic construct
  source 1..75: mol_type = other DNA
cgcttcgcgccgcgcatccgcgacctgggcgacaccaagctctacatcccgaagggcgacgccgcctatgacgcg

SEQ ID NO: 100077 - DNA, 75 bp, synthetic construct
  source 1..75: mol_type = other DNA
tgcctgaacaacccatgcgtcagtgggtgttgagcttcccgtttcagctgcgtttcctgtttgccagccggcccg

SEQ ID NO: 100078 - DNA, 75 bp, synthetic construct
  source 1..75: mol_type = other DNA
ttattcgtggctgggatgacggacgtggagtggatgccgggcgacaattattatcttcacagggggatgcaataa

SEQ ID NO: 100079 - DNA, 75 bp, synthetic construct
  source 1..75: mol_type = other DNA
gcgacagtatttttaaacatgaataccaggatcgcttcgccattgtagccgtaggtctgcgtctgccaaaagagt

SEQ ID NO: 100080 - DNA, 75 bp, synthetic construct
  source 1..75: mol_type = other DNA
tcatgatactaacaatgaaggtaaaatgcatcggcagtctgattggtcgtagtgaggcggcggtcaggatgaaag

SEQ ID NO: 100081 - DNA, 75 bp, synthetic construct
  source 1..75: mol_type = other DNA
ttttcttaaacgttggtttgggagaaggctcagcattacctgttggggtgcctgttccgtggccttcagccactc

SEQ ID NO: 100082 - DNA, 75 bp, synthetic construct
  source 1..75: mol_type = other DNA
ctgttggtgtgcctgttccatggccttcagccacaccgccaacaggctggctgaaatgcaacggtgcggcatttt

SEQ ID NO: 100083 - DNA, 75 bp, synthetic construct
  source 1..75: mol_type = other DNA
cgcaggatttatctttggtttcagggtgttaccggcaattatcttcgtcaccgcgctggtgagtattctctacta

SEQ ID NO: 100084 - DNA, 75 bp, synthetic construct
  source 1..75: mol_type = other DNA
gtccagataaattctgtgacgggcgtgttcagcatggcgggatttttgatgatttatgcccgcgcctgtaccaca

SEQ ID NO: 100085 - DNA, 75 bp, synthetic construct
  source 1..75: mol_type = other DNA
tggagctgcactggccaatgtacagacagactccctgacggggctattcagcatggcaggatttttgctgattta

SEQ ID NO: 100086 - DNA, 75 bp, synthetic construct
  source 1..75: mol_type = other DNA
tcgaatggtggcttgctcagtccagcgaagccagatctgcaattttagttgatcaggtaaaactggttgacgctc

SEQ ID NO: 100087 - DNA, 75 bp, synthetic construct
  source 1..75: mol_type = other DNA
cattaacatcatgtggaatgcgctttccaaaaacagaatgtttgacggcaacaaagagctgaaagagtttgtgat

SEQ ID NO: 100088 - DNA, 75 bp, synthetic construct
  source 1..75: mol_type = other DNA
ctgaactgcaatcgtgccacagtcagaaaatacattggcgataaagaagggaaaagacacgctatcgtcaacggt

SEQ ID NO: 100089 - DNA, 75 bp, synthetic construct
  source 1..75: mol_type = other DNA
aatccgcaacatgaactcgccggatgagttccgcaatctctacatgtgcgagtttgtcagcgacggcgaatccgc

SEQ ID NO: 100090 - DNA, 75 bp, synthetic construct
  source 1..75: mol_type = other DNA
gccggacggcaggacggtacggtatggctataacagccagcggcaggtgacgtcggtgacgtacccggacgggct

SEQ ID NO: 100091 - DNA, 75 bp, synthetic construct
  source 1..75: mol_type = other DNA
gtaaagaaaaaaccgcccctgaattggggatgcggacgatttcctggactgctttattatgccagcccacattgt

SEQ ID NO: 100092 - DNA, 75 bp, synthetic construct
  source 1..75: mol_type = other DNA
acgacgggatattcatccagcaagggaaaaccggaaaaaaacagataaaagcatggagtccacgattacaggcag

SEQ ID NO: 100093 - DNA, 75 bp, synthetic construct
  source 1..75: mol_type = other DNA
ttgataaatggactttaatggcgcgggaactggaacagtacccagacctcaatatcccaaagactattttatatc

SEQ ID NO: 100094 - DNA, 75 bp, synthetic construct
  source 1..75: mol_type = other DNA
gtgaagaaagtcagaagcggctgtgggtaaccgcgagtacatacgattttggcgggatctctgcgcaggtggatt

SEQ ID NO: 100095 - DNA, 75 bp, synthetic construct
  source 1..75: mol_type = other DNA
cctgatgtgtggtgtcagtacattgattccccagtatctggtggctgttaatcttggcgcggaactcccggcttt

SEQ ID NO: 100096 - DNA, 75 bp, synthetic construct
  source 1..75: mol_type = other DNA
accgctcagcctgcttaccctgctgaaggaggaacttctcgggatcagggatgcctctgaatcatcagaggagtc

SEQ ID NO: 100097 - DNA, 75 bp, synthetic construct
  source 1..75: mol_type = other DNA
tctttgtcgcaatgttgctctggtgtggcggcttcttcagtcaggcccgcgcagcgcagcctccgcaggcagcgc

SEQ ID NO: 100098 - DNA, 75 bp, synthetic construct
  source 1..75: mol_type = other DNA
tttagccggtcccgcataccgggtgacgctaccatcctgcatttttattgcctacatgcgccagaagcatcttta

SEQ ID NO: 100099 - DNA, 75 bp, synthetic construct
  source 1..75: mol_type = other DNA
ggaagttttgtccggttggtaggcgaaggtaaagacctggtgggtgtgcttttcggtagcattttcctgtgggtg

SEQ ID NO: 100100 - DNA, 75 bp, synthetic construct
  source 1..75: mol_type = other DNA
cagtttgatgccatcaaccagagtgtcgcgcgttttgcgtctgcatccggtgtggaggtggacaaggttgcagag

SEQ ID NO: 100101 - DNA, 75 bp, synthetic construct
  source 1..75: mol_type = other DNA
acccaggatatttaaaaatggtgcacattattatccaataacgttaggccatgaatttagcggctatattgatgc

SEQ ID NO: 100102 - DNA, 75 bp, synthetic construct
  source 1..75: mol_type = other DNA
agtccccatacctgatccggatctggagaagaacaaaaccatccagttactggaaggggaattaccgtcgccgat

SEQ ID NO: 100103 - DNA, 75 bp, synthetic construct
  source 1..75: mol_type = other DNA
cggtaacaccacagccgcctgatattttattagggccgctgtttaatgatgtgcaaaacgccaaactttttccgg

SEQ ID NO: 100104 - DNA, 75 bp, synthetic construct
  source 1..75: mol_type = other DNA
gtcagccggcgagcgtcaggaagaccagtgcgcatgctgccctgctgacgcttcaaacagaactccggacgctgg

SEQ ID NO: 100105 - DNA, 75 bp, synthetic construct
  source 1..75: mol_type = other DNA
aacctcatgaggggcaaatagctgcatggacggcggcaatagaggaacgcttccacgcggtatgctgtggtcgtc

SEQ ID NO: 100106 - DNA, 75 bp, synthetic construct
  source 1..75: mol_type = other DNA
gcggtgaatcgcctgatgatctcccgtaaaatcgatgccactgttgctgattttctttctgcattagtccgttac

SEQ ID NO: 100107 - DNA, 75 bp, synthetic construct
  source 1..75: mol_type = other DNA
caggccgtggccgctggtgatttaccagcgtgccgggcgggaatggctggaagagagcctggatgacacacaggg

SEQ ID NO: 100108 - DNA, 75 bp, synthetic construct
  source 1..75: mol_type = other DNA
acctcctgactttctgcgtactggtgctgaagaatggcttcaccgtcaccggagagagcgcctgtgcaagcccgg

SEQ ID NO: 100109 - DNA, 75 bp, synthetic construct
  source 1..75: mol_type = other DNA
cataatttttaaaggcctttgggcaagtaaaccggaaacatcagggaataacaccaacaaatggtattacggaaa

SEQ ID NO: 100110 - DNA, 75 bp, synthetic construct
  source 1..75: mol_type = other DNA
ccttcacggacgtcaacggcagtccgtggccacagtcggatccgccctataacgctgcgcccggtcactttgacg

SEQ ID NO: 100111 - DNA, 75 bp, synthetic construct
  source 1..75: mol_type = other DNA
tggttcaaattagcaacggtaaccatgccacaggcgagttctgttgtttcaattacgttgattggtggcgcggga

SEQ ID NO: 100112 - DNA, 75 bp, synthetic construct
  source 1..75: mol_type = other DNA
gaatgtgagtacacgaaccagttcttattttgcagatcgtctaatccagggccgggatgacaatgaattcctgac

SEQ ID NO: 100113 - DNA, 75 bp, synthetic construct
  source 1..75: mol_type = other DNA
cgggacccttcacccgaagacatgcgcaagcggtcactaccacgtacagcaatatcaccctcgaagacgaccagg

SEQ ID NO: 100114 - DNA, 75 bp, synthetic construct
  source 1..75: mol_type = other DNA
acctcacccggcatatcatgttttttgccaccaccggtggcggtaaaacagaaaccacctttgcctggctgctca

SEQ ID NO: 100115 - DNA, 75 bp, synthetic construct
  source 1..75: mol_type = other DNA
ttctttctgagcattgcgttcaggatggtcagcaatttacgcatacagtcaaccagcgccacttttttggttttt

SEQ ID NO: 100116 - DNA, 75 bp, synthetic construct
  source 1..75: mol_type = other DNA
aattccgtcacggtaacatgacgctggaaaatccatcgccagagctgctcacgatgttaatccgcgaactgagcg

SEQ ID NO: 100117 - DNA, 75 bp, synthetic construct
  source 1..75: mol_type = other DNA
agcctctgtttacggctgaagcggattacggcctggtgctgctggcgcatcagcaaaatattcttgtgcagatgc

SEQ ID NO: 100118 - DNA, 75 bp, synthetic construct
  source 1..75: mol_type = other DNA
tcgcaatcagggaaaatttttccccgaagtgcatgaagatgcttttgactacctgacgatgctgatccagcaatg

SEQ ID NO: 100119 - DNA, 75 bp, synthetic construct
  source 1..75: mol_type = other DNA
ctggaacaggggtactttccacagatacaacaaaatttgaaggatatttatcctatcttggtttgccgaccgaaa

SEQ ID NO: 100120 - DNA, 75 bp, synthetic construct
  source 1..75: mol_type = other DNA
cgggttccgacagcggtggtgaacatgcggcggtgttgtactcgctgatcggcacatgccgtctgaacaatgtgg

SEQ ID NO: 100121 - DNA, 75 bp, synthetic construct
  source 1..75: mol_type = other DNA
ctgtgccaccagccgcgatatgatcaagttctccctgagcgtacggctgaccaactccatccgtactctgtccgt

SEQ ID NO: 100122 - DNA, 75 bp, synthetic construct
  source 1..75: mol_type = other DNA
atgcacgattacctgctttttttactgggacttaccccccttctggcgatgatcattttgattctgaaagtcaaa

SEQ ID NO: 100123 - DNA, 75 bp, synthetic construct
  source 1..75: mol_type = other DNA
atggtttctaaaatcatgaataagaaatacgaaaaaggtctgtctttgattgaatctgcaatggtgcttgcgctt

SEQ ID NO: 100124 - DNA, 75 bp, synthetic construct
  source 1..75: mol_type = other DNA
cgagcgcatcgcgattgtacttggcaccagcacctccggcctgcatgaaggcgacacgcacgttaacctgcgcac

SEQ ID NO: 100125 - DNA, 75 bp, synthetic construct
  source 1..75: mol_type = other DNA
ccagtcgaatgcctcaacacagagagcgaataatgacgattgcagagcgaattcataatgacgattgcagagcga

SEQ ID NO: 100126 - DNA, 75 bp, synthetic construct
  source 1..75: mol_type = other DNA
ctttccgatatggaaaccgcgtttgccactttcaaacaggaactgaccggcaaggttgaagaaaccagccaggca

SEQ ID NO: 100127 - DNA, 75 bp, synthetic construct
  source 1..75: mol_type = other DNA
gcaacgctgcagtcggatatggaaaaagccggtgaactggcggcaagggacagggctgagcgtgaggcgtcacag

SEQ ID NO: 100128 - DNA, 75 bp, synthetic construct
  source 1..75: mol_type = other DNA
ggcagatcagcgattcattcggtggaccgctcagcctgcttaccctgctgaaggaggaacttctcgggatcaggg

SEQ ID NO: 100129 - DNA, 75 bp, synthetic construct
  source 1..75: mol_type = other DNA
ttgaatcccatacaagtgatagacccaatggggttagatgcgattgagaatatgacatcaggtggactaatttat

SEQ ID NO: 100130 - DNA, 75 bp, synthetic construct
  source 1..75: mol_type = other DNA
ggaccactcaaggccgccccgtcgctgtcctttctcgggctggccgtgatggatgaactctgcgcccgccatatc

SEQ ID NO: 100131 - DNA, 75 bp, synthetic construct
  source 1..75: mol_type = other DNA
gtcatggggtatgatacaaaagtagaggtttgtggtcatggctttcgaacaatggcctgtagttcattggtcgaa

SEQ ID NO: 100132 - DNA, 75 bp, synthetic construct
  source 1..75: mol_type = other DNA
caaatgattaatgcgtataaaatcacaattcgttctggttacgaacgcattactgaatgtggtggtgactgcgat

SEQ ID NO: 100133 - DNA, 75 bp, synthetic construct
  source 1..75: mol_type = other DNA
ccctgtcatgcctgttaaacgtatttgtcagcacggtaaaacaacttaaaaactccattattgccatttctgcga

SEQ ID NO: 100134 - DNA, 75 bp, synthetic construct
  source 1..75: mol_type = other DNA
agtgaagccagagctgccattttaacagaccaggtaaaactgaaggatgccctttcgcggtttcgggagttcatc

SEQ ID NO: 100135 - DNA, 75 bp, synthetic construct
  source 1..75: mol_type = other DNA
taccactgcgaccatcgcggcctgccgctggcccttatcagcacggaagggacaacagcgtggtacgcagaatac

SEQ ID NO: 100136 - DNA, 75 bp, synthetic construct
  source 1..75: mol_type = other DNA
tcgattttgaatgaatgtaatttttgttatgctaatttatctaattgtattattagggctttgtttgaaaactct

SEQ ID NO: 100137 - DNA, 75 bp, synthetic construct
  source 1..75: mol_type = other DNA
actggcacagcatacctctgagactgtccgcgagattattgatatcgaacccgcagttgccgaccagattggtca

SEQ ID NO: 100138 - DNA, 75 bp, synthetic construct
  source 1..75: mol_type = other DNA
atgactgtactgattcacgtactgggatcggatatccctcaccataaccgaaccgttttgcggtttttcaatgac

SEQ ID NO: 100139 - DNA, 75 bp, synthetic construct
  source 1..75: mol_type = other DNA
cgcagtactgagctggttgctggcaaaaacactgttgctgctttttgcctcttcttttgccgcattaaccccgga

SEQ ID NO: 100140 - DNA, 75 bp, synthetic construct
  source 1..75: mol_type = other DNA
ttgctgtcgcgtgcgggcgtgaccggcgcagaaaaccgcgccgcgttacccctcaatcatctggttgcaaagctg

SEQ ID NO: 100141 - DNA, 75 bp, synthetic construct
  source 1..75: mol_type = other DNA
aaggtcctttacttcaccattcacatccacacacagataaatcaatacgttgtgatttctgacttccctcccgtt

SEQ ID NO: 100142 - DNA, 75 bp, synthetic construct
  source 1..75: mol_type = other DNA
cggaacggcgcgggcgactggcagagcaggccgaccagctctgggcgatgtggcgaccggggccgcgctgggcgc

SEQ ID NO: 100143 - DNA, 75 bp, synthetic construct
  source 1..75: mol_type = other DNA
atggcaacgtcaaaaaaaataaattatccggtgctgtatgagtccggaataacacctccgttatgtgaagtcagt

SEQ ID NO: 100144 - DNA, 75 bp, synthetic construct
  source 1..75: mol_type = other DNA
actgggcgaatatatttgttacaccagattttttgagtgttgaaacttattcaggattaggaatgacaggcagag

SEQ ID NO: 100145 - DNA, 75 bp, synthetic construct
  source 1..75: mol_type = other DNA
ctgaagggactgggggcggggttctcaaatctctacagccatctggcctcttccgctatcagccctgcagccact

SEQ ID NO: 100146 - DNA, 75 bp, synthetic construct
  source 1..75: mol_type = other DNA
acagaaaattttaatactgattccaaacaaacaattgatgtcagattattgaatcaaaatatagacatgatattg

SEQ ID NO: 100147 - DNA, 75 bp, synthetic construct
  source 1..75: mol_type = other DNA
aaagattccttcggtgggttgatccccatgttcagggggcttgccggtgcagtcaccctgccgatggtggggctc

SEQ ID NO: 100148 - DNA, 75 bp, synthetic construct
  source 1..75: mol_type = other DNA
cacctcaatcagtcggtatcggtttatctgatagggaagcgggacagttatatcgttgtcgcgcagctgtcgccg

SEQ ID NO: 100149 - DNA, 75 bp, synthetic construct
  source 1..75: mol_type = other DNA
ataacaccgaaagccatcgccagccgcgccgcgagaagtcgaaaggcggaacgggcgacgagctgctgaccaact

SEQ ID NO: 100150 - DNA, 75 bp, synthetic construct
  source 1..75: mol_type = other DNA
ctcatctattacttctgccttgccagtgccattcaacgtactggcgcgcctgtttccacgatgattatcggcacc

SEQ ID NO: 100151 - DNA, 75 bp, synthetic construct
  source 1..75: mol_type = other DNA
tgtcgaagcgaagaccaaagacattatgccagtggcatttgaatttaaatgcgttccgtttgaaggtctgaaaga

SEQ ID NO: 100152 - DNA, 75 bp, synthetic construct
  source 1..75: mol_type = other DNA
tatacgaaatccgtgtgaagagttggtgggtgaactccggcgatgctttcatgatatacagccttgctgaaaatt

SEQ ID NO: 100153 - DNA, 75 bp, synthetic construct
  source 1..75: mol_type = other DNA
taccaaacggtaatggcatacaaagtttctgaagtcatcgatgcaatccgcgctactggcattcgcatcaaagga

SEQ ID NO: 100154 - DNA, 75 bp, synthetic construct
  source 1..75: mol_type = other DNA
ataagcgaacttggaatgttctccgtgcagacagataacaatccctccagtgctgagcacagttttgctggatat

SEQ ID NO: 100155 - DNA, 75 bp, synthetic construct
  source 1..75: mol_type = other DNA
agcgccgcactagacgcggcagaagtaaagcgccagtcgctgattgatgctgcaatggcttccatcagtctgatt

SEQ ID NO: 100156 - DNA, 75 bp, synthetic construct
  source 1..75: mol_type = other DNA
tgacgcgtacgtgctggcgcttcccgcctcgctgcctgtgcgttacgccgcggtactgacggtcatcaacgcgct

SEQ ID NO: 100157 - DNA, 75 bp, synthetic construct
  source 1..75: mol_type = other DNA
attcggacgagccaaaactgacgattattgactgggatgtgacgcaaattaaagcgtcattgcttcctgaatata

SEQ ID NO: 100158 - DNA, 75 bp, synthetic construct
  source 1..75: mol_type = other DNA
tgctccggtgacgaaagaggttcgcgttgcgtcacctgctatcgtcgaagcgaagccggtcaaaacgattaaaga

SEQ ID NO: 100159 - DNA, 75 bp, synthetic construct
  source 1..75: mol_type = other DNA
atggccgtttctggcctgcatggcatgatttgcgcttttggacgggagattcagaatgctgattggctatgtcag

SEQ ID NO: 100160 - DNA, 75 bp, synthetic construct
  source 1..75: mol_type = other DNA
ttacccactgttgccacttcatctctaaaagacaatgctgctacgtcagggctgacaccctttgccattcgttta

SEQ ID NO: 100161 - DNA, 75 bp, synthetic construct
  source 1..75: mol_type = other DNA
gaaacgaaacaatctgaaccagtagcgcaacaggaaccggaaaaagtctgtgccgcccgcggtcagagcggtggc

SEQ ID NO: 100162 - DNA, 75 bp, synthetic construct
  source 1..75: mol_type = other DNA
gcgatgaccagcttcttgcggcccagctcgaaatggcatcgccaccttcgggcccagagggctggcgacgctcgc

SEQ ID NO: 100163 - DNA, 75 bp, synthetic construct
  source 1..75: mol_type = other DNA
ccgaatcaggtaaacacaaaagacaaactaacaaaagacaatataaaacctttttcgtccgagaattctgtcgaa

SEQ ID NO: 100164 - DNA, 75 bp, synthetic construct
  source 1..75: mol_type = other DNA
tttcacgtattactgtcgatattcatctggaagaagcatcaaccgaagagatcattgaacatctgaaagtgttga

SEQ ID NO: 100165 - DNA, 75 bp, synthetic construct
  source 1..75: mol_type = other DNA
ctgtttgattgagtttcaggtgcccgccagtcaggatttcaaactggcgcataaagagatcgaccaaatcctgaa

SEQ ID NO: 100166 - DNA, 75 bp, synthetic construct
  source 1..75: mol_type = other DNA
aaaaatggtcgagcaagccagtaaagatgagcttacggtcgttatcaaacaccttttaaaccacatcagaatgaa

SEQ ID NO: 100167 - DNA, 75 bp, synthetic construct
  source 1..75: mol_type = other DNA
cactggaagcccagaccggtgacctctggcgcgacgtgcgctgggccattgccgatattcagggcgcaccgcgca

SEQ ID NO: 100168 - DNA, 75 bp, synthetic construct
  source 1..75: mol_type = other DNA
gggtgcatgtgtgttgacggggtcggtgagtatgtaggtcactcgctgccagatggaacgcaccagctttacacc

SEQ ID NO: 100169 - DNA, 75 bp, synthetic construct
  source 1..75: mol_type = other DNA
gaattcaaacacggtgatggtggggtcgatattttcgcctggaaagggaggcgaaagtttgctattgaggtgaaa

SEQ ID NO: 100170 - DNA, 75 bp, synthetic construct
  source 1..75: mol_type = other DNA
taacatgacgctggaaaatccttcaccagagctgctcacggtgttgatccgtgaactgaccgggagggggcgatg

SEQ ID NO: 100171 - DNA, 75 bp, synthetic construct
  source 1..75: mol_type = other DNA
tacgcgccgcgctctatcgccgtgcggtcgcctgtgcctggctgaccctgtgcgaaagtcagcaccgctacccgc

SEQ ID NO: 100172 - DNA, 75 bp, synthetic construct
  source 1..75: mol_type = other DNA
attggaaaactgttcttttaaaaactcgattttgaatgaatgtaatttttgttatgctaatttatctaattgtat

SEQ ID NO: 100173 - DNA, 75 bp, synthetic construct
  source 1..75: mol_type = other DNA
aactgggtatccagccaacaggcaaacgacttggcgcgatggatgtcgccgacgaaggcagggacaaaaatgcct

SEQ ID NO: 100174 - DNA, 75 bp, synthetic construct
  source 1..75: mol_type = other DNA
tgcttacggaaaagcagcaagcgcgctgtatcgggtgaagagtggtatctgtcagggaattacgtgggggcttaa

SEQ ID NO: 100175 - DNA, 75 bp, synthetic construct
  source 1..75: mol_type = other DNA
gttatatgccattgcccagggggcgggcactggtcagccgcaggcgtgtgtgatgaatatcattggtacggcgac

SEQ ID NO: 100176 - DNA, 75 bp, synthetic construct
  source 1..75: mol_type = other DNA
cgacagtcagcaccggctggtgcactacacgcggacacaatatgcagagccgctggtcgaaagtcgctatcttta

SEQ ID NO: 100177 - DNA, 75 bp, synthetic construct
  source 1..75: mol_type = other DNA
tggcggaagaagatgataaagtatgtgaacttatttttaaacaacaagataatttgattttaaaaataaatgata

SEQ ID NO: 100178 - DNA, 75 bp, synthetic construct
  source 1..75: mol_type = other DNA
agctgggcagcggtaaaaatgggcgttgctaagttacctgaaggcgttaacttcaagcatatctttgcggtatct

SEQ ID NO: 100179 - DNA, 75 bp, synthetic construct
  source 1..75: mol_type = other DNA
tattcgcccatcctttaccatgggcggtagcggcggcggtatcgcttataaccgcgaagagtttgaagaaatttg

SEQ ID NO: 100180 - DNA, 75 bp, synthetic construct
  source 1..75: mol_type = other DNA
acggaacgcgcggataatctgcctccggtctgtgatttatcgacggtttctgatcgttccctggtggatattgtg

SEQ ID NO: 100181 - DNA, 75 bp, synthetic construct
  source 1..75: mol_type = other DNA
cgatggtacaccgctgtgggttactggcagtggcaccagcaaaacggtactgacccgttatgcgacggtgcttaa

SEQ ID NO: 100182 - DNA, 75 bp, synthetic construct
  source 1..75: mol_type = other DNA
cgcctgtcgctatcagtcacacgctggcgcttgccgcgacacttgatgcgcagggatacagtgttaacgacatca

SEQ ID NO: 100183 - DNA, 75 bp, synthetic construct
  source 1..75: mol_type = other DNA
ttccaatttcagaaacagctaaaattggaggaactacgaatccatatggcacatcgaaatattttgttgaaaaaa

SEQ ID NO: 100184 - DNA, 75 bp, synthetic construct
  source 1..75: mol_type = other DNA
atggtgatcctgatggtgatgtcggtctcggtcgaaatcggccgctggctgtggtttaacggcggtcgcttgccg

SEQ ID NO: 100185 - DNA, 75 bp, synthetic construct
  source 1..75: mol_type = other DNA
ttgtataaatggaaagataaaattatcgacaacagtacttaccagactatgcgtaaacataacgaaccttccctg

SEQ ID NO: 100186 - DNA, 75 bp, synthetic construct
  source 1..75: mol_type = other DNA
gcattaacccggatgttgttgagcagtttctggcccttatgaatacacattgtaaatcctcagaagaggcgctca

SEQ ID NO: 100187 - DNA, 75 bp, synthetic construct
  source 1..75: mol_type = other DNA
gcgttgatatttttatcaacggtaaaatgtttgaacgtcaggatgtgacatttgttcaggataatccagatgctg

SEQ ID NO: 100188 - DNA, 75 bp, synthetic construct
  source 1..75: mol_type = other DNA
ctatcattcttttctgtgaaattggcatcaccgacacttatgcactcggtggttcggatatccgtcactgcgaac

SEQ ID NO: 100189 - DNA, 75 bp, synthetic construct
  source 1..75: mol_type = other DNA
atggttatcgccgtgtgtgggcgctgctgcgacgggagtcggagcgggacggcctgcctgtggttaatgcaaagc

SEQ ID NO: 100190 - DNA, 75 bp, synthetic construct
  source 1..75: mol_type = other DNA
gtgcttctgcgcccgtcgaaaagaaatcgtttttttctaaattcacgcgtctgaatatgcttcgcctggttcgtg

SEQ ID NO: 100191 - DNA, 75 bp, synthetic construct
  source 1..75: mol_type = other DNA
gaaactccccggaagaggtttattgttgtcaggctggggagagcataacgcgcgataccgcgctggtacgttcct

SEQ ID NO: 100192 - DNA, 75 bp, synthetic construct
  source 1..75: mol_type = other DNA
tatttctgcgggggaaatatcaggtaatttaagcaaatcttttgacgacatcatttatataaatgacacaaagaa

SEQ ID NO: 100193 - DNA, 75 bp, synthetic construct
  source 1..75: mol_type = other DNA
gttgaccgcccaacacaacgcggaggcagcccggattgcagcagaactcgatgccgaggcgcgaggtgatgccag

SEQ ID NO: 100194 - DNA, 75 bp, synthetic construct
  source 1..75: mol_type = other DNA
aatttgccttcgttttctatttcctatgccgggaatatggttggcgtggcgttaacaaccgaaggtgaatgtggc

SEQ ID NO: 100195 - DNA, 75 bp, synthetic construct
  source 1..75: mol_type = other DNA
ggacgctgataatctttctaagatctgggcgctggataatgttcaacgctttatcagcattgccaatactgagtt

SEQ ID NO: 100196 - DNA, 75 bp, synthetic construct
  source 1..75: mol_type = other DNA
ggaaagaaacctgcaatacatcaaaagccgcgatcaggagaacgaggatattgcgctaacggtagggaagctgcg

SEQ ID NO: 100197 - DNA, 75 bp, synthetic construct
  source 1..75: mol_type = other DNA
aatcatcacaactgatgcgatgggttgccagaaagatattgcagagaagatacaaaaacagggcggtgattattt

SEQ ID NO: 100198 - DNA, 75 bp, synthetic construct
  source 1..75: mol_type = other DNA
tggtgaaaccgctaatcgacaccgggcaatatcgcagagcgattacccatgttgtgagggataaaaatgccgact

SEQ ID NO: 100199 - DNA, 75 bp, synthetic construct
  source 1..75: mol_type = other DNA
gcgcgttgttctatgcctggtaccagggctcttccactctgtctgatttcaacaaaacgctggtactgtcgggga

SEQ ID NO: 100200 - DNA, 75 bp, synthetic construct
  source 1..75: mol_type = other DNA
taaataaacttaacataaaaggtactgttgagttgtttatagcactctgtgaatgggataaacattattttaaac

SEQ ID NO: 100201 - DNA, 75 bp, synthetic construct
  source 1..75: mol_type = other DNA
cgagggtttccgatgtgttatcgctgaaatgggagcagattggaaacgacgggatctttatccagcaagggaaaa

SEQ ID NO: 100202 - DNA, 75 bp, synthetic construct
  source 1..75: mol_type = other DNA
tgtggcttacatggagcaaaacgatcggctctatgatatcgccgtcagcgataacaatgcctcctacagccaggc

SEQ ID NO: 100203 - DNA, 75 bp, synthetic construct
  source 1..75: mol_type = other DNA
ctgacttgttggcagatagaaaaaagcgtttccgtaaaaatccgtctcttggaatgggcgactggcgattcttta

SEQ ID NO: 100204 - DNA, 75 bp, synthetic construct
  source 1..75: mol_type = other DNA
aaaccgttatcaccgatacgggtgaaaaaaaattagcgcaggcagccacaccagatggtaaaccggtccgcctga

SEQ ID NO: 100205 - DNA, 75 bp, synthetic construct
  source 1..75: mol_type = other DNA
caggacgactaccacattcaaagaggaattcgtattaatggtgatagtctcacccaatattgtagtgaaaacgcc

SEQ ID NO: 100206 - DNA, 75 bp, synthetic construct
  source 1..75: mol_type = other DNA
cgcggcagttccggaaaaattgatttatatggcattaagaaattacgtgagctgattctggaactggctgtgcgc

SEQ ID NO: 100207 - DNA, 75 bp, synthetic construct
  source 1..75: mol_type = other DNA
cagcaaattatggcggtggggatcctgtgcggtatcggttttactatgtctatctttattgccagcctggccttt

SEQ ID NO: 100208 - DNA, 75 bp, synthetic construct
  source 1..75: mol_type = other DNA
atcgcttccgagactggacgggttcgaacgatgtggtgaatcttttgacactatcatcagtgctaaccctgtttc

SEQ ID NO: 100209 - DNA, 75 bp, synthetic construct
  source 1..75: mol_type = other DNA
tgatggtaatgctgcgggagcagaaagtgcactcaaccgtgccggaacgctggccgttaatggcgtcaggcgtta

SEQ ID NO: 100210 - DNA, 75 bp, synthetic construct
  source 1..75: mol_type = other DNA
tgatatcttttctcctggcccggatggtgtgccaaacactgaagatgatattggtaactggacgctcggtaacgc

SEQ ID NO: 100211 - DNA, 75 bp, synthetic construct
  source 1..75: mol_type = other DNA
tattacagaccatgagtgcacaggaatatgaagatatccgggctgccggaagtgatgaacgccgtgagctgacac

SEQ ID NO: 100212 - DNA, 75 bp, synthetic construct
  source 1..75: mol_type = other DNA
caataatgccaatagggacatgggcctcaatccgtcgatacatgaaaacaaaaaatataattcaccacaattgag

SEQ ID NO: 100213 - DNA, 75 bp, synthetic construct
  source 1..75: mol_type = other DNA
aaagtgagccttatatatcagctttgcaagcgtcaactgatagtttgagagatggaaaatcgattaattatgaac

SEQ ID NO: 100214 - DNA, 75 bp, synthetic construct
  source 1..75: mol_type = other DNA
attgccagaaaaatttcgttgataaaggcatgattgccgacatcgcttttcatgatcttgatagcgacaacccac

SEQ ID NO: 100215 - DNA, 75 bp, synthetic construct
  source 1..75: mol_type = other DNA
ttttctggcacgacctggcagcaccgatcctggcggggattattaccgcagcgattgtcggctggtggcgtaacc

SEQ ID NO: 100216 - DNA, 75 bp, synthetic construct
  source 1..75: mol_type = other DNA
agatatacacggacagagccggataccctgtggtgattactcgcagtactcagcactcagtattctttcggcgca

SEQ ID NO: 100217 - DNA, 75 bp, synthetic construct
  source 1..75: mol_type = other DNA
ctattggcctggtggacaatctctccctgttcattgacgaaatggcgcatccgttacagccggttcgtctgtccg

SEQ ID NO: 100218 - DNA, 75 bp, synthetic construct
  source 1..75: mol_type = other DNA
gttcggcggcgtcatcggcatcatctgcgtctgcttcaaaagatgaggcgaccagacaggcgtcagcagcaaagg

SEQ ID NO: 100219 - DNA, 75 bp, synthetic construct
  source 1..75: mol_type = other DNA
aacggtctgaaaaaaatccgtttccccgagaagagcggcaagatgcaggatcacggcgtgattgccgttgataca

SEQ ID NO: 100220 - DNA, 75 bp, synthetic construct
  source 1..75: mol_type = other DNA
tcacctggtccccggcgttaaatcggtagaagaacagacagtgccgcagctcaaagcagcggcgcaggctgcgct

SEQ ID NO: 100221 - DNA, 75 bp, synthetic construct
  source 1..75: mol_type = other DNA
tattgttccctctgtaaaggaaatgattaaaaaggagaataagacgactatcacacctgaagaaatcattatata

SEQ ID NO: 100222 - DNA, 75 bp, synthetic construct
  source 1..75: mol_type = other DNA
cagagatggacggcatcaaggcactcaaggagatgcgcagccatgagacacggacccccgttattctgatgacgg

SEQ ID NO: 100223 - DNA, 75 bp, synthetic construct
  source 1..75: mol_type = other DNA
atgaccacatttaccgataaagaactgattaaagaaatcaaagaacgaatcagcagcatggacgtgcgagacaat

SEQ ID NO: 100224 - DNA, 75 bp, synthetic construct
  source 1..75: mol_type = other DNA
gccgaaatatacaggcgaaggaacgggcatcaagaaaatcacgggcggcgaccccgtggaaattaacccgaaata

SEQ ID NO: 100225 - DNA, 75 bp, synthetic construct
  source 1..75: mol_type = other DNA
gtctgctaataacgggattattcaccaccagttctttacctctcctcgcggcggaagctcctaaagacgccaccg

SEQ ID NO: 100226 - DNA, 75 bp, synthetic construct
  source 1..75: mol_type = other DNA
taaaaaagacagccacatcaaagggcaacagcgttatgtaccgcacaaacgcatgaacaacgcctttatgatgca

SEQ ID NO: 100227 - DNA, 75 bp, synthetic construct
  source 1..75: mol_type = other DNA
ccggggcgtttgactgtgctgacatgatttaccgtctgcgggaacagaagcccgtgtgggcgctgtgtaatgaca

SEQ ID NO: 100228 - DNA, 75 bp, synthetic construct
  source 1..75: mol_type = other DNA
gtctgctaataacgggattattcaccaccagttctttgccactcctcgcggcggaagcccctaaagacgccaccg

SEQ ID NO: 100229 - DNA, 75 bp, synthetic construct
  source 1..75: mol_type = other DNA
tgtgaaaacctaaaaacatctacccaatccgcccagcaaacccaactgcaccttgcagacgcactgactgacgcg

SEQ ID NO: 100230 - DNA, 75 bp, synthetic construct
  source 1..75: mol_type = other DNA
agtcacaacgccgaattacagttttctcgggtacagcggcacgatgaaagtgacgcccgatcgcatcacggacta

SEQ ID NO: 100231 - DNA, 75 bp, synthetic construct
  source 1..75: mol_type = other DNA
aagccgcgatagagaggattgttaatgcttacgggtttaaaacccgccaagccttagccgaccaccttggtattt

SEQ ID NO: 100232 - DNA, 75 bp, synthetic construct
  source 1..75: mol_type = other DNA
ccaatctcgactatgctcaatactcgtgtgcaccaaagcgaggtgagcatggcgacggacaccccacggattcca

SEQ ID NO: 100233 - DNA, 75 bp, synthetic construct
  source 1..75: mol_type = other DNA
aacgctggcagcgttacaaaaggagtacttgatagactcgcttttattacaggatttgctgacgccctcattagc

SEQ ID NO: 100234 - DNA, 75 bp, synthetic construct
  source 1..75: mol_type = other DNA
gggggaacagccagtgatacggttattcgtgacggcggaggacagagtctgtatgggctggcggtgaacaccaca

SEQ ID NO: 100235 - DNA, 75 bp, synthetic construct
  source 1..75: mol_type = other DNA
acacacacagattcgtgatgaacgtttttttaaaaccaataactctcaatatgatttagttaacggtatgtatct

SEQ ID NO: 100236 - DNA, 75 bp, synthetic construct
  source 1..75: mol_type = other DNA
tcaaaggcgaatgtgcgatgtggcgcaatattctggtccgtaagtatgcggggatgccgatccgtttctatcagg

SEQ ID NO: 100237 - DNA, 75 bp, synthetic construct
  source 1..75: mol_type = other DNA
acccgatgggccagcaacagcagggatagatgatttgggtgaaattttagctaaaatgaaacagagaacatcgag

SEQ ID NO: 100238 - DNA, 75 bp, synthetic construct
  source 1..75: mol_type = other DNA
ctacaggaaataaaatatattcctgtgagcattattccggtcgtgcaacatgggatattcggaagccgtatatag

SEQ ID NO: 100239 - DNA, 75 bp, synthetic construct
  source 1..75: mol_type = other DNA
ctccctggaactggttcaagaaggagcaggaagaacaacagagcactgcctcgctgccggtgcagcgcaatgacc

SEQ ID NO: 100240 - DNA, 75 bp, synthetic construct
  source 1..75: mol_type = other DNA
agaattcaagaaagatcagggcattgacctgcgcaacgatccgctggcaatgcagcgcctgaaagaagcggcaga

SEQ ID NO: 100241 - DNA, 75 bp, synthetic construct
  source 1..75: mol_type = other DNA
gagggtattggattgaacatacaaaatatttttcgctggcttgaaaaggatacgcctgatgctgttgaaaaaatt

SEQ ID NO: 100242 - DNA, 75 bp, synthetic construct
  source 1..75: mol_type = other DNA
cgcttgctttgcaatgcgcggccagcgttcatcccgatactgcgcatgaagttgcaagggttgaatctggtttta

SEQ ID NO: 100243 - DNA, 75 bp, synthetic construct
  source 1..75: mol_type = other DNA
tgaacctaacgccacgactgattacgatacaggtaatctaaatattgctgccagtggtgcaaataacgttcagat

SEQ ID NO: 100244 - DNA, 75 bp, synthetic construct
  source 1..75: mol_type = other DNA
gtttcaggcggctcactggcggcattgacttcacccttaacctcaacaactcccgtcgaagaaaaagcagagtaa

SEQ ID NO: 100245 - DNA, 75 bp, synthetic construct
  source 1..75: mol_type = other DNA
gagcactggcattcttttgaaggctacgcagagaaccaatactttgtcgatccgtgcaaactgttgctgacaact

SEQ ID NO: 100246 - DNA, 75 bp, synthetic construct
  source 1..75: mol_type = other DNA
agtgacctgcgggttattacccgccagggcgatattggcatggaagagttgcgccaggcgctgacggtagagaac

SEQ ID NO: 100247 - DNA, 75 bp, synthetic construct
  source 1..75: mol_type = other DNA
taatttgcaaaacgggcagatggtgaaaatccgccagaacgccagcggcgtggtgacgggcttaaccattgatac

SEQ ID NO: 100248 - DNA, 75 bp, synthetic construct
  source 1..75: mol_type = other DNA
gacactgcgtgtcgctaaaaccacaatcggcggcaacctggagaatggcggcacggttcaaatgaatagcgaagg

SEQ ID NO: 100249 - DNA, 75 bp, synthetic construct
  source 1..75: mol_type = other DNA
tgctgccggtagtgatgacaaagctatcgacaaagcccgtaatgcgccgttccgcgcaccgctcatcatcacggt

SEQ ID NO: 100250 - DNA, 75 bp, synthetic construct
  source 1..75: mol_type = other DNA
atgaaagggttgggcctggcaatttccatgtcggggatggtggcgtgtggcatgttgttctgccttgcttccggt

SEQ ID NO: 100251 - DNA, 75 bp, synthetic construct
  source 1..75: mol_type = other DNA
ccgcgatggcatttaatgagccgcttttactggaacccgcctatgcgcgggttttcttttgcgcactgggtaagg

SEQ ID NO: 100252 - DNA, 75 bp, synthetic construct
  source 1..75: mol_type = other DNA
atcaacacggtagcgggcgatgacatcattaacgccacagaacacggacaggcgcagattatcagcggctcggca

SEQ ID NO: 100253 - DNA, 75 bp, synthetic construct
  source 1..75: mol_type = other DNA
caccgtagactggttctaagtgaagagtcctggaatctggttatggatgctataagcaatcctccggcaccgaac

SEQ ID NO: 100254 - DNA, 75 bp, synthetic construct
  source 1..75: mol_type = other DNA
ggattatcagcgatatcgacgaggtgaaggtgtgcgtgcgcgtcaccctgccggaatgcgacgatctgcgcacca

SEQ ID NO: 100255 - DNA, 75 bp, synthetic construct
  source 1..75: mol_type = other DNA
cgataccaatccatccaagtttgagctggcaaaacagttcggcgccacagactgcattaatcccaatgattatga

SEQ ID NO: 100256 - DNA, 75 bp, synthetic construct
  source 1..75: mol_type = other DNA
tcagcggcggcggtcacggtattgatatcaccggtgacagcgcgacggtggataacaagggcaccatgaccgtca

SEQ ID NO: 100257 - DNA, 75 bp, synthetic construct
  source 1..75: mol_type = other DNA
atatgctgatcatgctgcaccaaatgggcaatcacgggcctgcgtattttaagcgatatgatgaaaagtttgcca

SEQ ID NO: 100258 - DNA, 75 bp, synthetic construct
  source 1..75: mol_type = other DNA
gttcaattgccgacaaattgcaggctggcgaacgggatctcgatgaaattattgctattgccgggcaagaactga

SEQ ID NO: 100259 - DNA, 75 bp, synthetic construct
  source 1..75: mol_type = other DNA
gaactggttagcgatgtgctgccttatgaagagatgaagttgcgcatgctcaacggcagtcattcattcctggcg

SEQ ID NO: 100260 - DNA, 75 bp, synthetic construct
  source 1..75: mol_type = other DNA
tttatggagaagcgtttcggggaatctgtagatcgccgtagggcaaaaaatggcgatagagaatacatggcatgg

SEQ ID NO: 100261 - DNA, 75 bp, synthetic construct
  source 1..75: mol_type = other DNA
tgttgcctttgggatttcaggcgttcaggtcacgcgtattctggacagcattgcactgtttcgaggctatccggc

SEQ ID NO: 100262 - DNA, 75 bp, synthetic construct
  source 1..75: mol_type = other DNA
aacattaaaacttgcaaagaaagcgttgggggagtggcaggaaaaccagattaagattgaaagaaaagcgcttgc

SEQ ID NO: 100263 - DNA, 75 bp, synthetic construct
  source 1..75: mol_type = other DNA
tgatgaattaatagtcatgctctgggcaaatgaaattttcaaccgtgatgagcccgatactattgcgagacctct

SEQ ID NO: 100264 - DNA, 75 bp, synthetic construct
  source 1..75: mol_type = other DNA
ataaaaaacgtaaaaatagcccgcggattgtccagtcaaatgagctgactgaggcggcatatagtctctccaggg

SEQ ID NO: 100265 - DNA, 75 bp, synthetic construct
  source 1..75: mol_type = other DNA
gcagatgtaccgcgcgacctactcaccggatgataacaaacttcgcctgtatgccgtgtcacgcctcgacccgga

SEQ ID NO: 100266 - DNA, 75 bp, synthetic construct
  source 1..75: mol_type = other DNA
attttataatgctgctcccggcgctgctgttggttgggtggttagttttggtgataattctcatgtttagggatg

SEQ ID NO: 100267 - DNA, 75 bp, synthetic construct
  source 1..75: mol_type = other DNA
gaacttattcaggatgttgattatatcacccccaatgaaacagaagctggtttactgtccggcatagacgtacac

SEQ ID NO: 100268 - DNA, 75 bp, synthetic construct
  source 1..75: mol_type = other DNA
tgtacacgccggcgcgaaaaatccacctgtaccactgcgaccatcgcggcctgccgctggcgcttgtcagcacgg

SEQ ID NO: 100269 - DNA, 75 bp, synthetic construct
  source 1..75: mol_type = other DNA
cggtacaatttataaattaccgtcgctgaaagatgcgttttatatcccgatgcaggaatatttccatttgaccaa

SEQ ID NO: 100270 - DNA, 75 bp, synthetic construct
  source 1..75: mol_type = other DNA
ttcatcacattagccgggctgaataccaggaattgttagccgtttcccgtggcgacgctgttgccgattatatta

SEQ ID NO: 100271 - DNA, 75 bp, synthetic construct
  source 1..75: mol_type = other DNA
cagccagacactgttaaagatggtcaatgaagcgcgtaagttatgtggggaaccagaggttcggaacaacaaatt

SEQ ID NO: 100272 - DNA, 75 bp, synthetic construct
  source 1..75: mol_type = other DNA
aaaaacaagagagaaatttaacaggtgttcaaacagatgttgaagtggtgtttgaacatgatgtcaacacaaagg

SEQ ID NO: 100273 - DNA, 75 bp, synthetic construct
  source 1..75: mol_type = other DNA
cgtgtgttcacgacgaacggcacggatgccagccgctttatggttcagtctggtgctgcatgggtatatgaacgt

SEQ ID NO: 100274 - DNA, 75 bp, synthetic construct
  source 1..75: mol_type = other DNA
cgttgctggtaacccgcgcgttgttaaagccatgctggcgaacatgcgtgacgagttaagcgacgctctgaagcg

SEQ ID NO: 100275 - DNA, 75 bp, synthetic construct
  source 1..75: mol_type = other DNA
aacaaacgtatgggtgacctgcgtgacatcaatggcgaagccggtgcatgggcacgcatcatgagcggtactggc

SEQ ID NO: 100276 - DNA, 75 bp, synthetic construct
  source 1..75: mol_type = other DNA
tatttctggaagcagaagaacgaatccacgtaccagacggtgtacggcagctataaaaacaaaacggaaaagaat

SEQ ID NO: 100277 - DNA, 75 bp, synthetic construct
  source 1..75: mol_type = other DNA
ctcttaacgttacccgccgtattgcaacaagcaataaaacaggcacatccgctcaaacacgtagaagcaaccttt

SEQ ID NO: 100278 - DNA, 75 bp, synthetic construct
  source 1..75: mol_type = other DNA
ctgataatgccgttaaaattgggcttggctctgcgctaacaatattgggcggttatttgacgctcaaattatcac

SEQ ID NO: 100279 - DNA, 75 bp, synthetic construct
  source 1..75: mol_type = other DNA
accttcacaaaattggtgatggcacattagatgtccgaaaaacccagaacaccaacctgaaaacaggtgagggtc

SEQ ID NO: 100280 - DNA, 75 bp, synthetic construct
  source 1..75: mol_type = other DNA
gtcaccacggatgtcattgctcagcgcggtacagccctgaagctgaccggcagcactgtgctgaacggtgccatt

SEQ ID NO: 100281 - DNA, 75 bp, synthetic construct
  source 1..75: mol_type = other DNA
ataaagtgacgactattattcagggcggcacgtcgtcggttacagcgctgaccggctccaccgaagaatcgcagt

SEQ ID NO: 100282 - DNA, 75 bp, synthetic construct
  source 1..75: mol_type = other DNA
tgtgagcaggatacagccgttgattgacgaactgaacgcgttgccaaaacccgtccccaaaggcgtgtcaaaaaa

SEQ ID NO: 100283 - DNA, 75 bp, synthetic construct
  source 1..75: mol_type = other DNA
atgaaaaaaagaaatttcagcgcagagtttaaacgcgaatccgctcaactggtcgttgaccagaactacaccgtg

SEQ ID NO: 100284 - DNA, 75 bp, synthetic construct
  source 1..75: mol_type = other DNA
cctgcgtggcgattttggtcgtatcgtggtgaaagatggcgcgaacattcaggataattgcgttatgcacggttt

SEQ ID NO: 100285 - DNA, 75 bp, synthetic construct
  source 1..75: mol_type = other DNA
atgaaatcccccgcaccttctcgcccgcaaaaaatggcgttaattccagcctgtatctttttgtgtttcgctgcg

SEQ ID NO: 100286 - DNA, 75 bp, synthetic construct
  source 1..75: mol_type = other DNA
accgcagtaatgtcactgatcctgtggggactggatggtattctggttcgcctggtatcctttatcactggcctg

SEQ ID NO: 100287 - DNA, 75 bp, synthetic construct
  source 1..75: mol_type = other DNA
gtgccaccgcgcatgtggaatgccgtaaagatgccgaagtgatcgacgaaatcccgatggcgtataaagatattg

SEQ ID NO: 100288 - DNA, 75 bp, synthetic construct
  source 1..75: mol_type = other DNA
tcaccggcgtgacggatggtgcctggcgtcacttccggctggtactgaccacgcaggcgcagcgggcagaagaag

SEQ ID NO: 100289 - DNA, 75 bp, synthetic construct
  source 1..75: mol_type = other DNA
actgctggggcgtaccaaatccggctcactggtactgactgaggataacaccgggctacgttttgaactgacacc

SEQ ID NO: 100290 - DNA, 75 bp, synthetic construct
  source 1..75: mol_type = other DNA
gccatcatcagttatacgctgacggtggcgatgcttattccggtaagcggatggctagccgatcgcttcggtacg

SEQ ID NO: 100291 - DNA, 75 bp, synthetic construct
  source 1..75: mol_type = other DNA
cgagccggaatacaaccgcatcgccacctaccagtccatcaatgacgcttatgtcgttgaagactatggcaagtg

SEQ ID NO: 100292 - DNA, 75 bp, synthetic construct
  source 1..75: mol_type = other DNA
cgtgcctggttactccagttcctgaaggcagaggtgacacgacaggctgatgtgacgcgcatactgccgctgatt

SEQ ID NO: 100293 - DNA, 75 bp, synthetic construct
  source 1..75: mol_type = other DNA
agtgcgggttttgagcgtttgtttagggtgttcagcgtccttggagtggagatcgtactttcatccagggaacca

SEQ ID NO: 100294 - DNA, 75 bp, synthetic construct
  source 1..75: mol_type = other DNA
gatttatggaaagcggaaaatcagtatgcggtcctgaaagaggcagccacgaaacggcagttatctgagcaggaa

SEQ ID NO: 100295 - DNA, 75 bp, synthetic construct
  source 1..75: mol_type = other DNA
agtacacttgtacggtgatggattcggcgaatcagcctctgagtgtcacatcactggcgtgtcaggtgatggtga

SEQ ID NO: 100296 - DNA, 75 bp, synthetic construct
  source 1..75: mol_type = other DNA
actgctgacaggacacgctttccaccctgcacctaagtctcatgaaccgtttaaccgccaggaagctgaacgata

SEQ ID NO: 100297 - DNA, 75 bp, synthetic construct
  source 1..75: mol_type = other DNA
cagctgaaatactccgacctggcatcaaccgcaggttatctttcagcaatgatcccccctctgtcatggatgatg

SEQ ID NO: 100298 - DNA, 75 bp, synthetic construct
  source 1..75: mol_type = other DNA
tgtttatggctgctgggcgaacacccagttgactatgtgaaatgggacatgaaccgcgagctggtccaggccggg

SEQ ID NO: 100299 - DNA, 75 bp, synthetic construct
  source 1..75: mol_type = other DNA
tattcgcatttgccaatgcggggatttcgttagaaggcgtatcgatgtcaggtctaacttcaatgctgccactcg

SEQ ID NO: 100300 - DNA, 75 bp, synthetic construct
  source 1..75: mol_type = other DNA
tcaaaaatttattcagcaatgcagaaaatgacgaaccggcgtcatgaggaaaactggaaactcagggcagaagca

SEQ ID NO: 100301 - DNA, 75 bp, synthetic construct
  source 1..75: mol_type = other DNA
tttgtgggaaattattagttctaattttagcagagactttccatggtatgataaagaaaaatccataaaatttag

SEQ ID NO: 100302 - DNA, 75 bp, synthetic construct
  source 1..75: mol_type = other DNA
tattctggcaacggtaatggcctgctgcggttttttgctctatccgctgaagtttagttttatccgtcctgaagt

SEQ ID NO: 100303 - DNA, 75 bp, synthetic construct
  source 1..75: mol_type = other DNA
tttatctgcttaccgcttttcagtctgcaaatgcaggtggaataccttatacatttaaccagaaaattcttcagg

SEQ ID NO: 100304 - DNA, 75 bp, synthetic construct
  source 1..75: mol_type = other DNA
cgttaacgcaggggactctgtatcaccggaatttatgcgggcgctggctgagcgtctgccgcagcatgaggataa

SEQ ID NO: 100305 - DNA, 75 bp, synthetic construct
  source 1..75: mol_type = other DNA
ctcagctttatgctgaaattgctgacgaacgctacatcgcaggagtgacttgtcaacagatctatgaatctttaa

SEQ ID NO: 100306 - DNA, 75 bp, synthetic construct
  source 1..75: mol_type = other DNA
tatcccgaatccggcgtggagattgcccaccgttcgttgtttgcacagtaccctgaattacgcccggcaggaaat

SEQ ID NO: 100307 - DNA, 75 bp, synthetic construct
  source 1..75: mol_type = other DNA
agacctggtagggaaggttgaaatgactgagtggttagttgactttgctgcccagcttcgcaaaggaggcaacca

SEQ ID NO: 100308 - DNA, 75 bp, synthetic construct
  source 1..75: mol_type = other DNA
gtgggtatctggttccgctttgccaccgacgcccggctgaaaattgaggttatcgaattttacgacgaccagagc

SEQ ID NO: 100309 - DNA, 75 bp, synthetic construct
  source 1..75: mol_type = other DNA
ttccgcgttaattataagaacggcggtattttttatcgttctgctcgtgacggttacggattcgaggctgactgg

SEQ ID NO: 100310 - DNA, 75 bp, synthetic construct
  source 1..75: mol_type = other DNA
ttactgatatgaaagtcattccggtcgccgggcacgatagcatgttgcttaatattggtggggcacataacgcat

SEQ ID NO: 100311 - DNA, 75 bp, synthetic construct
  source 1..75: mol_type = other DNA
cgccactcgacgctattcgtgagaacccaggcaaagggcactccatttcacaggttcgctctgagattcgcgccc

SEQ ID NO: 100312 - DNA, 75 bp, synthetic construct
  source 1..75: mol_type = other DNA
ggagagctaagaacttattcaacgttagacaaagctgctacagagttttttaagcgactttcattgatggtatct

SEQ ID NO: 100313 - DNA, 75 bp, synthetic construct
  source 1..75: mol_type = other DNA
gatcgcatgctgacgctctccagagccggacaggccgcggggctgacgtttaaccaggcgagagagtcactggca

SEQ ID NO: 100314 - DNA, 75 bp, synthetic construct
  source 1..75: mol_type = other DNA
gaagatgggggcatgtgtgttgacgggggcggtgagtatgtaagtcactcgctgcctggtggaacgtaccagcta

SEQ ID NO: 100315 - DNA, 75 bp, synthetic construct
  source 1..75: mol_type = other DNA
cacatccaggctgatgtctgggttcgttaccagcgaatgcgcggccacgaggttaatttcatctgtgccgacgat

SEQ ID NO: 100316 - DNA, 75 bp, synthetic construct
  source 1..75: mol_type = other DNA
tgcaactgacggcgtctgcgggcgtggcaccagtaaagtttctcgccaaaatcgcctccgacatgaataaaccca

SEQ ID NO: 100317 - DNA, 75 bp, synthetic construct
  source 1..75: mol_type = other DNA
ccgttacagccggttcgtctgtccggtgatgaacttcacggagaagatccatattacgtcctgtacgtcacgccg

SEQ ID NO: 100318 - DNA, 75 bp, synthetic construct
  source 1..75: mol_type = other DNA
caacggcgagcaatgatgcaggattacgccgacgctattgattcaatattggctggtgacggtaatccacttgaa

SEQ ID NO: 100319 - DNA, 75 bp, synthetic construct
  source 1..75: mol_type = other DNA
aactggcgcgcaatgttgggggttcttgctttaccagcagtcctgctgattattctggtggtcttcctgccaaat

SEQ ID NO: 100320 - DNA, 75 bp, synthetic construct
  source 1..75: mol_type = other DNA
ccaagtgggaacacaaatttgaccgtaaaaaagcgctggcctacgagcgtgaaatgttgggcaaatttgataaaa

SEQ ID NO: 100321 - DNA, 75 bp, synthetic construct
  source 1..75: mol_type = other DNA
cagggcaaaacaccaaaagcctctccaataacgccggaacaaatcgaaatacgagagctgaagaaaaagctacaa

SEQ ID NO: 100322 - DNA, 75 bp, synthetic construct
  source 1..75: mol_type = other DNA
aacatggggacgctggagacctgggcggataaaacagggaaggcgttcaaatcgatgtgggatgccatcctggat

SEQ ID NO: 100323 - DNA, 75 bp, synthetic construct
  source 1..75: mol_type = other DNA
gaatgcatttcccgttagtttacaagacttttcctgtactgaggaacatcttaattgtccgataacgctacatat

SEQ ID NO: 100324 - DNA, 75 bp, synthetic construct
  source 1..75: mol_type = other DNA
ggtggcgcttgaccgcatcatgatcggctttaacggcacgtcacacgcggaaaaatccaacttcagcaccaacaa

SEQ ID NO: 100325 - DNA, 75 bp, synthetic construct
  source 1..75: mol_type = other DNA
ggggccaaaccgctggcaaaacctgccggccgctcaggcaatggccaatgccgatgatttgattaaaagctacgt

SEQ ID NO: 100326 - DNA, 75 bp, synthetic construct
  source 1..75: mol_type = other DNA
cggactcatcatgagattttatctgattaataatgaatattacgaacagattaaggtgtgtttacagcctaaaaa

SEQ ID NO: 100327 - DNA, 75 bp, synthetic construct
  source 1..75: mol_type = other DNA
tcggaattggtgcgcttgctgctgccacgggggtgctggcgtatgcctggtaccggggcgacgccacgctttcag

SEQ ID NO: 100328 - DNA, 75 bp, synthetic construct
  source 1..75: mol_type = other DNA
ggccggagttgctgcaatgattatcaacgatgccctgcaccacagcgaaactccagctaccgatgcttttctagc

SEQ ID NO: 100329 - DNA, 75 bp, synthetic construct
  source 1..75: mol_type = other DNA
aattattacaaatttccccggaagtgcaggacgctttaaaaaacaaaaaaccggttgtggcgctggaatcgacca

SEQ ID NO: 100330 - DNA, 75 bp, synthetic construct
  source 1..75: mol_type = other DNA
cttatgacaaattggttaacaatgccgtcaaaattggtcgcacaattcttacggcgtggattaagcaggtccctg

SEQ ID NO: 100331 - DNA, 75 bp, synthetic construct
  source 1..75: mol_type = other DNA
ggcatggagtgttttgtatcggaagcgctgggagcatattaggaataataacaatgttcaccgccgatataaacg

SEQ ID NO: 100332 - DNA, 75 bp, synthetic construct
  source 1..75: mol_type = other DNA
gacggtgcgcccgggaatgttaacgcattttagcagcaacggcacacgctacggaccctacgtaaaactgtcctg

SEQ ID NO: 100333 - DNA, 75 bp, synthetic construct
  source 1..75: mol_type = other DNA
gagtttatggaaaagtgtatagaatacggaaaaacaatggtctttgttggtgaaacaggatcaggaaaaacaact

SEQ ID NO: 100334 - DNA, 75 bp, synthetic construct
  source 1..75: mol_type = other DNA
ttggtacgacaacactgctgtggggatttctttcggcagccatggcatgggccgatactgaagcgaaatttctga

SEQ ID NO: 100335 - DNA, 75 bp, synthetic construct
  source 1..75: mol_type = other DNA
gccgtggagcttgtggtgcgtggacgtcacaaagaagtggactccggtgagtggaagacgggcgaaagcaacacc

SEQ ID NO: 100336 - DNA, 75 bp, synthetic construct
  source 1..75: mol_type = other DNA
ggcgcgtaccgtgctgcgtgaggtgaaagtccttaaagagatggcaagccagcagggcgagacgatgtccgggcc

SEQ ID NO: 100337 - DNA, 75 bp, synthetic construct
  source 1..75: mol_type = other DNA
ttatcccgatgctgcaccagacctttccaaagctggaaatgtatctgcatgaagcacagacccaccagttactgg

SEQ ID NO: 100338 - DNA, 75 bp, synthetic construct
  source 1..75: mol_type = other DNA
gcgtcgcgagcgtgacctgacgggatggatgtcgctgtcgcggaaaccggaggtgacgtggtacgggtgggacgg

SEQ ID NO: 100339 - DNA, 75 bp, synthetic construct
  source 1..75: mol_type = other DNA
tcacatgatcggcatgtccatcaacctgcagaccagcggcccgcactgggtgggagccgccagctatcttggcga

SEQ ID NO: 100340 - DNA, 75 bp, synthetic construct
  source 1..75: mol_type = other DNA
tcgaggtcatggactcacggaaggcagtgcggatcaggctgataaatattgatgcaccggaaaagaaacaggatt

SEQ ID NO: 100341 - DNA, 75 bp, synthetic construct
  source 1..75: mol_type = other DNA
taacatgacgctggaaaatccttcaccagagctgctcacggtgttgatccgtgagctgaccgggaggggacgatg

SEQ ID NO: 100342 - DNA, 75 bp, synthetic construct
  source 1..75: mol_type = other DNA
gaaaaatcttgctacagcaggggttttcagatggattacaaatatccacgaaaacaaaaggtattactatacctt

SEQ ID NO: 100343 - DNA, 75 bp, synthetic construct
  source 1..75: mol_type = other DNA
ggaacgcagttaccaggaaagtatcctgtagacatcatattaaatgattccagggtggactctcttgaaatgttt

SEQ ID NO: 100344 - DNA, 75 bp, synthetic construct
  source 1..75: mol_type = other DNA
agcaggaagcgccaaaagcggtttcgccggacaagaaaagcacgaagcagaccagcgcgggtgcgccggttgtcc

SEQ ID NO: 100345 - DNA, 75 bp, synthetic construct
  source 1..75: mol_type = other DNA
caggctggtacagatatgctacaaacggttggttcaactaataccgcaatccttattactgatcctcatggtaaa

SEQ ID NO: 100346 - DNA, 75 bp, synthetic construct
  source 1..75: mol_type = other DNA
ttcatggaggtaaggtcgataaaatagtagctaaaaaacagtttattcaatatcactatgaactatcagaagcat

SEQ ID NO: 100347 - DNA, 75 bp, synthetic construct
  source 1..75: mol_type = other DNA
ccccggcagccttcaggggaaaaatatcatcagatggctgcttaaaaaaagaacaaatggtagtgtccgctattg

SEQ ID NO: 100348 - DNA, 75 bp, synthetic construct
  source 1..75: mol_type = other DNA
ttaaccaagagggttcaccggatctttcccgatgctgatgttcgggttaaaccgatgatgacactgccggcgatc

SEQ ID NO: 100349 - DNA, 75 bp, synthetic construct
  source 1..75: mol_type = other DNA
aatgccgggggcagtggatgtggatctggggcttgatgacagtgcgctggacacagaattttccattggtggtac

SEQ ID NO: 100350 - DNA, 75 bp, synthetic construct
  source 1..75: mol_type = other DNA
cgggattttcgccggagctgcaaggtgtctatagcgaaaccgatgcagatggcatgaaacgattgtacggttatg

SEQ ID NO: 100351 - DNA, 75 bp, synthetic construct
  source 1..75: mol_type = other DNA
gcagataaagaaaatagttcctcatccggataccgccttgcatgcatactgttcaggacagagtaaaaaacgtga

SEQ ID NO: 100352 - DNA, 75 bp, synthetic construct
  source 1..75: mol_type = other DNA
gctgaacaactcaaccgaaaactgaaaggctgggccatgttctataagttcgttgattttaaggccaaagtcttc

SEQ ID NO: 100353 - DNA, 75 bp, synthetic construct
  source 1..75: mol_type = other DNA
tttattcccccctgaaagaactggtgaaaatgcctgatttcagcgtttcactggacagggagcaggataaaaaca

SEQ ID NO: 100354 - DNA, 75 bp, synthetic construct
  source 1..75: mol_type = other DNA
tggatgcgttcgcccccccgctttacttcctgttgtttttgctgttctgtgctggtttttcgttatccatttacc

SEQ ID NO: 100355 - DNA, 75 bp, synthetic construct
  source 1..75: mol_type = other DNA
tacactcagcgcattgagcgacataatctgaatctgagacaacatctggcaaggctggtacggaagtcactgtcg

SEQ ID NO: 100356 - DNA, 75 bp, synthetic construct
  source 1..75: mol_type = other DNA
ggatttccgtcggacagtataaagcggccatgcgcaccctgcccgcacagtttacggatatcgccacgcagcttg

SEQ ID NO: 100357 - DNA, 75 bp, synthetic construct
  source 1..75: mol_type = other DNA
ctgtagacagggtggtgctcacttctggagtgaatccagattaaacatctcattgctgatgcttgatattgagca

SEQ ID NO: 100358 - DNA, 75 bp, synthetic construct
  source 1..75: mol_type = other DNA
cgtggtgtcacagggcgcacagtgattgcagaagtcatctctcctgatgccagattttttcagttgtaccgggaa

SEQ ID NO: 100359 - DNA, 75 bp, synthetic construct
  source 1..75: mol_type = other DNA
tacgccgcaaccggtgtggatgccgtgccgattcgttttgcaggctcttaccagcgcgacgataccggcgaaacg

SEQ ID NO: 100360 - DNA, 75 bp, synthetic construct
  source 1..75: mol_type = other DNA
tgcaatggctggctaacatttctggccgtgatgacattgacgatatagacggcggtgagattcgtgaacaggcac

SEQ ID NO: 100361 - DNA, 75 bp, synthetic construct
  source 1..75: mol_type = other DNA
tgacaataaaagcaattctcgaatacatagaagagcatattggagttaaaccgatcgatattgaaactatagtct

SEQ ID NO: 100362 - DNA, 75 bp, synthetic construct
  source 1..75: mol_type = other DNA
tcacggtcagtatcggtgagttctgttcaaaaaaagtgctcggcgtctgtctcgagaagaagcgcagctactgtc

SEQ ID NO: 100363 - DNA, 75 bp, synthetic construct
  source 1..75: mol_type = other DNA
acgacttcgacttcggtttaagtctgggtgctgcatatcaaactctgatcgttcagatcgtcaggttggagttgg

SEQ ID NO: 100364 - DNA, 75 bp, synthetic construct
  source 1..75: mol_type = other DNA
cgcaacactggagaaaaatttcccggaagataatgctgtcggtgtgcttgaggtttttgctgccggcaattttgc

SEQ ID NO: 100365 - DNA, 75 bp, synthetic construct
  source 1..75: mol_type = other DNA
agcgggcgatgtggtgagcgttgtgctcaacggcaaaacctacaccaccaccctggatgcctccggcaactggag

SEQ ID NO: 100366 - DNA, 75 bp, synthetic construct
  source 1..75: mol_type = other DNA
agataaacgcaggcgaaatcgaccttgctccttgtcatcattatcacgcggttggaccaatggcaggcattatca

SEQ ID NO: 100367 - DNA, 75 bp, synthetic construct
  source 1..75: mol_type = other DNA
atgagtatggttgccagaactgaaccaggacccgcagaggacgacatcaccgataccgatgatggcgacactcgc

SEQ ID NO: 100368 - DNA, 75 bp, synthetic construct
  source 1..75: mol_type = other DNA
gcagtgaacgtgtatttcatctttgtgtttgcagcccgttagacagcattctgacctcgcagatttataatcaca

SEQ ID NO: 100369 - DNA, 75 bp, synthetic construct
  source 1..75: mol_type = other DNA
tactcatgcttatttcgccattaagttgggctggaaccatgacttttcagttccgtaatccaaactttggtggta

SEQ ID NO: 100370 - DNA, 75 bp, synthetic construct
  source 1..75: mol_type = other DNA
tcacgttcaccagatggctgaacattatggtgttccggttatcctgcacaccgaccactgcgcgaagaaactgct

SEQ ID NO: 100371 - DNA, 75 bp, synthetic construct
  source 1..75: mol_type = other DNA
ttgaaattaccggtaaatcagtctgtcttgatgtacttacacagtggattgaagggcgtgagaccccgcgctacc

SEQ ID NO: 100372 - DNA, 75 bp, synthetic construct
  source 1..75: mol_type = other DNA
tgcgcgggatgatgccgggcgttgtagcatctatgttgcctgagcattcagctgtactggcagaaaactgtcatt

SEQ ID NO: 100373 - DNA, 75 bp, synthetic construct
  source 1..75: mol_type = other DNA
tgacggagacagtcaccagttcagaatagccgatcgccaggcatacacaggggtgaaggcgtactggctggattt

SEQ ID NO: 100374 - DNA, 75 bp, synthetic construct
  source 1..75: mol_type = other DNA
ctgttgcaagagttgttctcacgcgacggtatcggtacgcagattgtgatggaaagcgccgagcagattcgtcgc

SEQ ID NO: 100375 - DNA, 75 bp, synthetic construct
  source 1..75: mol_type = other DNA
atgaaaatcgaagaattgcgtgaaatttttagtgaaaatggcctctatgctgtgcgcgttgagaatggggaagtt

SEQ ID NO: 100376 - DNA, 75 bp, synthetic construct
  source 1..75: mol_type = other DNA
cgaccggtgaaaccggaaaaaccatcacagagtccttcatgaacaagccgaaagacattctgtcaccggatgcac

SEQ ID NO: 100377 - DNA, 75 bp, synthetic construct
  source 1..75: mol_type = other DNA
cgctgatgttgttatgcctgaccgggacggccagggccgcttcggctgaatgtgaaggcaattttgtcaatccaa

SEQ ID NO: 100378 - DNA, 75 bp, synthetic construct
  source 1..75: mol_type = other DNA
cagctatgttggtgagcctggcattgttctcgcaaagttcgttggcaaaagagtataaaattggtgcgtcattat

SEQ ID NO: 100379 - DNA, 75 bp, synthetic construct
  source 1..75: mol_type = other DNA
ttttgaaaaaataaaaaagaacaaaacacatggcaggatctgtccacaaaagaacaaaaattacagcttattaaa

SEQ ID NO: 100380 - DNA, 75 bp, synthetic construct
  source 1..75: mol_type = other DNA
tcctcgtggtttatgcagcatgatgccggtaatggcgcagacctgctggagaagggcgggcttatcagttgtcgt

SEQ ID NO: 100381 - DNA, 75 bp, synthetic construct
  source 1..75: mol_type = other DNA
gtctgaaatacgatgccaataatatttatctggcaactttttattctgaaacacgcaaaatgacgccaataactg

SEQ ID NO: 100382 - DNA, 75 bp, synthetic construct
  source 1..75: mol_type = other DNA
acttcccccttcagcaccaacggaagagataccgcagaccgattttcagtcggtcatgaaaaacttgcttaagcg

SEQ ID NO: 100383 - DNA, 75 bp, synthetic construct
  source 1..75: mol_type = other DNA
gaccgatgtggcacgttctccgggctgcatggtgaacctcggcggattcaccgttaatctcgggaaaatggggat

SEQ ID NO: 100384 - DNA, 75 bp, synthetic construct
  source 1..75: mol_type = other DNA
ttgagtagcgcatggaatacgcttagtcagtttggctcaaaccgtggtagcagtaattcaatgaccagtggcgca

SEQ ID NO: 100385 - DNA, 75 bp, synthetic construct
  source 1..75: mol_type = other DNA
tcagtgtcggagagttctgttcgaagaaagtgctgggtgtctgtctgcagaaaaaacgcagctactgtcagtttg

SEQ ID NO: 100386 - DNA, 75 bp, synthetic construct
  source 1..75: mol_type = other DNA
atgaccactattaccaaagaacgtattgaattgttcattaaaaacccgcttgaaaacgggcttacccgtggtgaa

SEQ ID NO: 100387 - DNA, 75 bp, synthetic construct
  source 1..75: mol_type = other DNA
cgcagcgtgtaacaaaagaaggaaaacaggatgatgaagaaaaaccgcagccatctggcgcaatggcagatgaac

SEQ ID NO: 100388 - DNA, 75 bp, synthetic construct
  source 1..75: mol_type = other DNA
catctgctgggaaaaatcaacagcggacaggttgatccgctggcggcccattacatctctcccgtcgatgaggac

SEQ ID NO: 100389 - DNA, 75 bp, synthetic construct
  source 1..75: mol_type = other DNA
ttaatcttcctgcgggtaactggcaagagggtgaacggggtattgcatgtcatcctggtcgggcaaaagaatttc

SEQ ID NO: 100390 - DNA, 75 bp, synthetic construct
  source 1..75: mol_type = other DNA
tggaacggggggataaaatcgacccggtgccggagacggccaatttttatgcccgccttggtcatgaacgttatc

SEQ ID NO: 100391 - DNA, 75 bp, synthetic construct
  source 1..75: mol_type = other DNA
atgcaatatggtgttgaatgctttggtgctgaatggcttaataaaataaaagtgtattttaaacagtttaaaatt

SEQ ID NO: 100392 - DNA, 75 bp, synthetic construct
  source 1..75: mol_type = other DNA
agcagaacgcgtgcagccctgaagaaaaatccgaaaaacgtgctgttgtcggtgatctggatgcagggggaaaaa

SEQ ID NO: 100393 - DNA, 75 bp, synthetic construct
  source 1..75: mol_type = other DNA
cactacatgcagaaagagatctacgaacagccgaacgcgatcaaaaacacccttaccgggcgcatcagccacggt

SEQ ID NO: 100394 - DNA, 75 bp, synthetic construct
  source 1..75: mol_type = other DNA
actacaccaaagcagcagaatctaaaaactcggaaaacgcggtggtgatctggaacatgccccagctggcaaaac

SEQ ID NO: 100395 - DNA, 75 bp, synthetic construct
  source 1..75: mol_type = other DNA
agggacactgaagtactgctttgcttatattgttattctaggactgaaagtaggtctggtttaccacctgttcat

SEQ ID NO: 100396 - DNA, 75 bp, synthetic construct
  source 1..75: mol_type = other DNA
atgaaaactgttaatgagctgattaaggatatcaattcgctgacctctcaccttcacgagaaagattttttgtta

SEQ ID NO: 100397 - DNA, 75 bp, synthetic construct
  source 1..75: mol_type = other DNA
gtatcggcagcgccattggtggtgctttcggtggtggggcgtctgcctccacggggacggccattcaggctgcgg

SEQ ID NO: 100398 - DNA, 75 bp, synthetic construct
  source 1..75: mol_type = other DNA
accgggctattccgcatgtggtgcgcgaatccgtcgatgccattcgccgctgggagcctcgctgccagcttatgt

SEQ ID NO: 100399 - DNA, 75 bp, synthetic construct
  source 1..75: mol_type = other DNA
gttgaaacccggcaatggggcgggctgacgctaactttaattattgcatcagttgggattgcgggggcgctgccg

SEQ ID NO: 100400 - DNA, 75 bp, synthetic construct
  source 1..75: mol_type = other DNA
ttgccgcacagacaacgcaggccagcaaccgtatccgcggccttctgacccagatacatccggcactggagcgcg

SEQ ID NO: 100401 - DNA, 75 bp, synthetic construct
  source 1..75: mol_type = other DNA
cagcagaaaaggccgaattttcgataactgcctgtacattgcaaaacagtgggcaggtaaacagaaagggaaaaa

SEQ ID NO: 100402 - DNA, 75 bp, synthetic construct
  source 1..75: mol_type = other DNA
ctggcgcggacgggactacctcctttacggtaaaacaagatgattctatgggcctggtaaccaatatgtacgccc

SEQ ID NO: 100403 - DNA, 75 bp, synthetic construct
  source 1..75: mol_type = other DNA
aattgctgtcctctcggttgtggggatttgggcgatgattgctgcgatgctgctgatttgatggaggaaccgtga

SEQ ID NO: 100404 - DNA, 75 bp, synthetic construct
  source 1..75: mol_type = other DNA
atacgatgaatggggcaaccagctgaatgaagagaacccgtattacctgtatcagccataccgtctgccagggca

SEQ ID NO: 100405 - DNA, 75 bp, synthetic construct
  source 1..75: mol_type = other DNA
atccacgaaatcgtggccgagtgcgagaaagagatcgccttcatgtatcaggtacacgacttcgtttatggcgac

SEQ ID NO: 100406 - DNA, 75 bp, synthetic construct
  source 1..75: mol_type = other DNA
gcagaagcagaaacgcaaaatacagcgactgcattcctgtatcgcaaatatccgcagggactaccttcacaaagt

SEQ ID NO: 100407 - DNA, 75 bp, synthetic construct
  source 1..75: mol_type = other DNA
atgaacggacaaatatcaattgttcgaccgggagcatgtgacgatcgcgaaatacgaatgattattcgtctggcg

SEQ ID NO: 100408 - DNA, 75 bp, synthetic construct
  source 1..75: mol_type = other DNA
tccctgactgaagaagataccaacgcgattattcatccttgcctggccgtagtgtcacgtaagcacatggacgga

SEQ ID NO: 100409 - DNA, 75 bp, synthetic construct
  source 1..75: mol_type = other DNA
cggacatgtaataatgcgaaacctgccgatggtccagaccattctgaccggaataaccattggtattttcccgct

SEQ ID NO: 100410 - DNA, 75 bp, synthetic construct
  source 1..75: mol_type = other DNA
gccggacaactggacgatgaacggcgagtacggcagcgagtttggcggatttttccccgtccaggtccgtttcac

SEQ ID NO: 100411 - DNA, 75 bp, synthetic construct
  source 1..75: mol_type = other DNA
caccatgaaatactgctgtgcctacattgtgatccttggcctgaaagtcggtctcttttattactggtttatggc

SEQ ID NO: 100412 - DNA, 75 bp, synthetic construct
  source 1..75: mol_type = other DNA
cgcctgtcgcgatcagtcacacgctggcgcttgccgcgacactggatgcgcagggatacagtgttaacgacatca

SEQ ID NO: 100413 - DNA, 75 bp, synthetic construct
  source 1..75: mol_type = other DNA
cggcgtgttctgtcacagccttttccgcttgggcacaggataccagcccggatactctcgtcgttactgctaacc

SEQ ID NO: 100414 - DNA, 75 bp, synthetic construct
  source 1..75: mol_type = other DNA
gtgaagtggcgttactcactgcgctggaaattgccttctccctgtcctggcaagcatgaactggtttcagaagtg

SEQ ID NO: 100415 - DNA, 75 bp, synthetic construct
  source 1..75: mol_type = other DNA
gcgcttgatttacagcactgggaaaaagaagacggcaccagcgtcattccttttttcacctcgttagaagcactt

SEQ ID NO: 100416 - DNA, 75 bp, synthetic construct
  source 1..75: mol_type = other DNA
ggttcacgacttcgtttatggagacgaacgccacaacatgattaatcgcctgctgcaactgaaccaccgaccaga

SEQ ID NO: 100417 - DNA, 75 bp, synthetic construct
  source 1..75: mol_type = other DNA
tgatggcaccgaatatccggatccgcactcagttacgcactggcgtgaaatgccagcagcaccgcagcaggaggt

SEQ ID NO: 100418 - DNA, 75 bp, synthetic construct
  source 1..75: mol_type = other DNA
tcgccttataccttcaataaatatgctgaatacgccgatttcaccagcgatatgctgatctacgaaaaaacctat

SEQ ID NO: 100419 - DNA, 75 bp, synthetic construct
  source 1..75: mol_type = other DNA
tgggatttagccgaggtcgaggcatggattgatgcgtgcaaacattccggctcggcccctcgtcccggaatgggg

SEQ ID NO: 100420 - DNA, 75 bp, synthetic construct
  source 1..75: mol_type = other DNA
cagcagaaaaggccgagttttcgatgactgcctgtacattgcaaaacagtgggcaggtaggcagaaaagggaaaa

SEQ ID NO: 100421 - DNA, 75 bp, synthetic construct
  source 1..75: mol_type = other DNA
gcttgagcaggatatgaaagcattacgcccacaaatctatgctgccaaatccgacgctaacagagccaatacgcg

SEQ ID NO: 100422 - DNA, 75 bp, synthetic construct
  source 1..75: mol_type = other DNA
aaagctgtgtaatacgcaatgcggcgcaggccttaactgacgatggaactctatacggagccacaattcttggtg

SEQ ID NO: 100423 - DNA, 75 bp, synthetic construct
  source 1..75: mol_type = other DNA
ggcagtatgatgaccacggctggctgacagacatcagccacctgagcgaaggccaccgtgtcgctgtccactacg

SEQ ID NO: 100424 - DNA, 75 bp, synthetic construct
  source 1..75: mol_type = other DNA
ccgtgaaagggaatggcagcaacaaccagtccgcactggactattttttcaatcccttcattgaaacggagtatc

SEQ ID NO: 100425 - DNA, 75 bp, synthetic construct
  source 1..75: mol_type = other DNA
tggctctggttgccggcatggcacaggctgacagcaacagtgattaccgggccggctctgattttgctcaccaga

SEQ ID NO: 100426 - DNA, 75 bp, synthetic construct
  source 1..75: mol_type = other DNA
tgtggtggtttcggaagagaaggagcattatctggtagtggatggttttcatcgtcagttgctgggcaggaaagc

SEQ ID NO: 100427 - DNA, 75 bp, synthetic construct
  source 1..75: mol_type = other DNA
gtgagcaagattgactatcaggcactgcgtgaaaaggcagagaaagcaacgtgtggtgagtggtcgctcgaatat

SEQ ID NO: 100428 - DNA, 75 bp, synthetic construct
  source 1..75: mol_type = other DNA
ctgaccaccattctcaatccggaagctgtcatctttgccaatccgatagcacagggggcctgcgcagcagatgcc

SEQ ID NO: 100429 - DNA, 75 bp, synthetic construct
  source 1..75: mol_type = other DNA
atgaaaaaggctaaaatactttctggcgtattattactgtgcttttcgtcaccattaatttctcaggctgcgaca

SEQ ID NO: 100430 - DNA, 75 bp, synthetic construct
  source 1..75: mol_type = other DNA
ccaaagccaacgacagattacaagcgttgtctttttcttatgaacaaaacaagcaataatcttaatcagattgca

SEQ ID NO: 100431 - DNA, 75 bp, synthetic construct
  source 1..75: mol_type = other DNA
ttttcaccggaagaactgcttggcctgtccgaagatgcgcaaaaaacacgcaaaaagacgttgccaaaagcgccg

SEQ ID NO: 100432 - DNA, 75 bp, synthetic construct
  source 1..75: mol_type = other DNA
tagtcagggtaaaacggtgtatcactcccccggtgcgccggatatccgcgagtttacgcgtgacgccatacccga

SEQ ID NO: 100433 - DNA, 75 bp, synthetic construct
  source 1..75: mol_type = other DNA
gcctcaattaacgggtaaaggccagcagtggttgacgcgtaaactactcgatgcgggtgtattaaagcccgtggc

SEQ ID NO: 100434 - DNA, 75 bp, synthetic construct
  source 1..75: mol_type = other DNA
ggaatggaccgagccgggcaacggtaatcagaaagttgttcgcgtgtcttatacatggaagttggcggatgttcc

SEQ ID NO: 100435 - DNA, 75 bp, synthetic construct
  source 1..75: mol_type = other DNA
cgcgggaactggatggcaggcctcaggtccggctggagcgagtggaaagagagtgccacggacagtatgtcgcag

SEQ ID NO: 100436 - DNA, 75 bp, synthetic construct
  source 1..75: mol_type = other DNA
accggaataccgatcgtttgctctgtttattgacgttactgctggtgctgattctggttaccgtttcaggcgtca

SEQ ID NO: 100437 - DNA, 75 bp, synthetic construct
  source 1..75: mol_type = other DNA
aggctaaaacctactggcacagagaactgggcggaatgacccgaaatcagcatctccagggaaaaatcaacagcg

SEQ ID NO: 100438 - DNA, 75 bp, synthetic construct
  source 1..75: mol_type = other DNA
tgaagtgactgaaggcgtattcgaaaaataccgtatcgctacctacaaagaagccagctggaagccttatatcat

SEQ ID NO: 100439 - DNA, 75 bp, synthetic construct
  source 1..75: mol_type = other DNA
tattttcttgaaaagaacagaaaaataagacatttgtctgtagatgacgtaatttctataggtggaattattcag

SEQ ID NO: 100440 - DNA, 75 bp, synthetic construct
  source 1..75: mol_type = other DNA
agtccgcccttgaaaaactttgcgcacgtcgtggtaatgcctggtacccgatttttcatctggctccacctgccg

SEQ ID NO: 100441 - DNA, 75 bp, synthetic construct
  source 1..75: mol_type = other DNA
cattgagaacgtgaccgatgagctgaagtcggcactggaaacaaaatttgggcgcgactcaactttctttgatcc

SEQ ID NO: 100442 - DNA, 75 bp, synthetic construct
  source 1..75: mol_type = other DNA
acccttcaaccggatatcctatgcatggaggctttgactcagcgggaaatacttttgggactcgttggcaggatt

SEQ ID NO: 100443 - DNA, 75 bp, synthetic construct
  source 1..75: mol_type = other DNA
actatatcgtgccatcaatccgtgaaaaaactgatgaatcagaaataacccccccgaatgatgaagagaaaacat

SEQ ID NO: 100444 - DNA, 75 bp, synthetic construct
  source 1..75: mol_type = other DNA
gaaggccgcgccccgcagtaaacctactagcagggaaaaagagcggggaaatatccagaaaatgaaaagcatgat

SEQ ID NO: 100445 - DNA, 75 bp, synthetic construct
  source 1..75: mol_type = other DNA
aactttgaaaggaaaaggacaattaatattttgtcaaagagaatttatcctgccactgcacaaaagattacatcc

SEQ ID NO: 100446 - DNA, 75 bp, synthetic construct
  source 1..75: mol_type = other DNA
caactggcagagagtttgcgccatatgcagggagagctgatgcgtaccgtcggtgatgtgcgcaacggggccaat

SEQ ID NO: 100447 - DNA, 75 bp, synthetic construct
  source 1..75: mol_type = other DNA
taggtaagtttattatatgcagttcaattctcttattgtgttttattggcatgatcttagcggccataataacta

SEQ ID NO: 100448 - DNA, 75 bp, synthetic construct
  source 1..75: mol_type = other DNA
aagatatttcgcgtttaagcattggtaacgaagttaatgaaaaaataattgcagttatagtcaagacgttagcat

SEQ ID NO: 100449 - DNA, 75 bp, synthetic construct
  source 1..75: mol_type = other DNA
gctacagcccttttaaccgcattgaaaaacatgcacgcccgattactggaacatgccagtttactctggcagcct

SEQ ID NO: 100450 - DNA, 75 bp, synthetic construct
  source 1..75: mol_type = other DNA
ggagacaggctgacgacggtgcagactgacaccacacgtatccagacggtatacgagccgggaagcttcacgccg

SEQ ID NO: 100451 - DNA, 75 bp, synthetic construct
  source 1..75: mol_type = other DNA
atcttatcagtgaagaacatgataaacgtattgctgaaaactatgtctttgatgaggtattaggccgtcatatct

SEQ ID NO: 100452 - DNA, 75 bp, synthetic construct
  source 1..75: mol_type = other DNA
attacaaaatcaacctgcttgacaaaaatgacttcactaaaacactcggtgtaagcactgatgacatcgttgctg

SEQ ID NO: 100453 - DNA, 75 bp, synthetic construct
  source 1..75: mol_type = other DNA
gacaggcgaggtatcggtgattgtctggatgaggctgagcaagagcttatcgttaccattaacaaatatgccagt

SEQ ID NO: 100454 - DNA, 75 bp, synthetic construct
  source 1..75: mol_type = other DNA
ccagaatgaaagagctcggcataactcaagagaagttagccgaagagctaggtatgacgcagggtgggattggac

SEQ ID NO: 100455 - DNA, 75 bp, synthetic construct
  source 1..75: mol_type = other DNA
tggattaaaaaacaatttgcgccaaatggcatattaacggggatctatcaggatttactgcatcgggagaattaa

SEQ ID NO: 100456 - DNA, 75 bp, synthetic construct
  source 1..75: mol_type = other DNA
caatgacaccacaaaagcaaagcccgctggcgctatgaacaccaacgggcttctaaccaacaacgtaaacgagga

SEQ ID NO: 100457 - DNA, 75 bp, synthetic construct
  source 1..75: mol_type = other DNA
atgtggtttccggttctcttccgcttcctcgcccactcgctcactacgttcggtcgctggggctgcggcgagcgg

SEQ ID NO: 100458 - DNA, 75 bp, synthetic construct
  source 1..75: mol_type = other DNA
aatatcatgtattttgatgataaaaagggattaggctttggtgcgaataataattttatttttaataaaatatgt

SEQ ID NO: 100459 - DNA, 75 bp, synthetic construct
  source 1..75: mol_type = other DNA
ttccgatggttaatattactgaggccagccagctgtgggatatcgctcaggcgcgcgtttgcgaggtgatagtcg

SEQ ID NO: 100460 - DNA, 75 bp, synthetic construct
  source 1..75: mol_type = other DNA
ctggtcactacctttggcgtactggtggtctttattgtggcgttttatttgatctgttggtcgctgatccaacgt

SEQ ID NO: 100461 - DNA, 75 bp, synthetic construct
  source 1..75: mol_type = other DNA
caggctgaacttatcaatacacaacttaatgcgctgcaaaacgcgctggcggaaaaaggcattcctttattgttc

SEQ ID NO: 100462 - DNA, 75 bp, synthetic construct
  source 1..75: mol_type = other DNA
tggtcccggcgttattagttgctggcgcagcaaatgcggctgaaatttacaataaagatggcaataaagttgatt

SEQ ID NO: 100463 - DNA, 75 bp, synthetic construct
  source 1..75: mol_type = other DNA
gtggcagtgttgccggaaatttcctggggaacatggcaaacaatctgctggtcggtgcaaatcatgaaggccatg

SEQ ID NO: 100464 - DNA, 75 bp, synthetic construct
  source 1..75: mol_type = other DNA
gcgttgaaaaccatggcggatcactccgcatatggtttcactataacggcaaacgtgtcagagaaaacctcggtg

SEQ ID NO: 100465 - DNA, 75 bp, synthetic construct
  source 1..75: mol_type = other DNA
ggaagcgcgtcagcaatctcctgatggctgcgtgatggtattcgccgcccgtattcgtcagggggtgtgccatgc

SEQ ID NO: 100466 - DNA, 75 bp, synthetic construct
  source 1..75: mol_type = other DNA
attttgacgggaaaactattgcgttgccgcaggtgcgtaaaaattacccttatgaggtgtttgtagagtggcatc

SEQ ID NO: 100467 - DNA, 75 bp, synthetic construct
  source 1..75: mol_type = other DNA
aaactggctgcccgttttgattatgtgttcgtcgatacgcctggtatgaaatctccggcattcgtaaaagcactg

SEQ ID NO: 100468 - DNA, 75 bp, synthetic construct
  source 1..75: mol_type = other DNA
attttgtcaaagtatggtatttatgaacaggaaggtcttgtagctccttcacaagaaccacaagatgtaaaaaaa

SEQ ID NO: 100469 - DNA, 75 bp, synthetic construct
  source 1..75: mol_type = other DNA
ggcttgcctggattaagtttgattcaactggtgtagaagaagagctaaatctcgaaaacgtgaaaataatttgcc

SEQ ID NO: 100470 - DNA, 75 bp, synthetic construct
  source 1..75: mol_type = other DNA
ctcatatgttacgtcatgcctgtggttttgctctggctgacaatggtgtcgatacccgactacttcaggattatc

SEQ ID NO: 100471 - DNA, 75 bp, synthetic construct
  source 1..75: mol_type = other DNA
cagttttgataatgaaaacgacgcaaaagaattttgcaaaattgtgaatgagttaggtattgacagaacacaggc

SEQ ID NO: 100472 - DNA, 75 bp, synthetic construct
  source 1..75: mol_type = other DNA
atcgctgacgagctgggttttgatctccagcaaatccgtaaacagcgcgacccgttatttcgcaaaaatgtatta

SEQ ID NO: 100473 - DNA, 75 bp, synthetic construct
  source 1..75: mol_type = other DNA
cagaaccgatttgccagttactcgcacaactggttgggagcgcatcggcaatgacaatcgcatcctgtgcagaac

SEQ ID NO: 100474 - DNA, 75 bp, synthetic construct
  source 1..75: mol_type = other DNA
actggaagtacttcagaaaaacagtgcggaagaacctgtgaggtataaattcatttttaatgatgccacgactgc

SEQ ID NO: 100475 - DNA, 75 bp, synthetic construct
  source 1..75: mol_type = other DNA
aagccggtaccgacagggtcgttcacctgatcaagccagccattgacgctttgaggaaccaggcggaaatgacca

SEQ ID NO: 100476 - DNA, 75 bp, synthetic construct
  source 1..75: mol_type = other DNA
aagccgtcaccttattggcctgaacattacccgggacattcccggctacctgttcgccggtggtgtggcttacga

SEQ ID NO: 100477 - DNA, 75 bp, synthetic construct
  source 1..75: mol_type = other DNA
cagaaatgccgggtataactattatctccgcctcgcaaaccggcaatgcgcgccgggttgctgaagcattacgcg

SEQ ID NO: 100478 - DNA, 75 bp, synthetic construct
  source 1..75: mol_type = other DNA
cttattttgctttaaaaaaagagaaagaggaggataaaggtttaaccttactggaagttgccggtgcactgatta

SEQ ID NO: 100479 - DNA, 75 bp, synthetic construct
  source 1..75: mol_type = other DNA
gtatattaacaaaaagtgaaataaatgaattatatcaagtcccctcttttaatcctgttgaaagggatgagtttt

SEQ ID NO: 100480 - DNA, 75 bp, synthetic construct
  source 1..75: mol_type = other DNA
aacgtcgtgcctgcaggcttacaggtttgtccctgtcgacctgccgctacgaggctcagcgtccggcggcggatg

SEQ ID NO: 100481 - DNA, 75 bp, synthetic construct
  source 1..75: mol_type = other DNA
cttggccgcaccatcgagcgaatacccatggttcgaaatacaacgaaacgttgcaaaactcacagaattccattt

SEQ ID NO: 100482 - DNA, 75 bp, synthetic construct
  source 1..75: mol_type = other DNA
tggctaaaggtcaggaaacggttaaggcgaccttcggtaaggactccagtatcgttaaatgggttgttctggctg

SEQ ID NO: 100483 - DNA, 75 bp, synthetic construct
  source 1..75: mol_type = other DNA
gaagtatatgataatgaatatagtgaatcaatggctggtcagattactattgatcccgtagatattactgttaat

SEQ ID NO: 100484 - DNA, 75 bp, synthetic construct
  source 1..75: mol_type = other DNA
caatgcaggagtctgccactcgtcagcgtgaacaggataccatccggcagttttctgaagagagtaaatccgaat

SEQ ID NO: 100485 - DNA, 75 bp, synthetic construct
  source 1..75: mol_type = other DNA
tctgaagcaggcgatggtggggatagtcgggagtatcggcagcgccattggcggtgctttcggtggtggtgcgtc

SEQ ID NO: 100486 - DNA, 75 bp, synthetic construct
  source 1..75: mol_type = other DNA
tcacagcttcgtatacacgaagttttagtggtagctggggcggatatacctgtcagtgttttattatctgatgaa

SEQ ID NO: 100487 - DNA, 75 bp, synthetic construct
  source 1..75: mol_type = other DNA
ggatattgtgcagggttcagcgggggtgctgataggtgcgccgacgggagtggcctgttcggtatgtccgggagg

SEQ ID NO: 100488 - DNA, 75 bp, synthetic construct
  source 1..75: mol_type = other DNA
taccggcagcagctccgatctggcagcgggcagcaacgtcacgctgaccattaacgggcaaacctatgttgcggc

SEQ ID NO: 100489 - DNA, 75 bp, synthetic construct
  source 1..75: mol_type = other DNA
gacgacctggcagcaccgatcctggcgggaattattaccgcagcgattgtcggctggtggcgtaaccggaagtaa

SEQ ID NO: 100490 - DNA, 75 bp, synthetic construct
  source 1..75: mol_type = other DNA
caaaaaattagctcaggcagccgcgccagatggtaatcctgtccgcctgactcacatggccgtgggcgacggtgg

SEQ ID NO: 100491 - DNA, 75 bp, synthetic construct
  source 1..75: mol_type = other DNA
gaaatacggctcgccgtgggttgtcggcaagcatccgcgtggtacgtcgcagggtgagattaaccagttgctgga

SEQ ID NO: 100492 - DNA, 75 bp, synthetic construct
  source 1..75: mol_type = other DNA
catcgaatgccggaagctggatgaaacattcccgcactttatccgccagatggaatcgatgctgaccaccggtga

SEQ ID NO: 100493 - DNA, 75 bp, synthetic construct
  source 1..75: mol_type = other DNA
ctgtaccgccgccgtatcgcccacgcctttgtcaatgcacaggacgccggagaggtggcaggatttattgccatt

SEQ ID NO: 100494 - DNA, 75 bp, synthetic construct
  source 1..75: mol_type = other DNA
ctggcgcagttgcaatggctctggtttcttttggtgctaatgctgcaaatcagggacatggcgttgttaacttca

SEQ ID NO: 100495 - DNA, 75 bp, synthetic construct
  source 1..75: mol_type = other DNA
agcccaggattcacgggatatttcggaacaaacctaaacccactatcgagtagattcattccaggaacagaggct

SEQ ID NO: 100496 - DNA, 75 bp, synthetic construct
  source 1..75: mol_type = other DNA
ccgaatcagcagtcgtactggtattccacctgtaagctgcaggtgctgaagaacggggttgagattttccatgaa

SEQ ID NO: 100497 - DNA, 75 bp, synthetic construct
  source 1..75: mol_type = other DNA
tcccaaagtactatggccaacagatatgcacgtaatacctttcctgcagattgggttgttatatgttccatagaa

SEQ ID NO: 100498 - DNA, 75 bp, synthetic construct
  source 1..75: mol_type = other DNA
taaataaagaatatggaattattgaagagccatctattctttcagcgaaagatgccccatcgcgagcgagaaaaa

SEQ ID NO: 100499 - DNA, 75 bp, synthetic construct
  source 1..75: mol_type = other DNA
tctttcgtggctatccggcgacaataagaaccgatcagggcccggagtttacctgccgcgccctcgatcaatggg

SEQ ID NO: 100500 - DNA, 75 bp, synthetic construct
  source 1..75: mol_type = other DNA
aacttcgatcaggacgagaaactggcctcccgcgagatcgctatcgcgttgggcttcgacccggctgaatttggc

SEQ ID NO: 100501 - DNA, 75 bp, synthetic construct
  source 1..75: mol_type = other DNA
ctaaacccgcaatatccaatgatcccatgcaatgatagctgttccgttgtagggaaagttatcgccagccagtgg

SEQ ID NO: 100502 - DNA, 75 bp, synthetic construct
  source 1..75: mol_type = other DNA
attatcagcaggctattgaaaatggatttgtccgaatgacgcagcgcatggtggcgatcatgcatagcggggagg

SEQ ID NO: 100503 - DNA, 75 bp, synthetic construct
  source 1..75: mol_type = other DNA
gtaccatagcgctcagagcaagtgctctacttcaggccatgagtcgggatattgaggagcaaagaaaagaattca

SEQ ID NO: 100504 - DNA, 75 bp, synthetic construct
  source 1..75: mol_type = other DNA
aattgaaagtgcaaacccaactattatgtttgccgaaacagatgcaggtagtacacagtatgtaatggttaatga

SEQ ID NO: 100505 - DNA, 75 bp, synthetic construct
  source 1..75: mol_type = other DNA
tcctgggaaatacggctgcagatgggatccgttgttacggtgccattcaggatgcgcaggcgttgtccgaaggtg

SEQ ID NO: 100506 - DNA, 75 bp, synthetic construct
  source 1..75: mol_type = other DNA
cagaccgcattcatcgctgaattaccagacgccggctgaatttgcagcaagctggagaaatggaaaattagaagg

SEQ ID NO: 100507 - DNA, 75 bp, synthetic construct
  source 1..75: mol_type = other DNA
gcgtcgcagtcatctgatgaattttcgtcatcacagaaagtgctgatggatatcagccagcggacaggtaccgct

SEQ ID NO: 100508 - DNA, 75 bp, synthetic construct
  source 1..75: mol_type = other DNA
gggagatgattggaagggcagatttgactgggttaaagatgagtgcgaagttatttatttgcccagaacaccatc

SEQ ID NO: 100509 - DNA, 75 bp, synthetic construct
  source 1..75: mol_type = other DNA
tagcgaggaagagaagccgtttgaattgccggagggatgggagtggacaacgctaactagaattgcggaaataaa

SEQ ID NO: 100510 - DNA, 75 bp, synthetic construct
  source 1..75: mol_type = other DNA
ttttagtgatttcgttataaacctatttatggggggaaccctcgctgaagtctttggcattgttttagtgatggc

SEQ ID NO: 100511 - DNA, 75 bp, synthetic construct
  source 1..75: mol_type = other DNA
ttctgatgaacaaaccagccttaaattcaaactggccttgttgcaggcgctacctgcggtaatagaaaaatccgt

SEQ ID NO: 100512 - DNA, 75 bp, synthetic construct
  source 1..75: mol_type = other DNA
ggggatggagaactacagcctgaagtggtaatccccatcctcgataccattgtccgccatcttgaatcagcggcc

SEQ ID NO: 100513 - DNA, 75 bp, synthetic construct
  source 1..75: mol_type = other DNA
cagtggctggcgctaagtgcactaaatcagtggctggcacctgagcgcaatttaagcaatgcctccaatgccgct

SEQ ID NO: 100514 - DNA, 75 bp, synthetic construct
  source 1..75: mol_type = other DNA
ttaatcaaccgataccattaaataacagcaatttatatctgtcagatggcgcgctctgcgaagcggtaacgcgtg

SEQ ID NO: 100515 - DNA, 75 bp, synthetic construct
  source 1..75: mol_type = other DNA
atatcaggaaggatatgctggcgggggataaagggttgagtgtggtgacggtaaactactacatgaccacgatcg

SEQ ID NO: 100516 - DNA, 75 bp, synthetic construct
  source 1..75: mol_type = other DNA
cgctgcggcgagtcttttgacactgttatttcagctaacccggcaacgtatgttggtagtgctgatgcattgaag

SEQ ID NO: 100517 - DNA, 75 bp, synthetic construct
  source 1..75: mol_type = other DNA
tatggttcagcgctctccgttaagacgaggcatggcaacatactggtttctgaaaggagagatgcaggcgggaca

SEQ ID NO: 100518 - DNA, 75 bp, synthetic construct
  source 1..75: mol_type = other DNA
gtgtttactgggatatcttgtgatacgagcacggataaaatagtttataaaaatatccaaagtgattgggttgaa

SEQ ID NO: 100519 - DNA, 75 bp, synthetic construct
  source 1..75: mol_type = other DNA
gatctggtgatcctgctggagaacaacacgccgtgggtggcggatggtttacgcagcctcggcagttcggtggat

SEQ ID NO: 100520 - DNA, 75 bp, synthetic construct
  source 1..75: mol_type = other DNA
tagtaagggtaattttgtcgaccagtccgatcgtaccggctatggcatgagcatgacctggaacggcctgaaaac

SEQ ID NO: 100521 - DNA, 75 bp, synthetic construct
  source 1..75: mol_type = other DNA
gcgctctgaagaagtccggagcgcactgaaacagaaacttcgccagaatcttgagtcgcgtcttgatgcagaagt

SEQ ID NO: 100522 - DNA, 75 bp, synthetic construct
  source 1..75: mol_type = other DNA
cagacttttcgctgggtgaatgtggcggtaagacatgcgattgagatcgaagcgggaaatgctcagacacaacaa

SEQ ID NO: 100523 - DNA, 75 bp, synthetic construct
  source 1..75: mol_type = other DNA
gaaaacattgcctgacatacatagccgcgccaataacccaaccggacgtctgatgcgctttgcccagctctctac

SEQ ID NO: 100524 - DNA, 75 bp, synthetic construct
  source 1..75: mol_type = other DNA
ttcgtgcaaatggatattacagacgtccattttcttcaggaactaaatttactaaacgagataccttgctagcca

SEQ ID NO: 100525 - DNA, 75 bp, synthetic construct
  source 1..75: mol_type = other DNA
ttgcgcaatggcattgagcacaactgttcatgccgaaactaacaaactggtgattgagtctggcgacagtgcaca

SEQ ID NO: 100526 - DNA, 75 bp, synthetic construct
  source 1..75: mol_type = other DNA
tcaggtaaagcggctggcacagtccgcagcggaactggccattacaaaaatgcagatacctgcaaaagccgggat

SEQ ID NO: 100527 - DNA, 75 bp, synthetic construct
  source 1..75: mol_type = other DNA
gttgaaggatgtatacatgatggatggttggttctaagtcctaaaaataatcaaatacatattgattatttttat

SEQ ID NO: 100528 - DNA, 75 bp, synthetic construct
  source 1..75: mol_type = other DNA
ggcctacactctgttgtgtaaccatatcccgatcaacggatacctgattggcacgaatgattacgaaggacatca

SEQ ID NO: 100529 - DNA, 75 bp, synthetic construct
  source 1..75: mol_type = other DNA
acgctgtatatggaaagtctgactgccgaagaacgcgagattatcaaggcgggtagtttgattaacttcaataaa

SEQ ID NO: 100530 - DNA, 75 bp, synthetic construct
  source 1..75: mol_type = other DNA
acaccgtcgtgaaacgtctaaaatcggtcgtctgttgtcactttacgttgatgacagtgttcctgatcccaccac

SEQ ID NO: 100531 - DNA, 75 bp, synthetic construct
  source 1..75: mol_type = other DNA
ttataaagaacagaaccggcgtttttacgggcaactgccgttctgtgatgttacagacgttttccgttttgttaa

SEQ ID NO: 100532 - DNA, 75 bp, synthetic construct
  source 1..75: mol_type = other DNA
gcaggtaaaacgcctggcgcaatccgctgcggcgctggccatcgaaaaaatgcagatccccgccaaagctagggc

SEQ ID NO: 100533 - DNA, 75 bp, synthetic construct
  source 1..75: mol_type = other DNA
atgcaatggaatgaggaaaagccgatgaacatcctgatcattgggcgaaaatttgaagctatcagtgatgtgaaa

SEQ ID NO: 100534 - DNA, 75 bp, synthetic construct
  source 1..75: mol_type = other DNA
aggtgtgtggactgaaccagttatgccgcacaaatcagaggaagatatccgcgaagatgaacggaaacgccagca

SEQ ID NO: 100535 - DNA, 75 bp, synthetic construct
  source 1..75: mol_type = other DNA
tatgccaataaagtggcgtttatcgacaccgattttgtcactacccaggcgttctgcaaaaagtacgaagggcgt

SEQ ID NO: 100536 - DNA, 75 bp, synthetic construct
  source 1..75: mol_type = other DNA
gtcgctgctgtgtgaatctgtagcaaaagccgttggcgtccctaatggggtgaagtaccagtttgtcacccagcc

SEQ ID NO: 100537 - DNA, 75 bp, synthetic construct
  source 1..75: mol_type = other DNA
ggagtatcaggggaaaggtctggcaacccgtgccgccaaattagcaatggactatggcttcaccgttctcaatct

SEQ ID NO: 100538 - DNA, 75 bp, synthetic construct
  source 1..75: mol_type = other DNA
cccaccgtgtacgttttgtcgccattaatttcgaaccagtagtcggggaaattctcgagaaaatcgacgacggtc

SEQ ID NO: 100539 - DNA, 75 bp, synthetic construct
  source 1..75: mol_type = other DNA
tttcacgcagggttttgtttaacgtcgaaatgaataattctgttgactgtgaattacttctcatccagcaacaac

SEQ ID NO: 100540 - DNA, 75 bp, synthetic construct
  source 1..75: mol_type = other DNA
tggcggagtttaccctgtcacgccgcgatccaggttatgttggcagaagtaaagcgactgctgagctggaaaatc

SEQ ID NO: 100541 - DNA, 75 bp, synthetic construct
  source 1..75: mol_type = other DNA
agcagcaggagcgctttttctgcgaggcattaactgaaccgacgctgacatgggcgaaggaaagtcagtttgcaa

SEQ ID NO: 100542 - DNA, 75 bp, synthetic construct
  source 1..75: mol_type = other DNA
atgaatgaaaagcaacctacgctgacgaaaacttttcgcgcccaatgggccgtgatgacgttctacgagcgcttc

SEQ ID NO: 100543 - DNA, 75 bp, synthetic construct
  source 1..75: mol_type = other DNA
acgcttccttacctgttcctcgcgctggctttcccgttctttaaagcacgtcaggatctcgacagaccgtttgtg

SEQ ID NO: 100544 - DNA, 75 bp, synthetic construct
  source 1..75: mol_type = other DNA
tgattcgcgtgcggctggccggggtgaataagccaatgcaactcggttatgccaccgtcgccaacacacagcact

SEQ ID NO: 100545 - DNA, 75 bp, synthetic construct
  source 1..75: mol_type = other DNA
gggttaagtgacttgcaggggaaaagcgccagggcatgggtattcacggccagcggtgatatcggcacaaccctg

SEQ ID NO: 100546 - DNA, 75 bp, synthetic construct
  source 1..75: mol_type = other DNA
tcagcgtctgaccgttccgtatgaggccagaacgttgactgatgatggattggttaccattgatccggggaatat

SEQ ID NO: 100547 - DNA, 75 bp, synthetic construct
  source 1..75: mol_type = other DNA
aggggtaacattgcaataccatcgtccatattcccccggcgtcgaaagcccggaggattatgttgaagctgtgtt

SEQ ID NO: 100548 - DNA, 75 bp, synthetic construct
  source 1..75: mol_type = other DNA
taatgtatcccgggcccgtatctggggatgggatatgcagggaaattaccagtctgattattttgactggatgct

SEQ ID NO: 100549 - DNA, 75 bp, synthetic construct
  source 1..75: mol_type = other DNA
cgactgctgagctggaaaatcagcgtctggcggggaatgtcagcgagctgacagaggtgtttgcgcgcattaagc

SEQ ID NO: 100550 - DNA, 75 bp, synthetic construct
  source 1..75: mol_type = other DNA
caatcgtctccaaattttccaaaagcgactgaaatatggtctgccgaccgaaaccaccattgccctttacgagct

SEQ ID NO: 100551 - DNA, 75 bp, synthetic construct
  source 1..75: mol_type = other DNA
ggctccatatcctctgcattccgtgcccccacaatggcagaaatgtacagggatgatgtacatttttaccgcaag

SEQ ID NO: 100552 - DNA, 75 bp, synthetic construct
  source 1..75: mol_type = other DNA
aagaccaataccgatgatgaggaaaggcaaacagccgtcggtggcccttctcttgaagatctggacaaagttgcg

SEQ ID NO: 100553 - DNA, 75 bp, synthetic construct
  source 1..75: mol_type = other DNA
ttttatcgacgaagtggaaaatgctgcatctcaccaagacaagccatttgattcactttttgcacaggaaggtat

SEQ ID NO: 100554 - DNA, 75 bp, synthetic construct
  source 1..75: mol_type = other DNA
taaagaaaaacagattgctcgtgttgagtatgatgatcttctttttattcgcgttaatggaaatccgaactatgt

SEQ ID NO: 100555 - DNA, 75 bp, synthetic construct
  source 1..75: mol_type = other DNA
ccgatttccgtaacagcgttgacgtgatgaccactgaaacgacctgtttaagttctgtctggcaaaccgatgaag

SEQ ID NO: 100556 - DNA, 75 bp, synthetic construct
  source 1..75: mol_type = other DNA
gcccggtcgtcgcgaagcaaagtggggcactattcagacagcaaaagcctacgcgagtatatctgccaggaagcc

SEQ ID NO: 100557 - DNA, 75 bp, synthetic construct
  source 1..75: mol_type = other DNA
ataattgccgttaccagtttgagaagatccgtaatgctatcgctgtacctagcgaaaaaaatattgatgctgcaa

SEQ ID NO: 100558 - DNA, 75 bp, synthetic construct
  source 1..75: mol_type = other DNA
aaagccattttagcgccaggattgcggtattttactacggtgcccagggaaataggtgtgcaactgcgtcgtcga

SEQ ID NO: 100559 - DNA, 75 bp, synthetic construct
  source 1..75: mol_type = other DNA
ttcatatgctgatgacgtcaccagaattgtataatacacttttggcttcggcgaagtacccaccattgccagaaa

SEQ ID NO: 100560 - DNA, 75 bp, synthetic construct
  source 1..75: mol_type = other DNA
aaatctgtggccaacgccgatgcggctaaaaaggcaacattactgatgtcaggcggctataaagccttccttgct

SEQ ID NO: 100561 - DNA, 75 bp, synthetic construct
  source 1..75: mol_type = other DNA
taaacttattaacaactcaaaacaaattgatagcttagaaaaactccgcgataccttacttcccaaactgatgag

SEQ ID NO: 100562 - DNA, 75 bp, synthetic construct
  source 1..75: mol_type = other DNA
tatgacgctaataacggcaatgcggtgcaaaccacacacggctggccgacgcagcgtcagccctactggagcagt

SEQ ID NO: 100563 - DNA, 75 bp, synthetic construct
  source 1..75: mol_type = other DNA
tgatttttgcgtttctgactaaaataccgctaaccagcataattgttgtaagtgcatctgtaatatcattaatcc

SEQ ID NO: 100564 - DNA, 75 bp, synthetic construct
  source 1..75: mol_type = other DNA
ctggacgacctgaaagccgccagtgcgaatattttttcattcagttacagcgggagttatgccgttgctgccgct

SEQ ID NO: 100565 - DNA, 75 bp, synthetic construct
  source 1..75: mol_type = other DNA
ggtcccggtgttgctgcgctctctaccgatttccgtaacagcgttgacgttatgaccacggaaacgacctgttta

SEQ ID NO: 100566 - DNA, 75 bp, synthetic construct
  source 1..75: mol_type = other DNA
ggtaaggcagcgcagccggatggccacacgctggcgcggctgtggggggcgctgccgccggatatcaggttaagc

SEQ ID NO: 100567 - DNA, 75 bp, synthetic construct
  source 1..75: mol_type = other DNA
caacggcagtgcataccgccgcgatgatgtttatcggggattcgttatctgacttagggaggatgctacatgagc

SEQ ID NO: 100568 - DNA, 75 bp, synthetic construct
  source 1..75: mol_type = other DNA
caggatgcgtccaccggactcaaaaccgacttttataccctgttgaacgataccggcgtgtcgtcgaacaccttg

SEQ ID NO: 100569 - DNA, 75 bp, synthetic construct
  source 1..75: mol_type = other DNA
agtcttatgctgcgctggtactggcacggcagcaaaaagcaccgctgggtgcactgcgtgaaatctgggagcgtc

SEQ ID NO: 100570 - DNA, 75 bp, synthetic construct
  source 1..75: mol_type = other DNA
tctaagccagctaatgggcagatgtcagcggtggcgttgatggacgctcgttctatcgctgcgactgcggcaaac

SEQ ID NO: 100571 - DNA, 75 bp, synthetic construct
  source 1..75: mol_type = other DNA
gatgattgcaaaagaaggcaggaaatatggccttaatatatgcttaacaactcaaagacccagagatatcactga

SEQ ID NO: 100572 - DNA, 75 bp, synthetic construct
  source 1..75: mol_type = other DNA
atgaaaacaaaatggtatgacttagcaaagcagctcatgcgggcgcagggcatgagccaggattcactcgcggat

SEQ ID NO: 100573 - DNA, 75 bp, synthetic construct
  source 1..75: mol_type = other DNA
gctgatttacggaccgaacattaaagactggccggaattgggggcgctgactgacaatatcgtcctcaaagtgtg

SEQ ID NO: 100574 - DNA, 75 bp, synthetic construct
  source 1..75: mol_type = other DNA
ggcctgaatgatttacaggggaagagtgccagagcgtgggtttttactgccagcggagacaccggcaccacgtta

SEQ ID NO: 100575 - DNA, 75 bp, synthetic construct
  source 1..75: mol_type = other DNA
ccttctcgctggcggtttacccgtcatcacagccggtgtttatggatctcgccaaaaaaggtgtggtcgcagatt

SEQ ID NO: 100576 - DNA, 75 bp, synthetic construct
  source 1..75: mol_type = other DNA
cgattcttctctggggataactggaaaatagctgcgaggtttggtctgggttaccagtttgacctgtcgacgaat

SEQ ID NO: 100577 - DNA, 75 bp, synthetic construct
  source 1..75: mol_type = other DNA
cacttgataagaacggtgtacagcatggctggaagactgcacacaggaatgagtggcagttagagaacctggggg

SEQ ID NO: 100578 - DNA, 75 bp, synthetic construct
  source 1..75: mol_type = other DNA
gccgcagcgagtcactctggctggcaaggggtggggtgctgaaacaacacaaagaccacccgctggcccggctct

SEQ ID NO: 100579 - DNA, 75 bp, synthetic construct
  source 1..75: mol_type = other DNA
acagattatcgacgcgcaatgaatactggagacaactctaaacttgttgataatccatcacaaccatttgatata

SEQ ID NO: 100580 - DNA, 75 bp, synthetic construct
  source 1..75: mol_type = other DNA
gactggccggaattgggggcgctgactgacaatatcgtcctcaaagtgtgctcgaagatcctcgacgaagtgacc

SEQ ID NO: 100581 - DNA, 75 bp, synthetic construct
  source 1..75: mol_type = other DNA
cgcggtggtaaggcagcacagccggacggccatacgctggcacggctgtgggcgtcgctgccgccggatatccgg

SEQ ID NO: 100582 - DNA, 75 bp, synthetic construct
  source 1..75: mol_type = other DNA
acaaaccggatgactggtagcagcgttcggctggagataaagcgccaaaatggacgccaccctatgccgtttttc

SEQ ID NO: 100583 - DNA, 75 bp, synthetic construct
  source 1..75: mol_type = other DNA
gaatacggcagcgatggcgacccgatcccgatgttcgcagcgggttacggtgtcagctggcgtcattccgaaggt

SEQ ID NO: 100584 - DNA, 75 bp, synthetic construct
  source 1..75: mol_type = other DNA
aagatgctgaacgagaagcggctgaacgtaagaaacaggacactaaataccaacaggcagctaactacattattt

SEQ ID NO: 100585 - DNA, 75 bp, synthetic construct
  source 1..75: mol_type = other DNA
accggattatgacgccgcaacggtagccgtgggcgaagatgcgatggaaggttcgctggacgaaatcaccagccg

SEQ ID NO: 100586 - DNA, 75 bp, synthetic construct
  source 1..75: mol_type = other DNA
tgatccatacctcgtgcttctgggctccgcctccttttacctgtgtgatcttcccggaagcgcgtcggtattggc

SEQ ID NO: 100587 - DNA, 75 bp, synthetic construct
  source 1..75: mol_type = other DNA
tgacgtttgatcgtctgccggatgtcgacagaatgggccgtccattgatgttctatggtcagcgaatccacgata

SEQ ID NO: 100588 - DNA, 75 bp, synthetic construct
  source 1..75: mol_type = other DNA
tttcgcaaaatgatgattctggtagctcgcatcaacttggcctaagcggtacggcgctggagaaaaataatctct

SEQ ID NO: 100589 - DNA, 75 bp, synthetic construct
  source 1..75: mol_type = other DNA
aaaatcatgtctgccgaaggtttacaaatcacctgcgacatgctgggccgttccggtgtcgtttacggtcacaaa

SEQ ID NO: 100590 - DNA, 75 bp, synthetic construct
  source 1..75: mol_type = other DNA
acctggatacaacgtgatattgctgcgttaagaagccagattatgatcggcgatacgtggacggcgagcgatatt

SEQ ID NO: 100591 - DNA, 75 bp, synthetic construct
  source 1..75: mol_type = other DNA
tgaacaacggctgtgtcgggtactgaatatcgacatcggcggtggcaccgcgaactacgccctgttcgatgccgg

SEQ ID NO: 100592 - DNA, 75 bp, synthetic construct
  source 1..75: mol_type = other DNA
ctggaaggctttgccgtcatattccgggctgccccgagacaaatggctccatgcgctgcaaaaggattcgttcat

SEQ ID NO: 100593 - DNA, 75 bp, synthetic construct
  source 1..75: mol_type = other DNA
ggggcatggtcctgtggcttcagtcacggcatcaccgtgtttggtgaaacactgcaggcaggaaaatatcagtcg

SEQ ID NO: 100594 - DNA, 75 bp, synthetic construct
  source 1..75: mol_type = other DNA
gctgatggtctgccagctgcgcagcggacaaccggttgaggatggtaaggccctgtatcgccgtgcctgtcagct

SEQ ID NO: 100595 - DNA, 75 bp, synthetic construct
  source 1..75: mol_type = other DNA
ggcaaagattatagctcattacccattaggggttgacgtaggcaaacaaaaatttgtacaggccattagagagct

SEQ ID NO: 100596 - DNA, 75 bp, synthetic construct
  source 1..75: mol_type = other DNA
cgttgcacgagcgcggcgtagcggtgccagagcaggtgtcagttatcggattcgatgatatcgcaattgccccct

SEQ ID NO: 100597 - DNA, 75 bp, synthetic construct
  source 1..75: mol_type = other DNA
tcccaagcgacccagagaagaaacgtgagtggatcaagtacaaactcaagatccaggggctttctctggccgcat

SEQ ID NO: 100598 - DNA, 75 bp, synthetic construct
  source 1..75: mol_type = other DNA
gactctggacgggaaagttccagaaagtgacgttcgttatcgagtgggaggcagttggggaaatggaaccactga

SEQ ID NO: 100599 - DNA, 75 bp, synthetic construct
  source 1..75: mol_type = other DNA
gtcaatggcttcggcccgaatgacgtgatcctcgatattcgctctatcgatgaacaggaagataaaccgctgaaa

SEQ ID NO: 100600 - DNA, 75 bp, synthetic construct
  source 1..75: mol_type = other DNA
cacatcacggaagagtgcaggtggaatcggacgtacgttcaactcgttttatcctatccgtgcccagactggaga

SEQ ID NO: 100601 - DNA, 75 bp, synthetic construct
  source 1..75: mol_type = other DNA
tgaaaaaccggatgagcctgagtctgaaccagtctctgggaactctgggctcggtatctctgagtgcatcgcagc

SEQ ID NO: 100602 - DNA, 75 bp, synthetic construct
  source 1..75: mol_type = other DNA
aggcggtctgccttgctgggtgtgacttcaccggacgggtgattgtgcgccagcaccacggcagcggcattgtgg

SEQ ID NO: 100603 - DNA, 75 bp, synthetic construct
  source 1..75: mol_type = other DNA
aataggcgtgcaactgcgtcgtcgattcactggatgggtagcccaggtatacgacggttctatgctggattcggc

SEQ ID NO: 100604 - DNA, 75 bp, synthetic construct
  source 1..75: mol_type = other DNA
atgatgaagctggaggccgtggggctgcgcggagcggctaaactgatgccttctgaactttccggagggatggcg

SEQ ID NO: 100605 - DNA, 75 bp, synthetic construct
  source 1..75: mol_type = other DNA
tagtctctgcatcccttccatgggcaaaggaggttattaagaataaaatattacctatcatagaaagtagtgttc

SEQ ID NO: 100606 - DNA, 75 bp, synthetic construct
  source 1..75: mol_type = other DNA
gcggtcttgatattaaaacccgccgcctgagtaaactggtgacagaggtggcgccagcagaagtgtctgacgtag

SEQ ID NO: 100607 - DNA, 75 bp, synthetic construct
  source 1..75: mol_type = other DNA
aacctatgcctgcctgacgcctgaactggtcgctcagtttggcttaaaagaggatgtggcaaaaaatctgcaatg

SEQ ID NO: 100608 - DNA, 75 bp, synthetic construct
  source 1..75: mol_type = other DNA
ccgaccgatcctcagtccggtcagcctgcgggtcagcgtgctcacaagcctttcatttttaccgtggcgctgaga

SEQ ID NO: 100609 - DNA, 75 bp, synthetic construct
  source 1..75: mol_type = other DNA
cgcctgggaactcagcgttaatgacgagatggcgctcgataacctgtttcgcgtcgactgcccgatctttccagc

SEQ ID NO: 100610 - DNA, 75 bp, synthetic construct
  source 1..75: mol_type = other DNA
cgccgaccggggcagagctgctggccgactgcacggcgcatgcgatccgtatcgcccaggataagccggaggtcg

SEQ ID NO: 100611 - DNA, 75 bp, synthetic construct
  source 1..75: mol_type = other DNA
acctaacaaggaaaaacctgcagccctgtttgcgaaaggctctgtcggtataacagacagtaacaaagcaggtgc

SEQ ID NO: 100612 - DNA, 75 bp, synthetic construct
  source 1..75: mol_type = other DNA
tagtaaggaaggaacaattacgttgaaatgtgataatcttttcggcgacaaaaaacaagcatcgcggaatatggt

SEQ ID NO: 100613 - DNA, 75 bp, synthetic construct
  source 1..75: mol_type = other DNA
tgagtccggtgcatgggcccgaatcatgagcggaaccgggtctgccggcggtggattcagtgacaactacaccca

SEQ ID NO: 100614 - DNA, 75 bp, synthetic construct
  source 1..75: mol_type = other DNA
atgctcaaaggattgcgtacattattttcacgcagggttttgtttaacgtcgaaatgaataattctgttgactgt

SEQ ID NO: 100615 - DNA, 75 bp, synthetic construct
  source 1..75: mol_type = other DNA
tctaaaacgaaagaatttataaagccagagggtattagtcgtagtgttattgtgaacaaaggcgatttaattctt

SEQ ID NO: 100616 - DNA, 75 bp, synthetic construct
  source 1..75: mol_type = other DNA
gaagtcagggaaagattacggcgaacagtaaggaaggaataatttcgttgaaatgtgataatcttttcggcgaca

SEQ ID NO: 100617 - DNA, 75 bp, synthetic construct
  source 1..75: mol_type = other DNA
ctcaccccaaatatcagtatcgttttatggcgctcgatcgcgctgaccgccaggcaaaaccctgcaaaatcattg

SEQ ID NO: 100618 - DNA, 75 bp, synthetic construct
  source 1..75: mol_type = other DNA
gaagaaagctatcgcgcaaaaggtgtacgaaacccactgtcgccaaaggacaccttggggcgatttttaacggca

SEQ ID NO: 100619 - DNA, 75 bp, synthetic construct
  source 1..75: mol_type = other DNA
catatacaaagattgcaatagaacagctactacgcgaaaagtattttgatgataaatgtcactgcaataatataa

SEQ ID NO: 100620 - DNA, 75 bp, synthetic construct
  source 1..75: mol_type = other DNA
gtggtaaaacagataatggtgtagggtttgtgttggatctaacagaaccaccaaaagggactgaggctgccatta

SEQ ID NO: 100621 - DNA, 75 bp, synthetic construct
  source 1..75: mol_type = other DNA
tgcggcctgaccgtggagcagatgcaaaaccagatggacccggtgtacacgccggcgcgaaaaatccacctgtac

SEQ ID NO: 100622 - DNA, 75 bp, synthetic construct
  source 1..75: mol_type = other DNA
aaaacactatcagtaagttggagtcattacccctctcacgatattacctttgttggtattgtacagaccgctaaa

SEQ ID NO: 100623 - DNA, 75 bp, synthetic construct
  source 1..75: mol_type = other DNA
cgtaacggtgaagagttaaataaaactctcgttaagatgcaaaaagccaacgccacctatacacaagcggatctt

SEQ ID NO: 100624 - DNA, 75 bp, synthetic construct
  source 1..75: mol_type = other DNA
gaaataaagtaacaaaagaaaatgatgtttatgatagtctaaatttttcaagcaaagatttaacgaattcttata

SEQ ID NO: 100625 - DNA, 75 bp, synthetic construct
  source 1..75: mol_type = other DNA
ggaaggtagtaagaaagctatcatgactggattcggtgaagagttcgacgctcaggctggtgaagagtgggcgca

SEQ ID NO: 100626 - DNA, 75 bp, synthetic construct
  source 1..75: mol_type = other DNA
gtattttgaggggcgaccttaaggttggagtagtctcatcaatttttgctcaaacagttagagcaaatttaatct

SEQ ID NO: 100627 - DNA, 75 bp, synthetic construct
  source 1..75: mol_type = other DNA
gagtcagagctgccagtgatgagtgaaagcggtcaggtatggaaaggtgatgagattcaggaggctaaagagcac

SEQ ID NO: 100628 - DNA, 75 bp, synthetic construct
  source 1..75: mol_type = other DNA
atctggagcacggtcatcatttcggtcacttgagcacctcgataaggtgtccagacactatctttctgaaataat

SEQ ID NO: 100629 - DNA, 75 bp, synthetic construct
  source 1..75: mol_type = other DNA
taaagctgatgctaaagcgtcagacaagcaagctcaaacagataagaagaatgctgataaggtggcaaaggcaga

SEQ ID NO: 100630 - DNA, 75 bp, synthetic construct
  source 1..75: mol_type = other DNA
ggcagtcattgacgaagtgattgtccgcgcgggggactatatcgacattggtacgcctctttttggcggatcggt

SEQ ID NO: 100631 - DNA, 75 bp, synthetic construct
  source 1..75: mol_type = other DNA
acacgttactggtgctggcgaatcccatcggcccaacctgccacaaaggcaccagcagctgcttcggcgacaccg

SEQ ID NO: 100632 - DNA, 75 bp, synthetic construct
  source 1..75: mol_type = other DNA
ggggaccggctgctcctgagcctgaagacggcgcgggtgacagtgctgtttcagatggcgttgtgtctcagcctg

SEQ ID NO: 100633 - DNA, 75 bp, synthetic construct
  source 1..75: mol_type = other DNA
caggtctggttgtagcggctgctgcaaaagatgctgcttacgctgcccttgttaagcaaggcaaccgtattgctg

SEQ ID NO: 100634 - DNA, 75 bp, synthetic construct
  source 1..75: mol_type = other DNA
cgccgcaaggattgagcatcccggcgggaacgatgatacttgttgatccacacgcgccagctattgacggcaaac

SEQ ID NO: 100635 - DNA, 75 bp, synthetic construct
  source 1..75: mol_type = other DNA
acaggccagcggcctgattacttcaccgcaaaccataaaagcagccctggcacatcagagcggtacatggataac

SEQ ID NO: 100636 - DNA, 75 bp, synthetic construct
  source 1..75: mol_type = other DNA
aaaatgcattattgcacgcgacatcattggcaatcgtcgttactcgcgggtatttgagaaagcatatgtggtaaa

SEQ ID NO: 100637 - DNA, 75 bp, synthetic construct
  source 1..75: mol_type = other DNA
gaagaggaagattacgacagccgtttcctgcgctgcgtggagctggtgcgggagatgatgggggagcagagataa

SEQ ID NO: 100638 - DNA, 75 bp, synthetic construct
  source 1..75: mol_type = other DNA
ccgcaaagcgcggacttaaacgctactacaccggaaaaccatgtaagcatggacatgacagtgaacgctgggttt

SEQ ID NO: 100639 - DNA, 75 bp, synthetic construct
  source 1..75: mol_type = other DNA
tataccgttgcggaaatgtcggccgatgcgtggacggctcgcgtcgttggcgtcgttaaaaaagccttgcacgta

SEQ ID NO: 100640 - DNA, 75 bp, synthetic construct
  source 1..75: mol_type = other DNA
ttaggtgtatctgatgccgaagtaagagatatacaaagaatactaagtaatccttacggtgtttatttcatagca

SEQ ID NO: 100641 - DNA, 75 bp, synthetic construct
  source 1..75: mol_type = other DNA
ccctattgatgttgaattgacagagagttgtctgattgagaatgatgaactggcactgtctgttattcaacaatt

SEQ ID NO: 100642 - DNA, 75 bp, synthetic construct
  source 1..75: mol_type = other DNA
cattgcatgaccaatgatgtggtgcaaacctttactgccaatactttactggcgctcggcgcatcgccagcgatg

SEQ ID NO: 100643 - DNA, 75 bp, synthetic construct
  source 1..75: mol_type = other DNA
gccgagagctgaaaccgcccgtcaggcactgagcgccagccgcctgatcgtaaccaacgatttagcgcagtgcgt

SEQ ID NO: 100644 - DNA, 75 bp, synthetic construct
  source 1..75: mol_type = other DNA
aggctaatttgctgcaaaccggctgggcagaaagcctacccaactggcgctacgtcgacacgaaacagccggtgc

SEQ ID NO: 100645 - DNA, 75 bp, synthetic construct
  source 1..75: mol_type = other DNA
tgagcagccatacttacagaaatgaacagtggcatttctttattttagaggaggacctccttttaggaaaaaata

SEQ ID NO: 100646 - DNA, 75 bp, synthetic construct
  source 1..75: mol_type = other DNA
cgcggcagaatttgcgggattttgcagatttgatgatgaagaaggagacggagaaacagggtttcaccctatcgt

SEQ ID NO: 100647 - DNA, 75 bp, synthetic construct
  source 1..75: mol_type = other DNA
gtatctggtgatcctcaccgcggtaattttattattgaaaatggtgaagtacgcattattgatctttcaggataa

SEQ ID NO: 100648 - DNA, 75 bp, synthetic construct
  source 1..75: mol_type = other DNA
tgttcacagccaccctgacgccacaacgcagccgagcgaactggataaagcgcaatgcgacgcaacgcttttacc

SEQ ID NO: 100649 - DNA, 75 bp, synthetic construct
  source 1..75: mol_type = other DNA
gccgcgtgccgaaaccgcacgtcaggcactgagcgccagccgcctgatcgtgaccaacgatttagcgcagtgcgt

SEQ ID NO: 100650 - DNA, 75 bp, synthetic construct
  source 1..75: mol_type = other DNA
ttgaacatggcgcaaacacaaaagcaactaataaagatacagatacagatctaaaagaattaaaccccacacata

SEQ ID NO: 100651 - DNA, 75 bp, synthetic construct
  source 1..75: mol_type = other DNA
aacggcgaaaacttccgcaccttaaaagaggccaatttattacaaacgggctgggcggagactctgcccaactgg

SEQ ID NO: 100652 - DNA, 75 bp, synthetic construct
  source 1..75: mol_type = other DNA
ggggaggtgtattcgaaccgatggacccagaagaacggggctgcgccgtcgaaactctggattgctcagattggc

SEQ ID NO: 100653 - DNA, 75 bp, synthetic construct
  source 1..75: mol_type = other DNA
gccggagtcggaatttacgcctgctgaacttgccgccttccgggactactgggcagcggaggggaaagtgtttac

SEQ ID NO: 100654 - DNA, 75 bp, synthetic construct
  source 1..75: mol_type = other DNA
accgtgagacggtgcgcagctttggcagcatggcaggcagtaatgccgcatataaactgaccagcacatacaccc

SEQ ID NO: 100655 - DNA, 75 bp, synthetic construct
  source 1..75: mol_type = other DNA
tcaccgacgatacctcgatggcctgtgtctggcggatgcgttactggaatgtgaaggcaagatcgatccgaatct

SEQ ID NO: 100656 - DNA, 75 bp, synthetic construct
  source 1..75: mol_type = other DNA
accagatgttatggctgcgtgtggatgccagcggttatccgcagtacgcaccaccaccggcgaataatgttctgc

SEQ ID NO: 100657 - DNA, 75 bp, synthetic construct
  source 1..75: mol_type = other DNA
aaaccgtggccagtattacttgaccactacagtatcctctgcgatgccgaagtcggggttctacccttgagctct

SEQ ID NO: 100658 - DNA, 75 bp, synthetic construct
  source 1..75: mol_type = other DNA
ggcagccgggaacacgggcggtgatgttcagccagcctgtcagccagttactggccgctgcccgtatggatgtgt

SEQ ID NO: 100659 - DNA, 75 bp, synthetic construct
  source 1..75: mol_type = other DNA
aataaaattcaacaatcaattcgttcattacacgaacacggtatggtatctggtgatcctcaccgcggtaatttt

SEQ ID NO: 100660 - DNA, 75 bp, synthetic construct
  source 1..75: mol_type = other DNA
ccgtcgaacgccagttggcagaactgccgcgtgccgaaaccgcccgtcaggcactgagcgccagccgcctgatcg

SEQ ID NO: 100661 - DNA, 75 bp, synthetic construct
  source 1..75: mol_type = other DNA
tgaatagccatacctatagaaatgagcactggcatttctttatcgttgaagatgatcttcttttaggtaaaaata

SEQ ID NO: 100662 - DNA, 75 bp, synthetic construct
  source 1..75: mol_type = other DNA
gatggatggcgtcctcgggaatggaattatctttttcatttcaatacgccaggtcaaggtattaatgatgtaacc

SEQ ID NO: 100663 - DNA, 75 bp, synthetic construct
  source 1..75: mol_type = other DNA
ttattaacaactcaaaacaaattgatagcttagaaaaactccgcgataccttacttcccaaactgatgagcggtg

SEQ ID NO: 100664 - DNA, 75 bp, synthetic construct
  source 1..75: mol_type = other DNA
catggtgcgacaggcccagagcagcaagccagaaatcggtcaactggcggataaaatctcagccgtatttgtgcc

SEQ ID NO: 100665 - DNA, 75 bp, synthetic construct
  source 1..75: mol_type = other DNA
ttcatgctatatggcattagcgaattaccggaaatcgtcattcagaataagggaaagccggtttttcgcgatagc

SEQ ID NO: 100666 - DNA, 75 bp, synthetic construct
  source 1..75: mol_type = other DNA
aatctcactctttcgaggaaaagagctgaaacagttcggcaatatttaattgccaagggattacctgcagaaaaa

SEQ ID NO: 100667 - DNA, 75 bp, synthetic construct
  source 1..75: mol_type = other DNA
gtgatcctcaccgtggtaattttattattgaaaatggtgaagtacgcattattgatctttcaggaaaacgggcat

SEQ ID NO: 100668 - DNA, 75 bp, synthetic construct
  source 1..75: mol_type = other DNA
gatatgccctgggaactggggcccggattacctgttatgaacatgaaaaatatgccggctgaaccacttgtattc

SEQ ID NO: 100669 - DNA, 75 bp, synthetic construct
  source 1..75: mol_type = other DNA
aacgaaacattaccgacctcaaaacccgtgacctactccaaccaattaaggcggctgaaaagtccgggcatcttg

SEQ ID NO: 100670 - DNA, 75 bp, synthetic construct
  source 1..75: mol_type = other DNA
gatgcagattaatcgctacgatgataaagggtgttttttaacagttgaagatcctgttgaatatcaaatttatgg

SEQ ID NO: 100671 - DNA, 75 bp, synthetic construct
  source 1..75: mol_type = other DNA
gctggctgtatctggcagtggtcattgacctgtggtcacgtgccgttattggctggtcaatgtcgccacgcatga

SEQ ID NO: 100672 - DNA, 75 bp, synthetic construct
  source 1..75: mol_type = other DNA
tgttgatcctgcatgagggagattccccgacgctggcctattttgaagcggcgatcagaagccgttttcccggcg

SEQ ID NO: 100673 - DNA, 75 bp, synthetic construct
  source 1..75: mol_type = other DNA
atatgcatgagcaagttgttgctgcaactaacggttcaactgtaaatcagctgtcggctgacggattacaacgcc

SEQ ID NO: 100674 - DNA, 75 bp, synthetic construct
  source 1..75: mol_type = other DNA
gaacggagtggccagtgataacctgcataaaactggcgaaggcaccctgacagtaaacgggaccggtgtgaatgc

SEQ ID NO: 100675 - DNA, 75 bp, synthetic construct
  source 1..75: mol_type = other DNA
aacaacctgataaatcagaaaaagtcaatattgtttcaaaaacacctaagttggctgaaaaagataagaaaaaaa

SEQ ID NO: 100676 - DNA, 75 bp, synthetic construct
  source 1..75: mol_type = other DNA
aaatcattaggtgttttaggtgaatcattaataaaacatagagctaacaacgtaattgcgcctgttactgaaatt

SEQ ID NO: 100677 - DNA, 75 bp, synthetic construct
  source 1..75: mol_type = other DNA
ggcgtggccggataaccgcatcgcagaggatgcgcactatgtttaccactatgatgaatacggcagactgacgga

SEQ ID NO: 100678 - DNA, 75 bp, synthetic construct
  source 1..75: mol_type = other DNA
cagccacgcgcacaggcgatgcgtgctgccgttgaacaggcaacacactctcaaaccccctggacgcttgatccg

SEQ ID NO: 100679 - DNA, 75 bp, synthetic construct
  source 1..75: mol_type = other DNA
tccggcaggagcacgggatcgagcttaaggattaccgggtggattatccttggtgggagaatgactacccggaca

SEQ ID NO: 100680 - DNA, 75 bp, synthetic construct
  source 1..75: mol_type = other DNA
ctggcaaacaactatgaaaacaccgatacgggagagcgagtttacctgattggagtattcgatcagcagatatca

SEQ ID NO: 100681 - DNA, 75 bp, synthetic construct
  source 1..75: mol_type = other DNA
ggtggatagtggaaggactattctgtctgttcaaggcgacgcattgcaagaccacggccataaagctataagact

SEQ ID NO: 100682 - DNA, 75 bp, synthetic construct
  source 1..75: mol_type = other DNA
ctgatcccatcaccgacacttcattcacgagggagtatcggtaatactggcgggagtgaaacccgtccacgaaat

SEQ ID NO: 100683 - DNA, 75 bp, synthetic construct
  source 1..75: mol_type = other DNA
ctggacacgctgaaagaaatagccgtagccattaacaatgatccgaaattcagtaccaccattaacaatgcgctg

SEQ ID NO: 100684 - DNA, 75 bp, synthetic construct
  source 1..75: mol_type = other DNA
ctcatccggatcgaaacagagaacggcgagcgggagaaagcgcagcgccgcagcctggcggagaagttacagcag

SEQ ID NO: 100685 - DNA, 75 bp, synthetic construct
  source 1..75: mol_type = other DNA
acacaggattcagttttgatgcatccagggttgtaccaacagcatcagagaatcgccctcgaaacattgcattta

SEQ ID NO: 100686 - DNA, 75 bp, synthetic construct
  source 1..75: mol_type = other DNA
gccaacgagacgtactgttacatgctggacaggatggttaatcacttcctgccattcattcaggagaaacaagat

SEQ ID NO: 100687 - DNA, 75 bp, synthetic construct
  source 1..75: mol_type = other DNA
tgtggcgtgcaggacgtgtttaacgtcggcggcgctcaggccattgccgcgctggcgttcggtacagaatccgtg

SEQ ID NO: 100688 - DNA, 75 bp, synthetic construct
  source 1..75: mol_type = other DNA
gtcgatcccgccagtgttgggacgtattgatagaaacaatgaaacaataagaaaattaaactccgaattgtcaaa

SEQ ID NO: 100689 - DNA, 75 bp, synthetic construct
  source 1..75: mol_type = other DNA
tttcattatatctaaacgcggctaataaaaatcatcctctggcgcagcatagtttggcatgtatgtatcgggatg

SEQ ID NO: 100690 - DNA, 75 bp, synthetic construct
  source 1..75: mol_type = other DNA
acagtccgccgagatattaggtatgatctattaccagggatttgaagaaattgcagaaaactcagctttaagttt

SEQ ID NO: 100691 - DNA, 75 bp, synthetic construct
  source 1..75: mol_type = other DNA
tttgaggctcttcaactgattgagcttcatatgctgatgacgtcaccagaattgtataatacacttttggcttca

SEQ ID NO: 100692 - DNA, 75 bp, synthetic construct
  source 1..75: mol_type = other DNA
tatttacatctagtgataatacgaaagcattggatttttatcatgaacaaaaagatataataactgagagactta

SEQ ID NO: 100693 - DNA, 75 bp, synthetic construct
  source 1..75: mol_type = other DNA
ttcatatgctgatgacgtcaccagaattgtataatacacttttggcttcagcgaagtatccaccattgccagtaa

SEQ ID NO: 100694 - DNA, 75 bp, synthetic construct
  source 1..75: mol_type = other DNA
ttcctatcgcaaagcgtcttcttgacatggggttcttgctgtatctagatggcaaaaagtcagatgcttacttgt

SEQ ID NO: 100695 - DNA, 75 bp, synthetic construct
  source 1..75: mol_type = other DNA
atgccgggtaaattcagattcagccgtcgcagtgaaaaaaatctggagggtgtcaaaccacagctggttgctgtc

SEQ ID NO: 100696 - DNA, 75 bp, synthetic construct
  source 1..75: mol_type = other DNA
ccggggcagcaatggcactctcgtcgattaccgtagtgagtaacgccaaccggttgctgcggtttaaaccgaagg

SEQ ID NO: 100697 - DNA, 75 bp, synthetic construct
  source 1..75: mol_type = other DNA
ggaatgagtgtactgacgaacagcagcgcgagctgttgatgcgcccagccatcagcgcctccgaaagcatcaccc

SEQ ID NO: 100698 - DNA, 75 bp, synthetic construct
  source 1..75: mol_type = other DNA
ggagatgaatccagagaggttaaaaatccggcagcttcagcgagaactgatatcagggctaattactggagcctg

SEQ ID NO: 100699 - DNA, 75 bp, synthetic construct
  source 1..75: mol_type = other DNA
cctctttatcgcgcgtgcgtgcggaagcatcttttcgcaacacccccctccgggattccgctacggctctgccat

SEQ ID NO: 100700 - DNA, 75 bp, synthetic construct
  source 1..75: mol_type = other DNA
taccgtaacttaccgcgcgtgacggtattacacccgatgacctggcagaactatctggattacactcagcatcac

SEQ ID NO: 100701 - DNA, 75 bp, synthetic construct
  source 1..75: mol_type = other DNA
tgttactatggacgtcacttatgaaagctcaggctctggcgactggaaaactgatggtttatttgcaggcattgg

SEQ ID NO: 100702 - DNA, 75 bp, synthetic construct
  source 1..75: mol_type = other DNA
atagccagcggtgatttgccagcaagcagttacagcttcggctttagcgaggggatgattggcaacgtgcatttc

SEQ ID NO: 100703 - DNA, 75 bp, synthetic construct
  source 1..75: mol_type = other DNA
agttgggcacggtgctcggcttgccgacttccgcagggtatatgtgggcctacgacatgatgacggtttctggca

SEQ ID NO: 100704 - DNA, 75 bp, synthetic construct
  source 1..75: mol_type = other DNA
cttggtggggatattgcagaattcgatactgaactgtctaattttattggtgttagacacgtggcgtatacttgt

SEQ ID NO: 100705 - DNA, 75 bp, synthetic construct
  source 1..75: mol_type = other DNA
gccgccgtttttgtctgaaactcctgtctcttaaaccaagcgccatacgcggtaatgcttcggaaatcatggcat

SEQ ID NO: 100706 - DNA, 75 bp, synthetic construct
  source 1..75: mol_type = other DNA
ataatgattaatctgcccgttgagcaggctgtggatatattcggagaaatggcacttaataaaaccactatttac

SEQ ID NO: 100707 - DNA, 75 bp, synthetic construct
  source 1..75: mol_type = other DNA
ttcagcaattccagaaaaatgcctttctggctgacacagcacggggaaatctgtccagcgcacagaacgctatca

SEQ ID NO: 100708 - DNA, 75 bp, synthetic construct
  source 1..75: mol_type = other DNA
tggcgatcctcataaaggaaattttatagtatccgaaaaaggtttaagactaattgacctttcaggtaaaaaaac

SEQ ID NO: 100709 - DNA, 75 bp, synthetic construct
  source 1..75: mol_type = other DNA
gtaaaacattaaatttcgctcattattatattatgctcattgagtatattgaaggtgtcgggttaaatggtattt

SEQ ID NO: 100710 - DNA, 75 bp, synthetic construct
  source 1..75: mol_type = other DNA
tgctctctaatgccctgcgctatacgccggaaggtcaggcggtaaccgtatcgataaaggaacaggaaaattatt

SEQ ID NO: 100711 - DNA, 75 bp, synthetic construct
  source 1..75: mol_type = other DNA
aatgactattttttacttgctgaacgtaaaacattaaatttctcacattattatattatgctcattgagtatatt

SEQ ID NO: 100712 - DNA, 75 bp, synthetic construct
  source 1..75: mol_type = other DNA
gaacttcatatgctgatgacggcaccaggattgtataatacacttttggcttcggcgaaatatccaccattacca

SEQ ID NO: 100713 - DNA, 75 bp, synthetic construct
  source 1..75: mol_type = other DNA
cagtggagatctaatatcattaggtggtcatgcaggacttggcgttgcgtttgctaaaaagaaaggtgaaatgtt

SEQ ID NO: 100714 - DNA, 75 bp, synthetic construct
  source 1..75: mol_type = other DNA
tgactaaagatttagcgcagtgcgtagagatttccaaccagtacggcccggagcacctgatcattcagacccgca

SEQ ID NO: 100715 - DNA, 75 bp, synthetic construct
  source 1..75: mol_type = other DNA
ttttacgttggctggaaagcgaaccgcaagattcgcataacgagcatgtcgttattaatgggcagaatttcctga

SEQ ID NO: 100716 - DNA, 75 bp, synthetic construct
  source 1..75: mol_type = other DNA
ttggtgatcactatgcttataaacccatgagtgaaaacactatcaacaacgcgcttcgtaaaatgggctatgaca

SEQ ID NO: 100717 - DNA, 75 bp, synthetic construct
  source 1..75: mol_type = other DNA
aagatccacaggcaaacccgttgaaaacaccttcggggaaaatcgaaatttattctgaacgactggcgaagattg

SEQ ID NO: 100718 - DNA, 75 bp, synthetic construct
  source 1..75: mol_type = other DNA
tttgatgaaattgcttcaagagcaagaacggctgctgaacaaactttccgatgggctaatgttgcagttaaacat

SEQ ID NO: 100719 - DNA, 75 bp, synthetic construct
  source 1..75: mol_type = other DNA
ggggccttatattccgtcgatatcgaatatccgatgactctgaatgacctgtcgctgctgtgtgaatctgtagca

SEQ ID NO: 100720 - DNA, 75 bp, synthetic construct
  source 1..75: mol_type = other DNA
agaagccaacagttacctaaaatatctccagcacttcattttttatttcaacagactaatttgatagatgcgcat

SEQ ID NO: 100721 - DNA, 75 bp, synthetic construct
  source 1..75: mol_type = other DNA
ttgcagcgacagatacgggggcactcataacaaatagtgcagtgcagaaagcagttctttctgttaataatcagt

SEQ ID NO: 100722 - DNA, 75 bp, synthetic construct
  source 1..75: mol_type = other DNA
ataaatttaatgttgtcttttcttacgacggatattatataaaggaattcatacttttattaccctataataaat

SEQ ID NO: 100723 - DNA, 75 bp, synthetic construct
  source 1..75: mol_type = other DNA
ctgtccccaagggcggcgatttcagtctcaccgacagactggctgatgatgtacggctccatatcctctgcattc

SEQ ID NO: 100724 - DNA, 75 bp, synthetic construct
  source 1..75: mol_type = other DNA
ataacagggtcagcgttacgatcggcctgatatcttattcagtttatctaattcactggcctattattgtgtttt

SEQ ID NO: 100725 - DNA, 75 bp, synthetic construct
  source 1..75: mol_type = other DNA
ctttggtaaagagcgcagcgagatgtcggtgatcaacgatcagtttggtgcgccgaccggggcagaactgctggc

SEQ ID NO: 100726 - DNA, 75 bp, synthetic construct
  source 1..75: mol_type = other DNA
actggagcagttactggctgagcgtaaaacggcagatccttccagctcgtatacggcgaagctgtatgcaagcgg

SEQ ID NO: 100727 - DNA, 75 bp, synthetic construct
  source 1..75: mol_type = other DNA
ggacgcagcgatgacatgttgattattcgcggtgtaaatgtctttccgtcacaactggaagaagagattgtcaaa

SEQ ID NO: 100728 - DNA, 75 bp, synthetic construct
  source 1..75: mol_type = other DNA
attgccgcaaaagtgactccgcgtattctgcctggcgttaccgccatcgggcaaggtgcgtggcttaaagcggat

SEQ ID NO: 100729 - DNA, 75 bp, synthetic construct
  source 1..75: mol_type = other DNA
aaagctcgtcgcgaggcaaaacgtgtgctgagacgggattcgcgcagccataagcaacgtgaagaagaatcggtc

SEQ ID NO: 100730 - DNA, 75 bp, synthetic construct
  source 1..75: mol_type = other DNA
gtactactgacgtgactggtactatcgaactgccggaaggtgtagagatggtaatgccgggcgacaacatcaaaa

SEQ ID NO: 100731 - DNA, 75 bp, synthetic construct
  source 1..75: mol_type = other DNA
actgatgccggtgattgtgcaacacgcggtatccggcgaagtgttaatgctgggctacatgaacccggaagcctt

SEQ ID NO: 100732 - DNA, 75 bp, synthetic construct
  source 1..75: mol_type = other DNA
gaatggaaagttactcctcatgggttaagaccagatctttatccccatcccgaagatgcaatccctgatttgtta

SEQ ID NO: 100733 - DNA, 75 bp, synthetic construct
  source 1..75: mol_type = other DNA
caaatcctgttattacattaattgttgttgttatttctttattcctccttcctgcaatcgtcgcgggactaggaa

SEQ ID NO: 100734 - DNA, 75 bp, synthetic construct
  source 1..75: mol_type = other DNA
ttctcagctgagccgctgacaggcgagaaagcgcaaaacagcaatctgaatagcgatcaacttgccaccttgcag

SEQ ID NO: 100735 - DNA, 75 bp, synthetic construct
  source 1..75: mol_type = other DNA
acattgaccggtactccttctggaaaattaaacgacagtttcctgcccgcgatatacattgctgatggtggattt

SEQ ID NO: 100736 - DNA, 75 bp, synthetic construct
  source 1..75: mol_type = other DNA
cagtattgcggttccgttcaccgtcagcctgatccgccccctgcaccgcccgtcatcagcgctggttcaggcgtt

SEQ ID NO: 100737 - DNA, 75 bp, synthetic construct
  source 1..75: mol_type = other DNA
tatgcatggattcgttaccggcagttcagcgacaacctggtggatgcgatgtttttccatatgaaacagcttgag

SEQ ID NO: 100738 - DNA, 75 bp, synthetic construct
  source 1..75: mol_type = other DNA
tgcctttaaacgctcgctctcttcttattccaacgaagtggtgctggtgttcaaaagtacctctctggcttacac

SEQ ID NO: 100739 - DNA, 75 bp, synthetic construct
  source 1..75: mol_type = other DNA
tactactggatgccgttcagggtttttgagttgtctttcggcggactcgcattcttcatttctcgatggataaaa

SEQ ID NO: 100740 - DNA, 75 bp, synthetic construct
  source 1..75: mol_type = other DNA
attcaactggacggcctgcttacagacaatgaccggctgcagttgaaaggcggatatttcggaacggatgccaga

SEQ ID NO: 100741 - DNA, 75 bp, synthetic construct
  source 1..75: mol_type = other DNA
aaacccggcgaggcatggtgtgattcgcttgctgatatcgtgtctcattcagtggctgagcttacccgtaatggc

SEQ ID NO: 100742 - DNA, 75 bp, synthetic construct
  source 1..75: mol_type = other DNA
cagtcatcaattaatcgtctagaaacaaaagacagtatggtgcgttttactggtgataatgggaagtttacaacc

SEQ ID NO: 100743 - DNA, 75 bp, synthetic construct
  source 1..75: mol_type = other DNA
gatcctcgataaagcaggtgatatgcagctgccgcaggtcaacggtttccgcacattgcgcgggctgggcgtgag

SEQ ID NO: 100744 - DNA, 75 bp, synthetic construct
  source 1..75: mol_type = other DNA
aggagtgaaacactccagccgtggctctaagatgaaaacccctcaccttgtcccattaagcaagcaggcaatagc

SEQ ID NO: 100745 - DNA, 75 bp, synthetic construct
  source 1..75: mol_type = other DNA
acgtattactccattctggatagcgacggcgataagatacacggcgacgatagtgatgaccgttacggcgcacgc

SEQ ID NO: 100746 - DNA, 75 bp, synthetic construct
  source 1..75: mol_type = other DNA
cggtagtaacacgagagctggtttacaccgcggtgacccgcgcgcgtcgccgtctgtcgctgtatgccgatgagc

SEQ ID NO: 100747 - DNA, 75 bp, synthetic construct
  source 1..75: mol_type = other DNA
ccaagttactgccggatgagtttaatagaggtctggaaagtcctgatgacactgatactaagttactcttccctg

SEQ ID NO: 100748 - DNA, 75 bp, synthetic construct
  source 1..75: mol_type = other DNA
gcaaactggcaaaacgtctcggcgtttcacataccgcgattgccaataagttgcgggaatatggtctgagtcaga

SEQ ID NO: 100749 - DNA, 75 bp, synthetic construct
  source 1..75: mol_type = other DNA
ctggctgcaccaacgggtaaagctgccgcgcgcttaaccgaatctctcggcaaggctttgcgacaattaccgctg

SEQ ID NO: 100750 - DNA, 75 bp, synthetic construct
  source 1..75: mol_type = other DNA
gtcaatcacgtcaatattgtcgcgcagcaggcgctgccggtaacgctcaacgaacagggcgaaggctcggttaca

SEQ ID NO: 100751 - DNA, 75 bp, synthetic construct
  source 1..75: mol_type = other DNA
ttaacgcgcataaaatcatcagacccggttacaccacgctccaggaactggtgagccgggtactttctgatgagc

SEQ ID NO: 100752 - DNA, 75 bp, synthetic construct
  source 1..75: mol_type = other DNA
ctcaccagtggctgttcctgtatcaactggaacaactgctcgccgaacgtaaatctgccgatccggaaacctcct

SEQ ID NO: 100753 - DNA, 75 bp, synthetic construct
  source 1..75: mol_type = other DNA
ttcatgttcgccaggatagcaagactgtacccggctcttatagcaacgctgatcgccgtttttgctgggtgcttt

SEQ ID NO: 100754 - DNA, 75 bp, synthetic construct
  source 1..75: mol_type = other DNA
attaatgctggcaactccggcgcgtatagcaggctgtaaaaaagtagtgttgtgctcaccgccgccgattgccga

SEQ ID NO: 100755 - DNA, 75 bp, synthetic construct
  source 1..75: mol_type = other DNA
aaggtgcttttgaggagaataattattcatcagctagattgtcacctatatttctctctgaattacaacaaaaac

SEQ ID NO: 100756 - DNA, 75 bp, synthetic construct
  source 1..75: mol_type = other DNA
cacgaattccaggtgctggcgcagagcggtgaagacgatgtggtcttctccgacacctctgactatgcagcgaac

SEQ ID NO: 100757 - DNA, 75 bp, synthetic construct
  source 1..75: mol_type = other DNA
gctggtgatattattgatgaaacatgtgtgcgcagtgtgcggccaggctatggattaccacctaaatattttgat

SEQ ID NO: 100758 - DNA, 75 bp, synthetic construct
  source 1..75: mol_type = other DNA
ggtgattttactgacgcccgatgctgatatggcgcgtcgcgttgccgaagccgtcgaacgccagttggcagaact

SEQ ID NO: 100759 - DNA, 75 bp, synthetic construct
  source 1..75: mol_type = other DNA
tgggcagcgaatcaggagctgttccatctggaaaccaaaacagacgatgttctgcgtatttttgtagaccacgct

SEQ ID NO: 100760 - DNA, 75 bp, synthetic construct
  source 1..75: mol_type = other DNA
cttccggctcactgggcagggcatacggcgcgtcagctgtgtatcaacatttatcagcgcgtagcgcctgctgct

SEQ ID NO: 100761 - DNA, 75 bp, synthetic construct
  source 1..75: mol_type = other DNA
ggattttccccgccccggcattcacgcaggtaaaacggctggcgcaatccgccgcagcgctggctattgaaaaga

SEQ ID NO: 100762 - DNA, 75 bp, synthetic construct
  source 1..75: mol_type = other DNA
cgaacacgaaatctataagctctatcgcgatctgccgcgcgtgacggtactgcatcccatgagctggcagaacta

SEQ ID NO: 100763 - DNA, 75 bp, synthetic construct
  source 1..75: mol_type = other DNA
ggcttcggtacttggcattggcttctgcccggaagacaggaaaaccgatggcatcatcgctgccgcctcggtgcg

SEQ ID NO: 100764 - DNA, 75 bp, synthetic construct
  source 1..75: mol_type = other DNA
agcctacacctctggtaagggggcactgcagtggaaatatgatgcggctaatggcaccggcaccctgactcaggg

SEQ ID NO: 100765 - DNA, 75 bp, synthetic construct
  source 1..75: mol_type = other DNA
actccttaagtatccttatgaaccttcagcgcctgaccgttccgtatgaggccagaacgttgaccgatgacggat

SEQ ID NO: 100766 - DNA, 75 bp, synthetic construct
  source 1..75: mol_type = other DNA
taactcgcccgcaggcgttgaattagcgccaggcgtgcgaactacgctgtttatcccggtacgcgcactgacggg

SEQ ID NO: 100767 - DNA, 75 bp, synthetic construct
  source 1..75: mol_type = other DNA
cagtggcacatctttgatctcctctctgtatggtgattcgctttcccatcgtggtggtgaaatctggctgggtag

SEQ ID NO: 100768 - DNA, 75 bp, synthetic construct
  source 1..75: mol_type = other DNA
acgggcagaaagtaaaatttatcgcgcagagcaacctgcatgggatggtaaatggctcctgttgctctcggaagg

SEQ ID NO: 100769 - DNA, 75 bp, synthetic construct
  source 1..75: mol_type = other DNA
gccacctgttccagcctcgggctggcagatttccagaagcgcatgaccgtgcaggaactctcgaaagaaggtttc

SEQ ID NO: 100770 - DNA, 75 bp, synthetic construct
  source 1..75: mol_type = other DNA
gccgggaagcctgtattttcaacgttttggcggtttgaatattgaacaggaggcgatatgccaatttaccagata

SEQ ID NO: 100771 - DNA, 75 bp, synthetic construct
  source 1..75: mol_type = other DNA
taagagcactttgcaaagacgttaagacagcttggcgagcattaggaaaaatcagttataaccataaggaaagtg

SEQ ID NO: 100772 - DNA, 75 bp, synthetic construct
  source 1..75: mol_type = other DNA
gccaaaagacgctgatatcagtaaacgcgagtcctggctggctgcgaacccggcactgggaacattcaggtcaga

SEQ ID NO: 100773 - DNA, 75 bp, synthetic construct
  source 1..75: mol_type = other DNA
gggagggttgtatgcttcagcactctttgattccggggcttattttgacctgattggtaaatacctccatcacga

SEQ ID NO: 100774 - DNA, 75 bp, synthetic construct
  source 1..75: mol_type = other DNA
tcgaccttcagacattaaaagccagtgacattaatgtaccggttaatactatcaatattttgggggggaaaggat

SEQ ID NO: 100775 - DNA, 75 bp, synthetic construct
  source 1..75: mol_type = other DNA
aactatattgccacacgcgtggatatgaaacggatgcgttcttattcttataatgtatcccgggcccgtatctgg

SEQ ID NO: 100776 - DNA, 75 bp, synthetic construct
  source 1..75: mol_type = other DNA
gattgaggcagatatttcagctcaggcatcgcaaggggcaacgcctgtgctgctggcggttgacgggaaagcggt

SEQ ID NO: 100777 - DNA, 75 bp, synthetic construct
  source 1..75: mol_type = other DNA
ctctgacacatggtgacagcggcctgcgtgacagaaaaacagcacaaaatgacgtgcagttctggtaccagtacg

SEQ ID NO: 100778 - DNA, 75 bp, synthetic construct
  source 1..75: mol_type = other DNA
agacacatggtgacagcggcctgcgtgacagaaaaacagtacaaaatgacgtacagttctggtaccagtacgctc

SEQ ID NO: 100779 - DNA, 75 bp, synthetic construct
  source 1..75: mol_type = other DNA
cccggaaggtcagtggcagtcctgtagcgccctgggaatgagcaaaaaagatacgctggcgatcctgctgccgta

SEQ ID NO: 100780 - DNA, 75 bp, synthetic construct
  source 1..75: mol_type = other DNA
ctggcggcggaagtcagcaatgaaaatgccacggtcgtcgatcacaacgaaacctggtccactttcacctggagc

SEQ ID NO: 100781 - DNA, 75 bp, synthetic construct
  source 1..75: mol_type = other DNA
gagttgtctctgaccgaacatgcggcaaaggccggtgagcgtacttttgccgggatggaagtcaggatgatccag

SEQ ID NO: 100782 - DNA, 75 bp, synthetic construct
  source 1..75: mol_type = other DNA
atgcctacaaacgttatcaagccgcaccagacccgctgcaagaagtggctgcagatatgctgaaacagcttgcag

SEQ ID NO: 100783 - DNA, 75 bp, synthetic construct
  source 1..75: mol_type = other DNA
atctgctctttctgcttagaagtgggaaagcagaagagtaccaggataatcatatcccccgcccggagtacgcag

SEQ ID NO: 100784 - DNA, 75 bp, synthetic construct
  source 1..75: mol_type = other DNA
gaagatattatgcctggtcgatggaccactcaacttgtcaataagcacttaggttacagatacacaggagtattc

SEQ ID NO: 100785 - DNA, 75 bp, synthetic construct
  source 1..75: mol_type = other DNA
agtattcattagccatgagtgaatttcttgcaaagagaaatctatcagcagcagcattcttcgctgatggggcat

SEQ ID NO: 100786 - DNA, 75 bp, synthetic construct
  source 1..75: mol_type = other DNA
tttgggacggtttctagctgcattacacaataagagaggttttaatcgtttgggttgtgattatctgttgctgac

SEQ ID NO: 100787 - DNA, 75 bp, synthetic construct
  source 1..75: mol_type = other DNA
ccactccagttaacgggcttccactataaagctcgtacccactccagctatggcaatattgatgtcttacaacaa

SEQ ID NO: 100788 - DNA, 75 bp, synthetic construct
  source 1..75: mol_type = other DNA
tgaaatatgccaataaagtggcgtttattgacactgattttgtcactacccaggcgttctgcaaaaagtacgaag

SEQ ID NO: 100789 - DNA, 75 bp, synthetic construct
  source 1..75: mol_type = other DNA
cgggagcccatcagttaagttatggcgctgatataccgtcagcagcagaagccagaaggctctgccacactatat

SEQ ID NO: 100790 - DNA, 75 bp, synthetic construct
  source 1..75: mol_type = other DNA
gctcacatttcaaatggttataaacatatttatatagcgattaattcaccagaaatatttctccaggcttcgcca

SEQ ID NO: 100791 - DNA, 75 bp, synthetic construct
  source 1..75: mol_type = other DNA
gtcagcgatatgaatgccatgggtgatatcacccacattaatctccacatcaactcaccgggtggcgatgttttt

SEQ ID NO: 100792 - DNA, 75 bp, synthetic construct
  source 1..75: mol_type = other DNA
ggttgatgctcaaagggcgctgccgcgactgtcaggcgaaaatcagcaagcgttatccgctggtggagttattga

SEQ ID NO: 100793 - DNA, 75 bp, synthetic construct
  source 1..75: mol_type = other DNA
aatatggctaacacatcatcccttgaaaagcagcggctggcacaggccacaatggggcaccaggcgcttcgcgca

SEQ ID NO: 100794 - DNA, 75 bp, synthetic construct
  source 1..75: mol_type = other DNA
tcatacgccagacgggtaaacctttgccgcctgtggttattgctgatgacggtaaagcgccacaagcggtgccgt

SEQ ID NO: 100795 - DNA, 75 bp, synthetic construct
  source 1..75: mol_type = other DNA
tgacttcaaccgaatcatgagcgtgctgcataaccttgggtatttcgtctgcgcccctgaggtcaataaaatcat

SEQ ID NO: 100796 - DNA, 75 bp, synthetic construct
  source 1..75: mol_type = other DNA
caccagcgttgaacgtcttgccggatataaagacgcgctggcgcagcatggtattgcgctcaatgaaaaacttat

SEQ ID NO: 100797 - DNA, 75 bp, synthetic construct
  source 1..75: mol_type = other DNA
ttgctatcgccaccattggaattgaaaccaaaggtgtctccgttgaaagtttaagtattgatgcagtggtagtga

SEQ ID NO: 100798 - DNA, 75 bp, synthetic construct
  source 1..75: mol_type = other DNA
tgacttcaaccgcatcatgagtgtgctgcataaccttggatatttcgtctgcgctcctgaggtaaataaaatcat

SEQ ID NO: 100799 - DNA, 75 bp, synthetic construct
  source 1..75: mol_type = other DNA
cgggccgtgctgttttactggcgaatggttactggacgttggctatggaaataccctcgacccgagccgcaaaag

SEQ ID NO: 100800 - DNA, 75 bp, synthetic construct
  source 1..75: mol_type = other DNA
tgagcaattacgaagtattacacaattagctaatccacaaattccaggaaaggataatgatggtcggtatatgct

SEQ ID NO: 100801 - DNA, 75 bp, synthetic construct
  source 1..75: mol_type = other DNA
gacacaacatccttctcgagctcggatctgcggagaatttgaaaactggctccgtgaaaatatgattcatcgctt

SEQ ID NO: 100802 - DNA, 75 bp, synthetic construct
  source 1..75: mol_type = other DNA
taattttaaaaacaaaatgaaagagattaaaaggaatttatctacatcacaaaaaaaagaagtcgaaaaaataat

SEQ ID NO: 100803 - DNA, 75 bp, synthetic construct
  source 1..75: mol_type = other DNA
atgaatcatattgaatatcaacatgaaaatgaaaaaattatattgagtatcattctcatttcaaattcttgttat

SEQ ID NO: 100804 - DNA, 75 bp, synthetic construct
  source 1..75: mol_type = other DNA
gcttaccatccggtcagcagtatgaataaaaagcaggatcctgtgataagagtggcagctctggcacagtaccgg

SEQ ID NO: 100805 - DNA, 75 bp, synthetic construct
  source 1..75: mol_type = other DNA
atcgactttactacgcatgattgccgggcttgagacgattaccagcggcgacctgtatatcggcgacaaacgaat

SEQ ID NO: 100806 - DNA, 75 bp, synthetic construct
  source 1..75: mol_type = other DNA
ggcacggtttcagacacaccatgagtaccattctgcacgaacagggctttaattccgcttggattgaaacgcagt

SEQ ID NO: 100807 - DNA, 75 bp, synthetic construct
  source 1..75: mol_type = other DNA
attaggggattcatcaggtctgaacctcaacaaaactttaaaaaagggattcgtgggtggagtcgccgcacggat

SEQ ID NO: 100808 - DNA, 75 bp, synthetic construct
  source 1..75: mol_type = other DNA
atggaacagataacaaaaccgcattgtggtgcacggctggatcgcttaccggattgccgctggcattcatcaatg

SEQ ID NO: 100809 - DNA, 75 bp, synthetic construct
  source 1..75: mol_type = other DNA
gtttaccactatgatgaatacggcagactgacggagaagacggaccgcatcccgacgggtgtgatacggacggac

SEQ ID NO: 100810 - DNA, 75 bp, synthetic construct
  source 1..75: mol_type = other DNA
taacagcacctttgctcccggaaaaaactgtgcagcctgaagataatgtgccatctgacagccagccagaaacat

SEQ ID NO: 100811 - DNA, 75 bp, synthetic construct
  source 1..75: mol_type = other DNA
tcaaccacactgccttttggaccgtgtttaagtctgggcggtatagcaacactttatctacaggcattgttttaa

SEQ ID NO: 100812 - DNA, 75 bp, synthetic construct
  source 1..75: mol_type = other DNA
gaattgttatcagtaaaatacctgttatgcaagcagggttaaaagaggtcaagatccacgttctgtttgtgaaca

SEQ ID NO: 100813 - DNA, 75 bp, synthetic construct
  source 1..75: mol_type = other DNA
acgacgatgtgtccacctggtccattgagtgcgaaagcgctggcaaggtcacggtaggtgacgttccgtcactgt

SEQ ID NO: 100814 - DNA, 75 bp, synthetic construct
  source 1..75: mol_type = other DNA
gaaagccgtctgcatcaaaagcataaactggaggctgatcaccgtcttcagtatgagcaagcgcgcgataaggcc

SEQ ID NO: 100815 - DNA, 75 bp, synthetic construct
  source 1..75: mol_type = other DNA
caacacgctttaccacggcatttattttagtgaattactgtttcatgccgcgcgaatggcggaagagaaagggcg

SEQ ID NO: 100816 - DNA, 75 bp, synthetic construct
  source 1..75: mol_type = other DNA
ccagcgatagtgaaactggcgagacggcagatcccttaattacggtgaacggtcatcacgttatcacatccacca

SEQ ID NO: 100817 - DNA, 75 bp, synthetic construct
  source 1..75: mol_type = other DNA
aataattgagcccgttattgaattgtataacgacgtggtatgggtcccgttcaacacactgcacaataaaattaa

SEQ ID NO: 100818 - DNA, 75 bp, synthetic construct
  source 1..75: mol_type = other DNA
ggttcttgatgaaattggcattcagcgcgagacgaaaaacgagcaggtggtactgcaccagattattgatcgacg

SEQ ID NO: 100819 - DNA, 75 bp, synthetic construct
  source 1..75: mol_type = other DNA
cctgtttttgcctcgctcaatgacgatcaacgccgggagctggtggcgctgcgcagcaacaataatggcgcaacc

SEQ ID NO: 100820 - DNA, 75 bp, synthetic construct
  source 1..75: mol_type = other DNA
atatcaccttcattaagctggtctggtgcgcctcagggaacgaaaagttttgctgtgacggtttatgatccagat

SEQ ID NO: 100821 - DNA, 75 bp, synthetic construct
  source 1..75: mol_type = other DNA
aaatccatagctgacgaactgatgaccgggtgcacgaattttgtgttcagcggtaaaaccggcaccaggaaaaat

SEQ ID NO: 100822 - DNA, 75 bp, synthetic construct
  source 1..75: mol_type = other DNA
aggagtattactgaaacgcgtgatattaggctcttgtgtgctgattgccatgaacgttgtgcagtacacactaat

SEQ ID NO: 100823 - DNA, 75 bp, synthetic construct
  source 1..75: mol_type = other DNA
aacagtaacatatttgcctgctgatgcaggaagacgtgatggtacaaaacttccgacaggtgctgttcaaggccg

SEQ ID NO: 100824 - DNA, 75 bp, synthetic construct
  source 1..75: mol_type = other DNA
aacaatttagcggcgcggtggtgaaaacgcgtgaagcgacagcgggtaaagaaattgaggctatcacacgccgga

SEQ ID NO: 100825 - DNA, 75 bp, synthetic construct
  source 1..75: mol_type = other DNA
gctcacatttcaaatggttataaacatatttatatagcgattaattcaccagagatatttctgctggcttgttct

SEQ ID NO: 100826 - DNA, 75 bp, synthetic construct
  source 1..75: mol_type = other DNA
aactggcaatggggcttaacgcatccaaaggcaaaaaaacggcaatcgataaaatttatccgcgacattttttgg

SEQ ID NO: 100827 - DNA, 75 bp, synthetic construct
  source 1..75: mol_type = other DNA
gccatcctgaacagcgcaatggcctactatgcgaagcaaaatggcgtcccagtcgttctctctgagttgtcgcag

SEQ ID NO: 100828 - DNA, 75 bp, synthetic construct
  source 1..75: mol_type = other DNA
gtggcgcaggcaggttttatcttaacccgacactggcgggacaccccgcaagggacagaggtctctttctggtta

SEQ ID NO: 100829 - DNA, 75 bp, synthetic construct
  source 1..75: mol_type = other DNA
catgagcacaattctgcacgaacaaggctttaattctgcctggattgaaatgcagttggctcatgtggataaaaa

SEQ ID NO: 100830 - DNA, 75 bp, synthetic construct
  source 1..75: mol_type = other DNA
gtgttgatatttttatcaatggcaaaatgttcgagcgtcaggatgtcacttttgttcaggataaccctgatgccg

SEQ ID NO: 100831 - DNA, 75 bp, synthetic construct
  source 1..75: mol_type = other DNA
ttattatcaatgattgactggaatgaagaattgcgctcacgtattggtgtgatgaattatatccatcaacgtaca

SEQ ID NO: 100832 - DNA, 75 bp, synthetic construct
  source 1..75: mol_type = other DNA
gagtctgccgcacatcgcgccattctgtcatcgtcatcactctttccgattgatggtggaggcactatcaatcag

SEQ ID NO: 100833 - DNA, 75 bp, synthetic construct
  source 1..75: mol_type = other DNA
caggtcggggccaacatgtcgctgggtattcgcccggaacatctactgccaagcgatatcgctgacgtcatcctt

SEQ ID NO: 100834 - DNA, 75 bp, synthetic construct
  source 1..75: mol_type = other DNA
ttttaataaaccacacacgagatgttgatattaatgagccagacggaccaacgaatctttccgcatggatgagac

SEQ ID NO: 100835 - DNA, 75 bp, synthetic construct
  source 1..75: mol_type = other DNA
ggcagaaacgatccccgcaagcctatcagtaaggaaagtgttaatcaggttatcgaattactgggatataaaggc

SEQ ID NO: 100836 - DNA, 75 bp, synthetic construct
  source 1..75: mol_type = other DNA
ctggtatcagcgcgaagtctttataccgaaaggttgggcaggccagcgtatcgtgctgcgtttcgatgcggtcac

SEQ ID NO: 100837 - DNA, 75 bp, synthetic construct
  source 1..75: mol_type = other DNA
gccggtgaaagtaaccgctaccgcaatcgatcaggtccaggttgagctgccgatgccaaacctccagcaagtctg

SEQ ID NO: 100838 - DNA, 75 bp, synthetic construct
  source 1..75: mol_type = other DNA
atgaagctgaccatcattcgattagaaaactttagcgaccaggaccggattgacctgcaaaagatctggccggag

SEQ ID NO: 100839 - DNA, 75 bp, synthetic construct
  source 1..75: mol_type = other DNA
gccatcttgctggcgccatgcatggccgtcgtacgcccttacgcggttgagaaatttgcccaggtctgggattgc

SEQ ID NO: 100840 - DNA, 75 bp, synthetic construct
  source 1..75: mol_type = other DNA
ccacgggcattgatgctctttgccacttactggagtgttttaccgcgaccgtggcaaatccggtcagcgataacg

SEQ ID NO: 100841 - DNA, 75 bp, synthetic construct
  source 1..75: mol_type = other DNA
atggacccgcaaaggtcgcctgtctgacttcaaaacggcataccgtgtggggatggggggatttggctctctgcg

SEQ ID NO: 100842 - DNA, 75 bp, synthetic construct
  source 1..75: mol_type = other DNA
tactggatgtttattctggtcaatatcatctttacgttcgtgctggggctgctggacaaaatgttaggctggtag

SEQ ID NO: 100843 - DNA, 75 bp, synthetic construct
  source 1..75: mol_type = other DNA
acgataaccaccgtatctacgccgcgcgttttaacgagcgcctgctcgctgccgtgcgggtaaccttaagcggca

SEQ ID NO: 100844 - DNA, 75 bp, synthetic construct
  source 1..75: mol_type = other DNA
ctcaggcggcgacctggacgtgactatcaaggaagaagatggtagtgaacaacgattcacccagccttatgcgtc

SEQ ID NO: 100845 - DNA, 75 bp, synthetic construct
  source 1..75: mol_type = other DNA
acgataaccaccgcatctacgccgcgcgttttaacgagcgcctgctagcggccgtgcgggtaaccttaagcggca

SEQ ID NO: 100846 - DNA, 75 bp, synthetic construct
  source 1..75: mol_type = other DNA
ttaatttctaaaaacacaggtaatggtataattaatgcagagagtggcgagacgcatctcacgggagataatacc

SEQ ID NO: 100847 - DNA, 75 bp, synthetic construct
  source 1..75: mol_type = other DNA
acctttgaaaaagatatttttccctatattggcaaacgccctattgctgaaatcaaaccaatggagttactagaa

SEQ ID NO: 100848 - DNA, 75 bp, synthetic construct
  source 1..75: mol_type = other DNA
tccatatgatgaaaaccgagtggcaatcagtgataactatttctcgaaagcaaatgtcgagcttgataataccgt

SEQ ID NO: 100849 - DNA, 75 bp, synthetic construct
  source 1..75: mol_type = other DNA
atgttaacagaacaacaacgtcgcgaactggactgggaaaaaaccgacggactgatgccggtaattgtgcaacat

SEQ ID NO: 100850 - DNA, 75 bp, synthetic construct
  source 1..75: mol_type = other DNA
gactagatgaaattgctgagcgccttgagaaatttgctaactacagcctttcacaggcccgttataaacactcac

SEQ ID NO: 100851 - DNA, 75 bp, synthetic construct
  source 1..75: mol_type = other DNA
gagcctagcgtgtttttgctcgatgaaccgctctctaacctcgatgctgcgctgcgcgtgcagatgcgtattgaa

SEQ ID NO: 100852 - DNA, 75 bp, synthetic construct
  source 1..75: mol_type = other DNA
ggcgacgatgggattatccggtctggggctggctgcttttcatgcctggaagaaatggcacgcagcaccggcagg

SEQ ID NO: 100853 - DNA, 75 bp, synthetic construct
  source 1..75: mol_type = other DNA
ggcgttggtatggtgtttcagtcttacgcgctctatccccacctgtcagtagcagaaaacatgtcatttggcctg

SEQ ID NO: 100854 - DNA, 75 bp, synthetic construct
  source 1..75: mol_type = other DNA
ctgaaagcaggagccgatatcatcatgctggataacttcgaaacagaacagatgcgcgaagccgtcaaacgcacc

SEQ ID NO: 100855 - DNA, 75 bp, synthetic construct
  source 1..75: mol_type = other DNA
gatgctgggtgtggacatggttaaacttcacgaacagcagcagaaacgactgcgtgaaagtgaaatccgccagca

SEQ ID NO: 100856 - DNA, 75 bp, synthetic construct
  source 1..75: mol_type = other DNA
gctcacatttcaaatggttataaacatatttatatagcgattaattcaccagagatatttctgctggtttgctct

SEQ ID NO: 100857 - DNA, 75 bp, synthetic construct
  source 1..75: mol_type = other DNA
gtcgtcgcagaagttctcgcggctttgcgcaaaggcggctatatcgaaatgaataaaggcaaactggtcgctatc

SEQ ID NO: 100858 - DNA, 75 bp, synthetic construct
  source 1..75: mol_type = other DNA
ggcgcggatgcgcggtatctttgtcgccgaacgtatcgccagcaacatggtaaaaattgtccaccatcaggcggt

SEQ ID NO: 100859 - DNA, 75 bp, synthetic construct
  source 1..75: mol_type = other DNA
tggattttggctgaaggttgaaggtgattccatgacctcacctgtaggtcaaagcatccctgaaggtcatatggt

SEQ ID NO: 100860 - DNA, 75 bp, synthetic construct
  source 1..75: mol_type = other DNA
cttatcggtattacccaggctccttatattatggggctggctgatggtttaatgaaaaacgatataccatacaaa

SEQ ID NO: 100861 - DNA, 75 bp, synthetic construct
  source 1..75: mol_type = other DNA
atccagctatctaaaaggtgatgatccgctgaaaggtggggcaatggggggaatgtcgtcaggattaggatatgg

SEQ ID NO: 100862 - DNA, 75 bp, synthetic construct
  source 1..75: mol_type = other DNA
aaaacatcaccctctggtttttatcggtaggaatgatccacgtaagccgatcagtaaagaaagcattaaccaagt

SEQ ID NO: 100863 - DNA, 75 bp, synthetic construct
  source 1..75: mol_type = other DNA
cactgaaacaaaaacttcgccataacctggaagcgcgtcttgatgcagaggttgatgccattctggatgagctgc

SEQ ID NO: 100864 - DNA, 75 bp, synthetic construct
  source 1..75: mol_type = other DNA
atgggaagacgaaggaaaaatcccgaacacgaaaaattaccgccaaaggtataccccaataaatatagttatgta

SEQ ID NO: 100865 - DNA, 75 bp, synthetic construct
  source 1..75: mol_type = other DNA
ttcaacacctctgcccagccacagaaaaccaaccttcgccttttacccgacatggtccatcagtaaaaggtgcgt

SEQ ID NO: 100866 - DNA, 75 bp, synthetic construct
  source 1..75: mol_type = other DNA
gaaatattcactatcatcttctgtcgccgaaaaaggggactttgggtataccattggcgcgaatagcggtgaaaa

SEQ ID NO: 100867 - DNA, 75 bp, synthetic construct
  source 1..75: mol_type = other DNA
agcattttggccctacccaggtgctgcacaatattgatttaaacattacccagggcgaagtcgtggtcattatcg

SEQ ID NO: 100868 - DNA, 75 bp, synthetic construct
  source 1..75: mol_type = other DNA
gtaagcggtacgaacaaccagcgttgtgtgaatcatatttctgaaccggataccgaaattccgccgggattcagg

SEQ ID NO: 100869 - DNA, 75 bp, synthetic construct
  source 1..75: mol_type = other DNA
cgtgatggaccgcatgaccatgaacggtggtcgctgggtgaattttaactgggagagctggcgcccgaatgttgg

SEQ ID NO: 100870 - DNA, 75 bp, synthetic construct
  source 1..75: mol_type = other DNA
acaggtaccatttctgtcaatctagcggccggtaaaaatgaaggtattgccggcttcgagaaagtggatatgact

SEQ ID NO: 100871 - DNA, 75 bp, synthetic construct
  source 1..75: mol_type = other DNA
gttcatcaggggcaagcaactacatcaatcgaaccggtgatattctggtttattatggtacgaaagaggatatcg

SEQ ID NO: 100872 - DNA, 75 bp, synthetic construct
  source 1..75: mol_type = other DNA
ttgtcgatggcctgaaggttaacgatccgaaagttgacgagcgtctgattcgccaggaagcgggtatggtgttcc

SEQ ID NO: 100873 - DNA, 75 bp, synthetic construct
  source 1..75: mol_type = other DNA
tttgagcgtgaggtgaaaaatgcgatgcgcagatggcgttatgagccgggtaagccaggcagtgggattgtggtg

SEQ ID NO: 100874 - DNA, 75 bp, synthetic construct
  source 1..75: mol_type = other DNA
tcatgcccagtatctcgatggtcgccgtgaaatgatgcaatggtacgctgactacattgattcactttctgagca

SEQ ID NO: 100875 - DNA, 75 bp, synthetic construct
  source 1..75: mol_type = other DNA
ccttactgacttttgtgcgttccagtgagttacgtttcgcgcgttgggatgagttcgacttcgataaagcccttt

SEQ ID NO: 100876 - DNA, 75 bp, synthetic construct
  source 1..75: mol_type = other DNA
atgaatttgtggcatttattcttcataatcgtactggccgagtaaaagtgtggggaaacgggaaagagtttgact

SEQ ID NO: 100877 - DNA, 75 bp, synthetic construct
  source 1..75: mol_type = other DNA
agcaggttgataatatggtcatggattatcgttcggaaattgatacggtgagtaaaaatattcgaaacaatgaag

SEQ ID NO: 100878 - DNA, 75 bp, synthetic construct
  source 1..75: mol_type = other DNA
gcctgccatttcaagcgcatgcaccagaacatcgtcgacaaaatcgagtatctgaactgctcgcgcgaatttttt

SEQ ID NO: 100879 - DNA, 75 bp, synthetic construct
  source 1..75: mol_type = other DNA
acagaccgtttgcactcagctgtcaatctttgcaggaaatcaggggaagatggcgctgtcatcaaaaccatgtac

SEQ ID NO: 100880 - DNA, 75 bp, synthetic construct
  source 1..75: mol_type = other DNA
gcgccaggcgtacgtactacgctgtttatcccggtgcgagcattgccgggttatggcgatggagaaattcaggcc

SEQ ID NO: 100881 - DNA, 75 bp, synthetic construct
  source 1..75: mol_type = other DNA
atgacacggatcgcggtcgagctttccttactgacttttgtgcgttccagtgagttacgtttcgcgcgttgggat

SEQ ID NO: 100882 - DNA, 75 bp, synthetic construct
  source 1..75: mol_type = other DNA
ccaatgggatttaatgtgccctttgccgtgtcacagaatagtgccgacgcctcttatttgcagcagatggcgctg

SEQ ID NO: 100883 - DNA, 75 bp, synthetic construct
  source 1..75: mol_type = other DNA
gctggctgttagcttgtatgactatattaatgatgcttcggcactggcctgcctcataaatttgttgctgaaccc

SEQ ID NO: 100884 - DNA, 75 bp, synthetic construct
  source 1..75: mol_type = other DNA
ctgaatacaatcctgcccccgatctcgctacagccctcgcaacaccaaagaaaacgcattttccttttctgactg

SEQ ID NO: 100885 - DNA, 75 bp, synthetic construct
  source 1..75: mol_type = other DNA
atttgtgccaggaaacccatgcgtaggcgtcgataaataccctaaacctcagcgcgaccgatacattacggatga

SEQ ID NO: 100886 - DNA, 75 bp, synthetic construct
  source 1..75: mol_type = other DNA
gtcgcgtccggcatcaccgtttgaaaatacggcactcgcgcgcccgacatcaagtacggcaacggctgcaaccag

SEQ ID NO: 100887 - DNA, 75 bp, synthetic construct
  source 1..75: mol_type = other DNA
agtctaaagcagatcgctggtccctacgctaccgtgcagaaatcattgacacctttgaaaaagacatcttcccct

SEQ ID NO: 100888 - DNA, 75 bp, synthetic construct
  source 1..75: mol_type = other DNA
ctcaagtgctgttaaatggcgatgatggcgcggttcaactactaagtggcactgttaacggtgctacagcgcagg

SEQ ID NO: 100889 - DNA, 75 bp, synthetic construct
  source 1..75: mol_type = other DNA
atgttcaaatcgaccctggcggcgatggctgctgttttcgctctttctgctctttctcccgcagcaatggcagcg

SEQ ID NO: 100890 - DNA, 75 bp, synthetic construct
  source 1..75: mol_type = other DNA
gtcagtgtattcaatccggcgcttctggaaatcgaccatcaatccggagtcgatattcgccagtttaatcgggca

SEQ ID NO: 100891 - DNA, 75 bp, synthetic construct
  source 1..75: mol_type = other DNA
atgaaaaatattgcgacaggcggcgttctggagcgtatccgtagactgaccccaccacatgtaaccgccccattc

SEQ ID NO: 100892 - DNA, 75 bp, synthetic construct
  source 1..75: mol_type = other DNA
cgtcaaaatctggcaacagcaggcacccggatcagcactctggaaaatcaggtaagcgaactggttgcacttgtc

SEQ ID NO: 100893 - DNA, 75 bp, synthetic construct
  source 1..75: mol_type = other DNA
gacgcgctaaggcacaagacaagccctacaccctcaatgatggacaaggcttatccttactcataaatcccgatg

SEQ ID NO: 100894 - DNA, 75 bp, synthetic construct
  source 1..75: mol_type = other DNA
attgagccagttattgaattgtataacgacgtggtatgggcgtcgttcaacacactgcacaataaaattaatccg

SEQ ID NO: 100895 - DNA, 75 bp, synthetic construct
  source 1..75: mol_type = other DNA
cgcttgattaatcgtctgcagcaattcgttccggatgccttacccgtggtgcgtaaagccagctggcactgcagg

SEQ ID NO: 100896 - DNA, 75 bp, synthetic construct
  source 1..75: mol_type = other DNA
gccgttatattttccctgtatgtcgcctgtcactttaagcgcatgcataagaacatcgtcgaccgaatcgaatat

SEQ ID NO: 100897 - DNA, 75 bp, synthetic construct
  source 1..75: mol_type = other DNA
ctgcacttttggaacgttacactgtctctgcaccttataaagcgggtgccgggattggcgtcctgaaattcgcac

SEQ ID NO: 100898 - DNA, 75 bp, synthetic construct
  source 1..75: mol_type = other DNA
agcaaaacgtgatgacgctaaaaaattgttagtgcagggcattgatcctaaagccgaacagaaagaagctcaggc

SEQ ID NO: 100899 - DNA, 75 bp, synthetic construct
  source 1..75: mol_type = other DNA
catctggaagtggaagacgatcgtcttctgctgattaaaggccgctacgaaggtattggcggtttcccgatcggc

SEQ ID NO: 100900 - DNA, 75 bp, synthetic construct
  source 1..75: mol_type = other DNA
cgcttgattgatcgtctgcagcaattcgttccggatgccttacccgtggttcgtaaagccagctggcactgcagt

SEQ ID NO: 100901 - DNA, 75 bp, synthetic construct
  source 1..75: mol_type = other DNA
ttcttgagcgtatccgtaagctggccccgcagcatgtaactgcggcgtaccggacagtggacgagtggcgggagt

SEQ ID NO: 100902 - DNA, 75 bp, synthetic construct
  source 1..75: mol_type = other DNA
cgcttgattgatcgtctgcagcaattcgttccggatgccttacccgtggtacgtaaagccagctggcactgcagg

SEQ ID NO: 100903 - DNA, 75 bp, synthetic construct
  source 1..75: mol_type = other DNA
ctccctgcgtggttattacatcacccttgatggcctgatgatgcttcagcttgggttaagtctacgcacaatgcg

SEQ ID NO: 100904 - DNA, 75 bp, synthetic construct
  source 1..75: mol_type = other DNA
cctggcagattctgtttgctatggtgctgggcattctcctgggaagctacctgcactaccatagcgacagccgcg

SEQ ID NO: 100905 - DNA, 75 bp, synthetic construct
  source 1..75: mol_type = other DNA
gaatcgagttcgtcagtcaagaagataaaacaatatgcattgcctttgctgatgaacgaggagtcgctctttttg

SEQ ID NO: 100906 - DNA, 75 bp, synthetic construct
  source 1..75: mol_type = other DNA
gcagacgccaccgctgacaaatcagcagactacacgaaagaatcattggtaacttacaaatctgtttctttctct

SEQ ID NO: 100907 - DNA, 75 bp, synthetic construct
  source 1..75: mol_type = other DNA
cttacgcaggctgaggaagagtctacccgacagaaagtggcgtttatccgtcagcttaaagagcaggcaacccgc

SEQ ID NO: 100908 - DNA, 75 bp, synthetic construct
  source 1..75: mol_type = other DNA
cactctgaaaatggctaaccatctgtcagaaatcgcagcagcaggcgaaaaggcacaacagaagtcccgggataa

SEQ ID NO: 100909 - DNA, 75 bp, synthetic construct
  source 1..75: mol_type = other DNA
gcatgttccgcgatacgctagaactggataagaccacgttcgacatggtcacgacgttaaaaagcgtctacctac

SEQ ID NO: 100910 - DNA, 75 bp, synthetic construct
  source 1..75: mol_type = other DNA
atgtctggaaatataggggcaaatccaagcacaactgttcatgccgaaactaacaaactggtgattgagtctggc

SEQ ID NO: 100911 - DNA, 75 bp, synthetic construct
  source 1..75: mol_type = other DNA
aggaaacagtgcctgaagcagttatgggaaaacagcagtatgccatctgacgtgtatcagcagttctgcctgaca

SEQ ID NO: 100912 - DNA, 75 bp, synthetic construct
  source 1..75: mol_type = other DNA
cagctatttaatccacgatagctcagttattattgatccagctcccgcactcaatgttctaacggcaggaagtta

SEQ ID NO: 100913 - DNA, 75 bp, synthetic construct
  source 1..75: mol_type = other DNA
gtcccggcgcatctgcttcagactatattgaacagggagcggacatcacttttacggcatcagtaaaggagcccg

SEQ ID NO: 100914 - DNA, 75 bp, synthetic construct
  source 1..75: mol_type = other DNA
tttgaccgaagcagttgaatatttcgttggtctaggatgtcgtatttttaacttatcacttggcaatgcaaatgc

SEQ ID NO: 100915 - DNA, 75 bp, synthetic construct
  source 1..75: mol_type = other DNA
tcattggtgttatggctttagctcttacagggtgcgcaagatcaactgatttcgttaagttagctgataaaaatt

SEQ ID NO: 100916 - DNA, 75 bp, synthetic construct
  source 1..75: mol_type = other DNA
cgaaaaccagcaagctcataaggataggcaagatagcatacataagcaggaggatgatgttcagaatgaacacac

SEQ ID NO: 100917 - DNA, 75 bp, synthetic construct
  source 1..75: mol_type = other DNA
catttacaggccgtgacgttgctgtattctttgctatcgcttgccctaatgccaaaccggaaactggagcgtaca

SEQ ID NO: 100918 - DNA, 75 bp, synthetic construct
  source 1..75: mol_type = other DNA
ttcagggggagatttggacgtaactatcaaggaagaagatggtagcgaacaacgattcacccaaccttacgccac

SEQ ID NO: 100919 - DNA, 75 bp, synthetic construct
  source 1..75: mol_type = other DNA
cagaaaatgcgcgaggaacaggcgcaggccatggctctggcggaggctcaggataaagcagctgctgcgttttat

SEQ ID NO: 100920 - DNA, 75 bp, synthetic construct
  source 1..75: mol_type = other DNA
aaatccacaaccagaaagtacttaaacgccacgttattaaccctggcgaaacaactggtgcgcagccttacgtct

SEQ ID NO: 100921 - DNA, 75 bp, synthetic construct
  source 1..75: mol_type = other DNA
acattgtcagcagaccatccggatacgtgacaatattccgctgctctcctggctgatgctcaaagggcgctgccg

SEQ ID NO: 100922 - DNA, 75 bp, synthetic construct
  source 1..75: mol_type = other DNA
tgtcaggccggaacgcagagaaatacagttgattaaacgtctgcagcaattcgtcccggatgccttacccgtggt

SEQ ID NO: 100923 - DNA, 75 bp, synthetic construct
  source 1..75: mol_type = other DNA
cgtggataacgtacaaatcctctcagccaagcctgcgaacatgtttgagcgtgaggtgaaaaatgcgatgcgcag

SEQ ID NO: 100924 - DNA, 75 bp, synthetic construct
  source 1..75: mol_type = other DNA
tctggaattgccagagagggagtccgagataagggcagcgcggcgcaaaaccgctggaaaaaccatttgcgcact

SEQ ID NO: 100925 - DNA, 75 bp, synthetic construct
  source 1..75: mol_type = other DNA
agacgcgaattctggctgaacggcaaattcaggaaaccgaaatcgagcgcgagcaggccgttcgttccagaaaag

SEQ ID NO: 100926 - DNA, 75 bp, synthetic construct
  source 1..75: mol_type = other DNA
ttcgtgaccacattgccccggtgatgggaaatctgctgcttaatgaaatcacaccccgccacgtcacccatcttc

SEQ ID NO: 100927 - DNA, 75 bp, synthetic construct
  source 1..75: mol_type = other DNA
ctcacatcaactcggactcagcggtacggcgctggaaagaaataacctttcatggaatttaatgcagtcctataa

SEQ ID NO: 100928 - DNA, 75 bp, synthetic construct
  source 1..75: mol_type = other DNA
tggtgacgctggcgggccgcctgctggtcgctgctatactgatttttgtaatgctaccgaccatcgtggtgttta

SEQ ID NO: 100929 - DNA, 75 bp, synthetic construct
  source 1..75: mol_type = other DNA
tgcttgccgagctgttccgccgcgctgaccagcgagcgggagagttggcggcaattgctgatcaggcaaggatta

SEQ ID NO: 100930 - DNA, 75 bp, synthetic construct
  source 1..75: mol_type = other DNA
taactacagccaaaattcccagaggctgaattatggtatcagagggggaattctggcacacagcgaaggggtaac

SEQ ID NO: 100931 - DNA, 75 bp, synthetic construct
  source 1..75: mol_type = other DNA
cgagagctgcattgaagtattccatgaagctgaaaccggtctgaatcacaccgatttccaccgtaatcaatggga

SEQ ID NO: 100932 - DNA, 75 bp, synthetic construct
  source 1..75: mol_type = other DNA
gatgctcaaagggcgctgccgtgattgtcaggcgaaaatcagcaagcgttatccgctggtggagttattgacggc

SEQ ID NO: 100933 - DNA, 75 bp, synthetic construct
  source 1..75: mol_type = other DNA
tgtacttatattctggaattgccagagagggaatcaaagataagcgcagcgcggcgcaaaaccgctggaaaaacc

SEQ ID NO: 100934 - DNA, 75 bp, synthetic construct
  source 1..75: mol_type = other DNA
ttgggtcggggctggacttaagcagcatccttgacagtctggaggcggcagaaaaatctaccctgacgccgatat

SEQ ID NO: 100935 - DNA, 75 bp, synthetic construct
  source 1..75: mol_type = other DNA
gcagtggaatggcggcgcatttgactggattagcgacagcgactcccgtaccggtccggtactcgaactgatcgc

SEQ ID NO: 100936 - DNA, 75 bp, synthetic construct
  source 1..75: mol_type = other DNA
cgctcgtgatgcgtcgggcgagatatcggcgaaggcgttgcgcgcccgcccgctggccatccgcttgcgcgacgg

SEQ ID NO: 100937 - DNA, 75 bp, synthetic construct
  source 1..75: mol_type = other DNA
ccacgacgaactggatctgcctcctggcgtcgccaaatttaaattgggcggtggccatggtggtcacaatggact

SEQ ID NO: 100938 - DNA, 75 bp, synthetic construct
  source 1..75: mol_type = other DNA
gatgatttctggcaaaccggtaatcgccgaagtcgtgtggaaggaacgttaactcagtcactgggcagagattat

SEQ ID NO: 100939 - DNA, 75 bp, synthetic construct
  source 1..75: mol_type = other DNA
atgtccggtgccgagtgtctggcacacggatttgcagaccaggtgacgccagccgttaaggcaatggcatgtatt

SEQ ID NO: 100940 - DNA, 75 bp, synthetic construct
  source 1..75: mol_type = other DNA
ggaaaattacctgcaggctggtatcaggttcctgtgacaaaggaaaccctgaaggcccctgcgggtctgtcttca

SEQ ID NO: 100941 - DNA, 75 bp, synthetic construct
  source 1..75: mol_type = other DNA
ggttcccgccgtaccggtattatcgttgtttcaatgctgattgcgatatttgccgtagggtttgcgcttcgacat

SEQ ID NO: 100942 - DNA, 75 bp, synthetic construct
  source 1..75: mol_type = other DNA
accgactcggtctgacccgcgaattactcgatctactggttctaagaggcatcgatttacgcggtattgagattg

SEQ ID NO: 100943 - DNA, 75 bp, synthetic construct
  source 1..75: mol_type = other DNA
cggttctgaaagttcttctgacaccttacgcctttgccgggaaaccgtctggcaggacgggccaggagataccct

SEQ ID NO: 100944 - DNA, 75 bp, synthetic construct
  source 1..75: mol_type = other DNA
tctgattctatgagttacgctgtgctagttgccgcaactctatttatggggatagggttgcagattgcgtggttc

SEQ ID NO: 100945 - DNA, 75 bp, synthetic construct
  source 1..75: mol_type = other DNA
tgctttatgaagtcgataccggtatgatcatgattaatggagaggaagagtcatccattaagttatctaacccgg

SEQ ID NO: 100946 - DNA, 75 bp, synthetic construct
  source 1..75: mol_type = other DNA
ctgcgcctgattgataacgtctccgacacgctgatcctgcgtccgctgatttcttacgacaaagagcacatcatc

SEQ ID NO: 100947 - DNA, 75 bp, synthetic construct
  source 1..75: mol_type = other DNA
ccggaaaccgtctgcacctggtacacccggtggagcgacgagtttgacgcggcagagcttgcagcaccgttctgg

SEQ ID NO: 100948 - DNA, 75 bp, synthetic construct
  source 1..75: mol_type = other DNA
gaagaggctcgccagcgcggcgcacgtctgccatcgatgccacacgtccggacattcctgcgcctgctgacaggc

SEQ ID NO: 100949 - DNA, 75 bp, synthetic construct
  source 1..75: mol_type = other DNA
gatatcactttggtctggacgctgcacgatcactggagcgttaccggacgctgcgcctttaccgacggatgcgaa

SEQ ID NO: 100950 - DNA, 75 bp, synthetic construct
  source 1..75: mol_type = other DNA
aacaagagtgttgggcattggagatgcttggtagggttggcgctttaacgcagtgccctcatcatgagggcactt

SEQ ID NO: 100951 - DNA, 75 bp, synthetic construct
  source 1..75: mol_type = other DNA
ccgatctcttgcggtaaaaggagaagatgagggtttccgtacaggcatggttgctgcttatcgcaagatggcgca

SEQ ID NO: 100952 - DNA, 75 bp, synthetic construct
  source 1..75: mol_type = other DNA
tggctgcccgccgatcccggatgtgatgagcgccatcattacttacatggtgacctttgatcgtctgccagatgt

SEQ ID NO: 100953 - DNA, 75 bp, synthetic construct
  source 1..75: mol_type = other DNA
tatgccggaaacggaaacataacaggtgatgcaattcgtcaggggctttattcccgtcttgggtatgaacgccct

SEQ ID NO: 100954 - DNA, 75 bp, synthetic construct
  source 1..75: mol_type = other DNA
tgacggagcgggaagtctgggtacatttacggcaacggcaacaactgttaaagcaactgcgttagatggtattga

SEQ ID NO: 100955 - DNA, 75 bp, synthetic construct
  source 1..75: mol_type = other DNA
gactggcaggtggtggcaaatggtgatgtcagcgttgaactgcgtgatgcggatcaacaggtggttgcaactgga

SEQ ID NO: 100956 - DNA, 75 bp, synthetic construct
  source 1..75: mol_type = other DNA
gcgaaagtttggcgcttgatgccttagtcttaggtgaacactcatcccgtctggcatggttagcaacggttatcc

SEQ ID NO: 100957 - DNA, 75 bp, synthetic construct
  source 1..75: mol_type = other DNA
ccagagtggtaaagaaacaacatcgtatagtaatgttgctaactcacaggataatgggccagacggaacaaaaac

SEQ ID NO: 100958 - DNA, 75 bp, synthetic construct
  source 1..75: mol_type = other DNA
gaaagataataatattaccacatatatcagaagaaaatattttggattcatctttcaggattctctgattaatgt

SEQ ID NO: 100959 - DNA, 75 bp, synthetic construct
  source 1..75: mol_type = other DNA
tttttttctagttttattaaacgcaaaagaattgaatcaaggatatctgagatttctattgctatagggaaaaat

SEQ ID NO: 100960 - DNA, 75 bp, synthetic construct
  source 1..75: mol_type = other DNA
aagattgcgagctggtcacccagatcttccacaaaaccgaaatcatgccgtttttactcgaacgggcgacggtta

SEQ ID NO: 100961 - DNA, 75 bp, synthetic construct
  source 1..75: mol_type = other DNA
ggtgtctacgcgtgggtaaaaagttcgctgggcggacgttgggcatttattactgcctatacctactggttcgta

SEQ ID NO: 100962 - DNA, 75 bp, synthetic construct
  source 1..75: mol_type = other DNA
gtcttgcgaaagcttttaatgaggtatgtgagaataaacctgtaatagggctcatgaactatttaatgcgggatt

SEQ ID NO: 100963 - DNA, 75 bp, synthetic construct
  source 1..75: mol_type = other DNA
ctcggctttgcgtggtggaaatacagtaaatatataaagggattaacggctgaagagcgccatattgaagcgacg

SEQ ID NO: 100964 - DNA, 75 bp, synthetic construct
  source 1..75: mol_type = other DNA
tcaggccgatcctgtggcttgggtcagtttgcaggacattcagggtaaagatgataaatggtcagtaccgctaac

SEQ ID NO: 100965 - DNA, 75 bp, synthetic construct
  source 1..75: mol_type = other DNA
gaagcgattctggcggacttgcctccggtgcgcgaaacccagggcaagccgaaaatcgcggtggtggcgcatgac

SEQ ID NO: 100966 - DNA, 75 bp, synthetic construct
  source 1..75: mol_type = other DNA
gtgtcacgctgaaactggataaagccagttatcgccctggcgacaccattaagttgcatatcgccgcgccaacgg

SEQ ID NO: 100967 - DNA, 75 bp, synthetic construct
  source 1..75: mol_type = other DNA
cggtgccgtgtgggaatccgcccaccttaccgggcgccggtgccgtgtggaaatccgcccaccttgccgcgcgcc

SEQ ID NO: 100968 - DNA, 75 bp, synthetic construct
  source 1..75: mol_type = other DNA
tgctgtgtggaaatccgcccaccttaccgggcgccggtgctgtgtggaaatccgcccatcttcatgacaaaaatt

SEQ ID NO: 100969 - DNA, 75 bp, synthetic construct
  source 1..75: mol_type = other DNA
atcagttttcgctgccaataatgaaaccagcaagtcggtcactttcccaaagtgtgaaggtctggatgctgccgg

SEQ ID NO: 100970 - DNA, 75 bp, synthetic construct
  source 1..75: mol_type = other DNA
atgtgcatataaacctatctgcaatggcggttgtcctaagcatcgtattactaaagtaaacaatgagactgtttc

SEQ ID NO: 100971 - DNA, 75 bp, synthetic construct
  source 1..75: mol_type = other DNA
ggcgtttattcccgccgatcaggttccccgcgctcagcatattttgcagggtgaacaaggctttcgcctgacgcc

SEQ ID NO: 100972 - DNA, 75 bp, synthetic construct
  source 1..75: mol_type = other DNA
tcttcctgatggcgatgttgaccgtgagttgcgcgaaagatttacccgaaaaaactgcagtaacagacacggctt

SEQ ID NO: 100973 - DNA, 75 bp, synthetic construct
  source 1..75: mol_type = other DNA
ctccacgagctttgctgcgggtaagaatgtcaatgttgagttcagcaaaggccatagcagcgctcagtactccgg

SEQ ID NO: 100974 - DNA, 75 bp, synthetic construct
  source 1..75: mol_type = other DNA
cagcctggagcaaagtggtggcgaagtgcagaacttactgaaccagatgcagcaggcgagcattaagcacataga

SEQ ID NO: 100975 - DNA, 75 bp, synthetic construct
  source 1..75: mol_type = other DNA
gacagcgtcgatgcgcagcgtggggatgctgacaaacctgaactatgaggctatgaaaacattgctcggcgagcg

SEQ ID NO: 100976 - DNA, 75 bp, synthetic construct
  source 1..75: mol_type = other DNA
acaggcttcttaaacaggccaatactgcggttgcgacattacaggactccgttgatctggagatggcaaccgacg

SEQ ID NO: 100977 - DNA, 75 bp, synthetic construct
  source 1..75: mol_type = other DNA
tgatgctgctattaacactctcctacattttactggcaggaacggcactggttggcggcgtgcaacctgcggacc

SEQ ID NO: 100978 - DNA, 75 bp, synthetic construct
  source 1..75: mol_type = other DNA
gaaacagaataccataagaaatttactatgttctgtttcatataatgaattaaaagaggcaagaaaaaaaagtca

SEQ ID NO: 100979 - DNA, 75 bp, synthetic construct
  source 1..75: mol_type = other DNA
aaaacaccgataaaaaaaaatattatgattggttgacgagtaattttaaagaattaagaagtaaaggaatatatc

SEQ ID NO: 100980 - DNA, 75 bp, synthetic construct
  source 1..75: mol_type = other DNA
tgagccaaatcttgaagacattgcgcggattatgcgggcgcttggtcgtcggcaattcactgttacacacgatgg

SEQ ID NO: 100981 - DNA, 75 bp, synthetic construct
  source 1..75: mol_type = other DNA
taaaattggcaccaaagggcagcatagctattttctgcgggcgaaagtcaactgcggcaagcatctgcgaaaagg

SEQ ID NO: 100982 - DNA, 75 bp, synthetic construct
  source 1..75: mol_type = other DNA
agggagatattaacgccaccaacggaagtaccgttattctgggaagtgaccgtgtctttactgacaagaatgacg

SEQ ID NO: 100983 - DNA, 75 bp, synthetic construct
  source 1..75: mol_type = other DNA
tggtattcccggcctgattgctgactacagcattaacgcccagacccgccacgacgcgcagagcggcgatgacag

SEQ ID NO: 100984 - DNA, 75 bp, synthetic construct
  source 1..75: mol_type = other DNA
atgaagcctatttttgttccgatgaccatctgaagcaactggccatcagggagttgcttcagcttgaactgacgc

SEQ ID NO: 100985 - DNA, 75 bp, synthetic construct
  source 1..75: mol_type = other DNA
atgtcagaaataaaatcgctggtcactgctgaagcagtgaaggatgtcctgcgctctgaagaagtcagaagcgca

SEQ ID NO: 100986 - DNA, 75 bp, synthetic construct
  source 1..75: mol_type = other DNA
gggcaagaacggataaagcggagctaattagtgatgacaagagatgctccagctatcatgcgaagctcacgcaat

SEQ ID NO: 100987 - DNA, 75 bp, synthetic construct
  source 1..75: mol_type = other DNA
gggattcaggcagaaactgtatgagggatggtatcagttacgcattgcgggcagggatgtatctgaacaggagct

SEQ ID NO: 100988 - DNA, 75 bp, synthetic construct
  source 1..75: mol_type = other DNA
tgatgcggagcaacaggtggttgcaactggacaaggcactagcgggactttgcaagtggtgaatccgcacctctg

SEQ ID NO: 100989 - DNA, 75 bp, synthetic construct
  source 1..75: mol_type = other DNA
tgaactggaaattttgtgggggcaaccgattaaagacgacaacgatcgcatcagagctgtaaattcgctgcatca

SEQ ID NO: 100990 - DNA, 75 bp, synthetic construct
  source 1..75: mol_type = other DNA
caaccgacttacgaaataagaataccagaaacaacgataagtgaaatgctatctgccaataactcaaaatcaggt

SEQ ID NO: 100991 - DNA, 75 bp, synthetic construct
  source 1..75: mol_type = other DNA
agacggcgcgggtgacagtgctgtttcagatggcgttgtgtctcagcctgacggtagcagtgagcctcagcctgg

SEQ ID NO: 100992 - DNA, 75 bp, synthetic construct
  source 1..75: mol_type = other DNA
tgcgggtgatgcaaacacgggtaatgtggggggcggaaacctggcggaacaagcattatcagccgctctctctta

SEQ ID NO: 100993 - DNA, 75 bp, synthetic construct
  source 1..75: mol_type = other DNA
cgttctggaatttctcttcattctcgctggaaaccgtcgctcaggagttattaggcgaaggaaaatctatcgata

SEQ ID NO: 100994 - DNA, 75 bp, synthetic construct
  source 1..75: mol_type = other DNA
ggattcaattctggatgaactgctgggcgcaccgactgttccggagccggaaggcattgcggatgacagtgctgt

SEQ ID NO: 100995 - DNA, 75 bp, synthetic construct
  source 1..75: mol_type = other DNA
aatgcagttcaaatattttttcatggatattgtgcaatttattggggttgttaaataaaggcgatgcttacgaac

SEQ ID NO: 100996 - DNA, 75 bp, synthetic construct
  source 1..75: mol_type = other DNA
ccgctaatagccgccttcaggcacattgggctgaactgtgggcgcaacgtaacatcttcaacgatcagcataacg

SEQ ID NO: 100997 - DNA, 75 bp, synthetic construct
  source 1..75: mol_type = other DNA
aaccaatggtattttattgaataatgaatggtgcgcctttctcaaagagcataagtttctggtcggtatttcaat

SEQ ID NO: 100998 - DNA, 75 bp, synthetic construct
  source 1..75: mol_type = other DNA
atggttaagccactggctgttgtcgcggttggcggcaatgcgctcattcaagacgatcaacacaatagtattccc

SEQ ID NO: 100999 - DNA, 75 bp, synthetic construct
  source 1..75: mol_type = other DNA
ccgacaaaccgatcattaaagtgccgggctgcccgccgatcccggatgtgatgagcgccatcattacttacatgg

SEQ ID NO: 101000 - DNA, 75 bp, synthetic construct
  source 1..75: mol_type = other DNA
aatcagcacagaaaaaacggatgatgccacaaaatggatgctgacagggtatcagaccgtctctgatgccgatgc

SEQ ID NO: 101001 - DNA, 75 bp, synthetic construct
  source 1..75: mol_type = other DNA
gaagatttctggcaaaccggaaaccgtcgcagccgtgtggaaggaacgttaacgcaatcgctgggcagagattat

SEQ ID NO: 101002 - DNA, 75 bp, synthetic construct
  source 1..75: mol_type = other DNA
tcaccacgctgaaaaaacgtagtcagaccccagggcaactcgccatcccggtgagggaaatcccgcgcggaaccg

SEQ ID NO: 101003 - DNA, 75 bp, synthetic construct
  source 1..75: mol_type = other DNA
agcagtacgagttgatagcattaaaagagttatcaactattgttcctaacgatctttttaaaccgataattgaac

SEQ ID NO: 101004 - DNA, 75 bp, synthetic construct
  source 1..75: mol_type = other DNA
agaaaagtgagtgatttaggtaagattaaagcttttctacaaagtgacgaaatatgtattgtcggaggatcaatg

SEQ ID NO: 101005 - DNA, 75 bp, synthetic construct
  source 1..75: mol_type = other DNA
taatagccgcaagggaaagaattaatgatatcttggtgtccgttggattgtcaaatattaataataatgtatcat

SEQ ID NO: 101006 - DNA, 75 bp, synthetic construct
  source 1..75: mol_type = other DNA
gccgcgcgcgcactttggtataaccagcaaccgatctgagttcggtccgcagaaaccgaaagagttcggcggcgg

SEQ ID NO: 101007 - DNA, 75 bp, synthetic construct
  source 1..75: mol_type = other DNA
tgacaggaaggttaaagtttcaccgacacttgatgtcccgttacctgaaaatattccaagtaattccaagtgtga

SEQ ID NO: 101008 - DNA, 75 bp, synthetic construct
  source 1..75: mol_type = other DNA
catgccagtgataacaccagtgagcagatctacatgctctctttatctgttcctttatcgggctggtggggtaat

SEQ ID NO: 101009 - DNA, 75 bp, synthetic construct
  source 1..75: mol_type = other DNA
cagaacgataaaacaaagtctaagcaacattttataaagctaaagactcttaacaagggggttgagaaaacatac

SEQ ID NO: 101010 - DNA, 75 bp, synthetic construct
  source 1..75: mol_type = other DNA
aatttctgtaaaaaccggacagttcgatatcattcgcgcttcagtgctgtccgttacgcctgatcagcgtattca

SEQ ID NO: 101011 - DNA, 75 bp, synthetic construct
  source 1..75: mol_type = other DNA
gcgggggactatatcgacattggtacgcctctttttggcggatcggttgtgccggtgacgggctttgttgaataa

SEQ ID NO: 101012 - DNA, 75 bp, synthetic construct
  source 1..75: mol_type = other DNA
gcggagtcaggagacctggctaaatttattggcgttagctcacttaatggctttatagacaaagacttagtcctg

SEQ ID NO: 101013 - DNA, 75 bp, synthetic construct
  source 1..75: mol_type = other DNA
tatttgcccgatgaatccgtttattgcagcgaaaaggatggcgaacaatttttgctggccgcgccagcgcatacg

SEQ ID NO: 101014 - DNA, 75 bp, synthetic construct
  source 1..75: mol_type = other DNA
atgagcgccatcattacttacatggtgacattcgatcgtctgccggatgtcgacagaatggggcgtccgctgatg

SEQ ID NO: 101015 - DNA, 75 bp, synthetic construct
  source 1..75: mol_type = other DNA
tcaactctgattaatagccagttccgcgaaatcgacgctggcggggttctcatcaccgggcgcatcggttactca

SEQ ID NO: 101016 - DNA, 75 bp, synthetic construct
  source 1..75: mol_type = other DNA
aacgaagagttattacttattgtctgcgtctgcagttcttatcggaacaggaacatccgctatacctctgattac

SEQ ID NO: 101017 - DNA, 75 bp, synthetic construct
  source 1..75: mol_type = other DNA
attacatcgaaacatagtgttgacctgacgcctgaacttgaaaaatatattaaagagtttgattttagtattttt

SEQ ID NO: 101018 - DNA, 75 bp, synthetic construct
  source 1..75: mol_type = other DNA
aggaatcagaagaaaccttccagaaatggacccgcaaaggtcgcctgtctgacttcaaaacggcataccgtgtgg

SEQ ID NO: 101019 - DNA, 75 bp, synthetic construct
  source 1..75: mol_type = other DNA
tcagttttctgtttcacttcctgcagcgtttggtggagataaatattttattgatggtgtatttcaacctttgag

SEQ ID NO: 101020 - DNA, 75 bp, synthetic construct
  source 1..75: mol_type = other DNA
ccaaagaaatcaaaaatatcatgcgcgatactggaacggcgcatttaatggcgatatcgggattgcacatcgctt

SEQ ID NO: 101021 - DNA, 75 bp, synthetic construct
  source 1..75: mol_type = other DNA
aagcactgcccgcaggttaacgttatcgataatgtgcccgcagagcccacgcatcatgatgtgcgccagctaatg

SEQ ID NO: 101022 - DNA, 75 bp, synthetic construct
  source 1..75: mol_type = other DNA
acgcagagtgaagatgaggggcttatcaccctctggcattacgatgcgtcggaccgtatcacccggcgcacggtg

SEQ ID NO: 101023 - DNA, 75 bp, synthetic construct
  source 1..75: mol_type = other DNA
ggtgtccagccagacgctgactaacctgcgcctgattgataacgtctccgacacgctgatcctgcgtccgctgat

SEQ ID NO: 101024 - DNA, 75 bp, synthetic construct
  source 1..75: mol_type = other DNA
ttcctgactccggaaaagtcaaaggagaaagtgtgtttgattttagcaaactgattcgggagattcgagtgatgg

SEQ ID NO: 101025 - DNA, 75 bp, synthetic construct
  source 1..75: mol_type = other DNA
ggtgcacttctgattgatgcatttattcagttaatacatgttaataatcagcgtggactgtttctttcctgtcag

SEQ ID NO: 101026 - DNA, 75 bp, synthetic construct
  source 1..75: mol_type = other DNA
ctaaagaaatcaaagatattatgcgcaatactggtacagcgcatttaatggctatatcgggattgcacatcgctt

SEQ ID NO: 101027 - DNA, 75 bp, synthetic construct
  source 1..75: mol_type = other DNA
cttattgctgaccgttcgttagccttactcttttgggcgttaaaaaatttacccgaaggatggatcaatattgct

SEQ ID NO: 101028 - DNA, 75 bp, synthetic construct
  source 1..75: mol_type = other DNA
caaagcccgcaagaagtttcccaaccagatgttcacggtttggggcggcaatctcattccagcgattgttatcct

SEQ ID NO: 101029 - DNA, 75 bp, synthetic construct
  source 1..75: mol_type = other DNA
tcagcttgagtggctggaacgtaaacttgccgatgcgccagaacgccatacgttgctgctgctgcaccatcatcc

SEQ ID NO: 101030 - DNA, 75 bp, synthetic construct
  source 1..75: mol_type = other DNA
ttcgtgcgccctgcgtctggctgccgggcaaccacgatttccagcccgcgatgtacagcgcgttacaggatgcgg

SEQ ID NO: 101031 - DNA, 75 bp, synthetic construct
  source 1..75: mol_type = other DNA
gccagaagggtggatcaacattgctgaacgttggcaatggctatcattggatttgcccctatatttccagacatc

SEQ ID NO: 101032 - DNA, 75 bp, synthetic construct
  source 1..75: mol_type = other DNA
aatcccccggctcatatttatgccggtaacggtaattttgtgggggacgggatccgccaggcgctgatggcgcgc

SEQ ID NO: 101033 - DNA, 75 bp, synthetic construct
  source 1..75: mol_type = other DNA
ctggtaaatattgatgcaccggaaaagaaacaggattatggtcggtggtcgacagacacgatgaaatcactggtt

SEQ ID NO: 101034 - DNA, 75 bp, synthetic construct
  source 1..75: mol_type = other DNA
gtactggtaccgacggcgatggagtctgttgctaaccaggtcattcgctcctcaagtgtcaagggggctgacatt

SEQ ID NO: 101035 - DNA, 75 bp, synthetic construct
  source 1..75: mol_type = other DNA
aaggctctacttgtcaaaaagcgaaccgccaaaccccaccggccaaagcactaccgtctggtaaagaccggtgag

SEQ ID NO: 101036 - DNA, 75 bp, synthetic construct
  source 1..75: mol_type = other DNA
actttccggaaaattcaagatcggcatgggtacaacacggggttacagtaacttcatctctctttcaacgggtag

SEQ ID NO: 101037 - DNA, 75 bp, synthetic construct
  source 1..75: mol_type = other DNA
cctgcgtgagagcggaaaggattttaccctcgtcagtgtggatttaatgaaaaaacgtctcgaaaacggtgtaat

SEQ ID NO: 101038 - DNA, 75 bp, synthetic construct
  source 1..75: mol_type = other DNA
cgattatctggcggatctgtttaagattgataactcccacggcgggcgtttcaaaaccgtgctgttaaccttcct

SEQ ID NO: 101039 - DNA, 75 bp, synthetic construct
  source 1..75: mol_type = other DNA
cgcctcatgggtgctacccgctggatttaagggtgctcgtgatgcccgttacgccatgtgggtttctatgttgag

SEQ ID NO: 101040 - DNA, 75 bp, synthetic construct
  source 1..75: mol_type = other DNA
cactgaaccagatagtcgatcgcagaacggcctcgatgcacagcgtcgggatgctgacgaacctgaaccatgcgg

SEQ ID NO: 101041 - DNA, 75 bp, synthetic construct
  source 1..75: mol_type = other DNA
cgacaaccgatcgcgccagcatctgaatgacgtcggtcttactgcctgggactgtgtgatcattaaccaaatcat

SEQ ID NO: 101042 - DNA, 75 bp, synthetic construct
  source 1..75: mol_type = other DNA
aaatctggttggttgccgggatcaccgatatgagaaatggcttcaacggcctggctgcgaaggtacagacggtgc

SEQ ID NO: 101043 - DNA, 75 bp, synthetic construct
  source 1..75: mol_type = other DNA
tggctcaccggtcacggcgatatcagcctgctggatttgtccacctgtacctttaacaccgctgaaggaagcgac

SEQ ID NO: 101044 - DNA, 75 bp, synthetic construct
  source 1..75: mol_type = other DNA
accctcgtcagtgtggatttaatgaaaaaacgtctcgaaaacggtgacgattactttgccgttaaccctaagggg

SEQ ID NO: 101045 - DNA, 75 bp, synthetic construct
  source 1..75: mol_type = other DNA
tgcgttcggctctgaaatatgcggtactttgcggcggcggagcgaatcaccgcctgggactttctgacgccttcc

SEQ ID NO: 101046 - DNA, 75 bp, synthetic construct
  source 1..75: mol_type = other DNA
gggcaatgacatttgggcgtttgtgggaaaaatttctcgccagcgcctattacagcgatcttagtcccagaacgc

SEQ ID NO: 101047 - DNA, 75 bp, synthetic construct
  source 1..75: mol_type = other DNA
tatgacgataaaggccgtctgacgggcgaacggcagactgacggagaagacggaccgcatcccgacgggtgtgat

SEQ ID NO: 101048 - DNA, 75 bp, synthetic construct
  source 1..75: mol_type = other DNA
attgtatgggaagcccgatgcgccagagttgtttctgaaacatggcaaaggtagcgttgccaatgatgttacaga

SEQ ID NO: 101049 - DNA, 75 bp, synthetic construct
  source 1..75: mol_type = other DNA
cgaacgcactgcgcttaattttgtgcaaaccctttcaggagttgccagtaaggtacgccactatgtcgaattact

SEQ ID NO: 101050 - DNA, 75 bp, synthetic construct
  source 1..75: mol_type = other DNA
taaaaatattgccgtattgtcttcaggtgttgtgcttgcgcataacgagtcagctgatatcaccaaagaagtcat

SEQ ID NO: 101051 - DNA, 75 bp, synthetic construct
  source 1..75: mol_type = other DNA
acgatgtcaccattacctggcatgtggatgacggtgatgtcatcaacgccaatcaactccttttcgaactcgaag

SEQ ID NO: 101052 - DNA, 75 bp, synthetic construct
  source 1..75: mol_type = other DNA
taccatccccattcgcaaaatggaaggggaagatcgacttaggtggtgaaagtattgattgctatgtgcttgaca

SEQ ID NO: 101053 - DNA, 75 bp, synthetic construct
  source 1..75: mol_type = other DNA
catgttaacacgaaggcgcatattgagtgcgtagaggcagcgattgctcaaggtttcccacaagaacgcacgcac

SEQ ID NO: 101054 - DNA, 75 bp, synthetic construct
  source 1..75: mol_type = other DNA
gaagcgtcacaggcgactcaaacagcggttaacattgccgggaaggaatgcgacctcgaggagcaatatcagctt

SEQ ID NO: 101055 - DNA, 75 bp, synthetic construct
  source 1..75: mol_type = other DNA
agacggggcatgcgtacagcgaacaggggctggcgacccgtcaggagccggacggtctgccgccggtggagtggc

SEQ ID NO: 101056 - DNA, 75 bp, synthetic construct
  source 1..75: mol_type = other DNA
aatgcaacaacccattaatgatcacattcgaatgttcagtcagtgaactggtggacatgaaaaaagccatcaaca

SEQ ID NO: 101057 - DNA, 75 bp, synthetic construct
  source 1..75: mol_type = other DNA
ctttgaaactgacaagcgcaagttgatgagcgcgctcaatcagatggatgcgctggtgttcagttctcgcgtcga

SEQ ID NO: 101058 - DNA, 75 bp, synthetic construct
  source 1..75: mol_type = other DNA
cggtgctgtgtgggaatccgcccaccttaccgggcgccggtgctgtgtggaaatccgcccatcttcatgacaaaa

SEQ ID NO: 101059 - DNA, 75 bp, synthetic construct
  source 1..75: mol_type = other DNA
gcatcccgactatcgtccgccgctcaagtgggtttctattgatattgaaaccacccgccacggtgagctgtactg

SEQ ID NO: 101060 - DNA, 75 bp, synthetic construct
  source 1..75: mol_type = other DNA
atgtcagaaattacatccctggtcactgctgaagcagtgaaggacgtcctgcgctctgaagaagtccggagcgca

SEQ ID NO: 101061 - DNA, 75 bp, synthetic construct
  source 1..75: mol_type = other DNA
ttgttagcctcgcgcaggccatcctctaccggggtgccggattcgaaatcgtctggccgcagttcctgacgctga

SEQ ID NO: 101062 - DNA, 75 bp, synthetic construct
  source 1..75: mol_type = other DNA
ctcaccagtggttgtttctctaccagcttgaacaactgctcgctgaacgcaaatctgccgatccggaaacctcct

SEQ ID NO: 101063 - DNA, 75 bp, synthetic construct
  source 1..75: mol_type = other DNA
gaagatagcattaatggcctgaaagattttgataaatataaaaagcatatattagcgtcaggaattgactgcaaa

SEQ ID NO: 101064 - DNA, 75 bp, synthetic construct
  source 1..75: mol_type = other DNA
ctggattttttccgtaaagttattcactatcaacaacgctatgcaggccaaaaacgtatttttaatgcattacaa

SEQ ID NO: 101065 - DNA, 75 bp, synthetic construct
  source 1..75: mol_type = other DNA
gacaatgcttttatgggggattacattttttttgataaaaaagtagatataaaagataataatcttacaacgtat

SEQ ID NO: 101066 - DNA, 75 bp, synthetic construct
  source 1..75: mol_type = other DNA
gcggcagaacgccgtgctgaagtcacgaaaggggcaagcgatgtacaggaagacgttaagcgtatgggcgatgac

SEQ ID NO: 101067 - DNA, 75 bp, synthetic construct
  source 1..75: mol_type = other DNA
ctggaaaaactcagtgcctctgcggagcttcgacagcagtctttcgctgttgctgctgatgccactgagagctgt

SEQ ID NO: 101068 - DNA, 75 bp, synthetic construct
  source 1..75: mol_type = other DNA
gcttaccgcatttttactatggaataatagtcaacccagatcatttttcaaagattacagaactgttgcacaaat

SEQ ID NO: 101069 - DNA, 75 bp, synthetic construct
  source 1..75: mol_type = other DNA
tgacgcgtacgtgctggcgcttcccgccgggcttccggtgcgttacgcctcggtactgacggtcatcaacgcgct

SEQ ID NO: 101070 - DNA, 75 bp, synthetic construct
  source 1..75: mol_type = other DNA
gtgaactgtgcgaagtggacctcctggttcttgacgaaattggcatccagcgtgagacgaaaaacgagcaggtgg

SEQ ID NO: 101071 - DNA, 75 bp, synthetic construct
  source 1..75: mol_type = other DNA
attccgtcaatggataaatcaaaattgactgagaatacgctacagctcgcaattatcagccgcattaaactgtac

SEQ ID NO: 101072 - DNA, 75 bp, synthetic construct
  source 1..75: mol_type = other DNA
tgttaagtgcatttggtgtgggtttgcttaccgcatttttactatggaataataaccaacccaaaccattcttta

SEQ ID NO: 101073 - DNA, 75 bp, synthetic construct
  source 1..75: mol_type = other DNA
gccgctggcccagcagtttcagcaggagctatacctgcgcatcttccgcaacgagccatatcaggaatatgtacg

SEQ ID NO: 101074 - DNA, 75 bp, synthetic construct
  source 1..75: mol_type = other DNA
ctcgatattacgtgtctggccgacgttatgggtcagaagtcctttaaactgggaacatcatcagccctgtatgcg

SEQ ID NO: 101075 - DNA, 75 bp, synthetic construct
  source 1..75: mol_type = other DNA
gcctgacctcgtttatagcaaatctatttgccattcctttagtgacatttattactgttccgttgacgcttgccg

SEQ ID NO: 101076 - DNA, 75 bp, synthetic construct
  source 1..75: mol_type = other DNA
gccacagatgttaataccgtcactatttatggctctgtatctggtgaaattttaggcggatacggtagtgataat

SEQ ID NO: 101077 - DNA, 75 bp, synthetic construct
  source 1..75: mol_type = other DNA
gttttgtgttagccgtcctgttaatcacagggctagtgatacagcgtcaccgaatatccacaatggtgcacttgc

SEQ ID NO: 101078 - DNA, 75 bp, synthetic construct
  source 1..75: mol_type = other DNA
tatgagtgtttcaaaatcactagcaaaaggctttgcaaggaaaaagataaaagatattacaggaatagatattga

SEQ ID NO: 101079 - DNA, 75 bp, synthetic construct
  source 1..75: mol_type = other DNA
tactcctgacgtgcttcaggcacagatccttcatggcttgccccacggttttaccttgtatggtggcgtacaggc

SEQ ID NO: 101080 - DNA, 75 bp, synthetic construct
  source 1..75: mol_type = other DNA
ggcgaagaaggcgtggaaaccgcactggccgcgacggtacatgaccgctttgagctgaccaacgaggcatctgat

SEQ ID NO: 101081 - DNA, 75 bp, synthetic construct
  source 1..75: mol_type = other DNA
gatggcaccctgactaccgaagtgcaccgcctggcggacactcgtttccaaccagataccgcttcagaaggctac

SEQ ID NO: 101082 - DNA, 75 bp, synthetic construct
  source 1..75: mol_type = other DNA
atttgccattcctttagtgacatttattactgttccgttgacgcttgccgcgatgatcgtgcatttaagcggacc

SEQ ID NO: 101083 - DNA, 75 bp, synthetic construct
  source 1..75: mol_type = other DNA
actggtcgggaatgggccgctgttattacccacactttgccgattaatgaagttgtggcagtggaagggcaatgg

SEQ ID NO: 101084 - DNA, 75 bp, synthetic construct
  source 1..75: mol_type = other DNA
atggatatcatgcttgattatcataaaaatggagggacagtcattatgataacccatgatagaagtttgattaga

SEQ ID NO: 101085 - DNA, 75 bp, synthetic construct
  source 1..75: mol_type = other DNA
agataatggtgacggaagctatacccagatcctgaccacaggagcgatgtctggcacgctgacgctgatgccact

SEQ ID NO: 101086 - DNA, 75 bp, synthetic construct
  source 1..75: mol_type = other DNA
aatcagcgctgccaactgtttttagcgaagatacttctgtagaacttatcagtcatatggctgataacctcaatt

SEQ ID NO: 101087 - DNA, 75 bp, synthetic construct
  source 1..75: mol_type = other DNA
aaaagagtgacctttttggttaccctgccaaaaatacgcgagaatacaacaaaaatctcgctgtccttaataaac

SEQ ID NO: 101088 - DNA, 75 bp, synthetic construct
  source 1..75: mol_type = other DNA
cgccagttgcgggtggagaaaatcctgaatcgttcgggcatccagcctctgcacagcaaatgctcgtttgcgaat

SEQ ID NO: 101089 - DNA, 75 bp, synthetic construct
  source 1..75: mol_type = other DNA
tcagggttaagcgtaagtcctctgaagctggccgcaagtctgctttcgcccataaagttaaaaatggtggtaaaa

SEQ ID NO: 101090 - DNA, 75 bp, synthetic construct
  source 1..75: mol_type = other DNA
gttacagggacaggcctcctgtagtgtgcaaagcagcgatgttctgattgtgctccctcgggacaatagtactgt

SEQ ID NO: 101091 - DNA, 75 bp, synthetic construct
  source 1..75: mol_type = other DNA
atgaaaaataaagttaattttaaagttgaaaatatacagggtgctaaaaagtacattaatgatgaaagtaagaac

SEQ ID NO: 101092 - DNA, 75 bp, synthetic construct
  source 1..75: mol_type = other DNA
tcgatgcaaagcgtaaacagacctgcaaaatcgccccctattttgttccctatcccgcaacagtcgggaacagaa

SEQ ID NO: 101093 - DNA, 75 bp, synthetic construct
  source 1..75: mol_type = other DNA
aacggtttaaattttatctggagcaacatgggtggatcgttgcccgtaaagaacaattggtggaaaggttgatgc

SEQ ID NO: 101094 - DNA, 75 bp, synthetic construct
  source 1..75: mol_type = other DNA
ttcagttattgggacaggattaggttcagtatttggtggcggtatagggaaagtcatctcggggtcaatgggctc

SEQ ID NO: 101095 - DNA, 75 bp, synthetic construct
  source 1..75: mol_type = other DNA
tgacgagcgccgccagttaatggatcgcgccatcgtcctgaccattattcagattgcccgtcgtggcttggtggt

SEQ ID NO: 101096 - DNA, 75 bp, synthetic construct
  source 1..75: mol_type = other DNA
ggtgccgcaggcgcagccaccggcgaggtggtgggaatgattgccacacagatgtacggtaaaccagtgagtgaa

SEQ ID NO: 101097 - DNA, 75 bp, synthetic construct
  source 1..75: mol_type = other DNA
ttcggtttccagcgtgcagattgaagatgccgcatcacagtcggctgcctatgttgtcatgccaatgagactgta

SEQ ID NO: 101098 - DNA, 75 bp, synthetic construct
  source 1..75: mol_type = other DNA
attcttagccctgttaaaacagcaggcgcaaaactggcagccagggcatccgcttgatcctgcaaccacgatggg

SEQ ID NO: 101099 - DNA, 75 bp, synthetic construct
  source 1..75: mol_type = other DNA
ttggtcaatctttgccaagccattcggtgatcgtgccgcgtaaaggcgtgattgaactaatgcgtatgctcgacg

SEQ ID NO: 101100 - DNA, 75 bp, synthetic construct
  source 1..75: mol_type = other DNA
cacgttggcgactttatcttcacctccaaactggtggatggtcgcttcccggattaccgtcgcgttctgccgaag

SEQ ID NO: 101101 - DNA, 75 bp, synthetic construct
  source 1..75: mol_type = other DNA
gccttcttcggtaaagctgggctcagtaaatcggatgaacagcttgcagttcaggtgctggcgagatatgcgatg

SEQ ID NO: 101102 - DNA, 75 bp, synthetic construct
  source 1..75: mol_type = other DNA
gccgatgcgatggtatgcactctggaacggtttaaattttatctggagcaacatgggtggatcgttgcccgtaaa

SEQ ID NO: 101103 - DNA, 75 bp, synthetic construct
  source 1..75: mol_type = other DNA
tgatttttaccgtaatcaccagcccggacagcgacaaagcgcggatgtggggccatatgcgcggcattattgagt

SEQ ID NO: 101104 - DNA, 75 bp, synthetic construct
  source 1..75: mol_type = other DNA
gtgaccttaaaacaaccgttaacgacctggcgaaagcgctggcgaaactactcaatattgaccccaaatcatggt

SEQ ID NO: 101105 - DNA, 75 bp, synthetic construct
  source 1..75: mol_type = other DNA
ggtcgaacaggaagcactgaagggtgataaggcagcgctcagccaaatgaggggctttgcctattcctccaggaa

SEQ ID NO: 101106 - DNA, 75 bp, synthetic construct
  source 1..75: mol_type = other DNA
tttcagccagcgcaaaccagggtaagggcagtgaaaaaggcaacggtaccacccatacagaaaccacggtggatg

SEQ ID NO: 101107 - DNA, 75 bp, synthetic construct
  source 1..75: mol_type = other DNA
caaagatgtagagatcaacaatgcccgaaacatcaccgcgacggcaacggaacaggtaaagctggttacccccaa

SEQ ID NO: 101108 - DNA, 75 bp, synthetic construct
  source 1..75: mol_type = other DNA
ccattacgctgaacgccctgcagtttatcaatcgccacacgcagaataccggccaggggctggaagcgcagacaa

SEQ ID NO: 101109 - DNA, 75 bp, synthetic construct
  source 1..75: mol_type = other DNA
tcttgatgaaacctacaaaatcgccattacccgtttcgataaccgcattcgtgttggcggaatggcggaaattgt

SEQ ID NO: 101110 - DNA, 75 bp, synthetic construct
  source 1..75: mol_type = other DNA
gagttagtgatattcgtgatatcagcgaacagttgctgcatatcacctggccggagttgaaaccgcgcaataatc

SEQ ID NO: 101111 - DNA, 75 bp, synthetic construct
  source 1..75: mol_type = other DNA
gtgtgcatcgccggaacgcgtttgttactggaagagagcatcgccgatgaattcttagccctgttaaaacagcag

SEQ ID NO: 101112 - DNA, 75 bp, synthetic construct
  source 1..75: mol_type = other DNA
tattatttttaacacacaaatgggcgttaatacagccggtagtgttgaaaggatagaaggacaatcattaagcaa

SEQ ID NO: 101113 - DNA, 75 bp, synthetic construct
  source 1..75: mol_type = other DNA
tgagtagcccgcgcattccggcggtgaaaagccagcttcgtcaactggatagcgaggcgtgtcgggaactggcgc

SEQ ID NO: 101114 - DNA, 75 bp, synthetic construct
  source 1..75: mol_type = other DNA
agcggtgtggtgcagacagtgcaggtgcagagtccgtcagaggtacgcagcgacacgccggttcttcagcagttt

SEQ ID NO: 101115 - DNA, 75 bp, synthetic construct
  source 1..75: mol_type = other DNA
agcttcgccagcgaccgctggctgacgttccatcaggtcagcgcgctcggcgggcaggtgcgccggggggagaaa

SEQ ID NO: 101116 - DNA, 75 bp, synthetic construct
  source 1..75: mol_type = other DNA
tcgccgcatatcgcgatatgcgactcgctgaaatcaacccacggacaggaaaaaccatcacaggaaataccgtcc

SEQ ID NO: 101117 - DNA, 75 bp, synthetic construct
  source 1..75: mol_type = other DNA
cttaagtcgcgaagagattttcggcccggtgctggtagtcacgcgtttcacatcagaagatcaggcgctacagct

SEQ ID NO: 101118 - DNA, 75 bp, synthetic construct
  source 1..75: mol_type = other DNA
aatacttgaagctatgtcctacggattacctgtaatttcaatggatatatctggagggacaagtagcgtgatttc

SEQ ID NO: 101119 - DNA, 75 bp, synthetic construct
  source 1..75: mol_type = other DNA
actcggcgtaaatgtttacgttgaaaaacaaggcgctaacggcattgaagggcgtttaacggcggatcaactcaa

SEQ ID NO: 101120 - DNA, 75 bp, synthetic construct
  source 1..75: mol_type = other DNA
cttcaagctatctgtcttatttttttatattacatttataaatattttacaaatagaatctcatatcccccatta

SEQ ID NO: 101121 - DNA, 75 bp, synthetic construct
  source 1..75: mol_type = other DNA
ccggcggtgcttgacgcccagtgcggcgtgctggcgattaatcctgatgacgcggtgagcggttattatcaggtt

SEQ ID NO: 101122 - DNA, 75 bp, synthetic construct
  source 1..75: mol_type = other DNA
agcctaaacgtgatttgatcgttactattgggcaagaaattaaggcgctcaataacgccactttcagtaaagatt

SEQ ID NO: 101123 - DNA, 75 bp, synthetic construct
  source 1..75: mol_type = other DNA
gtcatcaatgccgagcacgatggtcgccactggcgacgaataccagaacccatgcgactgttagatgatgctgtg

SEQ ID NO: 101124 - DNA, 75 bp, synthetic construct
  source 1..75: mol_type = other DNA
actgggtgtgaatcttttcacccgccacagaaacaatatccgtttaaccgctgccggagaaaagcttctgcctta

SEQ ID NO: 101125 - DNA, 75 bp, synthetic construct
  source 1..75: mol_type = other DNA
caaaccgtagacgttatggtcttgctgcatttatcgggctgattgctggcgttgtttcagcatttgttaagtggg

SEQ ID NO: 101126 - DNA, 75 bp, synthetic construct
  source 1..75: mol_type = other DNA
tgctggcgccgctggccggagggcaggtttatccctacgttgcgccgctcggcagtgacggaaagccttcagtct

SEQ ID NO: 101127 - DNA, 75 bp, synthetic construct
  source 1..75: mol_type = other DNA
tcacgataaaaaatgaccggcacaaggttgtaaataacaaccagacaagcaaggtgacgggaactgataccgaag

SEQ ID NO: 101128 - DNA, 75 bp, synthetic construct
  source 1..75: mol_type = other DNA
acggcgcggaaggcgtcgggctgttccgtaccgaaatgctctatatggatcgcgacagcgcgccggacgagcagg

SEQ ID NO: 101129 - DNA, 75 bp, synthetic construct
  source 1..75: mol_type = other DNA
gcgacgcttatccagacgcgccatcgcatccccgaaacgccgctcaccgaagatcagatagttattttccaggtg

SEQ ID NO: 101130 - DNA, 75 bp, synthetic construct
  source 1..75: mol_type = other DNA
aaatgttaaaagatcatggtgcagaggttacacctaatcaacaaataacttttaaagcgctgaattatactagcg

SEQ ID NO: 101131 - DNA, 75 bp, synthetic construct
  source 1..75: mol_type = other DNA
aaaatcatcagttgaaaatacaaaactatgttgctctatatggtttttgtagaaacattacattcgtttttctcg

SEQ ID NO: 101132 - DNA, 75 bp, synthetic construct
  source 1..75: mol_type = other DNA
cccagaccgaaaccgggattaatacaccggctgagacgtggcagatcgatttcactgcgcgtatggccggaatgg

SEQ ID NO: 101133 - DNA, 75 bp, synthetic construct
  source 1..75: mol_type = other DNA
caaaaaaacatattcttgtagaagaaaattataatgagttcataaaattttgtcgctatcaactgcccggactaa

SEQ ID NO: 101134 - DNA, 75 bp, synthetic construct
  source 1..75: mol_type = other DNA
gaagagacgacccggccaaccctgaaagaactggcagcgaagctgtccggaggagtgaatggttacagtcgctga

SEQ ID NO: 101135 - DNA, 75 bp, synthetic construct
  source 1..75: mol_type = other DNA
gtgactcttattttcacggacgaaccagatgaaagcttcactggcgctgctcagcctgctaacggcatttaccag

SEQ ID NO: 101136 - DNA, 75 bp, synthetic construct
  source 1..75: mol_type = other DNA
taccttgaagctattggaagtgaagaacgtatcgatcatcgttctctcagaactcaatgtgccgatgcccttacc

SEQ ID NO: 101137 - DNA, 75 bp, synthetic construct
  source 1..75: mol_type = other DNA
cgcaaactgcaccagaacagcaagaagagaacaatgctgataaccgtgacaacggtggcatgccgcgtcgttctc

SEQ ID NO: 101138 - DNA, 75 bp, synthetic construct
  source 1..75: mol_type = other DNA
gcttcccctggccgacattactttcggtctgcattcatggtgcagttgttgcggggcttctctatacctcggtac

SEQ ID NO: 101139 - DNA, 75 bp, synthetic construct
  source 1..75: mol_type = other DNA
ctgaaattatcaaacagaccaccccggacggtgcgggacgtgtggctgctcatgctgtggtgaatgccgcactgg

SEQ ID NO: 101140 - DNA, 75 bp, synthetic construct
  source 1..75: mol_type = other DNA
ggtcgcgacaaatccctgcacgcccttgaaaaattcaccgaactgaaaactatctggataagcctggaggcctga

SEQ ID NO: 101141 - DNA, 75 bp, synthetic construct
  source 1..75: mol_type = other DNA
tcatgaagccatcagccgatttttcgaacttggtacattgaatgtcattgaagttgccgctatttcaggccaccg

SEQ ID NO: 101142 - DNA, 75 bp, synthetic construct
  source 1..75: mol_type = other DNA
cttattgttatattgtttctcatgatgcttatcatgtactttattaattctctcaggcataaggaattaactgaa

SEQ ID NO: 101143 - DNA, 75 bp, synthetic construct
  source 1..75: mol_type = other DNA
gaaaaaagggatcgtcggttacgcggcaccccgtgatctggaaaaagtgaatgccttgctaaaagtaattatttc

SEQ ID NO: 101144 - DNA, 75 bp, synthetic construct
  source 1..75: mol_type = other DNA
taaccattagcaagttggaaacttttacccgctgtccatttattcgacaaatggccttcgaatggacaaaaaacc

SEQ ID NO: 101145 - DNA, 75 bp, synthetic construct
  source 1..75: mol_type = other DNA
cgatcgataaagtgtatggcgaagtggcgaccaccagtagccatgagctggcgatgattgtgcgcgaaccggtcg

SEQ ID NO: 101146 - DNA, 75 bp, synthetic construct
  source 1..75: mol_type = other DNA
cacagacggaaaccggcatcaatacgccagcagaaacctggcagattgacttcactgcacgcatgggtggaatgg

SEQ ID NO: 101147 - DNA, 75 bp, synthetic construct
  source 1..75: mol_type = other DNA
cgatgcgcagatggcgttacgagccgggtaaaccagggagtggaattgtggtaaacattctgtttaaaattaatg

SEQ ID NO: 101148 - DNA, 75 bp, synthetic construct
  source 1..75: mol_type = other DNA
cttaagatggggaactgtctcatgtcgtatggtgtgcggggaagtaacgcgcttattaagtttgactgcacagac

SEQ ID NO: 101149 - DNA, 75 bp, synthetic construct
  source 1..75: mol_type = other DNA
acaagagcggggacaatgggtctgatggagaagagggagaaagatactataccgttgattactcaggcgtaacgg

SEQ ID NO: 101150 - DNA, 75 bp, synthetic construct
  source 1..75: mol_type = other DNA
ggacgccggggagcagtcgtattgatggccaccaggcggagaatatcacctgggcgatttcatcgcagtctcctg

SEQ ID NO: 101151 - DNA, 75 bp, synthetic construct
  source 1..75: mol_type = other DNA
cattacgctgatggaagtgatgggatacagccagttgttgtacggacgcacctacgatgtaatggtgttcggcgc

SEQ ID NO: 101152 - DNA, 75 bp, synthetic construct
  source 1..75: mol_type = other DNA
aactaacttactttgaagataatgttaaacgaaccgaacacggaaatgcaggattcctattcgtgaatagacatt

SEQ ID NO: 101153 - DNA, 75 bp, synthetic construct
  source 1..75: mol_type = other DNA
atgacagacattacagccaatgttgtagtgagcatgccttcgcaactctttactatggcccgctcttttaaagcc

SEQ ID NO: 101154 - DNA, 75 bp, synthetic construct
  source 1..75: mol_type = other DNA
gccgaaaccgaagccaaagcctaaaccggtgaaaaaggtgcaggaacagccaaaacgtgatgccaaaccggcaga

SEQ ID NO: 101155 - DNA, 75 bp, synthetic construct
  source 1..75: mol_type = other DNA
gtgaaggctgaccacacggagaccattggtaacgaccagaagataacggtggggttgggccagacggtgaatgtg

SEQ ID NO: 101156 - DNA, 75 bp, synthetic construct
  source 1..75: mol_type = other DNA
agcataattttctgtatgccccaacaccaaaccagattgctgtgttggggtttagacaacctgctggttctgcag

SEQ ID NO: 101157 - DNA, 75 bp, synthetic construct
  source 1..75: mol_type = other DNA
acgcgattgatttatccggcagaaagtaagcaaataacactcagtgtgcaaaatagcggtgacaacaccagttat

SEQ ID NO: 101158 - DNA, 75 bp, synthetic construct
  source 1..75: mol_type = other DNA
tcgcagtctcctgccgataagtatgatctcatcaataaaacgtcccgtgtttctcctgacagtggccgtttttat

SEQ ID NO: 101159 - DNA, 75 bp, synthetic construct
  source 1..75: mol_type = other DNA
gccgtcagggactgacgtggttctggcttttattggcggtgatcgttccagcgcggtggtaattgcgtccaacca

SEQ ID NO: 101160 - DNA, 75 bp, synthetic construct
  source 1..75: mol_type = other DNA
atgcggcttcagaatatcagtgatattgaaacagcaaatgcatggttgccgacctttattgaagcctataacaac

SEQ ID NO: 101161 - DNA, 75 bp, synthetic construct
  source 1..75: mol_type = other DNA
agcacctgggttacagatacacaggagtattcaaaaccctggcaagtattgatgacaaaccgtcccgtttcgaaa

SEQ ID NO: 101162 - DNA, 75 bp, synthetic construct
  source 1..75: mol_type = other DNA
aggtaatgaaaaatatctttgcgcgttacgactatctggatgattcaggcaaagcgttatatctgcgttctcatc

SEQ ID NO: 101163 - DNA, 75 bp, synthetic construct
  source 1..75: mol_type = other DNA
caacctgtttcagcgacaccatccataagcagaagaccagcagcaaaatcttaccgtgatcctaataagctcagt

SEQ ID NO: 101164 - DNA, 75 bp, synthetic construct
  source 1..75: mol_type = other DNA
agcagtgataaggaaggagcggactcgttgacatcccatattgaatcgttctggacacgtgaacaaatgctttcc

SEQ ID NO: 101165 - DNA, 75 bp, synthetic construct
  source 1..75: mol_type = other DNA
tgggtgttggtgcggcagcctattccccggcgaaatacggtattctcggcgaattaaccacgggtagtaagttag

SEQ ID NO: 101166 - DNA, 75 bp, synthetic construct
  source 1..75: mol_type = other DNA
aaacttgaagccgaggttgtcgaagtattatgtattttctggatggcaattaaagagtttaactactttcctacg

SEQ ID NO: 101167 - DNA, 75 bp, synthetic construct
  source 1..75: mol_type = other DNA
gaacgcgtccccacaccaggcgagctacccgcaaacattgatgaacgggtcatgatttgtccgttaacaaacgac

SEQ ID NO: 101168 - DNA, 75 bp, synthetic construct
  source 1..75: mol_type = other DNA
aggcagcaacgccgcttttgatatcgtttatagcgatgcgcagggcgtgaaaaaagccgtgtcgggcttgcaggt

SEQ ID NO: 101169 - DNA, 75 bp, synthetic construct
  source 1..75: mol_type = other DNA
atgctgcgatgaagaaattgaacggatctgcaaatgcacgcaggcctgtggcgcgaagatgattgtgggtatcgg

SEQ ID NO: 101170 - DNA, 75 bp, synthetic construct
  source 1..75: mol_type = other DNA
cagcagcaatagctggtgctacaggtaatgccagtaaggataccgggaatgataatagctgggatattggtggtg

SEQ ID NO: 101171 - DNA, 75 bp, synthetic construct
  source 1..75: mol_type = other DNA
aacggcgacggtcaaacctgcaaagtggcaaatcagattatcgtggcgctcaatattgaagcggtttctgaagcc

SEQ ID NO: 101172 - DNA, 75 bp, synthetic construct
  source 1..75: mol_type = other DNA
aacaagaaagttattctgttgttaatttagaaaaacaactttcccgaactgttaccaacaaaattataacgatga

SEQ ID NO: 101173 - DNA, 75 bp, synthetic construct
  source 1..75: mol_type = other DNA
gcacagacgctggcggataaacgtcagcagcaacaagcacttgccgctgcgcaacagacgtactcccgcgatcac

SEQ ID NO: 101174 - DNA, 75 bp, synthetic construct
  source 1..75: mol_type = other DNA
atggacaacgatgccagtaatgagcatgttatggagatgctctggaaagtgatcagcgagggcggtacgttacag

SEQ ID NO: 101175 - DNA, 75 bp, synthetic construct
  source 1..75: mol_type = other DNA
cgtcgaaggaactgcactgtccgtggtggccttcacggctaagattgcctccggcctggataatctttactgggc

SEQ ID NO: 101176 - DNA, 75 bp, synthetic construct
  source 1..75: mol_type = other DNA
cgcgtggattgtgctggtgctcggctacttccaggtagtatggccgctgaatcgtcagccggtgccattgccgaa

SEQ ID NO: 101177 - DNA, 75 bp, synthetic construct
  source 1..75: mol_type = other DNA
gtgatttactgattgtcgatagcgctattaccgccagccatggtgatattgtcatcgctgctgttgacggcgagt

SEQ ID NO: 101178 - DNA, 75 bp, synthetic construct
  source 1..75: mol_type = other DNA
gtatgccctatgcaggtgtcattgcacaggaagctctggaagcaatcccggaagttgtaggctccgcaatgaaat

SEQ ID NO: 101179 - DNA, 75 bp, synthetic construct
  source 1..75: mol_type = other DNA
tacagacagcgctaacagtactgccgactggattaaagagcactggggattcgatccccgcagtgtgggccggac

SEQ ID NO: 101180 - DNA, 75 bp, synthetic construct
  source 1..75: mol_type = other DNA
cacatcccagtatgcacataacgatgcacttctacagacagcaagtaagttaaccaccacatcaaagctaaggcc

SEQ ID NO: 101181 - DNA, 75 bp, synthetic construct
  source 1..75: mol_type = other DNA
gaatctatatgggttgtatataatcctgctgttcaactaccggatgatctgaactacaaaaaagttagcaacata

SEQ ID NO: 101182 - DNA, 75 bp, synthetic construct
  source 1..75: mol_type = other DNA
atgtttttatattctagattcgatattttcgatatgtttggggttatggatctgcgccgttttattacgcttaaa

SEQ ID NO: 101183 - DNA, 75 bp, synthetic construct
  source 1..75: mol_type = other DNA
tttgcaagggtatttgtacgcacagccaatgccgctacgtgattttcccaaatggctggcgggcagccaaccgcc

SEQ ID NO: 101184 - DNA, 75 bp, synthetic construct
  source 1..75: mol_type = other DNA
gaaccgtggcagctcagacgttttggagattatcgggcaaaggttgcgaatgacgtcaatgacgtcattttgcgg

SEQ ID NO: 101185 - DNA, 75 bp, synthetic construct
  source 1..75: mol_type = other DNA
accgaagctggcaactcagctgcacacaggacatgggcaccgaacgaaactgaatttaaatcgcttttggtaatt

SEQ ID NO: 101186 - DNA, 75 bp, synthetic construct
  source 1..75: mol_type = other DNA
tgggtacggcagaagagttgctgtacttgctgggaattttaatgaatccggccaacaaagatcaggttttaccgt

SEQ ID NO: 101187 - DNA, 75 bp, synthetic construct
  source 1..75: mol_type = other DNA
gacggaatatttacatatattaaatcccgtcacagtgaagattacgacattgaaagagatgagtcaggctatgat

SEQ ID NO: 101188 - DNA, 75 bp, synthetic construct
  source 1..75: mol_type = other DNA
aaagctatcacttaatccgtgactcaatgcggggtgatactccgaggtgctccatttcgatatctcttcacgcgt

SEQ ID NO: 101189 - DNA, 75 bp, synthetic construct
  source 1..75: mol_type = other DNA
ttaatggcaatgaacgttaccaggtttcatcgcaaaattttccttttaccattagcgtcagcggacctggtgcga

SEQ ID NO: 101190 - DNA, 75 bp, synthetic construct
  source 1..75: mol_type = other DNA
gaacctccccgcccccggaggttctcatcctcatgggcttcaaatgcaaaaaagcctgctcgctgagcaggcttt

SEQ ID NO: 101191 - DNA, 75 bp, synthetic construct
  source 1..75: mol_type = other DNA
tggaaggaataaaaattattttttccgataataaaaagggattttttaatgacatttatgatccgttgataaata

SEQ ID NO: 101192 - DNA, 75 bp, synthetic construct
  source 1..75: mol_type = other DNA
ctggtgtgatgaactcgatcccgatggtgagtttggcctcggcgtagcggtagatgtctaccatgtctggtggga

SEQ ID NO: 101193 - DNA, 75 bp, synthetic construct
  source 1..75: mol_type = other DNA
ggctacgtcagccaggagactaaagatcgcgtgtttcaggcggtagaagagagcggttaccgcccaaatttgctg

SEQ ID NO: 101194 - DNA, 75 bp, synthetic construct
  source 1..75: mol_type = other DNA
accgtgaaaattaaagccagcaataaaaatggtgagatgccaaaacaggtgaatgtgctggtgtctgccgttgat

SEQ ID NO: 101195 - DNA, 75 bp, synthetic construct
  source 1..75: mol_type = other DNA
tgagagggatattcgaggcgggttatgtgataaagactcccacctttatgagtctgattatctactaggtgttca

SEQ ID NO: 101196 - DNA, 75 bp, synthetic construct
  source 1..75: mol_type = other DNA
actggcggcggaaagttatctcacgcaaaaagggttatgccttgcgctggagttgggtccgcatacctgcgttgg

SEQ ID NO: 101197 - DNA, 75 bp, synthetic construct
  source 1..75: mol_type = other DNA
atgtccaaacattatcctggcgatgactctcgcgatcagcaaatggaagccattgcgcagcagctgccggacgac

SEQ ID NO: 101198 - DNA, 75 bp, synthetic construct
  source 1..75: mol_type = other DNA
tgtgcctgcgttatcagggagtcttgctggatgccagcgaagaagtggttcatgttgcggtggtcgatgccccct

SEQ ID NO: 101199 - DNA, 75 bp, synthetic construct
  source 1..75: mol_type = other DNA
ttgcaaaacttctcgcctgttacgctggaagggcaattgttgttgagcggcaaaccaccgttgaatattgcacgt

SEQ ID NO: 101200 - DNA, 75 bp, synthetic construct
  source 1..75: mol_type = other DNA
cttcgcgagctgaatatctgcaccggctgcggtccaggagcgatggaagcgccgatgaaaggtgcagcagtaggt

SEQ ID NO: 101201 - DNA, 75 bp, synthetic construct
  source 1..75: mol_type = other DNA
atgattaacatcgacttactgacggcaatgctccttgagccacaactgccgcaaatcagtagcgccagcctgacg

SEQ ID NO: 101202 - DNA, 75 bp, synthetic construct
  source 1..75: mol_type = other DNA
cgttatccgcaggtggtgaagcagaccggacggttaacctcaatggcgaacctggcgctgttccgcctgtttaac

SEQ ID NO: 101203 - DNA, 75 bp, synthetic construct
  source 1..75: mol_type = other DNA
ctggatatcactaatcttaccgataaaccgcaaaaactgaacgttgccctgaccgccagtggtttgcttgaactg

SEQ ID NO: 101204 - DNA, 75 bp, synthetic construct
  source 1..75: mol_type = other DNA
agaaattcgagaggattatgttcttaactatatgcttgaaacagaaagcaaaggctcactactcaatactgataa

SEQ ID NO: 101205 - DNA, 75 bp, synthetic construct
  source 1..75: mol_type = other DNA
cagcggcctgttcccgtcactttacaccaacgcagcccaactgcaggcgttgggaatcaaaggcgacagtgatga

SEQ ID NO: 101206 - DNA, 75 bp, synthetic construct
  source 1..75: mol_type = other DNA
gattgcgctggagccgctacacccgatgaccgcagccgatcgttcctgtttgtgcacgttacgtcaggcgctgga

SEQ ID NO: 101207 - DNA, 75 bp, synthetic construct
  source 1..75: mol_type = other DNA
ttcctctatgcgaaatcgatgaacaccttcggcaccaattttcagttaatgggttaccgctattcgacacaaggt

SEQ ID NO: 101208 - DNA, 75 bp, synthetic construct
  source 1..75: mol_type = other DNA
ctattcgacacaaggtttttatacccttgatgatgttgcgtatcgtcgaatggaggggtacgaatatgattacga

SEQ ID NO: 101209 - DNA, 75 bp, synthetic construct
  source 1..75: mol_type = other DNA
gctgcgatctgctcaagcaagcgtttgcccgtgcggcgatcctctccaacgagaaattccgcggcgtgcgtctgt

SEQ ID NO: 101210 - DNA, 75 bp, synthetic construct
  source 1..75: mol_type = other DNA
aacctgaccgataatctcactctcaaaggggggatcgcaaaagcatttcgggccccttcgattcgtgaggtcagt

SEQ ID NO: 101211 - DNA, 75 bp, synthetic construct
  source 1..75: mol_type = other DNA
aaagagcaggcgatccagttcctgtgcggtaacctcggcgttaacgggcgcactgaacatccgtttgagctggaa

SEQ ID NO: 101212 - DNA, 75 bp, synthetic construct
  source 1..75: mol_type = other DNA
gataccactgatgctgaccatgataaacgtatcgcagagaactatgtctatgatgaagtgctgggtgtcaatgtt

SEQ ID NO: 101213 - DNA, 75 bp, synthetic construct
  source 1..75: mol_type = other DNA
ttgaacttgctcttttatcatcattattcaatatcgccagtgtggaatgggggacatgccgtatgaatcctgttg

SEQ ID NO: 101214 - DNA, 75 bp, synthetic construct
  source 1..75: mol_type = other DNA
gaaccttgatgactggcagagcgaagttgaatttaccctgccgcaggcgacgatgaagcgtctgattgaagcgac

SEQ ID NO: 101215 - DNA, 75 bp, synthetic construct
  source 1..75: mol_type = other DNA
attacaggccatgactggtgctccggattaaaactggaaggtcgtctggctggtaccggactggcggtttttggc

SEQ ID NO: 101216 - DNA, 75 bp, synthetic construct
  source 1..75: mol_type = other DNA
taaccgctgaacagcagactccaaacacgatctcagccagcaatgccattttcaacgtgcaggctttaacccagc

SEQ ID NO: 101217 - DNA, 75 bp, synthetic construct
  source 1..75: mol_type = other DNA
ggagtgataagtgccaggtgtcgttgtggtggaaagggagaggtactcgaccgcaaagccacaagcgagcgtggt

SEQ ID NO: 101218 - DNA, 75 bp, synthetic construct
  source 1..75: mol_type = other DNA
agcgtatcgcagagaactatgtctatgatgaagtgttgggtgtcaatgttccacgttcggagtttgaaagacgcg

SEQ ID NO: 101219 - DNA, 75 bp, synthetic construct
  source 1..75: mol_type = other DNA
ccgcatccggcaggcgtcagcgtaatgttgacgtcatccgcaatggataacgccagaaccctcagtaatggcggg

SEQ ID NO: 101220 - DNA, 75 bp, synthetic construct
  source 1..75: mol_type = other DNA
caacgaccacacacatccggtcagcggtgtggaaagtggcggcagcacggtgacaagtcaggcaaccacggagac

SEQ ID NO: 101221 - DNA, 75 bp, synthetic construct
  source 1..75: mol_type = other DNA
atcgactttatgtcggcggatggtattgtcccgggccgtacgcctgttcgttatcagggcgttgaagtcggaaca

SEQ ID NO: 101222 - DNA, 75 bp, synthetic construct
  source 1..75: mol_type = other DNA
agaaagctgtttttatagaaaatgaatatgctgcaacggattctctcgccctgactggagggttgcgcctcgata

SEQ ID NO: 101223 - DNA, 75 bp, synthetic construct
  source 1..75: mol_type = other DNA
ctaccctgccagcggcggatttcccgaacctcgatgactggcagagcgaagtcgaatttaccctgccgcaggcga

SEQ ID NO: 101224 - DNA, 75 bp, synthetic construct
  source 1..75: mol_type = other DNA
tacatttttagatgtcaccgtatttatgagaatattgtgaaagaatatggggatacattactgaatgagcttaaa

SEQ ID NO: 101225 - DNA, 75 bp, synthetic construct
  source 1..75: mol_type = other DNA
tgatgccgggtaaaggtaaagagcaggatcactttgtcgcactcgatacccaaccgaaatatcggctggacaatg

SEQ ID NO: 101226 - DNA, 75 bp, synthetic construct
  source 1..75: mol_type = other DNA
atggcacatccgttaccgcgttcattaagccgcctgaatccagatttgttgtatggaaatgtgctggcgagcggt

SEQ ID NO: 101227 - DNA, 75 bp, synthetic construct
  source 1..75: mol_type = other DNA
aaaaaacgtttgagccggtagtaacaataagaaaactgagttatgaagaatccagagaaagattttcttccttta

SEQ ID NO: 101228 - DNA, 75 bp, synthetic construct
  source 1..75: mol_type = other DNA
ggcggggattatttacctggtcgttaacggcctgctgacgctaatgatgcgtctgatcgagcacaaagcccttgc

SEQ ID NO: 101229 - DNA, 75 bp, synthetic construct
  source 1..75: mol_type = other DNA
tgcgccgccatatcctggacaacttcccgcgtatcgagcagaccctaacgaaagccataaaaggcattctggcgc

SEQ ID NO: 101230 - DNA, 75 bp, synthetic construct
  source 1..75: mol_type = other DNA
ccagcaactgcgtgagcgtgacggcgaaagcaaaactattctcagcgcccatttgtcactgattcaggatgacga

SEQ ID NO: 101231 - DNA, 75 bp, synthetic construct
  source 1..75: mol_type = other DNA
actgaagctggcaactcagctgcacatagggcatgggcaccgagcgaagatgaatttaaatcgcttttggctgtt

SEQ ID NO: 101232 - DNA, 75 bp, synthetic construct
  source 1..75: mol_type = other DNA
tttcgcgccaggaagcaacggacgagcagagcacgcgtttaggcgttgtgcgtgagactttttcgcgctggttga

SEQ ID NO: 101233 - DNA, 75 bp, synthetic construct
  source 1..75: mol_type = other DNA
tacaacgccgctgagcagaagcagaaaatctccgtttacggtcaggaatccaacccgaccacctggaagctggcg

SEQ ID NO: 101234 - DNA, 75 bp, synthetic construct
  source 1..75: mol_type = other DNA
ctattgtggatggtgctgtggaggaaggattgctggattttttacaggaaaaaaatcctccacactgctgcttat

SEQ ID NO: 101235 - DNA, 75 bp, synthetic construct
  source 1..75: mol_type = other DNA
aacctctcccggtttattcgtaataatcccggggcggagggatttctgaatcgtctgggggtacagacacgggat

SEQ ID NO: 101236 - DNA, 75 bp, synthetic construct
  source 1..75: mol_type = other DNA
caacattccccaggaagagaacccgttcctcggctatcgcgcggtacgtatttacccggaatttgctggcctgtt

SEQ ID NO: 101237 - DNA, 75 bp, synthetic construct
  source 1..75: mol_type = other DNA
ccgctagtcctgttcctcgcgaacagccactcagttatcaacccgttaactggcccgccggagatccgttttttc

SEQ ID NO: 101238 - DNA, 75 bp, synthetic construct
  source 1..75: mol_type = other DNA
atcagtactggttcagtgctcacccgattcagcaacttatccttgaaataaccgagcgcgatgccctactggatg

SEQ ID NO: 101239 - DNA, 75 bp, synthetic construct
  source 1..75: mol_type = other DNA
cggctttattcttccgataatatgtatcctgatagccagcaagggtttgccccaacggtacgtgggattgcccgt

SEQ ID NO: 101240 - DNA, 75 bp, synthetic construct
  source 1..75: mol_type = other DNA
accaaacgtcgctacacccgggaaaatgcgctcgaccgcgcttatgcctcctttaacgccaaccgtaacagcaac

SEQ ID NO: 101241 - DNA, 75 bp, synthetic construct
  source 1..75: mol_type = other DNA
cagttcattgtcaggtctgttctgcactctgagcgcgataaggacacaccgcgcatcatggttgccggcatagag

SEQ ID NO: 101242 - DNA, 75 bp, synthetic construct
  source 1..75: mol_type = other DNA
gtgatccgtgatgcgctactgaatgatgaggccgatgtcggggttttttatcgcgtagggaatgatgatgctctg

SEQ ID NO: 101243 - DNA, 75 bp, synthetic construct
  source 1..75: mol_type = other DNA
ataatattggcacctgggtacagcgcgccattattccgctgaaaagtgaactggtaatgggagacggcaatacag

SEQ ID NO: 101244 - DNA, 75 bp, synthetic construct
  source 1..75: mol_type = other DNA
ctcccgctatgctgaacgggacacaacccttagagaacatactgcattaattaaggaatattacggctatcatga

SEQ ID NO: 101245 - DNA, 75 bp, synthetic construct
  source 1..75: mol_type = other DNA
cgtacttgctggctttattggcatgtatctcgcggaattatatgaaccgccccggttttcctggagagtgtttta

SEQ ID NO: 101246 - DNA, 75 bp, synthetic construct
  source 1..75: mol_type = other DNA
cattagtgatgttgtacctgttggggtgccacttccctggccgacagatatcccaccggcgcgtcacgcaatcat

SEQ ID NO: 101247 - DNA, 75 bp, synthetic construct
  source 1..75: mol_type = other DNA
agaatactggacgcgtggaaatgggcagagggtgtcacgttttcagttaaaatgaatgttacagacaggcgacct

SEQ ID NO: 101248 - DNA, 75 bp, synthetic construct
  source 1..75: mol_type = other DNA
ctatcagcgatccgtctagcactatatggtcggctggcgtttggccttgccactcaacaacaggaatatgtcgag

SEQ ID NO: 101249 - DNA, 75 bp, synthetic construct
  source 1..75: mol_type = other DNA
tcataatgtttgcaggaaacacatattcctctgactgttttgaacttgctggcagagattacaaaatagatcccg

SEQ ID NO: 101250 - DNA, 75 bp, synthetic construct
  source 1..75: mol_type = other DNA
atgttacccaggatcagacacaataattttattggtgcggtggagttatttgtaaaatcatcgcatacaaaaaca

SEQ ID NO: 101251 - DNA, 75 bp, synthetic construct
  source 1..75: mol_type = other DNA
gatgacactcatcctgacgatgaaccaccgcagccaccacgcggtggtcgaccggcattacgcgttgtgaagtaa

SEQ ID NO: 101252 - DNA, 75 bp, synthetic construct
  source 1..75: mol_type = other DNA
gttactgaacgttgatggcgtagtgagatttggctcactttatgaatacgttgcgtcattcggaatttttaacgg

SEQ ID NO: 101253 - DNA, 75 bp, synthetic construct
  source 1..75: mol_type = other DNA
aagcaggcttgccggatggtgtgttgaacgtggtgacgggttttggtcatgaagcggggcaggcgctgtcgcgtc

SEQ ID NO: 101254 - DNA, 75 bp, synthetic construct
  source 1..75: mol_type = other DNA
tgctgaatttcattaaattcggcggcaagcgcacgacagcactttatttcgaaccggcatttttcgctctggcat

SEQ ID NO: 101255 - DNA, 75 bp, synthetic construct
  source 1..75: mol_type = other DNA
atgctggcaattcagtctttctggtcgttgatcattctgccatggactgacagcgataaaataaattggtatctg

SEQ ID NO: 101256 - DNA, 75 bp, synthetic construct
  source 1..75: mol_type = other DNA
ctggcagcacattaacacctggctggagcgggatatagttcccctgcgctcccgtctgacgatgggggacagtta

SEQ ID NO: 101257 - DNA, 75 bp, synthetic construct
  source 1..75: mol_type = other DNA
aatagtcagatcttatatatcactttttcattcccggtttggaggtgcgctaccttgctacgaatatgacaatct

SEQ ID NO: 101258 - DNA, 75 bp, synthetic construct
  source 1..75: mol_type = other DNA
caatggaggaacaccaccatgaacgccaatgaaccgagcaccagttgctgcgtgtgctgcaaggaaatcccgctc

SEQ ID NO: 101259 - DNA, 75 bp, synthetic construct
  source 1..75: mol_type = other DNA
atgtcaacttctatcagattctgtagctacctcctgctgccgctgatttacctgctggttaacgtcaaaattgcc

SEQ ID NO: 101260 - DNA, 75 bp, synthetic construct
  source 1..75: mol_type = other DNA
agagcaatgataattgcatcgtgaaaaattacttaatggttattaatgaatacccttatcgtaacactcatattg

SEQ ID NO: 101261 - DNA, 75 bp, synthetic construct
  source 1..75: mol_type = other DNA
ttagaggaaacggaccgattaatggggattggatacttctctgagagcgactatcgcagagttattagtagtatc

SEQ ID NO: 101262 - DNA, 75 bp, synthetic construct
  source 1..75: mol_type = other DNA
agatggtaatgccgggcgacaacatcaaaatggttgttaccctgatccacccgatcgcgatggacgacggtctgc

SEQ ID NO: 101263 - DNA, 75 bp, synthetic construct
  source 1..75: mol_type = other DNA
aatcagacaaagcacaaatgccagaaaaacaacagcaaactctcaaccgctatggctccgcgtcaaagctgtcaa

SEQ ID NO: 101264 - DNA, 75 bp, synthetic construct
  source 1..75: mol_type = other DNA
atcgcaatgaattatttacagcgatttgcagcggtatggcctcgattgctggttcgacaatgattggttacgccg

SEQ ID NO: 101265 - DNA, 75 bp, synthetic construct
  source 1..75: mol_type = other DNA
caggttaagggacatgacctgacgaaatgggtctggcagaatgaagctgaactacgccctgaaaacacgcaaaac

SEQ ID NO: 101266 - DNA, 75 bp, synthetic construct
  source 1..75: mol_type = other DNA
acgtctcgcacaactgaagttgaccgatcacggttgcttccttaaccgcgtcattcgtagccagattgagatgcc

SEQ ID NO: 101267 - DNA, 75 bp, synthetic construct
  source 1..75: mol_type = other DNA
ctgggaaattggccgacggattgtcgaatttgaacaaggtggtgaggccagagcagcttatggtgcacagctgat

SEQ ID NO: 101268 - DNA, 75 bp, synthetic construct
  source 1..75: mol_type = other DNA
gcgatgcccgccgcgtaaaaaccatcgccgatcgcatcggctttatctcgattcacagccaggtcactgacctgc

SEQ ID NO: 101269 - DNA, 75 bp, synthetic construct
  source 1..75: mol_type = other DNA
tagagatggtaatgccgggcgacaacatcaaaatggttgttaccctgatccacccgatcgcgatggacgacggtc

SEQ ID NO: 101270 - DNA, 75 bp, synthetic construct
  source 1..75: mol_type = other DNA
gtgtactgaataatcacagtgccactattgaagctgccggttccctgacactgagtgccggacaaatcaataacg

SEQ ID NO: 101271 - DNA, 75 bp, synthetic construct
  source 1..75: mol_type = other DNA
gcgcacttacaaataaccagacaaagtcattgaagcttaaaccggtcgcgttgccgaaagtggcaagccagcttc

SEQ ID NO: 101272 - DNA, 75 bp, synthetic construct
  source 1..75: mol_type = other DNA
tggtattttgtttgcacgtattcttagcccggccaccgagccttcgcaggtcacatttgaaaatctgtcgttcag

SEQ ID NO: 101273 - DNA, 75 bp, synthetic construct
  source 1..75: mol_type = other DNA
ggaaaaccgcacacccggcagcctgccgggaacaaagacgcagatgaccattcgttcgaaaacctataagggcag

SEQ ID NO: 101274 - DNA, 75 bp, synthetic construct
  source 1..75: mol_type = other DNA
aaatcagctcagtttgggcagttccaccagaaggtaaaccaaaggggataatatgtaagccttcagaatataatg

SEQ ID NO: 101275 - DNA, 75 bp, synthetic construct
  source 1..75: mol_type = other DNA
gggggccgggatttggtcatccatggacgaaacgggcgaacggctggtgcgctgggagcgtgagcatgttccgga

SEQ ID NO: 101276 - DNA, 75 bp, synthetic construct
  source 1..75: mol_type = other DNA
gtgtggcgtcgcgagcgtgacctgacgggatggatgtcgctgtcgcggaaaccggaggtgacgtggtacgggtgg

SEQ ID NO: 101277 - DNA, 75 bp, synthetic construct
  source 1..75: mol_type = other DNA
tcatctgatgagattttaattccttttgattctcatacgaaatgcttttttccggacaaaacgaataaattatcc

SEQ ID NO: 101278 - DNA, 75 bp, synthetic construct
  source 1..75: mol_type = other DNA
catatcgaaccagcggacaatgcctaccgcatccgcttgcgtatcgacggcgtattgcatcctttaccggatgtt

SEQ ID NO: 101279 - DNA, 75 bp, synthetic construct
  source 1..75: mol_type = other DNA
gcgtatccagacggtatatcagccggggagcttcgcgccgctcatccgcatcgaaacagacaacggcgagcggga

SEQ ID NO: 101280 - DNA, 75 bp, synthetic construct
  source 1..75: mol_type = other DNA
ggcaaaaaacaactccagaagtctctcgctgaatggctggaagactgggccgacttcctcacagcctatgacagc

SEQ ID NO: 101281 - DNA, 75 bp, synthetic construct
  source 1..75: mol_type = other DNA
tgattggttacgccgccctgggcgtacctgtggaatatttgctggcggcatcgttaatggcgatcccaggcggga

SEQ ID NO: 101282 - DNA, 75 bp, synthetic construct
  source 1..75: mol_type = other DNA
caggagacgaatgaactggaactgatgaacgcaacattcgatgaaaaatcgcgtgaactggtgaccttagcgaaa

SEQ ID NO: 101283 - DNA, 75 bp, synthetic construct
  source 1..75: mol_type = other DNA
acactcaaaaaaaagagcactatttagaattttctttggcggactgtgggttaggatttctccgagaattgcggc

SEQ ID NO: 101284 - DNA, 75 bp, synthetic construct
  source 1..75: mol_type = other DNA
tgctggttttcgcaacacagaggaacaggatcggcgcaggaaaacttatgcagaaaaaatacagaacatttatcg

SEQ ID NO: 101285 - DNA, 75 bp, synthetic construct
  source 1..75: mol_type = other DNA
ggtgtgctagggtatgaagcgcaactggttaacgccgtaatcagcacccgtgggccgctaaccgggcgtattgaa

SEQ ID NO: 101286 - DNA, 75 bp, synthetic construct
  source 1..75: mol_type = other DNA
ccagagaagaaatggtcgagctgacgggaagcccacttaaatcaaagcaatgtgaggctcttcgccgggctggaa

SEQ ID NO: 101287 - DNA, 75 bp, synthetic construct
  source 1..75: mol_type = other DNA
gaaacgtactactgcgctctatttcgaaccggcattcttcgctctggcgttaatctcaatttggctcagcatcaa

SEQ ID NO: 101288 - DNA, 75 bp, synthetic construct
  source 1..75: mol_type = other DNA
tttcccggtagagtggggcgcttatcgtctggaagtcaaagcgccgaatgaagcagtcagcagcgtgcgtttttg

SEQ ID NO: 101289 - DNA, 75 bp, synthetic construct
  source 1..75: mol_type = other DNA
gaggacacgggggtgacgcttccggcggagctggcggtgatgctggggaggctggagcgggaactgcgtgcggga

SEQ ID NO: 101290 - DNA, 75 bp, synthetic construct
  source 1..75: mol_type = other DNA
acctggagaaagtgaatgcgttgctgaaggtcattatcacctggtatgagtgcgaaatcgtccggctgaaggtga

SEQ ID NO: 101291 - DNA, 75 bp, synthetic construct
  source 1..75: mol_type = other DNA
ggaaagtggcattacaaagcgatactccggtaaaaaaagaaaaagtgcggtgcaaaacggcattccagagtctgt

SEQ ID NO: 101292 - DNA, 75 bp, synthetic construct
  source 1..75: mol_type = other DNA
tgtatcacatcattttcgatcaacaaaccaaaagccgcatccgcgtggatagcttccccgctgccagtgaactca

SEQ ID NO: 101293 - DNA, 75 bp, synthetic construct
  source 1..75: mol_type = other DNA
aaccaccacgatgacgctccgacaggatgcgtccaccgggttaagaaccgacttttatgccctgttgaacgatac

SEQ ID NO: 101294 - DNA, 75 bp, synthetic construct
  source 1..75: mol_type = other DNA
atgatgttcaccgaagtgccttttattgaacgcttcgccgcagcgcgaaaagccgggttcgatgctgtggaattt

SEQ ID NO: 101295 - DNA, 75 bp, synthetic construct
  source 1..75: mol_type = other DNA
gcaggtcaggtttacggtctttctgcccgaggcttggctattgataccgctttgccatcaggtgaagaatttcca

SEQ ID NO: 101296 - DNA, 75 bp, synthetic construct
  source 1..75: mol_type = other DNA
atagtcaaatgacctttaggaattcatcaaaactatctaatttcattagtaaatgcaaatgtggcgaccctatta

SEQ ID NO: 101297 - DNA, 75 bp, synthetic construct
  source 1..75: mol_type = other DNA
gctgtttatccagtggcagtgggatggggtatggctgctgcagtggcaggattatgcctttggcctcatgctgat

SEQ ID NO: 101298 - DNA, 75 bp, synthetic construct
  source 1..75: mol_type = other DNA
ccgtactgcgcggagaagaagaaatcacctggggtgagccaatctacctggctgatatcaccacacgtaactctc

SEQ ID NO: 101299 - DNA, 75 bp, synthetic construct
  source 1..75: mol_type = other DNA
aaggagtttggtgctaaagctggggcttcgattggtattgattttggcccatatgatttcggtgtatttggtgac

SEQ ID NO: 101300 - DNA, 75 bp, synthetic construct
  source 1..75: mol_type = other DNA
ggggtggctagtggcgcaacacctttaggagcaaattatttagaaaaaggccgtgttaagttttatcgcacttct

SEQ ID NO: 101301 - DNA, 75 bp, synthetic construct
  source 1..75: mol_type = other DNA
aaaactatacgttaattcgtgaagcattcaacgcgcagcggctggatgcggtcgagcgtgcagcagcattccttt

SEQ ID NO: 101302 - DNA, 75 bp, synthetic construct
  source 1..75: mol_type = other DNA
tcaaggatggtttgatattcctaacggttggacagccgacgctttcgggactatttcattctgtgctcattcttc

SEQ ID NO: 101303 - DNA, 75 bp, synthetic construct
  source 1..75: mol_type = other DNA
tattttcagtgtcaatagcaggtctgttcttgaagattacaaaatcctcttgaagtggcttgtcttttatgcagc

SEQ ID NO: 101304 - DNA, 75 bp, synthetic construct
  source 1..75: mol_type = other DNA
gtggattacgaagtaaaaaaaataaaagaattagaaagaaaaaatcatacattgatcgactgtataaaaaagata

SEQ ID NO: 101305 - DNA, 75 bp, synthetic construct
  source 1..75: mol_type = other DNA
gtattgatttggcgttacgcgaacgcgaagtccgactctaagatgtcacggaggttcaagttacctttagccgga

SEQ ID NO: 101306 - DNA, 75 bp, synthetic construct
  source 1..75: mol_type = other DNA
ccgacagcacagattgttcaccggcagtctgttacccgcacgggtgtggtgaatgaaaacggggtggtctattcc

SEQ ID NO: 101307 - DNA, 75 bp, synthetic construct
  source 1..75: mol_type = other DNA
gataccagtggctgtaccggggaactgcctatcagcgccggtaacagcgtaggcatgttcatggttgtcgggggc

SEQ ID NO: 101308 - DNA, 75 bp, synthetic construct
  source 1..75: mol_type = other DNA
ttttcgatggcgagaaaattgcagaacttgctgaggacgaatccggtaatattttacgtactgccgtacgacgct

SEQ ID NO: 101309 - DNA, 75 bp, synthetic construct
  source 1..75: mol_type = other DNA
tcttcgatatggtgcgtgaaagagtgtgcgctatggatactaagattgcgctgataagagcgggcgtgccagcca

SEQ ID NO: 101310 - DNA, 75 bp, synthetic construct
  source 1..75: mol_type = other DNA
ttctctttcgcagtcagaattggccatttttctaggattatcacaatcagatatatctaaaatcgaaagctttga

SEQ ID NO: 101311 - DNA, 75 bp, synthetic construct
  source 1..75: mol_type = other DNA
ttaaagcccttattaactcaataggtaattcaccatatgatatagcagtatggatttatcgtattgttcatcggg

SEQ ID NO: 101312 - DNA, 75 bp, synthetic construct
  source 1..75: mol_type = other DNA
atgaagcgtatccatagtgctaaatggcgtagtaaagcagcacaagagcaaagagcagcagaacaggctgttcgt

SEQ ID NO: 101313 - DNA, 75 bp, synthetic construct
  source 1..75: mol_type = other DNA
ggcattcctaaagcaagacgagatgaaataaaaaattcgctctcattaatatcacaattacaaaagcagaagtta

SEQ ID NO: 101314 - DNA, 75 bp, synthetic construct
  source 1..75: mol_type = other DNA
ttagcgttgaaaacggaacagacaaagcggttgccagagtattcttcaaaggagttattgccagcccaggaagaa

SEQ ID NO: 101315 - DNA, 75 bp, synthetic construct
  source 1..75: mol_type = other DNA
cttccgtaacggcaaagaagttttcgatcgtgaccttctcgacatgcgtatcgtcactgaagaagtggtcgttaa

SEQ ID NO: 101316 - DNA, 75 bp, synthetic construct
  source 1..75: mol_type = other DNA
agcgtgtttttagttggggtgatatttgcttttccgtacatcgcaacgcggcttggtgatttaggaactgaaggt

SEQ ID NO: 101317 - DNA, 75 bp, synthetic construct
  source 1..75: mol_type = other DNA
ggttgatttttatgcatattgaagcagtaccttgtcctcattgtggagctagtccagatcatcaagatctggaaa

SEQ ID NO: 101318 - DNA, 75 bp, synthetic construct
  source 1..75: mol_type = other DNA
gtgctccttaagttttatctcggtggaggtattgaaagatgcgaggatctcattaataaatatgttaaagatatc

SEQ ID NO: 101319 - DNA, 75 bp, synthetic construct
  source 1..75: mol_type = other DNA
gacgtaaaaccccgaaccgcaaaccgtggaccccaaacctgaatttctcaatggttgacttccatgaacgccagc

SEQ ID NO: 101320 - DNA, 75 bp, synthetic construct
  source 1..75: mol_type = other DNA
cggatcgtgtcacgttgaagctggacaaagccagctatcgtccaggcgataccatgaagttgcacattgcggcgc

SEQ ID NO: 101321 - DNA, 75 bp, synthetic construct
  source 1..75: mol_type = other DNA
atatctcactttccaaataatataaacattaagattattggcattaacattaccgaaaaagattatgttaatctt

SEQ ID NO: 101322 - DNA, 75 bp, synthetic construct
  source 1..75: mol_type = other DNA
aagggaaaagagataaataagtgcaatatcgtaattagatttaatagctacgatacgagccttaaccgaagagct

SEQ ID NO: 101323 - DNA, 75 bp, synthetic construct
  source 1..75: mol_type = other DNA
cgaactggttatacatgaagataagaaaggaggaaataagttacttgagttgtcgatggattacagtattgacct

SEQ ID NO: 101324 - DNA, 75 bp, synthetic construct
  source 1..75: mol_type = other DNA
ctggatgttttcgagcgcggcgaagtccgcactgagctgttgaaagaacttgaccggcagcaacgtaaactccag

SEQ ID NO: 101325 - DNA, 75 bp, synthetic construct
  source 1..75: mol_type = other DNA
aaaaacaacaaacagttattaaaacttgttatgaattacagtgttgacatcttacacgctgacaatgcattaact

SEQ ID NO: 101326 - DNA, 75 bp, synthetic construct
  source 1..75: mol_type = other DNA
gatcgtattgatagcctgacggctgcggtgccggtctttgcttgtctgttgttgctggtattcaggacgctttga

SEQ ID NO: 101327 - DNA, 75 bp, synthetic construct
  source 1..75: mol_type = other DNA
atgagcttgagcgcgagctggaatcacttatccagctgaatggcgcgccctccgggaatattcgtttatcagccg

SEQ ID NO: 101328 - DNA, 75 bp, synthetic construct
  source 1..75: mol_type = other DNA
gaagatttaatgccgctgcaggcgttcctctcccatgcggcgctggaagcaggcgaagggcaggcggatacctgg

SEQ ID NO: 101329 - DNA, 75 bp, synthetic construct
  source 1..75: mol_type = other DNA
tgaaggggcaggggctggatttaagcaacagccggatacagggacaacatactgagctggatgcaaccagtggaa

SEQ ID NO: 101330 - DNA, 75 bp, synthetic construct
  source 1..75: mol_type = other DNA
ctgttggtgttattctatcccggttccgcggcgatctggcgtaactccagaacattgcgcattatctttggcata

SEQ ID NO: 101331 - DNA, 75 bp, synthetic construct
  source 1..75: mol_type = other DNA
gagtttaccctcacgcgtgaaacgacgctggatcgctcgaaagcaaccgttaacacgagtgcggacgaccttacc

SEQ ID NO: 101332 - DNA, 75 bp, synthetic construct
  source 1..75: mol_type = other DNA
tgaatcccgtaacagggttaatgctattggcattaaccctgttacgggatatggctccggtctgatgcaaatcga

SEQ ID NO: 101333 - DNA, 75 bp, synthetic construct
  source 1..75: mol_type = other DNA
cagagggcgtcacattttcagtaaaaatgaaggccaatgatggtcgtgctacacgctatgatggagaacggaagg

SEQ ID NO: 101334 - DNA, 75 bp, synthetic construct
  source 1..75: mol_type = other DNA
agattgattgaaaaaaatgcaagcttaatgcaaaacgatggagaagaccgtttatctatagaaataattaatata

SEQ ID NO: 101335 - DNA, 75 bp, synthetic construct
  source 1..75: mol_type = other DNA
cagacggcacgccggttgtcgggcgtacacgctttaaaaatctgtggctgaataccggtcacggcacgctcggct

SEQ ID NO: 101336 - DNA, 75 bp, synthetic construct
  source 1..75: mol_type = other DNA
cggtcttgagatttcagagtggtggaataaacagcatgataattatagttcagaacccgctataaactataattt

SEQ ID NO: 101337 - DNA, 75 bp, synthetic construct
  source 1..75: mol_type = other DNA
gtttagacgccttatatctgctgctgtccgatggtctggtgatgcaagacttcatggcctaccgctctattttcc

SEQ ID NO: 101338 - DNA, 75 bp, synthetic construct
  source 1..75: mol_type = other DNA
cagctgctgaaagatgcgggcgacagcaacatgaaacgcgtctggctggaagcgggcggcaaaagcgccaacatc

SEQ ID NO: 101339 - DNA, 75 bp, synthetic construct
  source 1..75: mol_type = other DNA
actatccggccaatctctccggcggccaacaacagcgcgtggccattgcccgggcgctggccatgtcgccgaaag

SEQ ID NO: 101340 - DNA, 75 bp, synthetic construct
  source 1..75: mol_type = other DNA
tactccgctgaggatggcgactgtatccgctacgttctgacccgtacctctctaagcgacgattccaaaggcgat

SEQ ID NO: 101341 - DNA, 75 bp, synthetic construct
  source 1..75: mol_type = other DNA
ctggtgattcataacatcggcgcaggtgcgcaggaagaagacgtgctgtttagctggcggatggtggggcactat

SEQ ID NO: 101342 - DNA, 75 bp, synthetic construct
  source 1..75: mol_type = other DNA
gccagcagcattacgctggaggtggttgataaagcgcaatggaataccgggaatagcgcggcaacgctgaaaaaa

SEQ ID NO: 101343 - DNA, 75 bp, synthetic construct
  source 1..75: mol_type = other DNA
ttcagatggtgttaaggatagtgatgcggccacaaaaggacagatggacaacgccattgcagatgctgtacgggt

SEQ ID NO: 101344 - DNA, 75 bp, synthetic construct
  source 1..75: mol_type = other DNA
ggttcacgaagatatggcgaagaattttgctgagtacccgcaaaaatggaagttaaagggggaaccgcagaattc

SEQ ID NO: 101345 - DNA, 75 bp, synthetic construct
  source 1..75: mol_type = other DNA
attcatccacagccaggcggtttaacctcatttcagtcattgtgtaccagtcttgcggcgcgcgtgggtagcggc

SEQ ID NO: 101346 - DNA, 75 bp, synthetic construct
  source 1..75: mol_type = other DNA
atggttgcgcctgctgatctcgaaccgccacaagccgttcagccgccaccggagccggtggtagagccagaaccg

SEQ ID NO: 101347 - DNA, 75 bp, synthetic construct
  source 1..75: mol_type = other DNA
ataaattcaacatttaagcagctgaatgataagatagaagctaatgctaaaaaagctaatgcaggtattgcttcc

SEQ ID NO: 101348 - DNA, 75 bp, synthetic construct
  source 1..75: mol_type = other DNA
gatcactgccgctgatggtagtgagtactacggcaagtccatgacactgccggtactgggcgagggtactttttc

SEQ ID NO: 101349 - DNA, 75 bp, synthetic construct
  source 1..75: mol_type = other DNA
atcacagcaacatcaccgacaccaggcgctatctggatttagacaagcaagccgttagccgggtgatcaatgaga

SEQ ID NO: 101350 - DNA, 75 bp, synthetic construct
  source 1..75: mol_type = other DNA
aaagcacaattactggctatcctgtcaggattacagccccgcaaagacaaccagcgcccgtcagaaaataagtta

SEQ ID NO: 101351 - DNA, 75 bp, synthetic construct
  source 1..75: mol_type = other DNA
tcatttgattgataacgcggacgaacatctggcgggcatgttcgcttcgctattcagtcagtctgatgaacacat

SEQ ID NO: 101352 - DNA, 75 bp, synthetic construct
  source 1..75: mol_type = other DNA
gcggactcgcgaccgcagcggtaatctcatggggttacggcatgtgggcgaatttgaacgttgcacctatcacct

SEQ ID NO: 101353 - DNA, 75 bp, synthetic construct
  source 1..75: mol_type = other DNA
atgtttcaaaaaaacaaaactcgcaaaatgtccctaagccgggcgctggacaaatacctgaagattgtttccgtc

SEQ ID NO: 101354 - DNA, 75 bp, synthetic construct
  source 1..75: mol_type = other DNA
ttaaaggacctaatggggaaaaaaaccaaaaaataaaatattctcataattgggataaagaaattttaattatta

SEQ ID NO: 101355 - DNA, 75 bp, synthetic construct
  source 1..75: mol_type = other DNA
taatgggcgagagcgtcgcctgacttctggcgaagaacgccgactctcccgctatttcagagataaaaatcagca

SEQ ID NO: 101356 - DNA, 75 bp, synthetic construct
  source 1..75: mol_type = other DNA
gccggaaaaacaacgcctcctcgatgccatctggccggttctggtcagcttcagtgatgcgggcacacataccgt

SEQ ID NO: 101357 - DNA, 75 bp, synthetic construct
  source 1..75: mol_type = other DNA
ccacagcagcctatgctgtcggttacgaaagcttatcccatttccgccgggaatatttgcagatgtttggagagt

SEQ ID NO: 101358 - DNA, 75 bp, synthetic construct
  source 1..75: mol_type = other DNA
atcgcgcgcggcaaaagcgccgatattgaccgtgcggtgagtgcggcacgcagcgtatttgaacgcggcgactgg

SEQ ID NO: 101359 - DNA, 75 bp, synthetic construct
  source 1..75: mol_type = other DNA
cacaccgtcctgtggatccggagtcgtattgatttggcgttacgcgaacgcgaagtccgactctaagatgtcacg

SEQ ID NO: 101360 - DNA, 75 bp, synthetic construct
  source 1..75: mol_type = other DNA
gccagcactcattattacgatggcactgatcgtcctgtttattgtcgtgtcggtactccaacctcttcttcaact

SEQ ID NO: 101361 - DNA, 75 bp, synthetic construct
  source 1..75: mol_type = other DNA
gccattctctaccgcagcaatgcccagtcgcgtgtactggaagaggcgctgctacaggcgagtatgccgtaccgt

SEQ ID NO: 101362 - DNA, 75 bp, synthetic construct
  source 1..75: mol_type = other DNA
tgaatgcagccctgtctctggcacagggtaagaatgctctggctggtgccgcaggcgcagccaccggcgaggtgg

SEQ ID NO: 101363 - DNA, 75 bp, synthetic construct
  source 1..75: mol_type = other DNA
gcgaaggaaaaaagctgctgccgcacatttatgaacttaccagagtgatggatacccttcgtgaggctgccaaaa

SEQ ID NO: 101364 - DNA, 75 bp, synthetic construct
  source 1..75: mol_type = other DNA
agatgaattttaaatacaccatcaccttcagtcgtgacgaagacaaactacacgcgcctgataatgcctgggtgc

SEQ ID NO: 101365 - DNA, 75 bp, synthetic construct
  source 1..75: mol_type = other DNA
ggcaatttctgcgtgaagatcgtttgattgctctggtgcgtcagcgactgagcatcccgggcggctgttgcagct

SEQ ID NO: 101366 - DNA, 75 bp, synthetic construct
  source 1..75: mol_type = other DNA
cagaaagctgttgctgattctctggctgtggcaagggaaacgcttcgcggatatcgggatatttctgacggtgtg

SEQ ID NO: 101367 - DNA, 75 bp, synthetic construct
  source 1..75: mol_type = other DNA
atggacgtttcttacctgctcgatagccttaatgacaaacagcgcgaagcggtggccgcgccacgcagcaacctt

SEQ ID NO: 101368 - DNA, 75 bp, synthetic construct
  source 1..75: mol_type = other DNA
gtccgatattaatgatgatatgaacccaacgtttttaattgtctcaaaaaatagcaatggtttaagttcaactcc

SEQ ID NO: 101369 - DNA, 75 bp, synthetic construct
  source 1..75: mol_type = other DNA
atgcacatacgctgcctgtacttaatgaagaaaaaggtgatggaaacaacgctgcgggggctacggggtttacgg

SEQ ID NO: 101370 - DNA, 75 bp, synthetic construct
  source 1..75: mol_type = other DNA
acgtgcaggcgttcctcggtgaattgggttactccatcccgggagcgctgctggagccgatcctctgcgtggtga

SEQ ID NO: 101371 - DNA, 75 bp, synthetic construct
  source 1..75: mol_type = other DNA
ggcattactgtcaccaacagagccgaatgatgcgcttaaacgggcctttaaacgccgtaataatatgctgtacac

SEQ ID NO: 101372 - DNA, 75 bp, synthetic construct
  source 1..75: mol_type = other DNA
gcatctgacggcgctggaaaatgtgatgtttgggcctattcgcgtacgcaaaatgagtcaagcggcagcccgcga

SEQ ID NO: 101373 - DNA, 75 bp, synthetic construct
  source 1..75: mol_type = other DNA
ttcttgcaacggcgaaacgtcatctgggcgacgaactgcacgatcagttcagcatcaccttggcggatatgaaac

SEQ ID NO: 101374 - DNA, 75 bp, synthetic construct
  source 1..75: mol_type = other DNA
ggatcacggtggaaaacaccattgagctgttaagcattgaaagtatcaaacgttgtgtcgcggcgaatatcgggg

SEQ ID NO: 101375 - DNA, 75 bp, synthetic construct
  source 1..75: mol_type = other DNA
aaaacgatcctaacgaagcgcgggcgcagctcatcacgctgcgccgaagcgtgctaaaactaaccggtgatgttt

SEQ ID NO: 101376 - DNA, 75 bp, synthetic construct
  source 1..75: mol_type = other DNA
cctgcaattcatcaaagcgcgccgttcgatctcctgcaaaagcagtacgcgggaagtcgccaaagatgtcgtggc

SEQ ID NO: 101377 - DNA, 75 bp, synthetic construct
  source 1..75: mol_type = other DNA
agccgctgaaacaaatcgtcctccaatgaagcgtatccacagtgccaaatggcgtaataaagctgctcaggaaca

SEQ ID NO: 101378 - DNA, 75 bp, synthetic construct
  source 1..75: mol_type = other DNA
gatctgagctgcgccacctcaaacggtgaatattttattgatgacgagaacagagtcatcagcgaactggttgaa

SEQ ID NO: 101379 - DNA, 75 bp, synthetic construct
  source 1..75: mol_type = other DNA
gaagatttaatgccgctgcaggcgttcctctcccatgcggcactggaagcgggcgagggacaggcggatacctgg

SEQ ID NO: 101380 - DNA, 75 bp, synthetic construct
  source 1..75: mol_type = other DNA
tggcgaacatagccgtttgcaggtggcattccagggccagggaatcaaatggctggtggcagcttacgcccggct

SEQ ID NO: 101381 - DNA, 75 bp, synthetic construct
  source 1..75: mol_type = other DNA
ccagggcagcctgctggaatctggcggtcgcccggtgacgcgtcgcgttgaacaggcgatctggcctgccgatac

SEQ ID NO: 101382 - DNA, 75 bp, synthetic construct
  source 1..75: mol_type = other DNA
ggaagaagaacgccgtctggcctacgttggtgtaacccgcgcgatgcagaaactgacgctgacctacgcggaaac

SEQ ID NO: 101383 - DNA, 75 bp, synthetic construct
  source 1..75: mol_type = other DNA
cgcgctgtactttataactgccagcgcatctcgaatcggtatttttgataagaaactcaagctgagcaagatcgc

SEQ ID NO: 101384 - DNA, 75 bp, synthetic construct
  source 1..75: mol_type = other DNA
aattccaggacacggtggtattttagatcgtattgatagtctgacggctgcggtaccggtctttgcttgcttgtt

SEQ ID NO: 101385 - DNA, 75 bp, synthetic construct
  source 1..75: mol_type = other DNA
acgatttcctatcacgacctgttttaccgttatgaccgcatcgcaccgggatggggggcgctgatagactatatc

SEQ ID NO: 101386 - DNA, 75 bp, synthetic construct
  source 1..75: mol_type = other DNA
tattggtgatcggacgctggacgtagttcgccagacatcgcgcgatcgccagctaactctctggcaggcgtgtcg

SEQ ID NO: 101387 - DNA, 75 bp, synthetic construct
  source 1..75: mol_type = other DNA
atagttaacaataatattgttgatggcaatccggtcaggtttgtttatgcggtaagagacgacttattcttgggc

SEQ ID NO: 101388 - DNA, 75 bp, synthetic construct
  source 1..75: mol_type = other DNA
tttggcggtattcctcgtcaggttgctgtgccgctggctgccgtgttggcaatttatgcccgggaaaatggtgca

SEQ ID NO: 101389 - DNA, 75 bp, synthetic construct
  source 1..75: mol_type = other DNA
cggccacgttgaccacggtaaaactactctgaccgctgcaatcaccaccgtactggctaaaacctacggcggtgc

SEQ ID NO: 101390 - DNA, 75 bp, synthetic construct
  source 1..75: mol_type = other DNA
agaattagactgcaatctgtccgagagaaagtaatgcaattaaagagaataactcagatcgcttatgaaaatggt

SEQ ID NO: 101391 - DNA, 75 bp, synthetic construct
  source 1..75: mol_type = other DNA
agccacggcaccttttaaacacaatagcccattatggtgaaatgtctgaactggatatagctaaatggtctggtc

SEQ ID NO: 101392 - DNA, 75 bp, synthetic construct
  source 1..75: mol_type = other DNA
gaaagatgccaagaaaaccactgaaatgcgtgctgcgctggtgaatgccgatcagacgttgagtgaaacctggag

SEQ ID NO: 101393 - DNA, 75 bp, synthetic construct
  source 1..75: mol_type = other DNA
actatccgtcggagctttcaggcggccagcagcagcgcgtggctatcgcccgcgcgctggcggtgaaaccgaaaa

SEQ ID NO: 101394 - DNA, 75 bp, synthetic construct
  source 1..75: mol_type = other DNA
ttaccaacctttacggcggaacaatgatcttccctggtacttcaggttatctgaaaatggggaactgtctcatgt

SEQ ID NO: 101395 - DNA, 75 bp, synthetic construct
  source 1..75: mol_type = other DNA
ggggatggttggttattagtgacagattctcgttacgtcaactggaagagcatgccatcccagcaaacatatgga

SEQ ID NO: 101396 - DNA, 75 bp, synthetic construct
  source 1..75: mol_type = other DNA
gcggagtctgctggccgccggggtgaaagatgacggacgtctggcggcagcgggcaacctgactgtcagtaccac

SEQ ID NO: 101397 - DNA, 75 bp, synthetic construct
  source 1..75: mol_type = other DNA
gtctggcacaaccggcacgaaatcttcgtccacactgggaacgcatcgcagaacacagcgcggcgctggcgcata

SEQ ID NO: 101398 - DNA, 75 bp, synthetic construct
  source 1..75: mol_type = other DNA
caaaagcaacctgacggctaataaggatgtcacgctgaacggcagctatgtgcacctgtcaggaacaaacatcag

SEQ ID NO: 101399 - DNA, 75 bp, synthetic construct
  source 1..75: mol_type = other DNA
tgattattgccactggagcttctgctcgctatctcggcctgccctctgaagaagcctttaaagggcgtggggttt

SEQ ID NO: 101400 - DNA, 75 bp, synthetic construct
  source 1..75: mol_type = other DNA
acgaaccgggtgctttatctttcaggtatgctggataaccggcacgatgccgatcctgaaccaaccgggaaagca

SEQ ID NO: 101401 - DNA, 75 bp, synthetic construct
  source 1..75: mol_type = other DNA
tttaccgctgcgacacctacacaccaacgccacttggtgccgggttatttaatctttctgcaacttttgaacagg

SEQ ID NO: 101402 - DNA, 75 bp, synthetic construct
  source 1..75: mol_type = other DNA
atcaaccgctgtttacccgctggcgcaaagaagatgaagaagcggtaacgaaagcgatgcaggccacgggcatta

SEQ ID NO: 101403 - DNA, 75 bp, synthetic construct
  source 1..75: mol_type = other DNA
attagatatattacgagtttggaacattgaagtacatccagacaagtctaaagaacttgaacaatgtataacaca

SEQ ID NO: 101404 - DNA, 75 bp, synthetic construct
  source 1..75: mol_type = other DNA
gaaaggctataccctggcggcggtactgcacgatcttaatcaggcctgtcggtacgctagtcatttgattgcatt

SEQ ID NO: 101405 - DNA, 75 bp, synthetic construct
  source 1..75: mol_type = other DNA
atgtaagtggtatggcacgcaagaagaattgggaatttcataatttgagtttcataccagccttcgcacttaccc

SEQ ID NO: 101406 - DNA, 75 bp, synthetic construct
  source 1..75: mol_type = other DNA
taccgcgcaacagcagcaggtgacacaggcacagcaggtcgctgaccggatggcacagatttatgaacgcaatct

SEQ ID NO: 101407 - DNA, 75 bp, synthetic construct
  source 1..75: mol_type = other DNA
ttgtctgatttgcgtccgacgcaatccgagctggaaaacatccgggatctggagaaggtgaaagccgaactggcg

SEQ ID NO: 101408 - DNA, 75 bp, synthetic construct
  source 1..75: mol_type = other DNA
gctggccgggcagatggtcagcgtgacggcaggcaacagcgcaacggttgcttcgacggtcaccacgcatccgga

SEQ ID NO: 101409 - DNA, 75 bp, synthetic construct
  source 1..75: mol_type = other DNA
aagaatatcattttaaaagacttattgaaaaaacggcgcgttcaattataatggatattaataaagagtatgagt

SEQ ID NO: 101410 - DNA, 75 bp, synthetic construct
  source 1..75: mol_type = other DNA
ctggcctcggttgaggctggggctgtgctgggcgatatctgcgcttatgccaatgccggctttaccgccgagcgt

SEQ ID NO: 101411 - DNA, 75 bp, synthetic construct
  source 1..75: mol_type = other DNA
tccctgatacgggagaaagagcactggttcatttcagtggtgacagtggacttcgggttgcgctggttgcagagt

SEQ ID NO: 101412 - DNA, 75 bp, synthetic construct
  source 1..75: mol_type = other DNA
tcttcatatatattacatttgagcaaaacatttaatgctgcaagagatgtggcaaatgaactgcggttaatgaga

SEQ ID NO: 101413 - DNA, 75 bp, synthetic construct
  source 1..75: mol_type = other DNA
cctttagagtttaagagcttttcatatatttctagaggggtgaggaaatataaaggtgccggagaatataataaa

SEQ ID NO: 101414 - DNA, 75 bp, synthetic construct
  source 1..75: mol_type = other DNA
ttgtgcagcataataagcaggcagaactgattgcgctaagcaatgctgagtctctacaacgccaggagttgagcg

SEQ ID NO: 101415 - DNA, 75 bp, synthetic construct
  source 1..75: mol_type = other DNA
tgggaaatacccggatattacgcgctgaagcgggaacggcggtaagctatcacatggacctgcaaaacggtacga

SEQ ID NO: 101416 - DNA, 75 bp, synthetic construct
  source 1..75: mol_type = other DNA
cgggatgtttaacgcctccgtcgaaaacaccgaacgtgtcttatcaggaaaacctgaagcgaaaatgcccaacgg

SEQ ID NO: 101417 - DNA, 75 bp, synthetic construct
  source 1..75: mol_type = other DNA
tttcaggcttccgttgtggcgctgatggagatgttcaggccgtatgtaatggtgaattatctgttgcggcaaaaa

SEQ ID NO: 101418 - DNA, 75 bp, synthetic construct
  source 1..75: mol_type = other DNA
tcagcagacggttacccaggccatcaacctgctcgagcgttgcaagtgcagcggatatcagcctgaagaaatcat

SEQ ID NO: 101419 - DNA, 75 bp, synthetic construct
  source 1..75: mol_type = other DNA
ggagcgccgaaggagattgtcactgctgaactgatcgagcgcatttatggtctgcgctgcatgatcattgacgat

SEQ ID NO: 101420 - DNA, 75 bp, synthetic construct
  source 1..75: mol_type = other DNA
ctatgtgcagatgctaaccggtatgaccggaagcgacgctgattccagcccccaactgaccgcctgccgtaaatc

SEQ ID NO: 101421 - DNA, 75 bp, synthetic construct
  source 1..75: mol_type = other DNA
aaagataaactgctgccgcttggcgatgacgtgacttttattccaggacatggaccattatccactctcggttac

SEQ ID NO: 101422 - DNA, 75 bp, synthetic construct
  source 1..75: mol_type = other DNA
ttcttcaggcaatgttacgaaaactgaggattccgccacaaacaatacctctttctctccgtcggctcagggctc

SEQ ID NO: 101423 - DNA, 75 bp, synthetic construct
  source 1..75: mol_type = other DNA
gcactttctgatcaggctgagcaactggaacacatgactgcagcacttgccgaaggcggtgcgttggcgctgctg

SEQ ID NO: 101424 - DNA, 75 bp, synthetic construct
  source 1..75: mol_type = other DNA
aacagcatgtcttcaatatgctgtcggctggcagcgaacttaaagaagtgaagcgttttctcaccagcaagcgcc

SEQ ID NO: 101425 - DNA, 75 bp, synthetic construct
  source 1..75: mol_type = other DNA
ctattataaccaataccctaaaacaaaaattaagtttatcaccacaaaaatctttaacaaaaatacaagatgaag

SEQ ID NO: 101426 - DNA, 75 bp, synthetic construct
  source 1..75: mol_type = other DNA
tgttccaaatattggggatgggtattgggaatctttagatgataaagttgatttacattcatacggcatattatc

SEQ ID NO: 101427 - DNA, 75 bp, synthetic construct
  source 1..75: mol_type = other DNA
tcaacgggcagattttcgaccaccaggcgcggctgcattcgtttgagctggcgatggatgttaaggaagagttgt

SEQ ID NO: 101428 - DNA, 75 bp, synthetic construct
  source 1..75: mol_type = other DNA
cttgcgctgcatgattattgatgatccggtagcaggaacaccgttagtggtgccgctcggacgaacggcaccgtc

SEQ ID NO: 101429 - DNA, 75 bp, synthetic construct
  source 1..75: mol_type = other DNA
ctgaattgatcgagcgtatttacggtttgcgctgcatgattattgatgatccggtagccgaaacgccattagtgg

SEQ ID NO: 101430 - DNA, 75 bp, synthetic construct
  source 1..75: mol_type = other DNA
atggtagtgacagtgtccctacggtggtgacaaaaagtgtcaccaaaacagtgacaaccctgtcaccaaaatggg

SEQ ID NO: 101431 - DNA, 75 bp, synthetic construct
  source 1..75: mol_type = other DNA
ggggcgtttaccggctcgcgacgcggaggtcgcgccgggctgttcgaaattgcccacggcggtacgctgtttctt

SEQ ID NO: 101432 - DNA, 75 bp, synthetic construct
  source 1..75: mol_type = other DNA
ttgaactgcggcttctgaacgacaaggggaatggcatatccctgtcggactttaaagttaccttcgcaatcgact

SEQ ID NO: 101433 - DNA, 75 bp, synthetic construct
  source 1..75: mol_type = other DNA
atgccattctatttcaggaaggagtgtccgttaaactcaggctacctcattcatgcctatactggcacccagtca

SEQ ID NO: 101434 - DNA, 75 bp, synthetic construct
  source 1..75: mol_type = other DNA
aagagaaagcattctggcttgccaaagcaacggaaacaaaccgcccggcaatgcaacgtgttcatcgtgctaaat

SEQ ID NO: 101435 - DNA, 75 bp, synthetic construct
  source 1..75: mol_type = other DNA
gcaccagtacagtcactgccagcatcaacagcagcagcctgagccggaacgtgacgtttgtcgccgatgtcagca

SEQ ID NO: 101436 - DNA, 75 bp, synthetic construct
  source 1..75: mol_type = other DNA
ataaaaacactatgtccgaaagtgttcggacggagtgtgaaaaatcacctgaccgtcacgaagaaaccgacaagg

SEQ ID NO: 101437 - DNA, 75 bp, synthetic construct
  source 1..75: mol_type = other DNA
gtatgtgtgggtgaaactggaaattggtgagatttcagttgaggcatctgaactacgcgtcaaaggaatgcgagc

SEQ ID NO: 101438 - DNA, 75 bp, synthetic construct
  source 1..75: mol_type = other DNA
cacccgatcctgaatgtggagaactattagtgaccattccctccagagggaaactgtttttcactcataatgatc

SEQ ID NO: 101439 - DNA, 75 bp, synthetic construct
  source 1..75: mol_type = other DNA
agtgcgtatcaacggcgaactgataaccagtgaaccggcggacattctgccaatggcgcaacgttatttcctgtt

SEQ ID NO: 101440 - DNA, 75 bp, synthetic construct
  source 1..75: mol_type = other DNA
catctggcgctccaccttcctggatgtgctgcagtggaccgtggtatggacgctgctggcgaccactctgcagtg

SEQ ID NO: 101441 - DNA, 75 bp, synthetic construct
  source 1..75: mol_type = other DNA
cggggcgattgccgaatcgctgctggaagcggagctgtttggctatgaggaaggggcgtttaccggctcgcgacg

SEQ ID NO: 101442 - DNA, 75 bp, synthetic construct
  source 1..75: mol_type = other DNA
gccgtgcgggtgaccttaagcggcaccgagggggcactggattctctgcgcgtgcgggaagtcacccgacgtcgt

SEQ ID NO: 101443 - DNA, 75 bp, synthetic construct
  source 1..75: mol_type = other DNA
accccgcctcgttgttatcctcgcgacagacgtggctatcagatatggttaggcgaaacgcgtgttcgaactgct

SEQ ID NO: 101444 - DNA, 75 bp, synthetic construct
  source 1..75: mol_type = other DNA
aattaaggggatcgtcagcactggcggtaattctggttcatggggtggttatggaactaaaactgctactggagc

SEQ ID NO: 101445 - DNA, 75 bp, synthetic construct
  source 1..75: mol_type = other DNA
tatgctcatgcttaatatcagtgtggcaaaatacattgtgaaggaatttacgtcaaaacaactcaatgatttaaa

SEQ ID NO: 101446 - DNA, 75 bp, synthetic construct
  source 1..75: mol_type = other DNA
tcaggtcaatatccagacaccttctgcaggtggggtatcgcacaatacttacagtcagtttgatgtcagtcatca

SEQ ID NO: 101447 - DNA, 75 bp, synthetic construct
  source 1..75: mol_type = other DNA
gcgctgcatctttatcgcagcaacttcaaaccgtcggcacggctggaaaaaccgtatgcgatggtgtgcatcaat

SEQ ID NO: 101448 - DNA, 75 bp, synthetic construct
  source 1..75: mol_type = other DNA
gcagcgcgaagcccaattgcagaaatatcggtcattgctggaagatgctaaacgcacgaaacagcagcaactgga

SEQ ID NO: 101449 - DNA, 75 bp, synthetic construct
  source 1..75: mol_type = other DNA
gattttttggttgacattagaacaagcgaatctagaggtgtaacatctcttacgccagagcctacttattacggt

SEQ ID NO: 101450 - DNA, 75 bp, synthetic construct
  source 1..75: mol_type = other DNA
attgcccgcccggatatcgaacctgatggtcagataatacgcgtcgatataaatctggtttatgctgaagaacaa

SEQ ID NO: 101451 - DNA, 75 bp, synthetic construct
  source 1..75: mol_type = other DNA
acagtcaccgccagcatcaacagcagcagccagagccagagcgtgaagtttattgccgatgtcagcacggcgcag

SEQ ID NO: 101452 - DNA, 75 bp, synthetic construct
  source 1..75: mol_type = other DNA
ttgattggcattgcccacccgttagaaatggcagcagaaatgcgcagtgaatttgcacagctttttgccgattac

SEQ ID NO: 101453 - DNA, 75 bp, synthetic construct
  source 1..75: mol_type = other DNA
tgttatcgtggccagtggtttgattgatgcccatgccggtggcatggcgctggctggcgcgcagccatcaggaac

SEQ ID NO: 101454 - DNA, 75 bp, synthetic construct
  source 1..75: mol_type = other DNA
tccccaaacaagaatacatatcccgtgggtatttcacccttaaagaaaccgtgatcgatacaagcaatggaagca

SEQ ID NO: 101455 - DNA, 75 bp, synthetic construct
  source 1..75: mol_type = other DNA
atccactgcatcttgatgtgctggtggtggatgaagcgtcaatgatcgatctcccgatgatgtcgcgactgatcg

SEQ ID NO: 101456 - DNA, 75 bp, synthetic construct
  source 1..75: mol_type = other DNA
caaggctttgcgacagttaccgctgaccgatgaacaaaagaaacgcattccggaagatgccagcactttgcaccg

SEQ ID NO: 101457 - DNA, 75 bp, synthetic construct
  source 1..75: mol_type = other DNA
caacgtctctggtctgattcgcagtggttccgccattacgctgaacgccctgcagtttatcaatcgccacacgca

SEQ ID NO: 101458 - DNA, 75 bp, synthetic construct
  source 1..75: mol_type = other DNA
tgcatatgcttatcactgcacctaaattgtataatgcacttttagcatcagcaaaatatccaccattgccagagt

SEQ ID NO: 101459 - DNA, 75 bp, synthetic construct
  source 1..75: mol_type = other DNA
gctacatcaactatcgccacggataaaaacgcatacaccgctggcgagactataaccgtcgccgtgacgctgaaa

SEQ ID NO: 101460 - DNA, 75 bp, synthetic construct
  source 1..75: mol_type = other DNA
gcggacaatatcggtggggtctattatcgcccggttcagatttatattaataatgcctggagaacggtaagttca

SEQ ID NO: 101461 - DNA, 75 bp, synthetic construct
  source 1..75: mol_type = other DNA
caggaacgttttctgacgcatgtggcggccggcattgcaaaaacggatgcggtcaacaaagggcaactggatgag

SEQ ID NO: 101462 - DNA, 75 bp, synthetic construct
  source 1..75: mol_type = other DNA
attagcagaaacagactttcatattagtggtgtcactggtgagtcatggtatttccgtgaaactgctctggcaat

SEQ ID NO: 101463 - DNA, 75 bp, synthetic construct
  source 1..75: mol_type = other DNA
cactgccgtgacccgtgcgcgccaacgtttgtcgctgtatgccgatgagcgcatattaagtgcggcgattgccac

SEQ ID NO: 101464 - DNA, 75 bp, synthetic construct
  source 1..75: mol_type = other DNA
tgtatgcccgctcaaatgctgcggtgctgattgagggagaaacaggaaccggcaaagagctggcagcgcaggcaa

SEQ ID NO: 101465 - DNA, 75 bp, synthetic construct
  source 1..75: mol_type = other DNA
tgttgggagatttgaagtaaaaaaacaaataaaagaagaaaatattatgaggatgcgttctagggtaattgctat

SEQ ID NO: 101466 - DNA, 75 bp, synthetic construct
  source 1..75: mol_type = other DNA
gatctatttttaaatctaagcatcctacatctattgtagaattaatgaaaaaaagaaaaagagactattatatta

SEQ ID NO: 101467 - DNA, 75 bp, synthetic construct
  source 1..75: mol_type = other DNA
gcaggcatgccagacacagcgccgtcaggcgctgtttttttcatcccttccgcgatttttacgccgctaccggat

SEQ ID NO: 101468 - DNA, 75 bp, synthetic construct
  source 1..75: mol_type = other DNA
cagtgtcaccagtcagacggcggggatcagtacagtcaccgcaaccatcaacagcagcagtcagagccgggatgt

SEQ ID NO: 101469 - DNA, 75 bp, synthetic construct
  source 1..75: mol_type = other DNA
tgattattgccaccggagcttctgcacgctatctcggcctgccctctgaagaagcctttaaaggccgtggggttt

SEQ ID NO: 101470 - DNA, 75 bp, synthetic construct
  source 1..75: mol_type = other DNA
tgttttatcggctgagcattttacgcctgcaactgccaccactgcgtgagcgggtggcagatattctgccgctgg

SEQ ID NO: 101471 - DNA, 75 bp, synthetic construct
  source 1..75: mol_type = other DNA
cgggcagacggtcagcgtgacggcagacaacagtgcaatggtcgctctgacggtgattacagagccggacggcac

SEQ ID NO: 101472 - DNA, 75 bp, synthetic construct
  source 1..75: mol_type = other DNA
tatacattacattaaagatgaaaaaccttattttaaagatgtaattataccatcagatttggaaaggttaatttt

SEQ ID NO: 101473 - DNA, 75 bp, synthetic construct
  source 1..75: mol_type = other DNA
cagcaagttccagcgtaccttcgggatgacgctgccggactggaccatcggcgtcgatcgcatgctggctgaaat

SEQ ID NO: 101474 - DNA, 75 bp, synthetic construct
  source 1..75: mol_type = other DNA
atgccgggtaaattcagattcagccgtcggagcgagaaaaatctggagggcgtcaaaccacaactggttgctgtc

SEQ ID NO: 101475 - DNA, 75 bp, synthetic construct
  source 1..75: mol_type = other DNA
aatacccattcttagtgatgaactgcaattaaaaatgcagttactggtgcgcgaaagtctgatggctctgatgcg

SEQ ID NO: 101476 - DNA, 75 bp, synthetic construct
  source 1..75: mol_type = other DNA
ggaagggaagacatcagcagagatagcgatgattttgtcaatctctgagaatacggtcaatttccatcagaaaaa

SEQ ID NO: 101477 - DNA, 75 bp, synthetic construct
  source 1..75: mol_type = other DNA
tgtcgatccttcaaccactctgcctgttatttgtggtgttgaaattacgaccgaccgcgctggccgttacaacct

SEQ ID NO: 101478 - DNA, 75 bp, synthetic construct
  source 1..75: mol_type = other DNA
ggtcaggcgtggtacatggacctgatgtgttttgcgcgtggggctcgtgatctttatagcccgaaagcaatgcaa

SEQ ID NO: 101479 - DNA, 75 bp, synthetic construct
  source 1..75: mol_type = other DNA
taacacggttgctgtcacggaaatacccggaactgttgatacaggatgagctggttgctgaaggaagcagtaaac

SEQ ID NO: 101480 - DNA, 75 bp, synthetic construct
  source 1..75: mol_type = other DNA
acgtcacaggctgccagcattgcgacggatggcgtttatatcgtcaaagctatcgactatactggcgacaccaga

SEQ ID NO: 101481 - DNA, 75 bp, synthetic construct
  source 1..75: mol_type = other DNA
ttgcctgatttacgcggtgagtttattcgtggctgggatgatggaagagggattgatactaaccgtagcttgctt

SEQ ID NO: 101482 - DNA, 75 bp, synthetic construct
  source 1..75: mol_type = other DNA
ggctctggaaatttgacaatgaatggtgttacttcttatttcggtgtccgtccacgcaacatcgcatttaactac

SEQ ID NO: 101483 - DNA, 75 bp, synthetic construct
  source 1..75: mol_type = other DNA
tggaaaacggctacatcaaagtgcagtcgggtattcatggtaatgccacccagaccagcatccctggcgtctttg

SEQ ID NO: 101484 - DNA, 75 bp, synthetic construct
  source 1..75: mol_type = other DNA
aatgatgaaatagtgatgacgccagagatgaatttcagcaagcgcgaaaaagaaattctgaaatggacggcggaa

SEQ ID NO: 101485 - DNA, 75 bp, synthetic construct
  source 1..75: mol_type = other DNA
tgttaaaaacatgggctatctgagttcggatattcatgcaggaaccacggcggcaaccattaatctgggagacgg

SEQ ID NO: 101486 - DNA, 75 bp, synthetic construct
  source 1..75: mol_type = other DNA
ctttctcccgtagcagtacgcgtgaaattcctgttcctggtgatgagctgcaattaaaaatgcagttgctggtgc

SEQ ID NO: 101487 - DNA, 75 bp, synthetic construct
  source 1..75: mol_type = other DNA
tcaaggctttttgaccgcttttatcgtgtggatccttccaggcaacggaaaggtgaaggcagtggaatagggctt

SEQ ID NO: 101488 - DNA, 75 bp, synthetic construct
  source 1..75: mol_type = other DNA
agcggagctgtttggctatgaggaaggggcatttaccggctcgcgacgcggaggtcgcgccgggctgttcgaaat

SEQ ID NO: 101489 - DNA, 75 bp, synthetic construct
  source 1..75: mol_type = other DNA
accggggaaattttcgcaaccaaccgtgagcaggtggaagcgatgatcgaatatctgtggaaaataaggcgcaga

SEQ ID NO: 101490 - DNA, 75 bp, synthetic construct
  source 1..75: mol_type = other DNA
cagcaaggacattttcgccgtgatctgttttatcgactgagtattctgcgtctgcaattgccaccattgcgcgag

SEQ ID NO: 101491 - DNA, 75 bp, synthetic construct
  source 1..75: mol_type = other DNA
cctgcgcagtaagtatcgccagaaacagctggttgcggaagggaaaagccagaccatgaacagccgccacctgac

SEQ ID NO: 101492 - DNA, 75 bp, synthetic construct
  source 1..75: mol_type = other DNA
atattgttggttcttttgggcgtacccagctttttagagacgtacttagttcagggccatttagtcaacatgggc

SEQ ID NO: 101493 - DNA, 75 bp, synthetic construct
  source 1..75: mol_type = other DNA
ctaaagacctggtagaatctgctccagctgctctgaaagaaggcgtgagcaaagatgacgctgaagcactgaaaa

SEQ ID NO: 101494 - DNA, 75 bp, synthetic construct
  source 1..75: mol_type = other DNA
cgcacgccagcgatcccgtatgaggatctaagtgtagcgcgctacagtcgtggatttacgccatcacgtccaggc

SEQ ID NO: 101495 - DNA, 75 bp, synthetic construct
  source 1..75: mol_type = other DNA
tcaccagcgtgacgatggtaaacagcgtgagttccagccttacattgaagctcagacagcccaatgcgacgctcg

SEQ ID NO: 101496 - DNA, 75 bp, synthetic construct
  source 1..75: mol_type = other DNA
cacctaagagcacaggcggacaggtaaaaagccgagtgccaaccaatgcaggaacagccagcactgaagtggtca

SEQ ID NO: 101497 - DNA, 75 bp, synthetic construct
  source 1..75: mol_type = other DNA
tggatatgctctgtgaggagaatgaagctacccccgaacacgcccccatgcaacttgctaaggcgttatctttcc

SEQ ID NO: 101498 - DNA, 75 bp, synthetic construct
  source 1..75: mol_type = other DNA
cgacaagtaataacactgattttgctaaataccaaattataacaggactttcatttttgttaatatgcttcgttt

SEQ ID NO: 101499 - DNA, 75 bp, synthetic construct
  source 1..75: mol_type = other DNA
gccgagagcggtaaaggtcgcgtatgatcttgctaacgggaaatatactgcacaggacgcgaccacagcgcgaaa

SEQ ID NO: 101500 - DNA, 75 bp, synthetic construct
  source 1..75: mol_type = other DNA
gcaatggaagaaaaattcggtgtttccgctgctgctgctgtagctgtagctgtagctgctggcccggttgaagct

SEQ ID NO: 101501 - DNA, 75 bp, synthetic construct
  source 1..75: mol_type = other DNA
gtcgaagctggggcttacgtctacacgctggctaaagggaaggggaatgacgagaaaaactggtatctgaccagt

SEQ ID NO: 101502 - DNA, 75 bp, synthetic construct
  source 1..75: mol_type = other DNA
gccttccgccactccgccaacaggctggctaaaatgcaatggtgcggctttttctgctgaagaatacccggaact

SEQ ID NO: 101503 - DNA, 75 bp, synthetic construct
  source 1..75: mol_type = other DNA
tccttctgggacagaacgcggccagcacccagacgtacttcattcagccgaaagcccaggtcacctggatgggcg

SEQ ID NO: 101504 - DNA, 75 bp, synthetic construct
  source 1..75: mol_type = other DNA
ggggggtatggctacagtaagagtaatacgctttcaaacctcagcggttaccattcccgtggagtggtggaaggt

SEQ ID NO: 101505 - DNA, 75 bp, synthetic construct
  source 1..75: mol_type = other DNA
aggctgggaagatatagaggattttggggaaacacatctcgattttttgaagcaatatggtgattttgataatgg

SEQ ID NO: 101506 - DNA, 75 bp, synthetic construct
  source 1..75: mol_type = other DNA
cggggagcgggctttcgtaatcttgccctgatgggggaaggttactcagtaattccttcttctactaaacgtaaa

SEQ ID NO: 101507 - DNA, 75 bp, synthetic construct
  source 1..75: mol_type = other DNA
gctgggcggcgataattcgcccaccgataagatgaacgtgaaaggcgatacccaagggaacactcgcgttcgggt

SEQ ID NO: 101508 - DNA, 75 bp, synthetic construct
  source 1..75: mol_type = other DNA
caaacggtcaacggtattgaactcattgaggttggcggtaattctgcaggtaacttcgcgctgaccaccggaact

SEQ ID NO: 101509 - DNA, 75 bp, synthetic construct
  source 1..75: mol_type = other DNA
acaaaatcgtcatactctttttttacgtctgtaaattccctacaatcctgccattgtctgccaacaactatgggg

SEQ ID NO: 101510 - DNA, 75 bp, synthetic construct
  source 1..75: mol_type = other DNA
ttacagcttgatgccgaagataaaaaagcgatcgccgcactggattgcaacgaccgcctggttagcccggaaggt

SEQ ID NO: 101511 - DNA, 75 bp, synthetic construct
  source 1..75: mol_type = other DNA
ttaaagcccgcccagcagtgttaatgatccacgaacaggcgattgctgtgcagaacactgagtacctgaataaac

SEQ ID NO: 101512 - DNA, 75 bp, synthetic construct
  source 1..75: mol_type = other DNA
cagcaatgccattaaaaacatcccctccgagaatcttgatgcgcgactggaaccgacacgcgttcccattgagct

SEQ ID NO: 101513 - DNA, 75 bp, synthetic construct
  source 1..75: mol_type = other DNA
gtgatcgcgtcagccattgcgaaaagcctctacccgggcgtagatccgtcgaaactgacagaagatcagaagcaa

SEQ ID NO: 101514 - DNA, 75 bp, synthetic construct
  source 1..75: mol_type = other DNA
ggttcaacatcagcagcgcgtcgcgggtgggaacgttcaaaatctacaacctgtcagctgatacggtgaaccgca

SEQ ID NO: 101515 - DNA, 75 bp, synthetic construct
  source 1..75: mol_type = other DNA
ttcgttctttatgcgcaatatcgggacggtgagttttttgatgtcgtccgcaatggtgaggagctcttcgaaaca

SEQ ID NO: 101516 - DNA, 75 bp, synthetic construct
  source 1..75: mol_type = other DNA
tttattgtggaatgatgagttattcaacgaagcacagccgttatgggaagccgcacgagcgcatggtttacgccg

SEQ ID NO: 101517 - DNA, 75 bp, synthetic construct
  source 1..75: mol_type = other DNA
gtgattacgcctccggcaccaaccacgttctaccgacttacggctacaccgccacctgttccagcctcggactgg

SEQ ID NO: 101518 - DNA, 75 bp, synthetic construct
  source 1..75: mol_type = other DNA
atgagagatctgttacaacgcccggatttattcagtatcaatactgcgacactgggctataaaacaccgctacct

SEQ ID NO: 101519 - DNA, 75 bp, synthetic construct
  source 1..75: mol_type = other DNA
tttgaaaattgagtttacaactgatgggatacatttcaataaaatagcatatcagtgcctagaggattatattca

SEQ ID NO: 101520 - DNA, 75 bp, synthetic construct
  source 1..75: mol_type = other DNA
atttcccaattgcatttccaaacagatgtctgcgtgttttggtctcacaagactacacaccagatagcggggctg

SEQ ID NO: 101521 - DNA, 75 bp, synthetic construct
  source 1..75: mol_type = other DNA
ttttgagcctggttccagtactgattttgtgacgaataatcttaaaaatattgcttctgataatgccgctggtga

SEQ ID NO: 101522 - DNA, 75 bp, synthetic construct
  source 1..75: mol_type = other DNA
aaatacggaagcatgggtatggtataaaaattgcgatagtaaaaataaaaatgtggcagttgaacttcttcaaat

SEQ ID NO: 101523 - DNA, 75 bp, synthetic construct
  source 1..75: mol_type = other DNA
ctacatttgtttctgctgtgtttgttggttcagctatggcctatgacggaacaattacgtttacaggcaaagttg

SEQ ID NO: 101524 - DNA, 75 bp, synthetic construct
  source 1..75: mol_type = other DNA
gcaaagatcagccagagaggtgcaggcaagcattacccagcaaaaagccgccggacaatggctaacagaaacaca

SEQ ID NO: 101525 - DNA, 75 bp, synthetic construct
  source 1..75: mol_type = other DNA
aaaagcgccgacgcctgccgcaggaaataacaccacgcggattgcgaccactgagtttgttcaggccgctattac

SEQ ID NO: 101526 - DNA, 75 bp, synthetic construct
  source 1..75: mol_type = other DNA
gtcgcagcgaaaagaatctggagggcgtcaaaccacagctggttgccgtggttcgccgtgcgctggagctgacgg

SEQ ID NO: 101527 - DNA, 75 bp, synthetic construct
  source 1..75: mol_type = other DNA
ttaattttgtgctttatatttaccatgatattcttgattggcttataaagatggtcaacattaaaaacgccatac

SEQ ID NO: 101528 - DNA, 75 bp, synthetic construct
  source 1..75: mol_type = other DNA
ggggccgcatcaccgaccagaatacagacggcaatatcacgctcagcggtaccacggcgcagcctgccagcatcg

SEQ ID NO: 101529 - DNA, 75 bp, synthetic construct
  source 1..75: mol_type = other DNA
cagtgcaattcagtaatattacgtggtggtggttttacggattttcgtcagatgatttgccacttcccactggag

SEQ ID NO: 101530 - DNA, 75 bp, synthetic construct
  source 1..75: mol_type = other DNA
actggtgtaattattctttttacgcatttatgcacatgttaaaaatgaagtttcatgtgaataaaagtaatctaa

SEQ ID NO: 101531 - DNA, 75 bp, synthetic construct
  source 1..75: mol_type = other DNA
tacctgctcggtctggatctaagggcttaccaaataaaaatatactaatgttattggatcgcccattaattgctt

SEQ ID NO: 101532 - DNA, 75 bp, synthetic construct
  source 1..75: mol_type = other DNA
ccgaccatgtttccgcatggagtaaagggggtgaaagtacgcttgataattgcgaaatgctttgcattacacata

SEQ ID NO: 101533 - DNA, 75 bp, synthetic construct
  source 1..75: mol_type = other DNA
tttttgccagtcaggtagctgaagcttacgttttgcatctgatagcagtgaatcgtcggcctgtttatcgatatt

SEQ ID NO: 101534 - DNA, 75 bp, synthetic construct
  source 1..75: mol_type = other DNA
tctacaccaattaccctgaggcgtgggttagttattatcaggcaaaaaattttctcgcaattgatccggtgctga

SEQ ID NO: 101535 - DNA, 75 bp, synthetic construct
  source 1..75: mol_type = other DNA
cccggagtaaggggcaggagttaaccaggctactttgggcacttcgtgccgaccaacattctgcatccgattttg

SEQ ID NO: 101536 - DNA, 75 bp, synthetic construct
  source 1..75: mol_type = other DNA
accgccaggtaaagaacccgaatccggtatttacaccccgtgaaggtgccggaacgctgaaattctgcgaaaaac

SEQ ID NO: 101537 - DNA, 75 bp, synthetic construct
  source 1..75: mol_type = other DNA
atcgcaaccggtgaacgcaggaacgtccccaaacaagaatacatatcccgtgggtacttcaccctcaaagaaacc

SEQ ID NO: 101538 - DNA, 75 bp, synthetic construct
  source 1..75: mol_type = other DNA
aggctgaacacggcccggactcacaggtgattttactgacgcccgatactgatatggcgcatcaagttgccgagg

SEQ ID NO: 101539 - DNA, 75 bp, synthetic construct
  source 1..75: mol_type = other DNA
tggcagcggcggcaatcagccaggcgcagaaggcggcaggggaaacggttgatatcagtagccttaaacaaaagc

SEQ ID NO: 101540 - DNA, 75 bp, synthetic construct
  source 1..75: mol_type = other DNA
ccggaaatgcatttcagcaagcgggaaaaggaaattttgaaatggactgccgaaggaaagacatcggcagagatt

SEQ ID NO: 101541 - DNA, 75 bp, synthetic construct
  source 1..75: mol_type = other DNA
gtaccgtccgtgaaattttagataacgtgaaaactcgcggcgatgacgccttacgggaatacagcgcgaagtttg

SEQ ID NO: 101542 - DNA, 75 bp, synthetic construct
  source 1..75: mol_type = other DNA
aagaagcctggggcgatgttgttatgcacatgaaaaagcacatcgctaatcacctgaaaaagcgagcgccatcag

SEQ ID NO: 101543 - DNA, 75 bp, synthetic construct
  source 1..75: mol_type = other DNA
acagattcattagaatacaaaagtatcgctgagagatacggtgcagaagttattattagaagtgaagagcttgca

SEQ ID NO: 101544 - DNA, 75 bp, synthetic construct
  source 1..75: mol_type = other DNA
gtgggcagagcaccgaccagaacacggacggaaatatcacactcagcggcaccacagcacaacctgccagcatcg

SEQ ID NO: 101545 - DNA, 75 bp, synthetic construct
  source 1..75: mol_type = other DNA
gatcctaatgaaccagactggtacgacacactaccaggtatttaccgtgaggtgtaccagcgggatctggattgg

SEQ ID NO: 101546 - DNA, 75 bp, synthetic construct
  source 1..75: mol_type = other DNA
tgttcagattcagttattgaatagtgatggagcttcaagcattttattagggaaagatttcgctggacaggatgt

SEQ ID NO: 101547 - DNA, 75 bp, synthetic construct
  source 1..75: mol_type = other DNA
attgaaagagaatagcgatgaaaagattaacctattgaacaagatgggggatctggctggtcgtatcgttgcaga

SEQ ID NO: 101548 - DNA, 75 bp, synthetic construct
  source 1..75: mol_type = other DNA
ttatccttttttttattatattttattcagccccaaaagcatattaaaaaagatatcacaaaggattaatagaaa

SEQ ID NO: 101549 - DNA, 75 bp, synthetic construct
  source 1..75: mol_type = other DNA
cccgcgcgatctttatcgcccgggtgaaacggtaatcctcaatggtttgctgcgtgatgcagacggtaaagcgtt

SEQ ID NO: 101550 - DNA, 75 bp, synthetic construct
  source 1..75: mol_type = other DNA
cgacaccccgtaaggagcctgaagtgagtgatagtgcggtaagaaagaaaagtgaggtacggcaaaagacagttg

SEQ ID NO: 101551 - DNA, 75 bp, synthetic construct
  source 1..75: mol_type = other DNA
tcccgccatgccggaaacttttctctatattcccgtaacaccgccatcgacagctccgcatcaatgcgcgttgcc

SEQ ID NO: 101552 - DNA, 75 bp, synthetic construct
  source 1..75: mol_type = other DNA
gcacagaagcggcatctttgcgcgacagtctctgcctgctgcaaaaaagctatcgtttcggcagcgattctggca

SEQ ID NO: 101553 - DNA, 75 bp, synthetic construct
  source 1..75: mol_type = other DNA
ggagctacgttcctgcgggcagtggcacagaggcggcatctttgcgcgatagtctctgccttttgcaaaaaagtt

SEQ ID NO: 101554 - DNA, 75 bp, synthetic construct
  source 1..75: mol_type = other DNA
ccatgagaatgggcgaaacatctattcgaaggagttaatcgggaaggctgccgtcgcgggaattggcggggcaaa

SEQ ID NO: 101555 - DNA, 75 bp, synthetic construct
  source 1..75: mol_type = other DNA
ccatctcgatggtgtaactgaaacatatgctgagggatggaacgcttgccgcgctgccctgcttcagggcaaagg

SEQ ID NO: 101556 - DNA, 75 bp, synthetic construct
  source 1..75: mol_type = other DNA
ctctgttgcatgatattacaatgagtataaggcatggagatgtatcacttttaggtaaagatgagccatttatta

SEQ ID NO: 101557 - DNA, 75 bp, synthetic construct
  source 1..75: mol_type = other DNA
gcttgcttgttcaggtagccagagagtcagacgacagaataacagcactggaagaagaaaatgcagaattaagac

SEQ ID NO: 101558 - DNA, 75 bp, synthetic construct
  source 1..75: mol_type = other DNA
gtggagcggcaaaagcagatcctgttgcagatcgatagcctcagcagcggtggtgcagcggcgcaatcaaccagc

SEQ ID NO: 101559 - DNA, 75 bp, synthetic construct
  source 1..75: mol_type = other DNA
cgcgccggaaaacgtattctcgcgtttcatgtttccgactggttagtgccgaccaccgatctggtcaatgaccgg

SEQ ID NO: 101560 - DNA, 75 bp, synthetic construct
  source 1..75: mol_type = other DNA
ttttcttctggccgttttttatgtccattatgtggattgttggcggcgtctatttctgggtctatcgtgaacgcc

SEQ ID NO: 101561 - DNA, 75 bp, synthetic construct
  source 1..75: mol_type = other DNA
ttcgccccgacaccccgtaaggagcctgaagtgagtgatagtgcggtaagaaagaaaagtgaggtacggcaaaag

SEQ ID NO: 101562 - DNA, 75 bp, synthetic construct
  source 1..75: mol_type = other DNA
cgaatcgcccaacgtcagtcactggtaaaacagctacacgaacgccagcttgatcttcttattactactgaagcg

SEQ ID NO: 101563 - DNA, 75 bp, synthetic construct
  source 1..75: mol_type = other DNA
gatgtctgccgggaggccggtatctctgaagccacttactatcttgaagtggtcaacaaaaactggccaccgagt

SEQ ID NO: 101564 - DNA, 75 bp, synthetic construct
  source 1..75: mol_type = other DNA
atgaaaaaaaatgttggtaaccgcaataaaaattctgatgtgcttattcttaaaggtatgttgaacaatttaaaa

SEQ ID NO: 101565 - DNA, 75 bp, synthetic construct
  source 1..75: mol_type = other DNA
ttaccgtgatcccaataaagtcagtaaggttagtgctgcagggaagaaatcccctgttctggttgttcctgaacc

SEQ ID NO: 101566 - DNA, 75 bp, synthetic construct
  source 1..75: mol_type = other DNA
gccggtgagcaaaaaacctggacaggtcagggacgtactccggcaccaattaaagctcagctggatgcaggaaaa

SEQ ID NO: 101567 - DNA, 75 bp, synthetic construct
  source 1..75: mol_type = other DNA
gattttgatgccgcggtgaaaaaacaagttgctcatatcatacgcttgtccgccatcggtacggtcatcagccag

SEQ ID NO: 101568 - DNA, 75 bp, synthetic construct
  source 1..75: mol_type = other DNA
tccagatatttcagccagggcgtatcaaaggaaaatttattaaaggccccgattgtatcctttaatcatgataca

SEQ ID NO: 101569 - DNA, 75 bp, synthetic construct
  source 1..75: mol_type = other DNA
ttgcccgtaatgacagcgcgcttgggttgtttaatggcgatatcggtattgcgctggatcgcgggcaggggacgc

SEQ ID NO: 101570 - DNA, 75 bp, synthetic construct
  source 1..75: mol_type = other DNA
aggctgcatggaaaaaggcaaagacgtctctgccggtggcgcaatggtaaaccacggacctgggctgattttctc

SEQ ID NO: 101571 - DNA, 75 bp, synthetic construct
  source 1..75: mol_type = other DNA
ggaacgcggcgacagcggagaacacggcgaattacgccgggtcgtcaatgctgtactgcaaatgatggatgctta

SEQ ID NO: 101572 - DNA, 75 bp, synthetic construct
  source 1..75: mol_type = other DNA
cgacagaggcggtgcgaccggaacggtcgctgcaagccagggtttcgcgtcagggatggaagcccgccagggcgg

SEQ ID NO: 101573 - DNA, 75 bp, synthetic construct
  source 1..75: mol_type = other DNA
ccccacggctggataaacgagcggtggaaactctttctatggctgtggcacatctacgcaaactggttaagaagc

SEQ ID NO: 101574 - DNA, 75 bp, synthetic construct
  source 1..75: mol_type = other DNA
gtttgttatcagtatgcgatgagtttcgaacctaacactcctgttgagttccatcaaattactcgccacaataaa

SEQ ID NO: 101575 - DNA, 75 bp, synthetic construct
  source 1..75: mol_type = other DNA
cgccatgatgctgtgtaccggtttgaagcctgtatctggaaaatgaacggtaaaaccttctttgggtgtcatgaa

SEQ ID NO: 101576 - DNA, 75 bp, synthetic construct
  source 1..75: mol_type = other DNA
ggtgatttccggtggccccggcaccggtaaaacgaccaccgtggcgaagttgctggcggcgttaattcagatggc

SEQ ID NO: 101577 - DNA, 75 bp, synthetic construct
  source 1..75: mol_type = other DNA
ctcagccacaggtaaaaaaacgacagaaacacagtctgtttcagttaaacagaaagctgtttttatagaaaatga

SEQ ID NO: 101578 - DNA, 75 bp, synthetic construct
  source 1..75: mol_type = other DNA
ctcatccgcatcccgccatgccggaaacttatcgcgatattcccttaacaccgccatcgacagctcggcatcaat

SEQ ID NO: 101579 - DNA, 75 bp, synthetic construct
  source 1..75: mol_type = other DNA
caaggcgatcggttttttgtttttaaaccttggaagctttacattgccaggactaacagatgtaaagattgttga

SEQ ID NO: 101580 - DNA, 75 bp, synthetic construct
  source 1..75: mol_type = other DNA
cctcctgtggaagcaattgaacgcattgaagtgatccgtggccctatgtcttccctgtatggttctgatgccatc

SEQ ID NO: 101581 - DNA, 75 bp, synthetic construct
  source 1..75: mol_type = other DNA
ggtaccgaacgtgcgttatcaggaaaacctgaaaacacgatgcgccacgcagctgccgcgcctgaacggggcaac

SEQ ID NO: 101582 - DNA, 75 bp, synthetic construct
  source 1..75: mol_type = other DNA
aagctgtggagcacaaacagctacgcccgctggacgtgcagtttgccctgaccgtggcgggtgatgaacatcccg

SEQ ID NO: 101583 - DNA, 75 bp, synthetic construct
  source 1..75: mol_type = other DNA
gtaaaccgcgtgctggcgcattttcacctgatattgcctggcgctgggtgcgtgacgaactcgataccatgagta

SEQ ID NO: 101584 - DNA, 75 bp, synthetic construct
  source 1..75: mol_type = other DNA
ggagagggataaacagcgtggagaaaattatctccacctgggcacccgcttccgacaataacaacacagcagcct

SEQ ID NO: 101585 - DNA, 75 bp, synthetic construct
  source 1..75: mol_type = other DNA
atatcctggcttatgtgacgttccagtcaccggtgtatgtggcgatcttgttagtggtgggcgcagactggcatc

SEQ ID NO: 101586 - DNA, 75 bp, synthetic construct
  source 1..75: mol_type = other DNA
ttttgaacgaaatgctcttacctatatcccttacagagatggcgagtgctacagttctgaaactgatattttaat

SEQ ID NO: 101587 - DNA, 75 bp, synthetic construct
  source 1..75: mol_type = other DNA
taagcagaagaccagcagcaaaatcttaccgtgatcccaataaggtcagtaaagtaaatgtttcagggaagaaat

SEQ ID NO: 101588 - DNA, 75 bp, synthetic construct
  source 1..75: mol_type = other DNA
cgctcatccgcatcgaaacagacgtgaccgaactggagaaagcgcagcggcgaagcctggcggagaagttacagc

SEQ ID NO: 101589 - DNA, 69 bp, synthetic construct
  source 1..69: mol_type = other DNA
atgctggatagcaccgtcaagctaaattccgtactgaacggtcccctcgcccctttggggagagggtta

SEQ ID NO: 101590 - DNA, 75 bp, synthetic construct
  source 1..75: mol_type = other DNA
gcgcgcggcacgcaaagttagccagtctggatggataaaaaatctggcagatattctggcttatgtgacgtttca

SEQ ID NO: 101591 - DNA, 75 bp, synthetic construct
  source 1..75: mol_type = other DNA
gagcgccggtacctttgctgcccggactgccgggcagttcagcaataatggcggcacgataaatgccggcacact

SEQ ID NO: 101592 - DNA, 75 bp, synthetic construct
  source 1..75: mol_type = other DNA
gactggtactattcaaatggtaaggtagagccttggggaggattttatgatgcaaacaatcaattgcaaatggac

SEQ ID NO: 101593 - DNA, 75 bp, synthetic construct
  source 1..75: mol_type = other DNA
aacgaccgggcgccgcctgcagactatcatggatatcgtcagcacctgggcacctgcggccgataacaacgatcc

SEQ ID NO: 101594 - DNA, 75 bp, synthetic construct
  source 1..75: mol_type = other DNA
ggaacaaaaggtatcttctgggattttagcgatctttacggtgggacattgattttcccaggaaatgaaggttac

SEQ ID NO: 101595 - DNA, 75 bp, synthetic construct
  source 1..75: mol_type = other DNA
ggcaagaccttcaggttgcagcaaaaaatgaaagagtacacttctcatgctgttcccgctgatcgtgatgcctag

SEQ ID NO: 101596 - DNA, 75 bp, synthetic construct
  source 1..75: mol_type = other DNA
tacaagaagatgaaagctttaccaacaagaatattgtggttactctaccgtcatcgggtgagcgttatttaagca

SEQ ID NO: 101597 - DNA, 75 bp, synthetic construct
  source 1..75: mol_type = other DNA
gcgggacaagatcggctcaaatctcgctggtggcttggctggttcgctggacagcctgcggcggcgcatcctcga

SEQ ID NO: 101598 - DNA, 75 bp, synthetic construct
  source 1..75: mol_type = other DNA
caatggacgttgtgttacaggcgctggacggggagcacatgtcatgaatatcaacacggaaacccgcgaaattct

SEQ ID NO: 101599 - DNA, 75 bp, synthetic construct
  source 1..75: mol_type = other DNA
gatcagcaaattgaagaggccaagaaggtctacaccacattcagtgagctaccactggagatcgtggttgatgtt

SEQ ID NO: 101600 - DNA, 75 bp, synthetic construct
  source 1..75: mol_type = other DNA
tgcagagaaagtttggaataatcctaatatcattacaattggaacacatggtgatcctcaatcagtatatgatga

SEQ ID NO: 101601 - DNA, 75 bp, synthetic construct
  source 1..75: mol_type = other DNA
tgtttggctttctggccggtgcgaagctgttctccatgctcactggtatcgggcgacttgtcgccggatttatgg

SEQ ID NO: 101602 - DNA, 75 bp, synthetic construct
  source 1..75: mol_type = other DNA
ttcatgtttccgactggctggtgccgaccaccgatctggtcaatgaccggggaatgccgggggatggcgttatta

SEQ ID NO: 101603 - DNA, 75 bp, synthetic construct
  source 1..75: mol_type = other DNA
atttcttcagtatcggctccaacgatatgacccagtatctgtatgcggtcgatcgtaataacccgcgcgtatcgc

SEQ ID NO: 101604 - DNA, 75 bp, synthetic construct
  source 1..75: mol_type = other DNA
aaaccactattctccgcgccgccagcgctggtagtgcctgataagttgccgcgtgaatacagaaacggttggcct

SEQ ID NO: 101605 - DNA, 75 bp, synthetic construct
  source 1..75: mol_type = other DNA
tcgcaaaaacgatgggcaaacctacctcgtttgtgagtaaacaccttcgtctcattgatgcaccagaaaatgtta

SEQ ID NO: 101606 - DNA, 75 bp, synthetic construct
  source 1..75: mol_type = other DNA
ttatggcaggcgttggtctgagcgccggtagcggtattaataacggcctgggcgcgattggcggtcagatgttga

SEQ ID NO: 101607 - DNA, 75 bp, synthetic construct
  source 1..75: mol_type = other DNA
gccgatgccctacggctggggaaccggcggcattcagctcaccgccagcgtgattggcgaaagcgacgtgctgaa

SEQ ID NO: 101608 - DNA, 75 bp, synthetic construct
  source 1..75: mol_type = other DNA
atcctgtaatacaggaaaaggaaataactcttatgcacagcaattagcagatgaactaggtgtgagagtctatgc

SEQ ID NO: 101609 - DNA, 75 bp, synthetic construct
  source 1..75: mol_type = other DNA
ctttgaaatgggatttcagcaacttcattacccagatgggtgagtttagcaagatgctgagtatgatcggcgacc

SEQ ID NO: 101610 - DNA, 75 bp, synthetic construct
  source 1..75: mol_type = other DNA
accaaaactatgcctctttttaccatccagaaactggtaaagctgttttcgttgactctttcgataatgaagaat

SEQ ID NO: 101611 - DNA, 75 bp, synthetic construct
  source 1..75: mol_type = other DNA
caattttcatcaggccggcccccttcaaatgtgctcgtgaattcttggtgcaatgctctgaatgaagcgatatct

SEQ ID NO: 101612 - DNA, 75 bp, synthetic construct
  source 1..75: mol_type = other DNA
ctttgcctaacggtcttcatgcccgtccggcgtgggaacttaaagaacagtgcagccagtggcaaagcgaaatca

SEQ ID NO: 101613 - DNA, 75 bp, synthetic construct
  source 1..75: mol_type = other DNA
caccgaacaggcgcaggctacagagcaggcacaggctacagagcaggcacagaccacagagcaggcacagaccac

SEQ ID NO: 101614 - DNA, 75 bp, synthetic construct
  source 1..75: mol_type = other DNA
cccttcccactgcggcggtagtgattttggttactggtgctggaggggtatttggcaaagtgctggtggaatcgg

SEQ ID NO: 101615 - DNA, 75 bp, synthetic construct
  source 1..75: mol_type = other DNA
atgaggtaaaaatctttggctgtgtattcagtctggtaatcatccaaggaaagcttatcagaagggtgatgactc

SEQ ID NO: 101616 - DNA, 75 bp, synthetic construct
  source 1..75: mol_type = other DNA
gcggtgaactgggcggtgaaagtcgttatctgccgctactgcttgggctgggcctggatgagctgagtatgagta

SEQ ID NO: 101617 - DNA, 75 bp, synthetic construct
  source 1..75: mol_type = other DNA
cgtgccggaaaacggatactcgcgtttcatgtttccgactggctggtaccgactaccgatctggtcaatgatcgg

SEQ ID NO: 101618 - DNA, 75 bp, synthetic construct
  source 1..75: mol_type = other DNA
cccacttgatggtctgcccgtcgcgctgggggatttcacgacctttccggtgatgatgtcgttggtggggctggc

SEQ ID NO: 101619 - DNA, 75 bp, synthetic construct
  source 1..75: mol_type = other DNA
gatcctggtgttattaccagggcaaataccctggattcacagatgcttagtaaaggcacaaatggtgaatttggc

SEQ ID NO: 101620 - DNA, 75 bp, synthetic construct
  source 1..75: mol_type = other DNA
atgaagaataccgtactccagtgtatgcggtttctttctcgaaggatgagtttagtgaagatattaagacttttg

SEQ ID NO: 101621 - DNA, 75 bp, synthetic construct
  source 1..75: mol_type = other DNA
gcggtctgccaacgggcactaaagatctatatgaagcgcgagaacaagtgaaacaagggattcgccagttgctgc

SEQ ID NO: 101622 - DNA, 75 bp, synthetic construct
  source 1..75: mol_type = other DNA
tcaccgtactggtggcagaaagatattaacagcacgctggatattagcgtcgatcgcatcgcgcattattgctaa

SEQ ID NO: 101623 - DNA, 75 bp, synthetic construct
  source 1..75: mol_type = other DNA
gtcgcggggcaaagttatgccattaataccggcatcccgcacagtttcagtaatacgtcggcaggtatttgccga

SEQ ID NO: 101624 - DNA, 75 bp, synthetic construct
  source 1..75: mol_type = other DNA
aataacaccacgcggattgcgaccactgcgtttgtacaggccgctattaccgctctgattaacggtgcgcctgac

SEQ ID NO: 101625 - DNA, 75 bp, synthetic construct
  source 1..75: mol_type = other DNA
attcagttcccggcttttggtcgaccgtttctcttgcctgtttattgaacagatatcgggtgatgctgccaactt

SEQ ID NO: 101626 - DNA, 75 bp, synthetic construct
  source 1..75: mol_type = other DNA
aaacaaaaactgggactggaaaagcagtgccagttcaggcattgcgggtatgcttgcgccggggagaactgtcgg

SEQ ID NO: 101627 - DNA, 75 bp, synthetic construct
  source 1..75: mol_type = other DNA
cgctggtggcggtgcttcacaaaacatacagcaagaaacggttattaatattcacggtgtatctgatccacgtga

SEQ ID NO: 101628 - DNA, 75 bp, synthetic construct
  source 1..75: mol_type = other DNA
atagcacgcccggacatcgaacctgatgggcagataatccgtgtagatataaatcttgtatatgctgaagaacaa

SEQ ID NO: 101629 - DNA, 75 bp, synthetic construct
  source 1..75: mol_type = other DNA
agtttcagtctggaagtcatgggtcgattatcgtcgcgacctgaagaaaccgatcaagtctcagcagacggttac

SEQ ID NO: 101630 - DNA, 75 bp, synthetic construct
  source 1..75: mol_type = other DNA
ttataatcaataagttatctatcgacgtgaaaccgagccttgatccgcaaggcagagtagtcttcttacccaatc

SEQ ID NO: 101631 - DNA, 75 bp, synthetic construct
  source 1..75: mol_type = other DNA
atagagttagggtcgcacagtacttgaggatgtctaccgaccatcagcaatattctttacataatcagtccgaat

SEQ ID NO: 101632 - DNA, 75 bp, synthetic construct
  source 1..75: mol_type = other DNA
aagatattgaacgttcggccctgacattaaaggactcactgtatttattaaaaatacagaggagattcaacgcgc

SEQ ID NO: 101633 - DNA, 75 bp, synthetic construct
  source 1..75: mol_type = other DNA
cccaaaatggacgaatttagtagtcagttgctggggtatttcactttagcgctttataccagtgccccttccaaa

SEQ ID NO: 101634 - DNA, 75 bp, synthetic construct
  source 1..75: mol_type = other DNA
agacgctgactcatttgagtggaaaggatgtagctggtcttctcacataccttggtttgggagaagcggcgaaaa

SEQ ID NO: 101635 - DNA, 75 bp, synthetic construct
  source 1..75: mol_type = other DNA
gtcacagagaacccaggaagatatcaaagtggctgttgcggatgatgattgtgctctacgccctgtgcctgctgc

SEQ ID NO: 101636 - DNA, 75 bp, synthetic construct
  source 1..75: mol_type = other DNA
atgacgaaggaaatttaacccatatcggtgttgccggttttgaaacattgctggaaaccgtgcaagtgttggtca

SEQ ID NO: 101637 - DNA, 75 bp, synthetic construct
  source 1..75: mol_type = other DNA
ggcgtggaagatcgcggcgtgatgacagcgtttatgcaggcactgggatttacggcacaacagggcggctgggag

SEQ ID NO: 101638 - DNA, 75 bp, synthetic construct
  source 1..75: mol_type = other DNA
ccactggccgggaggttgccgatcgtcaatccggcgttaattcccgtcttactcagcagctacaaccgagggtct

SEQ ID NO: 101639 - DNA, 75 bp, synthetic construct
  source 1..75: mol_type = other DNA
acccgggccgtttcaaggatgaacaacatggaaaggattttgtccgctatcagacagagggatggcgcaacgatg

SEQ ID NO: 101640 - DNA, 75 bp, synthetic construct
  source 1..75: mol_type = other DNA
cataaagatataacaaacattttagctggtgatagtcaatctttccttaaacgaagtctttgggaatttatactc

SEQ ID NO: 101641 - DNA, 75 bp, synthetic construct
  source 1..75: mol_type = other DNA
caaatcgctggactcgttacgtagcggcgatctggtgctggtctggttgcaggtaaaagccagtaacagcgtgcc

SEQ ID NO: 101642 - DNA, 75 bp, synthetic construct
  source 1..75: mol_type = other DNA
aaagtggctgttgcggatgatgattgtgcttcacgtcctgtgcctgccgccgctgctgaccggttgcggaagtac

SEQ ID NO: 101643 - DNA, 75 bp, synthetic construct
  source 1..75: mol_type = other DNA
tatcaaaaatccgcacactgataaacgaagcgaatatgattgattttgtcctagctgatacagacaaagggaaaa

SEQ ID NO: 101644 - DNA, 75 bp, synthetic construct
  source 1..75: mol_type = other DNA
ggctaacgcgacgatgctcggcagtaagctgaatctgacgcaaatggccgttggtgatgcgaatggtatcttgcc

SEQ ID NO: 101645 - DNA, 75 bp, synthetic construct
  source 1..75: mol_type = other DNA
tacgtccgctggagcgtgaagatttacgctatgtgcatcaactcgacaataacgccagcgtaatgcgttactggt

SEQ ID NO: 101646 - DNA, 75 bp, synthetic construct
  source 1..75: mol_type = other DNA
gtcagcgtgatggcaggcaacggtgcaacggttgctccgacggtgattacagagccggacggcacggtggagatc

SEQ ID NO: 101647 - DNA, 75 bp, synthetic construct
  source 1..75: mol_type = other DNA
acggaactgctggaactgaatgccacgcttaccctgtggcaaaacaataccgcacagcgccatatcaccgggctg

SEQ ID NO: 101648 - DNA, 75 bp, synthetic construct
  source 1..75: mol_type = other DNA
ccgacctgctcaacgccattaaagatggccgctgggctgatgccgccagcatcggcaaacagatgcttaatcagg

SEQ ID NO: 101649 - DNA, 75 bp, synthetic construct
  source 1..75: mol_type = other DNA
atgactgataaaactattcctttttcgctactcgatctggctcccatccccgaaggttcttcagcacgagaagcg

SEQ ID NO: 101650 - DNA, 75 bp, synthetic construct
  source 1..75: mol_type = other DNA
atgtgctggccgggcagatggtcagcgtgacggcaggcaacagcgcaacggttgcttcgacggtcaccacgcatc

SEQ ID NO: 101651 - DNA, 75 bp, synthetic construct
  source 1..75: mol_type = other DNA
cagattttcgaccaccaggcccgcctgcattcgtttgagctggcgatggatgtgaaggaagagttgttggggtag

SEQ ID NO: 101652 - DNA, 75 bp, synthetic construct
  source 1..75: mol_type = other DNA
cgcggacctggtggtcattaaggatggttcagaggcggacggttcgacggcgaacacgctgcgggcgagggtgac

SEQ ID NO: 101653 - DNA, 75 bp, synthetic construct
  source 1..75: mol_type = other DNA
gagaccttagcaaagcactggcatcatataactgggggatcgggaatgttaagcgctatggcatggggttaatgc

SEQ ID NO: 101654 - DNA, 75 bp, synthetic construct
  source 1..75: mol_type = other DNA
tcgtatctgggatgacgggcgaggtgcagatggtggtcgcgaattattaagctggcaggcagctacaaacttttc

SEQ ID NO: 101655 - DNA, 75 bp, synthetic construct
  source 1..75: mol_type = other DNA
cctgcgggtgcatcctcctttctggcgcagcagcctgcgggaaaattttcgccattttcagcagcaggatattca

SEQ ID NO: 101656 - DNA, 75 bp, synthetic construct
  source 1..75: mol_type = other DNA
ctgtcaggtaagcagccactggatgagacgctgactcatttgagtggaaaagatgtggctggtcttctcgcatac

SEQ ID NO: 101657 - DNA, 75 bp, synthetic construct
  source 1..75: mol_type = other DNA
agcggtccagtggcgatgaatggaatgactgataatgcttatgccattacaggttctaataagtcttatattgcc

SEQ ID NO: 101658 - DNA, 75 bp, synthetic construct
  source 1..75: mol_type = other DNA
gccggaacgtcacgtttatcgccgatgtcaggacggcgcagatcgcggacctggcggttattaaggacggctcag

SEQ ID NO: 101659 - DNA, 75 bp, synthetic construct
  source 1..75: mol_type = other DNA
cctacttagctcaggctgccgagttggccggaaatccgggccagttagccgcgtatcactcccagggacactgcg

SEQ ID NO: 101660 - DNA, 75 bp, synthetic construct
  source 1..75: mol_type = other DNA
tggatgcagccgatgcttaccaacctggaacagctctaccggcttccggaggggttattgcgcagtgtggccata

SEQ ID NO: 101661 - DNA, 75 bp, synthetic construct
  source 1..75: mol_type = other DNA
gacggcctcgctgatgctcagaaagctcggcagttacccgcgccagaacggcctagcggtggccttgcgcgaact

SEQ ID NO: 101662 - DNA, 75 bp, synthetic construct
  source 1..75: mol_type = other DNA
gactcaaggcgcagcaggaaatgaaaaaaaactctgctgttgtctctgatattgaacaagtcattgcaaataaac

SEQ ID NO: 101663 - DNA, 75 bp, synthetic construct
  source 1..75: mol_type = other DNA
aagagaaagcattctggcttgccaaagcaacagaaacaaaccgcccagcaatgcaacgtgttcatcgtgctaaat

SEQ ID NO: 101664 - DNA, 75 bp, synthetic construct
  source 1..75: mol_type = other DNA
cttcgatcaactcgctatcgaggcataccagcgaggtgtatgggaggatttaggcaatggctatattacgaaaaa

SEQ ID NO: 101665 - DNA, 75 bp, synthetic construct
  source 1..75: mol_type = other DNA
cagccacagaacagatcttcatggtcatattatattagcacctgtttccgcacctgctcatattgttgaaagctc

SEQ ID NO: 101666 - DNA, 75 bp, synthetic construct
  source 1..75: mol_type = other DNA
agaaattaaggcttcaatggaaaaattgcatgccttaaatatgctatcgggcgacccacaccggggtaatttatc

SEQ ID NO: 101667 - DNA, 75 bp, synthetic construct
  source 1..75: mol_type = other DNA
gctggtgtccgggctggtttcggcgtggcagctgcttaacgctgagttcctcaaatcgccgataggtatcgtaat

SEQ ID NO: 101668 - DNA, 75 bp, synthetic construct
  source 1..75: mol_type = other DNA
gcattgagcaggtatacgctcgcggcaagctgatggtcaaagacggcaaagcctgcgtgaaaggaacgtttgaaa

SEQ ID NO: 101669 - DNA, 75 bp, synthetic construct
  source 1..75: mol_type = other DNA
actgaatatacaaatcagttctgctgcgcaggtaaaagtgcgacatattgaattatatatgaacagcaggagtga

SEQ ID NO: 101670 - DNA, 75 bp, synthetic construct
  source 1..75: mol_type = other DNA
gagggcgtagagctcaatgatatgccgattattccagaaaatgttaaagcagaaattaaggcttcaatggaaaaa

SEQ ID NO: 101671 - DNA, 75 bp, synthetic construct
  source 1..75: mol_type = other DNA
cgccgataccctgctggacgatcagcacccggatctgcgtgccgactttgtgatggctaacccgccatttaacat

SEQ ID NO: 101672 - DNA, 75 bp, synthetic construct
  source 1..75: mol_type = other DNA
ccgctgccattaataatgacccgaaattcagtaccaccattaacaatgcgctggcactgaaagcgccgctgtcga

SEQ ID NO: 101673 - DNA, 75 bp, synthetic construct
  source 1..75: mol_type = other DNA
gtgtggaatcgttctttatgtgtaaaaatatccgtctgtttatctacgcttggtaaaggtatgggaaagcgtctt

SEQ ID NO: 101674 - DNA, 75 bp, synthetic construct
  source 1..75: mol_type = other DNA
cacggacagcctgctggcgatggccggacgggatatcagtctgaccaccaccacccgtacggcacagagtgacgc

SEQ ID NO: 101675 - DNA, 75 bp, synthetic construct
  source 1..75: mol_type = other DNA
gaacctgaacagctcggccagtcagtcaagcggccacagccaaccaaagcgggctctgagttgctgggatggatg

SEQ ID NO: 101676 - DNA, 75 bp, synthetic construct
  source 1..75: mol_type = other DNA
atcaaggaacgtctcgtaccgttcctcgatgggcaggttatcaagaaagtcgatctcactactcgttcaatcgaa

SEQ ID NO: 101677 - DNA, 75 bp, synthetic construct
  source 1..75: mol_type = other DNA
ccatttatcaaatgccattaattacaatgttatttttaccaccccaaccagcccgaacgttagtggcgcgcagat

SEQ ID NO: 101678 - DNA, 75 bp, synthetic construct
  source 1..75: mol_type = other DNA
ctgggagaacagatacagcatgtgctggatgagccccccttctccggtcacctgttcatctttcgtagccgacgg

SEQ ID NO: 101679 - DNA, 75 bp, synthetic construct
  source 1..75: mol_type = other DNA
tcctcgtctcgctcggtttcgatatcgacgaagcaggcgcggaaaagttcgattcagtcctcgccggtacgaccg

SEQ ID NO: 101680 - DNA, 75 bp, synthetic construct
  source 1..75: mol_type = other DNA
atttccctgtgcctgtcgtggcactacaggagctgcgcgtggcagatctcgacgatgggtttacgcgcatcgcca

SEQ ID NO: 101681 - DNA, 75 bp, synthetic construct
  source 1..75: mol_type = other DNA
cctgccagtgcctagaattgattagccgaaacttaaatggctttgacgtgatattcatcgccggaggctttgtaa

SEQ ID NO: 101682 - DNA, 75 bp, synthetic construct
  source 1..75: mol_type = other DNA
ttctaggtatcataattttcttttctataaatgcctatgctggtcaattagatagtagcgggctacttgattctt

SEQ ID NO: 101683 - DNA, 75 bp, synthetic construct
  source 1..75: mol_type = other DNA
cgctggatcatcccacactgttatatctgactgaccagattttcagtcctgacattaaagcactgatacagcggg

SEQ ID NO: 101684 - DNA, 75 bp, synthetic construct
  source 1..75: mol_type = other DNA
gataatgcacggtcaggtgtgtcaacaatggttagttttgcagcgttacctgtttcaccatcgcaattttccctg

SEQ ID NO: 101685 - DNA, 75 bp, synthetic construct
  source 1..75: mol_type = other DNA
ggcagggatatgacgctttccacagtgaccacatccgcgcaggacaatattacctgggacaaaaataatcgtctg

SEQ ID NO: 101686 - DNA, 75 bp, synthetic construct
  source 1..75: mol_type = other DNA
aaaagatttcaataaaatcatgcagttaaaaacacgggaaagcggtataaaaaataatctcaaaatcctgttttt

SEQ ID NO: 101687 - DNA, 75 bp, synthetic construct
  source 1..75: mol_type = other DNA
aaatgaaaatgaaaatacattcatctatcccgcagcatcttatagttataaaaatcatataatattggttgaatc

SEQ ID NO: 101688 - DNA, 75 bp, synthetic construct
  source 1..75: mol_type = other DNA
gctaccaggcgcaggtgcggccctcgcaggtgcgttcaaaagaccacacgtttaaggtgccggactggccgggta

SEQ ID NO: 101689 - DNA, 75 bp, synthetic construct
  source 1..75: mol_type = other DNA
ctgtcaggtaagcatccactggatgagacgctgactcatttgagtgggaaggatgttgccggtcttcttgcatac

SEQ ID NO: 101690 - DNA, 75 bp, synthetic construct
  source 1..75: mol_type = other DNA
tttaattccgcttacagaactgcatcaaccagttccacagtatcgatgaattacagttggtgggctgttggtgag

SEQ ID NO: 101691 - DNA, 75 bp, synthetic construct
  source 1..75: mol_type = other DNA
atggcgtttggttcttactcgacggcgatgctcaaaggcattgttgatattccggtgtatccgctgaaaggctac

SEQ ID NO: 101692 - DNA, 75 bp, synthetic construct
  source 1..75: mol_type = other DNA
tcttgaggcagcttacgatacaggaggcaaactgattcagcgtgcattggatgatgctacgcaagaactcggacg

SEQ ID NO: 101693 - DNA, 75 bp, synthetic construct
  source 1..75: mol_type = other DNA
ccattcgcatgtgcattttccagcatcaatatctggcagagcataaagctccaggtcagaatttactgaagccaa

SEQ ID NO: 101694 - DNA, 75 bp, synthetic construct
  source 1..75: mol_type = other DNA
gtaattccgcagagtgtctgaacaccgggaccggggcatatacagactacaatctgaacgttttccacaaaagga

SEQ ID NO: 101695 - DNA, 75 bp, synthetic construct
  source 1..75: mol_type = other DNA
atcctggactggccggggcgctacaaggacgagcagcatggtcaggactttacccgctaccggctggaagggctg

SEQ ID NO: 101696 - DNA, 75 bp, synthetic construct
  source 1..75: mol_type = other DNA
acagcatgaggcaggtttgatcggtgctgacgaagttcccattctgacaaccagttctgctgaactggcacagca

SEQ ID NO: 101697 - DNA, 75 bp, synthetic construct
  source 1..75: mol_type = other DNA
tttacggccgcagatgccaaagacgtgatttttaccgtgatcaccagccctgatagcgataaggcgcggatgtgg

SEQ ID NO: 101698 - DNA, 75 bp, synthetic construct
  source 1..75: mol_type = other DNA
caggtctaagtcttgtagggctgaatttatcatcagtaaatttttctggagcagtgcttgatgatacagatctca

SEQ ID NO: 101699 - DNA, 75 bp, synthetic construct
  source 1..75: mol_type = other DNA
ttacgcattcagcattgcgccagaagattttgagccgttctcatataagctgaaacagtcgggagtgacggtctg

SEQ ID NO: 101700 - DNA, 75 bp, synthetic construct
  source 1..75: mol_type = other DNA
ctggctggcgggttttgtttccgttctcattatgctggtgctgtggaatgcaggttacattatccgctccatgga

SEQ ID NO: 101701 - DNA, 75 bp, synthetic construct
  source 1..75: mol_type = other DNA
caggaagccgtgcagacgctggtggcaatacgcgagctactggaatcaccggaacaactgttgctggatctttaa

SEQ ID NO: 101702 - DNA, 75 bp, synthetic construct
  source 1..75: mol_type = other DNA
gtggtggccgccattgtcgccggggcgttacttatccgtaaatactgggagcctgtcagcgcattctttggcggt

SEQ ID NO: 101703 - DNA, 75 bp, synthetic construct
  source 1..75: mol_type = other DNA
cagttaataaaagaagtgttgtatcaggatttccagccggtgttggggaaaacgcgacccatgaaaataaccgtt

SEQ ID NO: 101704 - DNA, 75 bp, synthetic construct
  source 1..75: mol_type = other DNA
atggataaattgctgccgccaccaccgcttgccagcgatgagcgtttttcaactctggcaaatatcgccgccgag

SEQ ID NO: 101705 - DNA, 75 bp, synthetic construct
  source 1..75: mol_type = other DNA
gggtttgtgaacatatacgcaatattttttgtgattctgaaatcatttctgaaaaatataaacctgttcaaggtt

SEQ ID NO: 101706 - DNA, 75 bp, synthetic construct
  source 1..75: mol_type = other DNA
ctggctggctggctttgtttccgtactcattatgctggtgctgtggaatgcgggctatattatccgctctatgca

SEQ ID NO: 101707 - DNA, 75 bp, synthetic construct
  source 1..75: mol_type = other DNA
atgggcgttatttttatcgccgtcggtttattaatcagtatgccctcctctaaaaagacacgcaggaaacggaag

SEQ ID NO: 101708 - DNA, 75 bp, synthetic construct
  source 1..75: mol_type = other DNA
cgcagaccggtatcagcaaaaccgtccattttttctctggtgaggcgatttcacaggtattcactgactggcctc

SEQ ID NO: 101709 - DNA, 75 bp, synthetic construct
  source 1..75: mol_type = other DNA
tttcttaatgccaccgattacgccgccgaggcactggaatgctacgacgacctcgatccagccagcgagaacatc

SEQ ID NO: 101710 - DNA, 75 bp, synthetic construct
  source 1..75: mol_type = other DNA
aaacagcactctctttggcaatattttgttatttcaataatgctcttctattggctgtggcagttttccctgcgc

SEQ ID NO: 101711 - DNA, 75 bp, synthetic construct
  source 1..75: mol_type = other DNA
ggcaaaacatcgtataaagacattactaaaattcaattggcaacaacagaaaaacaaaaactactggcttcactt

SEQ ID NO: 101712 - DNA, 75 bp, synthetic construct
  source 1..75: mol_type = other DNA
gagggaacgcttgtcataaacggtacaggaataaacgatggaggtcttaaggttggtgatggtaccgttattctt

SEQ ID NO: 101713 - DNA, 75 bp, synthetic construct
  source 1..75: mol_type = other DNA
tgcggtagccagaactatcacgacgccgttctgatggcgtcgatggaactggatatgagtgacgatgatgtcgat

SEQ ID NO: 101714 - DNA, 75 bp, synthetic construct
  source 1..75: mol_type = other DNA
ggaagtaacagggccatactaccaccttaccttactgttaatacagacattatcgtttatccaaagtttgaatgg

SEQ ID NO: 101715 - DNA, 75 bp, synthetic construct
  source 1..75: mol_type = other DNA
tgttaataactattttcagagtgtcatggcagaacacagagaaaataaaacaggtaataaaatattaatggaaaa

SEQ ID NO: 101716 - DNA, 75 bp, synthetic construct
  source 1..75: mol_type = other DNA
agggatggggaaatgagcctgccattattgccttatgtacaaacgtcttcaggtaaacaactgctcgatggccag

SEQ ID NO: 101717 - DNA, 75 bp, synthetic construct
  source 1..75: mol_type = other DNA
agacaggaagacgggggagctgtgccggccgggatgtcgctggtcagtggacagagcgtgacggatgtacaatcg

SEQ ID NO: 101718 - DNA, 75 bp, synthetic construct
  source 1..75: mol_type = other DNA
gactgtgggcgtggcgtatcagacgacggtaggtggcattatgaacacctcggtggccctgatgcagtcctcgca

SEQ ID NO: 101719 - DNA, 75 bp, synthetic construct
  source 1..75: mol_type = other DNA
actctcaagtggacgcccaacagtagtattaacgaatgaaaaacagataaatccagattctatttcttggggata

SEQ ID NO: 101720 - DNA, 75 bp, synthetic construct
  source 1..75: mol_type = other DNA
ccttgtgtgagccggtaaaagcgccacgtaacacggaagactacattcattatttttgtggtgagtcaggtctga

SEQ ID NO: 101721 - DNA, 75 bp, synthetic construct
  source 1..75: mol_type = other DNA
cgttttgcccaactcgatctgacggcgttgatggtttatctggtagacctggttgatgcttcggcattacctgcc

SEQ ID NO: 101722 - DNA, 75 bp, synthetic construct
  source 1..75: mol_type = other DNA
gctatatttttcatgatatatataataaaaaacacactatcgatgagttcaacgatgtggtaagaaaagcagttt

SEQ ID NO: 101723 - DNA, 75 bp, synthetic construct
  source 1..75: mol_type = other DNA
ttacggacacactgggtatggtgacgtcattcagctatgcaggagacaagaatcgccagctgacccgttacgagc

SEQ ID NO: 101724 - DNA, 75 bp, synthetic construct
  source 1..75: mol_type = other DNA
cgagggcagcaacattactcggcatggcacggttgcaagacctacgcaagccaccgcaacagatacaggagaacg

SEQ ID NO: 101725 - DNA, 75 bp, synthetic construct
  source 1..75: mol_type = other DNA
gtgaacattaatagagataaaattgtacaacttacaaataccgacaccattgaaaacctgacatccgcgttgagt

SEQ ID NO: 101726 - DNA, 75 bp, synthetic construct
  source 1..75: mol_type = other DNA
gggatcgttcggtcagattgatgaaatagaaataagcccggaagaactgaaacgggagcgtgatttattcctttc

SEQ ID NO: 101727 - DNA, 75 bp, synthetic construct
  source 1..75: mol_type = other DNA
ggatgcggaatacgcagaacaaccgggggtttctccaccacatgcagggttaacgtctaatcaactggaattatt

SEQ ID NO: 101728 - DNA, 75 bp, synthetic construct
  source 1..75: mol_type = other DNA
gctgaccggaagtgatgacggtcgccacagcaacacatctctggcgtggggagctggcgtgcagtttaacccgac

SEQ ID NO: 101729 - DNA, 75 bp, synthetic construct
  source 1..75: mol_type = other DNA
aaaattcccggtaactgttacccggtcgataaagttattcaccaggataataacgaaatcccggcaggtctttaa

SEQ ID NO: 101730 - DNA, 75 bp, synthetic construct
  source 1..75: mol_type = other DNA
tgcactacacgcggacacaatatgcagagccgctggtcgaaagccgctatctttacgacccgctgggccgcaggg

SEQ ID NO: 101731 - DNA, 75 bp, synthetic construct
  source 1..75: mol_type = other DNA
aggcgataaagttaatgtttattattctccagggcatcctgaaaaggctgagataaataacccgtgggttaattt

SEQ ID NO: 101732 - DNA, 75 bp, synthetic construct
  source 1..75: mol_type = other DNA
ttttaaatgggggtttatcggcattatgggcgttatttttatcgccgtcggtttattaatcagtatgccctcctc

SEQ ID NO: 101733 - DNA, 75 bp, synthetic construct
  source 1..75: mol_type = other DNA
catgtaaatgtgctttgcactgatccgactagcacatggttaataaccacagcaaaacgatatgtcggccctggt

SEQ ID NO: 101734 - DNA, 75 bp, synthetic construct
  source 1..75: mol_type = other DNA
tacttatccataagcgagaaaatagtgactcctacgccgttacaatcacctgcggtagccagaactatcacgacg

SEQ ID NO: 101735 - DNA, 75 bp, synthetic construct
  source 1..75: mol_type = other DNA
atgaaaaagatattacttatgttgagtctgctattttttactaccgcaagctattgtgagatttcggatacgtta

SEQ ID NO: 101736 - DNA, 75 bp, synthetic construct
  source 1..75: mol_type = other DNA
aacccgaccgaatccgtggccattgatattgcttatgaaggctccggcagtggcgactggcgcactgacggtttc

SEQ ID NO: 101737 - DNA, 75 bp, synthetic construct
  source 1..75: mol_type = other DNA
tgaccttgttgaagaaggagcctacaaaaccttccctgcagatgaagacggcatcctgccattaatggattccaa

SEQ ID NO: 101738 - DNA, 75 bp, synthetic construct
  source 1..75: mol_type = other DNA
tgtccgcagtcgtctggctggttgccgctggtacgccagcgagcgcagcagagcatcagtccacactaagcgccg

SEQ ID NO: 101739 - DNA, 75 bp, synthetic construct
  source 1..75: mol_type = other DNA
gctgaccgcagccaggttgatggaactacgtaaaccaccacgccagatactggagaacgaagatgatttatcgtg

SEQ ID NO: 101740 - DNA, 75 bp, synthetic construct
  source 1..75: mol_type = other DNA
tgcgcatgctggagcagggctttgaacgtgagattgtgctggcggcaacccaactcactgatgctgatattccga

SEQ ID NO: 101741 - DNA, 75 bp, synthetic construct
  source 1..75: mol_type = other DNA
aaattactcagacactgaaacgccccgacggctctgaagtacgtattgtggtggagcaggcattcggcagtggcc

SEQ ID NO: 101742 - DNA, 75 bp, synthetic construct
  source 1..75: mol_type = other DNA
ggatgacggcggcctgaatgtcattaataaaggctacaacccggacagagagatatggcagcaaagtgaaggaaa

SEQ ID NO: 101743 - DNA, 75 bp, synthetic construct
  source 1..75: mol_type = other DNA
atggggttatagaagcgaaaggaaataaaatagtaagaatgactgagaagccgatatataaatatcacgtaaatg

SEQ ID NO: 101744 - DNA, 75 bp, synthetic construct
  source 1..75: mol_type = other DNA
ttctggaaagatcatatgaagatgtacaagaaacgcccaatttactggctgttcagctccggtaaagagaaggcg

SEQ ID NO: 101745 - DNA, 75 bp, synthetic construct
  source 1..75: mol_type = other DNA
cgttctggccggagagatagatccagacctggaagaaccagaggaagaagtgatatcccgtgggccttgtggtgt

SEQ ID NO: 101746 - DNA, 75 bp, synthetic construct
  source 1..75: mol_type = other DNA
aatgaagtgttaattggtcattccggtgattgccgagtatacttcaataaaaacaataaactaaatcagttaacc

SEQ ID NO: 101747 - DNA, 75 bp, synthetic construct
  source 1..75: mol_type = other DNA
gcgcagcctgctggactatcagcactatttttgcggtgaatcaggagagaatcagacttcgttaaacgaaaaaga

SEQ ID NO: 101748 - DNA, 75 bp, synthetic construct
  source 1..75: mol_type = other DNA
gtcaacagtctaacatcctgggcgaatcccttgctgctaaacgttccggtgttctggtgctggctgctggcgctg

SEQ ID NO: 101749 - DNA, 75 bp, synthetic construct
  source 1..75: mol_type = other DNA
gaaagatgccgaaggcaatatcaccaccatcttctgtacttatgacgccgacaccttaagcaaagatccggcaga

SEQ ID NO: 101750 - DNA, 75 bp, synthetic construct
  source 1..75: mol_type = other DNA
agcagtggctaccgggattattggcgggattgtttttggtgcagctggttattttggtgcagattgggtagcgga

SEQ ID NO: 101751 - DNA, 75 bp, synthetic construct
  source 1..75: mol_type = other DNA
aaatattagctcagatgactggaattctttggagacatcacctgaattcaaaaaaaacagtttagctttcaatat

SEQ ID NO: 101752 - DNA, 75 bp, synthetic construct
  source 1..75: mol_type = other DNA
tcgaataagcatgaccagtttcggcgtattgtcagatacctcaagcgctggagaaattttacatttggcgatgat

SEQ ID NO: 101753 - DNA, 75 bp, synthetic construct
  source 1..75: mol_type = other DNA
acggcgaatacgaattggccgttggcaagagacattcaactgaggataatcgtgagtgggccagagcagcgccac

SEQ ID NO: 101754 - DNA, 75 bp, synthetic construct
  source 1..75: mol_type = other DNA
gtctgaatattgtctctttgcaggaaagcctgcatctggatatcgccaaactctggcagcaactcaatttccacc

SEQ ID NO: 101755 - DNA, 75 bp, synthetic construct
  source 1..75: mol_type = other DNA
gaccattattgataagttacgacgtaaaacacttgatggtaaaacgccgaattctattgctgtaacccgaatgag

SEQ ID NO: 101756 - DNA, 75 bp, synthetic construct
  source 1..75: mol_type = other DNA
ggccattgatattgcttatgaaggttccggcagtggcgactggcgcactgacggtttcatcgtgggtgtcggcta

SEQ ID NO: 101757 - DNA, 75 bp, synthetic construct
  source 1..75: mol_type = other DNA
aatacttccggtgaggtgagtctgcaaaatggtgctgctggcgacacactgacggtgaatggcgattacaatggc

SEQ ID NO: 101758 - DNA, 75 bp, synthetic construct
  source 1..75: mol_type = other DNA
gatttcattcagggctcgatggcaaccgatacggggatccgtgagaagggtcaagattttgatatcgatcgcgca

SEQ ID NO: 101759 - DNA, 75 bp, synthetic construct
  source 1..75: mol_type = other DNA
gccacagcaacacgtctctggcgtggggggctggcgtgcagtttaacccgacagaatccgtggccgttgatgtcg

SEQ ID NO: 101760 - DNA, 75 bp, synthetic construct
  source 1..75: mol_type = other DNA
cctgatgacccggggcgtgcgtaatgtgattgagatgaccaaccgttacatggggcgcaatgcgcaatttatgct

SEQ ID NO: 101761 - DNA, 75 bp, synthetic construct
  source 1..75: mol_type = other DNA
cagttaaggttgcacggtatcccatttgtaaccggtcctaaaaacgaaccaatagttcttcgcagtgatgttcca

SEQ ID NO: 101762 - DNA, 75 bp, synthetic construct
  source 1..75: mol_type = other DNA
gctgaccggaagtgatgacgatcgccacagcaacacgtctctggcgtggggagctggcgtgcagtttaacccgac

SEQ ID NO: 101763 - DNA, 75 bp, synthetic construct
  source 1..75: mol_type = other DNA
atctatgactctattgtaaaattgcgatctgaaggtgaagcattactggggaaatcgtttgcaaaacgtcttgat

SEQ ID NO: 101764 - DNA, 75 bp, synthetic construct
  source 1..75: mol_type = other DNA
tattaccaggccatctggtattgaaggcaagatggttaatgcgagtgagaagttatcgtggaaaaagcagggtga

SEQ ID NO: 101765 - DNA, 75 bp, synthetic construct
  source 1..75: mol_type = other DNA
acgaattacagaaagaactgaacgccggactaccacatcaagggatgcagacagtaccacgtccggcacacttag

SEQ ID NO: 101766 - DNA, 75 bp, synthetic construct
  source 1..75: mol_type = other DNA
agaaagaactgaacgccggactaccgcaccaggggctacagacagttccccgcccggcacacatagggggaaacc

SEQ ID NO: 101767 - DNA, 75 bp, synthetic construct
  source 1..75: mol_type = other DNA
catgccggatacatcatgtacgtcactgatgccgtgcaggatcgcaacgatatcgaaatgcttgagggattccgc

SEQ ID NO: 101768 - DNA, 75 bp, synthetic construct
  source 1..75: mol_type = other DNA
agggcaaacaattacttattcagagttgcctgagaaggtttgggctgcaactggaaagaagattaataatcttaa

SEQ ID NO: 101769 - DNA, 75 bp, synthetic construct
  source 1..75: mol_type = other DNA
gggttcaatggcggggacggggagccgtgccgtggtcagccgtttgcaggcaccgacgggaaaagcatgggatgc

SEQ ID NO: 101770 - DNA, 75 bp, synthetic construct
  source 1..75: mol_type = other DNA
gaccagaccgccgccagaactcatgccgccacgtatggcacaggtgattatattccggcgaccagttcttatgcg

SEQ ID NO: 101771 - DNA, 75 bp, synthetic construct
  source 1..75: mol_type = other DNA
atgagcatatgattgttttgggagcaggttcacttgctcatgccaactaccttgctcatttttatgatatgagta

SEQ ID NO: 101772 - DNA, 75 bp, synthetic construct
  source 1..75: mol_type = other DNA
gatgatgtgatcggcaaggtggtgaagagcgaagatattcctgccgctacccagctgtttactccgaactggatt

SEQ ID NO: 101773 - DNA, 75 bp, synthetic construct
  source 1..75: mol_type = other DNA
caaaaccgcacgttaacgtgggtactatcggccacgttgaccaaggtaaaaccacgctgaccgctgcaatcacta

SEQ ID NO: 101774 - DNA, 75 bp, synthetic construct
  source 1..75: mol_type = other DNA
gaacaggtctacatccacgcgcagaagaacatgaacaccgaggtgctgaataaccgcaccacggatgtgataaac

SEQ ID NO: 101775 - DNA, 75 bp, synthetic construct
  source 1..75: mol_type = other DNA
atggatatagctttagtcctaatatttctggcgatgtatttaacacttggctggtgttgggtatgcatccttgtc

SEQ ID NO: 101776 - DNA, 75 bp, synthetic construct
  source 1..75: mol_type = other DNA
ctctgtacatgagtgagagtttactgaaaagaaaacttcaggaggaaaaagtttctttctcccaaatcctgctgg

SEQ ID NO: 101777 - DNA, 75 bp, synthetic construct
  source 1..75: mol_type = other DNA
ttaatgaaaaacagttagaaaaattaaatccaccgcaagatttacgttctgcaatagaaaaaattgggtggaaga

SEQ ID NO: 101778 - DNA, 75 bp, synthetic construct
  source 1..75: mol_type = other DNA
atcaaagatacgataaattcggactttgatcagcccataagtattacagataaaaatgttcctgtcatatggaca

SEQ ID NO: 101779 - DNA, 75 bp, synthetic construct
  source 1..75: mol_type = other DNA
cgagacaatctcaaggatcaatacaatgaagaaaccttccagtttcatgattgtaatgccaaacatttcacctgt

SEQ ID NO: 101780 - DNA, 75 bp, synthetic construct
  source 1..75: mol_type = other DNA
atttgtcacagggggaacagtaggttcaccaaactcctatcagaatggccaaatgattacgagtcggccaggaga

SEQ ID NO: 101781 - DNA, 75 bp, synthetic construct
  source 1..75: mol_type = other DNA
aaccgccagggtgacatcaccgtatccactgctgacgtactggctgtcggcgatgcattcactatcgcaggcgtt

SEQ ID NO: 101782 - DNA, 75 bp, synthetic construct
  source 1..75: mol_type = other DNA
attacgatgcaaaacaaaacagaatttctaaccttgcagatccatcacttgagcaggatgctgtaaataatcgct

SEQ ID NO: 101783 - DNA, 75 bp, synthetic construct
  source 1..75: mol_type = other DNA
ctccggttgcaccggatacagggagtacaggaagcactggggctgatggtattgtgtctgaaggaaataacagca

SEQ ID NO: 101784 - DNA, 75 bp, synthetic construct
  source 1..75: mol_type = other DNA
cggtggcgcactggcgcttactggcatcatcggtgcaattggtcttgtcgcctggccggttatcaccggcatcaa

SEQ ID NO: 101785 - DNA, 75 bp, synthetic construct
  source 1..75: mol_type = other DNA
gaatccgtggccgttgatgtcgcttatgaaggttccggcagtggtgactggcgcactgacggtttcatcgtgggt

SEQ ID NO: 101786 - DNA, 75 bp, synthetic construct
  source 1..75: mol_type = other DNA
taatacgagatatgttttcatatttagtgtactgtatacggccatttatacaggaaaagcctatgtcagaacgta

SEQ ID NO: 101787 - DNA, 75 bp, synthetic construct
  source 1..75: mol_type = other DNA
tcagtgcaggcaaaagtaaacagcagttttgatggttactttaagacggatgcagaaggtgttctgggcgtccgg

SEQ ID NO: 101788 - DNA, 75 bp, synthetic construct
  source 1..75: mol_type = other DNA
gtgaatgaatggttcagcgcgtatgcgatggcgggtatggcttacagccgtgtgtcgaccttctccgaggattat

SEQ ID NO: 101789 - DNA, 75 bp, synthetic construct
  source 1..75: mol_type = other DNA
tactcttatttataatccagattatgagcagggtttactgacctcggtgaaggcagcggcccacgaagtgcaaac

SEQ ID NO: 101790 - DNA, 75 bp, synthetic construct
  source 1..75: mol_type = other DNA
gcggggccgtctgtgcgcgtgaatgaatggttcagcgcgtatgcgatggcgggtgtgtcttacagccgtgtgtcg

SEQ ID NO: 101791 - DNA, 75 bp, synthetic construct
  source 1..75: mol_type = other DNA
ggggcacagtcagggggatgcacagaaactggtagctgaccgtttcaatgctgcagggtatctgttccacggaca

SEQ ID NO: 101792 - DNA, 75 bp, synthetic construct
  source 1..75: mol_type = other DNA
ggagcacgctgcgacttggtaaaagctggcgctcttattctggcagaaattgaacgcattgaccgcgccgctggc

SEQ ID NO: 101793 - DNA, 75 bp, synthetic construct
  source 1..75: mol_type = other DNA
aggttgatattatcaaagccagtgattttcaatctcaagagatatcaagtctggaagacgtcgtgtcggctaaat

SEQ ID NO: 101794 - DNA, 75 bp, synthetic construct
  source 1..75: mol_type = other DNA
gcttcgtgattaccttgccgaagtaactcaccgtgagcgtgaagatattctggttggtgtccgccttgagttttt

SEQ ID NO: 101795 - DNA, 75 bp, synthetic construct
  source 1..75: mol_type = other DNA
gcatggcgattacataagtgggcaggaatatgcgccatcgcttttgctttcgcccactggctggatgaaaaatta

SEQ ID NO: 101796 - DNA, 75 bp, synthetic construct
  source 1..75: mol_type = other DNA
acgtgccattattggctggtcaatgtcgtcacgcatgacggcacaggagaccccggaacgttatgctaccgcatg

SEQ ID NO: 101797 - DNA, 75 bp, synthetic construct
  source 1..75: mol_type = other DNA
gttttgaacagctagttgaagaaggtacttacaaaaccttccctgctgatgaagatggcatcattccattaacag

SEQ ID NO: 101798 - DNA, 75 bp, synthetic construct
  source 1..75: mol_type = other DNA
cgcacctacagcagctaccggactacgactcctgccccggtgggcgtgtttggccccggctggaaagcgccttct

SEQ ID NO: 101799 - DNA, 75 bp, synthetic construct
  source 1..75: mol_type = other DNA
cctttttatattaaaagaatatttctcttataatagtgttgctatatatcaggtggtaactagggttaataccgg

SEQ ID NO: 101800 - DNA, 75 bp, synthetic construct
  source 1..75: mol_type = other DNA
gccatggggaaagtttgattttactctcccttgctcccgccaggtatggatagctggaggcatcggcattacccc

SEQ ID NO: 101801 - DNA, 75 bp, synthetic construct
  source 1..75: mol_type = other DNA
atgacgtcggaagatgaaccagactggaagaatatggataaacgttattctccaggtaagcgccccgagaagtac

SEQ ID NO: 101802 - DNA, 75 bp, synthetic construct
  source 1..75: mol_type = other DNA
gccaggaggcgtgtcgtatcgagtttcatctcgactttgagtttaccaataagttgattgaactcgcctttggtc

SEQ ID NO: 101803 - DNA, 75 bp, synthetic construct
  source 1..75: mol_type = other DNA
caagttgtttggggtgaagagcatctacaagcgaacttagattttgttgccgaatcactatgcctaaacgccatc

SEQ ID NO: 101804 - DNA, 75 bp, synthetic construct
  source 1..75: mol_type = other DNA
attaaaaaacattagtaaactggagaatatggagttctgcgctaaaaaacaacgggtgtattttagtgataaaaa

SEQ ID NO: 101805 - DNA, 75 bp, synthetic construct
  source 1..75: mol_type = other DNA
tacagctgggctacaaaattggcgtaggcggtactatcacctatccacgcgccagtaaaacccgcgatgtcatcg

SEQ ID NO: 101806 - DNA, 75 bp, synthetic construct
  source 1..75: mol_type = other DNA
acaatccctgataattatgatgcatcaatagctaaaggtgatggaagtattgtgcttggtgctcaaagtaaagcc

SEQ ID NO: 101807 - DNA, 75 bp, synthetic construct
  source 1..75: mol_type = other DNA
tttaactgttgttggggacccggatcacccatcaattaaaactgaaggcattttttcagttatatatgaaaactt

SEQ ID NO: 101808 - DNA, 75 bp, synthetic construct
  source 1..75: mol_type = other DNA
ttgaacttggcgatacaattgaaacctacttcaaatttaccattgatattcttgatattaccgataatttccttt

SEQ ID NO: 101809 - DNA, 75 bp, synthetic construct
  source 1..75: mol_type = other DNA
agcaggcacttgatgccactattctgaataccgccttacccgcaatcgctcatagccttaatcgttctcctctcg

SEQ ID NO: 101810 - DNA, 75 bp, synthetic construct
  source 1..75: mol_type = other DNA
gcgctggtgagtctggcccgtcaggacggaacgccgctgccgtttggtgcggtggtgacagttgagggcgaagcg

SEQ ID NO: 101811 - DNA, 75 bp, synthetic construct
  source 1..75: mol_type = other DNA
tgtaaatatgtttacatgtactttaactcagatagtaacagacatctattaacttacctcatagaaaagacggta

SEQ ID NO: 101812 - DNA, 75 bp, synthetic construct
  source 1..75: mol_type = other DNA
tgttattttgcagggtaaaaacacgattgtcacaacgggggattactcaattggtttgctaagtcaaacgagtgg

SEQ ID NO: 101813 - DNA, 75 bp, synthetic construct
  source 1..75: mol_type = other DNA
gggattttgtttggaccgtatctgactgacgatccgcaaaaactgttcaaaatatatgaaagcgactggtttaaa

SEQ ID NO: 101814 - DNA, 75 bp, synthetic construct
  source 1..75: mol_type = other DNA
tttctgggctagcctggagcctggtattaatcttggcccttggcgagtgcgtaatctgactacttggaataaatc

SEQ ID NO: 101815 - DNA, 75 bp, synthetic construct
  source 1..75: mol_type = other DNA
taccccggacgtttcaagggcgcccacgggcagaactttgcccgctggcagatggacggctggcgaaacaacgca

SEQ ID NO: 101816 - DNA, 75 bp, synthetic construct
  source 1..75: mol_type = other DNA
gagcatcagtccacgctgagcgcaggatatcttcatgccagtacggacgctcccggcagcgatgatctgaacggg

SEQ ID NO: 101817 - DNA, 75 bp, synthetic construct
  source 1..75: mol_type = other DNA
cgcagattatcattgcgaaagcgggtggagatgctgcggctattcaggcggcaacgccggtcacgctgaatatgg

SEQ ID NO: 101818 - DNA, 75 bp, synthetic construct
  source 1..75: mol_type = other DNA
gatatggcgactgcggttggttttaatgcgctggctaatgccagtaatgctctggctgttggtagtcagtcctct

SEQ ID NO: 101819 - DNA, 75 bp, synthetic construct
  source 1..75: mol_type = other DNA
gaaaacgggcgtctgacgttgcaggggcatccggttatccatgcatacaatactcagtctgtggctgacaaactg

SEQ ID NO: 101820 - DNA, 75 bp, synthetic construct
  source 1..75: mol_type = other DNA
ataaactcaataatcaactgacaccactgcgtggtaaaccgcaaattcagtttacgcaaaactggccgcgactcg

SEQ ID NO: 101821 - DNA, 75 bp, synthetic construct
  source 1..75: mol_type = other DNA
ctcggtaccggtcagcgcgctgaatacatgaaaaccatattcggtgaagaggcaagctcagctgctgctgtatta

SEQ ID NO: 101822 - DNA, 75 bp, synthetic construct
  source 1..75: mol_type = other DNA
atagcaatcatttcaagtctgctggtattcatttttgttaaaaataaaggattgaaagtcaatgaaagtcaaagc

SEQ ID NO: 101823 - DNA, 75 bp, synthetic construct
  source 1..75: mol_type = other DNA
cattggaccctggcgtgtgaggaacctgaccacctggaacaggtcatccggtcagtcgggaaaatgggagagttc

SEQ ID NO: 101824 - DNA, 75 bp, synthetic construct
  source 1..75: mol_type = other DNA
gacaatccaactaaatttttcatgtacaacaatggcatcacaatggtggcaaattcaatatcagcaacgaattta

SEQ ID NO: 101825 - DNA, 75 bp, synthetic construct
  source 1..75: mol_type = other DNA
gagaagttaacaaattcgatatatttgacccaatttcaaatttaggaatagaaacatcattttcagatgaaaaag

SEQ ID NO: 101826 - DNA, 75 bp, synthetic construct
  source 1..75: mol_type = other DNA
aatggttcagcgcgtatgcgatggcgggtatggcttacagccgtgtttcgactttttccggggattaccttcgcg

SEQ ID NO: 101827 - DNA, 75 bp, synthetic construct
  source 1..75: mol_type = other DNA
ggtatcagtgatgggcgcgtaaatgcggtggctgatgagctttatgctctggtatgccaacgccagcgcgaagaa

SEQ ID NO: 101828 - DNA, 75 bp, synthetic construct
  source 1..75: mol_type = other DNA
caggagaaagatggcagagtttactggcaactgaaaagtcatgccggaacaacagaatctcaggtatcaacggat

SEQ ID NO: 101829 - DNA, 75 bp, synthetic construct
  source 1..75: mol_type = other DNA
ggtatcagtgatgagctggtctattcgatgtcggctgaactcgacgcactggttaagctgcgccagcgggaagag

SEQ ID NO: 101830 - DNA, 75 bp, synthetic construct
  source 1..75: mol_type = other DNA
cgctggccggggatgaacgctttacccggctggcaaatcttgccgccgaacgcttcgcacaactcgatctgactg

SEQ ID NO: 101831 - DNA, 75 bp, synthetic construct
  source 1..75: mol_type = other DNA
gattagatagagctcgcattgttgaactcaagcttgcgggcaacaaagacgaagagctgtatcgtgaactgttgt

SEQ ID NO: 101832 - DNA, 75 bp, synthetic construct
  source 1..75: mol_type = other DNA
gtcattcagctatgcaggagacaagaatcgccagctgacccgttacagcgatacccgctggttcagcgtgatggc

SEQ ID NO: 101833 - DNA, 75 bp, synthetic construct
  source 1..75: mol_type = other DNA
gctccgatgtgccgttcactagggaacgagcggattggacgattcgtttattgaggcgtagatacctaaggttat

SEQ ID NO: 101834 - DNA, 75 bp, synthetic construct
  source 1..75: mol_type = other DNA
attactacagcaaaacgttatgttggccctggtgagagcccatcaacaccagatcaaattcgctattatgtaaaa

SEQ ID NO: 101835 - DNA, 75 bp, synthetic construct
  source 1..75: mol_type = other DNA
atgcgcaatcgcttgcccctttggcgtcgttgagatggtcgatacgattgcgcagaaatgcgacctttgtaacca

SEQ ID NO: 101836 - DNA, 75 bp, synthetic construct
  source 1..75: mol_type = other DNA
tggctgtactacattttcggtggggaagactttctaaacccatggagcataggggataacaacagaaaatatcct

SEQ ID NO: 101837 - DNA, 75 bp, synthetic construct
  source 1..75: mol_type = other DNA
atgaaaattaaattccacaaagcgtatgacgctaacacaaacaagctatcactatttatcgaattcgaacgccgg

SEQ ID NO: 101838 - DNA, 75 bp, synthetic construct
  source 1..75: mol_type = other DNA
attaaacaagccattgaactgcataaatataaaggaacaatttgggcggtgcggcgggtgctggaaatactctcc

SEQ ID NO: 101839 - DNA, 75 bp, synthetic construct
  source 1..75: mol_type = other DNA
cttgagaagcagattgaaacggcagactcgaccagtgaagcgaaccgcttcaagaaagagttggatgctttaatc

SEQ ID NO: 101840 - DNA, 75 bp, synthetic construct
  source 1..75: mol_type = other DNA
gcagaagaagcattcagcgctgaagagaaagcattctggcttgccaaagcaacggaaacaaaccgcccggcaatg

SEQ ID NO: 101841 - DNA, 75 bp, synthetic construct
  source 1..75: mol_type = other DNA
gaaggtgccccaacattatgtgtctagattggttcgatggccttaagcgagcggctgaaggccgccgcctgatga

SEQ ID NO: 101842 - DNA, 75 bp, synthetic construct
  source 1..75: mol_type = other DNA
tgaaaacctgacatccgcgttgagccaaagacttatcgctgatcaattacgcttaactacctccgaatcatgcac

SEQ ID NO: 101843 - DNA, 75 bp, synthetic construct
  source 1..75: mol_type = other DNA
gatactgacaggcggtagtacgtcatttgctgcggataacaatctgcatttttacggcaacttattaagtaaatc

SEQ ID NO: 101844 - DNA, 75 bp, synthetic construct
  source 1..75: mol_type = other DNA
ttcaggcaagtaatactttttgccagtctgctgagcatggtattgtaattgacaataagctaaccgctattctcg

SEQ ID NO: 101845 - DNA, 75 bp, synthetic construct
  source 1..75: mol_type = other DNA
cccgaccgaatccgtggccgttgatgtcgcttatgaaggctccggcagtggcaactggcgcactgacggtttcat

SEQ ID NO: 101846 - DNA, 75 bp, synthetic construct
  source 1..75: mol_type = other DNA
tacaacttgcagataccgacactattgaaaacctgacatccgcgttgagtcaaagacttatcgcggatcaattac

SEQ ID NO: 101847 - DNA, 75 bp, synthetic construct
  source 1..75: mol_type = other DNA
cgtaactgacaacaaggggaaaacgcacgatgtactgaccggaagtgatgacggtcgccacagcaacacgtctct

SEQ ID NO: 101848 - DNA, 75 bp, synthetic construct
  source 1..75: mol_type = other DNA
gctttaaaactcgctattccggaactggtcagcattgctattaagtccagcaaagtaaataaagcgattgaagat

SEQ ID NO: 101849 - DNA, 75 bp, synthetic construct
  source 1..75: mol_type = other DNA
gcagatgccattgccagcgcctttaatatgcctctcgatgttctgttctggtgtgccggttcgcagggaagtatg

SEQ ID NO: 101850 - DNA, 75 bp, synthetic construct
  source 1..75: mol_type = other DNA
tgtatcgaagagcgcattaatgaacaggtcatagagtcttatgggattaatgatttagtaggggcagccgtctca

SEQ ID NO: 101851 - DNA, 75 bp, synthetic construct
  source 1..75: mol_type = other DNA
gcaaaggtacgctgaataacgatatgtccatcaacaccccgtctgttggtgtgaatatcgctctgcacaacattg

SEQ ID NO: 101852 - DNA, 75 bp, synthetic construct
  source 1..75: mol_type = other DNA
ttgactgcagcaaagcaaatccgaatccaggtagtacagctaaaatgaccttcggttctgttttctttggtaata

SEQ ID NO: 101853 - DNA, 75 bp, synthetic construct
  source 1..75: mol_type = other DNA
acagggggcctgtgctgcagatgccattgccagcgcctttaacatgcccatcgatgctctgttctggtgtgccgg

SEQ ID NO: 101854 - DNA, 75 bp, synthetic construct
  source 1..75: mol_type = other DNA
cgcacctacagcagctaccggactacgactcctgccccggtgggcgttttaggccccggctggaaagcgccttct

SEQ ID NO: 101855 - DNA, 75 bp, synthetic construct
  source 1..75: mol_type = other DNA
acagctctgtggcccggggctttattgccgtctctgagtttgccagaaaatgtaatttaaaatcagtcaggcgtt

SEQ ID NO: 101856 - DNA, 75 bp, synthetic construct
  source 1..75: mol_type = other DNA
atacagttggcacacgcattgtaaaaattgttactgacaggccgactcaaaatgtaatcacacagctattcaatg

SEQ ID NO: 101857 - DNA, 75 bp, synthetic construct
  source 1..75: mol_type = other DNA
cgttatcaggccggaaaggaactggccggaaatatggcctcagtgggcgctgccggtgtggggattgcggcggcg

SEQ ID NO: 101858 - DNA, 75 bp, synthetic construct
  source 1..75: mol_type = other DNA
cgcacctacagcagctaccggactatgactcctgccccggtgggcgtcttgggccccggctggaaagcgccttct

SEQ ID NO: 101859 - DNA, 75 bp, synthetic construct
  source 1..75: mol_type = other DNA
atcaggcgtatgtggcgggatgtaatcgcgtgggtagcgatggcaatggctgccactatcgcggcgacagtcggg

SEQ ID NO: 101860 - DNA, 75 bp, synthetic construct
  source 1..75: mol_type = other DNA
caaccgttggtgaaatcgatgctggcgtgctggaaactaccgttggtgccaaggctaaacctttcagcatcaccg

SEQ ID NO: 101861 - DNA, 75 bp, synthetic construct
  source 1..75: mol_type = other DNA
gtcgagttatgagcaactaagaagcaatttattagaagaccatacatttattactatggcgcatttaggtgctcg

SEQ ID NO: 101862 - DNA, 75 bp, synthetic construct
  source 1..75: mol_type = other DNA
aacccggtaaaaaattttgcgttctgcccaggacaggtgcgtcaggccgtggcagtgatgccccttgcggcgaag

SEQ ID NO: 101863 - DNA, 75 bp, synthetic construct
  source 1..75: mol_type = other DNA
aaagctaaacctttcagcatcaccgttgactgcagcaatgcgaacccgaatcctggtagcactgctaaaatgacc

SEQ ID NO: 101864 - DNA, 75 bp, synthetic construct
  source 1..75: mol_type = other DNA
tccaggtagcacggctaaaatgaccttcggttctgttttctttggtaacagcaaagggactttgaacaacgacat

SEQ ID NO: 101865 - DNA, 75 bp, synthetic construct
  source 1..75: mol_type = other DNA
cgcacctacagcagctaccggactaagactcctgccccggtgggcgttttcggccccggctggaaagcgccttct

SEQ ID NO: 101866 - DNA, 75 bp, synthetic construct
  source 1..75: mol_type = other DNA
ttcgaaatcagaatatcaataaataccagcctactttttataggctgattgatggcaatgaagaagaaaagaaaa

SEQ ID NO: 101867 - DNA, 75 bp, synthetic construct
  source 1..75: mol_type = other DNA
acagattgagctggtgcgcagccagagtaaagctggtaataacgggccgtgggtaactcactgggaagaaatggc

SEQ ID NO: 101868 - DNA, 75 bp, synthetic construct
  source 1..75: mol_type = other DNA
tgtctggtcttatgctggcaatggttgcaggtactgcttctgctggtctggacggtggtcagttaaatatcagcg

SEQ ID NO: 101869 - DNA, 75 bp, synthetic construct
  source 1..75: mol_type = other DNA
ttaacgccgggccgaatctgggggatgatgttatttattccggtacggtagccgccgcgatggaaggccgtcatt

SEQ ID NO: 101870 - DNA, 75 bp, synthetic construct
  source 1..75: mol_type = other DNA
cagactattgaagcaacctttactaatcctgtggttagcaccacccagtggagtgctccgctgaacgtggcagta

SEQ ID NO: 101871 - DNA, 75 bp, synthetic construct
  source 1..75: mol_type = other DNA
ggtaaaaccgttaatgcgtaatttgattattgcggacaacgtgcacggcgaaagcggtctcgacggcccggcatt

SEQ ID NO: 101872 - DNA, 75 bp, synthetic construct
  source 1..75: mol_type = other DNA
ttatccggctggacattaatcatgaaaacctgctgcgtatgctgcagcaggcccggacggagcagaaacgtctgc

SEQ ID NO: 101873 - DNA, 75 bp, synthetic construct
  source 1..75: mol_type = other DNA
gttctggctgggcattgacttttcagcaatattgcatggtcccgtgaagtggttctgcgttgacgatgttattta

SEQ ID NO: 101874 - DNA, 75 bp, synthetic construct
  source 1..75: mol_type = other DNA
gagctaaaatttatacaacgtgcaattactgagtatttatccgataaattacccgttcatgaatgcgcatttgca

SEQ ID NO: 101875 - DNA, 75 bp, synthetic construct
  source 1..75: mol_type = other DNA
gtgatatcgctgtgcaaatgggaaccccgaccgactgcgtctatcttggcgtgaacgcactaatgcgtccacgtc

SEQ ID NO: 101876 - DNA, 75 bp, synthetic construct
  source 1..75: mol_type = other DNA
ggaaagggtgaggtctccaccgcctgtaaggattgccgtgggcgtggtgtcgccattcatcgtgaagagtcggta

SEQ ID NO: 101877 - DNA, 75 bp, synthetic construct
  source 1..75: mol_type = other DNA
ggcagcggcatcggccttgcgattgtgaagtcaatcgtggaagcacatcacggaagagtgcaggtggaatcggac

SEQ ID NO: 101878 - DNA, 75 bp, synthetic construct
  source 1..75: mol_type = other DNA
ccgccaggccaatttctctgccgatatcgcgcacgagatcagaacacccatcaccaatctggtgacgcagactga

SEQ ID NO: 101879 - DNA, 75 bp, synthetic construct
  source 1..75: mol_type = other DNA
cataataccgacaggtgtttatctcgatatatcaccgacaggaggctgggttggctcaatgaaaacccaggtcat

SEQ ID NO: 101880 - DNA, 75 bp, synthetic construct
  source 1..75: mol_type = other DNA
gtaacggcctggcatcaaaagttcagaacgtcctgaaggatgacccgttctccggacacctgttcatcttccgcg

SEQ ID NO: 101881 - DNA, 75 bp, synthetic construct
  source 1..75: mol_type = other DNA
atctgaatgacagggtggatgagctgaaccgggatattcgcggagtcggcgcatcagcagctgcgatgagtggta

SEQ ID NO: 101882 - DNA, 75 bp, synthetic construct
  source 1..75: mol_type = other DNA
gaatcgggctgagatgggtttttctgcgttcctggggaaaatgggcatcagtatgaatgacagggcgcgggcaac

SEQ ID NO: 101883 - DNA, 75 bp, synthetic construct
  source 1..75: mol_type = other DNA
atggctatgattaatattgatgagcgttatcttgttattattgaatttgaggaagatgatgttcgtgttgattct

SEQ ID NO: 101884 - DNA, 75 bp, synthetic construct
  source 1..75: mol_type = other DNA
accatcgttaaacaggcgttagccgcctaccttgaaaaccaccctcttttagtcgcttccgcagaaggaaaacag

SEQ ID NO: 101885 - DNA, 75 bp, synthetic construct
  source 1..75: mol_type = other DNA
gatgatgtcaataacacagcattatcaatgcctctgggcaggggctggattgagtcatccttacagggtggatat

SEQ ID NO: 101886 - DNA, 75 bp, synthetic construct
  source 1..75: mol_type = other DNA
ctatcttttttacattgatgacggtattcctgttttattattcagcgtcccatgcagcgtctctcgatggtggtg

SEQ ID NO: 101887 - DNA, 75 bp, synthetic construct
  source 1..75: mol_type = other DNA
caccagcaaaatcaccaacgtcaaagacggtgacctgacggctggtagcactgacgcggttaacggctctcagct

SEQ ID NO: 101888 - DNA, 75 bp, synthetic construct
  source 1..75: mol_type = other DNA
acgatttgcccgaccggagccatcgtcgagccatataccgtcgatgctcgccgctgtatctcttatctcaccatc

SEQ ID NO: 101889 - DNA, 75 bp, synthetic construct
  source 1..75: mol_type = other DNA
taagctacagccgcagcgagtcgttctggctggcaaggggcggagtgctgaaacaacacaaaggccatccgcttg

SEQ ID NO: 101890 - DNA, 75 bp, synthetic construct
  source 1..75: mol_type = other DNA
gcagtttctccttgaacataccgaaatgagccccggtaccgtgcgtgaatatgtcgtccgtctgcgccgtctggg

SEQ ID NO: 101891 - DNA, 75 bp, synthetic construct
  source 1..75: mol_type = other DNA
cctggcttaacagccatgagcattcaaacggcaacgatggaaatgataccggggggccgacttcaacgtttaacg

SEQ ID NO: 101892 - DNA, 75 bp, synthetic construct
  source 1..75: mol_type = other DNA
tttaacggcctggcatcaaaagttcagaacgtcctgaaggatgacccgttctccgggcatctgttcatctttcgc

SEQ ID NO: 101893 - DNA, 75 bp, synthetic construct
  source 1..75: mol_type = other DNA
aagcacaaggaacactttttttgacgtggcacgtattatacgagcaaaaaaccggcaatttttgtgctggaaaat

SEQ ID NO: 101894 - DNA, 75 bp, synthetic construct
  source 1..75: mol_type = other DNA
ggttacccaagcgctgacttttgttgcaacctgtaatgccctttatcatttgggggctgaacctgtatttataga

SEQ ID NO: 101895 - DNA, 75 bp, synthetic construct
  source 1..75: mol_type = other DNA
acacggcgaacccgtcgatgcctattcagatttgtccggcaccgccgccgctgttcaggcgtatcgggctggcca

SEQ ID NO: 101896 - DNA, 75 bp, synthetic construct
  source 1..75: mol_type = other DNA
atgcaaaaaaaaccgctcctgggaagagcggctggcaagaagaaacaatatgaacaattaattaacgatgggaat

SEQ ID NO: 101897 - DNA, 75 bp, synthetic construct
  source 1..75: mol_type = other DNA
ctgatgtattaatttttgaaccgaaagtttttggtgatgagcgtggtttctttatggaaagctttaatcagaaag

SEQ ID NO: 101898 - DNA, 75 bp, synthetic construct
  source 1..75: mol_type = other DNA
tatcggccacgttgaccaaggtaaaacgacgctgaccgctgcaatcactaccgtactggctaaaacctacggcgg

SEQ ID NO: 101899 - DNA, 75 bp, synthetic construct
  source 1..75: mol_type = other DNA
gctgcctgacgatacgctgtggccggaagatgaattgctccccttatcgaaagaaggtggatttgccgcgcgcca

SEQ ID NO: 101900 - DNA, 75 bp, synthetic construct
  source 1..75: mol_type = other DNA
ggttgaatttgttcaggataaccattcgaagtctaataaaggcgttttacgcgggctgcattatcagttagaacc

SEQ ID NO: 101901 - DNA, 75 bp, synthetic construct
  source 1..75: mol_type = other DNA
atattgtaggaagacagtattctgaactacaaaatcaccataaaacagaagcattatctcagaataataaatata

SEQ ID NO: 101902 - DNA, 75 bp, synthetic construct
  source 1..75: mol_type = other DNA
aaaattctcaacgtagaatggccatttacttctaacttaattctttcttcaaaagatatgagcgcgtcattattc

SEQ ID NO: 101903 - DNA, 75 bp, synthetic construct
  source 1..75: mol_type = other DNA
cgggcggagcattcactttgagccgctgctgccgggggaggcggtgtacagccgcagcgagtccctgtggctggt

SEQ ID NO: 101904 - DNA, 75 bp, synthetic construct
  source 1..75: mol_type = other DNA
ggttgaatttgttcaggataaccattctaagtctaataaaggcgttttacgcgggctccattaccagttagaacc

SEQ ID NO: 101905 - DNA, 75 bp, synthetic construct
  source 1..75: mol_type = other DNA
gatttgcgtgacaaaggatccctgccgtttctggaagggcatttgtatgaggtggctgagcgcggtggtcccgga

SEQ ID NO: 101906 - DNA, 75 bp, synthetic construct
  source 1..75: mol_type = other DNA
agaaaacaaattactgctcagtcagttacattctacaataatggacatcatagtatatgttcttgcttacatttt

SEQ ID NO: 101907 - DNA, 75 bp, synthetic construct
  source 1..75: mol_type = other DNA
atatgatgtgcttctttcaaaacatttagccccttgggaattatctgtaggttcaaaggccttattaccattcca

SEQ ID NO: 101908 - DNA, 75 bp, synthetic construct
  source 1..75: mol_type = other DNA
ggaaggcagtggcactacggcgcaacgttttcgcgcctctgtcccggtgcgaaacccggaaacgggaaatgtatc

SEQ ID NO: 101909 - DNA, 75 bp, synthetic construct
  source 1..75: mol_type = other DNA
aatggaacttttcctgatctgcaaagtttgagtcaggttcgtcaggggatgactaaagatcaattgtattatttg

SEQ ID NO: 101910 - DNA, 75 bp, synthetic construct
  source 1..75: mol_type = other DNA
actatcacaagcttctgcgcaaccgactcaaaaagctgggcgagatgattcagcaacattgtgtttcgctgaatt

SEQ ID NO: 101911 - DNA, 75 bp, synthetic construct
  source 1..75: mol_type = other DNA
tggtggtccagggtttactccatacatttcatttgagagtagaggacaacctttaaatataaaagaaggaggctc

SEQ ID NO: 101912 - DNA, 75 bp, synthetic construct
  source 1..75: mol_type = other DNA
accaggacgtgggattccattgaaaaaattgctctcaccctgtctgttgttgcggtggcctttatgtgggtacag

SEQ ID NO: 101913 - DNA, 75 bp, synthetic construct
  source 1..75: mol_type = other DNA
gcgctggcgtcatgccgatctggcggacctcgaacatattcgtcatgctgccgatcagttgtgggaagattcgct

SEQ ID NO: 101914 - DNA, 75 bp, synthetic construct
  source 1..75: mol_type = other DNA
tacccggagacgacgcgccacaactggctttaccctggagtcagcctaatatcgccgaacgtcacgcgatgctga

SEQ ID NO: 101915 - DNA, 75 bp, synthetic construct
  source 1..75: mol_type = other DNA
ccagcggcgcgatggtcgggtttaacgtccatttccattctctggcaagcgcctcgattactgcgatgtttagtt

SEQ ID NO: 101916 - DNA, 75 bp, synthetic construct
  source 1..75: mol_type = other DNA
gtggaaaagtagttggacaacttacttttgatatcaatcaagcacttgctgttagtgtaggcgagcaagttggtg

SEQ ID NO: 101917 - DNA, 75 bp, synthetic construct
  source 1..75: mol_type = other DNA
ccgcttacgctaacgcctcgttgtatgctctgcgatctgctgcgcataaactgttgaattacgcgcagcaggcgc

SEQ ID NO: 101918 - DNA, 75 bp, synthetic construct
  source 1..75: mol_type = other DNA
gttacgcactacgatagaagccactgaagacgatcttaaccaccttatcgtccaggggggaagtcgtagggctga

SEQ ID NO: 101919 - DNA, 75 bp, synthetic construct
  source 1..75: mol_type = other DNA
tagaacataacagtgatacagagtacggagatattgtcttacccgcgtcatttggcatgtcagtatgcgccgttg

SEQ ID NO: 101920 - DNA, 75 bp, synthetic construct
  source 1..75: mol_type = other DNA
ccagcggccagcgtctgggggaatgtgggcgtgcagctgggtgataatggctacaatgacaccgcagtgatggtg

SEQ ID NO: 101921 - DNA, 75 bp, synthetic construct
  source 1..75: mol_type = other DNA
cagataagctcgcccgaccagacttggtctgtggatactgctgatgcccgtacagagaatgggcaactaattttt

SEQ ID NO: 101922 - DNA, 75 bp, synthetic construct
  source 1..75: mol_type = other DNA
gcagcatatttgctcaagagtaaagcaagtaacgccggaactcagaacagtcactgggccactgttcttttaccg

SEQ ID NO: 101923 - DNA, 75 bp, synthetic construct
  source 1..75: mol_type = other DNA
tattgaattagtcagtgagtgcgcatccaagcggccgaagaaatcctctcctgcaaaaggagtaactataaattc

SEQ ID NO: 101924 - DNA, 75 bp, synthetic construct
  source 1..75: mol_type = other DNA
tggtgctactgataacgcactgggtgaaaactccattgttctgggagataacgacaccggatttaggcaagatgg

SEQ ID NO: 101925 - DNA, 75 bp, synthetic construct
  source 1..75: mol_type = other DNA
ccctgtactgaagggaatattgtaaacggtcgttatgaggtgcgtggtagcaggaaaattaaacctgaagccatc

SEQ ID NO: 101926 - DNA, 75 bp, synthetic construct
  source 1..75: mol_type = other DNA
ggaagtcctggcgaaccactgtacaaaactatgccactctactatcacgctgccttgccagcgccggtagtgccg

SEQ ID NO: 101927 - DNA, 75 bp, synthetic construct
  source 1..75: mol_type = other DNA
cagggaatggcggtcagtaccggcagacaggacgacggggcatccgtaccggctggcatgtcgctggtcagtgga

SEQ ID NO: 101928 - DNA, 75 bp, synthetic construct
  source 1..75: mol_type = other DNA
cccttctttcagccattatttcggtggccctgttttattcggcagcgccacatgcagatattcttgatggcggcg

SEQ ID NO: 101929 - DNA, 75 bp, synthetic construct
  source 1..75: mol_type = other DNA
agaaagagttggatgccttaatcaagaaacaggtcgagctacgagagtttgatgacaagttaaaacactacgccg

SEQ ID NO: 101930 - DNA, 75 bp, synthetic construct
  source 1..75: mol_type = other DNA
atgttaagtctgactgtattcatctattacggtagctatacaaggaaagcgcatcttacaggtatcgtcatgccc

SEQ ID NO: 101931 - DNA, 75 bp, synthetic construct
  source 1..75: mol_type = other DNA
cgccaaagcgcaacagtgcaatgcgttgattgcgggcagtgttgcattacaaacggactcaggttcggttaatcg

SEQ ID NO: 101932 - DNA, 75 bp, synthetic construct
  source 1..75: mol_type = other DNA
ggtagttatacccgtaaagctcacctgaccggtatcgttatgccttcatccgggctggtaaaaattacaccgcaa

SEQ ID NO: 101933 - DNA, 75 bp, synthetic construct
  source 1..75: mol_type = other DNA
cagagtgtgacggaagtaaggtcgagtagtttgccacaaagcctgaaaagccgcctgtcttcattattactaatg

SEQ ID NO: 101934 - DNA, 75 bp, synthetic construct
  source 1..75: mol_type = other DNA
cagcctttgcactgtggcagccttacagctgcttcgaaaagcgcgggcagcgattccttggcagtacgaattttt

SEQ ID NO: 101935 - DNA, 75 bp, synthetic construct
  source 1..75: mol_type = other DNA
gacgccagaagccaaagcgttggcacaggaagaacttatcaaaatggggccggtaacccgtgatgagcgcgtgac

SEQ ID NO: 101936 - DNA, 75 bp, synthetic construct
  source 1..75: mol_type = other DNA
aaaagttgcctgtccggagtgtggagggaagggagaggtatccactgcctgtaaagattgtcgtgggcgcggtgt

SEQ ID NO: 101937 - DNA, 75 bp, synthetic construct
  source 1..75: mol_type = other DNA
gaatatggggaaaaggctggcggctaatctccagagtatcacctgtcatgccatgcggatctatcatgtaaatgg

SEQ ID NO: 101938 - DNA, 75 bp, synthetic construct
  source 1..75: mol_type = other DNA
caccaacctgactgacgctgttgacagtctcggtgatgactctctgctgtggaatgatgcagcgaaagcattcag

SEQ ID NO: 101939 - DNA, 75 bp, synthetic construct
  source 1..75: mol_type = other DNA
aggagcgcgaagttcagcgtgtcggcagcaaccagaccatctcggttgatgtccggctgattgcggcgactcatc

SEQ ID NO: 101940 - DNA, 75 bp, synthetic construct
  source 1..75: mol_type = other DNA
gctactgagcacgcttgtcgagctgcaagaatcaggtgactcaatgcaaaagcctgcggcgaagcaattgattga

SEQ ID NO: 101941 - DNA, 75 bp, synthetic construct
  source 1..75: mol_type = other DNA
acggcgggaagatatccctctgctggctggccattttctgcagcgctttgccgagcgtaatcgcaaggcggtaaa

SEQ ID NO: 101942 - DNA, 75 bp, synthetic construct
  source 1..75: mol_type = other DNA
cgccggccccaatctgggggatgatgttatctattccggtacggtagccgccgcgatggaaggccgtcatttagg

SEQ ID NO: 101943 - DNA, 75 bp, synthetic construct
  source 1..75: mol_type = other DNA
tgttccgtcgttattccagacgactggcaactaacatcgcagcagcaagcctttatagaactgtttgctgaagat

SEQ ID NO: 101944 - DNA, 75 bp, synthetic construct
  source 1..75: mol_type = other DNA
tgccgcgtttaagctggcccagttcacccaccgcaagatcggcagcattgggaaaaaagaggttaaaaaaactca

SEQ ID NO: 101945 - DNA, 75 bp, synthetic construct
  source 1..75: mol_type = other DNA
gttatttattccggtacggtagccgccgcgatggaaggtcgccatttaggttttccggcgcttgccgtctcgcta

SEQ ID NO: 101946 - DNA, 75 bp, synthetic construct
  source 1..75: mol_type = other DNA
agtggccgaacgagggggggcggggtttacgccctttattactttcagcagtaacgggcagccttttactataac

SEQ ID NO: 101947 - DNA, 75 bp, synthetic construct
  source 1..75: mol_type = other DNA
tggctggattatctggacgcactggaactggtcgatacttccagtgcgccagatattgaatggcctacgcctccg

SEQ ID NO: 101948 - DNA, 75 bp, synthetic construct
  source 1..75: mol_type = other DNA
gcgtgcactgtgcaaagaaccgctgcgaacagggcgtattcttaatataaatgtaccggatttgccgctggacca

SEQ ID NO: 101949 - DNA, 75 bp, synthetic construct
  source 1..75: mol_type = other DNA
aaagcacagcgcgtagcctgcgctccacatttgacctgccggatgagccaacaggcaatgccgcgccttcatggc

SEQ ID NO: 101950 - DNA, 75 bp, synthetic construct
  source 1..75: mol_type = other DNA
ctgcggcggtaacgtgttccattttgcgcgcactgtgtaaagagccgctgcgtaccgggcgtattctcaatatta

SEQ ID NO: 101951 - DNA, 75 bp, synthetic construct
  source 1..75: mol_type = other DNA
gtatccggatggtaagccgccggtatgggcaaagtgtacgaaaggtgtgtatccgtcttactgggaagaatggaa

SEQ ID NO: 101952 - DNA, 75 bp, synthetic construct
  source 1..75: mol_type = other DNA
aggttttacgccccaggcgatggatctgttgattcattacgactggccgggaaatattcgtgagctggaaaacgc

SEQ ID NO: 101953 - DNA, 75 bp, synthetic construct
  source 1..75: mol_type = other DNA
caaccggttcaggcgttactccatgccgcctacgctaacgcgtcgttatatgctctgcgatctgcatcgcataag

SEQ ID NO: 101954 - DNA, 75 bp, synthetic construct
  source 1..75: mol_type = other DNA
tatcggccacgttgaccaaggtaaaaccaccctgaccgctgcaatcactaccgtactggctaaaacctacggcgg

SEQ ID NO: 101955 - DNA, 75 bp, synthetic construct
  source 1..75: mol_type = other DNA
gctgtgacctacagtgtatcagaaataatattaaatgtccaagatcctgtatttgtattgctaatgaaggttttt

SEQ ID NO: 101956 - DNA, 75 bp, synthetic construct
  source 1..75: mol_type = other DNA
caatttcctaccattgccgccagcgatttaatgcatcttgggcagtcagatcgagtgccgctggtctttcagttg

SEQ ID NO: 101957 - DNA, 75 bp, synthetic construct
  source 1..75: mol_type = other DNA
taaacctgtacggttaggggaaatcatcaccgactacactgacacgcttgacaggcgtctgaggaacggagaaga

SEQ ID NO: 101958 - DNA, 75 bp, synthetic construct
  source 1..75: mol_type = other DNA
cgctttatgaatcacgcctgaagggagaactgcatgacaaagtcattggacattatctgaacataaaacactatc

SEQ ID NO: 101959 - DNA, 75 bp, synthetic construct
  source 1..75: mol_type = other DNA
agcggccagccggggtttctggcagtcgatgacacctccaccgcgcagggggtggggatagggatggaaaccctc

SEQ ID NO: 101960 - DNA, 75 bp, synthetic construct
  source 1..75: mol_type = other DNA
acaggacgaataaaaatgtcaaacgtgcaatttttgcatcgacattgggaacaattattgaatggtatgattatg

SEQ ID NO: 101961 - DNA, 75 bp, synthetic construct
  source 1..75: mol_type = other DNA
ggcagaacgcggcgtgcaggtgttctttactcaggtttttcgtgacagcttttttcatgccgatatgcacccagg

SEQ ID NO: 101962 - DNA, 75 bp, synthetic construct
  source 1..75: mol_type = other DNA
tcaccggtcatttattaagtaaatcctgcactctggtagtgaatggcgggttgctggcggaagtgcattttccgg

SEQ ID NO: 101963 - DNA, 75 bp, synthetic construct
  source 1..75: mol_type = other DNA
gaatcagtggccgttgatgtcgcttatgaaggctccggcagtggcgactggcgcactgacggtttcatcgtgggt

SEQ ID NO: 101964 - DNA, 75 bp, synthetic construct
  source 1..75: mol_type = other DNA
gatcattggttctgtttttgctttatgtttttgttatgtgaatatcggtagtaagtattggcaagaaaactggga

SEQ ID NO: 101965 - DNA, 75 bp, synthetic construct
  source 1..75: mol_type = other DNA
atccggtgcgcctgcatgggcatctgaacatcagtccacgctgagcgcggggtatcttcatgtctcgacgaacgt

SEQ ID NO: 101966 - DNA, 75 bp, synthetic construct
  source 1..75: mol_type = other DNA
caaaaccgcacgttaacgtgggtactatcggccacgttgaccagggtaaaaccacactgaccgctgcaatcacta

SEQ ID NO: 101967 - DNA, 75 bp, synthetic construct
  source 1..75: mol_type = other DNA
tagaaggcgccacaccgctatttagcgatgtggatgagttatacagtttgctggaagaggcggcgcaagcggagg

SEQ ID NO: 101968 - DNA, 75 bp, synthetic construct
  source 1..75: mol_type = other DNA
ccgaatacgtggccattgatattgcttatgaagggtccggtagtggtgactggcgcactgacggtttcatcgtgg

SEQ ID NO: 101969 - DNA, 75 bp, synthetic construct
  source 1..75: mol_type = other DNA
gccgcttcttgaaggacatttgtatgaggtggctgagcgcggtggtcctggattcacaccatttattaccttcag

SEQ ID NO: 101970 - DNA, 75 bp, synthetic construct
  source 1..75: mol_type = other DNA
gtatggataccagcaatatggatgtttttgttcagcagtatgctgatacggtgaaatatctgtccgagaaaaaat

SEQ ID NO: 101971 - DNA, 75 bp, synthetic construct
  source 1..75: mol_type = other DNA
atgagcgagtcactgagctgggtgcagacgggcaacactctggtattaaccggagagttggatcaagacgtactg

SEQ ID NO: 101972 - DNA, 75 bp, synthetic construct
  source 1..75: mol_type = other DNA
tctcacaccttcaatgccaccagaacacatgaggcaaggaagcgcgccaaaactgagtccaccgagccataagag

SEQ ID NO: 101973 - DNA, 75 bp, synthetic construct
  source 1..75: mol_type = other DNA
tggctctgcaagaactggggccagtgtggatcaagttcgggcagatgctgtctacccgccgcgacctttttcctc

SEQ ID NO: 101974 - DNA, 75 bp, synthetic construct
  source 1..75: mol_type = other DNA
gtctggctgatgtccagcaccaatgccctggcactgtccatgcgtaaaaatgcgctgggtcagaaggaatacccg

SEQ ID NO: 101975 - DNA, 75 bp, synthetic construct
  source 1..75: mol_type = other DNA
cgatcatgattttcaaaaatggtcaggttgttgacatgcttaacggcgctgtgccgaaagcgccgttcgatagct

SEQ ID NO: 101976 - DNA, 75 bp, synthetic construct
  source 1..75: mol_type = other DNA
ttgtgtcaggtgttctatactattttaacatggcgtcaaataatcgtaaactgcaggaaaatgtgaaatcaatac

SEQ ID NO: 101977 - DNA, 75 bp, synthetic construct
  source 1..75: mol_type = other DNA
atagtgaaggcaactatctgacaacatcagtggatgacggtgtttggatttgcccctatatttccagacacctgt

SEQ ID NO: 101978 - DNA, 75 bp, synthetic construct
  source 1..75: mol_type = other DNA
gatgacctgaagggcattaacgtgaaataccgttatgaatttacggacacgctggggctggtgacgtcattcagt

SEQ ID NO: 101979 - DNA, 75 bp, synthetic construct
  source 1..75: mol_type = other DNA
gaatacgccgcgcttggcatcgacagctttgtgctttcgggctatccgcatctggaagaagcgtatcgggtcggc

SEQ ID NO: 101980 - DNA, 75 bp, synthetic construct
  source 1..75: mol_type = other DNA
ttgaagcagcaatgggtggcctgccggtggaagcgtggtttgatgattttgatattaagccgttagcctctgcct

SEQ ID NO: 101981 - DNA, 75 bp, synthetic construct
  source 1..75: mol_type = other DNA
atagtgaaggcaactatctgacaacatcagtggatgacggtgttgtattcctcaataacatcaaaccggacatgg

SEQ ID NO: 101982 - DNA, 75 bp, synthetic construct
  source 1..75: mol_type = other DNA
aagttacgcttcctgtaagcccttacagagatatttttcatagtagcagtatcgtgacaggtactcagtttcgca

SEQ ID NO: 101983 - DNA, 75 bp, synthetic construct
  source 1..75: mol_type = other DNA
acgttggatctgaattattatcacgatcctcattcggcagaaattgaagaagatggcagcaatattagcgatgat

SEQ ID NO: 101984 - DNA, 75 bp, synthetic construct
  source 1..75: mol_type = other DNA
cgcgccgcgctgaaagtgtcgttctttggccctttctatggcggctataacgtcattgcgctagatcgggagtac

SEQ ID NO: 101985 - DNA, 75 bp, synthetic construct
  source 1..75: mol_type = other DNA
gctatgtgtttgccctgatgtggttgcagtcatggccaatgttgtacgccattctgaacagcgccatgacatttt

SEQ ID NO: 101986 - DNA, 75 bp, synthetic construct
  source 1..75: mol_type = other DNA
cgctatgggttgatgccaaaagattattcagcacccactactgtagcagaacatgttatggggaacaacaaatcc

SEQ ID NO: 101987 - DNA, 75 bp, synthetic construct
  source 1..75: mol_type = other DNA
agacgggtgacacgctggcgttatccggagagctggatcaggacgttttgctaccgctttgggaaatgcgtgagg

SEQ ID NO: 101988 - DNA, 75 bp, synthetic construct
  source 1..75: mol_type = other DNA
gaatacggctatattgtcgactataaagaccttttccgctcattggaaaaaacagttcaggactacactgcagaa

SEQ ID NO: 101989 - DNA, 75 bp, synthetic construct
  source 1..75: mol_type = other DNA
acacctgttgatttagatgctgtaataaaatcaggtaattttactaaaggcacaactaaaggcaacaacgatgct

SEQ ID NO: 101990 - DNA, 75 bp, synthetic construct
  source 1..75: mol_type = other DNA
cgttacggtcagtttgattacccgttatcgacccttccccgccgcgaacggctggtaaaacgcgcccgggagcag

SEQ ID NO: 101991 - DNA, 75 bp, synthetic construct
  source 1..75: mol_type = other DNA
gacttggtcgtcaggtgattgaatgtaaggtttctcttgatgagggacaaccaccttatgctgcgggtaaatatc

SEQ ID NO: 101992 - DNA, 75 bp, synthetic construct
  source 1..75: mol_type = other DNA
attgtgaatcataaaaaaaatctcggtttaaatgcatataaaaaattaatgcgtatggctactggtgatgttatt

SEQ ID NO: 101993 - DNA, 75 bp, synthetic construct
  source 1..75: mol_type = other DNA
atgatgcgcatacggcaagtagtaatactcagtcgagccataatgctcgtcatgatatcgatgccagagctacac

SEQ ID NO: 101994 - DNA, 75 bp, synthetic construct
  source 1..75: mol_type = other DNA
caatgtgccaatgaaagactccggtgtggattggattggagatattccagagcattgggaagttgtgcctctaaa

SEQ ID NO: 101995 - DNA, 75 bp, synthetic construct
  source 1..75: mol_type = other DNA
ataaccaaaaatgaccctgttctgttacgcagcggtattattttaaaaggtatattttttggaagcatatttttt

SEQ ID NO: 101996 - DNA, 75 bp, synthetic construct
  source 1..75: mol_type = other DNA
ttttctctacttaatcgttagttcgcccctttttcttaatgccggtgaggctatgatgactggttcagctggtca

SEQ ID NO: 101997 - DNA, 75 bp, synthetic construct
  source 1..75: mol_type = other DNA
aggtaactaatttaagcaaatgctatcaaatatattcccagccatgggacagattgaagcaattctttgccccaa

SEQ ID NO: 101998 - DNA, 75 bp, synthetic construct
  source 1..75: mol_type = other DNA
agttaaatagtcttgatctgtttcgtaaagaattactaactactataaagccagagaaagtagagagattactta

SEQ ID NO: 101999 - DNA, 75 bp, synthetic construct
  source 1..75: mol_type = other DNA
agtaaaattttggtcatccagagaacttggtggtgttattcattctcctgtaaatgttatagaaggggatgaact

SEQ ID NO: 102000 - DNA, 75 bp, synthetic construct
  source 1..75: mol_type = other DNA
ggtttccgctgggcaccaaaacaggcgctgtttgtggcgccggcctggacaccgggccgggaagacgtgctcctc

SEQ ID NO: 102001 - DNA, 75 bp, synthetic construct
  source 1..75: mol_type = other DNA
gggtatggcttacagccgtgtgtcgactttctccggggattatctccgcgtaactgacaacaaggggaaacgcac

SEQ ID NO: 102002 - DNA, 75 bp, synthetic construct
  source 1..75: mol_type = other DNA
atgatgcttttattattgagcctgatatctatggcgatgaaagaggtttttttcaagaagtataccatcatgaaa

SEQ ID NO: 102003 - DNA, 75 bp, synthetic construct
  source 1..75: mol_type = other DNA
ctgatgatacggttgttgatttattgccggagtcatctggtaagttattgccttgtccggggcgggggggctggc

SEQ ID NO: 102004 - DNA, 75 bp, synthetic construct
  source 1..75: mol_type = other DNA
tgcttcgaactcgtaattcaacacagcaatgatgaaaaattaaaaataaaagcacaatcatacttggacgcaatt

SEQ ID NO: 102005 - DNA, 75 bp, synthetic construct
  source 1..75: mol_type = other DNA
ttatgctgtcgcttttgcattaggaaaaaatgactatacaccggtattccatactggacaatgccagcttcggtt

SEQ ID NO: 102006 - DNA, 75 bp, synthetic construct
  source 1..75: mol_type = other DNA
catgcggaaaatcttgtaaaagctaaaagtcgagatgtaatgataaatggatataacattgaacgttacttcgaa

SEQ ID NO: 102007 - DNA, 75 bp, synthetic construct
  source 1..75: mol_type = other DNA
gcaggcgctgttaatgcgcccggccatttccgcttccgacagcatcacccgtacggtggccgaaattctggaaaa

SEQ ID NO: 102008 - DNA, 75 bp, synthetic construct
  source 1..75: mol_type = other DNA
agatatgcgttgtggcttcaatggcctggcttcgaaggtgcagaacacgctgaaagatgacccgttctccgggca

SEQ ID NO: 102009 - DNA, 75 bp, synthetic construct
  source 1..75: mol_type = other DNA
ttacaaaagattcgcctttgtggttacactacctggcgcgatatattgattccggatatcaggctgagtttgaat

SEQ ID NO: 102010 - DNA, 75 bp, synthetic construct
  source 1..75: mol_type = other DNA
ccctgaactgctgcgtactgggcgaagatgtcaccccggatcaaccggagtttgcgctgtttattcgtgaagttg

SEQ ID NO: 102011 - DNA, 75 bp, synthetic construct
  source 1..75: mol_type = other DNA
gcgtacagagaatgggcaactggtttttaatttgcgtgataaaggggcgttgccgtttctggaggggcacttaca

SEQ ID NO: 102012 - DNA, 75 bp, synthetic construct
  source 1..75: mol_type = other DNA
aaattcttggttcgatatctgggccgagaaggtggacgaactttagcagcatccatgctagcaaaggatttaggc

SEQ ID NO: 102013 - DNA, 75 bp, synthetic construct
  source 1..75: mol_type = other DNA
gggcctggtcgcgcaggaggcggtgaagaattaggtggtttacgagcggtgaaacattacatgcagcgaaccgct

SEQ ID NO: 102014 - DNA, 75 bp, synthetic construct
  source 1..75: mol_type = other DNA
ctacactccggtgatgccaacctgactgatgaacagatcgctaaattaccttttgcgttatatcgccagggctac

SEQ ID NO: 102015 - DNA, 75 bp, synthetic construct
  source 1..75: mol_type = other DNA
tgatttatattacagcaatcgttttattagtatttattacaatagtaaaaaaatggtacatacttgataaaagaa

SEQ ID NO: 102016 - DNA, 75 bp, synthetic construct
  source 1..75: mol_type = other DNA
ctgttcaggcgtatcgggctggccattggttactgggagccgatggcgctgacggacgtcacccgatcaccggga

SEQ ID NO: 102017 - DNA, 75 bp, synthetic construct
  source 1..75: mol_type = other DNA
atgcgtaaactttatgccgccattttttccgcagccatctgtctggccgtatccggtgcgcctgcatgggcgtct

SEQ ID NO: 102018 - DNA, 75 bp, synthetic construct
  source 1..75: mol_type = other DNA
ccgaatgcgtggccattgatattgcttatgaagggtccggaagtggcgactggcgcactgacggtttcatcgtgg

SEQ ID NO: 102019 - DNA, 75 bp, synthetic construct
  source 1..75: mol_type = other DNA
ggccaatgcattatggacgggatgccactggaagcacaaatatggtcaggggcagtagttggcctgaagaggtgg

SEQ ID NO: 102020 - DNA, 75 bp, synthetic construct
  source 1..75: mol_type = other DNA
gctgtatttcgctccggccgatgtgaagcgtgtgcagttcagtcccttggaagagagcattgaagaaaagggcga

SEQ ID NO: 102021 - DNA, 75 bp, synthetic construct
  source 1..75: mol_type = other DNA
gtgcgtgaaaatccgtggacaggcgtaggcattggcgctgccgtcggtgtagtgttgggcgttctactgtctcgt

SEQ ID NO: 102022 - DNA, 75 bp, synthetic construct
  source 1..75: mol_type = other DNA
tatcgtttttcatatcgagggggggcctccagagatgaatggaataataatatttcctgatgatatgaaccgccc

SEQ ID NO: 102023 - DNA, 75 bp, synthetic construct
  source 1..75: mol_type = other DNA
gcgtaccctgaccttccggcgtgaggccgcatgcgaatttaccggggaaatcaccggcgtgaccgatggcgccgg

SEQ ID NO: 102024 - DNA, 75 bp, synthetic construct
  source 1..75: mol_type = other DNA
tagccaaaaccctcgtcgaagccctcatcgaaggtcaactgaccgagcaacaattaatccaggctcaacaagccc

SEQ ID NO: 102025 - DNA, 75 bp, synthetic construct
  source 1..75: mol_type = other DNA
tattggaagatagactcgatgcagagttctattctctggaacaaattaagaaccacaaaacacttcaagactatg

SEQ ID NO: 102026 - DNA, 75 bp, synthetic construct
  source 1..75: mol_type = other DNA
accaggccgaaagcgttaagcgcgccaacctgccgccagtagcaaaccacagccagaacaaaaccaaccagccac

SEQ ID NO: 102027 - DNA, 75 bp, synthetic construct
  source 1..75: mol_type = other DNA
acaccttcgccgctgaaacgggctggtctgtgtattacacctggtgggcagaggataaatccgccgcgggtaaag

SEQ ID NO: 102028 - DNA, 75 bp, synthetic construct
  source 1..75: mol_type = other DNA
aaaaggtaaactttgagccagacagcgccttccgcggtgagaaaaaaacgaagccgaaagcagcgaagaaagacg

SEQ ID NO: 102029 - DNA, 75 bp, synthetic construct
  source 1..75: mol_type = other DNA
ccgaattcgtggccattgatattgcttatgaagggtccggtagtggagactggcgcactgacggtttcatcgtgg

SEQ ID NO: 102030 - DNA, 75 bp, synthetic construct
  source 1..75: mol_type = other DNA
atgaacttagcgtacgttttcgtacggttgggcttcaaacccctttataacttatacggcagttgtaccgacgat

SEQ ID NO: 102031 - DNA, 75 bp, synthetic construct
  source 1..75: mol_type = other DNA
atttccctttgtaggtttaaagaataatcaatttatgatggtaatttctggtcatacttgtgttagttatcctaa

SEQ ID NO: 102032 - DNA, 75 bp, synthetic construct
  source 1..75: mol_type = other DNA
tcttctcagagatgcggcgtgtttgaaaacagtggacaacaggactgcgctattgcgccaggcagcacaaaaggt

SEQ ID NO: 102033 - DNA, 75 bp, synthetic construct
  source 1..75: mol_type = other DNA
aacatcacgtttgagacactcctgcgtctggttcaggttcagatcaactggcgggcaacgctggtccagacagcc

SEQ ID NO: 102034 - DNA, 75 bp, synthetic construct
  source 1..75: mol_type = other DNA
tatcggccacgttgaccaaggtaaaacaacactgaccgctgcaatcactaccgtactggctaaaacctacggcgg

SEQ ID NO: 102035 - DNA, 75 bp, synthetic construct
  source 1..75: mol_type = other DNA
cggattgatcttgtcaaattgggtacgttcatccgtgatcgggttcaactggtattgaccctggtaccggccaac

SEQ ID NO: 102036 - DNA, 75 bp, synthetic construct
  source 1..75: mol_type = other DNA
cgttatcgtctgagcgaaactggcgacgccattgccagacagacccgtgaagcggcggcgcgtgccgatgaatat

SEQ ID NO: 102037 - DNA, 75 bp, synthetic construct
  source 1..75: mol_type = other DNA
ccgaatccgtggccattgatattgcttatgaagggtccggaagtggggactggcgcactgacggtttcatcgtgg

SEQ ID NO: 102038 - DNA, 75 bp, synthetic construct
  source 1..75: mol_type = other DNA
tataaccataataactatagttcaacagatttgagcggggaactggataataatgacacctatgaaattggcacc

SEQ ID NO: 102039 - DNA, 75 bp, synthetic construct
  source 1..75: mol_type = other DNA
gaaaatccgtggacgggcgtgggcattggcgctgcaatcggtgtagtgctcggcgttctgctgtcgcgtcgttaa

SEQ ID NO: 102040 - DNA, 75 bp, synthetic construct
  source 1..75: mol_type = other DNA
taaagtcacatctaatactgaatctacgataaaacaacaagagctagtatctgatgatgcaatgataaatgaatt

SEQ ID NO: 102041 - DNA, 75 bp, synthetic construct
  source 1..75: mol_type = other DNA
agcacaacacaacgcaaaattaccaatatggctgccggtcaaataagaaatagcagtactgaggccattaacggt

SEQ ID NO: 102042 - DNA, 75 bp, synthetic construct
  source 1..75: mol_type = other DNA
tcatatgagcgaaatgatgctctttttagaaagaaagctaaaagtaatttaataaagtttagagcgattgaatca

SEQ ID NO: 102043 - DNA, 75 bp, synthetic construct
  source 1..75: mol_type = other DNA
tttgttagcaatgtcacatactgaactttcacacttcatcacgtcgtcaactaaagatagcattgatgaagataa

SEQ ID NO: 102044 - DNA, 75 bp, synthetic construct
  source 1..75: mol_type = other DNA
gtgaagacggcaaattactgaatatgctgtctgaatttaaattattgagagagcaatgtttcaggtggggtaatt

SEQ ID NO: 102045 - DNA, 75 bp, synthetic construct
  source 1..75: mol_type = other DNA
catcagaggtttaccggatttatacctggataaagagcagtaaaggcatccgggttccgaccacgaagaaatcac

SEQ ID NO: 102046 - DNA, 75 bp, synthetic construct
  source 1..75: mol_type = other DNA
tgttacgaatccagccgattatgataaatattccgatatggttaaaaagcatgtaatagatggtgaggaactcat

SEQ ID NO: 102047 - DNA, 75 bp, synthetic construct
  source 1..75: mol_type = other DNA
gcagcagtagcctcgtggaaataggccacacacaggtcgacccgtatgggaaacgctgttattgcgggaatcacg

SEQ ID NO: 102048 - DNA, 75 bp, synthetic construct
  source 1..75: mol_type = other DNA
attccaggtcttccagtggttgattggcgcaacggatggtcatgcaaaaaacttctccgtatttattcaggctgg

SEQ ID NO: 102049 - DNA, 75 bp, synthetic construct
  source 1..75: mol_type = other DNA
atacaaacacaattagtaatgacaaagccaaagcttccgatctgttagctaatatcaccgatggatcagtgatca

SEQ ID NO: 102050 - DNA, 75 bp, synthetic construct
  source 1..75: mol_type = other DNA
tcgagttctatcgagcgtctgtcttctggcttgcgtattaacagcgcgaaggatgacgccgcgggtcaggcgatt

SEQ ID NO: 102051 - DNA, 75 bp, synthetic construct
  source 1..75: mol_type = other DNA
gaatttatccgtcatggcggcaaaatgatcgactgccaggtgcttaatgatcacacggcttcgcttggagcctgc

SEQ ID NO: 102052 - DNA, 75 bp, synthetic construct
  source 1..75: mol_type = other DNA
ggcaaccatcatcacgcagaaaatgtgctttgtgaacttaacaaaatcacaaatgcaacgcccgttaatcaataa

SEQ ID NO: 102053 - DNA, 75 bp, synthetic construct
  source 1..75: mol_type = other DNA
cggcattagttatgtttaccagttcggccttcgcgctggatggcggccaactggatttcgcaggtttggtaagtg

SEQ ID NO: 102054 - DNA, 75 bp, synthetic construct
  source 1..75: mol_type = other DNA
gtcggtgacgcgctggaagcgatcgataccacgctggatgatgctctgctgtgggatacaacagccaatggcggt

SEQ ID NO: 102055 - DNA, 75 bp, synthetic construct
  source 1..75: mol_type = other DNA
aaataccgattacaacaacgtcggtgaagccctggatgcgctcgataataacgctctgctgtgggatgaagacgc

SEQ ID NO: 102056 - DNA, 75 bp, synthetic construct
  source 1..75: mol_type = other DNA
gtaaagatgtagtattgagcgaaaccaaagcggctgccgcgacatcttcaattacctttaattccggtgtactga

SEQ ID NO: 102057 - DNA, 75 bp, synthetic construct
  source 1..75: mol_type = other DNA
agtagcagttcgaacgataacgccatcgcgattgggaaaaaaacgcaagcccagggagtgagttctatagccctg

SEQ ID NO: 102058 - DNA, 75 bp, synthetic construct
  source 1..75: mol_type = other DNA
atgatttcacttttaatgccagcattgctgctggtgctgcggccggtgatagtaacagcgcagctctgcaatcct

SEQ ID NO: 102059 - DNA, 75 bp, synthetic construct
  source 1..75: mol_type = other DNA
atactctattgtttgaaaattacgggtcttatgataagacggggtctatcacgatagaaaaaaatcagggggcgg

SEQ ID NO: 102060 - DNA, 75 bp, synthetic construct
  source 1..75: mol_type = other DNA
tctggcgtgaagacgagcttgtcggcggcatatatggcgtggcgcagggaacgttattttgtggtgagtcgatgt

SEQ ID NO: 102061 - DNA, 75 bp, synthetic construct
  source 1..75: mol_type = other DNA
aaccattgaccttgcttatgaaggttccggtagtggcgactggcgaacggatgcatttattgttggtatcggata

SEQ ID NO: 102062 - DNA, 75 bp, synthetic construct
  source 1..75: mol_type = other DNA
tacaggcaaagatgcctatggtaactctgcggcagcagctgttgggacagtaatcgaagcaaaaggaatgaccat

SEQ ID NO: 102063 - DNA, 75 bp, synthetic construct
  source 1..75: mol_type = other DNA
gtctccagccgtttgattgtgaaaggctcccgtaatacccgcgttacggaaaatggggtcgagatcggttatgac

SEQ ID NO: 102064 - DNA, 75 bp, synthetic construct
  source 1..75: mol_type = other DNA
ccgttcatgctgtcacagtcaccggtcggcacgtttacggcagacaaattgcgcgtgaccgatatcactagcggt

SEQ ID NO: 102065 - DNA, 75 bp, synthetic construct
  source 1..75: mol_type = other DNA
atgctgcagggtatctgttccacggacaactgaaaggcaatctgaatgtggataatcgcctgccggaaggcgtta

SEQ ID NO: 102066 - DNA, 75 bp, synthetic construct
  source 1..75: mol_type = other DNA
gaaatagctgatgtttttagacgctcacagaaatttatttcatatgatgattatacggcatattctatattttct

SEQ ID NO: 102067 - DNA, 75 bp, synthetic construct
  source 1..75: mol_type = other DNA
tgctggacaagttaacgaaaattacagatgccagactttgcaaaggcttcagtgactgggctagttcagtcaaag

SEQ ID NO: 102068 - DNA, 75 bp, synthetic construct
  source 1..75: mol_type = other DNA
tgctgggatggcctgctgatgcactgaatcaggcaacgaaccgggtgctttatctttcaggtatgctggataacc

SEQ ID NO: 102069 - DNA, 75 bp, synthetic construct
  source 1..75: mol_type = other DNA
gcgtgaatgtgttgtccaaagacggttcaatgaaaattcaggtgggcgcaaatgatggtgaaaccatcacgattg

SEQ ID NO: 102070 - DNA, 75 bp, synthetic construct
  source 1..75: mol_type = other DNA
cggtgtggatccaatgattgactttcagggggctattaacccatctgaattttctaatggtaacgctccgctaac

SEQ ID NO: 102071 - DNA, 75 bp, synthetic construct
  source 1..75: mol_type = other DNA
ctggtcagaacacgaagctggggtcattcggcgcatttgataacgaatggcatacgctgggcttccgttttgccg

SEQ ID NO: 102072 - DNA, 75 bp, synthetic construct
  source 1..75: mol_type = other DNA
tggattgtatcgtctggctgttgaaggtgatattcagcagaaagaggctgcggcagagctgatcccatatattca

SEQ ID NO: 102073 - DNA, 75 bp, synthetic construct
  source 1..75: mol_type = other DNA
gcgagttacgtccggaaccagcggatgagattgcgcaagcgttgctaaataatacgtatacgttgtttaacgtgc

SEQ ID NO: 102074 - DNA, 75 bp, synthetic construct
  source 1..75: mol_type = other DNA
tgctgccggataacctgacccgtactgactccattctgcgtgggctggttgatgatattccggaagaagactggg

SEQ ID NO: 102075 - DNA, 75 bp, synthetic construct
  source 1..75: mol_type = other DNA
cagcactgatgctgttaacggctctcagctgaaaaccaccaacgatgccgtggcgacgaataccaccaatatcgc

SEQ ID NO: 102076 - DNA, 75 bp, synthetic construct
  source 1..75: mol_type = other DNA
gacccatatggtaaacgctgttattgcgggaatcacggctgcctcgaaaccatcgccagtgtggacagtattctt

SEQ ID NO: 102077 - DNA, 75 bp, synthetic construct
  source 1..75: mol_type = other DNA
cgcgtgtagctccccgacaccgccgaaaggcgttaccgtggtaaataactttgatgccaaacgctatctgggaac

SEQ ID NO: 102078 - DNA, 75 bp, synthetic construct
  source 1..75: mol_type = other DNA
tgctaacagtaaggatgctaccttaaccgtaacttcaggtaccggccagaacactgtttatagcacaacaggaag

SEQ ID NO: 102079 - DNA, 75 bp, synthetic construct
  source 1..75: mol_type = other DNA
tatgaaaattgccttcggaactaatgccactgtatttagaaacaaccacatttcgacttaccaaggttcattctc

SEQ ID NO: 102080 - DNA, 75 bp, synthetic construct
  source 1..75: mol_type = other DNA
caggttgtagggattgacaacttaaatgattattacgatgtcaacctcaaacaagcacgacttgatttactcaag

SEQ ID NO: 102081 - DNA, 75 bp, synthetic construct
  source 1..75: mol_type = other DNA
taacctcaattttaatgcctggttgcaggcgaaaagcggtcgtgacgtaacttctggtgacttcactgccagcct

SEQ ID NO: 102082 - DNA, 75 bp, synthetic construct
  source 1..75: mol_type = other DNA
agcaatggatataatgcgcaaataaacatgcagtcatggatgtttttatcaagctatgaaaaattaagagagaag

SEQ ID NO: 102083 - DNA, 75 bp, synthetic construct
  source 1..75: mol_type = other DNA
gccgctgactgataatgacgggagcatcattgttgatgaggatgataatccagtgatggtaatggaagacatcat

SEQ ID NO: 102084 - DNA, 75 bp, synthetic construct
  source 1..75: mol_type = other DNA
agaatctgggtaaggccgacgtagatatggataagcgaattatccgtttccataaggtattactggtcaacaaag

SEQ ID NO: 102085 - DNA, 75 bp, synthetic construct
  source 1..75: mol_type = other DNA
ccgttacggttcgccagttgcaaaatgccattggtgcagtcgctaccacgccgaccaaatacttccacgctaact

SEQ ID NO: 102086 - DNA, 75 bp, synthetic construct
  source 1..75: mol_type = other DNA
gtttgagtgtctggtctatctgcaccgttataatgaaggcacgctgtcgcgtatgcgtaccgaatacgtagttcc

SEQ ID NO: 102087 - DNA, 75 bp, synthetic construct
  source 1..75: mol_type = other DNA
atatttgaccccgggcgttggtgataccgctaagggcactattactatcgatggttctgcacaggatgttcagat

SEQ ID NO: 102088 - DNA, 75 bp, synthetic construct
  source 1..75: mol_type = other DNA
ctctgttgccgaaggcgatagcagcgtggccatcggtcagaacagctacagcaaagttgagacgagtattgcgct

SEQ ID NO: 102089 - DNA, 75 bp, synthetic construct
  source 1..75: mol_type = other DNA
gaattctttaatgaattacagccattatataataaattgctggggaaagatattgaacaattgtattcacttaca

SEQ ID NO: 102090 - DNA, 75 bp, synthetic construct
  source 1..75: mol_type = other DNA
atgcctcacaggtggggccttcaagtactgaaacaagttaaaattattgaggatttaatcgcccgtaaggttaat

SEQ ID NO: 102091 - DNA, 75 bp, synthetic construct
  source 1..75: mol_type = other DNA
atagcctccggtttggagatggagataatgaatataagtcggtcagccgtaatgatcacccttatggggcggact

SEQ ID NO: 102092 - DNA, 75 bp, synthetic construct
  source 1..75: mol_type = other DNA
gtaaatcctgtactcctgtaatcaatggcaacttacttgcagaaattcatttccccacaattgctgccagcgatt

SEQ ID NO: 102093 - DNA, 75 bp, synthetic construct
  source 1..75: mol_type = other DNA
tcccatccatgggaaaggcaaaaaaataatgtgcgttccgctttaacattagacaaaataaatgaacatattaaa

SEQ ID NO: 102094 - DNA, 75 bp, synthetic construct
  source 1..75: mol_type = other DNA
ggcgggtgtggcttacagccgtgtgtcgactttttccggggattatctctgcgtaactgacagcaaggggaaaag

SEQ ID NO: 102095 - DNA, 75 bp, synthetic construct
  source 1..75: mol_type = other DNA
tgcggatatgtctggtacgttcacccaggaaaacgggcgtctgacgctgcaggggcatccggttatccatgcata

SEQ ID NO: 102096 - DNA, 75 bp, synthetic construct
  source 1..75: mol_type = other DNA
aaaactatcgtcaatggtaatgcgggtattggtatcggcctgaatactctggttctggcagatgccatcaacggt

SEQ ID NO: 102097 - DNA, 75 bp, synthetic construct
  source 1..75: mol_type = other DNA
atgtgcagatatctgttgctgtgccttctgctactgccgctgtttgccagcccacaacaaacccgtattgaagaa

SEQ ID NO: 102098 - DNA, 75 bp, synthetic construct
  source 1..75: mol_type = other DNA
ttaatcacgataatggacgctggcaacacctcggcggcggaaagctaccgttattgctggaacaacagggggagc

SEQ ID NO: 102099 - DNA, 75 bp, synthetic construct
  source 1..75: mol_type = other DNA
atggttcccttatcagaaaggtggtgaatatagaaagtggtacggtaatcttgattatgtcgtaaattggttcga

SEQ ID NO: 102100 - DNA, 75 bp, synthetic construct
  source 1..75: mol_type = other DNA
gctgttaaatccacaattactacagctgataacacttcgattgtactgaatggttcaagcgatggtactgaaggt

SEQ ID NO: 102101 - DNA, 75 bp, synthetic construct
  source 1..75: mol_type = other DNA
ctgactgacgctgttgacagtctcggtgatgactctctgctgtggaacgctacggcgggtgcattcagtgccaaa

SEQ ID NO: 102102 - DNA, 75 bp, synthetic construct
  source 1..75: mol_type = other DNA
tcaaatgatgttgaaatatctgaagtcagtgtttctacgaaccctcactacctctatccaaacgattctaatagg

SEQ ID NO: 102103 - DNA, 75 bp, synthetic construct
  source 1..75: mol_type = other DNA
cccgaccgaatctgtggccattgatattgcttatgaaggctccggcagtggcgactggcgcactgacggtttcat

SEQ ID NO: 102104 - DNA, 75 bp, synthetic construct
  source 1..75: mol_type = other DNA
tttttatccgtcacaataagctatcggaaataccagcaataccagataccactgaggtttttgattgtggctgta

SEQ ID NO: 102105 - DNA, 75 bp, synthetic construct
  source 1..75: mol_type = other DNA
aacaaggctgccacactttccgatcttgatctcaatgcagctaagaaaacaggaagcacgttagttgttaacggt

SEQ ID NO: 102106 - DNA, 75 bp, synthetic construct
  source 1..75: mol_type = other DNA
gaactgtgaccaatggttcaggtaaagcagtctatgtttcagcggatggtaattttactactgacgctgaaacta

SEQ ID NO: 102107 - DNA, 75 bp, synthetic construct
  source 1..75: mol_type = other DNA
aatcttgcaaccgctacaactgctgaagttgaaggcgctggcgtagtcaatgcagccgctgtcggcgcgaaagct

SEQ ID NO: 102108 - DNA, 75 bp, synthetic construct
  source 1..75: mol_type = other DNA
taaactcaaaagcgatacttgcttatgcgacaggcgtttttgaaccattcttagcgtatacttttacactctacg

SEQ ID NO: 102109 - DNA, 75 bp, synthetic construct
  source 1..75: mol_type = other DNA
cgcagattatccagcaggcaggtaactccgtgttggcaaaagctaaccaggtaccgcagcaggttctgtctctgc

SEQ ID NO: 102110 - DNA, 75 bp, synthetic construct
  source 1..75: mol_type = other DNA
atgaagattccgtgcgtaaccgctggttcagcgtgatggtggggccgtctgtgcgcgtgaatgaatggttcagcg

SEQ ID NO: 102111 - DNA, 75 bp, synthetic construct
  source 1..75: mol_type = other DNA
tgacagcaccgatactaaagacctcacattaaccaacggtaaagggacctggaacttccaggcatcttacgttaa

SEQ ID NO: 102112 - DNA, 75 bp, synthetic construct
  source 1..75: mol_type = other DNA
acgctcacgttatgttgacattaaaaaccataggccctgaaggttttggtaaaaaagaaagaagctggaatgaca

SEQ ID NO: 102113 - DNA, 75 bp, synthetic construct
  source 1..75: mol_type = other DNA
ctcacgatttgctgcccgcgattgaacgtatgtgggatgtctctgccgggaaaatcattgcgattgacgccactg

SEQ ID NO: 102114 - DNA, 75 bp, synthetic construct
  source 1..75: mol_type = other DNA
gtgatgatggtaaatatcgtcaaatcatcaacgtcgcggatggttctgaagcccatgacgctgttactgttcgcc

SEQ ID NO: 102115 - DNA, 75 bp, synthetic construct
  source 1..75: mol_type = other DNA
cctgcagccagtcctccggagccatccggaaataatcctccggctcaccggaaatattcacgccgggaaaatatc

SEQ ID NO: 102116 - DNA, 75 bp, synthetic construct
  source 1..75: mol_type = other DNA
attcctttcaaagtcgagcactaattattgatacggatgatgctgcaagacagctttctggaaaaagaggaatga

SEQ ID NO: 102117 - DNA, 75 bp, synthetic construct
  source 1..75: mol_type = other DNA
ttgtttgaaaattatggggcttatgataagacggggtctatcacgatagaaaaaagtcagggggaggggacttta

SEQ ID NO: 102118 - DNA, 75 bp, synthetic construct
  source 1..75: mol_type = other DNA
atggtcctggcggaggtgtaacaccagtaaccattaacggtacagtctggctcgaaggcagcagttgcaaagcca

SEQ ID NO: 102119 - DNA, 75 bp, synthetic construct
  source 1..75: mol_type = other DNA
ggaaaacgcacgatgtgctgaccggaagtgatgacgatcgccacagcaacacgtctctggcgtggggagctggcg

SEQ ID NO: 102120 - DNA, 75 bp, synthetic construct
  source 1..75: mol_type = other DNA
ttcagcgtgatggcggggccgtctgtacgcgtgaatgaatggttcagcgcgtatgcgatggcgggtgtggcttac

SEQ ID NO: 102121 - DNA, 75 bp, synthetic construct
  source 1..75: mol_type = other DNA
gaatggaggtgcagcaatcgctctgttggcttttttaggaaatatttggaacaagaattcctcagctgaagctgc

SEQ ID NO: 102122 - DNA, 75 bp, synthetic construct
  source 1..75: mol_type = other DNA
aacgataaacagtatgtttggtgttggggtaagtcttacggctggactgagtgcgataccttcgaagggtattac

SEQ ID NO: 102123 - DNA, 75 bp, synthetic construct
  source 1..75: mol_type = other DNA
cggatatgccgctcaacggttttcaggggcagcctaatcgcccggaacaggccgcgcgggtgtttgccgtgcttt

SEQ ID NO: 102124 - DNA, 75 bp, synthetic construct
  source 1..75: mol_type = other DNA
aatatcgcagcggaaatatattgttacgaaccccgatgattatgataaatattccgatatggttaaaaggatagt

SEQ ID NO: 102125 - DNA, 75 bp, synthetic construct
  source 1..75: mol_type = other DNA
tggataaactggtgacagaggttgcccctactgcggtgacggcgcagggggcagtggctggcgcatatctggata

SEQ ID NO: 102126 - DNA, 75 bp, synthetic construct
  source 1..75: mol_type = other DNA
cagctcgagctacacgtttacatacgtcaccaagtcaaaacattgtccctacagcaagacattcgatactgagga

SEQ ID NO: 102127 - DNA, 75 bp, synthetic construct
  source 1..75: mol_type = other DNA
tacgcacatgtttatgctaagtgccagttatttggggagggttcatcgggacttataccaacatccctaactaga

SEQ ID NO: 102128 - DNA, 75 bp, synthetic construct
  source 1..75: mol_type = other DNA
agaagagattcaggcgagtcacatccgcgataccgaacgcaaaggtatcgccatcattcaccaggaattggccct

SEQ ID NO: 102129 - DNA, 75 bp, synthetic construct
  source 1..75: mol_type = other DNA
ggaaaagtccgacggtacctgggtgccgcttaacgattctgccggtgccacctttaacctcagtaacggcgcgaa

SEQ ID NO: 102130 - DNA, 75 bp, synthetic construct
  source 1..75: mol_type = other DNA
gagttatgaagattttcgcacctggctattggattgcaaaactttcattaccatggcccatcttggtgcaagagc

SEQ ID NO: 102131 - DNA, 75 bp, synthetic construct
  source 1..75: mol_type = other DNA
gttatcggattcaatagcagatgtattaagttattccatcggctgcatgatgggtcgctactccctcgatcgcga

SEQ ID NO: 102132 - DNA, 75 bp, synthetic construct
  source 1..75: mol_type = other DNA
gcgggctgcatcggcattttacttggcttaattaacgccttactggttaatcgcctacgggtgccttctatcatc

SEQ ID NO: 102133 - DNA, 75 bp, synthetic construct
  source 1..75: mol_type = other DNA
caacaacacgcgtaatgtaatccgcacagccggcctgaacaaactgcggatggaggacaggcgcggtgaggagca

SEQ ID NO: 102134 - DNA, 75 bp, synthetic construct
  source 1..75: mol_type = other DNA
ccgtggtaagcccggcggggtgatgttccacagcgatcagggcagtcattatacgagcaggcagttccggcagtt

SEQ ID NO: 102135 - DNA, 75 bp, synthetic construct
  source 1..75: mol_type = other DNA
gctggttccgccagccagggaaaaatcacaggctttgaatatggaatcgcgtattaagacactacttcgccattg

SEQ ID NO: 102136 - DNA, 75 bp, synthetic construct
  source 1..75: mol_type = other DNA
cagtcattatgagagaaataatagttctttcagaattaaagctaatgagaaactcttaaattttagggcgataga

SEQ ID NO: 102137 - DNA, 75 bp, synthetic construct
  source 1..75: mol_type = other DNA
cagaaaaaacggaagcgcttaacaagtgggtagagtggcttgacgcgctcgcatccggcgataatgtaataccct

SEQ ID NO: 102138 - DNA, 75 bp, synthetic construct
  source 1..75: mol_type = other DNA
acgctttgtgaatgctaaaacactgggctcgctgattcaggtaccgcaggaagaagaagcggagctgaaggcgtt

SEQ ID NO: 102139 - DNA, 75 bp, synthetic construct
  source 1..75: mol_type = other DNA
ttttccattacgtgatctaaaaagaagctacagatggcactgcttcaagaacaaggttattaatccagtaagcag

SEQ ID NO: 102140 - DNA, 75 bp, synthetic construct
  source 1..75: mol_type = other DNA
tattatttgtactgcgcacagcattcgtgaaggtggcagtgctagagactggctttatcgtttgactaataaatt

SEQ ID NO: 102141 - DNA, 75 bp, synthetic construct
  source 1..75: mol_type = other DNA
agaacgaatacctgatcttcaagaaacagcccgtatacgggctgttttaacagatatctacagtaagcggtccta

SEQ ID NO: 102142 - DNA, 75 bp, synthetic construct
  source 1..75: mol_type = other DNA
ccatagcaaggaacacacacagcactggttaaatcacttaagccatttcggggtgattcagtatgaagctgtgaa

SEQ ID NO: 102143 - DNA, 75 bp, synthetic construct
  source 1..75: mol_type = other DNA
tacccagagcattactaacctgaacaatcaggtcactaatctggatactcgcgttactaatatcgaaaacggtat

SEQ ID NO: 102144 - DNA, 75 bp, synthetic construct
  source 1..75: mol_type = other DNA
gtgccgggaaggctctgagcgatgggcagttaataaattctcaggctgaaatgtgttactggaccagtagttgtc

SEQ ID NO: 102145 - DNA, 75 bp, synthetic construct
  source 1..75: mol_type = other DNA
agaatatgcgcgccgacgcgccgccagcgcggaaccggtgaagcgcatcaccgtagcggatgcgattaactactg

SEQ ID NO: 102146 - DNA, 75 bp, synthetic construct
  source 1..75: mol_type = other DNA
gtgttggtactaccaggaagtgtgaaagacgataacaatcgtgttgcaggcactttcgcgcaaccaatgggctca

SEQ ID NO: 102147 - DNA, 75 bp, synthetic construct
  source 1..75: mol_type = other DNA
ccacagtaaggaacacacacagcattggttaaatcacctaagccatttcggggtgattcagtatgaagctgtgaa

SEQ ID NO: 102148 - DNA, 75 bp, synthetic construct
  source 1..75: mol_type = other DNA
cttctgacagttcccgccctctctcagcctcagcgttccccgacacactgcccggtaccgaatacggccccgaca

SEQ ID NO: 102149 - DNA, 75 bp, synthetic construct
  source 1..75: mol_type = other DNA
ctttaaaagaaggaattacatggtcagctttcagtaatggggggttatcctttagatacgttgaacatggatatt

SEQ ID NO: 102150 - DNA, 75 bp, synthetic construct
  source 1..75: mol_type = other DNA
tacaacacgcaaattaaagatctttcgctggggatttctggaactacagtaagtcccgtggtcaacctgatgctg

SEQ ID NO: 102151 - DNA, 75 bp, synthetic construct
  source 1..75: mol_type = other DNA
atctggcatgaaactgtagatgatcagaattatcgtcttgctactggatacgatgatgtaaaccaacaattattg

SEQ ID NO: 102152 - DNA, 75 bp, synthetic construct
  source 1..75: mol_type = other DNA
gcgacttctggcacagacaaagctcggttgaagcaacacgcgctctcacataccgattgcaaacaagcctgttcg

SEQ ID NO: 102153 - DNA, 75 bp, synthetic construct
  source 1..75: mol_type = other DNA
atgaagacgactgcaaaataagaagagaaaacgcagaagaactatttttagtgatacggcatattgctattaata

SEQ ID NO: 102154 - DNA, 75 bp, synthetic construct
  source 1..75: mol_type = other DNA
gttgggaaggatttgacggatgaagagaagaactgcctggccggcggcagtgcaggaagtccgggaggatggggt

SEQ ID NO: 102155 - DNA, 75 bp, synthetic construct
  source 1..75: mol_type = other DNA
gtggagatattacgtatctctgggcaggaaatcgctggtgctatctggcggttgttatggatctttttgcccgca

SEQ ID NO: 102156 - DNA, 75 bp, synthetic construct
  source 1..75: mol_type = other DNA
gggtgccaaccgatggctacacaggcaaagacgtggcccggcagcaaatcagcagttatattctgaattattaca

SEQ ID NO: 102157 - DNA, 75 bp, synthetic construct
  source 1..75: mol_type = other DNA
ggcaatttctgggcgcggcttgagcatgaacgcttcctgtcaggacagacaatggtcagcggcagcagtaatgat

SEQ ID NO: 102158 - DNA, 75 bp, synthetic construct
  source 1..75: mol_type = other DNA
ggtatcttcatgcccgtacgaacgctcccggcagtgataatctgaacgggattaacgtgaaataccgttatgagt

SEQ ID NO: 102159 - DNA, 75 bp, synthetic construct
  source 1..75: mol_type = other DNA
taaggccgccaggcaaattctgtttcattaacccgctgcgctttaatctaatctgtggtgctgatactcagagtc

SEQ ID NO: 102160 - DNA, 75 bp, synthetic construct
  source 1..75: mol_type = other DNA
ctatctcaccgaatatgttcaggtgctgcgcgacctgtggggcacggggaaaagcgattttaaaggcgatttttt

SEQ ID NO: 102161 - DNA, 75 bp, synthetic construct
  source 1..75: mol_type = other DNA
tggcagtgctatcacaaacggaccgataagaagcagccattgccgcttcgtgagcaacgtgctcgcatagaggtg

SEQ ID NO: 102162 - DNA, 75 bp, synthetic construct
  source 1..75: mol_type = other DNA
attagcgcttttgctaatcgcttgctgcatttaggtttttcagtaagcgttgtgggagaaatatcatcaccgcat

SEQ ID NO: 102163 - DNA, 75 bp, synthetic construct
  source 1..75: mol_type = other DNA
gagcagaacacccaaatcatcaatcagcttgctggtaacaccgacgcaacctatatcgaagaaaatggcgctggt

SEQ ID NO: 102164 - DNA, 75 bp, synthetic construct
  source 1..75: mol_type = other DNA
ctgactaccgatttaaaagattcttttggaaattggaataatcgtagaccatttagttatgatttcgctgagggt

SEQ ID NO: 102165 - DNA, 75 bp, synthetic construct
  source 1..75: mol_type = other DNA
aacgactaagtatgatgcgatgaacgaagagttgaaagctgttaaagctgaacttgcggctattaaatcctgtaa

SEQ ID NO: 102166 - DNA, 75 bp, synthetic construct
  source 1..75: mol_type = other DNA
tgttggcctggtttaccgtccgggttcgccgctgcgcagtcgctatgagcaactggcagaggccatccgtgcaag

SEQ ID NO: 102167 - DNA, 75 bp, synthetic construct
  source 1..75: mol_type = other DNA
cgcctctggtgtcggcgctacagctgtaggttataacgctgtcgcgtctggtgccagcagcgtagccattggtca

SEQ ID NO: 102168 - DNA, 75 bp, synthetic construct
  source 1..75: mol_type = other DNA
gagccggaacgtcaaccaatatgaactgcaatgaagtgatttgtaatcttgctgcagaaaaacttggtagcgtta

SEQ ID NO: 102169 - DNA, 75 bp, synthetic construct
  source 1..75: mol_type = other DNA
aacgcgtttcgccaaacgaccatgctaattttggtcagtccaccaatgatacatatccgacagcattacatctgg

SEQ ID NO: 102170 - DNA, 75 bp, synthetic construct
  source 1..75: mol_type = other DNA
cattaaaaaaaacaaatggacattcaatatgccaaggtgttgaacatgcaggcttagtgtgtaaggataaaaata

SEQ ID NO: 102171 - DNA, 75 bp, synthetic construct
  source 1..75: mol_type = other DNA
cccgttaacctgatgcgtggtgccatgcagcaacttgccaggcgctggcagaaaaattttgacgaaatggccctg

SEQ ID NO: 102172 - DNA, 75 bp, synthetic construct
  source 1..75: mol_type = other DNA
aggtgcaggctttcagcagtgtaaatattgccagtggccgaccgactgtggtactaactgatgaccgacaggtaa

SEQ ID NO: 102173 - DNA, 75 bp, synthetic construct
  source 1..75: mol_type = other DNA
aattcattgacaggactcgtgggtattccaggtttgcctgataaagagtttgcactgagcactcctgaatttatg

SEQ ID NO: 102174 - DNA, 75 bp, synthetic construct
  source 1..75: mol_type = other DNA
aataagcagggaggacttgtcggtacgctggataaggcagctatgcctgatttcagtgctgtggattcggaaatc

SEQ ID NO: 102175 - DNA, 75 bp, synthetic construct
  source 1..75: mol_type = other DNA
atgtgcgaaacgttctggttgcagggaatacggccaaacgaatagtcgttcagcaatttggagacgaacctgtcg

SEQ ID NO: 102176 - DNA, 75 bp, synthetic construct
  source 1..75: mol_type = other DNA
cttgccgaatctgctcgggcgccagttcgctgtccccgagccagaccaggtatggtgtggagatattacctatat

SEQ ID NO: 102177 - DNA, 75 bp, synthetic construct
  source 1..75: mol_type = other DNA
atagtatcagtgaagaacatgataaacgtattactaaaaactacgtctatgatgaagtattaggctatcctgttc

SEQ ID NO: 102178 - DNA, 75 bp, synthetic construct
  source 1..75: mol_type = other DNA
agcgtgcttaaccgcggctacgaccctgtgaagaacaagtggaatgagagcgagggtaaagcctactttaccggc

SEQ ID NO: 102179 - DNA, 75 bp, synthetic construct
  source 1..75: mol_type = other DNA
atgccccggtcacgttcagaacatcggaaggtggtgcactggagtggagctttaacagcagtaccggagctggtg

SEQ ID NO: 102180 - DNA, 75 bp, synthetic construct
  source 1..75: mol_type = other DNA
gacctggtgggctttaagccgcaaacgtcagtgaaggaaggcgtgaagaacttcgtggagtggtacaaggattac

SEQ ID NO: 102181 - DNA, 75 bp, synthetic construct
  source 1..75: mol_type = other DNA
gagaaagcggcaaagaggcagaagcggaagcgatgctgcgccagcaaccaccttccacgcgtattgacctcacgc

SEQ ID NO: 102182 - DNA, 75 bp, synthetic construct
  source 1..75: mol_type = other DNA
tacggcagacaaattgcgcgtgaccgatatcactagcggtgcgacatatccggtgctgattgaaagtataacagt

SEQ ID NO: 102183 - DNA, 75 bp, synthetic construct
  source 1..75: mol_type = other DNA
tgattatggggagccatgtattgaaagatatgccactaagaaaacaggctgaaatattattttgtttaggggggg

SEQ ID NO: 102184 - DNA, 75 bp, synthetic construct
  source 1..75: mol_type = other DNA
atgggactagattctggaaagagcatgcttataaatgttttccaactcagatccttaaacgcgaacaaggtgata

SEQ ID NO: 102185 - DNA, 75 bp, synthetic construct
  source 1..75: mol_type = other DNA
ataataacgtgggtgatgctctgtcaggaatcgacaataatactctgcaatggaatagaaccgcgggggcattca

SEQ ID NO: 102186 - DNA, 75 bp, synthetic construct
  source 1..75: mol_type = other DNA
aaaaaataacttggattctaaagggaatcaagttcatacgcgttctctacatgcagaagaaaacgcctttctgca

SEQ ID NO: 102187 - DNA, 75 bp, synthetic construct
  source 1..75: mol_type = other DNA
gccctgtggctgaaagccggggttgaggcagaaaaagtctccggaaatatgacgctgaaggcaggtatctggcgg

SEQ ID NO: 102188 - DNA, 75 bp, synthetic construct
  source 1..75: mol_type = other DNA
taaagctatttcgagttaccttggtacacctaaaggttcattccagaaagtagaaccaaatggtgatcagccaat

SEQ ID NO: 102189 - DNA, 75 bp, synthetic construct
  source 1..75: mol_type = other DNA
aatcaccaatgtcaccgctggcgaactctctgataccagcaccgacgccgtcaacggttctcagctgaaagcgac

SEQ ID NO: 102190 - DNA, 75 bp, synthetic construct
  source 1..75: mol_type = other DNA
aatcctttcttacttttcagcaaaatgcgcaaaattgtctttattgccaacgtcatcgctatgggatgagagcac

SEQ ID NO: 102191 - DNA, 75 bp, synthetic construct
  source 1..75: mol_type = other DNA
atataactgcaggtgtaattacatcgattgttttttgtgctatgcatactcaatacaatgacttgttttactttc

SEQ ID NO: 102192 - DNA, 75 bp, synthetic construct
  source 1..75: mol_type = other DNA
agttcgaaaatccctaaaatatcaattgtattctttggaataattaaagacagtattactcttaatgagcgattt

SEQ ID NO: 102193 - DNA, 75 bp, synthetic construct
  source 1..75: mol_type = other DNA
caaagctgatggcgtggatgccatcgctctgggtaatggtagccagtcgagaggcttaaacaccattgccttagg

SEQ ID NO: 102194 - DNA, 75 bp, synthetic construct
  source 1..75: mol_type = other DNA
agcggactagagcgagcagcattggaaaagcaacttgccgagactgcactcaaagataaatacgaaacacagcta

SEQ ID NO: 102195 - DNA, 75 bp, synthetic construct
  source 1..75: mol_type = other DNA
cttatgatgcaattgttctggcgttgatgtcggaactgggtgaaagcagtgccacaatgtttacccgacacgctg

SEQ ID NO: 102196 - DNA, 75 bp, synthetic construct
  source 1..75: mol_type = other DNA
gggtaattcagtatgaagctgtgaatagtcagacgttccgtttgctcgaggtaaacccgtttgaattgtggatga

SEQ ID NO: 102197 - DNA, 75 bp, synthetic construct
  source 1..75: mol_type = other DNA
tattggcttctcaaaacagcctatattgtaacttataacagtaaaatcagaactctcaaacaaagcagaaaaaga

SEQ ID NO: 102198 - DNA, 75 bp, synthetic construct
  source 1..75: mol_type = other DNA
catgcctttcaagcgttaacagcagcctgggttttcaagacttccgcaacgttctgataaaagcactggttcagg

SEQ ID NO: 102199 - DNA, 75 bp, synthetic construct
  source 1..75: mol_type = other DNA
ccttgtggctgaaagccggggttgaggcagaaaaattatttggaaatatgacgctgaaggcaggtatctggcgga

SEQ ID NO: 102200 - DNA, 75 bp, synthetic construct
  source 1..75: mol_type = other DNA
aaagtaaaaaatcaacttttgattttgcaagcgatgatgaagttgccacttagtgaactcatcataattggagaa

SEQ ID NO: 102201 - DNA, 75 bp, synthetic construct
  source 1..75: mol_type = other DNA
cctgcctcaattgcaaccgggttcttccattatgcctggtaaggttaaccccgttatcccggaagtaacaaacca

SEQ ID NO: 102202 - DNA, 75 bp, synthetic construct
  source 1..75: mol_type = other DNA
gggggcagagttttaccgggggcacagcagcacagatggctaccgggatgatttcagcctgtggggcgtgcatgt

SEQ ID NO: 102203 - DNA, 75 bp, synthetic construct
  source 1..75: mol_type = other DNA
gagaaagacggcagagtttactggcaactgaaaagtcatgccggaacaacagaatctcagatatcaccggatgtc

SEQ ID NO: 102204 - DNA, 75 bp, synthetic construct
  source 1..75: mol_type = other DNA
cgaactttactattgatgattcttattataccgagccaaaaacagaggatccgagattccgttacgtaagtagta

SEQ ID NO: 102205 - DNA, 75 bp, synthetic construct
  source 1..75: mol_type = other DNA
tggttctcagactacccgtggtgcgcagaccaactacaccgcctacaacatggacgcaccgcagaactctgtggg

SEQ ID NO: 102206 - DNA, 75 bp, synthetic construct
  source 1..75: mol_type = other DNA
cacagactggctacaccgcctacaacatggacgcaccgcagaactctgtaggtgagttttctgttggtagtgaag

SEQ ID NO: 102207 - DNA, 75 bp, synthetic construct
  source 1..75: mol_type = other DNA
ggtcaagcggctcacccgcggcaacccaacaatggccgccaaatttgccgagctcaaacaccaaaacaattctga

SEQ ID NO: 102208 - DNA, 75 bp, synthetic construct
  source 1..75: mol_type = other DNA
aaaagatcttaggcgttgttgtattatttgaaccagatatccatcatttacaaaaattatttgatagtgtaagta

SEQ ID NO: 102209 - DNA, 75 bp, synthetic construct
  source 1..75: mol_type = other DNA
actttcgggtggggcggcgacttttgatgcagtcacgacggctatggcgtctgctgcccctgctcttggagcaat

SEQ ID NO: 102210 - DNA, 75 bp, synthetic construct
  source 1..75: mol_type = other DNA
gcaacatcatacaacttcattaaccagaatggatttgtaaggattataggaaattatgaccataacaatagctat

SEQ ID NO: 102211 - DNA, 75 bp, synthetic construct
  source 1..75: mol_type = other DNA
gaggtcaacgccaggctttctatgtttgcctggggctggcatcacgaagcggggatccatttgttgcggctgatg

SEQ ID NO: 102212 - DNA, 75 bp, synthetic construct
  source 1..75: mol_type = other DNA
atggctatttttcatcttgattttaaaattgtgaaacgttcagaaggtaggtcttccgttgcgaaggctgcttat

SEQ ID NO: 102213 - DNA, 75 bp, synthetic construct
  source 1..75: mol_type = other DNA
ttgctgtacacctttttgctgcgtcagcaaataccgccgctgatgacgctgggcggtatcgcgctgttagtggtt

SEQ ID NO: 102214 - DNA, 75 bp, synthetic construct
  source 1..75: mol_type = other DNA
gggggggcatgaaagcaacctcaagctttatcgggtggttgatattgtgtcggcatttctggcattaccaccgcc

SEQ ID NO: 102215 - DNA, 75 bp, synthetic construct
  source 1..75: mol_type = other DNA
tcccggtagcgataatcttaacgggattaacgtgaaataccgttatgagtttacggacacgctggggctggtgac

SEQ ID NO: 102216 - DNA, 75 bp, synthetic construct
  source 1..75: mol_type = other DNA
cgccttaaggagctggttccgctggttgatgttccggctcagggggttgtggtaacggggtatatttatgaggtg

SEQ ID NO: 102217 - DNA, 75 bp, synthetic construct
  source 1..75: mol_type = other DNA
gctgtatgccagccgggattttgattggcgtggtggtactgattttttccctgcaacacgagctgctgccagcct

SEQ ID NO: 102218 - DNA, 75 bp, synthetic construct
  source 1..75: mol_type = other DNA
gcgcagcttaaccgccagcgcgaggcactggcgcgcgtcagtgcacagcagacgaaattagtccgggtgaaagag

SEQ ID NO: 102219 - DNA, 75 bp, synthetic construct
  source 1..75: mol_type = other DNA
atgaaactcaaacatgtcggtatgattgtcgtttctgtgttggcgatgtcgtctgctgcggtaagcgcagccgag

SEQ ID NO: 102220 - DNA, 75 bp, synthetic construct
  source 1..75: mol_type = other DNA
atcctagtgagttagctactaacggcggtacgggcacagctattatgattcaggctgcgggtaaaaacgttccct

SEQ ID NO: 102221 - DNA, 75 bp, synthetic construct
  source 1..75: mol_type = other DNA
tgttctttcaaccacgatgaacaaaaccaccgctgattttcagggactaagtgactcattaagttaccttgcccc

SEQ ID NO: 102222 - DNA, 75 bp, synthetic construct
  source 1..75: mol_type = other DNA
gacaacaaggggaaaacgcatgatgtgctgaccggaagtgatgacggtcgccacagcaacacgtctctggcgtgg

SEQ ID NO: 102223 - DNA, 75 bp, synthetic construct
  source 1..75: mol_type = other DNA
aagagctggagtcagaagtctgacgagaagagccgcacggatatggttattctgttacaggtcaaaaaagtttga

SEQ ID NO: 102224 - DNA, 75 bp, synthetic construct
  source 1..75: mol_type = other DNA
cggaatcagcgtaggaagtatcagacgctatattggtaaaccggatacgaacggattccccatgccatttagcga

SEQ ID NO: 102225 - DNA, 75 bp, synthetic construct
  source 1..75: mol_type = other DNA
gacgcttactcgtgtcgctaaccgccctttttgcagcactctgcgggctatatcttctcattggcggaggctggt

SEQ ID NO: 102226 - DNA, 75 bp, synthetic construct
  source 1..75: mol_type = other DNA
gtttggctgctttgaatacaggcaatgtatttgctaattcattgcagagtcaaatagctgctattgcccaggcag

SEQ ID NO: 102227 - DNA, 75 bp, synthetic construct
  source 1..75: mol_type = other DNA
tgcaaagcattattgatgatctgcgtgacgaaattgcgcggcgggtggcagatgacagcaaacaggaagatacag

SEQ ID NO: 102228 - DNA, 75 bp, synthetic construct
  source 1..75: mol_type = other DNA
gtggtgtttaagctaaaagattgcaaggggccggcgagttaccaggtgcaggtgacccttaccggtacggaagac

SEQ ID NO: 102229 - DNA, 75 bp, synthetic construct
  source 1..75: mol_type = other DNA
aatcaacagaaacgtctacccccgtcctgcgacccgaagctggcagttacgtcgccaacctggcagccgctaaca

SEQ ID NO: 102230 - DNA, 75 bp, synthetic construct
  source 1..75: mol_type = other DNA
gctgagcggtatcgcgctgttagtgattggcgtggtcatcgcggtcagagcaaaaccagaaaaacctttaactga

SEQ ID NO: 102231 - DNA, 75 bp, synthetic construct
  source 1..75: mol_type = other DNA
cataaagcgccagcagcgcgagctcggtgcggtgggaattaatacccgtaatctggcaaatgatgagcgggggct

SEQ ID NO: 102232 - DNA, 75 bp, synthetic construct
  source 1..75: mol_type = other DNA
cccgaccgaatccgtggccattgatattacttatgaaggctccggcagtggcgactggcgcaccgacggtttcat

SEQ ID NO: 102233 - DNA, 75 bp, synthetic construct
  source 1..75: mol_type = other DNA
tattgctcagggctgttgaccaggcatcccgcccgtttaaatccatccgcacagcgagtaagtcgctgtcggggg

SEQ ID NO: 102234 - DNA, 75 bp, synthetic construct
  source 1..75: mol_type = other DNA
cgaggaaatccagcaggccatgcgcaagaagccaaagcctaactggaacgaaacggtgcctcccatcatcaacaa

SEQ ID NO: 102235 - DNA, 75 bp, synthetic construct
  source 1..75: mol_type = other DNA
tgaatacatgaaaaccattttcggggaggaggccagctcagccgccgccgtgctgatgactgccgcctcaaccgg

SEQ ID NO: 102236 - DNA, 75 bp, synthetic construct
  source 1..75: mol_type = other DNA
cggcttccgtatgttgtcccatccggagacgccgaccgcgtttgaggtgctggatcatgtgccggaagtggcaga

SEQ ID NO: 102237 - DNA, 75 bp, synthetic construct
  source 1..75: mol_type = other DNA
gactacatgccttcgctcgtggctgataagaaatcgttagcacctaaattgaaaccaaatgctccctataaaaat

SEQ ID NO: 102238 - DNA, 75 bp, synthetic construct
  source 1..75: mol_type = other DNA
cggccggggagcttcacaccgctcatccgcatcgaaacggagaacggtgagcgggagaaagcgcagcgccgcagc

SEQ ID NO: 102239 - DNA, 75 bp, synthetic construct
  source 1..75: mol_type = other DNA
agaattagaactcgagttcaatatccttacagaatttccaaaggtacccaatggaataaccctgatttccgtaaa

SEQ ID NO: 102240 - DNA, 75 bp, synthetic construct
  source 1..75: mol_type = other DNA
gtggagtggtatcagaacatctcgaaaagtaaagatgctggcaccaagctgatgggcttctccggtcgggtgaaa

SEQ ID NO: 102241 - DNA, 75 bp, synthetic construct
  source 1..75: mol_type = other DNA
tacagagcgccatcaaatatttccgcgaagaatttgaggcgggaatcaaacagccgttcagcaatacccatttga

SEQ ID NO: 102242 - DNA, 75 bp, synthetic construct
  source 1..75: mol_type = other DNA
gttggagtcattaccggcgttgttgactttggtaaaataaattcccgaacaattaaaaataccagcgttagtgag

SEQ ID NO: 102243 - DNA, 75 bp, synthetic construct
  source 1..75: mol_type = other DNA
acggcaatacggcgtggagcggggagtatgatgaatggggcaaccagctgaatgaggagaacccgcatcacctgc

SEQ ID NO: 102244 - DNA, 75 bp, synthetic construct
  source 1..75: mol_type = other DNA
gatcggcgaaagggctgggttatgaaaaagagattagagattacgggttaaatctgttcggtatgtacggcagaa

SEQ ID NO: 102245 - DNA, 75 bp, synthetic construct
  source 1..75: mol_type = other DNA
gtgacttcgcaggctgatatcgacgcggcaatcggtggtatgagcagtcgcgacggacaggacttctccaagatc

SEQ ID NO: 102246 - DNA, 75 bp, synthetic construct
  source 1..75: mol_type = other DNA
cctgtcgagcatgaccagcgccgaggccgaggaatggggtgtggacgacgaccagcgccggttcttcgtccgctt

SEQ ID NO: 102247 - DNA, 75 bp, synthetic construct
  source 1..75: mol_type = other DNA
ccggtgatctacctgcccgccgaagacccgcccaccgccattcatcaccgcctgcacgcccttggggcgcacctc

SEQ ID NO: 102248 - DNA, 75 bp, synthetic construct
  source 1..75: mol_type = other DNA
aggtgaagtggtaaatgccgcttgtgcgattgattcagaatcaatgaaccaaacggttgagctgggtcaggtccg

SEQ ID NO: 102249 - DNA, 75 bp, synthetic construct
  source 1..75: mol_type = other DNA
gacgatggccgcgttgctgatgttcagttcccgggtgttgcccagcgcgccatccgcatcggtacgtaatgtccc

SEQ ID NO: 102250 - DNA, 75 bp, synthetic construct
  source 1..75: mol_type = other DNA
accggcgaaatacggcattcttggtgaattgaccactggcagcaagttagtgaaagctaacggtttaatggaagc

SEQ ID NO: 102251 - DNA, 75 bp, synthetic construct
  source 1..75: mol_type = other DNA
gatcgaagcgacctctgactgcggcgcttatgttatggttcacggcgcgctgaaacgtctggctgtgaagatgtc

SEQ ID NO: 102252 - DNA, 75 bp, synthetic construct
  source 1..75: mol_type = other DNA
gttcacattctgaccaacgcttgctacaacctgggggtgcggacgatttcttggacggtttatacggacatcaat

SEQ ID NO: 102253 - DNA, 75 bp, synthetic construct
  source 1..75: mol_type = other DNA
acagcgttagtgagacgtttagtgtagtcatgacaaaagatcctggtgcggcctgtactgagcaattcaatattt

SEQ ID NO: 102254 - DNA, 75 bp, synthetic construct
  source 1..75: mol_type = other DNA
taaacttggcgtaaatggcaacctgaatccagcggccagcgtctggggaatgtgggcgtgcagctgggtgataat

SEQ ID NO: 102255 - DNA, 75 bp, synthetic construct
  source 1..75: mol_type = other DNA
ttgcaccggtaggggaaatgttcgccccactggcacccatttttgacggcctcggtgagaagctgcgcggcgtct

SEQ ID NO: 102256 - DNA, 75 bp, synthetic construct
  source 1..75: mol_type = other DNA
atgcccgcgtggcaatgaacaccatcggttcctggcagaaccacgcgatttccctcggcctgccgccaaacaccc

SEQ ID NO: 102257 - DNA, 75 bp, synthetic construct
  source 1..75: mol_type = other DNA
accatgccagcaagggcgcggccatgatgggcgcaggcgaccagcagcaggccagcaagggcgcggccatgatgg

SEQ ID NO: 102258 - DNA, 75 bp, synthetic construct
  source 1..75: mol_type = other DNA
aaattaatgaagataatacttcagactattccatagctatattccctttcactacttcgttgaatacactggatc

SEQ ID NO: 102259 - DNA, 75 bp, synthetic construct
  source 1..75: mol_type = other DNA
ccagatatacagcggggagtttactggggctagtgttgttagctcaaggaacagcgacgagcgcgaaaaacaacc

SEQ ID NO: 102260 - DNA, 75 bp, synthetic construct
  source 1..75: mol_type = other DNA
ttctatcgccatgggattatcggcaaatacagataaaaagtctgcgatagctatcgggcaaaacgcaaaggttac

SEQ ID NO: 102261 - DNA, 75 bp, synthetic construct
  source 1..75: mol_type = other DNA
ttgttctcttctcaagcggaatagagctattcggggaaaagattgtcgccagctggattgccttgacggtaattg

SEQ ID NO: 102262 - DNA, 75 bp, synthetic construct
  source 1..75: mol_type = other DNA
taccgggatgatttcagcctgtggggcgtgcatgttctggcaggtaaatcctttgacggtggtctgtttgtggat

SEQ ID NO: 102263 - DNA, 75 bp, synthetic construct
  source 1..75: mol_type = other DNA
atcatcggcggcattggtctcgttgcgtggccggttgtgatggggattaacgccattatcgccgctgctggcgtg

SEQ ID NO: 102264 - DNA, 75 bp, synthetic construct
  source 1..75: mol_type = other DNA
atatagatgttactgtagacaaaaatggagtgacgattgatggaacaactctgaaaaatgaaataaaaaaagatg

SEQ ID NO: 102265 - DNA, 75 bp, synthetic construct
  source 1..75: mol_type = other DNA
tgaaggccgcagattatggtgctgtgctggcaaataattctgataatcatgcctcaattacgctggatttcgata

SEQ ID NO: 102266 - DNA, 75 bp, synthetic construct
  source 1..75: mol_type = other DNA
ccggtaacgctgcagcggctggtgctgctggagtcggcgtggcaaccgccggagttgttgccggtgtcggaatgc

SEQ ID NO: 102267 - DNA, 75 bp, synthetic construct
  source 1..75: mol_type = other DNA
ctggaagaaaccgccgcgatgctgggtgcgttacatgatggaaaaatcacaggctcaatggcgggtactggtggt

SEQ ID NO: 102268 - DNA, 75 bp, synthetic construct
  source 1..75: mol_type = other DNA
ctattccatagctatattccctttcactacttcgttgaatacactggatccattaatacttaatcaggaattagt

SEQ ID NO: 102269 - DNA, 75 bp, synthetic construct
  source 1..75: mol_type = other DNA
agtggcgaaaaatgccggggtaagtatcgaagaaaccgccgcaatggtgggggcgctgcacgattccaaaatcac

SEQ ID NO: 102270 - DNA, 75 bp, synthetic construct
  source 1..75: mol_type = other DNA
ccatgcccgtgctggccgcgcgaataccgggacttatgccctgaacggtcaggctgttgcgggacgtaccggaag

SEQ ID NO: 102271 - DNA, 75 bp, synthetic construct
  source 1..75: mol_type = other DNA
cagaagaatatctgtatcatgggcagctaaaaggaaacgtggatgtaactaatgtggttgaagttgggcagagcg

SEQ ID NO: 102272 - DNA, 75 bp, synthetic construct
  source 1..75: mol_type = other DNA
cagtcagcaccggctggtgcactacacgcggacacaatatgaagagccgctggtcgaaagtcgctatctttacga

SEQ ID NO: 102273 - DNA, 75 bp, synthetic construct
  source 1..75: mol_type = other DNA
accaccgctgattttcagggactaagtgactcattaagttaccttgcccctgttgcgaaaaatgctggggtgagt

SEQ ID NO: 102274 - DNA, 75 bp, synthetic construct
  source 1..75: mol_type = other DNA
ggtttaacaggataaaaagccgtttgatactgggggaagactatacaccatcagatatttttgacagtgttccat

SEQ ID NO: 102275 - DNA, 75 bp, synthetic construct
  source 1..75: mol_type = other DNA
agtcggcgttcttgcgtgtgcatctcccggaagcgcgcgtgcgtgtgtatcttctcttgatgaagaaagtactgc

SEQ ID NO: 102276 - DNA, 75 bp, synthetic construct
  source 1..75: mol_type = other DNA
gcggacatcaccgttaatggtcagaaagtgccagttatttacgctccggcgaaaaccggcaacatttttgtgctc

SEQ ID NO: 102277 - DNA, 75 bp, synthetic construct
  source 1..75: mol_type = other DNA
cataaagcgccagcagcgcgagctcggtgctgcggggattaatacccgtaatctggcaaatgatgagcgggggct

SEQ ID NO: 102278 - DNA, 75 bp, synthetic construct
  source 1..75: mol_type = other DNA
gtcaggctatcgaacttattcgtgctgcggtgaacgtggcgtcaccttcttcgataccgccgaagtgtatggtcc

SEQ ID NO: 102279 - DNA, 75 bp, synthetic construct
  source 1..75: mol_type = other DNA
ttcagcagcaatgttcatcgataggaatttaaatcccaaaaagattaaaaaaacacccaaaaacggatgtttatt

SEQ ID NO: 102280 - DNA, 75 bp, synthetic construct
  source 1..75: mol_type = other DNA
cgccaataaaggcgtgctcaatctgcaaagcaatatgccagacaccaaaccgggtctgtatgaaccgacttcgcc

SEQ ID NO: 102281 - DNA, 75 bp, synthetic construct
  source 1..75: mol_type = other DNA
gctgtaaatgaccatgggttgacatgtccatcaacaacagattgctcagatagatgtagtgattatattaatcca

SEQ ID NO: 102282 - DNA, 75 bp, synthetic construct
  source 1..75: mol_type = other DNA
gtcagcctatgaggcggtcgggactgacctgtttgaccagcaggagggctcactgcgtaagctgacgcagacggc

SEQ ID NO: 102283 - DNA, 75 bp, synthetic construct
  source 1..75: mol_type = other DNA
gtgctttgcgagttgcgcccggaaccagaagatgagattgccgaagtgttgcttaataatacgtatgcgttgttt

SEQ ID NO: 102284 - DNA, 75 bp, synthetic construct
  source 1..75: mol_type = other DNA
ttgatgttccggctcagggggttgtggtaacggggtatatttatgaggtgcagacagggcgctctgaaggttcgg

SEQ ID NO: 102285 - DNA, 75 bp, synthetic construct
  source 1..75: mol_type = other DNA
accagccccccagagcagttatcgcacggcagtaaaccatttcatatcaacgctgtcatcaaagtcgatagagaa

SEQ ID NO: 102286 - DNA, 75 bp, synthetic construct
  source 1..75: mol_type = other DNA
gaagaagttgaaggtacctggcctaacaaattgcaacctggaatatataaaaacatggggagtaatagcgttaac

SEQ ID NO: 102287 - DNA, 75 bp, synthetic construct
  source 1..75: mol_type = other DNA
acttcaccgtcaataacccgacgccgtactacgtgatcatcagcaacgccagcgctaaaaaaggcggcaacccgc

SEQ ID NO: 102288 - DNA, 75 bp, synthetic construct
  source 1..75: mol_type = other DNA
tatcaggcgtatcagccggtcactgcgcctgcaggtcgctcttatatcgaccagagcaaaagcgaatacaacatc

SEQ ID NO: 102289 - DNA, 75 bp, synthetic construct
  source 1..75: mol_type = other DNA
tttgatacatcatcaatatctatcgacttgataaagctggtattaaaccagccgttatcaaaaataattagcatt

SEQ ID NO: 102290 - DNA, 75 bp, synthetic construct
  source 1..75: mol_type = other DNA
gacagcaagggcaacacgcgcccgatattttccatcctgaaagaaatgcagcgcagttttgagaaaaataatctc

SEQ ID NO: 102291 - DNA, 75 bp, synthetic construct
  source 1..75: mol_type = other DNA
taaataaaataaatagccaatctatttgcgaagataaagagttcgctggtttaatatgtaaggataatagtggca

SEQ ID NO: 102292 - DNA, 75 bp, synthetic construct
  source 1..75: mol_type = other DNA
aacattactgtcaagaacgctgcttcaacacaaacaggaaaatggttagcttcgttaatagaaaaagttgcgaca

SEQ ID NO: 102293 - DNA, 75 bp, synthetic construct
  source 1..75: mol_type = other DNA
aggtcgcagaacataaactgtggctggctgattactctaatcaggcacaggccagtgaaaccccgcgttcaatta

SEQ ID NO: 102294 - DNA, 75 bp, synthetic construct
  source 1..75: mol_type = other DNA
ccctgatgatgagaaagtacacggtgaaactctaacaggacttggaatagccaacgttgcagttgtcagaatgga

SEQ ID NO: 102295 - DNA, 75 bp, synthetic construct
  source 1..75: mol_type = other DNA
tcccagtattgaattttgtcgctatgcccggtctggtggggcctattttagggccagttcttggcggggtactgg

SEQ ID NO: 102296 - DNA, 75 bp, synthetic construct
  source 1..75: mol_type = other DNA
tggttgctctgcttttgttgatagcattcactgtgtctagtgttgttaagtacaccagtcttttatcggagaaaa

SEQ ID NO: 102297 - DNA, 75 bp, synthetic construct
  source 1..75: mol_type = other DNA
aagcgacctctgactgcggcgcttatgttatggttcacggcgcgctgaaacgcctggctgtgaagatgtccaaaa

SEQ ID NO: 102298 - DNA, 75 bp, synthetic construct
  source 1..75: mol_type = other DNA
actgactatgattttcaaaatccctttgagggattgctccaaaaggatcgcgagccagtttcccaaaagcgagag

SEQ ID NO: 102299 - DNA, 75 bp, synthetic construct
  source 1..75: mol_type = other DNA
aagcatcctcggcacgattttgcaggaaaacggggtgaccgaatggagcccgctgttcagcgagccgcatccttc

SEQ ID NO: 102300 - DNA, 75 bp, synthetic construct
  source 1..75: mol_type = other DNA
ggcaaccggcgaaattgttaagctggatgtcaacagtaccagtactgtgcagccggttgcgctcatgaggctcgg

SEQ ID NO: 102301 - DNA, 75 bp, synthetic construct
  source 1..75: mol_type = other DNA
gatgaccttgatgccattaatccgacgtggaagttaaaagacagtaacggtggaagtaaagaagtcggcagtaaa

SEQ ID NO: 102302 - DNA, 75 bp, synthetic construct
  source 1..75: mol_type = other DNA
gcttaaccacgacgcgggccgctggtttcttttggggcagagcaaaattccggtggcgctggaacgtaaggggga

SEQ ID NO: 102303 - DNA, 75 bp, synthetic construct
  source 1..75: mol_type = other DNA
tcaatgtactgtctttgcaggaaagtaaccatattgacctgccgacgttgtggaaagcactcaacctatcgggaa

SEQ ID NO: 102304 - DNA, 75 bp, synthetic construct
  source 1..75: mol_type = other DNA
gcattcttaggacatgcagataattcaattacatacagaagatatggtaagtcagtcgcggtatctcaactatat

SEQ ID NO: 102305 - DNA, 75 bp, synthetic construct
  source 1..75: mol_type = other DNA
cagataacgccttcggatgtttccttgccggattggctggagaagatgcgccattcgaaccaggtgatcgacctg

SEQ ID NO: 102306 - DNA, 75 bp, synthetic construct
  source 1..75: mol_type = other DNA
cagatatgccgctcaatggttttcaggggcagcctaatcgccctgaacaggccgcccgtgtgtttgccgtgctgt

SEQ ID NO: 102307 - DNA, 75 bp, synthetic construct
  source 1..75: mol_type = other DNA
tcgccagatcttgtgggatgacctgcaggaagttctgccgcgcaaatgggttcgtaagaaaaacgacaccacgat

SEQ ID NO: 102308 - DNA, 75 bp, synthetic construct
  source 1..75: mol_type = other DNA
tggagcagctcagggatattggctatctggattacactgaattcaaacgcggccggtcaacctatttcagtgtgc

SEQ ID NO: 102309 - DNA, 75 bp, synthetic construct
  source 1..75: mol_type = other DNA
gatgacctgaatgccggtaaaaatctgatattcatggggcagaatggtcaggttgacctgaaggatccggtttcg

SEQ ID NO: 102310 - DNA, 75 bp, synthetic construct
  source 1..75: mol_type = other DNA
tcgccaagctctggcagcagctcaatttccaccagcaggtacaaaccggtagtatgggggatatgtttgctgaaa

SEQ ID NO: 102311 - DNA, 75 bp, synthetic construct
  source 1..75: mol_type = other DNA
ttaatcgttagcggcggtgaaacaacgtcttcagcagatggtgcaatgataacgttgcatggttccagaagcagt

SEQ ID NO: 102312 - DNA, 75 bp, synthetic construct
  source 1..75: mol_type = other DNA
ttcagggcctggttacaggcgaaaagcggtcgggaagtgacgatgggcgattttaccgccaacctgacggcgacc

SEQ ID NO: 102313 - DNA, 75 bp, synthetic construct
  source 1..75: mol_type = other DNA
atcatttccttacttctggaaaccacgcccattaaagctaaccatttgcgaagcatactggattatattgaacag

SEQ ID NO: 102314 - DNA, 75 bp, synthetic construct
  source 1..75: mol_type = other DNA
ctaacgacaacggtttagcctttaacgatgcaagcgcctctggtgtcggcgctacagctgtaggttataacgctg

SEQ ID NO: 102315 - DNA, 75 bp, synthetic construct
  source 1..75: mol_type = other DNA
ttcttttgaatctgctttacatcttgatatagaaaatcttccccttatagaaaattgggatggagaaccttacaa

SEQ ID NO: 102316 - DNA, 75 bp, synthetic construct
  source 1..75: mol_type = other DNA
tattaataacgatgagggatttaagactggagaagcaattgctattggagccaaagcacaagcaatgaaagaaca

SEQ ID NO: 102317 - DNA, 75 bp, synthetic construct
  source 1..75: mol_type = other DNA
catgctccaaagtggccgcagtgtggttgtatttatggaccgcagcgaaaggtggcctggagaatccttgatgcc

SEQ ID NO: 102318 - DNA, 75 bp, synthetic construct
  source 1..75: mol_type = other DNA
gaaggtcggggacggaaccgttgtactgaaccagcaagcggacaataaagggcaggtgcaggcgttcagcagtgt

SEQ ID NO: 102319 - DNA, 75 bp, synthetic construct
  source 1..75: mol_type = other DNA
gcgatggcgcacggtattgacgcaaagctggtgagtgaacacagcatcacgcttaaccacgacgcaggccgctgg

SEQ ID NO: 102320 - DNA, 75 bp, synthetic construct
  source 1..75: mol_type = other DNA
tttacggcaacttactcagccgctcttgtacgctggtggttgagagcgggaatctggccgaagtccattttccga

SEQ ID NO: 102321 - DNA, 75 bp, synthetic construct
  source 1..75: mol_type = other DNA
catctcaccaatccaaatgtaactaaatgtattgaactatcagatatacacatttttaacccaaaaaatgaattt

SEQ ID NO: 102322 - DNA, 75 bp, synthetic construct
  source 1..75: mol_type = other DNA
ttaatcacgataacgggcgctggcaacgcctcggcggcggaaagctgccgctattgctggaacaacagggggagc

SEQ ID NO: 102323 - DNA, 75 bp, synthetic construct
  source 1..75: mol_type = other DNA
gcgcaggtgctggacaaaatggcctacctgacaatatggcagggtgatgatgtacagcgccgggtgaaaggtgtg

SEQ ID NO: 102324 - DNA, 75 bp, synthetic construct
  source 1..75: mol_type = other DNA
aaatggttgcgtggagatgaaaatgcgctgacggcgcaacagaaaaaaggcggtgatgctgccaacttactgatt

SEQ ID NO: 102325 - DNA, 75 bp, synthetic construct
  source 1..75: mol_type = other DNA
atgccgcttggcgaggcgcttgagcagcatacgggtgtacctgtttatattcagcatgatatcagcgcatggacg

SEQ ID NO: 102326 - DNA, 75 bp, synthetic construct
  source 1..75: mol_type = other DNA
gcggatattggtcgtatgaatgttactaaagaagagcgcgataaattgcgtcagaaagtacccggtttacgtaac

SEQ ID NO: 102327 - DNA, 75 bp, synthetic construct
  source 1..75: mol_type = other DNA
aaaacatcagtcaaaggatattgctaacgttagtgcggtatatcatacagacgataataagaatattgataagat

SEQ ID NO: 102328 - DNA, 75 bp, synthetic construct
  source 1..75: mol_type = other DNA
ttttgctactgccgctgtttgccagcccgcagcaaacccgtattgaagaacaggccatcactcacacgcaggcac

SEQ ID NO: 102329 - DNA, 75 bp, synthetic construct
  source 1..75: mol_type = other DNA
agaattacccgtctattattatattcctggcgcgaaacagttgatggattacgacattaggctcggatataaatc

SEQ ID NO: 102330 - DNA, 75 bp, synthetic construct
  source 1..75: mol_type = other DNA
agtttaatttcagtccataagtcagggattttaagtttggagaaaaaacttaaattaccatcttatatatctatg

SEQ ID NO: 102331 - DNA, 75 bp, synthetic construct
  source 1..75: mol_type = other DNA
agtgcgaatccggcagagactgttgttgagggaccgtttagtaaagacgtcatcctcaaaatcacctataactag

SEQ ID NO: 102332 - DNA, 75 bp, synthetic construct
  source 1..75: mol_type = other DNA
cgtaactgacaacaaggggaaaacgcacgatgtgctgaccggaagtgatgacgatcgccacagcaacacgtctct

SEQ ID NO: 102333 - DNA, 75 bp, synthetic construct
  source 1..75: mol_type = other DNA
gggcgtgcgcatcgaagatgttgtgctggttaccccgcaaggcgcagaagtgctctacgccatgccgaaaacagt

SEQ ID NO: 102334 - DNA, 75 bp, synthetic construct
  source 1..75: mol_type = other DNA
gagctaacgaaatttgccaactatatcatgatgatatattaaaagatggggggaggtggtgcatccagattgata

SEQ ID NO: 102335 - DNA, 75 bp, synthetic construct
  source 1..75: mol_type = other DNA
atgaaagagcatcctgttttatgtgaggatgttagaaaaattgataaaaatacgattaaaggaatcatcggtgat

SEQ ID NO: 102336 - DNA, 75 bp, synthetic construct
  source 1..75: mol_type = other DNA
ccgaccgaatccgtggccattgatgtcgcttatgaaggctccggcagtggtgactggcgcactgacgggttcatc

SEQ ID NO: 102337 - DNA, 75 bp, synthetic construct
  source 1..75: mol_type = other DNA
atctggatactcgcgttactaatatcgaaaacggtattggcgatatcgtcaccaccggtagcaccaagtacttca

SEQ ID NO: 102338 - DNA, 75 bp, synthetic construct
  source 1..75: mol_type = other DNA
aaaaaataaaaaaactcaaacgtaatcctaaagcttttcttattgactctaagcacaggtctttgaatttgttag

SEQ ID NO: 102339 - DNA, 75 bp, synthetic construct
  source 1..75: mol_type = other DNA
tgccagcgcttatcctcccgctgctgttactgagcggttgcagcaacacgccgcacacgttgaaaaccagactcg

SEQ ID NO: 102340 - DNA, 75 bp, synthetic construct
  source 1..75: mol_type = other DNA
tcttcaccaccagcgtgtgggcgcaaccgcttcaggtgcagaccagccagaacgcggactcagctctaagaccgc

SEQ ID NO: 102341 - DNA, 75 bp, synthetic construct
  source 1..75: mol_type = other DNA
tctatatcagcaacaacaaaatcagtgatattcctgaatttgttcgcggtatggtaatggttaaaaaagccgcag

SEQ ID NO: 102342 - DNA, 75 bp, synthetic construct
  source 1..75: mol_type = other DNA
aatggttcagcgcgtatgcgatggcgggtatggcttacagccgtgtgtcgactttctccggggattatctgcagg

SEQ ID NO: 102343 - DNA, 75 bp, synthetic construct
  source 1..75: mol_type = other DNA
tctggcttctgcgcctggcggaacctctcacggatatttctcttttgccagcctgaaccggggctttactgttta

SEQ ID NO: 102344 - DNA, 75 bp, synthetic construct
  source 1..75: mol_type = other DNA
atattcgcaacacacaaaaagggctgcgtgacctgaacggtcaggcgtcgaaaatcgacggctttcgtaaggcaa

SEQ ID NO: 102345 - DNA, 75 bp, synthetic construct
  source 1..75: mol_type = other DNA
aagcgtgctgcctctgagctacagacgaagtacaacaatctgagaacgtctgtacagcgccagcgctccgaactg

SEQ ID NO: 102346 - DNA, 75 bp, synthetic construct
  source 1..75: mol_type = other DNA
cacagtaatgaacttaacttatcatatcttttcttgggttctgtgccgcctcttcccgagtggattgaaatgctt

SEQ ID NO: 102347 - DNA, 75 bp, synthetic construct
  source 1..75: mol_type = other DNA
actttttccggggattatctccgcgtaactgacaacaaggggaaaacgcacgacgtgctgaccggaagtgatgac

SEQ ID NO: 102348 - DNA, 75 bp, synthetic construct
  source 1..75: mol_type = other DNA
atggtacaggttacgctttgcgcatcgtcgttgggatatcttttcccgcagaatgaaacgcaagatttacgtctg

SEQ ID NO: 102349 - DNA, 75 bp, synthetic construct
  source 1..75: mol_type = other DNA
aagcatcctcggcacgattttgcaggaaaacggggtgaccgagtggagcccgctgttcagcgagccacatccttc

SEQ ID NO: 102350 - DNA, 75 bp, synthetic construct
  source 1..75: mol_type = other DNA
tatatggtatttccaaaagtatccgatggaattacccaggtctccgtagataataatctgatatcgcgtgttgac

SEQ ID NO: 102351 - DNA, 75 bp, synthetic construct
  source 1..75: mol_type = other DNA
cttctggcgctggaaatcacagataacggtatttccagatccggcaggtgcttatcgccaacatgctcgcgggga

SEQ ID NO: 102352 - DNA, 75 bp, synthetic construct
  source 1..75: mol_type = other DNA
atactctattgtttgaaaattatggggcttatgataagacggggtctatcacgatagaaaaaagtcagggggagg

SEQ ID NO: 102353 - DNA, 75 bp, synthetic construct
  source 1..75: mol_type = other DNA
aatgtttcagataatttaaaggaaattgaatctgcatcaagaaagttttggataccgggagattcaaaagaaatt

SEQ ID NO: 102354 - DNA, 75 bp, synthetic construct
  source 1..75: mol_type = other DNA
gccggtgagctggccgtgcagtttaaaaactccaccagtccgacccgcgcgcaggcgcaggcactcgaagcggca

SEQ ID NO: 102355 - DNA, 75 bp, synthetic construct
  source 1..75: mol_type = other DNA
gcggtggttgaatcatctaaaacaacgcattaatatcgaaggtgactataaacctttgattgctgatttattcaa

SEQ ID NO: 102356 - DNA, 75 bp, synthetic construct
  source 1..75: mol_type = other DNA
catcacagcggtatgccttactgggcccagggaagcacaacggaaatgcgccccaaaaacattgcctttaactac

SEQ ID NO: 102357 - DNA, 75 bp, synthetic construct
  source 1..75: mol_type = other DNA
aaagtaaacagcagttttgatggttactttaagacggatgcggaaggaatactgggtatccggtatgacttctga

SEQ ID NO: 102358 - DNA, 75 bp, synthetic construct
  source 1..75: mol_type = other DNA
cgaacgaccacgttaacaaatgtcagtccactaacgacgcctacccaaccggtttccgcatcgcggtttactctt

SEQ ID NO: 102359 - DNA, 75 bp, synthetic construct
  source 1..75: mol_type = other DNA
gtcttggtgttttgtttgctattgcgccttcttttccattacttagtgcacaaaatgctgagactgtcgttgttg

SEQ ID NO: 102360 - DNA, 75 bp, synthetic construct
  source 1..75: mol_type = other DNA
gaaatagaaatcactggttcaggtccagtaaaaaccagtgttaacggaaataaactggaaatttcagctgataca

SEQ ID NO: 102361 - DNA, 75 bp, synthetic construct
  source 1..75: mol_type = other DNA
agagtttatatcgactaatattgcagagttgctggacaagttaacgaaaattacagatgccagactttgcaaagg

SEQ ID NO: 102362 - DNA, 75 bp, synthetic construct
  source 1..75: mol_type = other DNA
gaatgcattaaccactccaatagcacaagaacttttaaacaaaaaaaatggtgatggatattttagccatgaaaa

SEQ ID NO: 102363 - DNA, 75 bp, synthetic construct
  source 1..75: mol_type = other DNA
attttaagagagagttgttgtctgaaccggaatggcgagcagcatgtgatatgccgggatatcaatggtgcgctc

SEQ ID NO: 102364 - DNA, 75 bp, synthetic construct
  source 1..75: mol_type = other DNA
cgctggcatgaagattccgtgcgtaaccgctggttcagcgtgatggcggggccgtctgtgcgcgtgaatgaatgg

SEQ ID NO: 102365 - DNA, 75 bp, synthetic construct
  source 1..75: mol_type = other DNA
aagcatcctcggcacgattttgcaggaaaacggggtgaccgactggagaccgctgttcagcgagccccatccttc

SEQ ID NO: 102366 - DNA, 75 bp, synthetic construct
  source 1..75: mol_type = other DNA
tgttgcgaaaaatgctggggtgagtcttgaacaggcggcggcgattaccggcacacttcatgataataacatcag

SEQ ID NO: 102367 - DNA, 75 bp, synthetic construct
  source 1..75: mol_type = other DNA
gaaggtaaaagcattgatgtttacaacttcggcaaaatgaagcgtgactttacttatattgatgatattgccgaa

SEQ ID NO: 102368 - DNA, 75 bp, synthetic construct
  source 1..75: mol_type = other DNA
aagcatcctcggcacgattttgcaggaaaacggggtgaccgattggagcccgctgttcagcgagcctcatccttc

SEQ ID NO: 102369 - DNA, 75 bp, synthetic construct
  source 1..75: mol_type = other DNA
acgtaaccgctggttcagcatgatggcggggccatctgtgcgcgtgaatgagtggttcagtgcttatgcgatggc

SEQ ID NO: 102370 - DNA, 75 bp, synthetic construct
  source 1..75: mol_type = other DNA
gccgcgatgcttgcagctgacggaccgcgttacaaagcgatcggcaatagtatggcaataccagtaatgcgctgg

SEQ ID NO: 102371 - DNA, 75 bp, synthetic construct
  source 1..75: mol_type = other DNA
cagaatagcgttggtacacctgctttatttttggctatgatgaacggacatactgacaacgtgaaaatatttatg

SEQ ID NO: 102372 - DNA, 75 bp, synthetic construct
  source 1..75: mol_type = other DNA
taccacacactcgtttaatctggcgctggttatcgcgggcctgtgtgacgttcaccggggcgctgtgttacttct

SEQ ID NO: 102373 - DNA, 75 bp, synthetic construct
  source 1..75: mol_type = other DNA
tactcttaaaaatgatctggatacgttcaatccaatatggttgttaaaggatgagaatggtggggaggccagaat

SEQ ID NO: 102374 - DNA, 75 bp, synthetic construct
  source 1..75: mol_type = other DNA
ccgatctgcaaattacaaatgctggcgtcatgctcgctacaaatcaggatttacccagcgagacgtttgatttag

SEQ ID NO: 102375 - DNA, 75 bp, synthetic construct
  source 1..75: mol_type = other DNA
caaaaccgcacgttaacgtaggtactatcggccacgttgaccagggtaaaaccacgctgaccgctgcaatcacta

SEQ ID NO: 102376 - DNA, 75 bp, synthetic construct
  source 1..75: mol_type = other DNA
catatgtccgcgattttatatatagacaatcatactttatcagtaaggctacgaataaagttggcagcggatgga

SEQ ID NO: 102377 - DNA, 75 bp, synthetic construct
  source 1..75: mol_type = other DNA
tcagcgcgtatgcgatggcgggtatggcttacagccgtgtgtcgactttctccggggattatctccgcgtaactg

SEQ ID NO: 102378 - DNA, 75 bp, synthetic construct
  source 1..75: mol_type = other DNA
cgtggggagttggcgtgcagtttaacccgaccgaatccgtggccattgatattgcttatgaaggctccggcagtg

SEQ ID NO: 102379 - DNA, 75 bp, synthetic construct
  source 1..75: mol_type = other DNA
gcaacacgtctctggcgtggggagctggcgtgcagtttaacccgaccgaatccgtggccattgatattgcttatg

SEQ ID NO: 102380 - DNA, 75 bp, synthetic construct
  source 1..75: mol_type = other DNA
aggtgaccgacaatacggggaaaacgcatgatgtgctgaccggaagtgatgacggtcgccacagcaacacgtctc

SEQ ID NO: 102381 - DNA, 75 bp, synthetic construct
  source 1..75: mol_type = other DNA
aacacaaatatcctcatgctccggcagaagaacaattaccctattgggttgaaatactgcttgtggatgaacaag

SEQ ID NO: 102382 - DNA, 75 bp, synthetic construct
  source 1..75: mol_type = other DNA
gatgaagtattaggtcatcatgtttctcgtgctgaatatgagaaacaagctaagtttaacagtgatacttacaaa

SEQ ID NO: 102383 - DNA, 75 bp, synthetic construct
  source 1..75: mol_type = other DNA
cacccgaatagcaatatcggcaggacttgatcgcgaaggtgcgacagacgtttacagcggaatatgccgttctgt

SEQ ID NO: 102384 - DNA, 75 bp, synthetic construct
  source 1..75: mol_type = other DNA
tctcggtcgacatcgaaacttcaggtcctattgtcggtgaacacagcatgttgacgttaggggcgtgcttggcat

SEQ ID NO: 102385 - DNA, 75 bp, synthetic construct
  source 1..75: mol_type = other DNA
cttgataatttactgcgcagttacgaatatcgcatcggtgtaggcgatgtactgatggtcactgtttgggatcac

SEQ ID NO: 102386 - DNA, 75 bp, synthetic construct
  source 1..75: mol_type = other DNA
tatacctgtctttgttggcctgaatgccccctttgactggtctttcattaactattattttcacgtttacgttgg

SEQ ID NO: 102387 - DNA, 75 bp, synthetic construct
  source 1..75: mol_type = other DNA
tactaacttgatggatatgctctggattggcattcatggacacaaaacaaagaaacaacgagacggagaacgcga

SEQ ID NO: 102388 - DNA, 75 bp, synthetic construct
  source 1..75: mol_type = other DNA
tgcgcagatgagatagatctagcgtggactcaaggctctcgcgaatggctcgcgttggaaactttcattgacact

SEQ ID NO: 102389 - DNA, 75 bp, synthetic construct
  source 1..75: mol_type = other DNA
aataaaaaatcactcgccgctgaagacagcaagttggttgcaacgctgaaagccgatcacgatgccacacgccag

SEQ ID NO: 102390 - DNA, 75 bp, synthetic construct
  source 1..75: mol_type = other DNA
accgtaaccaccccagatggtccagccgtgtacatggttcaaacacgccaggcattcgagcgaacacgcagtgtt

SEQ ID NO: 102391 - DNA, 75 bp, synthetic construct
  source 1..75: mol_type = other DNA
gctgatggcgctggtttttgtgctggcagctgcgccaatcagcttgggattgtttggtaatcacgactatcaggg

SEQ ID NO: 102392 - DNA, 75 bp, synthetic construct
  source 1..75: mol_type = other DNA
taactgggttaattcagatggcactattttctatccttatatcggtaaagtgcaggtggccggcaaaactttgag

SEQ ID NO: 102393 - DNA, 75 bp, synthetic construct
  source 1..75: mol_type = other DNA
cgcaagtggatgttagcgtggctgcatttagatctcaaaaagtatatgtgacaggcgaagtttcgaaatcaggtc

SEQ ID NO: 102394 - DNA, 75 bp, synthetic construct
  source 1..75: mol_type = other DNA
atgacattagcagaggcaatcgggaatgcggaaggcatgtctcaagcgtacagtgatgccacgggagtcttcgtt

SEQ ID NO: 102395 - DNA, 75 bp, synthetic construct
  source 1..75: mol_type = other DNA
atgaacagacgtcttcacctcatcaccacctgtacccggcgcaaggcgggcagcgtggaagataccgtttttccg

SEQ ID NO: 102396 - DNA, 75 bp, synthetic construct
  source 1..75: mol_type = other DNA
attctgttttttttaattttataaaactatatgctaagaaattaaagagttttttttattttttaaaagctccat

SEQ ID NO: 102397 - DNA, 75 bp, synthetic construct
  source 1..75: mol_type = other DNA
acgccatgttcctggttgccaccaataactatcgcgcttacggcggcaaatttgccggcacgggcgacagccata

SEQ ID NO: 102398 - DNA, 75 bp, synthetic construct
  source 1..75: mol_type = other DNA
ctgaaagcgctggaaggcgacgcagagtgggaagcgaaaatcctggaactggctggcttcctggattcctacatt

SEQ ID NO: 102399 - DNA, 75 bp, synthetic construct
  source 1..75: mol_type = other DNA
acgctttaagcggaacaggtggggctagagttattcttaatttagctaagtctcttcgggatagaggtcataaag

SEQ ID NO: 102400 - DNA, 75 bp, synthetic construct
  source 1..75: mol_type = other DNA
cgcgcagggcggtgccgaacgactgggaaaaggtgtgtatgcgggtgatgctcgatgcggcacaggacgccgggg

SEQ ID NO: 102401 - DNA, 75 bp, synthetic construct
  source 1..75: mol_type = other DNA
ccagactcgccagaatggtgtatgaaattgcgagcaaaaacaagacaaacatcaatagaatttatactgagatga

SEQ ID NO: 102402 - DNA, 75 bp, synthetic construct
  source 1..75: mol_type = other DNA
ccgttaagctatctgaaacccagctgggatagcggtctggcagggcagttgagcaagtttacgcttatggcgttg

SEQ ID NO: 102403 - DNA, 75 bp, synthetic construct
  source 1..75: mol_type = other DNA
gggttcagtcgcggcgcggcagcggcacggcactttgccaaccgggtgatgaaccaggatacggcgatagtggct

SEQ ID NO: 102404 - DNA, 75 bp, synthetic construct
  source 1..75: mol_type = other DNA
cgacaagttcggcagccaagggttgtcactggccatcgagaagtgctttatctgggcctatcgctgccgcatccg

SEQ ID NO: 102405 - DNA, 75 bp, synthetic construct
  source 1..75: mol_type = other DNA
tccgatagcacagggggcctgtgcagcagatgccattgccagcgcctttaatatgcctctcgatgttctgttctg

SEQ ID NO: 102406 - DNA, 75 bp, synthetic construct
  source 1..75: mol_type = other DNA
ccgcattcaggcaatcccaaatttcatctgcactatggtgatttgacggattcatccaatctgacccgtatttta

SEQ ID NO: 102407 - DNA, 75 bp, synthetic construct
  source 1..75: mol_type = other DNA
accggcgaggttgtaaattctggcaagcaacctatcactaacatcccattaactgtgatggatgctatcaatgct

SEQ ID NO: 102408 - DNA, 75 bp, synthetic construct
  source 1..75: mol_type = other DNA
agacggaaaaaaacagacgctgaagattggctatattggcgtcgtgccgccgcaaatcatgggctgggataaagc

SEQ ID NO: 102409 - DNA, 75 bp, synthetic construct
  source 1..75: mol_type = other DNA
aatgaaaaagcggccgatttctggcgcgcgctggtggaagcgggcgttaagccatgtggcctgggcgcgcgtgac

SEQ ID NO: 102410 - DNA, 75 bp, synthetic construct
  source 1..75: mol_type = other DNA
accgtactggccaaaacctacggcggtgctgctcgcgcattcgaccagatcgataacgcgccggaagaaaaagct

SEQ ID NO: 102411 - DNA, 75 bp, synthetic construct
  source 1..75: mol_type = other DNA
cccaggttgatgtcagtattgctgcctttagatcacagaaaacttacgttacaggcgaagttatgaagtcaggcc

SEQ ID NO: 102412 - DNA, 75 bp, synthetic construct
  source 1..75: mol_type = other DNA
tgcaggtggccggcaaaactttgagccaggttcgccaggacatagcaagccgtttgactacttatattgaaagtc

SEQ ID NO: 102413 - DNA, 75 bp, synthetic construct
  source 1..75: mol_type = other DNA
gctttcgagcagatggcttctaaagggaagattcaggctgaagagctacgtggtcaattaggtgacagaatggca

SEQ ID NO: 102414 - DNA, 75 bp, synthetic construct
  source 1..75: mol_type = other DNA
tgcggaaaggattaagaacctgacctttaatggcaaaccgattgatccgaacgccatgttcctcgttgccaccaa

SEQ ID NO: 102415 - DNA, 75 bp, synthetic construct
  source 1..75: mol_type = other DNA
cacaatgaaaatggatcggagtgggatgactctggcagaagcgttaggtaatgcggaaggtatgtcgcaagcatt

SEQ ID NO: 102416 - DNA, 75 bp, synthetic construct
  source 1..75: mol_type = other DNA
actaatggttaccgtatgggatcacccggagttgactactccagctggtcagtatcgtagtgctagtgacactgg

SEQ ID NO: 102417 - DNA, 75 bp, synthetic construct
  source 1..75: mol_type = other DNA
gtaagcacgccggtggggtggttatcgcgccgaccaaaattaccgattttgcgccgctttactgcgatgaagagg

SEQ ID NO: 102418 - DNA, 75 bp, synthetic construct
  source 1..75: mol_type = other DNA
aatcgcgtaatttctcagcttgtaccgactattactggtgttcatgacatgacggaaactgcgaaatttattaag

SEQ ID NO: 102419 - DNA, 75 bp, synthetic construct
  source 1..75: mol_type = other DNA
cggctatcagaatctgacgttgctgatctcaaaagcgtatcagcgcgggtacggtaccgccgggccgatcatcga

SEQ ID NO: 102420 - DNA, 75 bp, synthetic construct
  source 1..75: mol_type = other DNA
attaatggtaaccgtttgggatcacccggagctgacaacaccagcaggccagtaccgtagcgccagcgacactgg

SEQ ID NO: 102421 - DNA, 75 bp, synthetic construct
  source 1..75: mol_type = other DNA
aacaactgcacctatcgttaggtggaatcgcgtgatttcgcaattggttccgacaattaccggagttcatgatat

SEQ ID NO: 102422 - DNA, 75 bp, synthetic construct
  source 1..75: mol_type = other DNA
tttgccaggagcaacagtgttggggaaaagtgcgctcgttcgtgtctgattccgcacgctggcattacctgaccc

SEQ ID NO: 102423 - DNA, 75 bp, synthetic construct
  source 1..75: mol_type = other DNA
caggcaaaagctgccacactgtttaatgacgcccagcgtcaggcggtggaagggatgaaaccgttctttggcgtg

SEQ ID NO: 102424 - DNA, 75 bp, synthetic construct
  source 1..75: mol_type = other DNA
ccgcttcctcggtctggaaaagaagacccgtttctatcaggcctccacctcagaactgtacggcctggtacagga

SEQ ID NO: 102425 - DNA, 75 bp, synthetic construct
  source 1..75: mol_type = other DNA
atgacgcccagcgtcaggcggtggaagggatgaaaccgttctttggcgtgcaggcgggcgatctgtttattgcca

SEQ ID NO: 102426 - DNA, 75 bp, synthetic construct
  source 1..75: mol_type = other DNA
aacaactgctccgttagtgcgttggaatcgcgttatctcacaattggtaccgaccataactggagttcatgatat

SEQ ID NO: 102427 - DNA, 75 bp, synthetic construct
  source 1..75: mol_type = other DNA
catcttcattacataaatgatttgatgaataaacttattatgaccgcatcggtaatcagcatcctgatcgtcttt

SEQ ID NO: 102428 - DNA, 75 bp, synthetic construct
  source 1..75: mol_type = other DNA
ttttcgtgaagaagaatatgcaacgctcccgattgataaaatctttgttctcaacaaagcctatgatactccagt

SEQ ID NO: 102429 - DNA, 75 bp, synthetic construct
  source 1..75: mol_type = other DNA
ttgtcacccattgccagacgcaggatacctacgcacaacgccgtattgcagacgagttgtccccgccgcgaattg

SEQ ID NO: 102430 - DNA, 75 bp, synthetic construct
  source 1..75: mol_type = other DNA
atcttgcaagcaatgcaattaagttatctggtgcattttactctgtgatgggtgctcttaacgcttacaaggcca

SEQ ID NO: 102431 - DNA, 75 bp, synthetic construct
  source 1..75: mol_type = other DNA
tataaggcgctgaatacgctggattataccgtcggcacactcggcaatcatgaatttaattacggtctggattac

SEQ ID NO: 102432 - DNA, 75 bp, synthetic construct
  source 1..75: mol_type = other DNA
aagcgtatgtcgagcattacattcagggcgatccggatctggcaaaactgccggtgctttcagctgccgcaccgt

SEQ ID NO: 102433 - DNA, 75 bp, synthetic construct
  source 1..75: mol_type = other DNA
aatcaggggttgatagccatactactaggccgtattatgaacggagagatgatacaaatatggggaagtgggaac

SEQ ID NO: 102434 - DNA, 75 bp, synthetic construct
  source 1..75: mol_type = other DNA
cgacttttgtgctgagtaacggcaataacaatctgaattttaatgcctggctccaggcgaaaagcggccgggaag

SEQ ID NO: 102435 - DNA, 75 bp, synthetic construct
  source 1..75: mol_type = other DNA
gggtcgttgtcactgacgggcaaaggccatgccacggatatcgccatcattatgggactggcaggaaacagcccg

SEQ ID NO: 102436 - DNA, 75 bp, synthetic construct
  source 1..75: mol_type = other DNA
aacgccgctgaacaaaaacgcaatatctccgtttatgggcaggagtccaaccctactacctggcgtctggctgcg

SEQ ID NO: 102437 - DNA, 75 bp, synthetic construct
  source 1..75: mol_type = other DNA
tcggcgaacaagccagacttcagttaatggccgtgaaagccgtggtggtgtgcagcagaaatctattagaggaaa

SEQ ID NO: 102438 - DNA, 75 bp, synthetic construct
  source 1..75: mol_type = other DNA
tattgaggactatataactagtttgctttcagaaaatttacatgatgagaggatcattagcactttattggagca

SEQ ID NO: 102439 - DNA, 75 bp, synthetic construct
  source 1..75: mol_type = other DNA
tacgcttccgggacagttccggaaccgactcctaatcctgaaccaacaccggctcccgctcagcctcccatagtc

SEQ ID NO: 102440 - DNA, 75 bp, synthetic construct
  source 1..75: mol_type = other DNA
cgcgcgtggatgccgcgattgatgagagcgtcattgcccatatgaacgaactattaatcgccctgagtgatgacg

SEQ ID NO: 102441 - DNA, 75 bp, synthetic construct
  source 1..75: mol_type = other DNA
atcgctctgcgtacccatgaaattccgcacatctggccgcaggccgttgagcaacaggttgccggtctgaaagaa

SEQ ID NO: 102442 - DNA, 75 bp, synthetic construct
  source 1..75: mol_type = other DNA
ttggctatcaccggcgcggcaggagccagggggatttatgccatgaccaacagccagatcgacctcacgagcgat

SEQ ID NO: 102443 - DNA, 75 bp, synthetic construct
  source 1..75: mol_type = other DNA
gggcagtatccgatgaataaagtcgcgaccgatgatatcgggtttgcgatttatcaggtggatttgagtaagtaa

SEQ ID NO: 102444 - DNA, 75 bp, synthetic construct
  source 1..75: mol_type = other DNA
gggaagcctggactccttcgccagtggcaaactgagcggctttgacatgggttacagcagtatccagtttggtgg

SEQ ID NO: 102445 - DNA, 75 bp, synthetic construct
  source 1..75: mol_type = other DNA
gcgggactttcttcggtacagacatcttcatcacagggggcaccttctgaggctgaaaaagttccggcgtggatg

SEQ ID NO: 102446 - DNA, 75 bp, synthetic construct
  source 1..75: mol_type = other DNA
cgatgcttccccggctgataaaattagcagaggaaaccttcatagaacttcctcctgatgaactcgaaaaattga

SEQ ID NO: 102447 - DNA, 75 bp, synthetic construct
  source 1..75: mol_type = other DNA
tagaattgatgggcagaaaactttatcaaacctccttaccattatgttttcagctcacccatggacacttatttt

SEQ ID NO: 102448 - DNA, 75 bp, synthetic construct
  source 1..75: mol_type = other DNA
tgcgcgcatggtttaataaaaatcttccaggtcttcttgataaagaagtaaacagcgaaatatataacgactttc

SEQ ID NO: 102449 - DNA, 75 bp, synthetic construct
  source 1..75: mol_type = other DNA
ttaaaagggctttattctgattttgatagtttccctcgttcagcaaaaaccgcattagttgatatggggttcaat

SEQ ID NO: 102450 - DNA, 75 bp, synthetic construct
  source 1..75: mol_type = other DNA
agctcccgtttgtgtgtgaaaaacccctctcaacagatctcaactctgcacgatatctacaggagattgctccaa

SEQ ID NO: 102451 - DNA, 75 bp, synthetic construct
  source 1..75: mol_type = other DNA
aaagcgtttgtgcaggctacatcagaagccattgcaaacaaggcagttcagccgggagattacagctctgtggca

SEQ ID NO: 102452 - DNA, 75 bp, synthetic construct
  source 1..75: mol_type = other DNA
ggctatatgacgctcgcgcagtttgccgtgattttctggcacgacctggcagcaccgatccttgcgggaattatt

SEQ ID NO: 102453 - DNA, 75 bp, synthetic construct
  source 1..75: mol_type = other DNA
tatatgatccaattagttatattcatccccaacgagtaagtttgaataatgcacgtattagggaaggtgcgaata

SEQ ID NO: 102454 - DNA, 75 bp, synthetic construct
  source 1..75: mol_type = other DNA
gtcgtctgtacttgttaataagccagtgacatacacaacgacggaagtaaaaccggttggacagctcccggtgat

SEQ ID NO: 102455 - DNA, 75 bp, synthetic construct
  source 1..75: mol_type = other DNA
tcctattattaacacaaatggatgatggaagcgtttggcccagctacgttgaagagcgtacattacgatcagttg

SEQ ID NO: 102456 - DNA, 75 bp, synthetic construct
  source 1..75: mol_type = other DNA
cggtatttaccggcacgcgagctgaatatggcttgctctactggctgttgaaagatatccaggatgacaaagagc

SEQ ID NO: 102457 - DNA, 75 bp, synthetic construct
  source 1..75: mol_type = other DNA
ataccgttcgcaaggttataaacaagctgtagtggctcctgaaccacttgctgttctgcaacaggggaaagtaat

SEQ ID NO: 102458 - DNA, 75 bp, synthetic construct
  source 1..75: mol_type = other DNA
gctggattatctggatgcactggaagcggtagacacctccagtgctacggatatcgaatggcctacgcctccggg

SEQ ID NO: 102459 - DNA, 75 bp, synthetic construct
  source 1..75: mol_type = other DNA
atcgatgacactgaatatcgccaatgataacaaacagctaccctatctagctcaggcatgggtagagaatgaaaa

SEQ ID NO: 102460 - DNA, 75 bp, synthetic construct
  source 1..75: mol_type = other DNA
gcagctgcgccaatcagccagggattgtttggtaataccgactatcaggggctggtgcgtttagtggcgctggtg

SEQ ID NO: 102461 - DNA, 75 bp, synthetic construct
  source 1..75: mol_type = other DNA
taatattggaagtgaaaagtttaacgctgaacttgcaaaattaaatcaatctcttcgtgaaacgttgaataaact

SEQ ID NO: 102462 - DNA, 75 bp, synthetic construct
  source 1..75: mol_type = other DNA
gatggtggaacgagtctatgccagtgaccgggaacaacaacaggcaaccttcggcgaacaagccagactccagtt

SEQ ID NO: 102463 - DNA, 75 bp, synthetic construct
  source 1..75: mol_type = other DNA
tgcactgagcctggcaagacaaggggctgtattttgcagtactcaccccggcttgcctgtcggtccagttgctga

SEQ ID NO: 102464 - DNA, 75 bp, synthetic construct
  source 1..75: mol_type = other DNA
cgctggtggtaattcctgccgccggcatgttaattaagcgtggcgctatcccgttaagctatctgaaacccagtt

SEQ ID NO: 102465 - DNA, 75 bp, synthetic construct
  source 1..75: mol_type = other DNA
aggctattcttgcgcgctgtaagctgttccgcccgtttatcccgcccgttgttgatggcaaattgtggcaggatt

SEQ ID NO: 102466 - DNA, 75 bp, synthetic construct
  source 1..75: mol_type = other DNA
gcggttttatattctggcggaaatcagccagttcactttattgatggtatttgcccactggctaatccctgcgca

SEQ ID NO: 102467 - DNA, 75 bp, synthetic construct
  source 1..75: mol_type = other DNA
catatgaccatcgtcgatctccgcggcagccgcacccgggagtttctgcgttatctgctggcgaacgatgtggcg

SEQ ID NO: 102468 - DNA, 75 bp, synthetic construct
  source 1..75: mol_type = other DNA
cgcccatggtttgaacatacggacacaagccttaccagcaatggtcgtcagcattgtgcctatgtgctgctggat

SEQ ID NO: 102469 - DNA, 75 bp, synthetic construct
  source 1..75: mol_type = other DNA
caatcaaataagtttgatgatgaattattatttgatttaaatcttcttcaagaaaatcttggtaaatgtggaatt

SEQ ID NO: 102470 - DNA, 75 bp, synthetic construct
  source 1..75: mol_type = other DNA
acaatcgccgcactgactctggcagcattcttcctcggcatccccgtcttctttgatgtcggctttattattctt

SEQ ID NO: 102471 - DNA, 75 bp, synthetic construct
  source 1..75: mol_type = other DNA
caaaaagaaaagattatttctatatctcgaaccagaaatgaattattgaaagaaaatataaaactagatctattg

SEQ ID NO: 102472 - DNA, 75 bp, synthetic construct
  source 1..75: mol_type = other DNA
tatcaaatcagtttagtgagtctgatttggaaattttactaaatttccaaaagataaaaaacagcaaaaaaataa

SEQ ID NO: 102473 - DNA, 75 bp, synthetic construct
  source 1..75: mol_type = other DNA
actgaaacagcagctaatacggcagcagcaatagctggtgctacaggtaatgccagtaaggataccgggaatgat

SEQ ID NO: 102474 - DNA, 75 bp, synthetic construct
  source 1..75: mol_type = other DNA
agcggtggtgatgcggatggcctcaaggctggaagttccacaacctgatgaagcgcatagcgtggaatatcgggt

SEQ ID NO: 102475 - DNA, 75 bp, synthetic construct
  source 1..75: mol_type = other DNA
tgctcccagggtcagtaaagcggcctggaactgctcacagtgtgcgatcgagtactatggtgaacgctattgtct

SEQ ID NO: 102476 - DNA, 75 bp, synthetic construct
  source 1..75: mol_type = other DNA
tagatcgctggggggcatgggctgcagcagaaaatagcggtgtcgattggcaaccgatagcagcgggcttcaaga

SEQ ID NO: 102477 - DNA, 75 bp, synthetic construct
  source 1..75: mol_type = other DNA
ctatatgaatggctggactgttttgaccgaattaaacgtaatgcaccagttatggcggcgtatgttttttctgac

SEQ ID NO: 102478 - DNA, 75 bp, synthetic construct
  source 1..75: mol_type = other DNA
tctggaccatcgagaactgttgcctggcgtgtgctcaatgctcaatatttcggagtcgcccagtcacgaagaaga

SEQ ID NO: 102479 - DNA, 75 bp, synthetic construct
  source 1..75: mol_type = other DNA
ggcatgggatgctctcggcacggctctgcttcattcgggactctcggtaaccaaagttctgcccatgcgtggcga

SEQ ID NO: 102480 - DNA, 75 bp, synthetic construct
  source 1..75: mol_type = other DNA
cgggtgtcagtcacaccgacgggatccggcttaaactgacgtaccacgccagcggctacctgaaagccattcacc

SEQ ID NO: 102481 - DNA, 75 bp, synthetic construct
  source 1..75: mol_type = other DNA
tacgcactccgttgcgattggctcacatggacacaccatcaccgttaacgctgctggtaacgcggaaaacaccgt

SEQ ID NO: 102482 - DNA, 75 bp, synthetic construct
  source 1..75: mol_type = other DNA
aaatcagcacgataaatgctcttcgaatattcaaccaagcctttggccttatttttaggcgttccgaagatcatc

SEQ ID NO: 102483 - DNA, 75 bp, synthetic construct
  source 1..75: mol_type = other DNA
tggtcgctctcttcattaacgagtctgcttagcagcggcaaccaagcgttaagcgcagacaatatgaacaatgcc

SEQ ID NO: 102484 - DNA, 75 bp, synthetic construct
  source 1..75: mol_type = other DNA
atgacaatcgtaaaaacccataccggtaccgtgatcaccaaagatggaccgcaggtaaaaaaattgcaccaaaca

SEQ ID NO: 102485 - DNA, 75 bp, synthetic construct
  source 1..75: mol_type = other DNA
gggaaaatgttactggagtattaagcagtcatgacaatgcattcgggtgttttcttggtgcgctggccgggtcgg

SEQ ID NO: 102486 - DNA, 75 bp, synthetic construct
  source 1..75: mol_type = other DNA
cagcttgatagtaatttaacggcttctttagggcaacttgaaaggaagtttaataagacctttgacaagattgaa

SEQ ID NO: 102487 - DNA, 75 bp, synthetic construct
  source 1..75: mol_type = other DNA
aagagcagaaagaagacaccaactatctggacggtattcagggtttgctgaaaaccaaagatggccagcagctta

SEQ ID NO: 102488 - DNA, 75 bp, synthetic construct
  source 1..75: mol_type = other DNA
ctccaggcgaaaagcggccgggaagtgacgatgggggattttaccgcctccctgactgcgacatttgagtacata

SEQ ID NO: 102489 - DNA, 75 bp, synthetic construct
  source 1..75: mol_type = other DNA
ttttagttgggttgaagagatgcataacacaccgcaagacccggtgcatcatggtgaaggcgacgtcggtgtaca

SEQ ID NO: 102490 - DNA, 75 bp, synthetic construct
  source 1..75: mol_type = other DNA
gcaatacgacactgaacgtccctggtttgaacacactgacgaagggctgactgagcacggtcatgagtgccctta

SEQ ID NO: 102491 - DNA, 75 bp, synthetic construct
  source 1..75: mol_type = other DNA
caatgtcaccacgattattatggggagcggtactgcacacactgtcatacagggcgtttcagtgaggaggcagtg

SEQ ID NO: 102492 - DNA, 75 bp, synthetic construct
  source 1..75: mol_type = other DNA
gtgaatgctgcactggcggtggcacagggtaataacgcccttgccggtgccgcaggcgcagccaccggcgaggtg

SEQ ID NO: 102493 - DNA, 75 bp, synthetic construct
  source 1..75: mol_type = other DNA
tctatggaagaccaggggagttttgataaggcattaaaaattcaaagcattgatcttaaaataatggaagctgga

SEQ ID NO: 102494 - DNA, 75 bp, synthetic construct
  source 1..75: mol_type = other DNA
tcaagcttaagaattcctcgcaatctctcaatcttagcgactatgaatagtagcgatcaagcagtaatgcccatg

SEQ ID NO: 102495 - DNA, 75 bp, synthetic construct
  source 1..75: mol_type = other DNA
gatgggctggaatttatgtttttagccatcatgaaatttattgggtatatttcaggtggcaatgatgaagtattt

SEQ ID NO: 102496 - DNA, 75 bp, synthetic construct
  source 1..75: mol_type = other DNA
gaagcatataactcagagaagcaatattttaccagagaggactatacgtatgattacgaccttttaaatgcaata

SEQ ID NO: 102497 - DNA, 75 bp, synthetic construct
  source 1..75: mol_type = other DNA
atgtacgcaaaatcctttattgcatttgatggaaacggacgtctgaccggtgcccgtaccgcacagactgcgcca

SEQ ID NO: 102498 - DNA, 75 bp, synthetic construct
  source 1..75: mol_type = other DNA
gcaatacgacactgaacgtccctggtttgaacacactgacgacgggctgacggagcacggtcagcagtgccctta

SEQ ID NO: 102499 - DNA, 75 bp, synthetic construct
  source 1..75: mol_type = other DNA
taacaatgtctggatgatcaccattacgccatcctgtgccagcgttctggaatgtcttactgaactggcgtttga

SEQ ID NO: 102500 - DNA, 75 bp, synthetic construct
  source 1..75: mol_type = other DNA
aaggccgtcgtgaagcgcgcattgtccgcgtgttggtacccaaaaccagccagatcgtcggtcgctactttactg

SEQ ID NO: 102501 - DNA, 75 bp, synthetic construct
  source 1..75: mol_type = other DNA
ttcgggcacaatgacggcggcctgacggagaatggcaggcagcattgcccttatgtgaatccagaaagcagtgaa

SEQ ID NO: 102502 - DNA, 75 bp, synthetic construct
  source 1..75: mol_type = other DNA
aaacaagtagaagtttttcacttccaaaacaatagacctcattggaatgatagaggtgattataaaaaggttaaa

SEQ ID NO: 102503 - DNA, 75 bp, synthetic construct
  source 1..75: mol_type = other DNA
gggcgcacactggaacgctggctggaaaactatcaccgcgcagaagaactgccggaacccccgcgttttgtggaa

SEQ ID NO: 102504 - DNA, 75 bp, synthetic construct
  source 1..75: mol_type = other DNA
gcagcagggcgcaggctaaagtcggagaaaccgtcaccatgacggtgcataccttcaatgcgttgaataatgcgg

SEQ ID NO: 102505 - DNA, 75 bp, synthetic construct
  source 1..75: mol_type = other DNA
atttgcccgcctgttttcccgtattgccaaacggacggcaatcaataaaaccaaaattgatgatgtaaaagccat

SEQ ID NO: 102506 - DNA, 75 bp, synthetic construct
  source 1..75: mol_type = other DNA
acgcaccgggtgctggatatcctgaatgccagcggcgtgaaggtgaccagtgcggcgcagaaccgggcgtattac

SEQ ID NO: 102507 - DNA, 75 bp, synthetic construct
  source 1..75: mol_type = other DNA
gcaggtgtacccgtatgtggtccccctgctggatggcaggccgtcggtggcgcttcgtgggtggtttcagcctga

SEQ ID NO: 102508 - DNA, 75 bp, synthetic construct
  source 1..75: mol_type = other DNA
tgcaagcatacggagaatataaatgggaacacgtaccagagttaggtcagtatgtttataaagcagtaattaaac

SEQ ID NO: 102509 - DNA, 75 bp, synthetic construct
  source 1..75: mol_type = other DNA
tcaggcgctgggtgggcaggtccgtaagggcgagaagtccacgatggccgtgatatacaaaagctggcataagca

SEQ ID NO: 102510 - DNA, 75 bp, synthetic construct
  source 1..75: mol_type = other DNA
accgaaggcgatgaacagcggatgaatcgcaatctggaaacgctgatgcaaaaacgcgttgatggcttgctgtga

SEQ ID NO: 102511 - DNA, 75 bp, synthetic construct
  source 1..75: mol_type = other DNA
cgtcctttgcaataccgaaggcgatgaacgtaagcgtaaagccaatgccgtctgtaacacctgctccttgcagac

SEQ ID NO: 102512 - DNA, 75 bp, synthetic construct
  source 1..75: mol_type = other DNA
acgctattgccgccaaatctgctgaataatggcacaacggagcaaagtgatgtaacagaggtcagtgaggcgcac

SEQ ID NO: 102513 - DNA, 75 bp, synthetic construct
  source 1..75: mol_type = other DNA
ttaatgacgcgcgcaatgaagtgaaaaatagcgtactggtcgataacggtgacctgatccagggtagcccgctgg

SEQ ID NO: 102514 - DNA, 75 bp, synthetic construct
  source 1..75: mol_type = other DNA
catgtgctgcacagctactggctaaatcttaagagcgtggtgcgcttttgcgaaaaggtgaaaaaccataaaccg

SEQ ID NO: 102515 - DNA, 75 bp, synthetic construct
  source 1..75: mol_type = other DNA
agggggaggtggatctcttcaagggggtcaacctagatcgggtagggcattatccttacgtggagtcgctgcgca

SEQ ID NO: 102516 - DNA, 75 bp, synthetic construct
  source 1..75: mol_type = other DNA
ctcggaattatggttattagctcaggataaaaaaaggttgcattttattggtcatgtactcctgatgatttactt

SEQ ID NO: 102517 - DNA, 75 bp, synthetic construct
  source 1..75: mol_type = other DNA
cagaatgatttttccggacctgaaagaaaattcagcctccggctcaggaactgtgaatttaacagccagggtggg

SEQ ID NO: 102518 - DNA, 75 bp, synthetic construct
  source 1..75: mol_type = other DNA
ccggcgaaacacttcctgctaatgcaacagagaaacaacgtcaggaatatcttgcgaaactgcgtgacacgcagg

SEQ ID NO: 102519 - DNA, 75 bp, synthetic construct
  source 1..75: mol_type = other DNA
tttacatctgcatacccgtcgtctgggatcggtttatcctggcattgctcccgatgtcgtcgaaatattgcgtaa

SEQ ID NO: 102520 - DNA, 75 bp, synthetic construct
  source 1..75: mol_type = other DNA
agtcctcagtgtcggtgcagatagacgtttatgccgggactgtgacgcaggcgcgtcagatacgtcaggacgccc

SEQ ID NO: 102521 - DNA, 75 bp, synthetic construct
  source 1..75: mol_type = other DNA
tgaacagtgccagggaatggatgttatcagccttgatgacatgcggcggcgaatcaatgccagccctgacgataa

SEQ ID NO: 102522 - DNA, 75 bp, synthetic construct
  source 1..75: mol_type = other DNA
aaagaaagggagaaattgtagggaaaataatcaacgcctcttcgcaggcaggccaggtcggcaatcctgatttgg

SEQ ID NO: 102523 - DNA, 75 bp, synthetic construct
  source 1..75: mol_type = other DNA
tactatgaagatggaccgcagtggtatgacgcttgccgaggcactgggaaatgccgaaggtatgtcgcaggcatt

SEQ ID NO: 102524 - DNA, 75 bp, synthetic construct
  source 1..75: mol_type = other DNA
atacgacagttaaaaaatgataagagtggtaagattgctaatatctatcagttaaatgctcaagatgcctcagca

SEQ ID NO: 102525 - DNA, 75 bp, synthetic construct
  source 1..75: mol_type = other DNA
taatgggaaagatacaaaaatctcactttatgccttaatgcaaaaaggagatttgtcacaaaaccatcttttata

SEQ ID NO: 102526 - DNA, 75 bp, synthetic construct
  source 1..75: mol_type = other DNA
gtgattctgcagatgccagctggtccgaatgggcacaggtgtatacatcaaaagacagcttcaacgcagcaaccg

SEQ ID NO: 102527 - DNA, 75 bp, synthetic construct
  source 1..75: mol_type = other DNA
ttaaaaaaagggttcttgaatatgtttactgtttctccgctgctccatttttagccatgttctacacgttgtcag

SEQ ID NO: 102528 - DNA, 75 bp, synthetic construct
  source 1..75: mol_type = other DNA
atggacatactggtctttattgcggttaaatataattattttactgaatggaggaattattctggttacagaaaa

SEQ ID NO: 102529 - DNA, 75 bp, synthetic construct
  source 1..75: mol_type = other DNA
tttatcgggttgtaccattatccccggtcagggattaaacagtctacggaagaacgtagttgagttgccggacag

SEQ ID NO: 102530 - DNA, 75 bp, synthetic construct
  source 1..75: mol_type = other DNA
agtgaatttattaaagcaattggcctgtcaccggacacccttttatcaaaaggacggatgacggcattaagcgac

SEQ ID NO: 102531 - DNA, 75 bp, synthetic construct
  source 1..75: mol_type = other DNA
caggggcagactaccgggtataccgatccgacgagtggcgcaattgagatgaatggcacgctctatggaacatcc

SEQ ID NO: 102532 - DNA, 75 bp, synthetic construct
  source 1..75: mol_type = other DNA
cgccgcggatgaccgcgatggcgaacattgccctgtttcgtctgtttaatcgcgatctgtttggcaatttcaatg

SEQ ID NO: 102533 - DNA, 75 bp, synthetic construct
  source 1..75: mol_type = other DNA
atgatagccacacagatgtacggtaagccggtgagtgaactgagcgagacagagaagcagactgtttcgacactg

SEQ ID NO: 102534 - DNA, 75 bp, synthetic construct
  source 1..75: mol_type = other DNA
attacggattattcttcggtggcgtttgatatagcgtatatgaaaacgccagttatttattttcagttcgatagc

SEQ ID NO: 102535 - DNA, 75 bp, synthetic construct
  source 1..75: mol_type = other DNA
ggcaggtgacgcaggcgaaagcggaagcacggccaatttacgatatcgccaataaaaaatccctcgcggcggaag

SEQ ID NO: 102536 - DNA, 75 bp, synthetic construct
  source 1..75: mol_type = other DNA
tgaagtgttgcaaaaatccggcggtaaaaccgtcagcgaagaagacgtgctgcaactggtgcagttaagcaaacc

SEQ ID NO: 102537 - DNA, 75 bp, synthetic construct
  source 1..75: mol_type = other DNA
cgctggtgttcagttctcgcgtcgataactacccgctgattttgtgtgaggcgctatcgattggcgtgccggtga

SEQ ID NO: 102538 - DNA, 75 bp, synthetic construct
  source 1..75: mol_type = other DNA
ggtatgcttattgcacttttgaaaaaaggtagcgaacgtgcacatgacgtaactcagaagacattaagggaaata

SEQ ID NO: 102539 - DNA, 75 bp, synthetic construct
  source 1..75: mol_type = other DNA
caacatcaacatttactttcatgtcggtgctgttcagaaacggagagctgaatggcggtgcatttagtgctacag

SEQ ID NO: 102540 - DNA, 75 bp, synthetic construct
  source 1..75: mol_type = other DNA
tgttattactatgatcctgacggcaatattctgcgggaagcagcgccggacgggtggagaaatttgaatacaacg

SEQ ID NO: 102541 - DNA, 75 bp, synthetic construct
  source 1..75: mol_type = other DNA
cagaccgggcgcttcagtgaggacggggagcagaatgaacggtataaaaacggggctggggatcacgccgggtga

SEQ ID NO: 102542 - DNA, 75 bp, synthetic construct
  source 1..75: mol_type = other DNA
ggtgctgttcagaaacggagagctgaatggcggtgcatttagtgctacagccagcatgagtatgatatataacta

SEQ ID NO: 102543 - DNA, 75 bp, synthetic construct
  source 1..75: mol_type = other DNA
gaaacttgccggattgaagccggtgataaacaaatgacggtcaatatggggcaaatcagcagtaaccggtttcat

SEQ ID NO: 102544 - DNA, 75 bp, synthetic construct
  source 1..75: mol_type = other DNA
tcggccggggatctatactgcaaagctgaataacggaacatcgatcacgttgcggaatttatcgtcgtcccaaga

SEQ ID NO: 102545 - DNA, 75 bp, synthetic construct
  source 1..75: mol_type = other DNA
ccgattacatgtcggcgaaaggattaaaagccggagatattcacccggtctataaggcattaaatacgctggact

SEQ ID NO: 102546 - DNA, 75 bp, synthetic construct
  source 1..75: mol_type = other DNA
ttatgaccgaattgcaaaaatgcagcgcatggaagcggtctggcaaaaaaaagccccgctggctgatatctccac

SEQ ID NO: 102547 - DNA, 75 bp, synthetic construct
  source 1..75: mol_type = other DNA
gtggggcgatcatcttggggtggtcgacttacaactcagtaatgacagcggtaaatggcaggtgacgcaggcgaa

SEQ ID NO: 102548 - DNA, 75 bp, synthetic construct
  source 1..75: mol_type = other DNA
ggtcatataatcctgatgatttacttgttgagttagttttgtctcaggaacaaatatacaatgagcagaccccat

SEQ ID NO: 102549 - DNA, 75 bp, synthetic construct
  source 1..75: mol_type = other DNA
gaaggctcacgggaacagtgtgctgtacgtgatccgagtcgcgatggcgcccggggaccggggcatgtgctgaat

SEQ ID NO: 102550 - DNA, 75 bp, synthetic construct
  source 1..75: mol_type = other DNA
gaactaggcagttatcacaaccccatcatcaggggtactatgaatgccatataaataaggaccttctgaaagaat

SEQ ID NO: 102551 - DNA, 75 bp, synthetic construct
  source 1..75: mol_type = other DNA
cttccattcataattcttagaaaagttagagttccacctcttttagcattgtgtatgatcgtattttgtataatc

SEQ ID NO: 102552 - DNA, 75 bp, synthetic construct
  source 1..75: mol_type = other DNA
gctctgggtgccgggattggggctacggtagatgctggcgtggcaggccttacatcgctggctgaatggggcgtt

SEQ ID NO: 102553 - DNA, 75 bp, synthetic construct
  source 1..75: mol_type = other DNA
ccggattcacgcaggagggggctatccgctttcgtcagggtgagcaggagaaaattgtcgacccgcagtccatga

SEQ ID NO: 102554 - DNA, 75 bp, synthetic construct
  source 1..75: mol_type = other DNA
ttaaccgcatcaaaacctggcaggacaacggcggagcgcttgccgagtgcgccattctctaccgcagcaacgccc

SEQ ID NO: 102555 - DNA, 75 bp, synthetic construct
  source 1..75: mol_type = other DNA
ctcagctggccggagcgggtgccgggggcggacgaggtgctgccgccggagccgcccgcataccgggtgctgacg

SEQ ID NO: 102556 - DNA, 75 bp, synthetic construct
  source 1..75: mol_type = other DNA
ggtgtccagccagacgctaaccaacctgcgcctgattgataacgtctccgatacgctgatcctgcgtccgctgat

SEQ ID NO: 102557 - DNA, 75 bp, synthetic construct
  source 1..75: mol_type = other DNA
gggggggggggggggggggggggggggcgttcactgtactttcaacaggttaactccccctttctgagaggaaac

SEQ ID NO: 102558 - DNA, 75 bp, synthetic construct
  source 1..75: mol_type = other DNA
gaaatggaagttcgtgaacttctgtctcagtacgacttcccggcgacgacactccgatcgttcgtggttctgctc

SEQ ID NO: 102559 - DNA, 75 bp, synthetic construct
  source 1..75: mol_type = other DNA
caaagaacgcaatgaagctaaagcgcttggggcaaaatgggatcgaaccgaacagacctggtttgtaccaaaagg

SEQ ID NO: 102560 - DNA, 75 bp, synthetic construct
  source 1..75: mol_type = other DNA
tcaacaacctgacggttcgagtattcgttatgagggaaactcgttcgaaagaaaagataatagctcgttgctcct

SEQ ID NO: 102561 - DNA, 75 bp, synthetic construct
  source 1..75: mol_type = other DNA
aaagtttttcccgcccccgtaaattcagacctgggactgatgacttccttcatcgaagcatacctggacgctgac

SEQ ID NO: 102562 - DNA, 75 bp, synthetic construct
  source 1..75: mol_type = other DNA
agaacgaaaaatagctaaagataaaaagataacccttgtatttataggtaatttatattctttgcaaaatatgga

SEQ ID NO: 102563 - DNA, 75 bp, synthetic construct
  source 1..75: mol_type = other DNA
aaagccatggcgcagaaatttatcgaatttatcaaccagccgcagtacgtcaaaacgcgctatatcgcgacgcga

SEQ ID NO: 102564 - DNA, 75 bp, synthetic construct
  source 1..75: mol_type = other DNA
gcgtaaagccagctggcagagcacacgtctgaactcggatgccttacccgtggtgcgtaaagccagctggcactg

SEQ ID NO: 102565 - DNA, 75 bp, synthetic construct
  source 1..75: mol_type = other DNA
gcaaggatacgatagtaaatggattgaattacagcttgcacatgtagataaaaattcgatacgtggtatttataa

SEQ ID NO: 102566 - DNA, 75 bp, synthetic construct
  source 1..75: mol_type = other DNA
agtggggtagatgtaaagtgcttaaacattaattccccaattaagtatgccaccagtttattgaagctttataag

SEQ ID NO: 102567 - DNA, 75 bp, synthetic construct
  source 1..75: mol_type = other DNA
atcaggtttgtgctaaagatccgcaaatgctgttaattaccgcaattgatgacaccatgcgtgccatcggcaaaa

SEQ ID NO: 102568 - DNA, 75 bp, synthetic construct
  source 1..75: mol_type = other DNA
ctacacactgaacgatggacaaggcctgtcattactcatcaatccagacggctcaaagggctggcgcttccgctt

SEQ ID NO: 102569 - DNA, 75 bp, synthetic construct
  source 1..75: mol_type = other DNA
tcgcaccgtcgatacccacattaaaacgctgcgtgccaagctgcgcgccatcaaccccgatctttcaccgattaa

SEQ ID NO: 102570 - DNA, 75 bp, synthetic construct
  source 1..75: mol_type = other DNA
aaaccgcaaagccaaaagaaaagccttataagctggctgatggcggcggtatgtatctgctgattaacgctaatg

SEQ ID NO: 102571 - DNA, 75 bp, synthetic construct
  source 1..75: mol_type = other DNA
cgctatgcgatcataactggtcgcgctgaatacaatccagcgcctgatttggctatcgctctggccgttcctaag

SEQ ID NO: 102572 - DNA, 75 bp, synthetic construct
  source 1..75: mol_type = other DNA
tatggcgtggtcttttgtgcaggaacaggtacagcctggtgttgataacacctggcgtgaatcccgtagagatat

SEQ ID NO: 102573 - DNA, 75 bp, synthetic construct
  source 1..75: mol_type = other DNA
ggaccttgaagcgtataccggtagccttatcaccaaaaatgctacaaagatagtcatgttaactggtgtaagaac

SEQ ID NO: 102574 - DNA, 75 bp, synthetic construct
  source 1..75: mol_type = other DNA
cgcacgtactgcacaggccgcaccttatgcccgctacacctgccacctttgcggcagtgcactcagataccaccc

SEQ ID NO: 102575 - DNA, 75 bp, synthetic construct
  source 1..75: mol_type = other DNA
atgcaggttgagccggggcgttatcgtgtgaccctgtgcgtggaaggtcgccagccggcatatgccggagagatt

SEQ ID NO: 102576 - DNA, 75 bp, synthetic construct
  source 1..75: mol_type = other DNA
ccagccaggggaagctattgtgatcaccactgaaagcggtatgactattcgaatccacaagccaaaaggggcgga

SEQ ID NO: 102577 - DNA, 75 bp, synthetic construct
  source 1..75: mol_type = other DNA
cagggaccgaaaggagatacaggagccgcaggcccggcagggccacagggaccaaaaggggatacaggagccaca

SEQ ID NO: 102578 - DNA, 75 bp, synthetic construct
  source 1..75: mol_type = other DNA
taaagccagggcggctgcaagtgaaaagctgggctacccgattacgggaacgtttcacgatttaaaagcgaaggg

SEQ ID NO: 102579 - DNA, 75 bp, synthetic construct
  source 1..75: mol_type = other DNA
cgcaatgcgcttgatatgtgggtggagcggttggagatactggcgggaacacatgaaaacgtaaccacgctacca

SEQ ID NO: 102580 - DNA, 75 bp, synthetic construct
  source 1..75: mol_type = other DNA
caccgggttctgtatttttgccctcagtaagctggcaatggcgttatccagtacgcttgattccatccctttatc

SEQ ID NO: 102581 - DNA, 75 bp, synthetic construct
  source 1..75: mol_type = other DNA
ggctgttacacagcagttaaaaatgaggtgtcaaaaggaaaacttattgacaccgggttctgtatttttgccctc

SEQ ID NO: 102582 - DNA, 75 bp, synthetic construct
  source 1..75: mol_type = other DNA
cgatacacaagaacgctatcttcttatatatgaaatgcatactcacaggagtacggatattattgctaataaaat

SEQ ID NO: 102583 - DNA, 75 bp, synthetic construct
  source 1..75: mol_type = other DNA
taagcggtaatattatctcaaaaggattaggtttatttagagagataattgttgctgccttatttggcactggct

SEQ ID NO: 102584 - DNA, 75 bp, synthetic construct
  source 1..75: mol_type = other DNA
tgacagatcgtcagtgcaaaacagccaagccacgagacaaagcttataagctgtctgatggcggtggtctttatc

SEQ ID NO: 102585 - DNA, 75 bp, synthetic construct
  source 1..75: mol_type = other DNA
cctgtcgacttacgatcgactctggtcgaatttgccgtttattcgtccgatagcgaccatcaccgcagattcgct

SEQ ID NO: 102586 - DNA, 75 bp, synthetic construct
  source 1..75: mol_type = other DNA
ttttaaagatgataatggtgatgaaataatgcagttttacacgataaattcagaggggaatgggagtggtttatc

SEQ ID NO: 102587 - DNA, 75 bp, synthetic construct
  source 1..75: mol_type = other DNA
aggtcaaggatggcttggagatgacatcagcctacgtgattgcgatgtaatcagatggatgccgctaccagaacc

SEQ ID NO: 102588 - DNA, 75 bp, synthetic construct
  source 1..75: mol_type = other DNA
ttcgcgaatcagccgcacaccatccggcgctaacgctggcggcggtattcttaccgatcgcggcgaaggttttgt

SEQ ID NO: 102589 - DNA, 75 bp, synthetic construct
  source 1..75: mol_type = other DNA
gaccttgatcgggctgagtggattatccctaaaaaaagagagcctatcgatggtgtgaggttttccacccgtggc

SEQ ID NO: 102590 - DNA, 75 bp, synthetic construct
  source 1..75: mol_type = other DNA
tggtggctgaaacagtcacgcgaagcacaatccgccattcttaccaatgaaatcccgttggatgacgcgctgttg

SEQ ID NO: 102591 - DNA, 75 bp, synthetic construct
  source 1..75: mol_type = other DNA
atgtacgcaaaatcctttttcgctcttgatagcaacggacgtctgacgggcgcccgtactggacaggccgcacct

SEQ ID NO: 102592 - DNA, 75 bp, synthetic construct
  source 1..75: mol_type = other DNA
atgtacgcaaaatcctttatcgctcttgattgcaacggacgtctgacgggcgcccgtactggacaggccgcacct

SEQ ID NO: 102593 - DNA, 75 bp, synthetic construct
  source 1..75: mol_type = other DNA
atgagcactgataaagaagaatttgcactatattgcgaagcaaaaaatgacaaagtcagaaaacgcctaggaatt

SEQ ID NO: 102594 - DNA, 75 bp, synthetic construct
  source 1..75: mol_type = other DNA
gagtacaaaagttatatgtagtgaagtagacgatgatctttatccctcgcatgttattgcttctgggatgttaat

SEQ ID NO: 102595 - DNA, 75 bp, synthetic construct
  source 1..75: mol_type = other DNA
tttcgaccttgataagaaaacgttcacgttacttaacggcattattgcgcgtaatgaggcgctggagtggggcgt

SEQ ID NO: 102596 - DNA, 75 bp, synthetic construct
  source 1..75: mol_type = other DNA
gtagtgaagaggtggatcgcctgcttgggctggagattggcgctgacgactacgtggctaaaccgttttcacctc

SEQ ID NO: 102597 - DNA, 75 bp, synthetic construct
  source 1..75: mol_type = other DNA
caatgtcaccacgattattatggggagctgtactgcacacactgccagaccgggcgattcagtgaggaggaggta

SEQ ID NO: 102598 - DNA, 75 bp, synthetic construct
  source 1..75: mol_type = other DNA
tgcgctatatgagtttcgaccacgtttctccacccgaaatgctgttacgccagcatcttgattattttctctgcc

SEQ ID NO: 102599 - DNA, 75 bp, synthetic construct
  source 1..75: mol_type = other DNA
ttgccgataccgaccatgtgctggtcatgatggatatgggtagcgcattattgagtgctgaaactgcgctggaat

SEQ ID NO: 102600 - DNA, 75 bp, synthetic construct
  source 1..75: mol_type = other DNA
ctgatgagatacctgattttctgcgtgccttagagggatataccgggagtaagcttgtccagatagccacgaaat

SEQ ID NO: 102601 - DNA, 75 bp, synthetic construct
  source 1..75: mol_type = other DNA
accgactccctgagcagcgttttctctggcctggtcggtgcggctccggctgcggtatacattgagtctgcggcg

SEQ ID NO: 102602 - DNA, 75 bp, synthetic construct
  source 1..75: mol_type = other DNA
atacaatgtcgacaatactacatgaacaaggttttgatagtaaatggattgaaatgcaactagctcatgttgata

SEQ ID NO: 102603 - DNA, 75 bp, synthetic construct
  source 1..75: mol_type = other DNA
atggccggcgtgggattggcggacagcttcaatatggtcattatggctttttttgctgctatcgatcttggtact

SEQ ID NO: 102604 - DNA, 75 bp, synthetic construct
  source 1..75: mol_type = other DNA
tgggtaaaaaccgcgattacttgctctccactgctcacaatgcaatggattatattcgcaagaatggcggtaacg

SEQ ID NO: 102605 - DNA, 75 bp, synthetic construct
  source 1..75: mol_type = other DNA
aaagtcatagctaaaacgctgaataactggtggaatcaggctaaacgcgcagccgagcaaaaagttggcgttccg

SEQ ID NO: 102606 - DNA, 75 bp, synthetic construct
  source 1..75: mol_type = other DNA
atgggctatcgcttacaggggcaaattttaaaacgcaccaccgatcgcgaactgttatctcacggtttgttaccg

SEQ ID NO: 102607 - DNA, 75 bp, synthetic construct
  source 1..75: mol_type = other DNA
acgataccgaaatctttaagcgcattcagatcctgcgtgatatgggcgtgggcttatcggtagatgattttggta

SEQ ID NO: 102608 - DNA, 75 bp, synthetic construct
  source 1..75: mol_type = other DNA
tcccatggccgacgttactttcggtctgcattcatggtgctgttgtggcgggtctgctctatacctcggtacatc

SEQ ID NO: 102609 - DNA, 75 bp, synthetic construct
  source 1..75: mol_type = other DNA
tgctggaatctgcatatccagggacaggctgactattcaagaaaattatggagcatacttatgtttcaatcatgg

SEQ ID NO: 102610 - DNA, 75 bp, synthetic construct
  source 1..75: mol_type = other DNA
aaatctggtgaggtaagtggtaatgactccaacttactgatagtgttttatgttcagataatgcccgatgacttt

SEQ ID NO: 102611 - DNA, 75 bp, synthetic construct
  source 1..75: mol_type = other DNA
aatatgcttcttccggtttcaggtcagattctgcctgttcgctggctggcgcaacacaacagcgaaaaaccggtc

SEQ ID NO: 102612 - DNA, 75 bp, synthetic construct
  source 1..75: mol_type = other DNA
caatgtcaccacgattattatggggagcagtactgcacacactgccagaccgggcgtttcagtgaggaggaggta

SEQ ID NO: 102613 - DNA, 75 bp, synthetic construct
  source 1..75: mol_type = other DNA
cgcttgattgatcgtctgcagcaattcgttccggatgccttacccgtggtgcgtaaagccagctggcactgcaga

SEQ ID NO: 102614 - DNA, 75 bp, synthetic construct
  source 1..75: mol_type = other DNA
gttagcggttttcggcgatgcagaagcaaaggccattaaacctgaacacgtccggcgctacatggatgcacgtgg

SEQ ID NO: 102615 - DNA, 75 bp, synthetic construct
  source 1..75: mol_type = other DNA
tgtcctgactgtggcgcggtaatgggcgacgcaacataccaggaaacattcgatgaaaaaaatcaggctgaagtt

SEQ ID NO: 102616 - DNA, 75 bp, synthetic construct
  source 1..75: mol_type = other DNA
ccttcatcccgcacacgctaaacgcattgaggaaattatcgctgaaaataaaccgccatttactgtgtttttcag

SEQ ID NO: 102617 - DNA, 75 bp, synthetic construct
  source 1..75: mol_type = other DNA
caatgtcaccacgattattatggggagccgtactgcacacactgccagaccgggcgtttcagtgaggaggcggta

SEQ ID NO: 102618 - DNA, 75 bp, synthetic construct
  source 1..75: mol_type = other DNA
caatgtcaccacgattattatggggagctgtactgcacacactgccagaccgggcgcttcagtgaggaggcggta

SEQ ID NO: 102619 - DNA, 75 bp, synthetic construct
  source 1..75: mol_type = other DNA
caatgtcaccacgattattatggggagctgtactgcacacactgccagaccgggcggttcagtgaggagggggta

SEQ ID NO: 102620 - DNA, 75 bp, synthetic construct
  source 1..75: mol_type = other DNA
ccgctgctcggtgcaaaggtccttcccggcgagacagacatcgccctgcccggcccgctgccgttcatcctctcc

SEQ ID NO: 102621 - DNA, 75 bp, synthetic construct
  source 1..75: mol_type = other DNA
aaaccgctgtagggaaactggctaacaattgggatgatacgcttgttaaggtcttctcaggttcacaggatgagc

SEQ ID NO: 102622 - DNA, 75 bp, synthetic construct
  source 1..75: mol_type = other DNA
aacttgttcgcaccttccctaaaatggagaaaaaaatcactggatataccaccgttgatatatcccaatggcatc

SEQ ID NO: 102623 - DNA, 75 bp, synthetic construct
  source 1..75: mol_type = other DNA
agattcaggctgaagagcttcgtggacagttgggtgaccgtatggctggtgcatttaagctattcgctgaagcat

SEQ ID NO: 102624 - DNA, 75 bp, synthetic construct
  source 1..75: mol_type = other DNA
gatgaaaaattcgttcaggtgtggggtaatggcgcaacgttcgataacgcaattttgcgcacctcatacgaacgt

SEQ ID NO: 102625 - DNA, 75 bp, synthetic construct
  source 1..75: mol_type = other DNA
atttgaatgttggtggggcggagctcatgcttcagcgtcttattaagcataccgctgataataatgttgaacatg

SEQ ID NO: 102626 - DNA, 75 bp, synthetic construct
  source 1..75: mol_type = other DNA
attctcgaagtcgaagacgtgccgtttaccaacatgcacgatattttcgaaaaagcgttggttcagtatcgcgat

SEQ ID NO: 102627 - DNA, 75 bp, synthetic construct
  source 1..75: mol_type = other DNA
ttccagttatatgctgatgcgccgcggttgccgtgtgcattactgcttctttaacctcggcggcgcggcacacga

SEQ ID NO: 102628 - DNA, 75 bp, synthetic construct
  source 1..75: mol_type = other DNA
atcattctcgatgtcggcctgcctgatattagcggtttcgaactgtgtcgccagttgctggcgctccatcctgcg

SEQ ID NO: 102629 - DNA, 75 bp, synthetic construct
  source 1..75: mol_type = other DNA
ttcatcgcttttctggattatttggttcccggttattttctggatgctaagcctggcaacgacattggtatcatt

SEQ ID NO: 102630 - DNA, 75 bp, synthetic construct
  source 1..75: mol_type = other DNA
atgtccattctgtggattgttggcggagtttatttctgggcctatcgtgaacgccattggccgtggggagaaaac

SEQ ID NO: 102631 - DNA, 75 bp, synthetic construct
  source 1..75: mol_type = other DNA
ataagataagatatgatctgttaggtaaagcaatgcaaactgctgggattgatagtggtatgacaagttcatcag

SEQ ID NO: 102632 - DNA, 75 bp, synthetic construct
  source 1..75: mol_type = other DNA
cctcacatccactaatgattgagggggaaaaatcaccattttccaatgaattcgatgcctatattactgagtata

SEQ ID NO: 102633 - DNA, 75 bp, synthetic construct
  source 1..75: mol_type = other DNA
agagatggatgcacgacacctctatgtcgctatgacgcggggatcttcgcggctggttgtgtgctcgctaactcc

SEQ ID NO: 102634 - DNA, 75 bp, synthetic construct
  source 1..75: mol_type = other DNA
gaatattgcaagattcaatcatccagagttaaacaacattaagcaagattcagcattaacgagtgcagatattca

SEQ ID NO: 102635 - DNA, 75 bp, synthetic construct
  source 1..75: mol_type = other DNA
gggaagatgcgcaggacacctacgatcgcaccgtcgatacccacattaaaacgttgcgtgccaagctgcgcgcca

SEQ ID NO: 102636 - DNA, 75 bp, synthetic construct
  source 1..75: mol_type = other DNA
acaaaattgagaaggatgtaataacaaatgcaggaccacaaaatttcttaactttattcaaaaatgcagctttcg

SEQ ID NO: 102637 - DNA, 75 bp, synthetic construct
  source 1..75: mol_type = other DNA
attacctgaaagccgtggcctgggcgcagctttttgccagccttaaccgcgatgcgatgatggaaaacgtggtaa

SEQ ID NO: 102638 - DNA, 75 bp, synthetic construct
  source 1..75: mol_type = other DNA
tattgatgaatataagtctgctctggaaataattaaagatgatatagaatataaaaatatagcaaaaaaagctcg

SEQ ID NO: 102639 - DNA, 75 bp, synthetic construct
  source 1..75: mol_type = other DNA
tcgagtatctatctttgggcgaacaatatctgttcattcaccattacgtcgatattatcttgtaaggaatagctt

SEQ ID NO: 102640 - DNA, 75 bp, synthetic construct
  source 1..75: mol_type = other DNA
cccgctttccttatcctgtaattggtggagatcgtcttagaatctataaaatttgcgaagaattatcaaagcgat

SEQ ID NO: 102641 - DNA, 75 bp, synthetic construct
  source 1..75: mol_type = other DNA
ggacagcgaatatgcgcggatgtggggccacatgcacggcattattgatgctggcagtttatataaacgaccgct

SEQ ID NO: 102642 - DNA, 75 bp, synthetic construct
  source 1..75: mol_type = other DNA
gggtcgttgtcattgacgggtaaaggccatgccacggatgtcgccatcatcatggggctggcgggaaacagtcca

SEQ ID NO: 102643 - DNA, 75 bp, synthetic construct
  source 1..75: mol_type = other DNA
tctttttgttgagaataaatttaggtggtctcaacaattatcaacgcttaccgataatatcgaggagttattaaa

SEQ ID NO: 102644 - DNA, 75 bp, synthetic construct
  source 1..75: mol_type = other DNA
ttacgctgctaatgacactccccgcttatgcgaagttaacggcccatgaagaagcccgcatcaacgccatgctgg

SEQ ID NO: 102645 - DNA, 75 bp, synthetic construct
  source 1..75: mol_type = other DNA
attgttttcattttactttgtgctgctgcacttatttcatttctcacattgccttggggctttaaagatggatat

SEQ ID NO: 102646 - DNA, 75 bp, synthetic construct
  source 1..75: mol_type = other DNA
tgtattaccctgaaaaatctactacaactgcatatcaagacacccccggcagacgaggaaaatactatccttctt

SEQ ID NO: 102647 - DNA, 75 bp, synthetic construct
  source 1..75: mol_type = other DNA
agagaaatacagttgattaaacgtctgcagcaattcgtaccggatgccttacccgtggtgcgtaaagccagctgg

SEQ ID NO: 102648 - DNA, 75 bp, synthetic construct
  source 1..75: mol_type = other DNA
cagtttattgataaggtagcctcgtcgtcatcgattaccgggaagccgtatatcgtgaagatgcccggtaagagc

SEQ ID NO: 102649 - DNA, 75 bp, synthetic construct
  source 1..75: mol_type = other DNA
gtgaagaaaatcatttgtctggtcattacgctgttaatggcacttcccgcttacgcgaagttaacagcccatgaa

SEQ ID NO: 102650 - DNA, 75 bp, synthetic construct
  source 1..75: mol_type = other DNA
tatcgtgaagatgcccggtaagagcgatgagaacgcacagccttttttacatgcgctgcttgcgcagacggataa

SEQ ID NO: 102651 - DNA, 75 bp, synthetic construct
  source 1..75: mol_type = other DNA
gatggcattctgtatctgacgaccagggggacattaagtactcaacccggtagttcattgcacagaagctctgat

SEQ ID NO: 102652 - DNA, 75 bp, synthetic construct
  source 1..75: mol_type = other DNA
accacagggggcggttccaccgtaccggacggtggaggagtggcgggaatggcagcttgctgaaggacgaaaacg

SEQ ID NO: 102653 - DNA, 75 bp, synthetic construct
  source 1..75: mol_type = other DNA
ccatctcttggagtgcctactattaatattggttctagacaggctggacgagaacgaggaaagtccgtgattgat

SEQ ID NO: 102654 - DNA, 75 bp, synthetic construct
  source 1..75: mol_type = other DNA
gttactctgccagaattccagcaactccccgctcaacagcaggaagttttatgggcggcggcgttattgcatgat

SEQ ID NO: 102655 - DNA, 75 bp, synthetic construct
  source 1..75: mol_type = other DNA
atgatggaaaacgtagtaacagcgttgcagagcgttacgcagaaaacggtaagacaacagcaaacgctggcgatg

SEQ ID NO: 102656 - DNA, 75 bp, synthetic construct
  source 1..75: mol_type = other DNA
gatgcagtacatcaacgaggacggcacaaaacgttttgccaagaacgcccgtaaagagggatgtttccatgtcgt

SEQ ID NO: 102657 - DNA, 75 bp, synthetic construct
  source 1..75: mol_type = other DNA
ttgaaagagaagaaggtattgataatttaaacattgtctctcacgatctcgaagtagaagatgcagggttaatta

SEQ ID NO: 102658 - DNA, 75 bp, synthetic construct
  source 1..75: mol_type = other DNA
ccggagtaacattaacacctgccggtcaattgttactctctcgttccgaatccattacccgtgaaatgaaaaata

SEQ ID NO: 102659 - DNA, 75 bp, synthetic construct
  source 1..75: mol_type = other DNA
tatcgctcagatgtcaagattattttaaaatattctgaagggaataattatatattctgtagtggtaatcaagta

SEQ ID NO: 102660 - DNA, 75 bp, synthetic construct
  source 1..75: mol_type = other DNA
caaagatggatatgtgtgggatgagcacaagtatatgtggctcacatatttcctatcaaggatcggaagcttcgt

SEQ ID NO: 102661 - DNA, 75 bp, synthetic construct
  source 1..75: mol_type = other DNA
aggctgacgacggtacagaccgacaccacgcgtatccagacggtataccagccgggaagcttcacgccgctcatc

SEQ ID NO: 102662 - DNA, 75 bp, synthetic construct
  source 1..75: mol_type = other DNA
atccgggaaagtgacggtgaatgatattaccgaaaccgtgcgcaaatacgtgcctgaaatgcgcgagaaaggtgc

SEQ ID NO: 102663 - DNA, 75 bp, synthetic construct
  source 1..75: mol_type = other DNA
ctgatgatgatgagcgatgttacgccaatctatttccgcccgacccgtaacgcttacggtattcttggtggtatc

SEQ ID NO: 102664 - DNA, 75 bp, synthetic construct
  source 1..75: mol_type = other DNA
catagcgaacgccgaaaagcgcgagtttatacagggctatcgcgaccggagaacgcttagcgatttactggaatt

SEQ ID NO: 102665 - DNA, 75 bp, synthetic construct
  source 1..75: mol_type = other DNA
ctacggatgcacagggctatgcaacggttgagattgaacaaccccagggcgtgggcttagggacgccgctgaata

SEQ ID NO: 102666 - DNA, 75 bp, synthetic construct
  source 1..75: mol_type = other DNA
atgaagaaaatcatttgtctggtcattacgctgctaatgacactccccgtttacgcgaagttaactgcccatgaa

SEQ ID NO: 102667 - DNA, 75 bp, synthetic construct
  source 1..75: mol_type = other DNA
tttttaccgttgtcaccagccctgacactaacaaggcaaaaatgtgggggcatatgccagaaacactcacagcgg

SEQ ID NO: 102668 - DNA, 75 bp, synthetic construct
  source 1..75: mol_type = other DNA
gaaagtatagcaacgataactcctgtgtcgtatatgccgatgcgctcattattaattcaaacacgggtgaatata

SEQ ID NO: 102669 - DNA, 75 bp, synthetic construct
  source 1..75: mol_type = other DNA
gccttctcctgagttagtgcaggaattgcaaatgctggagaaggcaacgttgctgcatttgaaggacgagatatt

SEQ ID NO: 102670 - DNA, 75 bp, synthetic construct
  source 1..75: mol_type = other DNA
aaacgacagggctcgtgaagatgagccttttgataattcaatcatagaactagtaaaaaaatccattttaatatt

SEQ ID NO: 102671 - DNA, 75 bp, synthetic construct
  source 1..75: mol_type = other DNA
tattcgtatattaacacaatccaggaaaaatataaccttagtctaataccgttcaatcaagatgtatcagaaata

SEQ ID NO: 102672 - DNA, 75 bp, synthetic construct
  source 1..75: mol_type = other DNA
ccgaaagctataactatatccacaagtcgggaactttgcatgaagcgccaagccctatcattccgctaaattggt

SEQ ID NO: 102673 - DNA, 75 bp, synthetic construct
  source 1..75: mol_type = other DNA
atgaagaaaatcatttgtctggtcattacactactaatgacactccccgtttacgcgaagttaactgcccatgaa

SEQ ID NO: 102674 - DNA, 75 bp, synthetic construct
  source 1..75: mol_type = other DNA
tggggcgctgtggctgtgcttgtcgctggatgagcagcggcgtaaaacgccccctcaggaaagcgactataccca

SEQ ID NO: 102675 - DNA, 75 bp, synthetic construct
  source 1..75: mol_type = other DNA
cgccctttgtacagagtcgtgatcaacaaaagcggcaggatgctgtggtgcaactggcacagcaatacgggctct

SEQ ID NO: 102676 - DNA, 75 bp, synthetic construct
  source 1..75: mol_type = other DNA
aggggtacatgacgttagccgggcatcaagcctttcaacagcgaaagcacagattgaactagtagcgcaggaaat

SEQ ID NO: 102677 - DNA, 75 bp, synthetic construct
  source 1..75: mol_type = other DNA
acagtaaacaagcagaaactgttgctcctaaattcgttttcttaggggaaacctacgagtttgttgaaacttttt

SEQ ID NO: 102678 - DNA, 75 bp, synthetic construct
  source 1..75: mol_type = other DNA
tattgtgaagatgcccggtaagagcgatgaaaatgcgcaaccttttttacatgcgctgattgcgcagacggataa

SEQ ID NO: 102679 - DNA, 75 bp, synthetic construct
  source 1..75: mol_type = other DNA
acagccccaaagtttgatctgtttggtgaaacttacacgtttgttaagactttctctggcactgtcattaattcc

SEQ ID NO: 102680 - DNA, 75 bp, synthetic construct
  source 1..75: mol_type = other DNA
tgaagtcactttccaaaagcatgtccggtgccggaggatggcttggtacagtcggcgactggctttccggtgcag

SEQ ID NO: 102681 - DNA, 75 bp, synthetic construct
  source 1..75: mol_type = other DNA
ggctggtccgatctatacgcccggctggagtcggtgtaacgttgccggatgcggtgctgcgcaccttatttggcc

SEQ ID NO: 102682 - DNA, 75 bp, synthetic construct
  source 1..75: mol_type = other DNA
atgtacgcaaaatcctttttcgctcttgatggcaacggacgtctgacgggcgcccgtactgaacaggccgcacct

SEQ ID NO: 102683 - DNA, 75 bp, synthetic construct
  source 1..75: mol_type = other DNA
ttaccgatcgcggcgaaggtttcgtccacgatctgacgtcactggagcgcgatgtggccacaggtgtactggctc

SEQ ID NO: 102684 - DNA, 75 bp, synthetic construct
  source 1..75: mol_type = other DNA
acgggctggtatcaaatatttccgatgcactggccggaaatgttgtggactggcgaaactgggggagttcaattt

SEQ ID NO: 102685 - DNA, 75 bp, synthetic construct
  source 1..75: mol_type = other DNA
atcgcatgacctacaacctggtatcaatgttttccgaccttgccatccttgggctggtggaccttaacgaggtta

SEQ ID NO: 102686 - DNA, 75 bp, synthetic construct
  source 1..75: mol_type = other DNA
tgtatttctgcaccgcggtatgtgtcttatatctggtgagtggcggttataaaatcatccgtaactacatccgta

SEQ ID NO: 102687 - DNA, 75 bp, synthetic construct
  source 1..75: mol_type = other DNA
ttgacgagcagaaaagtaagattaaatccttacaggaaaaaattgctggctatcagtacgtgctggcaaacccgg

SEQ ID NO: 102688 - DNA, 75 bp, synthetic construct
  source 1..75: mol_type = other DNA
cgggcgcaccgatgaagagaaacaggccgacgctgatcggataaacctggcccttggcaacatcacggaggaaga

SEQ ID NO: 102689 - DNA, 75 bp, synthetic construct
  source 1..75: mol_type = other DNA
ggcgtcatattgaggcggaagaagtgttgcgtatgctgcgcgatacgtcggaaaaagcgcgagaagaactcaacg

SEQ ID NO: 102690 - DNA, 75 bp, synthetic construct
  source 1..75: mol_type = other DNA
cagactactcaccgagtcagttctgatgaaatccctgagtcagtgggtccgtaacaatggcatcatcagttacga

SEQ ID NO: 102691 - DNA, 75 bp, synthetic construct
  source 1..75: mol_type = other DNA
taatgaggtaatggctgaggtacagcggctgactaacccgcagattttcgatgcggaaacagctcaactctatca

SEQ ID NO: 102692 - DNA, 75 bp, synthetic construct
  source 1..75: mol_type = other DNA
cagcctgtttcagttgttgtgcgtgacaggcgactggtcgcaggcgctgcaacagatccagctgtgcgcccggat

SEQ ID NO: 102693 - DNA, 75 bp, synthetic construct
  source 1..75: mol_type = other DNA
catatacttatcgattacttagacaatgcgaaagttgacctctctccggtcctgatatcgatgttagaagatttt

SEQ ID NO: 102694 - DNA, 75 bp, synthetic construct
  source 1..75: mol_type = other DNA
aacgtactgagggtttccgcaaagcggaagcgtcgctgaggcttgaaggcatggaccccgccggaacgccgctgt

SEQ ID NO: 102695 - DNA, 75 bp, synthetic construct
  source 1..75: mol_type = other DNA
gcttcaatggtgggcagattatctggacgccaatcgagaaatacacataagcccttacgagttcggaaggagaac

SEQ ID NO: 102696 - DNA, 75 bp, synthetic construct
  source 1..75: mol_type = other DNA
agtctcaatgcggcccttcttgataccgggtcggcctacggtctcgccctgagttgcctccgggcacgcgggggg

SEQ ID NO: 102697 - DNA, 75 bp, synthetic construct
  source 1..75: mol_type = other DNA
cgggcctggtggacttcgcggaactgctgctacgcgcgcacgagctgtggcttaacaagccgcatattctgcaac

SEQ ID NO: 102698 - DNA, 75 bp, synthetic construct
  source 1..75: mol_type = other DNA
ttcgggaaggtgttctgcgtgaggatgaagatatctccgtacatgcggccagaaaacgctggtatctgcagcgca

SEQ ID NO: 102699 - DNA, 75 bp, synthetic construct
  source 1..75: mol_type = other DNA
ttcaaagctacggtaatccggtggagcagacctggcagaaggtgtatcaggcgtatcaggaagcgtgtgaccgtg

SEQ ID NO: 102700 - DNA, 75 bp, synthetic construct
  source 1..75: mol_type = other DNA
aacaggaagtggaaaaagtctgcaccgcctgcggtcagaccggcggcggcaactgccctgattgtggcgcggtga

SEQ ID NO: 102701 - DNA, 75 bp, synthetic construct
  source 1..75: mol_type = other DNA
gacggtggctaactttggtttctcgtctctgtggccactggcgaaactggtgctgctggtgcatttcgccattct

SEQ ID NO: 102702 - DNA, 75 bp, synthetic construct
  source 1..75: mol_type = other DNA
cgttcggcgagcgtgaggtgttcagcgacgtaacatacaatcggctggtggaagtgctggacgagtggatcgcca

SEQ ID NO: 102703 - DNA, 75 bp, synthetic construct
  source 1..75: mol_type = other DNA
gttatcggagggcttattgttatattgtttctcatgatgcttatcatgtacttggatttgcccctatatttccag

SEQ ID NO: 102704 - DNA, 75 bp, synthetic construct
  source 1..75: mol_type = other DNA
gctgcccggcgcggagagtgaatggttatttgtttcccggcagggagcgggactgacgcgccagcgtgcctggca

SEQ ID NO: 102705 - DNA, 75 bp, synthetic construct
  source 1..75: mol_type = other DNA
ctcgttggcagggatcagaacactggtactcattcggactaatgcccttctcgtgtcaagtctttccaggatcag

SEQ ID NO: 102706 - DNA, 75 bp, synthetic construct
  source 1..75: mol_type = other DNA
cggtcgcagcattatcggctggcggtcactttgacccgaaaaacaccgacaaacatcttggcccctggtctccgg

SEQ ID NO: 102707 - DNA, 75 bp, synthetic construct
  source 1..75: mol_type = other DNA
tatcgtgaagatgcccggtaagagcgatgagaatgcacagccttttttacatgcgttaattgcgcagacggataa

SEQ ID NO: 102708 - DNA, 75 bp, synthetic construct
  source 1..75: mol_type = other DNA
caatgagcaccctgcttggctggcgcgtgatggaccgcatgaccatgaacggtgggcgctgggtgaattttaact

SEQ ID NO: 102709 - DNA, 75 bp, synthetic construct
  source 1..75: mol_type = other DNA
atgaggtttataagctactggattatatttataaaaatagacataatcatcgggactattgtatggtaagtatgg

SEQ ID NO: 102710 - DNA, 75 bp, synthetic construct
  source 1..75: mol_type = other DNA
gattatgaaagcatatccaggaaaatttatatacatcgtttaaaaggggggctaagcacaactcatccattactg

SEQ ID NO: 102711 - DNA, 75 bp, synthetic construct
  source 1..75: mol_type = other DNA
gtgggcgagccaattaacccggaagcgtgggagtggtactggaaaaaaatcggcaacgagaaatgtccggtggtc

SEQ ID NO: 102712 - DNA, 75 bp, synthetic construct
  source 1..75: mol_type = other DNA
atgtacgcaaaatcctttgtcgctcttgattgcaacggacgtctgacgggcgcccgtactgaacaggccgcacct

SEQ ID NO: 102713 - DNA, 75 bp, synthetic construct
  source 1..75: mol_type = other DNA
ggcggtgacaaccatcatgaccatcctgagccactcggcggtggtggggcgagaatagcctgcggcatcattcca

SEQ ID NO: 102714 - DNA, 75 bp, synthetic construct
  source 1..75: mol_type = other DNA
cgatgaacaaagcggtgctcagccagagaacgcagagaaaaataaatcccaggacagtaacgatgactgccatga

SEQ ID NO: 102715 - DNA, 75 bp, synthetic construct
  source 1..75: mol_type = other DNA
ttgcctcgctggggctgctgatatctggtcagacaagtgcgcaacgtgaaccggtccgtacttatgtggatgaac

SEQ ID NO: 102716 - DNA, 75 bp, synthetic construct
  source 1..75: mol_type = other DNA
ggactgcacgcgtcaacggtacaaaagaggaaacgcttgacgactttaaccttggcgcgatgtgggaagcctggt

SEQ ID NO: 102717 - DNA, 75 bp, synthetic construct
  source 1..75: mol_type = other DNA
ggctactattctgacctctatcagaagcgggtatgcgaagggtatcactgtcagaccccgtagcattgcacttaa

SEQ ID NO: 102718 - DNA, 75 bp, synthetic construct
  source 1..75: mol_type = other DNA
ttagcgaacaggaaggaaaaattcgcggactgaaaaatcaaattgctgattatcaacgctggcttgatgaaagtt

SEQ ID NO: 102719 - DNA, 75 bp, synthetic construct
  source 1..75: mol_type = other DNA
atgacgccgctgatggagatggacaagcacaaatgaagaatgaatacattcaggaaaatgctgttgatacaactc

SEQ ID NO: 102720 - DNA, 75 bp, synthetic construct
  source 1..75: mol_type = other DNA
aggtactggctaagccgggcaccatcaagccgcacaccaagttcgaatctgaagtgtacattctgtccaaagatg

SEQ ID NO: 102721 - DNA, 75 bp, synthetic construct
  source 1..75: mol_type = other DNA
aggaacgggcgacaaaggcaattatgcggtaacgtccaaaatccatggtatgaaactggggccactggatcttga

SEQ ID NO: 102722 - DNA, 75 bp, synthetic construct
  source 1..75: mol_type = other DNA
taacagccactggggtcgcaccacacgcgaacgtaatctctataacctgctgattaaacagggtgccgattgtct

SEQ ID NO: 102723 - DNA, 75 bp, synthetic construct
  source 1..75: mol_type = other DNA
cggtggcgcactggcgctgactggtgtcatcggtgccattggtcttgtagcctggccggttatcaccggcatcaa

SEQ ID NO: 102724 - DNA, 75 bp, synthetic construct
  source 1..75: mol_type = other DNA
gaaaacatatagaataagaataaatgatagagataatattaagggaataattttaagtctattcgatgattgtta

SEQ ID NO: 102725 - DNA, 75 bp, synthetic construct
  source 1..75: mol_type = other DNA
caatggcgacaacggtattcccggccgatagtgaatgacctgtttgcctggcctgaagagcaggagccgtgctgt

SEQ ID NO: 102726 - DNA, 75 bp, synthetic construct
  source 1..75: mol_type = other DNA
gtgtgctgcatgacaataacatcagggggtcaatggcgggtacgggtagtagtgccgttgtcacccgattacagg

SEQ ID NO: 102727 - DNA, 75 bp, synthetic construct
  source 1..75: mol_type = other DNA
gccgctgccggacatcacgcaggaacgttttttacgtctgccggaagtaatgcacctgtgcggcctgtcacgctc

SEQ ID NO: 102728 - DNA, 75 bp, synthetic construct
  source 1..75: mol_type = other DNA
aaaaaaaataatgccacaaagcgcagttgaggccctgttacgtttcgatttccccgcgctgaaagcagaatgcgc

SEQ ID NO: 102729 - DNA, 75 bp, synthetic construct
  source 1..75: mol_type = other DNA
ccgtggaaaatgggcgcactaccgtgccctctccggcagaacgtcgcgatctttatctgcaagggtgtgatttta

SEQ ID NO: 102730 - DNA, 75 bp, synthetic construct
  source 1..75: mol_type = other DNA
ccgctgatgatgatcatgcgtaacgccgaacgtaatgcgcaatggcgtcataccttgcagtcaggtgttgaaaca

SEQ ID NO: 102731 - DNA, 75 bp, synthetic construct
  source 1..75: mol_type = other DNA
tattgtttttttcaattatttcgactggctgaagatttggcttgctccaaaactttaccttatcgaatatgcggc

SEQ ID NO: 102732 - DNA, 75 bp, synthetic construct
  source 1..75: mol_type = other DNA
gccgacgccttcgacaggtttcgtcactgggtgacgggcgcgttgcagggacgggggtatgacgtgctgctgccg

SEQ ID NO: 102733 - DNA, 75 bp, synthetic construct
  source 1..75: mol_type = other DNA
tgaaaaaaaatatataccgcaaagcgctgttgatgccttgttacgctttgattttccagcactaaaagctgagtt

SEQ ID NO: 102734 - DNA, 75 bp, synthetic construct
  source 1..75: mol_type = other DNA
tcagctccggacgctccctgcgatttgcctgttctcccggtgaggtgagcgtgctttatgccgtcgctccgaaag

SEQ ID NO: 102735 - DNA, 75 bp, synthetic construct
  source 1..75: mol_type = other DNA
atggttgaatggccatgtcctaattgtgggcaaacaactttaaaaattttagatgaatctttcatctgtaaggat

SEQ ID NO: 102736 - DNA, 75 bp, synthetic construct
  source 1..75: mol_type = other DNA
ttttgtacgcagtaaaatagaaccgttaaatcatatccatacctactcagacttttatctgtatgcgattggttt

SEQ ID NO: 102737 - DNA, 75 bp, synthetic construct
  source 1..75: mol_type = other DNA
ggaactgtgcggcaggtattgatgccaccatgacggcgattggtgtaccgcagggtatcaaccgtcgctctttct

SEQ ID NO: 102738 - DNA, 75 bp, synthetic construct
  source 1..75: mol_type = other DNA
ttggcatggataattgccagtctggtgggcacggtaataaacggtgtgtatttacaggcggtattaaaaggctgg

SEQ ID NO: 102739 - DNA, 75 bp, synthetic construct
  source 1..75: mol_type = other DNA
attcggggtgtaagccagatccttcttgagtttacggaagagcattctgacaatcccacttatcttttcgagcgc

SEQ ID NO: 102740 - DNA, 75 bp, synthetic construct
  source 1..75: mol_type = other DNA
aaggcagcacgttcgcccgtcatgctggataatttcgggggcttgagagaggcagcaaaccgcacacaggcggat

SEQ ID NO: 102741 - DNA, 75 bp, synthetic construct
  source 1..75: mol_type = other DNA
cattaccgtgcagatcaacagttctgacgataacccggcaactgtgctgaatgctgataaggcgtaccaggattc

SEQ ID NO: 102742 - DNA, 75 bp, synthetic construct
  source 1..75: mol_type = other DNA
taatgaatggctgcattgcgaaaatgacttacatgaaaaaaatatataccgcaaagcgctgttgatgccttgttg

SEQ ID NO: 102743 - DNA, 75 bp, synthetic construct
  source 1..75: mol_type = other DNA
tctgcaactctggtccctgaagatactggtgttgacattacaattgaagaaaataaaaattactcgagtggtcta

SEQ ID NO: 102744 - DNA, 75 bp, synthetic construct
  source 1..75: mol_type = other DNA
gctggatgcaggtgcagtttgcgttaacgttgaccttgcccatgcaggacaacaggcaaaactggaaccagatac

SEQ ID NO: 102745 - DNA, 75 bp, synthetic construct
  source 1..75: mol_type = other DNA
tccgatgctttcgatcggtttcgtcactggataacgggcgcgttacagggacgagggtatgatgtattgctgcca

SEQ ID NO: 102746 - DNA, 75 bp, synthetic construct
  source 1..75: mol_type = other DNA
tccaccgtgggcaataaataagaaaaagaatgtaatacccgtatttgatttaccggtacttcccatcccttccgt

SEQ ID NO: 102747 - DNA, 75 bp, synthetic construct
  source 1..75: mol_type = other DNA
ggatgcagcgcttgctcgtgttagcctgtatgagcatcaggtatcacatgaagaaaaaaaactcaatgattttaa

SEQ ID NO: 102748 - DNA, 75 bp, synthetic construct
  source 1..75: mol_type = other DNA
cggaagagcattctgacaatcccacttatctcttcgagcgcatcagcgagactgaagatcttgtcaaatggctat

SEQ ID NO: 102749 - DNA, 75 bp, synthetic construct
  source 1..75: mol_type = other DNA
caggcaaaagtgaacagcagttttgatggttactttaagacggatgcggaagggatactgggtatccggtatgac

SEQ ID NO: 102750 - DNA, 75 bp, synthetic construct
  source 1..75: mol_type = other DNA
gcgccagctcggcgacaataccgcagcctcggcagatgatgcagccggtgcacagattatcattgcgaaagcggg

SEQ ID NO: 102751 - DNA, 75 bp, synthetic construct
  source 1..75: mol_type = other DNA
gcagtaaccaccatcattccacctaatcacgaagcagaatcgctaccgagttggcatcaacgtctatgtcatcat

SEQ ID NO: 102752 - DNA, 75 bp, synthetic construct
  source 1..75: mol_type = other DNA
accttaaaaccatttttggtgaggaagccctgaaatcagcgaacgttttactggcagcggcagcaagcggaaaac

SEQ ID NO: 102753 - DNA, 75 bp, synthetic construct
  source 1..75: mol_type = other DNA
aattaaaatcaggggcaagtgcttactcttcggcctacaagctcatacgctcactgtatcccgcattcacatttt

SEQ ID NO: 102754 - DNA, 75 bp, synthetic construct
  source 1..75: mol_type = other DNA
ctgaaccgttgccgtgacacgggtgtcatgttcgggcaggcactggctgacgcgctgatgctgccgcttaatgcg

SEQ ID NO: 102755 - DNA, 75 bp, synthetic construct
  source 1..75: mol_type = other DNA
ctgacgcgctgatgctgccgcttaatgcgttcaacaaactgcgcagcggtattgactgggtactggaaaaactcg

SEQ ID NO: 102756 - DNA, 75 bp, synthetic construct
  source 1..75: mol_type = other DNA
attatcgagaagcacagaaaatcaacagataacattgtgttgctggagcatgagcttgaaaaaaacaggcagaga

SEQ ID NO: 102757 - DNA, 75 bp, synthetic construct
  source 1..75: mol_type = other DNA
tttcagccatcagtaaggatgataaggggaattacagttatgagattgatgtgacgggtattccgatggagtaca

SEQ ID NO: 102758 - DNA, 75 bp, synthetic construct
  source 1..75: mol_type = other DNA
acttattcacttattttctcaatttctgttataggtatgatttttcttgccttcagcatagcgatctttagtcgt

SEQ ID NO: 102759 - DNA, 75 bp, synthetic construct
  source 1..75: mol_type = other DNA
tatcagaggcattttttctgcgggaattctggcacaagcagatgcagcactaaccagtaacacgatggagatttt

SEQ ID NO: 102760 - DNA, 75 bp, synthetic construct
  source 1..75: mol_type = other DNA
agttacgaccagttcacgacgaatatgacccgcagccatgaatatgctgaaatggcatcccgtactgaaagcatg

SEQ ID NO: 102761 - DNA, 75 bp, synthetic construct
  source 1..75: mol_type = other DNA
acgactctgaccgctgcaatcaccaccgtactggctaaaacctacggcggtgctgctcgtgcattcgaccagatc

SEQ ID NO: 102762 - DNA, 75 bp, synthetic construct
  source 1..75: mol_type = other DNA
ttggcctcgtagcctggccggttatcaccggcatcaatgccatcatcgcggcagcaggcgcaatgggggcaatct

SEQ ID NO: 102763 - DNA, 75 bp, synthetic construct
  source 1..75: mol_type = other DNA
ttttcccgacggcaaacttcgaatcgttacctgttgcgcttgccacccagcgtctgaccgtggcgttagtgcatg

SEQ ID NO: 102764 - DNA, 75 bp, synthetic construct
  source 1..75: mol_type = other DNA
gggctgattgatatgctcagccacgatgatattccgtatttgcagggactgattgaagaagcaggcctgcgctgg

SEQ ID NO: 102765 - DNA, 75 bp, synthetic construct
  source 1..75: mol_type = other DNA
gtgtttcaattgctctggctattaaccctgtagcgataacttttgctgaacagaactcgtcagttattgaagttg

SEQ ID NO: 102766 - DNA, 75 bp, synthetic construct
  source 1..75: mol_type = other DNA
ctgaccaccattctcaacccggaggcggtcatttttgccaacccgatagcacagggggcctgtgcggcggacgcg

SEQ ID NO: 102767 - DNA, 75 bp, synthetic construct
  source 1..75: mol_type = other DNA
ctgcaaaagaagaatatcagcttgtcacgcaactttttaaaaatgaaattttagataagctaagacaaacaacag

SEQ ID NO: 102768 - DNA, 75 bp, synthetic construct
  source 1..75: mol_type = other DNA
tggtaacgggaagattacagtaagcaatggtgatgacgataagcttgttactgcgaaaaagattgctgatgccat

SEQ ID NO: 102769 - DNA, 75 bp, synthetic construct
  source 1..75: mol_type = other DNA
tggcctgcctgctatggagccacagtatgaatgccgctgccgacccgtcgtgtgaaggacgatttgtaaatccca

SEQ ID NO: 102770 - DNA, 75 bp, synthetic construct
  source 1..75: mol_type = other DNA
cattgtttgtgcgccgcgatgaagtagaagaagcgtggaaatgggtggattctattactgaagcctgggcgatgg

SEQ ID NO: 102771 - DNA, 75 bp, synthetic construct
  source 1..75: mol_type = other DNA
tgcagttaaaagccgtcattgcggagcagctgaataaaaaacagcaacaaacgcaagtccagaccgaagagaaaa

SEQ ID NO: 102772 - DNA, 75 bp, synthetic construct
  source 1..75: mol_type = other DNA
tgaagaaactggaatcctcaagcttgctaaaagatggcagtttaagtgcagagcagctattgctaactttattat

SEQ ID NO: 102773 - DNA, 75 bp, synthetic construct
  source 1..75: mol_type = other DNA
ctggaaaccatgcgtggtattcaggcactgtttgtacgtcgcgatgaagtggaagaagcctggaaatgggtagac

SEQ ID NO: 102774 - DNA, 75 bp, synthetic construct
  source 1..75: mol_type = other DNA
aggccgtgatcccgccgcacgagcgtccgtttataccggttttacgtcagttgggattcagtggtagcgatgaac

SEQ ID NO: 102775 - DNA, 75 bp, synthetic construct
  source 1..75: mol_type = other DNA
gataacgtcatcttctctgccaccggtatcaccaaaggcgatctgctggaagggattagccgcaaaggcaatatt

SEQ ID NO: 102776 - DNA, 75 bp, synthetic construct
  source 1..75: mol_type = other DNA
tattacaaataacagcggtatggagggtgtaaaatcagcaattcttgaactggaaaacaatggaaacctatcatc

SEQ ID NO: 102777 - DNA, 75 bp, synthetic construct
  source 1..75: mol_type = other DNA
ttgatggcaacggacgtctgaccgctgcccgtaccgcacagactgcaccttacgaccgctacacctgccaccttt

SEQ ID NO: 102778 - DNA, 75 bp, synthetic construct
  source 1..75: mol_type = other DNA
gtctccatggattcagggaaaagcccgttacgggctcacctgagaaaattgttcaggacagcttatcccgttttg

SEQ ID NO: 102779 - DNA, 75 bp, synthetic construct
  source 1..75: mol_type = other DNA
ttatcttccaccagttacggtgctgtcgggatcatattactgatgctctgtcacaggatatacaggacgacgcac

SEQ ID NO: 102780 - DNA, 75 bp, synthetic construct
  source 1..75: mol_type = other DNA
acgtcggatgcgctggcggtgtttggggtgatcaagtacatcatcaatgatgcgcgatcgggggagtttgacgac

SEQ ID NO: 102781 - DNA, 75 bp, synthetic construct
  source 1..75: mol_type = other DNA
tgataatgataatggcgggcttctggtgaggatgaccagaaacctccgtgatttggccagcgcggtttttggtac

SEQ ID NO: 102782 - DNA, 75 bp, synthetic construct
  source 1..75: mol_type = other DNA
gaaaaaagccggtgcgacagccgctctgattggtggtgctatctcatctgtcctggggattttaggctcttttgc

SEQ ID NO: 102783 - DNA, 75 bp, synthetic construct
  source 1..75: mol_type = other DNA
catcgggtttacatcgccaaacaggatgacaaaccggtagccgccgttctggaagcaaccgcgccagatggctat

SEQ ID NO: 102784 - DNA, 75 bp, synthetic construct
  source 1..75: mol_type = other DNA
agcctttcaggtattggtcaaaccagtgaaacggcagtgatctttaccgtccttaccagcccggatatccctcag

SEQ ID NO: 102785 - DNA, 75 bp, synthetic construct
  source 1..75: mol_type = other DNA
gaacgtcaaaagcgcgaagagttgtttaattacttcatcagaaagggtgccgtgcagcaagaaacagaagacgga

SEQ ID NO: 102786 - DNA, 75 bp, synthetic construct
  source 1..75: mol_type = other DNA
aggggatccgtcgggcatatcgtcatacactggcgacaagcccgtactcttcataccgcaaccctgtacgcaggc

SEQ ID NO: 102787 - DNA, 75 bp, synthetic construct
  source 1..75: mol_type = other DNA
taccacaatgagcaacgtgattatattacgtctggctgcagggactttcgttgcgttgtgcatggtggcatgggg

SEQ ID NO: 102788 - DNA, 75 bp, synthetic construct
  source 1..75: mol_type = other DNA
gcggtggcgtttgtcattccgaaagagagcgatagtctggaagatcgtgatgtggcgcattcgcaagagaaggcg

SEQ ID NO: 102789 - DNA, 75 bp, synthetic construct
  source 1..75: mol_type = other DNA
tgacagacatgaataaccggccaatgaaggggtacggcaatcaaacccgtgcagaacgcttccgcatactggatg

SEQ ID NO: 102790 - DNA, 75 bp, synthetic construct
  source 1..75: mol_type = other DNA
cactacgagagaaattaccgctggcacccgattgtgaaatcaccattgaaggccgggtactgaattttgacgctg

SEQ ID NO: 102791 - DNA, 75 bp, synthetic construct
  source 1..75: mol_type = other DNA
catgatctggcaagcctgggagcaggataaaaacccgcaacctcaggctcaacagaccacgcagacaacgaccac

SEQ ID NO: 102792 - DNA, 75 bp, synthetic construct
  source 1..75: mol_type = other DNA
gctatctgtgtattggtgattatagcgtgtgtttatctgatgatttttgcatggaataaaggagatgatgcggat

SEQ ID NO: 102793 - DNA, 75 bp, synthetic construct
  source 1..75: mol_type = other DNA
tgaaagtggggcttaaaccactggtcccgcagggtaaagatatgctggcgattttgtcgaacaacagtgtcggaa

SEQ ID NO: 102794 - DNA, 75 bp, synthetic construct
  source 1..75: mol_type = other DNA
atgctcgccaaaggtgtggttcatgatacctggccacaggcattaattgccagagaagcagaattccctaccggg

SEQ ID NO: 102795 - DNA, 75 bp, synthetic construct
  source 1..75: mol_type = other DNA
atgccagatacaggccgttttttagcagaaagtgaagggcggggacgggtttatgcagaattattgaatattgct

SEQ ID NO: 102796 - DNA, 75 bp, synthetic construct
  source 1..75: mol_type = other DNA
tgcagaattattgaatattggttttaatgatggagttgatgcgctcagaaacagggtgttaagcgtgcttcctgg

SEQ ID NO: 102797 - DNA, 75 bp, synthetic construct
  source 1..75: mol_type = other DNA
cgcggagaatttgttgaggggattagcgacccgaatgatccgaaatgggtgaaggggttacaaaacgagccagaa

SEQ ID NO: 102798 - DNA, 75 bp, synthetic construct
  source 1..75: mol_type = other DNA
gatatgcgtgaaatgctgaacaaaaaagcagaagagaaaggcgcaacggcctaccagattactgaagctcgtagc

SEQ ID NO: 102799 - DNA, 75 bp, synthetic construct
  source 1..75: mol_type = other DNA
aagcttacagcactgggagctgaagctgatacgttaaaaacgcagtcatcactgttacaggccaggctggaacaa

SEQ ID NO: 102800 - DNA, 75 bp, synthetic construct
  source 1..75: mol_type = other DNA
atgtcccggttaccggttggtatcaatgcaacgcgtcagattgcagcggcacaacaggaaatggcccgggaggcg

SEQ ID NO: 102801 - DNA, 75 bp, synthetic construct
  source 1..75: mol_type = other DNA
tggaaacagctaaagcagttggcggcgtggccgtattccctgtatttgcaaaaggtgaagtgccaggaaaagacg

SEQ ID NO: 102802 - DNA, 75 bp, synthetic construct
  source 1..75: mol_type = other DNA
ctgacccgtacaccataatcttttctcagcccagccctttacgtcaggtgccgaataataattacagttttctga

SEQ ID NO: 102803 - DNA, 75 bp, synthetic construct
  source 1..75: mol_type = other DNA
gaccgcgctggagctttttgaaatcagcaccctggatcactttattgtcgccggaaatgacgtcatttcgatggc

SEQ ID NO: 102804 - DNA, 75 bp, synthetic construct
  source 1..75: mol_type = other DNA
atgcgccagctctctccgctgcctctgattccttatgaatacacggaatacaaagccgtgaaggttggccctgac

SEQ ID NO: 102805 - DNA, 75 bp, synthetic construct
  source 1..75: mol_type = other DNA
gacggacgtcacccggtcaccgggatgcatggttaacctgggcttcagcctgccggcttttggtaaaacggcaca

SEQ ID NO: 102806 - DNA, 75 bp, synthetic construct
  source 1..75: mol_type = other DNA
ctggccaccacgtcatcgatggagaaacaacgtctggcacatgtctccatcggtcatgtggcgatgcggacactg

SEQ ID NO: 102807 - DNA, 75 bp, synthetic construct
  source 1..75: mol_type = other DNA
tgtcagaccggaacgcagggaggtacgcttgattcagcgtctgcagcaattcgtaccggatgccttacccgtggt

SEQ ID NO: 102808 - DNA, 75 bp, synthetic construct
  source 1..75: mol_type = other DNA
cagaggccaccggagccgccaacggagaactacgcagacctgagaaatgcagtaaatcgcacttacgcagacatg

SEQ ID NO: 102809 - DNA, 75 bp, synthetic construct
  source 1..75: mol_type = other DNA
tgagaacagtgaatctgcatctggcactggccccctttccgatgagtgtgatatctgcgctcgtttttttaggct

SEQ ID NO: 102810 - DNA, 75 bp, synthetic construct
  source 1..75: mol_type = other DNA
atgaatataaattccttaccatcccccgaaataaaagacaccgatgttttcattgccgtcataaacgttctggtt

SEQ ID NO: 102811 - DNA, 75 bp, synthetic construct
  source 1..75: mol_type = other DNA
acatagcagaagcgatttgggcaaatcgtaaagcgatcttgttagccagtggagcaaatgcggcgacaacgcgcg

SEQ ID NO: 102812 - DNA, 75 bp, synthetic construct
  source 1..75: mol_type = other DNA
gagtaaaaagcagtgcccttgttgctatggggaaaaatttattgaaagcgtagtttttacaaacaaggtccagta

SEQ ID NO: 102813 - DNA, 75 bp, synthetic construct
  source 1..75: mol_type = other DNA
gaaagtttcctgtcctgaatgtaaagggaagggggagatttccactgcctgtaaagactgccgtgggcgtggtgt

SEQ ID NO: 102814 - DNA, 75 bp, synthetic construct
  source 1..75: mol_type = other DNA
ataacgagagaaaacctgatgctggcttatcagcgcgtggtggaaaacaaaggcgcggcggagttgaaaccgtgg

SEQ ID NO: 102815 - DNA, 75 bp, synthetic construct
  source 1..75: mol_type = other DNA
ggttttctggcgctggatgcttcatcaggtgcacagggcgtcgggattggcatggaaaaaaccgacggaacggcg

SEQ ID NO: 102816 - DNA, 75 bp, synthetic construct
  source 1..75: mol_type = other DNA
catgatattgacgctagagccagtaaggactttaaagaggccagcgattactttaccagtcgcaaggtcagtgag

SEQ ID NO: 102817 - DNA, 75 bp, synthetic construct
  source 1..75: mol_type = other DNA
catggcattcaaccagcccggaatatggctgaacatattcctccggcacctaactggcctgcgccaacgccgcca

SEQ ID NO: 102818 - DNA, 75 bp, synthetic construct
  source 1..75: mol_type = other DNA
cagtagtaatggtcagcctttcacagtaacagacggaaacagtaccacagcacagcatttccgtgcttctgtccc

SEQ ID NO: 102819 - DNA, 75 bp, synthetic construct
  source 1..75: mol_type = other DNA
aaatcgtcgaggtacttggcgataatatgggcaccggcatggcggttgatatcgctctgcgcacccatgaaatcc

SEQ ID NO: 102820 - DNA, 75 bp, synthetic construct
  source 1..75: mol_type = other DNA
cgtacacacggcggtgtgaccctcaaccggtttattcctacccaaccgactacccatgagaaaatgcagcgcagc

SEQ ID NO: 102821 - DNA, 75 bp, synthetic construct
  source 1..75: mol_type = other DNA
aagcaccgattttctgtcccggaatccggaaatcatcaatctgtttcaggactacgtccagaactgcgtgctggg

SEQ ID NO: 102822 - DNA, 75 bp, synthetic construct
  source 1..75: mol_type = other DNA
caaaggcaacccgctggtgaatattggcggcaagttttatacccggactgaagatcctgacagtggcaacatcac

SEQ ID NO: 102823 - DNA, 75 bp, synthetic construct
  source 1..75: mol_type = other DNA
cttcggcggttccattcatctgttcgacgtcggtcagcctaccgtcggtaagttgaacgaaatcgactacaaaac

SEQ ID NO: 102824 - DNA, 75 bp, synthetic construct
  source 1..75: mol_type = other DNA
gccacgaaaacccgactgatctatacacctgacgggagcagtgaaccggaagaactggcctccatgaatgacggt

SEQ ID NO: 102825 - DNA, 75 bp, synthetic construct
  source 1..75: mol_type = other DNA
cggctctgttgccattggcagtggttcacgggccggacgggcacacaccggtaattattcgctgaatggtcaggc

SEQ ID NO: 102826 - DNA, 75 bp, synthetic construct
  source 1..75: mol_type = other DNA
gtaaaaatgtcgcctgggcacagtctgaggtcaacgcatggatgtcggaccgtatcagggcccgtgggcggggac

SEQ ID NO: 102827 - DNA, 75 bp, synthetic construct
  source 1..75: mol_type = other DNA
aatcatgaagagttgccgcttgattatctccaaggtcaaaaagatggtcttgaatgggctgcgcagcttgcagaa

SEQ ID NO: 102828 - DNA, 75 bp, synthetic construct
  source 1..75: mol_type = other DNA
gcagacagaacaatcacgctggtaatgcaatgcgatcaggacgctcatattcgtgtggatttgcccctatatttc

SEQ ID NO: 102829 - DNA, 75 bp, synthetic construct
  source 1..75: mol_type = other DNA
aagataatacgttgccttcaaattctatgcttgaccggtatacaataaatctttctacatcggctgaagagggaa

SEQ ID NO: 102830 - DNA, 75 bp, synthetic construct
  source 1..75: mol_type = other DNA
gacagtttatgaccttatcagccgggaggccttcccgaaacaaatcagcctcggcggaaaaaacgtggcgtgggc

SEQ ID NO: 102831 - DNA, 75 bp, synthetic construct
  source 1..75: mol_type = other DNA
cctgtttatgctgactcacctgcgccggttgtgccggatgaaatagacgtaaacgatgtaccaagggcggtgaca

SEQ ID NO: 102832 - DNA, 75 bp, synthetic construct
  source 1..75: mol_type = other DNA
tggtggcggtggatttgtttattctcccgtgtatcacatcagcattcagaatcaagggagcaatggcgagataga

SEQ ID NO: 102833 - DNA, 75 bp, synthetic construct
  source 1..75: mol_type = other DNA
ggtctgtggatactgccgatgcacatacagagaacggacagcttgtttttgatttgcgtgacaaaggggcgctgc

SEQ ID NO: 102834 - DNA, 75 bp, synthetic construct
  source 1..75: mol_type = other DNA
aataatctcgggaagaaatttgatcatctgaatgacagggtggatgagctgaaccgggatattcgcggagtcggc

SEQ ID NO: 102835 - DNA, 75 bp, synthetic construct
  source 1..75: mol_type = other DNA
gaagaactcaacagagtaatgggttgtgttgggaaaatacttggggcacttttaactatcgttagtgttgttgca

SEQ ID NO: 102836 - DNA, 75 bp, synthetic construct
  source 1..75: mol_type = other DNA
catggctgctgacgccgcatccaaaagcgatgactaccgatgcgcaaaaacgtcttgaagcgattgcctcgctgg

SEQ ID NO: 102837 - DNA, 75 bp, synthetic construct
  source 1..75: mol_type = other DNA
acaaccctgaccgctgcaatcactaccgtactggctaaaacctacggcggtgctgctcgtgcattcgaccagatc

SEQ ID NO: 102838 - DNA, 75 bp, synthetic construct
  source 1..75: mol_type = other DNA
actcaatctcaaattggcaaaaagctactaagcagaaaacaacaaccaatgacacctcaagcagtatctaaagca

SEQ ID NO: 102839 - DNA, 75 bp, synthetic construct
  source 1..75: mol_type = other DNA
ggaaagtgcacctgacgcctgctcagttatccatgctactggaggggatcgcgtggcaacatcccaaacggacag

SEQ ID NO: 102840 - DNA, 75 bp, synthetic construct
  source 1..75: mol_type = other DNA
aaatgaacaatcaagacctctgcctgatgtggctcagcgtctggtgcagcatcttgcagagcatggcattcaacc

SEQ ID NO: 102841 - DNA, 75 bp, synthetic construct
  source 1..75: mol_type = other DNA
gcagcagagccagttggtgcattccacattgctgaacagcaagttgacggcacaagtgactatctcaaggatgga

SEQ ID NO: 102842 - DNA, 75 bp, synthetic construct
  source 1..75: mol_type = other DNA
ataatcttttcgcagaacttacagatgattaccagcgctggttagcccgccacatggaggtgagcagccatgcgt

SEQ ID NO: 102843 - DNA, 75 bp, synthetic construct
  source 1..75: mol_type = other DNA
tcggtgggaaaaacgtggcgtgggcgcagtctgaaatcaccgcatggatggcagatcgcattgccgaacgtaacc

SEQ ID NO: 102844 - DNA, 75 bp, synthetic construct
  source 1..75: mol_type = other DNA
ggtgggcaacgtctttaaaggcgtaatttccagcgtcactggattcggtttctttgttcgcctggatgatctgtt

SEQ ID NO: 102845 - DNA, 75 bp, synthetic construct
  source 1..75: mol_type = other DNA
atgaaaataactcatcattataaattatttatctccgctctgacgacaatggccttgctttattctgcaattctt

SEQ ID NO: 102846 - DNA, 75 bp, synthetic construct
  source 1..75: mol_type = other DNA
gctatagccaagccgacaatcagccagcatctggcaaccaggctgccgaatccaatcgcggtaatgagtggaccg

SEQ ID NO: 102847 - DNA, 75 bp, synthetic construct
  source 1..75: mol_type = other DNA
actaccctgaccgctgcaatcacgaccgtactggctaaaacctacggcggtgctgctcgtgcattcgaccagatc

SEQ ID NO: 102848 - DNA, 75 bp, synthetic construct
  source 1..75: mol_type = other DNA
tagttggaaaaaataatgaagaatctttaaaaaatgatctggctctattccagtctctccaagaatcaagaaaaa

SEQ ID NO: 102849 - DNA, 75 bp, synthetic construct
  source 1..75: mol_type = other DNA
aactttactggttgtttgaacttgtttattaaaaataataccattgttgttgaattcagctctgatggagagtaa

SEQ ID NO: 102850 - DNA, 75 bp, synthetic construct
  source 1..75: mol_type = other DNA
aaagcaaagcattactttctcgcttacaacaacgcattattggtcaagattacgctctgtcagtcatatcttctc

SEQ ID NO: 102851 - DNA, 75 bp, synthetic construct
  source 1..75: mol_type = other DNA
gttgaggtgttggggccatttgttaattacggacaagttgagttagctattcatgcaaaactttcatcagaacgc

SEQ ID NO: 102852 - DNA, 75 bp, synthetic construct
  source 1..75: mol_type = other DNA
gtggccaaatcacttcaggatgacataaatgctgtcactaatgccggatttgcactgaaagaccagggaaataat

SEQ ID NO: 102853 - DNA, 75 bp, synthetic construct
  source 1..75: mol_type = other DNA
tcgatagctctctggttgaaccgctaatatgctccgcacgctataccggaagcacctttcggagcggagatgcaa

SEQ ID NO: 102854 - DNA, 75 bp, synthetic construct
  source 1..75: mol_type = other DNA
ttgaaaatctcaagcagaagttagtggaatgcaatcgctataactactgcgcagatgcagttaaaggcgtagagg

SEQ ID NO: 102855 - DNA, 75 bp, synthetic construct
  source 1..75: mol_type = other DNA
cgaagaggatttacgtgcctgggtggtgagcggagcggatatggtggtctacagcggcgcaaaagcctttaacgc

SEQ ID NO: 102856 - DNA, 75 bp, synthetic construct
  source 1..75: mol_type = other DNA
tggcatggcgagaaagataaaaacgccggtatccttgatgccggtccagcgactggagcgctggcttttgatatc

SEQ ID NO: 102857 - DNA, 75 bp, synthetic construct
  source 1..75: mol_type = other DNA
atctgaaagagaaatacaaaagactacacaaataatcccatctgaaactactttgctggaagacgaaaaatcatt

SEQ ID NO: 102858 - DNA, 75 bp, synthetic construct
  source 1..75: mol_type = other DNA
acccggagacgggggaactgctgtggcagcatgagacgaaacaggcatacaacgaacaggggctggcaaaccgcg

SEQ ID NO: 102859 - DNA, 75 bp, synthetic construct
  source 1..75: mol_type = other DNA
tattacgtgtaacgaaaacggtctgtgtgaaaactcagacttcgactttacctacacccagcataccgcctggat

SEQ ID NO: 102860 - DNA, 75 bp, synthetic construct
  source 1..75: mol_type = other DNA
aattatgctttagtcagtaagggagtgggcaaggatgatgactataaaagagcctttgatattattgagagtatt

SEQ ID NO: 102861 - DNA, 75 bp, synthetic construct
  source 1..75: mol_type = other DNA
cgacagcgtcacacagagtcagttcgattccattggccgccttcagtcacagacggatgcggcaggccggacgac

SEQ ID NO: 102862 - DNA, 75 bp, synthetic construct
  source 1..75: mol_type = other DNA
aaacagggcgtgccggttttcagaaactgccagcgttgtggggggcgtggttacgaaagattaccgtcaacggag

SEQ ID NO: 102863 - DNA, 75 bp, synthetic construct
  source 1..75: mol_type = other DNA
atgcaggacaacctcggcggtgactttaaggagtttcagtccgcttatgaggcggtggggactgacctgtttgac

SEQ ID NO: 102864 - DNA, 75 bp, synthetic construct
  source 1..75: mol_type = other DNA
accacactgaccgctgcaatcactaccgtactggctaaaacctacggcggtgctgctcgtgcattcgaccagatc

SEQ ID NO: 102865 - DNA, 75 bp, synthetic construct
  source 1..75: mol_type = other DNA
ggaatgaccctgcgtgatgactggaaagcccgtcactatgatgcagagaaggctgaccgctataccgtttcgttt

SEQ ID NO: 102866 - DNA, 75 bp, synthetic construct
  source 1..75: mol_type = other DNA
aaaagataataatggtaatcttttgagaaaaaacctttcggatgaaatcaacatcacaggtaagggcccaataaa

SEQ ID NO: 102867 - DNA, 75 bp, synthetic construct
  source 1..75: mol_type = other DNA
tttgatactgagtttattgagttaattgcctccccgttaaagctgaaaccggtcgttaaagacacgcgtttcgcc

SEQ ID NO: 102868 - DNA, 75 bp, synthetic construct
  source 1..75: mol_type = other DNA
gcggaactgaagcttatcgctgagaaaacgaaaaaaggctatgtggaagacgcttcggcaaacgtacatatcccc

SEQ ID NO: 102869 - DNA, 75 bp, synthetic construct
  source 1..75: mol_type = other DNA
atgactattgctgaacggctacggcaggaagggcatcaaattggctggcaggaaggtatgcatgaacaagccatt

SEQ ID NO: 102870 - DNA, 75 bp, synthetic construct
  source 1..75: mol_type = other DNA
gccgacctccgggtttatcactggtaaaaaatctggattgcagcctgcaaagcgcagcatcacggcattgccagg

SEQ ID NO: 102871 - DNA, 75 bp, synthetic construct
  source 1..75: mol_type = other DNA
cggccgactgggctaaatctgtgttctcttcggcggcgctgggtgatcctcgccgtactgcccgcttggttaacg

SEQ ID NO: 102872 - DNA, 75 bp, synthetic construct
  source 1..75: mol_type = other DNA
ctgcggcaagatgacgattctcggcgtctccagcgtcgcgccggaggtgatgcaggccaccgcgcgcgcggcatc

SEQ ID NO: 102873 - DNA, 75 bp, synthetic construct
  source 1..75: mol_type = other DNA
caagctgggcagaacttcccgttggttaaaaagcgatctggaagaatggttgtattgtcgtatttatgagtcccg

SEQ ID NO: 102874 - DNA, 75 bp, synthetic construct
  source 1..75: mol_type = other DNA
tggtagccggaactgtggcattagctctgggtttatctgcaactggcgtgatggctgcgggttttaaaccagcgc

SEQ ID NO: 102875 - DNA, 75 bp, synthetic construct
  source 1..75: mol_type = other DNA
gacagccgtggacagttaattgcggtgaaagacatgcagggccatgaaacgcggtatgaatacaacgccgccggt

SEQ ID NO: 102876 - DNA, 75 bp, synthetic construct
  source 1..75: mol_type = other DNA
aagccagaaacgcagttacagtatgttgggcacctgaagcctgggatttatatcaaggcgggtcgctttgttggg

SEQ ID NO: 102877 - DNA, 75 bp, synthetic construct
  source 1..75: mol_type = other DNA
aaactcaggctacctcatccgcaatatgatacagatatcgaatcccgggcaaacgaactgtggaaaaaggctgtg

SEQ ID NO: 102878 - DNA, 75 bp, synthetic construct
  source 1..75: mol_type = other DNA
gtctgaactgctgatgcgcgatcggatgcgtcaattactggaatgggcgaacgaccattacgatctggtgattgt

SEQ ID NO: 102879 - DNA, 75 bp, synthetic construct
  source 1..75: mol_type = other DNA
taatatcgcgcatcttaatgaactgacagagattattacggatagtcagcttgatgggcagacgcgtaaaacgct

SEQ ID NO: 102880 - DNA, 75 bp, synthetic construct
  source 1..75: mol_type = other DNA
aaattgaagtgacgattatcggcggacgtatcgacgactccagccagtcctgcattggcgaacatggtcgtaaat

SEQ ID NO: 102881 - DNA, 75 bp, synthetic construct
  source 1..75: mol_type = other DNA
tatttacggttgcgatgattgtcagcttatctgcccgtggaatcgctattcacaactgacaactgaagatgattt

SEQ ID NO: 102882 - DNA, 75 bp, synthetic construct
  source 1..75: mol_type = other DNA
aatgccgaataataagaatataacagatcatttaactgaacaagagataacatttttacatgccgatcttcagca

SEQ ID NO: 102883 - DNA, 75 bp, synthetic construct
  source 1..75: mol_type = other DNA
aattctgacagcgccccctatacgttattaaaaaactatgctgacagatttaaaaaatattcagcagaagagcag

SEQ ID NO: 102884 - DNA, 75 bp, synthetic construct
  source 1..75: mol_type = other DNA
gaagtgagtttgtcaatgcagcgtctggaacaggcaggcgtcaatattaaaggcgctatcctcaatggtgtgatt

SEQ ID NO: 102885 - DNA, 75 bp, synthetic construct
  source 1..75: mol_type = other DNA
tctcacgcgcatctcacaacacagaacctttcaggatgacccttgaggataccggtttggctgtcggtgcctttc

SEQ ID NO: 102886 - DNA, 75 bp, synthetic construct
  source 1..75: mol_type = other DNA
atggcgagttaagcgaattaacgtggtgcagccacaatcagcaccatgatgacacgctatatgttcgagctgact

SEQ ID NO: 102887 - DNA, 75 bp, synthetic construct
  source 1..75: mol_type = other DNA
tttcaataacatgcctaatcaacctattctggatggtcacatccagatggtcattaacagtcatgagaaaggctg

SEQ ID NO: 102888 - DNA, 75 bp, synthetic construct
  source 1..75: mol_type = other DNA
atgaccacttttactaaagaacaattaatagagataattaagcgcaatataacggttatggatcgttatcctgat

SEQ ID NO: 102889 - DNA, 75 bp, synthetic construct
  source 1..75: mol_type = other DNA
ttcccgaagcagatcccgcttgggggtaaaaatgtcgcctgggcacagtctgaggtcaacgcatggatgtcggac

SEQ ID NO: 102890 - DNA, 75 bp, synthetic construct
  source 1..75: mol_type = other DNA
tggtagcaatgccagacggcgttttgcagacgcgtaccgattttggtaaaaccggatacgatggcgcagcgccgc

SEQ ID NO: 102891 - DNA, 75 bp, synthetic construct
  source 1..75: mol_type = other DNA
ggggggcagtctattttacagcggcatattgcctcgttctcgcatcatggtttgcctcaaggcagtgacgacgcg

SEQ ID NO: 102892 - DNA, 75 bp, synthetic construct
  source 1..75: mol_type = other DNA
ggtgattactcctggattgtacagcctgttgcgaacgaaaaaacgctccactcgctggcgcatggggcagggcgt

SEQ ID NO: 102893 - DNA, 75 bp, synthetic construct
  source 1..75: mol_type = other DNA
ggcggcaatgtggaagcttttgtcaccaccgataacgttgctgtcggggcgaaaggcgcgtcgttcattattgac

SEQ ID NO: 102894 - DNA, 75 bp, synthetic construct
  source 1..75: mol_type = other DNA
aaaccactggtcagtaaactcctgaaacccgttgacgctaatggcaaaccaattagctgtaacgaaaatggcgta

SEQ ID NO: 102895 - DNA, 75 bp, synthetic construct
  source 1..75: mol_type = other DNA
atgtgggtagaagcaagaaatcgcgcaggcaaaatttcaggtattttaaccgacttcacctttcatgatctgaag

SEQ ID NO: 102896 - DNA, 75 bp, synthetic construct
  source 1..75: mol_type = other DNA
cagctgatcgaaaccatcaaacaagcgggttatgacgcatctgtaagccacccaaaggctaaaccgctggcggag

SEQ ID NO: 102897 - DNA, 75 bp, synthetic construct
  source 1..75: mol_type = other DNA
gctattaagcaaaacctattactctgtcggcggcgggtttattgtcgaagaagaacacttcggcctgtcgcacga

SEQ ID NO: 102898 - DNA, 75 bp, synthetic construct
  source 1..75: mol_type = other DNA
aaatcccgatgccccgattatctcaataggtgcaatatttttcgatccgcaaaccggagatatgggaccggaatt

SEQ ID NO: 102899 - DNA, 75 bp, synthetic construct
  source 1..75: mol_type = other DNA
ttactcttatgttgttacagtagatatggataatcagatgtatatggtcagaaagtatgttaagacatatgtgaa

SEQ ID NO: 102900 - DNA, 75 bp, synthetic construct
  source 1..75: mol_type = other DNA
cggggcttgccgaatacggcccctttttacctcacgggctgcagggggagctgccggacattccgaccaccacca

SEQ ID NO: 102901 - DNA, 75 bp, synthetic construct
  source 1..75: mol_type = other DNA
ttccctggtatgaggggaatatcctgtttgcctttgcagttgcggcacaggtgctgacgtggtgtgaaacgcgca

SEQ ID NO: 102902 - DNA, 75 bp, synthetic construct
  source 1..75: mol_type = other DNA
ccgtttccgagctgaccgaagagaaagtcggcatcgatgtgaccggctccattgccagcaccgctgacaccgacg

SEQ ID NO: 102903 - DNA, 75 bp, synthetic construct
  source 1..75: mol_type = other DNA
tttcagactatgaaggaagcagccgggataagcaacttttctctggtcacaaaaccgaaagggcaagtgctaatc

SEQ ID NO: 102904 - DNA, 75 bp, synthetic construct
  source 1..75: mol_type = other DNA
atgtacaaaggctttaacgaaatgtgggtagatgcaagaaatcgtgctggaaaaatttcaggtattttaaccgac

SEQ ID NO: 102905 - DNA, 75 bp, synthetic construct
  source 1..75: mol_type = other DNA
cagttcgcatattatctggccggttttccctggtatgaggggaatatcctgtttgcctttgcagttgcggcacag

SEQ ID NO: 102906 - DNA, 75 bp, synthetic construct
  source 1..75: mol_type = other DNA
gaaagtcgctatctttacgacctgctgggccgcagggtggtaaaacgggtatggcggcgtgaacgggacctgacg

SEQ ID NO: 102907 - DNA, 75 bp, synthetic construct
  source 1..75: mol_type = other DNA
gccaccgacgccggtacgtatgctgctggataaaaacggcaacaacctggcggcgcaggtagagtttgaaacctt

SEQ ID NO: 102908 - DNA, 75 bp, synthetic construct
  source 1..75: mol_type = other DNA
tctttgatgaggtgacattagcttaccgtggtttaaccgatgaacaaaagaaagtagttgatgctttaggttctg

SEQ ID NO: 102909 - DNA, 75 bp, synthetic construct
  source 1..75: mol_type = other DNA
gggattatttagctcttcagaaagtcaaaaagaaaaaattatttctatgtctcgaactagaaatgaatcattgaa

SEQ ID NO: 102910 - DNA, 75 bp, synthetic construct
  source 1..75: mol_type = other DNA
aactggaaccgaataatagcaacacccaggcagcgctcggttacgccttgtgggatagcggtgatatcgcacagt

SEQ ID NO: 102911 - DNA, 75 bp, synthetic construct
  source 1..75: mol_type = other DNA
ttgtccggcaccagttacggcattcccggacttctgatgctggcagtaagctacaggatgtaccgtgcggaagac

SEQ ID NO: 102912 - DNA, 75 bp, synthetic construct
  source 1..75: mol_type = other DNA
ccggtaccattacgacagccggcaccggctggtgcactacacgcggacacaatatgcagagccgctggtcgaaag

SEQ ID NO: 102913 - DNA, 75 bp, synthetic construct
  source 1..75: mol_type = other DNA
gtggagacacgacgcctcttcccgaccgcctgaccatccgtaatgcagaatccagagcagcatctggtggcttgg

SEQ ID NO: 102914 - DNA, 75 bp, synthetic construct
  source 1..75: mol_type = other DNA
aaagttaggcatcacaaagtacagcatcgtgaccaacagcaacgattccgtcacactgcgcctcatgactgagca

SEQ ID NO: 102915 - DNA, 75 bp, synthetic construct
  source 1..75: mol_type = other DNA
ctgaaagattgcaaagggccagcccagtatgaggttcgggtgacgctcaccggcacggaagacagcgaacagccc

SEQ ID NO: 102916 - DNA, 75 bp, synthetic construct
  source 1..75: mol_type = other DNA
ttatcgttgagctaggcttcaatgagaatgttattaagggactgcaaagagttgaaaaggcagctttgcagtcag

SEQ ID NO: 102917 - DNA, 75 bp, synthetic construct
  source 1..75: mol_type = other DNA
ctttctgtacggagcatgctggcgctttgtcttttcccggtcgttgctctcgttaacctgcaggacagcgtgact

SEQ ID NO: 102918 - DNA, 75 bp, synthetic construct
  source 1..75: mol_type = other DNA
gtacaacccgcgaactggctgaacgtatcaggatctatgccaaagcaaataagctctctgtgaacactttcttga

SEQ ID NO: 102919 - DNA, 75 bp, synthetic construct
  source 1..75: mol_type = other DNA
cgtttctggcccggggattttttcccgacgttctatggctgtcatctggctgtgctgggcattctggcgttgtga

SEQ ID NO: 102920 - DNA, 75 bp, synthetic construct
  source 1..75: mol_type = other DNA
gcccgctgcagtcttccctgctggtcagtgaacgtatggcattcaagctgcaccgtcagggcatgataatgaaca

SEQ ID NO: 102921 - DNA, 75 bp, synthetic construct
  source 1..75: mol_type = other DNA
agcgctgcatcttctgtaggtctgggtaattatccggcctcaaagtgtgaagtggtcgttttcatggagaaagca

SEQ ID NO: 102922 - DNA, 75 bp, synthetic construct
  source 1..75: mol_type = other DNA
gatttttattatttgtgcagtaaccaatatgacatggttaaaaatctggctggcacctaagttatatctaatcga

SEQ ID NO: 102923 - DNA, 75 bp, synthetic construct
  source 1..75: mol_type = other DNA
aaaacagggcttactgaaaatgaaagcccttgccgatgcgggattcccccaggcggtgatcccgccgcacgagcg

SEQ ID NO: 102924 - DNA, 75 bp, synthetic construct
  source 1..75: mol_type = other DNA
aaattatgcaggcagccaatatcagccagcctgacgccgataagttgcttgctgtatcacgtggtgaatttgttg

SEQ ID NO: 102925 - DNA, 75 bp, synthetic construct
  source 1..75: mol_type = other DNA
ctttgcagttgcggcacaggtgctgatgtggagtgaaacgcgcacctggtggcgttccgcagggtgcatgttgct

SEQ ID NO: 102926 - DNA, 75 bp, synthetic construct
  source 1..75: mol_type = other DNA
actttgcaatacgtgaccgcatcgataataccctaatagaaagcagtcttgactattatcaggatctgttcggct

SEQ ID NO: 102927 - DNA, 75 bp, synthetic construct
  source 1..75: mol_type = other DNA
ttacgctggcctgtcgtttggtaatgaagcctctacccgtcaccgttttcaggtgtctaacccgcgactggcggc

SEQ ID NO: 102928 - DNA, 75 bp, synthetic construct
  source 1..75: mol_type = other DNA
attaatgctggcaactccggcgcgtattgcgggctgtaaaaaagtggtgctgtgctcaccgccgccgattgccga

SEQ ID NO: 102929 - DNA, 75 bp, synthetic construct
  source 1..75: mol_type = other DNA
atggaaacgacatttgtgctggatgcactggagcgtcgaccgtccggcactgtccatcacagtgataagggttct

SEQ ID NO: 102930 - DNA, 75 bp, synthetic construct
  source 1..75: mol_type = other DNA
ctggcatcaacagggagtacaggcgactcgtatgacaacgcgatggctgagagcatcaatggtctttacaaagcg

SEQ ID NO: 102931 - DNA, 75 bp, synthetic construct
  source 1..75: mol_type = other DNA
atgacaacggataacacgaacacgaccacgacacgtaacgattcactggctgcacggaccgatacctggttgcag

SEQ ID NO: 102932 - DNA, 75 bp, synthetic construct
  source 1..75: mol_type = other DNA
gcgctaggggctgaaaacagtttgcaactagaattaccctctaaaaaggagcttgaaaataagtacggtgggtta

SEQ ID NO: 102933 - DNA, 75 bp, synthetic construct
  source 1..75: mol_type = other DNA
aagcattgacaaaatggtggaacgatacagcatcacaaagaatatttgactctctaatattgaataatccgggac

SEQ ID NO: 102934 - DNA, 75 bp, synthetic construct
  source 1..75: mol_type = other DNA
atgactattgctgaacggctacggcaggaaggacatcaaattggccgacaagaaggtaaattagaaggtttacag

SEQ ID NO: 102935 - DNA, 75 bp, synthetic construct
  source 1..75: mol_type = other DNA
ccagcaggtcacgcgcccggtcgcttcagttgggttgtatattcctggcggctccgccccgctcttctcaacggt

SEQ ID NO: 102936 - DNA, 75 bp, synthetic construct
  source 1..75: mol_type = other DNA
tccgcacgctggcactacctgactcatgaacaaagttctcctgattttgttccctgggaagttgaaccttttgag

SEQ ID NO: 102937 - DNA, 75 bp, synthetic construct
  source 1..75: mol_type = other DNA
ccggggcagcagtatgatgaggagtccggcctgtattataaccgccaccgctattatgacccgctgcgggggagg

SEQ ID NO: 102938 - DNA, 75 bp, synthetic construct
  source 1..75: mol_type = other DNA
aaacactgggctgtgccagagaagacatctaccaaaaaaatgctcgacggacggatgaaatattcctccatcttt

SEQ ID NO: 102939 - DNA, 75 bp, synthetic construct
  source 1..75: mol_type = other DNA
tcagggggccagtctaatatcaaagaaaatgcttatctggtcgtcccccaaattaattatactatggatttaaac

SEQ ID NO: 102940 - DNA, 75 bp, synthetic construct
  source 1..75: mol_type = other DNA
cacgattattatggggagcggtactgcacacactgccagaccgggcgcttcagtgaggagggggtagcagaatga

SEQ ID NO: 102941 - DNA, 75 bp, synthetic construct
  source 1..75: mol_type = other DNA
tgatagtgtcatttctttgtgtgtataatataaaacttactttctcgcttctcacaaaagaactgtcaactttaa

SEQ ID NO: 102942 - DNA, 75 bp, synthetic construct
  source 1..75: mol_type = other DNA
actgaaatcggacaaaaaagcgttgttccgggccgccgggcaggcccgccaggcctgtgagtttttactgaatgt

SEQ ID NO: 102943 - DNA, 75 bp, synthetic construct
  source 1..75: mol_type = other DNA
gactttggagtgaaagaaaaaaactccgtaattatcgaaaatagcaattatgatttagcaaagaaagaatatgtt

SEQ ID NO: 102944 - DNA, 75 bp, synthetic construct
  source 1..75: mol_type = other DNA
gtttccactgtttgccctggtctgggggctgaatctgtcccgccatgcgcatatccggcagccggccattaaccg

SEQ ID NO: 102945 - DNA, 75 bp, synthetic construct
  source 1..75: mol_type = other DNA
ttaataaacagtgtagcaaaaacagctcaatctgagttaagaagcgaggggggggcaactgtcactataaacttc

SEQ ID NO: 102946 - DNA, 75 bp, synthetic construct
  source 1..75: mol_type = other DNA
atggtgaattaccgtcttatatcactggcgctgacactcgacccgctggagattcgcgaccttcacaaactggta

SEQ ID NO: 102947 - DNA, 75 bp, synthetic construct
  source 1..75: mol_type = other DNA
ggcggaccccggtctgttaggcgttaacgcgggcgccacgctggcgattgtgctgtcgattgcctttttaaatgt

SEQ ID NO: 102948 - DNA, 75 bp, synthetic construct
  source 1..75: mol_type = other DNA
ctgcgtgccggttacagtcgttccgtgggaagaatgctggtactgagcctactggcgacgctgagtacaattgta

SEQ ID NO: 102949 - DNA, 75 bp, synthetic construct
  source 1..75: mol_type = other DNA
tagcgctgacaccggcacaccttccccgtgaaatacaccggctggagcctgaagaaagctgttgcccggagtgtg

SEQ ID NO: 102950 - DNA, 75 bp, synthetic construct
  source 1..75: mol_type = other DNA
tacagaaaaagctgcgcaaatagtggcagctaccggacgactggactctgtcgcccgaatgattgatgaaaccgg

SEQ ID NO: 102951 - DNA, 75 bp, synthetic construct
  source 1..75: mol_type = other DNA
ccctcgccctctgttcaggataaaccagccagcactgacaataccaacgtcaacggcgaagacatgactgagatt

SEQ ID NO: 102952 - DNA, 75 bp, synthetic construct
  source 1..75: mol_type = other DNA
aaaaatgcgcccgttcgtttctgattccgcacgctggcattacctgacccatgagcaaagttctcctgattttgt

SEQ ID NO: 102953 - DNA, 75 bp, synthetic construct
  source 1..75: mol_type = other DNA
tattgtatattttattcctttgttattattggcaacattctttttccctcttgttgtattgatatttattggtgc

SEQ ID NO: 102954 - DNA, 75 bp, synthetic construct
  source 1..75: mol_type = other DNA
aaactgagattgaggatactttaaagccacttagacaaccgagacagccacgaattagcggaagcagagcaatta

SEQ ID NO: 102955 - DNA, 75 bp, synthetic construct
  source 1..75: mol_type = other DNA
ccatatcagaaaacggcgctggcaacgtttattttcaacaccggtgttaccgcattcagtaaatcaacgctgctg

SEQ ID NO: 102956 - DNA, 75 bp, synthetic construct
  source 1..75: mol_type = other DNA
tgtcaggccggaacgcagagaaatacggttgattaaacgtctgcagcaattcgtcccggataccttacccgtggt

SEQ ID NO: 102957 - DNA, 75 bp, synthetic construct
  source 1..75: mol_type = other DNA
tcgagagaatatcatgttccagagagtgcaatcccagacattacatatcataaattaaaagagtgtaaaacagcg

SEQ ID NO: 102958 - DNA, 75 bp, synthetic construct
  source 1..75: mol_type = other DNA
gtggctctacggggtctgccggtgctcatactcatggtaatggtattcgttggccaggaggcggcggttctgcgt

SEQ ID NO: 102959 - DNA, 75 bp, synthetic construct
  source 1..75: mol_type = other DNA
atgtacgcaaaatcctttctcgcacttgatggcaacggacgtctgactggtgcccgtaccgcacagattgcgcca

SEQ ID NO: 102960 - DNA, 75 bp, synthetic construct
  source 1..75: mol_type = other DNA
gctgtaggtggtatctggaacttaattagggctatttccacgcttggaaatgtagcaaatacagcagcaggaaga

SEQ ID NO: 102961 - DNA, 75 bp, synthetic construct
  source 1..75: mol_type = other DNA
atctggaccagtcgtggatgtttctggccgggcgcggggcctttccgctgtttgccctggtgtgggggctgaatc

SEQ ID NO: 102962 - DNA, 75 bp, synthetic construct
  source 1..75: mol_type = other DNA
cctgaactggctctacagcccgcaggcgcaaaccatcatcaccgactattactaccgcgtaaataacccggaagt

SEQ ID NO: 102963 - DNA, 75 bp, synthetic construct
  source 1..75: mol_type = other DNA
tatgccgccagcgcagccggtagcggacagcgagccggtggcggtaattgacctggctaaccttgattatctcct

SEQ ID NO: 102964 - DNA, 75 bp, synthetic construct
  source 1..75: mol_type = other DNA
taatgctggcggtcagccacaggctgtacagggagaaagacagaacggaacgtctggcgctggttgcctgcctgc

SEQ ID NO: 102965 - DNA, 75 bp, synthetic construct
  source 1..75: mol_type = other DNA
ccggcttcgcctgcgatgcaaaacagtggagatactcaactggcaagaaaatataatcgcgaaggtgaagctgtt

SEQ ID NO: 102966 - DNA, 75 bp, synthetic construct
  source 1..75: mol_type = other DNA
cggcaggggatcccctgcccgtggcgttactgcaacgatcgcgacgtgcgcacaattgttgaactgggaaaaacc

SEQ ID NO: 102967 - DNA, 75 bp, synthetic construct
  source 1..75: mol_type = other DNA
gcggtgatgttgcagtccgaaacgctgtcaggctctgtctggctactggttgtattatttatcctgcttaatggt

SEQ ID NO: 102968 - DNA, 75 bp, synthetic construct
  source 1..75: mol_type = other DNA
cttcgggcagcattagtttggggacttcatttgctgataataaagatgctctattaatcgtcaaaaaagaggggt

SEQ ID NO: 102969 - DNA, 75 bp, synthetic construct
  source 1..75: mol_type = other DNA
tgtattatttatcctgcttaatggtttcttctttttcgatgtctacccacgctaccgctatgaagatatcgacgt

SEQ ID NO: 102970 - DNA, 75 bp, synthetic construct
  source 1..75: mol_type = other DNA
tgatatcgaagagttagatattaatagacataacaatataaaaacgatgttaccagatataaatatagggttagg

SEQ ID NO: 102971 - DNA, 75 bp, synthetic construct
  source 1..75: mol_type = other DNA
tgatttagcaaagaaagaatatgtttatattaatgatcttccattcaaagtaaatagtgttgcaagtaaaaagaa

SEQ ID NO: 102972 - DNA, 75 bp, synthetic construct
  source 1..75: mol_type = other DNA
agcactattaatatgctgcgcctcagcgatcccgacgctgcactcattatcagccggggccagatgcaggaaggg

SEQ ID NO: 102973 - DNA, 75 bp, synthetic construct
  source 1..75: mol_type = other DNA
tgatgattcacatcttacagacgaagtggttaacgccgctttcgaaggtaccaatttcgggcgcactgatttccg

SEQ ID NO: 102974 - DNA, 75 bp, synthetic construct
  source 1..75: mol_type = other DNA
tcgcttatgcctggatgcagcagatagacagcggtacagcagtaacagcaggcgccgtcacagccaatgcaacgt

SEQ ID NO: 102975 - DNA, 75 bp, synthetic construct
  source 1..75: mol_type = other DNA
cgtaaatcccaaataaaggatggacgttcttcggcaaaagaaccgtggcttatctttagcagtacgaatgacgtt

SEQ ID NO: 102976 - DNA, 75 bp, synthetic construct
  source 1..75: mol_type = other DNA
acgattcactggctgcccggaccgatacctggttgcagtcgttgctggtctggtcacccggacagcgggatatca

SEQ ID NO: 102977 - DNA, 75 bp, synthetic construct
  source 1..75: mol_type = other DNA
caatgtcgccacgattattatggggaacgctattgtacacattgtcatacagggcgtttcagtgaggaggcagca

SEQ ID NO: 102978 - DNA, 75 bp, synthetic construct
  source 1..75: mol_type = other DNA
gctcacatccaccagcagagcggggattcatctgatgatcgaccttgaaaccatgggaaaaatcccgatgccccg

SEQ ID NO: 102979 - DNA, 75 bp, synthetic construct
  source 1..75: mol_type = other DNA
atgacaacggataacacgaacacgacacgtaacgattcactggctgcccggaccggtaccaggctgcagtcgttt

SEQ ID NO: 102980 - DNA, 75 bp, synthetic construct
  source 1..75: mol_type = other DNA
ccaccggctgtaccgggcggaagacagaacggaacgtctggcgctggttgcatgcctgctggccgtgattccggc

SEQ ID NO: 102981 - DNA, 75 bp, synthetic construct
  source 1..75: mol_type = other DNA
cgggttcagacggaggatcagatgctccacggtatgctggattatctgtattcccagggaatgctcctgaaatgg

SEQ ID NO: 102982 - DNA, 75 bp, synthetic construct
  source 1..75: mol_type = other DNA
ggcaccagttacggtattgccgggctgctgatgctggcggtcagtcaccggctgtaccgggcggaagacagaacg

SEQ ID NO: 102983 - DNA, 75 bp, synthetic construct
  source 1..75: mol_type = other DNA
gcgtgaaggaagggaagccctggattcgctgacccgtttactgaatctcggttcggtttatccgtttcagcgtga

SEQ ID NO: 102984 - DNA, 75 bp, synthetic construct
  source 1..75: mol_type = other DNA
cacgcggacacaatatgcagagccgctggtcgaaagtcgctatctttacgacccgctgggccgcagggtggcaaa

SEQ ID NO: 102985 - DNA, 75 bp, synthetic construct
  source 1..75: mol_type = other DNA
ctggtggagtacacccgcgaccgcctgcaccgggaaacgctgcgcagcttcggccgttatgaactcaccaccgct

SEQ ID NO: 102986 - DNA, 75 bp, synthetic construct
  source 1..75: mol_type = other DNA
gaccggaatttagcaagaccatcgatctggatactgctggcggagtcattgatcgtgacgtcattaaatggtggc

SEQ ID NO: 102987 - DNA, 75 bp, synthetic construct
  source 1..75: mol_type = other DNA
tccgttgttaactattacaatgttactctgattgatgatcatggaaactatttgagtgaaaaaataaaaactgct

SEQ ID NO: 102988 - DNA, 75 bp, synthetic construct
  source 1..75: mol_type = other DNA
ttgggtttcagcggcagcgatgagcaggtactggaaaaggttgcccgccaggcaccgcactggctttccagcgtc

SEQ ID NO: 102989 - DNA, 75 bp, synthetic construct
  source 1..75: mol_type = other DNA
atgccgcatccggtagtcctgaatcgtgcgggggcaaccccgcacacatcaataatcccgcccttcccctgtgct

SEQ ID NO: 102990 - DNA, 75 bp, synthetic construct
  source 1..75: mol_type = other DNA
ccgatcagaaacgacaaatcgtggcgcagttccgtcagaactccttgctgcgactggctcctggcgacgatgcgg

SEQ ID NO: 102991 - DNA, 75 bp, synthetic construct
  source 1..75: mol_type = other DNA
atctcaatgaactccttgccgctgacaacccgattagcgaactaaaagtctttgatttacgtgaaagcatggcaa

SEQ ID NO: 102992 - DNA, 75 bp, synthetic construct
  source 1..75: mol_type = other DNA
ccggtgatgctgggtaatattatcggcggtgcagtgctggtgagtatgtgttatcgggctatttatttacgtcag

SEQ ID NO: 102993 - DNA, 75 bp, synthetic construct
  source 1..75: mol_type = other DNA
tcgtgtttctcgcatcacccgcacggcttccggtgcaaatgccggtggcggaaataaaacggatcgtaatcctga

SEQ ID NO: 102994 - DNA, 75 bp, synthetic construct
  source 1..75: mol_type = other DNA
agtatgaagtccgggtgacgctgaccggtacagaagacagtgaacagcccggctttctggcgctggatgcgtcct

SEQ ID NO: 102995 - DNA, 75 bp, synthetic construct
  source 1..75: mol_type = other DNA
tacacgtcgaacgtgtcgtttccggccatcagtcctgctgcgctttcgcaggggcaatcagtcagcgcgcctctc

SEQ ID NO: 102996 - DNA, 75 bp, synthetic construct
  source 1..75: mol_type = other DNA
cgagttagagtttttccagtatcgattttccgattcgtttgggggtaacccaccgttatattcgtgcggtcttag

SEQ ID NO: 102997 - DNA, 75 bp, synthetic construct
  source 1..75: mol_type = other DNA
gcgaggacgacgaagatggtcttgttagtctgcagcgtttcgcagttgggttagtccagagcttgatggctgaga

SEQ ID NO: 102998 - DNA, 75 bp, synthetic construct
  source 1..75: mol_type = other DNA
gtgtgcaggaaaatcactaccccgtttctggtacggggattttttcccgacgttctatgcctgtcatctggctgt

SEQ ID NO: 102999 - DNA, 75 bp, synthetic construct
  source 1..75: mol_type = other DNA
tttgagcactgtatcgccaatttgtttgtgattccgttcgccattgccattcgccatttcgcccctacctccttc

SEQ ID NO: 103000 - DNA, 75 bp, synthetic construct
  source 1..75: mol_type = other DNA
tgcaacgcctgcataaagcgggatatcgtctggtgatgctaaccggggataacccaaccaccgccaatgcgatcg

SEQ ID NO: 103001 - DNA, 75 bp, synthetic construct
  source 1..75: mol_type = other DNA
taaccgttggtctggtgtcgtgtgcaggaaaatcattaccccgtttctggcctggggatttttttccgacattct

SEQ ID NO: 103002 - DNA, 75 bp, synthetic construct
  source 1..75: mol_type = other DNA
gattattgttgccggtgatgttttcgataccggctcaccgcccagttacgcccgtacgttatataaccgctttgt

SEQ ID NO: 103003 - DNA, 75 bp, synthetic construct
  source 1..75: mol_type = other DNA
ggatatgcgtgaaatgctgaacaaaaaagcggaagagaaaggcgcaacggcctaccagattactgaagctcgtag

SEQ ID NO: 103004 - DNA, 75 bp, synthetic construct
  source 1..75: mol_type = other DNA
agagcggaacgtctggcgctgttggcctgcctgctggccgttattccggcccttaaccttgcctccagtgatgca

SEQ ID NO: 103005 - DNA, 75 bp, synthetic construct
  source 1..75: mol_type = other DNA
agtatggagatgcagggtgaagccgaattattaaatgcacaaagtcaaatggaattctggcgagatccctatggt

SEQ ID NO: 103006 - DNA, 75 bp, synthetic construct
  source 1..75: mol_type = other DNA
aaaaaaaatacaaaaagtcaatgctgttaataataatattcacataatcactaaaaatatcgagcaatatgaatt

SEQ ID NO: 103007 - DNA, 75 bp, synthetic construct
  source 1..75: mol_type = other DNA
ggccggaacctggggaccggttgcctcggtggcgatgattactcgtgatggccgttcctggaatgagtttgagta

SEQ ID NO: 103008 - DNA, 75 bp, synthetic construct
  source 1..75: mol_type = other DNA
ctctgccagagttgtggacttttatcgtcttcagttcagggtggcaagaaagacactgattgaattactgaatgc

SEQ ID NO: 103009 - DNA, 75 bp, synthetic construct
  source 1..75: mol_type = other DNA
ataccatccagaatacgacacggagcgcccatggtttgaacatacggacacaagccttaccagcaatggtcgtca

SEQ ID NO: 103010 - DNA, 75 bp, synthetic construct
  source 1..75: mol_type = other DNA
agagcggaacgtctggcgctgttggcctgcctgctggcagttattccggctcttaaccttgcccccagtgatgca

SEQ ID NO: 103011 - DNA, 75 bp, synthetic construct
  source 1..75: mol_type = other DNA
cggtcgcgcgctatggacggtgaacgttcaggaagtggaaagcgaagatgcagtgtttgatgttcgctgggaagg

SEQ ID NO: 103012 - DNA, 75 bp, synthetic construct
  source 1..75: mol_type = other DNA
gtggtaagtcacgcaccattcgccgcattcagtcgattcactatctggatcgcaaagacccggaaatgcaggagc

SEQ ID NO: 103013 - DNA, 75 bp, synthetic construct
  source 1..75: mol_type = other DNA
agagcggaacgtctggcgctgttggcctgcctgctggctgttattccggcacttaaccttgcccccagtgatgca

SEQ ID NO: 103014 - DNA, 75 bp, synthetic construct
  source 1..75: mol_type = other DNA
taaatagactaaagctactagttaaagaaaaaaaacttgaagataaagtattctttttaggagcactaaaaagat

SEQ ID NO: 103015 - DNA, 75 bp, synthetic construct
  source 1..75: mol_type = other DNA
atgaggtctttgctaccaatggtgacagcaatgtgggcggggcttgggacatgggcgactatcattttcaaacct

SEQ ID NO: 103016 - DNA, 75 bp, synthetic construct
  source 1..75: mol_type = other DNA
gagattgacctcacgccttcggttgctggtggcggggcggtgacgatggagcgcgtagagggcgcggtgaccgtg

SEQ ID NO: 103017 - DNA, 75 bp, synthetic construct
  source 1..75: mol_type = other DNA
tccctggtatgaggggaatatcctgtttgcctttgcagtcgcagcacaggtgctgacgtggtgtgagacgcgcag

SEQ ID NO: 103018 - DNA, 75 bp, synthetic construct
  source 1..75: mol_type = other DNA
gcgatttttaacgatgaagagaaattcgctgtccattcggcgttgccgcaggtggctttgctcggtgatgagggg

SEQ ID NO: 103019 - DNA, 75 bp, synthetic construct
  source 1..75: mol_type = other DNA
gtcaattatcagcctgttggcacagtactggcgcgctcagtttttcggctggttccagcaatacgtaacagtgat

SEQ ID NO: 103020 - DNA, 75 bp, synthetic construct
  source 1..75: mol_type = other DNA
ctatcaaaggctttctaacttcacctaaaaatatatggtggatgttaaaagattttaaacggtataatgaatttc

SEQ ID NO: 103021 - DNA, 75 bp, synthetic construct
  source 1..75: mol_type = other DNA
gaacgccgggcggtgaatccggcggtgatgatgaacgatacgctgtttaatgcgctcaatgactgggtggatcgt

SEQ ID NO: 103022 - DNA, 75 bp, synthetic construct
  source 1..75: mol_type = other DNA
ggtgtatgacagcgaagattaccaggaagggatgaacgctttcctcgaaaaacgtaaacctaatttcgttggtca

SEQ ID NO: 103023 - DNA, 75 bp, synthetic construct
  source 1..75: mol_type = other DNA
ggcaggaggaatcatcaatgctattcatgacggcaaagaaaaggttcgaaaagcaagatcaaggggaggcgagaa

SEQ ID NO: 103024 - DNA, 75 bp, synthetic construct
  source 1..75: mol_type = other DNA
ctttccgctgtttgccctggtgtgggggctgaatctgtcccgtcatgcgcatatcaggcagtcagccattaaccg

SEQ ID NO: 103025 - DNA, 75 bp, synthetic construct
  source 1..75: mol_type = other DNA
cagtatttctgtttttgatgttatagggcaggactactggggggaagggataacagctaaacgtattgccggtgc

SEQ ID NO: 103026 - DNA, 75 bp, synthetic construct
  source 1..75: mol_type = other DNA
attggcacgctggacgcgtttccggcacaaaactttccgccagccgactacatcgcgctcgggcatattcaccgc

SEQ ID NO: 103027 - DNA, 75 bp, synthetic construct
  source 1..75: mol_type = other DNA
cgcggttgtgttttgatgagcaggggctggaagccgccttacggtatctggatacgttacccgccggtgaacccc

SEQ ID NO: 103028 - DNA, 75 bp, synthetic construct
  source 1..75: mol_type = other DNA
gcgatctggcgtcgattaccgaacagctggaacagtggcgcgatgtatcacaggagccacctgtctggctggata

SEQ ID NO: 103029 - DNA, 75 bp, synthetic construct
  source 1..75: mol_type = other DNA
cgagcgctgccaccatcgaaaacgaaaccattgaccgactggaagccgcactcagcggcctgaaagcggctgccc

SEQ ID NO: 103030 - DNA, 75 bp, synthetic construct
  source 1..75: mol_type = other DNA
acaatgcgctggacgatgcccgtcaccaggcaaaacaagtttcagctatctggcaaaacctgatcccgagtcagg

SEQ ID NO: 103031 - DNA, 75 bp, synthetic construct
  source 1..75: mol_type = other DNA
aattgaagcagatatttcagctcaggcatcgcaaggggcaacgcctgtgctgctggcggttgacgggaaagcggt

SEQ ID NO: 103032 - DNA, 75 bp, synthetic construct
  source 1..75: mol_type = other DNA
ttgtgcgctgtagcgaaactggctgatgcagagggtgcttacctcggtacgggtgttcggattaccgggctgctg

SEQ ID NO: 103033 - DNA, 75 bp, synthetic construct
  source 1..75: mol_type = other DNA
cgcgcttatttcaagcagagacatcgttgctgacgccggggatcattgaaatgacaggcgttgctggcgtaccag

SEQ ID NO: 103034 - DNA, 75 bp, synthetic construct
  source 1..75: mol_type = other DNA
gcggcggtggccggccttgtgatgacggtgctgaccgttggtctggtgtcgtgtgcaggaaaatcattaccccgt

SEQ ID NO: 103035 - DNA, 75 bp, synthetic construct
  source 1..75: mol_type = other DNA
gcgcgaaggaagggaagcgctggatacactgactcaattattggatcttggttcggtttatccattccagcgcga

SEQ ID NO: 103036 - DNA, 75 bp, synthetic construct
  source 1..75: mol_type = other DNA
ggcgccgcactggctttccagtgtcagttccgcttcgccaatgtgggtcgcgaatgcggcgacggtggcaccttc

SEQ ID NO: 103037 - DNA, 75 bp, synthetic construct
  source 1..75: mol_type = other DNA
tggcatccagaagtacgagagcttctgccgggatgtatggagatgctcatgctgaatggggggttaaacctaaaa

SEQ ID NO: 103038 - DNA, 75 bp, synthetic construct
  source 1..75: mol_type = other DNA
tcatcacaaaatttgcgatccctggaatacaaatgaacctgctgatctgactcccgctgaaatagcttttttgac

SEQ ID NO: 103039 - DNA, 75 bp, synthetic construct
  source 1..75: mol_type = other DNA
cttggtttatgttggtgcgcataatgtatattatgttaaatatggtgggtttgttcttaagttcatgtgttccgc

SEQ ID NO: 103040 - DNA, 75 bp, synthetic construct
  source 1..75: mol_type = other DNA
cgttaacgttgctcgcaatgcttaaccccggactggatttttccgatgaggtggtgcggaacgcttgggaagtta

SEQ ID NO: 103041 - DNA, 75 bp, synthetic construct
  source 1..75: mol_type = other DNA
cctctgcccatcatcgccacgggacatttaacgaccgtgggtgccagtaaaagtgacgccgtgcgtgacatttat

SEQ ID NO: 103042 - DNA, 75 bp, synthetic construct
  source 1..75: mol_type = other DNA
ctgtgccccataccttttttacgcccgcgtgacattattaccagccaggcggggcttaacggtattgaaaaacag

SEQ ID NO: 103043 - DNA, 75 bp, synthetic construct
  source 1..75: mol_type = other DNA
aggaaaatcattaccccgtttctggcccggagattttttcccgacgttctatgcctgccatctggctgtgctggg

SEQ ID NO: 103044 - DNA, 75 bp, synthetic construct
  source 1..75: mol_type = other DNA
attcacctgctgctctgctacagcgtggtgctggagatgatcacccgcctcgcgccgaacgcggaaatcggcaag

SEQ ID NO: 103045 - DNA, 75 bp, synthetic construct
  source 1..75: mol_type = other DNA
tttccgactcaatctcatatgctaaaacatcaacagacattgatagttcacattataacaatcatattgctgaat

SEQ ID NO: 103046 - DNA, 75 bp, synthetic construct
  source 1..75: mol_type = other DNA
atgaatactatgtacgccaaatccttcatggctcttgacggtaatggccgcctgaccggcgcccgtactgcgcag

SEQ ID NO: 103047 - DNA, 75 bp, synthetic construct
  source 1..75: mol_type = other DNA
cgctatattgcgaagcaaaaaatgacaaggtcagaaaacgccttgggattaaagggggtttttactggactacag

SEQ ID NO: 103048 - DNA, 75 bp, synthetic construct
  source 1..75: mol_type = other DNA
cttggagctgaaaacgttattaagatgaaattgccaactatcattgagcttgaaaataaatttggctctcttgct

SEQ ID NO: 103049 - DNA, 75 bp, synthetic construct
  source 1..75: mol_type = other DNA
cgctatttagagcagttcaaagtatggctttataatgctcaccttaaacaaataacgattgaagaacttaataat

SEQ ID NO: 103050 - DNA, 75 bp, synthetic construct
  source 1..75: mol_type = other DNA
ctgctgatgctggcagtcagccaccggctgtaccgggcggaagacagaacggaacgtctggcgctggttgcatgc

SEQ ID NO: 103051 - DNA, 75 bp, synthetic construct
  source 1..75: mol_type = other DNA
ctctgggcattaaaataaaaaacgacaaggaaataagtttgttattaatttctatgatcccaatcagaccgcgac

SEQ ID NO: 103052 - DNA, 75 bp, synthetic construct
  source 1..75: mol_type = other DNA
gctcgtttcaccactctgtacggttgctctgtacttgttcctgaatatacgggcatcgttattgccgggcagtaa

SEQ ID NO: 103053 - DNA, 75 bp, synthetic construct
  source 1..75: mol_type = other DNA
agcgccgcagcctggcggatacccttcagcagtccggcggcgaagacggtggcagtgtggtgttcccgccggtgc

SEQ ID NO: 103054 - DNA, 75 bp, synthetic construct
  source 1..75: mol_type = other DNA
acccggcaggtaaccgcctgcccgacccggagctgcacccggacagcgccctcagcatgtggccggataaccgta

SEQ ID NO: 103055 - DNA, 75 bp, synthetic construct
  source 1..75: mol_type = other DNA
acaggtttccgtgtcggatgcggtgtctacgtatctgtttaacagccagttactgagccgcgatgatggttccat

SEQ ID NO: 103056 - DNA, 75 bp, synthetic construct
  source 1..75: mol_type = other DNA
acgccaggcaccgcactggctttccagcgtcagctccgcttcgccaatgtgggtagccaatgcggcaacgatcgc

SEQ ID NO: 103057 - DNA, 75 bp, synthetic construct
  source 1..75: mol_type = other DNA
gatttcgctaatgagcgtggttggtctattgctgcgcgatacatcgagaacgccagcggtgcgcggctggagcgt

SEQ ID NO: 103058 - DNA, 75 bp, synthetic construct
  source 1..75: mol_type = other DNA
cacgcaacgccgcactacaatttgcaacggactcaggtagccaggtggggtcaattagcgatgcctcacaaggcg

SEQ ID NO: 103059 - DNA, 75 bp, synthetic construct
  source 1..75: mol_type = other DNA
atgatgcgccactgactcatgctgatgcctgccggatggacagcgaatatctggcgctgcttacggcctgttccc

SEQ ID NO: 103060 - DNA, 75 bp, synthetic construct
  source 1..75: mol_type = other DNA
cacgtaacgattcactggttgcccggaccgatacctggttgcagtcgttgctggtctggtcacccggacagcggg

SEQ ID NO: 103061 - DNA, 75 bp, synthetic construct
  source 1..75: mol_type = other DNA
acaataaacatcaaaagcgtacgcaactgctgcactggcctgtggataatcccttcagcgccagcgagcgccgcg

SEQ ID NO: 103062 - DNA, 75 bp, synthetic construct
  source 1..75: mol_type = other DNA
ttcttgctgcatcattatcggcattatcaactgacatgattgtgcctgcgttaccagaactacagaaagcatttc

SEQ ID NO: 103063 - DNA, 75 bp, synthetic construct
  source 1..75: mol_type = other DNA
aagtattactggtgcgtcgcagtcgggagcagcgcgagcgtgtgttagccagccaacagcgtgaaacactcagcg

SEQ ID NO: 103064 - DNA, 75 bp, synthetic construct
  source 1..75: mol_type = other DNA
atttttcatcattggaaaccaattatcaaaaatcgaaaaaatatcagatccatgggttttatttcctctaaatgc

SEQ ID NO: 103065 - DNA, 75 bp, synthetic construct
  source 1..75: mol_type = other DNA
atgagaagaagattgtagatgttattaacacatggtctatagatgaaaaactaacctgggatgctttgtgcgaca

SEQ ID NO: 103066 - DNA, 75 bp, synthetic construct
  source 1..75: mol_type = other DNA
aagccgatcttgaaaatcctttttcccggatgacagagtccagattgttaactgattttacgcagacgcctcaga

SEQ ID NO: 103067 - DNA, 75 bp, synthetic construct
  source 1..75: mol_type = other DNA
gcagtggtggtacgccggtttcgtgtgaaacagcagtcgcagcgatgggaagtgcaatggtatggccgctattgc

SEQ ID NO: 103068 - DNA, 75 bp, synthetic construct
  source 1..75: mol_type = other DNA
agctcgatgagtttgtgcgtaatcacgccgaaaccgccttccacccatgcggtacgtgcaaaatggggtacgacg

SEQ ID NO: 103069 - DNA, 75 bp, synthetic construct
  source 1..75: mol_type = other DNA
tttcgtacccgtgaatgtcttccggcactatttgaaggatttaacgacaattgtgtgctgatacacggtaacttc

SEQ ID NO: 103070 - DNA, 75 bp, synthetic construct
  source 1..75: mol_type = other DNA
tgcggctgatattacccagtggattgacgggcagcagtttggtctgggccatattgagcctgcggtattcaccac

SEQ ID NO: 103071 - DNA, 75 bp, synthetic construct
  source 1..75: mol_type = other DNA
gaggggattagggttctccggccattaaattcaacaaacagccctgagccccgtaatggtcagtttggtgagagg

SEQ ID NO: 103072 - DNA, 75 bp, synthetic construct
  source 1..75: mol_type = other DNA
ggtcgggatacggtactgaacggtgctcaggtcaacggcaacaggattatcgccgatgtggaccacgacctgctg

SEQ ID NO: 103073 - DNA, 75 bp, synthetic construct
  source 1..75: mol_type = other DNA
gtggtaatggtgccggtatcagcgtctttgccagcgttaatgcggcaaaaggcagcgagaaaggtaacggtactg

SEQ ID NO: 103074 - DNA, 75 bp, synthetic construct
  source 1..75: mol_type = other DNA
cgagaaaatagcggatatgattcgtgggaaggaagcgttgccgaggagcacggcgggatattttgtggcaaatgg

SEQ ID NO: 103075 - DNA, 75 bp, synthetic construct
  source 1..75: mol_type = other DNA
gatgtcatctgcgtgatggaacaaaaacataaaaagcagctaatcgcggattttcgtcgtttaatcgaacacaaa

SEQ ID NO: 103076 - DNA, 75 bp, synthetic construct
  source 1..75: mol_type = other DNA
aaagtcactaccgttgtcatggccgtctggttaagcggatcaacctctcaattcacagggtgacaatggtagtga

SEQ ID NO: 103077 - DNA, 75 bp, synthetic construct
  source 1..75: mol_type = other DNA
ttggcccgatggatcgcaccgtcacgccacagggccgtcgcgccagcaccgcgcggggttatctcgatcaggcca

SEQ ID NO: 103078 - DNA, 75 bp, synthetic construct
  source 1..75: mol_type = other DNA
ggagtgtggacatcgtgggctgaccagtctggtggacgagttaggccgctgccatgaagaatgtccggtcgagga

SEQ ID NO: 103079 - DNA, 75 bp, synthetic construct
  source 1..75: mol_type = other DNA
gcggtaatttatacccttttccttgcactggttctttatcgtgaaatctcagttaaagatttacctaaaatattt

SEQ ID NO: 103080 - DNA, 75 bp, synthetic construct
  source 1..75: mol_type = other DNA
ctggcgttcccgctacagggcaaacgctataactgggcctatgagacggaacccgaaccgtttatgaacaaccgc

SEQ ID NO: 103081 - DNA, 75 bp, synthetic construct
  source 1..75: mol_type = other DNA
tgcgcggcatggaaacactgcgtatttttggtcgtggtgaagctgaaattgaaagtattcgttctgcttcggaag

SEQ ID NO: 103082 - DNA, 75 bp, synthetic construct
  source 1..75: mol_type = other DNA
cgatcttcagcgcattaaccgtgacttaagcgaggcgctcgaacggcaggtgatgacactgtccgggcagggata

SEQ ID NO: 103083 - DNA, 75 bp, synthetic construct
  source 1..75: mol_type = other DNA
aaaccttcccgccccgatgagcgtaatgaacaccgtcaggtccgcatcacacggggtcttaaaaatcagcgggga

SEQ ID NO: 103084 - DNA, 75 bp, synthetic construct
  source 1..75: mol_type = other DNA
gcgatcacttttatatcggttcgaataaggagatggcccgcgaatttatcgacgccgtggcgatgtgggcgaaag

SEQ ID NO: 103085 - DNA, 75 bp, synthetic construct
  source 1..75: mol_type = other DNA
gcgcaaagcaatgcagatggtcagatgcgggttgtgctgtctgcctcgctgtgggtgctgatcgaccgggcagca

SEQ ID NO: 103086 - DNA, 75 bp, synthetic construct
  source 1..75: mol_type = other DNA
acccgaaccgtttatgaacaaccgccgcatggagtgcggacgcggcaaaggtctgggcggttcatcgctgatcaa

SEQ ID NO: 103087 - DNA, 75 bp, synthetic construct
  source 1..75: mol_type = other DNA
aataaaaccggcaaagatctcagcaacattgggggttatgccagctatgaatcgccatggggaacgctagctggg

SEQ ID NO: 103088 - DNA, 75 bp, synthetic construct
  source 1..75: mol_type = other DNA
tgtgattcataaaaaaatcccggtaaaatatgttcaggcaccatcctataaagaaatatttgaggtgctgagtga

SEQ ID NO: 103089 - DNA, 75 bp, synthetic construct
  source 1..75: mol_type = other DNA
actggaaaccacgcttcacatggcgtccagtaagatcagtacgatagtgaatgaactggatgtgattctgacagc

SEQ ID NO: 103090 - DNA, 75 bp, synthetic construct
  source 1..75: mol_type = other DNA
aaccccggcatcattaacgtggtgaaagatatggcggaggtaatcgttgagccacgtcttgataaagccaataac

SEQ ID NO: 103091 - DNA, 75 bp, synthetic construct
  source 1..75: mol_type = other DNA
gctactgcctgatgttcccggcgctcaaacgacgaagtttaataaagaccattttatcaagcgtggtgtaacgga

SEQ ID NO: 103092 - DNA, 75 bp, synthetic construct
  source 1..75: mol_type = other DNA
gcgtgacgctggctgcggggtttctggccctgatccttgcgccggagtttttccagccattgcgcgatctgggta

SEQ ID NO: 103093 - DNA, 75 bp, synthetic construct
  source 1..75: mol_type = other DNA
tgatattgttaaaataataagttggctttatgcctatccaatgttgtctcgtggtgcaacaaaatggtatgtgtc

SEQ ID NO: 103094 - DNA, 75 bp, synthetic construct
  source 1..75: mol_type = other DNA
atattctcgatgcctgtgaaaaagcgatgagcgccgtcgatccggatctcgattttattcgtgtggatgaagagg

SEQ ID NO: 103095 - DNA, 75 bp, synthetic construct
  source 1..75: mol_type = other DNA
gcaatatctgctttaaaagagccaaaaactgagatgtcttactttactgagtctgaggttaagcggttattatcc

SEQ ID NO: 103096 - DNA, 75 bp, synthetic construct
  source 1..75: mol_type = other DNA
gcccatccttttggtagtgaaggttacgccaaagaggaacttcgcgcagaaattgccagcatgatcatgggcgat

SEQ ID NO: 103097 - DNA, 75 bp, synthetic construct
  source 1..75: mol_type = other DNA
attatttattggatgcagtgaattataatcctcttgtgggaatgtccacattgtgtccacactttggaggcaaag

SEQ ID NO: 103098 - DNA, 75 bp, synthetic construct
  source 1..75: mol_type = other DNA
gtcgaatggtttttaacgccgcaggggcagagtctggtagaagatgtgggatatgtgccgctgtatccaacaatg

SEQ ID NO: 103099 - DNA, 75 bp, synthetic construct
  source 1..75: mol_type = other DNA
cgttattagttatgaagacttccatcgtcctgaatttaccagcgttccattatttaaagatgaaatggtactggt

SEQ ID NO: 103100 - DNA, 75 bp, synthetic construct
  source 1..75: mol_type = other DNA
tcaggaacgtgacaatgtctacaacggcatgaccctgcgtgaatatgcccgcatggccctgactgagcggggaat

SEQ ID NO: 103101 - DNA, 75 bp, synthetic construct
  source 1..75: mol_type = other DNA
agatattataaaaatattagcatggctttatgcgtttcccatgttatcaagatgtgcagttaaatggtatctttt

SEQ ID NO: 103102 - DNA, 75 bp, synthetic construct
  source 1..75: mol_type = other DNA
gttttctgcgtttgcggagttcgaaaaatcccgcatcattgaacgcacaaaagagggtttagtaagagccaggaa

SEQ ID NO: 103103 - DNA, 75 bp, synthetic construct
  source 1..75: mol_type = other DNA
tcgtattgagtgcgtcaatgaaaaagcggatacggcgttgtgggctttgtatgacagccagggaaacccaatgcc

SEQ ID NO: 103104 - DNA, 75 bp, synthetic construct
  source 1..75: mol_type = other DNA
ggtagcgcgttatatgccgggaagtctgggcgaactggacagcctgggcttatctggtagcgaaatccgcttcca

SEQ ID NO: 103105 - DNA, 75 bp, synthetic construct
  source 1..75: mol_type = other DNA
agcccgttgatttgaaacgcgtcatgaccgcacgcaagaaatattttacaacatcggcggagaagcaaaatgcta

SEQ ID NO: 103106 - DNA, 75 bp, synthetic construct
  source 1..75: mol_type = other DNA
atagttatccctttagccattattatggccgtagttgtgtatgctggtagggatattgcaatttatattttattt

SEQ ID NO: 103107 - DNA, 75 bp, synthetic construct
  source 1..75: mol_type = other DNA
gtcagatcatagaacaaggccattacgcggatttaagcgtagctaacggtcctttctccacgttgctggcccatc

SEQ ID NO: 103108 - DNA, 75 bp, synthetic construct
  source 1..75: mol_type = other DNA
gttcaaaatactggcaaatggcctaccgtttcgaagggaagcaaaaaatcttctccataggtgtttatcctgctg

SEQ ID NO: 103109 - DNA, 75 bp, synthetic construct
  source 1..75: mol_type = other DNA
tgcaatgcggcaataacgggctcatcacgcgtgatatccgggcggtaatggtaaaccgttctgctcagattgaga

SEQ ID NO: 103110 - DNA, 75 bp, synthetic construct
  source 1..75: mol_type = other DNA
tggataacgcctgggtcagtgagtttctaccgctcctgccgcaaggcattgatacgcctgttggtgaccaggctg

SEQ ID NO: 103111 - DNA, 75 bp, synthetic construct
  source 1..75: mol_type = other DNA
ataaaaattatcgcaatattgtttctttaactcagaatcaatcatttccgttagtgaatcgcctggcagcattta

SEQ ID NO: 103112 - DNA, 75 bp, synthetic construct
  source 1..75: mol_type = other DNA
tcatatcagggatcattacgaatcaacgggatagaattacgcgatttatcaccggaatcatggcgtaaacatctc

SEQ ID NO: 103113 - DNA, 75 bp, synthetic construct
  source 1..75: mol_type = other DNA
aaaaccacatctggtttctggagcatgatgcagccggacagggagtggagttactgaagaaggggggacgtgtga

SEQ ID NO: 103114 - DNA, 75 bp, synthetic construct
  source 1..75: mol_type = other DNA
tctaagcgagttggaaaatatgtctcctgatgaccttcatgaagaatatgggaatatatcattatttaattgggt

SEQ ID NO: 103115 - DNA, 75 bp, synthetic construct
  source 1..75: mol_type = other DNA
agcaaacggtatttcgcggttactgaaacgctgggatctgtcatatagagaggtaacttatttgggtgatgcttc

SEQ ID NO: 103116 - DNA, 75 bp, synthetic construct
  source 1..75: mol_type = other DNA
cttatttccttctttcctgagctaaaagatgaaatctcttttgtcgcggaaaatggcgcgctggtctacgaacat

SEQ ID NO: 103117 - DNA, 75 bp, synthetic construct
  source 1..75: mol_type = other DNA
cgttttatcatgctaaagcccaggctgttggcgcggcggacagtctgaaaacgtttatggaaaccccgctcgccc

SEQ ID NO: 103118 - DNA, 75 bp, synthetic construct
  source 1..75: mol_type = other DNA
acgtttatggaaaccccgctcgcccatccgcaacgtggtgaggcggaattagcatcgaccgatccggtgaccatt

SEQ ID NO: 103119 - DNA, 75 bp, synthetic construct
  source 1..75: mol_type = other DNA
caccgccgctcccaccattggtaaaaaatggtacgtgtacgataatgcgatactaaatcagcttgagcatcgtct

SEQ ID NO: 103120 - DNA, 75 bp, synthetic construct
  source 1..75: mol_type = other DNA
acgaaaagcatacgcaagcggcagagtatttaggcgtttcttatcgacatcttttatatgttctcgcgcaattca

SEQ ID NO: 103121 - DNA, 75 bp, synthetic construct
  source 1..75: mol_type = other DNA
caaccggacatgcagacggctgaacaggattttttaaaccgacaccctgacgcggttgtgttcagtgcgaaaaaa

SEQ ID NO: 103122 - DNA, 75 bp, synthetic construct
  source 1..75: mol_type = other DNA
tatatagcttttcatcagacagagcattatgcatggttggttcctgcgcattggattgttaattttaaaccagca

SEQ ID NO: 103123 - DNA, 75 bp, synthetic construct
  source 1..75: mol_type = other DNA
cgcttgccgcgacacttgatgcgcagggatacagtgttaacgacatcatccatatcctgatggcagaaggaggtc

SEQ ID NO: 103124 - DNA, 75 bp, synthetic construct
  source 1..75: mol_type = other DNA
gaactcagcaaagacacgctgggtcgttacattcttgcaaatccgtcagcactggccggtcctaccctgtggggc

SEQ ID NO: 103125 - DNA, 75 bp, synthetic construct
  source 1..75: mol_type = other DNA
aaaaacagaaagcagttgtcaggactggcgctggagatggacccggaaaataaattctcagggatgatgcagtaa

SEQ ID NO: 103126 - DNA, 75 bp, synthetic construct
  source 1..75: mol_type = other DNA
aacctcgtaaaaagtattcgaatgaattcaaacttcgtatggttaaactggcttcacaacccggtggctgtgtgg

SEQ ID NO: 103127 - DNA, 75 bp, synthetic construct
  source 1..75: mol_type = other DNA
atgaaaccatatcagcgccagtttattgaatttgcgcttggcaagcaggtgttaaagtttggcgagtttacgctg

SEQ ID NO: 103128 - DNA, 75 bp, synthetic construct
  source 1..75: mol_type = other DNA
atactgaagcgtagtggacttgtgtacagaggggaacggtcagaatcgtttgatcctgagaaacattttaatcgt

SEQ ID NO: 103129 - DNA, 75 bp, synthetic construct
  source 1..75: mol_type = other DNA
gcagagtatttaggtgttacttatcgtcacttgctatatgtgatcgctcaactcattcacgacggtttattaatt

SEQ ID NO: 103130 - DNA, 75 bp, synthetic construct
  source 1..75: mol_type = other DNA
tgtacatgctgaaggtgcagaaaacgaaaaacggcattccgtatgttgccggtattggtgcggggattgaggatg

SEQ ID NO: 103131 - DNA, 75 bp, synthetic construct
  source 1..75: mol_type = other DNA
gattcgctaaattattatagattgtcaattgaatcctgtaatacagagaaattgttttttgatgcaagaaaatat

SEQ ID NO: 103132 - DNA, 75 bp, synthetic construct
  source 1..75: mol_type = other DNA
atagtaattggtgaggtcgtacatcttaaactatatattaattatgacatatctgtaaagcctgtttatgtatgt

SEQ ID NO: 103133 - DNA, 75 bp, synthetic construct
  source 1..75: mol_type = other DNA
tgagcttatcaggctggaaaatgccgataagcgtagcgatgcgctggtatcaaaattcaccaaagacccttcaca

SEQ ID NO: 103134 - DNA, 75 bp, synthetic construct
  source 1..75: mol_type = other DNA
actccaggcgtactggggaatgccgcggcgtattcgtattgattttaataccacgacagtcggcaactgcgatat

SEQ ID NO: 103135 - DNA, 75 bp, synthetic construct
  source 1..75: mol_type = other DNA
gtgatcaccgccggaacggcgattcgcgagtcgatggaaattattcaggccaatggcgcgacgcttgctggcgtg

SEQ ID NO: 103136 - DNA, 75 bp, synthetic construct
  source 1..75: mol_type = other DNA
tgtgaaggggatacacgcagacattttccgcgccagataaagatatcgccggaggcggaacggcaaccagttcgt

SEQ ID NO: 103137 - DNA, 75 bp, synthetic construct
  source 1..75: mol_type = other DNA
ccgcaccggtttacgcggcggtgggccgatgaccactctgattgaattacaggaatatcagggtaatcaacaaac

SEQ ID NO: 103138 - DNA, 75 bp, synthetic construct
  source 1..75: mol_type = other DNA
caggaaaaggaattatagtttcaacccctatcaacatgagcggcgcggcaattggtagtagtattaaaggcgagg

SEQ ID NO: 103139 - DNA, 75 bp, synthetic construct
  source 1..75: mol_type = other DNA
aaagttacgccggattgcccggttgagtatcagccgcgtctcaatgagttacaggggctatataatgatcatcca

SEQ ID NO: 103140 - DNA, 75 bp, synthetic construct
  source 1..75: mol_type = other DNA
gagaagctttattgcttcccttcgccatgctggtgctgacctttatactgcgcgcgtgggtagtttggttgcgcg

SEQ ID NO: 103141 - DNA, 75 bp, synthetic construct
  source 1..75: mol_type = other DNA
ggcaggaatcctggtcgttgatcgcaaggtctggcgaacggtgtattaccggttcgctaccagggaggagcggga

SEQ ID NO: 103142 - DNA, 75 bp, synthetic construct
  source 1..75: mol_type = other DNA
ggaaaaccaccatgctggcgcgcagcgggactatccgtatgccaactatttatggtgtgatgacacatgaagaac

SEQ ID NO: 103143 - DNA, 75 bp, synthetic construct
  source 1..75: mol_type = other DNA
tgatctgcagtatctcagaggtctgcagtggatgcctgagcataatgacgggacagggcccgatattttgttgct

SEQ ID NO: 103144 - DNA, 75 bp, synthetic construct
  source 1..75: mol_type = other DNA
atgattatcgctatatggacccggagttaattacgcttctggaagatatcgttgtggagaaacttggcctgggcg

SEQ ID NO: 103145 - DNA, 75 bp, synthetic construct
  source 1..75: mol_type = other DNA
gagaatgtgcgtcgcaatgaccagaaggtaaaaggcacgtaccgatttatcagccagccggtgaaagaggtgatt

SEQ ID NO: 103146 - DNA, 75 bp, synthetic construct
  source 1..75: mol_type = other DNA
gtgccggctcagccggcaacgttctcgctacccgtctgactgaagatccgaacacaaccgtgctgctgcttgaag

SEQ ID NO: 103147 - DNA, 75 bp, synthetic construct
  source 1..75: mol_type = other DNA
cgttcatatcgacggtctggccgcgtctatggcctcggtcattgctatggtaggtaatccggtcatcatgcctga

SEQ ID NO: 103148 - DNA, 75 bp, synthetic construct
  source 1..75: mol_type = other DNA
tcagtaaaaatttttacatcattatccaatgtgaatgtctggaaggaaagcttgaagaagtaaactttgaagagg

SEQ ID NO: 103149 - DNA, 75 bp, synthetic construct
  source 1..75: mol_type = other DNA
taatcaatgatgctcaaaaattcgttctagaaagattttcaccagacaaaacttaccttgctgaatttgagatct

SEQ ID NO: 103150 - DNA, 75 bp, synthetic construct
  source 1..75: mol_type = other DNA
ctctctgggatatcgagtaaatcacaaagctggactgtacgctggggaaatcaggcagatcaacaatgtcagttt

SEQ ID NO: 103151 - DNA, 75 bp, synthetic construct
  source 1..75: mol_type = other DNA
atgcgctcgccaagccgtgggcatgtgcggattaaatcccgcgacccgcaccagcatccggcaattctgtttaac

SEQ ID NO: 103152 - DNA, 75 bp, synthetic construct
  source 1..75: mol_type = other DNA
ttgctcttggatcgtccggtgtgcacgcagagtcagagggaggcgttccgtggaatgccaaatctggtgcataca

SEQ ID NO: 103153 - DNA, 75 bp, synthetic construct
  source 1..75: mol_type = other DNA
gcgtgacatcttcagtggtgcaattaccaactggcgtactgttggcggtaacgatcaggagatccagacctggca

SEQ ID NO: 103154 - DNA, 75 bp, synthetic construct
  source 1..75: mol_type = other DNA
gaaggtcaggatgcggatgaattactcggcaaatggcaaaaggaaatttggttattcgcgcgtcaggattttgac

SEQ ID NO: 103155 - DNA, 75 bp, synthetic construct
  source 1..75: mol_type = other DNA
ccatgaaaaccagtgagtttgtgctggaggctgaccgcacgcgaattaacagcgaagtagtgatcaatggtggcg

SEQ ID NO: 103156 - DNA, 75 bp, synthetic construct
  source 1..75: mol_type = other DNA
ttgccgcttcgcttatcgcggtagcttcgtttactcaggcgcaggagatgcttatcaagccggaagatattcatc

SEQ ID NO: 103157 - DNA, 75 bp, synthetic construct
  source 1..75: mol_type = other DNA
aaaccaccgatgaaattgccgccatgctggcggatgaaacctggatgtccggtgccgaatgtctggcacacggat

SEQ ID NO: 103158 - DNA, 75 bp, synthetic construct
  source 1..75: mol_type = other DNA
ctgctcactgtattgattcgtgaactgaccgggaggggaagatgctctcactcccatccggtacccgtatctggc

SEQ ID NO: 103159 - DNA, 75 bp, synthetic construct
  source 1..75: mol_type = other DNA
catatcagtctattcaattttcggacagtaaaagatctttatctgaacgatgatttaatggatgcaataaaacta

SEQ ID NO: 103160 - DNA, 75 bp, synthetic construct
  source 1..75: mol_type = other DNA
gttcagagagcagggggttgataccaaaattttgctaggccattcgaatcaaaaaatgaccgatatttacaacga

SEQ ID NO: 103161 - DNA, 75 bp, synthetic construct
  source 1..75: mol_type = other DNA
gattaactggctgacgctgcgcgccggtggtgcccgtacatggtggtgtccgtcgccggatgagcaggtggtggt

SEQ ID NO: 103162 - DNA, 75 bp, synthetic construct
  source 1..75: mol_type = other DNA
cagcctggcgtaaagcaggcatgaccggtgaacaccttgattttatgctttctgaacttaaacgttttaaaatca

SEQ ID NO: 103163 - DNA, 75 bp, synthetic construct
  source 1..75: mol_type = other DNA
cccgccactgcgtatgcggcgtggcagcattccggcgctggtgaataacaaattacgcagccttgaaaaacgctt

SEQ ID NO: 103164 - DNA, 75 bp, synthetic construct
  source 1..75: mol_type = other DNA
gccgggtgcccggattgtagaattcactgtccctgaacccagctacgccatggtgacaaaccgcagggtcatcca

SEQ ID NO: 103165 - DNA, 75 bp, synthetic construct
  source 1..75: mol_type = other DNA
aaatggcacgctccattggttcaaaacgacccaatgtcatcgggtcaaaatggcctgatgatcttacagagaata

SEQ ID NO: 103166 - DNA, 75 bp, synthetic construct
  source 1..75: mol_type = other DNA
gcgtcaggtagagagaaatttgttatacctgacgtctggttccatgagtgttatatgcgctttgctggtaaagct

SEQ ID NO: 103167 - DNA, 75 bp, synthetic construct
  source 1..75: mol_type = other DNA
cagattgaactattcaaattttactcggtgaaagatctttatctgaacgatgattttatggatgcaataaaacga

SEQ ID NO: 103168 - DNA, 75 bp, synthetic construct
  source 1..75: mol_type = other DNA
ttctggcgcgtcgtgagcagtgtttacggaaaagcagcaagcgcgctgtatcgggtgatgagtggtatctgtcag

SEQ ID NO: 103169 - DNA, 75 bp, synthetic construct
  source 1..75: mol_type = other DNA
accgcctttgcgttgcccgccatctattcgaatcagttcgcgccaccgtcgacgtcggcggatgcctgcgtgaca

SEQ ID NO: 103170 - DNA, 75 bp, synthetic construct
  source 1..75: mol_type = other DNA
ctcagactctggcaaaacgaagggcgtatatcccggcgtcttccggtaacaacctcgacactggcgttgaattat

SEQ ID NO: 103171 - DNA, 75 bp, synthetic construct
  source 1..75: mol_type = other DNA
cggcgggtatcttatccgaaaaatttacggcattttaagggattattatgccattcctgtcacgcgacaggatct

SEQ ID NO: 103172 - DNA, 75 bp, synthetic construct
  source 1..75: mol_type = other DNA
cacaggtgtagtcaccgaagtggaccgggaaaactggctttgtcgggtgaaaacaggcgagcttgaaaccaactg

SEQ ID NO: 103173 - DNA, 75 bp, synthetic construct
  source 1..75: mol_type = other DNA
gtatgtcaggggcatcaaatctatggtcattgaggccgtcgacaacatcaccctgaaaaccagtgagtttgtgct

SEQ ID NO: 103174 - DNA, 75 bp, synthetic construct
  source 1..75: mol_type = other DNA
acgtacaaaggccacacggtcgcaagaatcgacggtatcgccgcatcaatggctaccattgttgcgctcggtgcc

SEQ ID NO: 103175 - DNA, 75 bp, synthetic construct
  source 1..75: mol_type = other DNA
ccggcgcacagtcaggcaagacaacggttgagaataatgcgctcagcttcggtgatggttttgaaagcaatgcag

SEQ ID NO: 103176 - DNA, 75 bp, synthetic construct
  source 1..75: mol_type = other DNA
gatactttcatttcaggaaggcactatcgtctccggttttgatgataatgatactggggatatcagttcactcag

SEQ ID NO: 103177 - DNA, 75 bp, synthetic construct
  source 1..75: mol_type = other DNA
attcgtccagacaaatggctgaacgagcacaacgtgatcgtcgacgtgaaaaaggttgcagatatggaccgtttt

SEQ ID NO: 103178 - DNA, 75 bp, synthetic construct
  source 1..75: mol_type = other DNA
cattgtattttactgtttttggtggggattttattatggatgatttaaaaaaagtaaaaaatacggaagcatggg

SEQ ID NO: 103179 - DNA, 75 bp, synthetic construct
  source 1..75: mol_type = other DNA
gatccgccagcaggtcgccggactggaggcggtgctgaacaacattcccggcaatatcgtgatctcagatattgc

SEQ ID NO: 103180 - DNA, 75 bp, synthetic construct
  source 1..75: mol_type = other DNA
taattattgattccaggccaagtgctcttgatatttctcaaatgagtttacaggaatctattgatagggcatgga

SEQ ID NO: 103181 - DNA, 75 bp, synthetic construct
  source 1..75: mol_type = other DNA
cattgcctgttggtgtaccggttccatggcccaccgccacaccgccagcaggctggttacagtgcaacggagcta

SEQ ID NO: 103182 - DNA, 75 bp, synthetic construct
  source 1..75: mol_type = other DNA
cgcaatggctcacccggcggcacgctggatgctggaagcacctggttactgcgaagcatcaatgtactggaacga

SEQ ID NO: 103183 - DNA, 75 bp, synthetic construct
  source 1..75: mol_type = other DNA
ccgcttcgcccggtggtgtcagccggtgaaccggtcattctgttgccggggcagcagtttgaagtcagcacacct

SEQ ID NO: 103184 - DNA, 75 bp, synthetic construct
  source 1..75: mol_type = other DNA
atggtggttggcgacattatcgagtgcggcagcgacgtaaccgactacgcggtgggcgacagcgtatgcggctaa

SEQ ID NO: 103185 - DNA, 75 bp, synthetic construct
  source 1..75: mol_type = other DNA
accggaatcgtggcgcaaacatctctcctgggttgggcagaatccgcaattaccggcggcaacactacgggataa

SEQ ID NO: 103186 - DNA, 75 bp, synthetic construct
  source 1..75: mol_type = other DNA
cccatcctgtgatgagttcggtaatgccaacggctacactggcaaagcctgctgcggctccctcggctatgcgat

SEQ ID NO: 103187 - DNA, 75 bp, synthetic construct
  source 1..75: mol_type = other DNA
cagtgagtttgtgctggaggccgaccgcacgcgtattaacagcgaaatggtaatcaatggtggcgttatccaggg

SEQ ID NO: 103188 - DNA, 75 bp, synthetic construct
  source 1..75: mol_type = other DNA
gcgccgcagtttcaacaagccgcgcgccagctcgaacccgggatcaggctggcaaaggtgaacaccgaggctgag

SEQ ID NO: 103189 - DNA, 75 bp, synthetic construct
  source 1..75: mol_type = other DNA
cgggaacatctgcatggggattggtgcaggtgatggtgtcagaaacaaaagtggcttccatcgccgggattcaaa

SEQ ID NO: 103190 - DNA, 75 bp, synthetic construct
  source 1..75: mol_type = other DNA
agcgtctaacgatccggtgaccattgaagccgaggatctgtttatcacttcaccagaaggtaaaacgctggtcgg

SEQ ID NO: 103191 - DNA, 75 bp, synthetic construct
  source 1..75: mol_type = other DNA
taccagatgtttggtgggacgtggagtccgtttactcaaagcacccctgcgccaatcggggcagcagcaggaacc

SEQ ID NO: 103192 - DNA, 75 bp, synthetic construct
  source 1..75: mol_type = other DNA
gggttcacagacgcaggccaaaacgctggaaatcgaatttaaaggcgaaacggtcagtaagtggacgttctctga

SEQ ID NO: 103193 - DNA, 75 bp, synthetic construct
  source 1..75: mol_type = other DNA
attggtgctggtctgggtggggcatttgggaagtatgcccccacagccgtggggaaaatcttagggaatgatcct

SEQ ID NO: 103194 - DNA, 75 bp, synthetic construct
  source 1..75: mol_type = other DNA
caggtgctatcgcatcattaatgatatgggttggtacaggagcggttttagttatctcaagtctggttttactga

SEQ ID NO: 103195 - DNA, 75 bp, synthetic construct
  source 1..75: mol_type = other DNA
accccacgaataaattaccggatttacggggcgaatttatccgtggctgggatgacggacgaggtattgatgcag

SEQ ID NO: 103196 - DNA, 75 bp, synthetic construct
  source 1..75: mol_type = other DNA
atggtaaagattttcgtaccgatcaaccgcaacaaaatatcccttttaccctgaaaggttgcggtgcgctggtag

SEQ ID NO: 103197 - DNA, 75 bp, synthetic construct
  source 1..75: mol_type = other DNA
tttgcaatgagcagcaccgctttattgtcgcggaacagctgcgtcaactgaataaactcaccgagaacattattc

SEQ ID NO: 103198 - DNA, 75 bp, synthetic construct
  source 1..75: mol_type = other DNA
aaaacagctatgtgtatgccgaatctggcctggtgaccaccgttggggtgaaagatctggtcgtggtgcagacca

SEQ ID NO: 103199 - DNA, 75 bp, synthetic construct
  source 1..75: mol_type = other DNA
aggtatcagcattaataccgcaggccggacgctggataacagacgcggtacgctgaacagcctgcaggaactgac

SEQ ID NO: 103200 - DNA, 75 bp, synthetic construct
  source 1..75: mol_type = other DNA
cgctacagcgggcctggctgggcgtggcaccggagatcgggcgacagcatgtggatgattaccggctgatttttg

SEQ ID NO: 103201 - DNA, 75 bp, synthetic construct
  source 1..75: mol_type = other DNA
taacaaaggcatatgttcggttttttatcttgatggagataaaatacaatccactcaactttcatcaaaagaata

SEQ ID NO: 103202 - DNA, 75 bp, synthetic construct
  source 1..75: mol_type = other DNA
atgccggaaagtgatccgaaaacgaatggtgacctgagcgcggatatccgccgccttgagggcgcgctgaccgcc

SEQ ID NO: 103203 - DNA, 75 bp, synthetic construct
  source 1..75: mol_type = other DNA
ccttccctatttacgtaattatgacataccactagtaaattatcctcagcacgaatttatcccttctaaaggcaa

SEQ ID NO: 103204 - DNA, 75 bp, synthetic construct
  source 1..75: mol_type = other DNA
attcaaacttcgtatggtggagctggcattacaacccggtgcttgtgtggcccagattgcacgagaaaatggcgt

SEQ ID NO: 103205 - DNA, 75 bp, synthetic construct
  source 1..75: mol_type = other DNA
taggaaatctttcaacattcctgtttattgcagaaaaggcaggatatgacgttattgcaccagcagatgaagatg

SEQ ID NO: 103206 - DNA, 75 bp, synthetic construct
  source 1..75: mol_type = other DNA
tgattgacagtctgaaacaaattccctgggtggaagatgccgatgagtatccggaaaaagtgacgcaactggtga

SEQ ID NO: 103207 - DNA, 75 bp, synthetic construct
  source 1..75: mol_type = other DNA
atgacattatctttttttataacggtaattccagaccatgacaagccgcagccgccaggctgcctactcgaaccg

SEQ ID NO: 103208 - DNA, 75 bp, synthetic construct
  source 1..75: mol_type = other DNA
gggcgtttttgttggtgaatcggaagatctccgcaaaaaagccgacatgatggaaaaaatcggcaaggcaatgct

SEQ ID NO: 103209 - DNA, 75 bp, synthetic construct
  source 1..75: mol_type = other DNA
aggcggtttaatctggcgcgattggttaggtcttatcgaagaaggtcggtcagaaaacattactgagctacccgc

SEQ ID NO: 103210 - DNA, 75 bp, synthetic construct
  source 1..75: mol_type = other DNA
ttacctcgctgattgatgcggaggttttccataacgaaaacccggtgcgtggaatacgtaagctcaaggtcagga

SEQ ID NO: 103211 - DNA, 75 bp, synthetic construct
  source 1..75: mol_type = other DNA
gcaaaccgtgacgtgaatctggtatcagcagaaaacacgtcaaagctggaaggaaagaacacatccagtggtggc

SEQ ID NO: 103212 - DNA, 75 bp, synthetic construct
  source 1..75: mol_type = other DNA
aaaccggcaagaaacatgagcgggattatcgtcttatctggaaaacagagggcaccggtgatgagtctggcagat

SEQ ID NO: 103213 - DNA, 75 bp, synthetic construct
  source 1..75: mol_type = other DNA
cgaagaactgaaaaaatatcgcccggatattctcgatgcctgtgaaaaagcgatgagcgccgtcgatccggatct

SEQ ID NO: 103214 - DNA, 75 bp, synthetic construct
  source 1..75: mol_type = other DNA
aggcccacttacaacagtaaaattcggggctctgcctttacatacaatacaatgttgcacgattgcccatcatca

SEQ ID NO: 103215 - DNA, 75 bp, synthetic construct
  source 1..75: mol_type = other DNA
aagaaagctgatatattcagaccccgagataatttcatctccttacttaacacaatgtttaattctcgaaagaga

SEQ ID NO: 103216 - DNA, 75 bp, synthetic construct
  source 1..75: mol_type = other DNA
ttataggtttatggggaaaccaagatataaatattgcggttaatgacaaaactaactttattattggtgttaacg

SEQ ID NO: 103217 - DNA, 75 bp, synthetic construct
  source 1..75: mol_type = other DNA
atgattcctgattatttaacttttattcgctttcaggataaacgaaatctgatatacatttatgctattggactt

SEQ ID NO: 103218 - DNA, 75 bp, synthetic construct
  source 1..75: mol_type = other DNA
caaatagatggatattttattgggcgtattaataacagtgctttgtctgagggagatactcggcttggacatcag

SEQ ID NO: 103219 - DNA, 75 bp, synthetic construct
  source 1..75: mol_type = other DNA
gagaggtgtaaaagaaaaatgggattctactgattccaatgtttcgtttgtttatatttctagcaacaatgatgg

SEQ ID NO: 103220 - DNA, 75 bp, synthetic construct
  source 1..75: mol_type = other DNA
gtttctatctgaagccagctgcagtcaagagtgaacgggaagcgtgtaattatctcgacagcctgccagcctccg

SEQ ID NO: 103221 - DNA, 75 bp, synthetic construct
  source 1..75: mol_type = other DNA
tcaataaaaaagaaggccagataccgaagctacgactgactgcgcaaacagcttcacggattctgagtctgttac

SEQ ID NO: 103222 - DNA, 75 bp, synthetic construct
  source 1..75: mol_type = other DNA
accgcgtttgcgctgcccgccatctattcgaatcagttcgcaccaccgtcaacgtcggcggacgcctgcgtgaca

SEQ ID NO: 103223 - DNA, 75 bp, synthetic construct
  source 1..75: mol_type = other DNA
caaatgcacaacgtaatgcgtttactctgggtgatctgccgcaggaaaagaattgctttatcattaatcggattg

SEQ ID NO: 103224 - DNA, 75 bp, synthetic construct
  source 1..75: mol_type = other DNA
atgagttctaacggaatcgtggttgatacgcatcagcatacaggcgtcctgaaaggcggtgataccaccggaggc

SEQ ID NO: 103225 - DNA, 75 bp, synthetic construct
  source 1..75: mol_type = other DNA
aaataatagcatatcaacaacataaagatgataaatatcctgtaaaagagcatacccttactcaactctctattc

SEQ ID NO: 103226 - DNA, 75 bp, synthetic construct
  source 1..75: mol_type = other DNA
ccacgaattatgagtatgccagaagccattaaaatgactggtggcctttaccgggattctcttgcagataatcct

SEQ ID NO: 103227 - DNA, 75 bp, synthetic construct
  source 1..75: mol_type = other DNA
gttggattaaacgggcgtatgcttgcatcatagtgcttgtaatatttaagtttgttgactacgtaaatggagctt

SEQ ID NO: 103228 - DNA, 75 bp, synthetic construct
  source 1..75: mol_type = other DNA
tcaaacctgggtcgtacactttcgccagtctctggcgtggtggttgcggttgccggaatggcgaaaatttcacct

SEQ ID NO: 103229 - DNA, 75 bp, synthetic construct
  source 1..75: mol_type = other DNA
ctgctggtagcgagttactgccacaagcaaaagatccggaaaccacggcgcagtggattgagcgttgccttgctg

SEQ ID NO: 103230 - DNA, 75 bp, synthetic construct
  source 1..75: mol_type = other DNA
tagcgaagatccgacccgcgtgctgagcgaaaccattttcgaactgatggggattacgccaacgctgcacggcgg

SEQ ID NO: 103231 - DNA, 75 bp, synthetic construct
  source 1..75: mol_type = other DNA
tcgggtacagcgggatccattctgggtaaaaaacgtcatgagcccgtcaaagcttcgcgaaaaatgggatgagct

SEQ ID NO: 103232 - DNA, 75 bp, synthetic construct
  source 1..75: mol_type = other DNA
gttaacctgcttactatcagcccgttgcgtaacagtgattcttttgtgacagaggggcagtggttaacgtttaaa

SEQ ID NO: 103233 - DNA, 75 bp, synthetic construct
  source 1..75: mol_type = other DNA
cctgcaaggtggaattccgtcacggtaacatgacgctggaaaatccatcgccagagcagctcacggtgttaatcc

SEQ ID NO: 103234 - DNA, 75 bp, synthetic construct
  source 1..75: mol_type = other DNA
aggttctgaaactaagattcttagcgaaaatgaatctgtttacatacctcttggtgtaatacactgcttggaaaa

SEQ ID NO: 103235 - DNA, 75 bp, synthetic construct
  source 1..75: mol_type = other DNA
tatcggcgggcgggcgctactaatgcatggtactgaaggcgaagtgtatgctaatccgcagcgctgcccgcagat

SEQ ID NO: 103236 - DNA, 75 bp, synthetic construct
  source 1..75: mol_type = other DNA
aatatacgtttcgcaaaggtctggcgattgatatttatactgccatatgccatacccacatttgtaacgttactt

SEQ ID NO: 103237 - DNA, 75 bp, synthetic construct
  source 1..75: mol_type = other DNA
aagctatagctaccttctttttgtgcttagcattagcatcgactgataaaaccatttataccttacttgagcagg

SEQ ID NO: 103238 - DNA, 75 bp, synthetic construct
  source 1..75: mol_type = other DNA
aagatgccgcagagatgtttgtgtttctcgccgtcgagctttctttgctgtttatagtgattagtgccggtgtca

SEQ ID NO: 103239 - DNA, 75 bp, synthetic construct
  source 1..75: mol_type = other DNA
aaaaaatgaaataaagagccactataccaaagacgaaattcaagggttgttaacattaacagaaaacacacgaaa

SEQ ID NO: 103240 - DNA, 75 bp, synthetic construct
  source 1..75: mol_type = other DNA
gctataactgggcctatgagacggaaccggaaccgtttatgaacaaccgtcgcatggagtgcggacgcggtaagg

SEQ ID NO: 103241 - DNA, 75 bp, synthetic construct
  source 1..75: mol_type = other DNA
agacggttacactgatgaagaaaccactaacgcccacaatttcattgtgtggaacatcagaacactggataaaca

SEQ ID NO: 103242 - DNA, 75 bp, synthetic construct
  source 1..75: mol_type = other DNA
gaagcacctgcacgtacaccggaacgttgggagcatctgaaagagcaaattgttgaagctctgttggcctggcac

SEQ ID NO: 103243 - DNA, 75 bp, synthetic construct
  source 1..75: mol_type = other DNA
ttcgccaggcgcaggatggtcacttaccgacgctggatttaacggcttctaccgggatttctgacacctcttata

SEQ ID NO: 103244 - DNA, 75 bp, synthetic construct
  source 1..75: mol_type = other DNA
accagatgaagcggtttttattaatcgagaacatcatccgctgacacgctttggtattcatgacattgttgtacg

SEQ ID NO: 103245 - DNA, 75 bp, synthetic construct
  source 1..75: mol_type = other DNA
gttttctccgccggtaccgggtgagaaatttgtcactgaatgggttaaaaaaggaatgggtgtttcactgggaac

SEQ ID NO: 103246 - DNA, 75 bp, synthetic construct
  source 1..75: mol_type = other DNA
tgacggtggtcgggtttataccaaccggtggggaattggtgtggtgacggatgtgagcagttattaccgcaacac

SEQ ID NO: 103247 - DNA, 75 bp, synthetic construct
  source 1..75: mol_type = other DNA
gggccaacgctcgctggcgcattgctacaggcgggtttagtcgatgagctgattgtctatatcgcacctaaacta

SEQ ID NO: 103248 - DNA, 75 bp, synthetic construct
  source 1..75: mol_type = other DNA
ttgacggcgaaggccgcgtacacgggttagaaggcctgcgtgtggtggatgcgtcgattatgccgcagattatca

SEQ ID NO: 103249 - DNA, 75 bp, synthetic construct
  source 1..75: mol_type = other DNA
tttggcccgttatatagctataaaggcaccggaatacacagaatggtatggtagcttaaaaagtatcccgcagcg

SEQ ID NO: 103250 - DNA, 75 bp, synthetic construct
  source 1..75: mol_type = other DNA
aggaagcgctgccgaggagcacggcgggatattttgtggcaaatgggatgccggtgagggtaatgactccaactt

SEQ ID NO: 103251 - DNA, 75 bp, synthetic construct
  source 1..75: mol_type = other DNA
tgctgaaaaagtggcgatgtataccggtttatctgtggatacggttatggggacagaggccgcagtttttgaagg

SEQ ID NO: 103252 - DNA, 75 bp, synthetic construct
  source 1..75: mol_type = other DNA
attataaaaaaccaaagatgggcctatcttatttgcgtgacatttttttcagcattgcaattatatatgacatat

SEQ ID NO: 103253 - DNA, 75 bp, synthetic construct
  source 1..75: mol_type = other DNA
tataacgccatgccgctggaaggtgttaaagcactgacagacttcatggttgagttcgaacgccgtcacggctaa

SEQ ID NO: 103254 - DNA, 75 bp, synthetic construct
  source 1..75: mol_type = other DNA
atcgctgtttgtgattagcgtcaaaagctatcgcctgtcatgcggattttacgcctgccagtcactggtgctggt

SEQ ID NO: 103255 - DNA, 75 bp, synthetic construct
  source 1..75: mol_type = other DNA
ctcaggctctggcagaatgaagggcgtgtttcgcggcgtcttccggtaacaacctcttctgacactggcgttgaa

SEQ ID NO: 103256 - DNA, 75 bp, synthetic construct
  source 1..75: mol_type = other DNA
gacacaaggggcagtaagccattatctaaatggtcagacacctttaaatctagaggctgttatcaagttcgctgg

SEQ ID NO: 103257 - DNA, 75 bp, synthetic construct
  source 1..75: mol_type = other DNA
tggaagcctggaaaaagtatcgggtgctgctaaaccgtgtggacacttccgtagcaccagatatcgagtggctta

SEQ ID NO: 103258 - DNA, 75 bp, synthetic construct
  source 1..75: mol_type = other DNA
atccgcaggcgaacctgaaccgggaatggcaggtggtggcaagtgaactgcacggcgaacagccacaggcggtgc

SEQ ID NO: 103259 - DNA, 75 bp, synthetic construct
  source 1..75: mol_type = other DNA
gccgcaagctctaccaggtaactgcttcaatgaaaaactctggtttctttgaacctcataaggactgcgagcact

SEQ ID NO: 103260 - DNA, 75 bp, synthetic construct
  source 1..75: mol_type = other DNA
gttaactcaatccatttttgatatgtcgaaatggcgtgcgttaacgctacaggaaaaagctgcgggtattcagga

SEQ ID NO: 103261 - DNA, 75 bp, synthetic construct
  source 1..75: mol_type = other DNA
aatcttttggggcatttcgagggaggtggtgtgtcaacagtatcgggtgttgcaggtggcacaggctcgtggtcc

SEQ ID NO: 103262 - DNA, 75 bp, synthetic construct
  source 1..75: mol_type = other DNA
acggatcaaggctcaaacgggtattgccgataaagcgccggtaatgggcgaaacctttatccagtgggtcgtgga

SEQ ID NO: 103263 - DNA, 75 bp, synthetic construct
  source 1..75: mol_type = other DNA
cggtaacgcatccgcaggcagggaatctgggcggtggtggttttatgctgatccgctcgaaaaatggcaatacca

SEQ ID NO: 103264 - DNA, 75 bp, synthetic construct
  source 1..75: mol_type = other DNA
tttacccatcccaatctggtggtgaaaccgcatccgaaagcgcggccaaccggcgatacggaaggcgcgattcag

SEQ ID NO: 103265 - DNA, 75 bp, synthetic construct
  source 1..75: mol_type = other DNA
cccgctttgatggatacctgtcagacgccctgatatgggcagatggtcatggcagcaacccgaaagcctgtctgc

SEQ ID NO: 103266 - DNA, 75 bp, synthetic construct
  source 1..75: mol_type = other DNA
tctggtggacgattccctctgcgtgggctgccgctactgtgaaatgcgctgcccgtatggtgcgccgcagtttga

SEQ ID NO: 103267 - DNA, 75 bp, synthetic construct
  source 1..75: mol_type = other DNA
ttattacctgtagaaataacgccggatgagcagaaagaacctgtggcggccaattgcgccgtctttatccacttc

SEQ ID NO: 103268 - DNA, 75 bp, synthetic construct
  source 1..75: mol_type = other DNA
accgttaccagaaccctgcctgacaccggagatagtcagccggatgggactgactgaggcgtcacaggaaaaagt

SEQ ID NO: 103269 - DNA, 75 bp, synthetic construct
  source 1..75: mol_type = other DNA
atcttacagagaatacaacagagattactacagagaataaaaacacttttcgtccggaagcttcgcaaccggacc

SEQ ID NO: 103270 - DNA, 75 bp, synthetic construct
  source 1..75: mol_type = other DNA
tgtacctcataagtatgggaacgtggcacttactgctggtacatttagtgcaactgccaccatgaatattttcta

SEQ ID NO: 103271 - DNA, 75 bp, synthetic construct
  source 1..75: mol_type = other DNA
tgttaacgggcaaagtatttctcccgcatcgttacagatttcatttgttgaacctcagtcgtcaggagataaggc

SEQ ID NO: 103272 - DNA, 75 bp, synthetic construct
  source 1..75: mol_type = other DNA
aaagttgataggtaattggcactcaagtatatacggtaaagaattatttgaaaaatactcgcgattttcaaatat

SEQ ID NO: 103273 - DNA, 75 bp, synthetic construct
  source 1..75: mol_type = other DNA
atggaacagaaaatattatcctcagaaccccgcagatcattttcaaatgagtttaaacttcaaatggttaaactg

SEQ ID NO: 103274 - DNA, 75 bp, synthetic construct
  source 1..75: mol_type = other DNA
gattgctgaaggggcagatccgaagacaaaagtgattgctttcaccgtcaccgaaggcgggtactacctgaatac

SEQ ID NO: 103275 - DNA, 75 bp, synthetic construct
  source 1..75: mol_type = other DNA
actgcggatattctgatgccggtaaaacatttgctgccggacaatttccatattggtatcaacgtctcggcgggc

SEQ ID NO: 103276 - DNA, 75 bp, synthetic construct
  source 1..75: mol_type = other DNA
gcatttcaggcgtcgaaccttccgtcgtgccatccgtcgatcctaaatccagtaatggcgcggctttgaagcttg

SEQ ID NO: 103277 - DNA, 75 bp, synthetic construct
  source 1..75: mol_type = other DNA
tcttctcatagctgtatcgcctgggcaggtacgctggttggtcagaaatatatccacgaaagtacgctgactgat

SEQ ID NO: 103278 - DNA, 75 bp, synthetic construct
  source 1..75: mol_type = other DNA
gattgcaatgaacatcatcgttaccaacggcctggcgatcggggtgaataaggtgatttctgactggaatttcag

SEQ ID NO: 103279 - DNA, 75 bp, synthetic construct
  source 1..75: mol_type = other DNA
aaaaacgtggcggactggaacacctcttttaacctgcagtacagccgtcagacatactgggacatacggaaaacg

SEQ ID NO: 103280 - DNA, 75 bp, synthetic construct
  source 1..75: mol_type = other DNA
ttgttggattacctgcggcatatggtgggtttgaaactttagttgaaaatttgaccaaaaacgcatctagtgaca

SEQ ID NO: 103281 - DNA, 75 bp, synthetic construct
  source 1..75: mol_type = other DNA
acctggttcgcgcgtacgcaggaagattctcgtgagtggccggaaacggtgcgtaccttgctgattccagagcat

SEQ ID NO: 103282 - DNA, 75 bp, synthetic construct
  source 1..75: mol_type = other DNA
atttctatcgtaatgatgtggcgaaagctaaccgttcgcggatgaacgtcccattccagttagcagatagtgctc

SEQ ID NO: 103283 - DNA, 75 bp, synthetic construct
  source 1..75: mol_type = other DNA
ccggcagcggtacagggcggcatgtcacaaacgtcagcagacggtgatgcggacgtaaaaatgctcatggccatg

SEQ ID NO: 103284 - DNA, 75 bp, synthetic construct
  source 1..75: mol_type = other DNA
ccggcgcgtttgactgcgctgacatgatttaccgcctccggcagcagaagccggtctgggcactgtgcaatgaca

SEQ ID NO: 103285 - DNA, 75 bp, synthetic construct
  source 1..75: mol_type = other DNA
gtttcccggatggttacgggatctccatcggcaatatgactttgataccatcctctgctttggtgactgccgccc

SEQ ID NO: 103286 - DNA, 75 bp, synthetic construct
  source 1..75: mol_type = other DNA
cacgttgagaacttaaaaccttcaacgatgaaacgcataggtcatgcgatgtggtattacctgatgggctggcat

SEQ ID NO: 103287 - DNA, 75 bp, synthetic construct
  source 1..75: mol_type = other DNA
agcattccggcgctggtgaataacaaattacgcagccttgaaaaacgcttctctacgcggctgaaaattgatgac

SEQ ID NO: 103288 - DNA, 75 bp, synthetic construct
  source 1..75: mol_type = other DNA
ggaatttttcacgctatacatcgttgcgccgggacctgcaccggcatcctgaaaccggatttgaagaaatccgta

SEQ ID NO: 103289 - DNA, 75 bp, synthetic construct
  source 1..75: mol_type = other DNA
gtcaccacacagttctacatccaggaattcagtgagtatattgcgccactgcaggatgctgtagatctggaaatc

SEQ ID NO: 103290 - DNA, 75 bp, synthetic construct
  source 1..75: mol_type = other DNA
acgccggtgtgagcagtggcggtggtcagccatcgcagagtcagatgagcgcgtactacaaccacagcagtccgc

SEQ ID NO: 103291 - DNA, 75 bp, synthetic construct
  source 1..75: mol_type = other DNA
ggcacatcgtaacgactggatgtatggcgatgatgactgaacaggagcaaaacaggctgatacgtggactgataa

SEQ ID NO: 103292 - DNA, 75 bp, synthetic construct
  source 1..75: mol_type = other DNA
agtgattttttacgcttgatggaaaaattcattcgacagtttagcctaatgttgaccgacctgactgcaagtgaa

SEQ ID NO: 103293 - DNA, 75 bp, synthetic construct
  source 1..75: mol_type = other DNA
ttcgggctgatcccgtttttagtaggctgcctcatttttgctgtggtggcgctatggctgcactggcgacatcgc

SEQ ID NO: 103294 - DNA, 75 bp, synthetic construct
  source 1..75: mol_type = other DNA
caggccgtgaaaacgatggccgatcaacatttcaaacaggcactctggaactgggccttttgcgcaacgccgttg

SEQ ID NO: 103295 - DNA, 75 bp, synthetic construct
  source 1..75: mol_type = other DNA
gttaattagcattatatggtttttatttctctttatatattttataagtgataatgaaattacatcacatttttc

SEQ ID NO: 103296 - DNA, 75 bp, synthetic construct
  source 1..75: mol_type = other DNA
gctggaaaggaacagtaagcaatcacaaaaaagcccttaaaaacggcctcagcgttatacagggcggcagaacct

SEQ ID NO: 103297 - DNA, 75 bp, synthetic construct
  source 1..75: mol_type = other DNA
ctggattaaagccttgcaggatgatccgctggaaattttccgtgctgcagctgacgctgaaaaaatccagggctt

SEQ ID NO: 103298 - DNA, 75 bp, synthetic construct
  source 1..75: mol_type = other DNA
aaaaagataaaaaagataaaaaagataaaaaagataaaaaagatagtattatgctatcaaaaaaaacatcacaat

SEQ ID NO: 103299 - DNA, 75 bp, synthetic construct
  source 1..75: mol_type = other DNA
tgaagccgtatggtttgcccccgaccaggattatggtcgtaagggtagctccttcgccccgttctttgcggtaga

SEQ ID NO: 103300 - DNA, 75 bp, synthetic construct
  source 1..75: mol_type = other DNA
tctctcttgtttttaaatatagcaatgggaacttgacaagtgaagaaattttatatgctaaaggactgatgtctt

SEQ ID NO: 103301 - DNA, 75 bp, synthetic construct
  source 1..75: mol_type = other DNA
tggcatttgaagaaggatatttacgcccgcaatttattactgttgaagaaggcggagtgaacgcatattcatcgc

SEQ ID NO: 103302 - DNA, 75 bp, synthetic construct
  source 1..75: mol_type = other DNA
agtaaaggtggtgaaattcgcggcaaactgaacggtatcggctttgcccagaaactgaatctggaagttgatagc

SEQ ID NO: 103303 - DNA, 75 bp, synthetic construct
  source 1..75: mol_type = other DNA
actaaagagttgaagcaaattcaacgttttttggtttcggagttgaagcctcttttgccaattcattcatcagca

SEQ ID NO: 103304 - DNA, 75 bp, synthetic construct
  source 1..75: mol_type = other DNA
ggggagaacgacaaaaaccagatgctgtacagcatgaaggtgcacccgccgctgtggcgtgccggtctgcgccag

SEQ ID NO: 103305 - DNA, 75 bp, synthetic construct
  source 1..75: mol_type = other DNA
ggacaggaagcgctgccgaggagcacggcgggatattttgtggcaaatgggatgccggtgagagcgaaaaaatga

SEQ ID NO: 103306 - DNA, 75 bp, synthetic construct
  source 1..75: mol_type = other DNA
agatgaagaatatgaacgctggcagaaagagattggtgaaattacgctgcccgatcatgtatttgagctgatttt

SEQ ID NO: 103307 - DNA, 75 bp, synthetic construct
  source 1..75: mol_type = other DNA
aagaagcgttgccgaggagcacggcaagatattttgtggcaaatgggatgccagtaagagcgaaaaaaatgagtc

SEQ ID NO: 103308 - DNA, 75 bp, synthetic construct
  source 1..75: mol_type = other DNA
gctacttcaggctgacggaagtcagaggagtgctggaggagctggatggctggatcaaacggaaactgcgttgct

SEQ ID NO: 103309 - DNA, 75 bp, synthetic construct
  source 1..75: mol_type = other DNA
cggacgatacgacgtttattgtgagctgtgtcgataaagaagcgcccgatgttgaaccgaagctggtactgacgc

SEQ ID NO: 103310 - DNA, 75 bp, synthetic construct
  source 1..75: mol_type = other DNA
actatagtaaatcagagatgggtttttcttgttttattgacattttattctgcattacaattatatatgacatat

SEQ ID NO: 103311 - DNA, 75 bp, synthetic construct
  source 1..75: mol_type = other DNA
atgcggtctgtacaggccgtcatcaaagaacgtgctgccaaggctgaacaagccaaagcagtcgttgaacctgag

SEQ ID NO: 103312 - DNA, 75 bp, synthetic construct
  source 1..75: mol_type = other DNA
tatttaaaaaaatagttgagcatactcctctaatctcgattgatctcataattagaaacgataaaggagaggcgc

SEQ ID NO: 103313 - DNA, 75 bp, synthetic construct
  source 1..75: mol_type = other DNA
tatttaaaacaatagtcaagcatactcctctaatctcgattgacctcgtaattagaaacgataaaggagaggcgc

SEQ ID NO: 103314 - DNA, 75 bp, synthetic construct
  source 1..75: mol_type = other DNA
gacgcaattcgcatcacccgcgagatcatgcatcaacccgcgctggatcaataccgtggccgcgaaatcagcccc

SEQ ID NO: 103315 - DNA, 75 bp, synthetic construct
  source 1..75: mol_type = other DNA
gctaccgatggctaccgggctgaaaccggcgctggcggtggcgttaggtcattttctgcttggcctgctgtgcat

SEQ ID NO: 103316 - DNA, 75 bp, synthetic construct
  source 1..75: mol_type = other DNA
gcatcggactattacacgctgtcagtgaaccgttacttcgatgccttcgggtttaagaacgtctccctagggctg

SEQ ID NO: 103317 - DNA, 75 bp, synthetic construct
  source 1..75: mol_type = other DNA
tctctttggtattcaccgctgcactatcggcaatattctgggaaatgcccgtacaaaatttgaaagccgcgatag

SEQ ID NO: 103318 - DNA, 75 bp, synthetic construct
  source 1..75: mol_type = other DNA
gatatgaaactgtttaagaagtttcgtgggtatttattggttaagacgcaggttaatggggtttattatggggag

SEQ ID NO: 103319 - DNA, 75 bp, synthetic construct
  source 1..75: mol_type = other DNA
cgcgcgccagtggcggagtcgttcatctggcggcgttggttatatgtgttatgggatgaagttgcgcaactggtc

SEQ ID NO: 103320 - DNA, 75 bp, synthetic construct
  source 1..75: mol_type = other DNA
tgaccacgggaaaccggagcaaatcagtgaaagcgacaatcaatgccctgacgccagtgctgcgtggatggataa

SEQ ID NO: 103321 - DNA, 75 bp, synthetic construct
  source 1..75: mol_type = other DNA
ccaaaggcgatcatgcgggtgaatcaagagcgtcactgaaagcgagactgataaaaatcagttttatcaaagtgg

SEQ ID NO: 103322 - DNA, 75 bp, synthetic construct
  source 1..75: mol_type = other DNA
gcggatttccgacagttatccggagtggagatacgcccgaatccggcagaagggatgctgtacatcaatatgcca

SEQ ID NO: 103323 - DNA, 75 bp, synthetic construct
  source 1..75: mol_type = other DNA
catgcaaataatgctatgtggctctgcggtgtggttttatcaattctattttcagcactagatattaaaggtatc

SEQ ID NO: 103324 - DNA, 75 bp, synthetic construct
  source 1..75: mol_type = other DNA
agccagccatcgcagagtcagatgagcgcgtactacaaccacagcagtccactggccagcctgtcagcgaacttc

SEQ ID NO: 103325 - DNA, 75 bp, synthetic construct
  source 1..75: mol_type = other DNA
cgggcaggactgcggcagaactttcgtatcttccagaatgaggacatcagaagcatcctcggcaccatactgcag

SEQ ID NO: 103326 - DNA, 75 bp, synthetic construct
  source 1..75: mol_type = other DNA
ttactgtaaatactactgatccaaaaaataataaagaattcctttggcttagttacagtataaataatttaagtt

SEQ ID NO: 103327 - DNA, 75 bp, synthetic construct
  source 1..75: mol_type = other DNA
gtggcaaattgagcgaatccatcggtttaaaatgcgccgctccatcaggtcaaaatgacacgatggaagaggtca

SEQ ID NO: 103328 - DNA, 75 bp, synthetic construct
  source 1..75: mol_type = other DNA
taatccgacgtacaccctgccgttccgcaatactaaccatctggtttatcgcgataactggaatattcagttaac

SEQ ID NO: 103329 - DNA, 75 bp, synthetic construct
  source 1..75: mol_type = other DNA
tggtttaatctggcgcgactggttaggcctcatagaggtaggtaactcaaaaaacaatactgaactccccgcaca

SEQ ID NO: 103330 - DNA, 75 bp, synthetic construct
  source 1..75: mol_type = other DNA
ggtatcaacaacagcttatggtggtgtatccagtaatattacaggttcatacgcgacggcggtttgttcttttgc

SEQ ID NO: 103331 - DNA, 75 bp, synthetic construct
  source 1..75: mol_type = other DNA
gcggatgaattaatcaatgcgtcggatgccatcagtgtgatggccacggcgctgaacagtaatgtcagaggaggc

SEQ ID NO: 103332 - DNA, 75 bp, synthetic construct
  source 1..75: mol_type = other DNA
agcaaatatcgcctgcccgtcgattctggattattccatcctcaacgataacgactccatgtttaacacaccgcc

SEQ ID NO: 103333 - DNA, 75 bp, synthetic construct
  source 1..75: mol_type = other DNA
aaagttgtcgcagagggtaccaccaagccgtacagcgacattgagtttgcaaccaaaatcaccccggtcaccacc

SEQ ID NO: 103334 - DNA, 75 bp, synthetic construct
  source 1..75: mol_type = other DNA
accccggcctgctgtatgcgggacagtggcaggatgcggaatcggggctgtgctataaccggttccggtattacg

SEQ ID NO: 103335 - DNA, 75 bp, synthetic construct
  source 1..75: mol_type = other DNA
gagtaccgttacgacagcgcgggcaatgtgtcggctgtcaccagccgggaagattacggacgggaaacccggcgg

SEQ ID NO: 103336 - DNA, 75 bp, synthetic construct
  source 1..75: mol_type = other DNA
ttccgtgattttctgaacgaccgcaatggctggcgcaatgccacgttaattgccgtaaccagtaaacaatactga

SEQ ID NO: 103337 - DNA, 75 bp, synthetic construct
  source 1..75: mol_type = other DNA
cgcccgttacgctaccgatgataataatcatgaaggcgcgctgaatgtgattcaggcggttctggatagcaccac

SEQ ID NO: 103338 - DNA, 75 bp, synthetic construct
  source 1..75: mol_type = other DNA
ggtgatgcgcacggttatcaataataaaccggtggcgctggtagtgatggatgcgtttggcaaatatacccattt

SEQ ID NO: 103339 - DNA, 75 bp, synthetic construct
  source 1..75: mol_type = other DNA
ctgtgccggcagcagcgttgagctataaaaacaaaaagccgcccaaatggcggcggcggggcagacggcacagaa

SEQ ID NO: 103340 - DNA, 75 bp, synthetic construct
  source 1..75: mol_type = other DNA
gggatgtacctggtgagtgatccactggggttgcagggaggggagcagacttaccggtatgtgccgaatccttta

SEQ ID NO: 103341 - DNA, 75 bp, synthetic construct
  source 1..75: mol_type = other DNA
tgtaaacattaacggaaagcccgctgcaagggccgccgtcacccttccccctcctcccccacctggagcaatacc

SEQ ID NO: 103342 - DNA, 75 bp, synthetic construct
  source 1..75: mol_type = other DNA
cgacatgacgaactactacacgatcaactacgagagcgagcttttagatgaggtcaaagtgaccaaatcgaagaa

SEQ ID NO: 103343 - DNA, 75 bp, synthetic construct
  source 1..75: mol_type = other DNA
agtccggtatctgtctggcattgttttttttaatttcagccaatgtgctggcacagccactgcttatccctccgg

SEQ ID NO: 103344 - DNA, 75 bp, synthetic construct
  source 1..75: mol_type = other DNA
ttcgcagtgacgcctatcttggcaagctaaaaatcaccgtcaccgtaccgcagtcactggatttctcctctgtac

SEQ ID NO: 103345 - DNA, 75 bp, synthetic construct
  source 1..75: mol_type = other DNA
ccgttgatcggtcagttaagtactacccgggaagatatggcaaccttctctaacccgacgtatacgctgccgttc

SEQ ID NO: 103346 - DNA, 75 bp, synthetic construct
  source 1..75: mol_type = other DNA
gcgcgtgaggcatataaaccgaaaagaaaaatcaacccggtaaaaaatgacccgtcaaatattgacccctcaacg

SEQ ID NO: 103347 - DNA, 75 bp, synthetic construct
  source 1..75: mol_type = other DNA
gcttcagtcaactattgatgccgagcttcgctatgggctgaagtatgtcgaagaacaggaaattctctttggtga

SEQ ID NO: 103348 - DNA, 75 bp, synthetic construct
  source 1..75: mol_type = other DNA
cgcggttgtgttcagtgcgaaaaaacgccagtggggcagccaggaagatttagcgtgtgcgcagtggatctgggg

SEQ ID NO: 103349 - DNA, 75 bp, synthetic construct
  source 1..75: mol_type = other DNA
atgagcactacacacaacgtaactattcaaatgatggatctggttattgatttacagaaatcagttaatgctgct

SEQ ID NO: 103350 - DNA, 75 bp, synthetic construct
  source 1..75: mol_type = other DNA
ctggcaaacgtcagtactaacggttttaagcgtcagcgcgcggtgtttgaagatctgctttatcaaaccattcgc

SEQ ID NO: 103351 - DNA, 75 bp, synthetic construct
  source 1..75: mol_type = other DNA
tccaaatgatggatatggttattgacctgcaaaaaagcgtcaatgccgctatagaatatcccagcgaactaacca

SEQ ID NO: 103352 - DNA, 75 bp, synthetic construct
  source 1..75: mol_type = other DNA
aactccgtgagaaatgggatgaactggttattcgactgtggcgtggtcccgcgcagcgttgcgtgaatcatattt

SEQ ID NO: 103353 - DNA, 75 bp, synthetic construct
  source 1..75: mol_type = other DNA
ataaacagcgtcaggatgaaatcatcaacgccgcccgtcggtgctttcgtcgctatggttttcatgccgccagta

SEQ ID NO: 103354 - DNA, 75 bp, synthetic construct
  source 1..75: mol_type = other DNA
gtccagaattcacagtatcaagtaagcccggagacttcttcctatagatcgtattatcaacgtattcagacacag

SEQ ID NO: 103355 - DNA, 75 bp, synthetic construct
  source 1..75: mol_type = other DNA
tgacatgactaatttttacacgattaattacgagagcgagcttttagatggtggcaaagtgagcgaatccatcag

SEQ ID NO: 103356 - DNA, 75 bp, synthetic construct
  source 1..75: mol_type = other DNA
gaaaatcaagactatattttgctttccaatttgggaaagcaaacatctggcagaggcggtcacaaccgcaaggac

SEQ ID NO: 103357 - DNA, 75 bp, synthetic construct
  source 1..75: mol_type = other DNA
gatgaatggaatgactgataatgcttatgccatcacaggctctaataagtcttatattgccacagccacattgcc

SEQ ID NO: 103358 - DNA, 75 bp, synthetic construct
  source 1..75: mol_type = other DNA
gagccatgtcagctatgccggtcatctggcgcaggccggggtggatatcacgctgatttatgccggggcgcacaa

SEQ ID NO: 103359 - DNA, 75 bp, synthetic construct
  source 1..75: mol_type = other DNA
ggtgtctgacgggctgtccgtgacgctggatggtgcgctggataatacgtccggcagactgctttcacagaaaac

SEQ ID NO: 103360 - DNA, 75 bp, synthetic construct
  source 1..75: mol_type = other DNA
gcgtgtgaagaagcgaaaggtcgtgaacaactggcggcaacgctggcggcgatgccggagatgacggtggaaaaa

SEQ ID NO: 103361 - DNA, 75 bp, synthetic construct
  source 1..75: mol_type = other DNA
aacccgtatcacgcccagtacatcctgcgccgccgtgatgattacctggagctgttcgaccgtgatgccctgagc

SEQ ID NO: 103362 - DNA, 75 bp, synthetic construct
  source 1..75: mol_type = other DNA
gcggtgacagcctcaggcaccgggctgggctatggcgaaggcgagagtcctatggctatgacagttgtggctacc

SEQ ID NO: 103363 - DNA, 75 bp, synthetic construct
  source 1..75: mol_type = other DNA
tgatgatgactcagggtaccctggttgatgccacaattatcgaagcaccaagctcaaccaagaataaaaacaaac

SEQ ID NO: 103364 - DNA, 75 bp, synthetic construct
  source 1..75: mol_type = other DNA
ttgctgtgttgcggatgtctgataacagctatccgccctttggtgccagcgtgacaaatgcgaaaggccgtgaac

SEQ ID NO: 103365 - DNA, 75 bp, synthetic construct
  source 1..75: mol_type = other DNA
gattttaccgccctggaaaacgtggctatgccgctgctgattggcaagaaaaagccgctgaaatcaacagccgtg

SEQ ID NO: 103366 - DNA, 75 bp, synthetic construct
  source 1..75: mol_type = other DNA
tcacagttagcgatgctattcacgctagcgaacctgtttaaagtggatcagatgatacgacgacagactaaatcc

SEQ ID NO: 103367 - DNA, 75 bp, synthetic construct
  source 1..75: mol_type = other DNA
gattgtctatatcgcacctaaactattaggcagcgacgcccgtggattatgcacactgccagggcttgagaaatt

SEQ ID NO: 103368 - DNA, 75 bp, synthetic construct
  source 1..75: mol_type = other DNA
tcaccaacgaaattttccgcgttccggcgcgccgtaagcgtaagcccgcgattaagccgtctgatatcccaacat

SEQ ID NO: 103369 - DNA, 75 bp, synthetic construct
  source 1..75: mol_type = other DNA
tgtgtaagactggtaactctcaggtaattccagatgaggtgctgtcagcaattatgaaggtagtcaggattcgta

SEQ ID NO: 103370 - DNA, 75 bp, synthetic construct
  source 1..75: mol_type = other DNA
tgggtagccagatttatgccatggccggtatgcagactcgcctgcatctgatcgccaacgaacccggtacttatg

SEQ ID NO: 103371 - DNA, 75 bp, synthetic construct
  source 1..75: mol_type = other DNA
cagatgatggctgggctgaggcggacaataacatcgctgaaaatgcgttgcggatggtcagtctgggccgcaaaa

SEQ ID NO: 103372 - DNA, 75 bp, synthetic construct
  source 1..75: mol_type = other DNA
atgctgcggaaaacattaaacaaatcgcccgttacgctaccgatgataataatcatgaaggcgcgctgaacgtga

SEQ ID NO: 103373 - DNA, 75 bp, synthetic construct
  source 1..75: mol_type = other DNA
tgacatggattcaatagggggcgcagcaggtaattctaaagtttactctatttggaccaagattttcgataaagg

SEQ ID NO: 103374 - DNA, 75 bp, synthetic construct
  source 1..75: mol_type = other DNA
gatccggccttaacggtgcgttggtctgaactggatgaacaaactcaggcactttatccgcaacaaaatctccgc

SEQ ID NO: 103375 - DNA, 75 bp, synthetic construct
  source 1..75: mol_type = other DNA
cttgtgctgatactgtcaggcgtcgctctttgtgcttccagagcactgattgttacataccgcctctggcagttg

SEQ ID NO: 103376 - DNA, 75 bp, synthetic construct
  source 1..75: mol_type = other DNA
aaaagcagtaccgctggtactggatgagcgcttttaccgcaaggcgatgcagaggattagcttttattcacttga

SEQ ID NO: 103377 - DNA, 75 bp, synthetic construct
  source 1..75: mol_type = other DNA
acaagcctggaaagtggaacataaattgtcaatattctactgtatgctatttgtgccgtcatttctggtgcagaa

SEQ ID NO: 103378 - DNA, 75 bp, synthetic construct
  source 1..75: mol_type = other DNA
aacgaaaatggtgtgcaactacgatgtggacctcaaggatacggctactatactcaatacggtcgctttattggc

SEQ ID NO: 103379 - DNA, 75 bp, synthetic construct
  source 1..75: mol_type = other DNA
ggactcttgtccacagcgcgcgctggatttcgggccgatcgatgagttacggaagaagtatggcactgagaatga

SEQ ID NO: 103380 - DNA, 75 bp, synthetic construct
  source 1..75: mol_type = other DNA
tggcgtgtgcgcagtggatctgggggcggatcgtgggtctctacgaacaggcagccagtgatgatggcgagatca

SEQ ID NO: 103381 - DNA, 75 bp, synthetic construct
  source 1..75: mol_type = other DNA
agccggtctgggcactgtgcaatgacacggcctgttctgcagccatgctgctggcgtcggcctgctcccgacggc

SEQ ID NO: 103382 - DNA, 75 bp, synthetic construct
  source 1..75: mol_type = other DNA
agcagttcccgttctggtcagagtcaacgttaaaacgcgcatttgcaagtctgaaaacgctggggcttttgcgtt

SEQ ID NO: 103383 - DNA, 75 bp, synthetic construct
  source 1..75: mol_type = other DNA
gtgcaggacgagtattacatggcgcgggcgctaaagctggcgcaacgaggacgttttaccacccaccccaacccg

SEQ ID NO: 103384 - DNA, 75 bp, synthetic construct
  source 1..75: mol_type = other DNA
aatgtcgggtgcgtcattgtcaaagatggcgaaattgtcggtgaaggttaccatcaacgagcgggtgaaccacat

SEQ ID NO: 103385 - DNA, 75 bp, synthetic construct
  source 1..75: mol_type = other DNA
cctggttaagaaattaggtaacgataaaatcaagctggttctcgagctaacggaacgtaatcctattccggtaac

SEQ ID NO: 103386 - DNA, 75 bp, synthetic construct
  source 1..75: mol_type = other DNA
ttgcgcctgacaacccacaaaactgtatcagaaatgttaatttgtttttaaaagaaaagtattataaagcttcaa

SEQ ID NO: 103387 - DNA, 75 bp, synthetic construct
  source 1..75: mol_type = other DNA
tcaagcggtggcggcggctaaattgaattcaaaagtcctgatgctgactaaagtaggtgatgatatttttgcgga

SEQ ID NO: 103388 - DNA, 75 bp, synthetic construct
  source 1..75: mol_type = other DNA
ccggcgcagaacagtatggcgattctgttgctggagtctgctggccatcgctttgtttctcagtggtatgctctt

SEQ ID NO: 103389 - DNA, 75 bp, synthetic construct
  source 1..75: mol_type = other DNA
aaagatatgctgttgctggcgctgatgtcttcagaaaaccgcgcggcggcaagcctggcgcaccattatcctggt

SEQ ID NO: 103390 - DNA, 75 bp, synthetic construct
  source 1..75: mol_type = other DNA
gaagtccaactacagggaagattgggccaactaaaccacttgaagacctgttaaataaacatggtataccgatta

SEQ ID NO: 103391 - DNA, 75 bp, synthetic construct
  source 1..75: mol_type = other DNA
agcaatatgatattgcggagagacagcttgaagctgagcaaaaagcccaacatcaagctatagtaaatcaattga

SEQ ID NO: 103392 - DNA, 75 bp, synthetic construct
  source 1..75: mol_type = other DNA
agggtcaggccgcaccagtgcggatgcggcgtggcgttatgccagagctgcgctgttttcgtgaacacgcggcgg

SEQ ID NO: 103393 - DNA, 75 bp, synthetic construct
  source 1..75: mol_type = other DNA
gagtgttgacgaaatctccggccatattgtggacaatattgtcgaactggcgcgtaagcctggtctgagtatcgt

SEQ ID NO: 103394 - DNA, 75 bp, synthetic construct
  source 1..75: mol_type = other DNA
catcacgtcgcaacacccggattcagacaacgcgtctgaccggcagtgagcggagtctgctggccgccggggtga

SEQ ID NO: 103395 - DNA, 75 bp, synthetic construct
  source 1..75: mol_type = other DNA
aaataaaaataatttttatatccctgataaccgttgtcaccatatcgtcacgcctgaagccatcagtctggcgtt

SEQ ID NO: 103396 - DNA, 75 bp, synthetic construct
  source 1..75: mol_type = other DNA
atggcaaccttctctaacccgacgtatacgctgccgttccgcaatactaaccatctggtgtatcgcgataactgg

SEQ ID NO: 103397 - DNA, 75 bp, synthetic construct
  source 1..75: mol_type = other DNA
gatgataataatcatgaaggcgcgctgaatgtgattcaggcggtgctggataacacatccccttttaacagctga

SEQ ID NO: 103398 - DNA, 75 bp, synthetic construct
  source 1..75: mol_type = other DNA
ttcttgaagagttcggggcaaccgttaatctgacgttgcctggtattgtgtccgagaaagaacggcttttactca

SEQ ID NO: 103399 - DNA, 75 bp, synthetic construct
  source 1..75: mol_type = other DNA
ataaatctggtaattttgttagtgggtggaagcttgatcctcaaacgaagcaatatgaaaacttcataaataacg

SEQ ID NO: 103400 - DNA, 75 bp, synthetic construct
  source 1..75: mol_type = other DNA
ttgcgacgggtgcggctttattaatgcgaaccgggccacgctgaccacggggcagccgcagatgaaaaacggcag

SEQ ID NO: 103401 - DNA, 75 bp, synthetic construct
  source 1..75: mol_type = other DNA
gcgcgttattcctttgcgatgggcaatgctgcggaaaacattaaacaaatcgcccgttacgctaccgatgataat

SEQ ID NO: 103402 - DNA, 75 bp, synthetic construct
  source 1..75: mol_type = other DNA
aggactttaacgactttaatcttctgaatgtcaacaggtctgacctgctggaagaaaatccggtgttgctgaata

SEQ ID NO: 103403 - DNA, 75 bp, synthetic construct
  source 1..75: mol_type = other DNA
acaggctatgacggcattgtcgcctgtcttcagcaggcaatggcggatagccaggtgcggggcgtactgctggac

SEQ ID NO: 103404 - DNA, 75 bp, synthetic construct
  source 1..75: mol_type = other DNA
ctacaacgccgccggagaactgacggaggtcattctgccgggggatgagacgctgacgttcagccgtgatgaggc

SEQ ID NO: 103405 - DNA, 75 bp, synthetic construct
  source 1..75: mol_type = other DNA
ttgtgtatcagtatgacctgaagaagtttatgtcagacggttactcgaaaaaagttatgttgctggaggccaacc

SEQ ID NO: 103406 - DNA, 75 bp, synthetic construct
  source 1..75: mol_type = other DNA
aataaaggcggtacattttgctgcgcataaaaataggaagatattatccagacattttatttggcatatcagaag

SEQ ID NO: 103407 - DNA, 75 bp, synthetic construct
  source 1..75: mol_type = other DNA
atattctgcgggaagaagcgccggacggcagtaccaccacgtatgaatgggatgaattccatcccctgctggccc

SEQ ID NO: 103408 - DNA, 75 bp, synthetic construct
  source 1..75: mol_type = other DNA
agcaatgcttgctattattatcacaatatttagatttatttacattattttagaaaattcagtttcttgtgtctg

SEQ ID NO: 103409 - DNA, 75 bp, synthetic construct
  source 1..75: mol_type = other DNA
cgccagcggtaatcagtattaccagcttatttcattctttcctgagctaaaggatgagatctcttttgtcgcgga

SEQ ID NO: 103410 - DNA, 75 bp, synthetic construct
  source 1..75: mol_type = other DNA
gatggtgaataccgacatgcagctattgtttccgcagctgtatatttcgctgcagagcttcgcaaaggaggctgt

SEQ ID NO: 103411 - DNA, 75 bp, synthetic construct
  source 1..75: mol_type = other DNA
gtttgcggagtgtgcatacacgcttgaacatcatgatcacgcagtagccttcgccgctgagcttcgcaaaggagg

SEQ ID NO: 103412 - DNA, 75 bp, synthetic construct
  source 1..75: mol_type = other DNA
tcaagaatataatagtttcgccaagaatactactaacacgtttatctttacaattataccagacaataactatgt

SEQ ID NO: 103413 - DNA, 75 bp, synthetic construct
  source 1..75: mol_type = other DNA
aaccgggaggaggcccggcatctggaagcgttcctggcagagcacggtggctggaaggcatttttgtggaagcca

SEQ ID NO: 103414 - DNA, 75 bp, synthetic construct
  source 1..75: mol_type = other DNA
cttaatgaagtgaacagtcgcaatcccagccagttgaacggttttgttgaggttgccgggaaaaaggcgcaggtg

SEQ ID NO: 103415 - DNA, 75 bp, synthetic construct
  source 1..75: mol_type = other DNA
atccgtcagcttacctatgaagaaggtaacgaagccggattaattttcactggctgttatgactcgttcaaaccc

SEQ ID NO: 103416 - DNA, 75 bp, synthetic construct
  source 1..75: mol_type = other DNA
atgtcacttactgatactaaagtaaaaaatgccagaccagcggaaaaagccgtcaagctcactgatggatttggt

SEQ ID NO: 103417 - DNA, 75 bp, synthetic construct
  source 1..75: mol_type = other DNA
aacgcccgactttacgccaggctggcgttgcgatatggatggctatccccagtattttcctgattattttaatta

SEQ ID NO: 103418 - DNA, 75 bp, synthetic construct
  source 1..75: mol_type = other DNA
tccgcgagcgttacgcgagtacaacgaaatggtcgatgaaatatttcagtcaattgtaatcgcggggcgggtttg

SEQ ID NO: 103419 - DNA, 75 bp, synthetic construct
  source 1..75: mol_type = other DNA
tgatttgcctcgacggcaaactgggcgctgatggcaacgcactgttccgccagcctgatctgcgtgaaatgcgtg

SEQ ID NO: 103420 - DNA, 75 bp, synthetic construct
  source 1..75: mol_type = other DNA
tgatatgcccggcgatcaagtcagaagttaagttatcatttgactggatacattcatttcgtgttactgacgaag

SEQ ID NO: 103421 - DNA, 75 bp, synthetic construct
  source 1..75: mol_type = other DNA
ggcgttgtttgcgcgtgttgcagcagaaaaacatcagcgcggtgaactggaaaagccacaccaccagctggtcag

SEQ ID NO: 103422 - DNA, 75 bp, synthetic construct
  source 1..75: mol_type = other DNA
gcatggtggccgggaacccgtggctggccaagggagaggccagaatcattcttaatgaagtgaacagtcgcaatc

SEQ ID NO: 103423 - DNA, 75 bp, synthetic construct
  source 1..75: mol_type = other DNA
caatgccagctccactctggatgaaactgcccggaggccggttcggtacagcttatgatggactgactgatacgt

SEQ ID NO: 103424 - DNA, 75 bp, synthetic construct
  source 1..75: mol_type = other DNA
tggcgacaacaccgaggttatcgctgaggtggttgggcgagatggcgttctggttattttgaaggccatgaaggc

SEQ ID NO: 103425 - DNA, 75 bp, synthetic construct
  source 1..75: mol_type = other DNA
caggcaaaacaaaagctacaatctacacgtcagtacagcctcgataacctgctgcctgccgattactatccttgt

SEQ ID NO: 103426 - DNA, 75 bp, synthetic construct
  source 1..75: mol_type = other DNA
ttaagaacaaatggcgatttcatattacaagtatttctcttttactgttcagtttcgccgtttcaatcatctttt

SEQ ID NO: 103427 - DNA, 75 bp, synthetic construct
  source 1..75: mol_type = other DNA
cagtcattcatggcaatccgtcgcgcaaccaccgccagcggcaaccgcccgacctatgaagccagccgcagcgaa

SEQ ID NO: 103428 - DNA, 75 bp, synthetic construct
  source 1..75: mol_type = other DNA
gaaatcacagaccagaattgcgataatgctcgtgctgcattagaacaagctcaaaaagaagagcacaagaagaaa

SEQ ID NO: 103429 - DNA, 75 bp, synthetic construct
  source 1..75: mol_type = other DNA
caccggacggtaaacgcagcaccatcgcatatgataaacgcgggcgtccggtgagtgtgacggaaggcggtctta

SEQ ID NO: 103430 - DNA, 75 bp, synthetic construct
  source 1..75: mol_type = other DNA
ctggttcagtgccagtcagtggcagctaccgaatgaaagcgattatctgaaattacaggcactgtttgcccgagt

SEQ ID NO: 103431 - DNA, 75 bp, synthetic construct
  source 1..75: mol_type = other DNA
ccggcaatatgtcagcctgctggaggaatacaaatcactgcggcgttatttttccgtatcggctgtcgttcctta

SEQ ID NO: 103432 - DNA, 75 bp, synthetic construct
  source 1..75: mol_type = other DNA
tagaaaacgaacaggaacgtctttttgatgaagattacctaatggattcgaaagaatgcattgacgtaattcgtg

SEQ ID NO: 103433 - DNA, 75 bp, synthetic construct
  source 1..75: mol_type = other DNA
tgctctgtacgacatcaaggggttgacgtatcaagggcatttgcaccaattctggcaggccgattttaaaccaga

SEQ ID NO: 103434 - DNA, 75 bp, synthetic construct
  source 1..75: mol_type = other DNA
gctgggctcgacggtacgtgaacagttgaaaaagaagctggttgaagtacttgagtcaccccggattgaagcaaa

SEQ ID NO: 103435 - DNA, 75 bp, synthetic construct
  source 1..75: mol_type = other DNA
tacggatgtctggacgcacaagcccgtgcagtattatccgggtaaacatccctgtgaaaaaccggcggatatgtt

SEQ ID NO: 103436 - DNA, 75 bp, synthetic construct
  source 1..75: mol_type = other DNA
cgcagctggtgcaggttacccgccggatggcagagctgattgtcgaagtgattgacggaacgctctcgccgctcg

SEQ ID NO: 103437 - DNA, 75 bp, synthetic construct
  source 1..75: mol_type = other DNA
ccggtcgtgccggttcgtcaccgtcttcccgtacaggatatccacgcaggcaacgcatctgccgtgtcacgccgc

SEQ ID NO: 103438 - DNA, 75 bp, synthetic construct
  source 1..75: mol_type = other DNA
atgtcttttattgttatttggctacaacctttttttagagcagttacgtcaattactggcatgtataatagtatt

SEQ ID NO: 103439 - DNA, 75 bp, synthetic construct
  source 1..75: mol_type = other DNA
ccagacgctggataacagacgcggtacgctgaacagcctgcaggaactgactgtcagtaccggagcaatggataa

SEQ ID NO: 103440 - DNA, 75 bp, synthetic construct
  source 1..75: mol_type = other DNA
atctgcaagcggctccgctaaagataactgggcatttactgcgctggggattctgggtaacgatgacaccgcccg

SEQ ID NO: 103441 - DNA, 75 bp, synthetic construct
  source 1..75: mol_type = other DNA
ctgatagtcacagacccgccatactttaaagtgaagcccgagggctgggataaccagtggaagggcgacgatgat

SEQ ID NO: 103442 - DNA, 75 bp, synthetic construct
  source 1..75: mol_type = other DNA
ggcaacaatcagatgattgcggttaccaacaatcagatacagacggtgggtgttaaccagatagagacggtgggc

SEQ ID NO: 103443 - DNA, 75 bp, synthetic construct
  source 1..75: mol_type = other DNA
ggaagcctttacctgttctgtgggcatcgcctggcatctgatattgagatcatgatgcgtgaacgtttcaacgtg

SEQ ID NO: 103444 - DNA, 75 bp, synthetic construct
  source 1..75: mol_type = other DNA
cagcccggaaggggaaacggcgtggtgcggggagtatgacgagtgggggaaccagcttaatgaggagaacccgca

SEQ ID NO: 103445 - DNA, 75 bp, synthetic construct
  source 1..75: mol_type = other DNA
aacattatcaggggccataccagccaaaaaatgacggctatgcaacaaaggggcgcgagcttaaacagcatgtca

SEQ ID NO: 103446 - DNA, 75 bp, synthetic construct
  source 1..75: mol_type = other DNA
caaatagccattccagaatttaactggaaaatgacaattatggtccccttagataacctgtactggtcatgggct

SEQ ID NO: 103447 - DNA, 75 bp, synthetic construct
  source 1..75: mol_type = other DNA
aacataccgtgtgacgctttccgtgacccgggaggaggcccgacatctggaagcattcctggcagagcacggtgg

SEQ ID NO: 103448 - DNA, 75 bp, synthetic construct
  source 1..75: mol_type = other DNA
attttattaagcgagacacaactcagcatctgtgcctgcattgtgtgcctttagcgcttttttcaatccagttga

SEQ ID NO: 103449 - DNA, 75 bp, synthetic construct
  source 1..75: mol_type = other DNA
gtgagtatccggttacaacaggtgaaggcgttgttgcagggaattcgtgacgacgacgcgctgtatgattccctg

SEQ ID NO: 103450 - DNA, 75 bp, synthetic construct
  source 1..75: mol_type = other DNA
atgataaccattcccattacgtttcgtatgttgatagcaaagtatctctgtctgctgaagcccttttggctgcgt

SEQ ID NO: 103451 - DNA, 75 bp, synthetic construct
  source 1..75: mol_type = other DNA
taaaatatggtattcagaacctgatgaaggcgataactatttaataaaagatggcgctaattttgtgatccagtt

SEQ ID NO: 103452 - DNA, 75 bp, synthetic construct
  source 1..75: mol_type = other DNA
cgacgacgcactgtacgattccctgcgcgaacttctccagcgtcagcggatctgcatgattcgccgcgccagtga

SEQ ID NO: 103453 - DNA, 75 bp, synthetic construct
  source 1..75: mol_type = other DNA
tacggatgtctggacgcacaagcctgtgcagtattatccgggcaaacatccctgtgaaaaaccggcagatatgtt

SEQ ID NO: 103454 - DNA, 75 bp, synthetic construct
  source 1..75: mol_type = other DNA
atgtttgcgctcgctgatgtgaattcgttctatgcgagctgtgaaaaggtgtttcgtccggacctgcgtaacagg

SEQ ID NO: 103455 - DNA, 75 bp, synthetic construct
  source 1..75: mol_type = other DNA
gaagactgaagcacgcaaggagggagcttactttgtggcgaacagaatgctggctgcctgggaagctggttttat

SEQ ID NO: 103456 - DNA, 75 bp, synthetic construct
  source 1..75: mol_type = other DNA
gtggtaaatgggcggctggtgggggttaggggcactcaccagccatctgctcatgcgtccggaacacaagcaaac

SEQ ID NO: 103457 - DNA, 75 bp, synthetic construct
  source 1..75: mol_type = other DNA
aaaggcagcattgtcactggagcgtcgggctattggtgtggaactggaggaagggcgatttaatcagactgtaac

SEQ ID NO: 103458 - DNA, 75 bp, synthetic construct
  source 1..75: mol_type = other DNA
tggcattcacccacagcagcagcgattttaccgatattcttgctggtggcgctgaaaaatcagtgcttgcaggct

SEQ ID NO: 103459 - DNA, 75 bp, synthetic construct
  source 1..75: mol_type = other DNA
tgtggctatgacagtgtttcatattttatttcctgttttaaaaaacagttcaatattacaccttcagcatttatg

SEQ ID NO: 103460 - DNA, 75 bp, synthetic construct
  source 1..75: mol_type = other DNA
ctggctgatttcacaccatcgggtatagcgcagccgggattatttgatgaaatccagccccgtaaaaacagtgaa

SEQ ID NO: 103461 - DNA, 75 bp, synthetic construct
  source 1..75: mol_type = other DNA
tactaccttaatcgctggtttgcagataaaaactactacttcacgcagatctacggcgagcataaaaatacagat

SEQ ID NO: 103462 - DNA, 75 bp, synthetic construct
  source 1..75: mol_type = other DNA
cacgtgcgctccggtacggggctgacaatcggcgtcgggatggggccgaccaaaacgctggctaaaagcgcacaa

SEQ ID NO: 103463 - DNA, 75 bp, synthetic construct
  source 1..75: mol_type = other DNA
gtaaatcgtgacggtctggcgcaggttttcgcctggcttccggcggttcaaaaagcggcagcacaacagttgtgg

SEQ ID NO: 103464 - DNA, 75 bp, synthetic construct
  source 1..75: mol_type = other DNA
tgggttcgtggcgctccgcttattggtgtcgttgcagcctatggcatcgcgctgggaatgaatcacgatgccagt

SEQ ID NO: 103465 - DNA, 75 bp, synthetic construct
  source 1..75: mol_type = other DNA
ccatcggtgtcggcatgggccccacgaaaacgctggctaaaagcgctcaatgggcgtcaaaagaatggccacaat

SEQ ID NO: 103466 - DNA, 75 bp, synthetic construct
  source 1..75: mol_type = other DNA
acaggaggtggatgtggttgtcaccctgccactgagcgaatatttcgacacaaacgcacagccggacatggccaa

SEQ ID NO: 103467 - DNA, 75 bp, synthetic construct
  source 1..75: mol_type = other DNA
gctggccttaaatgctggctgggatatgcagcttctggccgaagaagtcaaagagttaatggatgatgattttga

SEQ ID NO: 103468 - DNA, 75 bp, synthetic construct
  source 1..75: mol_type = other DNA
agtacggtgagactgattacgatttcctgtgccggatggcggcggaggaaggcatcttcttttatgaggagcatg

SEQ ID NO: 103469 - DNA, 75 bp, synthetic construct
  source 1..75: mol_type = other DNA
tctcacggtcactgcggtgtgctgtgcgagcacggcgtcgacaacgacgcgaccctcgaaaatttaggcaaacaa

SEQ ID NO: 103470 - DNA, 75 bp, synthetic construct
  source 1..75: mol_type = other DNA
gcctgaaggctgggataaccagtggaagggcgacgatgattacctgaagtggctggaccagtgtctggcgcagtt

SEQ ID NO: 103471 - DNA, 75 bp, synthetic construct
  source 1..75: mol_type = other DNA
ccgttttagtcggcgatattaaaaccttacttatggatagccaggataagtattttgaagcaacccaaacagtgt

SEQ ID NO: 103472 - DNA, 75 bp, synthetic construct
  source 1..75: mol_type = other DNA
ggcgattttgaccgctcattctctgatggtgttctcgaagatatcgctgaacagattcgcaaaggaggcaaccag

SEQ ID NO: 103473 - DNA, 75 bp, synthetic construct
  source 1..75: mol_type = other DNA
aaacttcaacgtggtactggagagaacggttcgtgaactgaacggagaaccgtgcattttgctggaagaagcacc

SEQ ID NO: 103474 - DNA, 75 bp, synthetic construct
  source 1..75: mol_type = other DNA
acatcaccacgccggacgggcgggagacgaaattttactataacgacgggaacctggtgacggcggtggtgtacc

SEQ ID NO: 103475 - DNA, 75 bp, synthetic construct
  source 1..75: mol_type = other DNA
aaaggggatgaggattatcttcgctggcttgatatgtgcctcgcacaattctggcgagtgcttaaacctgctggc

SEQ ID NO: 103476 - DNA, 75 bp, synthetic construct
  source 1..75: mol_type = other DNA
ttaaaccgatggtggtaatgaccgcgttgcaacgtggcgtggtgcgggaaaactcggtactcaataccattcctt

SEQ ID NO: 103477 - DNA, 75 bp, synthetic construct
  source 1..75: mol_type = other DNA
cggcgccgtttccgcgccggtctttggtgccatcatgggcggcgtattgcgtaccatgaacatcgagccggatgc

SEQ ID NO: 103478 - DNA, 75 bp, synthetic construct
  source 1..75: mol_type = other DNA
cgcttgggcagatggcaaccgaaattgcccatgaacaaaatcaaccgttagccgccattcacgcacttactgata

SEQ ID NO: 103479 - DNA, 75 bp, synthetic construct
  source 1..75: mol_type = other DNA
aaccgggcgtggcggaactgtttcgcaaacaattcccggcgttacaggtgcatttaccgcagcacagtttgttta

SEQ ID NO: 103480 - DNA, 75 bp, synthetic construct
  source 1..75: mol_type = other DNA
ttcccgctcagcgagctgcaggcgtgcatggtagacagctgggaaatctggaccgactttcatgcactggcgctg

SEQ ID NO: 103481 - DNA, 75 bp, synthetic construct
  source 1..75: mol_type = other DNA
gaactggaaaagccacaccaccagctggtcagcacatacagtgaacttaaccggcaatatgccagcctgctggag

SEQ ID NO: 103482 - DNA, 75 bp, synthetic construct
  source 1..75: mol_type = other DNA
tcccgtcggatccagttttaacaccatcaccaaagatttaatcggcaacacctggaacattattagcggtataac

SEQ ID NO: 103483 - DNA, 75 bp, synthetic construct
  source 1..75: mol_type = other DNA
tgacctgcgcaaagtggacagcgcgggtcagcatgcttcgtgttgagttcagcgcagagtttaaacaggtggtga

SEQ ID NO: 103484 - DNA, 75 bp, synthetic construct
  source 1..75: mol_type = other DNA
tctggctcccggcctgctgtgcgcagacgggcagtaccgccagatagtcaccgtggaagatgcggtgcgcggcgg

SEQ ID NO: 103485 - DNA, 75 bp, synthetic construct
  source 1..75: mol_type = other DNA
catgaatggggtgcagatgggttatatcaaggtgccagcagcggaaacagatccagaccttgagacaattcgcat

SEQ ID NO: 103486 - DNA, 75 bp, synthetic construct
  source 1..75: mol_type = other DNA
gccacgtgtggaacagtacagcatcgatgagatgtttctcgatatccgtggtatagacaactgcatcgactatga

SEQ ID NO: 103487 - DNA, 75 bp, synthetic construct
  source 1..75: mol_type = other DNA
ctggatgcgcttggcccagaaccgggagataatgaggctgttttccttggtgaagatggagggcgaattcttcca

SEQ ID NO: 103488 - DNA, 75 bp, synthetic construct
  source 1..75: mol_type = other DNA
acattgtgttgcaccggggttgatggtgcttgaacggaatcagttgataaatatcacgatgcaggaagtggatgg

SEQ ID NO: 103489 - DNA, 75 bp, synthetic construct
  source 1..75: mol_type = other DNA
acgcaagctgaatgtactgggcattaagaccgcgctcgatctcgccctgacgaacccggccttcatccgcaaaaa

SEQ ID NO: 103490 - DNA, 75 bp, synthetic construct
  source 1..75: mol_type = other DNA
cagcgggcggaagaggcccgtaaacagcacaccgcttccttattttcccctgacaccccccgccctctttcagcc

SEQ ID NO: 103491 - DNA, 75 bp, synthetic construct
  source 1..75: mol_type = other DNA
gccttgatgtgctacaaaccgccacgcggggtgaatggtataagggcgatttttttgcgccgcaaccgtggcagc

SEQ ID NO: 103492 - DNA, 75 bp, synthetic construct
  source 1..75: mol_type = other DNA
tggcgacaacaccgaggttatcgctgaggtagttgggcgagatggcgttctggttattttggaggccatgaaggc

SEQ ID NO: 103493 - DNA, 75 bp, synthetic construct
  source 1..75: mol_type = other DNA
aacggtgacgccgactatcttcgatggcttgatatgtgtcttgcccagttctggcgagtgcttaagcctgccggc

SEQ ID NO: 103494 - DNA, 75 bp, synthetic construct
  source 1..75: mol_type = other DNA
gaccccggcctgctgtatgcggggcagtggcgggatgcggaatcggggctgtgctataaccggttccggtattac

SEQ ID NO: 103495 - DNA, 75 bp, synthetic construct
  source 1..75: mol_type = other DNA
cagaatatcattttgacaacaatgtgaacggaattgatagttttaaacatttcttcgaaaaggtattattaagtg

SEQ ID NO: 103496 - DNA, 75 bp, synthetic construct
  source 1..75: mol_type = other DNA
tgtattaaaagaaagtgaattttctgatagagttaaagtaaaagaaataaatattgagtttaatgataatagttt

SEQ ID NO: 103497 - DNA, 75 bp, synthetic construct
  source 1..75: mol_type = other DNA
tgatgcgcgtgaatcactggggataacgccgaaacagatagcggaagccaccggaaagaaaaacatggctccgca

SEQ ID NO: 103498 - DNA, 75 bp, synthetic construct
  source 1..75: mol_type = other DNA
ccgctgcagcaaaagctgccgcggaggcagatgatattttcggtgagctaagctctggtaagaatgcaccgaaaa

SEQ ID NO: 103499 - DNA, 75 bp, synthetic construct
  source 1..75: mol_type = other DNA
caatgatgccagtgggctgatacagagcggagcatcgttgaatctccgtgctgacacgctgagtaaccgtaacag

SEQ ID NO: 103500 - DNA, 75 bp, synthetic construct
  source 1..75: mol_type = other DNA
tgcaaaatttcaatgggcaacttggaattgaagctagaggtattttgcgggctttgtttttaattaagagaaacc

SEQ ID NO: 103501 - DNA, 75 bp, synthetic construct
  source 1..75: mol_type = other DNA
gatgcgtgaacgcttcaacgtcatgaaccacattatctgggcgaagccatcagggcgttggaacggttgtaataa

SEQ ID NO: 103502 - DNA, 75 bp, synthetic construct
  source 1..75: mol_type = other DNA
cgggcatttttaattgacggtattggcggaatgttctctgaacagctaagtatggtcagctccgacgatgtcgtt

SEQ ID NO: 103503 - DNA, 75 bp, synthetic construct
  source 1..75: mol_type = other DNA
aacgttctaaatgggccagaatcgaaggtttgattggcagttcaaaacgtattaaagcgattgcggcggatatgg

SEQ ID NO: 103504 - DNA, 75 bp, synthetic construct
  source 1..75: mol_type = other DNA
aagggagcgaagacggtcacggtgtggtgttcccggctgaactggtggggctgctggacaggctggagggggaaa

SEQ ID NO: 103505 - DNA, 75 bp, synthetic construct
  source 1..75: mol_type = other DNA
catgcaattggtgttgaactggaagctgaacgttttgagcaaacggccagggaagttctgaatttaatcagtaat

SEQ ID NO: 103506 - DNA, 75 bp, synthetic construct
  source 1..75: mol_type = other DNA
gattgatatgctgacctctgcaatcaatggctaccagaacaaggtactgaccgcagcggaggtaattgatgagct

SEQ ID NO: 103507 - DNA, 75 bp, synthetic construct
  source 1..75: mol_type = other DNA
aatcaatggatggcgctggacgtggattataaagcgcgtagcgacgaaattgttagtaacaagatgattgcactg

SEQ ID NO: 103508 - DNA, 75 bp, synthetic construct
  source 1..75: mol_type = other DNA
ttatagagataatgggagttcgggaggtcttacaacatggcttcttgttgaacttttaaaaaataacatgatcga

SEQ ID NO: 103509 - DNA, 75 bp, synthetic construct
  source 1..75: mol_type = other DNA
agaacggagatgttaaaccttatcttgataatgtaaatgctcttggtggtccgggaaacaggttctcgacagttt

SEQ ID NO: 103510 - DNA, 75 bp, synthetic construct
  source 1..75: mol_type = other DNA
aacagaattcagtttcagtcagtatgtcatgctgatgcgcctctgctgataaataatgccggaatgcattttgca

SEQ ID NO: 103511 - DNA, 75 bp, synthetic construct
  source 1..75: mol_type = other DNA
gatcttacagctgacgccagacgcactaacgctgggaaccgggacaaactgcgaaccgccacactggttgtggca

SEQ ID NO: 103512 - DNA, 75 bp, synthetic construct
  source 1..75: mol_type = other DNA
tatctggtttaagggtgatgttgtggaacgttatgattttcgtcagactgcaagtaagacttctcgcggtttgat

SEQ ID NO: 103513 - DNA, 75 bp, synthetic construct
  source 1..75: mol_type = other DNA
atgaatatgatgatctcatatcaggaacttgttcgcaccttccttagcgttcttccctactttctgttattgccg

SEQ ID NO: 103514 - DNA, 75 bp, synthetic construct
  source 1..75: mol_type = other DNA
aaaactattgtattggatgcggagcatgttcctataataatagtgatgtaactatcgaatggaatgagctaggtt

SEQ ID NO: 103515 - DNA, 75 bp, synthetic construct
  source 1..75: mol_type = other DNA
cggctgacgctggattccatcactatcaacagcaactttgacggttctatggtggtggagctgaccgggcggcgg

SEQ ID NO: 103516 - DNA, 75 bp, synthetic construct
  source 1..75: mol_type = other DNA
ttatatggcaaagtcgatggtttaggcgtgcttaaggctgcagttgcagcaattaaaaaagccgcagcaaattaa

SEQ ID NO: 103517 - DNA, 75 bp, synthetic construct
  source 1..75: mol_type = other DNA
ccggtgaagccaaaaccgatgcccgtgatgcgaccatcattgccgaagctacacgtactctgcctcatgctcttc

SEQ ID NO: 103518 - DNA, 75 bp, synthetic construct
  source 1..75: mol_type = other DNA
ttgaaaacgtcaggacgtttctctacttgcaacgatttgcgatagatcgctctgaacaattttccgatgctacag

SEQ ID NO: 103519 - DNA, 75 bp, synthetic construct
  source 1..75: mol_type = other DNA
gacggaagcagaaaatgcgctgacggaagccaacaaagacggtgcaatcaaccagacagagcatgacgatctgac

SEQ ID NO: 103520 - DNA, 75 bp, synthetic construct
  source 1..75: mol_type = other DNA
gtggtgaacattgccacgccggacggggccgggatttcgcataaccggtttacggattacaacgtcgggaaggaa

SEQ ID NO: 103521 - DNA, 75 bp, synthetic construct
  source 1..75: mol_type = other DNA
gacggtcagttcgctcctataggacaagggccaatgtctcttcctgagctgaatcacaggattttggtcgcagca

SEQ ID NO: 103522 - DNA, 75 bp, synthetic construct
  source 1..75: mol_type = other DNA
gcggcgagcgccaattagtgttgcttgctcgtgctttagctactggtgctgaggtactcatacttgatgagccgg

SEQ ID NO: 103523 - DNA, 75 bp, synthetic construct
  source 1..75: mol_type = other DNA
gtgattgttgagggttcagccacagctccagatgatggcgaaaatgattacagcgtaacgtctacctctgcgggt

SEQ ID NO: 103524 - DNA, 75 bp, synthetic construct
  source 1..75: mol_type = other DNA
gaaagatgccgggtatgcggcgaaggagcgcgagcttaaacagcatgtgatgtctccgctgatttcttactttcg

SEQ ID NO: 103525 - DNA, 75 bp, synthetic construct
  source 1..75: mol_type = other DNA
caccgatgtgtggacgtataaaccggtgcagtactatccagggaaacatccgtgcgaaaaaccggcagaaatgct

SEQ ID NO: 103526 - DNA, 75 bp, synthetic construct
  source 1..75: mol_type = other DNA
acttcatttattaatgttgatggtctcactggacttgtcgttactaaaaatagtcctgaagaattacgaacagca

SEQ ID NO: 103527 - DNA, 75 bp, synthetic construct
  source 1..75: mol_type = other DNA
cgggacattttgctgacgccgcagggtagccgcattgcccgtcgggaatatggctccctgctgtcggcactgata

SEQ ID NO: 103528 - DNA, 75 bp, synthetic construct
  source 1..75: mol_type = other DNA
ttctttccttgatgttattttctgttactgggtgtagttttaatcaacttcccggtacaataattagccggtcgc

SEQ ID NO: 103529 - DNA, 75 bp, synthetic construct
  source 1..75: mol_type = other DNA
ccttgaacaaaggagactgatgctacagtggtgggcagattttcttgatgcaaaccgggatgggatggtaaggcc

SEQ ID NO: 103530 - DNA, 75 bp, synthetic construct
  source 1..75: mol_type = other DNA
agaccaggggatatcgttgccgatttctttatgggctctggttcaactgtgaaagctgcaatagaacttggtcgt

SEQ ID NO: 103531 - DNA, 75 bp, synthetic construct
  source 1..75: mol_type = other DNA
cacttcctgcagcatgtggtggagataaatattttattgatggtgtatttcaacctttgagatatgagcgtgact

SEQ ID NO: 103532 - DNA, 75 bp, synthetic construct
  source 1..75: mol_type = other DNA
acctggcgaaatccaggatgaaagaagtcggaatgactcaagaacagctagctgaagcactcggtatgacacagg

SEQ ID NO: 103533 - DNA, 75 bp, synthetic construct
  source 1..75: mol_type = other DNA
cactgacacagcaaaccgtcatcgtccccggtacgaatgctgctgtcgttgttctcccacgcctggccctccagc

SEQ ID NO: 103534 - DNA, 75 bp, synthetic construct
  source 1..75: mol_type = other DNA
cggtatcgcagttaacccggcacgtccggaactggcagaacgtctgcaggaagcgggcattaaagtggtttccat

SEQ ID NO: 103535 - DNA, 75 bp, synthetic construct
  source 1..75: mol_type = other DNA
cgggttcttgatcaccctctttacccggtcctgaccagcatgcccgtagtcgaagtcaggaccgcagccagactc

SEQ ID NO: 103536 - DNA, 75 bp, synthetic construct
  source 1..75: mol_type = other DNA
aaggcaatcatacccgccgaccagaccttattttattcatcaacggtctgccgttagtcgttatcgaagttaaaa

SEQ ID NO: 103537 - DNA, 75 bp, synthetic construct
  source 1..75: mol_type = other DNA
cgggctatcggtgtagaactggaagcagacaggtttattcagaccactgaagaggtggaaaaactgaacaaaaca

SEQ ID NO: 103538 - DNA, 75 bp, synthetic construct
  source 1..75: mol_type = other DNA
tggaagttgtggcgtagtggctacttgtctaaagtagaaaggctagaaacagaatctttcggtgaaaatgtgggt

SEQ ID NO: 103539 - DNA, 75 bp, synthetic construct
  source 1..75: mol_type = other DNA
ttcatgctgatcgacatgggcggcgcaaccaccgatgtctattccgcctgtgccaacacgctctcgcccgacacc

SEQ ID NO: 103540 - DNA, 75 bp, synthetic construct
  source 1..75: mol_type = other DNA
gcgacagagcgcattctgtttgctgaacattatcaggggccatatcagccgaaaaatgacggctatgcggcaaag

SEQ ID NO: 103541 - DNA, 75 bp, synthetic construct
  source 1..75: mol_type = other DNA
tcttgaccaacgccgcctgatgcttcagtggtgggctgattttcttgatgcgaatcggaatgggatggtcaggcc

SEQ ID NO: 103542 - DNA, 75 bp, synthetic construct
  source 1..75: mol_type = other DNA
tggtgaatcgcattttgtccaacaaccacagccatcatcgcgatatggatgtaacgatcgttgttcattctcctg

SEQ ID NO: 103543 - DNA, 75 bp, synthetic construct
  source 1..75: mol_type = other DNA
tggggagcgggcatatggcaggactatattcaaacaaaaggatggcaaactgaagcacgtcttgtcagcaactgg

SEQ ID NO: 103544 - DNA, 75 bp, synthetic construct
  source 1..75: mol_type = other DNA
cgcccaggtgatttggttgccgatttttttatggggtcgggggcgacaataaaagcggcactgtcactgggacgc

SEQ ID NO: 103545 - DNA, 75 bp, synthetic construct
  source 1..75: mol_type = other DNA
gtgttgagttagtcaacgctgatagcctgcaatacatcgcaactctccctgataactccattgacctgatagtca

SEQ ID NO: 103546 - DNA, 75 bp, synthetic construct
  source 1..75: mol_type = other DNA
tggccccgctgatttcttactttcgtgatgcgcgtgattcactgggggtaacatcgaaacagatagcggaagcca

SEQ ID NO: 103547 - DNA, 75 bp, synthetic construct
  source 1..75: mol_type = other DNA
caccgatgtgtggacgcataaaccggtgcagtactatcccgggaaacatccgtgcgaaaaaccggcagaaatgtt

SEQ ID NO: 103548 - DNA, 75 bp, synthetic construct
  source 1..75: mol_type = other DNA
atgttgcggcaaatgattaccgccagcagtcgtccgggtgacctggttgcagatttcttcatggggtccggttcg

SEQ ID NO: 103549 - DNA, 75 bp, synthetic construct
  source 1..75: mol_type = other DNA
ggtggttatcgatcacaacgtgggggcgggcgtcattaccgatggtcatctgctacacgcaggcagcagtagtct

SEQ ID NO: 103550 - DNA, 75 bp, synthetic construct
  source 1..75: mol_type = other DNA
ccagtttgggccagattccccttcatttatgcaggattttgatgaattaaaagttaaggcaacttctattgcttc

SEQ ID NO: 103551 - DNA, 75 bp, synthetic construct
  source 1..75: mol_type = other DNA
tctggtctgattcgcagtggttccgccattacgctgaacgccctgcagtttatcaatcgccacacgcagaatacc

SEQ ID NO: 103552 - DNA, 75 bp, synthetic construct
  source 1..75: mol_type = other DNA
tcctgctgatgcgaaagtgacggtcgttgaattctttgattaccagtgcatctactgtgcccgcctggcgccgga

SEQ ID NO: 103553 - DNA, 75 bp, synthetic construct
  source 1..75: mol_type = other DNA
gaatttttccgtggtactggagcggactgtccgggaactgaacggagaagcctgcatcagcctggaggaggtgcc

SEQ ID NO: 103554 - DNA, 75 bp, synthetic construct
  source 1..75: mol_type = other DNA
gtgcagtattatccgggcaaacatccctgtgaaaaaccggcagatatgttgcggcagataattgaggccagtagt

SEQ ID NO: 103555 - DNA, 75 bp, synthetic construct
  source 1..75: mol_type = other DNA
ttaatggggtgccaggtttaaatagagataattttatttatatcagcaatatttttttaaatataaaacaacgga

SEQ ID NO: 103556 - DNA, 75 bp, synthetic construct
  source 1..75: mol_type = other DNA
tgtgctggatggtggcggctattactcattttataaatctgtggatgatggctacgtcgaactgagtgtgacacc

SEQ ID NO: 103557 - DNA, 75 bp, synthetic construct
  source 1..75: mol_type = other DNA
cgtgcaactggtgttgagctggaggctgagcgttttgagcagacggtcagggaggttcaggatttaatcatccag

SEQ ID NO: 103558 - DNA, 75 bp, synthetic construct
  source 1..75: mol_type = other DNA
gtatatttatctgttcaacaggcatggaatgggaaaataacttattctgtttccggtgaatctgagttcgctaaa

SEQ ID NO: 103559 - DNA, 75 bp, synthetic construct
  source 1..75: mol_type = other DNA
gtacagtattacccaggcaaacatccctgtgaaaaaccggcggatatgttgcgtcagataatcaccgccagcagt

SEQ ID NO: 103560 - DNA, 75 bp, synthetic construct
  source 1..75: mol_type = other DNA
gtggcgccatcctttaacacctcgtctgccgcttaaagagggtggtgaaccgccccgggtttcctggagagtatt

SEQ ID NO: 103561 - DNA, 75 bp, synthetic construct
  source 1..75: mol_type = other DNA
ctgaccgtcaatatggtgatggacgtcatcgcgaagatgggctttaaaaacctgacactggcgtccagctctttg

SEQ ID NO: 103562 - DNA, 75 bp, synthetic construct
  source 1..75: mol_type = other DNA
tggccccgctgattgcttactttcgtgatgcgcgcgctgccctggggataacggcaaaacagattgcagatgcca

SEQ ID NO: 103563 - DNA, 75 bp, synthetic construct
  source 1..75: mol_type = other DNA
ctggtcagcacatacagtgagctgaaccggcagtatacggaactgctgagtgaatataaaaatttgcggcggtat

SEQ ID NO: 103564 - DNA, 75 bp, synthetic construct
  source 1..75: mol_type = other DNA
gcgatagcgtagaagcgaaaaaacatgagaaagatggcagtatcacccattatgacgacaacaatcagtcagctt

SEQ ID NO: 103565 - DNA, 75 bp, synthetic construct
  source 1..75: mol_type = other DNA
aaccagttaatcaacaaatcgagaccaagagcgacgctattgtaggagaatcagccatgaagaacttaagcgaca

SEQ ID NO: 103566 - DNA, 75 bp, synthetic construct
  source 1..75: mol_type = other DNA
gcgatcacggcgtggataacgattccaccctgctgaacctcggcaaacaggcggtcgtggctgccgctgcgggtg

SEQ ID NO: 103567 - DNA, 75 bp, synthetic construct
  source 1..75: mol_type = other DNA
ttcttcctggagcagcttgaggcgctgggatataccggcgtgacgatcgaacagttccagcacctggatgcaagc

SEQ ID NO: 103568 - DNA, 75 bp, synthetic construct
  source 1..75: mol_type = other DNA
cggacccgccgtactttaaagtgaagcccgagggctgggataaccagtggaagggcgacgatgattacctgaagt

SEQ ID NO: 103569 - DNA, 75 bp, synthetic construct
  source 1..75: mol_type = other DNA
ggtggtggaactgaccggacagcgtaataacggtgtgcctgtttccctttccgtatcaacaggagccgagaatgg

SEQ ID NO: 103570 - DNA, 75 bp, synthetic construct
  source 1..75: mol_type = other DNA
cagccgtcgcgaagagttgagcgaccctgatcttttgagcgcaattatctcccgacgcgactattataccgacgc

SEQ ID NO: 103571 - DNA, 75 bp, synthetic construct
  source 1..75: mol_type = other DNA
atcccgactacttacccgcgaatgcagaagaaaaatatttcgataccgtcctggccggactgtgtgtgggttatg

SEQ ID NO: 103572 - DNA, 75 bp, synthetic construct
  source 1..75: mol_type = other DNA
gcctaacggccttgtaggccgcgataatacaggggcaatactttcgtgccaatccggtacctggggcgctcctaa

SEQ ID NO: 103573 - DNA, 75 bp, synthetic construct
  source 1..75: mol_type = other DNA
cacaaaaggtcatataataaagatataccaataaatataccacctcctcattcagcttaccgtcaaactttaaaa

SEQ ID NO: 103574 - DNA, 75 bp, synthetic construct
  source 1..75: mol_type = other DNA
tctccgtatcagtttccgtgccttataccgacgtctggacgcataaacccgttcagttctacccgggtaaacatc

SEQ ID NO: 103575 - DNA, 75 bp, synthetic construct
  source 1..75: mol_type = other DNA
gacgtccggcaaaattcaaagtagaacagcttgagcaatggcttaaggagcaaggcggatacaaggggactatcg

SEQ ID NO: 103576 - DNA, 75 bp, synthetic construct
  source 1..75: mol_type = other DNA
cggtacgataaatgctgacactctgcagatatcggcacagagcctgtcaaatcataaaggcaagctgattcagac

SEQ ID NO: 103577 - DNA, 75 bp, synthetic construct
  source 1..75: mol_type = other DNA
accgatctgccaacgcagacaatgaccgcatggatgactctcaaaccgtgggagccgttaagcgtaacgctgtcg

SEQ ID NO: 103578 - DNA, 75 bp, synthetic construct
  source 1..75: mol_type = other DNA
ttgtccagggaatgatcaaagccaccaccgatgcctggctgaaaggctgggacgagcgcaacggtggcaacctga

SEQ ID NO: 103579 - DNA, 75 bp, synthetic construct
  source 1..75: mol_type = other DNA
ttctgatgaggcggtcacttttttcagaagctatctgaaaaattatccgggcctgttgaataaagcatggagtgg

SEQ ID NO: 103580 - DNA, 75 bp, synthetic construct
  source 1..75: mol_type = other DNA
ctggcgggtgctgaaacctgccggaagtctttacctgttctgtggccatcgcctggcatctgacattgaaatcat

SEQ ID NO: 103581 - DNA, 75 bp, synthetic construct
  source 1..75: mol_type = other DNA
aaaagcagcaatggcgctggggcgtcgggcgttaggtgttgagcttgagtcagagcggtttaaccagacggtgaa

SEQ ID NO: 103582 - DNA, 75 bp, synthetic construct
  source 1..75: mol_type = other DNA
accacccgacgctggtcgctggcagattttcatactctgtttgttaatcatccctttacccgcctggttacccag

SEQ ID NO: 103583 - DNA, 75 bp, synthetic construct
  source 1..75: mol_type = other DNA
ggcgggcgattttcgtagcggtaatagtcagcaatcatcacctttcttttttcagggcacggcactcggtggttt

SEQ ID NO: 103584 - DNA, 75 bp, synthetic construct
  source 1..75: mol_type = other DNA
cagccagctgaacggttttgttgaggttgccgggaaaaaggcgcaggtggtgattgcgaacccgtccggcatcag

SEQ ID NO: 103585 - DNA, 75 bp, synthetic construct
  source 1..75: mol_type = other DNA
gatcagttggctgacgctgcgtgccgggaatgcccggacatggtggcgaccatcggaaggcgaacaggtggtgct

SEQ ID NO: 103586 - DNA, 75 bp, synthetic construct
  source 1..75: mol_type = other DNA
ttggggggataagaaaatcattgcccagtttccggagatgagcagggccgatttgcgccttgtgaaaaatatctc

SEQ ID NO: 103587 - DNA, 75 bp, synthetic construct
  source 1..75: mol_type = other DNA
atgaatggtcaaataatcacagttgcactcatcctgttggggaactcatttctgacacctcctgtacaggccata

SEQ ID NO: 103588 - DNA, 75 bp, synthetic construct
  source 1..75: mol_type = other DNA
gccaattttgatacccgcataggcgtgcgggcgctcattaccgttacccagggcagaaaaccggtgccgtttgga

SEQ ID NO: 103589 - DNA, 75 bp, synthetic construct
  source 1..75: mol_type = other DNA
gcaccgaaagtaatagcggcgcgtcacgtgttgatctggcgacgctaaaatctatcgaaggtaacactaccacgt

SEQ ID NO: 103590 - DNA, 75 bp, synthetic construct
  source 1..75: mol_type = other DNA
ctggaaggcatttttgtggaagccaccctatgcataccggcagataaaggtgacctgtgccgcctggtcatcacg

SEQ ID NO: 103591 - DNA, 75 bp, synthetic construct
  source 1..75: mol_type = other DNA
atccaaaagagatatttccgctgctgattcaattcggcactaccgaactggcgttacccattgcccgcgtctggc

SEQ ID NO: 103592 - DNA, 75 bp, synthetic construct
  source 1..75: mol_type = other DNA
cgctcattaccgtacttcaggggggtaaacctgtgccatttggttctcaggtatgtgaaacaaccaccggtataa

SEQ ID NO: 103593 - DNA, 75 bp, synthetic construct
  source 1..75: mol_type = other DNA
ggggcatcaaatcaatggtcattgagaccgctgacaaaatcaccttgaaaaccagtgagtttgtcctggaggctg

SEQ ID NO: 103594 - DNA, 75 bp, synthetic construct
  source 1..75: mol_type = other DNA
gaaaggtatggcgactaatgcagcaattggtatcagcgtaaactcagctgctcagcttgctggaaaagatccttt

SEQ ID NO: 103595 - DNA, 75 bp, synthetic construct
  source 1..75: mol_type = other DNA
ttctcagtgtacgcaagacattactcagccattacgattacgcctggctggttccgactgcagtggccgatgagt

SEQ ID NO: 103596 - DNA, 75 bp, synthetic construct
  source 1..75: mol_type = other DNA
gtcgcgggacgatgattaatccccgcgccagtgtggctggtatcgatgccgcaaacggtcagtgctggtatgaga

SEQ ID NO: 103597 - DNA, 75 bp, synthetic construct
  source 1..75: mol_type = other DNA
gcatttgcttaccgatgaattaattaaagatgaggctgttgccagagggctggttaaaaacagtaatatttccgc

SEQ ID NO: 103598 - DNA, 75 bp, synthetic construct
  source 1..75: mol_type = other DNA
gggatgcgctttccgatgggcgcgtggaactggcgattggcgcaacacgcgcgattccggtaggcggtcgttatg

SEQ ID NO: 103599 - DNA, 75 bp, synthetic construct
  source 1..75: mol_type = other DNA
cggcgtttaatcccgattgatgtcaaagtgattgccacgacgaccgcagatctggcaatgctggtggaacaaaat

SEQ ID NO: 103600 - DNA, 75 bp, synthetic construct
  source 1..75: mol_type = other DNA
gaaatttcacatggagtcgcttttatctgttccgtgccattccacgatggcgggcaaacctgacgctgggcgaga

SEQ ID NO: 103601 - DNA, 75 bp, synthetic construct
  source 1..75: mol_type = other DNA
tcgggtgcagcgggatccattctgggtaaaaaatatcatgagtccgtcaaagcttcgcgaaaaatgggatgaact

SEQ ID NO: 103602 - DNA, 75 bp, synthetic construct
  source 1..75: mol_type = other DNA
agcagcgcgttgaagaagaacgccagcgccatatccgtgctgtccgtgccaaaacaccgggcgtgtcacgcgtac

SEQ ID NO: 103603 - DNA, 75 bp, synthetic construct
  source 1..75: mol_type = other DNA
ttggggggataagaaaatcattgcccaatttccggagatgaacagggccgatttgcgccttgtgaaaaatatctc

SEQ ID NO: 103604 - DNA, 75 bp, synthetic construct
  source 1..75: mol_type = other DNA
ttggctatcttgaaattgccatgcggatcaagcaatacatcactgccatcctgcgtcacgccgtccagcaaaaac

SEQ ID NO: 103605 - DNA, 75 bp, synthetic construct
  source 1..75: mol_type = other DNA
tcagttcgttattcatgacgccacgcattggatgagaaaagtatatccagcagcaccgcagcaggatggtgaatg

SEQ ID NO: 103606 - DNA, 75 bp, synthetic construct
  source 1..75: mol_type = other DNA
taacatgacgctggaaaatccatcgtcagagctgctcacagtgttgatccgtgaactgaccgggaggggaagatg

SEQ ID NO: 103607 - DNA, 75 bp, synthetic construct
  source 1..75: mol_type = other DNA
tgacctgtgccgcctggtcatcacgggttcgcatgctgagggttgaattcagcgcagagtttaagcaggtggtga

SEQ ID NO: 103608 - DNA, 75 bp, synthetic construct
  source 1..75: mol_type = other DNA
attcaaacttcgtatggttgaactggcatcacaaccaggagcttgtgttgcacagattgcacgagaaaatggcgt

SEQ ID NO: 103609 - DNA, 75 bp, synthetic construct
  source 1..75: mol_type = other DNA
tgctggatgaagcccagggcgcagactgcctgatggttaaaccagccggagcgtacctcgacatcgtgcgtgagc

SEQ ID NO: 103610 - DNA, 75 bp, synthetic construct
  source 1..75: mol_type = other DNA
agccgcaagaatccgtttggcgatatcaaatcggatggcactgtgcaaacggctctcgaaaacctgggaatgaca

SEQ ID NO: 103611 - DNA, 75 bp, synthetic construct
  source 1..75: mol_type = other DNA
agcttcagcgtgccggactccatctgcagtgaatccgcctcaggagttgcagctgaaagtcgccgtgcagcagcg

SEQ ID NO: 103612 - DNA, 75 bp, synthetic construct
  source 1..75: mol_type = other DNA
gcgatcacggcgtcgacaacgacgcaaccctggaaaatttaggcaaacaagcgatagttgctgctgctgcgggtg

SEQ ID NO: 103613 - DNA, 75 bp, synthetic construct
  source 1..75: mol_type = other DNA
ggtgttaaaggcttgtggcgctgtggactatttctgtcaacatggtcacggattaatttctaaaaaacgcgttga

SEQ ID NO: 103614 - DNA, 75 bp, synthetic construct
  source 1..75: mol_type = other DNA
tattaataatccacagttggctgccgatgtgaaaacggcgtggttaaaagaggatccatcattaatcttatttgt

SEQ ID NO: 103615 - DNA, 75 bp, synthetic construct
  source 1..75: mol_type = other DNA
ataccggcagataaaggtgacctgtgtcgggtggtctgcgcgggtcgggatgttgcgcgttgagttcagcgcgga

SEQ ID NO: 103616 - DNA, 75 bp, synthetic construct
  source 1..75: mol_type = other DNA
acgtcatggcttctctggcgggcaaaggttttggtatctccctgacgataaagtctaaagagcttctggtgcaat

SEQ ID NO: 103617 - DNA, 75 bp, synthetic construct
  source 1..75: mol_type = other DNA
aaagcgtcctcttactggtatggacaggtgttactaccacattaagcgagggtttatcagtgctgatttgaattg

SEQ ID NO: 103618 - DNA, 75 bp, synthetic construct
  source 1..75: mol_type = other DNA
gcggtatgatttggtgtgtcggtctggcattcagtctgattgcgtctggtcaggcggggtatgccatttcctacg

SEQ ID NO: 103619 - DNA, 75 bp, synthetic construct
  source 1..75: mol_type = other DNA
taaggatagaatgaatcagcatctggagatagatgaggcctttacctggaaaatgtttattctttcgtcagggga

SEQ ID NO: 103620 - DNA, 75 bp, synthetic construct
  source 1..75: mol_type = other DNA
cacaaaccttggtcttatagaagcgctaaaaaacaaacaacccctcagcgatacgctgacaaaactttccacgct

SEQ ID NO: 103621 - DNA, 75 bp, synthetic construct
  source 1..75: mol_type = other DNA
gttcttcctgcaaaaattgctgtggacaacaaagaaaataaagaagcagcacaaacattcggtgctgtagttggt

SEQ ID NO: 103622 - DNA, 75 bp, synthetic construct
  source 1..75: mol_type = other DNA
gggtggcagaagagaaacatcagcggggtgaactggaaaagccacatcaccaactggtcagcacatacagtgagc

SEQ ID NO: 103623 - DNA, 75 bp, synthetic construct
  source 1..75: mol_type = other DNA
tgacctgtgccgcctggtcatcacgggttcgcatgctgagggttgaattcagagccgagtttaagcaggtggtga

SEQ ID NO: 103624 - DNA, 75 bp, synthetic construct
  source 1..75: mol_type = other DNA
gcgttcagcgggagacgaaaaacgagcaggtggtattgcaccagataattgatcgccggacagcatcactgtgca

SEQ ID NO: 103625 - DNA, 75 bp, synthetic construct
  source 1..75: mol_type = other DNA
ggccgctgacaatatcaccctgaaaaccagtgagtttgtactggaggctgaccgcacgcgtattaacagcgaagt

SEQ ID NO: 103626 - DNA, 75 bp, synthetic construct
  source 1..75: mol_type = other DNA
aatcgaacgtggtcaggtatggctaagccgggcaccatcaagccgcacaccaagttcgaatctgaagtgtacatt

SEQ ID NO: 103627 - DNA, 75 bp, synthetic construct
  source 1..75: mol_type = other DNA
actacttccagttactgctcacccgtttgatgaacaatgaagagatcagcgaagaagcccaacatgaaatggctg

SEQ ID NO: 103628 - DNA, 75 bp, synthetic construct
  source 1..75: mol_type = other DNA
tgatacatctggccagtatgttgcgttaaaaacagtcgcattgtctctggggttaccggttgtgaccgccattat

SEQ ID NO: 103629 - DNA, 75 bp, synthetic construct
  source 1..75: mol_type = other DNA
ttaaaaacagtcgcattgtctctggggttaccggttgtgaccgccattatctatcgtccggtacagcgctgtaca

SEQ ID NO: 103630 - DNA, 75 bp, synthetic construct
  source 1..75: mol_type = other DNA
gtccgctgacaatatcaccctgaaaaccagtgagtttgtactggaggctgaccgcacgcgaattaacagcgaagt

SEQ ID NO: 103631 - DNA, 75 bp, synthetic construct
  source 1..75: mol_type = other DNA
caatttattaatgctcaggcggcgcgtgttttgcgtctggacgcaacggccagccagggaagagcaatcacggaa

SEQ ID NO: 103632 - DNA, 75 bp, synthetic construct
  source 1..75: mol_type = other DNA
gcccgctgacaatatcaccttgaaaaccagtgagtttgtactggaggctgaccgcacgcggattaacagcgaagt

SEQ ID NO: 103633 - DNA, 75 bp, synthetic construct
  source 1..75: mol_type = other DNA
tgtaccggaagatcgtccgattgtagttactggtgccgtgtataatctcactaaaaccaacaacctgatggcgga

SEQ ID NO: 103634 - DNA, 75 bp, synthetic construct
  source 1..75: mol_type = other DNA
ggtcggattatctgccgtgaggcacatacggggtttcatgtatggatgaatggtcgtgaagatgaaggtcgtccg

SEQ ID NO: 103635 - DNA, 75 bp, synthetic construct
  source 1..75: mol_type = other DNA
ttcttaaatgggttcaggcagcaccagaagacgaagagaaaaagtctgcactggatatgggaaccgcattgcact

SEQ ID NO: 103636 - DNA, 75 bp, synthetic construct
  source 1..75: mol_type = other DNA
atacaagaagcataaagagcagttggaaaaattatcgattgaacttgataccgcaaaacagcgcattgcagagct

SEQ ID NO: 103637 - DNA, 75 bp, synthetic construct
  source 1..75: mol_type = other DNA
cagcgagctgagtgggaaagaaagcctgtacatttgagcattaacgcaaaacacgtcgatggtgacattaagtca

SEQ ID NO: 103638 - DNA, 75 bp, synthetic construct
  source 1..75: mol_type = other DNA
ccaggagtgcagctttgcattacctgtcaggaaatcgcagagctgaaaggcaaacattacaacggaggtgctgta

SEQ ID NO: 103639 - DNA, 75 bp, synthetic construct
  source 1..75: mol_type = other DNA
ttcatgctgtatggcattggcgaattgccggaaatcgtcaccctgccgaaaggaaaaccggttttcagcgataaa

SEQ ID NO: 103640 - DNA, 75 bp, synthetic construct
  source 1..75: mol_type = other DNA
gtggctgggcagtgattacatgcagaaggcgttttctcagaacggggataacatgctcaaacgcctgggagacgg

SEQ ID NO: 103641 - DNA, 75 bp, synthetic construct
  source 1..75: mol_type = other DNA
gcaccatcaagccgcacaccaagttcgaatctgaagtgtacattctgtccaaagatgaaggcggccgtcatactc

SEQ ID NO: 103642 - DNA, 75 bp, synthetic construct
  source 1..75: mol_type = other DNA
tgcccccggcgacagggactcatacgggtgtgtggcaccggacacaacaacgggcagggacccgccgcaacgacg

SEQ ID NO: 103643 - DNA, 75 bp, synthetic construct
  source 1..75: mol_type = other DNA
ggatttatggcgggtcagaaggatatgaccctgaacgccggaacgctcgataatcgtcagggtgtgctgggaagc

SEQ ID NO: 103644 - DNA, 75 bp, synthetic construct
  source 1..75: mol_type = other DNA
gcggagactggcaggtgcgccagcagctgcctgtcggagtcgggcctgacgaccggatgccgccaggcagccggg

SEQ ID NO: 103645 - DNA, 75 bp, synthetic construct
  source 1..75: mol_type = other DNA
gatgtcagcgccacccgcctttccaccagtctgtcatttgcggaagttgaaaaagaggcaattattaacgcagcc

SEQ ID NO: 103646 - DNA, 75 bp, synthetic construct
  source 1..75: mol_type = other DNA
ttatatgacttccactatccgaacgttgttgattttaagcgtgctgcgacagtggcttaccataccgttcttgcg

SEQ ID NO: 103647 - DNA, 75 bp, synthetic construct
  source 1..75: mol_type = other DNA
ggggcatcaaatcaatggtcattgagaccgctgacaatatcaccctgaaaaccagtgagtttgtgctggaggctg

SEQ ID NO: 103648 - DNA, 75 bp, synthetic construct
  source 1..75: mol_type = other DNA
aggggaaggttattccggaactggaagtgacggtctcccgcctttcccgtttgctggccgaacaggtacgctttg

SEQ ID NO: 103649 - DNA, 75 bp, synthetic construct
  source 1..75: mol_type = other DNA
ggggcatcaaatcaatggtcattgagaccgctgacaatatcaccgtgaaaaccagtgagtttgtcctggaggctg

SEQ ID NO: 103650 - DNA, 75 bp, synthetic construct
  source 1..75: mol_type = other DNA
tgaaaccgtttattactggtactgagttgccaccttttaaagaggatgtcatttctaaaacagaagaacaattta

SEQ ID NO: 103651 - DNA, 75 bp, synthetic construct
  source 1..75: mol_type = other DNA
aactggaagaaatccctcaactgctgaaaaaaattgctgaatacaaaggccgcaggctaaccatactggcaatcc

SEQ ID NO: 103652 - DNA, 75 bp, synthetic construct
  source 1..75: mol_type = other DNA
cattaatttgcatagatgatttagagcgtaaaggatcgtcattagaacttaaagatgtattaggtcttatttctt

SEQ ID NO: 103653 - DNA, 75 bp, synthetic construct
  source 1..75: mol_type = other DNA
ggggcatcaaatcaatggtcattgagaccgctgacaaaatcaccctgaaaaccagtgagtttgttctggaggctg

SEQ ID NO: 103654 - DNA, 75 bp, synthetic construct
  source 1..75: mol_type = other DNA
aataaaagacggcagccgctggacgcgcgatattctctggagtgaagacaaccattttcgctctgcgaccctgag

SEQ ID NO: 103655 - DNA, 75 bp, synthetic construct
  source 1..75: mol_type = other DNA
aaaaaagcccccatggcaaattgcttttcatttccggaaatgaaaacttagtaaacatttcagcggaaaaatcga

SEQ ID NO: 103656 - DNA, 75 bp, synthetic construct
  source 1..75: mol_type = other DNA
caggaagaactggaggcgatgctgaaagctgaaacctggcttaatggcgcggaggcggtggaaaaaggttttgct

SEQ ID NO: 103657 - DNA, 75 bp, synthetic construct
  source 1..75: mol_type = other DNA
aaaaaccagaaatagccaatgagttggtaggccttgaatgcccgcgaactcattttcattctaaggagtggttaa

SEQ ID NO: 103658 - DNA, 75 bp, synthetic construct
  source 1..75: mol_type = other DNA
gtccgctgacaatatcaccatgaaaaccagtgagtttgtactggaggctgaccgcacgcgcattaacagcgaagt

SEQ ID NO: 103659 - DNA, 75 bp, synthetic construct
  source 1..75: mol_type = other DNA
gagtgggaagaaatgaaacaaatgacactaattgagatggatggatttctgaaaggtaaatgcatcccaagtgat

SEQ ID NO: 103660 - DNA, 75 bp, synthetic construct
  source 1..75: mol_type = other DNA
cattctgctgggcactgcaccgctaattccgttatttatggcgctggttggaatgggggctgccgatgctaaccg

SEQ ID NO: 103661 - DNA, 75 bp, synthetic construct
  source 1..75: mol_type = other DNA
aaaaaccgatatggtttcattagcctggacctggattctcaagttcgcaccgtgaagcagagcggtgaatggttt

SEQ ID NO: 103662 - DNA, 75 bp, synthetic construct
  source 1..75: mol_type = other DNA
gttccatcacggtaacatgacgctggaaaatccatcgccagagctgctcacggtgttgatccgcgaactgagcgg

SEQ ID NO: 103663 - DNA, 75 bp, synthetic construct
  source 1..75: mol_type = other DNA
acattgtctggcgttatgaaaatttttcactggagtggcagtcggccattacgcaagccatcaacttgatcggcg

SEQ ID NO: 103664 - DNA, 75 bp, synthetic construct
  source 1..75: mol_type = other DNA
tagctggttttcttctttggatgaagaatggcaggggtggatcaggctaggaaaggaaaagcaagttaattttga

SEQ ID NO: 103665 - DNA, 75 bp, synthetic construct
  source 1..75: mol_type = other DNA
acgctggcagcttttgcctgggatcttttcaccgcgtggcaacaagctggtgcccccgcaaaagacaactgggca

SEQ ID NO: 103666 - DNA, 75 bp, synthetic construct
  source 1..75: mol_type = other DNA
ggtggaattgctaatggacggccctcacatagacaatcagaaaaggatgttggtaaagacttaggcgcaggatgg

SEQ ID NO: 103667 - DNA, 75 bp, synthetic construct
  source 1..75: mol_type = other DNA
tgacctgtgccgcctggtcatcacgggttcgcatgctgtgggttgaattcagcgctgagtttaagcaggtggtga

SEQ ID NO: 103668 - DNA, 75 bp, synthetic construct
  source 1..75: mol_type = other DNA
agctgacggaaaccggtcaattattgctggaacagaccgctgcggcggtggagtcgctggaaaactcacttgaaa

SEQ ID NO: 103669 - DNA, 75 bp, synthetic construct
  source 1..75: mol_type = other DNA
tggcaaccaggcgaacgagagagacttgccgccacagagtctgcccgttatttcagcacgggatcttttacggaa

SEQ ID NO: 103670 - DNA, 75 bp, synthetic construct
  source 1..75: mol_type = other DNA
ccgggtgtgcagctttgcattacctgtcaggaaattgcagagctgaaaggcaaacattacaacggaggtgctgta

SEQ ID NO: 103671 - DNA, 75 bp, synthetic construct
  source 1..75: mol_type = other DNA
gggaaaatgacaactactcacgttatcgtccggaaaagagtgtctggaacctgtatttattggcacagttgccgc

SEQ ID NO: 103672 - DNA, 75 bp, synthetic construct
  source 1..75: mol_type = other DNA
tttacgacgtccgaaatggatatttctcgacgaagcaacgtcacatctggaggagcaagaggctatccgtttact

SEQ ID NO: 103673 - DNA, 75 bp, synthetic construct
  source 1..75: mol_type = other DNA
ggattttggcaggcagctgcgtgggcatgttctcagtggaaccggactgacgatcggtgtcggcttcggcgccac

SEQ ID NO: 103674 - DNA, 75 bp, synthetic construct
  source 1..75: mol_type = other DNA
gtgtcgttgcagcctatggcatcgcgctgggaatgaatcacgatgccagtgacatgggtctgcagcgttactatg

SEQ ID NO: 103675 - DNA, 75 bp, synthetic construct
  source 1..75: mol_type = other DNA
gtgccagattgtggttggaaacacctacgcgttttaccttaccgctttgtaaaagtgggatcagtcctggcgtcc

SEQ ID NO: 103676 - DNA, 75 bp, synthetic construct
  source 1..75: mol_type = other DNA
cgacactgagcacatcagccagagcatgcgcgacatactgctgacgccggtcggctcgcgggtgatgcgccgtga

SEQ ID NO: 103677 - DNA, 75 bp, synthetic construct
  source 1..75: mol_type = other DNA
aaaacgccgggcgtgtcacgcgtgctttgcattgaatgtgaagcgccaattccgccagcaagacgccgcgtcatt

SEQ ID NO: 103678 - DNA, 75 bp, synthetic construct
  source 1..75: mol_type = other DNA
aacctacccgccagtgtatctctattaccccaaaaacgcgggtaaaacgaaaagagtgaaggccctgattgattt

SEQ ID NO: 103679 - DNA, 75 bp, synthetic construct
  source 1..75: mol_type = other DNA
tgcggcagttaatgaccagtcaattaggaaaagtcagccataccttcgctcatatgccacaggacgatccgcaaa

SEQ ID NO: 103680 - DNA, 75 bp, synthetic construct
  source 1..75: mol_type = other DNA
taaggaagtgaaggagcgtgaatatattgcgccgttttcctcccgtgaatatccgctgcctgcgggggcatcggg

SEQ ID NO: 103681 - DNA, 75 bp, synthetic construct
  source 1..75: mol_type = other DNA
ccatcgccagacgacggtgtcgaacggcgttgaagtggataccaacgtggcggtgagcgatttcttcggaagtaa

SEQ ID NO: 103682 - DNA, 75 bp, synthetic construct
  source 1..75: mol_type = other DNA
agcggaggtaaggatgagacggtccgaaactgggcgaagaagcacaatatcccggctgaaaaggtgaaatcccgc

SEQ ID NO: 103683 - DNA, 75 bp, synthetic construct
  source 1..75: mol_type = other DNA
aaacccggtatggatgtgacatcggccccttccgtcagggaggtgcgctttggtgatggctattcccagcgtgtg

SEQ ID NO: 103684 - DNA, 75 bp, synthetic construct
  source 1..75: mol_type = other DNA
agtcgtttctggctgagcacgggggctggaaggcctttctgtggacgccgccttatggctacaggcagataaagg

SEQ ID NO: 103685 - DNA, 75 bp, synthetic construct
  source 1..75: mol_type = other DNA
tgacctgtgccgcctggtcatcacgggttcgcatgctgggggttgaattcagggccgagtttaagcaggtggtga

SEQ ID NO: 103686 - DNA, 75 bp, synthetic construct
  source 1..75: mol_type = other DNA
tcgaacaatttaagctggtttatttataaatatgacgaacttgctgaactggctgcggttatcgatcgcttgtat

SEQ ID NO: 103687 - DNA, 75 bp, synthetic construct
  source 1..75: mol_type = other DNA
gctacagctatcagggcaacagcgaccaccgccagaccacggtgtcgaacggcgtggaagtggataccaacgtgg

SEQ ID NO: 103688 - DNA, 75 bp, synthetic construct
  source 1..75: mol_type = other DNA
atgcgagtaaccacccaacaaacctacgtctcgatgacgcaaagttttaataatctctccggcgatctggcgcat

SEQ ID NO: 103689 - DNA, 75 bp, synthetic construct
  source 1..75: mol_type = other DNA
tcgaattcaccgaccgcgttgttgccgtcgtgcgttaccgcgatggttcggtgattgatgttgtgcatcaggtga

SEQ ID NO: 103690 - DNA, 75 bp, synthetic construct
  source 1..75: mol_type = other DNA
ccgttctatcatcaatatctttgtgtcccagatggtaaaggggactatacttgtggtggccaagaccaacgggga

SEQ ID NO: 103691 - DNA, 75 bp, synthetic construct
  source 1..75: mol_type = other DNA
cgtcagcgaagtcgccgtctggtttatttatctcatcccggcgctggtggcatttgctctgccaccacgcgcagg

SEQ ID NO: 103692 - DNA, 75 bp, synthetic construct
  source 1..75: mol_type = other DNA
actgaaggattatcataatatgccagaacagcttaacgcgctttttgctccgcgtgcggaaacgacgaacggaca

SEQ ID NO: 103693 - DNA, 75 bp, synthetic construct
  source 1..75: mol_type = other DNA
tcggttacctctgatgcggatgacggcggcggctatgtcgagaccatcatcaccaacagtgacttcaccctgagc

SEQ ID NO: 103694 - DNA, 75 bp, synthetic construct
  source 1..75: mol_type = other DNA
caggagctgatcagccggatacgttcggcgtcccttgatcctgatattgagaaattcctcctgtgtgcagcagaa

SEQ ID NO: 103695 - DNA, 75 bp, synthetic construct
  source 1..75: mol_type = other DNA
agcctttacctgttctgtgggcatcgcctggcatctgatattgagatcatgatgcgtgaacgtttcaacgtgctt

SEQ ID NO: 103696 - DNA, 75 bp, synthetic construct
  source 1..75: mol_type = other DNA
gacgtttttatagcggactggaacagctgaaaacgttttgccagccgcaaacgctggcagcttttgcctgggatc

SEQ ID NO: 103697 - DNA, 75 bp, synthetic construct
  source 1..75: mol_type = other DNA
cctgtctaacacggttaaacaagcgaataaagatatcgatgccgccaaattgaaattaaccaccgaaatagccgc

SEQ ID NO: 103698 - DNA, 75 bp, synthetic construct
  source 1..75: mol_type = other DNA
tcttcatggggtccggttcgacagtcaaagcagcgaatgcactggggcgtcgtgcaattggcgttgagctggaga

SEQ ID NO: 103699 - DNA, 75 bp, synthetic construct
  source 1..75: mol_type = other DNA
acagcagaaatgcgcagtgaatttgcacagctttttgccgattacgaaattatgccgccttttcgccagttggcg

SEQ ID NO: 103700 - DNA, 75 bp, synthetic construct
  source 1..75: mol_type = other DNA
aacccggtatggatgtggcttcggctccttccgtcaggaaggtgcgctttggtgatggctattcccagcgcgcgc

SEQ ID NO: 103701 - DNA, 75 bp, synthetic construct
  source 1..75: mol_type = other DNA
cgtagacgataaatcgttgagcgaagtactgcatcaggttggtctggggaaattggctgcgcgtattcatgacca

SEQ ID NO: 103702 - DNA, 75 bp, synthetic construct
  source 1..75: mol_type = other DNA
ggggcggggaattgcgcctgaatggcagatgaagcgggagatcctttctcccgcttatacaaccaggtggactga

SEQ ID NO: 103703 - DNA, 75 bp, synthetic construct
  source 1..75: mol_type = other DNA
agaactgttaaaataaatgactgtttcaaagagtatttcgctaaagctcttaaagagcttggtgtcgaaaataca

SEQ ID NO: 103704 - DNA, 75 bp, synthetic construct
  source 1..75: mol_type = other DNA
caagttcatcaagtatttcgctgacgagctgaaagccaaacgccagcccggaatctgggtgcgaatggactacgg

SEQ ID NO: 103705 - DNA, 75 bp, synthetic construct
  source 1..75: mol_type = other DNA
caactggaacaaccacaccaccagctggtggcatcttatgattcactgaatcgcaaatattctgaattgctggat

SEQ ID NO: 103706 - DNA, 75 bp, synthetic construct
  source 1..75: mol_type = other DNA
gctcatattgattcccgcctgctactgatgaaagagttgctgcctgaatgtggggaaggggtatctgtcaccacg

SEQ ID NO: 103707 - DNA, 75 bp, synthetic construct
  source 1..75: mol_type = other DNA
gtatattaaatgaatattctaatttgaatttagttcagacagaatatagattgaatcttttgaggttatattcta

SEQ ID NO: 103708 - DNA, 75 bp, synthetic construct
  source 1..75: mol_type = other DNA
gacaccgtagctgccagcctgaatacctggcttgaaagtcacaacgccgcgaaaaccacgcttccggtggcccct

SEQ ID NO: 103709 - DNA, 75 bp, synthetic construct
  source 1..75: mol_type = other DNA
cagaagaatttgctgccgcgccggtattaaccccgcagcaggagagccactacttgcaggcctatttaccgctgg

SEQ ID NO: 103710 - DNA, 75 bp, synthetic construct
  source 1..75: mol_type = other DNA
tcccattaatctttgccaggtctggcgataacagcgaagcggcactcagcgctctgcgtttactgtatgaacaag

SEQ ID NO: 103711 - DNA, 75 bp, synthetic construct
  source 1..75: mol_type = other DNA
tggcaccatcgttgaacaggaagcggagaacccgaacaaactggagatagtcggcttccgtaacgagtatcaggc

SEQ ID NO: 103712 - DNA, 75 bp, synthetic construct
  source 1..75: mol_type = other DNA
ggcgaagggcagggcactgaaacagcatgtgatggccccgctgattgcttactttcgtgatgcgcgtgctgccct

SEQ ID NO: 103713 - DNA, 75 bp, synthetic construct
  source 1..75: mol_type = other DNA
gattatgttgtgcaacaggacgcattacagaaagagggtgatgcggtttccggcggcgtaacgttgcggaggaaa

SEQ ID NO: 103714 - DNA, 75 bp, synthetic construct
  source 1..75: mol_type = other DNA
agggacactgaagtactgctttgcttatattgttattcttggactgaaagtcggccttgtctaccacctgttcat

SEQ ID NO: 103715 - DNA, 75 bp, synthetic construct
  source 1..75: mol_type = other DNA
ggaaagccttcgggcgtattttccggcaacagaacgcattctgtttgctgaacattatcaggggccatatcagcc

SEQ ID NO: 103716 - DNA, 75 bp, synthetic construct
  source 1..75: mol_type = other DNA
ccggggcagcagtatgataaggagtcggggctgtactataaccgtcaccggtactacgatccgttgcaggggcgg

SEQ ID NO: 103717 - DNA, 75 bp, synthetic construct
  source 1..75: mol_type = other DNA
tctttatggggtcaggctccacaattaaagccgcaatgacgctggggcgtcgggcaattggtgtggaactggaaa

SEQ ID NO: 103718 - DNA, 75 bp, synthetic construct
  source 1..75: mol_type = other DNA
cgccagtggggtagcagggaggatttggcgtgtgcgcagtggatctgggggcggatcgtgggtctctacgaacag

SEQ ID NO: 103719 - DNA, 75 bp, synthetic construct
  source 1..75: mol_type = other DNA
gcggcgcggcggctgccatttgtgcctcacctgcggcgattattctcgcgccgacttcaggtgatgtggtactgg

SEQ ID NO: 103720 - DNA, 75 bp, synthetic construct
  source 1..75: mol_type = other DNA
cgtcctggtgacatggtggcggatttcttcatgggttctggctcaaccataaaggcggctatggcgcttgggcgt

SEQ ID NO: 103721 - DNA, 75 bp, synthetic construct
  source 1..75: mol_type = other DNA
agatgaacgccaaagtatttgaggacgggatcatgcaggtcggtagcgtcgtgcagattgcggatatctacgaca

SEQ ID NO: 103722 - DNA, 75 bp, synthetic construct
  source 1..75: mol_type = other DNA
gatgatgacgagctggcgtttgagctgagcgaactggacaacatccagattttcgaccagccaaagggcattgtc

SEQ ID NO: 103723 - DNA, 75 bp, synthetic construct
  source 1..75: mol_type = other DNA
ttctgtgggacaatctcttgattattatgggaggctctctgaattggggagtgaaatttgtgaggggatattgac

SEQ ID NO: 103724 - DNA, 75 bp, synthetic construct
  source 1..75: mol_type = other DNA
cactgcggcgttatttttccgtatcggcagccgttccttatacggatgtctggacgcacaagcctgtgcagtatt

SEQ ID NO: 103725 - DNA, 75 bp, synthetic construct
  source 1..75: mol_type = other DNA
tcagcgatagccagcaccctgaaatcagcgtcactttccgacatcgaaatgcgtggtttcacctttgatcaaaaa

SEQ ID NO: 103726 - DNA, 75 bp, synthetic construct
  source 1..75: mol_type = other DNA
tgacctgtgccgcctggtcatcacgggttcgcatgctgggggttgaattcagcgcggagtttaagcaggtggtga

SEQ ID NO: 103727 - DNA, 75 bp, synthetic construct
  source 1..75: mol_type = other DNA
tgacctgtgccgcctggtcatcacgggttcgcatgctgcgggttgaattcagcgccgagtttaagcaggtggtga

SEQ ID NO: 103728 - DNA, 75 bp, synthetic construct
  source 1..75: mol_type = other DNA
tgcatacgggaggcctgcagaacagccacggacagatacagtctgtgggtgacattctgttcgacagtgtgcggg

SEQ ID NO: 103729 - DNA, 75 bp, synthetic construct
  source 1..75: mol_type = other DNA
ggttgcagatttttttatgggctcaggttcaacggtaaaagcggcactggcgctcgggcgtcgtgcgattggcgt

SEQ ID NO: 103730 - DNA, 75 bp, synthetic construct
  source 1..75: mol_type = other DNA
ctacctctaatgatgagctgattggttcattacaggatctcgattacggcccggcgtcgatcacctttaccggac

SEQ ID NO: 103731 - DNA, 75 bp, synthetic construct
  source 1..75: mol_type = other DNA
ccatcagatccacgaaaacccggagctgggattacaagaatttaaaaccagtgctttggttgcggaaaagctgcg

SEQ ID NO: 103732 - DNA, 75 bp, synthetic construct
  source 1..75: mol_type = other DNA
cacagtttgtttatgaccccgctggcaatcgccagtagtgggcgagagaaagcggaggggctatatgcaaaatga

SEQ ID NO: 103733 - DNA, 75 bp, synthetic construct
  source 1..75: mol_type = other DNA
taccgatgtctggacgcataaacccgttcagttctacccgggtaaacatccgtgtgagaaaccggcggatatgct

SEQ ID NO: 103734 - DNA, 75 bp, synthetic construct
  source 1..75: mol_type = other DNA
agacacctgcttctgtgaatacacttctcacggtcactgcggtgtgctgtgcgagcatggcgtcgacaacgacgc

SEQ ID NO: 103735 - DNA, 75 bp, synthetic construct
  source 1..75: mol_type = other DNA
atatctctacctctaatgatgagttgattggttcattacaggatctcgattacggcccggcgtcgatcaccttta

SEQ ID NO: 103736 - DNA, 75 bp, synthetic construct
  source 1..75: mol_type = other DNA
gaaggtcgaggccgcgcgtgccgccggcgcgccggtgttccatgccgatgccagtcggcccgataccttgctggc

SEQ ID NO: 103737 - DNA, 75 bp, synthetic construct
  source 1..75: mol_type = other DNA
ttgcactggcgacgtatggcgaattgttcagcattgatcgccagaccatcatcaatgatgacctggatatgctga

SEQ ID NO: 103738 - DNA, 75 bp, synthetic construct
  source 1..75: mol_type = other DNA
catccagacattgggagatgaattactacaacaagcaggccagaaggaaaatatcacctggaattatgataaatg

SEQ ID NO: 103739 - DNA, 75 bp, synthetic construct
  source 1..75: mol_type = other DNA
cccggcgtaatgcgcattcctgagaaacatctggctcgtgaaatcgaacgcatcgccaatgccggtattcgttcg

SEQ ID NO: 103740 - DNA, 75 bp, synthetic construct
  source 1..75: mol_type = other DNA
aaaaatcgcggattaagcgaggaagagttagcggacagattagtcccaacactgggccttgatgatccgcaggcg

SEQ ID NO: 103741 - DNA, 75 bp, synthetic construct
  source 1..75: mol_type = other DNA
ggcggagcagtacaagcgcggtcacggtgaagagatttggcctgcggtgaaaccggtgtacgaaaaaatggcgga

SEQ ID NO: 103742 - DNA, 75 bp, synthetic construct
  source 1..75: mol_type = other DNA
tggtcagcacatacagtgagctgaaccggcagtatatggaactgctgagtgaatataaaaatttgcggcggtatt

SEQ ID NO: 103743 - DNA, 75 bp, synthetic construct
  source 1..75: mol_type = other DNA
acgtctcgatgacgcaaagctttaataatctctccggcgatctggcgcatgtggttgaacagatggcaaccggca

SEQ ID NO: 103744 - DNA, 75 bp, synthetic construct
  source 1..75: mol_type = other DNA
acaataaacaacatgaatataatattgaaacttcattagattttagttctcctttgccagagccggagcgagagc

SEQ ID NO: 103745 - DNA, 75 bp, synthetic construct
  source 1..75: mol_type = other DNA
atattcagttaggtttgatattaatatcagtactatcttatgcttttttaaacttgggttttttaccattaaata

SEQ ID NO: 103746 - DNA, 75 bp, synthetic construct
  source 1..75: mol_type = other DNA
agggctgggataaccagtggaagggcgacgatgattacctgaaatggctggaccagtgtctggcgcagttctggc

SEQ ID NO: 103747 - DNA, 75 bp, synthetic construct
  source 1..75: mol_type = other DNA
gagggggagttctgcaatgcgcaagatgagccaattgacctgcctgcggacgctctgattggcattgcccacccg

SEQ ID NO: 103748 - DNA, 75 bp, synthetic construct
  source 1..75: mol_type = other DNA
ctccgcgtcggcggggttaagccagcaggagtcgattctcgatggcgtcaacaacagcctgctggcggtgcgcga

SEQ ID NO: 103749 - DNA, 75 bp, synthetic construct
  source 1..75: mol_type = other DNA
gaaaacggtgtgaccgagtggagtccgctgttcagcgagccgcatccttcccgtgagttttgtgtccagtacggc

SEQ ID NO: 103750 - DNA, 75 bp, synthetic construct
  source 1..75: mol_type = other DNA
atggcgctggttgagatatcaaattttccaggaacgcctaagctgcgttgcagggtgccaaacggcacccttttt

SEQ ID NO: 103751 - DNA, 75 bp, synthetic construct
  source 1..75: mol_type = other DNA
aacattatcaggggccatatcagccaaaaaatgacggctatgcggcaaaggggcgcgagcttaagcagcacgtga

SEQ ID NO: 103752 - DNA, 75 bp, synthetic construct
  source 1..75: mol_type = other DNA
cttagcaatgggagcgtgaagttttcaaacgtcgagccatacatgatcgagcgtatgaaggctgaactgcctgat

SEQ ID NO: 103753 - DNA, 75 bp, synthetic construct
  source 1..75: mol_type = other DNA
aaggaaaggttatccgcgaacttgaggtgacggtctcccggctttcccgtctgctggccgaacaggtgcgttttg

SEQ ID NO: 103754 - DNA, 75 bp, synthetic construct
  source 1..75: mol_type = other DNA
ctgggatattcccgcagggtgttagagatgtttaccgagtcacatttgaagatggtcgttatgttgattgcgcag

SEQ ID NO: 103755 - DNA, 75 bp, synthetic construct
  source 1..75: mol_type = other DNA
gcgtcgggcgattcgttataatcgcgaagaagatatcgatgtcacggcgaaaagcgtgcagtttggtctcgcttc

SEQ ID NO: 103756 - DNA, 75 bp, synthetic construct
  source 1..75: mol_type = other DNA
tgccgaagtgacaaactccgcgattgagctgaaagtgttgattgagcagatgcgcgagcagattcagaacattga

SEQ ID NO: 103757 - DNA, 75 bp, synthetic construct
  source 1..75: mol_type = other DNA
tggacgccattgaagcccgctttaaagccctcggcgcacctgtggaattgatcaaagtgcacaacacgccggacg

SEQ ID NO: 103758 - DNA, 75 bp, synthetic construct
  source 1..75: mol_type = other DNA
agagtacggcccgtttaaaacagtggaggatttaaaacaggtgccggggatgggcaattcgctggtggaacgtaa

SEQ ID NO: 103759 - DNA, 75 bp, synthetic construct
  source 1..75: mol_type = other DNA
cagcaaactgttcagtggcggtcatgcgtgacggtaaaccgcacttgctaaaaatggaaaacgacagcacgctgc

SEQ ID NO: 103760 - DNA, 75 bp, synthetic construct
  source 1..75: mol_type = other DNA
cgccgtttaccggtatgtccatggggtctgtttctggtgctctgggtggttttgtgcaagtaggtactgaaacaa

SEQ ID NO: 103761 - DNA, 75 bp, synthetic construct
  source 1..75: mol_type = other DNA
ttttaataggatgcatgtgctctaatgtcgcacatgcttatatccctgttgtcgatccgacatcaattgcaaaaa

SEQ ID NO: 103762 - DNA, 75 bp, synthetic construct
  source 1..75: mol_type = other DNA
tctggcggaattcccggtggcgtgggtcgataaaaacgtgcaggccaacggtacggaaaaagccgccaaagccta

SEQ ID NO: 103763 - DNA, 75 bp, synthetic construct
  source 1..75: mol_type = other DNA
cgaaaaaacctatacagctgaactttcgtccattgcaggtacccccatcgaggctgggcccttcgatacagtggt

SEQ ID NO: 103764 - DNA, 75 bp, synthetic construct
  source 1..75: mol_type = other DNA
taaaattccatgttaacggtgatccaagtgattttaatcaggctgttgagtatttaaaacaagattcacaaatga

SEQ ID NO: 103765 - DNA, 75 bp, synthetic construct
  source 1..75: mol_type = other DNA
cgaaatcattcctcggagccagcggattaaaaccacagcaagtggcgctatttgaagatttagtctgcgcaatga

SEQ ID NO: 103766 - DNA, 75 bp, synthetic construct
  source 1..75: mol_type = other DNA
ctggtcgctattcactttcctgcaaggctttgttgatatgttcccgctggcctgggcagggatctccatgttctt

SEQ ID NO: 103767 - DNA, 75 bp, synthetic construct
  source 1..75: mol_type = other DNA
accgctgctatggaagataaattgaagatcaacatggagcgccagtggcctgagccaaaagatggtgaacctcgc

SEQ ID NO: 103768 - DNA, 75 bp, synthetic construct
  source 1..75: mol_type = other DNA
tcaacccggaggggctggactaccgctttgagtacggagagcgccgggtaatcatcacggacagtctgaaccggc

SEQ ID NO: 103769 - DNA, 75 bp, synthetic construct
  source 1..75: mol_type = other DNA
cgcgtagctatggattatccggcataccgctgtttatccatgtgatcctgcctggtgccctgccctcaattatgg

SEQ ID NO: 103770 - DNA, 75 bp, synthetic construct
  source 1..75: mol_type = other DNA
gcgggcggcgtgctgggaggtgtcttctcggattatctgatcaaacgcggtttatccctgaccctggcacgtaag

SEQ ID NO: 103771 - DNA, 75 bp, synthetic construct
  source 1..75: mol_type = other DNA
cggtcacggaaaggcatgcccactgaatgagcctattcttttagctgatgggacatggactactcacggggatgt

SEQ ID NO: 103772 - DNA, 75 bp, synthetic construct
  source 1..75: mol_type = other DNA
cgaactactttctgaacaaaaacatgtcacttcttattgattacaaaattaaccttattgatgaaagcgaattta

SEQ ID NO: 103773 - DNA, 75 bp, synthetic construct
  source 1..75: mol_type = other DNA
atgaaacacggaattaaagcactgctcattaccctgtccctggcctgtgccggaatgtctcatagtgctctggcg

SEQ ID NO: 103774 - DNA, 75 bp, synthetic construct
  source 1..75: mol_type = other DNA
ggagcggatgcgcggtgtttctgtggaagcgccagcaagaacaccggaacgctgggaacatttgaaagatcaaat

SEQ ID NO: 103775 - DNA, 75 bp, synthetic construct
  source 1..75: mol_type = other DNA
tcatgagtactatctatctgatgagggcaaataacgagagtgttataaagtctgagagggcaaaaaagggctacg

SEQ ID NO: 103776 - DNA, 75 bp, synthetic construct
  source 1..75: mol_type = other DNA
ggatgaaaacgcctcgccttatacattcaataaatatgctgaatacgccgatttcaccagtgatatgctgatcta

SEQ ID NO: 103777 - DNA, 75 bp, synthetic construct
  source 1..75: mol_type = other DNA
cagagattaaatcattcatcactggctttctgagcgatgcggcgcacgataaccaatcttcagacagcctgcttg

SEQ ID NO: 103778 - DNA, 75 bp, synthetic construct
  source 1..75: mol_type = other DNA
cagaagatcctatgcagatatggggcgctgttggtacccttcttaccctactgctattcgtcatatggttattct

SEQ ID NO: 103779 - DNA, 75 bp, synthetic construct
  source 1..75: mol_type = other DNA
cctcaacggcaattggcgcgcagggggcaattgaaggtttaaaagaaattaaactctttaaccgtcgggatgagt

SEQ ID NO: 103780 - DNA, 75 bp, synthetic construct
  source 1..75: mol_type = other DNA
acactcttgcgtcgaaatctatcaatgccgaagtgacaaactccgcgattgagctgaaagtgttgattgagcaga

SEQ ID NO: 103781 - DNA, 75 bp, synthetic construct
  source 1..75: mol_type = other DNA
ggtgatgattccattttaaggaatttattcaatggtgttattaagtgtggtgtatgtggtggtgatacatcagtt

SEQ ID NO: 103782 - DNA, 75 bp, synthetic construct
  source 1..75: mol_type = other DNA
gtggaggatctaaagcaggtgccggggatgggcaattcgctggtggaacgtaatctggcggtattaaccctgtaa

SEQ ID NO: 103783 - DNA, 75 bp, synthetic construct
  source 1..75: mol_type = other DNA
atgtctgagcaggaaacaaaacgaagtgaattattgactcagattattagcgaaaaacccaagctagacaacatg

SEQ ID NO: 103784 - DNA, 75 bp, synthetic construct
  source 1..75: mol_type = other DNA
gtgattgattttggtaaatttaatttgctggatattcggcgacataacatgacgaaaacgttcagtattaaaacg

SEQ ID NO: 103785 - DNA, 75 bp, synthetic construct
  source 1..75: mol_type = other DNA
tcatacgaacaaatattatgctgatgttgaggcacgactcgcagacgcagctaaggctaatgggaaacaaggtgt

SEQ ID NO: 103786 - DNA, 75 bp, synthetic construct
  source 1..75: mol_type = other DNA
tttcgtccattccaggcacccccatcgaggctggccccttcgatacagtggtgctttttaagattaactataact

SEQ ID NO: 103787 - DNA, 75 bp, synthetic construct
  source 1..75: mol_type = other DNA
accgctttacaccgccccgccagcgccagtagtgccagatgattggcaactcgtacctaagaaaataacactgga

SEQ ID NO: 103788 - DNA, 75 bp, synthetic construct
  source 1..75: mol_type = other DNA
gaaggcaaaacgcagtatgcgtatgacaaatccggcaggctgacgggtatcttcagcccggacggtacatcacag

SEQ ID NO: 103789 - DNA, 75 bp, synthetic construct
  source 1..75: mol_type = other DNA
agagtacggtccgtttaaaacggtggaggatctaaaacaggtgccggggatgggcaattcgctggtggaacgtaa

SEQ ID NO: 103790 - DNA, 75 bp, synthetic construct
  source 1..75: mol_type = other DNA
caaaaaaagaatacctaagagagaccattgctttaattgagcaggttatatttgctcgattagcgaatgacgagg

SEQ ID NO: 103791 - DNA, 75 bp, synthetic construct
  source 1..75: mol_type = other DNA
agagtacggtccgtttaaaacggtggaggatctaaagcaggtgccggggatgggcaattcgctggtggagcgtaa

SEQ ID NO: 103792 - DNA, 75 bp, synthetic construct
  source 1..75: mol_type = other DNA
gacttgttcgcaccttccttaaagggattaacatagccgatgcttacaatcctaagcaatacatcccgcccatac

SEQ ID NO: 103793 - DNA, 75 bp, synthetic construct
  source 1..75: mol_type = other DNA
atgcaaaagttaacctgttttaaagcgtacgatattcgcggcaagctgggcgaagaaatgaatgaagatatcgcc

SEQ ID NO: 103794 - DNA, 75 bp, synthetic construct
  source 1..75: mol_type = other DNA
gatgaatattcaggtagcccattggtcatttctggtcaaacacaaacttttggcggtggtagtgaatatgatatt

SEQ ID NO: 103795 - DNA, 75 bp, synthetic construct
  source 1..75: mol_type = other DNA
agcgcaacactactattgtttactatttaacctacaatctggatcgcaaagatctggtcccgctggttaacagcc

SEQ ID NO: 103796 - DNA, 75 bp, synthetic construct
  source 1..75: mol_type = other DNA
tggttaactcagggcgacgccgatcaacaaacgaaaggcgcactcgccagcctgctgctgatgttgttactcgcc

SEQ ID NO: 103797 - DNA, 75 bp, synthetic construct
  source 1..75: mol_type = other DNA
ccgcaagctttattgatcttgagcatcagtggttacctgatattttcactcagggcgtgttgtggaccgggctta

SEQ ID NO: 103798 - DNA, 75 bp, synthetic construct
  source 1..75: mol_type = other DNA
ttggcaaagggggtaacgctgtagtatatgaagatgctgaggatgcaacaaaagtcctgaagatgtttactacat

SEQ ID NO: 103799 - DNA, 75 bp, synthetic construct
  source 1..75: mol_type = other DNA
gaacctgatgacgaaccgcaggagccgtcaggcggaaatccgctatcgaaccagcctacgcaggatagcgcgggc

SEQ ID NO: 103800 - DNA, 75 bp, synthetic construct
  source 1..75: mol_type = other DNA
ggtatgaatgcctggccggttgcacgcctgctggacctgtggtggttttctgtggggatgacggaaaaaatccgg

SEQ ID NO: 103801 - DNA, 75 bp, synthetic construct
  source 1..75: mol_type = other DNA
gaaccggaaaaagtggccctgttacagaaagtctggcgtcagcgtttaagctatcgcctggtgcgtagcgcagaa

SEQ ID NO: 103802 - DNA, 75 bp, synthetic construct
  source 1..75: mol_type = other DNA
gtcgatgttaattggtcgtttcagcacgacattttctgcattagcagaaacgctggataatcaggaagaacctga

SEQ ID NO: 103803 - DNA, 75 bp, synthetic construct
  source 1..75: mol_type = other DNA
actgaaatcaccgtcagagcagcaaagattacttgtgttactggcagagaaaaaaaaccgaacaacgacggatga

SEQ ID NO: 103804 - DNA, 75 bp, synthetic construct
  source 1..75: mol_type = other DNA
gggtaagtcttacggctggactgagtgcgataccttcgaagggtattacgattgttcgagaaacaaatggtgggc

SEQ ID NO: 103805 - DNA, 75 bp, synthetic construct
  source 1..75: mol_type = other DNA
gtatcgaaccagcctacgcaggatagcgcgggcggtcggggacatcgtaaatggtcactacgatggttcaaatga

SEQ ID NO: 103806 - DNA, 75 bp, synthetic construct
  source 1..75: mol_type = other DNA
cgccacacggcaagcgaatattagttgaagcactcagccccggcgttaagcctcattatctcttctccagccagt

SEQ ID NO: 103807 - DNA, 75 bp, synthetic construct
  source 1..75: mol_type = other DNA
ctgaccgcatttgatttttattttgaagataacgaactcatcccgttaccttcgccattgaataacaacgatcac

SEQ ID NO: 103808 - DNA, 75 bp, synthetic construct
  source 1..75: mol_type = other DNA
tatatggcgggatttgatgaaaaggtcgggaatgctttcgatcatggacgcggaggcccgcgaccagtggtacag

SEQ ID NO: 103809 - DNA, 75 bp, synthetic construct
  source 1..75: mol_type = other DNA
agtttagtgctgccgaactggtaggcgcactcgcaggaatcgcagagctaccgcgcaaccatccaaaatggcagg

SEQ ID NO: 103810 - DNA, 75 bp, synthetic construct
  source 1..75: mol_type = other DNA
atgccgcccacgcacgcacaagccgttacatgacagatacgacaaaggagcgttatcaccagtgtcagaacgtga

SEQ ID NO: 103811 - DNA, 75 bp, synthetic construct
  source 1..75: mol_type = other DNA
ctggctggcgtggaaaatcgccaccagcccaacaaaggaagacggacttcagacaaaaccaatcagtttttgggc

SEQ ID NO: 103812 - DNA, 75 bp, synthetic construct
  source 1..75: mol_type = other DNA
gtcttggtattgccctggcgataaaagaaagcgcctttctgttgtggatcttgtctgcggcactcagcgaaaaac

SEQ ID NO: 103813 - DNA, 75 bp, synthetic construct
  source 1..75: mol_type = other DNA
tacgtcagttaaaactgccatccatggcagatgcgttgttacgccagcgcgaaaccccgcagacctatgacgagc

SEQ ID NO: 103814 - DNA, 75 bp, synthetic construct
  source 1..75: mol_type = other DNA
gttgccaaagaaaagtggacttccacagctatcgttactcaacctgatgtggggcaaatcgctggttataacaat

SEQ ID NO: 103815 - DNA, 75 bp, synthetic construct
  source 1..75: mol_type = other DNA
atgaacgcatcgtcatggtccttgcgcaatttgccctggttcaaggccacgctggcgcaatggcgttatgcgtta

SEQ ID NO: 103816 - DNA, 75 bp, synthetic construct
  source 1..75: mol_type = other DNA
acgtgatgtgggcgggaccgtggtcatcgcgtcatcaggatgaagtgttagcagaagcgaaagcgaaccctggca

SEQ ID NO: 103817 - DNA, 75 bp, synthetic construct
  source 1..75: mol_type = other DNA
aaaggtatcgctctgccgattctgccgtggtggaatgcggtggcgattaacgatgtgcccgcccagagtgatttc

SEQ ID NO: 103818 - DNA, 75 bp, synthetic construct
  source 1..75: mol_type = other DNA
gccgggtaatcccaacgatgcgccctccttcgccattgagtctggcatggcgcaaatttggcagcggcaaagcgg

SEQ ID NO: 103819 - DNA, 75 bp, synthetic construct
  source 1..75: mol_type = other DNA
tcttgacgatggatttgaggattccgtgttccgtgagtgggtggttacaccagagcgcccgctcagggagtggtt

SEQ ID NO: 103820 - DNA, 75 bp, synthetic construct
  source 1..75: mol_type = other DNA
cagcaaactgttcagtagcggtgatgcgtgacggtaaaccacagttgctgaaaatggaaaatgacagctcgctgc

SEQ ID NO: 103821 - DNA, 75 bp, synthetic construct
  source 1..75: mol_type = other DNA
attatcattattaatgatggcgatgatattgattttaactatgcaaaattagaactggagaaatcgtttgagtta

SEQ ID NO: 103822 - DNA, 75 bp, synthetic construct
  source 1..75: mol_type = other DNA
gcggtgctgctgggcggtatggtgggcgcggggattgtgttggggagtaacgctctgcgtaattacaacgcgaaa

SEQ ID NO: 103823 - DNA, 75 bp, synthetic construct
  source 1..75: mol_type = other DNA
atgaacagaccataagatacgctgaagaacagaagaaaagactcgaaggcttcactgatttcagcaatggctttg

SEQ ID NO: 103824 - DNA, 75 bp, synthetic construct
  source 1..75: mol_type = other DNA
taaatgatgaacttgaaaaagatctgaaagacaacatcgcgctgcgtatgaaaaacttacaggattctctgaaga

SEQ ID NO: 103825 - DNA, 75 bp, synthetic construct
  source 1..75: mol_type = other DNA
gtcatcgcgccatcaggatgaagtgttagcggaagcgaaagctaaccccggcatggcggcgctggcgcaaggtca

SEQ ID NO: 103826 - DNA, 75 bp, synthetic construct
  source 1..75: mol_type = other DNA
ggtacatgatcgcactggtgacgctcggcaccgtgcttggctacctgacgcgtaacactgtagcggcggctgcgc

SEQ ID NO: 103827 - DNA, 75 bp, synthetic construct
  source 1..75: mol_type = other DNA
ggcggtatatcacccaggatccgatagggttgaaggggggaataaatctatacacgtatccactggtaccaatac

SEQ ID NO: 103828 - DNA, 75 bp, synthetic construct
  source 1..75: mol_type = other DNA
ttgaaaacggcattgctgacctttgccccgcctgttgtgggtggtctactgttcccgaacggattcctgtacgcc

SEQ ID NO: 103829 - DNA, 75 bp, synthetic construct
  source 1..75: mol_type = other DNA
taccgccatcatgatgttccggcaaacgatgatgaaacgcaggcgctgttacgtcgggcgattcgttataaccgc

SEQ ID NO: 103830 - DNA, 75 bp, synthetic construct
  source 1..75: mol_type = other DNA
ctgccaaactggtgggtgccatcaacaccatcgttaatgatgatggctatctgcgtggctataacaccgacggca

SEQ ID NO: 103831 - DNA, 75 bp, synthetic construct
  source 1..75: mol_type = other DNA
ggcaaatgtctgacgttgaccgctcaacggtggccgtaaacactaccaacgcaatcagtacggcgctgggtgatg

SEQ ID NO: 103832 - DNA, 75 bp, synthetic construct
  source 1..75: mol_type = other DNA
aaagcgtgcagttcggtctttcctcactggcgcagtacattgatgatccggaagaagtgtggtttgtgaaatcac

SEQ ID NO: 103833 - DNA, 75 bp, synthetic construct
  source 1..75: mol_type = other DNA
cagaaagtctggcggcaacgtttaagttatcgcctggtacgctgcgcagaagagagcaaaattgcgctttccagt

SEQ ID NO: 103834 - DNA, 75 bp, synthetic construct
  source 1..75: mol_type = other DNA
gctagacagaacatcttggcatcacgtaacaagcaacttgataatgttaagttgtatctctcaagagagcttcag

SEQ ID NO: 103835 - DNA, 75 bp, synthetic construct
  source 1..75: mol_type = other DNA
agggagtagacacaacattagaatatcaacgggaattatcttttcttttcttaaagaaattaaaagatgcgggtc

SEQ ID NO: 103836 - DNA, 75 bp, synthetic construct
  source 1..75: mol_type = other DNA
aggcgcatttgcgtacctacagcgtggagaagctacgcgagcttatcgcacttggtggtcctgcgtatgaagcgt

SEQ ID NO: 103837 - DNA, 75 bp, synthetic construct
  source 1..75: mol_type = other DNA
gtggtgaccaccgcaacgggcattccggcctggcgcatccatcacagtcgcctgattcgcttcgacggggtgacg

SEQ ID NO: 103838 - DNA, 75 bp, synthetic construct
  source 1..75: mol_type = other DNA
gactccgctgaatgatgccctgtaccgttacgtgatgaacaccgatgacgacacaccagtaaaagtgctggcaca

SEQ ID NO: 103839 - DNA, 75 bp, synthetic construct
  source 1..75: mol_type = other DNA
gaaactggtaccggcgggcacctgcgtgaagatgaaatccccgggttcccctaccggccatggccagcttgaggc

SEQ ID NO: 103840 - DNA, 75 bp, synthetic construct
  source 1..75: mol_type = other DNA
gggctgtaacaccgctcgcggtttcggcgaagatatcaaacatctcggcaactccatctcccgcgctgccagcta

SEQ ID NO: 103841 - DNA, 75 bp, synthetic construct
  source 1..75: mol_type = other DNA
tatgggattgatcctcaaagaatcggagttctgggtgactctgccggtggatggcttgctcagatgatgggaact

SEQ ID NO: 103842 - DNA, 75 bp, synthetic construct
  source 1..75: mol_type = other DNA
cgcccatcaaaataatcaccggtatggtcagtgccatggtgggattaatgatggtgctatttggtggttttcagt

SEQ ID NO: 103843 - DNA, 75 bp, synthetic construct
  source 1..75: mol_type = other DNA
atgaatataaattgggtaaacgcagtctgaatgatctattaaccgtcgagcaagatgtctttcaggcgcaatcgg

SEQ ID NO: 103844 - DNA, 75 bp, synthetic construct
  source 1..75: mol_type = other DNA
tgtatctcttataaagacagcaaagcagtacaccgggggatcatcatcggtacgattgtagtcgcaatcctgatg

SEQ ID NO: 103845 - DNA, 75 bp, synthetic construct
  source 1..75: mol_type = other DNA
tagaatctcgtggtgatttaggacttgttgaaaagcagacaacatatatcattaacttattaacaacccccccca

SEQ ID NO: 103846 - DNA, 75 bp, synthetic construct
  source 1..75: mol_type = other DNA
acgtgaaaaaaggcattacggactcacagggggagccgtgggttggtgactggaaatatgtaccgacaaaagagg

SEQ ID NO: 103847 - DNA, 75 bp, synthetic construct
  source 1..75: mol_type = other DNA
ccgccaccggtgtgctggcgaaaacgcagcgccgcagcctggcggatacccttcagcagtccggcggcgaagacg

SEQ ID NO: 103848 - DNA, 75 bp, synthetic construct
  source 1..75: mol_type = other DNA
gtgcaacaggccgaagggcaacaaaaaatctctgcctcgcaggtcgaacaggcaaaactggatgtgctgcaacga

SEQ ID NO: 103849 - DNA, 75 bp, synthetic construct
  source 1..75: mol_type = other DNA
ctcatcagcacggaaggggcaacagcgtggtgcgcagaatatgatgaatggggcaacctgctgagtgatgagaac

SEQ ID NO: 103850 - DNA, 75 bp, synthetic construct
  source 1..75: mol_type = other DNA
tctcctgtggttatcaggaatactgtacaaggaggtcaatatacatccgcacttcctgtgactgtaacatttata

SEQ ID NO: 103851 - DNA, 75 bp, synthetic construct
  source 1..75: mol_type = other DNA
tgttcacgctttatgcccgtcatcctgaagctctggcacacggccatcagggcgagcatgtaatgctctctccac

SEQ ID NO: 103852 - DNA, 75 bp, synthetic construct
  source 1..75: mol_type = other DNA
agtcccgtctctgggagcttcagcgtaatcgtaattttcaggccagtcgccgtcttgaaggcgtcgagatgcctt

SEQ ID NO: 103853 - DNA, 75 bp, synthetic construct
  source 1..75: mol_type = other DNA
aatatgtagatcaatagattcgttaattgatgaatatcatatcgaatatgcaatgggaataaatctatatatgaa

SEQ ID NO: 103854 - DNA, 75 bp, synthetic construct
  source 1..75: mol_type = other DNA
tattttttatggcttcgataagtatcacccatgcttcgcaaactgccactaaatcacttggtgtgtctattacct

SEQ ID NO: 103855 - DNA, 75 bp, synthetic construct
  source 1..75: mol_type = other DNA
tacgtattggtatcaccagcggaatcggattatttatcgccttaatgggattaaaaaatactggcgttattgtcg

SEQ ID NO: 103856 - DNA, 75 bp, synthetic construct
  source 1..75: mol_type = other DNA
agcgccggtcgttgggcggaacagatggaaaacgtcgacgacaggccgtactggatgtataccggcatcaacgac

SEQ ID NO: 103857 - DNA, 75 bp, synthetic construct
  source 1..75: mol_type = other DNA
gcaaaccatcgatccgcaactggttacgccacaaggcgctgacgatattctgtcgcctgcgtttatgacgtcgtt

SEQ ID NO: 103858 - DNA, 75 bp, synthetic construct
  source 1..75: mol_type = other DNA
cttccaggggccgcaaccggaagaggcgatccgcgccctgctggataaagtgctgccgcgcgaagaagagctgaa

SEQ ID NO: 103859 - DNA, 75 bp, synthetic construct
  source 1..75: mol_type = other DNA
tgttcttatttggagaaatgtctcgtttataaataggttgtatacagtaataaacgaaaaagaattggaggaaaa

SEQ ID NO: 103860 - DNA, 75 bp, synthetic construct
  source 1..75: mol_type = other DNA
cgactcaacgtggaatcgcgcggtgatatatctttattaaatagaaaagttcaaaaaatattacagattctaaca

SEQ ID NO: 103861 - DNA, 75 bp, synthetic construct
  source 1..75: mol_type = other DNA
atgcgactgtggttaattcgtcatggtgaaacgcaagcgaatatcgatggtctgtacagcggtcatgctcccaca

SEQ ID NO: 103862 - DNA, 75 bp, synthetic construct
  source 1..75: mol_type = other DNA
cagagattaatttaggtacactgagtggcaaaacaaaagaacgggtttatgagcctgaagaaggtggacgtaaag

SEQ ID NO: 103863 - DNA, 75 bp, synthetic construct
  source 1..75: mol_type = other DNA
tcctcggcgcagcggttgacagcgatattccagcgaatctggtgctctcccttctcggactgggcgtgccggaaa

SEQ ID NO: 103864 - DNA, 75 bp, synthetic construct
  source 1..75: mol_type = other DNA
tgtcgatgaaggaaaaaccgatcgctggttccggcaggagctggagccggtgctgaagcgtaagggatggtgggg

SEQ ID NO: 103865 - DNA, 75 bp, synthetic construct
  source 1..75: mol_type = other DNA
tggtagatgtgcgcaagcgccagtcaaaaaccgtgccgtataaagagatcgaacgctacggcattgatcgtaacc

SEQ ID NO: 103866 - DNA, 75 bp, synthetic construct
  source 1..75: mol_type = other DNA
aagatgagtggaccggacttgtcgaacaggcagatcctctcattcgtgctaaagccgcagaaattgccgttgcgc

SEQ ID NO: 103867 - DNA, 75 bp, synthetic construct
  source 1..75: mol_type = other DNA
ggtgggcagtaaccagattatcaaagtgggatcaaaccaggttgaaaaggtggggatcattcgtgcgctgacggt

SEQ ID NO: 103868 - DNA, 75 bp, synthetic construct
  source 1..75: mol_type = other DNA
ttgaaatgagaatggctctggctgaagctggttttgttgtggccgctgtagaatacagaacaattcctgatacat

SEQ ID NO: 103869 - DNA, 75 bp, synthetic construct
  source 1..75: mol_type = other DNA
attacacagcaaatggcaaaaaataaagaaattaacgatgaattactgcagaaatggataaaaacttacctgaat

SEQ ID NO: 103870 - DNA, 75 bp, synthetic construct
  source 1..75: mol_type = other DNA
aaaggtcgtgaacaactggcggcaacgctggcggcgatgccggagatgacggtggaaaaagcccgcccgatcctg

SEQ ID NO: 103871 - DNA, 75 bp, synthetic construct
  source 1..75: mol_type = other DNA
gagataatacatggtatcagccaattattataaacagggttgttgagtggtttactaaaaatctgggagtcccta

SEQ ID NO: 103872 - DNA, 75 bp, synthetic construct
  source 1..75: mol_type = other DNA
atttcttattatgcatggtagcaaagacactctggtttcaccggagcaaagcgccaaactattcaggatgttgaa

SEQ ID NO: 103873 - DNA, 75 bp, synthetic construct
  source 1..75: mol_type = other DNA
cgtactgtatgaccctgcccccgaagcgggctatcagttacctcaggtccaaagggtatagcttcacgtgggact

SEQ ID NO: 103874 - DNA, 75 bp, synthetic construct
  source 1..75: mol_type = other DNA
gcacaggaaatatttgccgctccccaatagctgagagaatacttcgtggactcttcataaacaagaaaatcgatt

SEQ ID NO: 103875 - DNA, 75 bp, synthetic construct
  source 1..75: mol_type = other DNA
atgcgtgtataacccgcatatgacgaagttattgcagcaggcgcaacaagctggttgcaaaacgattgatggata

SEQ ID NO: 103876 - DNA, 75 bp, synthetic construct
  source 1..75: mol_type = other DNA
gcattatcactgcggagaaaaagcgtgagctcaatagtgcaggagtctggttgcgtgaaggtcaggtcattgatc

SEQ ID NO: 103877 - DNA, 75 bp, synthetic construct
  source 1..75: mol_type = other DNA
gagcataataataacggggctggaattgaaaattacaacttcattacgacggccggtctgaagtacacgttttaa

SEQ ID NO: 103878 - DNA, 75 bp, synthetic construct
  source 1..75: mol_type = other DNA
tgtcggcctgctggcggaagcgttcctgcagaagcagccgggggcgaaaatcattcacgacccgcgtctgacgtg

SEQ ID NO: 103879 - DNA, 75 bp, synthetic construct
  source 1..75: mol_type = other DNA
aaagcgttgtcgaaattagaaaacttgatattagtaaagagtcctggccatttaattatgtgacagaagcatgca

SEQ ID NO: 103880 - DNA, 75 bp, synthetic construct
  source 1..75: mol_type = other DNA
gctgattggcaccattgtgctgctggtcggcgtggttcatgctgctggcggcttaagcaacgcagtagagacgct

SEQ ID NO: 103881 - DNA, 75 bp, synthetic construct
  source 1..75: mol_type = other DNA
ctgttattgatgctattgaggaatgctttttacggaacaatattccgattcagtttgtaaaaataaataatacac

SEQ ID NO: 103882 - DNA, 75 bp, synthetic construct
  source 1..75: mol_type = other DNA
catgttgaagtgctatggaccacgctcaatcagttccataacaccggactaacgatgcaggataagcgtatcctg

SEQ ID NO: 103883 - DNA, 75 bp, synthetic construct
  source 1..75: mol_type = other DNA
acctggctcagggaaatgtaaaaaaaacggtgggattccattttactgactgtacaaatgttaataatgttaaag

SEQ ID NO: 103884 - DNA, 75 bp, synthetic construct
  source 1..75: mol_type = other DNA
tgcaccacacggcaattatgcactcgcagaacgtctcacgactcaaccttgctgcgcgcgttatgcaaacctcaa

SEQ ID NO: 103885 - DNA, 75 bp, synthetic construct
  source 1..75: mol_type = other DNA
tgggtgacccggggaactacgccgcgacggtcacctgggcccgcgcgtcttccggtaaggacccggtctccggta

SEQ ID NO: 103886 - DNA, 75 bp, synthetic construct
  source 1..75: mol_type = other DNA
agggggtggcatacagccgtctggactaccagtatgactttatgcaggagcgcttcctggggtattccgacgact

SEQ ID NO: 103887 - DNA, 75 bp, synthetic construct
  source 1..75: mol_type = other DNA
taaagaagagatcggcatcatgctggagtattcgaaggagaagtttggcggtgtgctcaaacttaccggaagcga

SEQ ID NO: 103888 - DNA, 75 bp, synthetic construct
  source 1..75: mol_type = other DNA
agttgggttacttgtgaacaactgatgccaatgctgcccattgtgaaggtcaacgattttgacagcgctctcacc

SEQ ID NO: 103889 - DNA, 75 bp, synthetic construct
  source 1..75: mol_type = other DNA
caagtaccaaccccacggaaaccatcattaacaacagtatcagcatgctggcagcaggcaatagcgtctacttca

SEQ ID NO: 103890 - DNA, 75 bp, synthetic construct
  source 1..75: mol_type = other DNA
cctaaaagtataatctcaagtgataatggggtgttagttccaactggtgacactataaaattatcacaagctatt

SEQ ID NO: 103891 - DNA, 75 bp, synthetic construct
  source 1..75: mol_type = other DNA
ggggcagaagcgcaggctgaaaaactggcggcctgcccgggaatgaccgtggagaacgcccgggctgtgctggct

SEQ ID NO: 103892 - DNA, 75 bp, synthetic construct
  source 1..75: mol_type = other DNA
gtgcgtaagggcaacccgaagaatatccacgactggaacgatctggtgcgctccgacgtgaagctgattttcccg

SEQ ID NO: 103893 - DNA, 75 bp, synthetic construct
  source 1..75: mol_type = other DNA
gtcttcagcaggcaatggcggacactcaggtacggggcgtactgctggacattgacagtcctggcgggcaggcca

SEQ ID NO: 103894 - DNA, 75 bp, synthetic construct
  source 1..75: mol_type = other DNA
acctctaagacctgattgtatgcaaattgttaggattagagaaacatgtgcaagtttgagaagtgcgtacgggcg

SEQ ID NO: 103895 - DNA, 75 bp, synthetic construct
  source 1..75: mol_type = other DNA
cctggcttccgccgacattttaaccaatggcacaaaagtgggtatgaaaccccttgagaatgaatcattggttaa

SEQ ID NO: 103896 - DNA, 75 bp, synthetic construct
  source 1..75: mol_type = other DNA
gatattattgccgttgaacgctggtgggaagactcggatctggtacaggtggaaggtatttgtgtctctcctggt

SEQ ID NO: 103897 - DNA, 75 bp, synthetic construct
  source 1..75: mol_type = other DNA
gaaatgccatcgagcgaatgcgtaacgagacgctggcattgtggatagcggataaccagcttcagtcacaagatt

SEQ ID NO: 103898 - DNA, 75 bp, synthetic construct
  source 1..75: mol_type = other DNA
caaaagatttttatttaaaaaatggtctcttatatttttcaagtcaggatgaagagtataaatgttttgagttca

SEQ ID NO: 103899 - DNA, 75 bp, synthetic construct
  source 1..75: mol_type = other DNA
tcatcgttttaggccactcgctcgccgaagttgacggtgaatactttactgaaataaataaaagcatccaagaaa

SEQ ID NO: 103900 - DNA, 75 bp, synthetic construct
  source 1..75: mol_type = other DNA
ttggtatatgatcgcactggtgacgctcggcttggttacctgacgcgtaacactgtggcggcagctgcgccaact

SEQ ID NO: 103901 - DNA, 75 bp, synthetic construct
  source 1..75: mol_type = other DNA
ctgatatgcagtttctgttgtgggatgcacagcgccgtgctggcatcagcgatgctgaaattaccgctgctatgg

SEQ ID NO: 103902 - DNA, 75 bp, synthetic construct
  source 1..75: mol_type = other DNA
ctttggcgattgttctcaacctttgggatacggtgccggtccgccgtctgcgcgccagttttacgcgtaaaggag

SEQ ID NO: 103903 - DNA, 75 bp, synthetic construct
  source 1..75: mol_type = other DNA
ggcgggtattggcgtcggcggcgaaggctttacgacctttaccattgcaacaccgaccggagaagggacaacgtc

SEQ ID NO: 103904 - DNA, 75 bp, synthetic construct
  source 1..75: mol_type = other DNA
gtgaattatttgccaacgacggtacaccgacatggctaaaagaaaagcgtgcaaaagaaatcgcacttgatgaaa

SEQ ID NO: 103905 - DNA, 75 bp, synthetic construct
  source 1..75: mol_type = other DNA
atgatgatttctaaggcgctgattgccgccctctgcctcgtctcggcccttggtgggtcggcactgacggccgta

SEQ ID NO: 103906 - DNA, 75 bp, synthetic construct
  source 1..75: mol_type = other DNA
gcacgcttcgcctcgagatccgcattgacggccagcatcccggcgagcgtccgggggcctggtacaatacacccc

SEQ ID NO: 103907 - DNA, 75 bp, synthetic construct
  source 1..75: mol_type = other DNA
ttacgcggggtgaaaagatgagatgggttgacatttttattatcgctctgattgttacgggtattgcgctttgtg

SEQ ID NO: 103908 - DNA, 75 bp, synthetic construct
  source 1..75: mol_type = other DNA
atggtgttaataccatcaatgtacttacctagcactacagatacagcaatatcaataaccataacaaacaaaaga

SEQ ID NO: 103909 - DNA, 75 bp, synthetic construct
  source 1..75: mol_type = other DNA
atgctggggttaagcgcactgctgaaagcagaaaattatgatgtcagactcaggaaagaaactgaaccaaccaaa

SEQ ID NO: 103910 - DNA, 75 bp, synthetic construct
  source 1..75: mol_type = other DNA
gagttgcaataggactttatgctaatgatgggaaaagaatacaatttaaaaaagaacaaaacatatctattgacg

SEQ ID NO: 103911 - DNA, 75 bp, synthetic construct
  source 1..75: mol_type = other DNA
gcttttatctttccaagaaaccaaacgaaatgtttaactatcattactcaactaaagggactatagccaatagcg

SEQ ID NO: 103912 - DNA, 75 bp, synthetic construct
  source 1..75: mol_type = other DNA
ccgctatctggagaaccgcgaaggttacgactggtatacgattcagaacatgctcaataccgttgaactgatgtc

SEQ ID NO: 103913 - DNA, 75 bp, synthetic construct
  source 1..75: mol_type = other DNA
tactgcggtgcttaaactattattcttatttacaaataaaaaaataaaatttgtcactacagagcattgcactac

SEQ ID NO: 103914 - DNA, 75 bp, synthetic construct
  source 1..75: mol_type = other DNA
atggaatattcagatcatgattttgtttcgtgctttacagggagctgctggcgcatccatgatccctttagtttt

SEQ ID NO: 103915 - DNA, 75 bp, synthetic construct
  source 1..75: mol_type = other DNA
gtttgcgctctcaaccaaaggtgcaaccagtactgcggcaaaatatctggcacaaacccagaacgcctcggactt

SEQ ID NO: 103916 - DNA, 75 bp, synthetic construct
  source 1..75: mol_type = other DNA
taaaattagctgacatatgtattttgtcaactcattacgaaggatttcctgtttcaattttggagtatttttgtg

SEQ ID NO: 103917 - DNA, 75 bp, synthetic construct
  source 1..75: mol_type = other DNA
ggtttaactgtggatgcggttatggggacagaggccgccgtttttgaaggtcagaccggtattgaggccgggctg

SEQ ID NO: 103918 - DNA, 75 bp, synthetic construct
  source 1..75: mol_type = other DNA
atgaaaaatattatcatttgagacaaactatttatagcaagcgtgagcttttttctgaagagagatatgcggaaa

SEQ ID NO: 103919 - DNA, 75 bp, synthetic construct
  source 1..75: mol_type = other DNA
aattaaagatcaaatcggttgcatgtctgtcagttcaagaggtaaaacaaaagcttggagaaaaattattctcaa

SEQ ID NO: 103920 - DNA, 75 bp, synthetic construct
  source 1..75: mol_type = other DNA
ttattctgcgccctgagaaataccaacagatgatgctggagcataaagcggagcttgagtctaaagcaatgcagc

SEQ ID NO: 103921 - DNA, 75 bp, synthetic construct
  source 1..75: mol_type = other DNA
atgttcaggcttgttgtcctgcgcgcgcgtattgctcgtgaaattgctgtacccaatagcgatgtccgaaaaaac

SEQ ID NO: 103922 - DNA, 75 bp, synthetic construct
  source 1..75: mol_type = other DNA
tactggcactgaccctgggcagcgtactggcagcggccagtgccccggcaatggccactggcgataatatggaaa

SEQ ID NO: 103923 - DNA, 75 bp, synthetic construct
  source 1..75: mol_type = other DNA
caccggagctgacggtgagtggtttttatgattacggacgcggggaccagaacaggaataacacccggaaaaacg

SEQ ID NO: 103924 - DNA, 75 bp, synthetic construct
  source 1..75: mol_type = other DNA
tcgcggattaaatgccgaagagataggttttgccgtttgcacaacaggtattcttccagttattttctgttccct

SEQ ID NO: 103925 - DNA, 75 bp, synthetic construct
  source 1..75: mol_type = other DNA
gcatactcactggtcgctggcgcaaaaccagtaacggtatccgtccgccctggtccggtgatgaatctcattttc

SEQ ID NO: 103926 - DNA, 75 bp, synthetic construct
  source 1..75: mol_type = other DNA
tggcctgaaccaaaagatggtgagcctcgcttgcacattaaagaacgcggcaactctccggtaactccgggtggt

SEQ ID NO: 103927 - DNA, 75 bp, synthetic construct
  source 1..75: mol_type = other DNA
aaagaggctctggaagccgcagccgaaccagacgatctcagcgagtgggctgatatgcagttcctgttgtgggat

SEQ ID NO: 103928 - DNA, 75 bp, synthetic construct
  source 1..75: mol_type = other DNA
tgaacggcctgcatagccacaatattagctgccatgcggaacggtttaacggcgagtgcagccatgcggaaatca

SEQ ID NO: 103929 - DNA, 75 bp, synthetic construct
  source 1..75: mol_type = other DNA
ggagacattacagactacggaactggtattgaagatgctttatccgcagttagctcagaaggatatggttaaagc

SEQ ID NO: 103930 - DNA, 75 bp, synthetic construct
  source 1..75: mol_type = other DNA
aatatggggttattggtgttgcgtggttatggacaattcgagtaataattgattttttgatgcttttatatatga

SEQ ID NO: 103931 - DNA, 75 bp, synthetic construct
  source 1..75: mol_type = other DNA
cccccgaatgtacatctatcgagaaagtattagtacattgtgtcaaagatgaaaatggtaatcccgtattctctg

SEQ ID NO: 103932 - DNA, 75 bp, synthetic construct
  source 1..75: mol_type = other DNA
tcacaggcaatactggcaacgctggtgtcgacaactatcgcggcggtaggtgcgttgttgattgccctgctggtg

SEQ ID NO: 103933 - DNA, 75 bp, synthetic construct
  source 1..75: mol_type = other DNA
gaagagatcgaaaccgtgatgggcttctgtgaaaaagtcggcctgccgatcacccttgcccagatgggcgtgaaa

SEQ ID NO: 103934 - DNA, 75 bp, synthetic construct
  source 1..75: mol_type = other DNA
tgctacctggcgtttaccagcagaactctgggttatctctgcaccgatgtgctcgctgctagttgggttaatgaa

SEQ ID NO: 103935 - DNA, 75 bp, synthetic construct
  source 1..75: mol_type = other DNA
gcaatggcattactttgatttccgcgatgacgtttctttccagttagtcaaaatggctcaggcctgcaaggaagg

SEQ ID NO: 103936 - DNA, 75 bp, synthetic construct
  source 1..75: mol_type = other DNA
gatattaagtggcgccatcgataagtttgatggcgcgcaaatggatgaggctactttctgggaatcggtttgtaa

SEQ ID NO: 103937 - DNA, 75 bp, synthetic construct
  source 1..75: mol_type = other DNA
gccagttacatggcacaaaacggtttttacagcgatctcgttataaaagcatcgcgccagaaaaatagtttccac

SEQ ID NO: 103938 - DNA, 75 bp, synthetic construct
  source 1..75: mol_type = other DNA
actccacatttggctgcgttggccccattggtccgctgaaacatctctcaaaagaggcactggaagccgcagccg

SEQ ID NO: 103939 - DNA, 75 bp, synthetic construct
  source 1..75: mol_type = other DNA
cgggtaaaaagctgcgcctgatgcagcaatacttccagtgtgcctgttcggtggcggatattctgcgtcgccatc

SEQ ID NO: 103940 - DNA, 75 bp, synthetic construct
  source 1..75: mol_type = other DNA
gtgattgtagacttcctcaacggcgatccggaccagccgatcattatggggcgcacctacctccaggaaaaccgc

SEQ ID NO: 103941 - DNA, 75 bp, synthetic construct
  source 1..75: mol_type = other DNA
ttcaccagattggtgcatgtgtggagcgcgccttttgagtactttactcgtcggtaccagattgtgcgctcgcgg

SEQ ID NO: 103942 - DNA, 75 bp, synthetic construct
  source 1..75: mol_type = other DNA
agggaagagcgtcaggccaagcttgaagctttccgcctgcaactccttgaggatggcattgacccggcagatctg

SEQ ID NO: 103943 - DNA, 75 bp, synthetic construct
  source 1..75: mol_type = other DNA
cggcaggaagtgccgttggtccagtagctttggccttggtcgagaatcttcgcaagatctcaggtgaactcaacg

SEQ ID NO: 103944 - DNA, 75 bp, synthetic construct
  source 1..75: mol_type = other DNA
agtaaaacgggccggtatcgaactgcctgatggccaatgcactcacgtgttgcgccatacattcgccagccattt

SEQ ID NO: 103945 - DNA, 75 bp, synthetic construct
  source 1..75: mol_type = other DNA
aaaccccagtctgcttttgattgcaaaaatatgcctggccaccggcgcacgctggagtgaagctgaaaacctgca

SEQ ID NO: 103946 - DNA, 75 bp, synthetic construct
  source 1..75: mol_type = other DNA
cgctggattacccggaactgctcacgcattccggtccatcgatcctttcccccggcaatcattacataaacagat

SEQ ID NO: 103947 - DNA, 75 bp, synthetic construct
  source 1..75: mol_type = other DNA
ccccatgaatccgataagttcaaatgataatgatagtgtagacttgcgaaatataaaatgccctgaaggttcaga

SEQ ID NO: 103948 - DNA, 75 bp, synthetic construct
  source 1..75: mol_type = other DNA
ggcctccggctggctacctgcggcgctggatgaatgccgcctgatgcaaatgcgtcgtcaggaagtcgttgcgcc

SEQ ID NO: 103949 - DNA, 75 bp, synthetic construct
  source 1..75: mol_type = other DNA
gaaaatggttgtgtgagtgctatcccaatggacgcaatggtaagcgcgtgcgtaagcaatttgctaccaaaggcg

SEQ ID NO: 103950 - DNA, 75 bp, synthetic construct
  source 1..75: mol_type = other DNA
ggactggcgtctgcgcaaggcgcgggagcgcgatctggcggtaaattttgtcgttcgcgaagaacatctgtggtc

SEQ ID NO: 103951 - DNA, 75 bp, synthetic construct
  source 1..75: mol_type = other DNA
atcgccaccgaattgcataaagggttcacaccactgttccgcccggataccccggaagagtataaacaggctgcc

SEQ ID NO: 103952 - DNA, 75 bp, synthetic construct
  source 1..75: mol_type = other DNA
gaacctaccaggatagggcgggacacatcaagcggatacgcttcactgatcagacctgtaaatcacttgcttgcc

SEQ ID NO: 103953 - DNA, 75 bp, synthetic construct
  source 1..75: mol_type = other DNA
tttccaggggccgcaaccggaagaagcgatccgcgccctgctggataaagttctaccccgcgaagaagaactgaa

SEQ ID NO: 103954 - DNA, 75 bp, synthetic construct
  source 1..75: mol_type = other DNA
agaagatatcttctttaagtttggcctgaatctttccgatgaactgattccacaagtacaaaaagcattacatga

SEQ ID NO: 103955 - DNA, 75 bp, synthetic construct
  source 1..75: mol_type = other DNA
caactccaacttctccttgaaaacgttaatagtaatgaccctattaatgaactcgtaaattccgtatctcaggtg

SEQ ID NO: 103956 - DNA, 75 bp, synthetic construct
  source 1..75: mol_type = other DNA
gagagcggagagtatgaaccaactatcagtatgcttatcccactggcaaatattcttggctgcgatccgatgtgc

SEQ ID NO: 103957 - DNA, 75 bp, synthetic construct
  source 1..75: mol_type = other DNA
atggtgggcaaaatgcgacctcgcaggagatcaattatttttagctatttatgatcttggtgttggaatcccaga

SEQ ID NO: 103958 - DNA, 75 bp, synthetic construct
  source 1..75: mol_type = other DNA
agccacatgtggtacacggaaatcagcgagtacctggttagctccggacgtaccgacgcgactccggagtgggtt

SEQ ID NO: 103959 - DNA, 75 bp, synthetic construct
  source 1..75: mol_type = other DNA
gcaacaggtgtgggtatccgtattgacgatgcggaaagcggaaaccttatgccactaaatgctatgggcaatgat

SEQ ID NO: 103960 - DNA, 75 bp, synthetic construct
  source 1..75: mol_type = other DNA
aagcgcccgactcactgtcaaaaccgattgttgagagtaatgacactccggcgaacagtacacagtttactctgg

SEQ ID NO: 103961 - DNA, 75 bp, synthetic construct
  source 1..75: mol_type = other DNA
atggtactttgctgacggaaggcgtagcaattatgcagtatcttgctgacagtgttcccgaccgccagttgctgg

SEQ ID NO: 103962 - DNA, 75 bp, synthetic construct
  source 1..75: mol_type = other DNA
tcaagttatgggcagaaaaggtattggtaagcttgccatgttttcacttgccaataaaatccaagtttattcgta

SEQ ID NO: 103963 - DNA, 75 bp, synthetic construct
  source 1..75: mol_type = other DNA
tgttcttcgagttattagcgtttcttgagcttcaaagtctgatcataacagatctggacgcagtcctaagagcag

SEQ ID NO: 103964 - DNA, 75 bp, synthetic construct
  source 1..75: mol_type = other DNA
agcacgataacggcaacgttgaagcgtctttccgtttatggctggaaacgcgggataatggcaccgtccctaact

SEQ ID NO: 103965 - DNA, 75 bp, synthetic construct
  source 1..75: mol_type = other DNA
aagcgcaacctcaaaaagacatatctcggctgcgaagaggtgacctacaccgacttcatcaccggcgaaaaaaac

SEQ ID NO: 103966 - DNA, 75 bp, synthetic construct
  source 1..75: mol_type = other DNA
cacgacaaacaggtgcatatggcgaacctgtgtgtagttggcggtttcgcggtgaacggtgtagcggcgctgcat

SEQ ID NO: 103967 - DNA, 75 bp, synthetic construct
  source 1..75: mol_type = other DNA
cgtgttggcgataccgttcggaattatcctgttagctttcgttctgacattaaatcatcaaattaaacgaattct

SEQ ID NO: 103968 - DNA, 75 bp, synthetic construct
  source 1..75: mol_type = other DNA
gtggtattccctgtatggtcaaacactcgcagaccccaagcgcctcatggcgaaacttagaattatctgtaatgg

SEQ ID NO: 103969 - DNA, 75 bp, synthetic construct
  source 1..75: mol_type = other DNA
tgtttttagcgaactatcccgtctgggcgaatggtcgtatccgaacccactggagaacatgcgaaaattcaccat

SEQ ID NO: 103970 - DNA, 75 bp, synthetic construct
  source 1..75: mol_type = other DNA
accaatacttctggcaatcatacacataccgtcggttttgctgtgagcgtgcaatcaggcggtgcagattatggt

SEQ ID NO: 103971 - DNA, 75 bp, synthetic construct
  source 1..75: mol_type = other DNA
ggattcgctgggctacagccgctggcaatgcctgaactggctgctgttgccctccgtcgcacctgcgctggcaat

SEQ ID NO: 103972 - DNA, 75 bp, synthetic construct
  source 1..75: mol_type = other DNA
ttccctgccaatcaatctccatacaattaaccagtttttccacaaaactctgaaccctgctgaagcgaaagactt

SEQ ID NO: 103973 - DNA, 75 bp, synthetic construct
  source 1..75: mol_type = other DNA
ttgagcacctgtttcccggtgaggacggttacagccgcagcgagtcactctggctggtgcgcggcggccgtggcg

SEQ ID NO: 103974 - DNA, 75 bp, synthetic construct
  source 1..75: mol_type = other DNA
acgttctgcgtcataccttcggcgctcattttatgatgaatggcgggaatattcttgtgctgcaacgtatactcg

SEQ ID NO: 103975 - DNA, 75 bp, synthetic construct
  source 1..75: mol_type = other DNA
ctgaaagtggtgttcctgccggattactgtgtctcggcggcggaaatgctgatcccggcggcggatatctctgag

SEQ ID NO: 103976 - DNA, 75 bp, synthetic construct
  source 1..75: mol_type = other DNA
aagctggtggaacaaacctggccgggcgacaaggcggtatgggcgaaactggcggtggtacatgacaaacaagtt

SEQ ID NO: 103977 - DNA, 75 bp, synthetic construct
  source 1..75: mol_type = other DNA
tgggatctccccgttgtcggctatcgtaatggcgtggcgcagccgctgcgtctgtggcaggcgacgcatgcgcat

SEQ ID NO: 103978 - DNA, 75 bp, synthetic construct
  source 1..75: mol_type = other DNA
ctgtccgcagtcaattaataatattccactggacgcacgtaaccacggctataccgtactggatatccaacaaga

SEQ ID NO: 103979 - DNA, 75 bp, synthetic construct
  source 1..75: mol_type = other DNA
acagcaccagtgaaaagctggcagcaacgccaaaggcagtaaaagcagcctatgacaatgctgaaaaacgtatgc

SEQ ID NO: 103980 - DNA, 75 bp, synthetic construct
  source 1..75: mol_type = other DNA
atggtgtggatggggtattggggacaagctggtgtgaagcttgaggggcgtaatccctggacactttggcaatat

SEQ ID NO: 103981 - DNA, 75 bp, synthetic construct
  source 1..75: mol_type = other DNA
ctattcctgaactgttgcgtgtattgattgatgagcaccagatgagctgggatgaagcctgggcgatcaccagca

SEQ ID NO: 103982 - DNA, 75 bp, synthetic construct
  source 1..75: mol_type = other DNA
ccggcggcgttcacgctgatatcgcctgctttgtcgttggcacactggcaggcgttatttgccgatccgcagtta

SEQ ID NO: 103983 - DNA, 75 bp, synthetic construct
  source 1..75: mol_type = other DNA
acttacacgcgatttcgatgcgcagatgttttcccgctaccgagaaaaacggttaaaaggcgagtacgcccgttc

SEQ ID NO: 103984 - DNA, 75 bp, synthetic construct
  source 1..75: mol_type = other DNA
ttgcactctcacctttgctccttatggtatttttgattctgaaactgaagatgcctgttcattattcagttctga

SEQ ID NO: 103985 - DNA, 75 bp, synthetic construct
  source 1..75: mol_type = other DNA
agcctcacagcgtcgcgtttatgcaaacaaaatttagctattaattcccagaatcggattcgcacccaacgcgaa

SEQ ID NO: 103986 - DNA, 75 bp, synthetic construct
  source 1..75: mol_type = other DNA
tataacattcatcgggcgtttggctacatatcgctatctcgatatggatgtctgtattaaagaagctattgaatg

SEQ ID NO: 103987 - DNA, 75 bp, synthetic construct
  source 1..75: mol_type = other DNA
aacgaaaacctgcccctcaaagaagcaaacttccccgctatgtcgtgaagcttcacgacgatgactcctttgacg

SEQ ID NO: 103988 - DNA, 75 bp, synthetic construct
  source 1..75: mol_type = other DNA
tgttatattagtgagatgaaggaatttgtaaaatgttattatacacacacaccagaaaatatgacattaagagag

SEQ ID NO: 103989 - DNA, 75 bp, synthetic construct
  source 1..75: mol_type = other DNA
ccgctggatgcacgtaatcacggctataccgtactggatatccagcaagacgggccgaccattcgttatttgatt

SEQ ID NO: 103990 - DNA, 75 bp, synthetic construct
  source 1..75: mol_type = other DNA
ctgccgggaacaaagacgcagatgaccattcgttcgaaaacctataagggcagcgggtttaatgaactgaagttt

SEQ ID NO: 103991 - DNA, 75 bp, synthetic construct
  source 1..75: mol_type = other DNA
ttcacccgactggtgcatgtctggagcgcgccgtttgagtactttactcgtcggtatcagattgtgcgttcgcgg

SEQ ID NO: 103992 - DNA, 75 bp, synthetic construct
  source 1..75: mol_type = other DNA
tgaaaatatctactattcacaatagactagatgaggattatatcccattatttggcgcggttaaagggaatgcta

SEQ ID NO: 103993 - DNA, 75 bp, synthetic construct
  source 1..75: mol_type = other DNA
ttctgattagctccatcatattggtggcactaatacaatcatccgcctgggccacttgttctaatacacgtgtcg

SEQ ID NO: 103994 - DNA, 75 bp, synthetic construct
  source 1..75: mol_type = other DNA
ggatggttggataagctgtagtgatcgaatgccggaagacaccaaaatgttactggcatttagtcaaggtaaaat

SEQ ID NO: 103995 - DNA, 75 bp, synthetic construct
  source 1..75: mol_type = other DNA
aaaaatcgatttatcttcaggttctgcaagtgtagaagggatgcttctaacccgtggaagtcgacaaagacagca

SEQ ID NO: 103996 - DNA, 75 bp, synthetic construct
  source 1..75: mol_type = other DNA
ggcctgtattacaaccgccaccgctattatgacccgctgcaggggcggtatatcactcaggatccgattggactg

SEQ ID NO: 103997 - DNA, 75 bp, synthetic construct
  source 1..75: mol_type = other DNA
taatcatataaatgactttgcagtaaaaaggattaatgaaattcaaaaggaactatcaacggcaggacatatatt

SEQ ID NO: 103998 - DNA, 75 bp, synthetic construct
  source 1..75: mol_type = other DNA
atcggcactgtcgctgaggctccagagattgctaaggaagtatatgagtacttttcgcagttaatttgtcctatt

SEQ ID NO: 103999 - DNA, 75 bp, synthetic construct
  source 1..75: mol_type = other DNA
aagtgaatggctacggtgttgaccacgtaaaagtagcggaaggtttaggttgtaaagcgattcgcgtcttcaaac

SEQ ID NO: 104000 - DNA, 75 bp, synthetic construct
  source 1..75: mol_type = other DNA
atgcatatcattgtttattcagaatgattgctcttatagaccatgtaaatgaaattgaggtagataaggccagga

SEQ ID NO: 104001 - DNA, 75 bp, synthetic construct
  source 1..75: mol_type = other DNA
ccagagggccaatgcactcacgtgctacgtcatacattcgccagccattttatgatgaatggcggaaacatactg

SEQ ID NO: 104002 - DNA, 75 bp, synthetic construct
  source 1..75: mol_type = other DNA
ctgctttgtcgttggcacactggcaggcgttatttgccgatccgcagctaccgcaggccttactggcaacactgg

SEQ ID NO: 104003 - DNA, 75 bp, synthetic construct
  source 1..75: mol_type = other DNA
cctggccggatatgaatgcggagctgcaggttgggcggcaggtctctgagatgttcggtcactaccggcagtcac

SEQ ID NO: 104004 - DNA, 75 bp, synthetic construct
  source 1..75: mol_type = other DNA
tatcactcaggatccgattgggctgaaagggggatggaatttttatcagtatccgttgaatccgataactgatat

SEQ ID NO: 104005 - DNA, 75 bp, synthetic construct
  source 1..75: mol_type = other DNA
gcgcaggtgctggacaaaatggcctacctgacgatatggcagggcgatgaagtacagcgccgggtgaaaggtgtg

SEQ ID NO: 104006 - DNA, 75 bp, synthetic construct
  source 1..75: mol_type = other DNA
gatgctgaaattaccgctgctatggaaaataaattgaagatcaacatggagcgccagtggcctgagccaaaagat

SEQ ID NO: 104007 - DNA, 66 bp, synthetic construct
  source 1..66: mol_type = other DNA
atgtatgctatcaccatcttctgtaaatttggggtgttcatggaattctttaaccagaaacctgac

SEQ ID NO: 104008 - DNA, 75 bp, synthetic construct
  source 1..75: mol_type = other DNA
cgaagggctacgatccgctcaaatggcgtaagaaagacaagcagctcgatgcagtattgaaagagctggaaagcg

SEQ ID NO: 104009 - DNA, 75 bp, synthetic construct
  source 1..75: mol_type = other DNA
ttaatgtaaaggctaacagcgcagacattgaaagattatcatttcacgatacaacaaatactaaatacattcaga

SEQ ID NO: 104010 - DNA, 75 bp, synthetic construct
  source 1..75: mol_type = other DNA
atgtaacctcaccaggtatttacagcgttacaggtaaagcgaccaatggtccaatactggacggaaacggcgtga

SEQ ID NO: 104011 - DNA, 75 bp, synthetic construct
  source 1..75: mol_type = other DNA
cgaagatgtcacgcatcgttccattcagcagcgcgatatctgcatggtgtttcagtcatacgctctgttcccgca

SEQ ID NO: 104012 - DNA, 75 bp, synthetic construct
  source 1..75: mol_type = other DNA
cgcgcgcaactggagaagaaactgcaatatgttaacgatacactcaaagatgggcactggatctgcgggcaacgt

SEQ ID NO: 104013 - DNA, 75 bp, synthetic construct
  source 1..75: mol_type = other DNA
ggcagccagaaggaacaggtaacggagcattatgggagtcaggatatgcaaaaaaccgtgtgttgcagatattca

SEQ ID NO: 104014 - DNA, 75 bp, synthetic construct
  source 1..75: mol_type = other DNA
aaggacgtgacagtctggaacgctatatgattcagcaggcatcgctggctggtatcacaacagagcgcctgggta

SEQ ID NO: 104015 - DNA, 75 bp, synthetic construct
  source 1..75: mol_type = other DNA
cagggcgtggggatagggatggaaacgctcgacggcaagcgggtggatattaacaacaccaccggggcgactttt

SEQ ID NO: 104016 - DNA, 75 bp, synthetic construct
  source 1..75: mol_type = other DNA
ggcatcaccacagaacggctgagcaaaacattcagcgttgatccgtcaatccagcagaagatggagaacgccatc

SEQ ID NO: 104017 - DNA, 75 bp, synthetic construct
  source 1..75: mol_type = other DNA
aaaaccatttcaaactttgtcaggattaatggggctgtttatcgtgttactcctgctgcagtcggcatagtgaca

SEQ ID NO: 104018 - DNA, 75 bp, synthetic construct
  source 1..75: mol_type = other DNA
accgggtggctgaaacacatccgtgaacacgccacgacgcgtatcgtgaaggcaatgacgctgacccgtcgcgat

SEQ ID NO: 104019 - DNA, 75 bp, synthetic construct
  source 1..75: mol_type = other DNA
caccattgtggcgatgggttgcttctacagcctgaacgagaagatgtatgtccgcattgtggaagagatagaagc

SEQ ID NO: 104020 - DNA, 75 bp, synthetic construct
  source 1..75: mol_type = other DNA
cagattgtgggttgaagaagccatggcacgtatatgcgagggaaattaccatccagcctggcatggtttcatctt

SEQ ID NO: 104021 - DNA, 75 bp, synthetic construct
  source 1..75: mol_type = other DNA
ggcaggcgctgccggaagagcttcgcataagtccgcatcgttatctggcgacgaacagtccgcaggggccgtggt

SEQ ID NO: 104022 - DNA, 75 bp, synthetic construct
  source 1..75: mol_type = other DNA
gcaatgtatgttacagatctcgctaatggcaaatatgacagctctcgcttggacatgtctgtcgggtatgagata

SEQ ID NO: 104023 - DNA, 75 bp, synthetic construct
  source 1..75: mol_type = other DNA
ggcgtgaaaaaggcgaagtaaacccgccgctgcgtatgcttaacggcgtacagaaatttttcgccgtactgtggc

SEQ ID NO: 104024 - DNA, 75 bp, synthetic construct
  source 1..75: mol_type = other DNA
atcccgagtggcgtattgaagccagccatacccgtgaaatggcaccacgctcagtaaaggtgctgtttcgggtcg

SEQ ID NO: 104025 - DNA, 75 bp, synthetic construct
  source 1..75: mol_type = other DNA
agcgtatggcagaacaacaatctgatatggttaagaaaattgtctttgatacgctcaaggagctatataaaaaag

SEQ ID NO: 104026 - DNA, 75 bp, synthetic construct
  source 1..75: mol_type = other DNA
ccagaattattaaagcagcgggttattcatggaaaggcttatgtgcggcatggcgctatgaagctgcctttcgtc

SEQ ID NO: 104027 - DNA, 75 bp, synthetic construct
  source 1..75: mol_type = other DNA
aagcaaaaactgcattttgttttcatgcccagggtgtgtaacgaaaaacagaaaccttattactcggtaagcagt

SEQ ID NO: 104028 - DNA, 75 bp, synthetic construct
  source 1..75: mol_type = other DNA
tggctgaacatattcctccggcacctaactggcctgcgccaacgccgccagtacaaaatgaacaatcaagacctc

SEQ ID NO: 104029 - DNA, 75 bp, synthetic construct
  source 1..75: mol_type = other DNA
gccatcattcagtgctcattagatactggtgccgatttaaactggctgctgactggtcaaatttccaatttgaat

SEQ ID NO: 104030 - DNA, 75 bp, synthetic construct
  source 1..75: mol_type = other DNA
atctggtcgtactgatggggcgggatctgttcaatacactgcgtcttcccatgattaacgccatcagcaccacca

SEQ ID NO: 104031 - DNA, 75 bp, synthetic construct
  source 1..75: mol_type = other DNA
ggcaggcgctgccggaagagctacgcttaagtccgcatcgttatctggcgacgaacagtccgcaggggccgtggt

SEQ ID NO: 104032 - DNA, 75 bp, synthetic construct
  source 1..75: mol_type = other DNA
tcggcaacagtacttaccagactatgcgtaaacataacgaacttccctggaggcagaatgatcttactcaccaat

SEQ ID NO: 104033 - DNA, 75 bp, synthetic construct
  source 1..75: mol_type = other DNA
ctgatcctcaagccgaaagtgctgctgtttgatgagccgttgagtaacctcgacgccaacctgcgtcgcagcatg

SEQ ID NO: 104034 - DNA, 75 bp, synthetic construct
  source 1..75: mol_type = other DNA
aaatggcggttacagtacgtgaagcggcgctggtgcctcgtgtgctgcaacaggcatttcacctgatgcgttctg

SEQ ID NO: 104035 - DNA, 75 bp, synthetic construct
  source 1..75: mol_type = other DNA
gttatcccgtcactcttacacccgcgccggaaggcggttatatggtttcttttgtggatatccctgaagcgttga

SEQ ID NO: 104036 - DNA, 75 bp, synthetic construct
  source 1..75: mol_type = other DNA
ctgatgaaggctgaacaggcagcagagaaagcgcaggaagccagatcgaaagtcatgaacctgatacaggcagaa

SEQ ID NO: 104037 - DNA, 75 bp, synthetic construct
  source 1..75: mol_type = other DNA
tttctgaacgttcatggagtgaaaatcaaataatgcaatcttatcatggaggaaagcaagatcttattagtgtgg

SEQ ID NO: 104038 - DNA, 75 bp, synthetic construct
  source 1..75: mol_type = other DNA
cgtcaaaactatcaacaaccttgattcctcataatgctcaaacagatccgctttccgggcctacaccattcagct

SEQ ID NO: 104039 - DNA, 75 bp, synthetic construct
  source 1..75: mol_type = other DNA
gtcacttcttattgattacaaaattaaccttattgatgaaagcgaatttacccaaaaggctggtgttgcaaccga

SEQ ID NO: 104040 - DNA, 75 bp, synthetic construct
  source 1..75: mol_type = other DNA
gataaacagaaagctgaagttgtggagtttttatgccacccgaagcggcaacagccatatgctcggctttctatc

SEQ ID NO: 104041 - DNA, 75 bp, synthetic construct
  source 1..75: mol_type = other DNA
ttctggctgtaccgtcagctggaaaacgagcacgactggcttatctcagactctgccgtggatgaggccattctc

SEQ ID NO: 104042 - DNA, 75 bp, synthetic construct
  source 1..75: mol_type = other DNA
catgggcctctaacccggctgaaactccgttgtgggcagctcagacggcgttaacattgatgctcagcatcggct

SEQ ID NO: 104043 - DNA, 75 bp, synthetic construct
  source 1..75: mol_type = other DNA
gatgagcagttccgggatgctcttttgctccaatagcgcctgcggcgaaaaaataatcatggataatcgccgtca

SEQ ID NO: 104044 - DNA, 75 bp, synthetic construct
  source 1..75: mol_type = other DNA
atttaacttgcaccatgcgacaaaaatcgacgccgtccagctcgcggctaaggcgcttggcaaagagttatcact

SEQ ID NO: 104045 - DNA, 75 bp, synthetic construct
  source 1..75: mol_type = other DNA
gcgttatctatgtcaatcttaaaaaatggcatgaagcaaatttgacaccgtatttactcacgcttttacgagggg

SEQ ID NO: 104046 - DNA, 75 bp, synthetic construct
  source 1..75: mol_type = other DNA
gtcagcgcgcagctgttagagcgcctctggttgcgctggaacccggcttatcatttgaaggaggccacggtatga

SEQ ID NO: 104047 - DNA, 75 bp, synthetic construct
  source 1..75: mol_type = other DNA
ggagttaatcgatcacgctattaatcaggcagataacaataaagttggggttgtgtatcttgatttggataattt

SEQ ID NO: 104048 - DNA, 75 bp, synthetic construct
  source 1..75: mol_type = other DNA
aatttttatgccatccagaagcagcaacggccatatgctcggctttctatcaatctttcaatgtgccagccttaa

SEQ ID NO: 104049 - DNA, 75 bp, synthetic construct
  source 1..75: mol_type = other DNA
gcagatgacggcggtgcaccgcgaggaagggctgagtcagtaccgcgcatacgacagccgtggacagttaattgc

SEQ ID NO: 104050 - DNA, 75 bp, synthetic construct
  source 1..75: mol_type = other DNA
gactggcgacagagccgggtgatgttcgctgtttttattatgatgcggtgacgggagagtataccggctggtcag

SEQ ID NO: 104051 - DNA, 75 bp, synthetic construct
  source 1..75: mol_type = other DNA
acgatcagttggttatcgaaaatcacctagcgtgtcgaagtgcgcagtctggaagcactagtacgttggcagtca

SEQ ID NO: 104052 - DNA, 75 bp, synthetic construct
  source 1..75: mol_type = other DNA
tgctgtgggtgatgccatggatgctgtttattctacaacctgcctggcagcgcatcgactcgcggttaattctga

SEQ ID NO: 104053 - DNA, 75 bp, synthetic construct
  source 1..75: mol_type = other DNA
ggcgttatttgccgacccgcagttaccgcaggcattactggcgacgctggtttcgacgactatcgcggcggtcgg

SEQ ID NO: 104054 - DNA, 75 bp, synthetic construct
  source 1..75: mol_type = other DNA
tttcaaataagtctgcggagtttgaatgtaatctttcagacatcacaccatcaggtgcagtgatttttactttgg

SEQ ID NO: 104055 - DNA, 75 bp, synthetic construct
  source 1..75: mol_type = other DNA
ggagtttctgcaaacggacgtggtggtggtcgccattattctttacgccctgctcggcaaacttgctgacgtcag

SEQ ID NO: 104056 - DNA, 75 bp, synthetic construct
  source 1..75: mol_type = other DNA
aagatctaaaatgtaaaattgatgaaatggtaagcacaataaaaccacaatatgccgcatctgagacatatccgt

SEQ ID NO: 104057 - DNA, 75 bp, synthetic construct
  source 1..75: mol_type = other DNA
gttaaagtgggcgaaccggtaaaggacctgaatgctcaaatcaaatcaggagaaaaacaagtccagataggaatg

SEQ ID NO: 104058 - DNA, 75 bp, synthetic construct
  source 1..75: mol_type = other DNA
aatggcattcgcgatgtcttcctgcaggaagatgtgctgtgtgccctttcccgtatggcggtggaagagaccggc

SEQ ID NO: 104059 - DNA, 75 bp, synthetic construct
  source 1..75: mol_type = other DNA
taacgtcagccaccgggcctgacgggctggaaatgcgccgggaatatgatgaatccggccgtctgattcaggaaa

SEQ ID NO: 104060 - DNA, 75 bp, synthetic construct
  source 1..75: mol_type = other DNA
gctaacgacctgtacagtgacggtcatggctatatctatatgatgaaagagggacgcggtcgttctgacgcaggc

SEQ ID NO: 104061 - DNA, 75 bp, synthetic construct
  source 1..75: mol_type = other DNA
aacacgccacgacgcgtgtcgtgaaggcaatgacgctgacccgtcgcgatcatgaaaacaaactggttgcaaaag

SEQ ID NO: 104062 - DNA, 75 bp, synthetic construct
  source 1..75: mol_type = other DNA
ttcagcgtattgcgcttgatcgcatcatgatcggctttaacggaaccagctacgcggataagtccgaccgcaacg

SEQ ID NO: 104063 - DNA, 75 bp, synthetic construct
  source 1..75: mol_type = other DNA
tgcactccaccaacgtcgaaaagctgaccaaaatggcgcgcctgatccagaccaccatctttgttaaaaatggtc

SEQ ID NO: 104064 - DNA, 75 bp, synthetic construct
  source 1..75: mol_type = other DNA
caagggacaggatggtatctctccgcaaatttctttcggtggggctattgatatcgataaatttgacaacgatgg

SEQ ID NO: 104065 - DNA, 75 bp, synthetic construct
  source 1..75: mol_type = other DNA
ttgtgtcaggtcgcgccggtggtgcaaaccaccgtgtttgatgcgtatcttggcggtctggcaccatcgggacgg

SEQ ID NO: 104066 - DNA, 75 bp, synthetic construct
  source 1..75: mol_type = other DNA
ctcaacagccgcgtcacctttgcaggctaccgtttttctgaaaagaacttcatgaccatgagcgagtatctggat

SEQ ID NO: 104067 - DNA, 75 bp, synthetic construct
  source 1..75: mol_type = other DNA
atgacaccaaccgaattattagaaagcgttaaagcacgatttaatccactgcttgtgcgtgaagaagaaacgctg

SEQ ID NO: 104068 - DNA, 75 bp, synthetic construct
  source 1..75: mol_type = other DNA
gccagccataccggggttcaaataatggcaccagaggatcgccccaacgagttaggaatgttgacaaaccggacc

SEQ ID NO: 104069 - DNA, 75 bp, synthetic construct
  source 1..75: mol_type = other DNA
cgcctcactggaacgcgaacagattcgccacgagcatgccaaatggtctgactccacatttggctgcgttggccc

SEQ ID NO: 104070 - DNA, 75 bp, synthetic construct
  source 1..75: mol_type = other DNA
atggcaaaacactaccatcgcctgaaacctgtaaaagattatcaggagattgacgacgtactgttcaagttttcg

SEQ ID NO: 104071 - DNA, 75 bp, synthetic construct
  source 1..75: mol_type = other DNA
taacggagtaccgccttccatgccgctaacgcggcataaatctctgttccttagtgaaacaaaaaaacatgctga

SEQ ID NO: 104072 - DNA, 75 bp, synthetic construct
  source 1..75: mol_type = other DNA
atgagcattccgtggagcgacagcagcaccgtgacctacaacggttcctacggcagcggatcggacagcagccag

SEQ ID NO: 104073 - DNA, 75 bp, synthetic construct
  source 1..75: mol_type = other DNA
aggcgctggagttgctgttcgggcatctgcgtaaagatctcaccgccgcagacggtcagacgcgtaaaacgttcc

SEQ ID NO: 104074 - DNA, 75 bp, synthetic construct
  source 1..75: mol_type = other DNA
agcagacaccccatgggaagttcaaacaggcgatgcggtaagtggcctggatgctactatccacacaggagatag

SEQ ID NO: 104075 - DNA, 75 bp, synthetic construct
  source 1..75: mol_type = other DNA
tgagcggcgatatccagcgtaagggaagggcgttagacaggcaggaaatccgggcgctgattcaggccgctaaac

SEQ ID NO: 104076 - DNA, 75 bp, synthetic construct
  source 1..75: mol_type = other DNA
ccactaccttcactgctggagctgaagcgtctgtggtagctgatgcaaatacccgttcaaagtttaatctctatg

SEQ ID NO: 104077 - DNA, 75 bp, synthetic construct
  source 1..75: mol_type = other DNA
gacggcgaccggctgaccacgatacagaacgacagaacccgcatccagacggtttatcagccggggagcttcacg

SEQ ID NO: 104078 - DNA, 75 bp, synthetic construct
  source 1..75: mol_type = other DNA
ggcaactgctattaccgcttattatttttgttctgaccgcgttagtcacaaaatgggtaggttatgtcagacaag

SEQ ID NO: 104079 - DNA, 75 bp, synthetic construct
  source 1..75: mol_type = other DNA
acgcccaaggtgtatccattcggtttattgatgacggaatcagtaccgatggggagatgggtaaaatggttgtca

SEQ ID NO: 104080 - DNA, 75 bp, synthetic construct
  source 1..75: mol_type = other DNA
gcagtggaaataggtgctccggtaacagcgtttgatgtgaccgttaaacctgaccagaagaatgttttcattctt

SEQ ID NO: 104081 - DNA, 75 bp, synthetic construct
  source 1..75: mol_type = other DNA
aagtattcacccagtgaaaaacaagaataccaagagttgttaagcgttctaaagcctgtatctcccaaatctaat

SEQ ID NO: 104082 - DNA, 75 bp, synthetic construct
  source 1..75: mol_type = other DNA
gggtattattcctgttattaactatggtggtgccattaatacagctaattttactgataacaccacagagttaac

SEQ ID NO: 104083 - DNA, 75 bp, synthetic construct
  source 1..75: mol_type = other DNA
cggcgatatcacccgctaccgttatgataatccacacagtgacttaccctgcgcaacggacgatgccaccggcag

SEQ ID NO: 104084 - DNA, 75 bp, synthetic construct
  source 1..75: mol_type = other DNA
ggcaggcgctgccggaagatctacgcataagtccgcatcgttatctggcgacgaacagtccgcaggggccgtggt

SEQ ID NO: 104085 - DNA, 75 bp, synthetic construct
  source 1..75: mol_type = other DNA
taaagcggatcgcgacagccagaatcatcgtctgatttgccccggttcgacggcactcatgaagaatgtcaccct

SEQ ID NO: 104086 - DNA, 75 bp, synthetic construct
  source 1..75: mol_type = other DNA
aatcaacttcatccgattccttacctttaatacagcggattagctacggctcactggatgttgccggtaatctgc

SEQ ID NO: 104087 - DNA, 75 bp, synthetic construct
  source 1..75: mol_type = other DNA
tcacgtaatccggatcaatacgtttgcgatgagatcgacgtgatcccggcaacgggtaaatcacgtagtaagggg

SEQ ID NO: 104088 - DNA, 75 bp, synthetic construct
  source 1..75: mol_type = other DNA
accatgcggaagtctcggatataaaaaaacacccgcgacttgaggacgtcaataaggggtggctgcaggatatca

SEQ ID NO: 104089 - DNA, 75 bp, synthetic construct
  source 1..75: mol_type = other DNA
attgtggtttgaactcgtcacaaaaatagatatggatatatataaaaagaacaggtatgcgagttatgatcttag

SEQ ID NO: 104090 - DNA, 75 bp, synthetic construct
  source 1..75: mol_type = other DNA
gcacggaaaaagcggcaaaagcttacctgaactggctctacagcccacaggcgcaaacgatcattaccgattatt

SEQ ID NO: 104091 - DNA, 75 bp, synthetic construct
  source 1..75: mol_type = other DNA
caggctgccgtacaataattctctatatccaaactgcccccttattaggccaaatattttgcatttcattaaata

SEQ ID NO: 104092 - DNA, 75 bp, synthetic construct
  source 1..75: mol_type = other DNA
ggttctggtcttgaaaacgtaggaatcccccttaatcagcctgctcgttcaaccattacatggaaagcatccctg

SEQ ID NO: 104093 - DNA, 75 bp, synthetic construct
  source 1..75: mol_type = other DNA
atcgaaatgcagcatgaagagtttcagaaaatgacagagcgcgagcaagtgcctttattgaaatcaccagaataa

SEQ ID NO: 104094 - DNA, 75 bp, synthetic construct
  source 1..75: mol_type = other DNA
tatgactgaagcagttaatacagactctatagccgttgcggaaatgtttcataacgctgcatggggagtgcgaac

SEQ ID NO: 104095 - DNA, 75 bp, synthetic construct
  source 1..75: mol_type = other DNA
gagaaggcattcgacactatcgactttgccagcgacggattaagagagaatgataaagaaattgtttctatgatg

SEQ ID NO: 104096 - DNA, 75 bp, synthetic construct
  source 1..75: mol_type = other DNA
ttacaatgcaaaaggagcttggagatttgttggatatctcctcaggcactatcagcacttgggtaagacgagatt

SEQ ID NO: 104097 - DNA, 75 bp, synthetic construct
  source 1..75: mol_type = other DNA
acggtgttcgactcgccgcgcgatatccctcaccatcgtaaactgacggtgacttttgaggatggtcaggtattg

SEQ ID NO: 104098 - DNA, 75 bp, synthetic construct
  source 1..75: mol_type = other DNA
aatcgaaatgcagcatgaagagtttcagaaaatgacagagcgcgagcaagtgcctttattgaaatcgccagaata

SEQ ID NO: 104099 - DNA, 75 bp, synthetic construct
  source 1..75: mol_type = other DNA
cgagcactgaacacgctggtggtgacctcggtcgcctttcctctgcccgtgctacgggccgaagccgcgatggca

SEQ ID NO: 104100 - DNA, 75 bp, synthetic construct
  source 1..75: mol_type = other DNA
aaatggcacgctgtatacgggttcaacaaaatcatttcagccttgcctggctaacgcgcgttcaacggtttccag

SEQ ID NO: 104101 - DNA, 75 bp, synthetic construct
  source 1..75: mol_type = other DNA
tgattgctattatggtgttcagacacttcgtggaaaagataatttccatatcactgaaatgccaatgagtcagga

SEQ ID NO: 104102 - DNA, 75 bp, synthetic construct
  source 1..75: mol_type = other DNA
atgaaaaaaggcaccgttcttaattctgatatttcatcggtgatctcccgtctgggacataccgatacgctggtg

SEQ ID NO: 104103 - DNA, 75 bp, synthetic construct
  source 1..75: mol_type = other DNA
agaatatatgttttcccgaaatcctgatgctgatgatctggcattttatacaggctatgtgtttgatgcccgcag

SEQ ID NO: 104104 - DNA, 75 bp, synthetic construct
  source 1..75: mol_type = other DNA
ggggctgaggcacaggctgaaaaactggccgcttttcccggcatgacggcgaaggctgcccgcgacatactggcc

SEQ ID NO: 104105 - DNA, 75 bp, synthetic construct
  source 1..75: mol_type = other DNA
gaggcgctgaagaaaaacagcgtgtaattgaaatggaaaaacaacttaaagaattatccgaaacaattgagcggc

SEQ ID NO: 104106 - DNA, 75 bp, synthetic construct
  source 1..75: mol_type = other DNA
agatcgcaaggtcgacggcaacccttacgaaaagcttccgaaagatgtgcgtgctgatttccagacgcgtatcga

SEQ ID NO: 104107 - DNA, 75 bp, synthetic construct
  source 1..75: mol_type = other DNA
gtagtgattgcataaaacacttcaaaaaaatcatttctgtatgtgataagtacaaaatagacagaaaactctata

SEQ ID NO: 104108 - DNA, 75 bp, synthetic construct
  source 1..75: mol_type = other DNA
aggaaaagtctgccatctgctgacgtcgatgacggacgccatgcgcttccccggaggagaaatggcggatctgta

SEQ ID NO: 104109 - DNA, 75 bp, synthetic construct
  source 1..75: mol_type = other DNA
aaatatcagaaagaaaatgggattcctctaagcagaaatgcaattattaagatgcttatcagtcgcttatcaaaa

SEQ ID NO: 104110 - DNA, 75 bp, synthetic construct
  source 1..75: mol_type = other DNA
ccggtagttgccggagcggcaatggcgctctcgtcgattaccgtagtgagtaacgccaaccggttgctgcggttt

SEQ ID NO: 104111 - DNA, 75 bp, synthetic construct
  source 1..75: mol_type = other DNA
ggcaccgaagagatctatttcgccacgttccatctcggcgtggatggcggcattgaagttactgccagccataac

SEQ ID NO: 104112 - DNA, 75 bp, synthetic construct
  source 1..75: mol_type = other DNA
gctgctcaaccaactggagccagaggtgcgaaaagagttgctgcgaggcgctgaggaaaaacagcgaatgattga

SEQ ID NO: 104113 - DNA, 75 bp, synthetic construct
  source 1..75: mol_type = other DNA
gaggcgctgcggaaaaacagcgagtgatcgagatggaaaaacaactgaaggaattatccgcaacgattgagcggt

SEQ ID NO: 104114 - DNA, 75 bp, synthetic construct
  source 1..75: mol_type = other DNA
attaccgcaattattgtttttatccgctattaccgcgtttttattattcctgaaaatgatgtgcggtttggcgag

SEQ ID NO: 104115 - DNA, 75 bp, synthetic construct
  source 1..75: mol_type = other DNA
agtgtattagctatgaagactcctgttgtttgctatattatgaatcacggttctaacgatacatctgagcgtgtt

SEQ ID NO: 104116 - DNA, 75 bp, synthetic construct
  source 1..75: mol_type = other DNA
agatgctgccggtataattcttaccaccgggattctgtctctgcggatgcatttgcattgcctgaagggtaacga

SEQ ID NO: 104117 - DNA, 75 bp, synthetic construct
  source 1..75: mol_type = other DNA
ttgctccgctggtggtatcactgtcgattttcgcagtatttggtagccagggcgtcaaacagccggatgggactg

SEQ ID NO: 104118 - DNA, 75 bp, synthetic construct
  source 1..75: mol_type = other DNA
acgcgatccgttgcgtagtgatagcgtggcggcgctgcaacgcctgcataaagcgggatatcgtctggtgatgtt

SEQ ID NO: 104119 - DNA, 75 bp, synthetic construct
  source 1..75: mol_type = other DNA
aaatcccgtctctcaggagggcgaatatctggattttttcaaaggcgagatagggaaaacccatctggctcagga

SEQ ID NO: 104120 - DNA, 75 bp, synthetic construct
  source 1..75: mol_type = other DNA
cgtgaaagccttggcccgaccgccttaggtgaagggttggctgtgccgcatggtaaaactgctgcggtaaaagaa

SEQ ID NO: 104121 - DNA, 75 bp, synthetic construct
  source 1..75: mol_type = other DNA
cgaagaggcgctggaatggctgaaaacagcgggccgggtgagtgcgattaacgtcagagcggaacagttacatca

SEQ ID NO: 104122 - DNA, 75 bp, synthetic construct
  source 1..75: mol_type = other DNA
ccgttaccgcagccctgtctgacaccggagatagtcagccggatgggactgactgaggtgtcacaggaaaaaatc

SEQ ID NO: 104123 - DNA, 75 bp, synthetic construct
  source 1..75: mol_type = other DNA
caccactggcctggcaacgccgtttacggtctcgcttgcacaagatccgcagatcacgtcaaacctggacctgat

SEQ ID NO: 104124 - DNA, 75 bp, synthetic construct
  source 1..75: mol_type = other DNA
gatgctgatgatctggcattttatacaggttatgtgtttgatgcccgcagggagaagatcgcttaccttgatgga

SEQ ID NO: 104125 - DNA, 75 bp, synthetic construct
  source 1..75: mol_type = other DNA
tggaatgcggccgttttccggaatgactggctatgacggcattgtcgcctgccttcagcaggcaatggtggatcc

SEQ ID NO: 104126 - DNA, 75 bp, synthetic construct
  source 1..75: mol_type = other DNA
gcgcggcctattaatacgcccccttactacggttatgccctgcgaccggggatcacctttacctacctgggactg

SEQ ID NO: 104127 - DNA, 75 bp, synthetic construct
  source 1..75: mol_type = other DNA
atcgggctattacagatgagcgtcgtggctatctgcaggaagagcgggaagaagtcgaagttgagctaaaacgca

SEQ ID NO: 104128 - DNA, 75 bp, synthetic construct
  source 1..75: mol_type = other DNA
atgacattatcattttttataacggtaattccaggccatgacaagccgcagccgccaggctgcctactcgagcga

SEQ ID NO: 104129 - DNA, 75 bp, synthetic construct
  source 1..75: mol_type = other DNA
gatgatgttgccgtccagtcactgactgtccatgcaggtacatcaggacaagttcgcgcggaagtcaaacttgag

SEQ ID NO: 104130 - DNA, 75 bp, synthetic construct
  source 1..75: mol_type = other DNA
tcttcgtgagttaaactctctcgttaactatattgataataatcaagaacgagcagaagaaatctatgctacggt

SEQ ID NO: 104131 - DNA, 75 bp, synthetic construct
  source 1..75: mol_type = other DNA
attgacggtctggcgtgggtgctggaaaaactcggtgttctgcccggtgaagctgagcgggttaagcgaaaactg

SEQ ID NO: 104132 - DNA, 75 bp, synthetic construct
  source 1..75: mol_type = other DNA
ctggaagagcgtttgcagctgctggacgagcagttggccaccgtcacccgcctggccaaggacaacgagctgccc

SEQ ID NO: 104133 - DNA, 75 bp, synthetic construct
  source 1..75: mol_type = other DNA
cctgttggcggcgaaggtgttacgctcaagcgcgtgcaggcgaaaagccgttcagggatctctgtatcctccaat

SEQ ID NO: 104134 - DNA, 75 bp, synthetic construct
  source 1..75: mol_type = other DNA
gcggtggaacgccgcttcggcaacgagcttccggcgtctccagtagagtggctgacggataatggttcatgctac

SEQ ID NO: 104135 - DNA, 75 bp, synthetic construct
  source 1..75: mol_type = other DNA
ttctatccgaaacggatatacacccgatctaaccgaaacatagacaacattatggcgatgttcagttctgtgtat

SEQ ID NO: 104136 - DNA, 75 bp, synthetic construct
  source 1..75: mol_type = other DNA
tccgcctggggcttctcatcccccagtgtgtgaaatatacgaaaaaaagctcgcactttcgtacgagctcttctt

SEQ ID NO: 104137 - DNA, 75 bp, synthetic construct
  source 1..75: mol_type = other DNA
gtcaaccaatatgaactgcaatgaagtgatttgtaatcttgctgcagaaaaacttggtagcgttaaaggggatta

SEQ ID NO: 104138 - DNA, 75 bp, synthetic construct
  source 1..75: mol_type = other DNA
gctcatagaacaagaaatcatgatagaagaataccagggggaatacttatttctgtaaatgccccggggcatttt

SEQ ID NO: 104139 - DNA, 75 bp, synthetic construct
  source 1..75: mol_type = other DNA
ataacgccctggctgtggggctgggccgggacctgagtaagttcggcactgtttccgctgatgtaacccagtccg

SEQ ID NO: 104140 - DNA, 75 bp, synthetic construct
  source 1..75: mol_type = other DNA
atgctaattttggtcagtccaccaatgatacatatccgacagcattacatctggcattgctgctgcgaagcaatg

SEQ ID NO: 104141 - DNA, 75 bp, synthetic construct
  source 1..75: mol_type = other DNA
gtgtgaaagttgtaaacagcaaagaagatatccgtgcttttgcagaaaactggctgggtaaacgtctggtaacgt

SEQ ID NO: 104142 - DNA, 75 bp, synthetic construct
  source 1..75: mol_type = other DNA
tggtttcaccattggcagcagtaagacatcgcacgaccgccgcgaagccgggacaacgcagagtcagagtgccag

SEQ ID NO: 104143 - DNA, 75 bp, synthetic construct
  source 1..75: mol_type = other DNA
ggtggtcagttgaatatcggtggttttgttaccgctggtacttgtgtaactacaataaatggtggcggtaaagac

SEQ ID NO: 104144 - DNA, 75 bp, synthetic construct
  source 1..75: mol_type = other DNA
cttgttgatgaaaacggtggagtaaagttttttgttaacaggctgtctgccatgtcaccgcgtacctattaccgc

SEQ ID NO: 104145 - DNA, 75 bp, synthetic construct
  source 1..75: mol_type = other DNA
gttaaagttaatgtgcagggtagcgggcataaaattacaatagatgaaggtgtagttcttagaaatttaagaata

SEQ ID NO: 104146 - DNA, 75 bp, synthetic construct
  source 1..75: mol_type = other DNA
ccgcaggcgagggcgcagcagatggggccttgtgtcgttgtactctcggcaaaaaaccacaatgtcctggaacag

SEQ ID NO: 104147 - DNA, 75 bp, synthetic construct
  source 1..75: mol_type = other DNA
ctcctttatggttccaatcttcggtggtcgtcgctggacggcgttcagcaccggtattctgattattccttgcgt

SEQ ID NO: 104148 - DNA, 75 bp, synthetic construct
  source 1..75: mol_type = other DNA
tgtgaagtctgatgctaatgccaccgtaacctctggtcatgtgaaaactaacagcacctataccttaacttacaa

SEQ ID NO: 104149 - DNA, 75 bp, synthetic construct
  source 1..75: mol_type = other DNA
cattgcgccgtctttatccacttccactcagaccagagtcagtgccagtcctgcaaggtggaattccgtcacggt

SEQ ID NO: 104150 - DNA, 75 bp, synthetic construct
  source 1..75: mol_type = other DNA
ttcgccacgttccatctcggcgtggatggcggcattgaagttaccgccagccataacccgatggattataacggc

SEQ ID NO: 104151 - DNA, 75 bp, synthetic construct
  source 1..75: mol_type = other DNA
gccagtagcgacgatttcagcgtactacaaagtaaattgtggggggatatcgagcggttccgcccacgcaatgaa

SEQ ID NO: 104152 - DNA, 75 bp, synthetic construct
  source 1..75: mol_type = other DNA
aatgtggaatcacgcggtgatgtgccgctgatggaagcgcgaacgcgaactctgctgacgttgctgaacgagtaa

SEQ ID NO: 104153 - DNA, 75 bp, synthetic construct
  source 1..75: mol_type = other DNA
cgttccatctcggcgtggatggcggcatcgaagttactgccagccataacccgatggattacaacggcatgaagc

SEQ ID NO: 104154 - DNA, 75 bp, synthetic construct
  source 1..75: mol_type = other DNA
ctacttctgtcaacagggcatgatccactccaccgatggccactgccgtccttttgacagtcaggcttctggcac

SEQ ID NO: 104155 - DNA, 75 bp, synthetic construct
  source 1..75: mol_type = other DNA
accggactgcgcgatgtccagcgtctggcagaagccaacgactttcctcccgttgatgcaaccaaacgcggtcgc

SEQ ID NO: 104156 - DNA, 75 bp, synthetic construct
  source 1..75: mol_type = other DNA
atgacagtagccgaacgattcgatcatatcatcctggtagtttcgctctgctcgcttggagctatgatgataatt

SEQ ID NO: 104157 - DNA, 75 bp, synthetic construct
  source 1..75: mol_type = other DNA
ttggcagatacccgagaactgggggagggcgttcacagtatcaactgggttaggctgccgccggaaataagagaa

SEQ ID NO: 104158 - DNA, 75 bp, synthetic construct
  source 1..75: mol_type = other DNA
cccgatagcggcagtcaggcttgtggtgatatcggccccgggcgaatgctcgatccgttaaccattgtggagatg

SEQ ID NO: 104159 - DNA, 75 bp, synthetic construct
  source 1..75: mol_type = other DNA
ggcacaggttgaatgcgggccaaccgtttgatgatgtgccgacgaatcccctcttgcagcccgatgtctgctctt

SEQ ID NO: 104160 - DNA, 75 bp, synthetic construct
  source 1..75: mol_type = other DNA
aatatctgaaaaatcagatcgattatgcacgacagtggatttctgaaggggagaaacgtactctttccattgccc

SEQ ID NO: 104161 - DNA, 75 bp, synthetic construct
  source 1..75: mol_type = other DNA
gcatggaaatcgccattattggtatggcggtccgtttcccgcagtcccggacgttacacgaattctggcataaca

SEQ ID NO: 104162 - DNA, 75 bp, synthetic construct
  source 1..75: mol_type = other DNA
ctaaatttagagcgagtggtggaacctaaccagaaggccgtcttaagtaaaaagttctctgaatttggcattagt

SEQ ID NO: 104163 - DNA, 75 bp, synthetic construct
  source 1..75: mol_type = other DNA
tcaccgttctgccgcaccggacgtttatcacctggctaatatggcggcggaatcccgcgttggcggtttgctcgg

SEQ ID NO: 104164 - DNA, 75 bp, synthetic construct
  source 1..75: mol_type = other DNA
ttggcgaccggaagatcctgcgttctggcaacaacgcggtcaacgtattgccagccgcaacctgtggatttccgt

SEQ ID NO: 104165 - DNA, 75 bp, synthetic construct
  source 1..75: mol_type = other DNA
ctgttctctgccgcattctgacacgacgctatgacaaagtaacaatgaaaaccgcaagtggactgaaaaaaggac

SEQ ID NO: 104166 - DNA, 75 bp, synthetic construct
  source 1..75: mol_type = other DNA
atgattgattattccgcagccggtttcatcctgctgcagggagcgcatttgtatgcgccggaagatcggggagtt

SEQ ID NO: 104167 - DNA, 75 bp, synthetic construct
  source 1..75: mol_type = other DNA
cgggattttgatggtaccggtgctggcagcctacaccgcctattcactggctgataaaccggcgttagcgccagg

SEQ ID NO: 104168 - DNA, 75 bp, synthetic construct
  source 1..75: mol_type = other DNA
cttcgacgacgaagggaatttaacccatatcggcgttgcaggttttgaaacgttgctggaaaccgtgcaggtgct

SEQ ID NO: 104169 - DNA, 75 bp, synthetic construct
  source 1..75: mol_type = other DNA
tgacgctattgctcactacacgggtaaaattgaatgtaggattattggttttcctgggatcgataagttactctg

SEQ ID NO: 104170 - DNA, 75 bp, synthetic construct
  source 1..75: mol_type = other DNA
gctgtttaccgtcagtgcgggcggtcagccagcctattcacaggattttgcgccactgccgccggatattcgtca

SEQ ID NO: 104171 - DNA, 75 bp, synthetic construct
  source 1..75: mol_type = other DNA
ttaccgcgtttttattattcctgagaatgatgtgcggtttggcgagcgtaaatttagggaaggtgcgaacaagtt

SEQ ID NO: 104172 - DNA, 75 bp, synthetic construct
  source 1..75: mol_type = other DNA
accctgagaatgccgggaggggggcttcggtataaagcaattgcagtaaagcaaaacgaaagcatacctaaacgc

SEQ ID NO: 104173 - DNA, 75 bp, synthetic construct
  source 1..75: mol_type = other DNA
atggagttcttggtcataaatatagtatctgacaatgtcaatggcatgcataaatgtcgttattataatgacact

SEQ ID NO: 104174 - DNA, 75 bp, synthetic construct
  source 1..75: mol_type = other DNA
ggtggcgaaatgagcgcccaccattacttccgtgattttgcttactgcgacagcggcatgatcccgtggctgctg

SEQ ID NO: 104175 - DNA, 75 bp, synthetic construct
  source 1..75: mol_type = other DNA
tcagcgatgccctgcgcccgctcaccagtagcgtagccggtttccttaacctgaccgggaaaggcgaaattctgc

SEQ ID NO: 104176 - DNA, 75 bp, synthetic construct
  source 1..75: mol_type = other DNA
tgttgccgtgctgccagcgatgaaccaacagatgtatcgtgctgctgccacccagcataatttagaggtgcttgc

SEQ ID NO: 104177 - DNA, 75 bp, synthetic construct
  source 1..75: mol_type = other DNA
ggctgcaaaagtaattgaaaacacgcagcgagatgtcaatattgcattgattaatgagttatctattatatttaa

SEQ ID NO: 104178 - DNA, 75 bp, synthetic construct
  source 1..75: mol_type = other DNA
ggtagctcagaaagcaaatctctttatattgaaaaaatgaaaatcagtgttataaaatatcaggaaataaattct

SEQ ID NO: 104179 - DNA, 75 bp, synthetic construct
  source 1..75: mol_type = other DNA
gtttcggtcatgtcagagtttttccccaaaagcaaagccaaagtcaccagtatttatatgatgatgggtggattg

SEQ ID NO: 104180 - DNA, 75 bp, synthetic construct
  source 1..75: mol_type = other DNA
cgaccggatggcggcgtttccggcaagcggtgagatcaacagcaaactggcgcaacccgttgaggcaattaaccg

SEQ ID NO: 104181 - DNA, 75 bp, synthetic construct
  source 1..75: mol_type = other DNA
gcttatttaatttccggtattggcctgggtcgcctgatcagtattttattcttcggtgtaatctccgacaaattt

SEQ ID NO: 104182 - DNA, 75 bp, synthetic construct
  source 1..75: mol_type = other DNA
gaaactgccaatcgaattacggggctctgcaacaattatataagcttgcgagtcaacgatactcctactcagacg

SEQ ID NO: 104183 - DNA, 75 bp, synthetic construct
  source 1..75: mol_type = other DNA
gggagcacaaagcgggaagaatgctgttgagaataactcactcagtgatggctggaacaatatcctgccatcagg

SEQ ID NO: 104184 - DNA, 75 bp, synthetic construct
  source 1..75: mol_type = other DNA
ggcgcggatatgggcattgcctttgatggcgattttgaccgctgtttcctgtttgacgaaaaagggcagtttatt

SEQ ID NO: 104185 - DNA, 75 bp, synthetic construct
  source 1..75: mol_type = other DNA
ctaattccgatcgaactgcagagatggtaatgcattcctgcggtattgtgactctcctgaagccacatctgggat

SEQ ID NO: 104186 - DNA, 75 bp, synthetic construct
  source 1..75: mol_type = other DNA
gccattgccacaggcctgcctgactccagagatagttgagcggatgggactgactgaggagtcacaggaaaaagt

SEQ ID NO: 104187 - DNA, 75 bp, synthetic construct
  source 1..75: mol_type = other DNA
accattattcgcacggcgcaaaccggcaaaatcggtgacggtaaaatcttcgtcttcgacgtggcacgggtcatt

SEQ ID NO: 104188 - DNA, 75 bp, synthetic construct
  source 1..75: mol_type = other DNA
ggtaaaatcttcgtctttgacgtggcacgggtcattcgtatccgtaccggtgaagaagacgacgcggcaatttaa

SEQ ID NO: 104189 - DNA, 75 bp, synthetic construct
  source 1..75: mol_type = other DNA
gtagaccggatgctgaaagagtttcgctctcagcgttaccacatggcgatcgttattgacgaattcggtggggtt

SEQ ID NO: 104190 - DNA, 75 bp, synthetic construct
  source 1..75: mol_type = other DNA
ggcaaccatcagttcaacactaacctctccggaggcagtgtagataacactctctcttatagtgtaaacactgcc

SEQ ID NO: 104191 - DNA, 75 bp, synthetic construct
  source 1..75: mol_type = other DNA
cgacatgaaagccctcggtgaagacagctaccgcgatctcagcggcattggcattcccgtcgctaaaaagtgcaa

SEQ ID NO: 104192 - DNA, 75 bp, synthetic construct
  source 1..75: mol_type = other DNA
agcagccaatatcgcgcagttgactgttaatcgttaccagaagctgctgggtactcagtacatcagtaagcaaga

SEQ ID NO: 104193 - DNA, 75 bp, synthetic construct
  source 1..75: mol_type = other DNA
gacaccgactcatgaagatatcattgataacaatcgatccatcaactggctgtataacgtggctgccggtgatta

SEQ ID NO: 104194 - DNA, 75 bp, synthetic construct
  source 1..75: mol_type = other DNA
atatgacttttatcttcaattcagccattttgaaggaatggcaatgtctgttgttgatgcgatgcaggttggggt

SEQ ID NO: 104195 - DNA, 75 bp, synthetic construct
  source 1..75: mol_type = other DNA
gatatattgcctgcataccgggcatcaccggtctgttgctgttggccacattgtctacgactgtacaggcggcag

SEQ ID NO: 104196 - DNA, 75 bp, synthetic construct
  source 1..75: mol_type = other DNA
cagggcgagagataccaattggtatctggatgatgccctaattaccgcaacgggtatcggctctgaaatagaaaa

SEQ ID NO: 104197 - DNA, 75 bp, synthetic construct
  source 1..75: mol_type = other DNA
ggcgcactggcacgttccgcagggggcgcattgtctgaccgtctgggcggtacacgcgtaactctggtgaacttt

SEQ ID NO: 104198 - DNA, 75 bp, synthetic construct
  source 1..75: mol_type = other DNA
cctggcgcttatcgaaatcaacccgctggttattaccaaacagggcgatcttgtctgcctcgacggcaaactggg

SEQ ID NO: 104199 - DNA, 75 bp, synthetic construct
  source 1..75: mol_type = other DNA
ttaaccctaaaacaggcaagccgccagtggatagcaacggaaataccattggtccgtttgataccagcagaacgc

SEQ ID NO: 104200 - DNA, 75 bp, synthetic construct
  source 1..75: mol_type = other DNA
aagctgtgctggttggagtggatgttacaggtgaaaataacacaatcaatttagagggcggtataaatatcactg

SEQ ID NO: 104201 - DNA, 75 bp, synthetic construct
  source 1..75: mol_type = other DNA
tgataccttatacagccatcaaaattgcgaagtgactggctgggcgcaaacctcggtgatgtcgcatcagtgcga

SEQ ID NO: 104202 - DNA, 75 bp, synthetic construct
  source 1..75: mol_type = other DNA
cattctgttttatgcagtgttatttttttgcgccccattcatagctgaattttataagcgtaacgaattaattga

SEQ ID NO: 104203 - DNA, 75 bp, synthetic construct
  source 1..75: mol_type = other DNA
cctcactccgtgatcagatcatggcactggatgaggcaaaaggggctgaggcgcaggctgaacagctggctgcct

SEQ ID NO: 104204 - DNA, 75 bp, synthetic construct
  source 1..75: mol_type = other DNA
agaggttcgccaggatatgcagcagcggattgatgcggcgcaccggatgtttgccgaaaaagtggcgatgtatac

SEQ ID NO: 104205 - DNA, 75 bp, synthetic construct
  source 1..75: mol_type = other DNA
gttggattgtcccacctgccgctgcgccgtgggatttcggcttaattgtgctacgaaacccgccttccggcatta

SEQ ID NO: 104206 - DNA, 75 bp, synthetic construct
  source 1..75: mol_type = other DNA
atattttttatataataacgcgataaagacatttcaggataataatacttatgtagatgactatataaagaaaat

SEQ ID NO: 104207 - DNA, 75 bp, synthetic construct
  source 1..75: mol_type = other DNA
tccgttgcacgtaacggacgtaaaaggtaaattacgcgcgggtgcctttcggctgacggctggaaggaatacctg

SEQ ID NO: 104208 - DNA, 75 bp, synthetic construct
  source 1..75: mol_type = other DNA
tcagttgcctgacgacggctaacaatcctgccagcagcattacgctggaagtggtggacccggcgcagtggaacg

SEQ ID NO: 104209 - DNA, 75 bp, synthetic construct
  source 1..75: mol_type = other DNA
tcagcaacggaggaagctcactcggttatggagaaaacggcgtcgggaatgtcagcatcaccacgggggggatgt

SEQ ID NO: 104210 - DNA, 75 bp, synthetic construct
  source 1..75: mol_type = other DNA
attttgtccgtggcggtagcacagcaacctgttgcatccgcgcagagtgaagccgatcgcattatggcgtgcgaa

SEQ ID NO: 104211 - DNA, 75 bp, synthetic construct
  source 1..75: mol_type = other DNA
ttctatcccaaacaactttatactcgttctaatcgcaacatagacaacattatgacaatgtttagttctgtgtat

SEQ ID NO: 104212 - DNA, 75 bp, synthetic construct
  source 1..75: mol_type = other DNA
gcggagcttaagctgattgcggagaaggtgaagaaggggtatgtggagcaagcgaaggataatgaggtgtactgg

SEQ ID NO: 104213 - DNA, 75 bp, synthetic construct
  source 1..75: mol_type = other DNA
gaccacacaaggtagcgtgtaacgttattttgtgtgaaaatctcggtaatgactccaacttactgatagtgtttt

SEQ ID NO: 104214 - DNA, 75 bp, synthetic construct
  source 1..75: mol_type = other DNA
atatagagcctaaatttattgctagaatgaaaattaaatatgggaaagaagtaatacatgcgcttttttctgagg

SEQ ID NO: 104215 - DNA, 75 bp, synthetic construct
  source 1..75: mol_type = other DNA
acaccaattaacatcaatctgtatgatcatgctcgcggaactgtaacggggaacaccagatataatgatgggtat

SEQ ID NO: 104216 - DNA, 75 bp, synthetic construct
  source 1..75: mol_type = other DNA
gctgccgtttttgaaggtcagtccggcattgaggccgggctggcggatgaattaatcaatgcgtcggatgccatc

SEQ ID NO: 104217 - DNA, 75 bp, synthetic construct
  source 1..75: mol_type = other DNA
acgcgcacaactgcaaaatcgtggcgtgatggttgtcggcgtccattttatgtcgctggaattgggcggccgcgt

SEQ ID NO: 104218 - DNA, 75 bp, synthetic construct
  source 1..75: mol_type = other DNA
ggcgaaccattcaccggctgcggtacagggtggcgtgccacagacgtcagcagacggtgatgcggacgtgaaaat

SEQ ID NO: 104219 - DNA, 75 bp, synthetic construct
  source 1..75: mol_type = other DNA
gcgttcaaaatcatcctctctgacgacaaagtgaaagctgttctggttaacatcttcggcggtatcgttcgttgc

SEQ ID NO: 104220 - DNA, 75 bp, synthetic construct
  source 1..75: mol_type = other DNA
cggcgaaagctgccgttgaaactgcgcgtatcaatctggcttacaccaaagtcacctctccaattagcggccgca

SEQ ID NO: 104221 - DNA, 75 bp, synthetic construct
  source 1..75: mol_type = other DNA
gctacggcggttcactcaaccagtatggctcctacagcaccgcgcaaatttcctgtgccatgccctacacctacg

SEQ ID NO: 104222 - DNA, 75 bp, synthetic construct
  source 1..75: mol_type = other DNA
gggtctggaaggtaaactggttcaacagttcaccaaaattttcatgggcctggcgaccattttcctggaacggga

SEQ ID NO: 104223 - DNA, 75 bp, synthetic construct
  source 1..75: mol_type = other DNA
tagatggaaaattagccttaaaatgtgtatttatcgagccagtgcattaggactattgacccaggaacaggcaag

SEQ ID NO: 104224 - DNA, 75 bp, synthetic construct
  source 1..75: mol_type = other DNA
ggacgtgaacagcttgccacgatgctggcaggacaacagggcatgagcgttgaacaggcccgggcgattctggcc

SEQ ID NO: 104225 - DNA, 75 bp, synthetic construct
  source 1..75: mol_type = other DNA
ttgaagcgttgccggcagaggttcgccaggacatgcaacagcgcattgatgcggcgcgccggatgtttgctgaaa

SEQ ID NO: 104226 - DNA, 75 bp, synthetic construct
  source 1..75: mol_type = other DNA
caatgtcggtaattttggtagcggtatcgtaaatgtcagtaatggtgccacccttaattcaacgggctatggatt

SEQ ID NO: 104227 - DNA, 75 bp, synthetic construct
  source 1..75: mol_type = other DNA
aacgtgggagagcaatccattggtggactggccatgaatggcggtacgctcattttcgatacggatattcctgct

SEQ ID NO: 104228 - DNA, 75 bp, synthetic construct
  source 1..75: mol_type = other DNA
gatgctgaagccttcagcatggacaaagtgttacgtcaggcggttgtcgttcctgaaagtaagcgcgtagaccgg

SEQ ID NO: 104229 - DNA, 75 bp, synthetic construct
  source 1..75: mol_type = other DNA
cggggctgcagccgtcagtgacattgcttcaggtgacaccgtcatccccccgtattgaggcccggggagagcttg

SEQ ID NO: 104230 - DNA, 75 bp, synthetic construct
  source 1..75: mol_type = other DNA
gggttatatcaatccagtcagtggaatgagtggttatgacggaatcgcaaaacgtctgcagcaggcgatttctga

SEQ ID NO: 104231 - DNA, 75 bp, synthetic construct
  source 1..75: mol_type = other DNA
atgcacattgtagctcataaaggaatgaccaaattggtaaagaatgtatatttcgatgaatcaggattcactggt

SEQ ID NO: 104232 - DNA, 75 bp, synthetic construct
  source 1..75: mol_type = other DNA
ttgccgcgcttataatggcggctttactctctactatctccccacgggtggaagtgccgcaatcactctcaatgt

SEQ ID NO: 104233 - DNA, 75 bp, synthetic construct
  source 1..75: mol_type = other DNA
tggtcagtgaaagccggacagggcaggatttttatattcttggcgggcatacagcatcactgacaaccgcccgtc

SEQ ID NO: 104234 - DNA, 75 bp, synthetic construct
  source 1..75: mol_type = other DNA
ccaacatcttgttgtccgtgatgtcagtttgcagggtacgacactggctctccccggcacatctgcagaaggcct

SEQ ID NO: 104235 - DNA, 75 bp, synthetic construct
  source 1..75: mol_type = other DNA
gaaaggtcgtgaacaactggcggcaacgctggcggcgatgccggatatgacggtggaaaaagcccgccctgtcct

SEQ ID NO: 104236 - DNA, 75 bp, synthetic construct
  source 1..75: mol_type = other DNA
ctccatcagatagtggttgtcgaacgtaagctactcacacaggaagaatgggagaagacattcaatctggataat

SEQ ID NO: 104237 - DNA, 75 bp, synthetic construct
  source 1..75: mol_type = other DNA
ttgtgggcttacttgcgcttttcgcaggtaatgccgctgcaaccgatggtgaaatagtttttgatggcggtaatg

SEQ ID NO: 104238 - DNA, 75 bp, synthetic construct
  source 1..75: mol_type = other DNA
tgcaattgtgcagcgtcgcctgcaactccagcagcaacaaagcgataaaacggcctttacggtgattcgtcaggg

SEQ ID NO: 104239 - DNA, 75 bp, synthetic construct
  source 1..75: mol_type = other DNA
gcccctgagatgctggctgaaacggatgagtacatggccggaggtaaacgatcggcccgtgtttaccgcgtagtg

SEQ ID NO: 104240 - DNA, 75 bp, synthetic construct
  source 1..75: mol_type = other DNA
tctccctgtttaccgaccggcgcgcgctggattctgacacgctgccggatggttcagatgatcgccgtggatggt

SEQ ID NO: 104241 - DNA, 75 bp, synthetic construct
  source 1..75: mol_type = other DNA
aacaaaatacagacaaaccagatgaccaacctcggctaaagtcaaaagaagatctggcaaatgcgaaaaccagac

SEQ ID NO: 104242 - DNA, 75 bp, synthetic construct
  source 1..75: mol_type = other DNA
tccaccgaaggcggcgtggaaatcgaaaaagtggcggaagaaaccccgcacctgatccacaaagttgcgcttgat

SEQ ID NO: 104243 - DNA, 75 bp, synthetic construct
  source 1..75: mol_type = other DNA
tatcatgacgatattcttgtattgaattcatctgtttctccgactagtgctgagtttatccaagttaaaacaaaa

SEQ ID NO: 104244 - DNA, 75 bp, synthetic construct
  source 1..75: mol_type = other DNA
actatgccgcaattaactgcaatggaagccgctgcgcaggagaaccagcgagtgatggggatcctgacgtgtcag

SEQ ID NO: 104245 - DNA, 75 bp, synthetic construct
  source 1..75: mol_type = other DNA
cacatccggaagggatttctacaacatggcattcagaatctaaattggatcgttttggatgcccagtgcacaccg

SEQ ID NO: 104246 - DNA, 75 bp, synthetic construct
  source 1..75: mol_type = other DNA
cgtacgactcgtagcgtgacgttgacagcggctggcgagcatctactttcccaggccagagactggctgagctgg

SEQ ID NO: 104247 - DNA, 75 bp, synthetic construct
  source 1..75: mol_type = other DNA
tatctggcttcataaaggtgaaatgatttcatctggtaaagccaaggctattacagaaaagtatctgcagtatac

SEQ ID NO: 104248 - DNA, 75 bp, synthetic construct
  source 1..75: mol_type = other DNA
atacatatccgacagcattacatctggcattgctgctgcgaagcaatgtattgcttgaagctgttgaacacctcg

SEQ ID NO: 104249 - DNA, 75 bp, synthetic construct
  source 1..75: mol_type = other DNA
aagcgaaagtagcaaactttgttgcctttgttggtgcgatgtacagtttctatgcgctgtactcatccggggaag

SEQ ID NO: 104250 - DNA, 75 bp, synthetic construct
  source 1..75: mol_type = other DNA
cttcggtgaatgacgtcgcgaaagcactggatgcgggttacaccaacaacgagctgtataccagcctgaacgtcg

SEQ ID NO: 104251 - DNA, 75 bp, synthetic construct
  source 1..75: mol_type = other DNA
accccgggggccttcgcgctctcctgaaccgccgcctgtgtacggtggtgatattcatgttcaccttcacaacgt

SEQ ID NO: 104252 - DNA, 75 bp, synthetic construct
  source 1..75: mol_type = other DNA
tcgaagatgagattttttattggcaatgttgtgttgttcccacacctgaaaatcttgatcctaaaaatgtaaaca

SEQ ID NO: 104253 - DNA, 75 bp, synthetic construct
  source 1..75: mol_type = other DNA
cctgtgcgaatgctgaagtggtagaaaacccggaacgtaacgtgccaattgctgttcttggcggtacgttgggtg

SEQ ID NO: 104254 - DNA, 75 bp, synthetic construct
  source 1..75: mol_type = other DNA
ggctcaatggcactggcatgggcattcgcaaaatgcggtatgttcagccgtaaatcaggtggtatgggcggttat

SEQ ID NO: 104255 - DNA, 75 bp, synthetic construct
  source 1..75: mol_type = other DNA
ccgcgccgaaacagcgcgagcgtcagcgcatcgtgattgaaggcgacggcgaagaacagatcgccgcatttgctg

SEQ ID NO: 104256 - DNA, 75 bp, synthetic construct
  source 1..75: mol_type = other DNA
acttcctgcacagccagaaacacttggaagtacaaacaccttattattaaacaaccttacctgtaagttggttaa

SEQ ID NO: 104257 - DNA, 75 bp, synthetic construct
  source 1..75: mol_type = other DNA
cttttgaccgcactaccttcggtttctggcgcattattgcgtgtgccatactcctttatggttccaatcttcggt

SEQ ID NO: 104258 - DNA, 75 bp, synthetic construct
  source 1..75: mol_type = other DNA
gtgataatggcgttacaggcggttatagccagttctttggcctgaaacatcagatgtccttcgacaacggcatga

SEQ ID NO: 104259 - DNA, 75 bp, synthetic construct
  source 1..75: mol_type = other DNA
gtgcttgatgggactattaatgttaaagctgatactgatgatgcaagaaatggcgaactgcgctttagtaatgaa

SEQ ID NO: 104260 - DNA, 75 bp, synthetic construct
  source 1..75: mol_type = other DNA
ttcctgttcttcaatgaggctggcgcgaccctgacaaatagcggtaatgcggtaacgggcggggaaaacgcgatt

SEQ ID NO: 104261 - DNA, 75 bp, synthetic construct
  source 1..75: mol_type = other DNA
ctcaggctctggcagaacgaagggcgtatatcacggcgtcttcaggtaacgacctcttctgacactggcgttgaa

SEQ ID NO: 104262 - DNA, 75 bp, synthetic construct
  source 1..75: mol_type = other DNA
tatgcgctgtactcgtctggggaagaggccatgctgtatggctccatcgtgaccttcctcggctggacactgtat

SEQ ID NO: 104263 - DNA, 75 bp, synthetic construct
  source 1..75: mol_type = other DNA
aatatggaactggcaaattcaaccgcgccgtttggtctggccttcgcgcaaatgttcacaccggaagtcggtaaa

SEQ ID NO: 104264 - DNA, 75 bp, synthetic construct
  source 1..75: mol_type = other DNA
gaagtgctgttaaaaatcaaagctgtgggtatttgtggtacggatattcacgcttttgccggcagacagcttttt

SEQ ID NO: 104265 - DNA, 75 bp, synthetic construct
  source 1..75: mol_type = other DNA
tcaataacagtgtcacattcgacgaagacaaaggcacgctgcaaattcgcaatgccacctttacctacagcaaaa

SEQ ID NO: 104266 - DNA, 75 bp, synthetic construct
  source 1..75: mol_type = other DNA
aactttgcccgctggcagatggacggctggcgaaacaatgcagaaaccgcgcggggaatgagtcgctcgccggag

SEQ ID NO: 104267 - DNA, 75 bp, synthetic construct
  source 1..75: mol_type = other DNA
gtacgttaggtgcggcggtgatttatatcgtctccaccaacgtgattgccgggattgtgccaaatatggagctgg

SEQ ID NO: 104268 - DNA, 75 bp, synthetic construct
  source 1..75: mol_type = other DNA
cggggctgcagccgtcagtgacattgcttcaggtgacaccgtcatccccgcgtattgcggcccggggagaacttg

SEQ ID NO: 104269 - DNA, 75 bp, synthetic construct
  source 1..75: mol_type = other DNA
gagcctttgttatcggtttctcagcggctggcggcattttacagctcggcgtttcggtcatgtcagagtttttcc

SEQ ID NO: 104270 - DNA, 75 bp, synthetic construct
  source 1..75: mol_type = other DNA
gatttcttattctcgtcgtgacgggttctatatagccgcattggagtacgacgacgatgagccaattggcggtgt

SEQ ID NO: 104271 - DNA, 75 bp, synthetic construct
  source 1..75: mol_type = other DNA
gctctggatatggctggtgcattgaccacggtaaaacgccagcatcgccccgctctgaatctttcacgcctgcct

SEQ ID NO: 104272 - DNA, 75 bp, synthetic construct
  source 1..75: mol_type = other DNA
tatgtacatcagtggagacgtgttgagtaatgactgggcccgtcatcagttagccaccgcagccgaattggttcg

SEQ ID NO: 104273 - DNA, 75 bp, synthetic construct
  source 1..75: mol_type = other DNA
ttctatatagccgcattggagtacgacgacgatgagccaattggcggtgtaacccactggatgcctctaccagaa

SEQ ID NO: 104274 - DNA, 75 bp, synthetic construct
  source 1..75: mol_type = other DNA
atgatgtctgtcatttctgatggcgtccttattggtctggcgatctacttcgtttatccattagtccgtaaagca

SEQ ID NO: 104275 - DNA, 75 bp, synthetic construct
  source 1..75: mol_type = other DNA
atggggttacaacaacgcccatctgcatctcaatgagtatgaaaaaagcggacttatccatcatcgcgacgagta

SEQ ID NO: 104276 - DNA, 75 bp, synthetic construct
  source 1..75: mol_type = other DNA
cgctcctgtagatactcaagaggggcaaagtcaggcgcgtgagctactcgcaacacatccttgtaaggggatgat

SEQ ID NO: 104277 - DNA, 75 bp, synthetic construct
  source 1..75: mol_type = other DNA
aaaacgcggccccggacgtggacggggtgtcacgaccgtcgtgactgccggtgagcaactggcggagagtgccgg

SEQ ID NO: 104278 - DNA, 75 bp, synthetic construct
  source 1..75: mol_type = other DNA
gaactccggtagtttgaccgataacagcaaagaattgctgtctcgttttgaaagttttgacattaacgtgctgcg

SEQ ID NO: 104279 - DNA, 75 bp, synthetic construct
  source 1..75: mol_type = other DNA
ggatgacacggaccagcttgatatagcccggttgttgaaactaattgagcgaattggcaaagggcggttcgccca

SEQ ID NO: 104280 - DNA, 75 bp, synthetic construct
  source 1..75: mol_type = other DNA
cagccccagataaccgccaggatacaactgccgggcggacgaactgctgatgtaaaagaagggcaacacattccc

SEQ ID NO: 104281 - DNA, 75 bp, synthetic construct
  source 1..75: mol_type = other DNA
cagcggggataccggactgcgcgacgtccagcgtctggcagaagctaacgactttccccccgtcgatgaaaccaa

SEQ ID NO: 104282 - DNA, 75 bp, synthetic construct
  source 1..75: mol_type = other DNA
atggtctatacagcggtcatgcgccccccccccctgaccgcgcgcggtattgagcaagcgcaaaatctgcatacg

SEQ ID NO: 104283 - DNA, 75 bp, synthetic construct
  source 1..75: mol_type = other DNA
cgatgagcacggcgcggtaactatcggcaacattgaacgctacatttcagatcaggcgttggcgaaaggttggcg

SEQ ID NO: 104284 - DNA, 75 bp, synthetic construct
  source 1..75: mol_type = other DNA
gcaacagaagaaactcagcgcattttatcagaaggacaaaaattcttcgacaacctctctcctgaagaattggca

SEQ ID NO: 104285 - DNA, 75 bp, synthetic construct
  source 1..75: mol_type = other DNA
gaagatgatctgcagcgctatatcgatgtcactcgcggcgaaatattcttttcacgtggggtgatcttggtggaa

SEQ ID NO: 104286 - DNA, 75 bp, synthetic construct
  source 1..75: mol_type = other DNA
ttaccgtgtcggcggaacaggtttgcttcaatgctttttccggcgaaggtaagggatatgtagtattcagctggc

SEQ ID NO: 104287 - DNA, 75 bp, synthetic construct
  source 1..75: mol_type = other DNA
cttatggtggaggaacagcttgtcatcagccgtaaccgtcgtcgtcgctacagctcatattgcggagaaatcgga

SEQ ID NO: 104288 - DNA, 75 bp, synthetic construct
  source 1..75: mol_type = other DNA
acactataccattcactgaatattcagctgaattactgagcacttattcagttaaggagtcaatttcatgcttcc

SEQ ID NO: 104289 - DNA, 75 bp, synthetic construct
  source 1..75: mol_type = other DNA
cagcggtgataccggactgcgcgaggtccagcgtctggcagaagccaacgactttccccccgtcgatgaaaccaa

SEQ ID NO: 104290 - DNA, 75 bp, synthetic construct
  source 1..75: mol_type = other DNA
atgcgactgtggttaattcgtcatggcgaaacacaagcgaatgtcgatggtctgtacagcggtcatgcgcccaca

SEQ ID NO: 104291 - DNA, 75 bp, synthetic construct
  source 1..75: mol_type = other DNA
attttgacaagagcgaatttaacccttcggattctgataggaaaatatggactgggataagaaagcttatttcat

SEQ ID NO: 104292 - DNA, 75 bp, synthetic construct
  source 1..75: mol_type = other DNA
caaaaagaattaagctttgactgcaataatatttcagatggcgtcaaaatttatctcagtattgatgcaacacca

SEQ ID NO: 104293 - DNA, 75 bp, synthetic construct
  source 1..75: mol_type = other DNA
tatttcaggtgatggccgaacaggcaaaaggtgcccagaaaaacgccatgaattcctggacgggaatgacgtcca

SEQ ID NO: 104294 - DNA, 75 bp, synthetic construct
  source 1..75: mol_type = other DNA
gggcgaaaactgaagatgtccgcaggtgggcaatacagaatgcgaaggaaaccacctggggactggcgggcgtca

SEQ ID NO: 104295 - DNA, 75 bp, synthetic construct
  source 1..75: mol_type = other DNA
ggcaccgaagagatttatttcgccacgttccatctcggcgtggatggcggcatggaagttactgccagccataag

SEQ ID NO: 104296 - DNA, 75 bp, synthetic construct
  source 1..75: mol_type = other DNA
ggcaccgaagagatttatttcgccacgttccatctcggcgtggatggcggcattgaagttaccgccagccataac

SEQ ID NO: 104297 - DNA, 75 bp, synthetic construct
  source 1..75: mol_type = other DNA
atggcgaaacacaagcgaatgtcgatggtctgtacagcggtcatgcaagaagatgccgaaaactatagcgcgtgg

SEQ ID NO: 104298 - DNA, 75 bp, synthetic construct
  source 1..75: mol_type = other DNA
cggtgagtatagcaatacgataaacgacccattaaatgataatcaattcattcattgggttaatattatcgaaaa

SEQ ID NO: 104299 - DNA, 75 bp, synthetic construct
  source 1..75: mol_type = other DNA
gatggttgcgatggatcttggtcatggcgatggtcgagggcgctacatccagcaagtgtatgggaggcaatcatg

SEQ ID NO: 104300 - DNA, 75 bp, synthetic construct
  source 1..75: mol_type = other DNA
aggcttaccgaccgatcgagaaaccgtctactggattaacgttcaggaaattccccctgcatcaaaacaagagaa

SEQ ID NO: 104301 - DNA, 75 bp, synthetic construct
  source 1..75: mol_type = other DNA
cagttaactgaccagaatttgctgcatgaaaactatgctttaaaagctgaaatagaactcgtaaaggcattgctg

SEQ ID NO: 104302 - DNA, 75 bp, synthetic construct
  source 1..75: mol_type = other DNA
ggcaccgaagagatttatttcgccacgttccatctcggcgtggatggcggcatggaagttacggccagccataat

SEQ ID NO: 104303 - DNA, 75 bp, synthetic construct
  source 1..75: mol_type = other DNA
tattatctcataatgtcatcactctgtttattttatactgctccatttactttactgttttaaccatgacatatg

SEQ ID NO: 104304 - DNA, 75 bp, synthetic construct
  source 1..75: mol_type = other DNA
gggctatggtgatgcgctggatcgcattggtcaggggcacagaccgccgcgaaatacctgctgtacatgtatctc

SEQ ID NO: 104305 - DNA, 75 bp, synthetic construct
  source 1..75: mol_type = other DNA
aacataccgtgtgacgctttccgtgacccgggaggaggcccgacatctggaggcgttcctggcagagcacggtgg

SEQ ID NO: 104306 - DNA, 75 bp, synthetic construct
  source 1..75: mol_type = other DNA
gtgagcctcgcttgcacattaaagaacccgacaactctccgctaactccggatggttgggttatagtgccgaaga

SEQ ID NO: 104307 - DNA, 75 bp, synthetic construct
  source 1..75: mol_type = other DNA
agaaaacggtcaatggtactatattgacggtacacgtccgcagtttggccgcaacgatccctgcccttgtggttc

SEQ ID NO: 104308 - DNA, 75 bp, synthetic construct
  source 1..75: mol_type = other DNA
gggcggggccgggatttggcaacctggcgataccgcgcgtgggtcaggaggtcattgtggacttcctcaacggcg

SEQ ID NO: 104309 - DNA, 75 bp, synthetic construct
  source 1..75: mol_type = other DNA
tgatgacactggaagaacagcttgttatcattgtagataaatacatatcaaaacgatatcagccacatgataaaa

SEQ ID NO: 104310 - DNA, 75 bp, synthetic construct
  source 1..75: mol_type = other DNA
agctaatctgatttttctggctctgaaaagcctcgaacttgatcgtcttgttgatgacggagagcgagaccatac

SEQ ID NO: 104311 - DNA, 75 bp, synthetic construct
  source 1..75: mol_type = other DNA
gcagaagaacatggataccgaggtgctcaacgaccgtaccaccaccgtaaaacacgatcaccgcgaaaccgtaaa

SEQ ID NO: 104312 - DNA, 75 bp, synthetic construct
  source 1..75: mol_type = other DNA
ttgctgcttgacagtggcattcgtggcattggcgatgccagtctggggacggctaatctgatttttctggccctg

SEQ ID NO: 104313 - DNA, 75 bp, synthetic construct
  source 1..75: mol_type = other DNA
atgacacggcctgttctgcagccatgctgctcccgacggctggttacccagacatcccgtatcggctccattggc

SEQ ID NO: 104314 - DNA, 75 bp, synthetic construct
  source 1..75: mol_type = other DNA
cggttttggccacctggcgataccgcgtgtgggtcaggaggtgattgtggacttcctcaacggcgacccggacca

SEQ ID NO: 104315 - DNA, 75 bp, synthetic construct
  source 1..75: mol_type = other DNA
tctggcggaattcccggtggcgtgggtcgataaaaacgtgcaggccaacggtacggaaaaagcagcaaaagccta

SEQ ID NO: 104316 - DNA, 75 bp, synthetic construct
  source 1..75: mol_type = other DNA
atgaagagatgcaaatatattttaagaggtttgttgctgaaatttaaaaatataagttctatgcatttattattt

SEQ ID NO: 104317 - DNA, 75 bp, synthetic construct
  source 1..75: mol_type = other DNA
agcaaagaattgctgtctcgttttgagaattttgacattaacgtcctgcgccgtgaacgcggcgttaagctggaa

SEQ ID NO: 104318 - DNA, 75 bp, synthetic construct
  source 1..75: mol_type = other DNA
taaagaactgaaaaagtttatgcacgattacgacaaaacatccccggaaatgagaaaataccttcagagcatcaa

SEQ ID NO: 104319 - DNA, 75 bp, synthetic construct
  source 1..75: mol_type = other DNA
tatcgccattgccgtttcagccacgaaaatggaaggacaggctaatcaaataatgtctggcaccatgaaatattg

SEQ ID NO: 104320 - DNA, 75 bp, synthetic construct
  source 1..75: mol_type = other DNA
agattttaatgatacacaaaggattgcttggtctagtaattatcagggattggttaaacattacaaacctatttt

SEQ ID NO: 104321 - DNA, 75 bp, synthetic construct
  source 1..75: mol_type = other DNA
atgctttttgatgtttttcagcaataccccgcggcgatgcccatactggcaaccgtcggaggattgatcatcggc

SEQ ID NO: 104322 - DNA, 75 bp, synthetic construct
  source 1..75: mol_type = other DNA
gttaaaagatgacttgccattgctggatcgtattatttcccatatcgatcagtttttatccgccaccagaaaaac

SEQ ID NO: 104323 - DNA, 75 bp, synthetic construct
  source 1..75: mol_type = other DNA
cagtgactaaatggttcgacgttgacaagtatgatgtgctgaacgagctgactgttgaacagatatacatagaag

SEQ ID NO: 104324 - DNA, 75 bp, synthetic construct
  source 1..75: mol_type = other DNA
ttgcgctgtgaagatattatgcctggccgatggaccactcaacttgtcaataagcacttaggttacagatacaca

SEQ ID NO: 104325 - DNA, 75 bp, synthetic construct
  source 1..75: mol_type = other DNA
atatctgcaccggctgtggtccgggagcgatggaagcgccgatgaaaggtgctgcggtcggacacgcgcagcagc

SEQ ID NO: 104326 - DNA, 75 bp, synthetic construct
  source 1..75: mol_type = other DNA
cacctgtcactgccgaagcagtaaaactctcttttgagcggctactaaaaatcggccaggggccagcagaagcat

SEQ ID NO: 104327 - DNA, 75 bp, synthetic construct
  source 1..75: mol_type = other DNA
aaatccgtccttcttccgtggtgacaaaagactacacctttaaacgtcccggctgggcagggcgttttgaccagg

SEQ ID NO: 104328 - DNA, 75 bp, synthetic construct
  source 1..75: mol_type = other DNA
tattgccggacgcgaacaggttgaaaaatacatgtcaggtgcatggtggaataacgaccctgtcattgctgcccg

SEQ ID NO: 104329 - DNA, 75 bp, synthetic construct
  source 1..75: mol_type = other DNA
gattacgacaaaacatccccggaaatgagaaaataccttcagagcatcaacgagtctatgttccttatgaaaaac

SEQ ID NO: 104330 - DNA, 75 bp, synthetic construct
  source 1..75: mol_type = other DNA
gccgcgagtatgagctcggctggtcaaaagtttatgaatgggcgtaccctggaaacggaaacagaaggcttttac

SEQ ID NO: 104331 - DNA, 75 bp, synthetic construct
  source 1..75: mol_type = other DNA
ccggcagcggtgcagggcggcatgtcacagacgtcagcagacggtgatgcggacgtaaaaatgctcatggccatg

SEQ ID NO: 104332 - DNA, 75 bp, synthetic construct
  source 1..75: mol_type = other DNA
attttgcagggcttaaaagccgatgttgtaacttataaccaggtgaccgacgtgcagatcctgcacgacaaaggc

SEQ ID NO: 104333 - DNA, 75 bp, synthetic construct
  source 1..75: mol_type = other DNA
gcatctttattgcattatatatttctcttttcttttcaatattagtttcaatctattggtatttaactgtaacta

SEQ ID NO: 104334 - DNA, 75 bp, synthetic construct
  source 1..75: mol_type = other DNA
atccagaaattggtggcttgctcactttcggcattccttctttcaaactggataaatccctgctggcacgccgtc

SEQ ID NO: 104335 - DNA, 75 bp, synthetic construct
  source 1..75: mol_type = other DNA
taggtcatattcaggtgatgtgcccgggctttgctgcggattgtctggagacgctggaagagattgccgagcaaa

SEQ ID NO: 104336 - DNA, 75 bp, synthetic construct
  source 1..75: mol_type = other DNA
ggtggattccgccagaaagtgtcagtctgtagggttgaaaatgatagccggagatcagaaacaacacgttgagca

SEQ ID NO: 104337 - DNA, 75 bp, synthetic construct
  source 1..75: mol_type = other DNA
ccttgagccttatggttttacatctgctgcacagaacggtgctgagggcgttgctttattcccggcaggcgaccg

SEQ ID NO: 104338 - DNA, 75 bp, synthetic construct
  source 1..75: mol_type = other DNA
acgctatctatggcggtgaaatgagtgcacaccactatttccgcgattttgcttattgcgatagcgggatgattc

SEQ ID NO: 104339 - DNA, 75 bp, synthetic construct
  source 1..75: mol_type = other DNA
ccttctatcctgaaagaggccgtaacgctggcttctccagcggcacgtattgtattgatgggcttctccagtgaa

SEQ ID NO: 104340 - DNA, 75 bp, synthetic construct
  source 1..75: mol_type = other DNA
gtgtgctgggtgtatcagaagaaacgatgtgggaccgtgaaacccgtcagcgtctgccgcgctatgtctggataa

SEQ ID NO: 104341 - DNA, 75 bp, synthetic construct
  source 1..75: mol_type = other DNA
gcgttagaacaactgtggttcttctgggtggtgccaattgtcggcggtattatcggtggtctgatttaccggact

SEQ ID NO: 104342 - DNA, 75 bp, synthetic construct
  source 1..75: mol_type = other DNA
ttccattgccccaaagattggctgtacgccggagactctgcgtgtctgggttcgccagcatgagcgggataccgg

SEQ ID NO: 104343 - DNA, 75 bp, synthetic construct
  source 1..75: mol_type = other DNA
tatattggctctgctaatttaactgggcgcgcgtggtattcgaatattgaagctggtgtattttatgatgaaaat

SEQ ID NO: 104344 - DNA, 75 bp, synthetic construct
  source 1..75: mol_type = other DNA
acctgaaaaaatccattaacgataaatataacagaagggtaaagtcactttctcggcatctcgaggattttattt

SEQ ID NO: 104345 - DNA, 75 bp, synthetic construct
  source 1..75: mol_type = other DNA
gatgccgaaaactatagcgcgtggtgcaatgactggcagcatgcaatccccacgaacggtgaaggatttcaggca

SEQ ID NO: 104346 - DNA, 75 bp, synthetic construct
  source 1..75: mol_type = other DNA
atgaatacactggctgcactggaaaatacgtttcgtgatatgagaaagcatggctgccaaacagtcatggtcacg

SEQ ID NO: 104347 - DNA, 75 bp, synthetic construct
  source 1..75: mol_type = other DNA
gttgtgtgctggggcggtcactcaatcaacgaaaacgagtatttatatgcccgtcgcgtcggaaatcagctgggt

SEQ ID NO: 104348 - DNA, 75 bp, synthetic construct
  source 1..75: mol_type = other DNA
ccccgttgggaggccgcggcgctggagtcgtttctggctgagcacgggggctggaaagcctttctgtggacgccg

SEQ ID NO: 104349 - DNA, 75 bp, synthetic construct
  source 1..75: mol_type = other DNA
agaccatcaataaaaccaattctgcgcgttttccggcgccgccttttcaacagcagcagcagccctttcccgggc

SEQ ID NO: 104350 - DNA, 75 bp, synthetic construct
  source 1..75: mol_type = other DNA
atttcttcttcttctttgctgtcttggttttatttttactcttgtattctacactccaactgagattaaaaatat

SEQ ID NO: 104351 - DNA, 75 bp, synthetic construct
  source 1..75: mol_type = other DNA
tgctggcaaacctgggtacgcccgatgcccccacacctgaagcggtaaaacgctatctgaaacaatttttaagcg

SEQ ID NO: 104352 - DNA, 75 bp, synthetic construct
  source 1..75: mol_type = other DNA
atgacgaagaagaccttagctgaaagatttgaagtgcttgaacaagagtacaattctgtcatgtcgacaaaatat

SEQ ID NO: 104353 - DNA, 75 bp, synthetic construct
  source 1..75: mol_type = other DNA
gcaggtagaaagcttccgatacaataatcggggagtacggaagattgaagaaatcctggacgcggagaacaaagc

SEQ ID NO: 104354 - DNA, 75 bp, synthetic construct
  source 1..75: mol_type = other DNA
aaagctttcgatacaataatcggggagtacggaagattgaagaaatcctggaggcggagaacaaagcagagttcg

SEQ ID NO: 104355 - DNA, 75 bp, synthetic construct
  source 1..75: mol_type = other DNA
gtcgccgaactggtgtgtctgaaaggaaaaacgctgggcgaactggtgcgcgaccggatggcagcgtttccggca

SEQ ID NO: 104356 - DNA, 75 bp, synthetic construct
  source 1..75: mol_type = other DNA
cgcgccatagggattggggcactgcgaccgggagctgcattgttagggtacggattgtccacggccgccgtgctg

SEQ ID NO: 104357 - DNA, 75 bp, synthetic construct
  source 1..75: mol_type = other DNA
ggacagcggcaacaccaacgccgtgcgcgggctggcgaatctttatcgccagcagtcgccggaaaaagccgaagc

SEQ ID NO: 104358 - DNA, 75 bp, synthetic construct
  source 1..75: mol_type = other DNA
ataacaccgacagctatgcggtgctggggctgggtgatgtggcaatggcgcgaaaagattaccccgccgccgaac

SEQ ID NO: 104359 - DNA, 75 bp, synthetic construct
  source 1..75: mol_type = other DNA
atatgtacggggcaggctcgagcattgatctgcatggggggcaactttgcactggcaatgccagatcgggaagcg

SEQ ID NO: 104360 - DNA, 75 bp, synthetic construct
  source 1..75: mol_type = other DNA
aacggtgattatcgacgcggtgagcgggcgcaagcaggtgttagcacatgcctcgctgatgccggatgtggcgat

SEQ ID NO: 104361 - DNA, 75 bp, synthetic construct
  source 1..75: mol_type = other DNA
aagaatacttcgaaggccttgccgaaggcgaagaaactctcagcttcagtgagtttaaacaggcgctttccagct

SEQ ID NO: 104362 - DNA, 75 bp, synthetic construct
  source 1..75: mol_type = other DNA
cttcccctaggaataacgaaccggatacgctaaaagaattagttgttacagctccactctccacattgcttaatg

SEQ ID NO: 104363 - DNA, 75 bp, synthetic construct
  source 1..75: mol_type = other DNA
cgattacaccgggacttacgttttcactaatgactttgcggccttgatgtctgacacgccagatgcgccagaaag

SEQ ID NO: 104364 - DNA, 75 bp, synthetic construct
  source 1..75: mol_type = other DNA
tattgatatttcccggttctcgcaagtgggatatatcatgcccgggcagtatcaaatggaattaatagtgaatgg

SEQ ID NO: 104365 - DNA, 75 bp, synthetic construct
  source 1..75: mol_type = other DNA
cagcggaatgatcccctggttgctggtagctgaattgctgtgtctgaaaggactgtcactgggagaactgatcca

SEQ ID NO: 104366 - DNA, 75 bp, synthetic construct
  source 1..75: mol_type = other DNA
cttttgttattgaaaaacaatattgtcccattaatctgtttagggttgcttttatattgctggattgcctacaaa

SEQ ID NO: 104367 - DNA, 75 bp, synthetic construct
  source 1..75: mol_type = other DNA
aaaggcatcgccatgacgctctggccgtgtccggtgggcgaaccgtgcattactgacgtgtgtgcagccgtggcg

SEQ ID NO: 104368 - DNA, 75 bp, synthetic construct
  source 1..75: mol_type = other DNA
cctccgaccggtcagtgcagctgctccccgctgaatttgagcaaaagcagcaataccgagccgtttggctgcaag

SEQ ID NO: 104369 - DNA, 75 bp, synthetic construct
  source 1..75: mol_type = other DNA
atgggccgcaatgtgcgccagggtcagtggcgtaaaaagcggtggaatttacgctggtcatgacaatcaatttta

SEQ ID NO: 104370 - DNA, 75 bp, synthetic construct
  source 1..75: mol_type = other DNA
ccgacgataaaccctggactacggccgcaccaggcggtcatagctggtacatttaccccatttacgactggaaag

SEQ ID NO: 104371 - DNA, 75 bp, synthetic construct
  source 1..75: mol_type = other DNA
tgggcatcggaaaatcctcaagccagaacatttagactggcaagaatatgcattattgctgctcaatagcatgcc

SEQ ID NO: 104372 - DNA, 75 bp, synthetic construct
  source 1..75: mol_type = other DNA
cgttgtggattggaaaaaagcagggtggcaccactgaccactgcgttcattcgattgataggaagatggattgaa

SEQ ID NO: 104373 - DNA, 75 bp, synthetic construct
  source 1..75: mol_type = other DNA
acgtcctgtttatcgactgggaagctcagttttcttgtacaattgactatgttcaatcgctacgtgagcagtatg

SEQ ID NO: 104374 - DNA, 75 bp, synthetic construct
  source 1..75: mol_type = other DNA
tgggcgagttttgaccaacagttggggggttggtgttgtgacaaatgtgagcagttattatcgtaacactacctc

SEQ ID NO: 104375 - DNA, 75 bp, synthetic construct
  source 1..75: mol_type = other DNA
tacaacagcatcggtattccggtcgccgccggtattttgtggccgtttactggaacactgcttaacccggtagtt

SEQ ID NO: 104376 - DNA, 75 bp, synthetic construct
  source 1..75: mol_type = other DNA
atgtccatttataaaattccgctacctctcaatatcctggaagcagcacaagaccgtatcacctggacacttaat

SEQ ID NO: 104377 - DNA, 75 bp, synthetic construct
  source 1..75: mol_type = other DNA
ccccgcgaggaggccacggcactggaatcgtttctggctgagcacgggggctggaaggcctttctgtggacgccg

SEQ ID NO: 104378 - DNA, 75 bp, synthetic construct
  source 1..75: mol_type = other DNA
cgatttgccttgcgacgcctgcgcctgttgccgtgctgccagcaatgaaccagcagatgtatcgggctgcagcta

SEQ ID NO: 104379 - DNA, 75 bp, synthetic construct
  source 1..75: mol_type = other DNA
ttgacgaaaaagggcagtttatcgagggctactacattgtcggcctgctggcagaagcgttcctcgaaaaaaatc

SEQ ID NO: 104380 - DNA, 75 bp, synthetic construct
  source 1..75: mol_type = other DNA
ccagacagtggcagtcaggcttgtggtgatatcggccctgggcgaatgctcgatccgttaaccattgtggatatg

SEQ ID NO: 104381 - DNA, 75 bp, synthetic construct
  source 1..75: mol_type = other DNA
agcgcgcgcggcaccagccgggtgatctgcttttcaccggatcacagtaaaacgctgccagagctcagcgttgca

SEQ ID NO: 104382 - DNA, 75 bp, synthetic construct
  source 1..75: mol_type = other DNA
ccttttttattgtttcaaccatcatcactctgcgcaatgtgcatgaagtctttttggatttgcccctatatttcc

SEQ ID NO: 104383 - DNA, 75 bp, synthetic construct
  source 1..75: mol_type = other DNA
ctggagtcaatgattaagcacgaagcgacccgtccgcttgaatgtaagcgtcgtctcagcaccgtctggcagatc

SEQ ID NO: 104384 - DNA, 75 bp, synthetic construct
  source 1..75: mol_type = other DNA
tgcgggtggcaacgtggtgcgttttgcgcctgcgctcaatgtcagcgaagaagaggtgacgaccggactggatcg

SEQ ID NO: 104385 - DNA, 75 bp, synthetic construct
  source 1..75: mol_type = other DNA
agcgcaaagagctccttggccaattattactcgacgagatcgtgacccgttatgatgaaaaaatcgacgttaaga

SEQ ID NO: 104386 - DNA, 75 bp, synthetic construct
  source 1..75: mol_type = other DNA
tcaataggtaatcgctggcagattggccatgatgatgaaatcttcgcgttctcgctctctaatagtattacgaat

SEQ ID NO: 104387 - DNA, 75 bp, synthetic construct
  source 1..75: mol_type = other DNA
gttgccaaagggccacaccaacaatttattaatggtatagcgattgctcttgaagaggatgttgttgcctgtggc

SEQ ID NO: 104388 - DNA, 75 bp, synthetic construct
  source 1..75: mol_type = other DNA
tccggaatacatcgtgtggatatatttcataccgggcaccacttttacagtacagaaccacgtccggtatttaca

SEQ ID NO: 104389 - DNA, 75 bp, synthetic construct
  source 1..75: mol_type = other DNA
tttgaaaacaaaggcgcggcgatgggctgctctaacccgcatccgcacggacagatttgggcaaatagcttcctg

SEQ ID NO: 104390 - DNA, 75 bp, synthetic construct
  source 1..75: mol_type = other DNA
gtgcgacaaatcaacaccgggcttaataccagagaaattattctggaaatgattgacgaagcagatgcccccccg

SEQ ID NO: 104391 - DNA, 75 bp, synthetic construct
  source 1..75: mol_type = other DNA
agcaaactgacacaacctgttgaggcgattaaccgcgtggaacagcactttagccgcgaggcgctggcggtggat

SEQ ID NO: 104392 - DNA, 75 bp, synthetic construct
  source 1..75: mol_type = other DNA
gtgtcagatgatgggcgcttttggcggagccatggtggtctacctgctttaccataatctgtttattgattatga

SEQ ID NO: 104393 - DNA, 75 bp, synthetic construct
  source 1..75: mol_type = other DNA
atggacaaaaaaaaatttaattcagtcgtgacacttgaagaacagcttgttgtcatcatagataaatacatatca

SEQ ID NO: 104394 - DNA, 75 bp, synthetic construct
  source 1..75: mol_type = other DNA
aggggctcgcccgatcagcggtgataccggactgcgcgacgtccagcgtctggctgaagccaacgactttcctcc

SEQ ID NO: 104395 - DNA, 75 bp, synthetic construct
  source 1..75: mol_type = other DNA
aaaggcatcgccatgacgctctggccatgtccggtgggcgaaccgtgcatcaccgacgtgtgtgcagccgtggcg

SEQ ID NO: 104396 - DNA, 75 bp, synthetic construct
  source 1..75: mol_type = other DNA
cgatcttcgaataattgaaatccctgacgtcatcggtgatttttttgatgaccaaacctggattcgattattcaa

SEQ ID NO: 104397 - DNA, 75 bp, synthetic construct
  source 1..75: mol_type = other DNA
tttctggcccggtttcactaccgacgccaccgtttgttaaacgtgttgatgtggtaaccgcactggagatggaag

SEQ ID NO: 104398 - DNA, 75 bp, synthetic construct
  source 1..75: mol_type = other DNA
tttgctgagcagcggacctggcatcgcaggcgaatcgcttttctatgtgattgcatcagcgttgctgtcgactac

SEQ ID NO: 104399 - DNA, 75 bp, synthetic construct
  source 1..75: mol_type = other DNA
gataacccaaactctggtgcaatattgggggcgctgggccaggcttattcacagaaaggcgatcgcgcgaatgcg

SEQ ID NO: 104400 - DNA, 75 bp, synthetic construct
  source 1..75: mol_type = other DNA
gtgagttcttatctgggtggaaaataaatccagatgcggataatggtcgaatttatttagagacaggtgaactat

SEQ ID NO: 104401 - DNA, 75 bp, synthetic construct
  source 1..75: mol_type = other DNA
atgcatgaattgcaaacggcgctctttcaggcgttcgataccctgaatctgcaacgggtaaaaacatttagcgtc

SEQ ID NO: 104402 - DNA, 75 bp, synthetic construct
  source 1..75: mol_type = other DNA
gcggcgattggtcgcctgaaaggtgaggaactggcgcaatataatttgtggctggattatctggacacactggaa

SEQ ID NO: 104403 - DNA, 75 bp, synthetic construct
  source 1..75: mol_type = other DNA
tggcacgcgtgcaaatcgcggctaaagctactgggcctaccacagacaccgaaacgaatcggcttccttctctgg

SEQ ID NO: 104404 - DNA, 75 bp, synthetic construct
  source 1..75: mol_type = other DNA
cgaactaaaaaatccgacgatcgtgacgctattaatgcggtaagtgagctgatagcggaagttgggatcaacaag

SEQ ID NO: 104405 - DNA, 75 bp, synthetic construct
  source 1..75: mol_type = other DNA
cggtgggctacggtcacgaccttgccgcgcgcgagagcatgttgctggcttcatgtatggcgggaatggcgtttt

SEQ ID NO: 104406 - DNA, 75 bp, synthetic construct
  source 1..75: mol_type = other DNA
taagttggcagcatcaccccgttctggtttatggtgccggtccaatcggcctgacgatcgttcaggtattaaaag

SEQ ID NO: 104407 - DNA, 75 bp, synthetic construct
  source 1..75: mol_type = other DNA
gcaattgagatcgatcgtacagatggtataagtatgacttttaatggatggcgctttaacttacgttcttctaat

SEQ ID NO: 104408 - DNA, 75 bp, synthetic construct
  source 1..75: mol_type = other DNA
tccacaaacccaacaaggggacattggtgcaaaagatgtcccatcctggcgtcgaatatgcaaagttttactcaa

SEQ ID NO: 104409 - DNA, 75 bp, synthetic construct
  source 1..75: mol_type = other DNA
atgcataccggcagataaaggtgacctgtgccgggtggtctgcgcgggtcgggatgttgcgcgttgagttcagcg

SEQ ID NO: 104410 - DNA, 75 bp, synthetic construct
  source 1..75: mol_type = other DNA
tgcccgtgaagtaatggcaaaagggccatttgacagcctgaaaaagagcctgaaaggcttcctggattatgccga

SEQ ID NO: 104411 - DNA, 75 bp, synthetic construct
  source 1..75: mol_type = other DNA
catcgaagttaccgccagccataatccgatggattataacggcatgaagctggttcgcgagggggctcgcccgat

SEQ ID NO: 104412 - DNA, 75 bp, synthetic construct
  source 1..75: mol_type = other DNA
ttgaatctagaggagatgtggccgcaactaaaaaatatacatgcttcatattagacttattaaattataaaaagt

SEQ ID NO: 104413 - DNA, 75 bp, synthetic construct
  source 1..75: mol_type = other DNA
atgcggtcatcaaacacggcgcggatatgggcattgcctttgatggcgattttgaccgctgtttcctgtttgacg

SEQ ID NO: 104414 - DNA, 75 bp, synthetic construct
  source 1..75: mol_type = other DNA
atccggaaatcggcggcctgctcacctttggcattccttcttttaaactggataaatctctgctggcgcgtcgtc

SEQ ID NO: 104415 - DNA, 75 bp, synthetic construct
  source 1..75: mol_type = other DNA
tactgggcggcaagtgccattaaagaagcgaaaaaatactgcacgcctaatgtctttgacgccaaagtgactgtt

SEQ ID NO: 104416 - DNA, 75 bp, synthetic construct
  source 1..75: mol_type = other DNA
atttttccaacagtgtgaaagcgtgcgattgggaggtgccagaaaacggtcgtttgttggcgcttaaaacggata

SEQ ID NO: 104417 - DNA, 75 bp, synthetic construct
  source 1..75: mol_type = other DNA
atatattatattgttacctgtatcagtgtcattttcacattacttagcggattatttctttggtaataagaatta

SEQ ID NO: 104418 - DNA, 75 bp, synthetic construct
  source 1..75: mol_type = other DNA
atggcactggtatcaatcagcgaagccgcaagactgacaggaaaaagtcgcacaacagtgcagtcatacattaag

SEQ ID NO: 104419 - DNA, 75 bp, synthetic construct
  source 1..75: mol_type = other DNA
ctctggacgaggaggatcgtgaggagattcaaaccctggtcgatgaggctcagcgggaactggctgggcatgatg

SEQ ID NO: 104420 - DNA, 75 bp, synthetic construct
  source 1..75: mol_type = other DNA
gtgacgagctggaacaatataatttatggctggattatctggacgcactggagctggtcgatacttccggtgcgc

SEQ ID NO: 104421 - DNA, 75 bp, synthetic construct
  source 1..75: mol_type = other DNA
aatgggtgagtaaggggatccgcgtgaactcaatcagcccaggatataccgcgacaccaatgaatacacgacctg

SEQ ID NO: 104422 - DNA, 75 bp, synthetic construct
  source 1..75: mol_type = other DNA
atgctgctgccaacggtgatggagtttaaccggatggtatgccgcgaacgttttagccaggtaggcagggcgctg

SEQ ID NO: 104423 - DNA, 75 bp, synthetic construct
  source 1..75: mol_type = other DNA
gatcaaacagacgctggatgtcccgtcgatccacttcgattccgcctgggtgccgtacacccattttcatccgat

SEQ ID NO: 104424 - DNA, 75 bp, synthetic construct
  source 1..75: mol_type = other DNA
aaggcgcatcggttgatcgtctcgacgtggtggtactgagcgcgctggaaattgacacccagttcaacgttaacg

SEQ ID NO: 104425 - DNA, 75 bp, synthetic construct
  source 1..75: mol_type = other DNA
cgcgggagtcgaataacgccgatgccattcttggcctgacggaagtggatattgccgcaggcgacaaagccgcgg

SEQ ID NO: 104426 - DNA, 75 bp, synthetic construct
  source 1..75: mol_type = other DNA
ttttttatgccattctgatttatatcacactgttctataatctggaactaacaacagcaggtgtttttttaatta

SEQ ID NO: 104427 - DNA, 75 bp, synthetic construct
  source 1..75: mol_type = other DNA
cgctttagtcagattggtcgggcactgcgaactaaaaaatccgacgatcgtgacgctattaacgcggtaagtgag

SEQ ID NO: 104428 - DNA, 75 bp, synthetic construct
  source 1..75: mol_type = other DNA
aaggaacttgaagagggggactggtcgggatggtctgtcagtgtgcatagtccctggggaaacgagaaagtttct

SEQ ID NO: 104429 - DNA, 75 bp, synthetic construct
  source 1..75: mol_type = other DNA
cagctgctgaaaggcgctggatgacgccgtcaggtaaggctaatttcattaccagtaaagggctgttagaagatc

SEQ ID NO: 104430 - DNA, 75 bp, synthetic construct
  source 1..75: mol_type = other DNA
ccagtcagccggattactcatcatggcgggtctggtagacagtcagacgggaaaaccggtcgatgatgcggctgc

SEQ ID NO: 104431 - DNA, 75 bp, synthetic construct
  source 1..75: mol_type = other DNA
cagatcgggaagcgagcgctgtaccgttaacgcaattagatctggcggtacacgtagccactaagcttaaccgct

SEQ ID NO: 104432 - DNA, 75 bp, synthetic construct
  source 1..75: mol_type = other DNA
atatgccgctgccgaacgcaccattatctgttacggaatggggatcactcagcacgaacatggtacccagaacgt

SEQ ID NO: 104433 - DNA, 75 bp, synthetic construct
  source 1..75: mol_type = other DNA
tgcgcacctcacgtcaggagcatcaaccgtggcatgccagtactggggcaccagaaatgccggcgatgagtaaag

SEQ ID NO: 104434 - DNA, 75 bp, synthetic construct
  source 1..75: mol_type = other DNA
attacagggcgtgttaacccctcggattacggtaactttgattcccgttatgtgaaagatgttcgacttggttca

SEQ ID NO: 104435 - DNA, 75 bp, synthetic construct
  source 1..75: mol_type = other DNA
actggcagtatgccgtcccaactaacggcgaaggttttcaggcgttttcgcaacgggtagaaaggtttattgccg

SEQ ID NO: 104436 - DNA, 75 bp, synthetic construct
  source 1..75: mol_type = other DNA
atgctgcatctgacagccgaacttgcccgacaaatgggcaaaaaaatctgcgttttgtttatcgactgggaggcg

SEQ ID NO: 104437 - DNA, 75 bp, synthetic construct
  source 1..75: mol_type = other DNA
atgaaaggtaacattggcaagcctggtgcgggtatctgcccactacgtggacactctaatgtacagggcgaccga

SEQ ID NO: 104438 - DNA, 75 bp, synthetic construct
  source 1..75: mol_type = other DNA
tccccttgctcataatttggctcttaagttttatcagtacccggaacacgggtttttcaccccactggaaattaa

SEQ ID NO: 104439 - DNA, 75 bp, synthetic construct
  source 1..75: mol_type = other DNA
ttgtttatcgactgggaggcgcaattctcttgcaccattaactatgttcagtccctgcgcgagttgtacaccgat

SEQ ID NO: 104440 - DNA, 75 bp, synthetic construct
  source 1..75: mol_type = other DNA
ctggcctttggtgggcagaaagactctccgggcaataccgggaaaaaatggggcggtgtgcgtgccgatggcgtg

SEQ ID NO: 104441 - DNA, 75 bp, synthetic construct
  source 1..75: mol_type = other DNA
ttacgctggcgcgcagaaaaatatcggcccggctggcctgacaatcgtcatcgttcgtgaagatttgctgggcaa

SEQ ID NO: 104442 - DNA, 75 bp, synthetic construct
  source 1..75: mol_type = other DNA
gtatctgcagtttgccggcgattacagggtgtccgccctgaacggccagacatggatggggggcgggattatcac

SEQ ID NO: 104443 - DNA, 75 bp, synthetic construct
  source 1..75: mol_type = other DNA
agggtgggcaggtattcagctatatgctgaatatgttcatgcaggtaaacaaacgcgtttcattctggctgatct

SEQ ID NO: 104444 - DNA, 75 bp, synthetic construct
  source 1..75: mol_type = other DNA
ggcgaccacatggggatgctggcgaccgtaatgaacggcctggcaatgcgtgatgcactgcaccgcgcctatgtg

SEQ ID NO: 104445 - DNA, 75 bp, synthetic construct
  source 1..75: mol_type = other DNA
cgctttcttgctacatgaacataaatcctgcggcgtcttctattcactacaaaggccgcaagttaccccattttg

SEQ ID NO: 104446 - DNA, 75 bp, synthetic construct
  source 1..75: mol_type = other DNA
atatgacaacaaatataaaaatgggcaaccagtattatatgttatgcggtgtggtgatgtgggtaaggttggagt

SEQ ID NO: 104447 - DNA, 75 bp, synthetic construct
  source 1..75: mol_type = other DNA
caggatgataagaagtgcgagctgattgtggctatcgactgccacatgacctcatcggcgaaatatgctgacatc

SEQ ID NO: 104448 - DNA, 75 bp, synthetic construct
  source 1..75: mol_type = other DNA
tcatgagacccagactctgcaagaaaagtacctgaatgccatcattcacgcaggtggtttgccgattgcgcttcc

SEQ ID NO: 104449 - DNA, 75 bp, synthetic construct
  source 1..75: mol_type = other DNA
ggaacgcagcaagcaggatgtttccttgttgtcggagaatcagcaaggactgaaatttatcccttgtaccggtca

SEQ ID NO: 104450 - DNA, 75 bp, synthetic construct
  source 1..75: mol_type = other DNA
gtgagagttaataaagcatgggagatgttcgatactgatatgtgggatatgtcagaagtaacagatgggaattac

SEQ ID NO: 104451 - DNA, 75 bp, synthetic construct
  source 1..75: mol_type = other DNA
tgagaagtacatcctatggtgttttgaaactactaacgaagcggcaatagtcgaaagtgcattaatttatatatt

SEQ ID NO: 104452 - DNA, 75 bp, synthetic construct
  source 1..75: mol_type = other DNA
aatgaaagcggagagctggtaaaacttaatcagcctccggagaactgggtgcatcttacccgcggagatatgaaa

SEQ ID NO: 104453 - DNA, 75 bp, synthetic construct
  source 1..75: mol_type = other DNA
cgatgcaatactacggtttcaatccaattacgatgaaaccgctgccgttccattgctatccatccagaacgtcat

SEQ ID NO: 104454 - DNA, 75 bp, synthetic construct
  source 1..75: mol_type = other DNA
gacaccggtgccgggcgtgaagatgagtggatccctattcgtccgggaacagatgccgcactggttaacggtctg

SEQ ID NO: 104455 - DNA, 75 bp, synthetic construct
  source 1..75: mol_type = other DNA
cattatttgaaaaaatgatgaaatcggttactgctattgcaacactctctctaatatcaagaagtttaagcgaat

SEQ ID NO: 104456 - DNA, 75 bp, synthetic construct
  source 1..75: mol_type = other DNA
atttcgtattaagccagttgtgacagaagagaatatttccctgcatgtcaatcagcagctttcaaactttgtcca

SEQ ID NO: 104457 - DNA, 75 bp, synthetic construct
  source 1..75: mol_type = other DNA
tcaaattatatcctggatagcaatacttatggcaaaactggtcactttggcaattctgatgaaccgagtgattat

SEQ ID NO: 104458 - DNA, 75 bp, synthetic construct
  source 1..75: mol_type = other DNA
agagaaagatggtggaatgccataaaagataataatcttgctgacgattatcttgagtttccatttcctaataga

SEQ ID NO: 104459 - DNA, 75 bp, synthetic construct
  source 1..75: mol_type = other DNA
agtaccaaaccggcgtttatcagccagggatggggcccgcagcgtcatgctaacggtgaaatcgcaacccgtgct

SEQ ID NO: 104460 - DNA, 75 bp, synthetic construct
  source 1..75: mol_type = other DNA
atatgggatgtgatatttatgcaccgggcaccaccggtacactgaacgatcataacagtactactgatattattg

SEQ ID NO: 104461 - DNA, 75 bp, synthetic construct
  source 1..75: mol_type = other DNA
cgcagaatatgatgaatggggtaaccagctgaatgaagagaacccgcaccagctgcagcagctcatccgcctgcc

SEQ ID NO: 104462 - DNA, 75 bp, synthetic construct
  source 1..75: mol_type = other DNA
ctgcgtggtatcgaaattgaagctgatgtggtgctgaaagcaaccaaagttgacggcgtgtttaccgctgatccg

SEQ ID NO: 104463 - DNA, 75 bp, synthetic construct
  source 1..75: mol_type = other DNA
caggcttaagggtcatgcgacccagactctgcaagaaaagtacctgaatgccattatttacgcgggtggtttgcc

SEQ ID NO: 104464 - DNA, 75 bp, synthetic construct
  source 1..75: mol_type = other DNA
taaagaatttggtgtaagtagtaatactgaaattaacggcgggtatcagtacattgaaatgaatggcaccgcaga

SEQ ID NO: 104465 - DNA, 75 bp, synthetic construct
  source 1..75: mol_type = other DNA
attatgattataatgcagcacaacgcaacagagagattgtagattcatatcaacaggctaatgaagccagactga

SEQ ID NO: 104466 - DNA, 75 bp, synthetic construct
  source 1..75: mol_type = other DNA
catttgcaggagattcgtctggaggataacggccaggcggagttgattttgcgtaatggcttaaccgttccggtc

SEQ ID NO: 104467 - DNA, 75 bp, synthetic construct
  source 1..75: mol_type = other DNA
gcatttccgcattttatcagccggatggaatccatgctgagcacgggtgaaatgaatcctcgccacgcccactgc

SEQ ID NO: 104468 - DNA, 75 bp, synthetic construct
  source 1..75: mol_type = other DNA
atgaacattagtgaacttaaaaactgtatacactatgaagtaataggttataaacgccctttctcctggcgaaaa

SEQ ID NO: 104469 - DNA, 75 bp, synthetic construct
  source 1..75: mol_type = other DNA
ctatgataccacagtggataatggcggcgtcctgaaagtgatggatggcggtaccgcaataggcattgataaaaa

SEQ ID NO: 104470 - DNA, 75 bp, synthetic construct
  source 1..75: mol_type = other DNA
catattaggcggacgggtaattatctgggctgggacaataaacaacgttacagtcagtgatgactcgggagtgct

SEQ ID NO: 104471 - DNA, 75 bp, synthetic construct
  source 1..75: mol_type = other DNA
atggcaaagatcgccggaacctgtttttttaaagtggatggtcagcagttatcgctgacaggtggcattgaagtg

SEQ ID NO: 104472 - DNA, 75 bp, synthetic construct
  source 1..75: mol_type = other DNA
ctaaaatgcattaagccactgcattcaatgggcggaactggtgaaagaagcggtccagatatatgggggaatccg

SEQ ID NO: 104473 - DNA, 75 bp, synthetic construct
  source 1..75: mol_type = other DNA
ggagctcatgcattggtactgcatgacattcctgatgactccacattcattaccaaatttcactctgaaattatt

SEQ ID NO: 104474 - DNA, 75 bp, synthetic construct
  source 1..75: mol_type = other DNA
accacgagggctgcagaggtggaaggcgtaaaccgtctgggtcagttcagcatcaaggatggggttgcaaacaac

SEQ ID NO: 104475 - DNA, 75 bp, synthetic construct
  source 1..75: mol_type = other DNA
atgagcctgacgccgatcccgggcgtgatcttctgagcatggcgttaattaatgccgcactcgaaaggcgcatcc

SEQ ID NO: 104476 - DNA, 75 bp, synthetic construct
  source 1..75: mol_type = other DNA
ggattatacgggcagcagtaaaagtgtaaatgccatgattgattcaggtatggagtactcaaaaaggattctgta

SEQ ID NO: 104477 - DNA, 75 bp, synthetic construct
  source 1..75: mol_type = other DNA
aattattccatgaaaaacaatgtaaactttgaccattcaactctgttgggtgatgtcgaatttacaagtcactgg

SEQ ID NO: 104478 - DNA, 75 bp, synthetic construct
  source 1..75: mol_type = other DNA
tttgaaactactaacgaagcggcaataatcgaaagtgcattaatatacatttttggacttaaaccagacaattta

SEQ ID NO: 104479 - DNA, 75 bp, synthetic construct
  source 1..75: mol_type = other DNA
tacaaaatcagtctgcccatcatatagagctattagttgatggtcagcattctctttgcctgtatatactcgaag

SEQ ID NO: 104480 - DNA, 75 bp, synthetic construct
  source 1..75: mol_type = other DNA
ataacggtcaggctgagctggttttacgtaatggtttaactgtgccggtcagtcgccgctatctgaaaagtttaa

SEQ ID NO: 104481 - DNA, 75 bp, synthetic construct
  source 1..75: mol_type = other DNA
attcaaaagagacaatctgatttattaaaagatgatttcaccactttagctgatgcattcaagaatgtattaagt

SEQ ID NO: 104482 - DNA, 75 bp, synthetic construct
  source 1..75: mol_type = other DNA
tttgtcgttccgtaatatctgttctggtcgctacagcgttatattcaccaatgatatcggcatcaacagttgatt

SEQ ID NO: 104483 - DNA, 75 bp, synthetic construct
  source 1..75: mol_type = other DNA
acgaatacgccattaaagcctttgaagaacatgcctttgattatctgctgaagccaattgatgaagcgcgactgg

SEQ ID NO: 104484 - DNA, 75 bp, synthetic construct
  source 1..75: mol_type = other DNA
atgcctggcacaaccctgttcagcgatatccgcatcaccctgcacacccgcgtcgccgcccggctgtggcaggcg

SEQ ID NO: 104485 - DNA, 75 bp, synthetic construct
  source 1..75: mol_type = other DNA
tgacggtggacagctggcgtgacagtgcgggggcgctgtggcagcccaacacctttgtgccggtgagcataccgg

SEQ ID NO: 104486 - DNA, 75 bp, synthetic construct
  source 1..75: mol_type = other DNA
cataatggtatccatacagaatacatcacagatcaaaaaaacagtaataataaagatcgtgaaaaaaataccgcg

SEQ ID NO: 104487 - DNA, 75 bp, synthetic construct
  source 1..75: mol_type = other DNA
agaaacagacctgggcactgttgatgttctccagtcatcagaaacacaaactgatgcagtggaaactgaggtatc

SEQ ID NO: 104488 - DNA, 75 bp, synthetic construct
  source 1..75: mol_type = other DNA
aaagattcttacttccgttagttttaagttatttcggagaagataaaaaagagtttgttgagtatacaatcaacc

SEQ ID NO: 104489 - DNA, 75 bp, synthetic construct
  source 1..75: mol_type = other DNA
acgctttaatgctctgtctgacgcagccacattcggcaccagcaagccttacgctgtcatcgactgcctatgatg

SEQ ID NO: 104490 - DNA, 75 bp, synthetic construct
  source 1..75: mol_type = other DNA
gtaaaagaaaaattaacagatgatattattgaactcatatctggaattaaacgcaaccaggaaaaaaacaacaaa

SEQ ID NO: 104491 - DNA, 75 bp, synthetic construct
  source 1..75: mol_type = other DNA
ggatgatggctcaaaaccatcagcttctcgacgtggtatcggagacacaccgcttattaacgttgatgggcattc

SEQ ID NO: 104492 - DNA, 75 bp, synthetic construct
  source 1..75: mol_type = other DNA
gcccatctcgataaaagtcatatttgcgtacatacctacccggaaagtcatcctgaaggcggtttatgtaccttc

SEQ ID NO: 104493 - DNA, 75 bp, synthetic construct
  source 1..75: mol_type = other DNA
tatgggcttaggtttcctggaaactcagataccagaatgtatttacaaggatttgatgctttatctggtttagat

SEQ ID NO: 104494 - DNA, 75 bp, synthetic construct
  source 1..75: mol_type = other DNA
attccaccaggagatatggttgaaatcatggagattgccatgtgcaaggctggcaattctccggtaactccggat

SEQ ID NO: 104495 - DNA, 75 bp, synthetic construct
  source 1..75: mol_type = other DNA
aaccccggtgcttcagcatctcctgctcaataaaaacgttcctgagtcgctgaggttgcttacggactacataca

SEQ ID NO: 104496 - DNA, 75 bp, synthetic construct
  source 1..75: mol_type = other DNA
ggtgatgaccggctatgtcgaccagtgggtgaacaccctgacgccgcagtcgcatgatatccgggtgacgggcag

SEQ ID NO: 104497 - DNA, 75 bp, synthetic construct
  source 1..75: mol_type = other DNA
gtgtcgatattctggtcaccgaccacggtatcgcagttaacccggcacgtccggaactggcagaacgtctgcagg

SEQ ID NO: 104498 - DNA, 75 bp, synthetic construct
  source 1..75: mol_type = other DNA
atcgtcgctcatggaatggggtctccgcatcttcatggttatcaccgcctgaccctggcacacttttttctgcca

SEQ ID NO: 104499 - DNA, 75 bp, synthetic construct
  source 1..75: mol_type = other DNA
gtttactgatacttctgcctctgacggtaaccagtaaacccctaattccgataatgaagacactttttacggatg

SEQ ID NO: 104500 - DNA, 75 bp, synthetic construct
  source 1..75: mol_type = other DNA
aataattgtgtaggtggtgcatcggaagtcgatctgatggctcatttagaagatacattagcttctaacaaacgt

SEQ ID NO: 104501 - DNA, 75 bp, synthetic construct
  source 1..75: mol_type = other DNA
gtcgcacaaattgaaaatagcctcgcagggcgtccgccaatggcgggggggtttgatatcgatgacacggtactt

SEQ ID NO: 104502 - DNA, 75 bp, synthetic construct
  source 1..75: mol_type = other DNA
tgcacagattaaccctttggtttctcgtgcgcactgcgacaaagtgtgttcattcctcgacgatgcgcaggcaca

SEQ ID NO: 104503 - DNA, 75 bp, synthetic construct
  source 1..75: mol_type = other DNA
ttctttatcggtctggcgagactttcggataactggctgctacgaaagctttccacaatttatattgagatctga

SEQ ID NO: 104504 - DNA, 75 bp, synthetic construct
  source 1..75: mol_type = other DNA
ttgaaaataaagacaaaaatacaactggatgagttagctgaacattacgatatgcgtataagtgatatactggaa

SEQ ID NO: 104505 - DNA, 75 bp, synthetic construct
  source 1..75: mol_type = other DNA
gacggtttgacgtttagtctgaaagaaggtgataaactcggacttattggaaataatggtgcgggaaaatctacg

SEQ ID NO: 104506 - DNA, 75 bp, synthetic construct
  source 1..75: mol_type = other DNA
gctggtcacccactggcactatgacgaagcagaccgcatcacgcagcgaacggtgaatggtgaaaccgcagaaca

SEQ ID NO: 104507 - DNA, 75 bp, synthetic construct
  source 1..75: mol_type = other DNA
gctggctttaaagcactggctgacatgagtccgtttgaatccctgctgattgtggatttgggcggaaccacgctg

SEQ ID NO: 104508 - DNA, 75 bp, synthetic construct
  source 1..75: mol_type = other DNA
tgaaaattttggtactggatttaaaaatatttgtcaggctataaaaaatctcgcaattagtaatccagatataat

SEQ ID NO: 104509 - DNA, 75 bp, synthetic construct
  source 1..75: mol_type = other DNA
agcaattcatggtgacacgtcaacttcattcgctgcctcgttatcagcatactatcatcaaattaaaattgcaca

SEQ ID NO: 104510 - DNA, 75 bp, synthetic construct
  source 1..75: mol_type = other DNA
gcgggtttttcgggttacgggcgggtgatggttgtcggtggcggggcggagattgtggcacccgctatccgcgaa

SEQ ID NO: 104511 - DNA, 75 bp, synthetic construct
  source 1..75: mol_type = other DNA
atgtcaaaatctactaatccatacggaaatggtaattcatcaattaaaattaaagaaataattgataattatttt

SEQ ID NO: 104512 - DNA, 75 bp, synthetic construct
  source 1..75: mol_type = other DNA
tagctttacataaaaacattctcttcagaacggttcgcagacttcaggaggaatggccggataaaaatgaattca

SEQ ID NO: 104513 - DNA, 75 bp, synthetic construct
  source 1..75: mol_type = other DNA
ctggcgattgccacgatcgccgcctggtcagggatgaatgatatcgccagttcacgcgcgtcaattgccgaccag

SEQ ID NO: 104514 - DNA, 75 bp, synthetic construct
  source 1..75: mol_type = other DNA
aattcattgaagcccatccggggtgtacttccggagacattgcggatgcttttgcaggttactcacgacagcgcg

SEQ ID NO: 104515 - DNA, 75 bp, synthetic construct
  source 1..75: mol_type = other DNA
acagcgtggtgcgcagaatatgatgaatggggcaacctgctgaatgaagagaacccgcatcagctgcagcagctt

SEQ ID NO: 104516 - DNA, 75 bp, synthetic construct
  source 1..75: mol_type = other DNA
accggtttaccggtgaccaccgcctgcggtggctatgacggctggattggcgactttatcgaagagcgtcgtctt

SEQ ID NO: 104517 - DNA, 75 bp, synthetic construct
  source 1..75: mol_type = other DNA
ttggtacaagacctgaagccattaaaatggctcctttagtaaatttattaaaaagagattctcgatatgaatgta

SEQ ID NO: 104518 - DNA, 75 bp, synthetic construct
  source 1..75: mol_type = other DNA
cacgcaggcgcagcgggcagaagaagcccggcagcaggccatttccggcgggacggaaccgtccgcttttcctga

SEQ ID NO: 104519 - DNA, 75 bp, synthetic construct
  source 1..75: mol_type = other DNA
ctcggaatggctgcgggaaaggtggtttttagcggcttcgaaccggaggcaaaacgatattatgaattttttgat

SEQ ID NO: 104520 - DNA, 75 bp, synthetic construct
  source 1..75: mol_type = other DNA
gctgaacaccgcaggcgcgaccaccgaaaccctgccgccggacagcaacagcaacaccactgtgctgacctacga

SEQ ID NO: 104521 - DNA, 75 bp, synthetic construct
  source 1..75: mol_type = other DNA
gcaatactgtttgctgtaacgcatatacatcaacttggtaatgactccaacttactgatagtgttttatgttcag

SEQ ID NO: 104522 - DNA, 75 bp, synthetic construct
  source 1..75: mol_type = other DNA
ctcaatatgacttcacgagatcagggtattaattttgaactatctgataaaacgatacaatttaaggggggaatc

SEQ ID NO: 104523 - DNA, 75 bp, synthetic construct
  source 1..75: mol_type = other DNA
tgcagacctggagtggcgataaccgcactagctgggacactctgcgctacaacacccgcatgggtctggggatga

SEQ ID NO: 104524 - DNA, 75 bp, synthetic construct
  source 1..75: mol_type = other DNA
gcagagcagtggcagtatgacgaacgcggctggctgacaggcatcagccatctcagcgaaggccaccgggtgacg

SEQ ID NO: 104525 - DNA, 75 bp, synthetic construct
  source 1..75: mol_type = other DNA
aagagattataaaaattaacaatatcagaatacatcagtacactgtactatatacatctaattgtacaatcgatg

SEQ ID NO: 104526 - DNA, 75 bp, synthetic construct
  source 1..75: mol_type = other DNA
attctggaaatggcccgcagccagctttttaaggccatgatgcggcaaatcgaaaacccggaatctgacgtggat

SEQ ID NO: 104527 - DNA, 75 bp, synthetic construct
  source 1..75: mol_type = other DNA
ccttacgttaagggcacgtttaaagtgcccaaaaattttccggtcgacaaaattaccacctcagaccagatgacg

SEQ ID NO: 104528 - DNA, 75 bp, synthetic construct
  source 1..75: mol_type = other DNA
cgccattgcccgggcgcgtgacaaattgcgttccatgcaactgctggcgcgtcagggcatcgacctgcctgtcac

SEQ ID NO: 104529 - DNA, 75 bp, synthetic construct
  source 1..75: mol_type = other DNA
agaacccgcatcagctgcagcagcttatccggctgccggggcagcagtatgatgaggagtccggcctgtattaca

SEQ ID NO: 104530 - DNA, 75 bp, synthetic construct
  source 1..75: mol_type = other DNA
gagcaactggcaggcggaacaccggaagaaaaccgtgacattttaacacgcttgttacaaggtaaaggcgacgcc

SEQ ID NO: 104531 - DNA, 75 bp, synthetic construct
  source 1..75: mol_type = other DNA
cgttcagatatgatgaaaagtatataattatgttaaaaatttattcattaggacctttatcattattagtgtttt

SEQ ID NO: 104532 - DNA, 75 bp, synthetic construct
  source 1..75: mol_type = other DNA
ccaaggtacgattaacctggagaaaaatgaaaactatagcagtagtctgagtgcaaatacgctagttggtatggc

SEQ ID NO: 104533 - DNA, 75 bp, synthetic construct
  source 1..75: mol_type = other DNA
gaattttgaggagttacttaaagtctggttcgtcgtaggcgtggttggcataaggaaaacagcatctttaattat

SEQ ID NO: 104534 - DNA, 75 bp, synthetic construct
  source 1..75: mol_type = other DNA
gtgcgtgatgccagcgttgtggtggtttccagcgcgatttctgccgataacccggaaattgttgctgcccatgaa

SEQ ID NO: 104535 - DNA, 75 bp, synthetic construct
  source 1..75: mol_type = other DNA
ttgaaaaaactgaaactgcatggctttaataatctgaccaaaagtctgagtttttgtatttacgatatctgctat

SEQ ID NO: 104536 - DNA, 75 bp, synthetic construct
  source 1..75: mol_type = other DNA
ggccccgtacttattggcgtcggtattgttaacattcttttcggtttttcagacagcgttgctgcgttctatatc

SEQ ID NO: 104537 - DNA, 75 bp, synthetic construct
  source 1..75: mol_type = other DNA
ccgcggtctgaacgcgcatattctggtgcaggaatatatcaaagaggcgcaagggtgcgatatccgctgtctggt

SEQ ID NO: 104538 - DNA, 75 bp, synthetic construct
  source 1..75: mol_type = other DNA
tactggaaaacgcagcgccgttcccgcgcccggattatctgtttgctgatatcgtcggtactggcgggcagcaac

SEQ ID NO: 104539 - DNA, 75 bp, synthetic construct
  source 1..75: mol_type = other DNA
tgttgatagagactatgagacgtatataagtatttatacatatattatagaaggttatagctatgctattgagcc

SEQ ID NO: 104540 - DNA, 75 bp, synthetic construct
  source 1..75: mol_type = other DNA
gcgttagccgtgggctttcccttgtgctgccgccgaagatggccgagcggatgcgcgaacgtgaacggcacgaga

SEQ ID NO: 104541 - DNA, 75 bp, synthetic construct
  source 1..75: mol_type = other DNA
agcgatcgcatcgacaaaacaacaacattctattcgctcaggcaacaagatagcctgcatacgcaccaaacgtga

SEQ ID NO: 104542 - DNA, 75 bp, synthetic construct
  source 1..75: mol_type = other DNA
atagtaccactggccagtgcgcttaattgtgacctgatgtggttgttaacgggaaaatcagaagcaaaggagtag

SEQ ID NO: 104543 - DNA, 75 bp, synthetic construct
  source 1..75: mol_type = other DNA
gtctggtactgatttgcattctggtggcgatctcctcacgcggcgagaaattgttattcaaaatttcgaccggca

SEQ ID NO: 104544 - DNA, 75 bp, synthetic construct
  source 1..75: mol_type = other DNA
gattcgttccagctctcttccggttatacctcaattaacggcaaacgctatgtgttcaactggaactacgacaaa

SEQ ID NO: 104545 - DNA, 75 bp, synthetic construct
  source 1..75: mol_type = other DNA
ctttgagaatttaaaacagacttttattaattttctgcacaacctgccgttttacggtcgtgcggtgatgtgtgt

SEQ ID NO: 104546 - DNA, 75 bp, synthetic construct
  source 1..75: mol_type = other DNA
ccttcgatgattaccttgatgatgaagaagaccctgaagaggaattgaagcgtgaacaatataaagcggagaaga

SEQ ID NO: 104547 - DNA, 75 bp, synthetic construct
  source 1..75: mol_type = other DNA
gtctcgcgaaattctctggcatcaccgatccgaccaaggcgctcgaagccctggagatgatgaccaaaatcgacc

SEQ ID NO: 104548 - DNA, 75 bp, synthetic construct
  source 1..75: mol_type = other DNA
actacacccgcacggcgcaggtgctgacggacacgatggcagaagcgcacatgtgggcggtggataaaccgctga

SEQ ID NO: 104549 - DNA, 75 bp, synthetic construct
  source 1..75: mol_type = other DNA
cgtcgctttgatttccttggtgaattcccgttggagccggtgaacggtaaaagcggtaccgcaatgttggttgat

SEQ ID NO: 104550 - DNA, 75 bp, synthetic construct
  source 1..75: mol_type = other DNA
aaattgcggaaagcgtctcgcaaaacaggctgcgacccgaacatggcagtcgcagcaaaggcttcttagcggcgg

SEQ ID NO: 104551 - DNA, 75 bp, synthetic construct
  source 1..75: mol_type = other DNA
tggttaatagaaaacgggcttccgttctataccaatcgtagtggcaaaccgattgtcagccgggatctatttacc

SEQ ID NO: 104552 - DNA, 75 bp, synthetic construct
  source 1..75: mol_type = other DNA
ttaaataagaaagatttcaagcgaattttcaatcgactagttaaaggtattcggccgcctaaaaaagtacatcaa

SEQ ID NO: 104553 - DNA, 75 bp, synthetic construct
  source 1..75: mol_type = other DNA
gcggcattacaggcggctatcgcacagttaaaaatgggcaacattgtcgccatcaaagggattggcggatttcat

SEQ ID NO: 104554 - DNA, 75 bp, synthetic construct
  source 1..75: mol_type = other DNA
ccgtgtcatttccaccgtatccactgccattgttggcatggtctgcacggccagcgatgcggatgcggaaacctt

SEQ ID NO: 104555 - DNA, 75 bp, synthetic construct
  source 1..75: mol_type = other DNA
ttattttatctactgctgactgggataatcctttctggacaaacaaacagcatgttgctttggatttagcgaaaa

SEQ ID NO: 104556 - DNA, 75 bp, synthetic construct
  source 1..75: mol_type = other DNA
gtgcgcggtgcggatatggcgatgatatttcaggagccgatgacatcgctgaacccggtatttactgtgggtgaa

SEQ ID NO: 104557 - DNA, 75 bp, synthetic construct
  source 1..75: mol_type = other DNA
atacgcgtaaattactggcggcagttccggtggcggaaccgtcccgactgcgaccacggcgcgtactgttgtcgg

SEQ ID NO: 104558 - DNA, 75 bp, synthetic construct
  source 1..75: mol_type = other DNA
tcagatttccggcggaatgcgccagcgggtaatgattgcgatggcgctgtcgtgccgcccggcagtgctgattgc

SEQ ID NO: 104559 - DNA, 75 bp, synthetic construct
  source 1..75: mol_type = other DNA
tttcagaacatgcttgggctgggcggcgaacccgcagcaactgtggcaggcgatggcgctgctggcacggtggtt

SEQ ID NO: 104560 - DNA, 75 bp, synthetic construct
  source 1..75: mol_type = other DNA
gaatgaagaatttatagagggtgttgataaagctttagacggtgatgctattccattagagaaaagattagaact

SEQ ID NO: 104561 - DNA, 75 bp, synthetic construct
  source 1..75: mol_type = other DNA
tctgccgacgcaaacggtgctgcatcatcatgcccacgcagcggcgtgtctggcagaacatcactggccgctgga

SEQ ID NO: 104562 - DNA, 75 bp, synthetic construct
  source 1..75: mol_type = other DNA
gtcaccaatatcgaagccgaccacatggatacctaccagggcgactttgagaatttaaaacagacttttattaat

SEQ ID NO: 104563 - DNA, 75 bp, synthetic construct
  source 1..75: mol_type = other DNA
gccatcgaaatttgaactggctcataatggcaccttatatctggataaagtcgaatatctatcaggggaagttca

SEQ ID NO: 104564 - DNA, 75 bp, synthetic construct
  source 1..75: mol_type = other DNA
gaggctgtacagacgcttatttcacaaggtaagacacggttgcagattcaggaagagctaggaatctctaaagca

SEQ ID NO: 104565 - DNA, 75 bp, synthetic construct
  source 1..75: mol_type = other DNA
ctatattgcgcaacgcgcgcgcgctgcatgtaggcgaagcaccgaatatggtggtgtgctggggcggtcactcca

SEQ ID NO: 104566 - DNA, 75 bp, synthetic construct
  source 1..75: mol_type = other DNA
ggtgctttcagcgacgagcatgcgttgcgcctagaccaggcctttccgttgatactcaagcagctggagttgatg

SEQ ID NO: 104567 - DNA, 75 bp, synthetic construct
  source 1..75: mol_type = other DNA
gatcattgatccacacggctgggttctatcgttgaatgcagcaggcgattattccagtcaattgcgagagttagg

SEQ ID NO: 104568 - DNA, 75 bp, synthetic construct
  source 1..75: mol_type = other DNA
agggtatcagatcagtggttcagatttagcgccaaatccggtcacgcagcagttaatgaatctgggggcgacgat

SEQ ID NO: 104569 - DNA, 75 bp, synthetic construct
  source 1..75: mol_type = other DNA
agcgttgtccgtgaggcttttacccggtcaaaacagcgttacggtgcaccacgcctgacggatgaactgtatgct

SEQ ID NO: 104570 - DNA, 75 bp, synthetic construct
  source 1..75: mol_type = other DNA
tggaggtaaatgcatcgccaggtctggaagggatagaaaaaaccaccggtatagacatcgcgggtaaaatgatcc

SEQ ID NO: 104571 - DNA, 75 bp, synthetic construct
  source 1..75: mol_type = other DNA
cgctcttatcagcaatcaatcacctgtttactgagaacaatctggatacagaaaccatcactgtcagttatgaat

SEQ ID NO: 104572 - DNA, 75 bp, synthetic construct
  source 1..75: mol_type = other DNA
ctgccgagaacttcaacccggatgtttacgctgcccgcgtgaacgttgagcactatctctcgccatgcccgtcaa

SEQ ID NO: 104573 - DNA, 75 bp, synthetic construct
  source 1..75: mol_type = other DNA
cctgcataccctctgtcacgatatatccattgaactggtggacgcgctgaaagctatggaactggccttcgaaga

SEQ ID NO: 104574 - DNA, 75 bp, synthetic construct
  source 1..75: mol_type = other DNA
ctgcacccggacagcaccctcagcatgtggccggataaccgtatcgcccgtgacgcgcactatctttaccggtat

SEQ ID NO: 104575 - DNA, 75 bp, synthetic construct
  source 1..75: mol_type = other DNA
acaaatccatcgttacaaaactgaagaatttatataataacacatgtcagataactggaaatcagtttgcctttc

SEQ ID NO: 104576 - DNA, 75 bp, synthetic construct
  source 1..75: mol_type = other DNA
gcgttacggggtatgcgtgttctggtgccatcatcactggcaacggccatgatacagcacggagcggctgagtat

SEQ ID NO: 104577 - DNA, 75 bp, synthetic construct
  source 1..75: mol_type = other DNA
actccattcgtcagtggtcaacattccgatggttaaattacaaaaggcaataaccaccttgaaatacgccattat

SEQ ID NO: 104578 - DNA, 75 bp, synthetic construct
  source 1..75: mol_type = other DNA
aaagctgcatttgtgtgtgcttttgcagctgtgttttttaaatatttgtgctctgatgcgtttatgccaggtaag

SEQ ID NO: 104579 - DNA, 75 bp, synthetic construct
  source 1..75: mol_type = other DNA
gagaacgaaaggcatttgatgacgtatagctactccactggcggggatgaaatgagcactgttcgtgtactcaaa

SEQ ID NO: 104580 - DNA, 75 bp, synthetic construct
  source 1..75: mol_type = other DNA
ggagaggaatccaccgaccgtgtggcaccactgctgtgtgaaaaagatgctcagaaacgtgctgccggctggcac

SEQ ID NO: 104581 - DNA, 75 bp, synthetic construct
  source 1..75: mol_type = other DNA
gccaggcaccgtatcagcaggtaacgctgaccgtgcatcttctgaaaactcaggggttgggtgaaagctaccgac

SEQ ID NO: 104582 - DNA, 75 bp, synthetic construct
  source 1..75: mol_type = other DNA
gttatgaaatctgcccaataccggaagtggtgctggcagcgccagaagatttggtcgactctgcgcagcggctta

SEQ ID NO: 104583 - DNA, 75 bp, synthetic construct
  source 1..75: mol_type = other DNA
ggctgattttacttacgtcagcacatggcagggcttcgtctatgtggcgttcatcattgatgtgtttgccggata

SEQ ID NO: 104584 - DNA, 75 bp, synthetic construct
  source 1..75: mol_type = other DNA
ttattgcaggatcatcctcgctataacgaagttgcagaacaagagctctttattcgtgactctgaatacaatgtc

SEQ ID NO: 104585 - DNA, 75 bp, synthetic construct
  source 1..75: mol_type = other DNA
agcgcctcggtcgccaaagctattctggatgagttgctggaggccaacaaagcgtactggccagagttacgttaa

SEQ ID NO: 104586 - DNA, 75 bp, synthetic construct
  source 1..75: mol_type = other DNA
tggggaatacgcgcatattgcgtgctgaagcaggaacagaggtaagctattacatggacctgcaaaacggcatcg

SEQ ID NO: 104587 - DNA, 75 bp, synthetic construct
  source 1..75: mol_type = other DNA
agcgacgttgattttgtcatggcgtacatccgcgtcggcaaatacccgatgcgcgaactggatgaaaaaatcccg

SEQ ID NO: 104588 - DNA, 75 bp, synthetic construct
  source 1..75: mol_type = other DNA
gcataagctccaagaattttatcgttacattgatgcggaggatcatgaaaatgcccgcatatcttatatgtatct

SEQ ID NO: 104589 - DNA, 75 bp, synthetic construct
  source 1..75: mol_type = other DNA
gggctgaccgtgctgcgcgggcgcgggattattgagacggcgcagggtcgcgattctcgtgtcgcacggcttaat

SEQ ID NO: 104590 - DNA, 75 bp, synthetic construct
  source 1..75: mol_type = other DNA
acttaaccgtaatgggcggcaactataagaatgtagcccagaccgtcaaaacctacatgctcgactacaagactg

SEQ ID NO: 104591 - DNA, 75 bp, synthetic construct
  source 1..75: mol_type = other DNA
cgaacgtcatgcgcccggtggagtaccagaacggcgaagcattcactatccgtaacgtacgggttatgcctgaat

SEQ ID NO: 104592 - DNA, 75 bp, synthetic construct
  source 1..75: mol_type = other DNA
atgcattggtattgcatgatattcctgatgattcaacattcatcactaaatttcagtctgaagttatctgctcgt

SEQ ID NO: 104593 - DNA, 75 bp, synthetic construct
  source 1..75: mol_type = other DNA
accggtcatgtttaccgtcataaccagcccggatacgccactggcaagttactgggggcatatgcctgaaacgtt

SEQ ID NO: 104594 - DNA, 75 bp, synthetic construct
  source 1..75: mol_type = other DNA
agggcgatctggttttacgaactttagccatgcctgccgataccaatgctaatggcgatatttttggtggttggt

SEQ ID NO: 104595 - DNA, 75 bp, synthetic construct
  source 1..75: mol_type = other DNA
tgggatcactcgtgatagtaatcatatgacgaaggtaagtgaaggaggatggtattatcaacaagtcgatcttgg

SEQ ID NO: 104596 - DNA, 75 bp, synthetic construct
  source 1..75: mol_type = other DNA
catccggcgaggatgttcaggttggggatacggtgatccgggagcgggaaaccgcggctcatgatgttcgtgagg

SEQ ID NO: 104597 - DNA, 75 bp, synthetic construct
  source 1..75: mol_type = other DNA
agcgaaagccggtttgtcgatattattactgagcgcttcgatgccggtatacgtctgggctcggaagtggatagc

SEQ ID NO: 104598 - DNA, 75 bp, synthetic construct
  source 1..75: mol_type = other DNA
atcactgcccttgaacatctgcaaacgtctgtagctcgtttggtgcagcgtgacggcagttcgatcacaccagaa

SEQ ID NO: 104599 - DNA, 75 bp, synthetic construct
  source 1..75: mol_type = other DNA
acgcgctgaacgccgcagctgcggttgcggttgctacggaagagggaattgacgacgaggctattttgcgtgcgc

SEQ ID NO: 104600 - DNA, 75 bp, synthetic construct
  source 1..75: mol_type = other DNA
agctggcgatggttgagcgcaacgaaaaaggccaccagatccgccgatacttcatcgagtgcgagaaaaagctgc

SEQ ID NO: 104601 - DNA, 75 bp, synthetic construct
  source 1..75: mol_type = other DNA
cgccattctggcaaaagaaattgctcacggtcgtgtcgtgactgtacgggtggaaggcatgaccttcctgcgccc

SEQ ID NO: 104602 - DNA, 75 bp, synthetic construct
  source 1..75: mol_type = other DNA
atggcggaagtcaaacgcaaatggggcgaccgctttgttgccgtcacgcaaaaaaataccggtaaaggtggtgcg

SEQ ID NO: 104603 - DNA, 75 bp, synthetic construct
  source 1..75: mol_type = other DNA
agctgtcggcgtggctggcctataaaaatggagttaagtcggctgatgtgacaaccgaccctgagcatgttaact

SEQ ID NO: 104604 - DNA, 75 bp, synthetic construct
  source 1..75: mol_type = other DNA
gtgttgttggggcaaggttttatgatatgccgagtcttcaacgattatatttttctggagagatttatattgcaa

SEQ ID NO: 104605 - DNA, 75 bp, synthetic construct
  source 1..75: mol_type = other DNA
gcctgttgagtatgttgatgctggcagagtaattctgatgcccccctcagtggcaaaagacatggtcaagagtgg

SEQ ID NO: 104606 - DNA, 75 bp, synthetic construct
  source 1..75: mol_type = other DNA
aacaagcttgaaagtgatttgtcattcaaactcggaaattccgctgttggtgtgggtggtaaaatatctaattct

SEQ ID NO: 104607 - DNA, 75 bp, synthetic construct
  source 1..75: mol_type = other DNA
ttggcagcatcacctaatagggcatgttttggtggtgtatgtataacgaaagaacataaccccaacctacgagat

SEQ ID NO: 104608 - DNA, 75 bp, synthetic construct
  source 1..75: mol_type = other DNA
ataacaatcgacgattgctgggaaggctgggccatactcctccggcagaagcagaaaaagcttattatgcttcca

SEQ ID NO: 104609 - DNA, 75 bp, synthetic construct
  source 1..75: mol_type = other DNA
tgcccgtgcgcagcacgatgactggctaaagagagagatactgcgcgtatacgatgagaatcatcaggtatacgg

SEQ ID NO: 104610 - DNA, 75 bp, synthetic construct
  source 1..75: mol_type = other DNA
tcgctaaacattggtacagctcacggtgaggcggcggcagatgccgggtatataaccaacgcgacgaaagtagag

SEQ ID NO: 104611 - DNA, 75 bp, synthetic construct
  source 1..75: mol_type = other DNA
gttggggatacggtgatccgggagcgggaaacagcgaaacatgatgttcgtgagaatacatccggtgcgttaacg

SEQ ID NO: 104612 - DNA, 75 bp, synthetic construct
  source 1..75: mol_type = other DNA
ccagcctgggcacggagcgcctgaaattcacggcacagcaacgtcaggcagctgatgacattcaacagtcatcca

SEQ ID NO: 104613 - DNA, 75 bp, synthetic construct
  source 1..75: mol_type = other DNA
aaccatggatgtatccggaagtaacacccgcgattcgtagtgctattgagttacgttatcgtcttatgccttatt

SEQ ID NO: 104614 - DNA, 75 bp, synthetic construct
  source 1..75: mol_type = other DNA
tttaagtacgctaagacgtaaacccagtcaaaagaaaggctgtattgacgccattatacctgcgtataacgaagg

SEQ ID NO: 104615 - DNA, 75 bp, synthetic construct
  source 1..75: mol_type = other DNA
actgctgatgccaacgaagcggatgtagataacgcggtcatgtctgcctggcgggcctttgtctcgcgtcgctgg

SEQ ID NO: 104616 - DNA, 75 bp, synthetic construct
  source 1..75: mol_type = other DNA
acagacggatttatcttgcgcgaaggtgagtttgtcacttcattacaggcattgaaagagatcggaataaaagct

SEQ ID NO: 104617 - DNA, 75 bp, synthetic construct
  source 1..75: mol_type = other DNA
ctacccgtcgagatgccgctcgtcgtgccctcagaactggtgcgccgccgaccggatatccaggcgtcagaggcg

SEQ ID NO: 104618 - DNA, 75 bp, synthetic construct
  source 1..75: mol_type = other DNA
atacgttgtgccgggcaaaaagactggcagggcgcaactcagctaatggccagttctgaatctgcctgtcttcag

SEQ ID NO: 104619 - DNA, 75 bp, synthetic construct
  source 1..75: mol_type = other DNA
ttgacccaacctcaaaggaagagattaaaatacttacagacacttctaaattaatttatgatttattcggggtta

SEQ ID NO: 104620 - DNA, 75 bp, synthetic construct
  source 1..75: mol_type = other DNA
catgcacaggatcatttgatgaatgcaatattatgccaggatttagccagggaaattatttcattaagaaaagaa

SEQ ID NO: 104621 - DNA, 75 bp, synthetic construct
  source 1..75: mol_type = other DNA
aatcaagttggtgagctttctggtcgcgttgacaagattgatctggctgcaggagctattgcaactgatgttgca

SEQ ID NO: 104622 - DNA, 75 bp, synthetic construct
  source 1..75: mol_type = other DNA
tgtcacttcagtcttacctggcgagtgaagcagctaactcaactattggccttgataaagacggtaagctgaccg

SEQ ID NO: 104623 - DNA, 75 bp, synthetic construct
  source 1..75: mol_type = other DNA
atgggcaaaaccgaccgcagcgccaacccttcgccgggcaacaaaaaaggcggtctcgccaacgtggtaaagaaa

SEQ ID NO: 104624 - DNA, 75 bp, synthetic construct
  source 1..75: mol_type = other DNA
cttcgtcttcaccagctacctggcgaaagtgaacgaagagtggaaaaacaacgttggtacgggctctaccgtaaa

SEQ ID NO: 104625 - DNA, 75 bp, synthetic construct
  source 1..75: mol_type = other DNA
tatccagcttcatgccacaacgtcgatagaagatctgttgcgattattaaaaggtatggcaggggtgaaaggcgt

SEQ ID NO: 104626 - DNA, 75 bp, synthetic construct
  source 1..75: mol_type = other DNA
cataacgggaagttggaagccgccctcgaccaattacaaaatcgtttcccatttgcttacgagccgcaaattgtg

SEQ ID NO: 104627 - DNA, 75 bp, synthetic construct
  source 1..75: mol_type = other DNA
tcctccgggatgagcaaatcaatatatatgaatatattaatgaaaaacagttagaaaaattaaatcctcagggaa

SEQ ID NO: 104628 - DNA, 75 bp, synthetic construct
  source 1..75: mol_type = other DNA
cgtcgccagcgggaagaagaaaaccttctcggatcaatgggggctgcataaccagctggcggtgtttaacccggc

SEQ ID NO: 104629 - DNA, 75 bp, synthetic construct
  source 1..75: mol_type = other DNA
ttagaaaaattaaatcctcagggaaatttacgtatagcaatagaaaaatttgggtggaataataaacctatcact

SEQ ID NO: 104630 - DNA, 75 bp, synthetic construct
  source 1..75: mol_type = other DNA
cgtgctgaatggtgccgttgaaatcgttgtgtgggtgaacgcatccgcactggtgcctgactcaactatgttctg

SEQ ID NO: 104631 - DNA, 75 bp, synthetic construct
  source 1..75: mol_type = other DNA
gcatgctccgtaataaatcatattaatcttcgcagcgatcagtctaaaatagctgaggcattatttttcaatctc

SEQ ID NO: 104632 - DNA, 75 bp, synthetic construct
  source 1..75: mol_type = other DNA
agaattacttaaaatcacaggattaaaactttgggttgaaccctgcggcatacgtatctcaaagttgtcatcatg

SEQ ID NO: 104633 - DNA, 75 bp, synthetic construct
  source 1..75: mol_type = other DNA
cagcttcgcgcctttgtggtcagtgaggatcggatgaaagaggcatttggattgttgaaaacgttgccgatgtag

SEQ ID NO: 104634 - DNA, 75 bp, synthetic construct
  source 1..75: mol_type = other DNA
gcccgggcactcaacccggaacatccggtgatccgcggtacgtccgccaatcctgacacttatttccagtctcgc

SEQ ID NO: 104635 - DNA, 75 bp, synthetic construct
  source 1..75: mol_type = other DNA
gatgctgaccagcttcgcgcctttgtggtcagtgaggatcggatgaaagaggcatttggattgttgaaaacgttg

SEQ ID NO: 104636 - DNA, 75 bp, synthetic construct
  source 1..75: mol_type = other DNA
aatgaaaattggcaatttgttccacattctaataccattttctttgatggatatattgctcctgggtggactgat

SEQ ID NO: 104637 - DNA, 75 bp, synthetic construct
  source 1..75: mol_type = other DNA
tatggttcagtgatgaccttgctggtgctggaagtcttccatcaattaaccttccgcctgatgaacaaaaattac

SEQ ID NO: 104638 - DNA, 75 bp, synthetic construct
  source 1..75: mol_type = other DNA
gatatacatatgttgcgtaatgtccaaaaagatgacattatcgattcaacgggatatcatctttttggtgggtgc

SEQ ID NO: 104639 - DNA, 75 bp, synthetic construct
  source 1..75: mol_type = other DNA
cagctcgataaatgccctgctgcaggcgcagatgttattgagaaaattaataataaatttggccgtttacgcggt

SEQ ID NO: 104640 - DNA, 75 bp, synthetic construct
  source 1..75: mol_type = other DNA
cggcacagctctggcggcggcactggcaccggagctgatgggctacagtgagctgacggccattgcccgaaactg

SEQ ID NO: 104641 - DNA, 75 bp, synthetic construct
  source 1..75: mol_type = other DNA
gcaacatcgccggcatcagcgccactctacctggaggcttcagttcgctgtgggttaaccaggaaaaaacccgca

SEQ ID NO: 104642 - DNA, 75 bp, synthetic construct
  source 1..75: mol_type = other DNA
gtgatgacaaaaccctcagcggtggggcgtatgcacagttcgacgctcgttacgccagcggaacgctgaacgtca

SEQ ID NO: 104643 - DNA, 75 bp, synthetic construct
  source 1..75: mol_type = other DNA
cgtcgaacgtgaacggctggtttgtgcaattgatgaattgcgtggggcattctcaaaacgccgtcaggttggcgc

SEQ ID NO: 104644 - DNA, 75 bp, synthetic construct
  source 1..75: mol_type = other DNA
aacaagatgaacaattagcaatggcatatatggccgctctgccgttcagcaggcctttagtttactgggatggct

SEQ ID NO: 104645 - DNA, 75 bp, synthetic construct
  source 1..75: mol_type = other DNA
cgtgcaacctccgttgcagtagcaatatcaggttttggtctgcttattaatcgtcctgcgctttctgtaaaacac

SEQ ID NO: 104646 - DNA, 75 bp, synthetic construct
  source 1..75: mol_type = other DNA
tatatggtaaatctattgattattcagcgatgcgtcatcgggatataattattgcaaaaatagatttgtttattc

SEQ ID NO: 104647 - DNA, 75 bp, synthetic construct
  source 1..75: mol_type = other DNA
gttcgtgaatccagacctgtgcgcaatttctatgtcggcactaacgatccccgggtgattttgtgcctgacccgc

SEQ ID NO: 104648 - DNA, 75 bp, synthetic construct
  source 1..75: mol_type = other DNA
atgggtactgatgtaaaagtggagtttgaggcaaagagaaacggtaagtgggagcaggtacatactcaatacgcc

SEQ ID NO: 104649 - DNA, 75 bp, synthetic construct
  source 1..75: mol_type = other DNA
cgaacggctaacagtttgctttcatgcgcagttaaaacagcgtcacgcaacgatgcgttttgaagaaatgaacga

SEQ ID NO: 104650 - DNA, 75 bp, synthetic construct
  source 1..75: mol_type = other DNA
atctgtaaaaatatactttgctgacacaaaaaaaacaatgacggaaaaaaagtgtgggagcacatcaaaagaaat

SEQ ID NO: 104651 - DNA, 75 bp, synthetic construct
  source 1..75: mol_type = other DNA
tggtgataccctccaagttggtaaaacagttattggtatccctcaggagtggttgagtcaagatattcccgctca

SEQ ID NO: 104652 - DNA, 75 bp, synthetic construct
  source 1..75: mol_type = other DNA
cgcgatctgggacaagaacctaagcatatcgtcattgcgggagtactgagaaccacccttgctaaccagcgcgtg

SEQ ID NO: 104653 - DNA, 75 bp, synthetic construct
  source 1..75: mol_type = other DNA
tatccagataacacacgagttgagagtgttattgatggagttgtgaatacaggcccagaaaaagtagtagatctt

SEQ ID NO: 104654 - DNA, 75 bp, synthetic construct
  source 1..75: mol_type = other DNA
cagtcggaaaatggtattaagaagtattctgttaaaaacgccaagggtgaacataatggcgtctacgaactgtat

SEQ ID NO: 104655 - DNA, 75 bp, synthetic construct
  source 1..75: mol_type = other DNA
tacctggttttcaccaccgtttccaatggtgtgctgctgttccttgagcgccgctactccgtgggtgtgaagagg

SEQ ID NO: 104656 - DNA, 75 bp, synthetic construct
  source 1..75: mol_type = other DNA
tgcgtttgattaagcgctctccgatggccttggatatatattgctgggcgacgtatcgtgtgagttatttaaagc

SEQ ID NO: 104657 - DNA, 75 bp, synthetic construct
  source 1..75: mol_type = other DNA
ggaatatgagctgcaagtggtggctgctcaggatcgtattgccaaaccagaacattacttcagcgcaacaaagct

SEQ ID NO: 104658 - DNA, 75 bp, synthetic construct
  source 1..75: mol_type = other DNA
ctaaccctatcgccgggcgcataaatatgagcaatctttgctcagagattttgcaggtcaactgtgcctcagagt

SEQ ID NO: 104659 - DNA, 75 bp, synthetic construct
  source 1..75: mol_type = other DNA
atcttgtttgaaagcgcaactggataaagcttaccaagacgcttatacctgtggtgatttaactctgcaaaaatc

SEQ ID NO: 104660 - DNA, 75 bp, synthetic construct
  source 1..75: mol_type = other DNA
ccctgggataccctggctcgtacacggaccaaaatcctgatcaacggcgaacagcttgatgccgacccggacacc

SEQ ID NO: 104661 - DNA, 75 bp, synthetic construct
  source 1..75: mol_type = other DNA
aaaacgcccaggcgcatgactggcacggcgtctgtgatcgcttaactgactttgtgaacagtgccggtaaacgct

SEQ ID NO: 104662 - DNA, 75 bp, synthetic construct
  source 1..75: mol_type = other DNA
cattgcgcgtatgtatgacgatataggttggatggcacaagcggcacaggatgagtgggaatataaaaaagcccg

SEQ ID NO: 104663 - DNA, 75 bp, synthetic construct
  source 1..75: mol_type = other DNA
catgggatcagcgaggaaagttttctaccgcgtttaatccctgtgtggctatgccatttggcccctgggataccc

SEQ ID NO: 104664 - DNA, 75 bp, synthetic construct
  source 1..75: mol_type = other DNA
tgccggaaaaatacggaagccttcttaatgagcgccatccggacctgtttgccggtgctcaggggattatttcac

SEQ ID NO: 104665 - DNA, 75 bp, synthetic construct
  source 1..75: mol_type = other DNA
cagaaacgtcagtcgcctggacgaattacgcaatattatcgaagtcagaaaatggcaggtgaatcaggccgccag

SEQ ID NO: 104666 - DNA, 75 bp, synthetic construct
  source 1..75: mol_type = other DNA
tgatgagcattaacgcggtgaaaggtgtggaaatcggcgacggttttgacgttgtagcgctgcgcggcagccata

SEQ ID NO: 104667 - DNA, 75 bp, synthetic construct
  source 1..75: mol_type = other DNA
aggtgttacatcggctggcaatactggagatcccagggattgtacgccagcagggaagtacactgacacttgcag

SEQ ID NO: 104668 - DNA, 75 bp, synthetic construct
  source 1..75: mol_type = other DNA
tctgtacaaactggcgggcgagttaacgccatttgtactgcatgttgcggcacgtaccgttgctactcatgcgct

SEQ ID NO: 104669 - DNA, 75 bp, synthetic construct
  source 1..75: mol_type = other DNA
ctgcacctgatttcgttaaaaccgttaccgctgcgatgctcgccggacttggcgatgccctccccgtttcggcgc

SEQ ID NO: 104670 - DNA, 75 bp, synthetic construct
  source 1..75: mol_type = other DNA
gtagcggcacgtaccgttgccacacatgcactctctatttttggcgatcattccgacgtcatggcggtgcgccag

SEQ ID NO: 104671 - DNA, 75 bp, synthetic construct
  source 1..75: mol_type = other DNA
ttcaactaacaatggtactcaggtaaatattataggtggagagggctttgacacgatatctttggacaatactac

SEQ ID NO: 104672 - DNA, 75 bp, synthetic construct
  source 1..75: mol_type = other DNA
gtaaaatcgcgcgatatgcgcgggcagaaatatgtgttgcaggtcgcaccggaagattgcaccggctgtaatttg

SEQ ID NO: 104673 - DNA, 75 bp, synthetic construct
  source 1..75: mol_type = other DNA
ccgatactctatctggcagaacgttatggtttcgagtcccagcaaacgctgacccgaaccttcaaaaactacttt

SEQ ID NO: 104674 - DNA, 75 bp, synthetic construct
  source 1..75: mol_type = other DNA
ggtgtatctcgaaccgttaaaccgttatcaggatcacatgatcaacactctcgccgatgcccgccgttacatcgt

SEQ ID NO: 104675 - DNA, 75 bp, synthetic construct
  source 1..75: mol_type = other DNA
tgatcgaaaataccgaccagcgttctcaggattatagtgcgattaaggacgttttccgtccaggtcatgccgatt

SEQ ID NO: 104676 - DNA, 75 bp, synthetic construct
  source 1..75: mol_type = other DNA
aaaataccctgccaaactccgcgaagctggaagccctgttttatggtctgggcagtgatggcagcgtttccgcga

SEQ ID NO: 104677 - DNA, 75 bp, synthetic construct
  source 1..75: mol_type = other DNA
gtagtgccgcgacgccgggcgcaagatgcagagattgccacggtacaggccgtgcggttgatatagccaaaacag

SEQ ID NO: 104678 - DNA, 75 bp, synthetic construct
  source 1..75: mol_type = other DNA
atggaagtgactggattaaaggtgaaatcaagaacgagggcgatataacttacaatgtttatactcatgcatctg

SEQ ID NO: 104679 - DNA, 75 bp, synthetic construct
  source 1..75: mol_type = other DNA
ttccgcacaggatagcgacattttaacgaccatcggattcaggcctgacgcggcttcggtggatgatgtcaacga

SEQ ID NO: 104680 - DNA, 75 bp, synthetic construct
  source 1..75: mol_type = other DNA
ggcgctgcgggaccttatcagcttatgcctgatacagctagagagttaggcctgaaagttggtgatggaattgat

SEQ ID NO: 104681 - DNA, 75 bp, synthetic construct
  source 1..75: mol_type = other DNA
tccctcattgaagactcactcgcagctggtacatcgcgtctttcccgcgaaaacaacagcgacttcacaatgaac

SEQ ID NO: 104682 - DNA, 75 bp, synthetic construct
  source 1..75: mol_type = other DNA
cggcgggtacaaagggcgtggtcaacgatatctccctgacgggggataaaatcagcgataccgcgccgacgccgc

SEQ ID NO: 104683 - DNA, 75 bp, synthetic construct
  source 1..75: mol_type = other DNA
aacactctcacgtctggtcacttcttcaaatgttaaaaaacatcccgtgacgcgacggtttgtgcgggttcgtaa

SEQ ID NO: 104684 - DNA, 75 bp, synthetic construct
  source 1..75: mol_type = other DNA
ctgcgccagaacttccgtatcttccagaatgaggacatcgaaagcatcctcgcgacgatcctgaaagaaaacggt

SEQ ID NO: 104685 - DNA, 75 bp, synthetic construct
  source 1..75: mol_type = other DNA
gttattgatattgaccatttcatggagcgcagttacctgaatgagctgggggacgcgctgaaaataccccaggat

SEQ ID NO: 104686 - DNA, 75 bp, synthetic construct
  source 1..75: mol_type = other DNA
atcttcgcagcgatcagtctaaaatagctgaggcattatttttcaatctcgataaagaaccctataaaaatagcc

SEQ ID NO: 104687 - DNA, 75 bp, synthetic construct
  source 1..75: mol_type = other DNA
attcgctgcgtctggaatgaaggctgccggttaaccccggccgtcgccgcacaccgtatttttattcttcagcat

SEQ ID NO: 104688 - DNA, 75 bp, synthetic construct
  source 1..75: mol_type = other DNA
tgatgtacggtcatgtttatgtggcgcagatttctctcggcgcgcagctgaaccagacggtgaaagcgattcagg

SEQ ID NO: 104689 - DNA, 75 bp, synthetic construct
  source 1..75: mol_type = other DNA
tgctcggcacccgcccggaatttatgctcggcacctggctcaacagcgcccgcacgatgctggatggtatggacg

SEQ ID NO: 104690 - DNA, 75 bp, synthetic construct
  source 1..75: mol_type = other DNA
catctggtacagagcggcgaactgaatatcgacgtggctttcctcggcgtcccgtcctgcgatgaattcggtaat

SEQ ID NO: 104691 - DNA, 75 bp, synthetic construct
  source 1..75: mol_type = other DNA
agtactgcagatgctgcgttagatgctttgaaagaaacgcagaatagatctctatgtaatgatatggaatactct

SEQ ID NO: 104692 - DNA, 75 bp, synthetic construct
  source 1..75: mol_type = other DNA
aatcgtccaccggtggtttccgatgctgcacctgatttcgttaaaaccgttaccgctgcgatgctcgccggactt

SEQ ID NO: 104693 - DNA, 75 bp, synthetic construct
  source 1..75: mol_type = other DNA
cgactttatcgaagagcgtcgtcttaatggcttaaagcagatcgaacgcattctcgaagcgctggcagaagtggg

SEQ ID NO: 104694 - DNA, 75 bp, synthetic construct
  source 1..75: mol_type = other DNA
tgggtattgctggcgatgattcagcttcctgcagtctggctttcgctcggtattctcggcaagaagttcgcaatt

SEQ ID NO: 104695 - DNA, 75 bp, synthetic construct
  source 1..75: mol_type = other DNA
tctcaaaacgccgtcaggttggcgcaagtgagtatgcatatattagctttttaactgtcagtcagcgccgtactt

SEQ ID NO: 104696 - DNA, 75 bp, synthetic construct
  source 1..75: mol_type = other DNA
gcaatgcgcaggatggtaactggcagggcgtttgcgagcgactcacagactttgtcaactccggcggaaaacgta

SEQ ID NO: 104697 - DNA, 75 bp, synthetic construct
  source 1..75: mol_type = other DNA
cactggtcgagagccgctacctctacgacccgctgggacggcgaatggcaaaacgggtctggcggcgggagcgtg

SEQ ID NO: 104698 - DNA, 75 bp, synthetic construct
  source 1..75: mol_type = other DNA
ctaaggctatttgatgatgttaaattggtttttgataaagtgcctctcagtattttagtgaatgatatttttttg

SEQ ID NO: 104699 - DNA, 75 bp, synthetic construct
  source 1..75: mol_type = other DNA
atcaaagtatgcaatattctgatgatactacaaagataaagcatgcccgctccgtgatcgatcatattgatttta

SEQ ID NO: 104700 - DNA, 75 bp, synthetic construct
  source 1..75: mol_type = other DNA
ccaaaaacaatatcaagattatcggtaattccacgccgtggtacgcacagggctattttgtttacgactccaaaa

SEQ ID NO: 104701 - DNA, 75 bp, synthetic construct
  source 1..75: mol_type = other DNA
ctgctcgactacctgaaacgtaaagacgtagcacgttacacccagctcatcgagcgcctgggtctgcgtcgctaa

SEQ ID NO: 104702 - DNA, 75 bp, synthetic construct
  source 1..75: mol_type = other DNA
gttgtagtgctgatgaggaaaattttatctgactacaatattgatatcgttttccgcaacaatcagcatcacggc

SEQ ID NO: 104703 - DNA, 75 bp, synthetic construct
  source 1..75: mol_type = other DNA
tttatagtcacgactcatagtccacaagtttgtcatactattgatagtcagaatatatggttgttaaagaatggc

SEQ ID NO: 104704 - DNA, 75 bp, synthetic construct
  source 1..75: mol_type = other DNA
agttatctggcgctcaaccggttcaggatgatggcgcggacaatgaattcattgaagctgccaacgacaacgaac

SEQ ID NO: 104705 - DNA, 75 bp, synthetic construct
  source 1..75: mol_type = other DNA
ctgagcaagatgaacgacaaggacaacgacatcagcctcatgaggagcaagaaaatgaaggcaaattcgaaaacg

SEQ ID NO: 104706 - DNA, 75 bp, synthetic construct
  source 1..75: mol_type = other DNA
cattgcgtgcgaactggatcagacaggccgcccagcgaactatttatcggcttctggacattcacctcgcttata

SEQ ID NO: 104707 - DNA, 75 bp, synthetic construct
  source 1..75: mol_type = other DNA
actgaacacaattttgtgttaagtgaatacaccgacgcatcaggccgcaaactcccttgttaccaaatcacccgc

SEQ ID NO: 104708 - DNA, 75 bp, synthetic construct
  source 1..75: mol_type = other DNA
gaagagcgagcgggaaaatcccccactacttcacccatgacacctgagcagattgaaatacgcgagctaaagaaa

SEQ ID NO: 104709 - DNA, 75 bp, synthetic construct
  source 1..75: mol_type = other DNA
agacttcaacgtgttgaaatggaaagggatatattaaaaaatgctaccgagaccttgatgtcagactccctaaac

SEQ ID NO: 104710 - DNA, 75 bp, synthetic construct
  source 1..75: mol_type = other DNA
caggctgaacagcctgctccggcgtttcgacgatcgtgatctctaccacacgctgatatggctgtgctggtatga

SEQ ID NO: 104711 - DNA, 75 bp, synthetic construct
  source 1..75: mol_type = other DNA
gctttctgtcggcattgaagaaagccttcaacagtggcgatgtcacgcctgctgatccggtcgtttttacaagcg

SEQ ID NO: 104712 - DNA, 75 bp, synthetic construct
  source 1..75: mol_type = other DNA
atgggcaaaaccgaccgcagcgccaacccttcgccgggcaacaaaaagggcggcctcgctaacgtggtaaagaaa

SEQ ID NO: 104713 - DNA, 75 bp, synthetic construct
  source 1..75: mol_type = other DNA
cctgcgtgagagcggaaaggattttacgctcgtcagtgtggatttaatgaaaaaacgtctcgaaaacggtgacga

SEQ ID NO: 104714 - DNA, 75 bp, synthetic construct
  source 1..75: mol_type = other DNA
aagcgtggctatcagagattgctaactttcgcggtcatgctgctggttacagggctgctatagaagcagcaccac

SEQ ID NO: 104715 - DNA, 75 bp, synthetic construct
  source 1..75: mol_type = other DNA
taacccaagaagatctgctggcgacgggttcgctctatattttactggaagaaaaactcgctattaaacctttag

SEQ ID NO: 104716 - DNA, 75 bp, synthetic construct
  source 1..75: mol_type = other DNA
tctcatgagattttgttaaacgatgcaaacattggaattcccggagtgtttccaaaacgcccggtggacttacac

SEQ ID NO: 104717 - DNA, 75 bp, synthetic construct
  source 1..75: mol_type = other DNA
atgggcaaaaccgaccgcagcgccaacccttcgccgggcaacaaaaacggcggtctcgcaaacgtggtaaagaaa

SEQ ID NO: 104718 - DNA, 75 bp, synthetic construct
  source 1..75: mol_type = other DNA
ggcgttaagcaatgccggttttgttaagcgcagccttaaggaactggaaaatggcaacgtcccggaaatcagcca

SEQ ID NO: 104719 - DNA, 75 bp, synthetic construct
  source 1..75: mol_type = other DNA
gcgaagcctgcggagttaatgcgactttcatcgcggacggggtgccacagtttgctctggttaatgggctgtacg

SEQ ID NO: 104720 - DNA, 75 bp, synthetic construct
  source 1..75: mol_type = other DNA
tggctggcatttatggtggtatgtgatgctattgtgtctcccagcggcactggcaatatttacatgaatgcgaca

SEQ ID NO: 104721 - DNA, 75 bp, synthetic construct
  source 1..75: mol_type = other DNA
tagtgtccacgggcaaggaacatttgtattgccttctcgtagtagagaaaatcatttattgcatagttttaccga

SEQ ID NO: 104722 - DNA, 75 bp, synthetic construct
  source 1..75: mol_type = other DNA
gtgtggcgtacaacgctatcaggaatggatgtcgtcgagatggcatcagcagatagtgctgctctcctgaagaaa

SEQ ID NO: 104723 - DNA, 75 bp, synthetic construct
  source 1..75: mol_type = other DNA
accttgctatcaaatcacccgcgatggcttcgcgttccttgctatgggctttactggcaaacgtgcagcccggtt

SEQ ID NO: 104724 - DNA, 75 bp, synthetic construct
  source 1..75: mol_type = other DNA
atgccgtatctgataaaaacgcgctgcaaaaaaaattaatatcaaggttaaatgaaatcatgaattacgctgtaa

SEQ ID NO: 104725 - DNA, 75 bp, synthetic construct
  source 1..75: mol_type = other DNA
atcataatgaatatatctatcttggttttcatgatattccagacacacataataaaagatttgaacgtattatcc

SEQ ID NO: 104726 - DNA, 75 bp, synthetic construct
  source 1..75: mol_type = other DNA
cagggcgtccgccaatggcgggggggtttgatatcgatgacacggtacttttttccagcccgggcttctggcgcg

SEQ ID NO: 104727 - DNA, 75 bp, synthetic construct
  source 1..75: mol_type = other DNA
cctgttaacgacggcgatatcatgacattcatgcagatctgcaaatccatcaccgcgtcagcagactgtgaggag

SEQ ID NO: 104728 - DNA, 75 bp, synthetic construct
  source 1..75: mol_type = other DNA
cggcaccgtaatttcgcatcgctgagtttaccgggtctttccgaagagcggaaaactgtcttcgttcctggactg

SEQ ID NO: 104729 - DNA, 75 bp, synthetic construct
  source 1..75: mol_type = other DNA
gtaacgtgcgggttatgcctgaatccattccggctggctttaaagcactggctgacatgagtccgtttgaatccc

SEQ ID NO: 104730 - DNA, 75 bp, synthetic construct
  source 1..75: mol_type = other DNA
gaccagccattcctcgataaatactgcgtcggttatgacgaaaaaaccttacccgcagatgcgccgagaaatggt

SEQ ID NO: 104731 - DNA, 75 bp, synthetic construct
  source 1..75: mol_type = other DNA
gcaactgacggctgcagactatgcgcaactgctggatgccttcaatgtttttatgctaccgcccgcgaagcgtcc

SEQ ID NO: 104732 - DNA, 69 bp, synthetic construct
  source 1..69: mol_type = other DNA
attagcctgaaattaaaaggtctgactccaattgaatatcggaatcagacctatatgcctcgtgtttaa

SEQ ID NO: 104733 - DNA, 75 bp, synthetic construct
  source 1..75: mol_type = other DNA
gcgaaagtgtttggccagcttccggctgaccctgagctggcagcaatgcaggcaaggcaggtgatgtcctcccct

SEQ ID NO: 104734 - DNA, 75 bp, synthetic construct
  source 1..75: mol_type = other DNA
aatgaaatcatgaattacgctgtaaattgtggcgcattgaaaataaatccattgcttaaaataaagacagcattc

SEQ ID NO: 104735 - DNA, 75 bp, synthetic construct
  source 1..75: mol_type = other DNA
attatatccgggtatcaacccaaaagtagtctcgttgtcggagttacaggaagcaggtcaggatgaaaaaaacag

SEQ ID NO: 104736 - DNA, 75 bp, synthetic construct
  source 1..75: mol_type = other DNA
gtcgcagcccggaattgtcaacggcgatatatgacgcgccagcgtcttttttatcgtccgcgctcacgcacgcca

SEQ ID NO: 104737 - DNA, 75 bp, synthetic construct
  source 1..75: mol_type = other DNA
catgcgcttgcgccttcaaaaaaaaccggacaggcattcatcctttcgccaaaggatggttccgatgccgaggca

SEQ ID NO: 104738 - DNA, 75 bp, synthetic construct
  source 1..75: mol_type = other DNA
tttgccggtacgataaaaatcacaaccagcgcagtcatcgataaccgtgcaaacctgaattatcttctgacccat

SEQ ID NO: 104739 - DNA, 75 bp, synthetic construct
  source 1..75: mol_type = other DNA
atgacgcgcggtttgaactgtctgtcgctgtttgccgaacggctacaagggttttctcctgccagcgtctgtata

SEQ ID NO: 104740 - DNA, 75 bp, synthetic construct
  source 1..75: mol_type = other DNA
cttcggcgaatgattgcacgtggagttgatccagtgacagagaagaaaaatcgtaaaattgagatgtcactaaaa

SEQ ID NO: 104741 - DNA, 75 bp, synthetic construct
  source 1..75: mol_type = other DNA
tccttggaccctttggtgaactgcattgcgtggggggggggccgcccgccccgcccccccccccccccccccccc

SEQ ID NO: 104742 - DNA, 75 bp, synthetic construct
  source 1..75: mol_type = other DNA
ctcgccaaccagtatcacatcgacagcgaacaggcccgacgggtgctggataccactatgcaaatgtacgaacag

SEQ ID NO: 104743 - DNA, 75 bp, synthetic construct
  source 1..75: mol_type = other DNA
taactaaattaattaaaaaatcggaaagcggcgattttgcttcttcgtatcagctttataaagtatttggctcga

SEQ ID NO: 104744 - DNA, 75 bp, synthetic construct
  source 1..75: mol_type = other DNA
cggtactgcagcctcaacagcatcaaccgttgcgggtgcatcagctgcaacaattatgtcagcgacagcaggaac

SEQ ID NO: 104745 - DNA, 75 bp, synthetic construct
  source 1..75: mol_type = other DNA
caccacagggactctatcaggtcgtcaacccgggaacaccaccgttcattcctgccattcaggaagggttaatga

SEQ ID NO: 104746 - DNA, 75 bp, synthetic construct
  source 1..75: mol_type = other DNA
ttctgacagtgccaatagcgcagctgactggataaaggataagacaggatttgacccgcgcagcataggccgttt

SEQ ID NO: 104747 - DNA, 75 bp, synthetic construct
  source 1..75: mol_type = other DNA
gcggtctcgacgacctgtactgggcctctcagcgcacaggcgcgacggtggagggcattaagcagattgggtatg

SEQ ID NO: 104748 - DNA, 75 bp, synthetic construct
  source 1..75: mol_type = other DNA
aagtcatggctggataacaaagaattattacaaacagcgatatcagttcttaaagacaacaaaaatttaaatggt

SEQ ID NO: 104749 - DNA, 75 bp, synthetic construct
  source 1..75: mol_type = other DNA
taatctcatatattttgaaattatctgttttggcatttactgtattaccgggggcaaatagggtagtactttttt

SEQ ID NO: 104750 - DNA, 75 bp, synthetic construct
  source 1..75: mol_type = other DNA
cagaacatcattaccggcgcagacttcaagcagcctcgcgttaagagcttgctcgagcgtctggttgagtttctg

SEQ ID NO: 104751 - DNA, 75 bp, synthetic construct
  source 1..75: mol_type = other DNA
gatttgcgcgacaatatcgatgtgaaaaaatgggaaattaatcaggccgccggtcgctatatccgctcacatgag

SEQ ID NO: 104752 - DNA, 75 bp, synthetic construct
  source 1..75: mol_type = other DNA
tgttagtgatctaaatagattggattttagttatacatgtgatttggaccatccgattgaatgtttttatgcaca

SEQ ID NO: 104753 - DNA, 75 bp, synthetic construct
  source 1..75: mol_type = other DNA
ttttcacgcttagctggtcttttagaaatggccgatgatgaatttattaaaatcagaaaaaagatttctgaacgg

SEQ ID NO: 104754 - DNA, 75 bp, synthetic construct
  source 1..75: mol_type = other DNA
gcaagaaaaaagttttaagacaaaatattactgaggttatagatagagaaactggaaacgtaacacaagaaataa

SEQ ID NO: 104755 - DNA, 75 bp, synthetic construct
  source 1..75: mol_type = other DNA
ttgaaaaatatcctgattacatttttggcgctagtcagtaccaactttttcactggaataaaaaagattatccct

SEQ ID NO: 104756 - DNA, 75 bp, synthetic construct
  source 1..75: mol_type = other DNA
aaacaactcattgtcaacaggggaaactgccaggatgcagaattcgccagcccctggaaaccggtacgtctggga

SEQ ID NO: 104757 - DNA, 75 bp, synthetic construct
  source 1..75: mol_type = other DNA
tcggcaattctaaacactggtacagcagggaatacagttgtaacctttaacagtaatggtacatggtccggtact

SEQ ID NO: 104758 - DNA, 75 bp, synthetic construct
  source 1..75: mol_type = other DNA
tggcggcaccaccgactgctcggtgctgctgatggggccgcagtggcggacccgtcatgaccgcgaacagagcct

SEQ ID NO: 104759 - DNA, 75 bp, synthetic construct
  source 1..75: mol_type = other DNA
atgggcaaaaccgaccgcagcgccaacccttcgccgggcaacaaaaatggcggcctcgcgaacgtggtaaagaaa

SEQ ID NO: 104760 - DNA, 75 bp, synthetic construct
  source 1..75: mol_type = other DNA
cgcaaacggcagtaaacacccacaggaggcggggcgttttattaattttttgttgagccaggaaggacaacaggc

SEQ ID NO: 104761 - DNA, 75 bp, synthetic construct
  source 1..75: mol_type = other DNA
cttgcaactggtggtagtgctacgtcaggtgaaggttctttacgtttctatggcaacactacactttcaaaaaat

SEQ ID NO: 104762 - DNA, 75 bp, synthetic construct
  source 1..75: mol_type = other DNA
ttcccattaaagggagtggaaacaacattagaatatcaacgggaattatcttttcttaaagaaaataaaagatgc

SEQ ID NO: 104763 - DNA, 75 bp, synthetic construct
  source 1..75: mol_type = other DNA
tcaaaggctggtgtacacttccaaccaactaacgctaacgcaactacagctaataactatccaatagcaagggcg

SEQ ID NO: 104764 - DNA, 75 bp, synthetic construct
  source 1..75: mol_type = other DNA
gccgcaaatatggacaccgtaggcacattttctatggcctctgcgctggcttcttttgatattttgactgctgtg

SEQ ID NO: 104765 - DNA, 75 bp, synthetic construct
  source 1..75: mol_type = other DNA
tactaaatggtttaaacctagccaacataactacaatagaacaactcaatcaaaaactctcacaaatgaaaaagc

SEQ ID NO: 104766 - DNA, 75 bp, synthetic construct
  source 1..75: mol_type = other DNA
gactttaaacaaccaagaatgaaaagcttgctcgaaaagctttgggatattttgaaacaacaaggccgtccatga

SEQ ID NO: 104767 - DNA, 75 bp, synthetic construct
  source 1..75: mol_type = other DNA
gctgagtgtatttcactcggttgggatagcagccgccagacgctggatgcgcaggtaatcagcggcgaaggtgaa

SEQ ID NO: 104768 - DNA, 75 bp, synthetic construct
  source 1..75: mol_type = other DNA
tcgtcgaggccaaaaatcaacaagcggaatttactcatttgatctggcagatgcacagtgaacacgtcacatcat

SEQ ID NO: 104769 - DNA, 75 bp, synthetic construct
  source 1..75: mol_type = other DNA
caatggagctgagccgcgaaatggtggcgatctattcagagcacagggccactttcagcaaacgcgtgatcaata

SEQ ID NO: 104770 - DNA, 75 bp, synthetic construct
  source 1..75: mol_type = other DNA
ggtttttatcggctggcacatgtgttgggacaatttcgtaatacagaaagcgaggcacgggtagaagcaatgaat

SEQ ID NO: 104771 - DNA, 75 bp, synthetic construct
  source 1..75: mol_type = other DNA
tttctgaaacgcgcggaaaaggtcattccctacccgattgaaattatttccggtaatgaagaagcccgtctgatt

SEQ ID NO: 104772 - DNA, 75 bp, synthetic construct
  source 1..75: mol_type = other DNA
gagcgtctggtagcggaaggcgcagggtttgcagagctgttgagcagcctgcaaaccccggagattaaaagcgat

SEQ ID NO: 104773 - DNA, 75 bp, synthetic construct
  source 1..75: mol_type = other DNA
aagcaaaaaacaaaactactgtggctaagcctcaacttaaagagactaaaagagaagggagtgaaaatggaactg

SEQ ID NO: 104774 - DNA, 75 bp, synthetic construct
  source 1..75: mol_type = other DNA
tagatttcaaaggcgacaggataaaggttatattttataatattaaacataataccattgaacataatggtgaaa

SEQ ID NO: 104775 - DNA, 75 bp, synthetic construct
  source 1..75: mol_type = other DNA
gttcagcacatcagcatccgcgagcggctgaatgattttatgcagcagcacggcacagcactggcggccgcactg

SEQ ID NO: 104776 - DNA, 75 bp, synthetic construct
  source 1..75: mol_type = other DNA
tgatgggcaattgacactggaaccacaggtaatgatgacaaagactcgtgcctgggcgctggacgcagaaactgc

SEQ ID NO: 104777 - DNA, 75 bp, synthetic construct
  source 1..75: mol_type = other DNA
ttgatggcgtttgtgtgcatccggaaagtgaaatcgttcacgtatggcgcggcggggtatggtgtccgatcagca

SEQ ID NO: 104778 - DNA, 75 bp, synthetic construct
  source 1..75: mol_type = other DNA
aagtcaaaaacaacgttaattcagaagaggaacaagtcagggaagaaacgcgtccagaaaataaaggggtcactc

SEQ ID NO: 104779 - DNA, 75 bp, synthetic construct
  source 1..75: mol_type = other DNA
cgaactgggtatttatggttcagtgatgaccttgctggtgctggaagtcttccatcaattaaccttccgcctgat

SEQ ID NO: 104780 - DNA, 75 bp, synthetic construct
  source 1..75: mol_type = other DNA
agtcggatctcgcagtcacagccaggtagcgccggccagaaaacggcaggcgctactccagcgtcagacaacacg

SEQ ID NO: 104781 - DNA, 75 bp, synthetic construct
  source 1..75: mol_type = other DNA
aatgcagcaaaaggcgcagactggagcaaaacattcgctcaggatctgaccaaccagaaaggcgaagatgcatgg

SEQ ID NO: 104782 - DNA, 75 bp, synthetic construct
  source 1..75: mol_type = other DNA
gccagcgttctgcctgtgccgtctactgctcatcagttgctgatgcgctgccaggcgttacttattcaactgctc

SEQ ID NO: 104783 - DNA, 75 bp, synthetic construct
  source 1..75: mol_type = other DNA
ttcagcgtctgccaggtgcaattggttacgttgaatatgcttacgctaagcagaacaacctggcgtacaccaaat

SEQ ID NO: 104784 - DNA, 75 bp, synthetic construct
  source 1..75: mol_type = other DNA
gccggaaggccgaaaatcagcacgcatatacagggccggatatcttgcgcctgtaatgataaaggcgattggtca

SEQ ID NO: 104785 - DNA, 75 bp, synthetic construct
  source 1..75: mol_type = other DNA
gatacgattcatcaaagatgaagcggatatgtgctgctctgtttatggttttggctaatcgctacgactggcaat

SEQ ID NO: 104786 - DNA, 75 bp, synthetic construct
  source 1..75: mol_type = other DNA
aggtcgccgcgcgtaccggaaccgtggtgtatctcgaaccgttaaaccgctatcgccgatgctcgtcgttacatc

SEQ ID NO: 104787 - DNA, 75 bp, synthetic construct
  source 1..75: mol_type = other DNA
tgacaggaattcatctttttctttgcaaacaaatggaatagagcaactttctacaaagaaagtcctcaatatgac

SEQ ID NO: 104788 - DNA, 75 bp, synthetic construct
  source 1..75: mol_type = other DNA
agcactgatgatcctgattaacgacggtatcgtgaaggttccacatttgctgatgagcaccgccgaagatggcaa

SEQ ID NO: 104789 - DNA, 75 bp, synthetic construct
  source 1..75: mol_type = other DNA
gcccggagtcggtgtcaggaccgcagccaggctcctcacagaggttgcctgtcgggccttcgcctctgcagcaca

SEQ ID NO: 104790 - DNA, 75 bp, synthetic construct
  source 1..75: mol_type = other DNA
tccggcagcatggtggcccacagtgagggggtcacctttggtcagcggaccggggatacggtggcactgattgcg

SEQ ID NO: 104791 - DNA, 75 bp, synthetic construct
  source 1..75: mol_type = other DNA
gaacgggataagcttgcctctgaataccataaattacgtgacgcaaaccaaaagagatacctagctgaacgggac

SEQ ID NO: 104792 - DNA, 75 bp, synthetic construct
  source 1..75: mol_type = other DNA
cagtattgaacaatccggcaaaagttgacgctatctatgctgactatgaaaaggatcgttggagcatgggacttg

SEQ ID NO: 104793 - DNA, 75 bp, synthetic construct
  source 1..75: mol_type = other DNA
gcaaagcggggggcatatcacgccataaacgcacagaaacgacctcacagcatcataattgctgagggggtggct

SEQ ID NO: 104794 - DNA, 75 bp, synthetic construct
  source 1..75: mol_type = other DNA
ttgccgcacagacaatgcaggccagcaatcgtatccgcggtttgttgaaccagatacatccggctctggagcgcg

SEQ ID NO: 104795 - DNA, 75 bp, synthetic construct
  source 1..75: mol_type = other DNA
ctggggcattatacgttttcgttaccagacgatattttgaagggcgagttaagaccattaaatttcaatacaaac

SEQ ID NO: 104796 - DNA, 75 bp, synthetic construct
  source 1..75: mol_type = other DNA
ccttccgcgacgcgctgggcaaattgagtctgaacgatgcctctctgttctacgagccggaaagttctacagcgc

SEQ ID NO: 104797 - DNA, 75 bp, synthetic construct
  source 1..75: mol_type = other DNA
cgggccgaaaacctgcgtggatttatggattggctggggcgtgccgaaagaacgttgcatcgtggtcaaaccagg

SEQ ID NO: 104798 - DNA, 75 bp, synthetic construct
  source 1..75: mol_type = other DNA
tctatcggcggtagcgcctctcacgaatttcaggtgctggcgcagagcggtgaagacgatgtggtcttctccgat

SEQ ID NO: 104799 - DNA, 75 bp, synthetic construct
  source 1..75: mol_type = other DNA
ttgccgggatggaatatctcaggaatagcctagctctgagtatggagtcatgttcagacgctggggcatatgttg

SEQ ID NO: 104800 - DNA, 75 bp, synthetic construct
  source 1..75: mol_type = other DNA
acagccaatgcccacttttaagctggataatagtgaagcaataatatcaaaaacagcagccgaaaaaaaggcatt

SEQ ID NO: 104801 - DNA, 75 bp, synthetic construct
  source 1..75: mol_type = other DNA
atggcttttattcattcaattatttggagttggtttaacagggcttgttttggctattatttactgcaagttgat

SEQ ID NO: 104802 - DNA, 75 bp, synthetic construct
  source 1..75: mol_type = other DNA
agtggtggaaaatgtcctcagtagcaaaacaggccaaccagcaccagcaacaggtaacaaactggcgatccggtt

SEQ ID NO: 104803 - DNA, 75 bp, synthetic construct
  source 1..75: mol_type = other DNA
taccgccgtggttggcgatattctcgacacgctgggctatatgcaccagtttgtttctccggcaatcaagccgct

SEQ ID NO: 104804 - DNA, 75 bp, synthetic construct
  source 1..75: mol_type = other DNA
taaattgcagaagttagctaatgagggaaaaattacgggttataatcttcctcaaggggttatttgccatttatt

SEQ ID NO: 104805 - DNA, 75 bp, synthetic construct
  source 1..75: mol_type = other DNA
attcaggaacgtctggaacgtgaatacgatcttgacctgattaccacggcaccgacagtagtgtatgaagtagaa

SEQ ID NO: 104806 - DNA, 75 bp, synthetic construct
  source 1..75: mol_type = other DNA
gtgatgggaaacaatggggaagtatatatgagtggtctgccagaaaaaggaattttgaaagctgtgtggggagat

SEQ ID NO: 104807 - DNA, 75 bp, synthetic construct
  source 1..75: mol_type = other DNA
gcttggccgcagcaattgcgacccatgctctggtgaatctgctggaggttaccggcgcagttttcctgaatcctg

SEQ ID NO: 104808 - DNA, 75 bp, synthetic construct
  source 1..75: mol_type = other DNA
aatcacctgttgcaggttgtctgtgccggtaatgaagaggcataccaatatcttatccagtggatggcgcacatt

SEQ ID NO: 104809 - DNA, 75 bp, synthetic construct
  source 1..75: mol_type = other DNA
cgtggcgtgcagaccaatatggtttaccacggtaatcaggtggcgctgacgtacgagatcccgatggcggaagtg

SEQ ID NO: 104810 - DNA, 75 bp, synthetic construct
  source 1..75: mol_type = other DNA
gagcagcgaatgaatcgcaatctggaaacgctgatgcaaaagcgtgtcgatggtttgctattactctgtactgaa

SEQ ID NO: 104811 - DNA, 75 bp, synthetic construct
  source 1..75: mol_type = other DNA
tgcgctgttcagcgaaaaccggcgttggcgtgcaggacgttctcgaacgtctggtgcgcgacattccgccgccgg

SEQ ID NO: 104812 - DNA, 75 bp, synthetic construct
  source 1..75: mol_type = other DNA
tccgacagtagtgtatgaagtagaaactacggggaaagaagttatctacgtcgacagcccgtctaagctgccagc

SEQ ID NO: 104813 - DNA, 75 bp, synthetic construct
  source 1..75: mol_type = other DNA
tctcctatgaagtttcccgttcgctggcggcctgcgaaggcgcattgctggtggtcgacgccgggcagggcgtgg

SEQ ID NO: 104814 - DNA, 75 bp, synthetic construct
  source 1..75: mol_type = other DNA
gcctattcagatttatgcgattacacgctctctcaatgcgttattagcttaatgaaggtgaatgtaagccttgac

SEQ ID NO: 104815 - DNA, 75 bp, synthetic construct
  source 1..75: mol_type = other DNA
ccttccgcgacgcactgggcaaactgagtctgaacgatgcctcgttgttctatgaaccggaaagttcgagtgcgc

SEQ ID NO: 104816 - DNA, 75 bp, synthetic construct
  source 1..75: mol_type = other DNA
gacgcaaaccaaaaacaaccaggacgttaacgcactgatggaatacaccattgagtaccgcaatgtcgtgcgtaa

SEQ ID NO: 104817 - DNA, 75 bp, synthetic construct
  source 1..75: mol_type = other DNA
attttaattttttatttgaaagccttataaagacgggagatttaaaactccctttcactgttaagaccgacatta

SEQ ID NO: 104818 - DNA, 75 bp, synthetic construct
  source 1..75: mol_type = other DNA
catcatgtttgaagcgctggatgccctcaaagagaacgatgtttacatcactacgggcagctctctgcgctatgc

SEQ ID NO: 104819 - DNA, 75 bp, synthetic construct
  source 1..75: mol_type = other DNA
cagaatggttatctcattcatactgttagtgtggctccgggggcttttgaaatctctaacctacctgtcacaggc

SEQ ID NO: 104820 - DNA, 75 bp, synthetic construct
  source 1..75: mol_type = other DNA
atatgatactttcgacagaacattttctgatcgattcacagctaactacatccagaaaatatcaatccccttaga

SEQ ID NO: 104821 - DNA, 75 bp, synthetic construct
  source 1..75: mol_type = other DNA
aaatcgcagaactctccatgctctgtggcttcgatgatgatcttgccgcacagacaatgcaggccagcaatcgta

SEQ ID NO: 104822 - DNA, 75 bp, synthetic construct
  source 1..75: mol_type = other DNA
aaagtgaccaccgaaagcgcagttcgcaaagccatcagcggcggtatgagtacggtacaggcctttgaaaccttc

SEQ ID NO: 104823 - DNA, 75 bp, synthetic construct
  source 1..75: mol_type = other DNA
gccattgcaccgtgctgccgggcatgcgccatttcggcgcactggcgacggtgattccctccacggtacagactg

SEQ ID NO: 104824 - DNA, 75 bp, synthetic construct
  source 1..75: mol_type = other DNA
gtagcggaagtcatgcgcagaacatatccacaggcacaaatcatcattgccgcagataacgatcaccagcaagga

SEQ ID NO: 104825 - DNA, 75 bp, synthetic construct
  source 1..75: mol_type = other DNA
aatacaccgtaagagctggaaaaaccgtgcagaagtggaactggccacactaacgtgggtggactggtataacaa

SEQ ID NO: 104826 - DNA, 75 bp, synthetic construct
  source 1..75: mol_type = other DNA
attgatgtattaatccatcggatggctcagccgacattgcagcaacaacggttacaacttactccggttctgatg

SEQ ID NO: 104827 - DNA, 75 bp, synthetic construct
  source 1..75: mol_type = other DNA
taatgatggcggtgccgcaaagttgctttggcatcttaaaggggtggatctctcaggttttgaccctcaacgagc

SEQ ID NO: 104828 - DNA, 75 bp, synthetic construct
  source 1..75: mol_type = other DNA
gtgaatcctggatcctgagcactttcccggagtggggtagctggttgaatgaagaaattgaacaagaacaggtcg

SEQ ID NO: 104829 - DNA, 75 bp, synthetic construct
  source 1..75: mol_type = other DNA
ttcttcgttccctcaggcgataattactcaggatcagatgtttgatttctatgacggtggtgggcttgatcaagc

SEQ ID NO: 104830 - DNA, 75 bp, synthetic construct
  source 1..75: mol_type = other DNA
ttagcacgggatatggctccgctggagagaaatgtccgtcataaacaagagtacgaaaaaaccagacaagtgata

SEQ ID NO: 104831 - DNA, 75 bp, synthetic construct
  source 1..75: mol_type = other DNA
atgagcgaaaaattacagaaagtgctggcccgcgctggccacggctcccgccgtgaaatcgaatctattattgaa

SEQ ID NO: 104832 - DNA, 75 bp, synthetic construct
  source 1..75: mol_type = other DNA
gccttcccgctggcgttggtggtgctgtacataatcattaaactcgccaccacaaaagtaccgttactggggtaa

SEQ ID NO: 104833 - DNA, 75 bp, synthetic construct
  source 1..75: mol_type = other DNA
ccggttgcccaaccgctcgctacaaattctataaataaaaacatacgcggtgattttaaccttaaaggtggtggt

SEQ ID NO: 104834 - DNA, 75 bp, synthetic construct
  source 1..75: mol_type = other DNA
aagagacaggagatcattgacgccgaccatcagtgcctcagaaaactcatctggccggaggatgactggaaatga

SEQ ID NO: 104835 - DNA, 75 bp, synthetic construct
  source 1..75: mol_type = other DNA
ggtgcaggttaaatggttccagcgctggctgaacgttttcaataaccagcagcagttctatccagatctgatcac

SEQ ID NO: 104836 - DNA, 75 bp, synthetic construct
  source 1..75: mol_type = other DNA
cgaaacgcggagccgaaggcgaaggcgtattgctccgagccctgaactgcagccagggccagcgatacctcgagc

SEQ ID NO: 104837 - DNA, 75 bp, synthetic construct
  source 1..75: mol_type = other DNA
tgcagccaagggcagcgctatctcgagctggcagagcagcgcccggctaacaagtcattcgtgtatggctgggta

SEQ ID NO: 104838 - DNA, 75 bp, synthetic construct
  source 1..75: mol_type = other DNA
tgatgagggacgttgtgtgaatgtgcaggcggccggtgctgttctcggtctgtgccgtcagcagtcctctgctgt

SEQ ID NO: 104839 - DNA, 75 bp, synthetic construct
  source 1..75: mol_type = other DNA
acgggtacggagggcgctacaacaaaaatccggtgaccgtacagggccgggataactggctggtacgtctggacc

SEQ ID NO: 104840 - DNA, 75 bp, synthetic construct
  source 1..75: mol_type = other DNA
tggacgttaacacctgtggtctgctgctgttcaccaccgatggtgaactggcaaaccgtttaatgcatccaagcc

SEQ ID NO: 104841 - DNA, 75 bp, synthetic construct
  source 1..75: mol_type = other DNA
ccgtactgcgacatgattttcgcagtgatggatacggcgctgaaaggcgggaccgaaaatgatggtactggcgtg

SEQ ID NO: 104842 - DNA, 75 bp, synthetic construct
  source 1..75: mol_type = other DNA
acaaaccattggtttcagtgatgtaacgccggtcattacaaccagggaaaccgatgacaaaataacatggtcact

SEQ ID NO: 104843 - DNA, 75 bp, synthetic construct
  source 1..75: mol_type = other DNA
cgtctgggcagccagggaatttttatggaagacgctgcgatgggggcaatcctcaaccagaaggcggaaaccgaa

SEQ ID NO: 104844 - DNA, 75 bp, synthetic construct
  source 1..75: mol_type = other DNA
gaacagctgcgcgccgataactatcagggttatgtggtgtatgacccaaagttatcagttctggcgcgaggggac

SEQ ID NO: 104845 - DNA, 75 bp, synthetic construct
  source 1..75: mol_type = other DNA
tcgacttttgggtaacggacaataacaaactggccgggcgtgggcgtaagtatcacgctgtgctgattgatgagg

SEQ ID NO: 104846 - DNA, 75 bp, synthetic construct
  source 1..75: mol_type = other DNA
acccttaaagcccgggcgtcggggatcccggatgtgttatccgtcggaagggtacagacgccgacacttgccatg

SEQ ID NO: 104847 - DNA, 75 bp, synthetic construct
  source 1..75: mol_type = other DNA
gcaggttaaaccattgttcgcttggtaatgactccaacttattgatagtgttttatgttcagataatgcccgatg

SEQ ID NO: 104848 - DNA, 75 bp, synthetic construct
  source 1..75: mol_type = other DNA
tgacggtgtggatgaagaaaacttcttctatgccatctgccataacaaagacctcggcttccatgagcatcacgc

SEQ ID NO: 104849 - DNA, 75 bp, synthetic construct
  source 1..75: mol_type = other DNA
cgcgcacaagcgcgccgacgatttgctggatgattacacctacgggctgatcatcgcgttcggtagcggcgacgc

SEQ ID NO: 104850 - DNA, 75 bp, synthetic construct
  source 1..75: mol_type = other DNA
gttgcacggtcagaccggttatgaagaggttgaagttaacaaccgtggtcgcgtcatccgccagttaaaagaagt

SEQ ID NO: 104851 - DNA, 75 bp, synthetic construct
  source 1..75: mol_type = other DNA
ctctcggcgtgggcgaatttgcgcagaccggctggctggcctatccaccgctatcgggaatagagtacagtccgg

SEQ ID NO: 104852 - DNA, 75 bp, synthetic construct
  source 1..75: mol_type = other DNA
gcagaagatggggtatttaatgatgtgcttgaaagagtcattaccctgattggcggagagcatctgcttaagtaa

SEQ ID NO: 104853 - DNA, 75 bp, synthetic construct
  source 1..75: mol_type = other DNA
ggaagctttatcccgaccttatcccggatggcgccattggccccagaaccatcaccgcgcttaagggatatcttt

SEQ ID NO: 104854 - DNA, 75 bp, synthetic construct
  source 1..75: mol_type = other DNA
accgccagcacgttaaaggctgcaagtgaagagattcagcaattagtagatgatttagcaaaaagtgctatttct

SEQ ID NO: 104855 - DNA, 75 bp, synthetic construct
  source 1..75: mol_type = other DNA
attgcggcaaccttctcgcgtaaacgtctgtttggttatacctcgctggtatgggcaaccgtctgtatcaccgtg

SEQ ID NO: 104856 - DNA, 75 bp, synthetic construct
  source 1..75: mol_type = other DNA
aatgcggcaaaaggcgcagactggagcaaaacatttgctcaggatctgactaaccagaaaggcgaagatgcgtgg

SEQ ID NO: 104857 - DNA, 75 bp, synthetic construct
  source 1..75: mol_type = other DNA
ggtaaaacaaatagtacgtgacggtacattagatcctttacaagtcagaattccaggtatttatgttgatgctgt

SEQ ID NO: 104858 - DNA, 75 bp, synthetic construct
  source 1..75: mol_type = other DNA
tacggtgatttatacagcttcaaattcggaccgctttgaacggttatggaagccgtcaaaaagggcgaaaaagca

SEQ ID NO: 104859 - DNA, 75 bp, synthetic construct
  source 1..75: mol_type = other DNA
atcacagacaccgccagcacgttaaaggctgcaagtgaagagattcagcaattagtagatgatttagcaaaaagt

SEQ ID NO: 104860 - DNA, 75 bp, synthetic construct
  source 1..75: mol_type = other DNA
tcatgtatatcatcgtggcgattgtgatgttgctgcgtggttttgctgacgccattatgatgcgtagccagcagg

SEQ ID NO: 104861 - DNA, 75 bp, synthetic construct
  source 1..75: mol_type = other DNA
tggaaggtttcagtgtggatggcgtgaccacgaaagtgcgtattgacgccggcgttgcaccggttgatcaccgcg

SEQ ID NO: 104862 - DNA, 75 bp, synthetic construct
  source 1..75: mol_type = other DNA
cctcagtgcgctacgggcttatcttacccccggctgctacagccagattgaccacgaatttcaccagcgtctaca

SEQ ID NO: 104863 - DNA, 75 bp, synthetic construct
  source 1..75: mol_type = other DNA
ttaaaattctgcgccgcaacccgctgattcaacagaatgaaatcgctgatattctgcaaatcagccgctcacgcg

SEQ ID NO: 104864 - DNA, 75 bp, synthetic construct
  source 1..75: mol_type = other DNA
agcattcaatttacggctcagttgcggaattgttcagacgagttatggttgagcaaattgatgttattttgtcgg

SEQ ID NO: 104865 - DNA, 75 bp, synthetic construct
  source 1..75: mol_type = other DNA
ttttaccgcccacggtaaagcaagcggtggccgcacaatcgacgatatgcagcgcgatatcatcagtacggtggt

SEQ ID NO: 104866 - DNA, 75 bp, synthetic construct
  source 1..75: mol_type = other DNA
caccggtgatatgcgaaacctgcccagggaaacagcaaagcaaatcctgctgagcgattactggaccggcccccg

SEQ ID NO: 104867 - DNA, 75 bp, synthetic construct
  source 1..75: mol_type = other DNA
ggagtttgttccagaaatttctccgtctttgaaaattatggatgagcgtatttttttggaacaaccgatgggatt

SEQ ID NO: 104868 - DNA, 75 bp, synthetic construct
  source 1..75: mol_type = other DNA
atttcaaaattgatggtcagcaattatccatgaccggcggtattgaggtgccgatgaatactaaggtcaatgatg

SEQ ID NO: 104869 - DNA, 75 bp, synthetic construct
  source 1..75: mol_type = other DNA
ctccgcgccgccagccagcgtccgtggtgggaagtgccgcccgccacggtgtacgccttcgcgttttcggtgttt

SEQ ID NO: 104870 - DNA, 75 bp, synthetic construct
  source 1..75: mol_type = other DNA
ggatcctcggcaaagagggcggttatgtcgatcatccgtcggataaaggcgggccgacccgctggggcatcacgc

SEQ ID NO: 104871 - DNA, 75 bp, synthetic construct
  source 1..75: mol_type = other DNA
tggacgttaacacctgtggtctgttgctgttcaccaccgatggtgaactggcaaaccgtttaatgcacccaagcc

SEQ ID NO: 104872 - DNA, 75 bp, synthetic construct
  source 1..75: mol_type = other DNA
aacgcgaagcgcgtaaccgttgcccgtccggttgtgtcgctgtattcgccgcccgtattcgccagggggaaacct

SEQ ID NO: 104873 - DNA, 75 bp, synthetic construct
  source 1..75: mol_type = other DNA
gggcgaaagcgggcatggccgggcttgccggggcggcagtcaaggatatggccgacaggatgacctccgatgaac

SEQ ID NO: 104874 - DNA, 75 bp, synthetic construct
  source 1..75: mol_type = other DNA
cgatatcgaatacaaataccgccgtaacggcgagaagcaattaattaagaccggtgacatcgtcgattatctggt

SEQ ID NO: 104875 - DNA, 75 bp, synthetic construct
  source 1..75: mol_type = other DNA
gagacatcgttgccctggaattaatcggcaagagaaaaatcaatatgcatgagctgtggcagttccatgccaacc

SEQ ID NO: 104876 - DNA, 75 bp, synthetic construct
  source 1..75: mol_type = other DNA
tgctatgtggtttccaggcattcgctgaacaattgccttcagtaactgacttaaccgggacattaacgacagaag

SEQ ID NO: 104877 - DNA, 75 bp, synthetic construct
  source 1..75: mol_type = other DNA
taattcccctaacctgaaacattttggtctgggaaaaaaagagataaccattaaggcactttcggaaaaatggct

SEQ ID NO: 104878 - DNA, 75 bp, synthetic construct
  source 1..75: mol_type = other DNA
actatctggcgaatcttgccatttagcgcaacttgccaaatccttccccctgccctggtccacttacgtccgttt

SEQ ID NO: 104879 - DNA, 75 bp, synthetic construct
  source 1..75: mol_type = other DNA
gtaaatttggttatggccattacaccggtatcgatctggcagaagagcgttccggtaacatgccgactcgcgaat

SEQ ID NO: 104880 - DNA, 75 bp, synthetic construct
  source 1..75: mol_type = other DNA
gcgacttcgtctatgtgggcgacgtggcagatgtaaacctgtggttcctggaaaatggcgtttccggcatcttca

SEQ ID NO: 104881 - DNA, 75 bp, synthetic construct
  source 1..75: mol_type = other DNA
agaatctggcgaacctgagccgtgaccctgcgcacgctaatgacagtatcagcccgatatttgacaaggagaagg

SEQ ID NO: 104882 - DNA, 75 bp, synthetic construct
  source 1..75: mol_type = other DNA
gaatacatggcctggctgaatcgcgacatcaacgtaaattcacaaaatcattcgagcggtatcaaggcagcaact

SEQ ID NO: 104883 - DNA, 75 bp, synthetic construct
  source 1..75: mol_type = other DNA
ctatgcttgagcataagcacgcgacgcagttatttgtggccgcgaaaacggatggtttgggagaggcaggccgct

SEQ ID NO: 104884 - DNA, 75 bp, synthetic construct
  source 1..75: mol_type = other DNA
tgagctgatgggcgaaaaaagctgcgcttatctggtggtaaaagagccgctgcgcgcggtgcaggtgcgtcgttt

SEQ ID NO: 104885 - DNA, 75 bp, synthetic construct
  source 1..75: mol_type = other DNA
gctttatcggcagcaacatcgttaaggccctgaatgataaaggcatcaccgatatcctggtggtggacaacctga

SEQ ID NO: 104886 - DNA, 75 bp, synthetic construct
  source 1..75: mol_type = other DNA
tcgaagtcggtcacatcttccagttgggtactaagtattctgaagctctgaaagcctccgtacagggcgaagatg

SEQ ID NO: 104887 - DNA, 75 bp, synthetic construct
  source 1..75: mol_type = other DNA
atctccagcaaagactattccgcactgctgaacgacccaaatacgcctctggtaaaccgcgccacacaaggggtt

SEQ ID NO: 104888 - DNA, 75 bp, synthetic construct
  source 1..75: mol_type = other DNA
ccagcgccacgctttgcttcccattgattgaaaaacatcaggtgaacgtcaccgcgctggtgccaccagcagtca

SEQ ID NO: 104889 - DNA, 75 bp, synthetic construct
  source 1..75: mol_type = other DNA
cgaaggctgttatttgccattaccacatcgggcagtaacgtcgtttcagcctgtaaacagcactatgattattgc

SEQ ID NO: 104890 - DNA, 75 bp, synthetic construct
  source 1..75: mol_type = other DNA
atgacaagttttactacgctgcttagcgttcatctcattagcgttgcgctttctgttgggctattaaccttacgt

SEQ ID NO: 104891 - DNA, 75 bp, synthetic construct
  source 1..75: mol_type = other DNA
cttccaggccgtagcagatgctacgcttgcttatcacaagaaaggccagatcgaatacattccgttcccggataa

SEQ ID NO: 104892 - DNA, 75 bp, synthetic construct
  source 1..75: mol_type = other DNA
acggaactgttcacctgatcaagactgactctctaatccctgaagggactgagtatagctttgaaggagaaagtc

SEQ ID NO: 104893 - DNA, 75 bp, synthetic construct
  source 1..75: mol_type = other DNA
gactttattgaatcccgcgagtacgaaaaaccgttgaacgtctacggttactcaaaattcctgtttgatgaatat

SEQ ID NO: 104894 - DNA, 75 bp, synthetic construct
  source 1..75: mol_type = other DNA
ggttttatgattcagggcggtggattcactgagcagatgcagcagaaaaaaccgaatccaccgatcaaaaatgaa

SEQ ID NO: 104895 - DNA, 75 bp, synthetic construct
  source 1..75: mol_type = other DNA
ggcgaacatattctggcggtggaaggtaacgtgacctgttatgccgattatcaacgcgcggtcgatcagatcctg

SEQ ID NO: 104896 - DNA, 75 bp, synthetic construct
  source 1..75: mol_type = other DNA
ttataacaacactacctttcaccgcgtcattcctggctttatgattcagggcggcggtttcaccgagcagatgca

SEQ ID NO: 104897 - DNA, 75 bp, synthetic construct
  source 1..75: mol_type = other DNA
gacagcagcccttcagggcaacagtgcggcagcaggcgcaattggtgcgggtactggtgaagtgatctcgtcagc

SEQ ID NO: 104898 - DNA, 75 bp, synthetic construct
  source 1..75: mol_type = other DNA
ggagaaagagcagaggcgtctgcagacagtggggcttatcagtgacataggcagtcaggtggcggatattgcgcg

SEQ ID NO: 104899 - DNA, 75 bp, synthetic construct
  source 1..75: mol_type = other DNA
gatggcaaagacccgcgcgcctcgaacgcgaagaaaaagaaaactcccgtcgttagcgataacgatgatgacggt

SEQ ID NO: 104900 - DNA, 75 bp, synthetic construct
  source 1..75: mol_type = other DNA
ggcctgcgcaacacgcgtggcaccatcgcgatggcgcgtaccgctgacaaagacagcgccaccagccagttcttt

SEQ ID NO: 104901 - DNA, 75 bp, synthetic construct
  source 1..75: mol_type = other DNA
ataaaagagtcggatgcagcccagtttcaccatcgccaggtaatttctcgccgttttgtcgtaacgcgtggcgat

SEQ ID NO: 104902 - DNA, 75 bp, synthetic construct
  source 1..75: mol_type = other DNA
gcggttacccgctggtaattttctgccatatcgtactggtgctgccgtttgtgttgcgcagcgtctatgtgtcgc

SEQ ID NO: 104903 - DNA, 75 bp, synthetic construct
  source 1..75: mol_type = other DNA
tctggtgtcgatgtttgttggctggctggctggagcgcaaacgctcaccgctcgatccggtagtacgatcgcttg

SEQ ID NO: 104904 - DNA, 75 bp, synthetic construct
  source 1..75: mol_type = other DNA
actggcgcggccttctggctgcgttaattctgggtggtgccttcctttctggttcatggtttggtgcccaccagg

SEQ ID NO: 104905 - DNA, 75 bp, synthetic construct
  source 1..75: mol_type = other DNA
tgcgggttgaagaggacgattacgacagccgtttcctgcgctgcgtggagctggtgcgggagatgatgggggagc

SEQ ID NO: 104906 - DNA, 75 bp, synthetic construct
  source 1..75: mol_type = other DNA
tctggatgcttgaaggttacttgctgaagcagaagttaagcgagcaacaacacagtgacatgtcacaaacagcca

SEQ ID NO: 104907 - DNA, 75 bp, synthetic construct
  source 1..75: mol_type = other DNA
ggtttgatctcaatcctgcgcgtaacacccgtgaaaaattattgctgccgctgggcgatatcaaaccgcttcagc

SEQ ID NO: 104908 - DNA, 75 bp, synthetic construct
  source 1..75: mol_type = other DNA
tctcatgccccggatgcccaccccccacgcaaaaccaacttttttctgatttgctttttaaatgtaagcgtacag

SEQ ID NO: 104909 - DNA, 75 bp, synthetic construct
  source 1..75: mol_type = other DNA
agcagaacgggacttactggtaccacagccattccggtctgcaggaacaggagggggtatacggcataagcgcta

SEQ ID NO: 104910 - DNA, 75 bp, synthetic construct
  source 1..75: mol_type = other DNA
ttttacgcagtatgaaggtattttatcagagaaacaggagggagccattgactatgctatagagagaattgaaaa

SEQ ID NO: 104911 - DNA, 75 bp, synthetic construct
  source 1..75: mol_type = other DNA
cgagcgatatgcgcgactatgcggatcttctcgacaaggttgaatccgttcttatcccggcttatgcacagaaaa

SEQ ID NO: 104912 - DNA, 75 bp, synthetic construct
  source 1..75: mol_type = other DNA
tttttacctcttttttcaacatgttgaaattcgccagacagtgtctggcgaattaacaccattgggaatgccgca

SEQ ID NO: 104913 - DNA, 75 bp, synthetic construct
  source 1..75: mol_type = other DNA
atgaacgaccagcaaatcgaaaaagaaatcgttgagaaaggtaaaacggcacctcgtgtaactcctgagaaaatt

SEQ ID NO: 104914 - DNA, 75 bp, synthetic construct
  source 1..75: mol_type = other DNA
ggcgggcgttatcagacgctacaggctcagtgtcttgccgatcctgaatgttcgctggagcaggcccgcgaaaag

SEQ ID NO: 104915 - DNA, 75 bp, synthetic construct
  source 1..75: mol_type = other DNA
ttgcggccgggcgtggagagcgctttctcgcctccgggggaaatacccataagtgtatcggctggcgtcagtccc

SEQ ID NO: 104916 - DNA, 75 bp, synthetic construct
  source 1..75: mol_type = other DNA
cgcaaggccatttattacctgcaacagcagggcaaaacagtgctgcaaattgcagattacccaggaatgctgatt

SEQ ID NO: 104917 - DNA, 75 bp, synthetic construct
  source 1..75: mol_type = other DNA
aaaggtctggataaacaacctgttcaggatccaaaaccagatctgttatccacgatggaacacgaaaacgtacgc

SEQ ID NO: 104918 - DNA, 75 bp, synthetic construct
  source 1..75: mol_type = other DNA
tatcaacaggctcaaggaccggcaggatggacggctcagcaaggattctatgtatatcggaatgagcgattgctg

SEQ ID NO: 104919 - DNA, 75 bp, synthetic construct
  source 1..75: mol_type = other DNA
gaccagtacgggaggttacgataaagccgacagtgcaggatgtgatgttaggagcgatagaaaaacgctttggcg

SEQ ID NO: 104920 - DNA, 75 bp, synthetic construct
  source 1..75: mol_type = other DNA
ttgaattgaaatttcccactttttgtcatggcacttacgcacaggatcaaggtccgcgcggcaaggtcatcgact

SEQ ID NO: 104921 - DNA, 75 bp, synthetic construct
  source 1..75: mol_type = other DNA
atcgctgggcgtctttcttgccggaggaacggttgttctggcggccgatcccagcgccacgctctgtttcccatt

SEQ ID NO: 104922 - DNA, 75 bp, synthetic construct
  source 1..75: mol_type = other DNA
ctggatgcccgtggttggcgatttactgtgtctgttagcgggatggatgcgcatctcctgggggccggtaatctt

SEQ ID NO: 104923 - DNA, 75 bp, synthetic construct
  source 1..75: mol_type = other DNA
tgggctggcaacggcagcggaagttgttgagcagttgtgtgaactaacgttgagttggggtaagcagcctgtgcg

SEQ ID NO: 104924 - DNA, 75 bp, synthetic construct
  source 1..75: mol_type = other DNA
gggcgaaagccgggcgcaactcgcctcgttaaaactgttacaggtcggcggcgcgcgtctttctgccacgttggc

SEQ ID NO: 104925 - DNA, 75 bp, synthetic construct
  source 1..75: mol_type = other DNA
tgagccgcaacgtgccgcgttgttaatccatgatatgcaggactattttgtcagcttctggggcgagaactgtcc

SEQ ID NO: 104926 - DNA, 75 bp, synthetic construct
  source 1..75: mol_type = other DNA
cctatgcacaggatatcaaaaatatatatcgtgtattactggccagaaaaaagttactttcagaacgtctcgcgc

SEQ ID NO: 104927 - DNA, 75 bp, synthetic construct
  source 1..75: mol_type = other DNA
tgacgctggactacaaagcgtctgacggcgaaacctatcagctgaactttatcgacaccccgggccacgttgact

SEQ ID NO: 104928 - DNA, 75 bp, synthetic construct
  source 1..75: mol_type = other DNA
ggctatacccgcatcgcctgcattacggggccgctggataaaacacctgcgcgtttacggttagaaggttatcgc

SEQ ID NO: 104929 - DNA, 75 bp, synthetic construct
  source 1..75: mol_type = other DNA
atagaccagtcgtaacaagaaaggaaatatttcatatcccattcactcatcgacatcttgtcaatgctcaacgct

SEQ ID NO: 104930 - DNA, 75 bp, synthetic construct
  source 1..75: mol_type = other DNA
atgtatctgcgtttatacgggagcatgggtactggcgcacaactttcggtcatacgggaaaaactgggacagcgt

SEQ ID NO: 104931 - DNA, 75 bp, synthetic construct
  source 1..75: mol_type = other DNA
caatcaaacacataccattggcatgttgatcactgccagtaccaatcctttctattcagaactggtgcgtggcgt

SEQ ID NO: 104932 - DNA, 75 bp, synthetic construct
  source 1..75: mol_type = other DNA
acttctgtttatgtttgttggcaggagatggaaaaaccagattttgacaagctttttatttcatcatttactacc

SEQ ID NO: 104933 - DNA, 75 bp, synthetic construct
  source 1..75: mol_type = other DNA
atgaacgacaagcaaatcgaaaaagaaatcgttgagaaaggcaaaacggcaccgcgcgttacgccagaccatatc

SEQ ID NO: 104934 - DNA, 75 bp, synthetic construct
  source 1..75: mol_type = other DNA
caattagcattttggagtcccggaggaatatttcctgacgcatatatagaacgcaaggaaaattcttatttgcag

SEQ ID NO: 104935 - DNA, 75 bp, synthetic construct
  source 1..75: mol_type = other DNA
aagatgaaacccaccgccttgcgcggatccgtctggatatccctaatgatgccgacatagactggaagattgata

SEQ ID NO: 104936 - DNA, 75 bp, synthetic construct
  source 1..75: mol_type = other DNA
caccattaaccactatccaccaaccgaaagatgaactgggggagctggcgattgatgtactcatccatcggataa

SEQ ID NO: 104937 - DNA, 75 bp, synthetic construct
  source 1..75: mol_type = other DNA
aatgagccggccagatgcatttgcaggcgttgctatagctattgcttttctagtatatgttatttgtcggtgggg

SEQ ID NO: 104938 - DNA, 75 bp, synthetic construct
  source 1..75: mol_type = other DNA
tcccggtaacgcgattggtactgaatatggctggcccactgcacaacagggctatttaagcgcggtggagcaagc

SEQ ID NO: 104939 - DNA, 75 bp, synthetic construct
  source 1..75: mol_type = other DNA
cggatggcacgatttataccttgtgcattatgactgcaatcctgagtcgagcgaagcatactggaatgaccatca

SEQ ID NO: 104940 - DNA, 75 bp, synthetic construct
  source 1..75: mol_type = other DNA
gagaatcagtgccagtgctttaagtgttgtaacggaaaaagaaaaaacaagacttaattggtatatttattatta

SEQ ID NO: 104941 - DNA, 75 bp, synthetic construct
  source 1..75: mol_type = other DNA
atcgttgggggtatttctcgctggcggcactgtggttctggcggccgaccccagcgccacgctttgcttcccatt

SEQ ID NO: 104942 - DNA, 75 bp, synthetic construct
  source 1..75: mol_type = other DNA
ggttgacctgaatatcgcagactatatggataaggaagacttcctgatccaagttatggcaggcgaagagtttgg

SEQ ID NO: 104943 - DNA, 75 bp, synthetic construct
  source 1..75: mol_type = other DNA
gagcgtaagggacgaaacatcgggctaactccttcaggggagtactttattcaacacagtaaacccattctcaac

SEQ ID NO: 104944 - DNA, 75 bp, synthetic construct
  source 1..75: mol_type = other DNA
tatttcactggtaatggaaggcgctctggctgttattgctgttgtgggtgtttactgcctggttgtgtttttgat

SEQ ID NO: 104945 - DNA, 75 bp, synthetic construct
  source 1..75: mol_type = other DNA
cgacgtggtgaaagtcaaagacattgaaattcatgcgcttgacgccttcgaccgtactgcactgatcaccctgcc

SEQ ID NO: 104946 - DNA, 75 bp, synthetic construct
  source 1..75: mol_type = other DNA
actacgacgaacgcggcatcgtatggcctgacgctatcgcgccgttccaggtggcgattctgccgatgaacatgc

SEQ ID NO: 104947 - DNA, 75 bp, synthetic construct
  source 1..75: mol_type = other DNA
atgtcaacttctatcagaatctgtagctacctactgctgccgctgatttacctgctggttaacgtcaaaatcgcc

SEQ ID NO: 104948 - DNA, 75 bp, synthetic construct
  source 1..75: mol_type = other DNA
gtgctgcgggttatgacaaaccattcaaaaccgttgccgaaggcgtaacggaatatatggcctggttgaatcgcg

SEQ ID NO: 104949 - DNA, 75 bp, synthetic construct
  source 1..75: mol_type = other DNA
ctccgttattaccaacaaaagatccaaaaggctccttacgccctggtgggatggactctctgtttcatggcaacc

SEQ ID NO: 104950 - DNA, 75 bp, synthetic construct
  source 1..75: mol_type = other DNA
gtttttactgttccggcgatctgatctctattgatccagagggttacatcaccgtgcaggggcgcgagaaagatc

SEQ ID NO: 104951 - DNA, 75 bp, synthetic construct
  source 1..75: mol_type = other DNA
atggctacattattcagaaaagaatatctgcgaagaagcagggctatagaactcttgtttctcattctgtttatc

SEQ ID NO: 104952 - DNA, 75 bp, synthetic construct
  source 1..75: mol_type = other DNA
gctggcggtatcaagattgaaattcaggacagggatggaagtaatgcatcatatcacaatggtatgttcaagacg

SEQ ID NO: 104953 - DNA, 75 bp, synthetic construct
  source 1..75: mol_type = other DNA
cgccagtcggcccccttccgtaaacaaaccagcctgaatggtttttatcaggataacggtggcgatgccgacttg

SEQ ID NO: 104954 - DNA, 75 bp, synthetic construct
  source 1..75: mol_type = other DNA
cagtcagctatcctccttttcactgccctgggctgacccggagaaaattccttacaccatcatgggcccttatct

SEQ ID NO: 104955 - DNA, 75 bp, synthetic construct
  source 1..75: mol_type = other DNA
taatcgcatttggtatggaggcgaacgtttttctaatggtgttgacatggtaattacccttcattactataccta

SEQ ID NO: 104956 - DNA, 75 bp, synthetic construct
  source 1..75: mol_type = other DNA
ggcagcgcttcatctaatcttggatatgccattgttaatacgcggtctttattggttgaaatcaccggtgtagct

SEQ ID NO: 104957 - DNA, 75 bp, synthetic construct
  source 1..75: mol_type = other DNA
ttcatgacgatggacggaacctttggtaacccggcctctcgttctcaccgtttcggctggcaggctgaagaagcg

SEQ ID NO: 104958 - DNA, 75 bp, synthetic construct
  source 1..75: mol_type = other DNA
gccggagcgtgtgccggaggcggacgaggtgccgccgccggagccgcccgcataccgggtgctgacgggcgtggt

SEQ ID NO: 104959 - DNA, 75 bp, synthetic construct
  source 1..75: mol_type = other DNA
atttttctggttgcgtctgccctgggaaactatccgtaatggcggactgtactggtggttgtcacttactgcccg

SEQ ID NO: 104960 - DNA, 75 bp, synthetic construct
  source 1..75: mol_type = other DNA
gaccggaagaaaatccgcttcacgtatctgtgggacggcgacagtattgcggaaatccgggaataccgcgatgat

SEQ ID NO: 104961 - DNA, 75 bp, synthetic construct
  source 1..75: mol_type = other DNA
aaaagatgctatcgatcaaatctggcccctggaaggctatctcctgaagcaaaagtggcatgaggcaaagcaatg

SEQ ID NO: 104962 - DNA, 75 bp, synthetic construct
  source 1..75: mol_type = other DNA
aacaaatgtatccagattcgtagtgctaagagaagtcgggccaagaatcccgttagaaacattaaggcaattacc

SEQ ID NO: 104963 - DNA, 75 bp, synthetic construct
  source 1..75: mol_type = other DNA
atgccggatagccgcaaagccagacgcattgccgacccagggctgcagccggagcgcacatcactggcgtggttt

SEQ ID NO: 104964 - DNA, 75 bp, synthetic construct
  source 1..75: mol_type = other DNA
gacgcggtgggcaggcttaaggcacagacggatgccgcaggccggacaacagagtacagcccggatgtggtgacg

SEQ ID NO: 104965 - DNA, 75 bp, synthetic construct
  source 1..75: mol_type = other DNA
aagcatatgcataaagtaacatcagaaatgttggagaaaatacgaaatgatgcagaatctaagattgaaaatgga

SEQ ID NO: 104966 - DNA, 75 bp, synthetic construct
  source 1..75: mol_type = other DNA
catccaaccgatattggggatgttccttataggtataggcttatgggggttctatgcacctgatgagggaacttg

SEQ ID NO: 104967 - DNA, 75 bp, synthetic construct
  source 1..75: mol_type = other DNA
cagacataaagacgcctttgaggcatacatgcttgggtacgactatgcaatgagcagcgcactgctcaaagctgc

SEQ ID NO: 104968 - DNA, 75 bp, synthetic construct
  source 1..75: mol_type = other DNA
cgggtgacggaagagcgtgactggggcggcgtggtctggcgttaccgctatgacgccgatggcctgtgtaccgcc

SEQ ID NO: 104969 - DNA, 75 bp, synthetic construct
  source 1..75: mol_type = other DNA
ggtttggattgtaccaacccttatgtcatttgtaatgaacaataccgctttatagttgctgaacagcttagaaaa

SEQ ID NO: 104970 - DNA, 75 bp, synthetic construct
  source 1..75: mol_type = other DNA
gagaccaacagctaccagttgcctgagtcgctggaaaaattttctcagcgtttcttagaagatcgcacaaaagca

SEQ ID NO: 104971 - DNA, 75 bp, synthetic construct
  source 1..75: mol_type = other DNA
tggatttcgattggcattctcgccatcgtggcgctgatcctctggcactacacccgtaatcgcaatttaatggat

SEQ ID NO: 104972 - DNA, 75 bp, synthetic construct
  source 1..75: mol_type = other DNA
gatttcagattaaaaaaatgtgttgatgatcttgggcgtccttttgatacggtgccgccggggttactctggatg

SEQ ID NO: 104973 - DNA, 75 bp, synthetic construct
  source 1..75: mol_type = other DNA
cgttatgcgatgatgatattgcctggcaaacggcacaaactggtgataaccagccctggcaggttaatgatgctt

SEQ ID NO: 104974 - DNA, 75 bp, synthetic construct
  source 1..75: mol_type = other DNA
ataccactaccccgatgaacacaccgtcatccgctgtatcctgccaccggaagatgaacgcgacagacaccccga

SEQ ID NO: 104975 - DNA, 75 bp, synthetic construct
  source 1..75: mol_type = other DNA
acggacaggtgctgcacgcaacgtcggagcagatcctgaaagacgattatatggtctgggccggcaatatgttcc

SEQ ID NO: 104976 - DNA, 75 bp, synthetic construct
  source 1..75: mol_type = other DNA
tgtttgaggcgatcgatcaactgcttgccgaaccattgtcgatccgtgatgtggtgatcacccgcgcattggctg

SEQ ID NO: 104977 - DNA, 75 bp, synthetic construct
  source 1..75: mol_type = other DNA
aatacggcaccagcaattgcgttggctgctattaaagctactgaatctggtcaagatccgctcttattagtactt

SEQ ID NO: 104978 - DNA, 75 bp, synthetic construct
  source 1..75: mol_type = other DNA
atggattatgaatttctgcgcgatgtaaccggagtggtaaaggtgcgcatgtccatggggcatgaggtggtcggg

SEQ ID NO: 104979 - DNA, 75 bp, synthetic construct
  source 1..75: mol_type = other DNA
ggcgatgtcatcagccataaaaccgaaaacagctatgtctatgcagagtctggcctggtgacgaccgtcggggta

SEQ ID NO: 104980 - DNA, 75 bp, synthetic construct
  source 1..75: mol_type = other DNA
gaataacagttagtcccggagagtcattgtctttacaaatacattaccacagggcagagcattggatcatacttt

SEQ ID NO: 104981 - DNA, 75 bp, synthetic construct
  source 1..75: mol_type = other DNA
catatcttcttcccgcagggcgatccgacagcagcaacgctacagtcgctcgccactttcgctatcgcctttgtc

SEQ ID NO: 104982 - DNA, 75 bp, synthetic construct
  source 1..75: mol_type = other DNA
aaaaagaaataacggtgcagctctctaacaccgccgaccgtccggcgctggcgcaagcctggctggataacggta

SEQ ID NO: 104983 - DNA, 75 bp, synthetic construct
  source 1..75: mol_type = other DNA
gcagtaccggattttccgccgtatctggcaccatcagccggaaacggcgttattgctgattggtgacccgaagca

SEQ ID NO: 104984 - DNA, 75 bp, synthetic construct
  source 1..75: mol_type = other DNA
gctcatccggctgccggggcagcagtatgatgaggagtccggcctgtattataaccgccaccgctattatgaccc

SEQ ID NO: 104985 - DNA, 75 bp, synthetic construct
  source 1..75: mol_type = other DNA
tacgcgacagaagtgaatattatattcatcgcgagacttaccgaccttggggtaaatgcgataccattgataaag

SEQ ID NO: 104986 - DNA, 75 bp, synthetic construct
  source 1..75: mol_type = other DNA
cgccattatgctggctatcgacctgttgttgcaggggcgtcgtggggcacatgccatgaccatgaaacaggctgc

SEQ ID NO: 104987 - DNA, 75 bp, synthetic construct
  source 1..75: mol_type = other DNA
gatcctgtatatcttcggtgccttcctgctgtttaccggcgtgaagatggcgctggcccatgaagatgaatcagg

SEQ ID NO: 104988 - DNA, 75 bp, synthetic construct
  source 1..75: mol_type = other DNA
ttgccaggtggttacgctgaagctgctgactggctggatgtaacagagaacgcattatttaatcgccttcgtgcc

SEQ ID NO: 104989 - DNA, 75 bp, synthetic construct
  source 1..75: mol_type = other DNA
ccgcaacaaggaatttacgcaacccgccccgatgccgggttgattgcgctgatggatgagatgtttgccggtatg

SEQ ID NO: 104990 - DNA, 75 bp, synthetic construct
  source 1..75: mol_type = other DNA
cgcctgagtatgtaatgactgacgcaggagaaattctggtaggcagagggaagctacttggcggtagaaactctc

SEQ ID NO: 104991 - DNA, 75 bp, synthetic construct
  source 1..75: mol_type = other DNA
gatgcagatgcaccaccaccgcgccgagcactgggtcattctcgccggcaccggccaggtgacggtcaacggcaa

SEQ ID NO: 104992 - DNA, 75 bp, synthetic construct
  source 1..75: mol_type = other DNA
ctcgcatcctcaagcgccacggcggatgcaatatcctctgcacgttttgccgctgtctcagcgcgcgttgctgca

SEQ ID NO: 104993 - DNA, 75 bp, synthetic construct
  source 1..75: mol_type = other DNA
atcagcccggtacatctgcgtgaagccgccgagaacttcaacccggatgtttacgctgcccgcgtgaacgttgag

SEQ ID NO: 104994 - DNA, 75 bp, synthetic construct
  source 1..75: mol_type = other DNA
gccgggaagattacggacgggaaacacggcgggagtaccggctggaccggaacggccaggtcacggcggtgacag

SEQ ID NO: 104995 - DNA, 75 bp, synthetic construct
  source 1..75: mol_type = other DNA
gcgaaaccatttgtcgtatgtaatgaatcacatagatttcttgtggctgaatctctaagaaaacttggtaagtta

SEQ ID NO: 104996 - DNA, 75 bp, synthetic construct
  source 1..75: mol_type = other DNA
ccagctaccgtatgccttatttccggcctcaaagctggtgagagattgcaggtgcgcctgcgtccaattgcagaa

SEQ ID NO: 104997 - DNA, 75 bp, synthetic construct
  source 1..75: mol_type = other DNA
ggactatacttgtggtggccaagaccaacggggagaatcaaaaggagatggtctatgggggccaggtaaagcaag

SEQ ID NO: 104998 - DNA, 75 bp, synthetic construct
  source 1..75: mol_type = other DNA
gagaagccggaccgcgagcgcgccgaggcctacctcgcctccggggagtactactggaacagcggcatgtttatg

SEQ ID NO: 104999 - DNA, 75 bp, synthetic construct
  source 1..75: mol_type = other DNA
gtcttggggcgattttgaatgagactggcgatgttatttccgatattgcgctctatttaccgtttttatttttac

SEQ ID NO: 105000 - DNA, 75 bp, synthetic construct
  source 1..75: mol_type = other DNA
ttatccctgaaaaattcagtctgcgagtcaacagaggtaacacattgattgttagcgtacttatcggactatata

SEQ ID NO: 105001 - DNA, 75 bp, synthetic construct
  source 1..75: mol_type = other DNA
tggtgattggtctgttgccgggctacgccacgattggtattttcgccccgctgttgctggcgctggctcgatttg

SEQ ID NO: 105002 - DNA, 75 bp, synthetic construct
  source 1..75: mol_type = other DNA
cgatatcgccgcgcttaccgcacatctggataaactgctcccgcaatcccctgaagaagacgaaaaagcgccccg

SEQ ID NO: 105003 - DNA, 75 bp, synthetic construct
  source 1..75: mol_type = other DNA
tacaagggaagttttcgatgaaaaggcatgtcgccgtttccttgccgggaaggtggcaaataaattgggccgtgg

SEQ ID NO: 105004 - DNA, 75 bp, synthetic construct
  source 1..75: mol_type = other DNA
atctggcgcaaacgtggcgttatgccgatgctgcgggcgctgatgtcggcgcgtaacattgcagaaaacttgctg

SEQ ID NO: 105005 - DNA, 75 bp, synthetic construct
  source 1..75: mol_type = other DNA
gcggaacgcttggctgatttggtgccggaagtattgcgtaaaccagatctggttacgagagaagttttcgatgaa

SEQ ID NO: 105006 - DNA, 75 bp, synthetic construct
  source 1..75: mol_type = other DNA
attgccctgaatgtgacgagccgctgcactatatccgtgatgcggtgagtgaaaagctggagtatattcccgctc

SEQ ID NO: 105007 - DNA, 75 bp, synthetic construct
  source 1..75: mol_type = other DNA
aggtctggcgggaatacccgttgcgtgccggggcaaacccgaagaaatccgctttcagtgcctggaaggccagat

SEQ ID NO: 105008 - DNA, 75 bp, synthetic construct
  source 1..75: mol_type = other DNA
atgagtaagttctttaccctcaaggccggggacgttgtactaacaggcacgcctgacggcgtcggccctttacag

SEQ ID NO: 105009 - DNA, 75 bp, synthetic construct
  source 1..75: mol_type = other DNA
gcggctcaaagaggatggaatatggataccggatgcttatccgaaaaaacgcaaatcacgtaagcgtcgcgccaa

SEQ ID NO: 105010 - DNA, 75 bp, synthetic construct
  source 1..75: mol_type = other DNA
ttttaatttaaatactattttacaggtaaatttaatgacctgtggttttgaagatcaatccatcgacactggacg

SEQ ID NO: 105011 - DNA, 75 bp, synthetic construct
  source 1..75: mol_type = other DNA
ctgctgatgaactggcgcagctgccgttttatcaggccgatacgcaacgccagcaagaatgggcggcaatggtac

SEQ ID NO: 105012 - DNA, 75 bp, synthetic construct
  source 1..75: mol_type = other DNA
ccacaacttatgcagaatagaattaaatggaataaaaacatccattatttttctaatgttgctgatttttctcat

SEQ ID NO: 105013 - DNA, 75 bp, synthetic construct
  source 1..75: mol_type = other DNA
gtccacgaaaaaccctggcaaggaattggtgtgggtgcggccgttgggctggttctaggactgttgctggcacgc

SEQ ID NO: 105014 - DNA, 75 bp, synthetic construct
  source 1..75: mol_type = other DNA
ctaactgtctgctggggatgggagagaaccagcatcgtcggatctggtttatctacgacgaacttccgtcgctga

SEQ ID NO: 105015 - DNA, 75 bp, synthetic construct
  source 1..75: mol_type = other DNA
gagttttaatagactttatttgaaaggaatgataggtttttggacaaagcatcttaaattcagagataaggtttt

SEQ ID NO: 105016 - DNA, 75 bp, synthetic construct
  source 1..75: mol_type = other DNA
gttaacggcgggctggtaaaagcggcgggtgttcatgcgcgtttggggcatggtcgatacctgattgccgaagcg

SEQ ID NO: 105017 - DNA, 75 bp, synthetic construct
  source 1..75: mol_type = other DNA
attgccagtggcgatgtggctggcacagctgcaggggctggtgttgggaagaacattgctgagaataacttggtt

SEQ ID NO: 105018 - DNA, 75 bp, synthetic construct
  source 1..75: mol_type = other DNA
acgccgtgcttcggcgctcgtctggtacaggaaggcaaccgcatatactttttggctgaccgggcaggatttaat

SEQ ID NO: 105019 - DNA, 75 bp, synthetic construct
  source 1..75: mol_type = other DNA
tggacggaacgcgaagcgcgtagccgttgcccgtccggttgtgttgctgtattcgccgcccgtattcgtcaggag

SEQ ID NO: 105020 - DNA, 75 bp, synthetic construct
  source 1..75: mol_type = other DNA
tcctgtaacagacagatggttgccgcttgccgatcttcgtagcccggttaaggccacggacatcatttaccgtcc

SEQ ID NO: 105021 - DNA, 75 bp, synthetic construct
  source 1..75: mol_type = other DNA
atgagaataattattacgattttggttttattgctgacgggatgtacttctgatgcggtaaatcaacgagggctt

SEQ ID NO: 105022 - DNA, 75 bp, synthetic construct
  source 1..75: mol_type = other DNA
catgagtcgttaaaactcttaacgttctgcgttatggttctcaaaaatggatataccgtaacgggaaaatctgcg

SEQ ID NO: 105023 - DNA, 75 bp, synthetic construct
  source 1..75: mol_type = other DNA
gaaaacgagtcgatttatattccgctgggggcgatgcactgcctggaaaacccggggaaaatagatttagaatta

SEQ ID NO: 105024 - DNA, 75 bp, synthetic construct
  source 1..75: mol_type = other DNA
atctcgaagaactgaaaaaatatcgcccggatattctcgatgcctgtgaaaaagcgatgagcgccgtcgatccgg

SEQ ID NO: 105025 - DNA, 75 bp, synthetic construct
  source 1..75: mol_type = other DNA
aacgcataactgtgaaaccgggcgagggcttgtcggtacagatgcatcatcaccgcgcagaacactgggtggtgg

SEQ ID NO: 105026 - DNA, 75 bp, synthetic construct
  source 1..75: mol_type = other DNA
ccggtgatgtgctggcggttgagaacctcaatattgcctttatacaagacctgcagaaaatggctgcggttcgcg

SEQ ID NO: 105027 - DNA, 75 bp, synthetic construct
  source 1..75: mol_type = other DNA
cgttgagattggcccacggcgcgcggtatttgaaaatccgcaacacccttatacgcgtaaattgctggcggcagt

SEQ ID NO: 105028 - DNA, 75 bp, synthetic construct
  source 1..75: mol_type = other DNA
ggcaccggataagtgaagagactgaccagtatgccggaggccaccggctgaaacaggccggaaacacgcagtatg

SEQ ID NO: 105029 - DNA, 75 bp, synthetic construct
  source 1..75: mol_type = other DNA
tgcggctaccgggaaaacgggaacggaatttgttcagcgagcgacgacgttttttggaccggaccggaattttga

SEQ ID NO: 105030 - DNA, 75 bp, synthetic construct
  source 1..75: mol_type = other DNA
atgcccctagccgcgaagtgctggagctcgttctaaaaatcgcagcaaaagttgaaaaccattcctcaaccatcg

SEQ ID NO: 105031 - DNA, 75 bp, synthetic construct
  source 1..75: mol_type = other DNA
atgaatcaaccaatacacaatgcttactggttatcccgttttgacagccttctcgacagtgctctgtcgcagcac

SEQ ID NO: 105032 - DNA, 75 bp, synthetic construct
  source 1..75: mol_type = other DNA
cggaaaccggaatgtacctggtgagtgatccgctggggttgctggggggtaagcagacttaccggtatgtgccga

SEQ ID NO: 105033 - DNA, 75 bp, synthetic construct
  source 1..75: mol_type = other DNA
aacagcgtggtcacggtatcgcccaggatttgatgcctcggctggatgtcgatgctgcaggcgttgccagcgtcg

SEQ ID NO: 105034 - DNA, 75 bp, synthetic construct
  source 1..75: mol_type = other DNA
cctctcaatgaaacgggtgttagcctgagtcagctttccgaccgcgataaacaggtggagatggagttttacctg

SEQ ID NO: 105035 - DNA, 75 bp, synthetic construct
  source 1..75: mol_type = other DNA
cagggcatgaatacacgctgtggatggacggtgaagaggtgatggttcgcgccaatcaactggaattcgctggcg

SEQ ID NO: 105036 - DNA, 75 bp, synthetic construct
  source 1..75: mol_type = other DNA
atctcataattttagcagtgccatttatgataaaaacatcccttaaaaccaatctaatctttttcttcctctgtg

SEQ ID NO: 105037 - DNA, 75 bp, synthetic construct
  source 1..75: mol_type = other DNA
atgcctgatcatatgtgtagcaacggtcggtttatccccgctggcgcggggaactctgatgttcaagtgtgtatg

SEQ ID NO: 105038 - DNA, 75 bp, synthetic construct
  source 1..75: mol_type = other DNA
tatgataaaaacatcccttaaaaccaatctaatctttttcttcctctgtgtatttgttccccgtatggcgtcata

SEQ ID NO: 105039 - DNA, 75 bp, synthetic construct
  source 1..75: mol_type = other DNA
gaaaatgagtccatctatattccactgggggcgacacattgtttggaaaatccaggaaaaatacctttagaaata

SEQ ID NO: 105040 - DNA, 75 bp, synthetic construct
  source 1..75: mol_type = other DNA
tcgcagagcggcgaaattatctttaacggtcagcgaatcgatactctctcgcccggtaaacttcagtcgttgcgc

SEQ ID NO: 105041 - DNA, 75 bp, synthetic construct
  source 1..75: mol_type = other DNA
gcaaagtaatcctcatgccataaccgctggacttaactgtacccccttcccgctgatgaccttcagcgcggagca

SEQ ID NO: 105042 - DNA, 75 bp, synthetic construct
  source 1..75: mol_type = other DNA
atagacatcgcgggtaaaatgatccgctggattgaacgccatgctacggcggaatattgcttaaaaaccggtggt

SEQ ID NO: 105043 - DNA, 75 bp, synthetic construct
  source 1..75: mol_type = other DNA
ctagtcttttcgtttcctgcgcccctctagttgcaccaaatacactaaatgcggttattcaaactgagtcttctg

SEQ ID NO: 105044 - DNA, 75 bp, synthetic construct
  source 1..75: mol_type = other DNA
aacgcaatttttaaatgattccaattactattggaatagtggtatgtttatgtttagcgcccgaacttatcttga

SEQ ID NO: 105045 - DNA, 75 bp, synthetic construct
  source 1..75: mol_type = other DNA
gttcaatcagcatttatccatggtctgagcgcttcgcgctcgctaaccatatcgaggcgggcgcaattgaaaaat

SEQ ID NO: 105046 - DNA, 75 bp, synthetic construct
  source 1..75: mol_type = other DNA
tccaatggtaacaacagattacaatgatacggtttatgttggttattaccagagtggtaaagaaacaacatcgta

SEQ ID NO: 105047 - DNA, 75 bp, synthetic construct
  source 1..75: mol_type = other DNA
aacaggcgctggagcatgcaaacattcacccgttgcataatggtaatttgccatttcagggtggcgcactgggtt

SEQ ID NO: 105048 - DNA, 75 bp, synthetic construct
  source 1..75: mol_type = other DNA
cgcgacgggcatggtgggccgggaatctgaactgttccgctacaccgtgaagcacagtctgatttttgccagcgt

SEQ ID NO: 105049 - DNA, 75 bp, synthetic construct
  source 1..75: mol_type = other DNA
atttgggtggaaacaccataagtaaaatttattcacgtggggatgaatatgtcatttatgaagtagccaatcttc

SEQ ID NO: 105050 - DNA, 75 bp, synthetic construct
  source 1..75: mol_type = other DNA
atcacctgctggacgcgccagcagatggaaggtcacgccacccgctcgcaacaagtcttatcggtcacggccccg

SEQ ID NO: 105051 - DNA, 75 bp, synthetic construct
  source 1..75: mol_type = other DNA
ctgattgaaagcatcaatctcgacagttcatcggcagaaaatgtgggctttgccattgccgaccgaatgatgcgt

SEQ ID NO: 105052 - DNA, 75 bp, synthetic construct
  source 1..75: mol_type = other DNA
agcaggacagccagaaaatcacttcgctgaccacagagctgacagcactgaaggaaaaactgcgcacgcaggacg

SEQ ID NO: 105053 - DNA, 75 bp, synthetic construct
  source 1..75: mol_type = other DNA
ggcaggtgacgtcggtgacgtacccggacgggcttcgcagcagccgggagtatgatgagaagggaaggctgacgg

SEQ ID NO: 105054 - DNA, 75 bp, synthetic construct
  source 1..75: mol_type = other DNA
agcctgaaccggcgggaggtgctgtacacggagggcgaaggcggcctgaagcgggtggtgaagaaggagcatgcg

SEQ ID NO: 105055 - DNA, 75 bp, synthetic construct
  source 1..75: mol_type = other DNA
atcatgtggatgaaatttttgttttacagttcgaccattctttaagtcgagagtataatgtagtgcatcacccca

SEQ ID NO: 105056 - DNA, 75 bp, synthetic construct
  source 1..75: mol_type = other DNA
atctgagtctggaatacggtattgcgcgtctggatggtaatggttcagataccgcaggcgataatggtgtgactg

SEQ ID NO: 105057 - DNA, 75 bp, synthetic construct
  source 1..75: mol_type = other DNA
atgttctgctcaacgacgacgcagaaacaccacccggatggcggtcaaaaacaggttcccattctgcaaaaagat

SEQ ID NO: 105058 - DNA, 75 bp, synthetic construct
  source 1..75: mol_type = other DNA
agcgttgtgccgacgcaaggcgcgttggttcgtgccaattttgatacccgcataggcgtgcgggcgctcattacc

SEQ ID NO: 105059 - DNA, 75 bp, synthetic construct
  source 1..75: mol_type = other DNA
cgtgctaatcgtggaccgttagtgatggaagtgaatgcgtcgccaggtctggaaggcatagaaaaaacgaccggt

SEQ ID NO: 105060 - DNA, 75 bp, synthetic construct
  source 1..75: mol_type = other DNA
aaaaacaacctgactggtacgtgaaagctgtcagaaaaactatcgcggcattgccaggtggttacgctgaagctg

SEQ ID NO: 105061 - DNA, 75 bp, synthetic construct
  source 1..75: mol_type = other DNA
gcgtgccgggctcacctttcagggcgttttgcgtgcgttattgcgccaggatcctgacgtcatcatgatccgatg

SEQ ID NO: 105062 - DNA, 75 bp, synthetic construct
  source 1..75: mol_type = other DNA
caagtctgggcactgaacgcctgaagtttgccgcacagcaacgcgccagcatcatgcagttcagtaagtgcacaa

SEQ ID NO: 105063 - DNA, 75 bp, synthetic construct
  source 1..75: mol_type = other DNA
agtgaaggaggaaattgcttggctgattgaagcggactttgacggtgaggtgctggagaataatgaataccgtct

SEQ ID NO: 105064 - DNA, 75 bp, synthetic construct
  source 1..75: mol_type = other DNA
ttacgctgcccgcgtgaacgttgagcactatctctcgccatgcccgtcaagcgaattttccgcaatgggcgatgt

SEQ ID NO: 105065 - DNA, 75 bp, synthetic construct
  source 1..75: mol_type = other DNA
acctcttctgacactggcgttgaattattacctgtagaaataacgccggatgagcagaaagaacctgtggcggcc

SEQ ID NO: 105066 - DNA, 75 bp, synthetic construct
  source 1..75: mol_type = other DNA
tctggcactacgatgcgtcggaccgcatcacgcaccggacggtgaacggcgacccggcggagcagtggcagtatg

SEQ ID NO: 105067 - DNA, 75 bp, synthetic construct
  source 1..75: mol_type = other DNA
aaggtctaattggttttcacttccgtagtgcccgaggtggacagataaaaatggtgcaattagcgggtgacgaac

SEQ ID NO: 105068 - DNA, 75 bp, synthetic construct
  source 1..75: mol_type = other DNA
acgtccataatgaatattatgttaatcgcatcgctgggatcgctgggatcgctgggcgcgcagtcgagtttataa

SEQ ID NO: 105069 - DNA, 75 bp, synthetic construct
  source 1..75: mol_type = other DNA
gggagggggacccggaacagaatcccttcgggctggcgcttgactgctacagcagcacaccacaacggctggaag

SEQ ID NO: 105070 - DNA, 75 bp, synthetic construct
  source 1..75: mol_type = other DNA
gaacccggagacgggggagatgctgtggcagcatgagacgaaacacgcctacaacgaacaggggctggcaaaccg

SEQ ID NO: 105071 - DNA, 75 bp, synthetic construct
  source 1..75: mol_type = other DNA
tgttcgtatcgcttcctgaaattgaggaagtagagaacgccgatataaaccagcgcctgctggaagtcatcgaac

SEQ ID NO: 105072 - DNA, 75 bp, synthetic construct
  source 1..75: mol_type = other DNA
agctgtcagaaaaactatcgcaaagttgccgggtggttacgctgaagcagctgactggctggatgtaacagagaa

SEQ ID NO: 105073 - DNA, 75 bp, synthetic construct
  source 1..75: mol_type = other DNA
aagaccgcgaccagcatattcagacgctgcgtattgtctgcggcgtgcttgcctttttccttatgtttgcctgtg

SEQ ID NO: 105074 - DNA, 75 bp, synthetic construct
  source 1..75: mol_type = other DNA
cgtcttttagtagatgaaaatggcatagctaaagaaatattgggcttccgcaaaagaaagagtattcaaacagat

SEQ ID NO: 105075 - DNA, 75 bp, synthetic construct
  source 1..75: mol_type = other DNA
cgctttattcaaccgccttcgtgcagatggcgatcagattttcccgctgggatgggcaatggttttacagcgcgc

SEQ ID NO: 105076 - DNA, 75 bp, synthetic construct
  source 1..75: mol_type = other DNA
ggaatttttctgtattgatgacaacaatcctgatttaatggatgaatactttaatactctcttaaacgctctcta

SEQ ID NO: 105077 - DNA, 75 bp, synthetic construct
  source 1..75: mol_type = other DNA
acctgacgggtgagggggatggagatgatgaaatcattcgcgtcgatctcacaaaattgccggcaaatgttgaat

SEQ ID NO: 105078 - DNA, 75 bp, synthetic construct
  source 1..75: mol_type = other DNA
ggatgaaggcgcggaacaacgtattgccggtgcgctggccgcacttaacgaagcaaaagacgcacactcggccag

SEQ ID NO: 105079 - DNA, 75 bp, synthetic construct
  source 1..75: mol_type = other DNA
gttgaagtgagcaccgatcacgatgtcacccctggcagcaaagcgcaggccaaagtgggagacaccatcgtgatg

SEQ ID NO: 105080 - DNA, 75 bp, synthetic construct
  source 1..75: mol_type = other DNA
ccgaattagcgaagaaatataatctgacgctgcaatggatttataagatagtcaaacgtgtacatacggagaagc

SEQ ID NO: 105081 - DNA, 75 bp, synthetic construct
  source 1..75: mol_type = other DNA
tttccggttatgcctatgcgcgtctgggggcgagctatcccagcaatggcggtattatcgacttctttcgtcgcg

SEQ ID NO: 105082 - DNA, 75 bp, synthetic construct
  source 1..75: mol_type = other DNA
gcatgaagtaaaacaacgcttcaagactcatgcagcaccctacaaagatttcaaggatggatggtcggaaactct

SEQ ID NO: 105083 - DNA, 75 bp, synthetic construct
  source 1..75: mol_type = other DNA
cagtacaaccaaaattggttttcgccgtagtactttcttgcgcagttatatgtatgatttcattcagcgttttgc

SEQ ID NO: 105084 - DNA, 75 bp, synthetic construct
  source 1..75: mol_type = other DNA
agctgtcagaaaaactatcgcggcattgccaggtggttacgctgaagctgctgattggctggatgtaacagagaa

SEQ ID NO: 105085 - DNA, 75 bp, synthetic construct
  source 1..75: mol_type = other DNA
agtgccagttcctgtaaagtagagttccgtcacggtaaaatgacgctggaaaatccttcaccagagctgctcacg

SEQ ID NO: 105086 - DNA, 75 bp, synthetic construct
  source 1..75: mol_type = other DNA
ctccgcgccgccagtcagcgtccgtggtgggaagtgccgcccgccacggtgtacgcctttgcgttttcggtgttt

SEQ ID NO: 105087 - DNA, 75 bp, synthetic construct
  source 1..75: mol_type = other DNA
cgaggtaccgggccgatcaccaagcggcgacaagtgggaggctgatgttctcttctcggtttccggtcgcaccat

SEQ ID NO: 105088 - DNA, 75 bp, synthetic construct
  source 1..75: mol_type = other DNA
acgaacatgcgtgggatgcggtcgtcgaagagttcgatggttatcggcaaatctggcgcaaacgtggcgttatgc

SEQ ID NO: 105089 - DNA, 75 bp, synthetic construct
  source 1..75: mol_type = other DNA
gcctggttgctggcattcgcatcaaaggagagtgttttgataaagagaggctttcatctgtcaggttaacttcaa

SEQ ID NO: 105090 - DNA, 75 bp, synthetic construct
  source 1..75: mol_type = other DNA
gcgcggtcagcctgtgccaggtggacggctgggcgtgaagatttacgaaatcagaggtggtaacgatggcgcgtg

SEQ ID NO: 105091 - DNA, 75 bp, synthetic construct
  source 1..75: mol_type = other DNA
ttcgccaacggcactttcctgctgctttcctggttgctgacggacgagcagtttatgagctggggctggcgcgta

SEQ ID NO: 105092 - DNA, 75 bp, synthetic construct
  source 1..75: mol_type = other DNA
cgtgaagtacagccactattacaacgatcctaaatccttctttgaagtgcttcgcaaggttgatataagtcgggg

SEQ ID NO: 105093 - DNA, 75 bp, synthetic construct
  source 1..75: mol_type = other DNA
atgattgaaattccattacccttatttatttcaatctatatagctctgctcataggaatgaactgtacgaaaaac

SEQ ID NO: 105094 - DNA, 75 bp, synthetic construct
  source 1..75: mol_type = other DNA
atcctgacgtcattatgatcggagagatccgcgatggcgaaacggcagaaattgccattaacgccgcacaaacgg

SEQ ID NO: 105095 - DNA, 75 bp, synthetic construct
  source 1..75: mol_type = other DNA
gcgtaaagcgacgctggtcgcctcgttgctaacgatggggatttcgaccgtggtgattggtctgctgccgggcta

SEQ ID NO: 105096 - DNA, 75 bp, synthetic construct
  source 1..75: mol_type = other DNA
atgaattgctaatattaacaggctgcaaatatgcaagccaccagcgaaaatggttaatggaaaacgggcttccgt

SEQ ID NO: 105097 - DNA, 75 bp, synthetic construct
  source 1..75: mol_type = other DNA
atgcaagcaacagccacaacactcgaaaataaccaggaattcacgccggtaaactcgcgtaataaagtccttgtc

SEQ ID NO: 105098 - DNA, 75 bp, synthetic construct
  source 1..75: mol_type = other DNA
gccgaaggttgggggtagggcagatagcgcaagcagagattcagttgcggcatgtgttctggctttccactcttg

SEQ ID NO: 105099 - DNA, 75 bp, synthetic construct
  source 1..75: mol_type = other DNA
gtggtgaatggggcggcgctgctggcgactgaaaacgccccaccgcgcaaacgtgcattgtacggctccttcccg

SEQ ID NO: 105100 - DNA, 75 bp, synthetic construct
  source 1..75: mol_type = other DNA
aatatccggtatgataataaagacaaccttcacaaaattggtgatggcacattagatgtccgaaaaacccagaac

SEQ ID NO: 105101 - DNA, 75 bp, synthetic construct
  source 1..75: mol_type = other DNA
tcgttgcaacttcatcatcatcggtctgagcactgggtagttgtctctggtaccgcaaagattacaattaatggc

SEQ ID NO: 105102 - DNA, 75 bp, synthetic construct
  source 1..75: mol_type = other DNA
acgggttaggcgcagtggggttatatctggcggcgatggctggcttgacgttaattgccttgctgctgacgcatg

SEQ ID NO: 105103 - DNA, 75 bp, synthetic construct
  source 1..75: mol_type = other DNA
actgaaaatgccccgccgcgcaaacgtgcgctttacggctctttcccgcaactgggcgccccaattggcttcttc

SEQ ID NO: 105104 - DNA, 75 bp, synthetic construct
  source 1..75: mol_type = other DNA
tttcgctaccaccaaacgtattgagatcacctgctggacgcgccaacagatggaaggtcacgccagtcacacaca

SEQ ID NO: 105105 - DNA, 75 bp, synthetic construct
  source 1..75: mol_type = other DNA
cagtttgttgaaaagcctaatatagaaactgcacatgaatatgtcacaagtggagaatattactggaatagtggt

SEQ ID NO: 105106 - DNA, 75 bp, synthetic construct
  source 1..75: mol_type = other DNA
aatcagggataacgtccgctttggactggagtttgagaaatccgcctttggtaagtacaacgttgataatgctgt

SEQ ID NO: 105107 - DNA, 75 bp, synthetic construct
  source 1..75: mol_type = other DNA
agccggtcagcctgtcagtcagcgcgccggttttttcccggaagaagccacatggggcgggctggttccgtcact

SEQ ID NO: 105108 - DNA, 75 bp, synthetic construct
  source 1..75: mol_type = other DNA
tttcggcagcaccagtgaaaaatgtaaatgaaaacatttaccaggccttagaagatgcggaagtgttgcttaaaa

SEQ ID NO: 105109 - DNA, 75 bp, synthetic construct
  source 1..75: mol_type = other DNA
cttggttgaccctgagcaacctgttgatcctggtgatttctgtatcgctagacttggtggtgatgaattcacatt

SEQ ID NO: 105110 - DNA, 75 bp, synthetic construct
  source 1..75: mol_type = other DNA
tgttacagcaggtgagccaggcactggatgttaacacgctgggaatgcagccgttacaactggcgggctttgctc

SEQ ID NO: 105111 - DNA, 75 bp, synthetic construct
  source 1..75: mol_type = other DNA
tcattcatgtaaaatgtgggaaatcattcagttctccaaaatcctcagcaggagcgatagcagaagtcggaagtc

SEQ ID NO: 105112 - DNA, 75 bp, synthetic construct
  source 1..75: mol_type = other DNA
atgctttatttatgcctatttggtctgcctcatgggtgctacccgctggatttaagggtgctcgcgatgcacgtt

SEQ ID NO: 105113 - DNA, 75 bp, synthetic construct
  source 1..75: mol_type = other DNA
gctcctggacacaggtacagaaggtgctagggtgcagccgcggcacaatcagtagcgcaataaaacgtaaatccc

SEQ ID NO: 105114 - DNA, 75 bp, synthetic construct
  source 1..75: mol_type = other DNA
ttcagcgcaaatgaaggcgctgacagatgccggtaagaaagtctattccagtatcgaattgcacccgcaatttgc

SEQ ID NO: 105115 - DNA, 75 bp, synthetic construct
  source 1..75: mol_type = other DNA
aacgaagcgcacaacacgcgccctgcgtgtttttttgtgccggatagtcacaccttatcaatggtgggctgtatg

SEQ ID NO: 105116 - DNA, 75 bp, synthetic construct
  source 1..75: mol_type = other DNA
tggagcattgcttcaattctgcttctctggactgcgattaatcgttgtcgaagcgtgctccttatgagcgctgaa

SEQ ID NO: 105117 - DNA, 75 bp, synthetic construct
  source 1..75: mol_type = other DNA
cacgctggtgatagcccaacgcctgctccgtaaactttgtccgcattgccgccaacagcaaggagcgccaatcca

SEQ ID NO: 105118 - DNA, 75 bp, synthetic construct
  source 1..75: mol_type = other DNA
caagcttgggcactgagcgtctgaagtttgcggcccagcagcgtcagcaggtacaggcgttcaatcagcagcagg

SEQ ID NO: 105119 - DNA, 75 bp, synthetic construct
  source 1..75: mol_type = other DNA
tattcccgacaatgtatggacatcgccgctgccccgctggcaagcacccggttgtagacactgctaccacggttt

SEQ ID NO: 105120 - DNA, 75 bp, synthetic construct
  source 1..75: mol_type = other DNA
atcgaggcgatacagacgccgcacgcgtctttttttgtatcggcgcacacgcacacctatacaatggtgggctgt

SEQ ID NO: 105121 - DNA, 75 bp, synthetic construct
  source 1..75: mol_type = other DNA
tccctaaaaataaaaagcctccatacagacagagaactaaaaaagaaaacttatttcttctatggtgcggagaga

SEQ ID NO: 105122 - DNA, 75 bp, synthetic construct
  source 1..75: mol_type = other DNA
cgtaccatcatgatcttcactggtagctggctgatttcacagttcgactggatcctgtatatcttcggcgcattc

SEQ ID NO: 105123 - DNA, 75 bp, synthetic construct
  source 1..75: mol_type = other DNA
ggaagtaatggggatcggtattcctgcgagcgttgaatctgtattatttaccagtggccggttattaacacaaat

SEQ ID NO: 105124 - DNA, 75 bp, synthetic construct
  source 1..75: mol_type = other DNA
tgtgtttaaaatgttgagatcatctgccgcaatacttcatgggatcaataacctgcgtaacaattacagcatggc

SEQ ID NO: 105125 - DNA, 75 bp, synthetic construct
  source 1..75: mol_type = other DNA
aaaaccacgctggcaaagcaggacgccaacaccttcagccgccagcccgcacagggcggtaacaccggcgtcgaa

SEQ ID NO: 105126 - DNA, 75 bp, synthetic construct
  source 1..75: mol_type = other DNA
tggcgtgctcggggcgattgttctgcgtaccgtcatgatcttcaccggtagctggctgatttcgcagttcgactg

SEQ ID NO: 105127 - DNA, 75 bp, synthetic construct
  source 1..75: mol_type = other DNA
gaatctgctccactgcagaactatccatttatacaaatcttaactatcaggtaccaaacatagctacgccagggc

SEQ ID NO: 105128 - DNA, 75 bp, synthetic construct
  source 1..75: mol_type = other DNA
ccgaagaaatccgctttcagtgcctggaaggccagattgcgcgagggggtgccaccagagaccatgctggatggt

SEQ ID NO: 105129 - DNA, 75 bp, synthetic construct
  source 1..75: mol_type = other DNA
gcaaatcagattccggatatgaatgacttcacatccagcctgaccagccctggctggcaaaaattaccgtcaggt

SEQ ID NO: 105130 - DNA, 75 bp, synthetic construct
  source 1..75: mol_type = other DNA
cgcctcggtcaccaacgctaatggcaacaccgggagcggcacgcgggatatcaccattgatgccaacctgccggg

SEQ ID NO: 105131 - DNA, 75 bp, synthetic construct
  source 1..75: mol_type = other DNA
tttctttcagaaaattggccaaaatacagagcatatccattccgacaaagaataataaggagtataaccgccata

SEQ ID NO: 105132 - DNA, 75 bp, synthetic construct
  source 1..75: mol_type = other DNA
cttcgctacacctgcgcatcaccgatcccaacggtattaacgtctattacggcaataccgtgaagctgtacaact

SEQ ID NO: 105133 - DNA, 75 bp, synthetic construct
  source 1..75: mol_type = other DNA
taccacgctcacgctgaccggttcgctgggagcggggcttgccagcggcgaagtggcgcagattagccttgatag

SEQ ID NO: 105134 - DNA, 75 bp, synthetic construct
  source 1..75: mol_type = other DNA
ttaaagctggacatgatcagcgacgaaaataaggcacgcctgacccgctggatgacatatatcggtgaagtcaaa

SEQ ID NO: 105135 - DNA, 75 bp, synthetic construct
  source 1..75: mol_type = other DNA
aagctgcatccgtagcggaaaccgatggtaaagcctttcctcagccagcaggtgttgcgttaccagtccgggaaa

SEQ ID NO: 105136 - DNA, 75 bp, synthetic construct
  source 1..75: mol_type = other DNA
agaaacagtggaagacactgagcgctcacaggcatcgttaaccggaacccgggcggatgacctgatttttctgtc

SEQ ID NO: 105137 - DNA, 75 bp, synthetic construct
  source 1..75: mol_type = other DNA
aagtgatcacctatagcttcgttgatccgaaagtgcagcagatgatccatccaggcgttgaagccttactgctgc

SEQ ID NO: 105138 - DNA, 75 bp, synthetic construct
  source 1..75: mol_type = other DNA
atgaaattcagtgaactgtggttacgcggatgggtgaacccggcgattgatagcgacgcgcccgactgcttaggt

SEQ ID NO: 105139 - DNA, 75 bp, synthetic construct
  source 1..75: mol_type = other DNA
cgtgaaattcataatagcgacattattattccggtgacggaggaatcgtgccggaacgcagcagcagacgggtaa

SEQ ID NO: 105140 - DNA, 75 bp, synthetic construct
  source 1..75: mol_type = other DNA
atgaatcccgattatgtgcaatccttgcagacatcccaccacttcccagctgatttaacctacagattatttcct

SEQ ID NO: 105141 - DNA, 75 bp, synthetic construct
  source 1..75: mol_type = other DNA
ggcactgcatccggggcaatccgcagcgatttatctgaaaggtaaacgtattggttttgttggggttgttcatcc

SEQ ID NO: 105142 - DNA, 75 bp, synthetic construct
  source 1..75: mol_type = other DNA
gagcaaaccaggtaatgaaaacaagagctgggattactggggaagtgcctcggcaggcattaccggagcgctggc

SEQ ID NO: 105143 - DNA, 75 bp, synthetic construct
  source 1..75: mol_type = other DNA
ctggcgtattggctttgtgcacgggggcaaccactccataacggcgggtattctggccggagaagggtcgctgat

SEQ ID NO: 105144 - DNA, 75 bp, synthetic construct
  source 1..75: mol_type = other DNA
gaacttggcgtctgcgcgatgatttttgctacggcagtcggtattccggttggtgtgctggctgcggttaaacgc

SEQ ID NO: 105145 - DNA, 75 bp, synthetic construct
  source 1..75: mol_type = other DNA
gtgaagccggggcgctgtcgttgcgtattgataacacgctggattacatcgactcgcaaagcacggaaatcatca

SEQ ID NO: 105146 - DNA, 75 bp, synthetic construct
  source 1..75: mol_type = other DNA
gacggtcaacaatcagggaagcctgctgtcaaccattccaaatacttcaagattgacgttcttgatatagaagtc

SEQ ID NO: 105147 - DNA, 75 bp, synthetic construct
  source 1..75: mol_type = other DNA
cgccagccagatagtcactgtggataccaccgcgccgctggcgagcaaaaccatcgccattgcgagcatcagcga

SEQ ID NO: 105148 - DNA, 75 bp, synthetic construct
  source 1..75: mol_type = other DNA
atattattgattggtcggtgttattttttgttgctacaatcgttttttttattattttgaagttcaactggaaat

SEQ ID NO: 105149 - DNA, 75 bp, synthetic construct
  source 1..75: mol_type = other DNA
tcaccaccgatacgggcctgatcgctaacgattttgtcaccagcgacacgacgcttgcagtaaacggcacgctgg

SEQ ID NO: 105150 - DNA, 75 bp, synthetic construct
  source 1..75: mol_type = other DNA
gctgcgtgagctgaacaagcaccaggatattgttcgacagattactgattcatcctgttgtgttgcatcagacaa

SEQ ID NO: 105151 - DNA, 75 bp, synthetic construct
  source 1..75: mol_type = other DNA
cggtaaaaggttccggcaccacgctctgggtttacaccggcaagggtgatgcttatgcaaacccgttgtcagatg

SEQ ID NO: 105152 - DNA, 75 bp, synthetic construct
  source 1..75: mol_type = other DNA
gctgccctggcggacggcgcgggcaacgtgcaggcgagcgtcagcaatattaacggcaacagcgcccaggcggat

SEQ ID NO: 105153 - DNA, 75 bp, synthetic construct
  source 1..75: mol_type = other DNA
taccggatgagcgtgaagatcagcgtgatgtgctgaaagcgctcgccagaagaggttccgttgactttgccagac

SEQ ID NO: 105154 - DNA, 75 bp, synthetic construct
  source 1..75: mol_type = other DNA
aggcgttgctgcaggtaaggtcaacattccggtcgtatccggtaatggtgaacttgctgcggttgcagaaatcaa

SEQ ID NO: 105155 - DNA, 75 bp, synthetic construct
  source 1..75: mol_type = other DNA
tagcgatgcgctggcgaatcaaatcactatggcgggcctggaagttgacggtgtagaaccggttgccggtagctt

SEQ ID NO: 105156 - DNA, 75 bp, synthetic construct
  source 1..75: mol_type = other DNA
cggcgtcaggcgtattgtcactttcctgcgtaacgatctttatcccggggtgttgacctttggtcagggcgtggt

SEQ ID NO: 105157 - DNA, 75 bp, synthetic construct
  source 1..75: mol_type = other DNA
atacacttaatgatgtagttcaaaatatcaggcgttggctaaaagaaaatgaaaatatggtgaaagctattaaga

SEQ ID NO: 105158 - DNA, 75 bp, synthetic construct
  source 1..75: mol_type = other DNA
aaagatggtttcctcataaatggtgaagttaatccgcattactttgaaccagccaatattgagaatctgattaaa

SEQ ID NO: 105159 - DNA, 75 bp, synthetic construct
  source 1..75: mol_type = other DNA
taccgtgcctgcttcggcggtcggcgcactgggggaggcggtgtatcagattagcgccagcgccaccgacagcgc

SEQ ID NO: 105160 - DNA, 75 bp, synthetic construct
  source 1..75: mol_type = other DNA
gttacctttggcggcaaaacctacaacgccaccgtagcaggcgatggcagttggacaaccagcgtacctgccgcc

SEQ ID NO: 105161 - DNA, 75 bp, synthetic construct
  source 1..75: mol_type = other DNA
tggacaagtgtgacctccggccatggtactggtaaatcggatatgacgagtatcattgcaatactcttcatcatg

SEQ ID NO: 105162 - DNA, 75 bp, synthetic construct
  source 1..75: mol_type = other DNA
ccgcattgttggcggtacattttggggctgacggcacccagcgataattttatacgccgctcgttataccatctg

SEQ ID NO: 105163 - DNA, 75 bp, synthetic construct
  source 1..75: mol_type = other DNA
gcgaatgggtgaacccggcgattgatagcgacgggctggcaaatcaaatcacgatggcgggcctggaagttgatg

SEQ ID NO: 105164 - DNA, 75 bp, synthetic construct
  source 1..75: mol_type = other DNA
cggactgagtgataaggcgcagttcgaaaaaattatcgacagggcgctgtcactgaaggatgaatcaaaagcatc

SEQ ID NO: 105165 - DNA, 75 bp, synthetic construct
  source 1..75: mol_type = other DNA
ataaaagatggtgggggcgaaaaggattttttagatgcatttgcgaagcagaagaaacttcatgaagtgcttgag

SEQ ID NO: 105166 - DNA, 75 bp, synthetic construct
  source 1..75: mol_type = other DNA
taacagtaagcgtcggcatggttcgagtgatcatatgccaccaactgaatacgaaaaccaatattatcagcggct

SEQ ID NO: 105167 - DNA, 75 bp, synthetic construct
  source 1..75: mol_type = other DNA
actggaaagttcttcggtacataccatggtggtcatagtgattttcttcaaaggttgaggacagaaaatgcatcc

SEQ ID NO: 105168 - DNA, 75 bp, synthetic construct
  source 1..75: mol_type = other DNA
gcactggcagagatttccggtcagctggggaatgaactggcgccggatatcgaaagagtctcggcggaactggct

SEQ ID NO: 105169 - DNA, 75 bp, synthetic construct
  source 1..75: mol_type = other DNA
tggcagggaaacgttttaagtcgatggaggatgaatacgcccggctcacggctgaaattaagaaagcggatacgg

SEQ ID NO: 105170 - DNA, 75 bp, synthetic construct
  source 1..75: mol_type = other DNA
tggctgtatctggcagtggtcattgacctgtggtcacgtgccgttattggctggtcaatgtcgccacgcatgacg

SEQ ID NO: 105171 - DNA, 75 bp, synthetic construct
  source 1..75: mol_type = other DNA
caacaaatatgttgttcactcagggagcaatacatcgtaccgacgatcgtactcagtcaaatattggttttggct

SEQ ID NO: 105172 - DNA, 75 bp, synthetic construct
  source 1..75: mol_type = other DNA
ccatgcaatttttaacccgcctgttaatgaaaagcgtggagtttgccagcccgaccattgttttgatcaccgacc

SEQ ID NO: 105173 - DNA, 75 bp, synthetic construct
  source 1..75: mol_type = other DNA
tatgggactggttaaacgcatgaaagccgcctacgacgtctgctgcggcagcgaagcattatcacagacagaacg

SEQ ID NO: 105174 - DNA, 75 bp, synthetic construct
  source 1..75: mol_type = other DNA
aatgatttcatggatagcgtccaccatatttggtgtccactattctctcaggaatttcaggatctgccagacggt

SEQ ID NO: 105175 - DNA, 75 bp, synthetic construct
  source 1..75: mol_type = other DNA
gaagacaatatggaaaccctcaacgacaatttaaaagtggtcgaaaaagcggataacgcggcgcaagtcaaagac

SEQ ID NO: 105176 - DNA, 75 bp, synthetic construct
  source 1..75: mol_type = other DNA
atgccgtgatgcagtatgcagatagtggtgaaataaactcggtcaactcagtggcagcaggttggataaatgcga

SEQ ID NO: 105177 - DNA, 75 bp, synthetic construct
  source 1..75: mol_type = other DNA
aagatatggcgatcactgtgacgggggttaaggctggaaaagtgagtatccccgtgatttccggtaatggtcagt

SEQ ID NO: 105178 - DNA, 75 bp, synthetic construct
  source 1..75: mol_type = other DNA
gagcaggcggcggtgcatatggccgatggcctggcgcgcgcgaccggggaagtcggcgtcgtgctggtaacgtcg

SEQ ID NO: 105179 - DNA, 75 bp, synthetic construct
  source 1..75: mol_type = other DNA
gtgagtgaggaaagccgccgctggctggcatcgtgcggcctgaccgtggagcagatgaaaaaccagatggacccg

SEQ ID NO: 105180 - DNA, 75 bp, synthetic construct
  source 1..75: mol_type = other DNA
acgcggtggacaataatctgacaccggaacaaacacaggctggactggataagatagcgaaaggtgatatgccgg

SEQ ID NO: 105181 - DNA, 75 bp, synthetic construct
  source 1..75: mol_type = other DNA
aaaacaaccaccctgacggtttcttttgagccgaaaagtgcaaccgacaagacgttcagagcggtttccgccgat

SEQ ID NO: 105182 - DNA, 75 bp, synthetic construct
  source 1..75: mol_type = other DNA
ggggagaggattccgtggaaaatgccatcgcattatgccctaattgtcacaggcaagcccattatggtgttttgg

SEQ ID NO: 105183 - DNA, 75 bp, synthetic construct
  source 1..75: mol_type = other DNA
ggtatccaccggacagggacagaaatcagccggtgataccagttttaccctggcctggaaacccggcgaagccgg

SEQ ID NO: 105184 - DNA, 75 bp, synthetic construct
  source 1..75: mol_type = other DNA
tgtggtcaccgctagcatcaacaacagcagccagagccggaacgtgacatttatcgccgatgtcaggacggcgaa

SEQ ID NO: 105185 - DNA, 75 bp, synthetic construct
  source 1..75: mol_type = other DNA
caatcgagaaagacgagatgaaccgggtgtttatcttcgggaaagttattgggagcatgccgcaaacatacagga

SEQ ID NO: 105186 - DNA, 75 bp, synthetic construct
  source 1..75: mol_type = other DNA
ggtgaagcggataacaagggttcgatgtggtggctgactcaggctggtgaaagtgaaccagtgtcaccggtaccg

SEQ ID NO: 105187 - DNA, 75 bp, synthetic construct
  source 1..75: mol_type = other DNA
cggtgaaaggggccggaaccacactgtgggtttataacgggagcggcgacccttatgcaaacccgctttcagaca

SEQ ID NO: 105188 - DNA, 75 bp, synthetic construct
  source 1..75: mol_type = other DNA
atgtcgcaacattattcagtgtcatggaaaaaaggactggctgcactctgcttactggctgttgccgggcttagc

SEQ ID NO: 105189 - DNA, 75 bp, synthetic construct
  source 1..75: mol_type = other DNA
ttcccctgaaatgattaactccggtatcatgtgcgccttatgtgattacaacgaaaataaaaaccatcacacccc

SEQ ID NO: 105190 - DNA, 75 bp, synthetic construct
  source 1..75: mol_type = other DNA
aaggctatggagcggaagaaacaccgtgatagccagcgggaagaacgcaaccggaagcggaagcagttaaatccg

SEQ ID NO: 105191 - DNA, 75 bp, synthetic construct
  source 1..75: mol_type = other DNA
tggtggtgatgaccgtgtttattacagacagatacaatattgtattaatgggaattgggtatccgctgcaagtat

SEQ ID NO: 105192 - DNA, 75 bp, synthetic construct
  source 1..75: mol_type = other DNA
caccgacgcctggctgaaaggctgggacgagcgcaacggcggcaacctgacgctacgcctggatgacgccgatat

SEQ ID NO: 105193 - DNA, 75 bp, synthetic construct
  source 1..75: mol_type = other DNA
aaacaacgtcgctcatatataatcaattccttcgattattatcttgatttcgatcatattgaaatgacttcagat

SEQ ID NO: 105194 - DNA, 75 bp, synthetic construct
  source 1..75: mol_type = other DNA
taaccgcgagttgcgccgggcaaaaggtcaggttcagaagtgggagcgtgtctgcgccgcgctgcgggagttgaa

SEQ ID NO: 105195 - DNA, 75 bp, synthetic construct
  source 1..75: mol_type = other DNA
atgcacgatcgtgagggggaaacttactataccgatgtgtttactggtgagaagaaagcaacaagtatgtggatg

SEQ ID NO: 105196 - DNA, 75 bp, synthetic construct
  source 1..75: mol_type = other DNA
ctcaccgccgcgcttgccagtaacgagacggcgcaaataagtatcgacggcggcacaacctggaccacgcttacc

SEQ ID NO: 105197 - DNA, 75 bp, synthetic construct
  source 1..75: mol_type = other DNA
ctggttgattgacgcactgcaacgccgcgactatccggtggtgcagggcggcgtattgctggtggcgacgatgat

SEQ ID NO: 105198 - DNA, 75 bp, synthetic construct
  source 1..75: mol_type = other DNA
tggaagttatctttaatttctgaggaacttaatatggctgaagtgtctgttaggaaaagacttgatgcagagggg

SEQ ID NO: 105199 - DNA, 75 bp, synthetic construct
  source 1..75: mol_type = other DNA
accgcttaccgcaatgtgtttatccaggatgatccgggaatgcatttccgtcgggttatccgcaacgcggaaggt

SEQ ID NO: 105200 - DNA, 75 bp, synthetic construct
  source 1..75: mol_type = other DNA
ttgcgaccgcagtcgggattccggttggtgtgctggctgcggttaaacgtggttccattttcgatcacacagcgg

SEQ ID NO: 105201 - DNA, 75 bp, synthetic construct
  source 1..75: mol_type = other DNA
actggaacctgacgcctgtctccggtcgcgtgagcgatatggtgttcctcgatgattccaatccgttaaccggtt

SEQ ID NO: 105202 - DNA, 75 bp, synthetic construct
  source 1..75: mol_type = other DNA
acttattataatgttgctttcggggtggttttattacacagaatataataagcatgaatttttatatttattatc

SEQ ID NO: 105203 - DNA, 75 bp, synthetic construct
  source 1..75: mol_type = other DNA
ctttttatgaatcagcggggatgcactttaaagggaattacactactccaccagtcgctaatttcacaaaaaccc

SEQ ID NO: 105204 - DNA, 75 bp, synthetic construct
  source 1..75: mol_type = other DNA
tatggaacattccatggatatctcgatgtatttaaagggttatcacctgagcgtcaatatgaggtacttgccaat

SEQ ID NO: 105205 - DNA, 75 bp, synthetic construct
  source 1..75: mol_type = other DNA
atcagtcgtgaagagctgatagcgctcggccagcgtttcggcgttacaccactcgccagtgcgctggcgctggcg

SEQ ID NO: 105206 - DNA, 75 bp, synthetic construct
  source 1..75: mol_type = other DNA
tctcagaaccattgagctacggtccgctgaatggtcagaaattgattttgataatgccctgtggacaatccctga

SEQ ID NO: 105207 - DNA, 75 bp, synthetic construct
  source 1..75: mol_type = other DNA
caacgatgccgatattgaccggatccgcgagatcaaacgctggatcgacaacggcgtgcaggtcagcaaagttaa

SEQ ID NO: 105208 - DNA, 75 bp, synthetic construct
  source 1..75: mol_type = other DNA
acaacacaaatcgcctccggtacgctgatggtgagcgacaactcgcagcttggagatacccactataaccgccag

SEQ ID NO: 105209 - DNA, 75 bp, synthetic construct
  source 1..75: mol_type = other DNA
tgatgaatgtctggacgctgctcgttcccgccgcgctgttctttttcggtgccgggatgctgtttccgctggcga

SEQ ID NO: 105210 - DNA, 75 bp, synthetic construct
  source 1..75: mol_type = other DNA
ttattttttccggtaacgtcgcaggcggctatggtggcgcaatctattcttctggtactaatgatactggtgccg

SEQ ID NO: 105211 - DNA, 75 bp, synthetic construct
  source 1..75: mol_type = other DNA
atgattatcctcgtcaacctgctggtcgatctgctgtacggcgtggtgaacccacgtattcgtcataagaagtaa

SEQ ID NO: 105212 - DNA, 75 bp, synthetic construct
  source 1..75: mol_type = other DNA
ggggcaaaaaatagcaaccatgggtagcaccggaaccagttcaacacgcttgcattttgaaattcgttacaaggg

SEQ ID NO: 105213 - DNA, 75 bp, synthetic construct
  source 1..75: mol_type = other DNA
aggattttaaattgcatagaaaatgcattctgagctgttcctttgtatcaaagaatgaaataaaggatgagttta

SEQ ID NO: 105214 - DNA, 75 bp, synthetic construct
  source 1..75: mol_type = other DNA
tgaatgtagcgttgtgctcgtttatcgtgccaacgctatttttttatcgtcgtcgtgattccagacataagccgc

SEQ ID NO: 105215 - DNA, 75 bp, synthetic construct
  source 1..75: mol_type = other DNA
cccaggttgagccactggcgctacgcaagatcatgcaggaactcgggcgcaacatgcaggctattaccggtgcga

SEQ ID NO: 105216 - DNA, 75 bp, synthetic construct
  source 1..75: mol_type = other DNA
atggtacaacacagcaatggacaactggttattactggtgaatattgtcctgaaggtgtgcaaacagcattcact

SEQ ID NO: 105217 - DNA, 75 bp, synthetic construct
  source 1..75: mol_type = other DNA
atccgcacggatgatgagcgcacccaccggtaccattacgacagtcagcaccggctggtgcactacacgcggaca

SEQ ID NO: 105218 - DNA, 75 bp, synthetic construct
  source 1..75: mol_type = other DNA
cgaacattgatccagtgtggaaagtattaatcaccaccggattttgtggcggtctaacaaccttctcaacatttt

SEQ ID NO: 105219 - DNA, 75 bp, synthetic construct
  source 1..75: mol_type = other DNA
gcaggaaatggcgcatgggcgtattccgccggaatttctgccgctgcaaagtgcgtgggcaatatcaataatgcg

SEQ ID NO: 105220 - DNA, 75 bp, synthetic construct
  source 1..75: mol_type = other DNA
tgggcatattcaccacgatcttagccacgttttcgatctgcatcgtaacttgatcgaaactggctcgatgctgag

SEQ ID NO: 105221 - DNA, 75 bp, synthetic construct
  source 1..75: mol_type = other DNA
ggaaaacccggaaattcctccgtttatgatgtattcggaagtgctacaggaatcggtggtgcatttactggaaac

SEQ ID NO: 105222 - DNA, 63 bp, synthetic construct
  source 1..63: mol_type = other DNA
atgccactgctggataagctgcgtgagcagtacggggtcggaccgctatgcagcgaactgcat

SEQ ID NO: 105223 - DNA, 75 bp, synthetic construct
  source 1..75: mol_type = other DNA
gctggatattgccgccagcaacactattgaactgttttctgttgccagtggtgctgacggctttgatttcatcat

SEQ ID NO: 105224 - DNA, 75 bp, synthetic construct
  source 1..75: mol_type = other DNA
gctctgttgatgttggactccgccaaaggacggcagattgaagtagaagcaactggcccacaggaagttgaggct

SEQ ID NO: 105225 - DNA, 75 bp, synthetic construct
  source 1..75: mol_type = other DNA
ttgtctgtcagtggccgtcagctggcgttttcgaaccgtgacggcgtggttaaggccgggcagtcagtatctgtg

SEQ ID NO: 105226 - DNA, 75 bp, synthetic construct
  source 1..75: mol_type = other DNA
atgccggcgtaccgtatcagctgctggaatccagccgcctggcggaagtggagcccgcgctggcagaagtggcgc

SEQ ID NO: 105227 - DNA, 75 bp, synthetic construct
  source 1..75: mol_type = other DNA
cgtactgacgctctttttttaccgtcgtcgtgattccagacataaaccgctgatgtcatggctggcctggctgtt

SEQ ID NO: 105228 - DNA, 75 bp, synthetic construct
  source 1..75: mol_type = other DNA
acgtgctgtccggttaattacgcatctggtggtggacaaagagaagatgcgcagcaacttcgccgcttcaaagaa

SEQ ID NO: 105229 - DNA, 75 bp, synthetic construct
  source 1..75: mol_type = other DNA
aaacttatcagacagaaagaacgcgtgatcgcaaactatgcgccaacctggaagaggcgattcgtcgctctggtt

SEQ ID NO: 105230 - DNA, 75 bp, synthetic construct
  source 1..75: mol_type = other DNA
gggcagagcactacgctgaccgtggcattccagccggagggcgcaaccgacaagagcttccgtgcggtgtctgcg

SEQ ID NO: 105231 - DNA, 75 bp, synthetic construct
  source 1..75: mol_type = other DNA
gcaagcttgataatggtggtcgggtgctcgtcaaaggaaaatgccctgtgccatcctcagccgaaacctccagcg

SEQ ID NO: 105232 - DNA, 75 bp, synthetic construct
  source 1..75: mol_type = other DNA
gtggactttattcattcaattattttcggttggcttggtcgggcttgctttagctattatttactgcaagctggt

SEQ ID NO: 105233 - DNA, 75 bp, synthetic construct
  source 1..75: mol_type = other DNA
cagtatccgctgaatccggttcagtatatagattcaatgggactggcatcaaaatatggacacttaaataatggc

SEQ ID NO: 105234 - DNA, 75 bp, synthetic construct
  source 1..75: mol_type = other DNA
cggcgctggccatgaagctggctgctgcgagcagcgacggcaaggcggtgacccaatcattcgcccacgtgcagg

SEQ ID NO: 105235 - DNA, 75 bp, synthetic construct
  source 1..75: mol_type = other DNA
atgactcacaatgggcggtaatttgttccattgccccaaagattggctgtacaccggagattctgcgtgtctggg

SEQ ID NO: 105236 - DNA, 75 bp, synthetic construct
  source 1..75: mol_type = other DNA
atgacagtgatgacgctcaatctcgtcgaaaaacagccagcagctatgcgccggataattggcaagcatcttgcc

SEQ ID NO: 105237 - DNA, 75 bp, synthetic construct
  source 1..75: mol_type = other DNA
taccgtgataacgccatcgcctacaaagaacagcgagataaaaaagtcagtgagctgaagcaggcgaccgccacc

SEQ ID NO: 105238 - DNA, 75 bp, synthetic construct
  source 1..75: mol_type = other DNA
ttctgcagtcagcaagcaagttacgtcagagtgggcgtgtggctcaccgttgtgaagaggatacacgcagacatt

SEQ ID NO: 105239 - DNA, 75 bp, synthetic construct
  source 1..75: mol_type = other DNA
gggtaacggacataacctacatcaggatccacgaaggctggctgtatcttgccgtggttgttgatctgttctcac

SEQ ID NO: 105240 - DNA, 75 bp, synthetic construct
  source 1..75: mol_type = other DNA
aaagctattgaggcaatgggtgcgacaccaacgccaatgccgttgggggatgtttatccggctttgactcagggg

SEQ ID NO: 105241 - DNA, 75 bp, synthetic construct
  source 1..75: mol_type = other DNA
aaatggttttatataaaaccatggcccccgttaatattttctcaagaagaaatttctttctaaaaaaatcaagaa

SEQ ID NO: 105242 - DNA, 75 bp, synthetic construct
  source 1..75: mol_type = other DNA
cttgcctttctctgtggcattgcactttcgggtagctggctgatggtgatggcgaatctgctgttctgcgtgctg

SEQ ID NO: 105243 - DNA, 75 bp, synthetic construct
  source 1..75: mol_type = other DNA
tactggaccattccagaagaaagcacgcgaagtttactctcaattcccggaatggacaccaggtctgtacgaaac

SEQ ID NO: 105244 - DNA, 75 bp, synthetic construct
  source 1..75: mol_type = other DNA
acggataaagaaaaagatctacggaacgcgggaagaagctcgcagtgatatttttgattacatcgaaatgtttta

SEQ ID NO: 105245 - DNA, 75 bp, synthetic construct
  source 1..75: mol_type = other DNA
tatggttctggaaagtcaggacgaatatgactcacaatgggcgacaatttgttccattgctccaaagattggctg

SEQ ID NO: 105246 - DNA, 75 bp, synthetic construct
  source 1..75: mol_type = other DNA
agctaataaagaagactgccagaccattaacggtaagcgagtttatacaggcagaagctcaaaactggaccaact

SEQ ID NO: 105247 - DNA, 75 bp, synthetic construct
  source 1..75: mol_type = other DNA
ctttatggcgccgtcgatcgccaaagaaggaaaaatatcaaccatcgtgccgatgtgtagtcatgttgatcacag

SEQ ID NO: 105248 - DNA, 75 bp, synthetic construct
  source 1..75: mol_type = other DNA
atcgctatctggaaaatgcgcccgcggacatattcaccacgatcttagccacgtcttcgacttacaccgtaattt

SEQ ID NO: 105249 - DNA, 75 bp, synthetic construct
  source 1..75: mol_type = other DNA
gttactgctgaagatgaatcttcaggggtatgactaccgccgggatgatgagtttatgatgtggggatcggcaga

SEQ ID NO: 105250 - DNA, 75 bp, synthetic construct
  source 1..75: mol_type = other DNA
ttagctgatgcgaaagctgaaaatgatgctcttcggcgcaagcttgataatggtggtcgggtgctcgtcaaagga

SEQ ID NO: 105251 - DNA, 75 bp, synthetic construct
  source 1..75: mol_type = other DNA
agtttccgtgtgctggcgcagaagtcctgggatcagcgaggaaagttttccaccacgtttaacccctgcgttgcc

SEQ ID NO: 105252 - DNA, 75 bp, synthetic construct
  source 1..75: mol_type = other DNA
tctgacactgaccagtgagcaggacagtgaccgttatgacagtaagcagcagaatgccagtgccggaggcagctt

SEQ ID NO: 105253 - DNA, 75 bp, synthetic construct
  source 1..75: mol_type = other DNA
atgacagtgatgacacttaatcttgtcgaaaaacagccagcagctatgcgccggataattggtaagcatctggcc

SEQ ID NO: 105254 - DNA, 75 bp, synthetic construct
  source 1..75: mol_type = other DNA
gctgtgatcccggctgctgttctgatgatgttcttcccgcaactggcgatggtcgctggcagcagtggtcaggac

SEQ ID NO: 105255 - DNA, 75 bp, synthetic construct
  source 1..75: mol_type = other DNA
gcggcgcggcttatgatctgatgaaagcgttattaaaagacgcggatggctcaaaagatctgttgcaatgcgtgc

SEQ ID NO: 105256 - DNA, 75 bp, synthetic construct
  source 1..75: mol_type = other DNA
gtgaacgatgtcgccggtaacccgaccagcgtctcacgcgtggcgctggtcgatgccacgccgccggtggtaacc

SEQ ID NO: 105257 - DNA, 75 bp, synthetic construct
  source 1..75: mol_type = other DNA
aacgttgcaggagttgataaatacagcagaaaaaacggcgtttctcggcgatcggtttagaagttatataagagc

SEQ ID NO: 105258 - DNA, 75 bp, synthetic construct
  source 1..75: mol_type = other DNA
ggcgcggaagatggcgacacggtaactattacgttgggtggtaatacttatacggcgacggtgggcagcaatctc

SEQ ID NO: 105259 - DNA, 75 bp, synthetic construct
  source 1..75: mol_type = other DNA
agttcccgggctcagtgcattactgctgaagatgaatcttcaggggtatgactaccgccgggatgatgagtttat

SEQ ID NO: 105260 - DNA, 75 bp, synthetic construct
  source 1..75: mol_type = other DNA
gccgcgctgcgggagctgaacaagtgccgggatattctccgggatattaccgccaccagagaacagcagcggtga

SEQ ID NO: 105261 - DNA, 75 bp, synthetic construct
  source 1..75: mol_type = other DNA
tttgcgagctctttacagcagttataataaaaatcataaaaatgataatctttatgattttgatagttttgataa

SEQ ID NO: 105262 - DNA, 75 bp, synthetic construct
  source 1..75: mol_type = other DNA
tatcattgatttacatggtgatgtttatgcaactgattaatgtcaaacgatattacccgaaagacaaaccctatg

SEQ ID NO: 105263 - DNA, 75 bp, synthetic construct
  source 1..75: mol_type = other DNA
cgaataacccggacgtcgttgccgcccgtttccgttctttgttacgtcagggcgatattgatggcgcgcaaaaat

SEQ ID NO: 105264 - DNA, 75 bp, synthetic construct
  source 1..75: mol_type = other DNA
cttttgagccggaaagtgcaaccgacaagacgttcagagcggtttccgccgatccgtcaacgggaaccattgctg

SEQ ID NO: 105265 - DNA, 75 bp, synthetic construct
  source 1..75: mol_type = other DNA
aacggcgaaaagtggtacttcatgcccagccatgactttggtggctatgcagatgagtatgatccctgtgtacgt

SEQ ID NO: 105266 - DNA, 75 bp, synthetic construct
  source 1..75: mol_type = other DNA
aataatgacatcatcatcttgaggacggtggaagagtgtcgcaaaacaccagacattgagcaaactttgaagccc

SEQ ID NO: 105267 - DNA, 75 bp, synthetic construct
  source 1..75: mol_type = other DNA
tcatcctggattactgaataaagcctgggatggggagccctttgatttccggcgagcagacaaagaaatttatca

SEQ ID NO: 105268 - DNA, 75 bp, synthetic construct
  source 1..75: mol_type = other DNA
ggctcagataaacgctggagcgccggtgaaccgggcgtttatgtggataacgattccagtaactcactgaaaaaa

SEQ ID NO: 105269 - DNA, 75 bp, synthetic construct
  source 1..75: mol_type = other DNA
ccaccaagcgacagagtacctggcttgcgtgagattgtggcccaccctaactatataattctataccgcgtaaca

SEQ ID NO: 105270 - DNA, 75 bp, synthetic construct
  source 1..75: mol_type = other DNA
tgcgccatttcttgataccgttgctcagaccagcgccttcccgtggggttggctggcgggggcggcggtaggtgg

SEQ ID NO: 105271 - DNA, 75 bp, synthetic construct
  source 1..75: mol_type = other DNA
tcgtcaccgttacgctaaacagtaaaacctacaccacgacgctggatgcctccggcaactggagcgtcggcgttc

SEQ ID NO: 105272 - DNA, 75 bp, synthetic construct
  source 1..75: mol_type = other DNA
tctcacgaattaacaggcaaagacggcggcgcaatccagattgaaacatcaccgatgagcactctattcggaaaa

SEQ ID NO: 105273 - DNA, 75 bp, synthetic construct
  source 1..75: mol_type = other DNA
ggcgcaaatcatcagcggcacggttactggcgctcaggcgggcgatatcgtcaccgtgacgctgaataatgtgga

SEQ ID NO: 105274 - DNA, 75 bp, synthetic construct
  source 1..75: mol_type = other DNA
tatgaatggtacgtttcagttgtacaagagaatatatccaggtatgttcaacaaagaagcagagcgtgagctaga

SEQ ID NO: 105275 - DNA, 75 bp, synthetic construct
  source 1..75: mol_type = other DNA
atgatcaacacctcacgccaggatggctttatgcactattgcaatgtggtttgtttgttggcttttttagttccg

SEQ ID NO: 105276 - DNA, 75 bp, synthetic construct
  source 1..75: mol_type = other DNA
aagcacccaaagagtctttggacagcctcaacgctgagttccttagatgggtgacacctttctacactccgctac

SEQ ID NO: 105277 - DNA, 75 bp, synthetic construct
  source 1..75: mol_type = other DNA
cccctatatttccagacacctgttatcacttaacccattactggcctgctgccgcagatattcccgtggcgagcg

SEQ ID NO: 105278 - DNA, 75 bp, synthetic construct
  source 1..75: mol_type = other DNA
attgccggcagacacggtaacagagacgccggtcagctccctgccgctggaccaggcgacggtcagcgtcactaa

SEQ ID NO: 105279 - DNA, 75 bp, synthetic construct
  source 1..75: mol_type = other DNA
cgctggctgaataatatttactacgcgcccgagctgagtgatgagcatggccgcaaggtgcttatcagctatgac

SEQ ID NO: 105280 - DNA, 75 bp, synthetic construct
  source 1..75: mol_type = other DNA
gagtgtgtaaaaatgcaagtattattgcaagcagtttgttatgttgtaaaatagcaaagcttaatggtgctgaaa

SEQ ID NO: 105281 - DNA, 75 bp, synthetic construct
  source 1..75: mol_type = other DNA
aaagctgaaaatgatgctcttcggcgcaagcttgataatggtggtcgggtgctcgtcaaaggcaaatgtcctgtg

SEQ ID NO: 105282 - DNA, 75 bp, synthetic construct
  source 1..75: mol_type = other DNA
gcttctcgctgccgatttatcagggcggtatggttaattcgcaggtgaaacaggcacagtacaactttgtcggtg

SEQ ID NO: 105283 - DNA, 75 bp, synthetic construct
  source 1..75: mol_type = other DNA
gaatacgatgaatggggcaacctgctgaatgaagagaacccgcatcagctgcagcagcttatccgcctgccgggg

SEQ ID NO: 105284 - DNA, 75 bp, synthetic construct
  source 1..75: mol_type = other DNA
ccccgtaatcagttgggtcagcgcaggggattggatggaagcagtagaaccatatcataggcgcgcggtcgaccg

SEQ ID NO: 105285 - DNA, 75 bp, synthetic construct
  source 1..75: mol_type = other DNA
actacacgcggacacaatatgcagagccgctggtcgaaagccgctatctttacgacccgctgggccgcagggtgg

SEQ ID NO: 105286 - DNA, 75 bp, synthetic construct
  source 1..75: mol_type = other DNA
gattaacctggtgttctgcgtgctggtgatacgagcacgcgggaacgtatcaaaaatccttgtattacgaaggcg

SEQ ID NO: 105287 - DNA, 75 bp, synthetic construct
  source 1..75: mol_type = other DNA
gactcatcttcctgatggtagcagtatttcctcgcttttttcagagttgccttcttctgtttgtggtttcttaat

SEQ ID NO: 105288 - DNA, 75 bp, synthetic construct
  source 1..75: mol_type = other DNA
gaaagagctgaagcgggttaccgacgaacgggacatattaaaaaaagccgctgtagattcaattggttatcgcaa

SEQ ID NO: 105289 - DNA, 75 bp, synthetic construct
  source 1..75: mol_type = other DNA
gcagcgccgcagcctggcggatacccttcagcagtccggcggcgaagacggtggcagtgtggtgttcccgccggt

SEQ ID NO: 105290 - DNA, 75 bp, synthetic construct
  source 1..75: mol_type = other DNA
tcgtaacctatagtcaaaatgaaaaaattaaagagatggctactacttatcttgaacttttgacagccaattccg

SEQ ID NO: 105291 - DNA, 75 bp, synthetic construct
  source 1..75: mol_type = other DNA
aaagttaaagagatggctactgcttatcttgaacttttgacagccaataccgaagaggaagttcaaacagagtga

SEQ ID NO: 105292 - DNA, 75 bp, synthetic construct
  source 1..75: mol_type = other DNA
ccagaaagggcttatcgcatggtttgaaagcggggatgtcagggcctataaaatccggttcccgaatggtacggt

SEQ ID NO: 105293 - DNA, 75 bp, synthetic construct
  source 1..75: mol_type = other DNA
tatcgtggtggaggttgccgctgatatctctctcaaagggaaaaacctcgacctcacgggagttaccacgatcaa

SEQ ID NO: 105294 - DNA, 75 bp, synthetic construct
  source 1..75: mol_type = other DNA
agagcacgagcccccagaatggcacaactggaaaagttactggacgtatgaccgccagaaaaggaagttctctcc

SEQ ID NO: 105295 - DNA, 75 bp, synthetic construct
  source 1..75: mol_type = other DNA
caaaaagtgctgccgctgcagagtcctcaaaaagcgcggcggccaccagtgccgctgcggcaaaaacgtcagaaa

SEQ ID NO: 105296 - DNA, 75 bp, synthetic construct
  source 1..75: mol_type = other DNA
gcagcgaagacatccgaaacgaacgcgaaagcgtcggaaaccagcgcagaatcctcaaaaacggctgccgcatcg

SEQ ID NO: 105297 - DNA, 75 bp, synthetic construct
  source 1..75: mol_type = other DNA
tctgctatttcaaacagcaaaacatttcacttccactttaattttaatgatttgcgcgatatttacaaagaatat

SEQ ID NO: 105298 - DNA, 75 bp, synthetic construct
  source 1..75: mol_type = other DNA
ctcggcgcgccgattggctcgaatcagggactggaaacccgcgccatgctggagattattatccagcaggccacg

SEQ ID NO: 105299 - DNA, 75 bp, synthetic construct
  source 1..75: mol_type = other DNA
acacattcccaacgggaaccgcagctactatttaagccgttcgcagccgcctttctttgcgttgatggtggagtt

SEQ ID NO: 105300 - DNA, 75 bp, synthetic construct
  source 1..75: mol_type = other DNA
ggcgacaacatcaaaatggttgttaccctgatccacccgatcgcgatggacgacggtctgcgtttcgcaatccgt

SEQ ID NO: 105301 - DNA, 75 bp, synthetic construct
  source 1..75: mol_type = other DNA
tggggacaactgacacattgcgtgaaatgcagcattataaacaactgagtcagcacggggctgacaactggaaaa

SEQ ID NO: 105302 - DNA, 75 bp, synthetic construct
  source 1..75: mol_type = other DNA
cctgagctgaagccatccgaaataccaacactgctcggatataccgccagcctggttgataaaaaatggttgcga

SEQ ID NO: 105303 - DNA, 75 bp, synthetic construct
  source 1..75: mol_type = other DNA
ttcctgctttatcgacgacatgcgccagcgccttaccacggcgttgcagcgtccggctgttccatcttcccctta

SEQ ID NO: 105304 - DNA, 75 bp, synthetic construct
  source 1..75: mol_type = other DNA
gcatttgaccagccttactggatgatgaaggcatcactgcttgcggaatttaataaggtcatcacggatgtcgga

SEQ ID NO: 105305 - DNA, 75 bp, synthetic construct
  source 1..75: mol_type = other DNA
taccctgtcgaatccgtcattagtgtctgtgactctgataacagtcaggggatgctacggcaagttttcatggga

SEQ ID NO: 105306 - DNA, 75 bp, synthetic construct
  source 1..75: mol_type = other DNA
cgaacattagccgaacttgataaattaattaaaaagatagaagtagaagaagattatgagttttgtgtatccctt

SEQ ID NO: 105307 - DNA, 75 bp, synthetic construct
  source 1..75: mol_type = other DNA
atgagtctcttgaatgacgttcagaaattcattgaagcccatccggggtgtacttccggggacattgcggatgct

SEQ ID NO: 105308 - DNA, 75 bp, synthetic construct
  source 1..75: mol_type = other DNA
cggatgagcaagttcacatcgaaagcgtaggccattactggacactgctgactgaactgctgaaagaaattccgg

SEQ ID NO: 105309 - DNA, 75 bp, synthetic construct
  source 1..75: mol_type = other DNA
catccaactaacgttatttctacaacatcaaaaaaagaagtaaaaatacgatacaaaccaatatttgaatttaca

SEQ ID NO: 105310 - DNA, 75 bp, synthetic construct
  source 1..75: mol_type = other DNA
ccaaaaaaattgttactgaaggagttgctactaaacaaagtactgctgaaaaattattgccaacgcaattattga

SEQ ID NO: 105311 - DNA, 75 bp, synthetic construct
  source 1..75: mol_type = other DNA
ttttatattaaaggctgggacttgactatatttataggtgttattgctttaaagaaagatatcatccattatgga

SEQ ID NO: 105312 - DNA, 75 bp, synthetic construct
  source 1..75: mol_type = other DNA
ctcggtgatgtgcttgagttgaaatggcaggatattatggataaagggatctacattgagcaaaacaaaaccggc

SEQ ID NO: 105313 - DNA, 75 bp, synthetic construct
  source 1..75: mol_type = other DNA
agcccgaaatgtatcttcctgtacatgcgaatatgtgatcaatacaaccaaaggcgggaaagtcatagctaaaac

SEQ ID NO: 105314 - DNA, 75 bp, synthetic construct
  source 1..75: mol_type = other DNA
tatctaaaacagttgtagaacatttcgaaatacctttgcctccttttgaagaacagaaacgcatcgcgagcattc

SEQ ID NO: 105315 - DNA, 75 bp, synthetic construct
  source 1..75: mol_type = other DNA
gattattctcgcccactcgaacgaatccgaatgggtcactttccgtaataacaaaaacaacgaagccttcctcga

SEQ ID NO: 105316 - DNA, 75 bp, synthetic construct
  source 1..75: mol_type = other DNA
aaaaactggattatcgccaaaaaaatatttaagaaatgccaacatcaggtggagaaaaatagatgttagcgatct

SEQ ID NO: 105317 - DNA, 75 bp, synthetic construct
  source 1..75: mol_type = other DNA
tgtggcgctgagcgggcagcgtaataacggtgtgcctgtttccctttccgtatcaacaggagcagagaatggcag

SEQ ID NO: 105318 - DNA, 75 bp, synthetic construct
  source 1..75: mol_type = other DNA
attcgtaaactcgaacactacgcgcagaatgacccggacgcctacggctattccggtgcgctgtgccgcgccaac

SEQ ID NO: 105319 - DNA, 75 bp, synthetic construct
  source 1..75: mol_type = other DNA
ccgtctattctgcaacaaattgccatcgccaaaacggaaccgggcgatgagaataaccaggacatctccgcgctg

SEQ ID NO: 105320 - DNA, 75 bp, synthetic construct
  source 1..75: mol_type = other DNA
gaactcacatcatgcggttagtcaggtatacgattttgaaagatatactgtaatttactcattttacaggaaggg

SEQ ID NO: 105321 - DNA, 75 bp, synthetic construct
  source 1..75: mol_type = other DNA
ttatcaccgagccggacgggacggtggagatctctgttaccagccagacggcgggagtcagtgcggtcaccgcca

SEQ ID NO: 105322 - DNA, 75 bp, synthetic construct
  source 1..75: mol_type = other DNA
atgagcgtgatgtttgatcctgaagcggcgatttatcctttccccccgaagccgacgccgttaagtattgatgaa

SEQ ID NO: 105323 - DNA, 75 bp, synthetic construct
  source 1..75: mol_type = other DNA
aggcgttaacccgcttgcaagaagaatacccggatgctgccatactggtgcatccagaatcaccgcaagctattg

SEQ ID NO: 105324 - DNA, 75 bp, synthetic construct
  source 1..75: mol_type = other DNA
attagctggcacttcctgaccaatgttcagcacacctatgaccgggagaaaaagctggtggaaaaatatgatgtc

SEQ ID NO: 105325 - DNA, 75 bp, synthetic construct
  source 1..75: mol_type = other DNA
acataatgatgattacctgagtgcctacgcccataacgacacaatgctggtccgggaacaacaagaagtgaaggc

SEQ ID NO: 105326 - DNA, 75 bp, synthetic construct
  source 1..75: mol_type = other DNA
cctggtcgatcgtaataacaatatcgtcctcgaatatcgcaagaaagagctggtgcggctgacgctgaccgatcc

SEQ ID NO: 105327 - DNA, 75 bp, synthetic construct
  source 1..75: mol_type = other DNA
ctacaaaatgcagcaggcagtgccagacaaagagttactggaagcaccaaccgctggcgagggagcaacttgccg

SEQ ID NO: 105328 - DNA, 75 bp, synthetic construct
  source 1..75: mol_type = other DNA
cagcgtgactgcaggcaacagcgcaacggtcgcttcgacggtgaccacaaagccggacgggacggtggagatcag

SEQ ID NO: 105329 - DNA, 75 bp, synthetic construct
  source 1..75: mol_type = other DNA
tcacaaacgaaatattccgcgttccggcgcgccgccagcgtaagcctgcggttaatccgtccgacatcccgaccc

SEQ ID NO: 105330 - DNA, 75 bp, synthetic construct
  source 1..75: mol_type = other DNA
tctacgttgaactagtggaactgaacgcttacttcatacatgaaatccagaaagcgcagtccacggaagaactag

SEQ ID NO: 105331 - DNA, 75 bp, synthetic construct
  source 1..75: mol_type = other DNA
atgggcgtatacattggtcagagcacccgtatttatgaccgtgaaaccggcgaaatccactacggtcgcgttccg

SEQ ID NO: 105332 - DNA, 75 bp, synthetic construct
  source 1..75: mol_type = other DNA
ggattcacaacgataatatctgtctgaaattatttggaatgcaggtatatgtggctgatttgtatcagctaatga

SEQ ID NO: 105333 - DNA, 75 bp, synthetic construct
  source 1..75: mol_type = other DNA
cgctattatgacccgctgcgggggaggtatatcactcaggatccgattgggctgaaggggggatggaatttttat

SEQ ID NO: 105334 - DNA, 75 bp, synthetic construct
  source 1..75: mol_type = other DNA
tgttctttacccaatacatgctattagcctgaatatactaaatgtttttggtcgatcagacttatttttaaaagt

SEQ ID NO: 105335 - DNA, 75 bp, synthetic construct
  source 1..75: mol_type = other DNA
cgatacctttattcgcctgttgaacgccaccccgaacggtgtgatccgtaactccgacgtggcaaaaggcgtggt

SEQ ID NO: 105336 - DNA, 75 bp, synthetic construct
  source 1..75: mol_type = other DNA
ctatgaagaaaattatatacatcctgccgggagcatttttgctgcgattcaaaaaaatgagagtctcctaaagtt

SEQ ID NO: 105337 - DNA, 75 bp, synthetic construct
  source 1..75: mol_type = other DNA
atgtccgctggcgtgtttatggcgatcggatttactttttacctttccgttatcgccgatgccccgtcttcatag

SEQ ID NO: 105338 - DNA, 75 bp, synthetic construct
  source 1..75: mol_type = other DNA
atggtcgatacggcccaggaacccagactttctcggctcttctctaatcgggttattgctcgctatccggcgttt

SEQ ID NO: 105339 - DNA, 75 bp, synthetic construct
  source 1..75: mol_type = other DNA
aaagttgcggatatggtggcgaattttggctatgaaatagacacttacggacatattccaaacggtaatcgcagc

SEQ ID NO: 105340 - DNA, 75 bp, synthetic construct
  source 1..75: mol_type = other DNA
atgaaaacggcaacggcaagccggatgcagaggaagcagcagaggcctttaataatgcaaaagtccatttggaaa

SEQ ID NO: 105341 - DNA, 75 bp, synthetic construct
  source 1..75: mol_type = other DNA
aaatagccgaagaaacgctgcgtaattatcagcagtcatatgcgtttgtcgaaaaacaactgttgacaggtagca

SEQ ID NO: 105342 - DNA, 75 bp, synthetic construct
  source 1..75: mol_type = other DNA
gattttatcgctaaatacatccattcaacaaacgtttatagctatttaagtccaagtgaaccgccccgggtttcc

SEQ ID NO: 105343 - DNA, 75 bp, synthetic construct
  source 1..75: mol_type = other DNA
ctattagccagacgtcaggtgcaattgtcggaatattttcagcatttctaataactaagataatatctaatcagt

SEQ ID NO: 105344 - DNA, 75 bp, synthetic construct
  source 1..75: mol_type = other DNA
gggaagagcaccacgctgaccgtggcattccagccggaaggcgcaaccgacaagagcttccgtgcggtgtcagcg

SEQ ID NO: 105345 - DNA, 75 bp, synthetic construct
  source 1..75: mol_type = other DNA
atgagtcttttaaatgacgttcagaaattcattgaagcccatccggggtgtacttccggtgacattgcggatgct

SEQ ID NO: 105346 - DNA, 75 bp, synthetic construct
  source 1..75: mol_type = other DNA
ggttgatgataatacgaagtggcgttggagtggcattattgtgccagtatgcacaaccattttcacggcggcggt

SEQ ID NO: 105347 - DNA, 75 bp, synthetic construct
  source 1..75: mol_type = other DNA
cggctgacgctggattccatcaccatcaacagccattttgacggttcaatggtggtggcgctgagcgggcggcgt

SEQ ID NO: 105348 - DNA, 75 bp, synthetic construct
  source 1..75: mol_type = other DNA
ataaacagcctctcctttcaggccggacacaagacgactgagccattagcgattaatcatacaggtgttcatttt

SEQ ID NO: 105349 - DNA, 75 bp, synthetic construct
  source 1..75: mol_type = other DNA
ggggaactcaccagccatggacagattcagggcagccaggtcacgctttctccgctgaagccacaggggacagat

SEQ ID NO: 105350 - DNA, 75 bp, synthetic construct
  source 1..75: mol_type = other DNA
ggtgtcacgctgggattgttcgattatctggcggatctgtttaagattgataactcccacgccgggcgtttcaaa

SEQ ID NO: 105351 - DNA, 75 bp, synthetic construct
  source 1..75: mol_type = other DNA
tcggtgtgacggtgcaggtgccgtacaccgatgtgtggacgcataaaccggtgcagtactatccagggaaacatc

SEQ ID NO: 105352 - DNA, 75 bp, synthetic construct
  source 1..75: mol_type = other DNA
ttaccctgaccagtggtctctcctcaagcagtacggagctgtccagcctctttacgtcaggaagtggaatgtgga

SEQ ID NO: 105353 - DNA, 75 bp, synthetic construct
  source 1..75: mol_type = other DNA
ggaaaatgcgatgaactattccgtgggttttcgcgcgccaaatacgcgggaactgattagcggatttgccgatta

SEQ ID NO: 105354 - DNA, 75 bp, synthetic construct
  source 1..75: mol_type = other DNA
ggctgtttgatgcggaatatcttgttgccagcaaagcctgggggccgttcgattttacactcggcctgggctggg

SEQ ID NO: 105355 - DNA, 75 bp, synthetic construct
  source 1..75: mol_type = other DNA
aatatacgacgcgctgaaacaaggtgatgtactggtacgtctgggtggtctgcgcgtgttgcgtattggtgatga

SEQ ID NO: 105356 - DNA, 75 bp, synthetic construct
  source 1..75: mol_type = other DNA
aacgaccaaaaggcgaacccgtgtatcgtgacccggataacccttttaatacgtggactggtatagggaagcgcc

SEQ ID NO: 105357 - DNA, 75 bp, synthetic construct
  source 1..75: mol_type = other DNA
tcttaagctcatagctatgataaagaaaaaaaagaatatttatctggctacaactaactatgacttgctcatcga

SEQ ID NO: 105358 - DNA, 75 bp, synthetic construct
  source 1..75: mol_type = other DNA
gaccgcggagaattttggtgatgcactggaagatccgtcatttctcgcgatgcttgcggcactagtcaatagcgg

SEQ ID NO: 105359 - DNA, 75 bp, synthetic construct
  source 1..75: mol_type = other DNA
aacattaccaggggccatatcgcggcaaaagtgacgactatgcggcaaaagaaagggaactcaaacagcacataa

SEQ ID NO: 105360 - DNA, 75 bp, synthetic construct
  source 1..75: mol_type = other DNA
tcaatctccttgatatcaccagtgttgatgcacagaatcagcagcaggtgaaagatgccatgattaactatttca

SEQ ID NO: 105361 - DNA, 75 bp, synthetic construct
  source 1..75: mol_type = other DNA
agatccctgtggtgagcggaaatggtcagttcgccgcagtggctgaagtcaccgttactgaagcgggcgctgcag

SEQ ID NO: 105362 - DNA, 75 bp, synthetic construct
  source 1..75: mol_type = other DNA
gtatggatgttggtagaagctatagtgctggctatactgacaaaaaatatttgacatcaacgggagatggtgatg

SEQ ID NO: 105363 - DNA, 75 bp, synthetic construct
  source 1..75: mol_type = other DNA
gaagagcacggcgatagcattgaactggttactgatgatcatcagcgagaaaacccgctacaacaactgctggac

SEQ ID NO: 105364 - DNA, 75 bp, synthetic construct
  source 1..75: mol_type = other DNA
tggcaacaacgcggtcaacgtattgccagccgcaacctgtggatttccgttccctgtctgctgctggcgttttgc

SEQ ID NO: 105365 - DNA, 75 bp, synthetic construct
  source 1..75: mol_type = other DNA
accgaagaaattactaccatacaaagtactgctgaaaaattattgccaacgcaattattgaatgatccagaataa

SEQ ID NO: 105366 - DNA, 75 bp, synthetic construct
  source 1..75: mol_type = other DNA
tacgccggccactgcaattaaggtgacaccgacatccggtacggtggcaaaagggaaaacaaccaccctgactgt

SEQ ID NO: 105367 - DNA, 75 bp, synthetic construct
  source 1..75: mol_type = other DNA
atgagtctttttaatgacgttcagaaattcattgaagcccatccggggtgtacttccggagacattgcggatgct

SEQ ID NO: 105368 - DNA, 75 bp, synthetic construct
  source 1..75: mol_type = other DNA
tgacgaagtgtgcgctcgcttcccgaatgtgcataaggtatgtctgcgcgcgtcctggccccaccagcaaagccg

SEQ ID NO: 105369 - DNA, 75 bp, synthetic construct
  source 1..75: mol_type = other DNA
ccttagcccggagttcgccatgctgtcgatcccggcggcgctgatgctcggcctgctgctggggttgttcaacgg

SEQ ID NO: 105370 - DNA, 75 bp, synthetic construct
  source 1..75: mol_type = other DNA
gaagcgatggataaacgctttgacaagattatggatgagatgaatcggcggtttgacaaggttgatgataatacg

SEQ ID NO: 105371 - DNA, 75 bp, synthetic construct
  source 1..75: mol_type = other DNA
gcgctggcggtgatcgtggtgtgctggtttattctgcgccgtaccacgcttggcgttcatatctacgccgtcggc

SEQ ID NO: 105372 - DNA, 75 bp, synthetic construct
  source 1..75: mol_type = other DNA
tatccttgttcctttgttctgtttatatcaataatttggtctcagttaatttctaagcgcatactttcaaaaata

SEQ ID NO: 105373 - DNA, 75 bp, synthetic construct
  source 1..75: mol_type = other DNA
catcatcgatgaagagctggagcctggcgatattctttatattccgccaggattcccgcatgaagctacgcgctg

SEQ ID NO: 105374 - DNA, 75 bp, synthetic construct
  source 1..75: mol_type = other DNA
atcctgcggacgttctgccgcaagagatggataaactgcgtgagatgatgctcgaattgatcaaccagccggaac

SEQ ID NO: 105375 - DNA, 75 bp, synthetic construct
  source 1..75: mol_type = other DNA
atggcgacgattaaatgtgtgtactgcaaaaaagaagtcactgaactggattttcaacaagcaagcttattgcag

SEQ ID NO: 105376 - DNA, 75 bp, synthetic construct
  source 1..75: mol_type = other DNA
agctgtatctggcgaatgcgtcctggatatgggtgccgttacttgccatcttcaccattgcggcgtggtttggca

SEQ ID NO: 105377 - DNA, 75 bp, synthetic construct
  source 1..75: mol_type = other DNA
tcaacagcaactttgacggttctatggtggtggagctgaccgggcggtggaataacggtgtgcctgtgtcccttt

SEQ ID NO: 105378 - DNA, 75 bp, synthetic construct
  source 1..75: mol_type = other DNA
ctcgatcagtacgacgtgtttatcattcagggtaccggacgtcgtcgctggcgagtgggcgaaaagctgcaaatg

SEQ ID NO: 105379 - DNA, 75 bp, synthetic construct
  source 1..75: mol_type = other DNA
cggcagtgctacgcgccaggggagcagttcgccaacccggtttatcggccagtcggctatgacgtcaaggacata

SEQ ID NO: 105380 - DNA, 75 bp, synthetic construct
  source 1..75: mol_type = other DNA
gacattgagtaccgtgaagttccagtagaagtgaaaccagaagttcgcgttgaaggtggtcagcacctgaacgtt

SEQ ID NO: 105381 - DNA, 75 bp, synthetic construct
  source 1..75: mol_type = other DNA
aggcaggtaaccggctgagcgccaacagtgctgacctgattgccggcagggacatggcactcagtggtaaggagg

SEQ ID NO: 105382 - DNA, 75 bp, synthetic construct
  source 1..75: mol_type = other DNA
ttactaacaaggttctggcgtgttaccaacgcgaagctaacaagaatatggcgcttctattaaataatcatcagt

SEQ ID NO: 105383 - DNA, 75 bp, synthetic construct
  source 1..75: mol_type = other DNA
gtgttaccaacgcgaagctaacaaggaaatagctcgtctattaaatattccgcaggagttaaataattctcagga

SEQ ID NO: 105384 - DNA, 75 bp, synthetic construct
  source 1..75: mol_type = other DNA
gatacccgccttaacctaatagttaacacggttaattgcaatcggagctattggagtttcaacaaaacagccaga

SEQ ID NO: 105385 - DNA, 75 bp, synthetic construct
  source 1..75: mol_type = other DNA
ttgctgtctcttcgttagtattcagttcggcgtcgtttgccgctgggctggaagacaatatggaaacccttaacg

SEQ ID NO: 105386 - DNA, 75 bp, synthetic construct
  source 1..75: mol_type = other DNA
ggagataccagttttacgctggcctggaaaccgggagaagaaggtcagaaagggcttataggctggtttgaaagc

SEQ ID NO: 105387 - DNA, 75 bp, synthetic construct
  source 1..75: mol_type = other DNA
gcacgctgccgtggccgatgctcgacccgcgcgaatgcggtctgaaaagcgttgctgaagcggcaaataccccgg

SEQ ID NO: 105388 - DNA, 75 bp, synthetic construct
  source 1..75: mol_type = other DNA
aagacgtgatgacccgcaccgtgaaaatcagcggtgtggggcgtccatatctggcagaggagggcactgaaaccg

SEQ ID NO: 105389 - DNA, 75 bp, synthetic construct
  source 1..75: mol_type = other DNA
caagagtttataagcgaagcccgtacgtggttgcagaagttcttttaagggctaatggtaagtgccaaagctgta

SEQ ID NO: 105390 - DNA, 75 bp, synthetic construct
  source 1..75: mol_type = other DNA
agttcccggatgttcagattctgcaatacgctttcttcgggccgtttattggtgcgctggcgcgttctgcaggtg

SEQ ID NO: 105391 - DNA, 75 bp, synthetic construct
  source 1..75: mol_type = other DNA
ctgcgtttcgaccagatcgaatttgcagcatttgaactgcacatcctgaagcgtccaggcgcagaagcggattac

SEQ ID NO: 105392 - DNA, 75 bp, synthetic construct
  source 1..75: mol_type = other DNA
tggaaaatccggtcaaacgtggtgagcaggttatcaaacaggtcacgctgatgaaacccaatgccgggacgctgc

SEQ ID NO: 105393 - DNA, 75 bp, synthetic construct
  source 1..75: mol_type = other DNA
aaaatcatatagctaccttacaggaacggactcgcgatgcgctggcgcgcttcaagctggatgcgttacttattc

SEQ ID NO: 105394 - DNA, 75 bp, synthetic construct
  source 1..75: mol_type = other DNA
gatggtgccgatttgcgttggggggcagagtcggcaagccgggcaatgtacatttggatgtcggcggtacgagac

SEQ ID NO: 105395 - DNA, 75 bp, synthetic construct
  source 1..75: mol_type = other DNA
gtcactaacgtgggtaaaccttctgtagcggaagaacgcagcaaaattacgccggtcagtgcgattaaggtgacg

SEQ ID NO: 105396 - DNA, 75 bp, synthetic construct
  source 1..75: mol_type = other DNA
gacgatgttgagaatgctggtgccagtgtaaaaccgttggctgaagcgattttcctgaacgatcgtgttcgtttc

SEQ ID NO: 105397 - DNA, 75 bp, synthetic construct
  source 1..75: mol_type = other DNA
atgacggcgcgctatcagggtatgaaccgaaataccggcctcggcatcagcgataccgagcatatcagccagagc

SEQ ID NO: 105398 - DNA, 75 bp, synthetic construct
  source 1..75: mol_type = other DNA
atgagtctgttgaatgacgttcagaaattcattgaagcccatccggggtgtacttccggcgacattgcggatgct

SEQ ID NO: 105399 - DNA, 75 bp, synthetic construct
  source 1..75: mol_type = other DNA
gcactgagccgggctgtaataagcgcgtgaagtccggcaagtgcgaagatcacaggcgggctgcatggcgtgcag

SEQ ID NO: 105400 - DNA, 75 bp, synthetic construct
  source 1..75: mol_type = other DNA
ttgctgccgtagctgaagcggaacgtgagcgtattctggagcggacaaacgacggcagaatagcggcacttgccg

SEQ ID NO: 105401 - DNA, 75 bp, synthetic construct
  source 1..75: mol_type = other DNA
tgctgatgccctgccatcgggtggaaccgccgtggcagcgaataaactcgccaccccagtaaatattaatggcgt

SEQ ID NO: 105402 - DNA, 75 bp, synthetic construct
  source 1..75: mol_type = other DNA
aggtgttgcggcaggtaaagcgcagattcctgtggttaccggcaatggtgagtttgcggcggtggcggagatcac

SEQ ID NO: 105403 - DNA, 75 bp, synthetic construct
  source 1..75: mol_type = other DNA
gaagactttgcttggcggcgacaacctgattgaagtgaataaccttgccaccgacccgctgattaaacccgcaca

SEQ ID NO: 105404 - DNA, 75 bp, synthetic construct
  source 1..75: mol_type = other DNA
agataaaagtgtccgtcacccttatggatgagcagaaaaacctggtgaaagggatggcttcgctgctggcgggta

SEQ ID NO: 105405 - DNA, 75 bp, synthetic construct
  source 1..75: mol_type = other DNA
ggcagatgtcagcggtggcgttgatggacgctcgttctatcgctgcgactgcggcaaacggtggctatttaacct

SEQ ID NO: 105406 - DNA, 75 bp, synthetic construct
  source 1..75: mol_type = other DNA
ggagatctctgtcaccagccagacggccggaaccagtgcggtcactgccagcatcaacaccagcagccagagccg

SEQ ID NO: 105407 - DNA, 75 bp, synthetic construct
  source 1..75: mol_type = other DNA
cttgatgtttacagtaagggagaaggcgatgagcgttatctgcgcagggaccagaatggcgcggatatcccggac

SEQ ID NO: 105408 - DNA, 75 bp, synthetic construct
  source 1..75: mol_type = other DNA
cggtaaaaggttccggcaccaccctgtgggtttataacggaaagggcgatgcgtatgcaaacccgctgtcagatg

SEQ ID NO: 105409 - DNA, 75 bp, synthetic construct
  source 1..75: mol_type = other DNA
aacaatgcggagcagatgccggacactatagaacggttgccgccgccgggcaccttcgttttaacgaggataatt

SEQ ID NO: 105410 - DNA, 75 bp, synthetic construct
  source 1..75: mol_type = other DNA
cgtctgaccgccggtatttgcctgataacacaaactattttccctgttatggctgctgcccctacgcatattaat

SEQ ID NO: 105411 - DNA, 75 bp, synthetic construct
  source 1..75: mol_type = other DNA
tcttaataataagaaagctactgacaatgaaattaatgacatcaaagttaaccttacaccggtcatcgattcgat

SEQ ID NO: 105412 - DNA, 75 bp, synthetic construct
  source 1..75: mol_type = other DNA
tatcggccacgttgaccacggtaaaactacgctgaccgctgcaatcacaaccgtactggctaaaacctacggcgg

SEQ ID NO: 105413 - DNA, 75 bp, synthetic construct
  source 1..75: mol_type = other DNA
gaaattacgctctatatggaaagtctgactgctgaagagcgcgagattatcaaggcgggtagtttgattaacttc

SEQ ID NO: 105414 - DNA, 75 bp, synthetic construct
  source 1..75: mol_type = other DNA
gcaggttatcgaacaggtcacgctgatgaaacccaatgccgggacgctgcgcggtgtcagtctggcagcggtcgc

SEQ ID NO: 105415 - DNA, 75 bp, synthetic construct
  source 1..75: mol_type = other DNA
gggacatccacatattattaccggataaaaagaaaaaataaaaatgacaggcagggggaaagtatttccccttac

SEQ ID NO: 105416 - DNA, 75 bp, synthetic construct
  source 1..75: mol_type = other DNA
cctggctggcgactcaggagaacagcgagcaggttgaacatgacgagacgccgtatccgctggtcgatgatctgg

SEQ ID NO: 105417 - DNA, 75 bp, synthetic construct
  source 1..75: mol_type = other DNA
agatgagtcatcaggagcgcaataccgtgcgcatggcttatattcataaggcagagcacctggaagcccgcaaag

SEQ ID NO: 105418 - DNA, 75 bp, synthetic construct
  source 1..75: mol_type = other DNA
tggcctggaaaccgggagaggaaggccagaaagggcttataggctggtttgaaagcggggatgtgcgggcctata

SEQ ID NO: 105419 - DNA, 75 bp, synthetic construct
  source 1..75: mol_type = other DNA
gatgctctttacgaagcaatgaaagaaggcgcaacagccgcgctaaatggcaacctggcagcaccgactattcac

SEQ ID NO: 105420 - DNA, 75 bp, synthetic construct
  source 1..75: mol_type = other DNA
atgagtctgttcaatgacgttcagaaattcattgaagcccatccggggtgtacttccggggacattgcggatgct

SEQ ID NO: 105421 - DNA, 75 bp, synthetic construct
  source 1..75: mol_type = other DNA
ggacaaaatgttaccttcacggtcgtgaatggtgcggcggtttttgccgatccaaatggcggtattgtgacgaca

SEQ ID NO: 105422 - DNA, 75 bp, synthetic construct
  source 1..75: mol_type = other DNA
ttatcaatattatcctgttgattatcggcacttttatggatatgacaccggcggtactgatttttacgccgatat

SEQ ID NO: 105423 - DNA, 75 bp, synthetic construct
  source 1..75: mol_type = other DNA
cgccggtcagtgcgattaaggtgacgcctacatccggtacggtggcaaaagggaaaacaaccaccctgacggttt

SEQ ID NO: 105424 - DNA, 75 bp, synthetic construct
  source 1..75: mol_type = other DNA
tgtcgatcagcaaatcctgcttgctgatggaaaatcaacctcaacgctgacctataccgcgcgagattccagcgg

SEQ ID NO: 105425 - DNA, 75 bp, synthetic construct
  source 1..75: mol_type = other DNA
aacgcaaggcctcaagcccagcccggttaatcaagtatatggtggcggccaagggcggcattgacccgacgagct

SEQ ID NO: 105426 - DNA, 75 bp, synthetic construct
  source 1..75: mol_type = other DNA
aatcagaatttcgccaccattaccgtgaaggggaacacgatcaccgtgaaaggtgttgcggcaggtaaagcgcag

SEQ ID NO: 105427 - DNA, 75 bp, synthetic construct
  source 1..75: mol_type = other DNA
accaccggcaaagcgatgggcgactacggctgtatgctgcgcgcttatcgtcgtcatattgtcgatgccatgttg

SEQ ID NO: 105428 - DNA, 75 bp, synthetic construct
  source 1..75: mol_type = other DNA
tccagccttccgaacggcaggccgaggcgaaggcgaaccgcaagcggtacgagccacgaccccggcggccggata

SEQ ID NO: 105429 - DNA, 75 bp, synthetic construct
  source 1..75: mol_type = other DNA
atggttgcatgttgcgcgcttatcggcgacacattattgatgccatgctgcattgccatgaacgtagcaccttta

SEQ ID NO: 105430 - DNA, 75 bp, synthetic construct
  source 1..75: mol_type = other DNA
aaaggcgagaaggtcgaaagctaccgcgttaccaactgcggcacggacgaccccgccgacgctgcaatcctgatc

SEQ ID NO: 105431 - DNA, 75 bp, synthetic construct
  source 1..75: mol_type = other DNA
aaattatgaacagtcttatgcattcgttgagcaacaactggtgaccgggagtacgaacgttctggcgcttgaaca

SEQ ID NO: 105432 - DNA, 75 bp, synthetic construct
  source 1..75: mol_type = other DNA
cgatacctttattcgtctgttgaacgccaccccgaatggggtgatccgtaactccgatgtagccaaaggcgtggt

SEQ ID NO: 105433 - DNA, 75 bp, synthetic construct
  source 1..75: mol_type = other DNA
aagccgctaacgacgatctgctgaactctttctggttgctggacagcgaaaaaggcgaagcgcgttgcatcgttg

SEQ ID NO: 105434 - DNA, 75 bp, synthetic construct
  source 1..75: mol_type = other DNA
tgttgagtggttggtggtatcggctctgaaactccctgaattggatgaaaaataccgaactgagcttgaggttaa

SEQ ID NO: 105435 - DNA, 75 bp, synthetic construct
  source 1..75: mol_type = other DNA
atatccgcagctgaccatccgtgtatccggttatgcagttcgctttaactctctgactccggaacagcagcgcga

SEQ ID NO: 105436 - DNA, 75 bp, synthetic construct
  source 1..75: mol_type = other DNA
atgtcaccgtgggccgcgaaacgcctgcatgaatttggcggcgatattactaaattccgtgtagtgaaagtctgg

SEQ ID NO: 105437 - DNA, 75 bp, synthetic construct
  source 1..75: mol_type = other DNA
atgcgttcggtaatacgcttgccgggcagacggtcagcgtgatggcggacaacggtgcaacggtcgctccgactg

SEQ ID NO: 105438 - DNA, 75 bp, synthetic construct
  source 1..75: mol_type = other DNA
aagctgcattaacggcgacatctcgcgatacctttattcgtctgctgaacgcaactccgaacggagttatccgta

SEQ ID NO: 105439 - DNA, 75 bp, synthetic construct
  source 1..75: mol_type = other DNA
gtaattgtcgtggcgataataccgtatgtggatttggtgcccgtttacggcgactgactgccggtatttgtttga

SEQ ID NO: 105440 - DNA, 75 bp, synthetic construct
  source 1..75: mol_type = other DNA
cctgcgcattcggatactgccgcgtcactgatcctgtcgaacgttaaaactattccatacaccctgggggctttg

SEQ ID NO: 105441 - DNA, 75 bp, synthetic construct
  source 1..75: mol_type = other DNA
ccgcgcgtcaggctgaccagcatcactacagcgcggcagtttgacggacagatggtcgtcgacgtgaccggccaa

SEQ ID NO: 105442 - DNA, 75 bp, synthetic construct
  source 1..75: mol_type = other DNA
agagcaggacagtattagtgccattaaacaactggcaattcagcgccctgccacccccctagcaacgaggtcgag

SEQ ID NO: 105443 - DNA, 75 bp, synthetic construct
  source 1..75: mol_type = other DNA
tcagattgacgatgcgctgaagttggcagacgaaggcaaagtgaaagaagcacaggccgtcgcagagcaactgaa

SEQ ID NO: 105444 - DNA, 75 bp, synthetic construct
  source 1..75: mol_type = other DNA
agaaaacgaagtggcttgatccggcaacaaaaagcaagcgtgccgctggcggattccgtgaggaggaagaacggg

SEQ ID NO: 105445 - DNA, 75 bp, synthetic construct
  source 1..75: mol_type = other DNA
catcattctgggttcttccagtttgtcagtcagtgagctatggcacgcattaatgcatccgtttagccctgatac

SEQ ID NO: 105446 - DNA, 75 bp, synthetic construct
  source 1..75: mol_type = other DNA
tcgtcacacaacatggtcgtctggtgaagactttgcttggcggcgacaacctgattgaagtgaataaccttgccg

SEQ ID NO: 105447 - DNA, 75 bp, synthetic construct
  source 1..75: mol_type = other DNA
tgggttcaagtaacctggcggctctctggcagctggagagtgccattaccgacgcgaccgccgcgctgctgtatg

SEQ ID NO: 105448 - DNA, 75 bp, synthetic construct
  source 1..75: mol_type = other DNA
agtatcggtaaggcagtgacggcgaaagaagtgatcacccgaacagtgaaagtgaccaacgtgggcaaaccttcc

SEQ ID NO: 105449 - DNA, 75 bp, synthetic construct
  source 1..75: mol_type = other DNA
gcaaatgaaggtaaagtaaaagaagcgcaggctgctgcagagcaactgaaaacgacccgcaacgcctatcaccag

SEQ ID NO: 105450 - DNA, 75 bp, synthetic construct
  source 1..75: mol_type = other DNA
ggtatccaccgggcaggggcagaaatctgccggtgacaccagttttacgctggcctggaagcccggcgagaaagg

SEQ ID NO: 105451 - DNA, 75 bp, synthetic construct
  source 1..75: mol_type = other DNA
tatcggccacgttgaccagggtaaaactaccctgaccgctgcaatcacaaccgtactggctaaaacctacggcgg

SEQ ID NO: 105452 - DNA, 75 bp, synthetic construct
  source 1..75: mol_type = other DNA
agtgtcattatcccgattggtattgtcacatcacttgttggtgttccattatttattagtattattctgcgttat

SEQ ID NO: 105453 - DNA, 75 bp, synthetic construct
  source 1..75: mol_type = other DNA
atggcatcaaaaataaactggctattgcaaaatacctctccgggaagcctggttttacaatcgtggctaacccgg

SEQ ID NO: 105454 - DNA, 75 bp, synthetic construct
  source 1..75: mol_type = other DNA
atgcgttcgggaatgcacttgccgggcagacggtcagcgtgatggcggacaacggtgcgcggtcgcttcgacgat

SEQ ID NO: 105455 - DNA, 75 bp, synthetic construct
  source 1..75: mol_type = other DNA
tttgcgactgaccaactggcgcagcgcacctgaactggacaacgattatgaagcacgcccggccaatggctggga

SEQ ID NO: 105456 - DNA, 75 bp, synthetic construct
  source 1..75: mol_type = other DNA
tgaatttcgacaaacgtctctcctccaccatttatctggtgggatttgcctgcaccagctccgtcattggtaccg

SEQ ID NO: 105457 - DNA, 75 bp, synthetic construct
  source 1..75: mol_type = other DNA
ttgtggaaccaagatagcactcgaacgacgaagcaaagaacgcgaaaaagcggaaaaggcagaaaaggcagcaga

SEQ ID NO: 105458 - DNA, 75 bp, synthetic construct
  source 1..75: mol_type = other DNA
gcacggccagacgggcacccaagtgcgtgagggaagcaagtcggcggcggcaacgcctcagcgtgccaagaaacg

SEQ ID NO: 105459 - DNA, 75 bp, synthetic construct
  source 1..75: mol_type = other DNA
gaggttcgcaagcgcggcgcgggccttgtcatcggagagccggatttaggcatttgggcgaaggccagcaacgtc

SEQ ID NO: 105460 - DNA, 75 bp, synthetic construct
  source 1..75: mol_type = other DNA
gcttcccgtttgtccaccgttcagcgagaaattgaaaacctggaaacacggcttaatcctaacccggcaaaccgg

SEQ ID NO: 105461 - DNA, 75 bp, synthetic construct
  source 1..75: mol_type = other DNA
acgccatgttttgggctatttgcaggacttcctgttccatccgaaacgggcgatgacgccggtacgtgcgctttc

SEQ ID NO: 105462 - DNA, 75 bp, synthetic construct
  source 1..75: mol_type = other DNA
aacgttgcgctgtcgtcgctttccggcggctggttgcgtaaagcggcattaggacgcgcgctggtgagcaatccg

SEQ ID NO: 105463 - DNA, 75 bp, synthetic construct
  source 1..75: mol_type = other DNA
cgtaatgagcaattagccggtaataaatcaaccagccgatttaaaatcattaagctgcatgatgcagaagcgcag

SEQ ID NO: 105464 - DNA, 75 bp, synthetic construct
  source 1..75: mol_type = other DNA
cgtcgatcaacgctggcatgctctacttttttatcgcccacgccggatcggtgctgattatgatcgccttcttgc

SEQ ID NO: 105465 - DNA, 75 bp, synthetic construct
  source 1..75: mol_type = other DNA
tatcggccacgttgaccatggcaaaacaacgctgaccgctgcaatcactaccgtactggctaaaacctacggcgg

SEQ ID NO: 105466 - DNA, 75 bp, synthetic construct
  source 1..75: mol_type = other DNA
ggcggaaggtctggatgcgctggtgatggacgtgaaagtgggtagcggtgcatttatgccgacctacgaactctc

SEQ ID NO: 105467 - DNA, 75 bp, synthetic construct
  source 1..75: mol_type = other DNA
gtcctattgctatggtaatgctggcagtcactggtgggctggcagtaatgtgcttcgtcaaaatgtacggtatta

SEQ ID NO: 105468 - DNA, 75 bp, synthetic construct
  source 1..75: mol_type = other DNA
gatcgaagatgtgctgatcgacagcctggaaagggaagggatccgagacgggaaagaggtgctgtgccctgtgtg

SEQ ID NO: 105469 - DNA, 75 bp, synthetic construct
  source 1..75: mol_type = other DNA
ggagtacaaagacaagaagtggcacattgttcgtattcccaaaagtgccagcctgcgtgaagttctcacctcaat

SEQ ID NO: 105470 - DNA, 75 bp, synthetic construct
  source 1..75: mol_type = other DNA
ggcgatggagcgatatgggagagtgattttcatacgctctcatatggcttccggcctgagcgcagtgtccaccac

SEQ ID NO: 105471 - DNA, 75 bp, synthetic construct
  source 1..75: mol_type = other DNA
tgacgagtccctgacaagatgtatctattctttgcgctgcatttttgaaaaaattggctatgatcgttgcataga

SEQ ID NO: 105472 - DNA, 75 bp, synthetic construct
  source 1..75: mol_type = other DNA
acgttcaacggtacgattattttcatctcccacgaccgttcatttattcgcaatatggcgacgcgtattgtcgat

SEQ ID NO: 105473 - DNA, 75 bp, synthetic construct
  source 1..75: mol_type = other DNA
tatttaaaataaatattaactcgaaagataatcataataatgctgaagaaaatacaatgcgttctgtattatcag

SEQ ID NO: 105474 - DNA, 75 bp, synthetic construct
  source 1..75: mol_type = other DNA
aaacgttgccggagcgcgaaaaactggtattaaccctctattaccaggaagagctgaatctcaaagagattggcg

SEQ ID NO: 105475 - DNA, 75 bp, synthetic construct
  source 1..75: mol_type = other DNA
tgatgcccaggacgcatggctcagcctggtggcgctaaacgatcatgcgctggaaggcgatctcctgctgagtgc

SEQ ID NO: 105476 - DNA, 75 bp, synthetic construct
  source 1..75: mol_type = other DNA
gcaaatcatttcaaataaaaaaatcgatggtctctatacctatccgatggctgcgacaaatttttgtaatgacca

SEQ ID NO: 105477 - DNA, 75 bp, synthetic construct
  source 1..75: mol_type = other DNA
ggcgctgtctctcggttttggcgatggagtgaatggctcaatgcaggcactgctaccatgcgaatcccccgcagc

SEQ ID NO: 105478 - DNA, 75 bp, synthetic construct
  source 1..75: mol_type = other DNA
atcgacgctaaaaatcttttcctcatcgccagtaatcatcttcctgttgatgaactaaataacacatcacaattt

SEQ ID NO: 105479 - DNA, 75 bp, synthetic construct
  source 1..75: mol_type = other DNA
acttgctgcttggatttgcccctatatttccagacacctgttatcacttaacccattactggcttgctgccgtag

SEQ ID NO: 105480 - DNA, 75 bp, synthetic construct
  source 1..75: mol_type = other DNA
tttatgctggccagctgggtgacgtaaggccgaagtgttcgggttcattggctcagtggcaggcaaatatcggtg

SEQ ID NO: 105481 - DNA, 75 bp, synthetic construct
  source 1..75: mol_type = other DNA
gcgttatgactggctggggcagtacctgttctcatcgctgagtgaattacaggactatgctacccgatggcaatg

SEQ ID NO: 105482 - DNA, 75 bp, synthetic construct
  source 1..75: mol_type = other DNA
cattcagacgccggaaggggggacggagaaggattatcagttcctgccgtcgaaaaatgaccattatcgtgagcg

SEQ ID NO: 105483 - DNA, 75 bp, synthetic construct
  source 1..75: mol_type = other DNA
gtaaaaaacgtgatggtcatgcgctgagcgatgaagaaattcgtttctttatcaacggcattcgcgacaacacta

SEQ ID NO: 105484 - DNA, 75 bp, synthetic construct
  source 1..75: mol_type = other DNA
gaggacgcgccgggctgtttgaaatcgcccacggtggcacgctgtttcttgacgagataggcgaaatgccgctgc

SEQ ID NO: 105485 - DNA, 75 bp, synthetic construct
  source 1..75: mol_type = other DNA
cagacttacggggggcaggtatggatagataatcagagtcagaccagtggtgtatatatggtgcccactccgcca

SEQ ID NO: 105486 - DNA, 75 bp, synthetic construct
  source 1..75: mol_type = other DNA
gcagctctacttgattcgagaaatggcaaaggcatctaccggtatctgtgtggaacgcacagggtggcatgaacg

SEQ ID NO: 105487 - DNA, 75 bp, synthetic construct
  source 1..75: mol_type = other DNA
gtatatcaatattctggataacgaattatcgaattttaagtttaatgagaacagcaaagacgagtttatggccgg

SEQ ID NO: 105488 - DNA, 75 bp, synthetic construct
  source 1..75: mol_type = other DNA
aaacgttgatgagtgaacaccgtaacaatattcaggtagcaattgatgctttatatagccaacgtcgggtgatgc

SEQ ID NO: 105489 - DNA, 75 bp, synthetic construct
  source 1..75: mol_type = other DNA
ctaagcgatgaagaaattcgtttctttatcaacggtattcgcgacaacactatctccgaagggcagattgccgcc

SEQ ID NO: 105490 - DNA, 75 bp, synthetic construct
  source 1..75: mol_type = other DNA
gctggaaaaagaagaagccctgcgcgtggaagaactacaaaatgccgagttcgatcgcaaactggcgcaggaaga

SEQ ID NO: 105491 - DNA, 75 bp, synthetic construct
  source 1..75: mol_type = other DNA
ccgcgaaatcattaaagatgttggcgtggcgattatcggccagaccagctcactggctccggcggataaacgttt

SEQ ID NO: 105492 - DNA, 75 bp, synthetic construct
  source 1..75: mol_type = other DNA
cggtgctggacaacggtaaagcggcagaagtctttggtcgtatggtagcggcacaaaaaggcccgaccgacttcg

SEQ ID NO: 105493 - DNA, 75 bp, synthetic construct
  source 1..75: mol_type = other DNA
taaggcagcctcactaggtgagggctatgaagcccattatggctcacatcggttaggctctgacgacttcatcca

SEQ ID NO: 105494 - DNA, 75 bp, synthetic construct
  source 1..75: mol_type = other DNA
tacccgtttgcgccagcacaaattgcccgcttctaccgctgatatggctgccgctcatctgcatgcgatggcact

SEQ ID NO: 105495 - DNA, 75 bp, synthetic construct
  source 1..75: mol_type = other DNA
gctggcagggttacgatcctcgctacatatactcgctcgtggtcagacgctattttgcggatatgaaaaccaaga

SEQ ID NO: 105496 - DNA, 75 bp, synthetic construct
  source 1..75: mol_type = other DNA
atggctaaatattccgcacctaataaaacggatcaacaacaagataacgaaaatgacaacagttattttgaaatg

SEQ ID NO: 105497 - DNA, 75 bp, synthetic construct
  source 1..75: mol_type = other DNA
agctgatttatcgtccgaaggtactggttcaggggcgtaagggggcggagaaaaaggttgaggtggttcagaaag

SEQ ID NO: 105498 - DNA, 75 bp, synthetic construct
  source 1..75: mol_type = other DNA
acagctaccagggcacggtattgctggtgagccacgatcgtcagtttgtcgataacaccgttacagaatgctgga

SEQ ID NO: 105499 - DNA, 75 bp, synthetic construct
  source 1..75: mol_type = other DNA
gttcacagataaaatactctccaggaaacccggggcggttcaggatgaacagggccgggactgccctgactgggt

SEQ ID NO: 105500 - DNA, 75 bp, synthetic construct
  source 1..75: mol_type = other DNA
ctgttcaaagggctgctatttctcggcgcgggcgcgattatttcgcgtttgcatacccacgacatggaaaaaatg

SEQ ID NO: 105501 - DNA, 75 bp, synthetic construct
  source 1..75: mol_type = other DNA
tctgttcgtgaggccctggcaaccttgcgccgtaaaggacttattgaggtcaataatggtgaaagaacgaaggtt

SEQ ID NO: 105502 - DNA, 75 bp, synthetic construct
  source 1..75: mol_type = other DNA
aaagaaaatagataaaaaaattgaagaaatagataatgcaatccgggatctttcctctgaaacagagagattcaa

SEQ ID NO: 105503 - DNA, 75 bp, synthetic construct
  source 1..75: mol_type = other DNA
agttgcacctgctgggctatttgacgctggaagcaagcagcggcgaacaggcgctggatctgctggcggcatcag

SEQ ID NO: 105504 - DNA, 75 bp, synthetic construct
  source 1..75: mol_type = other DNA
gagttaaatgattcgcaggagttaaataactcgcaggacttaaaaaattcgcaggtgagttgtaaaggttcagtt

SEQ ID NO: 105505 - DNA, 75 bp, synthetic construct
  source 1..75: mol_type = other DNA
agcgccgcacaacgtgcttcgctggttaccgcgatgatcgaaacgggcgttgctattccgtcaatgtgcctgtct

SEQ ID NO: 105506 - DNA, 75 bp, synthetic construct
  source 1..75: mol_type = other DNA
agtagagagtttcgggatttcgtcgtcacccgcatcgaagaaccaacattgctcgacgaggagccacaggccaac

SEQ ID NO: 105507 - DNA, 75 bp, synthetic construct
  source 1..75: mol_type = other DNA
ctgtcaggtaagcagccactggacaatacgctgactcatttgagtggaaaggatgttgccggtcttctcgcatac

SEQ ID NO: 105508 - DNA, 75 bp, synthetic construct
  source 1..75: mol_type = other DNA
atgaatggattcagaaaccgttcacgaagcagtctagtctggcgttataggtgtgtcggaaaccgtgctgtccgg

SEQ ID NO: 105509 - DNA, 75 bp, synthetic construct
  source 1..75: mol_type = other DNA
aaatagacaacaacatcggtgaaaacgcgttacgttcggtggcggttggaagaaaaaatcttatgacctttgtca

SEQ ID NO: 105510 - DNA, 75 bp, synthetic construct
  source 1..75: mol_type = other DNA
cgccccagccataaccccgcgctgccagacgtggcgctgttgcgcaaaccctttacccgtgcgcagttggcgcag

SEQ ID NO: 105511 - DNA, 75 bp, synthetic construct
  source 1..75: mol_type = other DNA
tggcagcctggaactggtgaacacggactcacccgacgcgccgcgaatacagcgggcgctgcaagctgccgaacg

SEQ ID NO: 105512 - DNA, 75 bp, synthetic construct
  source 1..75: mol_type = other DNA
gatatagataaacatttaaatcttaatcattgctgtttatatgctgcttgtttgggcgagttaaccggtggaaat

SEQ ID NO: 105513 - DNA, 75 bp, synthetic construct
  source 1..75: mol_type = other DNA
agagcaaagccctggtcagtttcgtgatgtgccgtttggcgaaggctgcgttgatttcgttggcatctttaaaac

SEQ ID NO: 105514 - DNA, 75 bp, synthetic construct
  source 1..75: mol_type = other DNA
cgtttttctttctgcggcggtagccttactgagtacagttgggcggcgggaccaatatcgccagtgccgtggagt

SEQ ID NO: 105515 - DNA, 75 bp, synthetic construct
  source 1..75: mol_type = other DNA
gatgtcagccagctggaaaatgccatcatcaatctggtgatgaacgcccgcgatgcgatggaagggcagacggga

SEQ ID NO: 105516 - DNA, 75 bp, synthetic construct
  source 1..75: mol_type = other DNA
actataaaatatatcatagacaatgttttgtacaatagaaaaaaagatatagctaatgaaatagatattgataaa

SEQ ID NO: 105517 - DNA, 75 bp, synthetic construct
  source 1..75: mol_type = other DNA
gtgcgtaatcatccgttaggtatttatgaaaaagcactggcgaaagatctctcctggccggagcgactggtgctg

SEQ ID NO: 105518 - DNA, 75 bp, synthetic construct
  source 1..75: mol_type = other DNA
cagtggtcaggatttacgccccagctataaccccgcgttgccagaagtggcgctgctgcgcaaaccttttacccg

SEQ ID NO: 105519 - DNA, 75 bp, synthetic construct
  source 1..75: mol_type = other DNA
ctacagaagttaaataatctacagaagttaaataatctacagaagttaaataatatacagaagttaaataatata

SEQ ID NO: 105520 - DNA, 75 bp, synthetic construct
  source 1..75: mol_type = other DNA
caagatttagccaacctttctggcgcaagagatgctcagctagaaagaaaggtttattttgatataaagatgctt

SEQ ID NO: 105521 - DNA, 75 bp, synthetic construct
  source 1..75: mol_type = other DNA
tttctgaaggatttttttatgaaaaatcctgagatgattaattggtatttccctcagttacttaatagctatgag

SEQ ID NO: 105522 - DNA, 75 bp, synthetic construct
  source 1..75: mol_type = other DNA
aagggctggcgtgggcggttgaacaggcagccgccgcgcaggtgatgctggcggtggagattatggataccgcgt

SEQ ID NO: 105523 - DNA, 75 bp, synthetic construct
  source 1..75: mol_type = other DNA
ggcattggctggcatgaagcacgtattccgaccattgccacgcccgtgccgcgcggcgcatttagctgggtcacg

SEQ ID NO: 105524 - DNA, 75 bp, synthetic construct
  source 1..75: mol_type = other DNA
agagagaggaaattcatcagcactttctgagcagaccacaacgcccgccatatccaaattttatttatgaagaca

SEQ ID NO: 105525 - DNA, 75 bp, synthetic construct
  source 1..75: mol_type = other DNA
actggcaaaaatgtggcgcgaatgcccgcaggaaattaacaagccagaattgccctcgctggcagatgccgttac

SEQ ID NO: 105526 - DNA, 75 bp, synthetic construct
  source 1..75: mol_type = other DNA
gtatccataactcggtcacccgtatcacgccgaaaccgacgcatatgatcggcggctatgcccatctggcatacg

SEQ ID NO: 105527 - DNA, 75 bp, synthetic construct
  source 1..75: mol_type = other DNA
ttctcaacggtcagaccaaggctcggtacggtaaatcccatgaaatcgctgtgaagcttggacttaaatcagcag

SEQ ID NO: 105528 - DNA, 75 bp, synthetic construct
  source 1..75: mol_type = other DNA
cgctggtcaaatcagacatcacgccacaggaagtggatgtggttgttaccctgccactgagcgaatatttcgaca

SEQ ID NO: 105529 - DNA, 75 bp, synthetic construct
  source 1..75: mol_type = other DNA
ttatagataatgttttgtacaatagaaaaaaagatatagctagtgaaatagatactgataaagtgaatttcatgc

SEQ ID NO: 105530 - DNA, 75 bp, synthetic construct
  source 1..75: mol_type = other DNA
cggtatatgagatccagtattacggcaaaaccttccggatgaacgctgctcaggtactgcatgataaatatatga

SEQ ID NO: 105531 - DNA, 75 bp, synthetic construct
  source 1..75: mol_type = other DNA
accattcgcatggcagtcaccagatcagcgaatttcgcacgcagattgaaagcacgttgcaggaacttcatcagg

SEQ ID NO: 105532 - DNA, 75 bp, synthetic construct
  source 1..75: mol_type = other DNA
gcactggttatttgcctgatcaccttctttgttgtctcctggattctggggcgtcagggtaaacaacagagcgaa

SEQ ID NO: 105533 - DNA, 75 bp, synthetic construct
  source 1..75: mol_type = other DNA
ctcttcttgataaacaggatatcctgctgctggatggcgcgatggcgacggagctggaagcgcgagggtgtaact

SEQ ID NO: 105534 - DNA, 75 bp, synthetic construct
  source 1..75: mol_type = other DNA
cgtcgtcaactgccgccgcccgcgtcactttctccggcacctttaccggggcgcagcgcctcggcagatattctg

SEQ ID NO: 105535 - DNA, 75 bp, synthetic construct
  source 1..75: mol_type = other DNA
cgccaccggtgacccgccctgtgacgccgccccgcccgacaatggcgacgcccacagccacagtcagcagccaga

SEQ ID NO: 105536 - DNA, 75 bp, synthetic construct
  source 1..75: mol_type = other DNA
aaataatcgtcagaagttaaataattcgcaggagttaaataattcacaggatttaaataattcgcaggagttaaa

SEQ ID NO: 105537 - DNA, 75 bp, synthetic construct
  source 1..75: mol_type = other DNA
tttctttatgaaaaatcctgagatgattaattggtacttccctcagttacttaagagttatgagggtgaaaagat

SEQ ID NO: 105538 - DNA, 75 bp, synthetic construct
  source 1..75: mol_type = other DNA
tggcggcagaaaacaaaaacaggtcgattacgtgccgggtacgccatgcaagccagatcaacaaaacggcatctg

SEQ ID NO: 105539 - DNA, 75 bp, synthetic construct
  source 1..75: mol_type = other DNA
atgggtcatgatctctttctttccagaggaggtaataaccctttttatgatttatttactttgcttcagcttaca

SEQ ID NO: 105540 - DNA, 75 bp, synthetic construct
  source 1..75: mol_type = other DNA
cgtgaacaagggctggatgacggtcgcattatttacgagcaagatttgattgtagctcgtctgcaacaggatccg

SEQ ID NO: 105541 - DNA, 75 bp, synthetic construct
  source 1..75: mol_type = other DNA
agtgaagctaacaagaaaatagcgcgtctattaaataataatcaggagttaaataatctacagaaattaaataat

SEQ ID NO: 105542 - DNA, 75 bp, synthetic construct
  source 1..75: mol_type = other DNA
cgccagctgctgccaaccggctggcagttccgccagcagaatgccgccacaccggcactgaacaaacgcctccct

SEQ ID NO: 105543 - DNA, 75 bp, synthetic construct
  source 1..75: mol_type = other DNA
aaccgtgcatttaatcggcggctgcgatgtggctatggagctggacgcacggcgagcgattgcccagggaacacg

SEQ ID NO: 105544 - DNA, 75 bp, synthetic construct
  source 1..75: mol_type = other DNA
gcgcctgccatgaaaccaaaatgccaatccttcctgctatgcagaaaaaaaatctggcggtggtcggtgcaggtc

SEQ ID NO: 105545 - DNA, 75 bp, synthetic construct
  source 1..75: mol_type = other DNA
tactggaattactggtccgcaccttccgcgatctgcgtgccaacggcgaaaagaaaacgtcaatggatacactga

SEQ ID NO: 105546 - DNA, 75 bp, synthetic construct
  source 1..75: mol_type = other DNA
taataacaccgatagcgaagatagccatgaacagtcaggcggaatatcgcgcacctatctttttcgtccattacc

SEQ ID NO: 105547 - DNA, 75 bp, synthetic construct
  source 1..75: mol_type = other DNA
tacaacgtcctgcgccaggaaggcacgcagaaaagcgtcatcgacaccatgcagacccgcaacgagctgtacgaa

SEQ ID NO: 105548 - DNA, 75 bp, synthetic construct
  source 1..75: mol_type = other DNA
gaccctgccgtgccgtttatccgtagccaggccgggacactgatatcactgattccaggaattactgaccgcgaa

SEQ ID NO: 105549 - DNA, 75 bp, synthetic construct
  source 1..75: mol_type = other DNA
agatccgagaaattttaatcagcgagtcagcttgggaagaaatgacctgcttattcgcaccttccttagatacct

SEQ ID NO: 105550 - DNA, 75 bp, synthetic construct
  source 1..75: mol_type = other DNA
gaaaccgacctccagcattactgtgcctggacgcaccattaaccgctttggcgaagaagttgagatgatcaccaa

SEQ ID NO: 105551 - DNA, 75 bp, synthetic construct
  source 1..75: mol_type = other DNA
ctgcggagttaatgcgacttttatcgcggacggggtgccacagtttgctctggttaatggtctccacgccatgaa

SEQ ID NO: 105552 - DNA, 75 bp, synthetic construct
  source 1..75: mol_type = other DNA
gcttacgtaactggcgtgcaaaacgtgcgtgatgtgattccgttcccacgtactccgcgtaacgccagcttctaa

SEQ ID NO: 105553 - DNA, 75 bp, synthetic construct
  source 1..75: mol_type = other DNA
cagcgtcctgttactttttaccacccgcgagccacggttaattatgataaccaacggccaggttgaaagcggtct

SEQ ID NO: 105554 - DNA, 75 bp, synthetic construct
  source 1..75: mol_type = other DNA
cggccggaaaactgcgcggtgccgtgctgtctgcccggggcgtccagctggccggtgacggcgttgtgatccact

SEQ ID NO: 105555 - DNA, 75 bp, synthetic construct
  source 1..75: mol_type = other DNA
cctgcagacaccggagttcctgaagcaacctcgtccggtcgtgccgcaggaccaggcgtttctggatgcgcaggc

SEQ ID NO: 105556 - DNA, 75 bp, synthetic construct
  source 1..75: mol_type = other DNA
acggcgcggcgaacgtgcaggccagtgtcagcagcgcgagcggcaacagcgcctcggcgacccatgcgtacagcg

SEQ ID NO: 105557 - DNA, 75 bp, synthetic construct
  source 1..75: mol_type = other DNA
gtatcgacctaagagtcattccgatccttctattcagcagcataacctttgtgcacattgcttcggcgaacataa

SEQ ID NO: 105558 - DNA, 75 bp, synthetic construct
  source 1..75: mol_type = other DNA
aatgccgttgccggtcttgtgaaagagagcaataccggtggggtacagatagatccgacgacgtttcgtaaatac

SEQ ID NO: 105559 - DNA, 75 bp, synthetic construct
  source 1..75: mol_type = other DNA
gaagggaagtcctttgaaagaaaagatgagagttcattacacctgattactaacaaggttctggcatgttaccaa

SEQ ID NO: 105560 - DNA, 75 bp, synthetic construct
  source 1..75: mol_type = other DNA
cgatccacacgtaggcgtttccctgatggccgatgccgtgctgtcggtgatggccgctaacggtatgcgtaccag

SEQ ID NO: 105561 - DNA, 75 bp, synthetic construct
  source 1..75: mol_type = other DNA
tcaagattacagcgcaattaaagacgttttccgtccgggccatgctgattacacctacgaacaaaaatacggcct

SEQ ID NO: 105562 - DNA, 75 bp, synthetic construct
  source 1..75: mol_type = other DNA
tcctgtgccctcaagatatttagcattagtaaaaaactgaatgcatacattctaccaaccattgaggctgaagcc

SEQ ID NO: 105563 - DNA, 75 bp, synthetic construct
  source 1..75: mol_type = other DNA
tgattgttatactaaccattatgggttcagaggtaattgaaagctactcacgtgaagatgtcagtcaatttattc

SEQ ID NO: 105564 - DNA, 75 bp, synthetic construct
  source 1..75: mol_type = other DNA
gcgtggcggcaggggcgattgccaaaaaatatctcgccgagaaatttggtattgaaatccgcggctgcctgaccc

SEQ ID NO: 105565 - DNA, 75 bp, synthetic construct
  source 1..75: mol_type = other DNA
acaccaagttcgaatctgaagtgtacatcctgtccaaagatgaaggcggtcgtcatactccgttcttcaaaggct

SEQ ID NO: 105566 - DNA, 75 bp, synthetic construct
  source 1..75: mol_type = other DNA
gatgtggcaaaggttcagggacaactggcaggtatcagccaggtgttttgcgatccacacgtaggtgtttcactg

SEQ ID NO: 105567 - DNA, 75 bp, synthetic construct
  source 1..75: mol_type = other DNA
tccggcgattaaacaacaactttgccttgatgcgggcaccgatcgcgactggttgcgcaaagtgcgaccctggtt

SEQ ID NO: 105568 - DNA, 75 bp, synthetic construct
  source 1..75: mol_type = other DNA
tatataacgggaatcctaacaataacattaggtatttttatttgtgttttcttatggaagttaaataaattattg

SEQ ID NO: 105569 - DNA, 75 bp, synthetic construct
  source 1..75: mol_type = other DNA
ctgaagcaggcacgtccggtagcaccgcaggatcagtcatttctcgacgctcaggcacagcaattccggcaatcc

SEQ ID NO: 105570 - DNA, 75 bp, synthetic construct
  source 1..75: mol_type = other DNA
ccaggtaccggcagtggatgaaaacggcaacggcaagccggatgcagaggaagcagcagaggcggtgaatgcagc

SEQ ID NO: 105571 - DNA, 75 bp, synthetic construct
  source 1..75: mol_type = other DNA
atcagaagaaagctcgcttttatgtgattaatgcagcgaaaattgcccgtgaatgtggactggcagcgcgcatta

SEQ ID NO: 105572 - DNA, 75 bp, synthetic construct
  source 1..75: mol_type = other DNA
gccatcagaagcattagaggaaacacttcttcacgaacaacgttttcgccgcctgaacgcacaacaaccggaagt

SEQ ID NO: 105573 - DNA, 75 bp, synthetic construct
  source 1..75: mol_type = other DNA
gaagaactggagtcgagggggttataccgtcgtgctgcaacggtgtggatggtggcattccgtgaaagtcactcc

SEQ ID NO: 105574 - DNA, 75 bp, synthetic construct
  source 1..75: mol_type = other DNA
agctggatgctgacttctgttttacggcaaaacctgcaacgcgatacgtttaatgaatttacgttacaggttgcc

SEQ ID NO: 105575 - DNA, 75 bp, synthetic construct
  source 1..75: mol_type = other DNA
tttggattgttgtatacaatcaagttcacaactttaaaaaaattatctaatcgcgaagctgaaattaattcacgc

SEQ ID NO: 105576 - DNA, 75 bp, synthetic construct
  source 1..75: mol_type = other DNA
taacctgtctcatattcttattgattccttagatgatgcaaaggttaaccttacaccggtcatcgattcgatgct

SEQ ID NO: 105577 - DNA, 75 bp, synthetic construct
  source 1..75: mol_type = other DNA
cactggtctttgtttccttttcaatgcctcctgatgagctgaaacagcgggtccaggatgcggcacaactcaata

SEQ ID NO: 105578 - DNA, 75 bp, synthetic construct
  source 1..75: mol_type = other DNA
cacccgactaaacgcgaattaatttacgccgcgacgccagccagcgattttgtctgtggcacgcaacaggtggct

SEQ ID NO: 105579 - DNA, 75 bp, synthetic construct
  source 1..75: mol_type = other DNA
atttcagtatatattggaagcttggctcaacatcatatacaggtgaacaatcttcctgaaaaaataatattaata

SEQ ID NO: 105580 - DNA, 75 bp, synthetic construct
  source 1..75: mol_type = other DNA
gagattatgaaaaatcaaccaaatgatgttattaatgaaaaaattaataatgaattaaaacttaggtttagaatg

SEQ ID NO: 105581 - DNA, 75 bp, synthetic construct
  source 1..75: mol_type = other DNA
caaaccgctggctggttcgctattatgacaagaagaatcgctcaaacatacagttaccaattgatatcaatgaaa

SEQ ID NO: 105582 - DNA, 75 bp, synthetic construct
  source 1..75: mol_type = other DNA
aaccatcctcgaaaattgcggtaagaaatttgaaaacccggtttactggggcgtggatctctcttccgagcatga

SEQ ID NO: 105583 - DNA, 75 bp, synthetic construct
  source 1..75: mol_type = other DNA
aataataaagagtctaatgaagagattatggaaaatcaaccaaaagatgttattaaagaaaaatttaataatgaa

SEQ ID NO: 105584 - DNA, 75 bp, synthetic construct
  source 1..75: mol_type = other DNA
gataatcgcgagaaattcaccccggcacagaacctgatttacccccgccgacgtgcagaactggccgcacggtag

SEQ ID NO: 105585 - DNA, 75 bp, synthetic construct
  source 1..75: mol_type = other DNA
gaacaccgaggtgctgaataaccgcaccactgatgtgataaacaaccatgccgaaaaaataggtaacaaccaggc

SEQ ID NO: 105586 - DNA, 75 bp, synthetic construct
  source 1..75: mol_type = other DNA
cactcctgacccggaatcgcctgtgcgaggtccggctgaaggacggatacagggaagttacggcaacaatggctt

SEQ ID NO: 105587 - DNA, 75 bp, synthetic construct
  source 1..75: mol_type = other DNA
ggataatgccctgtccatcacgctggctgaaggcggcagctataaaattactggcaggggaacgctggacggtcc

SEQ ID NO: 105588 - DNA, 75 bp, synthetic construct
  source 1..75: mol_type = other DNA
atgaaaaaaatcataatactgctcagtttactgatacttctgcctctgacggtaaccagtaagcccttaatccca

SEQ ID NO: 105589 - DNA, 75 bp, synthetic construct
  source 1..75: mol_type = other DNA
gcaaaatgcgagatgctgcaccgaaattaattgactttgctaagtcgtttgacccaaactcaaaggaaaagatta

SEQ ID NO: 105590 - DNA, 75 bp, synthetic construct
  source 1..75: mol_type = other DNA
ctaatcaggtctgggtcgcagatataacgtatgttgccacccgggaaggatggctgtatctcgctggcgtcaaag

SEQ ID NO: 105591 - DNA, 75 bp, synthetic construct
  source 1..75: mol_type = other DNA
cgaaaaagggcaggcgtgggttgccaacgcactgactgaagaatatctgcgccaggggggaggtgaattgtctct

SEQ ID NO: 105592 - DNA, 75 bp, synthetic construct
  source 1..75: mol_type = other DNA
aaagcagaaactgtaaaacgcaacactagcaaactaagctataaattgcagcgcgaactggaacagcttccgcaa

SEQ ID NO: 105593 - DNA, 75 bp, synthetic construct
  source 1..75: mol_type = other DNA
ggctggcttcctggattcctacattccggaaccagagcgtgcaattgacaagccgttcctgctgccgatcgaaga

SEQ ID NO: 105594 - DNA, 75 bp, synthetic construct
  source 1..75: mol_type = other DNA
gccaggggggcggcgaattgcccctggtaccaggcaaggactggaataatcagcagaacatctatcaccgctggt

SEQ ID NO: 105595 - DNA, 75 bp, synthetic construct
  source 1..75: mol_type = other DNA
ggaaaagcgcacccaatgtacgtgccgatgtgggtcgatgacgaagagcttgctgccagactggcaggggatcct

SEQ ID NO: 105596 - DNA, 75 bp, synthetic construct
  source 1..75: mol_type = other DNA
acgtgggcacaggggcagatacacgatggcatatttgcgatcccggcggtcaacgtttaggtggccagggggcta

SEQ ID NO: 105597 - DNA, 75 bp, synthetic construct
  source 1..75: mol_type = other DNA
gcgcccggaggggatgattcgtattggctgtagttttggttttgggcgcagccatattgcgccagccattaccga

SEQ ID NO: 105598 - DNA, 75 bp, synthetic construct
  source 1..75: mol_type = other DNA
tgtcttacaggcactggcaaaagcaggaaaactcacccctgctatcggcgtcgtcacttatcaggaaactattcc

SEQ ID NO: 105599 - DNA, 75 bp, synthetic construct
  source 1..75: mol_type = other DNA
attattaatttaactccagaaagcaaaaaaacgttgatgagtgaacaccgtaacaatattcaggtagcaattgat

SEQ ID NO: 105600 - DNA, 75 bp, synthetic construct
  source 1..75: mol_type = other DNA
ctgaaagcgctggaaggtgacgcagagtgggaagcgaaaatcctggaactggctggcttcctggattcttacatt

SEQ ID NO: 105601 - DNA, 75 bp, synthetic construct
  source 1..75: mol_type = other DNA
ggccactggcgaaactggtgctgctggtgcatttcgccattctgttcttcgcgctggtagtgctgggaattgtgg

SEQ ID NO: 105602 - DNA, 75 bp, synthetic construct
  source 1..75: mol_type = other DNA
atgccgtggtgcaagactggaaagcacgtggtcgtccacagtatgttgatggcatcacctccgatagtgacagcg

SEQ ID NO: 105603 - DNA, 75 bp, synthetic construct
  source 1..75: mol_type = other DNA
acagctttgcgattaccagaatatcgccactctgggcagggctgattggtgtctgtacgtttattgccgcgttac

SEQ ID NO: 105604 - DNA, 75 bp, synthetic construct
  source 1..75: mol_type = other DNA
agcggtatacatcgagtctgcggcgggtacagcggcgggcggaaaaaccggtctgacggctatcaccgttggcgt

SEQ ID NO: 105605 - DNA, 75 bp, synthetic construct
  source 1..75: mol_type = other DNA
cgagggccagccagtcacgggcatgaaagatcagatcaagactgaactaactttcaaaccggctggaaatattgt

SEQ ID NO: 105606 - DNA, 75 bp, synthetic construct
  source 1..75: mol_type = other DNA
ggcgaccgtttccagttggaccgaaaaaggtgacggttcctatgttgctacgttgactacaggcggaaagacggg

SEQ ID NO: 105607 - DNA, 75 bp, synthetic construct
  source 1..75: mol_type = other DNA
cagccagaacgaaacaattttctggcacgtcgtgagcggtgcttacggaaaagcagcaagcgcgctgcatcgggt

SEQ ID NO: 105608 - DNA, 75 bp, synthetic construct
  source 1..75: mol_type = other DNA
ttatttgcttcgctgttaatttcactttcatattctagtgcctacgcagatttatcagaaacagtgtatattaat

SEQ ID NO: 105609 - DNA, 75 bp, synthetic construct
  source 1..75: mol_type = other DNA
acaagttgcctgcttcgaccgcggatatggctgccgctcatctgcatgcaatggcactggcacagttgcgcggtc

SEQ ID NO: 105610 - DNA, 75 bp, synthetic construct
  source 1..75: mol_type = other DNA
gtccgcgcctggtttttagcgaatcgcgcgggggagcctgccgacctggtggaatgtattgccggaaccatcgtc

SEQ ID NO: 105611 - DNA, 75 bp, synthetic construct
  source 1..75: mol_type = other DNA
gtctattaaataatcatcagaagttaaataatcgtcaaaagttaaatgctctacagaagttaaataatttacaga

SEQ ID NO: 105612 - DNA, 75 bp, synthetic construct
  source 1..75: mol_type = other DNA
aaaaatactgatgccagccttgataataagcaatttttatatggctattataagaaatgttttccatttgatatg

SEQ ID NO: 105613 - DNA, 75 bp, synthetic construct
  source 1..75: mol_type = other DNA
acacgctaccgggtatttaccgagaagtgtatcagcaggatttagactgggtagtggacgatcagtcgcgctttg

SEQ ID NO: 105614 - DNA, 75 bp, synthetic construct
  source 1..75: mol_type = other DNA
attctcggcggtatcagcagcgggcagcaaatcattgcccatatggcgctgaaaccgacctccagcattaccgtg

SEQ ID NO: 105615 - DNA, 75 bp, synthetic construct
  source 1..75: mol_type = other DNA
aacgtgcaggtcaataccgcgctaccgggcgtcaccattaatccggtaacgacggacgatattattaacgccgca

SEQ ID NO: 105616 - DNA, 75 bp, synthetic construct
  source 1..75: mol_type = other DNA
tttcgtcaacaaaccgggattgcgccgtttatcgtggttgtacctggcgttaatgaagcaagcttcaggcaaaat

SEQ ID NO: 105617 - DNA, 75 bp, synthetic construct
  source 1..75: mol_type = other DNA
gtctttttgcctgggcagttgcattcatcatctttgctgcaatttttaactacacgacgcgcttttattatgcgt

SEQ ID NO: 105618 - DNA, 75 bp, synthetic construct
  source 1..75: mol_type = other DNA
gatgtggcaaaggttcaggggcaactggcaggcatcagccaggtattttgcgatccacacgtaggcgtttcactg

SEQ ID NO: 105619 - DNA, 75 bp, synthetic construct
  source 1..75: mol_type = other DNA
agtgaaggcaaaacacaccggcatttttctcgcaaggctgtgttgccacctgagccggtgctgaagcatatgagt

SEQ ID NO: 105620 - DNA, 75 bp, synthetic construct
  source 1..75: mol_type = other DNA
attcatcgtctttactgcattttttaactacacaacgcgccttaattatgcattaaagtttgcagtggcgatgac

SEQ ID NO: 105621 - DNA, 75 bp, synthetic construct
  source 1..75: mol_type = other DNA
cgtgcggttgatatagctaaaacggagcagtgggggagagttgttgagaaagagtgcggaagatgcaaaggtgtc

SEQ ID NO: 105622 - DNA, 75 bp, synthetic construct
  source 1..75: mol_type = other DNA
ctaaccgaggaaagaatttcaaatttatctaaggctgcaggcataaacagaagaactgaactaccattaatcttg

SEQ ID NO: 105623 - DNA, 75 bp, synthetic construct
  source 1..75: mol_type = other DNA
taatctacagaagttaaataatccgcaggagttaaataattcgcaggagttaaataatccgcaggagttaaataa

SEQ ID NO: 105624 - DNA, 75 bp, synthetic construct
  source 1..75: mol_type = other DNA
aacccatgcgactgatgctgcagactcagcacgcgcagccagaacgtcagccggacaggccgcgacgtcggctca

SEQ ID NO: 105625 - DNA, 75 bp, synthetic construct
  source 1..75: mol_type = other DNA
tggattgaaatccagttggctcatgtagataaaaattctattagggggacttataaccatgctcaatattttagt

SEQ ID NO: 105626 - DNA, 75 bp, synthetic construct
  source 1..75: mol_type = other DNA
tttcatcttatcttcctggttcatacatggcgttatccggttcgggtggtgccacccgggacaacggaagcagtc

SEQ ID NO: 105627 - DNA, 75 bp, synthetic construct
  source 1..75: mol_type = other DNA
aaattaaatcctccggaagatttacgaacagtaatagaaaaactggggtggaagaatagaactcacactgcataa

SEQ ID NO: 105628 - DNA, 75 bp, synthetic construct
  source 1..75: mol_type = other DNA
gtaaacttattgcatttgttgctatgcctttttcagaaaaaacgtctaactacccgcatggttattttgatgaag

SEQ ID NO: 105629 - DNA, 75 bp, synthetic construct
  source 1..75: mol_type = other DNA
gccgccagattgcacaactggaagaacggctggggctgacgctgtttgagcgtaatcagcagcgcattcgcctga

SEQ ID NO: 105630 - DNA, 75 bp, synthetic construct
  source 1..75: mol_type = other DNA
atgaatcggcaaaggacacggaatcccatgtcctggtcaaccaacttcatgaactccttttaagcgctccacttt

SEQ ID NO: 105631 - DNA, 75 bp, synthetic construct
  source 1..75: mol_type = other DNA
cgccctgtatgaagcgatgctggcaagagaaaaaattcgtcatgaattgcggacactggaacagggtatctcccc

SEQ ID NO: 105632 - DNA, 75 bp, synthetic construct
  source 1..75: mol_type = other DNA
tgttcaggcgtttaaagacaacgtcaaaaatgaagtgactggcgctgatggaggaccagtcagaacagaaattac

SEQ ID NO: 105633 - DNA, 75 bp, synthetic construct
  source 1..75: mol_type = other DNA
ccacagcccctataaagacgtacgtgactatattgaaaccgtgatccgctcctttgcccgccatgcgtcaaaaga

SEQ ID NO: 105634 - DNA, 75 bp, synthetic construct
  source 1..75: mol_type = other DNA
gatacaacattgccaagaattgatatctatattgatcagataatgactgtgtcaggggtagcaaattcttctgga

SEQ ID NO: 105635 - DNA, 75 bp, synthetic construct
  source 1..75: mol_type = other DNA
caaattttgcataccgggcgctacagctaccaaccgcatctggtcgctccctccgcattgcaggcccccatcaac

SEQ ID NO: 105636 - DNA, 75 bp, synthetic construct
  source 1..75: mol_type = other DNA
tcgacgctttggttaacagtctgaatgaagctcaggctggtgacgttgtcctgttccacggctgctgccataacc

SEQ ID NO: 105637 - DNA, 75 bp, synthetic construct
  source 1..75: mol_type = other DNA
atacgccttgataacggcgcttttagcgactggatgaaagcattaaagaaaggcactccggtagactggagtaag

SEQ ID NO: 105638 - DNA, 75 bp, synthetic construct
  source 1..75: mol_type = other DNA
agcaaagaattgctgtctcgttttgaaaatttcgatattaacgtcttgcgccgtgaacgcggcgtaaagctggaa

SEQ ID NO: 105639 - DNA, 75 bp, synthetic construct
  source 1..75: mol_type = other DNA
aaagaggccacaccatggcaaaccgcaaacagcaccgcgctatcgcggagcgtcgtcacatccagactgaaatca

SEQ ID NO: 105640 - DNA, 75 bp, synthetic construct
  source 1..75: mol_type = other DNA
tgcaagaggtccaacaagtcactttgatcttgcaggatatgtgttttttggatttattggaagcttaattatgac

SEQ ID NO: 105641 - DNA, 75 bp, synthetic construct
  source 1..75: mol_type = other DNA
taccgtttgccggggcagcagtatgatgaggagtcgggactgtattacaaccgtcaccggtactacgatccgttg

SEQ ID NO: 105642 - DNA, 75 bp, synthetic construct
  source 1..75: mol_type = other DNA
cccaaacttacaccagaacaatgggcacaagccggacgattaattgcatcaggagttccgcgccagaaagttgcg

SEQ ID NO: 105643 - DNA, 75 bp, synthetic construct
  source 1..75: mol_type = other DNA
atggcgctggatgcaggcaccggaagtattcgggctgtgatattcgacctggaaggcaatcaaatagcagtggga

SEQ ID NO: 105644 - DNA, 75 bp, synthetic construct
  source 1..75: mol_type = other DNA
atcactccagtacaaaccggcttgctgtgcccaggaataggtattctgagttttactaccatccagccagaatac

SEQ ID NO: 105645 - DNA, 75 bp, synthetic construct
  source 1..75: mol_type = other DNA
agtcaccaacctgaacaacaccactaccaacctgtctgaagcgcagtcccgtattcaggacgccgactatgcgac

SEQ ID NO: 105646 - DNA, 75 bp, synthetic construct
  source 1..75: mol_type = other DNA
cgtgctgacgctctttttttatcgtcgtcgtgactccagacacaaaccgctgatgtcatggctggcctggctgct

SEQ ID NO: 105647 - DNA, 75 bp, synthetic construct
  source 1..75: mol_type = other DNA
gcaaccgttgtttgaactgctggtggaggaatgccatcgtcaggagagttatgcagacagcgccttaaagtcagt

SEQ ID NO: 105648 - DNA, 75 bp, synthetic construct
  source 1..75: mol_type = other DNA
tttgcgctgccaagcgccagcttattgagcgtaaattcctcattgctgatggcgtgaaaatcggagtgaacaagg

SEQ ID NO: 105649 - DNA, 75 bp, synthetic construct
  source 1..75: mol_type = other DNA
ggtcgtgttaacgtagccgggatgacgccagacaacatggctccgctgtgcgaagcgattgtggctgtgctgtaa

SEQ ID NO: 105650 - DNA, 75 bp, synthetic construct
  source 1..75: mol_type = other DNA
acgaaaccttatacggaaattttaccggcggcctcgacctccatcaggtcagtgaagaaaatcaggtcatcgtgt

SEQ ID NO: 105651 - DNA, 75 bp, synthetic construct
  source 1..75: mol_type = other DNA
ttacccaggccaaaacgcagcaggcagaatttacccatttaatctggcagatgcgcagcgaacacatcgcctcga

SEQ ID NO: 105652 - DNA, 75 bp, synthetic construct
  source 1..75: mol_type = other DNA
catctggcaggaaatcattctggtgctgacgctgatggtgacctcgaaagggattgctggcgtgcctggcgtgtc

SEQ ID NO: 105653 - DNA, 75 bp, synthetic construct
  source 1..75: mol_type = other DNA
aagacggcaaaaaaagcagggagtgaagttattcaatctacgattgtcaacgatcttgatgctgctgatcttgtg

SEQ ID NO: 105654 - DNA, 75 bp, synthetic construct
  source 1..75: mol_type = other DNA
acaagataaacatgagcggtccactgtcttcccgcttccagtcgctgtgcgatattgttgatccgggttcatcaa

SEQ ID NO: 105655 - DNA, 75 bp, synthetic construct
  source 1..75: mol_type = other DNA
tatttatacattccctgtcttgcaaccacagataacccagtgaagataatgctgcaatggggaaccattcagaca

SEQ ID NO: 105656 - DNA, 75 bp, synthetic construct
  source 1..75: mol_type = other DNA
cttatggattaaataagaaaatctcagaaacgtatgtgcaatattatatgaaacactatgatattagtgcgaaaa

SEQ ID NO: 105657 - DNA, 75 bp, synthetic construct
  source 1..75: mol_type = other DNA
ccatatcaccgaaacgctggacaacgcgtactacctggcgattttgcaggtctacaacgacagccagattattca

SEQ ID NO: 105658 - DNA, 75 bp, synthetic construct
  source 1..75: mol_type = other DNA
agtgatgtgcgtttttattcccgcagcagcattcgcttcgcccgctgtgattgcattgaaggaacactttgcgaa

SEQ ID NO: 105659 - DNA, 75 bp, synthetic construct
  source 1..75: mol_type = other DNA
cgggtgatgatgacgcaaactcgcgcctgggcgctggatgcagaaactgcgcctgtggcaccgctaccttccgcc

SEQ ID NO: 105660 - DNA, 75 bp, synthetic construct
  source 1..75: mol_type = other DNA
tcattcgtgagggcgaagagaaaatgtcgtttaccagcaaaaaggaagcagatgcttatgacaaaatgcttgata

SEQ ID NO: 105661 - DNA, 75 bp, synthetic construct
  source 1..75: mol_type = other DNA
ttgacctgtgcgcaagagatggtgcgacgagacggcggcggtgaaatccctcccattccatggcgcaccattgtc

SEQ ID NO: 105662 - DNA, 75 bp, synthetic construct
  source 1..75: mol_type = other DNA
acgttcctgctcgtgacctggctcccctgctccgccagatgatagatgcgggtagcgtcggtaatgttgtgcatt

SEQ ID NO: 105663 - DNA, 75 bp, synthetic construct
  source 1..75: mol_type = other DNA
aacagttactgaatacagaagaccagtgcccggtcgggacgttataactaaaattactgatactgttgagacggc

SEQ ID NO: 105664 - DNA, 75 bp, synthetic construct
  source 1..75: mol_type = other DNA
atcgatcatccgaaggtgttgagttatctcgacgtactgcgcgacaaagcgccggtgggcaacaacgtcgccatc

SEQ ID NO: 105665 - DNA, 75 bp, synthetic construct
  source 1..75: mol_type = other DNA
ctgctgggctggcgtttgccattaacgcggcggcgcgtgggcatcaggtaacattgtttgatgcccacagcgaga

SEQ ID NO: 105666 - DNA, 75 bp, synthetic construct
  source 1..75: mol_type = other DNA
tgtgtattgatggatcgagcgcagatctggtttttcttgataaaggggcagcgtgcgtaggtctgacaagagagg

SEQ ID NO: 105667 - DNA, 75 bp, synthetic construct
  source 1..75: mol_type = other DNA
tcgataacatgcagcgtattctgaatacccgggccggaagccttaaacatcttccggattatggtctgccggata

SEQ ID NO: 105668 - DNA, 75 bp, synthetic construct
  source 1..75: mol_type = other DNA
tggcgaacggccaggcactgaaagaggctcagtgcagctgcggggccagcggcatgtgccgtcatcgcgtgatgc

SEQ ID NO: 105669 - DNA, 75 bp, synthetic construct
  source 1..75: mol_type = other DNA
gaactgcacgcgctgcattcatttcagcttgccgtagtggggagtcgggcgcattcatggtatggcgagcgatgg

SEQ ID NO: 105670 - DNA, 75 bp, synthetic construct
  source 1..75: mol_type = other DNA
agactgacaggacagattaaacagttctggctggaatcgggatgcgtctatggttatcgcaaaatccatctggat

SEQ ID NO: 105671 - DNA, 75 bp, synthetic construct
  source 1..75: mol_type = other DNA
tttcgggtagctggctgatggtgatggcgaatctgctgttctgcgtgctggtggttcgcgcacgcgggaacgttt

SEQ ID NO: 105672 - DNA, 75 bp, synthetic construct
  source 1..75: mol_type = other DNA
atgaacgatctgttaaacgacgaggaactggttgaactgaccggctaccagttcccgtcaaaacaatgcggcgcc

SEQ ID NO: 105673 - DNA, 75 bp, synthetic construct
  source 1..75: mol_type = other DNA
ctggttgatcatggactgactgacgacgtcgttatggaaagcgcctgggttatagtttcattgacagccacatca

SEQ ID NO: 105674 - DNA, 75 bp, synthetic construct
  source 1..75: mol_type = other DNA
tccttaatgaatatatgggtgataaagcaaataacacctctgacatgatcgacaccattaaaaccgattttgaaa

SEQ ID NO: 105675 - DNA, 75 bp, synthetic construct
  source 1..75: mol_type = other DNA
ttggtgcctctcaagatggggctgaactttctggcgctgcgcgcaacccgcctgtcggcgctcgacgcctggcgc

SEQ ID NO: 105676 - DNA, 75 bp, synthetic construct
  source 1..75: mol_type = other DNA
tactttattcggttctaataaaccagatgcacgaatgagagatatggaattcattctaagaggcttggctcttaa

SEQ ID NO: 105677 - DNA, 75 bp, synthetic construct
  source 1..75: mol_type = other DNA
gtgagaattgaagagtggtttaaaaatgagggtatcgataaatcaacctttcataaactcttaaagaagtatgac

SEQ ID NO: 105678 - DNA, 75 bp, synthetic construct
  source 1..75: mol_type = other DNA
tagatgtaattgagtggataaaagataattttacgttaatcaaaagagaatttaataaagattcatctttaatgc

SEQ ID NO: 105679 - DNA, 75 bp, synthetic construct
  source 1..75: mol_type = other DNA
caaaaccgcacgttaacgtaggtactatcggccacgttgaccatggtaaaacgacactgaccgctgcaatcacga

SEQ ID NO: 105680 - DNA, 75 bp, synthetic construct
  source 1..75: mol_type = other DNA
aggctcacgggaacagtgtgctgtacgtgacccgagtcgcgatggtagccgggggccggggcatgtgctgaatgg

SEQ ID NO: 105681 - DNA, 75 bp, synthetic construct
  source 1..75: mol_type = other DNA
gttacctgcgtgatgataaccatcatcagtggaaaactgtgttatttctattgggtgtttttgggataaatatcg

SEQ ID NO: 105682 - DNA, 75 bp, synthetic construct
  source 1..75: mol_type = other DNA
atgaacgacctgctaacagaccaggaactggttgaactgaccggttaccagttcccgtcaaaacaatgcggtgcc

SEQ ID NO: 105683 - DNA, 75 bp, synthetic construct
  source 1..75: mol_type = other DNA
tgaagcgctggagcgcggttaccggctgggcgcggcggctaacagtgatgaacaccagggacgctgtgggggcgg

SEQ ID NO: 105684 - DNA, 75 bp, synthetic construct
  source 1..75: mol_type = other DNA
tgaggctgattttattcggcaattacctgctgaaacccgcgggtggctggcccggtaccgtaaaaataaaaccgg

SEQ ID NO: 105685 - DNA, 75 bp, synthetic construct
  source 1..75: mol_type = other DNA
catttatcgccggtttcagtagtcatttaaatcaactgagtgacgacgattttattaacgccctgcccgatttac

SEQ ID NO: 105686 - DNA, 75 bp, synthetic construct
  source 1..75: mol_type = other DNA
taaagaaagaggcattgttgaacatgcctcaattcacgttgggcaacgatggctattacgcttggatttaaagga

SEQ ID NO: 105687 - DNA, 75 bp, synthetic construct
  source 1..75: mol_type = other DNA
tcaaagcgcaactggcatcaacccagagcactaaggagtacaaaaaagaccgcggcaaagcgatggattctgccg

SEQ ID NO: 105688 - DNA, 75 bp, synthetic construct
  source 1..75: mol_type = other DNA
atggctaaacctgtacgattcacacgagaagtattactcccgattgctaaacgttattttgaagcgatgcagggt

SEQ ID NO: 105689 - DNA, 75 bp, synthetic construct
  source 1..75: mol_type = other DNA
accttttaataatgtcgattatggtggtttttatgaggttttcaaacaaatacttgaaatagcctctacttataa

SEQ ID NO: 105690 - DNA, 75 bp, synthetic construct
  source 1..75: mol_type = other DNA
gtcagccgaatttatttggtgaatggtgcattgctgatactgatctggcgctaatgattaaccgcctggtactac

SEQ ID NO: 105691 - DNA, 75 bp, synthetic construct
  source 1..75: mol_type = other DNA
ccgggtgtggcgctgactgctgagcagatggcgttactgaccggtgatattgtctggctggttaacaccacggtg

SEQ ID NO: 105692 - DNA, 75 bp, synthetic construct
  source 1..75: mol_type = other DNA
aaatacagttttcatatagttgaaaataatactagtgttagcaaccttggtatatgctgtaaatccctgcgttat

SEQ ID NO: 105693 - DNA, 75 bp, synthetic construct
  source 1..75: mol_type = other DNA
atgaaaaagcaaagtgaaattaatgtaagtaaattagcatcatggaagttttcatttaaaaatattgggtgtatc

SEQ ID NO: 105694 - DNA, 75 bp, synthetic construct
  source 1..75: mol_type = other DNA
ctgcaaatgccgttacattgtccaccgcaaaccattgctcatcatcaacaactggaacagcaggcactggcgtca

SEQ ID NO: 105695 - DNA, 75 bp, synthetic construct
  source 1..75: mol_type = other DNA
ttctggcagcaagttgtaaatttagccgcgccggtgacagacccagaaatgaacgtgcgcgttaatcctcatgtt

SEQ ID NO: 105696 - DNA, 75 bp, synthetic construct
  source 1..75: mol_type = other DNA
atggaaacgacattcgtgctggatgcactggagcaggcgttgtgggcccgtcgtccgtctggcaccatccatcac

SEQ ID NO: 105697 - DNA, 75 bp, synthetic construct
  source 1..75: mol_type = other DNA
gcagtcgttcctaaaatcacacggcctggagggcagcatgagccgtcgcggtaactgccatgataatgcggttgc

SEQ ID NO: 105698 - DNA, 75 bp, synthetic construct
  source 1..75: mol_type = other DNA
gtgtcgtcgccggtccatttggattaatcatttcctattctattgctgcgggcgtagttgaagggaaactgattc

SEQ ID NO: 105699 - DNA, 75 bp, synthetic construct
  source 1..75: mol_type = other DNA
aaagtgcagatcagctctggcatgaacagactttactccctctttttgcctgggcactaccaatcagtcgtaatg

SEQ ID NO: 105700 - DNA, 75 bp, synthetic construct
  source 1..75: mol_type = other DNA
tatgtggcgttcatcattgatgtgtttgccggatacatcgtggggtggcgggtctcatcgtccatggaaacgaca

SEQ ID NO: 105701 - DNA, 75 bp, synthetic construct
  source 1..75: mol_type = other DNA
aaatgtaacaaagcgacgttgttccgtgcgctggaagaaaatgcggcgattgtatcagcgtgtaacttgcagcaa

SEQ ID NO: 105702 - DNA, 75 bp, synthetic construct
  source 1..75: mol_type = other DNA
agagtgggcgccatacaaaaaaatgcaggaagagcgcgaagaacatgatcgcaatgagctgcaacgcgggcagga

SEQ ID NO: 105703 - DNA, 75 bp, synthetic construct
  source 1..75: mol_type = other DNA
gcaggcggaggttcaaaagggaaattatggagtcaaattctcgctgatgtctcgggattaccggggagcccgcag

SEQ ID NO: 105704 - DNA, 75 bp, synthetic construct
  source 1..75: mol_type = other DNA
gcgcaggggcgtcgcgtggtagggcgtaaagtgggcctgacacatccgaaagtgcaacaacaactgggcgttgat

SEQ ID NO: 105705 - DNA, 75 bp, synthetic construct
  source 1..75: mol_type = other DNA
aggcaaactgaccactgaaaccaccagtgcaggcactgcaaccaaagatcctctggctgccctggatgaagctat

SEQ ID NO: 105706 - DNA, 75 bp, synthetic construct
  source 1..75: mol_type = other DNA
ctaatcagggttatcgggctggccgcaatgcgcagttacatcatgctgtgacggggtcttcaaatgctgtagctc

SEQ ID NO: 105707 - DNA, 75 bp, synthetic construct
  source 1..75: mol_type = other DNA
ggcgtgcgtaacagtgcacataccctggcgaaactggcgacgccatttgccgaaggtgaggcactgcgtctttcc

SEQ ID NO: 105708 - DNA, 75 bp, synthetic construct
  source 1..75: mol_type = other DNA
cgtgcgctggaagaaaatgcggcgattgtatcagcgtgtaacttgcagcaaatcgctgatttctcgaatattcat

SEQ ID NO: 105709 - DNA, 75 bp, synthetic construct
  source 1..75: mol_type = other DNA
ttcccagattactttggctggcgcaccatcgttctgatatctaccgacaggcgtcgaccatcaccatgatcagcg

SEQ ID NO: 105710 - DNA, 75 bp, synthetic construct
  source 1..75: mol_type = other DNA
gagccggaacataatatttaccagaaacagggaaaaggcgtggtgtatttgcgcccttatgaaaagaccaatctt

SEQ ID NO: 105711 - DNA, 75 bp, synthetic construct
  source 1..75: mol_type = other DNA
atattcattcgaagttctgggtaagcaactggcgaaagcccgccgtgattacctctccacattacgcaagaacat

SEQ ID NO: 105712 - DNA, 75 bp, synthetic construct
  source 1..75: mol_type = other DNA
tttagtgacggtacacgcagccaactggcaagcggtcaggcgctgaaggaggctcagtgtagctgcggagccatc

SEQ ID NO: 105713 - DNA, 75 bp, synthetic construct
  source 1..75: mol_type = other DNA
taaccagattaaggcgctacaggatgaagggaaccagcaggaggccgcccgcattgcgacagaagaatactcatc

SEQ ID NO: 105714 - DNA, 75 bp, synthetic construct
  source 1..75: mol_type = other DNA
atctcgatgtactgcgcgacaaagcgccggtgggcaacaaagttgccatcatcggttgtggcgggattggttttg

SEQ ID NO: 105715 - DNA, 75 bp, synthetic construct
  source 1..75: mol_type = other DNA
tcgcgcggcgatgccgatatggtgtcgatggcacgaccgtttcttgctgatgcggagctgctgtcaaaagcgcaa

SEQ ID NO: 105716 - DNA, 75 bp, synthetic construct
  source 1..75: mol_type = other DNA
ggcgcgctccatgtcagtattaatgagtggaggtggccatcggggccaccgttacggtacgttaattgtcaatct

SEQ ID NO: 105717 - DNA, 75 bp, synthetic construct
  source 1..75: mol_type = other DNA
ttatgatgagagatacgagggaaacacactaaggaaggttttggaattacaaggtgtagctgcaaaatgtactga

SEQ ID NO: 105718 - DNA, 75 bp, synthetic construct
  source 1..75: mol_type = other DNA
agaatcaatgataatcttctatcagcagtgatatccgcaagcgctcgtcttaccacccaaaaacaagcatctttc

SEQ ID NO: 105719 - DNA, 75 bp, synthetic construct
  source 1..75: mol_type = other DNA
acggttcagcaattatttccgaaggataagcattttcacccttctgacgtaacacttgataatccagaggtgcgt

SEQ ID NO: 105720 - DNA, 75 bp, synthetic construct
  source 1..75: mol_type = other DNA
atagatttagcagcatttaggcgaaagattaaagaatataaaaaaaccaaaacccagcctgctggatttaaacga

SEQ ID NO: 105721 - DNA, 75 bp, synthetic construct
  source 1..75: mol_type = other DNA
aacagaacaaccaaattatgattttaaacagggaggtgatgctgccaacggcactgttgcaaatagtcggtggtg

SEQ ID NO: 105722 - DNA, 75 bp, synthetic construct
  source 1..75: mol_type = other DNA
aagatggcgctgaagtatcagcagcgtccaaaggtggcaccggaattcattccgcgtaccatcgacgggaaagcg

SEQ ID NO: 105723 - DNA, 75 bp, synthetic construct
  source 1..75: mol_type = other DNA
aacgatatttctcttcatacgtcagagagtgcagagcaactcttgtatgaacagacattgctccctcttttttcc

SEQ ID NO: 105724 - DNA, 75 bp, synthetic construct
  source 1..75: mol_type = other DNA
ttctgatccctctgataactgcaactatcgctcttacaggatgcacaccaaagaccagcctggaacgacataccc

SEQ ID NO: 105725 - DNA, 75 bp, synthetic construct
  source 1..75: mol_type = other DNA
aaaatttaacatctccaataagccaagcattgtatccatatgttgcaagaacaggaaataaaaatattcttttca

SEQ ID NO: 105726 - DNA, 75 bp, synthetic construct
  source 1..75: mol_type = other DNA
tgatcccgaagcctggaaaactacggtgctggagctaacagaaaaagcgaagcagcgtcagcaaattcgctaccc

SEQ ID NO: 105727 - DNA, 75 bp, synthetic construct
  source 1..75: mol_type = other DNA
cggagatgctctcaatcgtctgcgcgaagcctttatggcccgctggattggatgggcgatgcagcaaaataatgg

SEQ ID NO: 105728 - DNA, 75 bp, synthetic construct
  source 1..75: mol_type = other DNA
tttatttacgcagccgaaataatcaaattaatatatggtgccagttttgttaatgcacaacatgtattaagaata

SEQ ID NO: 105729 - DNA, 75 bp, synthetic construct
  source 1..75: mol_type = other DNA
gcgcattctggcgcagttggctgctggtttcatgggcggcaatcgcgatgaaggcgaagagagcaacggcaaccc

SEQ ID NO: 105730 - DNA, 75 bp, synthetic construct
  source 1..75: mol_type = other DNA
ccttcgccatgtgcttggcgtcatagcagactggccggtcaaccgggtcagcgaactgcttccgtggcgcatagc

SEQ ID NO: 105731 - DNA, 75 bp, synthetic construct
  source 1..75: mol_type = other DNA
cgaactccttgaggattggcgcgccagtgtaagagcctctcctgataagtatcgccatattaccaccgacaattt

SEQ ID NO: 105732 - DNA, 75 bp, synthetic construct
  source 1..75: mol_type = other DNA
caggctgaagaactggagtccaggggcttataccgtcgtgctgcaaccgtgtggatggcggcattccgtgaaagc

SEQ ID NO: 105733 - DNA, 75 bp, synthetic construct
  source 1..75: mol_type = other DNA
agagttcggtaagtaaccgttatggtacgacgaaagtgtttgaaagccagaatctgacggataaacagatccaca

SEQ ID NO: 105734 - DNA, 75 bp, synthetic construct
  source 1..75: mol_type = other DNA
tgcaagtcgtcaactactcgccatctgattatgccgcagcgcagcaagcgctagaggggaagctaaccgggctgg

SEQ ID NO: 105735 - DNA, 75 bp, synthetic construct
  source 1..75: mol_type = other DNA
cgccagtacgtggatgacaaagggagtgaaatcacctcgaccacggataaaaagctggaagaccagagcgccacc

SEQ ID NO: 105736 - DNA, 75 bp, synthetic construct
  source 1..75: mol_type = other DNA
atgtcaccctgacgtttaatgtgtcgtctaccggcgcgaacaactggacaccgacgacgtacatcagtgatttac

SEQ ID NO: 105737 - DNA, 75 bp, synthetic construct
  source 1..75: mol_type = other DNA
tcggcaacctcagcgcctggggtaatgatgttcccgcagaactgaaactgggcattgaccgtatcgcggctattc

SEQ ID NO: 105738 - DNA, 75 bp, synthetic construct
  source 1..75: mol_type = other DNA
gacctcttattattatttttattatggtgttggtcacactcgttacccgatggggtggtgtctggattatgtcct

SEQ ID NO: 105739 - DNA, 75 bp, synthetic construct
  source 1..75: mol_type = other DNA
catattcgatgtgttatctgaaggtgctgatgaacggtgcagtgatttatgacggcgtggcgaatgatgcacctc

SEQ ID NO: 105740 - DNA, 75 bp, synthetic construct
  source 1..75: mol_type = other DNA
gagccggtgctggagattattcaggcgcggcgctggattgaagcgcgtatgcaggaggctggatttatatgttag

SEQ ID NO: 105741 - DNA, 75 bp, synthetic construct
  source 1..75: mol_type = other DNA
gctcagaaaagtacaaaaagaaaggcctgtgggattcggcaaaaaacgatatcgactggaaagcacttccatgcg

SEQ ID NO: 105742 - DNA, 75 bp, synthetic construct
  source 1..75: mol_type = other DNA
ccgctacttaccgatgaacaggcttcacaagcaggcgtgacgcgagtcaatctcgatacgctgtgccgtgaagcg

SEQ ID NO: 105743 - DNA, 75 bp, synthetic construct
  source 1..75: mol_type = other DNA
acgagcatgaacatcttgaacgctgtttgctttccttcaagcaacaaggtgttgccggagtgatttatctggctt

SEQ ID NO: 105744 - DNA, 75 bp, synthetic construct
  source 1..75: mol_type = other DNA
ccacggcacctggacgctgcgctgggaaacgcccgttaactacagtatcgatgcccctctggttttcaccggcag

SEQ ID NO: 105745 - DNA, 75 bp, synthetic construct
  source 1..75: mol_type = other DNA
gtcacctcgtgcctggtgaatcctcgcgcctgccacgaaaccaaaatgccaatccttcccgccgtgcagaaaaaa

SEQ ID NO: 105746 - DNA, 75 bp, synthetic construct
  source 1..75: mol_type = other DNA
taatggtgactcactgttgattaactggaactgtgcagcctcgaaatccccaccgaagacccctgatgaaaagca

SEQ ID NO: 105747 - DNA, 75 bp, synthetic construct
  source 1..75: mol_type = other DNA
gtcctcgcagatcggtttgcataaatcgttgagggtcgggctgggttatgacgtcaaagtcggaaataacgttac

SEQ ID NO: 105748 - DNA, 75 bp, synthetic construct
  source 1..75: mol_type = other DNA
attggtggtggtgcctcaggtattgcaaggccaatggacgcaggaactggtcgatcgttttgcgctacaggaagt

SEQ ID NO: 105749 - DNA, 75 bp, synthetic construct
  source 1..75: mol_type = other DNA
ccataaacatgtttaccccttgcgctacgggcagcctttcgtcgaaaccgtatggcaactgatgcagagcgatcc

SEQ ID NO: 105750 - DNA, 75 bp, synthetic construct
  source 1..75: mol_type = other DNA
cgggatgtttgccgcaacagtgctggcaatttacttcgttccggtctttttcgttgtagtggaacatctctttgc

SEQ ID NO: 105751 - DNA, 75 bp, synthetic construct
  source 1..75: mol_type = other DNA
tgacaaagtaggtaacaatgaaattaatgaaatcaaagttaacctgtctaatattcttattgattccttagatga

SEQ ID NO: 105752 - DNA, 75 bp, synthetic construct
  source 1..75: mol_type = other DNA
tttcatatgaccagtggtgaaatgtctctgggtgttcatggatatagaccatctcaacatattatttctattgag

SEQ ID NO: 105753 - DNA, 75 bp, synthetic construct
  source 1..75: mol_type = other DNA
gataaactttcaacaaaaaaatatacttaatgatgtagttcaaggtatcagtcgttggctaaaagaaaatcatct

SEQ ID NO: 105754 - DNA, 75 bp, synthetic construct
  source 1..75: mol_type = other DNA
gaaatgctcaagtcaaaagaaaggatgatttggggaggaagaatcttaatttaaatgataatgataaaaaaggta

SEQ ID NO: 105755 - DNA, 75 bp, synthetic construct
  source 1..75: mol_type = other DNA
gccgtcagcgtatcccgggctcagaccaccaccggagcatccggaacaccagagaacagaacgaccacgccagcc

SEQ ID NO: 105756 - DNA, 75 bp, synthetic construct
  source 1..75: mol_type = other DNA
ggacagatagttttggttttacttatggaaagtttgtctgcaacgattctctggttgggcaaacttcggctatta

SEQ ID NO: 105757 - DNA, 75 bp, synthetic construct
  source 1..75: mol_type = other DNA
agtcgtgatacttcgccaatcgccgcgcgaaatgaagcgcaattgcactatctgaaggctattgagagtaagcag

SEQ ID NO: 105758 - DNA, 75 bp, synthetic construct
  source 1..75: mol_type = other DNA
gatgacgatccgctcgaaaacctataagggcagcgggtttaatgaactgaagtttgacgatgcgacagggaaaga

SEQ ID NO: 105759 - DNA, 75 bp, synthetic construct
  source 1..75: mol_type = other DNA
gtccgtgatgatttactccaaacaatcctttataatgaagaggtggaagaaaaatctttaaaaacggcggaggca

SEQ ID NO: 105760 - DNA, 75 bp, synthetic construct
  source 1..75: mol_type = other DNA
agtggcctgacaaaagaacaagtgctgcgtctgcgcgaagagtttggcgtatatgcggttgcttctggtcgcgta

SEQ ID NO: 105761 - DNA, 75 bp, synthetic construct
  source 1..75: mol_type = other DNA
gtattacgccaacgttgcacggcgggcaggcgcaggcgaagctcgacgaacatcaacctgtctttatgcctgtcg

SEQ ID NO: 105762 - DNA, 75 bp, synthetic construct
  source 1..75: mol_type = other DNA
cttatatttgccactggcgaagccgggtgcggcaaaacctggatcagtgctgcaaaagcggcagaggctctgatt

SEQ ID NO: 105763 - DNA, 75 bp, synthetic construct
  source 1..75: mol_type = other DNA
gcactaacgatccccgggtgattttgtgcctgacccgccaggctgaagaactggagtccaggggcttattccgtc

SEQ ID NO: 105764 - DNA, 75 bp, synthetic construct
  source 1..75: mol_type = other DNA
ttgagtttacacctgatgctggagcttcagaacgctgggaaaaacaacagttcagttttcctattgataaagaga

SEQ ID NO: 105765 - DNA, 75 bp, synthetic construct
  source 1..75: mol_type = other DNA
caaccggtatcgatcctacactggagcaatggcaaacgctggcgcagctttccgttgagaaaggctggttaccgc

SEQ ID NO: 105766 - DNA, 75 bp, synthetic construct
  source 1..75: mol_type = other DNA
aatctggcgggttataacgaaaaaattgctgaagccgatcgcatgatgcgtccgattccagacccgtactggaag

SEQ ID NO: 105767 - DNA, 75 bp, synthetic construct
  source 1..75: mol_type = other DNA
actataaggttgactccatcagggagtcatggacaagtatcttaaaacgcgcaggtctgagacacagaaaatcgt

SEQ ID NO: 105768 - DNA, 75 bp, synthetic construct
  source 1..75: mol_type = other DNA
ggctaatggatctgatatttctgatgtatcagccttccgaaatgcgctccagttagggaccgctgcaacacgaga

SEQ ID NO: 105769 - DNA, 75 bp, synthetic construct
  source 1..75: mol_type = other DNA
gttttattgaggcttgccgtcatcaacaaacaaaaaacctgtggattatcgctgtatacacgggtattcgtcacg

SEQ ID NO: 105770 - DNA, 75 bp, synthetic construct
  source 1..75: mol_type = other DNA
ctttataataaatatctcgatcaggtcatcccctggcagaccttcgatgaaaccataaaagagttaagtcgcttt

SEQ ID NO: 105771 - DNA, 75 bp, synthetic construct
  source 1..75: mol_type = other DNA
caatgatgtcaggtaatggctacatctacattccatgcattgcgacgacaggaaacccggtgaaacttatgttgc

SEQ ID NO: 105772 - DNA, 75 bp, synthetic construct
  source 1..75: mol_type = other DNA
aaaaaccccgccagtgttccttcaagagagttgtttgaaacgttcccgatcaactgttaccacggcggacgcaat

SEQ ID NO: 105773 - DNA, 75 bp, synthetic construct
  source 1..75: mol_type = other DNA
caaacgcgcccgcacggctcagaccccaggtggtactggtgcgttacgcgtagctgccgatttcctggcgaaaaa

SEQ ID NO: 105774 - DNA, 75 bp, synthetic construct
  source 1..75: mol_type = other DNA
atgacacaggcagaacgccgccatgaccggctggctgtcaggctgtcactgataatcagccgtctggtggcgggt

SEQ ID NO: 105775 - DNA, 75 bp, synthetic construct
  source 1..75: mol_type = other DNA
atccgggccgtcgcgggccaggcaaacctgctggataaagacgggcaaattatcgacggcgggaaagcactgacc

SEQ ID NO: 105776 - DNA, 75 bp, synthetic construct
  source 1..75: mol_type = other DNA
ttgcgggtttttctccgggctataaaaaaatagctattggtgacgatgtggttcaggtcgccagtgataaacagg

SEQ ID NO: 105777 - DNA, 75 bp, synthetic construct
  source 1..75: mol_type = other DNA
cattactgatccggaattcatcttttggtcgtttacgtctgttccgttaccctgatgatacgatgttctgcacgt

SEQ ID NO: 105778 - DNA, 75 bp, synthetic construct
  source 1..75: mol_type = other DNA
tggcgcgggaacgttcaggctcatagaatcaccatatatatcatctacctatacaattgatggttctctaaaata

SEQ ID NO: 105779 - DNA, 75 bp, synthetic construct
  source 1..75: mol_type = other DNA
attatcagcaggctattgaaaatggatttgtccggatgacgcagcgcatggtggagatcatgcatggtggtgagg

SEQ ID NO: 105780 - DNA, 75 bp, synthetic construct
  source 1..75: mol_type = other DNA
cccggttatttccgggcggatttatatgagtagtgttgatgatttaaacacactataccctgcatttgctgatat

SEQ ID NO: 105781 - DNA, 75 bp, synthetic construct
  source 1..75: mol_type = other DNA
agcggtaatgctgtctgtatctgaacaaagtgtcagcaaaaaagtgattactgcaatcagcgaagggattttttc

SEQ ID NO: 105782 - DNA, 75 bp, synthetic construct
  source 1..75: mol_type = other DNA
ggaatcaatcatgccagcatccaacaaagcatctgttactgtgctattgtttgttaagaataacatggccagtac

SEQ ID NO: 105783 - DNA, 75 bp, synthetic construct
  source 1..75: mol_type = other DNA
ggttgaagagcagaggcgccaaaacgcaagcaggcctcaattcccgtatttatgctgtcaaaactatagaaaaaa

SEQ ID NO: 105784 - DNA, 75 bp, synthetic construct
  source 1..75: mol_type = other DNA
ctatactcttccattattgtttcttctcaggagattaaaagctgtcagaacgggtgctgaacgagtctgtgtctt

SEQ ID NO: 105785 - DNA, 75 bp, synthetic construct
  source 1..75: mol_type = other DNA
cttttatgaggagcatgcttataaaagtaccgaccagagcctggttctgtgcgatactgttcgttatctgcctga

SEQ ID NO: 105786 - DNA, 75 bp, synthetic construct
  source 1..75: mol_type = other DNA
tattggaaactgtacaatatatttcgttccgaactgtctggataattactcattactgatccggaattcatcttt

SEQ ID NO: 105787 - DNA, 75 bp, synthetic construct
  source 1..75: mol_type = other DNA
ttgtgacaccgcatataaaaactgctattgtaagaaactggttaatttctccaggtgattatattaacaagaaag

SEQ ID NO: 105788 - DNA, 75 bp, synthetic construct
  source 1..75: mol_type = other DNA
tggcatggaaggcggtgcaatgctcaatgacgccagccagatcccacaccatcgcaccattaccgaagcggtaca

SEQ ID NO: 105789 - DNA, 75 bp, synthetic construct
  source 1..75: mol_type = other DNA
accttgagcttctcgggaagcacgttcgcgtgcaggctttcaaagagcaggtcgagcaaaaggtcactgccactc

SEQ ID NO: 105790 - DNA, 75 bp, synthetic construct
  source 1..75: mol_type = other DNA
ccccaaacaaggcttcatctggcgtgagtacagccccgcatcctatgatctctgcggtattgaaagacggtattt

SEQ ID NO: 105791 - DNA, 75 bp, synthetic construct
  source 1..75: mol_type = other DNA
accgactccatgagcagcgttttctctggcctggtgggtgcagctccggcagcggtatacatcgagtctgcggcg

SEQ ID NO: 105792 - DNA, 75 bp, synthetic construct
  source 1..75: mol_type = other DNA
aagatgagatgatcgggattgtccgattcggcaaagatgattgcgtacgttcggcactttgccaacgaacgctac

SEQ ID NO: 105793 - DNA, 75 bp, synthetic construct
  source 1..75: mol_type = other DNA
ccgttcttgatgtacaacaggcccgtctgctcgagcagcagactcggaatgacagagccatttcagaggcccgga

SEQ ID NO: 105794 - DNA, 75 bp, synthetic construct
  source 1..75: mol_type = other DNA
accagagctgaacaacagctgacgcaacagaaaaacatgcctgacggcaaaacgatagtttctcctgaaaaattc

SEQ ID NO: 105795 - DNA, 75 bp, synthetic construct
  source 1..75: mol_type = other DNA
tttaatgccacgcctgttcctgacaccgcgccgccagctctggtgttcgtcgacggacaaattcgcgaaagcgct

SEQ ID NO: 105796 - DNA, 75 bp, synthetic construct
  source 1..75: mol_type = other DNA
tatacgctgaaatctctgctgaaaaatacgacagacgtagcaggcaattttctgatgacatctgaggagtacgct

SEQ ID NO: 105797 - DNA, 75 bp, synthetic construct
  source 1..75: mol_type = other DNA
tagaactgacaccgcaggccctgacggcgttaagcaatgtcggttttgttaagcgcagtcttaaggaactggaaa

SEQ ID NO: 105798 - DNA, 75 bp, synthetic construct
  source 1..75: mol_type = other DNA
ccaatgttattgaactggtgatccgttgcggcaacaatagcccgaaaggtgttgtattcaatgcttattatagca

SEQ ID NO: 105799 - DNA, 75 bp, synthetic construct
  source 1..75: mol_type = other DNA
gttcgattgcccctacatcggtttatccccgctggcgcggggaacacatcaacgttatcgattacaactgacagg

SEQ ID NO: 105800 - DNA, 75 bp, synthetic construct
  source 1..75: mol_type = other DNA
gatttaagcgcactcgccgctgcgacagcaaaaggtgaaggcctggtgctgcatgaagcctggctcaaagagatg

SEQ ID NO: 105801 - DNA, 75 bp, synthetic construct
  source 1..75: mol_type = other DNA
tttattttctcatcataccccacttcgaatggcccaacttcgacgatttcgtttgcagtacgcaattctaaaaca

SEQ ID NO: 105802 - DNA, 75 bp, synthetic construct
  source 1..75: mol_type = other DNA
tgtatcaggggtaaatgctaaggttgtagttcttaactctggcggagaggactggaccgcggtgagcagcggtac

SEQ ID NO: 105803 - DNA, 75 bp, synthetic construct
  source 1..75: mol_type = other DNA
aggtggttggcagaaagccagaatggaacagcagatgtatgaatggtttgggcgcatcccgaagttcatcatcac

SEQ ID NO: 105804 - DNA, 75 bp, synthetic construct
  source 1..75: mol_type = other DNA
cacactggattacagaacggcgggccaaccattttgccggactggcactggctgtttctggtttcgagaacgagc

SEQ ID NO: 105805 - DNA, 75 bp, synthetic construct
  source 1..75: mol_type = other DNA
taaagattgagctggagatcttgaaagctacacatgattcattaattgataaaacaggatttaacgctattggcc

SEQ ID NO: 105806 - DNA, 75 bp, synthetic construct
  source 1..75: mol_type = other DNA
tctcattcatctggatgccagcgctgaatatctgccgggcctgcccactttcgactggtaatccggaaattcaca

SEQ ID NO: 105807 - DNA, 75 bp, synthetic construct
  source 1..75: mol_type = other DNA
cgtcagcaactcctggcatccggaaaactggggggaagatggtccgtggatgcgcattttccgcaatgcgcgtaa

SEQ ID NO: 105808 - DNA, 75 bp, synthetic construct
  source 1..75: mol_type = other DNA
cgttggttaaacggccaggacattgccagtgagcatggctggattgaggttgttgagtcgttgatgctgtcgcca

SEQ ID NO: 105809 - DNA, 75 bp, synthetic construct
  source 1..75: mol_type = other DNA
gagcagataccgcaacttcctgatgctgcctcccgcgcaaacaagatgcctgctttcgataacgatggtaaccct

SEQ ID NO: 105810 - DNA, 75 bp, synthetic construct
  source 1..75: mol_type = other DNA
tctgccgtgaattgcataaacgcctgttcagcctgaccttaagcgaacaatttaccggcggcttgctggcactgc

SEQ ID NO: 105811 - DNA, 75 bp, synthetic construct
  source 1..75: mol_type = other DNA
ctgaacaatgccaccggcgcagccggggaagggtgtaacgaaaaaagcagccttcattactccagggattcagaa

SEQ ID NO: 105812 - DNA, 75 bp, synthetic construct
  source 1..75: mol_type = other DNA
attgctggcagaactatcaacgaaaaaacgggggaaccaatggctattgaaggcgctgcggcgactgttccatta

SEQ ID NO: 105813 - DNA, 75 bp, synthetic construct
  source 1..75: mol_type = other DNA
cgcactggataacggaacgccgagctaaccatttcgccgggctggcgctggcggtttctggtctggaagatgagc

SEQ ID NO: 105814 - DNA, 75 bp, synthetic construct
  source 1..75: mol_type = other DNA
cttaagagaagaactgctttctcggggcattaataaaccggtagcaacgctggttactcaggtcgaagtcgacgc

SEQ ID NO: 105815 - DNA, 75 bp, synthetic construct
  source 1..75: mol_type = other DNA
actgtggctgttcaggcaaaaatcttccctgacaatatgttaagtggaacaggcaatgcggctaaaccgattaat

SEQ ID NO: 105816 - DNA, 75 bp, synthetic construct
  source 1..75: mol_type = other DNA
aagcggaaatgggttgaaagcaaggttaataggtgtaaacgggtcgcctgtttcgatctggagcgtgtcttctgg

SEQ ID NO: 105817 - DNA, 75 bp, synthetic construct
  source 1..75: mol_type = other DNA
aagctgaacaccaacgtgagcggaattgcccgcgctatggaagaggcccgcagcggtaccggcggcgcgagcagt

SEQ ID NO: 105818 - DNA, 75 bp, synthetic construct
  source 1..75: mol_type = other DNA
ggctggattatctcgatgcgctggaatctgtggacatatccagcgcaccagatatcaactggcctgagtcgccgg

SEQ ID NO: 105819 - DNA, 75 bp, synthetic construct
  source 1..75: mol_type = other DNA
gaaagcggggcaggccgtgaacaacctgcaaaaaatctttgatgacaagccggacagggcgatcgcttcactcaa

SEQ ID NO: 105820 - DNA, 75 bp, synthetic construct
  source 1..75: mol_type = other DNA
aacttcgcggccacgacgtcgaggaattcgtcggagttgtccggcgttacggcgccagcaaagacgtgcaggaaa

SEQ ID NO: 105821 - DNA, 75 bp, synthetic construct
  source 1..75: mol_type = other DNA
ttgttaattaactatcctcccaaactggcgatatccagtctggtaaacagcctcaaaggcgtatcgggtaggtga

SEQ ID NO: 105822 - DNA, 75 bp, synthetic construct
  source 1..75: mol_type = other DNA
cagcaaaaggtgaaggcatggtgctgcatgaagcctggctcaaagagatggaacgctatttccacgaacgtggac

SEQ ID NO: 105823 - DNA, 75 bp, synthetic construct
  source 1..75: mol_type = other DNA
ctagctttgttcgttctcttacagttaatgggtatctaccgataggccagcaagcctctgtcgcaccaaccccta

SEQ ID NO: 105824 - DNA, 75 bp, synthetic construct
  source 1..75: mol_type = other DNA
cctggccgactggaagggggtgctgtttatgcaggggcgttgcccttactgtcaccagtttgacccggtactgaa

SEQ ID NO: 105825 - DNA, 75 bp, synthetic construct
  source 1..75: mol_type = other DNA
atgtctctcactaaatcactgctgttcaccctgttgctggcagccgctgctgtgcaggcctccacccgggatgaa

SEQ ID NO: 105826 - DNA, 75 bp, synthetic construct
  source 1..75: mol_type = other DNA
cgggctgggttatgacgtcaaagtcggaaataacgttaccttcaccgttggtaaaacgaaaaaggatgataccgg

SEQ ID NO: 105827 - DNA, 75 bp, synthetic construct
  source 1..75: mol_type = other DNA
tcaggtcaatcttgctgactggaaagtggtgctgttcatgcaagggcgatgtccgtactgtcaccagtttgaccc

SEQ ID NO: 105828 - DNA, 75 bp, synthetic construct
  source 1..75: mol_type = other DNA
ttgcaaaggtgatccagcgtcgtagcaatgaagtagcatcaaagaaggtgccttctgttggatttgatggtgtat

SEQ ID NO: 105829 - DNA, 75 bp, synthetic construct
  source 1..75: mol_type = other DNA
gctgtctgcgtgctgcgatgatgacacaggaaaccttattggctggatgcagccaggaaaaagccggaagcgtag

SEQ ID NO: 105830 - DNA, 75 bp, synthetic construct
  source 1..75: mol_type = other DNA
atacgccggatcaattgtttcacgatggtgaccccactcagggcattgagggcactattgtttatgctgaacaca

SEQ ID NO: 105831 - DNA, 75 bp, synthetic construct
  source 1..75: mol_type = other DNA
tatagctgattgcgaaatacaagataaagatcatgattgttttactattttcgctaagggtactattttttcctc

SEQ ID NO: 105832 - DNA, 75 bp, synthetic construct
  source 1..75: mol_type = other DNA
aaatggcacctcccgctcacgccgccggaaagcgcgtgggatcgagatgctgtcggcaatgggatggtggagtta

SEQ ID NO: 105833 - DNA, 75 bp, synthetic construct
  source 1..75: mol_type = other DNA
agctttaccacatcgcccaagccactgatgattttggtgcgccgaagttcaacaaagagaccggccagccagtgc

SEQ ID NO: 105834 - DNA, 75 bp, synthetic construct
  source 1..75: mol_type = other DNA
acagcggctacgtacaggtactgtggtaaccacagatgacaggaactgggaattacgttactcagcttctgcact

SEQ ID NO: 105835 - DNA, 75 bp, synthetic construct
  source 1..75: mol_type = other DNA
ctgctggcgctcatgcgcacactgtcggcattggtgctcatgtgcacactgttgctattggttcacacggacaca

SEQ ID NO: 105836 - DNA, 75 bp, synthetic construct
  source 1..75: mol_type = other DNA
gacgagaaggcccagtataacgagtggctggattatctcgatgcgctggaatctgtggacatatccagcgcacca

SEQ ID NO: 105837 - DNA, 75 bp, synthetic construct
  source 1..75: mol_type = other DNA
ctggagaataaactggcagaaaaagcgcaagaacaaggcgcgaagggctatgtcattaactcagcaggcgggaaa

SEQ ID NO: 105838 - DNA, 75 bp, synthetic construct
  source 1..75: mol_type = other DNA
gtgcaggaaatgattgatgcggcgaatcagccagcggaggttgctcatctcgatattgccagagcttgcgggacg

SEQ ID NO: 105839 - DNA, 75 bp, synthetic construct
  source 1..75: mol_type = other DNA
gtcagggggatactgcctttccggaagcattaccggtgccaccggacgtgatgcagaccttcttcccgaatatcc

SEQ ID NO: 105840 - DNA, 75 bp, synthetic construct
  source 1..75: mol_type = other DNA
cagttttgcatccctttagtgccggtaacttactattcctgaattaccatccgcaaagtgaactgatagtgaaca

SEQ ID NO: 105841 - DNA, 75 bp, synthetic construct
  source 1..75: mol_type = other DNA
gagtaatggcaccgagcaaccgtaaacaagcggagctgcctgccagtgctgaatttatcaataacccggtaggca

SEQ ID NO: 105842 - DNA, 75 bp, synthetic construct
  source 1..75: mol_type = other DNA
aggcaaactgcaggtgaacgccggtggtacagccacgaatgtcaccctgaagcagggcggcgcactggtcaccag

SEQ ID NO: 105843 - DNA, 75 bp, synthetic construct
  source 1..75: mol_type = other DNA
agcagcggcaggtaatttctatacggcaggagtaggcacggtcggtaatgttaaacctgctggcggtgtgctgga

SEQ ID NO: 105844 - DNA, 75 bp, synthetic construct
  source 1..75: mol_type = other DNA
tctggcgctcccgccagaaatcggggcactagttaagcattatatagatgaagccagattattacctaccgataa

SEQ ID NO: 105845 - DNA, 75 bp, synthetic construct
  source 1..75: mol_type = other DNA
cggcaacatccgcgccgatcatgtgcagaaaggcgaaatcaacgttggtgctaagctcgtcgtcctcggtggtcc

SEQ ID NO: 105846 - DNA, 75 bp, synthetic construct
  source 1..75: mol_type = other DNA
taatgtaattgcctgtcataatatttccgggagatacgactatcttctgcatcttgtagtaaaagatatggatga

SEQ ID NO: 105847 - DNA, 75 bp, synthetic construct
  source 1..75: mol_type = other DNA
ctgatatggctaaaacaaccaaaactgtactgggcgatgatctgaatgcggaaggcgccaccgaagacgccctga

SEQ ID NO: 105848 - DNA, 75 bp, synthetic construct
  source 1..75: mol_type = other DNA
gatcttttcattcaggacgtagagactggcgggcccatgtcatcaacgctggaatcaacatacggactttcacgc

SEQ ID NO: 105849 - DNA, 75 bp, synthetic construct
  source 1..75: mol_type = other DNA
ttccgcggtaatttcagcattaaagataaactacaggagaaaattgcgcttaccgacgccatcgtcagccagtca

SEQ ID NO: 105850 - DNA, 75 bp, synthetic construct
  source 1..75: mol_type = other DNA
tgaaatattagacatgaaaggtcaacaattgcctaaagcttgtcaagagtcaactaatagatacattttatatcg

SEQ ID NO: 105851 - DNA, 75 bp, synthetic construct
  source 1..75: mol_type = other DNA
cgctggcggtgctggaattttgagtctgacgccggaaaacagctaaattcgtatctcgccagtgagggaattctc

SEQ ID NO: 105852 - DNA, 75 bp, synthetic construct
  source 1..75: mol_type = other DNA
cgttgggttgggtgccgtttaaaataggcagcgctgtctggaaaaatggcgcggtgcggttcgctggcaggattt

SEQ ID NO: 105853 - DNA, 75 bp, synthetic construct
  source 1..75: mol_type = other DNA
acaccgacatgtggagtgaagagtatcagtgtgcatggctggatatgtatcaccgcgtctttgatcgcgtcagcg

SEQ ID NO: 105854 - DNA, 75 bp, synthetic construct
  source 1..75: mol_type = other DNA
tgtcattaatgagaagggctggcaggccgtcaaatccggcgcagtggcaaccgacacggttgtgaataccggcgc

SEQ ID NO: 105855 - DNA, 75 bp, synthetic construct
  source 1..75: mol_type = other DNA
cgaaaaattacggttatttcatgccgaatccacaggggctttctgcggaacaacttcagaaaggggccagccagg

SEQ ID NO: 105856 - DNA, 75 bp, synthetic construct
  source 1..75: mol_type = other DNA
tcgaagaaggtcattttgcgaaaggttctatgctgcctaaagtggaagctgccgcctcgtttgctcgctctcgcg

SEQ ID NO: 105857 - DNA, 75 bp, synthetic construct
  source 1..75: mol_type = other DNA
atcctgcccagatatatcgtgatcaaaatataccctatgcactttatcgttatggtgataataccacatcagagc

SEQ ID NO: 105858 - DNA, 75 bp, synthetic construct
  source 1..75: mol_type = other DNA
cacgctgggtacggcggcctgtcctccgtatcatattgcgttcgttattggtggaacttctgcagaaacgaacct

SEQ ID NO: 105859 - DNA, 75 bp, synthetic construct
  source 1..75: mol_type = other DNA
gtagagcctaccagctttgattatctggatggaaaaaaacagcccactggattcttccgtaacctcatcaattcg

SEQ ID NO: 105860 - DNA, 75 bp, synthetic construct
  source 1..75: mol_type = other DNA
gggcgtttatcatcgtgtgccagatgcgcctgcgtaaagcaattaaacaaggcaaagcagcggatgtcagtttta

SEQ ID NO: 105861 - DNA, 75 bp, synthetic construct
  source 1..75: mol_type = other DNA
ataggtcgactaaacaggaatactggcagttgcgaccagagaatgcctacgcccccaaaggccaggcggaacctc

SEQ ID NO: 105862 - DNA, 75 bp, synthetic construct
  source 1..75: mol_type = other DNA
cagctaccaggcggtgcggttgattcagtttcgggtggagttttgggacagaacgccactgaaagaacagcagac

SEQ ID NO: 105863 - DNA, 75 bp, synthetic construct
  source 1..75: mol_type = other DNA
gctgaaatatgctccaggactcgcgttgtacaagaaagatgtttctacaagaaaattcgtaaaggatgcgagagt

SEQ ID NO: 105864 - DNA, 75 bp, synthetic construct
  source 1..75: mol_type = other DNA
atctctcgccagcaatgcgctgaatagcctgattaacggcttcgttcagatgggagtcgactgggttaaatctgc

SEQ ID NO: 105865 - DNA, 75 bp, synthetic construct
  source 1..75: mol_type = other DNA
tgttagtgccttatggtctgatggcacattaacggctgctccgacctttaaacttatggggtacacgacaacaag

SEQ ID NO: 105866 - DNA, 75 bp, synthetic construct
  source 1..75: mol_type = other DNA
ttggcgttctcatttataattatgtagcggttccagtactggcagcaaatggtgttattttggcaccaatcccac

SEQ ID NO: 105867 - DNA, 75 bp, synthetic construct
  source 1..75: mol_type = other DNA
gcaccagtacgccggggctgggcctgctgctgtggatgcaaaaagtctacggcaatgacgccccgcaggcctggc

SEQ ID NO: 105868 - DNA, 75 bp, synthetic construct
  source 1..75: mol_type = other DNA
gtcagcaggcctgtacagcggtaaaacaaaatcatggggtggtggtttctatgccagtggtctgttccggtccgg

SEQ ID NO: 105869 - DNA, 75 bp, synthetic construct
  source 1..75: mol_type = other DNA
tggcgggtgatttatcaggatccgcgcaccagtacaccggggctgggtctgttgctatggatgcaaaaagtctat

SEQ ID NO: 105870 - DNA, 75 bp, synthetic construct
  source 1..75: mol_type = other DNA
gccggcctgcattatgagttcgatctgacggacagtgctgacgttcacctgaaggatgcagcgggagaacatcag

SEQ ID NO: 105871 - DNA, 75 bp, synthetic construct
  source 1..75: mol_type = other DNA
gagggcgttcagttccttgcctatatcaacccatatgtcgccagtgataaagacctctgtgccgaagcagcaaaa

SEQ ID NO: 105872 - DNA, 75 bp, synthetic construct
  source 1..75: mol_type = other DNA
tggccacgttttgtgcgtaacacctccgatcgctttgaagcgcgtttcagtctggtagaagtaacccaaagcccg

SEQ ID NO: 105873 - DNA, 75 bp, synthetic construct
  source 1..75: mol_type = other DNA
tctgaaatagattttcgtattgcaaataccgcatttgttgctcaggccattgcgattctgaatggcggtgcacct

SEQ ID NO: 105874 - DNA, 75 bp, synthetic construct
  source 1..75: mol_type = other DNA
cgtcttgaggggatacaaaacctgtttcgccagtttccacccgggcaggccgaggcctggttacagcaggcgcga

SEQ ID NO: 105875 - DNA, 75 bp, synthetic construct
  source 1..75: mol_type = other DNA
aaaattacttctcaggcaattgttgatttaattgcccagggacatgaggtcatcgtcactcatggtaacgggcca

SEQ ID NO: 105876 - DNA, 75 bp, synthetic construct
  source 1..75: mol_type = other DNA
cgcaaaaattcctccagtttatggtttctccggcttttcagaatgcgatcccaaccggcaactggatgtatccgg

SEQ ID NO: 105877 - DNA, 75 bp, synthetic construct
  source 1..75: mol_type = other DNA
ttattgccgacttattttttttgtattgtttttggtctgaaaattctttgtgtagatgaatttccgggttttact

SEQ ID NO: 105878 - DNA, 75 bp, synthetic construct
  source 1..75: mol_type = other DNA
gcatcgggtggcgttaatttccctaatggattccagatgcgattcggtgctatcgctggtaatggtggaaaatta

SEQ ID NO: 105879 - DNA, 75 bp, synthetic construct
  source 1..75: mol_type = other DNA
catttccggttggttattcgcaatgctgaagggcagctacgctggcggtgctggaattttgaacctgatgccgga

SEQ ID NO: 105880 - DNA, 75 bp, synthetic construct
  source 1..75: mol_type = other DNA
tcgttgaatcagcaaatacaggtccttcatcagcgcaagggtcatcattcaccataacatataagaatgtccctg

SEQ ID NO: 105881 - DNA, 75 bp, synthetic construct
  source 1..75: mol_type = other DNA
aaccagcaggtggaacgcttgacgtagcggcaacagcaggtgcttgttctgacgctaacagtaatacattgatct

SEQ ID NO: 105882 - DNA, 75 bp, synthetic construct
  source 1..75: mol_type = other DNA
gtctgtgttgccttaagccagggttatattggttacgatctacaaaacgccttaagagaagaactgctttctcgg

SEQ ID NO: 105883 - DNA, 75 bp, synthetic construct
  source 1..75: mol_type = other DNA
ttagaatgtataaggaaaagggctttggttgactcacaaaaatatacatcaggacatgcagcttcatcaatttat

SEQ ID NO: 105884 - DNA, 75 bp, synthetic construct
  source 1..75: mol_type = other DNA
acgaaaccaatcggttcattctttaccgaacaagaagcagagctactgacaaaacaaggctataccctgaaagaa

SEQ ID NO: 105885 - DNA, 75 bp, synthetic construct
  source 1..75: mol_type = other DNA
ggtcaatgataacggttctaatgggtcaaagaaaaaattaaaaaacaaaaaaatgcttatatgtagaaataatgc

SEQ ID NO: 105886 - DNA, 75 bp, synthetic construct
  source 1..75: mol_type = other DNA
ttacgccatcatataattcagaagagtttatcgttcagacttacgattcgatacgtaatcaaacttacagtaatt

SEQ ID NO: 105887 - DNA, 75 bp, synthetic construct
  source 1..75: mol_type = other DNA
tgataattctcccttgaagagattaacgtttgatgattattctgtaaaacttaagacgctgattaaaaataaaat

SEQ ID NO: 105888 - DNA, 75 bp, synthetic construct
  source 1..75: mol_type = other DNA
ttaacgattcattactggatattcgttacagcctgtcggatcgtattcgttattactggcgcatagtcgaattaa

SEQ ID NO: 105889 - DNA, 75 bp, synthetic construct
  source 1..75: mol_type = other DNA
tagtgatgacttatgggagaaaaataaactgcaagaacaactgggatttatgaaaaaaaatggttacagtttcag

SEQ ID NO: 105890 - DNA, 75 bp, synthetic construct
  source 1..75: mol_type = other DNA
attatcaggcgcaagaagctcaggcgttggcgcaatggatagaaaaaaccaaaatggtttatgaagcgcattcca

SEQ ID NO: 105891 - DNA, 75 bp, synthetic construct
  source 1..75: mol_type = other DNA
gtaccggagccagaccgggtatggtgtggagatattacgtatcgtgtgcccggagttcagggcgggcatggatgc

SEQ ID NO: 105892 - DNA, 75 bp, synthetic construct
  source 1..75: mol_type = other DNA
atttaaagcgaaagctaaatcctgcactgatgccgacgaacgcgcggcggctgcgcgacgttatcgctggatgaa

SEQ ID NO: 105893 - DNA, 75 bp, synthetic construct
  source 1..75: mol_type = other DNA
cgtcaatgggagatatatagaaaaatagagggtttaccattagtgtattcagttatttgttttatttcctatgga

SEQ ID NO: 105894 - DNA, 75 bp, synthetic construct
  source 1..75: mol_type = other DNA
agtaacgcgatgcttaatattctggattggttcgaacggtatcccgatattgtaaaaaatataacccaggcttaa

SEQ ID NO: 105895 - DNA, 75 bp, synthetic construct
  source 1..75: mol_type = other DNA
taattgattctcatcataaaaataaagtttttagctataatgatatgctttataaaaaagcgacgcttggttgtt

SEQ ID NO: 105896 - DNA, 75 bp, synthetic construct
  source 1..75: mol_type = other DNA
ttaagacgctgattaaaaataaaattcctattattaatacaacaatcaatttatcttcgttgtctatagatgttt

SEQ ID NO: 105897 - DNA, 75 bp, synthetic construct
  source 1..75: mol_type = other DNA
gtgctgggtctgttgttcctgcttatgttccgtagcgtcgccaaaaaggcgaccagcggcgtaccaggtaagttt

SEQ ID NO: 105898 - DNA, 75 bp, synthetic construct
  source 1..75: mol_type = other DNA
tttttatttccgctttacttatttctggctgttcgacatcaggcaatcagcatctcaaaaacgaaacatcacaaa

SEQ ID NO: 105899 - DNA, 75 bp, synthetic construct
  source 1..75: mol_type = other DNA
gtggcgcgcggaacaagccgttcgccggagatatggccgggacggcgaattgtgctgacggggcatccgcaggcg

SEQ ID NO: 105900 - DNA, 75 bp, synthetic construct
  source 1..75: mol_type = other DNA
acatccacgcgcagaagaacatgaacaccgaggtgctgaataaccgcaccactgatgtgataaacaaccatgccg

SEQ ID NO: 105901 - DNA, 75 bp, synthetic construct
  source 1..75: mol_type = other DNA
agtggatcctgaatgtgccgtgggccattttccacattctgatcattacgctgcaagccttcatcttcatggttc

SEQ ID NO: 105902 - DNA, 75 bp, synthetic construct
  source 1..75: mol_type = other DNA
atagtcaagaagtacaggatgaagtaaaagcattggatgcgaagattgccgactgtgacgataagaaacgttcta

SEQ ID NO: 105903 - DNA, 75 bp, synthetic construct
  source 1..75: mol_type = other DNA
ttcggtgtagaaatctatgctgctgccaaacaaggtgaacccgatccagaattaaacacatctttaaaattcgtt

SEQ ID NO: 105904 - DNA, 75 bp, synthetic construct
  source 1..75: mol_type = other DNA
attaaaaatgatggacattatttttgtagagccggaggaaacagaccagacggtttaaatgagccggttacagat

SEQ ID NO: 105905 - DNA, 75 bp, synthetic construct
  source 1..75: mol_type = other DNA
ttatggggcgtacctaccaccaggaaaaccgcacccccggcagcctgccggggacgaagacgcagatgacgatcg

SEQ ID NO: 105906 - DNA, 75 bp, synthetic construct
  source 1..75: mol_type = other DNA
tggttcacagacacaggcaaaaagactcgaaatcgaatttaaagacgaaacggtcacaaagtggacgttctcaga

SEQ ID NO: 105907 - DNA, 75 bp, synthetic construct
  source 1..75: mol_type = other DNA
cttatttataaaagagccgaaattaaaaatccctgagtccccaataagtaagcataaaaaaagactcagtgctat

SEQ ID NO: 105908 - DNA, 75 bp, synthetic construct
  source 1..75: mol_type = other DNA
cggtttcattactccggaagacggcagcaaagacgtgttcgtacacttctctgcaatccagactaatggttttaa

SEQ ID NO: 105909 - DNA, 75 bp, synthetic construct
  source 1..75: mol_type = other DNA
cccacccgtgaggaagttcgtaagttctatctggccgaaaaacaatccggcatagaccttggtttagtgttgcca

SEQ ID NO: 105910 - DNA, 75 bp, synthetic construct
  source 1..75: mol_type = other DNA
gaaaaaaaatggatggagtaacaatcttaagatttatagctgctttttatgtgtttatttttcacattaacatga

SEQ ID NO: 105911 - DNA, 75 bp, synthetic construct
  source 1..75: mol_type = other DNA
ccaggcggaacaggcacagcgtgaacacgaagagcgcattaagcacgaagcggcagaacaagcccgccgcgatgc

SEQ ID NO: 105912 - DNA, 75 bp, synthetic construct
  source 1..75: mol_type = other DNA
tttttcatatttatcctcagcattattaatcccattgtctgatataatccagggacctgtagtttggtccgtata

SEQ ID NO: 105913 - DNA, 75 bp, synthetic construct
  source 1..75: mol_type = other DNA
gccagcgtgagcaactgaactatgtcattggcaccgaagttccggttccgggcggtgaggccagcgccattcagt

SEQ ID NO: 105914 - DNA, 75 bp, synthetic construct
  source 1..75: mol_type = other DNA
cctgattgctcagggcatcccagaagaattcgcacagaaagcagtgctggcgatcgctggcggcaaagtgcagga

SEQ ID NO: 105915 - DNA, 75 bp, synthetic construct
  source 1..75: mol_type = other DNA
gtcttcgtgaagatggttcagatagatctatgtttaaccccaaagagtatttttctgattacattgaaagaagat

SEQ ID NO: 105916 - DNA, 75 bp, synthetic construct
  source 1..75: mol_type = other DNA
gggagtcttcactgcacagctggcgtatcttcgctattcaagtggtagaaagagaacgaataaaatctttgttac

SEQ ID NO: 105917 - DNA, 75 bp, synthetic construct
  source 1..75: mol_type = other DNA
ctctaataagtcttatattgccacagccacattgccctttgtatttcctaataaggtgctgggcgttatccctct

SEQ ID NO: 105918 - DNA, 75 bp, synthetic construct
  source 1..75: mol_type = other DNA
acagtggagataggtgcaaagactgtgctattgatccaaatacaaattattcaaaagatggtcttacagcgcaaa

SEQ ID NO: 105919 - DNA, 75 bp, synthetic construct
  source 1..75: mol_type = other DNA
ctgaccgtgaagcggtcgagtccgtactggcacagcacggccttgctgattgcgtccattatgtcggtcaggcgg

SEQ ID NO: 105920 - DNA, 75 bp, synthetic construct
  source 1..75: mol_type = other DNA
acaatacttactgaaaatccaaaagaatatgtccaaaagcaaataaaggagtctcataaagaatctgctacaaat

SEQ ID NO: 105921 - DNA, 75 bp, synthetic construct
  source 1..75: mol_type = other DNA
ggtcagtccacacagattccggtatctccggagttcaaaacatctcctcgctttaaaagagtgttagttgtaggg

SEQ ID NO: 105922 - DNA, 75 bp, synthetic construct
  source 1..75: mol_type = other DNA
attcattactggatattcgttacagcctgtcggatcgtattcgttattactggccgcatagccggattaaaaata

SEQ ID NO: 105923 - DNA, 75 bp, synthetic construct
  source 1..75: mol_type = other DNA
acgacaatggcaaatataccgcgagctagaaaaactttctttggttaagtctatctattgttttttattttatgc

SEQ ID NO: 105924 - DNA, 75 bp, synthetic construct
  source 1..75: mol_type = other DNA
ttgtttaagcttgccagaaaaggggatgcctttgctctgcgtgagttactcagggtggataaaaatcaggactaa

SEQ ID NO: 105925 - DNA, 75 bp, synthetic construct
  source 1..75: mol_type = other DNA
atgactgcacaacaaatcgctgacgttctggatgttgatctgaaccgactgaaagaaaatcgggaagcaatgaca

SEQ ID NO: 105926 - DNA, 75 bp, synthetic construct
  source 1..75: mol_type = other DNA
gagttgttcctgtagacccgccacttggcgggttttttgttttcaggagtttatcaaatggccatatcagaccag

SEQ ID NO: 105927 - DNA, 75 bp, synthetic construct
  source 1..75: mol_type = other DNA
gttcacgacacgaaaagttaattgcatactctaaccgccatttttataacagtgatttggtgatattcccttctc

SEQ ID NO: 105928 - DNA, 75 bp, synthetic construct
  source 1..75: mol_type = other DNA
tacaaaagtgaactggctgtctggaaaaacaaggaagagcttttaaaggctcagaaaaagcattgttgtcaaaac

SEQ ID NO: 105929 - DNA, 75 bp, synthetic construct
  source 1..75: mol_type = other DNA
tggatgaagcccgtttctggtttggtcttaatgcgatcaagataaaggatctacgcggacgcattcgtggacgac

SEQ ID NO: 105930 - DNA, 75 bp, synthetic construct
  source 1..75: mol_type = other DNA
taccgttagcaccagaaacggttgcggaacgagctgctgtgctttgctttgctgcggaaagtgtggcgacagatt

SEQ ID NO: 105931 - DNA, 75 bp, synthetic construct
  source 1..75: mol_type = other DNA
gcgtgacaagttgtcaccatatgacaccgaagagatgcttgaggctatgcgtatttttctggaagaacagggagg

SEQ ID NO: 105932 - DNA, 75 bp, synthetic construct
  source 1..75: mol_type = other DNA
ttcaccgacctgattgtggccgtggtgtcacccagcggcagcaaggaaggggaaatggcctcccgtgaaacggtg

SEQ ID NO: 105933 - DNA, 75 bp, synthetic construct
  source 1..75: mol_type = other DNA
ttacagcctgtcggatcgtattcgttattactggccgcatagtcggattaaaaatagcgtcgaaacggtaatgac

SEQ ID NO: 105934 - DNA, 75 bp, synthetic construct
  source 1..75: mol_type = other DNA
gtactcagcgaagttggtatatcgccggacccgaaaaaacagagtcaactggctgaggcgctgtctttatatgta

SEQ ID NO: 105935 - DNA, 75 bp, synthetic construct
  source 1..75: mol_type = other DNA
aagcacattctaccgattaccagacccggacggcttattgggaattagtccgcgatcactttgcaatattgaaag

SEQ ID NO: 105936 - DNA, 75 bp, synthetic construct
  source 1..75: mol_type = other DNA
atcggcctcttttatacggtgaatgctattgctgggatcggcgtaagcctctggttggcaaaacgttctgacagt

SEQ ID NO: 105937 - DNA, 75 bp, synthetic construct
  source 1..75: mol_type = other DNA
atgacaccggcggactttcgcgaatttgtgtttgcgattgccgatagagttgggtttgcacgcgagcgcattatt

SEQ ID NO: 105938 - DNA, 75 bp, synthetic construct
  source 1..75: mol_type = other DNA
gctgcatatctctactgacgaacaaggccgtttagtgctgaaactgcaaaacgatgatcgtcaccataaccgcat

SEQ ID NO: 105939 - DNA, 75 bp, synthetic construct
  source 1..75: mol_type = other DNA
ttcccttatcctggatttcagtctggttttgttgaggttaacgacagtagccagggcaatcaacaagggacaaca

SEQ ID NO: 105940 - DNA, 75 bp, synthetic construct
  source 1..75: mol_type = other DNA
gatgtgggcgggagaccagaacgtcgactggagtctggacgatggccttgcgtccgttgtcccggcggcgctgtc

SEQ ID NO: 105941 - DNA, 75 bp, synthetic construct
  source 1..75: mol_type = other DNA
atgtgggactgtcgccctgttttattgcccgaaggccctttctcacgcgaacaggcggttggcgtcacaacagct

SEQ ID NO: 105942 - DNA, 75 bp, synthetic construct
  source 1..75: mol_type = other DNA
gcgaaacttgctggtatgtgtcctgtgcagaccgaccaacatgttctgaatgtcgtgtcgcatcagctgcattga

SEQ ID NO: 105943 - DNA, 75 bp, synthetic construct
  source 1..75: mol_type = other DNA
gtggtgaaagtggactctctgaatgattacggtgaactgcagacatggacgattaaccagaagaaatcagcaata

SEQ ID NO: 105944 - DNA, 75 bp, synthetic construct
  source 1..75: mol_type = other DNA
ccgcacggaggggactagcaaaaacattgctgttaacgatggtcttgtcgcactgtcaggcagaaccgatcggat

SEQ ID NO: 105945 - DNA, 75 bp, synthetic construct
  source 1..75: mol_type = other DNA
tagattttcaatttcatcagaataacgacagttttactctacgttttcaagaccgtcttattttaatccatagca

SEQ ID NO: 105946 - DNA, 75 bp, synthetic construct
  source 1..75: mol_type = other DNA
gattatggtgcgcatatctctgtgcaaccctcgcagcatgaaatcccttatccttatgtcatcgatggctctgaa

SEQ ID NO: 105947 - DNA, 75 bp, synthetic construct
  source 1..75: mol_type = other DNA
ctggtcctgtggggagcatatcgtgtgcttgatacgtggattgcccgtgtcagtcaggaagagcgtgaggcactg

SEQ ID NO: 105948 - DNA, 75 bp, synthetic construct
  source 1..75: mol_type = other DNA
agaacaagaaatataccggtgattgcagaaggtgtagagacgcaggagggtgctcagggattgataaatattggt

SEQ ID NO: 105949 - DNA, 75 bp, synthetic construct
  source 1..75: mol_type = other DNA
cgctaagcgtgaggcctcattttaaatttatgggggcaaattttgagctttccctggttggccggttagacaggg

SEQ ID NO: 105950 - DNA, 75 bp, synthetic construct
  source 1..75: mol_type = other DNA
tggattcggtgatcaccgccgtcggcctttctcagcatatatttatcatgattgccgccgtaatgattgccgtcg

SEQ ID NO: 105951 - DNA, 75 bp, synthetic construct
  source 1..75: mol_type = other DNA
atcaccagcggaagatttttctctggactcagttatcacggcgttagtctcgcgaccgatgaacgtatgctgccg

SEQ ID NO: 105952 - DNA, 75 bp, synthetic construct
  source 1..75: mol_type = other DNA
taatagacttgagaatcaatataaagacgataaaaacatcagtgacgcgatgcgtaatattctggattggttcga

SEQ ID NO: 105953 - DNA, 75 bp, synthetic construct
  source 1..75: mol_type = other DNA
ttttcattgcaatatttttaatttctggctgttcaacatcagggaaccaaaaaatcaaaaatgaaacggctcaaa

SEQ ID NO: 105954 - DNA, 75 bp, synthetic construct
  source 1..75: mol_type = other DNA
ttccggcaacatgccgcgatttaataccatcagtatcagcggttaccacatgggggaagcgggtgccaactgcgt

SEQ ID NO: 105955 - DNA, 75 bp, synthetic construct
  source 1..75: mol_type = other DNA
ctcaacgacagactttttttacctcatccggtaaatataaatcttctaatcagtcagatagtgacattatctggt

SEQ ID NO: 105956 - DNA, 75 bp, synthetic construct
  source 1..75: mol_type = other DNA
cctataagggcagcgggtttaatgaactgaagtttgacgatgcgacagggaaagaacaggtctacatccacgcgc

SEQ ID NO: 105957 - DNA, 75 bp, synthetic construct
  source 1..75: mol_type = other DNA
atgtaggactgtcaccctgttttattgcccgaaggccctttctcacgcgaacaggcggttggcgtcacaacagct

SEQ ID NO: 105958 - DNA, 75 bp, synthetic construct
  source 1..75: mol_type = other DNA
tgatgctcatagaatggattttttagcaaattcgttcaacaagtctaactatgatgataccagggagcaggatac

SEQ ID NO: 105959 - DNA, 75 bp, synthetic construct
  source 1..75: mol_type = other DNA
acaaagtgacgcgatagacgcgctgattgacgctcggtttatccccgctggcgcggggaacactgaaggtgctga

SEQ ID NO: 105960 - DNA, 75 bp, synthetic construct
  source 1..75: mol_type = other DNA
cggcgctggagaaccattttgcggtgatcccggcagacagaacatggcgaccacagccgttgctgaaaccgctgg

SEQ ID NO: 105961 - DNA, 75 bp, synthetic construct
  source 1..75: mol_type = other DNA
tagacctttaagtatagagagaacatgttcctattcgatgaaaaattcaccagtaactgttgataagcggaccaa

SEQ ID NO: 105962 - DNA, 75 bp, synthetic construct
  source 1..75: mol_type = other DNA
gttacacctgataaactgaccggcaccattcagaacgatatcctcaaagagtacctctgccgcaatacctatatt

SEQ ID NO: 105963 - DNA, 75 bp, synthetic construct
  source 1..75: mol_type = other DNA
ccgtgatgctcaggctgcgaatgatgagtttttagcagcgtatgattcactgccgcatcaacagaaagttcagca

SEQ ID NO: 105964 - DNA, 75 bp, synthetic construct
  source 1..75: mol_type = other DNA
acctttaagtacaattgatattgcagtttcaactcgaccagaactacaggagacagatgaaaaagaatttttccc

SEQ ID NO: 105965 - DNA, 75 bp, synthetic construct
  source 1..75: mol_type = other DNA
agaaaattgcattactctttaactttgtaacaaccaccattgtaatgttgtttattcctaaaatgatcaattcat

SEQ ID NO: 105966 - DNA, 75 bp, synthetic construct
  source 1..75: mol_type = other DNA
tcattagaacataaagaaaaaattatttctgattcacttcattacaacccaaaccctcgcgacatattagatatg

SEQ ID NO: 105967 - DNA, 75 bp, synthetic construct
  source 1..75: mol_type = other DNA
gaacgactcttgacgatggcaacgagcaatggagatatttcatgtataacaatcagttcaatgcctcgactttta

SEQ ID NO: 105968 - DNA, 75 bp, synthetic construct
  source 1..75: mol_type = other DNA
atgttggactgtctccctgttttattgcccgaaggccctttctcacgcgaacaggcggttggcgtcacaacagct

SEQ ID NO: 105969 - DNA, 75 bp, synthetic construct
  source 1..75: mol_type = other DNA
gtcagcgaactgaatgctctgggtgatatcacccacattaatctccatatcaattcaccgggtggcgatgtcttt

SEQ ID NO: 105970 - DNA, 75 bp, synthetic construct
  source 1..75: mol_type = other DNA
caaattgagcaggaacttatcgcccccgaaaatcgcagcggttgcctggcggtaattgaagaagtgatgctcgac

SEQ ID NO: 105971 - DNA, 75 bp, synthetic construct
  source 1..75: mol_type = other DNA
tagagtcgtttttgtctacactttatgttgaaaataaatcgtacaaagagaaatatcattttaataacggtaggg

SEQ ID NO: 105972 - DNA, 75 bp, synthetic construct
  source 1..75: mol_type = other DNA
atgtcggactgtccccctgttttattgcccgaaggccctttctcacgcgaacaggcggttggcgtcacaacagct

SEQ ID NO: 105973 - DNA, 75 bp, synthetic construct
  source 1..75: mol_type = other DNA
caaagctggggttcagaactgaaatcgcagagcctaccagctttgattacctggatggaaaaaaacagcccactg

SEQ ID NO: 105974 - DNA, 75 bp, synthetic construct
  source 1..75: mol_type = other DNA
gttatgaaggtgttcatgctctactggacaatggctatcaacccagacaattacaagtgttagttgatgctcttc

SEQ ID NO: 105975 - DNA, 75 bp, synthetic construct
  source 1..75: mol_type = other DNA
gaagaggcgcgcgttctgcatgccactcaggaactggtaacgctgggactggcgaaaccgatccttatcggtcgt

SEQ ID NO: 105976 - DNA, 75 bp, synthetic construct
  source 1..75: mol_type = other DNA
ggcaacaataagcgcatcaaccgggtcgataacaattaatggatctactacagcctcaccaatattttacattga

SEQ ID NO: 105977 - DNA, 75 bp, synthetic construct
  source 1..75: mol_type = other DNA
caattgtggcagacatgccatttatcatgggggagttcgaagacggcgcacgcaaaggtcacttctacgaagagg

SEQ ID NO: 105978 - DNA, 75 bp, synthetic construct
  source 1..75: mol_type = other DNA
gccaggcgttaagccagcaaacgcccgctgcacaagttgacaccgcattacccacggcgctgaaaaatggttggc

SEQ ID NO: 105979 - DNA, 75 bp, synthetic construct
  source 1..75: mol_type = other DNA
ccgacgtcataacggaacaggggatacgccgaatgttgatacaaatacagagattactacagagattacaacgga

SEQ ID NO: 105980 - DNA, 75 bp, synthetic construct
  source 1..75: mol_type = other DNA
acaaaaaaagtaaaaaaggtttctcacttttagagctattacttgttttaggtattatcgcagccttagttgtag

SEQ ID NO: 105981 - DNA, 75 bp, synthetic construct
  source 1..75: mol_type = other DNA
aacggcttgcgcgtggtggagaaaaacatctctgacgtgcggatggtggtttccggcgcgggtgccgcagcaatc

SEQ ID NO: 105982 - DNA, 75 bp, synthetic construct
  source 1..75: mol_type = other DNA
ggcgaaaccgatccttatcggtcgtccgaacgtgatcgaaatgcgcattcagaaactgggcttgcagatcaaagc

SEQ ID NO: 105983 - DNA, 75 bp, synthetic construct
  source 1..75: mol_type = other DNA
ccaacggctaaaggagctaaataacacgcaagtagatatagatttgtttcatgcgcgctttacgctgaacgatcg

SEQ ID NO: 105984 - DNA, 75 bp, synthetic construct
  source 1..75: mol_type = other DNA
ttctattttccgaatgtgttgaagtatgaccctgaccaactcaggcaagatcttgcatctcaaggcggtgttaat

SEQ ID NO: 105985 - DNA, 75 bp, synthetic construct
  source 1..75: mol_type = other DNA
aggaaaaacacctgaagaagttgcaagtaaaattcagggttatcttaattctattgcgtatcctgtctacttacc

SEQ ID NO: 105986 - DNA, 75 bp, synthetic construct
  source 1..75: mol_type = other DNA
tggctatgtttatttcccttgccactctgcaacaaagaaaacttatacaataccaggaacggcctcacaggcagg

SEQ ID NO: 105987 - DNA, 75 bp, synthetic construct
  source 1..75: mol_type = other DNA
ataaccatccgtatacctttaaagcgcaaaaagcggttatttctattcctgttgtcccacaggtgacaggcgtgg

SEQ ID NO: 105988 - DNA, 75 bp, synthetic construct
  source 1..75: mol_type = other DNA
gcctgggtacggttaaagcacgggcggcggaacgcgagcaaacccgccaattgctggctggcagcgtagcccgcc

SEQ ID NO: 105989 - DNA, 75 bp, synthetic construct
  source 1..75: mol_type = other DNA
cgcgtctaattgactcagtaataacctatgagagtgctcttttgctttctgttcgcgttttaggatttgagactc

SEQ ID NO: 105990 - DNA, 75 bp, synthetic construct
  source 1..75: mol_type = other DNA
atgaatcgtgatcccttttatccagctatcgcctgttttccgctgttgcttatgctggccggatgtgcgcctgtg

SEQ ID NO: 105991 - DNA, 75 bp, synthetic construct
  source 1..75: mol_type = other DNA
tacaacaaagcggtggttgaagcggtgaatgacgtggcgcgggcagccagtcaggttcagacactggcggagaaa

SEQ ID NO: 105992 - DNA, 75 bp, synthetic construct
  source 1..75: mol_type = other DNA
aacaaaaacagatccagagccagctggatagcctggtgttgggtgaacattctcaaatcgccagcctgaaagcgc

SEQ ID NO: 105993 - DNA, 75 bp, synthetic construct
  source 1..75: mol_type = other DNA
ttgcaggcggcgcactggtacgttgaatcatccttaagcagcatcgacgcggcaaaagcggccttttaccccgac

SEQ ID NO: 105994 - DNA, 75 bp, synthetic construct
  source 1..75: mol_type = other DNA
cattcaccaaagccagttagggtatcgtctgtatgcggaaattatctgctctgccattatcgactggtggtcgcg

SEQ ID NO: 105995 - DNA, 75 bp, synthetic construct
  source 1..75: mol_type = other DNA
tggtggcggacgatcgccagtatctgaacttttccagcaatgattacctcggcttaagccatcatccggacatca

SEQ ID NO: 105996 - DNA, 75 bp, synthetic construct
  source 1..75: mol_type = other DNA
ccactggacatgtacaaagaggtcaacaccggcactaacctgcctgcgcaaatcgacctgtatgcagtagatggc

SEQ ID NO: 105997 - DNA, 75 bp, synthetic construct
  source 1..75: mol_type = other DNA
ctgcggccctgacaggtctgttccagccgtacagtgtgggtaaattcaacgccacggcagcggttggtggttaca

SEQ ID NO: 105998 - DNA, 75 bp, synthetic construct
  source 1..75: mol_type = other DNA
acaacatcctgagcccttcgagtctgcgcaaacagtgggatcaactcactaccaagcggctgcgtgcaaccgcag

SEQ ID NO: 105999 - DNA, 75 bp, synthetic construct
  source 1..75: mol_type = other DNA
tttctctcacgccatccagaagctgccgccgggatatacaccccggcaggtaaatcatggggatccgctgacgac

SEQ ID NO: 106000 - DNA, 75 bp, synthetic construct
  source 1..75: mol_type = other DNA
cagaaactttctggttacggcaaggatatgtcactttatgggctggaggattacaccgtcgtccgccacgtcatg

SEQ ID NO: 106001 - DNA, 75 bp, synthetic construct
  source 1..75: mol_type = other DNA
agaaagcgttagttatcgccacaacggatgtatcgttattcacgaagggcgaagaaatagatcttaaattgcttt

SEQ ID NO: 106002 - DNA, 75 bp, synthetic construct
  source 1..75: mol_type = other DNA
atgaaagaatataaagagatattgaataataaagaagaaaaattacttgttacattgttggctcgtacaaaaatt

SEQ ID NO: 106003 - DNA, 75 bp, synthetic construct
  source 1..75: mol_type = other DNA
cggtcattatccacaaagttaaaggtcgggccgtatatgcagttgataaggatctggtacacaactacttgtcga

SEQ ID NO: 106004 - DNA, 75 bp, synthetic construct
  source 1..75: mol_type = other DNA
ctctccgtgctggcagaagtcgcctctgtacgtctccatcaggaggaggattcatgcctgcccccgtcgtcctga

SEQ ID NO: 106005 - DNA, 75 bp, synthetic construct
  source 1..75: mol_type = other DNA
tttaataactatttcattagtggtggtaaagttcgtagccaaggttttgaactcgaaggtattggttatctgacc

SEQ ID NO: 106006 - DNA, 75 bp, synthetic construct
  source 1..75: mol_type = other DNA
cgttttcgtgccggagtgcagggttcgccatttactctcgcggattctcacagtgccattcaaccattaatcgtc

SEQ ID NO: 106007 - DNA, 75 bp, synthetic construct
  source 1..75: mol_type = other DNA
ctgaacagcgcattcagctggctgaagcccaggcgaaggcagttgccactcaggatggtccgcagatcgactttt

SEQ ID NO: 106008 - DNA, 75 bp, synthetic construct
  source 1..75: mol_type = other DNA
gccgttacggtcagttgctgagcttcactgactgttccggttatgtaacccgctatgaccatgaccgttttggtc

SEQ ID NO: 106009 - DNA, 75 bp, synthetic construct
  source 1..75: mol_type = other DNA
tgcgatgatggcgaaaaactgcgtgttacgttcgtcctggactgttgcgctcgtgaagccatagactgggccgca

SEQ ID NO: 106010 - DNA, 75 bp, synthetic construct
  source 1..75: mol_type = other DNA
gcgacagggcgtcggaaaagtcctgctccggcacgccgtaacatgggcgcagtcacagggctatcgtcagatgat

SEQ ID NO: 106011 - DNA, 75 bp, synthetic construct
  source 1..75: mol_type = other DNA
ccagttctcctcaagatatggcggtatatgagcgggttgaaattcttcgggggtcgaacggccttttacatggta

SEQ ID NO: 106012 - DNA, 75 bp, synthetic construct
  source 1..75: mol_type = other DNA
ccagacaaagtcattgaagcttaaaccggtcgcgttgccgaaagtggcaagccagcttcctgatgaactggggta

SEQ ID NO: 106013 - DNA, 75 bp, synthetic construct
  source 1..75: mol_type = other DNA
tgttttgaggcggtgatctggcttacctacggctggaacaagaaacaggaccgcgtgacaaatacggttattgcc

SEQ ID NO: 106014 - DNA, 75 bp, synthetic construct
  source 1..75: mol_type = other DNA
caggagaaaccgtgaatggcggaacactggtaaaccatgacaaccagtttgtatccggaacagctgatggcgtga

SEQ ID NO: 106015 - DNA, 75 bp, synthetic construct
  source 1..75: mol_type = other DNA
cataaaatcaatgatgattggcaatataagcttaacgcagagtatcaacatgtaaatgcccgattattgtacgca

SEQ ID NO: 106016 - DNA, 75 bp, synthetic construct
  source 1..75: mol_type = other DNA
attgctgtctgaattgaccacgagcaaacggagaaagtccaaatgtatgcggcagaaaatgaagtggtttatcac

SEQ ID NO: 106017 - DNA, 75 bp, synthetic construct
  source 1..75: mol_type = other DNA
gcttatggtgccggattcgttcaggcgcattgtgagttgctgccgtttgatgggggaattccggttgagcaataa

SEQ ID NO: 106018 - DNA, 75 bp, synthetic construct
  source 1..75: mol_type = other DNA
tgctggtcatacgcttaaaggtgtttacaaactcgtatgcccacatataacatataactgttttattacacaact

SEQ ID NO: 106019 - DNA, 75 bp, synthetic construct
  source 1..75: mol_type = other DNA
ctgattaaccagaaacgcattgcaccgctgaatcttctgagtgttgacccgaacagccagaaccagattattgcg

SEQ ID NO: 106020 - DNA, 75 bp, synthetic construct
  source 1..75: mol_type = other DNA
gcttgcggtgcgtaacagcgacaaacgtactgacaaagaaacaccgtacgttccaatcccggaaggcggcgtgaa

SEQ ID NO: 106021 - DNA, 75 bp, synthetic construct
  source 1..75: mol_type = other DNA
tttcggtatggacctgcgaccttatcgggaacaaggtttaccgctgccggaacagtatcgcattggctatcgtcg

SEQ ID NO: 106022 - DNA, 75 bp, synthetic construct
  source 1..75: mol_type = other DNA
tggtgtcacaccagtgcgccttttactccgaagaaggtgcctgtctgcatgaatatgccacgtactcctgtgagt

SEQ ID NO: 106023 - DNA, 75 bp, synthetic construct
  source 1..75: mol_type = other DNA
aattcgatttgaacttgcttgtcatttttgaatgcatataccaacatcttagcattagcaaggccgcagaatcgt

SEQ ID NO: 106024 - DNA, 75 bp, synthetic construct
  source 1..75: mol_type = other DNA
agctgggaaagcaccaatgaacggtatagtaaggacaaagaggcgggaaatattgcccgaaaagtggataaaaac

SEQ ID NO: 106025 - DNA, 75 bp, synthetic construct
  source 1..75: mol_type = other DNA
taagaaacaccagaagccagttccggctctgaaccaaccgggtggcatcgttgagaaagaagccgctattcaggt

SEQ ID NO: 106026 - DNA, 75 bp, synthetic construct
  source 1..75: mol_type = other DNA
gataattgctcagtttcgtcgcatcaggattcaggcgatgctctcaagcgattagtcagctatcgcgattatctt

SEQ ID NO: 106027 - DNA, 75 bp, synthetic construct
  source 1..75: mol_type = other DNA
cgccaggggtggcacactggcgggcaccaccacgctgaataacggtgccacgcttaccctttccgggaaaacggt

SEQ ID NO: 106028 - DNA, 75 bp, synthetic construct
  source 1..75: mol_type = other DNA
cggcgcggccacgctaaatgggatcgaactcataactgtgaatggcgatgaatctccagcagatgccttcagaca

SEQ ID NO: 106029 - DNA, 75 bp, synthetic construct
  source 1..75: mol_type = other DNA
cgctgaatatgctctatatcgacccgcagaacagcagtcagattattgccgaacaggtgatccctgaaaacgagg

SEQ ID NO: 106030 - DNA, 75 bp, synthetic construct
  source 1..75: mol_type = other DNA
ccacgagaaagtgttatctgccatgaacagtgcgatcgcaaactcatccgtatctgaagaaaaagctcttgagtg

SEQ ID NO: 106031 - DNA, 75 bp, synthetic construct
  source 1..75: mol_type = other DNA
tgcacaacggaggtacagcatctgacactgttgttaacagtgacggctggcagattatcaaggaaggtggtctgg

SEQ ID NO: 106032 - DNA, 75 bp, synthetic construct
  source 1..75: mol_type = other DNA
tggtttttcatggtttgttacatatctcatctgcatgatgtcgtttcaaatgtcgttatccagatatatgacccc

SEQ ID NO: 106033 - DNA, 75 bp, synthetic construct
  source 1..75: mol_type = other DNA
tgattctgctgatgattgaatcggtcgccagtttcgcctggtttattcgctggtttggtcgcgttgtgcctggca

SEQ ID NO: 106034 - DNA, 75 bp, synthetic construct
  source 1..75: mol_type = other DNA
cgcttaccaatttgagtggaaaggatgtggctggtcttctcgcataccttggtttaggagaagcggcgaaaaggg

SEQ ID NO: 106035 - DNA, 75 bp, synthetic construct
  source 1..75: mol_type = other DNA
ggagaaaacggagaaaatgtggttattatacagaaaaaaaatgaacatatagatacagacttcttttatataaat

SEQ ID NO: 106036 - DNA, 75 bp, synthetic construct
  source 1..75: mol_type = other DNA
ttatgcccgtgcactgggtaataaaaaaattaactgtctggttggtaaaacacctgtgggcgtatcagcagagca

SEQ ID NO: 106037 - DNA, 75 bp, synthetic construct
  source 1..75: mol_type = other DNA
gtattcgtggtcgctgaggctgctacgactgtgaagatgaagacaggaagtgctactgctgtattaccagtggtt

SEQ ID NO: 106038 - DNA, 75 bp, synthetic construct
  source 1..75: mol_type = other DNA
ccggaaagcaacggcagctatggcttcgtccgtctggagggtgacctgctcagaacagaggttgccggtatgtca

SEQ ID NO: 106039 - DNA, 75 bp, synthetic construct
  source 1..75: mol_type = other DNA
ccgaagcgccagaagaagccatttccgaccttgcatggaaaaaacaccagatgccagcatggcatttaattaccg

SEQ ID NO: 106040 - DNA, 75 bp, synthetic construct
  source 1..75: mol_type = other DNA
gtatacctgggcttatttactggccattatcccgttagtgactctttgtattttcggagccaaatctgccattga

SEQ ID NO: 106041 - DNA, 75 bp, synthetic construct
  source 1..75: mol_type = other DNA
taaaagtaaaatgcaggattattttaattctattgcgtatcctgtctacttacctgagttaaagctggaaaatat

SEQ ID NO: 106042 - DNA, 75 bp, synthetic construct
  source 1..75: mol_type = other DNA
cctttatgatgatgaaggcgtactcattgcggtggcgaactgcccggaaacgtacaaaccgcagttgcaggaagg

SEQ ID NO: 106043 - DNA, 75 bp, synthetic construct
  source 1..75: mol_type = other DNA
taaagactatttttatgatgtttctgaccaaaaaacccgtttgatgtacggtactgttgatatcgatgttactcc

SEQ ID NO: 106044 - DNA, 75 bp, synthetic construct
  source 1..75: mol_type = other DNA
ggtccgggatgatgctggcagcctgggcggatatatgaacctgacacacacctcctccggcctgtgggctgacat

SEQ ID NO: 106045 - DNA, 75 bp, synthetic construct
  source 1..75: mol_type = other DNA
taaatccgagctgaagaaaaaatttattatttatggtccgcaacttatctcgtcaaccaacagtagtcttttgat

SEQ ID NO: 106046 - DNA, 75 bp, synthetic construct
  source 1..75: mol_type = other DNA
gttgctggctgagctgtccactaaaaagcaggggaaaccatggctattgaaggcgatgctgcgactgttccgcta

SEQ ID NO: 106047 - DNA, 75 bp, synthetic construct
  source 1..75: mol_type = other DNA
atgctaacgcgactatcgaaagtctccgtgatgatgtttctgctgggcgtaagcggctgcaagtcgccgcctcct

SEQ ID NO: 106048 - DNA, 75 bp, synthetic construct
  source 1..75: mol_type = other DNA
ccatcaaagatcgcaccactgttggtgtgagttctgacggcaccctgacccgtgcagaaggtgcaaagaacacca

SEQ ID NO: 106049 - DNA, 75 bp, synthetic construct
  source 1..75: mol_type = other DNA
gcacggggcagtttataaacgcagccatgcgcggcgaaatcaaacgccgccagcgtcgcaaggccaaagaatcag

SEQ ID NO: 106050 - DNA, 75 bp, synthetic construct
  source 1..75: mol_type = other DNA
taaagatgatccaaacattaaacagatggtggctcaggctgctggtaattcggggcgttatacagtctctttacc

SEQ ID NO: 106051 - DNA, 75 bp, synthetic construct
  source 1..75: mol_type = other DNA
tccatcgtctgatggtaaaactacggaaaagttagggccaataaagtatagtttacagaaacagatacttatata

SEQ ID NO: 106052 - DNA, 75 bp, synthetic construct
  source 1..75: mol_type = other DNA
ctctgtggtcgttcctgtccgtggcggtaaggctcccgctgtagtcactgctgccgctggtagtgaaatcacagt

SEQ ID NO: 106053 - DNA, 75 bp, synthetic construct
  source 1..75: mol_type = other DNA
cagaagagagtgtctcaattgagatgaatattccgtcagatgatggaaaaagtacggagaaattgggaccaatga

SEQ ID NO: 106054 - DNA, 75 bp, synthetic construct
  source 1..75: mol_type = other DNA
gcctcaatccatgaaacgcagaacgatcgtgaagtggtcagcctgtatgctcatctggtccagccggttttagat

SEQ ID NO: 106055 - DNA, 75 bp, synthetic construct
  source 1..75: mol_type = other DNA
aacatttcgtaatgccgctacgccgctacaaacattaaaaaactcaaagatgcaggctaccgaacagaagtcatg

SEQ ID NO: 106056 - DNA, 75 bp, synthetic construct
  source 1..75: mol_type = other DNA
cggggtttttgagttactcaggtaatgtcgtcttagggaaggtgcgaataagcaggtcatttcttcccaagctga

SEQ ID NO: 106057 - DNA, 75 bp, synthetic construct
  source 1..75: mol_type = other DNA
ttacaaggatggggaaggtgccaagatagtagacgcacaaggaaaagaggttttaggtgctattaatacaacaac

SEQ ID NO: 106058 - DNA, 75 bp, synthetic construct
  source 1..75: mol_type = other DNA
tatcagatagtggcatcgatttgccacctggcgcgaatgaagaaaatgcgggtagtggcagagtacgttgaaaac

SEQ ID NO: 106059 - DNA, 75 bp, synthetic construct
  source 1..75: mol_type = other DNA
ttggctacatggcaacaggctggtaattcaggcgcgcttcttgccgggttaggcggcatgaactccaacgctcca

SEQ ID NO: 106060 - DNA, 75 bp, synthetic construct
  source 1..75: mol_type = other DNA
tcaggacaagatggctggtcgtgagattgaccgaggcaggctggcagagacaatccgcagcaatcaggctggaga

SEQ ID NO: 106061 - DNA, 75 bp, synthetic construct
  source 1..75: mol_type = other DNA
tgctgctggagctgcctgagggctggattatcattcatttggggatgtctggcagcctgcgcatccttccagaag

SEQ ID NO: 106062 - DNA, 75 bp, synthetic construct
  source 1..75: mol_type = other DNA
gaggcggagatattacctatgcccctgtataccaaatcactattcaaaatgacggccagaatggagagattggcc

SEQ ID NO: 106063 - DNA, 75 bp, synthetic construct
  source 1..75: mol_type = other DNA
tgctgacagtgattataattttcaccctgccatactggacaggtaaaatacgcagaaagttcgacctaataccac

SEQ ID NO: 106064 - DNA, 75 bp, synthetic construct
  source 1..75: mol_type = other DNA
attcaacgcactgacgtatggcggggacgaaatgaagcctgggaaagcgtctcttataaacatctccgcagccac

SEQ ID NO: 106065 - DNA, 75 bp, synthetic construct
  source 1..75: mol_type = other DNA
ccgttatggaggccatgaagcacatcaatgactggcttggcgaagaggtgatccgttttaactcttatgctcttc

SEQ ID NO: 106066 - DNA, 75 bp, synthetic construct
  source 1..75: mol_type = other DNA
aacagaagcaccagaagaagccatttccgacctcgcatggaagaaacaccagatgccagcatggcatttaatcac

SEQ ID NO: 106067 - DNA, 75 bp, synthetic construct
  source 1..75: mol_type = other DNA
ctcaggcaataaaagcacttatggggatggttgatcagcgggtgcagggcaatctgttaaatatgcgacgtgatg

SEQ ID NO: 106068 - DNA, 75 bp, synthetic construct
  source 1..75: mol_type = other DNA
ggtacagccacgaatgtcaccctgaagcagggcggcgcactggtcaccagtactgcagcaactgttcttggcagc

SEQ ID NO: 106069 - DNA, 75 bp, synthetic construct
  source 1..75: mol_type = other DNA
cgaactggccgacggcggtacggttgccggcctgacgcttgacgatgttgatcgcatgtcagtacgtgaacttcg

SEQ ID NO: 106070 - DNA, 75 bp, synthetic construct
  source 1..75: mol_type = other DNA
ctggcgggaactggatcaccgccgaaaccgaagcgccagaagaagccatttccgaccttgcatggaaaaacacca

SEQ ID NO: 106071 - DNA, 75 bp, synthetic construct
  source 1..75: mol_type = other DNA
cccatggttaacctatattaatgattatggtggcagaccatctattcagtttagctgccattcagataaatgtgt

SEQ ID NO: 106072 - DNA, 75 bp, synthetic construct
  source 1..75: mol_type = other DNA
agtgtgcagcgccgcgctaaatatctgctgctggaattgccggaaggctggatcatcattcatctgggtatgtct

SEQ ID NO: 106073 - DNA, 75 bp, synthetic construct
  source 1..75: mol_type = other DNA
ctgaaaagtacaaacagcatggtctatttcactgacagcgcaaacaataagaaattccatacgctgacggtcgat

SEQ ID NO: 106074 - DNA, 75 bp, synthetic construct
  source 1..75: mol_type = other DNA
tggcgctggcgaacccggaaccggaaattctgctgccgctggcgaaagaagtgcgtccggatgccatcatctgca

SEQ ID NO: 106075 - DNA, 75 bp, synthetic construct
  source 1..75: mol_type = other DNA
tattggtgacactacagcatatattgatttgcatgctggtaaaaatattaccggtgatggttttggcttccgcca

SEQ ID NO: 106076 - DNA, 75 bp, synthetic construct
  source 1..75: mol_type = other DNA
accgtgtcgggtttgtggtacgccgattgtggcgactaaacatgcgcagcgggcgacattttattgccgacagtg

SEQ ID NO: 106077 - DNA, 75 bp, synthetic construct
  source 1..75: mol_type = other DNA
acatctccgacgtgcggatggtggtttccggcgcgggtgcagcagcaattgcctgtatgaacctgctggtggcgc

SEQ ID NO: 106078 - DNA, 75 bp, synthetic construct
  source 1..75: mol_type = other DNA
tggcgggtaagttcggcgtcagtactcgcaaggttgcctccacgctggcggtggtaaccgcaacggggcggctgg

SEQ ID NO: 106079 - DNA, 75 bp, synthetic construct
  source 1..75: mol_type = other DNA
acttaatacacaaatcacgtttatgaacaccacagtgaatgtcacctggacgtcatcaatccctttgaatgccgc

SEQ ID NO: 106080 - DNA, 75 bp, synthetic construct
  source 1..75: mol_type = other DNA
tgttcaaaaaaaacagggggcaaatataaagataggtgaaggaaatgttattcttaatgaagaaggaacatttaa

SEQ ID NO: 106081 - DNA, 75 bp, synthetic construct
  source 1..75: mol_type = other DNA
gacagtatggtgcgttttactggtgataatgggaagtttacaacccttacagtgaacaaccttactatagatgac

SEQ ID NO: 106082 - DNA, 75 bp, synthetic construct
  source 1..75: mol_type = other DNA
gcaatggtcgcagtgaaagaaaaccaggatcagcctttcctgcatttagaacgtgaagtacgtaaagctgtaaaa

SEQ ID NO: 106083 - DNA, 75 bp, synthetic construct
  source 1..75: mol_type = other DNA
acagacatgagtcctttttttacgcgggtatttcacgcaatgaaacaccattaaaaaatcttccaagttcagacg

SEQ ID NO: 106084 - DNA, 75 bp, synthetic construct
  source 1..75: mol_type = other DNA
gcgattgatgcgggtgaccatgatgcggcttctcatctgttcggtaaattatcggacgccaatccgcttaagatg

SEQ ID NO: 106085 - DNA, 75 bp, synthetic construct
  source 1..75: mol_type = other DNA
gtggatatggcgtttattgcctggcgcaatctgcggttgattaatcgcatcgccacgctgtatggcattgaactg

SEQ ID NO: 106086 - DNA, 75 bp, synthetic construct
  source 1..75: mol_type = other DNA
ggcactgcgagcagatggtttaggaacggcggatcatagcgccctggcgtgctactacgaaaaactggcgaaagt

SEQ ID NO: 106087 - DNA, 75 bp, synthetic construct
  source 1..75: mol_type = other DNA
cctcataaacaatatgcacccaaggcaagcccggccctgacgggaacgcctacagcgccgactgcggcgcagaca

SEQ ID NO: 106088 - DNA, 75 bp, synthetic construct
  source 1..75: mol_type = other DNA
ccggcttcgttaaacctggaaccgaatggcactgcgacaacgaatgagcaagggcaggctattttcaccgctacc

SEQ ID NO: 106089 - DNA, 75 bp, synthetic construct
  source 1..75: mol_type = other DNA
tgaatgaaccgtcacgccgacgtttactgaaagggattggcgcgctggcgctggcagggagttgcccggtcgctc

SEQ ID NO: 106090 - DNA, 75 bp, synthetic construct
  source 1..75: mol_type = other DNA
cgcggacacgggaaacccctcgctgcggagaagggaaaaccaatttcgatcttacagagaatacaacagagatta

SEQ ID NO: 106091 - DNA, 75 bp, synthetic construct
  source 1..75: mol_type = other DNA
ggtgtatatggaaaacaagttcaaaaaattgaatccgttcaatactggaacgatttaggatattcagttacatcc

SEQ ID NO: 106092 - DNA, 75 bp, synthetic construct
  source 1..75: mol_type = other DNA
cacgacaatgcttaatgcgctggcgggcaaacaaccactggacaatacgcttaccagtttaagtggaaagaatgt

SEQ ID NO: 106093 - DNA, 75 bp, synthetic construct
  source 1..75: mol_type = other DNA
accagggaacgcatttccggctggttatccgcaatgctgaagggcagctacgctggcggtgctggaattttgaac

SEQ ID NO: 106094 - DNA, 75 bp, synthetic construct
  source 1..75: mol_type = other DNA
caacaggaaagtagtcttgttgccacagcaataaaccacaataaaaacaaatcaggaaaagttaccagtacggat

SEQ ID NO: 106095 - DNA, 75 bp, synthetic construct
  source 1..75: mol_type = other DNA
aaatcctggttgaggtatctctgaacacaccggcacagctctctttgccactttatcttcctgacgacgaaacct

SEQ ID NO: 106096 - DNA, 75 bp, synthetic construct
  source 1..75: mol_type = other DNA
aacaactgtctctggtctgcatcgataatattgaatgtattgctggcgatgagttgtgggaaatggcgattttcg

SEQ ID NO: 106097 - DNA, 75 bp, synthetic construct
  source 1..75: mol_type = other DNA
cagccgccgcatccgtgcgctggaacaggcgattggtgttgaattgtttaaccgccaggtgacgccgctgcaact

SEQ ID NO: 106098 - DNA, 75 bp, synthetic construct
  source 1..75: mol_type = other DNA
atgagaacaaagaaaacagcagatcagaaagcgttagttatcgctacaacggacgtatcgttattcacgaagggt

SEQ ID NO: 106099 - DNA, 75 bp, synthetic construct
  source 1..75: mol_type = other DNA
gtcgtcggtgaacaggtatggaatttcgccgattttgcgacctcgcaaggcatattgcgcgttggcggtaacaag

SEQ ID NO: 106100 - DNA, 75 bp, synthetic construct
  source 1..75: mol_type = other DNA
ggttaacaacgtcctttgcttcccgttcatcttccgtggcgcactggacgttggcgcaaccgctattaatgaaga

SEQ ID NO: 106101 - DNA, 75 bp, synthetic construct
  source 1..75: mol_type = other DNA
cgcgtcaggggaaatatccagatgcggctggacagcaaaggtgagtgctggttcaggcgtcaggaattacaggcc

SEQ ID NO: 106102 - DNA, 75 bp, synthetic construct
  source 1..75: mol_type = other DNA
gatgctggagccacaactgcagtatacctggcagggactctccctggatgacggccaggataacgccggttatgt

SEQ ID NO: 106103 - DNA, 75 bp, synthetic construct
  source 1..75: mol_type = other DNA
ttgaactggtgccggacgcaccgctgaacactgaactgaacgtcagcctgaacgcgctggcggaacaccgcatcg

SEQ ID NO: 106104 - DNA, 75 bp, synthetic construct
  source 1..75: mol_type = other DNA
acatggctgccgaaattgagaagttgcgtgttgagctggagaccgttaaacagcgggaaaaggatctgtttatgg

SEQ ID NO: 106105 - DNA, 75 bp, synthetic construct
  source 1..75: mol_type = other DNA
tatgatgaccaaaatcattcaactggaatgtttattggtgtgcaggtgaaaacaaccgcgactacgctagaagaa

SEQ ID NO: 106106 - DNA, 75 bp, synthetic construct
  source 1..75: mol_type = other DNA
cactggcaggcaaaccggtaatggaaggcaagggcgttctgtttaagaaattcgccgggatagatgtgtttgaca

SEQ ID NO: 106107 - DNA, 75 bp, synthetic construct
  source 1..75: mol_type = other DNA
ttcatcttccgtggcgcgctggacgttggcgcaaccgccatcaacgaagagatgaaactggcggcggtacgcgcg

SEQ ID NO: 106108 - DNA, 75 bp, synthetic construct
  source 1..75: mol_type = other DNA
ggatcgaaaaactggaacacaatccaggccagtacattccagaagaactgcgtcaggcaggtgaaggcgaagcag

SEQ ID NO: 106109 - DNA, 75 bp, synthetic construct
  source 1..75: mol_type = other DNA
cctgggtcaatacccatttcatgctggtaagtgaaatgccgcacggtgggcagaaactttctggttacggcaagg

SEQ ID NO: 106110 - DNA, 75 bp, synthetic construct
  source 1..75: mol_type = other DNA
gactggtttttaagcccgcagggacagcaattggtagaggatgtgggctatgtgccgctgtataaaacgttatca

SEQ ID NO: 106111 - DNA, 75 bp, synthetic construct
  source 1..75: mol_type = other DNA
ttacgtcactcgtatgaatgacaatatgctcaaaatgcgcaagcagattaaacttttggctataaatggcgttgc

SEQ ID NO: 106112 - DNA, 75 bp, synthetic construct
  source 1..75: mol_type = other DNA
ctgctccgctgaccgtaacattaaagcgaaaatcaaccgcgaaggtatctggatcgaaaaactggaacacaatcc

SEQ ID NO: 106113 - DNA, 75 bp, synthetic construct
  source 1..75: mol_type = other DNA
aaatgatccagttgttattattcggacctgtcttaataacaattcaaaagagcctagcttgtactggaagcatct

SEQ ID NO: 106114 - DNA, 75 bp, synthetic construct
  source 1..75: mol_type = other DNA
tgtacgaatactacagacgcctggtgatgatgcgggagccgtggcgggtgtggttcatgcagcgaccggtacaga

SEQ ID NO: 106115 - DNA, 75 bp, synthetic construct
  source 1..75: mol_type = other DNA
agccgaagccgaagccggacaggatgctccccggaaaaagaccggcaataaagccagacaggaaaaaaaggcgcg

SEQ ID NO: 106116 - DNA, 75 bp, synthetic construct
  source 1..75: mol_type = other DNA
aaaactggaacataatccaggcaaatatatcccggaagagctgcgcaaagcaggagaaggcgaagcggtgcgcgt

SEQ ID NO: 106117 - DNA, 75 bp, synthetic construct
  source 1..75: mol_type = other DNA
ttgttatcatcgtcatcattctgaacaaaaccggagtgtccgacagcctcacggccttgacacttgcaaccgttg

SEQ ID NO: 106118 - DNA, 75 bp, synthetic construct
  source 1..75: mol_type = other DNA
gcgtcgtcgcctgttccgctgtgtttccatccgggaaaacacggacggcacctttgccatcacggcggtgcagca

SEQ ID NO: 106119 - DNA, 75 bp, synthetic construct
  source 1..75: mol_type = other DNA
agaaagcgttagttatcgcaacaacggatgtatcgttattcacgaagggagaagaaatagatcttaaattgcttt

SEQ ID NO: 106120 - DNA, 75 bp, synthetic construct
  source 1..75: mol_type = other DNA
taaaattggccccggcttatatcagtacacatctattgatgattgcactcgctacagagtcctgaggctctactc

SEQ ID NO: 106121 - DNA, 75 bp, synthetic construct
  source 1..75: mol_type = other DNA
gatgcacaatatgaaattcttatgctacaaaatggtcttaagagcaaggcagaaattattgccgaaacgcggtcg

SEQ ID NO: 106122 - DNA, 75 bp, synthetic construct
  source 1..75: mol_type = other DNA
tccggtcacgtcagcggttatagcgtggcgcaccaggtgctggaagaagaactggccgagtggctgggctattcg

SEQ ID NO: 106123 - DNA, 75 bp, synthetic construct
  source 1..75: mol_type = other DNA
atgtttgtggctgcttcttttcttatacgcgccctgtatacgattatctggcctttaaacaacatttaccggatc

SEQ ID NO: 106124 - DNA, 75 bp, synthetic construct
  source 1..75: mol_type = other DNA
gttggatctcggtcgagctaggtgatcattgtcatacccatattatcccgcgcttgcaaaaagtgattgatggcg

SEQ ID NO: 106125 - DNA, 75 bp, synthetic construct
  source 1..75: mol_type = other DNA
gcatggcttaatggaactctcgggcgtcactctgatgcagtacgtttattcaaagacgcgatgagctctgggagt

SEQ ID NO: 106126 - DNA, 75 bp, synthetic construct
  source 1..75: mol_type = other DNA
ctgggtcgattagaaattccgattttgatatttcatcgacaattaaccctgcacttcacaaaattatcaatagtt

SEQ ID NO: 106127 - DNA, 75 bp, synthetic construct
  source 1..75: mol_type = other DNA
atataaaagtctggcagcgccctgaagattctggaagccaaacgattatgaaggggttggttatgcaagacaccc

SEQ ID NO: 106128 - DNA, 75 bp, synthetic construct
  source 1..75: mol_type = other DNA
ggaattaaccaccgcccaactgacgctgatcaccgatgaaggatcggtcaatgagaaacaggaaacatttattgt

SEQ ID NO: 106129 - DNA, 75 bp, synthetic construct
  source 1..75: mol_type = other DNA
tactcgtcacaacagcatccgccccggcgctggcaacttacccggcaagccagcctgctcaggccgcagaagtga

SEQ ID NO: 106130 - DNA, 75 bp, synthetic construct
  source 1..75: mol_type = other DNA
gcaaagtgcttactggcctgacgaaacgcattgtcgacaccctgaccgcctcggcgctgaacgaaccttcagcga

SEQ ID NO: 106131 - DNA, 75 bp, synthetic construct
  source 1..75: mol_type = other DNA
aaagaaactatgggcaaaaaaggacgggactatatcattaaaaattttgatgaaaggaaaataataaaaatatac

SEQ ID NO: 106132 - DNA, 75 bp, synthetic construct
  source 1..75: mol_type = other DNA
caccgcaacatccttacacccgtgcgctgttagctgctgttccgcaacttggtgcgatgaaagggttagattatc

SEQ ID NO: 106133 - DNA, 75 bp, synthetic construct
  source 1..75: mol_type = other DNA
gtgattaaagcggtgttgctgcgttcgattgagcagggcggtacaacgctgaaagattttctgcaaagtgatggt

SEQ ID NO: 106134 - DNA, 75 bp, synthetic construct
  source 1..75: mol_type = other DNA
ggtgataacagccgtgcgttacagctggcagaaaaactgcgccagcaaggttgctgggtgacggcgattcgcccg

SEQ ID NO: 106135 - DNA, 75 bp, synthetic construct
  source 1..75: mol_type = other DNA
tgtctgattctggttcttgaccggtcaatgtcatcggttcaggctattgagtacggtaaatctcagggcgtcaaa

SEQ ID NO: 106136 - DNA, 75 bp, synthetic construct
  source 1..75: mol_type = other DNA
cccgctgccgccgccgttcagcccggtacaacttattgaactgcatgttctcaaaagcaacgtctattaccgcta

SEQ ID NO: 106137 - DNA, 75 bp, synthetic construct
  source 1..75: mol_type = other DNA
gctgatctcaaaaatagtcagcaagttgccgtgatcccttatattgcctgccagaaatgcccggcgtgtaaaagt

SEQ ID NO: 106138 - DNA, 75 bp, synthetic construct
  source 1..75: mol_type = other DNA
caaatttatcgaagtggtcgctgcgctggaaccgacctttggcggcatcaacctcgaagacattaaagcgccaga

SEQ ID NO: 106139 - DNA, 75 bp, synthetic construct
  source 1..75: mol_type = other DNA
ttgtcggtctgtttaaaggcgagttgcagttctctgatccagaattccacaaaaaagagaccacaatgatgggca

SEQ ID NO: 106140 - DNA, 75 bp, synthetic construct
  source 1..75: mol_type = other DNA
ttttaggccatgaaatatgtggggagattattgaatcaggaaaaaacattcacaattttaatatcggacagcaag

SEQ ID NO: 106141 - DNA, 75 bp, synthetic construct
  source 1..75: mol_type = other DNA
ttgaaaaggaaaaacaacaaaacaaggaagtaaatatagatgagcaatcaaatcaaactggaagcgatgaaacag

SEQ ID NO: 106142 - DNA, 75 bp, synthetic construct
  source 1..75: mol_type = other DNA
atgaatgaacatcacactgtggcagcaacagatgattcaggtcttcaggtcagtggtgacaattctgtcacagtg

SEQ ID NO: 106143 - DNA, 75 bp, synthetic construct
  source 1..75: mol_type = other DNA
ttcatcttccgtggcgcgctggacgttggcgcaacggccatcaacgaagagatgaaactggcagcggtacgcgca

SEQ ID NO: 106144 - DNA, 75 bp, synthetic construct
  source 1..75: mol_type = other DNA
ctggtactggcaggtacaggcgtgatgttcccgttcttctcaccgtttctcggctggctgggcgtattccttacc

SEQ ID NO: 106145 - DNA, 75 bp, synthetic construct
  source 1..75: mol_type = other DNA
actcgattccggcattcttggcggctacattgcgcccgataatctcaccatcacgttatcggtgggccactcatt

SEQ ID NO: 106146 - DNA, 75 bp, synthetic construct
  source 1..75: mol_type = other DNA
gctcccggcgagcaggtgctggtggtcggggcggggccaatcggtctgggcgcggcggcaatcgctaaagccgat

SEQ ID NO: 106147 - DNA, 75 bp, synthetic construct
  source 1..75: mol_type = other DNA
gcctgtatgaacctgctggtagcgctgggtctgcaaaaacataacatcgtagtttgcgactcaaaaggcgttatc

SEQ ID NO: 106148 - DNA, 75 bp, synthetic construct
  source 1..75: mol_type = other DNA
tttacggagatttacatttcctgattatcctgtaatcataaaggcaaaccacgatagtggaggttatcatatagt

SEQ ID NO: 106149 - DNA, 75 bp, synthetic construct
  source 1..75: mol_type = other DNA
atgtcaaaaactaatgacacaattcccgcaatccaggaggctaaccacgatgtccgtagattggcatacggtttt

SEQ ID NO: 106150 - DNA, 75 bp, synthetic construct
  source 1..75: mol_type = other DNA
attaataaatccttaattccgatgctttgtcggaaagctggtgttccaaacgaagatatcaggggaactatcact

SEQ ID NO: 106151 - DNA, 75 bp, synthetic construct
  source 1..75: mol_type = other DNA
tttctatgctctattggtaatatagtatcgcccaattggtttttgcaggggattggtgattttaaaaaactttca

SEQ ID NO: 106152 - DNA, 75 bp, synthetic construct
  source 1..75: mol_type = other DNA
caatgataatcttctgttcaaatggctcaggctctggctgatcaaagggcgtatatcacggcgtcttccggtaac

SEQ ID NO: 106153 - DNA, 75 bp, synthetic construct
  source 1..75: mol_type = other DNA
tgtccgtagattggcatacggttttctggcttcaattattgccagcattatactcaccctgcctttttctgagcg

SEQ ID NO: 106154 - DNA, 75 bp, synthetic construct
  source 1..75: mol_type = other DNA
attacccatccacagcaggcgctttcggtgagcctctgttccgatcaaccctgggtgcaggtttatagcggtgaa

SEQ ID NO: 106155 - DNA, 75 bp, synthetic construct
  source 1..75: mol_type = other DNA
tggcatcgctggaagcagaaccggtggcatggctgcattcagacaatggcttaggtattccggcaataacacgga

SEQ ID NO: 106156 - DNA, 75 bp, synthetic construct
  source 1..75: mol_type = other DNA
catgaaagcctcatcggacaataacgacttccgcgtccggggctggggctggctgggttcgctggaaaccggtct

SEQ ID NO: 106157 - DNA, 75 bp, synthetic construct
  source 1..75: mol_type = other DNA
agttgttgatgtgcaggtgcctgcaccgacagcgggtgaagtgcagatccgcgtacatgcgataggtatcaaccg

SEQ ID NO: 106158 - DNA, 75 bp, synthetic construct
  source 1..75: mol_type = other DNA
aaatattcccttgaaaatcttattgagggcatttctgaggttaatcttcacaacagagttgacttcaggctgcca

SEQ ID NO: 106159 - DNA, 75 bp, synthetic construct
  source 1..75: mol_type = other DNA
acatcgcatccgtgcctgaccttcgacaaatggaaaacgttgttattggctgatgacgactacaacgtactggcg

SEQ ID NO: 106160 - DNA, 75 bp, synthetic construct
  source 1..75: mol_type = other DNA
caaggtagtcttaccgataaaaaatacatttatatgaatatagacggagctataagtaaagaacaaataccaaat

SEQ ID NO: 106161 - DNA, 75 bp, synthetic construct
  source 1..75: mol_type = other DNA
acgcccggaagactctggtagccagacggtgatgcaatcccaggtcatgaaaaatgtccgcatgatctcgccgca

SEQ ID NO: 106162 - DNA, 75 bp, synthetic construct
  source 1..75: mol_type = other DNA
caatatctggctggcggcagaaaagcctgataactgccgcattgttattcgccctggctgctacatcactcacga

SEQ ID NO: 106163 - DNA, 75 bp, synthetic construct
  source 1..75: mol_type = other DNA
gcacatggtgcatccggaacaagtaccgaaccggcgacggctgcgactatgccggtacgcgctatttcgacaaaa

SEQ ID NO: 106164 - DNA, 75 bp, synthetic construct
  source 1..75: mol_type = other DNA
tcgcatcaggattcaggcgatgctctcaagcgattagtcagttatcgcgattatctttattctacccccgcttaa

SEQ ID NO: 106165 - DNA, 75 bp, synthetic construct
  source 1..75: mol_type = other DNA
cgatacaggcgaaaccactctgcataccagtgatatcaacctcaggggggataaccgcaagtattccggtacttt

SEQ ID NO: 106166 - DNA, 75 bp, synthetic construct
  source 1..75: mol_type = other DNA
aggcgatgctaatgaccttattcttcttggtaaaaatggagaagtgatcagtgatgcggttatcgcggaaattac

SEQ ID NO: 106167 - DNA, 75 bp, synthetic construct
  source 1..75: mol_type = other DNA
gaaaaaataaaatcttttaaagaactttacgactcagcactcaataattttgctttcgattttcaaaatttagca

SEQ ID NO: 106168 - DNA, 75 bp, synthetic construct
  source 1..75: mol_type = other DNA
tctcgctttctaaaaggcactataaaagaccttgcagctatgaaagagcgctccagaatcacacctcttaaattc

SEQ ID NO: 106169 - DNA, 75 bp, synthetic construct
  source 1..75: mol_type = other DNA
cgccgcgttggttggctgaagagttcgctgaatccttagagttacaggtattaccgctgccgttaaaacaaaaca

SEQ ID NO: 106170 - DNA, 75 bp, synthetic construct
  source 1..75: mol_type = other DNA
cgctggcgcggggaacacgactggtacggcccgtgggagcgtgtgatcggcggtttatccccgctggcgcgggga

SEQ ID NO: 106171 - DNA, 75 bp, synthetic construct
  source 1..75: mol_type = other DNA
ctacgatctgctttcagcaggtcccgatggtgaaatgggaaccgaggacgacatcaccaactggggtttgagcaa

SEQ ID NO: 106172 - DNA, 75 bp, synthetic construct
  source 1..75: mol_type = other DNA
agggtgaaatcaacgaactggtgaacctgcctgatgtcgtggggatggagattgccataaatggtgagattatct

SEQ ID NO: 106173 - DNA, 75 bp, synthetic construct
  source 1..75: mol_type = other DNA
agcttcgctgattggccctctcaaggtcgagaaggatgcagttatcaacggcgtgagcgccagcggccacagcca

SEQ ID NO: 106174 - DNA, 75 bp, synthetic construct
  source 1..75: mol_type = other DNA
atgaacgtttatgaccgggtgatccccaaccgttcctgggaaacgctgtggatgctgagtatcggggtgatcctg

SEQ ID NO: 106175 - DNA, 75 bp, synthetic construct
  source 1..75: mol_type = other DNA
agcaagggccgattgacgggaacaatagcgctggcgtgtccggttgagcaaactaccgcagctgatttgccgttg

SEQ ID NO: 106176 - DNA, 75 bp, synthetic construct
  source 1..75: mol_type = other DNA
ggcttccctgtctgctctgttacagaagcatgtgacggtggatgaggtgcgccctgttctgcaggcgatgatgaa

SEQ ID NO: 106177 - DNA, 75 bp, synthetic construct
  source 1..75: mol_type = other DNA
ccggtgtggcggttgctctgtctcttgctgctgtcacgtcagtcccggcactggctgctgacacggttgtacagg

SEQ ID NO: 106178 - DNA, 75 bp, synthetic construct
  source 1..75: mol_type = other DNA
cgcaggtaacggcactgctcggtacgccggtttctgctgaggcactgagtgccggcactgtccggacagatgcct

SEQ ID NO: 106179 - DNA, 75 bp, synthetic construct
  source 1..75: mol_type = other DNA
agccgctttagacgaatggggcagtgcgtcgcttcgtcagcttgaaatgtgcgcgctgattagacttgagataaa

SEQ ID NO: 106180 - DNA, 75 bp, synthetic construct
  source 1..75: mol_type = other DNA
ctaccgtaccggtggggacattaaacgactgccaaaagatccgtggggcaatgattatcagtatctcagcccggg

SEQ ID NO: 106181 - DNA, 75 bp, synthetic construct
  source 1..75: mol_type = other DNA
gaggaagttgcgctactggcgctcgaggatgcgttcgtttctgatgatttcgctgcctcttttgaggccgccgca

SEQ ID NO: 106182 - DNA, 75 bp, synthetic construct
  source 1..75: mol_type = other DNA
actggcggcttgcctgcatatcgactttgtttcctataacgcggtacttcaggaacaaagtatgggcattcatta

SEQ ID NO: 106183 - DNA, 75 bp, synthetic construct
  source 1..75: mol_type = other DNA
ccgtgcacagaatgaagatgtagatgagttgtgtaagaaagtgacaagttggatgtattcgcatcctggagagag

SEQ ID NO: 106184 - DNA, 75 bp, synthetic construct
  source 1..75: mol_type = other DNA
ggtcgcccgttacctggacgcaagaatattgtcattagcagccagccgggtacggatgatcgcgtaatgtgggtg

SEQ ID NO: 106185 - DNA, 75 bp, synthetic construct
  source 1..75: mol_type = other DNA
gctttcgctcagagtgaaggactgcgtaacaagactgataccgtggatgcgcgcatgctggcagagttctgtcgt

SEQ ID NO: 106186 - DNA, 75 bp, synthetic construct
  source 1..75: mol_type = other DNA
gaaaaacggtacgctactgcgccaggtgatcaacaagctgaacgaaattgactttaccagcgccagcgaacgcca

SEQ ID NO: 106187 - DNA, 75 bp, synthetic construct
  source 1..75: mol_type = other DNA
atgaaaaccagtattatcaacggctcggaagtgtctagattatccgtggcgattcacgatgttcatcaagctatc

SEQ ID NO: 106188 - DNA, 75 bp, synthetic construct
  source 1..75: mol_type = other DNA
ccatcagaccggtataaatagtgaaaataacagcgtccgtctcagcattcagggcggtcatctcgggcacgataa

SEQ ID NO: 106189 - DNA, 75 bp, synthetic construct
  source 1..75: mol_type = other DNA
ggtactcgcgcagcagcaaaaggtggtatcaccaccatgatcgaaatgccgctcaatcagctgcctgcaacggtg

SEQ ID NO: 106190 - DNA, 75 bp, synthetic construct
  source 1..75: mol_type = other DNA
cggcatccccatactggcgcaatttttggcagcggttgttgccatgctgggtgtcgggcttaccggtattattga

SEQ ID NO: 106191 - DNA, 75 bp, synthetic construct
  source 1..75: mol_type = other DNA
gccgaagaactgttggttcaacgcaaaactgacctggtaattacgctgcaaccagtaataagccgctctgtcatc

SEQ ID NO: 106192 - DNA, 75 bp, synthetic construct
  source 1..75: mol_type = other DNA
atttaatgattttggggggcaaccaggcagatgaagtaaatatcaaagcttttcctcgttcccgcgtaacaggct

SEQ ID NO: 106193 - DNA, 75 bp, synthetic construct
  source 1..75: mol_type = other DNA
ttgaccacttcatccaccagccgcgaggcgatggagttactggaagctctggctgaagctggcgtgaccattggt

SEQ ID NO: 106194 - DNA, 75 bp, synthetic construct
  source 1..75: mol_type = other DNA
gggcgaagatattcccattacagcacgacgcgtggtgactttcagaccagggcagaaattaaaaagccgggtcga

SEQ ID NO: 106195 - DNA, 75 bp, synthetic construct
  source 1..75: mol_type = other DNA
ccctgcgtaaaatcggctttgatacttttaaactgaacggctgtgaagagctgtcgctgattgacagttcgaaga

SEQ ID NO: 106196 - DNA, 75 bp, synthetic construct
  source 1..75: mol_type = other DNA
ctcatcaaagagattcgaaatagcaaaagcaaagatgcagcaatctacatctactacacctggtcgagaaatgac

SEQ ID NO: 106197 - DNA, 75 bp, synthetic construct
  source 1..75: mol_type = other DNA
agtgcaaaacacagtgtgcgtgaactgccggtgaactggtgggtacagccttccgttatccgcaccttcagctcc

SEQ ID NO: 106198 - DNA, 75 bp, synthetic construct
  source 1..75: mol_type = other DNA
gttggcaccaatgcaagacacataactttcccccggtcgtttacaacaacgaactattccatctcaattaactgg

SEQ ID NO: 106199 - DNA, 75 bp, synthetic construct
  source 1..75: mol_type = other DNA
gtttcggggcgaatgcgcgaacggcgctgatcacccgtggtctggctgaaatgtcgcgtctgggcacggcgctgg

SEQ ID NO: 106200 - DNA, 75 bp, synthetic construct
  source 1..75: mol_type = other DNA
atacggacagcctgacgcgaatattcatgccgtgcaacttgaactggcgcaggtcaattatatgaacgaaatggc

SEQ ID NO: 106201 - DNA, 75 bp, synthetic construct
  source 1..75: mol_type = other DNA
atgctacaaaattgccggaatggcagaagcctatgacgtgacccttgcgccgcactgtccgctcggaccgattgc

SEQ ID NO: 106202 - DNA, 75 bp, synthetic construct
  source 1..75: mol_type = other DNA
tcgtttgttgcgcatgggctggattagaaaaaataaacttaaagcgtaatgctttatgggttccttgctgcatat

SEQ ID NO: 106203 - DNA, 75 bp, synthetic construct
  source 1..75: mol_type = other DNA
ttttgttcaattctccaggtgtgcttcctgaattttattcgagtgttgaaaaacaaaattatcagaacaagcatc

SEQ ID NO: 106204 - DNA, 75 bp, synthetic construct
  source 1..75: mol_type = other DNA
gattgaaacgggtgaaattccgccaggcaatcagaatacggtcggctttcgtacctataaatccgtttttgactt

SEQ ID NO: 106205 - DNA, 75 bp, synthetic construct
  source 1..75: mol_type = other DNA
gctgaacgccggacctacggtgagaacctccgcagtgctacccattccgctggtcgctcccgtgcttctatggtc

SEQ ID NO: 106206 - DNA, 75 bp, synthetic construct
  source 1..75: mol_type = other DNA
aaatttagggctatttaaaaactgccaagactggtctaatgattctttagaaacatgtaagatgaagtgctccgg

SEQ ID NO: 106207 - DNA, 75 bp, synthetic construct
  source 1..75: mol_type = other DNA
ttaccaaattttgaggcgattagtcttggagtaaaagtaatatcgaatcctattccttcggctctaattataaaa

SEQ ID NO: 106208 - DNA, 75 bp, synthetic construct
  source 1..75: mol_type = other DNA
cgcggtgaaaaacgtcattgcgatcggtgcgggaatgtccgacggtatcggttttggtgcgaatgcgcgtacggc

SEQ ID NO: 106209 - DNA, 75 bp, synthetic construct
  source 1..75: mol_type = other DNA
acgccaggtggtggtgcgtgggtacttaacaaagtaaaagtcgcaactcttcaggcttacattaacggagcatgg

SEQ ID NO: 106210 - DNA, 75 bp, synthetic construct
  source 1..75: mol_type = other DNA
aaattattttttgttccaggtggtaggattcgcaaaaatgaatctattaaaaatgcttttaaaagaatatcatct

SEQ ID NO: 106211 - DNA, 75 bp, synthetic construct
  source 1..75: mol_type = other DNA
cgctcatgagtttacttttcagcaattacgccgtattacaggaacgccgtttgaagcactggtgcggcagaaagt

SEQ ID NO: 106212 - DNA, 75 bp, synthetic construct
  source 1..75: mol_type = other DNA
gtgagttctcagtagctgttggtacaggggccagagcggataaaaaatttgcaacagcagtgggctcatgggctg

SEQ ID NO: 106213 - DNA, 75 bp, synthetic construct
  source 1..75: mol_type = other DNA
tcgaacctggtgaaaaaatacgtcttcttgaggtagacggttctgcatttggcttggacgacgttctgcgctttc

SEQ ID NO: 106214 - DNA, 75 bp, synthetic construct
  source 1..75: mol_type = other DNA
gctgaaaaaatgaatatgccgccatcctcgatggtctattttctgcgtgatgcggttgatgcaggcgtgctgacg

SEQ ID NO: 106215 - DNA, 75 bp, synthetic construct
  source 1..75: mol_type = other DNA
tttttgtaaaaggtcatttgagaatacgtattctgaatatatagaatttctaaatgagaatattgaagcaaaccc

SEQ ID NO: 106216 - DNA, 75 bp, synthetic construct
  source 1..75: mol_type = other DNA
tacaacagggttaaacctgcatcaccatcttgagaaaaatctcagaggccttgaacaaacgatcaatatcgttaa

SEQ ID NO: 106217 - DNA, 75 bp, synthetic construct
  source 1..75: mol_type = other DNA
gtgtcagtacattattacgggcttacggacgtctgacctgtggcgttctggcggaaaaaatgaatatgccacctt

SEQ ID NO: 106218 - DNA, 75 bp, synthetic construct
  source 1..75: mol_type = other DNA
agagtattgagttggcaacccctctaagtgaactgattatgggaattgttgattatattaagggtaagttatcca

SEQ ID NO: 106219 - DNA, 75 bp, synthetic construct
  source 1..75: mol_type = other DNA
aagatgcagagtatcaacatctcccgtgacaaaacatttccactgcgaataccgccaaaacgacgactggtttac

SEQ ID NO: 106220 - DNA, 75 bp, synthetic construct
  source 1..75: mol_type = other DNA
gcgcgacagtacaaaacaccgtgtgagtgaactgccggtgaactggtgggtacagccttctgttatccgcacctt

SEQ ID NO: 106221 - DNA, 75 bp, synthetic construct
  source 1..75: mol_type = other DNA
ctattggttaagcaatcctccggctgctttcctcaataacattaagaagactggcactaagcagactttgaaaat

SEQ ID NO: 106222 - DNA, 75 bp, synthetic construct
  source 1..75: mol_type = other DNA
cgcgctaccgatttcaacgccctggagccgggcgttgtcgaaatcgacggcaaaaatatttatacgcaaatggta

SEQ ID NO: 106223 - DNA, 75 bp, synthetic construct
  source 1..75: mol_type = other DNA
ccggtctggcaactgatgggcggcctggtgcgtgacaaaattaaagcctacagttgggtcggcggcgatcgtccg

SEQ ID NO: 106224 - DNA, 75 bp, synthetic construct
  source 1..75: mol_type = other DNA
ggttgcgaacatcgaaagctctatttctgccatgtgtcttgcgtatgacgatctgctgcaggcgaaagtcactat

SEQ ID NO: 106225 - DNA, 75 bp, synthetic construct
  source 1..75: mol_type = other DNA
actttctttcaatgttttttatggccacattatttttccctgcattcaatgcagctttattttttacaggtatca

SEQ ID NO: 106226 - DNA, 75 bp, synthetic construct
  source 1..75: mol_type = other DNA
atgcttcggtttcatatcgttttccttgttaaatattcatgtaattttactaacaataataaaatcattcttaat

SEQ ID NO: 106227 - DNA, 75 bp, synthetic construct
  source 1..75: mol_type = other DNA
gatgccctcgctcgcctggtttcttgtgcatggccaggcaacgattttgaactttacagcgtcatcgagaatctt

SEQ ID NO: 106228 - DNA, 75 bp, synthetic construct
  source 1..75: mol_type = other DNA
attcaaaaggccagggaggaacaggccagggatgatagcgcggcctctgcatctgagtttatccgtggtctgaaa

SEQ ID NO: 106229 - DNA, 75 bp, synthetic construct
  source 1..75: mol_type = other DNA
cagtttttttggtgagttaaccctttcagataaccattttttgctatccggtgataatactgaagctgtatctgg

SEQ ID NO: 106230 - DNA, 75 bp, synthetic construct
  source 1..75: mol_type = other DNA
gtgattgatgcaaaagttctgaatggggtcagcacattattacgggcttacgggcgtctgacctgcggggttctg

SEQ ID NO: 106231 - DNA, 75 bp, synthetic construct
  source 1..75: mol_type = other DNA
tcgttttcctttttaaatgttcatgtaattttacttacgataataaaatcattcttaatcaaaaaacgaaggtag

SEQ ID NO: 106232 - DNA, 75 bp, synthetic construct
  source 1..75: mol_type = other DNA
aaataagcattataatgccggcatataatgcacaatatacaatcgcagagtctattgagtctgtactgaggcaga

SEQ ID NO: 106233 - DNA, 75 bp, synthetic construct
  source 1..75: mol_type = other DNA
ctttgcttattgcaattttgtttttagtagttggtttgtgctttgctcttaaagttggtaatggattacttcagg

SEQ ID NO: 106234 - DNA, 75 bp, synthetic construct
  source 1..75: mol_type = other DNA
aactgggcgggagatgatcctgataagctgttatttgccagaaatgtagcggcccgtcagcctgaaatgctggaa

SEQ ID NO: 106235 - DNA, 75 bp, synthetic construct
  source 1..75: mol_type = other DNA
ctgtggatgttgactccgaccctggcatggcgcatttcaaaataccaaaactgcaatcgctaaaattacctgagt

SEQ ID NO: 106236 - DNA, 75 bp, synthetic construct
  source 1..75: mol_type = other DNA
atgctcggtgaaatcaacgacaccaacaaggagaaactgtcggcgtggttggcatttaaaaatgacgttaaatct

SEQ ID NO: 106237 - DNA, 75 bp, synthetic construct
  source 1..75: mol_type = other DNA
ggcaacattacctgttgccattgattacccggctgcgctggcactacgtcagatggcacttgtgcaggacgaatt

SEQ ID NO: 106238 - DNA, 75 bp, synthetic construct
  source 1..75: mol_type = other DNA
aattccgcatataggacaagaggttgtgaaggcaaatccagatttaactttagcaaccccagcttattgcttcac

SEQ ID NO: 106239 - DNA, 75 bp, synthetic construct
  source 1..75: mol_type = other DNA
cctttgcgcctaacatcactttttcggtgctgtatacccgtaacggtcagtacagttttcagaacgccgggatta

SEQ ID NO: 106240 - DNA, 75 bp, synthetic construct
  source 1..75: mol_type = other DNA
atacgcaagctcaaagcaagtaaagagctgtatggtaaaatttttggcgttattgacacgccgcagaaatttgaa

SEQ ID NO: 106241 - DNA, 75 bp, synthetic construct
  source 1..75: mol_type = other DNA
ccggttggcggcgaactggaaatggtcgatggcaccacgctgtcgcactcactcgccgggcgtcataagattcgt

SEQ ID NO: 106242 - DNA, 75 bp, synthetic construct
  source 1..75: mol_type = other DNA
atgcgtggttttaatgagctgaaagaaacgctgcacaataatcgcgttaactggatactggatgtcgcccgtcag

SEQ ID NO: 106243 - DNA, 75 bp, synthetic construct
  source 1..75: mol_type = other DNA
ctgttactaattattataaagataaaaacagaataaatcatgagttgtatagttcattatcaagttcgggagcta

SEQ ID NO: 106244 - DNA, 75 bp, synthetic construct
  source 1..75: mol_type = other DNA
ttggcgatacggcagaagctgcccgtaagaatggtatcaaagtatccagtgagtttattacgacgggtaaaggat

SEQ ID NO: 106245 - DNA, 75 bp, synthetic construct
  source 1..75: mol_type = other DNA
gtggcaaacgatggacggacgcacctgcaaagggccgaacgtgatgccgaaattcaaaaataacccaggccaaat

SEQ ID NO: 106246 - DNA, 75 bp, synthetic construct
  source 1..75: mol_type = other DNA
gcagccgtacagtcagtatcaggctgatgtgcaaattttatcgcagactgagctgcaagtgatgcatccggagct

SEQ ID NO: 106247 - DNA, 75 bp, synthetic construct
  source 1..75: mol_type = other DNA
ggagaaacaagggttctggcatgacgatgtacgcccgtggaacgtgatggtcgatgcccgacagcatgcccgctt

SEQ ID NO: 106248 - DNA, 75 bp, synthetic construct
  source 1..75: mol_type = other DNA
atctaggaaaggttttttaattaggcatgcccttgaaaaaaaaatagtaatagacaataaactttgcttgcctaa

SEQ ID NO: 106249 - DNA, 75 bp, synthetic construct
  source 1..75: mol_type = other DNA
agccagccgaatcgctcatggcgtaccggttggcggcgaactggaaatggtcgatggcaccacgctgtcacactc

SEQ ID NO: 106250 - DNA, 75 bp, synthetic construct
  source 1..75: mol_type = other DNA
agcaactgaatactgttctgctggtcattctggggacgtaccttattcacagtgatgacccacacaaccgaatca

SEQ ID NO: 106251 - DNA, 75 bp, synthetic construct
  source 1..75: mol_type = other DNA
aaccttaacattcgtgctgctgcattgcatgtactgggagatttgctcggttctgcaggcgccattatcgcggca

SEQ ID NO: 106252 - DNA, 75 bp, synthetic construct
  source 1..75: mol_type = other DNA
caaagtctgatggtgcatcttattttagtttaacaactgagggtgaacgcgcttacgagcagtttggcggcgaat

SEQ ID NO: 106253 - DNA, 75 bp, synthetic construct
  source 1..75: mol_type = other DNA
cggctttaacaccggtatggaaaaagccaataccgaagagttctgtattagctgtcacgaaatgcgcaatacggt

SEQ ID NO: 106254 - DNA, 75 bp, synthetic construct
  source 1..75: mol_type = other DNA
ttagcgaattacctgagatttatcaaacaatttttggccatcccgagtgggatggcgacgctgctcgcgattgta

SEQ ID NO: 106255 - DNA, 75 bp, synthetic construct
  source 1..75: mol_type = other DNA
tatttgccagtatcgcgcctggagcattgagtttttcaattctctgcgtgctgactttccggagctgaaaaacac

SEQ ID NO: 106256 - DNA, 75 bp, synthetic construct
  source 1..75: mol_type = other DNA
cacttcttggactctgtaaaagtgaaagagtttttctgtggaaacatcttgtaaaacgcgaatcatctatggatg

SEQ ID NO: 106257 - DNA, 75 bp, synthetic construct
  source 1..75: mol_type = other DNA
acagcggcaagatccagagatggcaaacgtgattttagtcaccgataacgaaagttgtgggtattcggctacgga

SEQ ID NO: 106258 - DNA, 75 bp, synthetic construct
  source 1..75: mol_type = other DNA
actgatggcattcctgaaagagtgggtcaaacgttgtgctgttaataacgatggcagcgactgtagcgacagtga

SEQ ID NO: 106259 - DNA, 75 bp, synthetic construct
  source 1..75: mol_type = other DNA
gttgatagtgtgatggatattcagttcccccgcaaaattatattcggatgggaacagatcctaacgtttcgcaaa

SEQ ID NO: 106260 - DNA, 75 bp, synthetic construct
  source 1..75: mol_type = other DNA
agatcatccccacattcaagcgcatctaccacatccgcgacggcgtgacccatgaggaagctggcgaagggcggg

SEQ ID NO: 106261 - DNA, 75 bp, synthetic construct
  source 1..75: mol_type = other DNA
tctggtgaacgccggcaacagtggtacggggctggcgaccaccggtaagggtattcaggtggttgaggccattaa

SEQ ID NO: 106262 - DNA, 75 bp, synthetic construct
  source 1..75: mol_type = other DNA
atgtcgcgtcttggcgcggcgctgggggccgatcctgccacctttatgggcatggcggggctgggcgatctggtg

SEQ ID NO: 106263 - DNA, 75 bp, synthetic construct
  source 1..75: mol_type = other DNA
agcgacggaaaggcattcagtatcggaggcggtcaggcggatgccctgatgctggaaaaaggcagttcattcacg

SEQ ID NO: 106264 - DNA, 75 bp, synthetic construct
  source 1..75: mol_type = other DNA
tctcttcttaaatatttatctttcttgataattgacgataaatacagattcaaatttagcgaaaaaatctccccc

SEQ ID NO: 106265 - DNA, 75 bp, synthetic construct
  source 1..75: mol_type = other DNA
actgcaggcagagaaaactggccgattttctctgcactggagggataatacaaggcctgataagacgcgtcagcg

SEQ ID NO: 106266 - DNA, 75 bp, synthetic construct
  source 1..75: mol_type = other DNA
tcagaagtaatgagcgcaacgtctgcaattaatggtctgtatattgggcagaccagttatagtggattggactca

SEQ ID NO: 106267 - DNA, 75 bp, synthetic construct
  source 1..75: mol_type = other DNA
attctggaatgattacaaggtaatatctaatgattatgtgttttcgttacctttatggcgaaattataccccagg

SEQ ID NO: 106268 - DNA, 75 bp, synthetic construct
  source 1..75: mol_type = other DNA
tcagcagctgctgcactgcggcaaaagtttccgcgtttacagcaatccggatttcattggcgtgcagcttggcgg

SEQ ID NO: 106269 - DNA, 75 bp, synthetic construct
  source 1..75: mol_type = other DNA
cgacgttatagcaaaagcagagaacattcgtctgctgatcctcgacgttgatggcgtactgtcagatggcctgat

SEQ ID NO: 106270 - DNA, 75 bp, synthetic construct
  source 1..75: mol_type = other DNA
cttgggccaagacaactggatgatttagataatctacgaattatcgacgatggtcgccggtctgcgcgggtatat

SEQ ID NO: 106271 - DNA, 75 bp, synthetic construct
  source 1..75: mol_type = other DNA
tttcgcagtcactcgcctcagaacattctctcgaaagtctggttcggcagcttctggagatgctggaaatggtca

SEQ ID NO: 106272 - DNA, 75 bp, synthetic construct
  source 1..75: mol_type = other DNA
ttgatgaagattttaatttgaatgttgctcttctgattattttaattcatacgctaagcaagaatagaaatgatg

SEQ ID NO: 106273 - DNA, 75 bp, synthetic construct
  source 1..75: mol_type = other DNA
atgtgcacaaggacggacttgcgctgaacacggtaattaacgaggggggctggcaggttgttaaggcaggtggta

SEQ ID NO: 106274 - DNA, 75 bp, synthetic construct
  source 1..75: mol_type = other DNA
tactgtgatacttttaacggagaaagatcattcagaacagattattttctcacaataggcattccttatgatgat

SEQ ID NO: 106275 - DNA, 75 bp, synthetic construct
  source 1..75: mol_type = other DNA
tattacctaaagacccttttacggaagcaattatttttgccggttctgacgcttggagccatgccaagggctggg

SEQ ID NO: 106276 - DNA, 75 bp, synthetic construct
  source 1..75: mol_type = other DNA
cctgcatgctgccgatatcgcgatgtatcaggagaaaaaacacaaacagaaaacaccttttgtcgcgcattcagc

SEQ ID NO: 106277 - DNA, 75 bp, synthetic construct
  source 1..75: mol_type = other DNA
aagatattctggagaagttaaaaatatcgctcaaaacattttactgccacaaacacaatatcatgatgatccttc

SEQ ID NO: 106278 - DNA, 75 bp, synthetic construct
  source 1..75: mol_type = other DNA
atggatcatctacccatgccgaaattcgggccgctagccggattacgggttgtcttctccggtatcgaaatcgcc

SEQ ID NO: 106279 - DNA, 75 bp, synthetic construct
  source 1..75: mol_type = other DNA
aaaactctatcgggtgactgacattctgacctgttttcttgatcttcccgttccggcatcactggaagaaatgga

SEQ ID NO: 106280 - DNA, 75 bp, synthetic construct
  source 1..75: mol_type = other DNA
ttccgacttacggaaggcctgataatttaaaacgtgcgattgacagtgtcatcgagcagacatataaaaatatag

SEQ ID NO: 106281 - DNA, 75 bp, synthetic construct
  source 1..75: mol_type = other DNA
ggtacagccacgaatgtcaccctgaaacagggtggagcactggtcaccagtactgcggcaacggttcttggcagc

SEQ ID NO: 106282 - DNA, 75 bp, synthetic construct
  source 1..75: mol_type = other DNA
gttaacaattcgtataaaagaatgttagaacatgagtctagtttagaaaagattcatagaaatagaaagcaaaat

SEQ ID NO: 106283 - DNA, 75 bp, synthetic construct
  source 1..75: mol_type = other DNA
aaatcgacgctactgaaaatgatggtagggctataccgtcaaaataaaggacaaattacccttgacggggttgct

SEQ ID NO: 106284 - DNA, 75 bp, synthetic construct
  source 1..75: mol_type = other DNA
tataaacaagatgctgatgatcttagatttgaatggcctcgaaccgcagcgtgcttagaccgcattgctataagc

SEQ ID NO: 106285 - DNA, 75 bp, synthetic construct
  source 1..75: mol_type = other DNA
ttgattatttcgttgctggaaaaaccaccgacttccgaagatgaagagatgaacccacatgatcggaaggcatgg

SEQ ID NO: 106286 - DNA, 75 bp, synthetic construct
  source 1..75: mol_type = other DNA
atcctcgatgaaaccgcctgcattctcagccgtaatggcgatccgcaaaccttgcagcagctaagtgcactggga

SEQ ID NO: 106287 - DNA, 75 bp, synthetic construct
  source 1..75: mol_type = other DNA
agaggcggctaacgagtttcgccgctatagcaaacgctttgctgccggtgcacaaaaagaaacggcggctatttt

SEQ ID NO: 106288 - DNA, 75 bp, synthetic construct
  source 1..75: mol_type = other DNA
tgtcagcgaactgaatgcactgggtgatatcacccacattaatctccatatcaattcaccggtggcgatgtcttt

SEQ ID NO: 106289 - DNA, 75 bp, synthetic construct
  source 1..75: mol_type = other DNA
gtaatgatggatggtccccgcgatgaaatactgaaaaaactgtcagggaaacagcagagtggggagagcagagcg

SEQ ID NO: 106290 - DNA, 75 bp, synthetic construct
  source 1..75: mol_type = other DNA
tttttctgggaactctgcgtgaaaatctgcagctttcgcgtcttccgggaagcctgtcggatgtggatatgatta

SEQ ID NO: 106291 - DNA, 75 bp, synthetic construct
  source 1..75: mol_type = other DNA
tcgtccgtctggagggtgacctgctcagaacagaggttgccggtatgtctctgacgacaggggtatatggtgctg

SEQ ID NO: 106292 - DNA, 75 bp, synthetic construct
  source 1..75: mol_type = other DNA
ggtattgccggatggcacgctatttggcgaaggcgttaaaaccaaaatcaaaaagctgcttaccgaagagtgcaa

SEQ ID NO: 106293 - DNA, 75 bp, synthetic construct
  source 1..75: mol_type = other DNA
cattgagcgtgagcagcgtgtccttgctgagcgtatggctgagctgcacatgaccgaagaggagcgcattaaggc

SEQ ID NO: 106294 - DNA, 75 bp, synthetic construct
  source 1..75: mol_type = other DNA
atgagaaaactattactaccgttattatttatggctgggactgttaatgcagcatcaagtgtaaaggagatttgt

SEQ ID NO: 106295 - DNA, 75 bp, synthetic construct
  source 1..75: mol_type = other DNA
tatcaccctgggcgttcaggccggttatgcccacagtgtcagcggcagcagcgttgaaggttataacggtgcgta

SEQ ID NO: 106296 - DNA, 75 bp, synthetic construct
  source 1..75: mol_type = other DNA
ggaacccgctttatcactaccagaatcaacgaccagacctggaaatctctcatggtatgtaacagcgccacggga

SEQ ID NO: 106297 - DNA, 75 bp, synthetic construct
  source 1..75: mol_type = other DNA
ttgagggggccggtctggcaagacagtatcatgtgcttcagcctggaggtctccgtaagacactttctcacgatg

SEQ ID NO: 106298 - DNA, 75 bp, synthetic construct
  source 1..75: mol_type = other DNA
gaggtctggggctgtcaggaggacagcggcagatggccgccctgacaagaatggtacttggttctcctcgggtag

SEQ ID NO: 106299 - DNA, 75 bp, synthetic construct
  source 1..75: mol_type = other DNA
aagagccggtgctggcggaacaggccgaatactacccgaaactggcggcacaaacgcatattccactggcggcgg

SEQ ID NO: 106300 - DNA, 75 bp, synthetic construct
  source 1..75: mol_type = other DNA
agccgcaatattctcgtcgtcgtacccagccatgtctttggtgaagtgctgcgccagattaaaccgctgctgcgc

SEQ ID NO: 106301 - DNA, 75 bp, synthetic construct
  source 1..75: mol_type = other DNA
cagaatggggcgcggaagttatctggatcgagaacgtcgcctgggccgacaccattcgcgttcaaccgaactacc

SEQ ID NO: 106302 - DNA, 75 bp, synthetic construct
  source 1..75: mol_type = other DNA
aaagaccctggtgtagcgtgggtacagcggcggcggtagggatttttatcggtgcactgttaggtatgcgcaaat

SEQ ID NO: 106303 - DNA, 75 bp, synthetic construct
  source 1..75: mol_type = other DNA
gaagccgatttgcagacctgctgaatactatcagcacgccagatgactacagtcgcgatctgctggccatgctgg

SEQ ID NO: 106304 - DNA, 75 bp, synthetic construct
  source 1..75: mol_type = other DNA
cgtgtcctgcggtttgttttctcgtttatgagaaaacatccgaaggtaaaacatactgcggtaaatgggttacat

SEQ ID NO: 106305 - DNA, 75 bp, synthetic construct
  source 1..75: mol_type = other DNA
cctctggttcatacgccagcaatttgcgggaatatgagtctgtcagggagtttatgaccagcgctacgttactgg

SEQ ID NO: 106306 - DNA, 75 bp, synthetic construct
  source 1..75: mol_type = other DNA
taatctcatctgggtgcgcggttcgctggaagatactcattcacttagcgaactggttgccggagccagcgcggt

SEQ ID NO: 106307 - DNA, 75 bp, synthetic construct
  source 1..75: mol_type = other DNA
ccggttgcggtctgtacaaatgtgccgatggctacatcgtgatggaactggtgggcattacccagattgcagagt

SEQ ID NO: 106308 - DNA, 75 bp, synthetic construct
  source 1..75: mol_type = other DNA
aggtacggaaagccatgaagataatgagatcgtcgagcgtatcagacaaaccatagtgcgtgacggggcgcgttt

SEQ ID NO: 106309 - DNA, 75 bp, synthetic construct
  source 1..75: mol_type = other DNA
gggcgtttttcgcccgacagccgtgtatggtcccggcgataaagagttaaaaccgctgtttgactggatgctgcg

SEQ ID NO: 106310 - DNA, 75 bp, synthetic construct
  source 1..75: mol_type = other DNA
atatccggaactcgactacaacgtgaaacgtagtcactacaacggctcggtggaagcgcgtcttaccgaagagag

SEQ ID NO: 106311 - DNA, 75 bp, synthetic construct
  source 1..75: mol_type = other DNA
gaactgacgcccattaccggttgtggagtattaatgatcgccatccgggaatgattcgcgtgaatgaaggaggaa

SEQ ID NO: 106312 - DNA, 75 bp, synthetic construct
  source 1..75: mol_type = other DNA
ttccgccagagcctcggtggcctgatcgaagcctatgaagccgttgcccgccgcctgggtgtacagctggactga

SEQ ID NO: 106313 - DNA, 75 bp, synthetic construct
  source 1..75: mol_type = other DNA
ggggaacactttactacaataggtggacacgctacggcgcacggtttatccccgctggcgcggggaacacaccgg

SEQ ID NO: 106314 - DNA, 75 bp, synthetic construct
  source 1..75: mol_type = other DNA
ttgattacctcgctgctggaaaaaacaccatccaccgaagatgaggagatgaatccacacgatcgcaaggcatgg

SEQ ID NO: 106315 - DNA, 75 bp, synthetic construct
  source 1..75: mol_type = other DNA
tatttgattggtcaggatccatcgcgcatcaatgacttatggcaagtgatgtatcgcgccggattttatcgtggt

SEQ ID NO: 106316 - DNA, 75 bp, synthetic construct
  source 1..75: mol_type = other DNA
atgctgatgtcagcgatctctattatcgctacgattttttacgtcgttattatgtgcaggcggggcggatggaca

SEQ ID NO: 106317 - DNA, 75 bp, synthetic construct
  source 1..75: mol_type = other DNA
ttggtgcatccgttggtggtcctgttggtgctgttgctggtgcagtaattggcggcattgcaggcgctttgtttt

SEQ ID NO: 106318 - DNA, 75 bp, synthetic construct
  source 1..75: mol_type = other DNA
tacctgtgcgcgatcccggcggctcataactacgccatgagttcgccgggatcgctgggcgtctttcttgccgga

SEQ ID NO: 106319 - DNA, 75 bp, synthetic construct
  source 1..75: mol_type = other DNA
aacatgaaacagaccgtggatgcattttttgacagcgccagtcagaaacaactgtcagaagcacagtcaaaagct

SEQ ID NO: 106320 - DNA, 75 bp, synthetic construct
  source 1..75: mol_type = other DNA
ctatttgttcattgttctgactataccgctagaatcagtaactccccaagatctaggaaaggttttttaattagg

SEQ ID NO: 106321 - DNA, 75 bp, synthetic construct
  source 1..75: mol_type = other DNA
gtgtcgcctgctgtggtacagggggcaccggatatcacccgggaaatccagcaggatatcgcccggcgaatgagg

SEQ ID NO: 106322 - DNA, 75 bp, synthetic construct
  source 1..75: mol_type = other DNA
ggatatgaaattgataataacaatctgtcaatcatcgattttcttaagaaatgtcgaagaattctaactattaat

SEQ ID NO: 106323 - DNA, 75 bp, synthetic construct
  source 1..75: mol_type = other DNA
tttactggctggcctctctactcaaaagcggggggggtcatggctatcgaagctgtttccgcgactgttccgcta

SEQ ID NO: 106324 - DNA, 75 bp, synthetic construct
  source 1..75: mol_type = other DNA
gcttgctcaacacggcagcgaaaaaccagtaacgcacgtttcacgcgacgaactccagacattacacattgcacg

SEQ ID NO: 106325 - DNA, 75 bp, synthetic construct
  source 1..75: mol_type = other DNA
cagcacctgaacagcctggtatatgaccgtgactacgggtggagtgacaacggcgacctggtgcgcatcagcggc

SEQ ID NO: 106326 - DNA, 75 bp, synthetic construct
  source 1..75: mol_type = other DNA
gaagagagcgtgcgccgcgacgtggcgcgtgagctgcacgatgatatcggtcagaccatcactgctattcgtact

SEQ ID NO: 106327 - DNA, 75 bp, synthetic construct
  source 1..75: mol_type = other DNA
cgcggggaactcagttgcccgatggacactcccagaccatcagccggtttatccccgctggcgcggggaactcag

SEQ ID NO: 106328 - DNA, 75 bp, synthetic construct
  source 1..75: mol_type = other DNA
atcgttctgcaggctgctatcgctgccggtgctccgaaagatctgatcggctggatcgatcaaccttctgttgaa

SEQ ID NO: 106329 - DNA, 75 bp, synthetic construct
  source 1..75: mol_type = other DNA
ccactcggtgcaatagacggaatgcgtatcgggtcgacactcagttatttaaaccagacgcaaagccagcaggga

SEQ ID NO: 106330 - DNA, 75 bp, synthetic construct
  source 1..75: mol_type = other DNA
attacacctcatgctgcttcattcaccaatgaggccgagcataacaccatgcaaatttctattaaaaatgtccta

SEQ ID NO: 106331 - DNA, 75 bp, synthetic construct
  source 1..75: mol_type = other DNA
ttgggattgccggacgaactgtcgcgctttacgccattctgcctggcgctgccgattatcgcgctggcctggcac

SEQ ID NO: 106332 - DNA, 75 bp, synthetic construct
  source 1..75: mol_type = other DNA
tgcacgacaatgatcgcgtttttggcgactacaccgaaggcgtgatggccgactttgccctgagtgaagaggatt

SEQ ID NO: 106333 - DNA, 75 bp, synthetic construct
  source 1..75: mol_type = other DNA
tgatgatgaccagaatcaggataaagcggaacaaaacagcccaaatgcgttacaaaacgagccaaaaacaaaaca

SEQ ID NO: 106334 - DNA, 75 bp, synthetic construct
  source 1..75: mol_type = other DNA
gacaacctgccccagctgtatcagaccgaaacattcctgaaggcactgagtgacatactggcccggcacgaactt

SEQ ID NO: 106335 - DNA, 75 bp, synthetic construct
  source 1..75: mol_type = other DNA
ttgagatcctgcaattttcggcctcaaaaccgagcaccgcgcgtgaagtgcgcggtatagttacccacgcataca

SEQ ID NO: 106336 - DNA, 75 bp, synthetic construct
  source 1..75: mol_type = other DNA
ctatcaagaccctcattccgggctacctgtcaggcctgccgtctaccagccgcgagtctatggagttactggaag

SEQ ID NO: 106337 - DNA, 75 bp, synthetic construct
  source 1..75: mol_type = other DNA
atgaaagagctaacctacaaagcgaacgacgtgctgaaaaaactgttcgatgatgctggtctgattctggtcgac

SEQ ID NO: 106338 - DNA, 75 bp, synthetic construct
  source 1..75: mol_type = other DNA
cgacctccacaaactggtgcgtgatactgacaaagttttccctaatccgaaaaattcagattttgggatgatgac

SEQ ID NO: 106339 - DNA, 75 bp, synthetic construct
  source 1..75: mol_type = other DNA
aagctctggctgaagctggcgtgaccattggcaacttcttcagtaatgacttgatgaccgcctatggtcgccgcc

SEQ ID NO: 106340 - DNA, 75 bp, synthetic construct
  source 1..75: mol_type = other DNA
ggcatctggtctggtacttgctgctgtttgttatcagtctctggctccagttgggattgccggacgaactgtcgc

SEQ ID NO: 106341 - DNA, 75 bp, synthetic construct
  source 1..75: mol_type = other DNA
ggaatacgttaaacctatcggcggcggttatttttttgcgctgccgggggggaaggacacgaacgattatctcgg

SEQ ID NO: 106342 - DNA, 75 bp, synthetic construct
  source 1..75: mol_type = other DNA
ctggacagccatatccggctggcgaatccccgcacggcggagagtgagtccagcctgatgctgcgtcgtggctac

SEQ ID NO: 106343 - DNA, 75 bp, synthetic construct
  source 1..75: mol_type = other DNA
gcgctggaaatcctgacgctgagtagtccacttctcaaccagctggtaattgatgaagtgctggttgccgccgat

SEQ ID NO: 106344 - DNA, 75 bp, synthetic construct
  source 1..75: mol_type = other DNA
tcagaccatcaccgccattcgtacgcaagcgggcattgtccagcggctcgcagcggataacgcccgcgtgaaaca

SEQ ID NO: 106345 - DNA, 75 bp, synthetic construct
  source 1..75: mol_type = other DNA
cttcttggcattgaagaggaaggtattccctttcgcattcaacacattccatcaggtgacatcatcgatagcgcc

SEQ ID NO: 106346 - DNA, 75 bp, synthetic construct
  source 1..75: mol_type = other DNA
gatcgctgtcaccaccacttctggtacaggttctgaagtcactccgtttgcggttgtaactgacgacgctactgg

SEQ ID NO: 106347 - DNA, 75 bp, synthetic construct
  source 1..75: mol_type = other DNA
gatcagtcctatccgctgtccctcgctatcaagaccctcattccggggtatctgtcaggcttgccatccaccagc

SEQ ID NO: 106348 - DNA, 75 bp, synthetic construct
  source 1..75: mol_type = other DNA
cacgctgggcgacagtcgggtatttatcgacaaaaaagatggccagggaacagcctttacccttgaagaaggcac

SEQ ID NO: 106349 - DNA, 75 bp, synthetic construct
  source 1..75: mol_type = other DNA
ggtacaggacgattaccaatcgttgtcaattcaaggtaatggtgcgcagggaataacagaaaatagttatattgg

SEQ ID NO: 106350 - DNA, 75 bp, synthetic construct
  source 1..75: mol_type = other DNA
tgcatgacgaggcggtcgattatgaatatcgcgcttgttggcgctggtaccaagaaggccatggttttcatgaga

SEQ ID NO: 106351 - DNA, 75 bp, synthetic construct
  source 1..75: mol_type = other DNA
ccatgcccggcgcagcattggctctaacgctgcccgcctggtaaaagggattcccttccgggaactccactcata

SEQ ID NO: 106352 - DNA, 75 bp, synthetic construct
  source 1..75: mol_type = other DNA
agctgaagaactgccggctgttactgccctggctatttcccacaacacaaagctgctcgacccgctggagattcg

SEQ ID NO: 106353 - DNA, 75 bp, synthetic construct
  source 1..75: mol_type = other DNA
atgttgtggcataaacttccgaaatctatctacttccgccgtggctctctgccaatcgcgctggatgaagtgatt

SEQ ID NO: 106354 - DNA, 75 bp, synthetic construct
  source 1..75: mol_type = other DNA
ccatcagtatcgcaaccgtcacaggtaacactttttgagcgcttcatggcacagcatgccgccagtgccgtttcc

SEQ ID NO: 106355 - DNA, 75 bp, synthetic construct
  source 1..75: mol_type = other DNA
ttatcttctctccgcacccgcgtgcaaaagatgcaaccaacaaagctgctgatatcgttctgcaggctgctatcg

SEQ ID NO: 106356 - DNA, 75 bp, synthetic construct
  source 1..75: mol_type = other DNA
cactgtaacccttcacctgcaggtatccacatttgtggataccggctttttattcaccctcactctgataaggaa

SEQ ID NO: 106357 - DNA, 75 bp, synthetic construct
  source 1..75: mol_type = other DNA
gacggtcagccctatccgctgtcgctcgctatcaagaccctcattccgggctacctgtcaggcctgccgtctacc

SEQ ID NO: 106358 - DNA, 75 bp, synthetic construct
  source 1..75: mol_type = other DNA
gcaaaaggacgtgaacaactggcacggacgctggctgaacagccgggaatgacggtggagcaggcgaaaacgtta

SEQ ID NO: 106359 - DNA, 75 bp, synthetic construct
  source 1..75: mol_type = other DNA
atctttcggcctttacgggcacttatagctctacgctggctgtcagtcgctattgtagtggcacactaaatttgg

SEQ ID NO: 106360 - DNA, 75 bp, synthetic construct
  source 1..75: mol_type = other DNA
ggacgctggctgaacagccgggaatgacggtggagcaggcgaaaacgttactggcagcggcaccggttgccggtg

SEQ ID NO: 106361 - DNA, 75 bp, synthetic construct
  source 1..75: mol_type = other DNA
ccttcagaccagacgttatcatcgctttgggtggtggttccccgatggatgccgcgaagatcatgtgggtcatgt

SEQ ID NO: 106362 - DNA, 75 bp, synthetic construct
  source 1..75: mol_type = other DNA
acaatatcaccctgaaaatcgaccctgctgtagtactagcaacccgcaagtatgtggatgataaagcactggagc

SEQ ID NO: 106363 - DNA, 75 bp, synthetic construct
  source 1..75: mol_type = other DNA
tgcgttgccggaagcaaaaggacgcgaaaaactggcacaggcgctggctgaacaaccgggaatgacagtggagca

SEQ ID NO: 106364 - DNA, 75 bp, synthetic construct
  source 1..75: mol_type = other DNA
cgaaacggctgatatcaaacgtgctgtcgcatccgtactgatgtctaaaaccttcgataacggagtcatctgtgc

SEQ ID NO: 106365 - DNA, 75 bp, synthetic construct
  source 1..75: mol_type = other DNA
atggaaagtaaagagcgagcaccaaccattgtcgtcactgaaatcggtgactgtatcaataaatggaatgaggtt

SEQ ID NO: 106366 - DNA, 75 bp, synthetic construct
  source 1..75: mol_type = other DNA
cgggagaaaccgtgaacgacggaacactgacaaatcatgacaaccagattgtcttcggtacgaccaacggaatga

SEQ ID NO: 106367 - DNA, 75 bp, synthetic construct
  source 1..75: mol_type = other DNA
atcatcaccacgctgatgagccgtcagtattctgactggtttggtctggccgggctgagtgaacacattgatgca

SEQ ID NO: 106368 - DNA, 75 bp, synthetic construct
  source 1..75: mol_type = other DNA
actggtaaaccatgacaaccagtttgtatccggaacagctaatggcgtgactgtcagtaccgggcttgagctggg

SEQ ID NO: 106369 - DNA, 75 bp, synthetic construct
  source 1..75: mol_type = other DNA
ggggcggatggtcaggaaaatggggaaggcgctggcgcagatatcggtaactggaatttgcaggagtttcagtaa

SEQ ID NO: 106370 - DNA, 75 bp, synthetic construct
  source 1..75: mol_type = other DNA
gtcataatgtccgctgggtgcgtgatgagatgagcagtctggtgctgctgactgacacgccctggtatccgcctt

SEQ ID NO: 106371 - DNA, 75 bp, synthetic construct
  source 1..75: mol_type = other DNA
gcatcttctccctctgttcaggacaaaccagccagcactgacaataccaacgtcaacggcgaagacatgacagaa

SEQ ID NO: 106372 - DNA, 75 bp, synthetic construct
  source 1..75: mol_type = other DNA
attgccgtgggcaactgcccggaaagctataaaccgcaactggctgaaggcagcgggcgcacccagaccgtgcgc

SEQ ID NO: 106373 - DNA, 75 bp, synthetic construct
  source 1..75: mol_type = other DNA
gaccacaatcgacaactcccgtcgcgtggtcaacgtcaatgtgcaggatccatcccctgcccgcctcaacgagtg

SEQ ID NO: 106374 - DNA, 75 bp, synthetic construct
  source 1..75: mol_type = other DNA
cgcggatgcatggtcgtactcgcgtccaacaagccgcacgtgatgccgtgggttgcgctgattcttttgttcgtg

SEQ ID NO: 106375 - DNA, 75 bp, synthetic construct
  source 1..75: mol_type = other DNA
accgatacgcggatcgcgcaccgcaccgccgacgaacgccttccagcctggcaaccagaacgcattaaagcatgg

SEQ ID NO: 106376 - DNA, 75 bp, synthetic construct
  source 1..75: mol_type = other DNA
ttagttgccaacacgggtgcagggactgatatcgaaggatacaacaagctctctcacttcactattaccggaggt

SEQ ID NO: 106377 - DNA, 75 bp, synthetic construct
  source 1..75: mol_type = other DNA
cattccgctggtcgctcccgtgccgctatcgtcgctgaccttgagtcaggcggtaactggatggacagcttgtaa

SEQ ID NO: 106378 - DNA, 75 bp, synthetic construct
  source 1..75: mol_type = other DNA
gaagtagaacgtgagcacaaacagctcaaatacgccggacgctttgggccaggcctgccgagtatttctgatggt

SEQ ID NO: 106379 - DNA, 75 bp, synthetic construct
  source 1..75: mol_type = other DNA
tgggcgatggcggcggagcattgccgacgccggacgcaaagcagactgcactggtgaatgagaaacgccgggctg

SEQ ID NO: 106380 - DNA, 75 bp, synthetic construct
  source 1..75: mol_type = other DNA
caagaaaaattaggttcttatctctttatgcagtctttcgttcaggattgtataatccagggaggatgttgtcct

SEQ ID NO: 106381 - DNA, 75 bp, synthetic construct
  source 1..75: mol_type = other DNA
tgtttttgcgattgccgatagagttgggtttgcgcgcgaacgcattattctcggcggcgaccatctggggccaaa

SEQ ID NO: 106382 - DNA, 75 bp, synthetic construct
  source 1..75: mol_type = other DNA
atcagtagatgataaaaggactttatttgataataaaagggacaactggaatagtcaagaagtacaggatgaagt

SEQ ID NO: 106383 - DNA, 75 bp, synthetic construct
  source 1..75: mol_type = other DNA
aatggaatactcattgatggtggtagccagatagtaaaagttcaagggcatgctgatggtacaacgataaataag

SEQ ID NO: 106384 - DNA, 75 bp, synthetic construct
  source 1..75: mol_type = other DNA
tgccggggcaagtgcagccgatggtggtcagcccggataaacgttacctctacgttggcgtgcgtcccgaatttc

SEQ ID NO: 106385 - DNA, 75 bp, synthetic construct
  source 1..75: mol_type = other DNA
tctgtcagctatatgtttgacaatactggtgtgattgtatttaaaggaacaaatcctgaccatatttttgaaatt

SEQ ID NO: 106386 - DNA, 75 bp, synthetic construct
  source 1..75: mol_type = other DNA
tgatgccagccattgaaatggacagggcgctcggtgaggtgaaatcactgggcgtcgcagagtccggattgcgta

SEQ ID NO: 106387 - DNA, 75 bp, synthetic construct
  source 1..75: mol_type = other DNA
caatgccacagcgtgatacagaagaaggaaaacaaggtgaagaaaaaccacaaccatctggcgcaatggcaaatg

SEQ ID NO: 106388 - DNA, 75 bp, synthetic construct
  source 1..75: mol_type = other DNA
aaatgtcggctttacttgagatcggccgtacgaccctgtggcgaaaaatgaagcagcacggcattgatgtcagtc

SEQ ID NO: 106389 - DNA, 75 bp, synthetic construct
  source 1..75: mol_type = other DNA
ggtcagcccggataaacgtttcctctacgttggcgtgcgcccggagtttcgcgttctggcgtatcgtattgcgcc

SEQ ID NO: 106390 - DNA, 75 bp, synthetic construct
  source 1..75: mol_type = other DNA
atcaagaacgcgattcactgtggcgtatacgacacccaatctcggcgaaacaccgacactgcattttgaagcaat

SEQ ID NO: 106391 - DNA, 75 bp, synthetic construct
  source 1..75: mol_type = other DNA
aattagggccaaaacgcgtggcctggcggcgcaaagatgttatggcgtggcttgaaagccgccagccagtacagc

SEQ ID NO: 106392 - DNA, 75 bp, synthetic construct
  source 1..75: mol_type = other DNA
gggatatggtattaaatgtaaagttcaatctcataaaattcaacctaatgcacaaggaacatttccaacagtaca

SEQ ID NO: 106393 - DNA, 75 bp, synthetic construct
  source 1..75: mol_type = other DNA
ggattattgcagacttgggatgatgccagatctggagcatgtacggggggagtttgtggtgttctttcacgtata

SEQ ID NO: 106394 - DNA, 75 bp, synthetic construct
  source 1..75: mol_type = other DNA
ttcgcctttttctgacccggtgccagtacctttaccggtgtgtcatcagtgtgaaccttgcgggtgttcattaca

SEQ ID NO: 106395 - DNA, 75 bp, synthetic construct
  source 1..75: mol_type = other DNA
tatggcggaacgcaatctgccgctgcatgttttccactttgactgtttctggatgaaagccttccagtgtactga

SEQ ID NO: 106396 - DNA, 75 bp, synthetic construct
  source 1..75: mol_type = other DNA
catcgttatttatactgaacctacagatcttcacaaaggaattgcagctctgaaagctgccggtattactgagtt

SEQ ID NO: 106397 - DNA, 75 bp, synthetic construct
  source 1..75: mol_type = other DNA
cgctgcgcatgaccctggagctggataaggtgggcatggagcggttggaagccgaagctgcctgggaaaagctct

SEQ ID NO: 106398 - DNA, 75 bp, synthetic construct
  source 1..75: mol_type = other DNA
tgaaggtgtacgtggatgaccagatggcaaaacatcttgccgcacttgacccgcattcgcagtatgcacccaaag

SEQ ID NO: 106399 - DNA, 75 bp, synthetic construct
  source 1..75: mol_type = other DNA
ctctcaggagcagacggatgttgcctcattcagtgtactggagccgacagcagatggattcagaaattattactc

SEQ ID NO: 106400 - DNA, 75 bp, synthetic construct
  source 1..75: mol_type = other DNA
gtgatgtgactgaagaagaaggaagcatcgttatttatactgaacctacagatcttcacaaaggaattgcagctc

SEQ ID NO: 106401 - DNA, 75 bp, synthetic construct
  source 1..75: mol_type = other DNA
agtctgattactgttttcagcgtttcggaagatggcagcgtgttgagtaaagaaggcttccagccaacggaaacc

SEQ ID NO: 106402 - DNA, 75 bp, synthetic construct
  source 1..75: mol_type = other DNA
tgcttttttcgaagcatacctgggcaccgactacaccgatcgaggtctgctgacaaaagagtggatgaaagggaa

SEQ ID NO: 106403 - DNA, 75 bp, synthetic construct
  source 1..75: mol_type = other DNA
gtgtgcaggctcaacgccggatgatcggctcatctggagcgtgattgaacagctcaacggcgaactggcggaagg

SEQ ID NO: 106404 - DNA, 75 bp, synthetic construct
  source 1..75: mol_type = other DNA
ccgcaggcgcgttaaccgtcttattgaactatggcctgaattattcagcctggaatcaccgaagccgcttaaggt

SEQ ID NO: 106405 - DNA, 75 bp, synthetic construct
  source 1..75: mol_type = other DNA
ggttccggcattaaagcaggatcgcatttgcctgtttacggtcagcgatgatggtcatctggtggcgcaggaccc

SEQ ID NO: 106406 - DNA, 75 bp, synthetic construct
  source 1..75: mol_type = other DNA
tatctggtggaggagcgcgctgaagaacagacagaagccgcgcctttaccggttccgctggcttcaggccagtaa

SEQ ID NO: 106407 - DNA, 75 bp, synthetic construct
  source 1..75: mol_type = other DNA
agcttatccgcctgccggggcagcagtatgatgaggagtccggcctgtattacaaccgccaccgctattatgacc

SEQ ID NO: 106408 - DNA, 75 bp, synthetic construct
  source 1..75: mol_type = other DNA
gaaaaatgtattggcgcagggcctgatggtgcacctgtggaggagcagggactgggatggaaaaataaatgtggt

SEQ ID NO: 106409 - DNA, 75 bp, synthetic construct
  source 1..75: mol_type = other DNA
atataatttcctatatcatcattgcaattgtaacattatgtttcatctcaatgattaccgctgcgataattgttt

SEQ ID NO: 106410 - DNA, 75 bp, synthetic construct
  source 1..75: mol_type = other DNA
aaattaagaggaacaactggcttactcggcgcacttaatggtgataaaaaaaataattacgaagcagttctagct

SEQ ID NO: 106411 - DNA, 75 bp, synthetic construct
  source 1..75: mol_type = other DNA
atgatggtgcaccaggattactcttgcgtatcaaaaatggagatagttaatacgattcagtctttttttgactca

SEQ ID NO: 106412 - DNA, 75 bp, synthetic construct
  source 1..75: mol_type = other DNA
tggcaccattaatgaagtttctacggcgttgattcagtgtgagggggatgacatacccgcgctgggaattttacc

SEQ ID NO: 106413 - DNA, 75 bp, synthetic construct
  source 1..75: mol_type = other DNA
aaccgtgacagcgatgaagactggtacctgcgcagtgaacatgcttatcgttctgaagtccccccgtatgcctcc

SEQ ID NO: 106414 - DNA, 75 bp, synthetic construct
  source 1..75: mol_type = other DNA
gcaatcgttaatactcatacctatttttgtatttttcataggcctatataattataaactggctataataaatgc

SEQ ID NO: 106415 - DNA, 75 bp, synthetic construct
  source 1..75: mol_type = other DNA
gacgaagttaccgttaagcgtttgaaaaaacagggtaataaagtcgagttgttgcctgaaaacagtgagtttaaa

SEQ ID NO: 106416 - DNA, 75 bp, synthetic construct
  source 1..75: mol_type = other DNA
gtaacgccattcttatcaccaaacaggccagcggacggggaaaaattgacccgctgatggcgctcttcaatgcgg

SEQ ID NO: 106417 - DNA, 75 bp, synthetic construct
  source 1..75: mol_type = other DNA
tctcgatggcgagccattgaatgggcgaaaatttcgtattgaaatgcttccggcggcgttgcattgccgattacc

SEQ ID NO: 106418 - DNA, 75 bp, synthetic construct
  source 1..75: mol_type = other DNA
tcgctaaaacgcgcaggttttggtggggtgctcgtttcacacggcctgcgatctatcgccagtacagcccttaat

SEQ ID NO: 106419 - DNA, 75 bp, synthetic construct
  source 1..75: mol_type = other DNA
ggggcgatagtgaccatcgcagaaggttgcctgattatggccgcctgtgccaccggcccttatgcgctggttctg

SEQ ID NO: 106420 - DNA, 75 bp, synthetic construct
  source 1..75: mol_type = other DNA
gctgacgcgcagtatggagtacgatgctgccggacgtgtcatcagtctgactaacgagaacggcagccacagcga

SEQ ID NO: 106421 - DNA, 75 bp, synthetic construct
  source 1..75: mol_type = other DNA
cgcttttacccggccatgcggggcatggccttgtgggttttcaggtatgaatccgccgtgtcgtgtgcgggcggt

SEQ ID NO: 106422 - DNA, 75 bp, synthetic construct
  source 1..75: mol_type = other DNA
aaccgtgacagcgatgaagactggtacctgcgcagtgaatatgcgtatcgttctgaagtcccccggtatgcctcc

SEQ ID NO: 106423 - DNA, 75 bp, synthetic construct
  source 1..75: mol_type = other DNA
cgaagataacccgaatattatcgaaggcgcttcgtcgtggtttgatattcaggcaccacacgacatcacctttaa

SEQ ID NO: 106424 - DNA, 75 bp, synthetic construct
  source 1..75: mol_type = other DNA
gcgttagcaactattggtgatttttataaatcgccaaaacaaattttttatgtgcaagtttgttttgtttttgtg

SEQ ID NO: 106425 - DNA, 75 bp, synthetic construct
  source 1..75: mol_type = other DNA
gatgtcgatgaaagatatcggcattatggatggtgacttgctggcagtgcataaaactcaggatgtacgtaacgg

SEQ ID NO: 106426 - DNA, 75 bp, synthetic construct
  source 1..75: mol_type = other DNA
cgtgggtgaatcatgtcgaagggttgtggcaggcgcttcatgagacaataacccgaaattaccagcgccgttcaa

SEQ ID NO: 106427 - DNA, 75 bp, synthetic construct
  source 1..75: mol_type = other DNA
gaagtcagaggagtgctggaagagctggacggctggatcaaacggaaactgcggtgcctgttgtggcggcagtag

SEQ ID NO: 106428 - DNA, 75 bp, synthetic construct
  source 1..75: mol_type = other DNA
ctgccggtccccggacagagcacaaaggaagtcgccggcggctccgctttacccggccatgcggggcatggcctt

SEQ ID NO: 106429 - DNA, 75 bp, synthetic construct
  source 1..75: mol_type = other DNA
acagggcgatgatctcagcgtacaacaaccacgggccatggtggaactcagggtcaagccatatgaatcaggcga

SEQ ID NO: 106430 - DNA, 75 bp, synthetic construct
  source 1..75: mol_type = other DNA
gaaaaactcccggccatcgcggataaagacatcggtttcattctcaaaaataccgggatgacactactctccagc

SEQ ID NO: 106431 - DNA, 75 bp, synthetic construct
  source 1..75: mol_type = other DNA
aagtgatgaagacctttttccctaacattccggtcgccacgccaaccacgtttcttgtcaacgtgaacacgctcg

SEQ ID NO: 106432 - DNA, 75 bp, synthetic construct
  source 1..75: mol_type = other DNA
gacgaatcaaagttaaaggcgaagagtatctggtggcagggcgaagagtatggtgcctggccatataagctcgag

SEQ ID NO: 106433 - DNA, 75 bp, synthetic construct
  source 1..75: mol_type = other DNA
ttaactggctcactcgttgtggcgatattttcagcaccgagagcgagtatcttaccggactggatcgcgagattg

SEQ ID NO: 106434 - DNA, 75 bp, synthetic construct
  source 1..75: mol_type = other DNA
atgtgagtaataaccagctgaccagcctgccggaccgcctgcccagcggactggagatgcttaatgtgtgttgga

SEQ ID NO: 106435 - DNA, 75 bp, synthetic construct
  source 1..75: mol_type = other DNA
gtggacctgcgcgactggaaagtggtgctgttcatgcaggggcactgtccctactgtcataaatttgacccggtg

SEQ ID NO: 106436 - DNA, 75 bp, synthetic construct
  source 1..75: mol_type = other DNA
tgtctttaataaaaaaaatcgcatttcagctttacgtgatttttttattaacagtcgaaacgatgatgactacat

SEQ ID NO: 106437 - DNA, 75 bp, synthetic construct
  source 1..75: mol_type = other DNA
gggaaccagtggttgagtcgttacgccagtccagcgagcaaaatctctctgttccggctgcgctcgacgcagcca

SEQ ID NO: 106438 - DNA, 75 bp, synthetic construct
  source 1..75: mol_type = other DNA
acgccggaaaaattaaaagccgcgctgggtggcgtctcttacatcattcatggcttaatgcgcatggatactctg

SEQ ID NO: 106439 - DNA, 75 bp, synthetic construct
  source 1..75: mol_type = other DNA
taatgatattgaacaggtttgtagtgccagtggctgtggctacagaggcatgagtgggaaacagcccttccggcg

SEQ ID NO: 106440 - DNA, 75 bp, synthetic construct
  source 1..75: mol_type = other DNA
cgcttttatgcgcttacgcactcccccgaagcgcgttacatacgtgaaatgttggttagccaacccaacccaatc

SEQ ID NO: 106441 - DNA, 75 bp, synthetic construct
  source 1..75: mol_type = other DNA
agcttgatgtgagaagaaacgggctggacagcctgccggtcctgcccgccgggctgaagcatctttatttgtgta

SEQ ID NO: 106442 - DNA, 75 bp, synthetic construct
  source 1..75: mol_type = other DNA
aaccgtgacagcgatgaagactggtacctgcgcagtgaacatgcctatcgttctgaagtccccctgtatgcctcc

SEQ ID NO: 106443 - DNA, 75 bp, synthetic construct
  source 1..75: mol_type = other DNA
ggagaagcttgatgtgagtggaaaccagctgtgcagcctgccggtcctgcccaccgggctggaggagctttatgt

SEQ ID NO: 106444 - DNA, 75 bp, synthetic construct
  source 1..75: mol_type = other DNA
gagataataatgattctaggctgaatttacctgatactttttttactcgtgagggtgttaaggttgagagtgctg

SEQ ID NO: 106445 - DNA, 75 bp, synthetic construct
  source 1..75: mol_type = other DNA
tggcactattaatgaagtttcctcggcgctgattcagtgtgagggcgatgacatacccgcgctggggattttgcc

SEQ ID NO: 106446 - DNA, 75 bp, synthetic construct
  source 1..75: mol_type = other DNA
acgctgactaatttgagtggaaaggatgtagctggtcttctcgcataccttggtttgggagaagcggcaaaacgg

SEQ ID NO: 106447 - DNA, 75 bp, synthetic construct
  source 1..75: mol_type = other DNA
cttcttcgcgacaatgtatggagcctcgtagaaaatagtctggaattgacctctgttaattcaaatgtcgataat

SEQ ID NO: 106448 - DNA, 75 bp, synthetic construct
  source 1..75: mol_type = other DNA
cgcgagtctatggagttattggaagccctggctgaagctggcgtgaccattggtaacttcttcagtaatgacctg

SEQ ID NO: 106449 - DNA, 75 bp, synthetic construct
  source 1..75: mol_type = other DNA
cataaccagctgaccagcctgccggaccgcctgcccagcggactggagatgcttaatgtgtgttggaacaaactg

SEQ ID NO: 106450 - DNA, 75 bp, synthetic construct
  source 1..75: mol_type = other DNA
ctttggtacaccacaacaacaatggctcgacgctatcagcgtctacgaagctcaaacgctgttgcaggaaggtca

SEQ ID NO: 106451 - DNA, 75 bp, synthetic construct
  source 1..75: mol_type = other DNA
acaggtaactcaggcacgacaaagcctgacgctggaagagctttatcagatgttccgcgatggtgcggatggcgt

SEQ ID NO: 106452 - DNA, 75 bp, synthetic construct
  source 1..75: mol_type = other DNA
cagttggatactattcaacaacgtcttaagcaggcttcagatgcacgagctcaggaagtcgccggtagcgaagtg

SEQ ID NO: 106453 - DNA, 75 bp, synthetic construct
  source 1..75: mol_type = other DNA
tctcttgctatccagtcagaaatcgtgcggattcttgataaatttactgcgcttacagctgagcttacagctgag

SEQ ID NO: 106454 - DNA, 75 bp, synthetic construct
  source 1..75: mol_type = other DNA
attggttatgatttttttatggaatattacgatgacatagttaattcagatgcgtgtattggtcgtggtggtcgt

SEQ ID NO: 106455 - DNA, 75 bp, synthetic construct
  source 1..75: mol_type = other DNA
ctggctgctgacaaggttgtacaggcgggagaaaccgtgaacgatggaacactgacaaatcatgacaaccagatt

SEQ ID NO: 106456 - DNA, 75 bp, synthetic construct
  source 1..75: mol_type = other DNA
gtatatcgatccgttgagtgtttatatgcgtacagtttggcccgataacatcaggactatcagagcagcggtgaa

SEQ ID NO: 106457 - DNA, 75 bp, synthetic construct
  source 1..75: mol_type = other DNA
atgcaggtttgcccgttgctctaatggtaggcggtggcaatgcgggtacagaagagctggcccgagccaatatga

SEQ ID NO: 106458 - DNA, 75 bp, synthetic construct
  source 1..75: mol_type = other DNA
ccgaagcccgtcagttctggtgtgatacatgatatgttacgggatgcaaaagcgcgtgatctgccgatgggtcat

SEQ ID NO: 106459 - DNA, 75 bp, synthetic construct
  source 1..75: mol_type = other DNA
gaaagcccctacacatggatgtggctggccaatcttactcatcccgatattttctcttttgacctacgtcacgaa

SEQ ID NO: 106460 - DNA, 75 bp, synthetic construct
  source 1..75: mol_type = other DNA
tgattgccggagggcacacatttggtaaagcacatggtgctgcttcacctgaaaaatgccttggtgctgcacctg

SEQ ID NO: 106461 - DNA, 75 bp, synthetic construct
  source 1..75: mol_type = other DNA
ctatcggaagatctggaaggatcgtgttacaagtagaccctgagttaaaaaagaagctttactctatcttagcta

SEQ ID NO: 106462 - DNA, 75 bp, synthetic construct
  source 1..75: mol_type = other DNA
tgcattttacggcgcaatacgcaaaagcaaagaatgatgtgggtactggcgaagttagttctgcgataacaatga

SEQ ID NO: 106463 - DNA, 75 bp, synthetic construct
  source 1..75: mol_type = other DNA
ataacgaactgcaggataaatttgtctgctggtatccgggttttcaaagtgacgggaagggaccagcgatggcag

SEQ ID NO: 106464 - DNA, 75 bp, synthetic construct
  source 1..75: mol_type = other DNA
agagtatgtcaaacccatcggcggtggttatttctttgcgctgccaggtgttaaggatgagaacgattacctggg

SEQ ID NO: 106465 - DNA, 75 bp, synthetic construct
  source 1..75: mol_type = other DNA
atggctgctgatttactggctaacgcaggcggtcggtttaacccattttccgttattgatgatcggtagtttact

SEQ ID NO: 106466 - DNA, 75 bp, synthetic construct
  source 1..75: mol_type = other DNA
gatcaaacaggccaaagacaacccagaaaaagcagaagagcgctgggcgttcctgcttagtgaagaatggatggt

SEQ ID NO: 106467 - DNA, 75 bp, synthetic construct
  source 1..75: mol_type = other DNA
cactgttgttaacagtgacggctggcaggtggtgaaggatggtgcagtggctgagaataccaccgttaatcacaa

SEQ ID NO: 106468 - DNA, 75 bp, synthetic construct
  source 1..75: mol_type = other DNA
ttcaatgaggcatttgccttactcagacaaacaggcttgcggaatgagtatgtttatcgttctgcactcacacac

SEQ ID NO: 106469 - DNA, 75 bp, synthetic construct
  source 1..75: mol_type = other DNA
gacgttactgcccgtggcgctgatctcacgctatcgccatcaacgcgactggcgcactctgctgttacagggtgc

SEQ ID NO: 106470 - DNA, 75 bp, synthetic construct
  source 1..75: mol_type = other DNA
ccggcagaggttcgccaggacatgcagcagcgcattgatgcggcgcgccggatgtttgccgaaaaagtggcgatg

SEQ ID NO: 106471 - DNA, 75 bp, synthetic construct
  source 1..75: mol_type = other DNA
accagtaattagccgctctgtcatctgcatgccgttacatactattcgcaattctcttatatgtagcaacaaaca

SEQ ID NO: 106472 - DNA, 75 bp, synthetic construct
  source 1..75: mol_type = other DNA
aaagaccctggtgtagcgtgggtacagcagctgcggtaggtatttttatcggcgcactgttaagcatgcgcaaat

SEQ ID NO: 106473 - DNA, 75 bp, synthetic construct
  source 1..75: mol_type = other DNA
gtatcgttccgaccactaacccaacttcaaccgctatcttcaaatcgctgatcagcctgaagactcgtaacgcca

SEQ ID NO: 106474 - DNA, 75 bp, synthetic construct
  source 1..75: mol_type = other DNA
gcagatattcctgatcctgcgctgtttgtcaaaaaccttggtttgggggaaggctctgcactgcccgttggtgtg

SEQ ID NO: 106475 - DNA, 75 bp, synthetic construct
  source 1..75: mol_type = other DNA
gaatgctgttatcgctggtggtgctcggtatgacctgaacggacagccttgcggtgaagtcacggaagaagataa

SEQ ID NO: 106476 - DNA, 75 bp, synthetic construct
  source 1..75: mol_type = other DNA
tgcgaaagaactggcggcaggtttaccgacagccatttcgctggcctcgaccgaccagacctttgctgatgatct

SEQ ID NO: 106477 - DNA, 75 bp, synthetic construct
  source 1..75: mol_type = other DNA
gctgcggtcacccggtccctccttcccgtctgccgtgattttccggtcgttcgcccgctcaggtttcgcggcctc

SEQ ID NO: 106478 - DNA, 75 bp, synthetic construct
  source 1..75: mol_type = other DNA
acacgacagccactggcaaatgcccgttccatcagggcggtcacgaccagagcgcgggggcgggcacaaccactc

SEQ ID NO: 106479 - DNA, 75 bp, synthetic construct
  source 1..75: mol_type = other DNA
ccaaaaaaagcactccttgttgcccgacatttccgctgatgaatttcaagaacgtctgattgctgtaatggaaga

SEQ ID NO: 106480 - DNA, 75 bp, synthetic construct
  source 1..75: mol_type = other DNA
tggcaataaacgccactgacggaccgtcagggccggtgatggcccgttcgcgtcaccgccgtgaggctggtcata

SEQ ID NO: 106481 - DNA, 75 bp, synthetic construct
  source 1..75: mol_type = other DNA
gtttgggacacgtattaccacagaaacgccggaaaaattaaaagccgcgctgggtggcgtctcttacatcattca

SEQ ID NO: 106482 - DNA, 75 bp, synthetic construct
  source 1..75: mol_type = other DNA
gagataatacattttctgatttagttaataattcacaaagaaatatcgctaatgaccctgaaaataatttaagag

SEQ ID NO: 106483 - DNA, 75 bp, synthetic construct
  source 1..75: mol_type = other DNA
agggagtgagaacggccacggcgtggtgttcccggctgaactggtgcggctgctggacaggctggaggaagaaat

SEQ ID NO: 106484 - DNA, 75 bp, synthetic construct
  source 1..75: mol_type = other DNA
taaccagaaaggcaaactgcaggtgaacgccggtggtacagccacgaatgtcaccctgaagcagggcggcgcact

SEQ ID NO: 106485 - DNA, 75 bp, synthetic construct
  source 1..75: mol_type = other DNA
taaaaccggagctgccgcggcgaaaagtgaatatctggtgtgcattgatggcgatgcattattagactgcgatgc

SEQ ID NO: 106486 - DNA, 75 bp, synthetic construct
  source 1..75: mol_type = other DNA
ccagactgtacatggtcacgcactggataccacgctgaatggggggtaccagtatgtgcacaacggcggtacggc

SEQ ID NO: 106487 - DNA, 75 bp, synthetic construct
  source 1..75: mol_type = other DNA
tgattcttaacggcaaaagtgctgacaatgaaacattacgcgaagcaattatgctgctgcgtgaggaaggaatga

SEQ ID NO: 106488 - DNA, 75 bp, synthetic construct
  source 1..75: mol_type = other DNA
ctgaaacactggatttaagtgccctgagattgcacagccctgaatcaaatccctggggtgctgattttgactatg

SEQ ID NO: 106489 - DNA, 75 bp, synthetic construct
  source 1..75: mol_type = other DNA
cgacgaccacgataaccactttttacagccactggaccgctacaacctgattgacgaagacgaacctgcacagtt

SEQ ID NO: 106490 - DNA, 75 bp, synthetic construct
  source 1..75: mol_type = other DNA
aatccttggggagcggattttgattatgctgccagatttaaaagtctggatcttgaggcggtgaaaaaagatatt

SEQ ID NO: 106491 - DNA, 75 bp, synthetic construct
  source 1..75: mol_type = other DNA
ggtttgggagaaggttcggcattacccgttggtgtgcctgttccgtggccttccgccactccgccaacaggctgg

SEQ ID NO: 106492 - DNA, 75 bp, synthetic construct
  source 1..75: mol_type = other DNA
gccgcgtttctccccgatgtgccttttcccgatacgctccatcttgaaagcgatctcgctaccgcactggcagcc

SEQ ID NO: 106493 - DNA, 75 bp, synthetic construct
  source 1..75: mol_type = other DNA
tcaaactgacgcacagggatatggggccgaaatctcgctacatcgggccggaagtgccgaaagaagatctgatct

SEQ ID NO: 106494 - DNA, 75 bp, synthetic construct
  source 1..75: mol_type = other DNA
tcttgatggcgaaccgttgagcggacaaaattttcatattgaaatacttccggcggcgttgcgggtgatgctgcc

SEQ ID NO: 106495 - DNA, 75 bp, synthetic construct
  source 1..75: mol_type = other DNA
tgattcttaacggcaaaagtgctggcaatgagatattgcgcgaagcgattatgctgttgcgtgaggaaggaatga

SEQ ID NO: 106496 - DNA, 75 bp, synthetic construct
  source 1..75: mol_type = other DNA
ctggctcgcaatacccagaaaattttccgctggatagagaaagacacccctgatgcagttgaaaaaatgcaggct

SEQ ID NO: 106497 - DNA, 75 bp, synthetic construct
  source 1..75: mol_type = other DNA
gcgaattctgcaaaagtgcatttttacgccattaatgactttggtggcgcaattgaaggtaatgccaggctgtaa

SEQ ID NO: 106498 - DNA, 75 bp, synthetic construct
  source 1..75: mol_type = other DNA
gtggccagcaagtcccgaacatgcatcggcaccaccacactggagtcattaaagaatgaacagtgggtgttgccg

SEQ ID NO: 106499 - DNA, 75 bp, synthetic construct
  source 1..75: mol_type = other DNA
gaaaaaggcttcctgacagtacaaaaaaggctcaatggcgaagcgctggaggaatacgttaaacccatcggcggc

SEQ ID NO: 106500 - DNA, 75 bp, synthetic construct
  source 1..75: mol_type = other DNA
gcgaagattaccaaagcgtattttgaactgggaatgacatttccggaactgtacggcgacagccatccggaagcc

SEQ ID NO: 106501 - DNA, 75 bp, synthetic construct
  source 1..75: mol_type = other DNA
gcgcagccacagttcagcctggtttcgggagctggtggagacgcgggaacggctggtgagagacgctgatgattt

SEQ ID NO: 106502 - DNA, 75 bp, synthetic construct
  source 1..75: mol_type = other DNA
ttctctataccagcgatccgaatcttacgctggaaatggaaaatgaaatcaaagagaagatcgcccagtccaaag

SEQ ID NO: 106503 - DNA, 75 bp, synthetic construct
  source 1..75: mol_type = other DNA
atataaattatttggtagtcgcttactcaacgcccgcaatcagttagataaaaatctcctcgaaatggctatgca

SEQ ID NO: 106504 - DNA, 75 bp, synthetic construct
  source 1..75: mol_type = other DNA
aataactaatagatttaaaaatatcataatttcatgccttgtttttgtgattttattcatatctgtagcgttttt

SEQ ID NO: 106505 - DNA, 75 bp, synthetic construct
  source 1..75: mol_type = other DNA
tgtgttccccgcgccagcggggataaaccgtggattgcggaggatgacggcgttctgaatccgtgttccccgcgc

SEQ ID NO: 106506 - DNA, 75 bp, synthetic construct
  source 1..75: mol_type = other DNA
gaaggcgatctcgacgccagtgtcgccactcgctggcaagaactctgccgtctggcagcaccaggagtggtgtaa

SEQ ID NO: 106507 - DNA, 75 bp, synthetic construct
  source 1..75: mol_type = other DNA
tggatgaactgaacgcgacactcagtctgtgttattgcgccaccgccatcgaaagccatcgcatcttactggaag

SEQ ID NO: 106508 - DNA, 75 bp, synthetic construct
  source 1..75: mol_type = other DNA
ggctgccggtggtggaatccctgcgtcattccagcgagcaacatctgtctatccctgccgcgctggatgccgcct

SEQ ID NO: 106509 - DNA, 75 bp, synthetic construct
  source 1..75: mol_type = other DNA
aagcgtagtccgaagaaaacacctccagactatttaggtcgaaatgatccagcaacagtgtatggttctcctggt

SEQ ID NO: 106510 - DNA, 75 bp, synthetic construct
  source 1..75: mol_type = other DNA
gttaacaacgatcccgaaataccggaaagactgcgccttaactttgatttaagttacacagaatcaacggataag

SEQ ID NO: 106511 - DNA, 75 bp, synthetic construct
  source 1..75: mol_type = other DNA
tgaaggctataaaaaatttttaattaaacatgagtgtgatttatccaacgcagataaaaaatcgttatattattg

SEQ ID NO: 106512 - DNA, 75 bp, synthetic construct
  source 1..75: mol_type = other DNA
aacgccccggtaacgttccataaactgaccaccagtaacctcaccggtcagggtggcaccatcaatatgcgtgtt

SEQ ID NO: 106513 - DNA, 75 bp, synthetic construct
  source 1..75: mol_type = other DNA
tgaaggatgtcgatgattttgttgcgtcagcggttgttttgtatgaccagatgaatcgcggcggcccggcaggga

SEQ ID NO: 106514 - DNA, 75 bp, synthetic construct
  source 1..75: mol_type = other DNA
aagacggcactgctaatcccgacagccagaatgcgaagctgatgcaaaacgtggtgtgggtaacggcagatcagc

SEQ ID NO: 106515 - DNA, 75 bp, synthetic construct
  source 1..75: mol_type = other DNA
aagattatttctctttttgccagtcattaaatatagcagatgatcgttccgtcagaacaatgacgcttatcttac

SEQ ID NO: 106516 - DNA, 75 bp, synthetic construct
  source 1..75: mol_type = other DNA
taaacaatttagtaggaacaataatgatcgaatgaaggttggaaaagcgcccaagactagaacccaggatgtttc

SEQ ID NO: 106517 - DNA, 75 bp, synthetic construct
  source 1..75: mol_type = other DNA
atgaaaggagcgcaacaagatgatgaatcaacatataacaacatcttaaaaaaaggcctgacattacgccaggcc

SEQ ID NO: 106518 - DNA, 75 bp, synthetic construct
  source 1..75: mol_type = other DNA
cacatcacgttcaggtagaaaatgttcccgatccgggcattgaacaggcagatgatattattctgcgtattacgg

SEQ ID NO: 106519 - DNA, 75 bp, synthetic construct
  source 1..75: mol_type = other DNA
gaatttggtgacccggaaccggtcgctgcatggggctgttattacggctcgctctgggatggctataacggctgg

SEQ ID NO: 106520 - DNA, 75 bp, synthetic construct
  source 1..75: mol_type = other DNA
gcgcagccacagttcagcctattttcgggagttggtggagacgcgggaacgactggtgagagacgctgatgattt

SEQ ID NO: 106521 - DNA, 75 bp, synthetic construct
  source 1..75: mol_type = other DNA
tgttcagtcctcaaaaacaaaatttataaatcttgcaacagggttaacgaatgatactacgccaactatattaat

SEQ ID NO: 106522 - DNA, 75 bp, synthetic construct
  source 1..75: mol_type = other DNA
ggcacgcgcccgcgataaaggcctgattcttctctcctgcggcccgtattacaacgtgctgcgcatccttgtacc

SEQ ID NO: 106523 - DNA, 75 bp, synthetic construct
  source 1..75: mol_type = other DNA
ttgaaaattttaacgatcgcttattgtaaaaataatagtaaaaataattgcaagatacagaccgtcaataaaaac

SEQ ID NO: 106524 - DNA, 75 bp, synthetic construct
  source 1..75: mol_type = other DNA
ggatgagaatggacagaacacgccaacgaatgctccggcggaagacccggatattgtggctgtcgggtattacgg

SEQ ID NO: 106525 - DNA, 75 bp, synthetic construct
  source 1..75: mol_type = other DNA
aaaaaagatctctctatgcagttaacagttaacttaatttgggggattgttgttagtgttccacctcagcaacct

SEQ ID NO: 106526 - DNA, 75 bp, synthetic construct
  source 1..75: mol_type = other DNA
ccgaagctacgggtctgaaagctgaaagaacgctgtttattgatgacagcgaagctattctcgatgctgccgcac

SEQ ID NO: 106527 - DNA, 75 bp, synthetic construct
  source 1..75: mol_type = other DNA
acatcagggaggatgtgcaatttatgatgaacgcccttctgtttgccgcacttggtattgcggatggcgaattct

SEQ ID NO: 106528 - DNA, 75 bp, synthetic construct
  source 1..75: mol_type = other DNA
tacttcatcagatgcttatgctgtggggggcgaggctctcagagcttaggctggcaaaaaagacagaatttgacc

SEQ ID NO: 106529 - DNA, 75 bp, synthetic construct
  source 1..75: mol_type = other DNA
aatcagggaaatccaccagcgaaagacctgaattgttgaacttgctttctcacctccgcgaaggggacaccctcg

SEQ ID NO: 106530 - DNA, 75 bp, synthetic construct
  source 1..75: mol_type = other DNA
cacggttcactggccgggcggagtcgccccgcccttctgatgcttccccgttttgccgatatttttcaacaggga

SEQ ID NO: 106531 - DNA, 75 bp, synthetic construct
  source 1..75: mol_type = other DNA
tcctgactggcttcctgttccacgtcagcgcatctatatgcgcactgcgcataaaaaagcctataactgtggtat

SEQ ID NO: 106532 - DNA, 75 bp, synthetic construct
  source 1..75: mol_type = other DNA
tcgaatcattggtattatgctttgtattgctaatatatcccttatttattagagatacgctctttagtttgaaaa

SEQ ID NO: 106533 - DNA, 75 bp, synthetic construct
  source 1..75: mol_type = other DNA
ttagcgagaagccgaagatgcgctatccggtaacgctggtgacctgggcagtaatggtgctcaagcgcctgctgc

SEQ ID NO: 106534 - DNA, 75 bp, synthetic construct
  source 1..75: mol_type = other DNA
atgacaaagaaacagcgtaaaaataaaaaattcgggtccatgaccggcagccgggttgaaaccttcacgccaggg

SEQ ID NO: 106535 - DNA, 75 bp, synthetic construct
  source 1..75: mol_type = other DNA
atcactgatattactacgtttgtacatactggtgatttacttgcgttaatacctcagcaaggcataactttaatt

SEQ ID NO: 106536 - DNA, 75 bp, synthetic construct
  source 1..75: mol_type = other DNA
atggcccgttcagctaacccccgtaaacgtaaacccacctctcaaagaagcaaacttccccgctatgtcgtgaag

SEQ ID NO: 106537 - DNA, 75 bp, synthetic construct
  source 1..75: mol_type = other DNA
tattactgctttgcaatgacacaaatcgcttgcctgccattaactcaacgccccgacgatattgaaccactgttt

SEQ ID NO: 106538 - DNA, 75 bp, synthetic construct
  source 1..75: mol_type = other DNA
gtcccagatgctggatattacgatcaatccttacccgatacaattttaaagcaatcacaattagcaaaacagtat

SEQ ID NO: 106539 - DNA, 75 bp, synthetic construct
  source 1..75: mol_type = other DNA
gcgctgccctcgtttgtccagggtgatgcctggaacaattttaaagccggtgagcagcagattattatcggcaaa

SEQ ID NO: 106540 - DNA, 75 bp, synthetic construct
  source 1..75: mol_type = other DNA
gctcacgagcaaggttatcaggcggggattgccgaaggtcgccagacaggccatgaacaaggctatcaggagggt

SEQ ID NO: 106541 - DNA, 75 bp, synthetic construct
  source 1..75: mol_type = other DNA
agaagtctggcaagcactggcagcaaaagaagtgttcgactgccagacggactttaatattcacctctggcagcg

SEQ ID NO: 106542 - DNA, 75 bp, synthetic construct
  source 1..75: mol_type = other DNA
gcgccgctttacgggctcgaaagccatatgcaaggcaaagtcgtcacctttggtggcggcttccccctctggcgt

SEQ ID NO: 106543 - DNA, 75 bp, synthetic construct
  source 1..75: mol_type = other DNA
catgctgagaaactggatggttttgagctgcagcggagtaatgaattacattatccgatgcgcctgcgcggagat

SEQ ID NO: 106544 - DNA, 75 bp, synthetic construct
  source 1..75: mol_type = other DNA
ttcttacctggcagcgcgggcgtattgaaaacagtgtatcgctggttgaaggcgcgattgatgaactattggcag

SEQ ID NO: 106545 - DNA, 75 bp, synthetic construct
  source 1..75: mol_type = other DNA
cgcgcgctgttgttacggccacagcttctcctactggatgagcccacctcggcgctggatatgtcggtacaagcg

SEQ ID NO: 106546 - DNA, 75 bp, synthetic construct
  source 1..75: mol_type = other DNA
ccgccacaaaatttttaacgccgactgggttatcgatggtgaacagcagccgaaatcgctgttcaagatgatcaa

SEQ ID NO: 106547 - DNA, 75 bp, synthetic construct
  source 1..75: mol_type = other DNA
ccgtttaaggcaaaatatctgaagttgactgacagtggtgttgcatctggtactgttaactcttcattggttatg

SEQ ID NO: 106548 - DNA, 75 bp, synthetic construct
  source 1..75: mol_type = other DNA
atgagcggtggagatggacgcgaccacaacagtggcgcacataacactggtggtaacattaatggcggccctacg

SEQ ID NO: 106549 - DNA, 75 bp, synthetic construct
  source 1..75: mol_type = other DNA
tcttcatcatccataaacaaagatatcaaatcgttcaatttaaacgtggctttaccgcttaatgttgttacagaa

SEQ ID NO: 106550 - DNA, 75 bp, synthetic construct
  source 1..75: mol_type = other DNA
gcgcaagttatatcatccaccgataacatttatgatgagttgaggctgcttctttcagaagtcgctatacgaggt

SEQ ID NO: 106551 - DNA, 75 bp, synthetic construct
  source 1..75: mol_type = other DNA
atctacaatttgtataagtatgatgcggagtgccggaaatggctgcaggtatgggcggattacttggatggcctg

SEQ ID NO: 106552 - DNA, 75 bp, synthetic construct
  source 1..75: mol_type = other DNA
caaagttaaaggccagaaagagtgccggagaactctggaaggcgatgccatcagagtgctggggcatatggaagc

SEQ ID NO: 106553 - DNA, 75 bp, synthetic construct
  source 1..75: mol_type = other DNA
gatatcaaccgcagcatcaaacacaccttcctcgactttggcgatgacgacttcaccaacggcaagccgcacccg

SEQ ID NO: 106554 - DNA, 75 bp, synthetic construct
  source 1..75: mol_type = other DNA
cggaagagggcatctggatgaccgacgttcctgaaccggaactcggacataacgatctgctgattaaaatccgta

SEQ ID NO: 106555 - DNA, 75 bp, synthetic construct
  source 1..75: mol_type = other DNA
acgactcggtaaaaaaagtagggtggctggcaatccagtctgcatcccagaaatggaagatgtcgttgaagggct

SEQ ID NO: 106556 - DNA, 75 bp, synthetic construct
  source 1..75: mol_type = other DNA
gcagcctcagcacgtgccgccagcacgtcagccggacaggccgcgtcgtcggctcagtcagcgtcttccagcgca

SEQ ID NO: 106557 - DNA, 75 bp, synthetic construct
  source 1..75: mol_type = other DNA
atgtcgttttcctgtccactttgtcatcagccgctatcgcttgaaaaaaacagctatatctgtcccaaacggcat

SEQ ID NO: 106558 - DNA, 75 bp, synthetic construct
  source 1..75: mol_type = other DNA
atgtctgataatctgccgtggaaaacctggacaccggacgatcttgcgccgccgcaggcggtgtttgtacccatg

SEQ ID NO: 106559 - DNA, 75 bp, synthetic construct
  source 1..75: mol_type = other DNA
taaacgatcccgcgatccgggtgatagtgcggaaatgatgcaagcgcggcgtacatttttagatgccgggcatta

SEQ ID NO: 106560 - DNA, 75 bp, synthetic construct
  source 1..75: mol_type = other DNA
agtattctggggagacggaacaacttcatcatcagatgggcaaaacttcagaactggtaattctggtcgttatgc

SEQ ID NO: 106561 - DNA, 75 bp, synthetic construct
  source 1..75: mol_type = other DNA
atgattgatacattgccagataatgcaatgatattgaaatccgttctggccgtaaaactggtgatgcaattaaaa

SEQ ID NO: 106562 - DNA, 75 bp, synthetic construct
  source 1..75: mol_type = other DNA
aatttggtgttttgctttctgcattttctctgtcttatggtttttcacaacttccttccggtattttgctagacc

SEQ ID NO: 106563 - DNA, 75 bp, synthetic construct
  source 1..75: mol_type = other DNA
ttgacgatgcccagcgtggatttatcgccccgctgctggatgaaggtattctgcgtgatgcgaacggtaaagttt

SEQ ID NO: 106564 - DNA, 75 bp, synthetic construct
  source 1..75: mol_type = other DNA
gaaaaggcgctctattatcttgataattactttatggaacgattaatgttagttagcccaaaactcacggcgcta

SEQ ID NO: 106565 - DNA, 75 bp, synthetic construct
  source 1..75: mol_type = other DNA
ccggagacaaaggcgcgcgctcgctgggtgaggtgcataacgaggtgcgccgggaaatcagggattctgatttac

SEQ ID NO: 106566 - DNA, 75 bp, synthetic construct
  source 1..75: mol_type = other DNA
ttgttatctttatgcttcgcacttcaccagagcagaatttctttctgacaaagaaatatcatttattaaatcgaa

SEQ ID NO: 106567 - DNA, 75 bp, synthetic construct
  source 1..75: mol_type = other DNA
cggtgcttccgctgattcttcacgctggggggccggtaaacctctgtatcaggacctggtaagccgcaccaaagt

SEQ ID NO: 106568 - DNA, 75 bp, synthetic construct
  source 1..75: mol_type = other DNA
tggtatgaactactcagcaatcagtcatatccgggacatattcgggtacatgaacttgcacaacaggaactggga

SEQ ID NO: 106569 - DNA, 75 bp, synthetic construct
  source 1..75: mol_type = other DNA
agccccctggtaccttgagcatgatgctggtaatggtgcggacctgctgggtaaaggtggtcttgtcagttgtcg

SEQ ID NO: 106570 - DNA, 75 bp, synthetic construct
  source 1..75: mol_type = other DNA
ctggcttaatgagttcgggcttaaacccgttttctcaatcggttctgtcgtcgacttgtacagcaatattgaccg

SEQ ID NO: 106571 - DNA, 75 bp, synthetic construct
  source 1..75: mol_type = other DNA
ttggacttaaagcgacctggaaaacgtatcagttcggtatgctttggcaggtcttgtttgcagataacatacgta

SEQ ID NO: 106572 - DNA, 75 bp, synthetic construct
  source 1..75: mol_type = other DNA
agatttttggcgttaaaggaattaaatacccgtcgaaagaaaagatgctttcggttggagaacttgaatctgagg

SEQ ID NO: 106573 - DNA, 75 bp, synthetic construct
  source 1..75: mol_type = other DNA
ttttattaacagatttaatatgaataaatggctgattgataaaaataacaatttttttatccaacttatcgatca

SEQ ID NO: 106574 - DNA, 75 bp, synthetic construct
  source 1..75: mol_type = other DNA
tttttatcatcaaatctacaacatgtaacattcgaatgtaaagaaattggggattgcaattttactactgcaata

SEQ ID NO: 106575 - DNA, 75 bp, synthetic construct
  source 1..75: mol_type = other DNA
atcatttcctggtgttccttccctgactgtcagcactgtcaacgatgctcctgtatcaacttcgcttcccgccgg

SEQ ID NO: 106576 - DNA, 75 bp, synthetic construct
  source 1..75: mol_type = other DNA
atgtcgttttcctgtccactttgccatcagcctctttcgcgtgaaaaaaacagctatatctgtccccagcgacat

SEQ ID NO: 106577 - DNA, 75 bp, synthetic construct
  source 1..75: mol_type = other DNA
cgagctggcctcatttttatgcacttaataataatgattttactataagtctttataataacaaacccggtgtgg

SEQ ID NO: 106578 - DNA, 75 bp, synthetic construct
  source 1..75: mol_type = other DNA
agtattaatatgccgactgtaccaaccagtgtctttgaaggtaaagctaaatattctacctatgatgatgcagtc

SEQ ID NO: 106579 - DNA, 75 bp, synthetic construct
  source 1..75: mol_type = other DNA
acgtagacaccgttctgctggatatggacggcacactgctcgacctcgctttcgataactatttctggcaaaagc

SEQ ID NO: 106580 - DNA, 75 bp, synthetic construct
  source 1..75: mol_type = other DNA
ataaaggaaagataccaggtctaaaaatagatcagaaaattaggggacaaatgccagaaagaggatggacagagg

SEQ ID NO: 106581 - DNA, 75 bp, synthetic construct
  source 1..75: mol_type = other DNA
gagtggagctaaagacttactaaaactggttgagattctttttccctcttttggtttgaccggagcagaggcaca

SEQ ID NO: 106582 - DNA, 75 bp, synthetic construct
  source 1..75: mol_type = other DNA
tgtaaaactttcgttgatcaccaacgataaaattatcggtaatgataaggcaatatccagtagtaatgacaccgt

SEQ ID NO: 106583 - DNA, 75 bp, synthetic construct
  source 1..75: mol_type = other DNA
gacgttgggcttttatcggaccaactctgacggcgatgcttgtacaaccgacagcagagagagctataacgcctt

SEQ ID NO: 106584 - DNA, 75 bp, synthetic construct
  source 1..75: mol_type = other DNA
cacctgggcacgccgggggattatttccgaccgtctggcaacggcgattctgattcatgcgggacgaaccacagt

SEQ ID NO: 106585 - DNA, 75 bp, synthetic construct
  source 1..75: mol_type = other DNA
ggcacaccgttcacgctgacgcagtcaccggtcagtgcctttgcggcggataaactgcatgtgacagacattacc

SEQ ID NO: 106586 - DNA, 75 bp, synthetic construct
  source 1..75: mol_type = other DNA
ggaacactgcttaacccggtagttgccggagcggcaatggcgctctcgtcgattaccgtagtgagtaacgccaac

SEQ ID NO: 106587 - DNA, 75 bp, synthetic construct
  source 1..75: mol_type = other DNA
aatatgttgccacaaacgttaatactggaatgggtaaaagccgataatgaaagtggttcgttactctgcttaacc

SEQ ID NO: 106588 - DNA, 75 bp, synthetic construct
  source 1..75: mol_type = other DNA
gtgaaatactccattctttagataaattgaggaaagacggtcttttacttacgccagacaagcgttcgttccttg

SEQ ID NO: 106589 - DNA, 75 bp, synthetic construct
  source 1..75: mol_type = other DNA
caggaatctatttcccgggtaaaagcaccggtaactcgttttaattctaggcaatataatgctgaatattatcat

SEQ ID NO: 106590 - DNA, 75 bp, synthetic construct
  source 1..75: mol_type = other DNA
gcaattttggagcggagaagatttaaggggccgtttgggaaacggacaatattgtacggtaagcctgttttttga

SEQ ID NO: 106591 - DNA, 75 bp, synthetic construct
  source 1..75: mol_type = other DNA
tcctggctttgaacaaccgtgggaagaagatttcggtaagcctgagcgcattgtcaccgcgctggacatcatgac

SEQ ID NO: 106592 - DNA, 75 bp, synthetic construct
  source 1..75: mol_type = other DNA
gatgcgctggtccgtgaagggatcaccattgcagacgcggtgaaacgcgtactgcatctgccgaccgtggcggag

SEQ ID NO: 106593 - DNA, 75 bp, synthetic construct
  source 1..75: mol_type = other DNA
gtggaaggtctgggaagacgtgacctgcgccggtacggtgctgcgtatgaatccagttttgtttatcaccatgcc

SEQ ID NO: 106594 - DNA, 75 bp, synthetic construct
  source 1..75: mol_type = other DNA
gcatcgctggcagtaagtcgaatccgctgggatgacgacgaagagaatcaatattacttctctttctctctacct

SEQ ID NO: 106595 - DNA, 75 bp, synthetic construct
  source 1..75: mol_type = other DNA
tgccatcggctacgcaaaactgaatgccaccaccggttaccaaatcgtcggcgttattcgtcaggaaaatgggcg

SEQ ID NO: 106596 - DNA, 75 bp, synthetic construct
  source 1..75: mol_type = other DNA
aaaccatgtcttttcgtgaaatgctgttacgccagcgggttaacgagggcgcacgcgcctgcatgttaagccacg

SEQ ID NO: 106597 - DNA, 75 bp, synthetic construct
  source 1..75: mol_type = other DNA
gcgtaagcgcctgcaagtcgccgccacctgtgcaaagtcaacgaccggagccagcagcatgggcgatggagaaag

SEQ ID NO: 106598 - DNA, 75 bp, synthetic construct
  source 1..75: mol_type = other DNA
attgatctctcgcgatttgaaaaaaaaggctatatcacccctgcaaaatacctcgttcgtgtgcaaataaacaaa

SEQ ID NO: 106599 - DNA, 75 bp, synthetic construct
  source 1..75: mol_type = other DNA
gggaaaaaattccctttgatgttgctgaagcagaacaggaattacaggaaggcccgctgaccgaatattccggtg

SEQ ID NO: 106600 - DNA, 75 bp, synthetic construct
  source 1..75: mol_type = other DNA
tggattcttgtaaaaaataacgatttcagcaacgaagaattgcgcgaaatatataaatcttgcgaaattttgcaa

SEQ ID NO: 106601 - DNA, 75 bp, synthetic construct
  source 1..75: mol_type = other DNA
tgctggcggttgacgggaaagcggtagccctgctggcagtacgcgatccattgcgtagtgatagcgtggcggcgc

SEQ ID NO: 106602 - DNA, 75 bp, synthetic construct
  source 1..75: mol_type = other DNA
ttgtccggcgctgggcctgacgatcccggtgggtaaagactctatgtcgatgaaaacccgctggcaggaaggtaa

SEQ ID NO: 106603 - DNA, 75 bp, synthetic construct
  source 1..75: mol_type = other DNA
ttggcgctattcgtgcaggtcaggcgcagcagccatccagtcttgcgcgtggtattggtggggcggcatcaggcg

SEQ ID NO: 106604 - DNA, 75 bp, synthetic construct
  source 1..75: mol_type = other DNA
catttgatattgatcgtaacacccggcgactgcgtgaaatatttgaggatgcaattcaggcaggaatacaggaga

SEQ ID NO: 106605 - DNA, 75 bp, synthetic construct
  source 1..75: mol_type = other DNA
ccgtgacgacgcaggcaacggcacgctgacgcgcacgcgtaagaaatcgttctggtggtataaaaaagtgattgc

SEQ ID NO: 106606 - DNA, 75 bp, synthetic construct
  source 1..75: mol_type = other DNA
ttgttggcatgggaattatgagtggaactgtagctcatgcggctgacaacgaagtaactttcttaggcgctgtca

SEQ ID NO: 106607 - DNA, 75 bp, synthetic construct
  source 1..75: mol_type = other DNA
caagaccgagataagattatatgtactttgattatttctactttttctctagatggtttatcagggcgtagtgtt

SEQ ID NO: 106608 - DNA, 75 bp, synthetic construct
  source 1..75: mol_type = other DNA
cgggtgtgctggtacatccgagttttattgaactaatggcgaaagcggcccagggtgaacatgtcgaatttgccc

SEQ ID NO: 106609 - DNA, 75 bp, synthetic construct
  source 1..75: mol_type = other DNA
cgaggagccgacaacatggcgtgcccccaaattggcaacggcgtcgaactcggtgccaatgtcattattcttggc

SEQ ID NO: 106610 - DNA, 75 bp, synthetic construct
  source 1..75: mol_type = other DNA
ccagtctgaaggtgcgttccgtgaaggtggcaaaggactgaccacggtcgatatgatcccgcacggcgagcatcg

SEQ ID NO: 106611 - DNA, 75 bp, synthetic construct
  source 1..75: mol_type = other DNA
tctttgctgccttggtggcagttatttcaggcacaagttgcctctatctgatacgcagagtgattaatcgtggca

SEQ ID NO: 106612 - DNA, 75 bp, synthetic construct
  source 1..75: mol_type = other DNA
gaaaccgccgtcgctacgatgaagcgcttccgctggcaggcaattgttgcactggctgtgggtatcccggtaatg

SEQ ID NO: 106613 - DNA, 75 bp, synthetic construct
  source 1..75: mol_type = other DNA
tgcgtaacccatatctacaggtaagcgactggggctggggtattgatccactcggtctgcgtatcaccatgaata

SEQ ID NO: 106614 - DNA, 75 bp, synthetic construct
  source 1..75: mol_type = other DNA
aatatgaaagaggcgctattagtctggcacgtatgaatagccagatgaaacgcttacaacagcaacaacgtaaga

SEQ ID NO: 106615 - DNA, 75 bp, synthetic construct
  source 1..75: mol_type = other DNA
ctgctctattgtgtacgggtgtacagaaagatggtaattttgattttaaaaatgacaatcttgagcctgtagtag

SEQ ID NO: 106616 - DNA, 75 bp, synthetic construct
  source 1..75: mol_type = other DNA
acagaagacaccgtgctggaaattcagcggctggctgccgcctgccgcgacaccctgaatggcatgacgaagtaa

SEQ ID NO: 106617 - DNA, 75 bp, synthetic construct
  source 1..75: mol_type = other DNA
tgccagacgaaaaggttagagagatttacgcgttgtccgaagctaagggcgatcacttaaatctacctcagaaag

SEQ ID NO: 106618 - DNA, 75 bp, synthetic construct
  source 1..75: mol_type = other DNA
ctctaaaagagacgctgaggcgacaggttgaagagagtggtctgtcgtctgtcatcacactgaccggagcccaac

SEQ ID NO: 106619 - DNA, 75 bp, synthetic construct
  source 1..75: mol_type = other DNA
gtgaactgttcttttatagattgtagttttaacgaattaagtggtagggaagatatttattttttgggatgtgaa

SEQ ID NO: 106620 - DNA, 75 bp, synthetic construct
  source 1..75: mol_type = other DNA
agacaaaagttcatgatgatatgtttccgctcgaagaggtggcgaagctcggctacaacgtgttttatcacgggc

SEQ ID NO: 106621 - DNA, 75 bp, synthetic construct
  source 1..75: mol_type = other DNA
ccgccgctttactatccatcacggttacgccgtagtgatcaataaaaacgtggtagcgggggatgatttcaccat

SEQ ID NO: 106622 - DNA, 75 bp, synthetic construct
  source 1..75: mol_type = other DNA
tactgaagaaatgtggcctgccattgctaagattacgtactatagacagtgatatagaagggaagttgggagtgt

SEQ ID NO: 106623 - DNA, 75 bp, synthetic construct
  source 1..75: mol_type = other DNA
cacagtttggtgcgctggttgataaattccgtgcagacctggcggatatggcaggtcagtgcgttggtggctctg

SEQ ID NO: 106624 - DNA, 75 bp, synthetic construct
  source 1..75: mol_type = other DNA
caacgttgtcacgatctcgccttcccgccgtggaacatcgttctgatcgccatgccagcgcaaggcgggtatgtc

SEQ ID NO: 106625 - DNA, 75 bp, synthetic construct
  source 1..75: mol_type = other DNA
cgccttttcaaaatcaatattcatgctccttatcatgcctctgttgaagccgcccggcagatgcccgaaggcggg

SEQ ID NO: 106626 - DNA, 75 bp, synthetic construct
  source 1..75: mol_type = other DNA
catttagaacgtgaagtacgtaaagctgtaaaagaacgggcattggaaaaaattaaactgttcggttctgatggc

SEQ ID NO: 106627 - DNA, 75 bp, synthetic construct
  source 1..75: mol_type = other DNA
caccgtgctttgttccttatgtgtgtgcgtcatcataaaagggaaaacagcctgtttcctggaaacagactcaca

SEQ ID NO: 106628 - DNA, 75 bp, synthetic construct
  source 1..75: mol_type = other DNA
tgaatgtggatgccacccgctttcgccgcaagtattacaagaacggcgcacatcttggttatatcctgtattcca

SEQ ID NO: 106629 - DNA, 75 bp, synthetic construct
  source 1..75: mol_type = other DNA
ttcgacattaaaacagcacaggccggagtcaatccgtcaatgaaagcatggatcgttctgaataagtgcgcaacc

SEQ ID NO: 106630 - DNA, 75 bp, synthetic construct
  source 1..75: mol_type = other DNA
atctgtttagagaaaaaaacggtcatcttataaaaggaatggttcacaaagaacactttagactgcttattgaat

SEQ ID NO: 106631 - DNA, 75 bp, synthetic construct
  source 1..75: mol_type = other DNA
aagtccccctcgcgaattccgtcatgattgctcctcaaagcacaactgaatggacactacgctctggcatcagcg

SEQ ID NO: 106632 - DNA, 75 bp, synthetic construct
  source 1..75: mol_type = other DNA
aaccggacgggaaaacagaaacggtcagtcacaaacttactgccgaagaagtaaaagatggtaaagcgaatgtgg

SEQ ID NO: 106633 - DNA, 75 bp, synthetic construct
  source 1..75: mol_type = other DNA
tgccgcctttgctggtggcccgtatgcgcagtcacagttctgaatattaccgtgagatcgtcgaacggagggatc

SEQ ID NO: 106634 - DNA, 75 bp, synthetic construct
  source 1..75: mol_type = other DNA
ctggtgtaacgaatcccaggaacgttatgtactggcggttgctgccgatcagttaccgctgtttgacgaactgtg

SEQ ID NO: 106635 - DNA, 75 bp, synthetic construct
  source 1..75: mol_type = other DNA
cctttctcggatatgacttcaaagtgcgtacgctgaagaatttcaaaggcgaactgtaccgaaaatgcatgccgg

SEQ ID NO: 106636 - DNA, 75 bp, synthetic construct
  source 1..75: mol_type = other DNA
gcctgcttcctcgacaagaaaaccgctctaatcgacgaagcgatttcgatcaaagagcagcaaattagcctgctg

SEQ ID NO: 106637 - DNA, 75 bp, synthetic construct
  source 1..75: mol_type = other DNA
caaaacatggtgaaaaaataaaatatggcatcataaatgattatggaacagtgaaagaatatgagggtgtcatta

SEQ ID NO: 106638 - DNA, 75 bp, synthetic construct
  source 1..75: mol_type = other DNA
atgattgataacctcgttgagcgtgggatcactgttcagttccttgctaactcattgagttttgataactcccct

SEQ ID NO: 106639 - DNA, 75 bp, synthetic construct
  source 1..75: mol_type = other DNA
ttagttttgctggaagacaagcaaaactacgaagagtacttacggtcgataaaaggtgagagaacattgtcactt

SEQ ID NO: 106640 - DNA, 75 bp, synthetic construct
  source 1..75: mol_type = other DNA
caggttaaacatggcgatatttttggtcatgaatttatgggggaagtagttgaaaccggaaaggacgtaaaaaat

SEQ ID NO: 106641 - DNA, 75 bp, synthetic construct
  source 1..75: mol_type = other DNA
atgatggatcatcactctgctttcaacccgtagacaaaaaccgcgtatctgctttgatcgaaccagagcctctgc

SEQ ID NO: 106642 - DNA, 75 bp, synthetic construct
  source 1..75: mol_type = other DNA
tgccctttgggcgcgcgcaagaactttctctcgcctgcctgctgacttcacttgtcgttacgctgctcaaggttt

SEQ ID NO: 106643 - DNA, 75 bp, synthetic construct
  source 1..75: mol_type = other DNA
taatacctcgcaaatgatctcctggtatgacacatcagatcgtaacaatacctggaatatttcagcatcggcaac

SEQ ID NO: 106644 - DNA, 75 bp, synthetic construct
  source 1..75: mol_type = other DNA
tcgtggccgtttatgacccgcaacagcaggtttacggtgtcccggattatattcacgggatggaatccgccatgc

SEQ ID NO: 106645 - DNA, 75 bp, synthetic construct
  source 1..75: mol_type = other DNA
gtatttcgagctgggaatgacgttcccggaactgtatgacgacagccatccggaagccctggcccgtaataccca

SEQ ID NO: 106646 - DNA, 75 bp, synthetic construct
  source 1..75: mol_type = other DNA
gaccacatcattgtgtgcctatctggtggcaaagactcaatagctgcgtatttgcggctggtggacatgggggtt

SEQ ID NO: 106647 - DNA, 75 bp, synthetic construct
  source 1..75: mol_type = other DNA
tgtgtcggatgctcctgtcctgaccattccggaagcggcggacagtgtgaatgccgaagaactgaaggatggcgt

SEQ ID NO: 106648 - DNA, 75 bp, synthetic construct
  source 1..75: mol_type = other DNA
ctgcgctggagctgaactcttatctcaatattacacgtaatacctactgggaccgtgaaagtaataccaattact

SEQ ID NO: 106649 - DNA, 75 bp, synthetic construct
  source 1..75: mol_type = other DNA
gtggttaaaggcgactggtttaacgttggcggcaaagtttacggcactccttaccaatggggccgaacctgctga

SEQ ID NO: 106650 - DNA, 75 bp, synthetic construct
  source 1..75: mol_type = other DNA
tgctcttagtcataagcttccccgcttaccaagactaccagggcgggggaaaccccgctctaccctcactcctga

SEQ ID NO: 106651 - DNA, 75 bp, synthetic construct
  source 1..75: mol_type = other DNA
atgagtagacaacgcatttttatcgctggccatcgcggaatggtcggttctgccatcaggcggcagctcgaacag

SEQ ID NO: 106652 - DNA, 75 bp, synthetic construct
  source 1..75: mol_type = other DNA
acaggaaaagattcaggcaattgtccgcaacctggctcgacaaaactgttccgcagacagtaagaacatttgcag

SEQ ID NO: 106653 - DNA, 75 bp, synthetic construct
  source 1..75: mol_type = other DNA
ttattgatgaagcctggcgatgtgaacaggaaaagattcaggcaattgtccgcaacctggctcgacaaaactgtt

SEQ ID NO: 106654 - DNA, 75 bp, synthetic construct
  source 1..75: mol_type = other DNA
atctctacgataccttccattttactggtgcatccttagaaagtgacgaaacgatgttgccgccagacttacagg

SEQ ID NO: 106655 - DNA, 75 bp, synthetic construct
  source 1..75: mol_type = other DNA
ggcggcatgttcactgcagatgattaccaggcgatcaccactggcatcggttttaacctcaatcaatttggttcg

SEQ ID NO: 106656 - DNA, 75 bp, synthetic construct
  source 1..75: mol_type = other DNA
tcaaatatgcatacagacgagatcgctactccggtggtaaagtatacaaaatcatttggaaaaataacggcatca

SEQ ID NO: 106657 - DNA, 75 bp, synthetic construct
  source 1..75: mol_type = other DNA
cgcgggttatcgtttctctgataaagattatgtgtcgatgagtgagtatctcgcctcgcgcaacggcgatgaaac

SEQ ID NO: 106658 - DNA, 75 bp, synthetic construct
  source 1..75: mol_type = other DNA
ggacgacggaagcctcatggggatggctgaataacgtctctctctatggcggcggcatgtttacggctgatgatt

SEQ ID NO: 106659 - DNA, 75 bp, synthetic construct
  source 1..75: mol_type = other DNA
gtgtttgctgacagcaacagtgattaccgggccggttctgattttgctcaccagatcaaagggcagggaagcagc

SEQ ID NO: 106660 - DNA, 75 bp, synthetic construct
  source 1..75: mol_type = other DNA
gtgtgtatgcaggtggattgttaaacaaggcaattgttgacctcggggatggggatgatgtcgtcacattgagtg

SEQ ID NO: 106661 - DNA, 75 bp, synthetic construct
  source 1..75: mol_type = other DNA
gcggctgcaaattgaaaaccgccccggttcgtcctgttgttgccgcacgccccgcagaatatgtatgctctgagg

SEQ ID NO: 106662 - DNA, 75 bp, synthetic construct
  source 1..75: mol_type = other DNA
gttaatggaatggatgttaaacatgtatgtgaggtttatggggtaactccttcttacttcaatagggcgctacgt

SEQ ID NO: 106663 - DNA, 75 bp, synthetic construct
  source 1..75: mol_type = other DNA
tccggacggcgagaaagtaccggctgcagagattgccaaagcgtattttgagctgggaatgacgtttcctgaact

SEQ ID NO: 106664 - DNA, 75 bp, synthetic construct
  source 1..75: mol_type = other DNA
gcatggcgatgaatgcctgggcacatcctgatggtgagaaagttcccgcagctgaaatagcccggacttatttcg

SEQ ID NO: 106665 - DNA, 75 bp, synthetic construct
  source 1..75: mol_type = other DNA
ttttacgggcggcagcgctcggtaagaaagttaactcactgactgatgatcgggtactgaaagaagttatgagac

SEQ ID NO: 106666 - DNA, 75 bp, synthetic construct
  source 1..75: mol_type = other DNA
ctgggtcttaatacccagaagattttccgctgggtaaagaaagatactcctgatgccgttgaaaaaatgcaggct

SEQ ID NO: 106667 - DNA, 75 bp, synthetic construct
  source 1..75: mol_type = other DNA
tgcgcatccgcacaacctggcggtaaaacttgagcataccggtctggacgcacaccttgatttattactttccac

SEQ ID NO: 106668 - DNA, 75 bp, synthetic construct
  source 1..75: mol_type = other DNA
aaagataaggcaataataaaaaaaattataaataaagtggtggtctttttctctttttttatttcccttgctttt

SEQ ID NO: 106669 - DNA, 75 bp, synthetic construct
  source 1..75: mol_type = other DNA
tttgaggatgaaaccatcaggaaaaaagctgaagattccggacttactgtatctgcttacatccgaaatgcagca

SEQ ID NO: 106670 - DNA, 75 bp, synthetic construct
  source 1..75: mol_type = other DNA
tggacagcaggcattaaaaggaacaacatcgggaagcagtaacgttgcaattgggtctggctctcttgtcacaaa

SEQ ID NO: 106671 - DNA, 75 bp, synthetic construct
  source 1..75: mol_type = other DNA
ggggtgggtaaaccgttatatcaggacctgattgcgcgcactaaagctgcattacagaagaacccgaaaaatgtg

SEQ ID NO: 106672 - DNA, 75 bp, synthetic construct
  source 1..75: mol_type = other DNA
tgatgcaatattatttgcatcagcaagctatgctttatatttatttttattcgattatgaattttataaaagttt

SEQ ID NO: 106673 - DNA, 75 bp, synthetic construct
  source 1..75: mol_type = other DNA
tgtatttaagatcgccaagcagagcaataaaacctggtccctgacgcatccggtggatgacgcaattaccctgct

SEQ ID NO: 106674 - DNA, 75 bp, synthetic construct
  source 1..75: mol_type = other DNA
aacgccagctggcagaacgggatgaagagctggtcatcctccaaaaggccgcgacatacttcgcgaagcgcctga

SEQ ID NO: 106675 - DNA, 75 bp, synthetic construct
  source 1..75: mol_type = other DNA
tttttcgattccgacactgtcagttgcatatctaatttatgcatgctatcaaaagacatgaaagacaagctttct

SEQ ID NO: 106676 - DNA, 75 bp, synthetic construct
  source 1..75: mol_type = other DNA
atggagtggctggcccggcattccaggttataaaagacagtctgacactgggactgaatgcgctgacgctgacgg

SEQ ID NO: 106677 - DNA, 75 bp, synthetic construct
  source 1..75: mol_type = other DNA
caacttcctaaggacagagaaactctgttctattttaacgtgcgagaaataccgccaaaaacagataaaaaaatg

SEQ ID NO: 106678 - DNA, 75 bp, synthetic construct
  source 1..75: mol_type = other DNA
tagatagactatgtcccgatgggacttggtcaggtaacgtgtttgacttttacagacgaacctatcgaaaactaa

SEQ ID NO: 106679 - DNA, 75 bp, synthetic construct
  source 1..75: mol_type = other DNA
actcagccgttgttgtcagatgggcccctgacagtgctgatggatcattatcttgatactgatgatctggctgac

SEQ ID NO: 106680 - DNA, 75 bp, synthetic construct
  source 1..75: mol_type = other DNA
caggaagaaaaatcgtggttattcccacctacaatatccccgactaaagagaaaatattcgaagctatcagaaat

SEQ ID NO: 106681 - DNA, 75 bp, synthetic construct
  source 1..75: mol_type = other DNA
tcatcaaagacagtattttaatgtcgatgaatgatgtgaaatttggcaaagcatctcttccgaagatagagggct

SEQ ID NO: 106682 - DNA, 75 bp, synthetic construct
  source 1..75: mol_type = other DNA
agcgcacaagattcgttacttatttctatgaaacggctgctgcaccatttgttaacatcatgaatgatattgaga

SEQ ID NO: 106683 - DNA, 75 bp, synthetic construct
  source 1..75: mol_type = other DNA
ggtcgtacaaaagccgcgctggcaaagaacccgaaaaatgtgctgcttgccgtggtgtggatgcagggggaattt

SEQ ID NO: 106684 - DNA, 75 bp, synthetic construct
  source 1..75: mol_type = other DNA
gctttgatcaattcgtctttggtaaagaacgtatagaggccagaaaagaccttgccattgttaatgtctgggatg

SEQ ID NO: 106685 - DNA, 75 bp, synthetic construct
  source 1..75: mol_type = other DNA
acgcttttcacgaccggttatcgctacactaaatattacgatgatgtcgaagtcaatgcctggcaaggcggcgta

SEQ ID NO: 106686 - DNA, 75 bp, synthetic construct
  source 1..75: mol_type = other DNA
tgctttcgcggcaaaaataattagtgaagaagctatgttatccggtattaaggttttacaaggtattgaaaagtt

SEQ ID NO: 106687 - DNA, 75 bp, synthetic construct
  source 1..75: mol_type = other DNA
cgcttgctcaaagggctatgttatctgaggtggaaatagcattttggtcaggaagacgaagtgtggaacaaaata

SEQ ID NO: 106688 - DNA, 75 bp, synthetic construct
  source 1..75: mol_type = other DNA
aagcgagaaaagaggcagagaaatctggtggtgggctgatgcattatttatggcagcaccaacattagccgcatt

SEQ ID NO: 106689 - DNA, 75 bp, synthetic construct
  source 1..75: mol_type = other DNA
cgctaaagagagagaagcgttattaaaattaatgacgcatgagtctattctctttccagatctttcagactattt

SEQ ID NO: 106690 - DNA, 75 bp, synthetic construct
  source 1..75: mol_type = other DNA
tcagacattaacacctgaaggtcgtcagcagcaactagaggaaataaaagagcgtatcgaaaccgttatacaagg

SEQ ID NO: 106691 - DNA, 75 bp, synthetic construct
  source 1..75: mol_type = other DNA
tcggtagttaatgccagcatcagcggcgacacctcgcaacaaggactggcgcgccttccggctctgctgaaacag

SEQ ID NO: 106692 - DNA, 75 bp, synthetic construct
  source 1..75: mol_type = other DNA
gggttacttctgcgaacggggagctgttttcgctttttgccgacgggttgcgcgctatcttttatggtggtttga

SEQ ID NO: 106693 - DNA, 75 bp, synthetic construct
  source 1..75: mol_type = other DNA
gttgtcggcgtcattgcgggtgtactttgcgcccgttatgtcggttctccgctggatttcaccgtgcgaacatta

SEQ ID NO: 106694 - DNA, 75 bp, synthetic construct
  source 1..75: mol_type = other DNA
tcggagggatatgttgattattttggagtgtgcaagggcaaagagataaaacaggacgaagattcaaaaccagca

SEQ ID NO: 106695 - DNA, 75 bp, synthetic construct
  source 1..75: mol_type = other DNA
tcgcaaaaaaccatcccggtaccgatggtcgtaggccacgaatatgttggtgaaatagtggctattggtcaggaa

SEQ ID NO: 106696 - DNA, 75 bp, synthetic construct
  source 1..75: mol_type = other DNA
atgaacaagagcgaagcgagaacaccagtgcgacggggaagaccaaaaagtgccgggcttgatgagcgtaagaaa

SEQ ID NO: 106697 - DNA, 75 bp, synthetic construct
  source 1..75: mol_type = other DNA
gggtactttaaaccctaatgctattttcttcttcacaaatccgacagtgacaagtgaaagtggtgggactcaatc

SEQ ID NO: 106698 - DNA, 75 bp, synthetic construct
  source 1..75: mol_type = other DNA
cgaagttatcgaattttacgacgaccagagtggctatgagcgcgggctgacgttgccactgcgccatccttcagg

SEQ ID NO: 106699 - DNA, 75 bp, synthetic construct
  source 1..75: mol_type = other DNA
gatcaccgatgttaacgaataccgccttgagctggcgcgcaaaatgggtatcacccgtgcggttaacgtcgcgaa

SEQ ID NO: 106700 - DNA, 75 bp, synthetic construct
  source 1..75: mol_type = other DNA
cgcaatcatgggcggtacgttactgactggcatctgctttgtgttgataaataacctcaccgacctgctggtcag

SEQ ID NO: 106701 - DNA, 75 bp, synthetic construct
  source 1..75: mol_type = other DNA
aacacgttggtgcacgcaatgtggtgatcactgatgttaacgaataccgccttgagctggcgcgcaaaatgggta

SEQ ID NO: 106702 - DNA, 75 bp, synthetic construct
  source 1..75: mol_type = other DNA
aataaagaaaaagaatattacctgttcttagatgaggttcgaaggaatctgagagttatttatttggcgtatcgt

SEQ ID NO: 106703 - DNA, 75 bp, synthetic construct
  source 1..75: mol_type = other DNA
aaggcgatggcgcaagatatcatataggtgcaattgttcaggatgttatctctgcgttcgaggatgaaggactag

SEQ ID NO: 106704 - DNA, 75 bp, synthetic construct
  source 1..75: mol_type = other DNA
ccattgaacagtgtgaactggtgatcaaagcggcgcgtaaggcgctggcggccatgcgagtcagtgtcgaagaag

SEQ ID NO: 106705 - DNA, 75 bp, synthetic construct
  source 1..75: mol_type = other DNA
acattattttgggcatcaatgttaaaagatcattcaggtgtctggttggtgtttaacgttgatcattctggacgg

SEQ ID NO: 106706 - DNA, 75 bp, synthetic construct
  source 1..75: mol_type = other DNA
ctgacgctgaccattgaacagtgtgaactggtgattaaagcggcgcataaggcactggcggccatgcgagtaagt

SEQ ID NO: 106707 - DNA, 75 bp, synthetic construct
  source 1..75: mol_type = other DNA
cgaagcattaaaacttactaatcaaagtaaaaacctgccctatctggcccaaacatggatagaagatacgaaagg

SEQ ID NO: 106708 - DNA, 75 bp, synthetic construct
  source 1..75: mol_type = other DNA
acccgaaaaaccgcctgcttgctgtggtgtggatgcagggcgagtttgatattgatgcgaagccgacggagcatt

SEQ ID NO: 106709 - DNA, 75 bp, synthetic construct
  source 1..75: mol_type = other DNA
atttgttacttggacgttaccacgttcatttcaacgcagggcgattgaaatggtggcgtaaaaagtgccgcgagg

SEQ ID NO: 106710 - DNA, 75 bp, synthetic construct
  source 1..75: mol_type = other DNA
cgccgtaagcaggagcaacgccagaaggcaatggatgcatttttcgaagccttcgggattgacagcatggaacca

SEQ ID NO: 106711 - DNA, 75 bp, synthetic construct
  source 1..75: mol_type = other DNA
gcctgtgcggcggcgctggcgaccatcaatgtgttgctggagcagaacttaccggctcaggctgagcaaaaaggc

SEQ ID NO: 106712 - DNA, 75 bp, synthetic construct
  source 1..75: mol_type = other DNA
aacaatcagttcgggctggggatttatctgtatacggatgctcccgttcctgatggtgtggcgatgacgggtacc

SEQ ID NO: 106713 - DNA, 75 bp, synthetic construct
  source 1..75: mol_type = other DNA
cctggtgaaatgggccaatactgctaatggactcaacaggtttgtcattacggatattacaggtagtgcagaaac

SEQ ID NO: 106714 - DNA, 75 bp, synthetic construct
  source 1..75: mol_type = other DNA
ggtcaaaacagcgttacggtgccccacgcctgacggatgaactgcgtgctcagggttatggcgcccgaaccggat

SEQ ID NO: 106715 - DNA, 75 bp, synthetic construct
  source 1..75: mol_type = other DNA
aatcgacctgtacgcggtagatggcgatgagtacaaattcctctgtgttgctaaaggcggcggctctgccaacaa

SEQ ID NO: 106716 - DNA, 75 bp, synthetic construct
  source 1..75: mol_type = other DNA
tcattaccggctttaagcatctctcctcgtcacaggacgaagcccgctatgaagtgcgtcttgaaccccgtatgg

SEQ ID NO: 106717 - DNA, 75 bp, synthetic construct
  source 1..75: mol_type = other DNA
cctcgctggtaatgacttttttcggcatcccaatactgacgcaattttttgcagcggttattgccatgctggggg

SEQ ID NO: 106718 - DNA, 75 bp, synthetic construct
  source 1..75: mol_type = other DNA
atggcgttcccgtctccggcgtctgactacgttgagcagcgtctgtctgttaacgcgatctgcaatgtaggccca

SEQ ID NO: 106719 - DNA, 75 bp, synthetic construct
  source 1..75: mol_type = other DNA
cctcgacggtgccgattggcacgctgcatatgccgctcaaacagttgcacgacaaaggcgtaaaagtgatgactg

SEQ ID NO: 106720 - DNA, 75 bp, synthetic construct
  source 1..75: mol_type = other DNA
gtgctgtcggtaaaccgatcggtttacttttcattgctgaaaaaattgttccaggcaatgaacctctgccagatc

SEQ ID NO: 106721 - DNA, 75 bp, synthetic construct
  source 1..75: mol_type = other DNA
caaagaggtcaacaccggcactaacctgcctgcgcaaatcgacctgtacgcggtagatggcgatgagtacaaatt

SEQ ID NO: 106722 - DNA, 75 bp, synthetic construct
  source 1..75: mol_type = other DNA
atacctgcaatgaggaagccagcgactacgtgacgttaaccagtaccgaagaactgtcattccgcgttaaagagg

SEQ ID NO: 106723 - DNA, 75 bp, synthetic construct
  source 1..75: mol_type = other DNA
aggaaaccaaagccctgctgactcccggcaaactgaaaaacttcctcgtcgagaaaatgcgtaccctcggtactg

SEQ ID NO: 106724 - DNA, 75 bp, synthetic construct
  source 1..75: mol_type = other DNA
ataaggatatcgttatgaccaggatgcgtcagttactccttgcttcacttttcacctgcgcaggcacattagcca

SEQ ID NO: 106725 - DNA, 75 bp, synthetic construct
  source 1..75: mol_type = other DNA
gcgctggcctggcttggcgatgacttcacgtattacatcggtttaccggatgaagagacattctcgctgccggat

SEQ ID NO: 106726 - DNA, 75 bp, synthetic construct
  source 1..75: mol_type = other DNA
ccgacaacgtcaaccagacgcaaagtgataaaccggtcgaaaaccccggcattgcagcccgctttacgttggggc

SEQ ID NO: 106727 - DNA, 75 bp, synthetic construct
  source 1..75: mol_type = other DNA
gctggctttccataccttgctttttggtatcggcatcatctgtggaattgtgctgatattcctgatcttttcttt

SEQ ID NO: 106728 - DNA, 75 bp, synthetic construct
  source 1..75: mol_type = other DNA
ttgtttttgggtttgcttactgtatttgcaattttacttcgtttttttatttaccggagactcagaaagaaaaca

SEQ ID NO: 106729 - DNA, 75 bp, synthetic construct
  source 1..75: mol_type = other DNA
tatcgagtttttcgacgaccagagcggctatgagcgcggactgacgctgccgcttcgccatccttcagggctgca

SEQ ID NO: 106730 - DNA, 75 bp, synthetic construct
  source 1..75: mol_type = other DNA
ggtaaacgaagacaaaagtccgccattgccaaatatactgaaccggcaatttaaccccgccgcaccaaaccgcgt

SEQ ID NO: 106731 - DNA, 75 bp, synthetic construct
  source 1..75: mol_type = other DNA
aggcgctagcgggcgttctgggtatctccggcgcagaactcggctattctgtacgcccggtcagactggaggatg

SEQ ID NO: 106732 - DNA, 75 bp, synthetic construct
  source 1..75: mol_type = other DNA
ttggttggctggataatcgcgctacatctggcagattatcaatttcgccagatgggagccggttggttggcaaac

SEQ ID NO: 106733 - DNA, 75 bp, synthetic construct
  source 1..75: mol_type = other DNA
ccgttcacactggtgaaatctccggcatcaggggcggcggacaaactgcaactgacaggcatatcaaaggcggcg

SEQ ID NO: 106734 - DNA, 75 bp, synthetic construct
  source 1..75: mol_type = other DNA
atgtttcccttggttaaaaaaacggttagtgcattatttgtgagtactctgttagccagtgcaccagcattcgct

SEQ ID NO: 106735 - DNA, 75 bp, synthetic construct
  source 1..75: mol_type = other DNA
tatcgcaattcgctctctcccttcgccttacttattatttggcggtacagcggtcattggcggtgggattgcatt

SEQ ID NO: 106736 - DNA, 75 bp, synthetic construct
  source 1..75: mol_type = other DNA
ccaggcaatgaacctctgccagatccccggacgtgcaggagcactgattacgacgcttcttcgccatatatcgac

SEQ ID NO: 106737 - DNA, 75 bp, synthetic construct
  source 1..75: mol_type = other DNA
gcccaacaacgcctcaacgtttatcgcggtacgctatcagcgcaccggcgaactggaagagaatgcgcagcgttt

SEQ ID NO: 106738 - DNA, 75 bp, synthetic construct
  source 1..75: mol_type = other DNA
gtgtattgaaattgctcaaggagagtatataaccggtcttgatgatgatgacttattccttccagaaagattaga

SEQ ID NO: 106739 - DNA, 75 bp, synthetic construct
  source 1..75: mol_type = other DNA
attttctctgaagttattaaggaatataaagcactgtttctcgatcttccgagaccggaaaatgaagagctccct

SEQ ID NO: 106740 - DNA, 75 bp, synthetic construct
  source 1..75: mol_type = other DNA
tcggagaactaaacgccaatctggatcttagtattgatgatccagccaaatcttcatcatccataaacaaagata

SEQ ID NO: 106741 - DNA, 75 bp, synthetic construct
  source 1..75: mol_type = other DNA
tgaatccattggttattacggctcaacgtggcgtaacagcgctgccacctggacatctgcggaccgggaaagcca

SEQ ID NO: 106742 - DNA, 75 bp, synthetic construct
  source 1..75: mol_type = other DNA
cgctggtggatatggcgtttatcgcctggcgcaatctgcgtttgattaatcgcatcgccacgctgtatggcattg

SEQ ID NO: 106743 - DNA, 75 bp, synthetic construct
  source 1..75: mol_type = other DNA
aacacccgcgttttcgaaagggatggcggttatgttgtgctggatatctccctgaagccaaagcagggtagtcag

SEQ ID NO: 106744 - DNA, 75 bp, synthetic construct
  source 1..75: mol_type = other DNA
cagaaacgaaacagcctgaaccagtggcgcaacaggaagtggaaaaagtctgcaccgcctgcggtcagaccggcg

SEQ ID NO: 106745 - DNA, 75 bp, synthetic construct
  source 1..75: mol_type = other DNA
tcagtactgagtccatactcgagggcaagaaatttgcaggaactccaagaggcaaagtgggtcttaccggtaact

SEQ ID NO: 106746 - DNA, 75 bp, synthetic construct
  source 1..75: mol_type = other DNA
atattccgattagatataggtcaggaagaagctaaagagagagaagcactcttaaaattaatgacacgtgaatca

SEQ ID NO: 106747 - DNA, 75 bp, synthetic construct
  source 1..75: mol_type = other DNA
atggacgcttacatcatcgccggattaatcggagtttctgtatttctggttggttttattatagccgtactgata

SEQ ID NO: 106748 - DNA, 75 bp, synthetic construct
  source 1..75: mol_type = other DNA
tcctgatgcatgagccgctggccggatgcggtggtacggctgagagccgcagaggagaagtagcgtccattttca

SEQ ID NO: 106749 - DNA, 75 bp, synthetic construct
  source 1..75: mol_type = other DNA
ttcgtgaccatatgaccgctgatcaactggcgttgctcgcgtatctggaaagccgtaactgtgtgctactggata

SEQ ID NO: 106750 - DNA, 75 bp, synthetic construct
  source 1..75: mol_type = other DNA
ggtaacgctggtgacctgggcagtaatggtgctcaagcgcctgctgccggggcgcgtgatggacaaaatattgca

SEQ ID NO: 106751 - DNA, 75 bp, synthetic construct
  source 1..75: mol_type = other DNA
tgcccggcacgggggatggtggctatccgggagtggtcaccacggagccagattattactacgttattccactgg

SEQ ID NO: 106752 - DNA, 75 bp, synthetic construct
  source 1..75: mol_type = other DNA
aaccggctcttcaggctcccggcgaaatcgtccgggggccggaggatatccggcagtccattcagattatcctgc

SEQ ID NO: 106753 - DNA, 75 bp, synthetic construct
  source 1..75: mol_type = other DNA
gacagccggttaaacatcactaccgggtaaacgaagacaaaagtccgccattgccaaatttactgaaccggcaat

SEQ ID NO: 106754 - DNA, 75 bp, synthetic construct
  source 1..75: mol_type = other DNA
tcttccttagtattctttcttcgagtgcactggcatctcctgtagcaagcactgataaacccaggagtccattca

SEQ ID NO: 106755 - DNA, 75 bp, synthetic construct
  source 1..75: mol_type = other DNA
ggcattgataacggcgcattttctgcatgggtgcgtgggctaaaaattaactggagtgatttttataaatggctc

SEQ ID NO: 106756 - DNA, 75 bp, synthetic construct
  source 1..75: mol_type = other DNA
ttcttttggtggctttcatgaggccatcaaacatgatgttgagagaagtccaggtatcctctgttccattcccgt

SEQ ID NO: 106757 - DNA, 75 bp, synthetic construct
  source 1..75: mol_type = other DNA
cctaaatgctttgtttcaaaaaaagatatcatttacgcatctattggatatgcaaatggggcttcatatgacgcc

SEQ ID NO: 106758 - DNA, 75 bp, synthetic construct
  source 1..75: mol_type = other DNA
tgaacgcttgaaaatgctggcggatgagcggctgtataagagtaagaaaaacggcagggcgcagattagctggca

SEQ ID NO: 106759 - DNA, 75 bp, synthetic construct
  source 1..75: mol_type = other DNA
taatgctaaaaacgccatcttcaccgtttcggaagcgatggagcacttctcctatttgccgaccggattgtacgt

SEQ ID NO: 106760 - DNA, 75 bp, synthetic construct
  source 1..75: mol_type = other DNA
gtgatcaaattgatgaagtcgataaagagttgctgaatttattagcgaagcgtctggaactggttgccgaagtcg

SEQ ID NO: 106761 - DNA, 75 bp, synthetic construct
  source 1..75: mol_type = other DNA
ctgctgtagcagcatcagtattgatggctatgtccgctcaggcagctgagatttataacaaagacagcaataaat

SEQ ID NO: 106762 - DNA, 75 bp, synthetic construct
  source 1..75: mol_type = other DNA
acaaggaggcagcggaaagcggcgcgttttacgcccgtatccgccacgaacgctacctgaatgaacaggccattc

SEQ ID NO: 106763 - DNA, 75 bp, synthetic construct
  source 1..75: mol_type = other DNA
cctgtaacgtctcgcgggcagtacttttatggcgaaggagtaagcgcggctagagatatccttgctccgaaggga

SEQ ID NO: 106764 - DNA, 75 bp, synthetic construct
  source 1..75: mol_type = other DNA
cactgacagctaatcagtacgcactggcgctgtactggccggtttcttcactgcctcagggcgtcacactggaag

SEQ ID NO: 106765 - DNA, 75 bp, synthetic construct
  source 1..75: mol_type = other DNA
cgatggcgttgcgctacacgcggcggcggtgtcgcacggcagcctgaccgtttcgattaacgaaaccagcaacgt

SEQ ID NO: 106766 - DNA, 75 bp, synthetic construct
  source 1..75: mol_type = other DNA
atagcgacattactcaaggggtaatgataaatcgcgctcaagcacgtagggggccgagccacgaagatattcgtg

SEQ ID NO: 106767 - DNA, 75 bp, synthetic construct
  source 1..75: mol_type = other DNA
ggcggcaccgcgcgtgattcgtgaggggcaaccctgcacggtcaggctgggcgcggataccgtgctgacggggta

SEQ ID NO: 106768 - DNA, 75 bp, synthetic construct
  source 1..75: mol_type = other DNA
atgggactcgatatttacttttatgccagtgaaaagcgcggtgcagacaaaagccggatacccggctcacgttac

SEQ ID NO: 106769 - DNA, 75 bp, synthetic construct
  source 1..75: mol_type = other DNA
tttttgtacgaatgttttgataggaatgttctgaaggatttgaattacattgtaccaatttctgatgtttttaaa

SEQ ID NO: 106770 - DNA, 75 bp, synthetic construct
  source 1..75: mol_type = other DNA
tatttgctttttttaacatatcctgcgcattttactttggtatgctgaactcacttggaggggatttcaaatatg

SEQ ID NO: 106771 - DNA, 75 bp, synthetic construct
  source 1..75: mol_type = other DNA
cacaaagtgcaggcattacttttttacagggcgtagagagcgtcagagaaacaatgcgctgcccgtactgggtgc

SEQ ID NO: 106772 - DNA, 75 bp, synthetic construct
  source 1..75: mol_type = other DNA
gccggatgacattatgtcaattttgcaggcgctgcatgaggcgggcgcgctggatgctgacctggaggtgatttg

SEQ ID NO: 106773 - DNA, 75 bp, synthetic construct
  source 1..75: mol_type = other DNA
gctacgggaggtaaggccctgcaactgaataaaccggaaaaccacatctggtttctggagcatgatgcagccggg

SEQ ID NO: 106774 - DNA, 75 bp, synthetic construct
  source 1..75: mol_type = other DNA
tttccgcaaggtagagcactggttcggcgattacgctcaacgcttccagagtgaaagccgcgtattattgcgtca

SEQ ID NO: 106775 - DNA, 75 bp, synthetic construct
  source 1..75: mol_type = other DNA
agatgggacgcctgttcgagaagatgctgacactctcgggttatcaggtgcggattctggagcaacatgactggg

SEQ ID NO: 106776 - DNA, 75 bp, synthetic construct
  source 1..75: mol_type = other DNA
aacctctttaaagcagccctaatacaatatataacaaacaataacacactactaattgaaatatataaaaacgct

SEQ ID NO: 106777 - DNA, 75 bp, synthetic construct
  source 1..75: mol_type = other DNA
atgaaaaaaattacagtggcactttctacggttgcagcatctgttctgatggcaatgtctgcacaagcggcagaa

SEQ ID NO: 106778 - DNA, 75 bp, synthetic construct
  source 1..75: mol_type = other DNA
cagacaccgcaggtagcactggacatgcgtctgatgaccgacagtgcgggaaatctacggttggttgcagactat

SEQ ID NO: 106779 - DNA, 75 bp, synthetic construct
  source 1..75: mol_type = other DNA
cccagtccgatctggcggctgacattgaagaaaaggacacccacctttttgcggagctgggcaagcgacgtcttg

SEQ ID NO: 106780 - DNA, 75 bp, synthetic construct
  source 1..75: mol_type = other DNA
ccattgttttggcagatcctgacgatgttgaatcctacctgcagtccctgaatctgagccaaagtgatctcaggc

SEQ ID NO: 106781 - DNA, 75 bp, synthetic construct
  source 1..75: mol_type = other DNA
gaagatttttatacaccagagtctggttattttacgactgtcgcccgacagttagcgctggctggattatcggca

SEQ ID NO: 106782 - DNA, 75 bp, synthetic construct
  source 1..75: mol_type = other DNA
aactgctgacgacactgaatctgaagctggaaccggcggatgattttcgtgatgaaccggtgaagttaaccgcgt

SEQ ID NO: 106783 - DNA, 75 bp, synthetic construct
  source 1..75: mol_type = other DNA
cttaccggaaaaaacctgctcattgaaaagtcaaaaatcgaaatgaatgtcgaacaattaagaaaaggaattgcg

SEQ ID NO: 106784 - DNA, 75 bp, synthetic construct
  source 1..75: mol_type = other DNA
tataactcattcttcggacttggtgcaggagaaaaagttaagggcggtagatataacgttggagttggctttgag

SEQ ID NO: 106785 - DNA, 75 bp, synthetic construct
  source 1..75: mol_type = other DNA
atgtggacggagcggttagggatactggcgggaacacatgaaaacgtaaccacgctaccagtagccagaagaaaa

SEQ ID NO: 106786 - DNA, 75 bp, synthetic construct
  source 1..75: mol_type = other DNA
ggcggtagcgttgaacaagacatggatattgcccaaagcgcaatggcggcaattaacgtgggagtaaaccaatga

SEQ ID NO: 106787 - DNA, 75 bp, synthetic construct
  source 1..75: mol_type = other DNA
aaggcatttacggccgtgagatgttcgaaacctggtataaaatggcggcgctgattcagtctggtctggatctct

SEQ ID NO: 106788 - DNA, 75 bp, synthetic construct
  source 1..75: mol_type = other DNA
aacgggcagactgtattcagcgaaagccgcaccacgttgcgtgtctggtgggcagaaactacctggcagatgcag

SEQ ID NO: 106789 - DNA, 75 bp, synthetic construct
  source 1..75: mol_type = other DNA
gcagtacggctgtgtcggacagggcttacatattgccaaaaaactgcttccgtatatccctaataatgcggggat

SEQ ID NO: 106790 - DNA, 75 bp, synthetic construct
  source 1..75: mol_type = other DNA
catcaggttctgaatctataaatgagcgttatacattgttctataattataatgataaaggagatgtgacattaa

SEQ ID NO: 106791 - DNA, 75 bp, synthetic construct
  source 1..75: mol_type = other DNA
cattgatgagtaatatttcaggaaataataataccggagttggcttcctgactttgtatcgatgtactggaacag

SEQ ID NO: 106792 - DNA, 75 bp, synthetic construct
  source 1..75: mol_type = other DNA
acttacaccgtatttatggatttatcgcttggcgtgaccggaccactggctgggctggtgatgagttgggcgggc

SEQ ID NO: 106793 - DNA, 75 bp, synthetic construct
  source 1..75: mol_type = other DNA
tatataatcacgattatagctttacaacaagcggggctatgcttgatgcaatgagtaacgatgtagttattgttt

SEQ ID NO: 106794 - DNA, 75 bp, synthetic construct
  source 1..75: mol_type = other DNA
aaacagggtgcatacgccacccagccggggctgtttgattccatggtggaaaaatatcgttctgacctgtcggaa

SEQ ID NO: 106795 - DNA, 75 bp, synthetic construct
  source 1..75: mol_type = other DNA
gatgccacagaccttaacgtgatgtatcacaaaggaaacacggcgcagaacacgaagctggggtcattcggcgca

SEQ ID NO: 106796 - DNA, 75 bp, synthetic construct
  source 1..75: mol_type = other DNA
aactgttgggaacgttaagtctgaaactggagccggcagatgattttcgtgatgagccggtgaagttaacggcgt

SEQ ID NO: 106797 - DNA, 75 bp, synthetic construct
  source 1..75: mol_type = other DNA
cctttgtcgggctgttcttcttcggctggcaacggctgaataaataccagcacctgctggtgacgtggctggtgg

SEQ ID NO: 106798 - DNA, 75 bp, synthetic construct
  source 1..75: mol_type = other DNA
taatggcgaggacgtcaggccggtggccgaccgcgtgaccgtgcagtctgccgccatcgttgaataccagataaa

SEQ ID NO: 106799 - DNA, 75 bp, synthetic construct
  source 1..75: mol_type = other DNA
ataatggtttattcacgaccatggttcagcagttcagaactgacctgtctccgcttgctgcgcagtgtgtgagtg

SEQ ID NO: 106800 - DNA, 75 bp, synthetic construct
  source 1..75: mol_type = other DNA
aaggcaaccgcgctgaatctcaaggttcctccaaagataaaacccgtcttgccttcgctggcctgaaattcggtg

SEQ ID NO: 106801 - DNA, 75 bp, synthetic construct
  source 1..75: mol_type = other DNA
gacgcccagccgtttattgccgactggatggcgaagcagttgcagcctttaagtaaaatcatgactcataaagca

SEQ ID NO: 106802 - DNA, 75 bp, synthetic construct
  source 1..75: mol_type = other DNA
cgctgccaacatgaacaccgcgcggctggtcatcacaccggccacggacaccacggaggccgtcatggaaagcga

SEQ ID NO: 106803 - DNA, 75 bp, synthetic construct
  source 1..75: mol_type = other DNA
gtgggacgatctcagcacattgccgaaaactgtgccagcagggtcaactccagaatcgtcaggtggtactggcga

SEQ ID NO: 106804 - DNA, 75 bp, synthetic construct
  source 1..75: mol_type = other DNA
gaaccgtcagactgggataatgctgaaacacatacccgtccgtcaggaaatgaaactgcttccagctccccttcc

SEQ ID NO: 106805 - DNA, 75 bp, synthetic construct
  source 1..75: mol_type = other DNA
atcaccaaaaatgcaacttacccggtgctgattgacagcattgtggtggaagtgaaaaaagcggtaacagaataa

SEQ ID NO: 106806 - DNA, 75 bp, synthetic construct
  source 1..75: mol_type = other DNA
aaacatcgaccctataaaaaatttattattgatgagataaaaaaatacaagaaagtaaaaggagggtttaattgt

SEQ ID NO: 106807 - DNA, 75 bp, synthetic construct
  source 1..75: mol_type = other DNA
cggatacagcattttgcctttcctgccactcgatgagtaaaccttttgaggaatatcagggaactgtccactttt

SEQ ID NO: 106808 - DNA, 75 bp, synthetic construct
  source 1..75: mol_type = other DNA
tgatttgtggtcagggacgacttgaagcgtatattgagtatggtgaaacgaaaattcctgcaatcatcaagcagg

SEQ ID NO: 106809 - DNA, 75 bp, synthetic construct
  source 1..75: mol_type = other DNA
atgtgcaggcggtgggtattcagaccaacgcctcgtttaatttatcctcgttgatagcgactattcaggataatc

SEQ ID NO: 106810 - DNA, 75 bp, synthetic construct
  source 1..75: mol_type = other DNA
cgccgatcattacccatcgtttctctatcgatgatttccagaagggctttgacgctatgcgttcgggccctgact

SEQ ID NO: 106811 - DNA, 75 bp, synthetic construct
  source 1..75: mol_type = other DNA
agtctcaagagaagcaaaaaaatataaaagcaaatgatatttttgaagccaggatgataattgaaaaggaattat

SEQ ID NO: 106812 - DNA, 75 bp, synthetic construct
  source 1..75: mol_type = other DNA
cttttattgccaccagcggcgcgttccacggtaaatcacttggcgcgctgtcggccacggcgaaatcgaccttcc

SEQ ID NO: 106813 - DNA, 75 bp, synthetic construct
  source 1..75: mol_type = other DNA
aggcaacttttaatcaggctgtaactaccagcactcagtggagcgctccgctgaacgtagcaattacttattact

SEQ ID NO: 106814 - DNA, 75 bp, synthetic construct
  source 1..75: mol_type = other DNA
tgttcgacaatccgtttctgcataccaccacttttggcggcaacccgctggcctgtgcggcagcgctggcaacca

SEQ ID NO: 106815 - DNA, 75 bp, synthetic construct
  source 1..75: mol_type = other DNA
cggaattaaagtcagcctgattgaacccggtcctattcgtactcgttttaccgacaacgtcaaccagacacaaag

SEQ ID NO: 106816 - DNA, 75 bp, synthetic construct
  source 1..75: mol_type = other DNA
gcgtcagccgtgatgtggaaggtgtgattgaaatgctgcgccgtatggggcttgagcgattcatccgcacgaaag

SEQ ID NO: 106817 - DNA, 75 bp, synthetic construct
  source 1..75: mol_type = other DNA
gaaaacccttgcggcgctaacgcccggtaaactgaaatacagcttcttttgtaatagcggcaccgagtccgttga

SEQ ID NO: 106818 - DNA, 75 bp, synthetic construct
  source 1..75: mol_type = other DNA
gcacttacaatgcgcagaaggagcgagcacagaaagaagtcttgaacttttccgggcatataactatactccccg

SEQ ID NO: 106819 - DNA, 75 bp, synthetic construct
  source 1..75: mol_type = other DNA
ggtaaggccagtatccggtgatccgaacgtggaaattaccggagcgggtattggtgctgtcattccgttaagtgc

SEQ ID NO: 106820 - DNA, 75 bp, synthetic construct
  source 1..75: mol_type = other DNA
agttctactcgggtgatttatgacggtaataagaaagaagcatcgctaaccgtacaaaacaaaaataaatcagaa

SEQ ID NO: 106821 - DNA, 75 bp, synthetic construct
  source 1..75: mol_type = other DNA
aaggtatttacggtcgtgagatgtttgaaacctggtacaagatggcggcgctgattcagtctggcctcgatcttt

SEQ ID NO: 106822 - DNA, 75 bp, synthetic construct
  source 1..75: mol_type = other DNA
accattgtcttcatgatgtgcaggacatgagtaatctgaatcacccgaaagcagaccttaataaagggcagtacg

SEQ ID NO: 106823 - DNA, 75 bp, synthetic construct
  source 1..75: mol_type = other DNA
atgtcacagacccagtccgatacttttacgctgtcttatcctttcaccactgctgcaggtaccagaattgaacag

SEQ ID NO: 106824 - DNA, 75 bp, synthetic construct
  source 1..75: mol_type = other DNA
ggaaatgctgtacacacggcactgtcgtttgatttagtgggcgaagatgttctggtttctggtgcaggcccgatt

SEQ ID NO: 106825 - DNA, 75 bp, synthetic construct
  source 1..75: mol_type = other DNA
cgagacagatgaattgatagcgtggccggtgctctatgtaccatcaggttctgtagtgaacgtatatcttgatgg

SEQ ID NO: 106826 - DNA, 75 bp, synthetic construct
  source 1..75: mol_type = other DNA
ctgacggcaacgctaacctctgcaaatggcactccagtggagggtcaggtcatcaactttagcgtaacgccagaa

SEQ ID NO: 106827 - DNA, 75 bp, synthetic construct
  source 1..75: mol_type = other DNA
gtgggacagccagcctgcgtcgatggttggtggtcgccagtacatcgtcgaagacccggaaattaaccgttaccg

SEQ ID NO: 106828 - DNA, 75 bp, synthetic construct
  source 1..75: mol_type = other DNA
caatatatattctatgatgcagcttcatccttttgttatctatatgcgtggtatttattttacaaaaacaaagag

SEQ ID NO: 106829 - DNA, 75 bp, synthetic construct
  source 1..75: mol_type = other DNA
cagaaatcgatcatccgctgttaaaaacaccgctggcaattgatcatcgccccgatttcagccgctggaatgccc

SEQ ID NO: 106830 - DNA, 75 bp, synthetic construct
  source 1..75: mol_type = other DNA
ggacttttcaggtagtgagcagacttcatttcgggatctactggagcgtgagcattttactgtggattacgaata

SEQ ID NO: 106831 - DNA, 75 bp, synthetic construct
  source 1..75: mol_type = other DNA
cggggatgggtgagagcaaccagggcgctgacgcaggcgcaggggctgctggcgagatggttccggtttcagccg

SEQ ID NO: 106832 - DNA, 75 bp, synthetic construct
  source 1..75: mol_type = other DNA
tcggtctgcgtccatctgttgcttaccttcagtcaaaaggtaaagaccttggtgttcatggtgaccgagacttag

SEQ ID NO: 106833 - DNA, 75 bp, synthetic construct
  source 1..75: mol_type = other DNA
tttcaagctcggcctcctgggtaggcgttgatgctactggtaaagtgacattcaaaaatgacggtgatagcaata

SEQ ID NO: 106834 - DNA, 75 bp, synthetic construct
  source 1..75: mol_type = other DNA
tgttaattcgcacatgtcatttgactaaagaacagatactcgatctcctgaaggcaaaggatttttatggttgcc

SEQ ID NO: 106835 - DNA, 75 bp, synthetic construct
  source 1..75: mol_type = other DNA
acgggcatgcgccacatgaatggcgaaatcaaaacgggaggtgaagcccaccgccttttccatcagtttttcgca

SEQ ID NO: 106836 - DNA, 75 bp, synthetic construct
  source 1..75: mol_type = other DNA
atgaaagctactaaactggtactgggcgcggtaatcctgggttctactctgctggcaggttgctccagcaacgct

SEQ ID NO: 106837 - DNA, 75 bp, synthetic construct
  source 1..75: mol_type = other DNA
attcctggccgtgaagaagagtttcgggatggcgtagcagcagcgattcgttatgctcgtgcgctgggtaataaa

SEQ ID NO: 106838 - DNA, 75 bp, synthetic construct
  source 1..75: mol_type = other DNA
atgcaaaactggataaagacggtggtcgtagccgtaagcctggcgctgcccggcgtggcgctggcgcaatcgctg

SEQ ID NO: 106839 - DNA, 75 bp, synthetic construct
  source 1..75: mol_type = other DNA
gcctcacgttacgcagaagcggacagcgacggcgatattgaagtcgggtatttccgtaaggttaatgcgctgttt

SEQ ID NO: 106840 - DNA, 75 bp, synthetic construct
  source 1..75: mol_type = other DNA
ctgcagaaacgatttcagcaagtcactgggctgggcaagagcgacgaaaacgctgatgcaggcgcaggggctgct

SEQ ID NO: 106841 - DNA, 75 bp, synthetic construct
  source 1..75: mol_type = other DNA
tggagaaaagcgtcaccacgcgggactacaactaccgcaccgccacagcagagatgatgacagagcagcatgacg

SEQ ID NO: 106842 - DNA, 75 bp, synthetic construct
  source 1..75: mol_type = other DNA
ttgcagaaacgatttcagctcgtcactgggatgggcgagagcggcgaaggcgttgacgcaagcacaggggctgct

SEQ ID NO: 106843 - DNA, 75 bp, synthetic construct
  source 1..75: mol_type = other DNA
cacgcaccggcacggtggtaatgggtgacggtatcgcgttgcatgcggcggcggtgtcgcacggcagtcttactg

SEQ ID NO: 106844 - DNA, 75 bp, synthetic construct
  source 1..75: mol_type = other DNA
ttcatggtaggataattgatcatttaggtattcaaatgtatcaaagtccaacagcagcaatagctgaaatggttt

SEQ ID NO: 106845 - DNA, 75 bp, synthetic construct
  source 1..75: mol_type = other DNA
ttaaggagcgggtgatccgcaacagtctgcggccccctgccgtgcccggtatcggacgcaccgagaaatacggga

SEQ ID NO: 106846 - DNA, 75 bp, synthetic construct
  source 1..75: mol_type = other DNA
agccagcggctttcttcaacgctttgaccctttaatgtttgttgtggattacaaccgttctactgagctttttgt

SEQ ID NO: 106847 - DNA, 75 bp, synthetic construct
  source 1..75: mol_type = other DNA
agtcaatatggcaccaatattactattaatgatggtgacagaattacaggagatactgccatccatcaggaaacc

SEQ ID NO: 106848 - DNA, 75 bp, synthetic construct
  source 1..75: mol_type = other DNA
tcagtttgattcgaagctggcgcagatagtccagcagcaggggcgtaacgggcagttgcgtatcgggtttggcag

SEQ ID NO: 106849 - DNA, 75 bp, synthetic construct
  source 1..75: mol_type = other DNA
gacgatgacacactcagcattccactgacgccccccgacagcgggtggcaggccacttacattgaagccaccttc

SEQ ID NO: 106850 - DNA, 75 bp, synthetic construct
  source 1..75: mol_type = other DNA
gtttctgctcgttttgattataaaattggttcagaatcgttatcgaatgaaataggatttgaacctaataaaaat

SEQ ID NO: 106851 - DNA, 75 bp, synthetic construct
  source 1..75: mol_type = other DNA
tgcaaatatcacagctaatcactgataccatcagtttgttagaccaagattctgatgaatatcaaaagcctcagc

SEQ ID NO: 106852 - DNA, 75 bp, synthetic construct
  source 1..75: mol_type = other DNA
ttgataaaattcgtgattcatcaaatgatgattatatcaatacatcgaaacttaccatcgatgtgattgagagag

SEQ ID NO: 106853 - DNA, 75 bp, synthetic construct
  source 1..75: mol_type = other DNA
gttggcttttttttagcgatggatctcgattcagcctcgccaaggaagactaatgagccacatttcattattata

SEQ ID NO: 106854 - DNA, 75 bp, synthetic construct
  source 1..75: mol_type = other DNA
ttaaggagcgggtgatccggaacagtctgcggccccctgccgtgcccggtatcggacgcacggagaaatacggga

SEQ ID NO: 106855 - DNA, 75 bp, synthetic construct
  source 1..75: mol_type = other DNA
actgggttttcatggtgtcacgctcctggtattcccaggcagtagaactgctcatgtgccctacggcgacgttat

SEQ ID NO: 106856 - DNA, 75 bp, synthetic construct
  source 1..75: mol_type = other DNA
tccacgtggattctctcgtcatggtgatttcaccatcaaagaggcacaactgcttgggaaggtgcgaataagcgg

SEQ ID NO: 106857 - DNA, 75 bp, synthetic construct
  source 1..75: mol_type = other DNA
gccggttgtttgacccgtccgtcagactggcggcggatatccgggataacgaagggcgggggtttgcccgtcagg

SEQ ID NO: 106858 - DNA, 75 bp, synthetic construct
  source 1..75: mol_type = other DNA
caggcgggcattgtccagcgactggcggcagataacgccagcgtgaagcagagcgggcagctcatcgaacaactg

SEQ ID NO: 106859 - DNA, 75 bp, synthetic construct
  source 1..75: mol_type = other DNA
ggctgctgcccctacgcatgttaaccctgcgcattcggatactgccgcgtcactgatcctgtcgaacgttaaaac

SEQ ID NO: 106860 - DNA, 75 bp, synthetic construct
  source 1..75: mol_type = other DNA
tggtagagatcatgttatctatatcaataccaatagtttggatgaagcagtctgggtcaaacaagcactggaaaa

SEQ ID NO: 106861 - DNA, 75 bp, synthetic construct
  source 1..75: mol_type = other DNA
atgctcaagggcgatgttgatctgttcaattatgtgattggggaaacggatattgcgggttgtggttctgcgggt

SEQ ID NO: 106862 - DNA, 75 bp, synthetic construct
  source 1..75: mol_type = other DNA
ggaagaagtgatgctttttctgagttaccagaaaacacaatagtcgttccttatggcgagcttacaggtagtttt

SEQ ID NO: 106863 - DNA, 75 bp, synthetic construct
  source 1..75: mol_type = other DNA
aataaactgatcgcctttagcgatctgctggaaaaaattggcgattgccccggaaaatgtggcttatgtcggcga

SEQ ID NO: 106864 - DNA, 75 bp, synthetic construct
  source 1..75: mol_type = other DNA
attcaatcgagacttaatgggaagaaaaggtatcggaaagtttgctggttttggtattgctgagattatagaaat

SEQ ID NO: 106865 - DNA, 75 bp, synthetic construct
  source 1..75: mol_type = other DNA
ctgcttcaccagggcatttcattacttctgtcgaaaacatgggagatggtgtagcaattatcttttcttatgtgt

SEQ ID NO: 106866 - DNA, 75 bp, synthetic construct
  source 1..75: mol_type = other DNA
tacaacctaaattagctataaaattaattatagccagtatttcgtataaactttttactaaaatatctagtctac

SEQ ID NO: 106867 - DNA, 75 bp, synthetic construct
  source 1..75: mol_type = other DNA
tctgtggcctgatatttgtagtagggattgcgataattctgtatgaaattcatttgcgcatcccgttactgaagt

SEQ ID NO: 106868 - DNA, 75 bp, synthetic construct
  source 1..75: mol_type = other DNA
tgcgattcagaaagtaccggcgatgcgtaaatacagcggccacatcagcaacgtcttcgttgtgattatgggtct

SEQ ID NO: 106869 - DNA, 75 bp, synthetic construct
  source 1..75: mol_type = other DNA
agaactacaaaaaatgattgttgacctgaatgttacacataatgtccaacttataccagcaacaaaatgtataga

SEQ ID NO: 106870 - DNA, 75 bp, synthetic construct
  source 1..75: mol_type = other DNA
tgctggtctggctcaccgttacccgtcccgaaacacccggtgaactgtatctcacctatctgggcgcgtgggtgg

SEQ ID NO: 106871 - DNA, 75 bp, synthetic construct
  source 1..75: mol_type = other DNA
ccacacgaaatttacatgtgcttgccgatcatcacggcaaccgttcgccacgagcgcggcccgatgccagaggca

SEQ ID NO: 106872 - DNA, 75 bp, synthetic construct
  source 1..75: mol_type = other DNA
cgcgaatgcatggtcgtactcgcgtccagcaagccgcgcgcgatgccgttggctgcgcggattcttttgttcgtg

SEQ ID NO: 106873 - DNA, 75 bp, synthetic construct
  source 1..75: mol_type = other DNA
tatcttgcgactttacaggcaatagcctttggcaccagacatattattgaaactctcagggaaaatgggcatacc

SEQ ID NO: 106874 - DNA, 75 bp, synthetic construct
  source 1..75: mol_type = other DNA
agaggtaaccctgagcacgcagttcatcagtcaggcgtggtgtaccgtaaccctattattgatgggtaagatcaa

SEQ ID NO: 106875 - DNA, 75 bp, synthetic construct
  source 1..75: mol_type = other DNA
acggcgacagacttttctgcaatcacaaaaactcagccgtaaattgcaggatgactgggtaacgctcgaaaaagg

SEQ ID NO: 106876 - DNA, 75 bp, synthetic construct
  source 1..75: mol_type = other DNA
ttaaggagcgggtgatccgaaacagtctgcggccccctgccgtgcccggtatcggacgcacagagaaatacggga

SEQ ID NO: 106877 - DNA, 75 bp, synthetic construct
  source 1..75: mol_type = other DNA
tgattctgccagagaaaaaaatgcccttgttgttatcaataacggcagcaataataatggctcaggtattgctat

SEQ ID NO: 106878 - DNA, 75 bp, synthetic construct
  source 1..75: mol_type = other DNA
gttccggcagctacacccgcgccagagataatgcccctgacacttaaggtgtgtagtggtcaagtaatactggcc

SEQ ID NO: 106879 - DNA, 75 bp, synthetic construct
  source 1..75: mol_type = other DNA
ttaaggagcgggtgatccgaaacagtctgcggccccctgccgtgcccggtatcggacgcacggagaaatacggaa

SEQ ID NO: 106880 - DNA, 75 bp, synthetic construct
  source 1..75: mol_type = other DNA
cgcctattacaacggtgaagaccgtggcgtgttcatgatggctaagcgttttacggctctgagcttcggttgctt

SEQ ID NO: 106881 - DNA, 75 bp, synthetic construct
  source 1..75: mol_type = other DNA
aacctttcctatcagtcagcaatgactgggcacaatatcgcagcacaacgcttggctctggatcagcaagagttc

SEQ ID NO: 106882 - DNA, 75 bp, synthetic construct
  source 1..75: mol_type = other DNA
atgattgtgatttcccgacatgttgctatccccaatggcgagtttgagatcactgctattcgtgcacagggcgcg

SEQ ID NO: 106883 - DNA, 75 bp, synthetic construct
  source 1..75: mol_type = other DNA
cctttatacttactgatgacagaaaactcgatttagcgagagctgccgtttctatatatggacgaagctatattg

SEQ ID NO: 106884 - DNA, 75 bp, synthetic construct
  source 1..75: mol_type = other DNA
gtatgattatgtattcccgccagtgattaacggcggcaacaggccagtaaacgcatcagtgataaaagtagctgc

SEQ ID NO: 106885 - DNA, 75 bp, synthetic construct
  source 1..75: mol_type = other DNA
ttaaggagcgggtgatccgaaacagtctgcggccccctgccgtgcccggtatcggacgcactgagaaatacggta

SEQ ID NO: 106886 - DNA, 75 bp, synthetic construct
  source 1..75: mol_type = other DNA
agttgccgctgtttgatgaactgtgtaagcgtgaacgcgcgccgtacgcggtgattggtgaggccaccgaagaat

SEQ ID NO: 106887 - DNA, 75 bp, synthetic construct
  source 1..75: mol_type = other DNA
atgttgctcaactgaaaggtttctacgacgccattcaggcgctggtcgcccaacgtaagctgctcgcctaccacg

SEQ ID NO: 106888 - DNA, 75 bp, synthetic construct
  source 1..75: mol_type = other DNA
gattctggccccgactgtggaggtggcggccaacgccttcaaccctgccagggatatggtacgacgggacgatga

SEQ ID NO: 106889 - DNA, 75 bp, synthetic construct
  source 1..75: mol_type = other DNA
atccagcggttgcgtgaacttaaccagtcgctgcaaaaggaactggcgcgcaatcagcatctggctgaacggttg

SEQ ID NO: 106890 - DNA, 75 bp, synthetic construct
  source 1..75: mol_type = other DNA
tcaaaaaccataacgctgtcggtaaacgtctggcacaactgaagctgaccgatcacggttgtttccttaaccgcg

SEQ ID NO: 106891 - DNA, 75 bp, synthetic construct
  source 1..75: mol_type = other DNA
ttattcactatttaagaacgatatactatgaacaaaattatatacatcctgttgggagcatttttgctgcgattc

SEQ ID NO: 106892 - DNA, 75 bp, synthetic construct
  source 1..75: mol_type = other DNA
tccttcgataatatcaatgcttaatatcaatcttctttttaatccactaaatcttccgggaatgggaagtggtat

SEQ ID NO: 106893 - DNA, 75 bp, synthetic construct
  source 1..75: mol_type = other DNA
tgtttgttgatacaccaggcatgaaatctccggcgttcgttaaagctctgagttgtgctcacattcttttcacat

SEQ ID NO: 106894 - DNA, 75 bp, synthetic construct
  source 1..75: mol_type = other DNA
gtgccgctgtcagtggtacccggagcgacggaaaggcattcagtatcggaggcggtcaggcggatgccctgatgc

SEQ ID NO: 106895 - DNA, 75 bp, synthetic construct
  source 1..75: mol_type = other DNA
agcactaacagcgcgtggtcagaacatcacgatgcgcggacaggatttatctgcttctactgcacgacgcggtca

SEQ ID NO: 106896 - DNA, 75 bp, synthetic construct
  source 1..75: mol_type = other DNA
tcgctatctacccgatcctgctggtttatagcgtggcaatcaccaatacagttgaaagcttcatgtctcaccagc

SEQ ID NO: 106897 - DNA, 75 bp, synthetic construct
  source 1..75: mol_type = other DNA
cgagcgccctgacttcaaatgtttacagtattagtggcgatgccgccagcgcacaaatcgtcgcgatgcaagtga

SEQ ID NO: 106898 - DNA, 75 bp, synthetic construct
  source 1..75: mol_type = other DNA
attgcatagccacggcacgggcaaaggccgcgcattttgcgaaaaactggcgcagcaggcgggtattgatcagtc

SEQ ID NO: 106899 - DNA, 75 bp, synthetic construct
  source 1..75: mol_type = other DNA
atgagatgccgggggctgattgccctgctggtatgggggcagagtgtggccgccgccgatcttggcacctggggc

SEQ ID NO: 106900 - DNA, 75 bp, synthetic construct
  source 1..75: mol_type = other DNA
ttgttccagacagaccggttaccacctcagagtctgtaattttttacgatgccaaaaaagctacagacaatcagc

SEQ ID NO: 106901 - DNA, 75 bp, synthetic construct
  source 1..75: mol_type = other DNA
actggcggcggatatccgggataacgaagggcgggtgtttgcccgtcagggtgaagtgatgaatccgctgcagta

SEQ ID NO: 106902 - DNA, 75 bp, synthetic construct
  source 1..75: mol_type = other DNA
agggaacccgccacagcatgaaagcgtcatcgggcaataacgacttccgcgcacggggccggggctggctgggct

SEQ ID NO: 106903 - DNA, 75 bp, synthetic construct
  source 1..75: mol_type = other DNA
tgattacagagccggacggcacagtggagatccctgtcaccagccagacggcgggcaccagtgccgtcactgcaa

SEQ ID NO: 106904 - DNA, 75 bp, synthetic construct
  source 1..75: mol_type = other DNA
tggcctgttaatgcccatattacttcacatggcgatgaatgcagtcataacaggaatacaatatacgttacaata

SEQ ID NO: 106905 - DNA, 75 bp, synthetic construct
  source 1..75: mol_type = other DNA
cgcttgaaaatgctggcggatgagcggctgtataagagtaagaaaaacggcagggcacagattagctggcagtaa

SEQ ID NO: 106906 - DNA, 75 bp, synthetic construct
  source 1..75: mol_type = other DNA
cctttagcgcctctactgctaagcatttgttactagatccagccgatattaatcagtgcaacagcgctattttaa

SEQ ID NO: 106907 - DNA, 75 bp, synthetic construct
  source 1..75: mol_type = other DNA
gttcaccaccggagctgatggcacatacagtgacgcgagtggcgcctcggagaattcaacccgctggggtgtgga

SEQ ID NO: 106908 - DNA, 75 bp, synthetic construct
  source 1..75: mol_type = other DNA
gtcgatatggcgtttatcgcctggcgcaatctgcgtttaattaatcgcatcgccacgctgtatggcattgaactg

SEQ ID NO: 106909 - DNA, 75 bp, synthetic construct
  source 1..75: mol_type = other DNA
ttttgccggagccagcgaactggtgcgcgaagtggggatggactggatgtcgcaagatctcgctgctcgtttgtc

SEQ ID NO: 106910 - DNA, 75 bp, synthetic construct
  source 1..75: mol_type = other DNA
gaataatctttcctccagcgaactggttagcgccgtcaatccgaaacaattcgccatgtccggggcatttagtgg

SEQ ID NO: 106911 - DNA, 75 bp, synthetic construct
  source 1..75: mol_type = other DNA
gcgctgggcggcacattgaccatttcctgtctgcacggcacgcgtgtcagcgtttctctacctcaacgttatgtc

SEQ ID NO: 106912 - DNA, 75 bp, synthetic construct
  source 1..75: mol_type = other DNA
gcaacattgccggacatttgtttagcggtgacgacgcccgcacggcgctgatttgcggcgacagacgctggagct

SEQ ID NO: 106913 - DNA, 75 bp, synthetic construct
  source 1..75: mol_type = other DNA
tggtgccaaccgagaaaaactctgccgtctacggcatgttgacctcgctgaccattaccgccggacaaaagactg

SEQ ID NO: 106914 - DNA, 75 bp, synthetic construct
  source 1..75: mol_type = other DNA
gaaggtgtacgtagatgacctgatggcaaaacatcttgctgcacaggacccacattcacagtacgcgccaaaagc

SEQ ID NO: 106915 - DNA, 75 bp, synthetic construct
  source 1..75: mol_type = other DNA
gatgcccaggataactttattactgatggcgttgttcagcttaatgaggaaaacgtacaagtcaggaatgcggat

SEQ ID NO: 106916 - DNA, 75 bp, synthetic construct
  source 1..75: mol_type = other DNA
gtgccatggtggcagtgctgcagatgtgccgtgggtttgtggtgacacgacgtattactggaaaaatacctacgg

SEQ ID NO: 106917 - DNA, 75 bp, synthetic construct
  source 1..75: mol_type = other DNA
gcttttccattaggcagctgttagcagataacgcctcctatcagatccctatgtatcagcgtaactatgcgtggg

SEQ ID NO: 106918 - DNA, 75 bp, synthetic construct
  source 1..75: mol_type = other DNA
tcgacgttctggaatcctctaagctgctgaagaccgtagagcttcctgtcctgactggtagcctgaccgctaagg

SEQ ID NO: 106919 - DNA, 75 bp, synthetic construct
  source 1..75: mol_type = other DNA
atcgcctggaatgaagatcaaaaaggaatttataccgcaacgtatacctccttactccctggcaccggtttaaaa

SEQ ID NO: 106920 - DNA, 75 bp, synthetic construct
  source 1..75: mol_type = other DNA
actcaaaggaacaacacatcgtgatcttaacttaagggcagaatgtaggaacaggggggctagcttaggactcaa

SEQ ID NO: 106921 - DNA, 75 bp, synthetic construct
  source 1..75: mol_type = other DNA
ggcacgcgttgctaattcacgatggtgattttatttccacgcaaacggtttcgtcagcgcatcagattctttata

SEQ ID NO: 106922 - DNA, 75 bp, synthetic construct
  source 1..75: mol_type = other DNA
acatatactgaaccatttttcaagcatactgacgcagtatttgcaagaagtgtaagaggcgggaaaattgaaaga

SEQ ID NO: 106923 - DNA, 75 bp, synthetic construct
  source 1..75: mol_type = other DNA
cggcagataacgccagcgtgaaacagagcgggcagctcatcgaacaactgtcgctgggcgtttacgacgcggtgc

SEQ ID NO: 106924 - DNA, 75 bp, synthetic construct
  source 1..75: mol_type = other DNA
ttggtccgattgattacttcaatgttcaggacaagatagctggtcgtgagattgaccgaggcagactggcagaga

SEQ ID NO: 106925 - DNA, 75 bp, synthetic construct
  source 1..75: mol_type = other DNA
ctggcgaaacacgcgagctacgcctggataaaattaccagctttagccacccggaaattggtacggtggtggtga

SEQ ID NO: 106926 - DNA, 75 bp, synthetic construct
  source 1..75: mol_type = other DNA
cgctgactaatttgagtggaaaggatgtcgctggtcttctcacataccttggtttaggagaagcggcgaaaacga

SEQ ID NO: 106927 - DNA, 75 bp, synthetic construct
  source 1..75: mol_type = other DNA
ggagacagctcagtagttatacctctcatagggagttcatttaactattcctattctaacatcgctacctgcact

SEQ ID NO: 106928 - DNA, 75 bp, synthetic construct
  source 1..75: mol_type = other DNA
tccctggatatgcggggacacgacgtatttctggaagcagaagaacgaatccacgtaccagacggtgtacggcag

SEQ ID NO: 106929 - DNA, 75 bp, synthetic construct
  source 1..75: mol_type = other DNA
ttgacgttctggagtcctctaagctgttgaagacagtagagcttccggtcctgactggcagcctgaccgctaagg

SEQ ID NO: 106930 - DNA, 75 bp, synthetic construct
  source 1..75: mol_type = other DNA
atagcaagatacctggtcgaaatttctgagaaaattgtttgtgatgcggaccagtcaggctgggatggtaaacgt

SEQ ID NO: 106931 - DNA, 75 bp, synthetic construct
  source 1..75: mol_type = other DNA
tcacggccctgagcttcggctgcttccgtcacgacggtgagaatattacggtcgtcctttcacgtgatggtgact

SEQ ID NO: 106932 - DNA, 75 bp, synthetic construct
  source 1..75: mol_type = other DNA
aaccggggatgagtccgctggaaatctggtgtaacgaatcccaggaacgctacgtgctggctgttgccgccgatc

SEQ ID NO: 106933 - DNA, 75 bp, synthetic construct
  source 1..75: mol_type = other DNA
ttttgaagagctgaaggaactgttcaccctctattgtgacagttgtccgggctgggaactgaacggtcgtctgat

SEQ ID NO: 106934 - DNA, 75 bp, synthetic construct
  source 1..75: mol_type = other DNA
actctatggtggaaagcaaggcttaccttgaaccaaaaaatttctacatcaccaatccgaatattggacgttcgg

SEQ ID NO: 106935 - DNA, 75 bp, synthetic construct
  source 1..75: mol_type = other DNA
tgccgctgtgcgaactgctggagaaattatcggtctgcaaatggggctttcatttgcgacattcgtcgatccagg

SEQ ID NO: 106936 - DNA, 75 bp, synthetic construct
  source 1..75: mol_type = other DNA
gggcgcatgaaatagctgtgcgccgcagaaaaagcgaggaatccaggttcaacgatttcgttaaggccggtgacc

SEQ ID NO: 106937 - DNA, 75 bp, synthetic construct
  source 1..75: mol_type = other DNA
gtatttagaactgaattattaatgcgaaattcattttttaaaaatatagttcatgaggatgaagagtacttacct

SEQ ID NO: 106938 - DNA, 75 bp, synthetic construct
  source 1..75: mol_type = other DNA
cttatcggacaatatggtcagtttgcattaggccacgaaaagtattgggatttacaggacaagatggttggtcgc

SEQ ID NO: 106939 - DNA, 75 bp, synthetic construct
  source 1..75: mol_type = other DNA
ttcggtatcgacctgcggccttatcgggaacaaggtttaccgctgccggaacagtatcggattggctaccgtcgc

SEQ ID NO: 106940 - DNA, 75 bp, synthetic construct
  source 1..75: mol_type = other DNA
tttcggtatggacctgcgaccttatcggaaacaaggtttaccgctgccggagcagtatcgcattggctaccgccg

SEQ ID NO: 106941 - DNA, 75 bp, synthetic construct
  source 1..75: mol_type = other DNA
tgttcagtctgtttaccgttattggctttaatgcccaggctaacgaacatcatcatgaaaccatgagcgaagcaa

SEQ ID NO: 106942 - DNA, 75 bp, synthetic construct
  source 1..75: mol_type = other DNA
ccgacattcggggagtcctgtgcagcgtgggtgtttgacctggtggcggccctgtttggctcctacgatgcgcag

SEQ ID NO: 106943 - DNA, 75 bp, synthetic construct
  source 1..75: mol_type = other DNA
tgaagcgaaagctaattttagcggcattattgaaatcagtaagcgaaccggcatgaagatcgaggatactacgaa

SEQ ID NO: 106944 - DNA, 75 bp, synthetic construct
  source 1..75: mol_type = other DNA
aagggctatgccaccggctttaactggcacgatattgaggcccgcgcccatgccaccagtttcaccgtggcgggc

SEQ ID NO: 106945 - DNA, 75 bp, synthetic construct
  source 1..75: mol_type = other DNA
caggcgcatcaatcgcatcatcaatggccccggcagcagcggcgacagctaccgcgacaatgggtacggccccga

SEQ ID NO: 106946 - DNA, 75 bp, synthetic construct
  source 1..75: mol_type = other DNA
tgggtatttattatctctgtcatctcttattgaagcgggtatatctgttccagatgcattgaggattatagcaag

SEQ ID NO: 106947 - DNA, 75 bp, synthetic construct
  source 1..75: mol_type = other DNA
cgttaattgctccgttttgcgaacatttattcagtgaaatttttaatttgcttgccgatattattagcgaatttc

SEQ ID NO: 106948 - DNA, 75 bp, synthetic construct
  source 1..75: mol_type = other DNA
atgggacgttcaataccggtgaagattggtcagaaggaatttgcatcaaaacagaaagcccgcggctattacatg

SEQ ID NO: 106949 - DNA, 75 bp, synthetic construct
  source 1..75: mol_type = other DNA
cgattgactacttcaatgttcaggacaagatggctggtcgtgagattgaccgaggtaggctggcagagacaatcc

SEQ ID NO: 106950 - DNA, 75 bp, synthetic construct
  source 1..75: mol_type = other DNA
agctgataagaaagcagcggcagaaaaagccgccgcagacaaaaaagcggcagctgcaaaagcagcagctgaaaa

SEQ ID NO: 106951 - DNA, 75 bp, synthetic construct
  source 1..75: mol_type = other DNA
acacgtttgcgtgacgaaggtgtgattaaagcctggggactgggtgtgaaccgcgtcgaaccttgcgaactgacg

SEQ ID NO: 106952 - DNA, 75 bp, synthetic construct
  source 1..75: mol_type = other DNA
atgggtgagctacgtcgccgcatgttggatggcaaactgacggctgaggatgtagtaaatgcaatcctgaaagga

SEQ ID NO: 106953 - DNA, 75 bp, synthetic construct
  source 1..75: mol_type = other DNA
acagctgttatgtttgatcatgtgcgaatatcgacagggaattttaaagattgcattacagaacaattggaatta

SEQ ID NO: 106954 - DNA, 75 bp, synthetic construct
  source 1..75: mol_type = other DNA
gcgcgatggctttgacgagatagcgcaggcgataaaaaacggagatatgccaccagctattgactggttttccat

SEQ ID NO: 106955 - DNA, 75 bp, synthetic construct
  source 1..75: mol_type = other DNA
tgctacagcttctattcatctgaccacaatccagacattgctgtcggtgaaatgcccgcattttggatgtatcta

SEQ ID NO: 106956 - DNA, 75 bp, synthetic construct
  source 1..75: mol_type = other DNA
ctactacaacggtgcagaccgtggcgtcttcatgatggctaagcgctttacggctctgagcttcggttgcttccg

SEQ ID NO: 106957 - DNA, 75 bp, synthetic construct
  source 1..75: mol_type = other DNA
ccatgggattttttgatcttattggtgctttttttctggtcacttttattgctgaacgtcgcaaaaaacgcacct

SEQ ID NO: 106958 - DNA, 75 bp, synthetic construct
  source 1..75: mol_type = other DNA
tgtcgttatccagatatatgactccagcagttgtcagtagtttatcgaaaatgaaagagcttatttctgcatccc

SEQ ID NO: 106959 - DNA, 75 bp, synthetic construct
  source 1..75: mol_type = other DNA
gcctttaactacaccctgaaccgtgacagcgatgaagactggtacctgcgcagtgaaaatgcttatcgtgctgaa

SEQ ID NO: 106960 - DNA, 75 bp, synthetic construct
  source 1..75: mol_type = other DNA
gcctaccactgcaaccattagttcctgatcaggagaacaaaaataagaaaaatgaagagaaatccgttaatccag

SEQ ID NO: 106961 - DNA, 75 bp, synthetic construct
  source 1..75: mol_type = other DNA
gaacttttcaattagatcaatgggataataaagcatttctgcaagataaagacctgcttctgggtaattcgcaat

SEQ ID NO: 106962 - DNA, 75 bp, synthetic construct
  source 1..75: mol_type = other DNA
ggcaccaccacgctgaataacggcgccacgtttacccttgccgggaagacggtgaacaacgataccctgaccatc

SEQ ID NO: 106963 - DNA, 75 bp, synthetic construct
  source 1..75: mol_type = other DNA
agggatgctctctgtaccgcactcgcgggggcggggctgaaagtgactgaacagcaggctgattcgataacggtc

SEQ ID NO: 106964 - DNA, 75 bp, synthetic construct
  source 1..75: mol_type = other DNA
cgatgcaaacccaatcctgtttatccatgacgttggtgcaggtggtctttctaacgctatgccggaactggtgag

SEQ ID NO: 106965 - DNA, 75 bp, synthetic construct
  source 1..75: mol_type = other DNA
acgacgtgaagcgcggtttgcgaaacggcgttgctccttacatacccgcggccttttgctgggatgccgggagcg

SEQ ID NO: 106966 - DNA, 75 bp, synthetic construct
  source 1..75: mol_type = other DNA
tgccagcgccgccgcgctcggtgtgcctttaaaaattacccatatggcggtaggcgatggcggcggaacattgcc

SEQ ID NO: 106967 - DNA, 75 bp, synthetic construct
  source 1..75: mol_type = other DNA
tgcggctgtcacgtcagttccggcactggctgctgacacggttgtacaggcaggagaaaccgtgaacggcggaac

SEQ ID NO: 106968 - DNA, 75 bp, synthetic construct
  source 1..75: mol_type = other DNA
gctgcaacgacaatcaagatgggtactggctcagctactgctgtcctgcctgtagtcaaacgcctaagtttcact

SEQ ID NO: 106969 - DNA, 75 bp, synthetic construct
  source 1..75: mol_type = other DNA
agtacctgggctgtcagagaaggtcagacgctgggcaatgtggtgatccagcggattgatccgacgacccggacc

SEQ ID NO: 106970 - DNA, 75 bp, synthetic construct
  source 1..75: mol_type = other DNA
gccttttgcggggatgcctggagcgcaggccacggcgcgacagaggcggcgcgaccggaacggtcgctgcaagcc

SEQ ID NO: 106971 - DNA, 75 bp, synthetic construct
  source 1..75: mol_type = other DNA
acgacgtgaagcgcggtttgcgaaacggcgttgctccttacataccggcggccttttgccgggatgcctggagcg

SEQ ID NO: 106972 - DNA, 75 bp, synthetic construct
  source 1..75: mol_type = other DNA
gtaaaaatgagctcaactttatccgacaggataacgaagctcctccggtaaaaatgccttttctgaccgcgttaa

SEQ ID NO: 106973 - DNA, 75 bp, synthetic construct
  source 1..75: mol_type = other DNA
acgccgattaatttgctgggcttcaaagatggcaccgccaatcccgacagccagaatacgaaactgatgcaaaaa

SEQ ID NO: 106974 - DNA, 75 bp, synthetic construct
  source 1..75: mol_type = other DNA
gaaattgaccgaggcagactggcagagacaatccgcagcaatcaggctggcgaggcgctaacagcgcgtggtcag

SEQ ID NO: 106975 - DNA, 75 bp, synthetic construct
  source 1..75: mol_type = other DNA
caaagcgccaacgccagcagcagggaataacaccacgcagattgcgaccaccgcgtttgttcaggcggcactgac

SEQ ID NO: 106976 - DNA, 75 bp, synthetic construct
  source 1..75: mol_type = other DNA
gccagggcagcagcatgatgaggagtcggggctgtactataaccgtcaccggcactacgatccgttgcaggggcg

SEQ ID NO: 106977 - DNA, 75 bp, synthetic construct
  source 1..75: mol_type = other DNA
cgctgatccacagtcgctacaggtcgtacaaaccggaggtggagacgcgcagtttacgctgttgaacccaaacca

SEQ ID NO: 106978 - DNA, 75 bp, synthetic construct
  source 1..75: mol_type = other DNA
aacgaaggtttgccaactaacgcagaccctcaggtctatgccttcaagttagctaagctggtgaagaccatgctc

SEQ ID NO: 106979 - DNA, 75 bp, synthetic construct
  source 1..75: mol_type = other DNA
cggcaggctgacggagaagacggaccgcatcccggcgggtgtgatacggacggacgacgagcggacccaccacta

SEQ ID NO: 106980 - DNA, 75 bp, synthetic construct
  source 1..75: mol_type = other DNA
tcgatgtcggatcggccagtgtcagggcaggcgtttacaatgccagtggccacagactggcattcgctactgcgc

SEQ ID NO: 106981 - DNA, 75 bp, synthetic construct
  source 1..75: mol_type = other DNA
atcacgcaagattgataacctgattaccctttctgctatgacaggagcaacgaaggagttagccgaccagattac

SEQ ID NO: 106982 - DNA, 75 bp, synthetic construct
  source 1..75: mol_type = other DNA
ttactgcctcgataaaagctgcatatctccagcaaatgaaccatcggtattaaccgtaaggatggttgggatctg

SEQ ID NO: 106983 - DNA, 75 bp, synthetic construct
  source 1..75: mol_type = other DNA
ggtggcagctgatccgaatactgtgtccggtatcaagtccgtggggacgctgattgatgagttgtggttgtttgg

SEQ ID NO: 106984 - DNA, 75 bp, synthetic construct
  source 1..75: mol_type = other DNA
gaagctaacggcgattttgggatctggataaacgacactggcgaatcccccgctgatccacagtcgctacaggtc

SEQ ID NO: 106985 - DNA, 75 bp, synthetic construct
  source 1..75: mol_type = other DNA
actccgggcaactggatatggggctactgttcgtttgctaccaacacgatctggaaaagggctttctgacagtac

SEQ ID NO: 106986 - DNA, 75 bp, synthetic construct
  source 1..75: mol_type = other DNA
ccgacatgctcgaaagaattcccgccgaaattcttccgcctggcgctgccgtgggaactttaactgccaaagctg

SEQ ID NO: 106987 - DNA, 75 bp, synthetic construct
  source 1..75: mol_type = other DNA
gcacaccatcaaccgactccggtcaccagcgttgatttgctggggcagggccgtcaggcgctgatcgacgctaac

SEQ ID NO: 106988 - DNA, 75 bp, synthetic construct
  source 1..75: mol_type = other DNA
gagatttggcaacaggtctgtaaaacggtgaaagaggcgacagctctggcgggcatccccgtttccgcgatttgc

SEQ ID NO: 106989 - DNA, 75 bp, synthetic construct
  source 1..75: mol_type = other DNA
ggagtggacgcttcaggagtccggggcaagcgcaaatctttttcacaaggcgcagcaacgcgggtgtcatccgat

SEQ ID NO: 106990 - DNA, 75 bp, synthetic construct
  source 1..75: mol_type = other DNA
gacttccgcgcccggggttggggctggctgggttcactggaaaccggtctgcccttcagtatcactgacaacctg

SEQ ID NO: 106991 - DNA, 75 bp, synthetic construct
  source 1..75: mol_type = other DNA
tgcgtgacagtgcaaaacacagtgtgagtgaattaccggtgaactggtgggtacagccttctgttatccgcacct

SEQ ID NO: 106992 - DNA, 75 bp, synthetic construct
  source 1..75: mol_type = other DNA
caggtatgcaagcccagattgaagacatttcacgcaagattgataacctgattagtctttctgcaatgacaggag

SEQ ID NO: 106993 - DNA, 75 bp, synthetic construct
  source 1..75: mol_type = other DNA
aagattttgaaacagatgattttgatatcaaaaaaaacgagagtgagatttatgatgaaaatgacgatcagatga

SEQ ID NO: 106994 - DNA, 75 bp, synthetic construct
  source 1..75: mol_type = other DNA
tcgatgtcggatcggccagtgtcagagcgggagtttactgtgccaatggccgcaggttggcatttgccactgcgc

SEQ ID NO: 106995 - DNA, 75 bp, synthetic construct
  source 1..75: mol_type = other DNA
agcgtcacgcacagcgggtatgacgcggcaggaaggctaacggcgcagacggacgcggcgggacggcggacagag

SEQ ID NO: 106996 - DNA, 75 bp, synthetic construct
  source 1..75: mol_type = other DNA
tgagctcgccctccagcaaaaaggaatcgaaacgcatcgcaggacttttcgtgaactgcataatcaattgagtac

SEQ ID NO: 106997 - DNA, 75 bp, synthetic construct
  source 1..75: mol_type = other DNA
cgttaatcgcgcctttttgcgaacatttattcagcgaaatatttaaccttctgcgtgatattattagtgaattac

SEQ ID NO: 106998 - DNA, 75 bp, synthetic construct
  source 1..75: mol_type = other DNA
gcagaccattagcggcaccaccaccgccgaagtgggccagacggtgaccgttacctttaacgggcaaacctggag

SEQ ID NO: 106999 - DNA, 75 bp, synthetic construct
  source 1..75: mol_type = other DNA
acaccttcaggagaaccacggaatcaggttggatcatatacctcaaaatcaggcattcaatttacggtggaatga

SEQ ID NO: 107000 - DNA, 75 bp, synthetic construct
  source 1..75: mol_type = other DNA
aatgtagcgatgcatgtattgaaaaatataacactgggcaactcttcgggttagatggtataaaagcagataatc

SEQ ID NO: 107001 - DNA, 75 bp, synthetic construct
  source 1..75: mol_type = other DNA
ttcttattcacgctctatcaacagtgaattgacccttaatatttcacttaaagaaaatgacttctgtgaggacct

SEQ ID NO: 107002 - DNA, 75 bp, synthetic construct
  source 1..75: mol_type = other DNA
acgttgatgatggcgtgcaggatatccagaatgatgtcaatcaattagctgacagcctcgaatctgtattgaagt

SEQ ID NO: 107003 - DNA, 75 bp, synthetic construct
  source 1..75: mol_type = other DNA
cgcttggaccagaaaaggcgtttgctgttcaggacaagatggctggtcgtgagattgatcgcggaaaacttgcag

SEQ ID NO: 107004 - DNA, 75 bp, synthetic construct
  source 1..75: mol_type = other DNA
ggtgttaacggtgcgatcacattaagcattcacgaagaggatgtccggctggctccgggcccgatgtggtcagag

SEQ ID NO: 107005 - DNA, 75 bp, synthetic construct
  source 1..75: mol_type = other DNA
atattcatcaatcgctgcgcgagcatattgttaacggcggcacgctccgggacttcgaacggcagattaccccaa

SEQ ID NO: 107006 - DNA, 75 bp, synthetic construct
  source 1..75: mol_type = other DNA
ttaggggccgcgccagacaatcaatcaacgggttttgtgtcaacgctcccgacacaacaggccactactgatatt

SEQ ID NO: 107007 - DNA, 75 bp, synthetic construct
  source 1..75: mol_type = other DNA
aatagctgacgtgataggtaaaaatcatgaggcggcaggggatagacaaggtcagccagctaaagaaagaatcat

SEQ ID NO: 107008 - DNA, 75 bp, synthetic construct
  source 1..75: mol_type = other DNA
ccaggataacgaagcgcccccggtcaagttaccctttctgaccgcactgaaaaccgtgggcaaaaataaacgctt

SEQ ID NO: 107009 - DNA, 75 bp, synthetic construct
  source 1..75: mol_type = other DNA
cgattagattcagattgttaaatggcgatattaatctgggtgaggctctttattcaacacaatatatgtttcctt

SEQ ID NO: 107010 - DNA, 75 bp, synthetic construct
  source 1..75: mol_type = other DNA
tgataaaatggcattaatacatcttgttaaaacaagggcggctcatcctttgagcagggaatcaacgcagtttca

SEQ ID NO: 107011 - DNA, 75 bp, synthetic construct
  source 1..75: mol_type = other DNA
ttcggcaaggtcaccgaaacttacccggctaacccgaacggttccccgaacggtattacggcggtcacgactgaa

SEQ ID NO: 107012 - DNA, 75 bp, synthetic construct
  source 1..75: mol_type = other DNA
ttgaaaaagaagccgctattcaggtttctaacgtagcaatcttcaatgcgacaaccggcaaggctgaccgtgtag

SEQ ID NO: 107013 - DNA, 75 bp, synthetic construct
  source 1..75: mol_type = other DNA
acggcggtattgcccgtggagccacgccggaaagcagcggcagctatggcttcgtccgtctggagggtgacctgc

SEQ ID NO: 107014 - DNA, 75 bp, synthetic construct
  source 1..75: mol_type = other DNA
cgatcaggatggcgatcaaacgtcatggcagttatcgcataccttttataacgactcattcagccataaagagct

SEQ ID NO: 107015 - DNA, 75 bp, synthetic construct
  source 1..75: mol_type = other DNA
agcaattccttaagtgtccgcttagtgttgtgaagaaacgcgccagcattcgttacagcggggatgtgaattgta

SEQ ID NO: 107016 - DNA, 75 bp, synthetic construct
  source 1..75: mol_type = other DNA
cttttttttctttttgctatcatttttattgctttttatattgttaatgccagtaatgatccgcagctgagacat

SEQ ID NO: 107017 - DNA, 75 bp, synthetic construct
  source 1..75: mol_type = other DNA
tggaatcttatgccattcgtttgttgagcggaccattgaatggatgcgagtatgaaatacttaatgggcgtctac

SEQ ID NO: 107018 - DNA, 75 bp, synthetic construct
  source 1..75: mol_type = other DNA
gccgcgaattattgagaagatggaagcctacggagcaccggcgtcgatcaccagtttcgtggtgccgaccggtta

SEQ ID NO: 107019 - DNA, 75 bp, synthetic construct
  source 1..75: mol_type = other DNA
tatgtggatgataagacactggagctgaaggtgtatgtggatgaccaaatggcaaaacaccttgccgcagcggac

SEQ ID NO: 107020 - DNA, 75 bp, synthetic construct
  source 1..75: mol_type = other DNA
gtgcacgacgccacctgcatcggttatttgattaaccctgatggcattaaaacccaggagatgtacgtcgaagtg

SEQ ID NO: 107021 - DNA, 75 bp, synthetic construct
  source 1..75: mol_type = other DNA
ggtggtgggtatcgcgggtgttggtgatgccaaacagctcgggcgtattggcgcgaaaaccattatctacttcga

SEQ ID NO: 107022 - DNA, 75 bp, synthetic construct
  source 1..75: mol_type = other DNA
cgcaatcagacgatttcaaaacgcacgagcataaaattttagggctaaatggaagtggcagtaatgtagtgtttg

SEQ ID NO: 107023 - DNA, 75 bp, synthetic construct
  source 1..75: mol_type = other DNA
tgttttctgcattgttgagttctggactggcccatgcggatgataaaacgctggatatcagctatgttaaatcac

SEQ ID NO: 107024 - DNA, 75 bp, synthetic construct
  source 1..75: mol_type = other DNA
ttaagcagctggcgcgtcgcagtacggtgacaccgggcggtgccgcctgtaagtataacgacattattccggcgg

SEQ ID NO: 107025 - DNA, 75 bp, synthetic construct
  source 1..75: mol_type = other DNA
tgatgagcaccagtgatacgcgccagcaggacggacgccgcgcactggatcacctgttgctgttcagtcgccccg

SEQ ID NO: 107026 - DNA, 75 bp, synthetic construct
  source 1..75: mol_type = other DNA
ttgggatggtgtttcagcaatacaatttatggccgcatctgacggtacaacaaaacctgattgaagccccctgcc

SEQ ID NO: 107027 - DNA, 75 bp, synthetic construct
  source 1..75: mol_type = other DNA
ggtcagcgtgatggcagacaacagcgcaacggtgtctccgacggtcactacagagccggacggcacggtggagat

SEQ ID NO: 107028 - DNA, 75 bp, synthetic construct
  source 1..75: mol_type = other DNA
aatgcgctggctgtgctggtcattgccaagtgggaacacaaatttgaccgcaaaaaggcgatggcctacgaacgt

SEQ ID NO: 107029 - DNA, 75 bp, synthetic construct
  source 1..75: mol_type = other DNA
acagccctgggaagcattgcatttgttgataacacggctacatatggcacggcagcaggtaaccgagccaaagtt

SEQ ID NO: 107030 - DNA, 75 bp, synthetic construct
  source 1..75: mol_type = other DNA
aaacaaccgctggacaatacgctgactcatttgagtggaaaggatgttgccggtcttctcgcataccttggtttg

SEQ ID NO: 107031 - DNA, 75 bp, synthetic construct
  source 1..75: mol_type = other DNA
cgttgcatcagcgatcgttctgttcgatcagatgaatcgtggtggtccggtgggaaatattgtggttgtgcattg

SEQ ID NO: 107032 - DNA, 75 bp, synthetic construct
  source 1..75: mol_type = other DNA
aaatttgaccgcaaaaaggcgatggcctacgaacgtgaaatgctgggcaaatttgataagactgcggatcagtaa

SEQ ID NO: 107033 - DNA, 75 bp, synthetic construct
  source 1..75: mol_type = other DNA
ctgaaatgcaacggtgcggctttttctgctgaagcatacccggaactggcaaaggcttacccgacaaataaattg

SEQ ID NO: 107034 - DNA, 75 bp, synthetic construct
  source 1..75: mol_type = other DNA
tgaagcgtgcagcagcacagagtgcagcgctggcggggcttttccagccgtacagtgtggggaaattcaacgcca

SEQ ID NO: 107035 - DNA, 75 bp, synthetic construct
  source 1..75: mol_type = other DNA
cggcgcaacggttgccccaacggtgattacagagccggacggcacggcggagatcagtgtcaccagccagacggc

SEQ ID NO: 107036 - DNA, 75 bp, synthetic construct
  source 1..75: mol_type = other DNA
ctggcgggaagttgtccggtcgctcatgcacaaaaaacgcaaagtgcaccgggtacgctttcaccggatgcacgc

SEQ ID NO: 107037 - DNA, 75 bp, synthetic construct
  source 1..75: mol_type = other DNA
tattcgtcgatacgccaggtatgaaatccccggccttcgttaaggcactgagttgtgctgatattttgttcacat

SEQ ID NO: 107038 - DNA, 75 bp, synthetic construct
  source 1..75: mol_type = other DNA
tggtcgttaccggataccttggtgaggttgatgtatcgagagactggagattaaaaaatgatgatggtatggagt

SEQ ID NO: 107039 - DNA, 75 bp, synthetic construct
  source 1..75: mol_type = other DNA
ataccagccgatggtgatggtggcgtgaaattaaatggcggattatatatatcaggctcaccaattgtgagtctg

SEQ ID NO: 107040 - DNA, 75 bp, synthetic construct
  source 1..75: mol_type = other DNA
caaaacggaaaagaatattcactttgtgccgttcatgaccgatgagaacggagcaaatgtcccgacgaacaaacc

SEQ ID NO: 107041 - DNA, 75 bp, synthetic construct
  source 1..75: mol_type = other DNA
ggtggggataagccagggctggaagctgggcggggccatcaaaaccaccgagcgcaaactggctgaaggggtgct

SEQ ID NO: 107042 - DNA, 75 bp, synthetic construct
  source 1..75: mol_type = other DNA
tttcaccaccggggcagatggaacatacagtgacgtgaccggtgcctcagagagttctacccgctggggtgtggg

SEQ ID NO: 107043 - DNA, 75 bp, synthetic construct
  source 1..75: mol_type = other DNA
agccgggacgtgatgtttgtcgccgatgtcaggacggcgaagatcgcgagtctggaggtgatgcaggataacgcg

SEQ ID NO: 107044 - DNA, 75 bp, synthetic construct
  source 1..75: mol_type = other DNA
cctgggcgcatgaaaccgcggtggtccgacggaagagcgaggcgtcccggtttcaggatcttgttgcctgtggag

SEQ ID NO: 107045 - DNA, 75 bp, synthetic construct
  source 1..75: mol_type = other DNA
aatgcgggcattcttctggttccgtgctgtcgtggtggatctgcgtttactacagggggtgatggcgctttcagt

SEQ ID NO: 107046 - DNA, 75 bp, synthetic construct
  source 1..75: mol_type = other DNA
gagtgttcactgtcggtggcgctcagaacattgtaaatttaggtgttgatggcaatcagacgacaatagctcagt

SEQ ID NO: 107047 - DNA, 75 bp, synthetic construct
  source 1..75: mol_type = other DNA
cctcgccatggtcaatccgaatctcggttattcggtggatgaggcgtttctgtaccgggagtaccgtaaagcccg

SEQ ID NO: 107048 - DNA, 75 bp, synthetic construct
  source 1..75: mol_type = other DNA
gacggcgcagatcgcgagtctggaggtgaggcaggataactcagtggctgacggcgcaatggcgaacacgctgcg

SEQ ID NO: 107049 - DNA, 75 bp, synthetic construct
  source 1..75: mol_type = other DNA
cctgtggttggttatcggcctgataaccctggcagtgatggttttcgccggcggccatttttaccgcagtgcatg

SEQ ID NO: 107050 - DNA, 75 bp, synthetic construct
  source 1..75: mol_type = other DNA
ttttcatataaccctgttcacactgtaaccatcatgaaccgctgcggcggtttttttattttcaggaggctgatg

SEQ ID NO: 107051 - DNA, 75 bp, synthetic construct
  source 1..75: mol_type = other DNA
atgataccagtgtggagcacggcctgcccggactgggcagagcgtctgaaaaaggggctgtcgattattccggct

SEQ ID NO: 107052 - DNA, 75 bp, synthetic construct
  source 1..75: mol_type = other DNA
gtctcccgcgtgctcgacgccgtcaccgacccgctgatggggctgctggtagaccgcacccgcacgcggcacggc

SEQ ID NO: 107053 - DNA, 75 bp, synthetic construct
  source 1..75: mol_type = other DNA
accagccagaccgccggaatcagtgcggtcaccgtcagcatcaacaacagcaccctgagccagaacgtgacattt

SEQ ID NO: 107054 - DNA, 75 bp, synthetic construct
  source 1..75: mol_type = other DNA
ccgatgcgttcggtaatacgcttgccggacagacggtgagcgtgttggcggacaacggtgcaacggtcgctccga

SEQ ID NO: 107055 - DNA, 75 bp, synthetic construct
  source 1..75: mol_type = other DNA
tgataaattccgtgcagacctgacggatatggcaggtcagtgcgttggtggctctgctggcggtgttccctggat

SEQ ID NO: 107056 - DNA, 75 bp, synthetic construct
  source 1..75: mol_type = other DNA
cctcccgcccggaagggtttgtggtgtatacgaccacccagtcgaatgaaccgcccgccggggtgttcagacaga

SEQ ID NO: 107057 - DNA, 75 bp, synthetic construct
  source 1..75: mol_type = other DNA
caacaacagcagccagagtcagaacgtgacatttgtcgcggatgtcaggacggcgcagatcgcggacctggtggt

SEQ ID NO: 107058 - DNA, 75 bp, synthetic construct
  source 1..75: mol_type = other DNA
aattaccatcaggttttattcttcagtggggctcaatcggcgcaccaggcattgcacaggatgtagtaacccatt

SEQ ID NO: 107059 - DNA, 75 bp, synthetic construct
  source 1..75: mol_type = other DNA
tgataaattccgtgcagacctggcggatatggcaggccagtgcgtcagtggctctgctggcggtgttccctggat

SEQ ID NO: 107060 - DNA, 75 bp, synthetic construct
  source 1..75: mol_type = other DNA
aggaagcgctgtcgctcggcgcgtccatcgagttcattaaccactattttggcctttccacgccggaggtctgtg

SEQ ID NO: 107061 - DNA, 75 bp, synthetic construct
  source 1..75: mol_type = other DNA
aagaatacccggaactggcaaaggcttatccgacaaataaattgcctgatttacgtggtgagtttattcgtggct

SEQ ID NO: 107062 - DNA, 75 bp, synthetic construct
  source 1..75: mol_type = other DNA
cttttatttcagagttacaaacatcgattgtagggattcgtgaaggaaaaaacatcagttatgaggagttgcaat

SEQ ID NO: 107063 - DNA, 75 bp, synthetic construct
  source 1..75: mol_type = other DNA
ggaaacagaagtggcaagtatgatggagggaatgattaaagtcgttgccgaataccgtaatacaaagaactcaat

SEQ ID NO: 107064 - DNA, 75 bp, synthetic construct
  source 1..75: mol_type = other DNA
gcacagttgaaaaaacgtggctatgtcaacgcgggtatttacaaccctcaagggattggcggcacccacgtgatg

SEQ ID NO: 107065 - DNA, 75 bp, synthetic construct
  source 1..75: mol_type = other DNA
cgggcgtatgacggcctgagcgttgctggcccatcgggcgcatacgaatattttgcccgcagcgccagcggtctg

SEQ ID NO: 107066 - DNA, 75 bp, synthetic construct
  source 1..75: mol_type = other DNA
cgtacaaggatgtgggaaaattcttttaaagaatggcgaacaaataacactgcatggcaactgtattatattctt

SEQ ID NO: 107067 - DNA, 75 bp, synthetic construct
  source 1..75: mol_type = other DNA
aaatctccggactgtcggggcatcacagtggatgaactgcagaagctggactttggcgtgatgaacttcagcgat

SEQ ID NO: 107068 - DNA, 75 bp, synthetic construct
  source 1..75: mol_type = other DNA
tcgcggcgcttacgcagccagtaaatatgcgctggaggcgtggtcggatgcgctgcgcatggagctacgccacag

SEQ ID NO: 107069 - DNA, 75 bp, synthetic construct
  source 1..75: mol_type = other DNA
atctctctatgcagttaaccgttaatttaatttgggggattgttgttagtgttccacctcagcaacccattgcca

SEQ ID NO: 107070 - DNA, 75 bp, synthetic construct
  source 1..75: mol_type = other DNA
tgggtgctggagtacgccgcgggcaacggtgcggctctgttacagaaaggggggcagattcgctgccgctttaaa

SEQ ID NO: 107071 - DNA, 75 bp, synthetic construct
  source 1..75: mol_type = other DNA
tgtttatcggcgcgatggcgggactggtactctcctcgacgctgctcggtcagttgttgttttttgaaattaggg

SEQ ID NO: 107072 - DNA, 75 bp, synthetic construct
  source 1..75: mol_type = other DNA
gcagaatctcgccaatccctgaagtctgagatggctgatttacgccagtctctgaaagttgagatggctgagcat

SEQ ID NO: 107073 - DNA, 75 bp, synthetic construct
  source 1..75: mol_type = other DNA
acaaatctggaactttaattaatagttatagtaaagcaaataatgaatttgttgcttcgattttttcattatgtt

SEQ ID NO: 107074 - DNA, 75 bp, synthetic construct
  source 1..75: mol_type = other DNA
atgaaaatcaagcatgaacacatccgcatggcgatgaatgcctgggcgcatccggacggcgaaaaagtgccggct

SEQ ID NO: 107075 - DNA, 75 bp, synthetic construct
  source 1..75: mol_type = other DNA
agagtcgattcaggttcaggcgcagttaaaacagcctaaattacgtgagagcgtacaaacggcgcaaagggaggt

SEQ ID NO: 107076 - DNA, 75 bp, synthetic construct
  source 1..75: mol_type = other DNA
ggagctggaggaaccagcaagcaatatcgcggttgacgactcgcagttcgcacactgcgaatccattatcgttga

SEQ ID NO: 107077 - DNA, 75 bp, synthetic construct
  source 1..75: mol_type = other DNA
tcaattttgtaataagcagttttatgataatgctctgataccgttaacggttgattccggtgaagcctcattatc

SEQ ID NO: 107078 - DNA, 75 bp, synthetic construct
  source 1..75: mol_type = other DNA
gctgttgaaaaaattcaggctctgttaccggcgatcgaaaaggcaatgccgcctctgctggtggcccgtatgcgc

SEQ ID NO: 107079 - DNA, 75 bp, synthetic construct
  source 1..75: mol_type = other DNA
gctgaaataacccagtcttattttgagttgggtatgacgtttcctgaattgtacgacgacagccatccggaagcc

SEQ ID NO: 107080 - DNA, 75 bp, synthetic construct
  source 1..75: mol_type = other DNA
actcaatggtgttgagagtttaaagctgaaacatggccgctggaatcttgaggctgtttattttcaaaatgaatg

SEQ ID NO: 107081 - DNA, 75 bp, synthetic construct
  source 1..75: mol_type = other DNA
gattcgtatctgaacacattcctcaacagcaacccggaatataaacgcgtctggaagttgctgctgaaagacaaa

SEQ ID NO: 107082 - DNA, 75 bp, synthetic construct
  source 1..75: mol_type = other DNA
cggagggtgacgattacgggttttcagatgatatcccgttctgaacgactgactgtgacaaccgccccgtccagt

SEQ ID NO: 107083 - DNA, 75 bp, synthetic construct
  source 1..75: mol_type = other DNA
atggcatttaaacactatgacgtggtcagggcggtatcgccgtccgatcttgcggaacgaataactcaaaaactg

SEQ ID NO: 107084 - DNA, 75 bp, synthetic construct
  source 1..75: mol_type = other DNA
ttctggcacttatatcagtacaaagttatgcgggtattatgccttcacagtcgcgtatcgtttatcaccagttag

SEQ ID NO: 107085 - DNA, 75 bp, synthetic construct
  source 1..75: mol_type = other DNA
gcagttcccacggtattatggggacgattttgtcgctggtgccgacgaatattgtggcgtcgatggcgaaaggcg

SEQ ID NO: 107086 - DNA, 75 bp, synthetic construct
  source 1..75: mol_type = other DNA
gactggtgagagacgctgatgaacttgtcgcggtggtaattgctggtttcaatcagatgaatcgtggtggtccgg

SEQ ID NO: 107087 - DNA, 75 bp, synthetic construct
  source 1..75: mol_type = other DNA
tattatgcaggttgttaagtatcgacatgtcaaaaatacagggtttatctcttttgacggtaaaaccttcgtcta

SEQ ID NO: 107088 - DNA, 75 bp, synthetic construct
  source 1..75: mol_type = other DNA
gcctggcgggagaacaccgccactggatgatccctctcagaaagggagcgcaatatgaagagatcagaaaactgg

SEQ ID NO: 107089 - DNA, 75 bp, synthetic construct
  source 1..75: mol_type = other DNA
taccaaagtcggcatcactattgatacagactggttctggggattagtcgaagagtgcgtgcgcggctacatcaa

SEQ ID NO: 107090 - DNA, 75 bp, synthetic construct
  source 1..75: mol_type = other DNA
tttagagcctatcatgcaactgcatgaaaaccactccctaaagcgggcaggcgtggcggggctacgagcgcgcgc

SEQ ID NO: 107091 - DNA, 75 bp, synthetic construct
  source 1..75: mol_type = other DNA
atgaaaatcaagcatgaacacatccgcatggcgatgaatgcctgggcacgtcctgatggcgaaaaagttccggca

SEQ ID NO: 107092 - DNA, 75 bp, synthetic construct
  source 1..75: mol_type = other DNA
gcaaaacaacgccaaggaactgactcgcgtcggtgttgaccctaacagcgttgctcagatgtatcagcagaaccc

SEQ ID NO: 107093 - DNA, 75 bp, synthetic construct
  source 1..75: mol_type = other DNA
gattttgcccgtcagatacaggggcagggtactggcagtattcagaactttaagccacaggagagtattcctggt

SEQ ID NO: 107094 - DNA, 75 bp, synthetic construct
  source 1..75: mol_type = other DNA
atcgaactcttccttgattctccggtgcaggatcaggcgacgctcacctcgctgtggctcagcgttcagtctttt

SEQ ID NO: 107095 - DNA, 75 bp, synthetic construct
  source 1..75: mol_type = other DNA
gtgaaaactggcccgccgactcgttccatgaagcgacgatgctccagttactatcaagtcaggttccaccagacg

SEQ ID NO: 107096 - DNA, 75 bp, synthetic construct
  source 1..75: mol_type = other DNA
gccctggctcgcaatacccagaaaattttccgctgggtagagaaagacacccctgatgcagttgaaaaaattcag

SEQ ID NO: 107097 - DNA, 75 bp, synthetic construct
  source 1..75: mol_type = other DNA
gtaggcagaaatgacctggatgagcgaggttatgtctatgttctacctaaaagatacaagattttgtatcggctg

SEQ ID NO: 107098 - DNA, 75 bp, synthetic construct
  source 1..75: mol_type = other DNA
aggtaaaaacggcgcgggcaaatcgactctcattcgaatgcttaccggcagcgaacgcccggatagcggtgaaat

SEQ ID NO: 107099 - DNA, 75 bp, synthetic construct
  source 1..75: mol_type = other DNA
cgtctttggatacctgaccagcggccggacccgctggacgctgacgcttgtcatgcaggttaaggacagggagtg

SEQ ID NO: 107100 - DNA, 75 bp, synthetic construct
  source 1..75: mol_type = other DNA
gatcagcttgttctcagccacgatgtcttccttaaacaaatgtgggctaaaaatggcggtaatggctggggattt

SEQ ID NO: 107101 - DNA, 75 bp, synthetic construct
  source 1..75: mol_type = other DNA
atctcaatccccgccagatggtaagcatcccggaacagcgtgtaacagtccgtcaccccgtgctcaaagcgccgc

SEQ ID NO: 107102 - DNA, 75 bp, synthetic construct
  source 1..75: mol_type = other DNA
ttatctctatccggttactcacaatcgcagtctgatatttttgcttgggctggaacgattttcgttactgtcaaa

SEQ ID NO: 107103 - DNA, 75 bp, synthetic construct
  source 1..75: mol_type = other DNA
cgccctaaaatcaatgctctgattcaatttttagttgggaaagttattgactacgcaattccgcgtaaaaagata

SEQ ID NO: 107104 - DNA, 75 bp, synthetic construct
  source 1..75: mol_type = other DNA
cagggcgacgaagttcggctgaaaaaatacttttacgtactgcgcccgctattggctgtgcgctgggtcgaatcg

SEQ ID NO: 107105 - DNA, 75 bp, synthetic construct
  source 1..75: mol_type = other DNA
aaatcgctggtttcttccttacaaaccaaatatgcgctgaaaggttatgacattgaagcagcctccctgcaatca

SEQ ID NO: 107106 - DNA, 75 bp, synthetic construct
  source 1..75: mol_type = other DNA
gtggatttgtggtgacacgacgtattactggaaaaatacatacgctacccagtacgacaccgtgtacggcgggta

SEQ ID NO: 107107 - DNA, 75 bp, synthetic construct
  source 1..75: mol_type = other DNA
cgggggacattattcaggaatcactggacgagctgaacgtcagcctgcgcgagtttgccagagcaatggaaattg

SEQ ID NO: 107108 - DNA, 75 bp, synthetic construct
  source 1..75: mol_type = other DNA
atgttattaccctggttaatactaatcccctttatcggcggcttcttgtgctggcagaccgaacgctttggcgtc

SEQ ID NO: 107109 - DNA, 75 bp, synthetic construct
  source 1..75: mol_type = other DNA
ctgaaaatgttgaagcggcagatgtacgggcgtgccgggttcgagttactgaggcaacgggtgatgagtcctttg

SEQ ID NO: 107110 - DNA, 75 bp, synthetic construct
  source 1..75: mol_type = other DNA
ttctcactgcagaaatggtttttaccccaaggggattttcaggaagcatggagtgtaattaattcatattgtagt

SEQ ID NO: 107111 - DNA, 75 bp, synthetic construct
  source 1..75: mol_type = other DNA
ctgccgctgttcccgaacgcgtcggcagagtttgcgccaatcgctatgtggctgggtgttatcggcatcttctac

SEQ ID NO: 107112 - DNA, 75 bp, synthetic construct
  source 1..75: mol_type = other DNA
gtggtcagctttatgaacgtatccatacccgcgacatgcgcatgatgggcggtctgtggagcaagatgaaatggc

SEQ ID NO: 107113 - DNA, 75 bp, synthetic construct
  source 1..75: mol_type = other DNA
tcattcgtagccagattgagatgccgatagatgacaacgtcgtgcttaacaaaggtgacgttttacaagtcagcg

SEQ ID NO: 107114 - DNA, 75 bp, synthetic construct
  source 1..75: mol_type = other DNA
acgctggctgcctggtttagaaaatatccagaaatacaggttgtctcacgcgatcgaggtggtatctatgctaca

SEQ ID NO: 107115 - DNA, 75 bp, synthetic construct
  source 1..75: mol_type = other DNA
tgggctatcagatgtgggatcacttaccggaactgccggtaacatgggcttgcgtcaagcatccctgcggcggaa

SEQ ID NO: 107116 - DNA, 75 bp, synthetic construct
  source 1..75: mol_type = other DNA
gggcagtgcctccgcacaagatttagtgcaggcggtggaaaaagcaggctacggcgcggaagcgattgaagatga

SEQ ID NO: 107117 - DNA, 75 bp, synthetic construct
  source 1..75: mol_type = other DNA
ccgcagaatgccgggatacttctggtgccctgttgccgtggcgggtcagcattcaccaccgggccggacggttca

SEQ ID NO: 107118 - DNA, 75 bp, synthetic construct
  source 1..75: mol_type = other DNA
tgagggtcaccgatgcgttcggtaatgcgcttgccgggcagacggtcagcgtgttggcaggcaacggtgccacga

SEQ ID NO: 107119 - DNA, 75 bp, synthetic construct
  source 1..75: mol_type = other DNA
ggacggcacggtggagatctcagtcaccagccagacggcgggagtcagtgcagtcacggcaaccatcaacaacag

SEQ ID NO: 107120 - DNA, 75 bp, synthetic construct
  source 1..75: mol_type = other DNA
cgtgaactgccggtgaacgggtgggtacagccttctgttatccgcaccttcagctcccggggagacatgagcacg

SEQ ID NO: 107121 - DNA, 75 bp, synthetic construct
  source 1..75: mol_type = other DNA
gacatttatcgccgatgtcaggacggcgaagatcgcggatctggtggtcattaaggatggttcagaggcggacgg

SEQ ID NO: 107122 - DNA, 75 bp, synthetic construct
  source 1..75: mol_type = other DNA
ggtgatgtcaccacgcctgttgtggtgaagccgtcgggtgacagcggtacggtaatgagcacagtcagtgagcca

SEQ ID NO: 107123 - DNA, 75 bp, synthetic construct
  source 1..75: mol_type = other DNA
gccagacggcgggagccagtgcggtcaccgccagtatcaacagcagcaacgcgagccggaacgtgacgtttgttg

SEQ ID NO: 107124 - DNA, 75 bp, synthetic construct
  source 1..75: mol_type = other DNA
accgctctgacggtggcctgctggtgacgctggcggaaatggcgtttgctggtcattgtggcattgacgcggata

SEQ ID NO: 107125 - DNA, 75 bp, synthetic construct
  source 1..75: mol_type = other DNA
gtcattaaggatggttcagaggcggacggttcgacggcgaacacgctgcgggcgagggtcaccgatgcgttcggt

SEQ ID NO: 107126 - DNA, 75 bp, synthetic construct
  source 1..75: mol_type = other DNA
tgggtttataggctatcagagcgaaggggaaaaattatacacacacattcttacattagataatcccgaagagat

SEQ ID NO: 107127 - DNA, 75 bp, synthetic construct
  source 1..75: mol_type = other DNA
agccggtacgctgaccaatgaacaatggcagcaggttaccgctgaactgcacgaccgcatgatggaaacggtctt

SEQ ID NO: 107128 - DNA, 75 bp, synthetic construct
  source 1..75: mol_type = other DNA
gtcgtggtggactacgcgacggacgatgctaatgaaaaatctctcggggcgatttgccttgtcggcgaccacgtc

SEQ ID NO: 107129 - DNA, 75 bp, synthetic construct
  source 1..75: mol_type = other DNA
acctgggcacgccgggggattatttccgaccgtctggcaacggcgattctggtgcacgccgggagaaccgctgaa

SEQ ID NO: 107130 - DNA, 75 bp, synthetic construct
  source 1..75: mol_type = other DNA
gaccaccggtaagggtattcaggtggttgaggccattaacggtgccaccacggaggaaggggcttttgtccaggg

SEQ ID NO: 107131 - DNA, 75 bp, synthetic construct
  source 1..75: mol_type = other DNA
gccggctgtttgacccgtctgtcagactggctgcggatatccgggataacgaaggtcgtatcttcgccagccagg

SEQ ID NO: 107132 - DNA, 75 bp, synthetic construct
  source 1..75: mol_type = other DNA
cctttggtttgtactggcgaatagcggaatggccgggtgaaccgccccgggaatcctggagactaaacttcctga

SEQ ID NO: 107133 - DNA, 75 bp, synthetic construct
  source 1..75: mol_type = other DNA
atggtgctgattaccagcagcaaggaaaatatcaccctgaaaatcgatcctgctgtagtgctggcaacccgcaag

SEQ ID NO: 107134 - DNA, 75 bp, synthetic construct
  source 1..75: mol_type = other DNA
atgttactaccctggctaatattaattccctttattggcggcttcctgtgctggcagaccgaacgctttggcgtc

SEQ ID NO: 107135 - DNA, 75 bp, synthetic construct
  source 1..75: mol_type = other DNA
aaactcatatctacatattaatggttggtatgtagacgggcaaccgtcttataccatccttccttttgtggaagt

SEQ ID NO: 107136 - DNA, 75 bp, synthetic construct
  source 1..75: mol_type = other DNA
tacttttacgtgctgcgtccgctgctggccgtgcgttgggttgaagcgggaaaaggcgtaccgccaatgcgcttt

SEQ ID NO: 107137 - DNA, 75 bp, synthetic construct
  source 1..75: mol_type = other DNA
tggtttgccgagaaaaatttggttgccagtctgaaattaaaaacatgggcaacggagattaattccgcgctatac

SEQ ID NO: 107138 - DNA, 75 bp, synthetic construct
  source 1..75: mol_type = other DNA
agcgaaccggagtattactttgttgtggttctggcggggcagtcaaacagcatggcatatggtgaaggccttccg

SEQ ID NO: 107139 - DNA, 75 bp, synthetic construct
  source 1..75: mol_type = other DNA
aactacaatgacattattcctgcggaccactgcctgcatgatgttcaggatttgagtaagttttcacacccgaaa

SEQ ID NO: 107140 - DNA, 75 bp, synthetic construct
  source 1..75: mol_type = other DNA
atagacgaactactggaacgtaaacagcgcgcgggagaagcggaatatggtccgcgccgtcctttgttacatgcg

SEQ ID NO: 107141 - DNA, 75 bp, synthetic construct
  source 1..75: mol_type = other DNA
ttgatcaatataaaaaacaggttggttattcactatttaaggactatatactatgaacaaaattatatacatcct

SEQ ID NO: 107142 - DNA, 75 bp, synthetic construct
  source 1..75: mol_type = other DNA
tggacacagatgccaaccgtaaggtttatttgccggtgatccgcgcctaccgcgtcggctcggagctggtagcct

SEQ ID NO: 107143 - DNA, 75 bp, synthetic construct
  source 1..75: mol_type = other DNA
tctgatattgctgataaactatgcctttctgaaattgccattagaaataaacttgatgcagaatcatcttcattt

SEQ ID NO: 107144 - DNA, 75 bp, synthetic construct
  source 1..75: mol_type = other DNA
ctaaatttgcctttagcgggaaaataaagcgtatccgaaaagttgatgatttaatatttaagattttatttgttt

SEQ ID NO: 107145 - DNA, 75 bp, synthetic construct
  source 1..75: mol_type = other DNA
gtcaggagaaggtaacgatatgctgatgtccttctttctgcagacggatacgacgaacctgaacgcgatgcatca

SEQ ID NO: 107146 - DNA, 75 bp, synthetic construct
  source 1..75: mol_type = other DNA
ttcccgctcactgtggaatgctgagcagtctcaggatgttgagacgctttgcgcatccattatgacaacatggtc

SEQ ID NO: 107147 - DNA, 75 bp, synthetic construct
  source 1..75: mol_type = other DNA
ggaattaagaaacagcaaggaaatgcataatgcggatacagcgggagataacttcaggatagactttgacaaagt

SEQ ID NO: 107148 - DNA, 75 bp, synthetic construct
  source 1..75: mol_type = other DNA
ccgcatttccatgaacttcctcatcaatgggagatgtttgtcgttatgcaggggcaggttcaagtctgtttgtac

SEQ ID NO: 107149 - DNA, 75 bp, synthetic construct
  source 1..75: mol_type = other DNA
tatcgtgaagatggtccgcttggcatgaccagccgccgtcgtggtaaatccagcaataatcagctgcctcaggga

SEQ ID NO: 107150 - DNA, 75 bp, synthetic construct
  source 1..75: mol_type = other DNA
ttgaggcattatacgaacaagcagagcaatccgagcgcctgcgttcccatcttttgatgcatagttcgcatcagg

SEQ ID NO: 107151 - DNA, 75 bp, synthetic construct
  source 1..75: mol_type = other DNA
gtgaataccggcgcggaagggggaccagatgcagaaaatggtgataccgggcagtttgttcgcggaaatgccgta

SEQ ID NO: 107152 - DNA, 75 bp, synthetic construct
  source 1..75: mol_type = other DNA
caagataactacctccgagatgtgcggattagattcaaccaactagccaatgcgcaggcaaccaagcttctccct

SEQ ID NO: 107153 - DNA, 75 bp, synthetic construct
  source 1..75: mol_type = other DNA
acggcgaaaatcatcatcactgttatctgtattgtctgggtagtcagaagcattacggactatgaactgaaaacg

SEQ ID NO: 107154 - DNA, 75 bp, synthetic construct
  source 1..75: mol_type = other DNA
ggagatatacatagtgtcaaatgcctgtcaccaaaagcccttatgttggagataaaggaggggccatttgaccca

SEQ ID NO: 107155 - DNA, 75 bp, synthetic construct
  source 1..75: mol_type = other DNA
agtgtgctggagcagtcgacgccgaataaatggccagaatgggacgtccccggtgggcaactcaccaccaaaggt

SEQ ID NO: 107156 - DNA, 75 bp, synthetic construct
  source 1..75: mol_type = other DNA
gtgtccaccggtcagatggtcggggggattgctgaatccaccaccataaacaaaaatggccggcaggttatctgg

SEQ ID NO: 107157 - DNA, 75 bp, synthetic construct
  source 1..75: mol_type = other DNA
aaataaagtcgaatggcctgttaatgcccatattacttcacatggcgatgaatgcagtcataacaggaatacaat

SEQ ID NO: 107158 - DNA, 75 bp, synthetic construct
  source 1..75: mol_type = other DNA
aaataaactttccattcgtactattgaaaagttattagtcaatgcattcagctcacctgatcctggctctgtaag

SEQ ID NO: 107159 - DNA, 75 bp, synthetic construct
  source 1..75: mol_type = other DNA
gcgagattacccagggcgaagcatggctggatgaagcgatgctgacgggcgaacctatcccgcagcaaaaaggcg

SEQ ID NO: 107160 - DNA, 75 bp, synthetic construct
  source 1..75: mol_type = other DNA
ggagggagaactgccggaggctgaacgacagattgcttttctgcggatggggatggatatcaatgcctggctggt

SEQ ID NO: 107161 - DNA, 75 bp, synthetic construct
  source 1..75: mol_type = other DNA
aacgaaaccgggcttaggcgtagaaatcgacgaagctaaagttattgagttcagtaaaaatgccccggactggcg

SEQ ID NO: 107162 - DNA, 75 bp, synthetic construct
  source 1..75: mol_type = other DNA
tgttcagacagaaactgcagtacgcccgggatgtccgtgacggcaaaattcatgatccgcactttctgccggtga

SEQ ID NO: 107163 - DNA, 75 bp, synthetic construct
  source 1..75: mol_type = other DNA
gtaaaagtcgatgctccatcttctgaaactggcgcaccgacgccatcaccgtcagaaaatgaagcggtaagcaca

SEQ ID NO: 107164 - DNA, 75 bp, synthetic construct
  source 1..75: mol_type = other DNA
ggtggcagccgatccgaatacggtgtccggtatcaagtccgtggggacgctgattgatgaactgtggctgtttgg

SEQ ID NO: 107165 - DNA, 75 bp, synthetic construct
  source 1..75: mol_type = other DNA
gtaatgcgctgggcgggcagacggtcagcgtgttggcagacaacggtgcaacggtcgcttcgacggtgaccacgc

SEQ ID NO: 107166 - DNA, 75 bp, synthetic construct
  source 1..75: mol_type = other DNA
tgcgcatcaacgtgccgacctttttccgcgatccggatttcccccaggtggaacaactggtgggcgattttacgg

SEQ ID NO: 107167 - DNA, 75 bp, synthetic construct
  source 1..75: mol_type = other DNA
ttgccgggcagacggtcagcgtgatggcaggtaacggtgccacgactgctccgacggttatcacagagccggacg

SEQ ID NO: 107168 - DNA, 75 bp, synthetic construct
  source 1..75: mol_type = other DNA
cagtctcaggatgttgagacgctttgcgcatccgttattacaacatggtcgtatgatgccctgggagcgggggcg

SEQ ID NO: 107169 - DNA, 75 bp, synthetic construct
  source 1..75: mol_type = other DNA
gcaccgcaaattgtttataccctggtgattgccaccacggtactgattatcgcctgtccgtgtgcgctggggctg

SEQ ID NO: 107170 - DNA, 75 bp, synthetic construct
  source 1..75: mol_type = other DNA
tttcgctggcggatgcgcggaagaaaagggaagaggccagaaagctggtagctgctggtatcgatcctcgtgagc

SEQ ID NO: 107171 - DNA, 75 bp, synthetic construct
  source 1..75: mol_type = other DNA
aggtcccggcacgagtgagcgccgttcccggcgttcgcttcctgaaagtggaatttattccggcagaggagggca

SEQ ID NO: 107172 - DNA, 75 bp, synthetic construct
  source 1..75: mol_type = other DNA
gtgaagtgatgaatccgctgcagtatgtccttttaaccagacgctgtatttcatcaatggcgatgatccggcgca

SEQ ID NO: 107173 - DNA, 75 bp, synthetic construct
  source 1..75: mol_type = other DNA
ctgtgggacgctaagtcttccactggtttcactcaggggacgctccagcaggacgctctgaacatctgcgataac

SEQ ID NO: 107174 - DNA, 75 bp, synthetic construct
  source 1..75: mol_type = other DNA
catatatggcctaccaagaaggagaaaatttaacttcatttatggagattaaaggttggcgtatatacggacaac

SEQ ID NO: 107175 - DNA, 75 bp, synthetic construct
  source 1..75: mol_type = other DNA
aaccgtctgggcgtattctctgttgtggaggggaaagctgataatgtcgttctggaaaatggcggacgtctggat

SEQ ID NO: 107176 - DNA, 75 bp, synthetic construct
  source 1..75: mol_type = other DNA
ctggcgagatttcagaaaggtgattaaagatatcaaacctgaatgttatattttgggtgagatatggcatgaggg

SEQ ID NO: 107177 - DNA, 75 bp, synthetic construct
  source 1..75: mol_type = other DNA
tagcctgagccagaacgtcacctttgtaccgggtgacgcatcgcagctcacttcaaccgttgaaacaaataagtc

SEQ ID NO: 107178 - DNA, 75 bp, synthetic construct
  source 1..75: mol_type = other DNA
tcagggcggcgtcgccgtcagacttggcggaacaactgacacagaaaatcaaagaaggctggcaaccatttggaa

SEQ ID NO: 107179 - DNA, 75 bp, synthetic construct
  source 1..75: mol_type = other DNA
ccttgatgcttcaagaattgttccaactgcaaacgaaaaccgtcctcgtaacattgcctttaattatatcgtgag

SEQ ID NO: 107180 - DNA, 75 bp, synthetic construct
  source 1..75: mol_type = other DNA
gagcggggcttcgaggtcgatcatagcacgatcaaccgctgggtattggcttatgcacctgtcatcgagaaacgg

SEQ ID NO: 107181 - DNA, 75 bp, synthetic construct
  source 1..75: mol_type = other DNA
gacatgataccggcagaccactgtctgcatgatgttcaggatatgagcagctttaaccatccgaaagctgacctg

SEQ ID NO: 107182 - DNA, 75 bp, synthetic construct
  source 1..75: mol_type = other DNA
ctcggtcacgataacaacggcggtattgcccgtggggccacgccggaaagcagcggcagctatggcttcgtccgt

SEQ ID NO: 107183 - DNA, 75 bp, synthetic construct
  source 1..75: mol_type = other DNA
acaatttaccgtgcactggggcgaccagaaaacgtgtgccattcatctgccggaacatctggaagatgtgactaa

SEQ ID NO: 107184 - DNA, 75 bp, synthetic construct
  source 1..75: mol_type = other DNA
ccactctggcacgcataattcgcatggtgcgccaggcccaaagtagtaaaccggaaatcggtcaactggcggata

SEQ ID NO: 107185 - DNA, 75 bp, synthetic construct
  source 1..75: mol_type = other DNA
aggcgatccatataattgggctgaaggtggtcttgacggcggtaacatggccgggacagaagcgttcggctggat

SEQ ID NO: 107186 - DNA, 75 bp, synthetic construct
  source 1..75: mol_type = other DNA
tcctccatcgttaccgacaaaacgacctacaccgctggcggtgcgataaaagttacggtgacactcaaggatagc

SEQ ID NO: 107187 - DNA, 75 bp, synthetic construct
  source 1..75: mol_type = other DNA
taagtgatgttgccgttatgcttgagattaaagagggcccatttgatgaaaaaaaagcaaaagtgttaacttctt

SEQ ID NO: 107188 - DNA, 75 bp, synthetic construct
  source 1..75: mol_type = other DNA
aacggaaccctcgttcatagcaacggtgatggcaatgttcaaacccgacttggcgtaaaaacctggctgaagagc

SEQ ID NO: 107189 - DNA, 75 bp, synthetic construct
  source 1..75: mol_type = other DNA
caaggatgaggttaactcaacagttgatttaacccttacaaaacaatcagggactggcaatcgttttgttttaca

SEQ ID NO: 107190 - DNA, 75 bp, synthetic construct
  source 1..75: mol_type = other DNA
acagcgtttatctgcagggctggcgcaacagattgtcatcacggagcctctgctggataatcgtgggcaggtgaa

SEQ ID NO: 107191 - DNA, 75 bp, synthetic construct
  source 1..75: mol_type = other DNA
agtatcccagcgagcaatatcttaatgagctgatcaccaacatggagtttgctgcaagggcaccagttgaagtcg

SEQ ID NO: 107192 - DNA, 75 bp, synthetic construct
  source 1..75: mol_type = other DNA
cggcttcaatggcagtggctacagcgactgcaccttcttcctttattgcctgttcgtccggaatggcggcgcaaa

SEQ ID NO: 107193 - DNA, 75 bp, synthetic construct
  source 1..75: mol_type = other DNA
gcagccgttcagcatggcgttaaaaaagctatcaggattttgcaggaagccgctgatgtggatgctgacggcatc

SEQ ID NO: 107194 - DNA, 75 bp, synthetic construct
  source 1..75: mol_type = other DNA
ccgtgaagggggcgagtaaagctctggatcgtatcgctcaattctatatcgacatggcagagggcattttccctg

SEQ ID NO: 107195 - DNA, 75 bp, synthetic construct
  source 1..75: mol_type = other DNA
caagtcgcgaagaaaattctggtgacgtgcgcgctgccgtacgctaacggctcaatccacctcggccatatgctg

SEQ ID NO: 107196 - DNA, 75 bp, synthetic construct
  source 1..75: mol_type = other DNA
gccgcgaagaagtcagccagcgatgccggcacatcagcccgtgaggcggcaacccatgcgactgatgctgcagac

SEQ ID NO: 107197 - DNA, 75 bp, synthetic construct
  source 1..75: mol_type = other DNA
ttacatttatattccaggcattaaatcggcgctggataatcccggtacgacgttcaaaggttacgtgatccatga

SEQ ID NO: 107198 - DNA, 75 bp, synthetic construct
  source 1..75: mol_type = other DNA
gccaattaatttctacgatgtgcattatgcatttacccactacgtgggcacgtcaggcggcaataccgacgacat

SEQ ID NO: 107199 - DNA, 75 bp, synthetic construct
  source 1..75: mol_type = other DNA
tttgcgctggatgtggctgcacggcaccgggtgcagttttcgatgcctgagtccgatgcggtgtctatgctcaaa

SEQ ID NO: 107200 - DNA, 75 bp, synthetic construct
  source 1..75: mol_type = other DNA
tatatattctgaaattcaagaaaacaaatcctcagtaaatttctttcctgatatatatagctttgaatttaaaaa

SEQ ID NO: 107201 - DNA, 75 bp, synthetic construct
  source 1..75: mol_type = other DNA
gcggtgaaaccaaatacggcatttctgaccgccgcgacggtgtgattgacggcaaaaccgatgtcagcggtgacg

SEQ ID NO: 107202 - DNA, 75 bp, synthetic construct
  source 1..75: mol_type = other DNA
atgcctgagttttcccctgcattccttcattcgctgaatttcgttatacgccctgatgttgaaggtggctatgtt

SEQ ID NO: 107203 - DNA, 75 bp, synthetic construct
  source 1..75: mol_type = other DNA
tgtttcaagattataattttaacaaaaaagaacttatagaggtttttgcatccatttctttatttgctgaagcac

SEQ ID NO: 107204 - DNA, 75 bp, synthetic construct
  source 1..75: mol_type = other DNA
tcgccttgatggcagcaatgcctctgaccagctggtgattaatggtggtcaggcaaccggcaaaacctggcttgc

SEQ ID NO: 107205 - DNA, 75 bp, synthetic construct
  source 1..75: mol_type = other DNA
aaaacagtgaattgcagattgtcctgaaaacggatgattaccgcataaccatcgattatctccgaacccgtcctg

SEQ ID NO: 107206 - DNA, 75 bp, synthetic construct
  source 1..75: mol_type = other DNA
gatggctgtatgaatttcttcgccggaccgcaggataaacacttcagcgcgccgattaatttctacgatgtacat

SEQ ID NO: 107207 - DNA, 75 bp, synthetic construct
  source 1..75: mol_type = other DNA
gggagaaatctttagctacatgcctgtggaaataaacagttatatgaaatacataaataataaatttgctaaaat

SEQ ID NO: 107208 - DNA, 75 bp, synthetic construct
  source 1..75: mol_type = other DNA
gatcagatcattactgacgacggtctgccggagagtgccagccgcgcgctggcgaagctggatctctctttgctg

SEQ ID NO: 107209 - DNA, 75 bp, synthetic construct
  source 1..75: mol_type = other DNA
gaaaaagccgccaggacggcaggaagaacgcccgccgggcagcagactcaccggctggttccgctctccgactcc

SEQ ID NO: 107210 - DNA, 75 bp, synthetic construct
  source 1..75: mol_type = other DNA
cctgaacggctggtttaaccgcatggaaaagctgaccgacgcctgtctggaaatcatcgatacccctttgggcat

SEQ ID NO: 107211 - DNA, 75 bp, synthetic construct
  source 1..75: mol_type = other DNA
tatgcccacacactcgaagcaattattccaggctttgcagcatcagcgccgatagaacgcaaggtcacacgcgag

SEQ ID NO: 107212 - DNA, 75 bp, synthetic construct
  source 1..75: mol_type = other DNA
aagtctccgacattcagacttcacttatcggacgttacagcactgcattctcagcattagcggaaacgctggata

SEQ ID NO: 107213 - DNA, 75 bp, synthetic construct
  source 1..75: mol_type = other DNA
acgactattatgacgtcagcccgaagcaggcccgtctggatcgcatagcatctccggcattccatttccagcagc

SEQ ID NO: 107214 - DNA, 75 bp, synthetic construct
  source 1..75: mol_type = other DNA
tgcatataatttcgcaaacgacagaattgatgtgcaaaatcttaaagcgtctgggttaattacagctaactcagt

SEQ ID NO: 107215 - DNA, 75 bp, synthetic construct
  source 1..75: mol_type = other DNA
ggttgagccgtcaacaggctggcaggtacgcgcctatttacgtgcggcgctgggcatgaatcagactcatggagg

SEQ ID NO: 107216 - DNA, 75 bp, synthetic construct
  source 1..75: mol_type = other DNA
acatccgtgcagctcaggcgcttggcgtcagcgatcgcagtatcattctgcgtcatatgttgccaaatgccatgg

SEQ ID NO: 107217 - DNA, 75 bp, synthetic construct
  source 1..75: mol_type = other DNA
atggcaaataaaactgaaaagccaacacaaaagaaactccaggatgcttctaaaaaagggcaaattctaaaaagt

SEQ ID NO: 107218 - DNA, 75 bp, synthetic construct
  source 1..75: mol_type = other DNA
gaaaccctgcttcgtcggattcgtttatggcaggcgtttatggagcgcgatacccgtccacttagccacgaagaa

SEQ ID NO: 107219 - DNA, 75 bp, synthetic construct
  source 1..75: mol_type = other DNA
tcattaatgtataataaaccaattctagcttctgcatttgcattagttggttacgaaaaaataatagatggaact

SEQ ID NO: 107220 - DNA, 75 bp, synthetic construct
  source 1..75: mol_type = other DNA
gaaaccctgctccgtcggattcgtttatggcaggcgtttatggagcgcgatacccgtccactcagtcatgaagaa

SEQ ID NO: 107221 - DNA, 75 bp, synthetic construct
  source 1..75: mol_type = other DNA
ctgcaccaaaagtagctgatttacaggaggcgttgattgggcgcttcagttccgctttctctgcattagcggaaa

SEQ ID NO: 107222 - DNA, 75 bp, synthetic construct
  source 1..75: mol_type = other DNA
catttcgcaatgctcttgctttcgtgctcagcgcagaacgcggatatgtcaatgaccccactgaccgtggcggtg

SEQ ID NO: 107223 - DNA, 75 bp, synthetic construct
  source 1..75: mol_type = other DNA
gtatggaaaaaaatagtattaacagaaagaattgaagaaggcgaatcgactacttacgtttattcgaattactca

SEQ ID NO: 107224 - DNA, 75 bp, synthetic construct
  source 1..75: mol_type = other DNA
tctggcggggaatgtcagcgagctgacagaggtgtttgcgcgcattaagcagattgctggtcaggagcatattga

SEQ ID NO: 107225 - DNA, 75 bp, synthetic construct
  source 1..75: mol_type = other DNA
cttacggggtttattagtcaggtagatggaacaccagcgtatacaggtgtatttcagggatgggctacgcgctcg

SEQ ID NO: 107226 - DNA, 75 bp, synthetic construct
  source 1..75: mol_type = other DNA
catacccgctacggtgcgttaggtacgatggcggttggtgaaggcggcggcgagctggttaagcaactgctgaat

SEQ ID NO: 107227 - DNA, 75 bp, synthetic construct
  source 1..75: mol_type = other DNA
tgctggcggcatggaaagccttagaccgatctcagatagacgaacagcacggcgctcagggctggcgcggaattc

SEQ ID NO: 107228 - DNA, 75 bp, synthetic construct
  source 1..75: mol_type = other DNA
aacaacggctggaaaataacggctgggtactgtgggcaccgattcgctttggtgctaccagtatcaactttgcta

SEQ ID NO: 107229 - DNA, 75 bp, synthetic construct
  source 1..75: mol_type = other DNA
ccggactgggcatgttgtctcctgtcggcaataccgtagagtctacctggaaagctctgcttgccggtcagagtg

SEQ ID NO: 107230 - DNA, 75 bp, synthetic construct
  source 1..75: mol_type = other DNA
cagtaccacggtgatcttaatggtcagcgcagtgctgttctcggtgctgctggtagtgcatctggtttacttctc

SEQ ID NO: 107231 - DNA, 75 bp, synthetic construct
  source 1..75: mol_type = other DNA
acacgggcttattgctgggggaagtgaaacaggaggccagcgtatcgcagtatggaagattagcgcacaggaggc

SEQ ID NO: 107232 - DNA, 75 bp, synthetic construct
  source 1..75: mol_type = other DNA
tgcgtgaaatgatggcaggcggcggcaaaatgatcctcggttcagacagccacacccgttacggtgcattaggga

SEQ ID NO: 107233 - DNA, 75 bp, synthetic construct
  source 1..75: mol_type = other DNA
tggcgctggtggcgatggtcggtgcaggcgtcacccgtaacccgctgcattgccaccgcttctggcagcaactga

SEQ ID NO: 107234 - DNA, 75 bp, synthetic construct
  source 1..75: mol_type = other DNA
tgaatttgagaatgtcctggttgttgttgggcgtgggtggaaccagtataacttcggagaaatgttggaattcgc

SEQ ID NO: 107235 - DNA, 75 bp, synthetic construct
  source 1..75: mol_type = other DNA
gctggctgggctcactggaaactggtctgcccttcagtatcactgacaacctgatgctggagccacaactgcagt

SEQ ID NO: 107236 - DNA, 75 bp, synthetic construct
  source 1..75: mol_type = other DNA
gaatgattacggcggctggtacgacactgatcatataaacctggtacaaggctcagctttcgcaggctccctaca

SEQ ID NO: 107237 - DNA, 75 bp, synthetic construct
  source 1..75: mol_type = other DNA
agggaaccggcaatatcttcgggatgtatatcgtcgagacggtgtcgaccacgcataccgagtttttcagcgacg

SEQ ID NO: 107238 - DNA, 75 bp, synthetic construct
  source 1..75: mol_type = other DNA
tttatgtcacgctgaaaacctgtggctggagccgaaatggccaaagcaaaacgccgaatggtgacaaccttttta

SEQ ID NO: 107239 - DNA, 75 bp, synthetic construct
  source 1..75: mol_type = other DNA
gggcagccacaacgatatgacctttggtgaaggcacctcatcccgtgacaccctgcgcgacagtgcaaaacaccg

SEQ ID NO: 107240 - DNA, 75 bp, synthetic construct
  source 1..75: mol_type = other DNA
tgctgatgacttacctgaaaccggtactgccgaaactgacagaacgtgcggaagcattcctgaatacggaactga

SEQ ID NO: 107241 - DNA, 75 bp, synthetic construct
  source 1..75: mol_type = other DNA
ctggccagcaaattcctgaatggccggggtatgcgtcgggaagtcgttcagggaacgctcgaagaacgtgcacga

SEQ ID NO: 107242 - DNA, 75 bp, synthetic construct
  source 1..75: mol_type = other DNA
taatgatgtcagacataaggccgtgagtcggttgttccacgaacccgttaccgtcctggcttataccatgatcag

SEQ ID NO: 107243 - DNA, 75 bp, synthetic construct
  source 1..75: mol_type = other DNA
ctgtgatgcctttaccgctcgtaagtatggagagatgtttaatgcgcttagcggtattacaccactgttgcgtag

SEQ ID NO: 107244 - DNA, 75 bp, synthetic construct
  source 1..75: mol_type = other DNA
cacatatagcgattggaatatattttaaaccaaatttatcaccaataccgttgatttcagtaagggcaaccaatc

SEQ ID NO: 107245 - DNA, 75 bp, synthetic construct
  source 1..75: mol_type = other DNA
cttttcaaccaagctttgtcacctgcggcactgacaacacttggaaattggtttggagcagagactataatacca

SEQ ID NO: 107246 - DNA, 75 bp, synthetic construct
  source 1..75: mol_type = other DNA
ttgttaaagctattctctatatagtatttttctgtctggcgataagagttttttggggaagcaataaatctcttc

SEQ ID NO: 107247 - DNA, 75 bp, synthetic construct
  source 1..75: mol_type = other DNA
gcaaagggggcacttctaaccgtaaaaaaccctcatgcctatcctattcttgttcagacaagaataattgaggag

SEQ ID NO: 107248 - DNA, 75 bp, synthetic construct
  source 1..75: mol_type = other DNA
atggaacgacaattaagggcggtgcttcacgcgtagagggagggagtgcgaatggaatactcattgatggtgtag

SEQ ID NO: 107249 - DNA, 75 bp, synthetic construct
  source 1..75: mol_type = other DNA
acccatcgacttttagccaatcagcagggctattcaaatatagtggcagcgtttaaatacaatgaatccttcacg

SEQ ID NO: 107250 - DNA, 75 bp, synthetic construct
  source 1..75: mol_type = other DNA
tttccagcgcgtaagttcaggcggtacagccacgggaacccaactgagtggggggacgcagaatgtttcatcagg

SEQ ID NO: 107251 - DNA, 75 bp, synthetic construct
  source 1..75: mol_type = other DNA
tctgggtttaagcgcaacctatggacaaacaggaaacaaggtttcagccggaaccgtccagtcagtcattggtgt

SEQ ID NO: 107252 - DNA, 75 bp, synthetic construct
  source 1..75: mol_type = other DNA
gacttgtgatggcatttttcccggcattagcacaacgctatatgaagcgtattacggggaatgatgacattgctt

SEQ ID NO: 107253 - DNA, 75 bp, synthetic construct
  source 1..75: mol_type = other DNA
cgctgattgaaaacgcggagtttgttgaaggttctgacaaacttctgcgtctgacgctggatctcggcggcgaaa

SEQ ID NO: 107254 - DNA, 75 bp, synthetic construct
  source 1..75: mol_type = other DNA
acaattaaccgccactctggcgctggatcgccatcaggaacgccagcagcagttgatcgtgatggaagagcgtgc

SEQ ID NO: 107255 - DNA, 75 bp, synthetic construct
  source 1..75: mol_type = other DNA
ctccttcccgtgggtaggcggcgaagcgacgcatgtggttattcccaacgaggtcatggaacaagattgcctgct

SEQ ID NO: 107256 - DNA, 75 bp, synthetic construct
  source 1..75: mol_type = other DNA
ggtggctatttaacctctgccagcgaacttgattgctggggacaacgtgccggagtacgccttcgatgtaacgcc

SEQ ID NO: 107257 - DNA, 75 bp, synthetic construct
  source 1..75: mol_type = other DNA
gaagattacattacggcttacgcccataatgacacgatgctggtaaataatgggcaaagcgtgaaggctgggcaa

SEQ ID NO: 107258 - DNA, 75 bp, synthetic construct
  source 1..75: mol_type = other DNA
ccaccattgcgcgcgaactgcatgattctattgcccaatctctctcttgcatgaagatgcaggtgagttgtttac

SEQ ID NO: 107259 - DNA, 75 bp, synthetic construct
  source 1..75: mol_type = other DNA
ttgatgaaattgcattagtcagtggtggcaacgcaaacagtaattatgaaggaggcggaagtcgtagtcgtaaca

SEQ ID NO: 107260 - DNA, 75 bp, synthetic construct
  source 1..75: mol_type = other DNA
gggctggctgggctcactggaaaccggtctgcccttcagtatcactgacaacctgatgctggagccacaactgca

SEQ ID NO: 107261 - DNA, 75 bp, synthetic construct
  source 1..75: mol_type = other DNA
aaagaaccggtaaaagatgaagaagaacaaccacaacagccattaacggggtcgccgtctcaggacaaaaaagaa

SEQ ID NO: 107262 - DNA, 75 bp, synthetic construct
  source 1..75: mol_type = other DNA
cgttttgacggcgtgctggcaagcgaactggctgacccgcaactgtacaaaacctttactgatgccgctgaagtg

SEQ ID NO: 107263 - DNA, 75 bp, synthetic construct
  source 1..75: mol_type = other DNA
ctttacatggaaagcctgacggctgaagagcgcgagattatcaaggcgggtagtttgattaacttcaataaaaac

SEQ ID NO: 107264 - DNA, 75 bp, synthetic construct
  source 1..75: mol_type = other DNA
tgtttgaacggcgcaccctgccgcatcagtcaatgcagtattcgaaggactaccggtgggtgtcaaatgaccgta

SEQ ID NO: 107265 - DNA, 75 bp, synthetic construct
  source 1..75: mol_type = other DNA
ttgtggcaggctaaccgtcgtttgcattctcgcgccccgctgtgtgaacgcctgtctcccgtactcaacggctta

SEQ ID NO: 107266 - DNA, 75 bp, synthetic construct
  source 1..75: mol_type = other DNA
tccgtcttccgcgcagaaaaacgcatcggcctggtgctgttcggcaagggcaatatcggctcccgctggctggaa

SEQ ID NO: 107267 - DNA, 75 bp, synthetic construct
  source 1..75: mol_type = other DNA
caactgcagtacacctggcagggactctccctggatgacggccaggataacgccggttatgtgaagttcgggcat

SEQ ID NO: 107268 - DNA, 75 bp, synthetic construct
  source 1..75: mol_type = other DNA
agacggacaactggcgcaattacagggtttacaagattactggcgtaatgaactgatccctgcactgatgcgtgc

SEQ ID NO: 107269 - DNA, 75 bp, synthetic construct
  source 1..75: mol_type = other DNA
ggccgtcatctcagccgcgatcaacaacaactggtggatacgctggttgaacaactcaccgccactctggcgctt

SEQ ID NO: 107270 - DNA, 75 bp, synthetic construct
  source 1..75: mol_type = other DNA
ctttgggtggtttatctggcgcagccattttctctgcccgcgatgctggttttacttcctgccgccttatggtcc

SEQ ID NO: 107271 - DNA, 75 bp, synthetic construct
  source 1..75: mol_type = other DNA
agcaatatccatcagcattccgcaactgaaactgctctcgtttcatctgtaccagctaatcagtcgacggcaggg

SEQ ID NO: 107272 - DNA, 75 bp, synthetic construct
  source 1..75: mol_type = other DNA
caaaatttaaccctgctgcgtgatatcgaactgcgtgtatatgacactgaagatgaagagaatcatcaggagttc

SEQ ID NO: 107273 - DNA, 75 bp, synthetic construct
  source 1..75: mol_type = other DNA
aataaaacagttagtgcgcataaatctaatatttatggcaagctaggtttgcattcaattgtagagcttatcgac

SEQ ID NO: 107274 - DNA, 75 bp, synthetic construct
  source 1..75: mol_type = other DNA
cgccagtgaaacggtgctgctggggcgtaacggttccgactattccgcgacacaaatcggtgcgctggcgggtgt

SEQ ID NO: 107275 - DNA, 75 bp, synthetic construct
  source 1..75: mol_type = other DNA
tcgtcgccgcttccgtaagcgcattctccattgccacgctgttcccgacgctacaggctccggtagtgctcggcg

SEQ ID NO: 107276 - DNA, 75 bp, synthetic construct
  source 1..75: mol_type = other DNA
caaaatgcaggaatggtttgaatccggcctgcaacagtgggacatctcccgcgacgcaccgtacttcggttttga

SEQ ID NO: 107277 - DNA, 75 bp, synthetic construct
  source 1..75: mol_type = other DNA
cgacgctgtttttgattattttactttccagcgtcgtacagcctaacttctggtggctgctggcaattactgtct

SEQ ID NO: 107278 - DNA, 75 bp, synthetic construct
  source 1..75: mol_type = other DNA
cggcaataccgtagagtctacctggaaaactctgcttgccggtcagagtggcatcagcctaatcgaccatttcga

SEQ ID NO: 107279 - DNA, 75 bp, synthetic construct
  source 1..75: mol_type = other DNA
cgggaagagattgaagcagaggcaagaggcctgcttcctgaaagcgatatgtaccctgatttcggcgcattaata

SEQ ID NO: 107280 - DNA, 75 bp, synthetic construct
  source 1..75: mol_type = other DNA
cccgtatacgccaggcccgccgccgcgcgcgcctgaaagaagaaggcacaagcgtgactgtcacgctaactaaac

SEQ ID NO: 107281 - DNA, 75 bp, synthetic construct
  source 1..75: mol_type = other DNA
agcctgtacccaaccggtgctgggcatctgcttagggatgcaactgctcgggcgacgtagcgaagagagcaatgg

SEQ ID NO: 107282 - DNA, 75 bp, synthetic construct
  source 1..75: mol_type = other DNA
atgctgatatcaccggtattttcacccgcatggggattgatcacccgaccagtattcctggccgacctcagtctc

SEQ ID NO: 107283 - DNA, 75 bp, synthetic construct
  source 1..75: mol_type = other DNA
aaacagaagtaactctggaagagtactgttcgttaatctggaaaacgaacatcatgagtccattaaaaatcccca

SEQ ID NO: 107284 - DNA, 75 bp, synthetic construct
  source 1..75: mol_type = other DNA
acgggttactacggtctgacgcaaggattgctttccgtcctgcgtctgttctggggaaacctgataaactttatg

SEQ ID NO: 107285 - DNA, 75 bp, synthetic construct
  source 1..75: mol_type = other DNA
tgacttacattgatgagttttcagaactgcatggcaaagatgttccggtgcgtgaagccctcgccggacaagtgc

SEQ ID NO: 107286 - DNA, 75 bp, synthetic construct
  source 1..75: mol_type = other DNA
aagctggtgattctggcgcgtgaagcaggttacgacatcgaaccggaccaggtacgtgttgaatcgctggtgcct

SEQ ID NO: 107287 - DNA, 75 bp, synthetic construct
  source 1..75: mol_type = other DNA
gggccttacccgattaaagacttcaatcctacctatgattattctggtgccatatcgacaggtattttttcagtt

SEQ ID NO: 107288 - DNA, 75 bp, synthetic construct
  source 1..75: mol_type = other DNA
tcttcacgcccgtactttacagccagtatccggtagtgaaatcgacctgcaactgcgctgtagctacacgccgga

SEQ ID NO: 107289 - DNA, 75 bp, synthetic construct
  source 1..75: mol_type = other DNA
ccgtatccatgggaaatggcggcgtactgctggccgattccggcgccgctgtcagtggtacccggagcgacggaa

SEQ ID NO: 107290 - DNA, 75 bp, synthetic construct
  source 1..75: mol_type = other DNA
aacggcgtaataaacgaacaggcaggacagagaaagcgcggatctgggaagtgacggacagaacggtcaggacct

SEQ ID NO: 107291 - DNA, 75 bp, synthetic construct
  source 1..75: mol_type = other DNA
cgatactgggttttctggcgggtaactgtgtagggataatttcagaatatagcgggcgaaaattgagcgaaacaa

SEQ ID NO: 107292 - DNA, 75 bp, synthetic construct
  source 1..75: mol_type = other DNA
aacggcattctgtcgcagtaccagtacagtaatgaatgcgtgaaccaggcgggcgacagccgctacgaatacgac

SEQ ID NO: 107293 - DNA, 75 bp, synthetic construct
  source 1..75: mol_type = other DNA
ctcctcaacgaacccaattaccgcctgggactcatggccggatatcaggaaagccgttatagctttacagccaga

SEQ ID NO: 107294 - DNA, 75 bp, synthetic construct
  source 1..75: mol_type = other DNA
ggcagtgagattcagcggggtatacaggccgcgacagccgcgcttcagggactggctggggggaatttagcgggt

SEQ ID NO: 107295 - DNA, 75 bp, synthetic construct
  source 1..75: mol_type = other DNA
tatctttatttaaaagcgtgcccagtcggttaatagaaaaatcagcttactgctcaattgaaaacatgatcacca

SEQ ID NO: 107296 - DNA, 75 bp, synthetic construct
  source 1..75: mol_type = other DNA
cctactccacggagcaggcaccatacagtagccgtaacctgcttgtcccgcactatcgcctcctgggaaaccgtg

SEQ ID NO: 107297 - DNA, 75 bp, synthetic construct
  source 1..75: mol_type = other DNA
aatggcgcaggcgcagctctggcaatggcaaatgctctgcgtgatgcaggcattgaagcgagtcagattggctac

SEQ ID NO: 107298 - DNA, 75 bp, synthetic construct
  source 1..75: mol_type = other DNA
aatcaagaaaaatcatgatactaaatattttattctcactgatggtgatatagactttcatggttttaaagaaga

SEQ ID NO: 107299 - DNA, 75 bp, synthetic construct
  source 1..75: mol_type = other DNA
ttttggcaattcagcgttattgcgtcatcactttcaccaacgttttttattatctccttcgcaatatcgcaaaaa

SEQ ID NO: 107300 - DNA, 75 bp, synthetic construct
  source 1..75: mol_type = other DNA
accgaaataccggcctcggcatcagcgataccgagcatatcagccagagcatgcgcgatattctgctgacgccgg

SEQ ID NO: 107301 - DNA, 75 bp, synthetic construct
  source 1..75: mol_type = other DNA
tcgaccggattacagcgataacccgcataaagattgcgaagggatgtttgtaccggaagactatgtacccgtgcc

SEQ ID NO: 107302 - DNA, 75 bp, synthetic construct
  source 1..75: mol_type = other DNA
ctcgacgaagcaggattacctggcgaactgcgcctgcgtcaggggctggcgctggtggcgatggttggggcgggc

SEQ ID NO: 107303 - DNA, 75 bp, synthetic construct
  source 1..75: mol_type = other DNA
agatactgaagatgatggaaaatacaatgctgatttcagaaaccctgaatcaaacagagacgggggcaaacttgg

SEQ ID NO: 107304 - DNA, 75 bp, synthetic construct
  source 1..75: mol_type = other DNA
cgttctctgttccggttaccccacatactttccgccattcctacgcgatgcatatgctgtatgctggtattccgc

SEQ ID NO: 107305 - DNA, 75 bp, synthetic construct
  source 1..75: mol_type = other DNA
tttctctggcgccgccatatccgttcgtacagctggccacgctcaaacaacggactgaaaaagcgaccagaacgg

SEQ ID NO: 107306 - DNA, 75 bp, synthetic construct
  source 1..75: mol_type = other DNA
ggttatgataatactgttaatggcgtagcaatgttaagcaagtctttacctgtgttatctgatggctcaaaggta

SEQ ID NO: 107307 - DNA, 75 bp, synthetic construct
  source 1..75: mol_type = other DNA
aacagtagagcatttaggatggtatagataccttgataactccctgtctacgcaaagtataaactcgaaagtttt

SEQ ID NO: 107308 - DNA, 75 bp, synthetic construct
  source 1..75: mol_type = other DNA
atgctttggtatttcagacgatattttaaactttttatatattttattactaaagggaggcgtggatttgatgga

SEQ ID NO: 107309 - DNA, 75 bp, synthetic construct
  source 1..75: mol_type = other DNA
gcattatgcagtactgccgctgcgtctggaaaatgatgagttaattgtcggcagtgaagatggtattgacccggt

SEQ ID NO: 107310 - DNA, 75 bp, synthetic construct
  source 1..75: mol_type = other DNA
atgatgccgtgcgtcgggcgatggaaaagctaccaaaacgtgaacgcgctcgcggccgtatcagcggttcagcgg

SEQ ID NO: 107311 - DNA, 75 bp, synthetic construct
  source 1..75: mol_type = other DNA
ggatcgatctgtgtttacatatcgtgcgcaaagattttggtcatgagattgctaataatgtcgcccggcgactgg

SEQ ID NO: 107312 - DNA, 75 bp, synthetic construct
  source 1..75: mol_type = other DNA
tgatgaaattggcatgcagcgggatacgcgcaacgagcaggtcacgctgaaccagatagtcgaccgcagaacggc

SEQ ID NO: 107313 - DNA, 75 bp, synthetic construct
  source 1..75: mol_type = other DNA
atgaacgtcgttatcctcgataccggctgcgccaacctgaattcggtgaagtccgctatcagccgccacggttac

SEQ ID NO: 107314 - DNA, 75 bp, synthetic construct
  source 1..75: mol_type = other DNA
agcgctgccaacctatcgcaacgccgtccctacccagtcgattctgactatcacttctaacgtggtgtacggcca

SEQ ID NO: 107315 - DNA, 75 bp, synthetic construct
  source 1..75: mol_type = other DNA
gcttccccatagtctggcgattaagggggttaaatgccacgggacacgaccagctttcctccatggtctggcgat

SEQ ID NO: 107316 - DNA, 75 bp, synthetic construct
  source 1..75: mol_type = other DNA
gttgacggggaagttcgggtcagcacatcgaagagtgaagggcgtattgtccgctttgacctgaagtttgtcgaa

SEQ ID NO: 107317 - DNA, 75 bp, synthetic construct
  source 1..75: mol_type = other DNA
gagcgtgatggcttcgtactgggcgatggtgccggtatgctggtacttgaagagtacgaacacgcgaaaaaaacg

SEQ ID NO: 107318 - DNA, 75 bp, synthetic construct
  source 1..75: mol_type = other DNA
aagcgcgtcaggttagcggaatggagtataccttgtgtaactccttcggctttggtggcactaacggttctttga

SEQ ID NO: 107319 - DNA, 75 bp, synthetic construct
  source 1..75: mol_type = other DNA
attaaaaaaagcaacatatttggagcatcattcactaataccagaataaaaaatttgctctgtgaagatattatg

SEQ ID NO: 107320 - DNA, 75 bp, synthetic construct
  source 1..75: mol_type = other DNA
aggcacctcatcccgtgcccccctgcgtgacagtgcaaaacacagtgtgagtgaattaccggtgaactggtgggt

SEQ ID NO: 107321 - DNA, 75 bp, synthetic construct
  source 1..75: mol_type = other DNA
cacacatatccctatatcgggatagaatcaaacaggttattgaagactccctcaatgaacatcctaactcaatga

SEQ ID NO: 107322 - DNA, 75 bp, synthetic construct
  source 1..75: mol_type = other DNA
gaaacttataacgacttattgaatagggtagattatatgactaaggtgcgaacaaaaatcttcggtgatggagac

SEQ ID NO: 107323 - DNA, 75 bp, synthetic construct
  source 1..75: mol_type = other DNA
accatttctttgaaaatggcgatgaacttaatgagcagatggtacaacggttggaagcggcccgtgaaatggggc

SEQ ID NO: 107324 - DNA, 75 bp, synthetic construct
  source 1..75: mol_type = other DNA
atgctgcctcgaaatgagggcgggaaaataaggttatcagccttgttttctccctcattacttgaaggatatgaa

SEQ ID NO: 107325 - DNA, 75 bp, synthetic construct
  source 1..75: mol_type = other DNA
aagaaccagccgttaccactggcggtgtcttatgtgggtgaaacacctgaaggtgcgcagaaacagctggcgaag

SEQ ID NO: 107326 - DNA, 75 bp, synthetic construct
  source 1..75: mol_type = other DNA
cgcaaaatacagtgcaatagacaagaaaaaaagtcatcttaaccaggaaatcaaaaagcttattaaaaaaaatat

SEQ ID NO: 107327 - DNA, 75 bp, synthetic construct
  source 1..75: mol_type = other DNA
cacgtcgcggtcattagcatggacagcgatccggcgaaaatctttcaattagggaaggtgcgaataagcggggaa

SEQ ID NO: 107328 - DNA, 75 bp, synthetic construct
  source 1..75: mol_type = other DNA
gatagctcggggaagttagttaattacccgccaaatggcaaataccttctcaatcgtaaaagggacaactttgag

SEQ ID NO: 107329 - DNA, 75 bp, synthetic construct
  source 1..75: mol_type = other DNA
atggtgccggtatgctggtacttgaagagtacgaacacgcgaaaaaacgcggtgcgaaaatttacgctgaactcg

SEQ ID NO: 107330 - DNA, 75 bp, synthetic construct
  source 1..75: mol_type = other DNA
tcaaaagtaacagttgctgcaaatgctcttaagctagaagttgttaataataattctgaaaataaacgcagtttt

SEQ ID NO: 107331 - DNA, 75 bp, synthetic construct
  source 1..75: mol_type = other DNA
ggttgacttttgggccttacccgattaaagattttaatcctacttatgattattctggtgctatatcgacaggta

SEQ ID NO: 107332 - DNA, 75 bp, synthetic construct
  source 1..75: mol_type = other DNA
tccaggccatcgcggaagccgtacgcaaacgcaacgatctgctgtttattgtcgttaccgatatgcaaagtcttc

SEQ ID NO: 107333 - DNA, 75 bp, synthetic construct
  source 1..75: mol_type = other DNA
atcaatgacagccgctggagcattatctggtcaattttattcggtgtgctggttggcggtctgggcacctggata

SEQ ID NO: 107334 - DNA, 75 bp, synthetic construct
  source 1..75: mol_type = other DNA
ctggggaaaatttgctcttggccttggcctgatgagcgccggattctgcattctgaccttaagcgcccgctggtc

SEQ ID NO: 107335 - DNA, 75 bp, synthetic construct
  source 1..75: mol_type = other DNA
tcgatctcagattgacgaacagcccggcgctcagggctggcgcgggattcggctttttacgcaccagggctgtag

SEQ ID NO: 107336 - DNA, 75 bp, synthetic construct
  source 1..75: mol_type = other DNA
attggtaagtatattcagcaacgtagagtaactcgagcagccatctacttacagttaacaaaccttcctattgac

SEQ ID NO: 107337 - DNA, 75 bp, synthetic construct
  source 1..75: mol_type = other DNA
ggcaaatagactcgatcctgaacccatcggtcccaaatttgtcccagtcaaaaaataaggaaggtactaatgatg

SEQ ID NO: 107338 - DNA, 75 bp, synthetic construct
  source 1..75: mol_type = other DNA
ggatgcacagaaaaagctggctgaatacattcaacaagttgatgaccgagtgaatgaagagctggaaaaggacct

SEQ ID NO: 107339 - DNA, 75 bp, synthetic construct
  source 1..75: mol_type = other DNA
aagcgcgccaggtaagcggaatggagtacaccctgtgtaactccttcggcttcggtggcaccaatggctctttga

SEQ ID NO: 107340 - DNA, 75 bp, synthetic construct
  source 1..75: mol_type = other DNA
ggttgagccgtcaacaggctggcaggtccgcgcctatttacgcgcggcgctgggcatgaatcagacgcatggagg

SEQ ID NO: 107341 - DNA, 75 bp, synthetic construct
  source 1..75: mol_type = other DNA
cggtgaactggtgggtacagccttctgttatccgcaccttcagctcccggggagatatgcgtgtggggacttcca

SEQ ID NO: 107342 - DNA, 75 bp, synthetic construct
  source 1..75: mol_type = other DNA
ctctggagatgcatgaacttaacgagcaaaacatccagtatttgactgcccttaatattaatatacataaaatgt

SEQ ID NO: 107343 - DNA, 75 bp, synthetic construct
  source 1..75: mol_type = other DNA
cgctaaatacagtgcaatagacaagaaaaaaagttattttaataaggaaatcaaaaatctaattaaaaagaatat

SEQ ID NO: 107344 - DNA, 75 bp, synthetic construct
  source 1..75: mol_type = other DNA
aaaaaaagtcatcttaaccaggaaatcaaaaagcttattaaaaaaaatattttccctgagctatacaatgaacaa

SEQ ID NO: 107345 - DNA, 75 bp, synthetic construct
  source 1..75: mol_type = other DNA
ttctgcctcgatggcgaatgcgataaggctcagggcgggaagagtaatgattttgctgaagctgtttctcagctg

SEQ ID NO: 107346 - DNA, 75 bp, synthetic construct
  source 1..75: mol_type = other DNA
aagtgtctgagatccagtcgatgttaattggtcgtttcagcacgacattttctgcattagcagaaacgctggata

SEQ ID NO: 107347 - DNA, 75 bp, synthetic construct
  source 1..75: mol_type = other DNA
gcaaaattttaaaactagcaatgcggcatattcacaactatgtgaaaaatcagctttatttaaaagcgtgcccag

SEQ ID NO: 107348 - DNA, 75 bp, synthetic construct
  source 1..75: mol_type = other DNA
atttgtgcgaaaaccgacggttgtaacgaggctcgctggttctcgctgacgacgcgcaatgttaatgacggccag

SEQ ID NO: 107349 - DNA, 75 bp, synthetic construct
  source 1..75: mol_type = other DNA
tatacccacagctatatactcctgaaatattttatgaggcctgcagaaatctccagtcattttatgatcatcagg

SEQ ID NO: 107350 - DNA, 75 bp, synthetic construct
  source 1..75: mol_type = other DNA
tgatccgcgggccaggtgcagggcgcgacgtcaccgccggggcgattcagtcggatattaaccgtctggcgcagt

SEQ ID NO: 107351 - DNA, 75 bp, synthetic construct
  source 1..75: mol_type = other DNA
tcaaaaagctaatcaaagaaaatattttccctgagctatactatgagcaatgtaataaaatcccctcctcatcga

SEQ ID NO: 107352 - DNA, 75 bp, synthetic construct
  source 1..75: mol_type = other DNA
ccgtatccatgggaaatggcggagtactgctggccgattccggagccgctgtcagtggtacccggagcgacggaa

SEQ ID NO: 107353 - DNA, 75 bp, synthetic construct
  source 1..75: mol_type = other DNA
atcagctcaacggaggtctacacgaaggtatttgcgctggatgtggctgcacggcaccgtgaaccgccccgggtt

SEQ ID NO: 107354 - DNA, 75 bp, synthetic construct
  source 1..75: mol_type = other DNA
tttcttatgttggtgaaacagctgaaggtgcgcagaaacagctggcgcaatatatccagcaagttgacgaccagg

SEQ ID NO: 107355 - DNA, 75 bp, synthetic construct
  source 1..75: mol_type = other DNA
cccaggaagtagtcgcgcaggagcagaaagatctgcgtattgaaccgccccgggtttcctggagagtattttatc

SEQ ID NO: 107356 - DNA, 75 bp, synthetic construct
  source 1..75: mol_type = other DNA
atacataaaatgttgctatcaaatataacaatagaaaagagcgacctttcatatgggtattattttggttgtgta

SEQ ID NO: 107357 - DNA, 75 bp, synthetic construct
  source 1..75: mol_type = other DNA
taaaggctccagccgccgtggcgtgggtgaaagaacactccaggaatggttgtctgtttacctttcaacccgtcc

SEQ ID NO: 107358 - DNA, 75 bp, synthetic construct
  source 1..75: mol_type = other DNA
gcgcccgtgacaccaccgtgaacggcgggcagctcaccgcgcagggcggaaccctgaccggcaccaccacgctga

SEQ ID NO: 107359 - DNA, 75 bp, synthetic construct
  source 1..75: mol_type = other DNA
tcgattaatagaaaaatcagcttactgctcaactgaaaacatgatcaccaataaatttgatgttgtcttttctta

SEQ ID NO: 107360 - DNA, 75 bp, synthetic construct
  source 1..75: mol_type = other DNA
ggaaataacatggcagaattttaaaactagcaattcggcatattcaaaactatgtggaaaattatctttatttaa

SEQ ID NO: 107361 - DNA, 75 bp, synthetic construct
  source 1..75: mol_type = other DNA
agctaaatacagtgcaatagtcaagaaaaaaagttattttaataaggaaatcagaaatctaataaaaaagaatat

SEQ ID NO: 107362 - DNA, 75 bp, synthetic construct
  source 1..75: mol_type = other DNA
agtgaaaacagtaataatcagccggaaattaacggttctggcagtaccgaactaatctcttggcctataaaaaag

SEQ ID NO: 107363 - DNA, 75 bp, synthetic construct
  source 1..75: mol_type = other DNA
ccatggtttttttggtgaggtaatcaatagggcaccacagataatattaaataatacaaactatgtgaaaaaagt

SEQ ID NO: 107364 - DNA, 75 bp, synthetic construct
  source 1..75: mol_type = other DNA
tatcgtcgccgcggaagagcaaggtgttacacctgataaactgaccggcaccattcaaaacgatatcctcaaaga

SEQ ID NO: 107365 - DNA, 75 bp, synthetic construct
  source 1..75: mol_type = other DNA
tacttccggaggtggttgaccgtgttgaatgccggaatcaggggctggagaaatccaggacgttgatgaccggta

SEQ ID NO: 107366 - DNA, 75 bp, synthetic construct
  source 1..75: mol_type = other DNA
caacaccgccaaaggcgcgctggacgtggcaaaagagtttaatggcgacgtgcagatcgaactgaccggctactg

SEQ ID NO: 107367 - DNA, 75 bp, synthetic construct
  source 1..75: mol_type = other DNA
gtagcaaaagagtttaacggcgacgtgcagatcgaactgaccggctactggacctgggaacaggcgcaacagtgg

SEQ ID NO: 107368 - DNA, 75 bp, synthetic construct
  source 1..75: mol_type = other DNA
atgctagacatggcgatatccttgctgttaatggccctccgggaaccggaaaaaccacgctggtgctttctatca

SEQ ID NO: 107369 - DNA, 75 bp, synthetic construct
  source 1..75: mol_type = other DNA
cctccctgctgccgttgctggaaaaactgaccacaggaaagacggcagagctgctggcaccggactacctggata

SEQ ID NO: 107370 - DNA, 75 bp, synthetic construct
  source 1..75: mol_type = other DNA
aagcgattcatgtgatgtgcgtgcatcttggcctgcgtgaggcgcaccgtcaggcgcagcttgcgatgctcgccg

SEQ ID NO: 107371 - DNA, 75 bp, synthetic construct
  source 1..75: mol_type = other DNA
gttaagcgaagactatttcttaagtatgtggaagtttgttagagataataattgcgaaatagcttgcccaaattt

SEQ ID NO: 107372 - DNA, 75 bp, synthetic construct
  source 1..75: mol_type = other DNA
aggatattcgtcggggagatgtcaccattgtctttgatcccaaaggggatgcggatctgttgctgcgtgtctggg

SEQ ID NO: 107373 - DNA, 75 bp, synthetic construct
  source 1..75: mol_type = other DNA
cccattatgctttcagttgcctggcatctgttgaatcttctgccattgcagcgcattgccaccaccaactcgggt

SEQ ID NO: 107374 - DNA, 75 bp, synthetic construct
  source 1..75: mol_type = other DNA
gaagtattatattgttagaaatggtacacattgtgcttttaaaatgcacaaacaatttccatcatttttcaaact

SEQ ID NO: 107375 - DNA, 75 bp, synthetic construct
  source 1..75: mol_type = other DNA
gcgagaggttcatgctgcagagtctttgctggcccctggagcaaaattcagcgacaggcttggacactccggaga

SEQ ID NO: 107376 - DNA, 75 bp, synthetic construct
  source 1..75: mol_type = other DNA
gacgatgcggtgaagcaacggggggaaataaaagtgggagtcacgggcaatatcagtcagcgagtgtccctgcgc

SEQ ID NO: 107377 - DNA, 75 bp, synthetic construct
  source 1..75: mol_type = other DNA
tagcgcatgcggcagataatattccatcttttttccgggctactaaaggttttgatattgttacagtaataccag

SEQ ID NO: 107378 - DNA, 75 bp, synthetic construct
  source 1..75: mol_type = other DNA
actctgctgagggatatggtggggcgatttataccaatagcgtgacggctccctatcttattgatatttcagttg

SEQ ID NO: 107379 - DNA, 75 bp, synthetic construct
  source 1..75: mol_type = other DNA
tgtcatcggtgcgttttttctgcgtggggccgatccggaagtgatggatattctggccacacttccggcggatgt

SEQ ID NO: 107380 - DNA, 75 bp, synthetic construct
  source 1..75: mol_type = other DNA
cgcggtcggtaactccatgttcgccgatctggtgagtgtggccgggcacatttataaacacggtatcaatgcggg

SEQ ID NO: 107381 - DNA, 75 bp, synthetic construct
  source 1..75: mol_type = other DNA
atgagtaaccgttatgtgattgaggctctgctgcgtccggctgtggaactgaataccgccgtggtggcagcaacg

SEQ ID NO: 107382 - DNA, 75 bp, synthetic construct
  source 1..75: mol_type = other DNA
gcagcgggcagcatgctgtttcttaaccaactcactcgcttaaaagaagatgccatcatcggcctgatcttctcg

SEQ ID NO: 107383 - DNA, 75 bp, synthetic construct
  source 1..75: mol_type = other DNA
tgcttacttccagttatgatacgcaactggaagatgtgggttttgttaatcctgatggtgagcgagttttagtgg

SEQ ID NO: 107384 - DNA, 75 bp, synthetic construct
  source 1..75: mol_type = other DNA
cattgctggaagcatgggaactctacagcgttatggttaaccgtgttgatacttcagatcctgaatggccggagg

SEQ ID NO: 107385 - DNA, 75 bp, synthetic construct
  source 1..75: mol_type = other DNA
ttcaatgactggcggcaaaaagctaatcatccgttaaaagtgcaggccgggctggatgagatttttacccgcgcc

SEQ ID NO: 107386 - DNA, 75 bp, synthetic construct
  source 1..75: mol_type = other DNA
cgatatcatgatcaataataagtgtgaggtgtctccaagtgaaatagaactgtcacatggagggcattcaattac

SEQ ID NO: 107387 - DNA, 75 bp, synthetic construct
  source 1..75: mol_type = other DNA
attattttgaccttccgcgaatcgctgccaggccgacatcgggttcgccgttatcggccgctggaagcgtgctgg

SEQ ID NO: 107388 - DNA, 75 bp, synthetic construct
  source 1..75: mol_type = other DNA
gaacttgccccggtgattactgacaccgggcgcaaaacctgggtgaagtcgtcactggagcactatgttacggcg

SEQ ID NO: 107389 - DNA, 75 bp, synthetic construct
  source 1..75: mol_type = other DNA
gaaagcctgacaaagggaacggtaatatcattgccggagaaagacaccaggcagtaaacaatattagtttttcgt

SEQ ID NO: 107390 - DNA, 75 bp, synthetic construct
  source 1..75: mol_type = other DNA
cgggcaggatacttccgtcgcccttaatgcctcactatttaacggcgatgggacgctggtgaatgccaccgatgg

SEQ ID NO: 107391 - DNA, 75 bp, synthetic construct
  source 1..75: mol_type = other DNA
ctgaatccagcggccagcgtctggggaatgtgggcgtgcagctgggtgataatggctacaatgacaccgcagtga

SEQ ID NO: 107392 - DNA, 75 bp, synthetic construct
  source 1..75: mol_type = other DNA
caacgggcgtacttctgagtagttttgcttccaccgcaaacccgcaaatgttcgccctcgcccgtgaacacgccg

SEQ ID NO: 107393 - DNA, 75 bp, synthetic construct
  source 1..75: mol_type = other DNA
tgatggggcaacgttcgttactggcgcggatcaggatattcagtcaattgatgctatttccagcggcactatcga

SEQ ID NO: 107394 - DNA, 75 bp, synthetic construct
  source 1..75: mol_type = other DNA
cgaaccggtattggtggcgggtgatttcaacgactggcggcaaaaagctaatcatccgttaaaagtgcaggccgg

SEQ ID NO: 107395 - DNA, 75 bp, synthetic construct
  source 1..75: mol_type = other DNA
aaccagggcgacagccgctcgaatatgaccggaactcgcgccgataaccagaaccacggttatgccgttgggctg

SEQ ID NO: 107396 - DNA, 75 bp, synthetic construct
  source 1..75: mol_type = other DNA
gcagaaactcggcctctcttatgacgatgacgaagaagaggaagaagacgagaagcaagaagacatgatgcgtct

SEQ ID NO: 107397 - DNA, 75 bp, synthetic construct
  source 1..75: mol_type = other DNA
gaactggtgggtacagccttctgttatccgcaccttcagctcccggggggacatgagcatgggtacagccgcagc

SEQ ID NO: 107398 - DNA, 75 bp, synthetic construct
  source 1..75: mol_type = other DNA
aagtcagaaagcacggcaaagagcgccgtcgtatctggcgaaagttgcatcttgaaccgccccgggtttcctgga

SEQ ID NO: 107399 - DNA, 75 bp, synthetic construct
  source 1..75: mol_type = other DNA
ttaataacatgattatgctgcgggtcagggagaaccggacggccgagttactgacgacccagttgtcccaggtgg

SEQ ID NO: 107400 - DNA, 75 bp, synthetic construct
  source 1..75: mol_type = other DNA
gcacgtccttcgatgggcaaaaccgaactggcgctggatatcatcgacaaggtgactgagcaggggcatggtgtt

SEQ ID NO: 107401 - DNA, 75 bp, synthetic construct
  source 1..75: mol_type = other DNA
atcggcagtcaggatgtggtggatctcgcaggtggcgacaatttgcatatcggcggcgacgggaaagatggcgtc

SEQ ID NO: 107402 - DNA, 75 bp, synthetic construct
  source 1..75: mol_type = other DNA
taatttaaataaattactttccggacaagaacaaaaaatcactctactgaagagtgctaaaacggaatggaaaaa

SEQ ID NO: 107403 - DNA, 75 bp, synthetic construct
  source 1..75: mol_type = other DNA
attagcggataaatggatgaaggataatattcataccgctgtcatcatggcgggggaatttctgtctgctaatga

SEQ ID NO: 107404 - DNA, 75 bp, synthetic construct
  source 1..75: mol_type = other DNA
ttgcccgttttgaagatgaagactgggcgcgtttctcacagggtgtgggacgaatgacaggacgtaatatctgga

SEQ ID NO: 107405 - DNA, 75 bp, synthetic construct
  source 1..75: mol_type = other DNA
ggcggtgccggtatgcaggtgacggcgtatacccagacgtcttcggatattgaagcccgcatcggtaatgcggct

SEQ ID NO: 107406 - DNA, 75 bp, synthetic construct
  source 1..75: mol_type = other DNA
ggggctgatccggaagtgatggatattctggccacgcttccggcggatgtattttttgtacgccagtaccgggat

SEQ ID NO: 107407 - DNA, 75 bp, synthetic construct
  source 1..75: mol_type = other DNA
ggcggcgagccagcaatgagcaacgaagctggcgctatctggatatcatcaaccggatgattgaccgacctggtg

SEQ ID NO: 107408 - DNA, 75 bp, synthetic construct
  source 1..75: mol_type = other DNA
gatctggtgtgtgccaaaataaccgcgtgggaagaatcagcgcccgaatttgcggaatttaatgccatggctcaa

SEQ ID NO: 107409 - DNA, 75 bp, synthetic construct
  source 1..75: mol_type = other DNA
cctcggaactgtcagagcgtgttgacgcactggcggaagatccccggctggtgattttatgggcgggatatcctt

SEQ ID NO: 107410 - DNA, 75 bp, synthetic construct
  source 1..75: mol_type = other DNA
gaggaaacttatgatcaaaatggaataaaatatattacgtgctatcaaaatgatgaggaattatcgtctttatac

SEQ ID NO: 107411 - DNA, 75 bp, synthetic construct
  source 1..75: mol_type = other DNA
aacggcggtattgcccgtggagccacgccggaaagcagcggcagctatggcttcgtccgtctggagggtgacctg

SEQ ID NO: 107412 - DNA, 75 bp, synthetic construct
  source 1..75: mol_type = other DNA
atcactgtctgtgaccgggaagcggatatctggcattacctgtattataaagtcagccacggacagcgtggtgcg

SEQ ID NO: 107413 - DNA, 75 bp, synthetic construct
  source 1..75: mol_type = other DNA
aagctggaacgccagcttatgaaagagcgctaaatcaggctgctactgccgtgcgcccgctcttagctaacgaag

SEQ ID NO: 107414 - DNA, 75 bp, synthetic construct
  source 1..75: mol_type = other DNA
gcgttttgaacgggaagagaaaattaacgctggaacacgctaaaaaactggcaacgcgattcggcatttcccctg

SEQ ID NO: 107415 - DNA, 75 bp, synthetic construct
  source 1..75: mol_type = other DNA
cggtcgggatctgattagtgaagttgatatagtgggtaatgaaataacgctgcgcccctggcaggttatgtggat

SEQ ID NO: 107416 - DNA, 75 bp, synthetic construct
  source 1..75: mol_type = other DNA
ggacagcccttatgagggtgtcaattttcgtgtcaatgataacggtctggtgccatatctgatcattaaagcaaa

SEQ ID NO: 107417 - DNA, 75 bp, synthetic construct
  source 1..75: mol_type = other DNA
gaattaactcattatcaggtgtttaaaaaccgggtactctataccaaagaggattccacggttgaagcccggaac

SEQ ID NO: 107418 - DNA, 75 bp, synthetic construct
  source 1..75: mol_type = other DNA
ttatcgctgacatcatcgcctggtgttccggcaatatgccgcgctttaataccatcagtattagcggttaccaca

SEQ ID NO: 107419 - DNA, 75 bp, synthetic construct
  source 1..75: mol_type = other DNA
aaatatcaaaagggcttaaaggcttggcaaaattcggcggattaccggtggttgcgctgagccaactttcccgcg

SEQ ID NO: 107420 - DNA, 75 bp, synthetic construct
  source 1..75: mol_type = other DNA
cttccaaggaatagcgatgtaaataatcttcaacaatactcaattgctgaaaaagaaaaaattgcaagagaatta

SEQ ID NO: 107421 - DNA, 75 bp, synthetic construct
  source 1..75: mol_type = other DNA
gcgttttgaacgggaagagaaaattaacactggaacacgctaaaaaactggctgcgcgattcggtatttctcccg

SEQ ID NO: 107422 - DNA, 75 bp, synthetic construct
  source 1..75: mol_type = other DNA
ggaaaacagaaacgctattgaggaactgaaatctggcgctttcgttcagaacgttcagatgctcagaggcttggg

SEQ ID NO: 107423 - DNA, 75 bp, synthetic construct
  source 1..75: mol_type = other DNA
accggatatcctttttcagaaaacatattggtcgtttgactcagcaagaggttcatcaccagaaagggacggaac

SEQ ID NO: 107424 - DNA, 75 bp, synthetic construct
  source 1..75: mol_type = other DNA
ttgttttccagggctttaacccacaaatggacctccagcctgacgctgaactactttctctggcgcgaccgcaaa

SEQ ID NO: 107425 - DNA, 75 bp, synthetic construct
  source 1..75: mol_type = other DNA
ggggcctgcagctcttccgggaagccttcggctacccaggagccgaaagcctccccgctggtcagcatctgccag

SEQ ID NO: 107426 - DNA, 75 bp, synthetic construct
  source 1..75: mol_type = other DNA
tgtggttgataccactggagcaggcgatgtttttcacggcgcactcgcggtagcgttagcagaaaaaatgcccac

SEQ ID NO: 107427 - DNA, 75 bp, synthetic construct
  source 1..75: mol_type = other DNA
atgcctgaaaagggccagaacgtgcttatttcggtgaatttcgatagctctcaggttgaaccgctaatatgctcc

SEQ ID NO: 107428 - DNA, 75 bp, synthetic construct
  source 1..75: mol_type = other DNA
tttggtaaggcgttaatgctgcgtccagggttattacgggcaacttaccggcagtttatccggagccatgaaccg

SEQ ID NO: 107429 - DNA, 75 bp, synthetic construct
  source 1..75: mol_type = other DNA
tatggaccacctttagtgacgatcaaattgacctgaattaccgtagccctgaagtgttgctggcgatggtggatg

SEQ ID NO: 107430 - DNA, 75 bp, synthetic construct
  source 1..75: mol_type = other DNA
ccgtgcgattaaccgtaaaaaatatcacagtaaagagataacccgagaactgaacgatgaagctacattaaggca

SEQ ID NO: 107431 - DNA, 75 bp, synthetic construct
  source 1..75: mol_type = other DNA
ctgtgatttctctctgagcaattatgcctatgttgattccagtgaagacctgcgtcagggaaggatttccttttc

SEQ ID NO: 107432 - DNA, 75 bp, synthetic construct
  source 1..75: mol_type = other DNA
caagctacacaacagcctgtacagcaaagtacacaggcagcgccacagcagcaaggaggtttcatttccgacctt

SEQ ID NO: 107433 - DNA, 75 bp, synthetic construct
  source 1..75: mol_type = other DNA
cagcctatgaaagagcgctgaataacgccgcaaatgccatcagaccaatacttgccaatgatgcaactgatcgct

SEQ ID NO: 107434 - DNA, 75 bp, synthetic construct
  source 1..75: mol_type = other DNA
gaataagcaggtcatttcttcccaagctgactcgttgattaaaatttcgcggatctgggccgatttttttcccgc

SEQ ID NO: 107435 - DNA, 75 bp, synthetic construct
  source 1..75: mol_type = other DNA
tggatacccccgaaaatcagcggaaacaggacacttaatgcgggagatcggtttgtgtcatcccggaccggacgt

SEQ ID NO: 107436 - DNA, 75 bp, synthetic construct
  source 1..75: mol_type = other DNA
cgcataaagacaacattgcttactttggcaacggcgatgacgaagcgcatatggtgtaccagttctcgctgccgc

SEQ ID NO: 107437 - DNA, 75 bp, synthetic construct
  source 1..75: mol_type = other DNA
tgaatatattaaaagtaaacatgaaacgtttgaaatacttgctaaagaaaagatatttaaatttagcgaaattga

SEQ ID NO: 107438 - DNA, 75 bp, synthetic construct
  source 1..75: mol_type = other DNA
atgctgcggcaaatgacggatattgtgccggataagataccgtacggcgttctgctgtgtgtcctgaccgtgttg

SEQ ID NO: 107439 - DNA, 75 bp, synthetic construct
  source 1..75: mol_type = other DNA
catcctgatgctaatgatggttggataattcctggtgcgtcgtggattccatcacactggatgccgctaccagaa

SEQ ID NO: 107440 - DNA, 75 bp, synthetic construct
  source 1..75: mol_type = other DNA
tgttatcggcggagattatcattacacagcagcggggcaactggctcagcatgaagacacttctacggtgcagct

SEQ ID NO: 107441 - DNA, 75 bp, synthetic construct
  source 1..75: mol_type = other DNA
atggtaaaaccattacttactattatcactctattgtattgcgccagttcatcagcaaaaactggatcccctccc

SEQ ID NO: 107442 - DNA, 75 bp, synthetic construct
  source 1..75: mol_type = other DNA
gcacgcggtatatcatgaattgtcgcgactaattaaaattcgtcgaagtcataacgagtttcatccggataatga

SEQ ID NO: 107443 - DNA, 75 bp, synthetic construct
  source 1..75: mol_type = other DNA
actgcgttgcagaatgccaggccggaggatttaccagcgctgcgcatgcagtatccagagtttgcagatgttatt

SEQ ID NO: 107444 - DNA, 75 bp, synthetic construct
  source 1..75: mol_type = other DNA
agtaaactcgatggtcctgcatatgaatattatcctgatggcaaactcatgcaggaaaatttctatcagcaaagt

SEQ ID NO: 107445 - DNA, 75 bp, synthetic construct
  source 1..75: mol_type = other DNA
gtcgggatctgattagtgaagttgatatattgggtaatgaaataacgctgcacccctggcaggttatgtggatta

SEQ ID NO: 107446 - DNA, 75 bp, synthetic construct
  source 1..75: mol_type = other DNA
agctttaccgaaggtgcgggcgtggtattcaacagcatgagcgaaaagacgaaggcgcaatttctttccctttat

SEQ ID NO: 107447 - DNA, 75 bp, synthetic construct
  source 1..75: mol_type = other DNA
agtattcttggctcgcgtaatgattacgcaggtgtcgaaaaaatcggatataaccgtgcgattaaccgtaaaaaa

SEQ ID NO: 107448 - DNA, 75 bp, synthetic construct
  source 1..75: mol_type = other DNA
atcacaatctataattaactcaatgagacaacttgcagcaaatgctttaggaacaagtactggtatttcaccctc

SEQ ID NO: 107449 - DNA, 75 bp, synthetic construct
  source 1..75: mol_type = other DNA
tcatcactgaagttaataagctgaaatctcagtcaggcggtgaaatttacaacactattttttctggaaagcaca

SEQ ID NO: 107450 - DNA, 75 bp, synthetic construct
  source 1..75: mol_type = other DNA
tattaacgccattccagatgcgcgatcattcaacgcgccatttatggaccacctttagcgacgatcaaattgacc

SEQ ID NO: 107451 - DNA, 75 bp, synthetic construct
  source 1..75: mol_type = other DNA
agacgcagccgcgaaacgccaatccttaatcgatcagaatactgaaaacgtatacaagatgaaccgccccgattt

SEQ ID NO: 107452 - DNA, 75 bp, synthetic construct
  source 1..75: mol_type = other DNA
atgatatgtacggcggttttgctgctgcaatgactctcttcgggcaggaaaacactaaagctatgcagatggctt

SEQ ID NO: 107453 - DNA, 75 bp, synthetic construct
  source 1..75: mol_type = other DNA
atgattgtgtttattatcgctggcggcggcgcgtttaagcaggtattagtagatagcggtgtcgggcactatatt

SEQ ID NO: 107454 - DNA, 75 bp, synthetic construct
  source 1..75: mol_type = other DNA
aactgccggtgaactggtgggtacagccttctgttatccgcaccttcagttcccggggtgacatgagcatgggta

SEQ ID NO: 107455 - DNA, 75 bp, synthetic construct
  source 1..75: mol_type = other DNA
gctggcgcggaatacgttaaacagtattcagaagtatctaaggcgaccggactctcgattgaatcccttcaaaga

SEQ ID NO: 107456 - DNA, 75 bp, synthetic construct
  source 1..75: mol_type = other DNA
acatgacgttctcaccgtcacagaatggtacgtcactggacctgcaggccggactggaagcccgtgtccgggaaa

SEQ ID NO: 107457 - DNA, 75 bp, synthetic construct
  source 1..75: mol_type = other DNA
atggggaacatctgacacgcaaggcagatcctaaccgtgatttgactatcccagctacaccaactagaccagctt

SEQ ID NO: 107458 - DNA, 75 bp, synthetic construct
  source 1..75: mol_type = other DNA
aaacgaaggagtaaaaagtaaaatacggatatacacaaacaatgtgaaaaacttatctaaagacagagaaagcct

SEQ ID NO: 107459 - DNA, 75 bp, synthetic construct
  source 1..75: mol_type = other DNA
gatggttataaaaccaatcaattaactagtggttatgattatcaggattcaaatagcccgtttgaaccgccccgg

SEQ ID NO: 107460 - DNA, 75 bp, synthetic construct
  source 1..75: mol_type = other DNA
ggaaggccgcgatgccgacctgcaggcgatttgctcaatgggcattaacctgttccgcgtactgatgacttatct

SEQ ID NO: 107461 - DNA, 75 bp, synthetic construct
  source 1..75: mol_type = other DNA
ctgaatgcacttgatgttaaattgcaaggacaggtcgccgcgtctattgcttctcaaaacaagcaattagaaacc

SEQ ID NO: 107462 - DNA, 75 bp, synthetic construct
  source 1..75: mol_type = other DNA
aggttaaatcgcgttggtgctaatgctgactggatgattcagacaggtattcagaatccagagcagctatcacac

SEQ ID NO: 107463 - DNA, 75 bp, synthetic construct
  source 1..75: mol_type = other DNA
tgcaagcccttagcaaggtaaatactggcgctgcccaacttgggattatctttaattacatgaagtctctcgacc

SEQ ID NO: 107464 - DNA, 75 bp, synthetic construct
  source 1..75: mol_type = other DNA
cgggaatgcgtctgcgccacccggtgactgacgataccagcgatgaccgcctggcacacagccccggtgaccgga

SEQ ID NO: 107465 - DNA, 75 bp, synthetic construct
  source 1..75: mol_type = other DNA
ggagacaccttccccttattcgccagacagaatcagctgaatgtggcctggcgtgtctggcgatgatggcctgtt

SEQ ID NO: 107466 - DNA, 75 bp, synthetic construct
  source 1..75: mol_type = other DNA
ggatctggtggatttgcccctatatttccagacacctgttatcacttaacccattactggcctgctgccgcagat

SEQ ID NO: 107467 - DNA, 75 bp, synthetic construct
  source 1..75: mol_type = other DNA
gtcagcttgggaagaaatgacctgcttattcgcaccttccctatccgtttccgggaaagtgagaaatattgtcaa

SEQ ID NO: 107468 - DNA, 75 bp, synthetic construct
  source 1..75: mol_type = other DNA
atagtagcgaaatactcgcagacatggaaaaggaatacatacctgaccctaatgatagacgtatactaaaaaacc

SEQ ID NO: 107469 - DNA, 75 bp, synthetic construct
  source 1..75: mol_type = other DNA
cccgactgaactgatcgagccgaaatcggtggtttctggcgctacgccggtaatgcgtgattccgaacacttctt

SEQ ID NO: 107470 - DNA, 75 bp, synthetic construct
  source 1..75: mol_type = other DNA
gaacggccggccgttcacccgccggtagtcaggcgcatcgcctggttccgctctccgatcaccactacgtcagcc

SEQ ID NO: 107471 - DNA, 75 bp, synthetic construct
  source 1..75: mol_type = other DNA
ccgctaatcgtcgcattgaggcgtcgggatactggttctaccgcaatgatgaatttgtttttgactacaaactta

SEQ ID NO: 107472 - DNA, 75 bp, synthetic construct
  source 1..75: mol_type = other DNA
gccgcgctgagccgtgctgttgcaaaaggcgactccccggtaacgttccataaactgaccaccagtaacctcacc

SEQ ID NO: 107473 - DNA, 75 bp, synthetic construct
  source 1..75: mol_type = other DNA
ttgtctacgccatcataatggccatcaccttcgctgctggtgtatttattattctgcaaggcgtgcgtttaatcc

SEQ ID NO: 107474 - DNA, 75 bp, synthetic construct
  source 1..75: mol_type = other DNA
ggacggctgaatccaccaccatcaacaaaaatggccggcaggttatctggtcttcaggactggcccgtgacaccc

SEQ ID NO: 107475 - DNA, 75 bp, synthetic construct
  source 1..75: mol_type = other DNA
tgcgtttacaaatgtcggaaacagtaacctcggggtggcaaccaccggacagggtatccgggttgtggatgcaca

SEQ ID NO: 107476 - DNA, 75 bp, synthetic construct
  source 1..75: mol_type = other DNA
gcatgattggcgtcattcttacggtggcgggttttgaagggatttcactggtctttaccggttctcttattctgg

SEQ ID NO: 107477 - DNA, 75 bp, synthetic construct
  source 1..75: mol_type = other DNA
cagacaaaaaattaaaagatgcgtctaaaaaaggacaaatattaaaaagtagagacttgactgtctctttaataa

SEQ ID NO: 107478 - DNA, 75 bp, synthetic construct
  source 1..75: mol_type = other DNA
gatgaaatactgcggttattgttatggctggaagatgtcgagaatgcggggcaactagatgcgacagaggaaccg

SEQ ID NO: 107479 - DNA, 75 bp, synthetic construct
  source 1..75: mol_type = other DNA
ataaacaaaacttttattgatgcaatatctgcaatgctttatattcgtaagaatgctgataaatggcatctacag

SEQ ID NO: 107480 - DNA, 75 bp, synthetic construct
  source 1..75: mol_type = other DNA
caaaagccagcgaaaaagctttctggcttgaggtgaaaggccattctatgactgcgccacagggcgtaaggccga

SEQ ID NO: 107481 - DNA, 75 bp, synthetic construct
  source 1..75: mol_type = other DNA
atgtcgatacttgagtatatactggatcataatgccaaacctgatatatgggattactttaaagctattggcatt

SEQ ID NO: 107482 - DNA, 75 bp, synthetic construct
  source 1..75: mol_type = other DNA
tacgcgaaatcgctgcaggcgatggatttcagcattatcactgataaaacctcatataacgccattgaatggccc

SEQ ID NO: 107483 - DNA, 75 bp, synthetic construct
  source 1..75: mol_type = other DNA
gattgatagtcagttacagggaatggatggttttaaaaccaatcaattgactaatagcttagactatcaggattc

SEQ ID NO: 107484 - DNA, 75 bp, synthetic construct
  source 1..75: mol_type = other DNA
gctgattatcaggacccgtggctgaaacaacggctggaaaataacggctgggtactgtgggcaccgattcgcttt

SEQ ID NO: 107485 - DNA, 75 bp, synthetic construct
  source 1..75: mol_type = other DNA
gtggaaggggactccgcgggcggctctgcgaagcaggggcgtaaccgcaagaaccaggcgattctgccgctgaag

SEQ ID NO: 107486 - DNA, 75 bp, synthetic construct
  source 1..75: mol_type = other DNA
aacggctgtgggtcagaatacctggatagtcccgggcctgtgcgttacgcaggaagataatcacaatgtgatgcg

SEQ ID NO: 107487 - DNA, 75 bp, synthetic construct
  source 1..75: mol_type = other DNA
tgcttttaatgatggagttaatgtgctcagaaacaggatattaagtgcgctccctggaatgggagggcgaaactc

SEQ ID NO: 107488 - DNA, 75 bp, synthetic construct
  source 1..75: mol_type = other DNA
ccggttatgcccacagtgtcagcggcagcagcgctgaaggttataacggtcaggccacgctgaatgtgactttct

SEQ ID NO: 107489 - DNA, 75 bp, synthetic construct
  source 1..75: mol_type = other DNA
gcgagcgcgatattttgaagctgattgctcagggcttaccgaataagatgattgcccgccgcctggacatcacag

SEQ ID NO: 107490 - DNA, 75 bp, synthetic construct
  source 1..75: mol_type = other DNA
aaattgaagacaaacattatattgaactcttctggaataaagtatactatttttggatattttttgaattttcga

SEQ ID NO: 107491 - DNA, 75 bp, synthetic construct
  source 1..75: mol_type = other DNA
tttatgttatgccgggtacccactgcaaatgggtgcgcgtagacggcgacgctgtccgcgactttcgcacggtca

SEQ ID NO: 107492 - DNA, 75 bp, synthetic construct
  source 1..75: mol_type = other DNA
ggttggccttaagttagaaaactatgctcacttcatgactgatccgcaaggtggtatgaaagcggcgatccaagt

SEQ ID NO: 107493 - DNA, 75 bp, synthetic construct
  source 1..75: mol_type = other DNA
tccggtggtgccctgattgcagacagtggtgccactgttgaggggaccaatgccagcggtaagttcagtattgat

SEQ ID NO: 107494 - DNA, 75 bp, synthetic construct
  source 1..75: mol_type = other DNA
cgggtaatccgaaaaccgcggaacaatatcaactgacaaaacaatatggtgtcacctggcttttttcggaagacg

SEQ ID NO: 107495 - DNA, 75 bp, synthetic construct
  source 1..75: mol_type = other DNA
atgggacgctataaaggatcctttcttggtctggcatggtcacttttcaaccctatattgatgttaacagtctac

SEQ ID NO: 107496 - DNA, 75 bp, synthetic construct
  source 1..75: mol_type = other DNA
aaattttttgtgaagatggcctctatgctgtgtgcgttgaaaatggcgctattgtcagccactgccgtattaaat

SEQ ID NO: 107497 - DNA, 75 bp, synthetic construct
  source 1..75: mol_type = other DNA
ccataacgcttcagcggcggtggaaagtgaacggttcttcctgcgcaccagcatcaactggcgttcaaccaccgg

SEQ ID NO: 107498 - DNA, 75 bp, synthetic construct
  source 1..75: mol_type = other DNA
acagccactaatgcagtgctgtctgctgactctctgtctctggggggaggtgaggctgctaaagtcacaatgacc

SEQ ID NO: 107499 - DNA, 75 bp, synthetic construct
  source 1..75: mol_type = other DNA
gttgatattaatggcaccgtaaatattaaagattatttttcggtggctacttgcaatggtcaatctagcacctgc

SEQ ID NO: 107500 - DNA, 75 bp, synthetic construct
  source 1..75: mol_type = other DNA
aaatcatctttcaatggagttgttaacacatataaagtataaggatgagatattacaagatatcgagaaagagga

SEQ ID NO: 107501 - DNA, 75 bp, synthetic construct
  source 1..75: mol_type = other DNA
gtttggtcatttgctgtttgatctgcaaaacgatccgcagcagctacatccgattcatgatgatgtgatcgagtc

SEQ ID NO: 107502 - DNA, 75 bp, synthetic construct
  source 1..75: mol_type = other DNA
gttaactggttgttcgcagaaggtatctcggcgtatagcggtaagaacatagaagatggttcagtgctgaaatca

SEQ ID NO: 107503 - DNA, 75 bp, synthetic construct
  source 1..75: mol_type = other DNA
cgggaaattcaattcaactggcaggaaaaaattgagtggtcttgttatctatcctgtagttgtagatttatcact

SEQ ID NO: 107504 - DNA, 75 bp, synthetic construct
  source 1..75: mol_type = other DNA
ggctatcgtggtaatgaactgcacaagcgttatgcgaaccagagcaatatcactattatccataacccagattat

SEQ ID NO: 107505 - DNA, 75 bp, synthetic construct
  source 1..75: mol_type = other DNA
gcccgttactctggtcaggtcttttgttctatcaagtttgtaatcctgacggtttagccgatgcgttatgggggg

SEQ ID NO: 107506 - DNA, 75 bp, synthetic construct
  source 1..75: mol_type = other DNA
gccaacatcctgcatcagagctggtggaatgcggatacctccaccacggccaacattaccgtcggttttaacgtc

SEQ ID NO: 107507 - DNA, 75 bp, synthetic construct
  source 1..75: mol_type = other DNA
cggacagacccggatggtgttcaccacctggtgctgtctgtgctggctggccggactggggatgccgctggataa

SEQ ID NO: 107508 - DNA, 75 bp, synthetic construct
  source 1..75: mol_type = other DNA
actatcacttatttaagtgatactggttgtctggagattcagggggccagtctaactcattccagcgtgtcggat

SEQ ID NO: 107509 - DNA, 75 bp, synthetic construct
  source 1..75: mol_type = other DNA
cggcgaaatatacgtggatcttccagccacaggcacaggctatctggatgggcgtcgatcataatgcgcacacgg

SEQ ID NO: 107510 - DNA, 75 bp, synthetic construct
  source 1..75: mol_type = other DNA
attcgctgtcatttactgggggtatcgcatactgcgtcataaagaaggattaggctatggtgatgtgaagtttct

SEQ ID NO: 107511 - DNA, 75 bp, synthetic construct
  source 1..75: mol_type = other DNA
tgttgatctggtgtatatagatgacttttgttctgacatattaaagctattggaaggagcgaacgaaactggtta

SEQ ID NO: 107512 - DNA, 75 bp, synthetic construct
  source 1..75: mol_type = other DNA
aaacgaagcgaatctgctgattgattttgtcctggctgatacaggcaaagggaaaataacaaaggcgattgatgg

SEQ ID NO: 107513 - DNA, 75 bp, synthetic construct
  source 1..75: mol_type = other DNA
attcagccggttcacattgatgatgtccttccagaagtggtcgaccgtgttgaatgccgcaatcagggactggag

SEQ ID NO: 107514 - DNA, 75 bp, synthetic construct
  source 1..75: mol_type = other DNA
cagctccaccaatgaaccacgcctgatggtcagcaccgatggcgtggcagatattccggttcagggcaatctcga

SEQ ID NO: 107515 - DNA, 75 bp, synthetic construct
  source 1..75: mol_type = other DNA
ctgaacatttttccgagtattgatacaggtgtttgcgccacatcagtacgtaagtttaaccaactggcaacaaaa

SEQ ID NO: 107516 - DNA, 75 bp, synthetic construct
  source 1..75: mol_type = other DNA
actatcacacactgaagcaaaagaaatattattttcgcttttggcactagtaaactcaaaatcgagtgtaaaaat

SEQ ID NO: 107517 - DNA, 75 bp, synthetic construct
  source 1..75: mol_type = other DNA
ggcgtaacgatgatctggaaggtgccgtgattggcgcgttttttctgcgtggggctgatccggaagtgatggata

SEQ ID NO: 107518 - DNA, 75 bp, synthetic construct
  source 1..75: mol_type = other DNA
cgagtccagaacatcaggaaaagtgatggtctgtggtggtgatgtcttctgccttgacggtgaatgcgataaggc

SEQ ID NO: 107519 - DNA, 75 bp, synthetic construct
  source 1..75: mol_type = other DNA
taattcttttatagcaactttttgctacaatatttccaatgatattgagattactatcaatgatgcagcagcgcc

SEQ ID NO: 107520 - DNA, 75 bp, synthetic construct
  source 1..75: mol_type = other DNA
taaccgccgtttttcactctcacgttgatgatattccggtattgtctgcacgggatcgacaacagcaagttattt

SEQ ID NO: 107521 - DNA, 75 bp, synthetic construct
  source 1..75: mol_type = other DNA
gcagcctacccgggttcagtacgggccgtaccttatgaacccctatttggccttgctccgggtggagtttaccgt

SEQ ID NO: 107522 - DNA, 75 bp, synthetic construct
  source 1..75: mol_type = other DNA
ttacagccaagctgtacaggctctacgcagcaacgactgggatctctggcaggcagaagccgctatatgcagcaa

SEQ ID NO: 107523 - DNA, 75 bp, synthetic construct
  source 1..75: mol_type = other DNA
atgcaatatagacttaataacttcttacaaagtctattattaataccgcagatatttattcatcttacactatgc

SEQ ID NO: 107524 - DNA, 75 bp, synthetic construct
  source 1..75: mol_type = other DNA
tcgaagaactgctgttactggccctgacgcagcaggggatgacggttattcacaatccctgctacagcggtgatg

SEQ ID NO: 107525 - DNA, 75 bp, synthetic construct
  source 1..75: mol_type = other DNA
aaccacccaagcgtggtgatgtggagcattgccaatgaaccagatacccgcccgcaaggtgcccgggaatatttc

SEQ ID NO: 107526 - DNA, 75 bp, synthetic construct
  source 1..75: mol_type = other DNA
gctcaagagtttttacttaggtgggggcaaaactggtatggctcgtcgcttgtcatgggatgaaccaagcctaac

SEQ ID NO: 107527 - DNA, 75 bp, synthetic construct
  source 1..75: mol_type = other DNA
tatcctcgctgagggaaaattacgatatggaaaaagccatttacatttacaatcaacgacattttaatgtaaaga

SEQ ID NO: 107528 - DNA, 75 bp, synthetic construct
  source 1..75: mol_type = other DNA
tctcggcttaagtgaagttatctttgatattgccgacggaaaaacgctggttattggcaatacagagaatgacgg

SEQ ID NO: 107529 - DNA, 75 bp, synthetic construct
  source 1..75: mol_type = other DNA
ttcctgcttttccccgtcctgtgtggtcgccgccggcgtcgtgaacgcgccagtgagtggcgtcaccgccattac

SEQ ID NO: 107530 - DNA, 75 bp, synthetic construct
  source 1..75: mol_type = other DNA
aaataaaagtgggagtcacgggcaatatcagtcagcgagtgtccctgcgtggtagcgtggcgtggcagaaaggga

SEQ ID NO: 107531 - DNA, 75 bp, synthetic construct
  source 1..75: mol_type = other DNA
atgaccagccagaacaccccggcatggcgtaacgatgacctggaaggcgctgtcattggcgcgttttttctgcgt

SEQ ID NO: 107532 - DNA, 75 bp, synthetic construct
  source 1..75: mol_type = other DNA
atgcttctaagtgcctgagatacatcaacttattgtttttaaagaagttgaagctgaccgataagccgggttctg

SEQ ID NO: 107533 - DNA, 75 bp, synthetic construct
  source 1..75: mol_type = other DNA
aaggctattttctacaaagtgccgcaaaaacgcgagcgtttgatcattgtagctgtaagaaatgatcttgctgat

SEQ ID NO: 107534 - DNA, 75 bp, synthetic construct
  source 1..75: mol_type = other DNA
ccggatgagacgcagtattacggtggggtgactgccggcggggatggcggtctgaaaaataacggcaccacacaa

SEQ ID NO: 107535 - DNA, 75 bp, synthetic construct
  source 1..75: mol_type = other DNA
ccgggagtcaggacgcggtttgaaattcgtagtgcgtacacagactcctatggaataaattttgagcgtattgat

SEQ ID NO: 107536 - DNA, 75 bp, synthetic construct
  source 1..75: mol_type = other DNA
catcccggcacaggaaaaatataaggggttgaatcagtttggtcatttgctgtttgatctgcaaaacgatccgca

SEQ ID NO: 107537 - DNA, 75 bp, synthetic construct
  source 1..75: mol_type = other DNA
ttacgagattcatcctgcaaaaatgaaacgagtaattaatggtgttgacgttcttgcgggcgttgctcgtattct

SEQ ID NO: 107538 - DNA, 75 bp, synthetic construct
  source 1..75: mol_type = other DNA
ttgacgtaccgtgggcgcgcattgtggtgcacgatctgccagaaagtgcggtgggcgtctccagcgatgtcgtga

SEQ ID NO: 107539 - DNA, 75 bp, synthetic construct
  source 1..75: mol_type = other DNA
tctatctttgctctggggatcatgccgtatatttcggcatcgatcattatccagctgctgacggtggttcaccca

SEQ ID NO: 107540 - DNA, 75 bp, synthetic construct
  source 1..75: mol_type = other DNA
acagtgacggctggcaggtggtgaaggatggtgcagtggctgagaataccaccgttaatcacaagggcaaactgc

SEQ ID NO: 107541 - DNA, 75 bp, synthetic construct
  source 1..75: mol_type = other DNA
tgaaaaccctgcgtcaacaggtgctgaatcgtctgatcgacgaggcgctgctggatcagtacgctcgcgaactaa

SEQ ID NO: 107542 - DNA, 75 bp, synthetic construct
  source 1..75: mol_type = other DNA
gtcgtccgagatttccatgtcgggtaatttttatctgaatcaggcccagaacgccctgcgtgatgcctatgacaa

SEQ ID NO: 107543 - DNA, 75 bp, synthetic construct
  source 1..75: mol_type = other DNA
aatcatcatgctttgaggttggcggaatatataccgtagatcacctgactggtgatgaacttaacacccaataca

SEQ ID NO: 107544 - DNA, 75 bp, synthetic construct
  source 1..75: mol_type = other DNA
gaaccagtaatacaggtgatataggtttctttggatgcagatttaattcagaccagattcgtatttcaggtgctt

SEQ ID NO: 107545 - DNA, 75 bp, synthetic construct
  source 1..75: mol_type = other DNA
aatacgcagtcaggtgataagggggattatacctgcgtggtgacggattctgcagaacagcgcagagtgttacgt

SEQ ID NO: 107546 - DNA, 75 bp, synthetic construct
  source 1..75: mol_type = other DNA
atactaataatttcatattgaatatttttgttagcacaattcgatatgtagatatggttttttctcgctactcat

SEQ ID NO: 107547 - DNA, 75 bp, synthetic construct
  source 1..75: mol_type = other DNA
tcagattcctggcggaagtgcgccagcacacctggtcatccggtaccaacggcgtggtggcagccacgttttcac

SEQ ID NO: 107548 - DNA, 75 bp, synthetic construct
  source 1..75: mol_type = other DNA
atggatttaaacatagaagactctagctcagaagagttactttcagataacaccctcgagaaagacgaaaattct

SEQ ID NO: 107549 - DNA, 75 bp, synthetic construct
  source 1..75: mol_type = other DNA
gcacacctggtcatccggtaccaacggcgtggtggcagcaacgttttcactgcgtctgaaaggcaaaccggtgtc

SEQ ID NO: 107550 - DNA, 75 bp, synthetic construct
  source 1..75: mol_type = other DNA
tagcaaagataacctgccggaagagttgaacttcaagccggttgccgacgctatctttaacggcggtctggtagg

SEQ ID NO: 107551 - DNA, 75 bp, synthetic construct
  source 1..75: mol_type = other DNA
gactcaattggcagaagctggattaccgctcaatgtggaagtgaacagcaagcagctttactggccgttcactgg

SEQ ID NO: 107552 - DNA, 75 bp, synthetic construct
  source 1..75: mol_type = other DNA
atgcgttcgcgaccggcgatggcaatatgtggcttgccagcggtggtgactggtttttcgatttaaatgattgca

SEQ ID NO: 107553 - DNA, 75 bp, synthetic construct
  source 1..75: mol_type = other DNA
aataccgcaccggccaggaagtacggtgcagcttctgaagtcgctgtcacacgacatgcacagtatcagttgtgg

SEQ ID NO: 107554 - DNA, 75 bp, synthetic construct
  source 1..75: mol_type = other DNA
aatcattgaagattatgaaaatatcaaagaaaatgcttatctggtcattccccaaattaattatactatggattt

SEQ ID NO: 107555 - DNA, 75 bp, synthetic construct
  source 1..75: mol_type = other DNA
actgcaccatcaaggaagtccagttcaccgccgggcagaaacaggatattgatgtgaccacgctctgctccacag

SEQ ID NO: 107556 - DNA, 75 bp, synthetic construct
  source 1..75: mol_type = other DNA
ctgacgcggggggatttttcgcttgcgcccccgtatccgtttgtgcagctggccactctgaagcagcggaccgaa

SEQ ID NO: 107557 - DNA, 75 bp, synthetic construct
  source 1..75: mol_type = other DNA
taccaagagcaactctaacagatcaattagaaaatgaattaacaaaagaaatatataaaaactcatcgaaaatta

SEQ ID NO: 107558 - DNA, 75 bp, synthetic construct
  source 1..75: mol_type = other DNA
agcggctggaaaaaacgctcaaattcgagatgccgcaatggttgggtatcgacgaaatccacatcatcaaacctc

SEQ ID NO: 107559 - DNA, 75 bp, synthetic construct
  source 1..75: mol_type = other DNA
actgtctggcagataccgcccatctcctgtgagaagagtgtccataccgaagcccggcggcggcgaacgtctgct

SEQ ID NO: 107560 - DNA, 69 bp, synthetic construct
  source 1..69: mol_type = other DNA
atgagtgactatcatcacggcgtgcaggtgctggagattaacgacggcacccgcgtcatttccaccgta

SEQ ID NO: 107561 - DNA, 75 bp, synthetic construct
  source 1..75: mol_type = other DNA
gcatacctggtctgcaggaaccaatggtgttgtggctgcaacgttttccctgcgtctgaaaggtaaacctgtgct

SEQ ID NO: 107562 - DNA, 75 bp, synthetic construct
  source 1..75: mol_type = other DNA
gtgcagtgggacgactacgcccagatctttaccctgattaaagatggcgcgtacgtgaaagtgaagcctggtgcg

SEQ ID NO: 107563 - DNA, 75 bp, synthetic construct
  source 1..75: mol_type = other DNA
aaaaagcgcagttactgccagtttgattcgaagctggcgcagatagtccagcagcaggggcgcaacggacagttg

SEQ ID NO: 107564 - DNA, 75 bp, synthetic construct
  source 1..75: mol_type = other DNA
tccgcagtatccggtgatgcgggtgcatatacctgcgagatttctgattcagcaagccctgttaacaaggtgacc

SEQ ID NO: 107565 - DNA, 75 bp, synthetic construct
  source 1..75: mol_type = other DNA
cttaatgcgctaactgcggacgaaattaaacaggccgttgaaattgttaaagcttccgcggacttcaaacccaat

SEQ ID NO: 107566 - DNA, 75 bp, synthetic construct
  source 1..75: mol_type = other DNA
aacaagggctgggcctgaacgggcagatcaacatccctgaagggcgcttccatgcctatggtcaggatctgattg

SEQ ID NO: 107567 - DNA, 75 bp, synthetic construct
  source 1..75: mol_type = other DNA
acgggggccaatgctcctgctcttgcggtcagtgaagactttaaatctctgctagcgcgctcttatgacagctcg

SEQ ID NO: 107568 - DNA, 75 bp, synthetic construct
  source 1..75: mol_type = other DNA
tcaccctgggcgttcaggctggttatggccacagcgtcagcggcagcagcgctgaagggtataacggtcaggcca

SEQ ID NO: 107569 - DNA, 75 bp, synthetic construct
  source 1..75: mol_type = other DNA
gcgttcagcgcgtgtagagcgcgtacttagcgaaccgcatcatccttccggggaattaaccgattttcgtatccg

SEQ ID NO: 107570 - DNA, 75 bp, synthetic construct
  source 1..75: mol_type = other DNA
cgccttttactccgaagaaggtgcctgtctgcatgaatatgccacgtactcctgcgagtcaaaaacatccgggaa

SEQ ID NO: 107571 - DNA, 75 bp, synthetic construct
  source 1..75: mol_type = other DNA
cccgtttgtgcaactggccacgctgaaacagcgggcggaaaaagcggccagaacagcaggaagaacgcctgccgg

SEQ ID NO: 107572 - DNA, 75 bp, synthetic construct
  source 1..75: mol_type = other DNA
atgaataacctggttccagttggatctccggcatctcccggaacattgctcccggtggccatcgattaccctgcc

SEQ ID NO: 107573 - DNA, 75 bp, synthetic construct
  source 1..75: mol_type = other DNA
atgcagccgagccagcttgcggtcaactttaacggtatgcgctcgacgcttgcgggcaccgtgcgaacccagcag

SEQ ID NO: 107574 - DNA, 75 bp, synthetic construct
  source 1..75: mol_type = other DNA
cctggatggatgccagaatcagttgcgacctgcaatgagggaaatatttcctatacagtcaagagaaacgatggt

SEQ ID NO: 107575 - DNA, 75 bp, synthetic construct
  source 1..75: mol_type = other DNA
gcgttctgcacgtgtggaacgggtgctcagcgagccgcatcatccctcgggggaattaaccgattttcgtattcg

SEQ ID NO: 107576 - DNA, 75 bp, synthetic construct
  source 1..75: mol_type = other DNA
tgcagtggttaaagagtggcggcccgcgttctgcgcgtgtggaacgggtgctcagcgagccgcatcatccctcgg

SEQ ID NO: 107577 - DNA, 75 bp, synthetic construct
  source 1..75: mol_type = other DNA
cagtggttttagagagaaccgtcagagagctcaatggtgagtcgtgcattgaacttgaagagatcccgccaacta

SEQ ID NO: 107578 - DNA, 75 bp, synthetic construct
  source 1..75: mol_type = other DNA
atcatatgattgcgttgaccaaaactgccttaaaacagttaagtcacttgccaaagacttagaaaaatacattgt

SEQ ID NO: 107579 - DNA, 75 bp, synthetic construct
  source 1..75: mol_type = other DNA
gagggatgaggggcgtgatattacccgcgttcagcggcgcggactgaaaagatttgcgctggtatggctggcagg

SEQ ID NO: 107580 - DNA, 75 bp, synthetic construct
  source 1..75: mol_type = other DNA
ttatccgggtgatgaatatcagtttggtaaagaaatagtagaaagcgaattactctggcctgttgatcgtgtgca

SEQ ID NO: 107581 - DNA, 75 bp, synthetic construct
  source 1..75: mol_type = other DNA
gcaggcggcctctatacccgcttatggcatgacaacgtcagcagtactgcgctccatcgccagcacaacatgaag

SEQ ID NO: 107582 - DNA, 75 bp, synthetic construct
  source 1..75: mol_type = other DNA
cgccaccatttgctgccctgaccggcatacgctgcagtaccgcgcatatcacggagacaacgcctggctgtactc

SEQ ID NO: 107583 - DNA, 75 bp, synthetic construct
  source 1..75: mol_type = other DNA
gcgaaaaacagcacgagttacagttgcggattcagggcgagccggtttccgggcagcttaatctggcaggaagtt

SEQ ID NO: 107584 - DNA, 75 bp, synthetic construct
  source 1..75: mol_type = other DNA
ggggaaatctatctgaatggcgatgccgactggagccagattgaaaactggcgggcgcgagtgacggcgaagggc

SEQ ID NO: 107585 - DNA, 75 bp, synthetic construct
  source 1..75: mol_type = other DNA
tttgatactcgattcgctttttatggagttgattttacatttttaagacgtatagtggaattaaataaattatat

SEQ ID NO: 107586 - DNA, 75 bp, synthetic construct
  source 1..75: mol_type = other DNA
cgtcaccaaaacaccgattaccgcggctgacttactgaatgatcgtgtactgccgttttatgcgtctcagggcct

SEQ ID NO: 107587 - DNA, 75 bp, synthetic construct
  source 1..75: mol_type = other DNA
gctggcgttaccattaagcgagtttgatcagattattacagacgacggtttgccggagagtgccagtcgcgcgct

SEQ ID NO: 107588 - DNA, 75 bp, synthetic construct
  source 1..75: mol_type = other DNA
cattgcagataagattttgtcactcgataggtcagcgtcatattgcaagtacaatatgtataagaaaaattgttc

SEQ ID NO: 107589 - DNA, 75 bp, synthetic construct
  source 1..75: mol_type = other DNA
aatcacagacatgccatcgacagtaaaaaatctacatattgaattaactgattcaccatttatacacatcatacc

SEQ ID NO: 107590 - DNA, 75 bp, synthetic construct
  source 1..75: mol_type = other DNA
caaattgctgtaccaggattcattcgttatttaatcgaaagcagatttggtaaggccgaattgtataaaagaacg

SEQ ID NO: 107591 - DNA, 75 bp, synthetic construct
  source 1..75: mol_type = other DNA
gatattagatgatgatacagaggtacctataaattatttccctttaagggcatttcaattgtcttatgatatcgg

SEQ ID NO: 107592 - DNA, 75 bp, synthetic construct
  source 1..75: mol_type = other DNA
ggtcaaattgtgggtaaaatcggcgagacgtttggcgtaagcaatttagcgctcgacacacagggggtaggcgac

SEQ ID NO: 107593 - DNA, 75 bp, synthetic construct
  source 1..75: mol_type = other DNA
ctgatgttgtattggagagtagtgacgatatttatataatagagtgcaaaaatgttaaggtcttaccttcaactg

SEQ ID NO: 107594 - DNA, 75 bp, synthetic construct
  source 1..75: mol_type = other DNA
attcaggtcagctttaatcctcagtttttcctcaatggcaaagaaaccgcagcgcctgccggactgaccagcgca

SEQ ID NO: 107595 - DNA, 75 bp, synthetic construct
  source 1..75: mol_type = other DNA
aagctgcgaaatcaattttggcagagtatccacattatcaaagggaggactcttggggagctgcaatgataagaa

SEQ ID NO: 107596 - DNA, 75 bp, synthetic construct
  source 1..75: mol_type = other DNA
tcaccctgggcgttcaggcgggttatgaccacagcgtcagcggcagcagcgctgaaggttataacggtcaggcca

SEQ ID NO: 107597 - DNA, 75 bp, synthetic construct
  source 1..75: mol_type = other DNA
cggggtttctccgcaaacgacacagtgtcagtaagctggttgtgcaccttatttttacgacaaagtatcgacgca

SEQ ID NO: 107598 - DNA, 75 bp, synthetic construct
  source 1..75: mol_type = other DNA
gaagagttgaacttcaagccggttgccgacgctatctttaacggcggtctggtaggtgaaaacggcgcgccgggc

SEQ ID NO: 107599 - DNA, 75 bp, synthetic construct
  source 1..75: mol_type = other DNA
atcacaatggattggataatgtgtctctatctccattttctgatgccggatgttcatttgcattggttcgccatg

SEQ ID NO: 107600 - DNA, 75 bp, synthetic construct
  source 1..75: mol_type = other DNA
ttgttatcggcgggatgattggcagcacattccgttctgcaatgagcggtacccgccgtgcgcttgattccctga

SEQ ID NO: 107601 - DNA, 75 bp, synthetic construct
  source 1..75: mol_type = other DNA
gcgctgttattgaaagtgttaagaatcatcaacttttaaaattatattctgaatgtcgaggggttagaggggatt

SEQ ID NO: 107602 - DNA, 75 bp, synthetic construct
  source 1..75: mol_type = other DNA
tcgtcatcatcgtcgcttaataccactggcactaggaatgacattcagaaagctgcggatacctacaacaatggc

SEQ ID NO: 107603 - DNA, 75 bp, synthetic construct
  source 1..75: mol_type = other DNA
caaatataatcgataatcgttccattcactcatctgaaagaatgaaaaaagttttatctttactaaagataaaaa

SEQ ID NO: 107604 - DNA, 75 bp, synthetic construct
  source 1..75: mol_type = other DNA
attcaatggcgcaaagatccttgaactggatgggcgacaccccgccgatgaaattctgcaagcgtcactacgcgc

SEQ ID NO: 107605 - DNA, 75 bp, synthetic construct
  source 1..75: mol_type = other DNA
tttgaaaacagcctaccaattagtaaagttattgatcttttgagacgtataaatgtaaccgcatcaaatgcaaca

SEQ ID NO: 107606 - DNA, 75 bp, synthetic construct
  source 1..75: mol_type = other DNA
acttaagttataatcatgataactattgggaaaaaaacggaagcaactcaattgcagtttggtatggaaaaaata

SEQ ID NO: 107607 - DNA, 75 bp, synthetic construct
  source 1..75: mol_type = other DNA
gaagagaagcatctgatagttgtaaggtcagttacaaccttacaggacatcacgcaaaagaacaatcgctaactt

SEQ ID NO: 107608 - DNA, 75 bp, synthetic construct
  source 1..75: mol_type = other DNA
atcaccgttccggatgaaacatggaagcaagaagcacagaaaactattcaggtcctatcgtcgttggtcatgaaa

SEQ ID NO: 107609 - DNA, 75 bp, synthetic construct
  source 1..75: mol_type = other DNA
tcgacactcataattatcaccatatctgggccgttggtgatattcatggtgactatcaattattacaatcccgct

SEQ ID NO: 107610 - DNA, 75 bp, synthetic construct
  source 1..75: mol_type = other DNA
ttaatgcccatcactatcgttatatatgggccgttggtgatattcatggtgactatcaattattacaatcccgct

SEQ ID NO: 107611 - DNA, 75 bp, synthetic construct
  source 1..75: mol_type = other DNA
ccgtgcggaccaacaagaaattgaaactaaactgaccattggtgaagtagtttatgtaaatgaagtagctgatga

SEQ ID NO: 107612 - DNA, 75 bp, synthetic construct
  source 1..75: mol_type = other DNA
ccctcgagaaagacgaaaattctccggacaatggctttgaggtcggggaatataacacatatgaagcatataact

SEQ ID NO: 107613 - DNA, 75 bp, synthetic construct
  source 1..75: mol_type = other DNA
aatagtgaaggggcattctccatccacaataacgtggcagagaatgtgttgctggaaaacggtggtcatttagac

SEQ ID NO: 107614 - DNA, 75 bp, synthetic construct
  source 1..75: mol_type = other DNA
tatgtggcttgccagcggcggcgactggttctttgaattaaatgagacggaacaacaagaagcaataaatctgtt

SEQ ID NO: 107615 - DNA, 75 bp, synthetic construct
  source 1..75: mol_type = other DNA
actagttgcaattccggctcaaccccttcttaccgccatgtccgcagaagggctgacggcacaggggcatccgat

SEQ ID NO: 107616 - DNA, 75 bp, synthetic construct
  source 1..75: mol_type = other DNA
tcaccctgggcgttcaggccggttatgtccacagcgtcagcggcagcagcgctgaaggctataacggtcaggcca

SEQ ID NO: 107617 - DNA, 75 bp, synthetic construct
  source 1..75: mol_type = other DNA
ccacttcctttgccgtggcccgtaatcaaagctttcgtgcagcaggcgatgagttaggcttatcctcgtccgcca

SEQ ID NO: 107618 - DNA, 75 bp, synthetic construct
  source 1..75: mol_type = other DNA
tcaaaggtggcaagcaaacggtatatggtttagccactgaggcaaatatcgaaagtggtgaacaaattgttgatg

SEQ ID NO: 107619 - DNA, 75 bp, synthetic construct
  source 1..75: mol_type = other DNA
gccaggcgtggcggtaaaagcgggcaatctacatctggcggttgggctggattgtctgtggaacagcagcgtttg

SEQ ID NO: 107620 - DNA, 75 bp, synthetic construct
  source 1..75: mol_type = other DNA
gccatttctgaattactggatatttcgaccagcaagataaacagagcgttagaaaaaattcacgaattaaaacac

SEQ ID NO: 107621 - DNA, 75 bp, synthetic construct
  source 1..75: mol_type = other DNA
gaactggcgcgtcagggcttcgatgtgcgcggctggtcgcgttcgaaaaaagagattgcaggtattcgatgcagc

SEQ ID NO: 107622 - DNA, 75 bp, synthetic construct
  source 1..75: mol_type = other DNA
acgaccagcttgctcagcgcggaacggctggcgcgcctgcctcagggcgcggcgttcatcaatgtatcgcgcggc

SEQ ID NO: 107623 - DNA, 75 bp, synthetic construct
  source 1..75: mol_type = other DNA
gtagaaggtcaggataatatccttctggttaatttcctgcagaagaatggtgacaacaagaaactgaatattgac

SEQ ID NO: 107624 - DNA, 75 bp, synthetic construct
  source 1..75: mol_type = other DNA
aggccaagcgtgaagctgaagagaaaatcgaacgcgaacgcgctgaatctgcacgtcgcgaggctgaattaaagt

SEQ ID NO: 107625 - DNA, 75 bp, synthetic construct
  source 1..75: mol_type = other DNA
tcaccctgggcgttcaggctggttatgtccacagcgtcagcggcagcagcgctgaaggttataacggtcaggcca

SEQ ID NO: 107626 - DNA, 75 bp, synthetic construct
  source 1..75: mol_type = other DNA
atgacgtggaaagacaggcttcaggatgcgtcatttcgtggcgtaccgtttaaggttgaagaagaaagtgcggga

SEQ ID NO: 107627 - DNA, 75 bp, synthetic construct
  source 1..75: mol_type = other DNA
tttcgtggttcctctttgctgacaatcattaatagcattgcagttacagatttactgggaatagtcccctatgaa

SEQ ID NO: 107628 - DNA, 75 bp, synthetic construct
  source 1..75: mol_type = other DNA
cttgacggagatataaatataaataatgacatacatattaaaaatgcgcaggttgtgatgcagggacatgccaca

SEQ ID NO: 107629 - DNA, 75 bp, synthetic construct
  source 1..75: mol_type = other DNA
agggcgcggcgcgactggcaaacgcgaccgcactcggtactaaactgaatattacacaaatggccgtcggggacg

SEQ ID NO: 107630 - DNA, 75 bp, synthetic construct
  source 1..75: mol_type = other DNA
atgtcttttagtggtggtgctggatggttcaaactggcaactgtaacaatgccacaagccagttccgtggtttac

SEQ ID NO: 107631 - DNA, 75 bp, synthetic construct
  source 1..75: mol_type = other DNA
aggcatcaaaggggcatctgccagcgcccgtaacaaaccggcgacattgagcactggtctggtgattcaggtacc

SEQ ID NO: 107632 - DNA, 75 bp, synthetic construct
  source 1..75: mol_type = other DNA
tctccaatgactagtctaaaaactagtattaagactatcacttatttaagtgatattggttgtctggagattcag

SEQ ID NO: 107633 - DNA, 75 bp, synthetic construct
  source 1..75: mol_type = other DNA
gggggatggaatttttatcagtatccgttgaatccagttacgaatacagatcctctggggttagaagtttttcct

SEQ ID NO: 107634 - DNA, 75 bp, synthetic construct
  source 1..75: mol_type = other DNA
agacgctgatgtcatcctgttctgcactggatgactgcatcagtgacagtttcagtggtttcagtatcgatggcg

SEQ ID NO: 107635 - DNA, 75 bp, synthetic construct
  source 1..75: mol_type = other DNA
cgtcgggacagcaaccatctggtaaaggtagttccagtgggggaagcgaaggttttgctgcatcgttctctcgtg

SEQ ID NO: 107636 - DNA, 75 bp, synthetic construct
  source 1..75: mol_type = other DNA
aatctggttcaggcggtggaggcggttccggtggaggatttggcggcggggaagataccggttctgtagatactt

SEQ ID NO: 107637 - DNA, 75 bp, synthetic construct
  source 1..75: mol_type = other DNA
ctgacattgtcaggcgcaatgcggtcgcacatcctggctttgtgccggtatctccactgagggttcctgtacgat

SEQ ID NO: 107638 - DNA, 75 bp, synthetic construct
  source 1..75: mol_type = other DNA
atgcagaatgccgcagtggggcaggcaacaacacccgcgcagagcactggctggccttccgtcacgcatccggca

SEQ ID NO: 107639 - DNA, 75 bp, synthetic construct
  source 1..75: mol_type = other DNA
ggatgaactgcagcgtattaagttcgaccagctggacttcactaacttctacgaagacctgatgaataaccagaa

SEQ ID NO: 107640 - DNA, 75 bp, synthetic construct
  source 1..75: mol_type = other DNA
accgcttcatgatgttctacatccgtaccgccgacaaactgacgcgtaccgcaccgtggttagaaaacctcgaag

SEQ ID NO: 107641 - DNA, 75 bp, synthetic construct
  source 1..75: mol_type = other DNA
ctgtttgattgagtttcaggtgcccgccagccaggacttcaaactggcgcataaagaaatcgaccagatcctgaa

SEQ ID NO: 107642 - DNA, 75 bp, synthetic construct
  source 1..75: mol_type = other DNA
atgacgtggaaagacaggcttcaggatgcgtcatttcgaggtgtgccgtttaaggttgaagaagaaagtgcggga

SEQ ID NO: 107643 - DNA, 75 bp, synthetic construct
  source 1..75: mol_type = other DNA
aggcaaaagggattaacacgttgcttgatagctataccctggttttcaaaggcagtagcgcgggatgtggtgatg

SEQ ID NO: 107644 - DNA, 75 bp, synthetic construct
  source 1..75: mol_type = other DNA
gcgaagtgcaacagtgaagaaaaggcgctgggaaaggcaaaggacaacaaactgacggtgagtgtgggcgagttc

SEQ ID NO: 107645 - DNA, 75 bp, synthetic construct
  source 1..75: mol_type = other DNA
agcagatcacgaaatggcattgctgatgaatgacgcattcgaccgcgaagcgaaggcgaaagcagaagaagcaga

SEQ ID NO: 107646 - DNA, 75 bp, synthetic construct
  source 1..75: mol_type = other DNA
ttgcataatgctttgccaacgactgaaggttttattcactggcggcaaactctacactctggaaaaatggaacgc

SEQ ID NO: 107647 - DNA, 75 bp, synthetic construct
  source 1..75: mol_type = other DNA
atgattttatataaaaaacataaaatcatactaggtgtgatatttgtcataatacataatttcatacctgatatg

SEQ ID NO: 107648 - DNA, 75 bp, synthetic construct
  source 1..75: mol_type = other DNA
gtaaatcaggcttctggtgcgttgcagaaaaaccagaatggcgcagatattcctgataaaagattattcctgcgc

SEQ ID NO: 107649 - DNA, 75 bp, synthetic construct
  source 1..75: mol_type = other DNA
gctggttgtatctcgcagtagtcatcgacctgtggtcacgcgccgttattggctggtcgatgtcactgcgaatga

SEQ ID NO: 107650 - DNA, 75 bp, synthetic construct
  source 1..75: mol_type = other DNA
aagaaagttggttgcgacgtggaggcgaatcatcagaccttatccgttaccctgaaaatcaccatgaaattggca

SEQ ID NO: 107651 - DNA, 75 bp, synthetic construct
  source 1..75: mol_type = other DNA
tcaccctgggcgttcaggcaggttatggccacagcgtcagcggcagcagcgctgaaggttataacggtcaggcca

SEQ ID NO: 107652 - DNA, 75 bp, synthetic construct
  source 1..75: mol_type = other DNA
tcaccctgggcgttcaggcaggttatgtccacagcgtcagcggcagcagcgctgaaggatataacggtcaggcca

SEQ ID NO: 107653 - DNA, 75 bp, synthetic construct
  source 1..75: mol_type = other DNA
cgcccgcttaccgaatgggaagcagaacaagaacgcatcaaggcagaagaagccatgaacgcgatgcacgtcgaa

SEQ ID NO: 107654 - DNA, 75 bp, synthetic construct
  source 1..75: mol_type = other DNA
cgccgatgttttcagcggtaaaacgaagtctgtgggggcaggcctgtatgcatccgccatgtttgattccggtgc

SEQ ID NO: 107655 - DNA, 75 bp, synthetic construct
  source 1..75: mol_type = other DNA
ggaatggatgcggttttgaaggcaatcgaggcatctatacagaatccaacagctgcatttcctaatgctacatta

SEQ ID NO: 107656 - DNA, 75 bp, synthetic construct
  source 1..75: mol_type = other DNA
gcggcatgttagggtatagcctctacgcaaacatgagtgaatatcatgaatttgaagtatttggaacagtacgag

SEQ ID NO: 107657 - DNA, 75 bp, synthetic construct
  source 1..75: mol_type = other DNA
cagaaatgcagaaatatgaacggtgaatatatctggccctggatattgcccttttccgcagcagggatgaaacat

SEQ ID NO: 107658 - DNA, 75 bp, synthetic construct
  source 1..75: mol_type = other DNA
cttgttgactggtttttatcacagaaaaaatcggtgaaaggatttactaatgcgatattctcaggcctcccaact

SEQ ID NO: 107659 - DNA, 75 bp, synthetic construct
  source 1..75: mol_type = other DNA
ggacatacaagctgatgaatataccaactatatattaaacggagttgaacctgtaactgccaatggttctgaaat

SEQ ID NO: 107660 - DNA, 75 bp, synthetic construct
  source 1..75: mol_type = other DNA
accactgcgaccatcgcggcctgccgctggcgcttgtcagcacggaaggggcaacagaatggtgcgcagaatacg

SEQ ID NO: 107661 - DNA, 75 bp, synthetic construct
  source 1..75: mol_type = other DNA
tcaccctgggcgttcaggctggttatgaccacagcgtcagcggcagcagcgctgaaggatataacggtcaggcca

SEQ ID NO: 107662 - DNA, 75 bp, synthetic construct
  source 1..75: mol_type = other DNA
aatatacctgcgtggtgaccgattcggcagagaaagcacagagtgtgacgtcttttgaatgcaccgtgacagtga

SEQ ID NO: 107663 - DNA, 75 bp, synthetic construct
  source 1..75: mol_type = other DNA
tctggcggtcaattgaatggtgcactgggcatcggaacatccagtgctcttggcggtaactcgattgttttgggt

SEQ ID NO: 107664 - DNA, 75 bp, synthetic construct
  source 1..75: mol_type = other DNA
attgcgacctgggctgcaggcttcattagccatgtgtcgctggtcgaaatcctgatcccattctgtgtgatggcg

SEQ ID NO: 107665 - DNA, 75 bp, synthetic construct
  source 1..75: mol_type = other DNA
ggtcgctctgggttacatgatgcaacgttgtgaagaagttggctgccagaatcatggcaatgccgaagtcgctca

SEQ ID NO: 107666 - DNA, 75 bp, synthetic construct
  source 1..75: mol_type = other DNA
tcgtctaataatgatattataatagaggcggtttttaataattgctatatgtctcatgatcttgatcgtatagag

SEQ ID NO: 107667 - DNA, 75 bp, synthetic construct
  source 1..75: mol_type = other DNA
tacgcatgatatatcatcattaatcaatgagctttcccaaagcgatgttgatgatcaaaaaatacctgaagagga

SEQ ID NO: 107668 - DNA, 75 bp, synthetic construct
  source 1..75: mol_type = other DNA
gagacgctggagtacaaacgccagctggctgacctgggcgacaaggttgaacaccagaaacggctgaatgagctg

SEQ ID NO: 107669 - DNA, 75 bp, synthetic construct
  source 1..75: mol_type = other DNA
aaaatgacaatatctcaccagaactttttaaattacttagtcaagaaaaagtttattgggtagaaattgatggct

SEQ ID NO: 107670 - DNA, 75 bp, synthetic construct
  source 1..75: mol_type = other DNA
gaatgcacttggcaaacaagaagtcatcagcacgcgcctaactagtaaaggggcaaacgctactctagcagctag

SEQ ID NO: 107671 - DNA, 75 bp, synthetic construct
  source 1..75: mol_type = other DNA
tgcattggctgtttaaaggcaggatggcaacactggtactgcgtttatgtgcttcgtaaagacatctggaatgag

SEQ ID NO: 107672 - DNA, 75 bp, synthetic construct
  source 1..75: mol_type = other DNA
gcgttcaaatggataaggatcatttaccgctgctggaaggccagaacctgttatgacgaagcgaaatatttgctg

SEQ ID NO: 107673 - DNA, 75 bp, synthetic construct
  source 1..75: mol_type = other DNA
acctgcgagatttctgattcagcaagccctgttaacaaggtgacctccacttcctgcactgttaccgtcagttaa

SEQ ID NO: 107674 - DNA, 75 bp, synthetic construct
  source 1..75: mol_type = other DNA
gtcggcccgtggtcgctgacccgcgatattgcgctggattaccgcaataaggagcaaaaaatcagcatcgggcca

SEQ ID NO: 107675 - DNA, 75 bp, synthetic construct
  source 1..75: mol_type = other DNA
ctttgccaatgcaacggcggctatctcggttctaagcgtcggtgccaccaccggcgtaaaaaacagaaagctggt

SEQ ID NO: 107676 - DNA, 75 bp, synthetic construct
  source 1..75: mol_type = other DNA
gttggtggcggcctgttaggtctggaagccgctggcgcgctgaaaaacttaggcattgaaacccacgttatcgaa

SEQ ID NO: 107677 - DNA, 75 bp, synthetic construct
  source 1..75: mol_type = other DNA
cgctgggacggcgaatggcaaaacgggtctggcggcgggagcgtgacctgacggggtggatgtcgctgtcgcgta

SEQ ID NO: 107678 - DNA, 75 bp, synthetic construct
  source 1..75: mol_type = other DNA
ttacttggcttctttcccttgataagaagaaaccaccgcacgaagaaacagaagattttgtaaaacgtgcattag

SEQ ID NO: 107679 - DNA, 75 bp, synthetic construct
  source 1..75: mol_type = other DNA
aaacccttttcttcactagcgtacgggcagtcccttcaacaacgaagcgggaagagggaaataccctgaagaggt

SEQ ID NO: 107680 - DNA, 75 bp, synthetic construct
  source 1..75: mol_type = other DNA
gcgatttggcagtagtgaatacgcctgccggggaagcgagctggtatgttaatgccatcgagtacgtgaaaccgt

SEQ ID NO: 107681 - DNA, 75 bp, synthetic construct
  source 1..75: mol_type = other DNA
cgtatcgggtttggcagtgcgaagcatcctgactgtcgggggattacggttgatgagctgcagcgtattaagttc

SEQ ID NO: 107682 - DNA, 75 bp, synthetic construct
  source 1..75: mol_type = other DNA
gcgttctgcacgtgtggaacgggggctcaacgagccgcatcatccctcgggggaattaaccgattttcgtatccg

SEQ ID NO: 107683 - DNA, 75 bp, synthetic construct
  source 1..75: mol_type = other DNA
agcttggttattaacccggcgctaactgcaaaccgaagcctagatgatgtcggtgaagtggttgaccgcgcagaa

SEQ ID NO: 107684 - DNA, 75 bp, synthetic construct
  source 1..75: mol_type = other DNA
gcaggggatccaaacggcctggcagatgaagcgggaaatgctttcaccttgctatactacaagatactccgacct

SEQ ID NO: 107685 - DNA, 75 bp, synthetic construct
  source 1..75: mol_type = other DNA
cgttctatgcctcctgtgaaactgtatttcgcccggatctcaaaggtaggccggttgtggtgctttccaacaatg

SEQ ID NO: 107686 - DNA, 75 bp, synthetic construct
  source 1..75: mol_type = other DNA
gcgggagggggacgctgtattttgcaggacagggtatccagcagcagtggcagatgaaacgggaaatgctttctc

SEQ ID NO: 107687 - DNA, 75 bp, synthetic construct
  source 1..75: mol_type = other DNA
atggtactgaatggtgatgtggtcagtaccggcgatattgttaacgcaggggagattcgctttgataatcagacg

SEQ ID NO: 107688 - DNA, 75 bp, synthetic construct
  source 1..75: mol_type = other DNA
ggctggcattatgctgggcgacttcttcagccagggtgtggcccagctcaacctgtttgatgagaacgcgccgcg

SEQ ID NO: 107689 - DNA, 75 bp, synthetic construct
  source 1..75: mol_type = other DNA
tcaacaagggctgccagcggcctggcttgatgcccgcgagtttttacgcgctgaacgcgccgcacaaccgcaggt

SEQ ID NO: 107690 - DNA, 75 bp, synthetic construct
  source 1..75: mol_type = other DNA
gtgtttcgttgacaactgctcagttgccggtagccatcgactaccctgcggcgctggccctgcgccagatggccc

SEQ ID NO: 107691 - DNA, 75 bp, synthetic construct
  source 1..75: mol_type = other DNA
gtgattaatggtggtcaggcaaccggcaaaacctggcttgcgtttacaaatgtcggaaacagtaacctcggggtg

SEQ ID NO: 107692 - DNA, 75 bp, synthetic construct
  source 1..75: mol_type = other DNA
gtttattgatggcctgccaagaaacaaatcagaaatcaccattttaaaattaaaatctgatattgcatctttaaa

SEQ ID NO: 107693 - DNA, 75 bp, synthetic construct
  source 1..75: mol_type = other DNA
tatgccggaaaccactcaggccagcggtatctttacaggtaaagcggatgtcgcctgggataccaccaaagaagg

SEQ ID NO: 107694 - DNA, 75 bp, synthetic construct
  source 1..75: mol_type = other DNA
tcaccctgggcgttcaggctggttatgcccacagcgtcagcggcagcagcgctgaaggctataacggtcaggcca

SEQ ID NO: 107695 - DNA, 75 bp, synthetic construct
  source 1..75: mol_type = other DNA
gtttctacgcctcatgtgaaaaagttttccgccctgaccttcgcaacgaaccggtcatcgtactcagcaataacg

SEQ ID NO: 107696 - DNA, 75 bp, synthetic construct
  source 1..75: mol_type = other DNA
atagttttttcagaagaaaagttagagtataaagtattaggtgacattcgataccctcgtgaggtaatagtatgg

SEQ ID NO: 107697 - DNA, 75 bp, synthetic construct
  source 1..75: mol_type = other DNA
tatacactgattttacttgtgcattacaaaaaaaagaaaaaacattattgtgcatagaaacattatccaacattt

SEQ ID NO: 107698 - DNA, 75 bp, synthetic construct
  source 1..75: mol_type = other DNA
ttttttggtcatcagctcagggaacaggtaaagagctggacaggactcaccatgggggtgggcattgcgcctaca

SEQ ID NO: 107699 - DNA, 75 bp, synthetic construct
  source 1..75: mol_type = other DNA
gtggaaaaataatcatacaaacagtattgtagacatattactaattgataaaaacaacatcaaattggcagagga

SEQ ID NO: 107700 - DNA, 75 bp, synthetic construct
  source 1..75: mol_type = other DNA
ccatcaatatgcgtgttcgccttgatggcagcaatacctctgaccagctggtgattaatggtggtcaggcaaccg

SEQ ID NO: 107701 - DNA, 75 bp, synthetic construct
  source 1..75: mol_type = other DNA
tttggagggaatcaaaaatccacaaaaagagagatgatgatccaaaactttataacagatgagtacaacttatct

SEQ ID NO: 107702 - DNA, 75 bp, synthetic construct
  source 1..75: mol_type = other DNA
ttcggtttcgagtctttatacaaggcagttgaggatggcgagctgtgtttcagcgagctaggcatgtttgaggat

SEQ ID NO: 107703 - DNA, 75 bp, synthetic construct
  source 1..75: mol_type = other DNA
taccgcgccattcggcggcattggcgcttccggtaaccatcgccccagcgcctggtatgccgcagattactgcgc

SEQ ID NO: 107704 - DNA, 75 bp, synthetic construct
  source 1..75: mol_type = other DNA
ccctcgcgtcgaaatttacagtatcgacgaagcattttgtgacctgacaggtgttcgcaactgccgggacttgac

SEQ ID NO: 107705 - DNA, 75 bp, synthetic construct
  source 1..75: mol_type = other DNA
atgataaaccccatctttacccgtggggaaaaagcagcggggatggtaagtgccaacttgcgtctgggtggtgat

SEQ ID NO: 107706 - DNA, 75 bp, synthetic construct
  source 1..75: mol_type = other DNA
cggttggggttggaattgcgcagacaaaaacgctcgctaagctggccaatcacgccgcgaagaagtggcagaggc

SEQ ID NO: 107707 - DNA, 75 bp, synthetic construct
  source 1..75: mol_type = other DNA
gtttattgacagcctgccaagaaataaatcagaaataaccattttgaaattaaaatctgatattgcatctttaaa

SEQ ID NO: 107708 - DNA, 75 bp, synthetic construct
  source 1..75: mol_type = other DNA
aatggacatttaaaaaccagactggccacagagacttaaaaatatcattacccgttccacaaattacagccttac

SEQ ID NO: 107709 - DNA, 75 bp, synthetic construct
  source 1..75: mol_type = other DNA
gtggaagaataatcatacagacagtattatagacatattgctaattgataaaaacaacatcaaattggcagagga

SEQ ID NO: 107710 - DNA, 75 bp, synthetic construct
  source 1..75: mol_type = other DNA
aacgttccataaactgaccaccagtaacctcaccggtcagggtggcaccatcaatatgcgtgttcgccttgatgg

SEQ ID NO: 107711 - DNA, 75 bp, synthetic construct
  source 1..75: mol_type = other DNA
cgttctctgttccggtcacaccacatacgttccgccattcctacgcgatgcatatgctgtatgctggtattccgc

SEQ ID NO: 107712 - DNA, 75 bp, synthetic construct
  source 1..75: mol_type = other DNA
acgctgcgcgcttcgcccttcgggtcgttgcctgcggcaatgctctctcgctggcgctcgagtcgaaccttggtc

SEQ ID NO: 107713 - DNA, 75 bp, synthetic construct
  source 1..75: mol_type = other DNA
gctgcgtcgcaaaatcgaaagtatgggcgtgcgcgttcacaccagcaaaaacacccttgagattgtgcaggaagg

SEQ ID NO: 107714 - DNA, 75 bp, synthetic construct
  source 1..75: mol_type = other DNA
cgatcataacgagaacaccattgttgacccttcggtgatctatttcgatttcgctaacccgctgcaggctcagga

SEQ ID NO: 107715 - DNA, 75 bp, synthetic construct
  source 1..75: mol_type = other DNA
ttgtcaaattcacagaatgcacaaaatgttgcaaatggtgctgcctctaccgcccaaaatgcacaaacaaccgca

SEQ ID NO: 107716 - DNA, 75 bp, synthetic construct
  source 1..75: mol_type = other DNA
agttttcactaccagtacggacagagcttgagttttatgcaagaggaaaggcgtcttcaaagtataatttatgga

SEQ ID NO: 107717 - DNA, 75 bp, synthetic construct
  source 1..75: mol_type = other DNA
cggtgcctttaactacaccctgaaccgtgacagcgatgaagactggtacctgcgcagtgaaaatgcttatcgtgc

SEQ ID NO: 107718 - DNA, 75 bp, synthetic construct
  source 1..75: mol_type = other DNA
ggtatggatcgaaacgctctccctgcaactgaaagacagcatgtgcggttttcgcgtttatccggttgcgccgac

SEQ ID NO: 107719 - DNA, 75 bp, synthetic construct
  source 1..75: mol_type = other DNA
gaagcttctcatccttccccgcatgggcagaatattcaattgcggattcgtttgagaattcaggggcttttgaaa

SEQ ID NO: 107720 - DNA, 75 bp, synthetic construct
  source 1..75: mol_type = other DNA
aaaactgaccattgataccaccgttaaaggtcaagcgttgccgttgagcgtcacctatcaaggtgaatctgctga

SEQ ID NO: 107721 - DNA, 75 bp, synthetic construct
  source 1..75: mol_type = other DNA
tatctcaaccagcgtgagcaggtagggcctgagttgtgggatgaggcaattttgtacaggtacttacatatggct

SEQ ID NO: 107722 - DNA, 75 bp, synthetic construct
  source 1..75: mol_type = other DNA
atgccaaaaatgaactcaatacgaatattgatagtgcgaaaaatgacgcgatcaattcgtcgaacaactacaccg

SEQ ID NO: 107723 - DNA, 75 bp, synthetic construct
  source 1..75: mol_type = other DNA
acgccggttatgtgaagttcgggcatggcagtgcacaacatgtgcgtgccggcttccgtctgggcagccacaacg

SEQ ID NO: 107724 - DNA, 75 bp, synthetic construct
  source 1..75: mol_type = other DNA
taattaaatttcctgtcatcgatacagcattaaacttatggtctcttggtgaatctattcacagatatacatcgg

SEQ ID NO: 107725 - DNA, 75 bp, synthetic construct
  source 1..75: mol_type = other DNA
ggcctgatgtttgccgcaggctacagggagttaattaaccagcaagggatgctctggttaaacagttggcgttca

SEQ ID NO: 107726 - DNA, 75 bp, synthetic construct
  source 1..75: mol_type = other DNA
ttttatgacaagctgatcatggcgaccggttcctacccgtggatcccgccaatcaaaggttctgatactcaggac

SEQ ID NO: 107727 - DNA, 75 bp, synthetic construct
  source 1..75: mol_type = other DNA
ttggttacgccccggcgatgttctgcttcagtctgtatggctacattctggatttaaatccggggattattggct

SEQ ID NO: 107728 - DNA, 75 bp, synthetic construct
  source 1..75: mol_type = other DNA
ggtatatcaccgctacgatgggggtgtttgacccattgacaaatacaacgtatgtatatcttaacccaaaatttc

SEQ ID NO: 107729 - DNA, 75 bp, synthetic construct
  source 1..75: mol_type = other DNA
ggagcattctctgttgtggagggtaaagctgataatgtcgtactggaaaatggcggacgcctggatgtgctgacc

SEQ ID NO: 107730 - DNA, 75 bp, synthetic construct
  source 1..75: mol_type = other DNA
tttactttgttcccgcgcagttatcaaaagcaaaaggaataggtaaaaatattcttctcaaattacagttagtta

SEQ ID NO: 107731 - DNA, 75 bp, synthetic construct
  source 1..75: mol_type = other DNA
atgaaagtaaccaaatctattatagctgttttattgtgcttatctgctggtagtgcatatgcagattgtgagtat

SEQ ID NO: 107732 - DNA, 75 bp, synthetic construct
  source 1..75: mol_type = other DNA
tctgctggagtccgtttatgggccagcctgcgcctttcccacaggggccgtttattctcgcgtctattttgcgct

SEQ ID NO: 107733 - DNA, 75 bp, synthetic construct
  source 1..75: mol_type = other DNA
catcagtggctggttcagcgaaaagctgggcattcattcgccgagccgcgtgtttatgggctttggtgacaatat

SEQ ID NO: 107734 - DNA, 75 bp, synthetic construct
  source 1..75: mol_type = other DNA
gcagttgaaatgcaatatctgccgggtcagggtctgcaatcttatcagttgatgactaaaatttggtctaacgat

SEQ ID NO: 107735 - DNA, 75 bp, synthetic construct
  source 1..75: mol_type = other DNA
gtgagagaatatatggctgtggtataaatattgctccagcattacggggactgggagaattcggtgaggattttg

SEQ ID NO: 107736 - DNA, 75 bp, synthetic construct
  source 1..75: mol_type = other DNA
gcatcgattttaccagggcaacgtctggcaaatgagatgacaccggatgttccccgtatcccctcgcctgaaatc

SEQ ID NO: 107737 - DNA, 75 bp, synthetic construct
  source 1..75: mol_type = other DNA
gccggaaagcagcggcagctatggcttcgtccgtctggagagtgacctgctcagaacagaggttgccggtatgtc

SEQ ID NO: 107738 - DNA, 75 bp, synthetic construct
  source 1..75: mol_type = other DNA
catcagtagcacacaatgcccttgagtctatacagaacagcacaagagaaggggcatatcatttttctgttgaac

SEQ ID NO: 107739 - DNA, 75 bp, synthetic construct
  source 1..75: mol_type = other DNA
ggataagatggctgaaaaccaggcgcattttctgggaaatcgttcagaaacgatgctggaatttacccccacgcg

SEQ ID NO: 107740 - DNA, 75 bp, synthetic construct
  source 1..75: mol_type = other DNA
ctaggtgcgcaggtcgattttattggtcgcgtcggtgacgacgacacaggcaacagcctgctggcagagctggag

SEQ ID NO: 107741 - DNA, 75 bp, synthetic construct
  source 1..75: mol_type = other DNA
atcagtgcgctccttgcgattaagatagcgactgttggtctcaaactggggctgaatctccttatttcccccttt

SEQ ID NO: 107742 - DNA, 75 bp, synthetic construct
  source 1..75: mol_type = other DNA
ttttgactgaaatatggagagacaagcttggtcaattcatcagcaaagatgtagatataaattacattgcaaaga

SEQ ID NO: 107743 - DNA, 75 bp, synthetic construct
  source 1..75: mol_type = other DNA
atgcaagttgcactatcacaggctttagcaacaccattccccgctagtatcgcggcatatgcacagatactttct

SEQ ID NO: 107744 - DNA, 75 bp, synthetic construct
  source 1..75: mol_type = other DNA
cacaacaggcgctttcggtaagcctttgttccgatcaaccctgggtgcagatttatagcggcgaaaaattaggtg

SEQ ID NO: 107745 - DNA, 75 bp, synthetic construct
  source 1..75: mol_type = other DNA
tggtgggcgtctactggctcactgctgctcgtgcgcgcaaagcgtcgcaagactggctcgcccgtgtacgacagc

SEQ ID NO: 107746 - DNA, 75 bp, synthetic construct
  source 1..75: mol_type = other DNA
cgggagaaaccgtgaacggcggaacactgacaaatcatgacaaccagattgtcttcggtgcgaccaacggaatga

SEQ ID NO: 107747 - DNA, 75 bp, synthetic construct
  source 1..75: mol_type = other DNA
ctggcgctcgagtcgaaccttggtcgaagcttctcatccttccccgcatgggcagaatatttaattgcggattcg

SEQ ID NO: 107748 - DNA, 75 bp, synthetic construct
  source 1..75: mol_type = other DNA
ttcagaccacatcaccggcgaacaagatattatatattcacaaaatgcttttttctcacatgtgattaatcatat

SEQ ID NO: 107749 - DNA, 75 bp, synthetic construct
  source 1..75: mol_type = other DNA
tttatagcggtgaaaaattacagcgtcagggactggcagttgaacctatggaaggtgcgaacaagttcctgatat

SEQ ID NO: 107750 - DNA, 75 bp, synthetic construct
  source 1..75: mol_type = other DNA
tgccgccacgcaacagcaactggataatctggttagcgaacagcctggcgtgaccttaattcgcttagcagaaaa

SEQ ID NO: 107751 - DNA, 75 bp, synthetic construct
  source 1..75: mol_type = other DNA
gaaagataacgtccgcatctcgctcatgcacacgcgtctgtttttcggcatgttgccgcgtattccttcactact

SEQ ID NO: 107752 - DNA, 75 bp, synthetic construct
  source 1..75: mol_type = other DNA
accagctggtgattaatggtggtcaggcaaccggcaaaacctggcttgcgtttacaaatgtcggaaatagtaacc

SEQ ID NO: 107753 - DNA, 75 bp, synthetic construct
  source 1..75: mol_type = other DNA
ctgacgacaggggtgcatggtgccgcaggccattcttccgttgatgttaaggatgatgacggttcccgcgccggc

SEQ ID NO: 107754 - DNA, 75 bp, synthetic construct
  source 1..75: mol_type = other DNA
cacacctttaaaaccgctaatgatctgtgggaaataaccattacccatccacaacaggcgctttcggttagcctt

SEQ ID NO: 107755 - DNA, 75 bp, synthetic construct
  source 1..75: mol_type = other DNA
gacctgggaacaggcgcaacagtggcgcgatgcaggcattcagcaggtggtttatcaccgcagccgtgacgcgca

SEQ ID NO: 107756 - DNA, 75 bp, synthetic construct
  source 1..75: mol_type = other DNA
gtgacctgacggggtggatgtcgctgtcgcgtaaaccggaggtgacatggtacgggtgggacggtgacaggctga

SEQ ID NO: 107757 - DNA, 75 bp, synthetic construct
  source 1..75: mol_type = other DNA
gatatcagtatcagcctgtattcatggtgtacatttggtacaacatttaatgacggttttgcaatcagtattcta

SEQ ID NO: 107758 - DNA, 75 bp, synthetic construct
  source 1..75: mol_type = other DNA
ttcatattgtcgagcgtggtagaggccaatcagtaagtgactggtcgctgacgaaggttggtaatgaaatactga

SEQ ID NO: 107759 - DNA, 75 bp, synthetic construct
  source 1..75: mol_type = other DNA
aaacattggaagtcaattcttcactaaagataattttacattcaatatcccattatatgccacatatcagtctga

SEQ ID NO: 107760 - DNA, 75 bp, synthetic construct
  source 1..75: mol_type = other DNA
ccgtatccatgggaaatggcggggtactgctggccgattccggggccgctgtcagtggtacccggagcgacggaa

SEQ ID NO: 107761 - DNA, 75 bp, synthetic construct
  source 1..75: mol_type = other DNA
tagtatccgtgatgccgcttctccggtggaagccgcacgtcagttcaaacgttccatcgctgaactgtggggcta

SEQ ID NO: 107762 - DNA, 75 bp, synthetic construct
  source 1..75: mol_type = other DNA
accgtcaccggtactacgatccgttgcaggggcggtatattacacaagaccccattgggctggagggggggatgg

SEQ ID NO: 107763 - DNA, 75 bp, synthetic construct
  source 1..75: mol_type = other DNA
gctggggaggctggagcgggaactgcgcgcgggagcggtgagtgcggagagtgaggcatggcttgcgcagtgcgg

SEQ ID NO: 107764 - DNA, 75 bp, synthetic construct
  source 1..75: mol_type = other DNA
attgcacaggccattgatagtgggattaccagtttagaaacgtatatttctaaccttggtgacactatatccacg

SEQ ID NO: 107765 - DNA, 75 bp, synthetic construct
  source 1..75: mol_type = other DNA
cttattattaagacgatgaaatcgcttacgctgcgttttattctggcctttccgttcacattactgaccgcggca

SEQ ID NO: 107766 - DNA, 75 bp, synthetic construct
  source 1..75: mol_type = other DNA
tatggtcttcggatcagtattgatcctaatagtggagtatttctgcgagcagatggcagggtgggtacagataaa

SEQ ID NO: 107767 - DNA, 75 bp, synthetic construct
  source 1..75: mol_type = other DNA
actacaccgcgaaactctcttcgcgtatcgatgatatcgacctgaacctggaagattttgttcagcgtgtaaatg

SEQ ID NO: 107768 - DNA, 75 bp, synthetic construct
  source 1..75: mol_type = other DNA
gaaataccagccacagtggccggttccccggaacaacagaaaaaaacaggacgtaagaagaagaaaaaaagaaga

SEQ ID NO: 107769 - DNA, 75 bp, synthetic construct
  source 1..75: mol_type = other DNA
gccttcttcaccagcgtaaagcgaccacccactggcgctacactgaacaactccaacatcgttacccttctattc

SEQ ID NO: 107770 - DNA, 75 bp, synthetic construct
  source 1..75: mol_type = other DNA
ttatgacacggaatgaaggtgcttaccttttgaaatgtgtccaatcaatcattaatactgttactataccctatc

SEQ ID NO: 107771 - DNA, 75 bp, synthetic construct
  source 1..75: mol_type = other DNA
ctcttatatcagaaaaacagtcgctttcaaaggtacttttaaatgataagaataatgaactgagcgatgggacaa

SEQ ID NO: 107772 - DNA, 75 bp, synthetic construct
  source 1..75: mol_type = other DNA
gaagtgagtgccctgctccactatgtgccggacctgcaccgtaaaatgctgctggcgacgttgtggaacaccggg

SEQ ID NO: 107773 - DNA, 75 bp, synthetic construct
  source 1..75: mol_type = other DNA
atttgtcatgtctgccatcattaccaccatatttacaatcactctcggcacgttttaatagtctggagacgttac

SEQ ID NO: 107774 - DNA, 75 bp, synthetic construct
  source 1..75: mol_type = other DNA
tgtcccgtacaaccagtgatgcgctgtttctggcgctgcgccgggtgaaagcagatctgaatgcggatacctggc

SEQ ID NO: 107775 - DNA, 75 bp, synthetic construct
  source 1..75: mol_type = other DNA
accggtgaaattgtcgatgcgcattacagctggagtcgtacttacctgcagaagagtgtacctatgacaattaca

SEQ ID NO: 107776 - DNA, 75 bp, synthetic construct
  source 1..75: mol_type = other DNA
caacaccgcgaaaggtgcactggaagtcgcccatgaatttaaaggcgatgtacagattgagctgacagggttctg

SEQ ID NO: 107777 - DNA, 75 bp, synthetic construct
  source 1..75: mol_type = other DNA
tcggtatagccggtcagggggggcaaatttacctccgcacagaacagacaaaaggccacttgtcagttcgctggg

SEQ ID NO: 107778 - DNA, 75 bp, synthetic construct
  source 1..75: mol_type = other DNA
ggtcatctcggtcacgataacaacggcggtattgcccgtggggccacgccggaaagcagcggcagctatggcttc

SEQ ID NO: 107779 - DNA, 75 bp, synthetic construct
  source 1..75: mol_type = other DNA
caagtaaatttgatagtactgcagatgctgcgttagatgctttgaaagaaacgcagaatagatctctatgtaatg

SEQ ID NO: 107780 - DNA, 75 bp, synthetic construct
  source 1..75: mol_type = other DNA
gcaaagaacgacgcgatcagttcatccaacagttacactgacagtaaaatcagtgacacgaagacagaactgaac

SEQ ID NO: 107781 - DNA, 75 bp, synthetic construct
  source 1..75: mol_type = other DNA
ggatattagtttcgctacagaaaatagtaaatgaaaaaaaaatatacacaacaaataaaatgcgtcatattcaac

SEQ ID NO: 107782 - DNA, 75 bp, synthetic construct
  source 1..75: mol_type = other DNA
gcggggtggcagcaacaaacgccagagtctcggtaatgcaaaacggtcatgaaatttatcagactaccgtggctc

SEQ ID NO: 107783 - DNA, 75 bp, synthetic construct
  source 1..75: mol_type = other DNA
tcaacgagtggatcaagcaacataacctgaaagccgatgccccggtggcgctatacggtaatggcaaagatgtcg

SEQ ID NO: 107784 - DNA, 75 bp, synthetic construct
  source 1..75: mol_type = other DNA
cagaacaatgctgacagactggtcattgacggtggcagggcaaccggaaaaaccatcctgaacctggtgaacgcc

SEQ ID NO: 107785 - DNA, 75 bp, synthetic construct
  source 1..75: mol_type = other DNA
cagtgacacgaagacagaactgaacgccagtatcgacaaggcaaagaacgacgcgattagttcatccaacagtta

SEQ ID NO: 107786 - DNA, 75 bp, synthetic construct
  source 1..75: mol_type = other DNA
acaaaaagataacttctacggcgtacagtttcacccggagcgttctggtgccgctggcgctaagttgctgaaaaa

SEQ ID NO: 107787 - DNA, 75 bp, synthetic construct
  source 1..75: mol_type = other DNA
ctgacttccgttgctaaactaccgtttgcttacgctaaagatggtatctcctacaccttctctatcgttccgaac

SEQ ID NO: 107788 - DNA, 75 bp, synthetic construct
  source 1..75: mol_type = other DNA
cttattaaaaatgcctgtttaaaattatataatttggcacataccgcaaccaactcccaccttaaaccaactggt

SEQ ID NO: 107789 - DNA, 75 bp, synthetic construct
  source 1..75: mol_type = other DNA
aaagcaaccacccactggcgctacactgaacaactccagcaccgttacccttcaatcagcgtaagtgacaatgtg

SEQ ID NO: 107790 - DNA, 75 bp, synthetic construct
  source 1..75: mol_type = other DNA
ctgaccgggtgagtgaggaaagccgccgctggctggcatcgtgcggcctgaccgtggagcagatgcaaaaccaga

SEQ ID NO: 107791 - DNA, 75 bp, synthetic construct
  source 1..75: mol_type = other DNA
cggtgccgctgtcagtggtacccggagcgacggaaaggcattccgtatcggaggcggtcaggcggatgccctgat

SEQ ID NO: 107792 - DNA, 75 bp, synthetic construct
  source 1..75: mol_type = other DNA
gccgcaaaatgctgctggccacactgtggaacaccggtgcgcgcattaatgaagcactggcgctgacgcgggggg

SEQ ID NO: 107793 - DNA, 75 bp, synthetic construct
  source 1..75: mol_type = other DNA
attcgacccagtaaataacacaacatcggtgtacctgaaccctaaatttctttcagtaaatatcacaacctggtg

SEQ ID NO: 107794 - DNA, 75 bp, synthetic construct
  source 1..75: mol_type = other DNA
tggtggtcttcagagagtgaatcccggcggaagtgtctcagacacggttatcagtgccggaggcggacagagcct

SEQ ID NO: 107795 - DNA, 75 bp, synthetic construct
  source 1..75: mol_type = other DNA
atgacaacgttacaacgtccgctggtcattgcactggcatatgacgggctatgtacttttgaatttggcgttgcc

SEQ ID NO: 107796 - DNA, 75 bp, synthetic construct
  source 1..75: mol_type = other DNA
tggatgtggctgcacggcaccgggtgcagttttcgatgccggaatctgatgcggttgtgatgctgaaacaattat

SEQ ID NO: 107797 - DNA, 75 bp, synthetic construct
  source 1..75: mol_type = other DNA
cgggaaatggcgtacggtcgtcgatttcaaaactaacagtgttccccagggggtccgcgatcgggcattcgaaga

SEQ ID NO: 107798 - DNA, 75 bp, synthetic construct
  source 1..75: mol_type = other DNA
acagagcgttacggtcagttaggtggtgcccggatgcagcagcttaaccgtgagctgttacgggtaggccgcacg

SEQ ID NO: 107799 - DNA, 75 bp, synthetic construct
  source 1..75: mol_type = other DNA
gccggacattgctcgtgcggcaacagcgacacgtacagccggacaggactgggctaaggttgcagcggtctggca

SEQ ID NO: 107800 - DNA, 75 bp, synthetic construct
  source 1..75: mol_type = other DNA
aaatgcttaaaaaaagtaatcaaataatatcaaaggaaatgaaaagaagaggggtggaaatttatgatattaatg

SEQ ID NO: 107801 - DNA, 75 bp, synthetic construct
  source 1..75: mol_type = other DNA
atggtgatgttaataatcctgatactcctcgtccattgttatctcttgaggattttttttattgacaataatatc

SEQ ID NO: 107802 - DNA, 75 bp, synthetic construct
  source 1..75: mol_type = other DNA
cactggatgtggctgcacggcaccgggtgcagtttgcgatgcctgaagtggatgcggtagccatgctgaaaggga

SEQ ID NO: 107803 - DNA, 75 bp, synthetic construct
  source 1..75: mol_type = other DNA
atcagttaaaaacccgcaaagaattttacgcttatcttgatagtaagaggaaagaaggaaactcgagatttagtt

SEQ ID NO: 107804 - DNA, 75 bp, synthetic construct
  source 1..75: mol_type = other DNA
ctatctatcaccattttctgaaaatacgtgagcgtaacaatgttagtgatgttttggtagaaattacgatgttcg

SEQ ID NO: 107805 - DNA, 75 bp, synthetic construct
  source 1..75: mol_type = other DNA
atggggcataagtccatcagctcaacggaggtctacacgaaggtgtttgcgctggatgtggctgcacggcaccgg

SEQ ID NO: 107806 - DNA, 75 bp, synthetic construct
  source 1..75: mol_type = other DNA
cgcggcagcaaaacgcggctacatcctgacacttgcagaagaagaacacgcgctggaagcaaaggatgctttgat

SEQ ID NO: 107807 - DNA, 75 bp, synthetic construct
  source 1..75: mol_type = other DNA
tccagatgaccaagtcttctcgagcgagtcagaggataatgtttgttattttcgcaaggcgtttcggcaaaatag

SEQ ID NO: 107808 - DNA, 75 bp, synthetic construct
  source 1..75: mol_type = other DNA
gggataacattatcgctggggtgcatcggaagatggcggcgtatttaaatattacagccagcacggataagcagg

SEQ ID NO: 107809 - DNA, 75 bp, synthetic construct
  source 1..75: mol_type = other DNA
ctacatcaggaattcagaagctaaaaatgtagtgctggaaaacgctggctcattaacagtcgtcactggttcccg

SEQ ID NO: 107810 - DNA, 75 bp, synthetic construct
  source 1..75: mol_type = other DNA
atgtcaggctccgttatacacagccagtctgcagccagagtaccggcagtttattctgccggacagtctccacaa

SEQ ID NO: 107811 - DNA, 75 bp, synthetic construct
  source 1..75: mol_type = other DNA
ttttgccgaagccgtttctcagctggcggcactggccgctgcaggtaaggatgttgcggcgctgaacggggtgga

SEQ ID NO: 107812 - DNA, 75 bp, synthetic construct
  source 1..75: mol_type = other DNA
accggaggagacctggtacgggtgggacggtgacaggctgaccactgtacagacccaacagacaagaatccagac

SEQ ID NO: 107813 - DNA, 75 bp, synthetic construct
  source 1..75: mol_type = other DNA
attgaaagtggtacggataccgccagtgggttagcgattgcgattctggatgatgcgaagatattgattccgctt

SEQ ID NO: 107814 - DNA, 75 bp, synthetic construct
  source 1..75: mol_type = other DNA
tttgcccgggatacccaaaagcaatttgcagatttggggattgaccttcaggcgtctcttgaaagttataaatct

SEQ ID NO: 107815 - DNA, 75 bp, synthetic construct
  source 1..75: mol_type = other DNA
aacgtccctgaaaggagcggcagaagacttcggggctgtacaaaatattatggcttatgccggtgatcagggttc

SEQ ID NO: 107816 - DNA, 75 bp, synthetic construct
  source 1..75: mol_type = other DNA
caagcaaaggatagcctctggcatcgccagacacctaaccgccttgatgatatggttaaacaattagtaaacaag

SEQ ID NO: 107817 - DNA, 75 bp, synthetic construct
  source 1..75: mol_type = other DNA
agatgccataacccagatcgtcgccagtctggaagttggtaaaggcagcggctcagcggaagaggccgtcaccaa

SEQ ID NO: 107818 - DNA, 75 bp, synthetic construct
  source 1..75: mol_type = other DNA
tatccacgaataaagtaaggcccgtagtcgcagcaaagattgatattccaaaattcgaaaaacatcatcgtgata

SEQ ID NO: 107819 - DNA, 75 bp, synthetic construct
  source 1..75: mol_type = other DNA
aggttatcaggactgccggacttgttaagagcagaacgggcgaaaatgtgcggctgattgtgatcgacacgctgg

SEQ ID NO: 107820 - DNA, 75 bp, synthetic construct
  source 1..75: mol_type = other DNA
gtaccaattatgacgcgtattattctcccggttcaccgttgctcgatacccgtaaactctatagccaaagttggg

SEQ ID NO: 107821 - DNA, 75 bp, synthetic construct
  source 1..75: mol_type = other DNA
ccaaaggtgtgtcattgcctgatgatcgcgagtcagtcttctggctgaatattaaaaatattccgccctctgcga

SEQ ID NO: 107822 - DNA, 75 bp, synthetic construct
  source 1..75: mol_type = other DNA
atgtccagaaaaagttgtttaatgaggctctttaaaacaaccatgtggtacaaattatttatcgctgttatattt

SEQ ID NO: 107823 - DNA, 75 bp, synthetic construct
  source 1..75: mol_type = other DNA
acggcgggatgaaaccacgtcatgcagatctgttagcggcggatatcgaccgtgaaacactgctcaaatatctcg

SEQ ID NO: 107824 - DNA, 75 bp, synthetic construct
  source 1..75: mol_type = other DNA
tattgacgggctgataaatggcatcagaaacaaatgggagtcactgaaaaccagcataaccggaatgggtgacag

SEQ ID NO: 107825 - DNA, 75 bp, synthetic construct
  source 1..75: mol_type = other DNA
tgatagtctggttgtttttgccatcaatacaaagaaatattcctgtcgttacccaacccgtagaaattttaccct

SEQ ID NO: 107826 - DNA, 75 bp, synthetic construct
  source 1..75: mol_type = other DNA
gggatctattgcgagttataaggctgcggggatctctccgattgaagggatgttgagtgttatagagcgttacct

SEQ ID NO: 107827 - DNA, 75 bp, synthetic construct
  source 1..75: mol_type = other DNA
acattgataaacgaagcgaatctgctgattgattttgtcctggctgatacaggcaaagggaaaataacaaaggcg

SEQ ID NO: 107828 - DNA, 75 bp, synthetic construct
  source 1..75: mol_type = other DNA
tattaatgctcattgctatcgtgagtggaatgtgtttttacgccagcgtactcatggcgacgactccggcagttg

SEQ ID NO: 107829 - DNA, 75 bp, synthetic construct
  source 1..75: mol_type = other DNA
gaatgaggagattacgcgtgataataaacgaggatccttatctgaggcatggcagttctttcataattcatttga

SEQ ID NO: 107830 - DNA, 75 bp, synthetic construct
  source 1..75: mol_type = other DNA
agcgaacggcaaagtttgatgccgaagagggagaactgccggaggctgaacgacagattgcttttctgcggatgg

SEQ ID NO: 107831 - DNA, 75 bp, synthetic construct
  source 1..75: mol_type = other DNA
tagtaatagatgacttagaaaggcgtggcaaaaatttagatgttaaagatgttttagggctagtatctctattaa

SEQ ID NO: 107832 - DNA, 75 bp, synthetic construct
  source 1..75: mol_type = other DNA
agctcactacccaacagctgattaacggtgttgccggtaccgattttatgctgaaaggtgaaaccgacgagctgg

SEQ ID NO: 107833 - DNA, 75 bp, synthetic construct
  source 1..75: mol_type = other DNA
cgccagattgcttttatggaaatggggatggacatcaacgcctggctggtttcccgttcgctgtggaatgccgac

SEQ ID NO: 107834 - DNA, 75 bp, synthetic construct
  source 1..75: mol_type = other DNA
agttcaccgacttcggtggtcatcttatcgacgggctgataaatggcatcagaaacaaatgggagtcgctcaaaa

SEQ ID NO: 107835 - DNA, 75 bp, synthetic construct
  source 1..75: mol_type = other DNA
ctgctccactacgtgcccgaccttcaccgaaaaatgctgctggccactttatggaacaccggcgcgcgtattaat

SEQ ID NO: 107836 - DNA, 75 bp, synthetic construct
  source 1..75: mol_type = other DNA
tgccaccgccacttcagtcccggccctggctgctgacagtgttgtacaggcaggggaaatcgtgaacggcgggac

SEQ ID NO: 107837 - DNA, 75 bp, synthetic construct
  source 1..75: mol_type = other DNA
accgttggacaactctggaaacaggaacgatttatttacaatccgtcagttgcggattttcagcgctggtctgaa

SEQ ID NO: 107838 - DNA, 75 bp, synthetic construct
  source 1..75: mol_type = other DNA
ggcaaaacactgggtggcgactcacccgcaatttgtcagtggggcttttaagctcatcagtgcgctccttgcgat

SEQ ID NO: 107839 - DNA, 75 bp, synthetic construct
  source 1..75: mol_type = other DNA
atgaaacgacatctgaacaccagctacaagctggtatggaatcacattacgggcaccctggtggtgacttccgaa

SEQ ID NO: 107840 - DNA, 75 bp, synthetic construct
  source 1..75: mol_type = other DNA
cagtgatgcactaaaaaccaaccgtatggcgttgtatggtcagggtgttgaagcgtatgccatggcgcagaccgt

SEQ ID NO: 107841 - DNA, 75 bp, synthetic construct
  source 1..75: mol_type = other DNA
aagtgctggtcaccgcgcaacatctcgacgatcaatgtgaaacctttctgctggcgctaaaacgcggtagcggcc

SEQ ID NO: 107842 - DNA, 75 bp, synthetic construct
  source 1..75: mol_type = other DNA
cgaggagaaagaaaaggatcatatccattcaatagcccttgccctaatggtactgagaaagtatcagcttatcat

SEQ ID NO: 107843 - DNA, 75 bp, synthetic construct
  source 1..75: mol_type = other DNA
ccactgcgatgagcgtaattgaaaacctgccgccgggaaacgccgggctgcgtcaggccatcgctcgtcgctatg

SEQ ID NO: 107844 - DNA, 75 bp, synthetic construct
  source 1..75: mol_type = other DNA
gaaagtcagggatatattatcgcgcgaccgcagtcgggttattacgttgcgccacaggcaataaaaatgccgaaa

SEQ ID NO: 107845 - DNA, 75 bp, synthetic construct
  source 1..75: mol_type = other DNA
cgcaactggggggcagtcagtggctggtttaaacagcgctgggcagacattcaggaagcctttaacggcggcatt

SEQ ID NO: 107846 - DNA, 75 bp, synthetic construct
  source 1..75: mol_type = other DNA
aggtgaatatgaaacttcaatgttagccaaaaacataaagatttatacaacggctaaaggtgatgggttacttct

SEQ ID NO: 107847 - DNA, 75 bp, synthetic construct
  source 1..75: mol_type = other DNA
tcagatgccaatgctattaggcagattcccaaatttaataaaacatatttatacgatctgttcaggtattaccga

SEQ ID NO: 107848 - DNA, 75 bp, synthetic construct
  source 1..75: mol_type = other DNA
gcaaaagtattagagataccggagcagggttttggtttcaaagaaataaggaatgaataccttagaaccggacaa

SEQ ID NO: 107849 - DNA, 75 bp, synthetic construct
  source 1..75: mol_type = other DNA
tgttctggtacacactcattgggtgaagctgaaagccgcacttggtgttggtggcaggttgcgctggctggctac

SEQ ID NO: 107850 - DNA, 75 bp, synthetic construct
  source 1..75: mol_type = other DNA
actggtcgccgctggggctgttctacaaggcgtttgcgggggtcatgaagtggtttaacatcgaccttcccggcc

SEQ ID NO: 107851 - DNA, 75 bp, synthetic construct
  source 1..75: mol_type = other DNA
tcacccactggcactatgacgaagcagaccgcctcacgcaccgcaccgtgaatggcgaaaccgcagagcagtggc

SEQ ID NO: 107852 - DNA, 75 bp, synthetic construct
  source 1..75: mol_type = other DNA
tccagtgtaaccggaatgggtgacagcatcagtagctggtttaaacagtgctgggctgacattcaggaagccttt

SEQ ID NO: 107853 - DNA, 75 bp, synthetic construct
  source 1..75: mol_type = other DNA
ggcgatattcgccctccgcgtgcagacgaagcggtcagcgtgcgtttcaaagcgccaggattgctgcatattgtc

SEQ ID NO: 107854 - DNA, 75 bp, synthetic construct
  source 1..75: mol_type = other DNA
gctggaacaaccgcgtgtatggcctggttgcgccgggttacaaaatggcgcaggtggctgttgaccatattcttg

SEQ ID NO: 107855 - DNA, 75 bp, synthetic construct
  source 1..75: mol_type = other DNA
atgtacgcactgaaaaagattacggtaactgaagatggtcgtcaggttgaggaagtgcatgtcctgggggatatg

SEQ ID NO: 107856 - DNA, 75 bp, synthetic construct
  source 1..75: mol_type = other DNA
tatttgtgacgcaagaaggtgtggctgtaggtgagaatggcgtcagttttgtctggcagaaaacgcttagtcaag

SEQ ID NO: 107857 - DNA, 75 bp, synthetic construct
  source 1..75: mol_type = other DNA
gacaaaacactgggtagcgactcacccgcaatttgtcagtggggcttttaagctcatcagtgcgctccttgcgat

SEQ ID NO: 107858 - DNA, 75 bp, synthetic construct
  source 1..75: mol_type = other DNA
gatacagatatttcgagtactatctgccaatcgaagataaagatcttgactttaggccggaaagaaaggagttgg

SEQ ID NO: 107859 - DNA, 75 bp, synthetic construct
  source 1..75: mol_type = other DNA
agttggtgaagggaaaaagtctgtttggcatagattccaaagtagtgcggcagatggttctggtgcttttcattg

SEQ ID NO: 107860 - DNA, 75 bp, synthetic construct
  source 1..75: mol_type = other DNA
ttctggtgaatttaaggtcagtacccgaggaaaagtgatcgctgccagcgcggtttactcctggaataagaggct

SEQ ID NO: 107861 - DNA, 75 bp, synthetic construct
  source 1..75: mol_type = other DNA
ttgcctggtctgcaacgggatgctcaagagcaaaagcgtggtctatgggctgacagtcaaccagcgccgccgtgg

SEQ ID NO: 107862 - DNA, 75 bp, synthetic construct
  source 1..75: mol_type = other DNA
caacaacttcagaaacaaacgttcacatcaaattaacaactctgacatcactaacagtgagattgactccttaac

SEQ ID NO: 107863 - DNA, 75 bp, synthetic construct
  source 1..75: mol_type = other DNA
acattcatttggcagctcgtcttgcagatgatgcttttgaaagtgcttattttaaagaaatcaataagtttataa

SEQ ID NO: 107864 - DNA, 75 bp, synthetic construct
  source 1..75: mol_type = other DNA
tggtacgtcagccagctgcagacgatggtggccacactgaaaatccccatggaacggcgtaataaacgaacaggc

SEQ ID NO: 107865 - DNA, 75 bp, synthetic construct
  source 1..75: mol_type = other DNA
gcctggcaaacatgcggatgaaataaaaaatgtgaaagcatcgttgaaaaacacacttattgatgttaaaaaaaa

SEQ ID NO: 107866 - DNA, 75 bp, synthetic construct
  source 1..75: mol_type = other DNA
cagcaattccttttaaggacgcagagaaaaatatatcaatcggctcatttatatcctcagcaagaattgaaatca

SEQ ID NO: 107867 - DNA, 75 bp, synthetic construct
  source 1..75: mol_type = other DNA
gtttgtgcagctggccactctgaagcagcggaccgaaaaagccgccaggacggcaggaagaatgcccgccggtca

SEQ ID NO: 107868 - DNA, 75 bp, synthetic construct
  source 1..75: mol_type = other DNA
taacggcggtatcgtggggattggtaagctgctgattaactggtcgccggttggtctgctctataaagcctttgc

SEQ ID NO: 107869 - DNA, 75 bp, synthetic construct
  source 1..75: mol_type = other DNA
aattgagagtggcaatcaggacgtttataaagggggtatcagcaatggaacgacaattaagggcggtacttcacg

SEQ ID NO: 107870 - DNA, 75 bp, synthetic construct
  source 1..75: mol_type = other DNA
tcaccctgggcgttcaggcgggttatgtccacagcgtcagcggcagcagcgctgaagggtataacggtcaggcca

SEQ ID NO: 107871 - DNA, 75 bp, synthetic construct
  source 1..75: mol_type = other DNA
cagcagactcaccggctggttccgctctctgatgcctggtacgtcagccagctgcagacgatggtggccacactg

SEQ ID NO: 107872 - DNA, 75 bp, synthetic construct
  source 1..75: mol_type = other DNA
ctttttatgcgcaattacgacctgtcaatagtgatgtgcagtcgggtaaagtgaatgccagcgcgacatttgtac

SEQ ID NO: 107873 - DNA, 75 bp, synthetic construct
  source 1..75: mol_type = other DNA
acggagtgcagagcgaaattctgtccattgaaagtggtacggatgcagccagcggctggcaattgcgattctgga

SEQ ID NO: 107874 - DNA, 75 bp, synthetic construct
  source 1..75: mol_type = other DNA
cagcttccgctcagccgtcagcggtacccgacgcgcccttgattccctgggcgatacatcgcgccgcctgcagga

SEQ ID NO: 107875 - DNA, 75 bp, synthetic construct
  source 1..75: mol_type = other DNA
ctctgatggtaaacacccgtgatttgtctatctctctcggcaatcagttgtccccctcttttgtgtcagcaaccc

SEQ ID NO: 107876 - DNA, 75 bp, synthetic construct
  source 1..75: mol_type = other DNA
cggcagggcagcgtgagtgaagaaagccagcagtggcttgcgcagtgcgggctgacggcggaacagatggccgcg

SEQ ID NO: 107877 - DNA, 75 bp, synthetic construct
  source 1..75: mol_type = other DNA
gtgggccacggtgaagtgtggtcggcgcgcctgatgtctgcggtgcttaatcaacaagggctgccagcggcctgg

SEQ ID NO: 107878 - DNA, 75 bp, synthetic construct
  source 1..75: mol_type = other DNA
acatgatccttattttaaatttataggtactgctgttattaatcggcttggggtttatgcagcagaaaaactcat

SEQ ID NO: 107879 - DNA, 75 bp, synthetic construct
  source 1..75: mol_type = other DNA
agcttctatattgaagacgaaaaaagattgaacgatttacaccatataattacgactggtaaaacagggaatatt

SEQ ID NO: 107880 - DNA, 75 bp, synthetic construct
  source 1..75: mol_type = other DNA
agcgcggcaggcgcgttatcaggcatttgcccgtaccctattgcccggcgaagtgctggtcaccgcgcaacatct

SEQ ID NO: 107881 - DNA, 75 bp, synthetic construct
  source 1..75: mol_type = other DNA
tgggaataataaattattacagtccagggagcttgagagaatacggttaactgattttaatacagcaagtgttgt

SEQ ID NO: 107882 - DNA, 75 bp, synthetic construct
  source 1..75: mol_type = other DNA
gggggcaattgcttatagaaagaacaaaagtatatatattaaaaatacacctgttctttttgacagcgaaaaccc

SEQ ID NO: 107883 - DNA, 75 bp, synthetic construct
  source 1..75: mol_type = other DNA
atgacactcacgctcaatagacaacttctctcctcacgccagattctggtggcctttagcggcggccttgattct

SEQ ID NO: 107884 - DNA, 75 bp, synthetic construct
  source 1..75: mol_type = other DNA
ctggcacgacggcgctaaaaaagccttcaccctggcccgtcaggcgggtgtgatgaccgttctggacggggacat

SEQ ID NO: 107885 - DNA, 75 bp, synthetic construct
  source 1..75: mol_type = other DNA
cgggtaagcgctgggcgtacctcgccgttgttctcgacctgttcgcaagaaaaccagtgggctgggccatgtcgt

SEQ ID NO: 107886 - DNA, 75 bp, synthetic construct
  source 1..75: mol_type = other DNA
gttagatggtcatagcctcaccccaacccaatttgacaggtacttatcttctgctggtggacatgagcgcagccg

SEQ ID NO: 107887 - DNA, 75 bp, synthetic construct
  source 1..75: mol_type = other DNA
tgacgctggcgacggcccgcgatcctgaggcggccagtatgcgttaccgaaaacggatcattattgttgaaagta

SEQ ID NO: 107888 - DNA, 75 bp, synthetic construct
  source 1..75: mol_type = other DNA
cgctgtcaggtaagcagccactggatgagacgctgactcatttgagtgggaaggatgttgccggtcttctcgcat

SEQ ID NO: 107889 - DNA, 75 bp, synthetic construct
  source 1..75: mol_type = other DNA
acaatctgttagacgccgccagcaaaacagggctgtttgctaaaagcggtgtggcagcggaagccgttaacgttc

SEQ ID NO: 107890 - DNA, 75 bp, synthetic construct
  source 1..75: mol_type = other DNA
ccacctttacgctgaaactcaggatgaaggtccgtgataaagaatgggttccacgggtggagtgggtggagagtt

SEQ ID NO: 107891 - DNA, 75 bp, synthetic construct
  source 1..75: mol_type = other DNA
tgacggatattggcgcggcgaaacttgcctgcgccgccgcgctcggtgtgccgctaaaaattacccatatggcgg

SEQ ID NO: 107892 - DNA, 75 bp, synthetic construct
  source 1..75: mol_type = other DNA
tgtgccagcttggtaaaaatgattaaacactgtcaggacgaaaccgatgctcaaacccgacagcctgcgcagggc

SEQ ID NO: 107893 - DNA, 75 bp, synthetic construct
  source 1..75: mol_type = other DNA
ggggcgcaataagtgctgtgatcttgtcgattgctcggcagaatggccgaacaacgttatcaacggcggcaatgc

SEQ ID NO: 107894 - DNA, 75 bp, synthetic construct
  source 1..75: mol_type = other DNA
gccagaacgcgctttgcaaggcaaagtggtgctaccgctggcgacatgcggtacggtggctcatctgctggcggt

SEQ ID NO: 107895 - DNA, 75 bp, synthetic construct
  source 1..75: mol_type = other DNA
agccaccgtgtgtgccaaaacagaagctcggtttgaagttgccgccgatctgaatacgcaacggggtgatttatg

SEQ ID NO: 107896 - DNA, 75 bp, synthetic construct
  source 1..75: mol_type = other DNA
gtgcgccacgctacttaagccactgaaaaaaggtgaacatcacggacagaaaggcttttttgcctggtttaaccg

SEQ ID NO: 107897 - DNA, 75 bp, synthetic construct
  source 1..75: mol_type = other DNA
atgaaagctggtcggtgccgttctcggtaatgctggtcgtgccgctgggggttatcggcgcgctgctggcaacct

SEQ ID NO: 107898 - DNA, 75 bp, synthetic construct
  source 1..75: mol_type = other DNA
gtgtttattataacacttcattgtttaacactatgggcttttctttgggatggaacagggttttaaactcatatt

SEQ ID NO: 107899 - DNA, 75 bp, synthetic construct
  source 1..75: mol_type = other DNA
ttggacagacagggacgaatgttgttttcccgctacctttccccgcgcgggtcgaatcaattacactgacaatgg

SEQ ID NO: 107900 - DNA, 75 bp, synthetic construct
  source 1..75: mol_type = other DNA
gcatgggatgttattcgccaaaccagtcgtcaggatcttaacctgaggctttttttacctactctgcaagcagcg

SEQ ID NO: 107901 - DNA, 75 bp, synthetic construct
  source 1..75: mol_type = other DNA
aaaaagaaagcgtgagtatcgttggtgacgacggtaaagtatatgttgctggattagataaaaatggaatattag

SEQ ID NO: 107902 - DNA, 75 bp, synthetic construct
  source 1..75: mol_type = other DNA
agatttacacaagccacaccaacaacaaatgttagatatcaggtagtaaatgagagcgataacagtatcagtaat

SEQ ID NO: 107903 - DNA, 75 bp, synthetic construct
  source 1..75: mol_type = other DNA
atgtctggaacattatttgcaacatttaaaggtttcatcctcggtgttttcgttaacaacgaattacagtgagca

SEQ ID NO: 107904 - DNA, 75 bp, synthetic construct
  source 1..75: mol_type = other DNA
aactactacgtaaatcacgggtgggatagcgaaaaatcattgctcgaatggtgccggaaactccgtgtagccgct

SEQ ID NO: 107905 - DNA, 75 bp, synthetic construct
  source 1..75: mol_type = other DNA
atgaactacgaggaagggaacaacattcatactgaaattgaatttttttcactcactattttatttttaaaaaac

SEQ ID NO: 107906 - DNA, 75 bp, synthetic construct
  source 1..75: mol_type = other DNA
gcaatatcatcctgaaaatcgaccctgctgtagtgctggcaacccgcaagtatgtggatgacaaggcactggagc

SEQ ID NO: 107907 - DNA, 75 bp, synthetic construct
  source 1..75: mol_type = other DNA
gctataagccgcaactggctgaaggcagcgggcgcactcagaccgtgcgcatggtgctgattaccagcagcacgg

SEQ ID NO: 107908 - DNA, 75 bp, synthetic construct
  source 1..75: mol_type = other DNA
tgtacatggtcacgcactggataccacgctgaatgggggtaccagtatgtgcacaacggcggtacggcgtctggc

SEQ ID NO: 107909 - DNA, 75 bp, synthetic construct
  source 1..75: mol_type = other DNA
gtgtggtgcggtgatgtgacctatatctggacgggtaagcgctgggcgtacctcgccgttgttctcgtgtcaacg

SEQ ID NO: 107910 - DNA, 75 bp, synthetic construct
  source 1..75: mol_type = other DNA
actaagtggcaggaagcttaccccaaaggagtttgacgacatattaaggaaagccggaaatcacgaacgtagtcg

SEQ ID NO: 107911 - DNA, 75 bp, synthetic construct
  source 1..75: mol_type = other DNA
gatcaaaggcggtggtgcggcgctaacgcgtgaaaaaatagttgcttcagtggcgaagaaatttatctgtattgc

SEQ ID NO: 107912 - DNA, 75 bp, synthetic construct
  source 1..75: mol_type = other DNA
atggtttttctccagaagatagtttttgttatagcattagtattcctagagatatttctttttataaagatgctc

SEQ ID NO: 107913 - DNA, 75 bp, synthetic construct
  source 1..75: mol_type = other DNA
gtgcgctgagccgcattcaccacaacgctaaggattctctctggttgaaaatacttagctgttatgtgcctgctt

SEQ ID NO: 107914 - DNA, 75 bp, synthetic construct
  source 1..75: mol_type = other DNA
gaatcgccacaggaaatacttgatcgtgtctcccgctggtcggcattgctttattacgatcagcctgacggtaac

SEQ ID NO: 107915 - DNA, 75 bp, synthetic construct
  source 1..75: mol_type = other DNA
caaataccggcttttatgcccgctgccagatgtacgacggcagaccatcatcaaatgctttttcatggagggttt

SEQ ID NO: 107916 - DNA, 75 bp, synthetic construct
  source 1..75: mol_type = other DNA
ggtactacagagggaatcaggcatcgtttgccagactgacaggagttcaacccgcacaggtcacgcagtggatca

SEQ ID NO: 107917 - DNA, 75 bp, synthetic construct
  source 1..75: mol_type = other DNA
gaaaatatcaccctgggcgttcaggccggttatgcccacagcgtcagcggcagcagcgctgaaggctataacggt

SEQ ID NO: 107918 - DNA, 75 bp, synthetic construct
  source 1..75: mol_type = other DNA
caggctggcgtgacagccggaaaatcaaaactcgacctgacaaacactgactggatttacggggtggatttatga

SEQ ID NO: 107919 - DNA, 75 bp, synthetic construct
  source 1..75: mol_type = other DNA
atatcaccctgggcgttcaggccggttatgcccacagcgtcagcggcagcagtgctgaaggttataacggtcagg

SEQ ID NO: 107920 - DNA, 75 bp, synthetic construct
  source 1..75: mol_type = other DNA
cgggatcgacaacagcaggttatttccggcctgccgtggtttttatgttccggtggcatggtgaggaaattccgc

SEQ ID NO: 107921 - DNA, 75 bp, synthetic construct
  source 1..75: mol_type = other DNA
ctttgcaagcgagtaccaaatgagcaatccagatagtgagcagagctgttcttacatcgtggcttttagccaaaa

SEQ ID NO: 107922 - DNA, 75 bp, synthetic construct
  source 1..75: mol_type = other DNA
ttagggctgcctacatccataaagcggagcatctgggggagcgcaggttgatgctgcagtggtgggctgattatc

SEQ ID NO: 107923 - DNA, 75 bp, synthetic construct
  source 1..75: mol_type = other DNA
cagaaacagctggtgaaggaggggatgccctgccaggtaaaactaggcagcgatctggttataacaggctatgta

SEQ ID NO: 107924 - DNA, 75 bp, synthetic construct
  source 1..75: mol_type = other DNA
cattttaattgatggaggaacaactaattacgaattagtaaagctgatccctaaagatttaaagtgtacggttgt

SEQ ID NO: 107925 - DNA, 75 bp, synthetic construct
  source 1..75: mol_type = other DNA
ctatgtgaatggtttgttggtcactaaaatgaccattccaccgtttatcgctaccttgggcctgatgatgtccgt

SEQ ID NO: 107926 - DNA, 75 bp, synthetic construct
  source 1..75: mol_type = other DNA
ccgcattcacagtatgcacccaaagaaagtccgacgtttaccgggatacccaaagcgccaacgccagcagcaggg

SEQ ID NO: 107927 - DNA, 75 bp, synthetic construct
  source 1..75: mol_type = other DNA
gatactggtgccgtcgatttacgtgtcactaacgccgtgtttagcaataacatcgctaatgacggtaaaggtggt

SEQ ID NO: 107928 - DNA, 75 bp, synthetic construct
  source 1..75: mol_type = other DNA
ttaagtaccagtcgtgtaatggccatcgcctttatatttatgtcagtgcttattgttctcagcctctctgttaac

SEQ ID NO: 107929 - DNA, 75 bp, synthetic construct
  source 1..75: mol_type = other DNA
atggcccttctggtcatgaacctgccgccttaaacctctctgccagctggctcgacaaaatgagcaccgaacagc

SEQ ID NO: 107930 - DNA, 75 bp, synthetic construct
  source 1..75: mol_type = other DNA
agaactcaaaaattccggtgcaaaacagacaggcgaaacactgaagatcaacattcttgatcacgacattccgga

SEQ ID NO: 107931 - DNA, 75 bp, synthetic construct
  source 1..75: mol_type = other DNA
cggtgaaacagcccattgttgatgaaggcagtaacgccgcttttgacatcgtttatagcgatgcgcaaggcgtga

SEQ ID NO: 107932 - DNA, 75 bp, synthetic construct
  source 1..75: mol_type = other DNA
ttacggtggcgcaatttatagcagtagtacgaactctccctatcttattgatatttcggttgatgccagctacag

SEQ ID NO: 107933 - DNA, 75 bp, synthetic construct
  source 1..75: mol_type = other DNA
ggaatctctgcaaaaagccctgcgcggcctcgaagtgggcgcgactggcttcgacccgaaagtgagcctcgacga

SEQ ID NO: 107934 - DNA, 75 bp, synthetic construct
  source 1..75: mol_type = other DNA
gcatgcataacatgcccggtctgccagtgggtaagttttatttccagcccggagcgctgatggcgtcaatggatc

SEQ ID NO: 107935 - DNA, 75 bp, synthetic construct
  source 1..75: mol_type = other DNA
aatagcgcagcaggctatggagatggtccttccactgcggcgggtggctttatgtatctcggcttaagtgaagtt

SEQ ID NO: 107936 - DNA, 75 bp, synthetic construct
  source 1..75: mol_type = other DNA
cctggcagcacattttgctgaacgggcattatacatttcagaacactaatgaaattattgacctggatgctctgg

SEQ ID NO: 107937 - DNA, 75 bp, synthetic construct
  source 1..75: mol_type = other DNA
aggcgaagagggggaaactgccaggctgaatgccggacgttatgaattctggctctaccgacaaatcagaaaacg

SEQ ID NO: 107938 - DNA, 75 bp, synthetic construct
  source 1..75: mol_type = other DNA
gaaattcgcaacagttactccgaataaagatgaaaaaatcgagaatacaactgcatggaaaaaggattattgcca

SEQ ID NO: 107939 - DNA, 75 bp, synthetic construct
  source 1..75: mol_type = other DNA
aacgccagactcaaagcagactgcactggtaaatgagaaacgccgcgctgcgctgaatatgctctatatcgaccc

SEQ ID NO: 107940 - DNA, 75 bp, synthetic construct
  source 1..75: mol_type = other DNA
caatactagttttaaatataagtgggagcttaatatatatggttcaggtgaactagaagataaacttaagaaaga

SEQ ID NO: 107941 - DNA, 75 bp, synthetic construct
  source 1..75: mol_type = other DNA
acagtgtgagtgaattaccggtgaactggtgggtacagccttctgttatccgcaccttcagctcccggggagata

SEQ ID NO: 107942 - DNA, 75 bp, synthetic construct
  source 1..75: mol_type = other DNA
gaaattagtggaagaaaccacgggtgtatgggggcagtgggcaaaagattttaataatagtctgaaaacgtcacc

SEQ ID NO: 107943 - DNA, 75 bp, synthetic construct
  source 1..75: mol_type = other DNA
tgacgatagggagtattgataagtaccagaatcaggcagagctaaatgttggctccacccaacaaacctttgtgc

SEQ ID NO: 107944 - DNA, 75 bp, synthetic construct
  source 1..75: mol_type = other DNA
aatcctcaggcaggatgcgcgtgactttggctggcgccagatggttcacgaacgggaaaagcgggctatcctgga

SEQ ID NO: 107945 - DNA, 75 bp, synthetic construct
  source 1..75: mol_type = other DNA
ggcgctcctaagctttaccttatcagccatattcctggcgctgactacatcgataccaacgaagtggaaagcgaa

SEQ ID NO: 107946 - DNA, 75 bp, synthetic construct
  source 1..75: mol_type = other DNA
tgctgtagtactagcaactcgcaagtatgtggatgataaagcactggagctgaaggtgtatgtggatgaccaaat

SEQ ID NO: 107947 - DNA, 75 bp, synthetic construct
  source 1..75: mol_type = other DNA
acccagcctatattgcgctgttagaaaagcgacaaacgctattaaatacaaaaaacactattaacaaatccatca

SEQ ID NO: 107948 - DNA, 75 bp, synthetic construct
  source 1..75: mol_type = other DNA
ggcaatggcatgcagtgcgctgatggaatcgggtttatgggcaaaggacgcagtagaacgccagatgagtcatca

SEQ ID NO: 107949 - DNA, 75 bp, synthetic construct
  source 1..75: mol_type = other DNA
ccattccgcctgacggggtgagcgaaattgatcgccgggaagtgaagtccggttttcagaagtccgtgaaggata

SEQ ID NO: 107950 - DNA, 75 bp, synthetic construct
  source 1..75: mol_type = other DNA
gaaagcgttaacgccggtattcgcatgctgtcattgtcggcgctggcgttacaggctcgcctccaggctaacccg

SEQ ID NO: 107951 - DNA, 75 bp, synthetic construct
  source 1..75: mol_type = other DNA
cagcaaaatgtgttacgtaaaacagaagaagcacaaaagagcttagattttctgaaaacacatttaccgcaggta

SEQ ID NO: 107952 - DNA, 75 bp, synthetic construct
  source 1..75: mol_type = other DNA
gtattaccaaatgatgttaccaaccctgctttttatgctggtttacgtcaccgtgctgataatcatcagtttgat

SEQ ID NO: 107953 - DNA, 75 bp, synthetic construct
  source 1..75: mol_type = other DNA
gccagaacgcgctttgcaaggcaaagtggtactgccactggcgacgggcggcacggtggctcatctgctggcggt

SEQ ID NO: 107954 - DNA, 75 bp, synthetic construct
  source 1..75: mol_type = other DNA
aagcgacgctttatgcctgccgccagcgtttacgcccgatattgatgacctcgctggcgtttatcttcggcgtac

SEQ ID NO: 107955 - DNA, 75 bp, synthetic construct
  source 1..75: mol_type = other DNA
tgtgctacagctgagatttgacgagtcactgtcgtacccgcgcatttctgcgcagaccggtgtcagcaaaaccgc

SEQ ID NO: 107956 - DNA, 75 bp, synthetic construct
  source 1..75: mol_type = other DNA
tttctggcaggcattgcaccgtcgggatgttcaggttcctgaccttctgtctctgcgaggtaatgcccatgcgta

SEQ ID NO: 107957 - DNA, 75 bp, synthetic construct
  source 1..75: mol_type = other DNA
accagcgtctggagcagatgataagccaaatcgacaagctggaagatgtggtgaaagtgcagcgtaatcagtccg

SEQ ID NO: 107958 - DNA, 75 bp, synthetic construct
  source 1..75: mol_type = other DNA
tgtacatggtcacgcactggataccacgctgaatggggggtaccagtatgtgcacaacaggcggtacggcgtctg

SEQ ID NO: 107959 - DNA, 75 bp, synthetic construct
  source 1..75: mol_type = other DNA
gtttatctgtttatgccacaatcccctactccagtgagcaggcgactattgagcaaaaacagaaaaaacaccaaa

SEQ ID NO: 107960 - DNA, 75 bp, synthetic construct
  source 1..75: mol_type = other DNA
aaacccgtggtaagctcggcggggtgatgttccacagcgagcagggcagtcattatacgagcaggcggttccggc

SEQ ID NO: 107961 - DNA, 75 bp, synthetic construct
  source 1..75: mol_type = other DNA
cgctattgcacccctgcaggatgcggtggatctgggcgaagcgacggaagatgagcaaaaacggctgctgagctg

SEQ ID NO: 107962 - DNA, 75 bp, synthetic construct
  source 1..75: mol_type = other DNA
atcagccactgcgcatcctgcgcatgcctgaactgacgatgatactcgggatatctcgctcgagtatttacgaaa

SEQ ID NO: 107963 - DNA, 75 bp, synthetic construct
  source 1..75: mol_type = other DNA
gattaacgaatacaaatcttttggttatacatttgaagacccattagcaacatgtaatgaaattgcgccactggc

SEQ ID NO: 107964 - DNA, 75 bp, synthetic construct
  source 1..75: mol_type = other DNA
atgcgtgttgagagctgtatcgctaaagacaaaatcagcaaaatgaggtgtactggcaatagcggacactaccat

SEQ ID NO: 107965 - DNA, 75 bp, synthetic construct
  source 1..75: mol_type = other DNA
cgtaatttgaaagtgaaaattcatggtcttcgaatgctagacgtgagagttcttggtatgtatccgttcgccagt

SEQ ID NO: 107966 - DNA, 75 bp, synthetic construct
  source 1..75: mol_type = other DNA
atgcaaaacacaactcatgacaacgtaattctggagctcaccgttcgcaaccatccgggcgtaatgacccacgtt

SEQ ID NO: 107967 - DNA, 69 bp, synthetic construct
  source 1..69: mol_type = other DNA
gcccacagcgtcagcggcagcagcgctgaaggttataacggtcaggccacgctgaatgtgactttctga

SEQ ID NO: 107968 - DNA, 75 bp, synthetic construct
  source 1..75: mol_type = other DNA
gtgtgcgtaattgtcgcgatctgactgattttggcagagaaattcgcgcaacggtgctacaacgtacccatctta

SEQ ID NO: 107969 - DNA, 75 bp, synthetic construct
  source 1..75: mol_type = other DNA
gttgaggcatatttccgctcaccggacggtgccgtattcggtgttcaggcaaaatactttttccagcttgcttcc

SEQ ID NO: 107970 - DNA, 75 bp, synthetic construct
  source 1..75: mol_type = other DNA
tatgagtgattttattcaatccaataatgaaacaactccagaaaaggcatttattaaagaagttatgggaacagg

SEQ ID NO: 107971 - DNA, 75 bp, synthetic construct
  source 1..75: mol_type = other DNA
caaaaaactggacgcgatggggatcaaaaccgttctcgatttggcggatacagatatccggtttatccgtaaaca

SEQ ID NO: 107972 - DNA, 75 bp, synthetic construct
  source 1..75: mol_type = other DNA
tttttaaagttacatagttcagcgttaccatctgatgctattctgatttttaaagattcagatggctatggctac

SEQ ID NO: 107973 - DNA, 75 bp, synthetic construct
  source 1..75: mol_type = other DNA
agacgatttctaatcatgatgtcataaagatttttgagcttcttcatcagggaagacatcccgagtctcagaaag

SEQ ID NO: 107974 - DNA, 75 bp, synthetic construct
  source 1..75: mol_type = other DNA
aatgtatccagcggtcagatggtcgggggaacagctgaatccaccaccatcaacaaaaatgggcggcaggttatc

SEQ ID NO: 107975 - DNA, 75 bp, synthetic construct
  source 1..75: mol_type = other DNA
tgagttcatccgtttaccatataaacctgtagaaaatgttattttagaaaaatacaaagcatctaatatctttaa

SEQ ID NO: 107976 - DNA, 75 bp, synthetic construct
  source 1..75: mol_type = other DNA
cagatatccggtttatccgtaaacattttaatgtcgtgctcgaaagaacggtgcgtgaactgcgcggcgaaccct

SEQ ID NO: 107977 - DNA, 75 bp, synthetic construct
  source 1..75: mol_type = other DNA
atatcgtcaccggcccgactgcacctggtttcctgacaccagacctgctggcggtgctgaacgagaaattcggcc

SEQ ID NO: 107978 - DNA, 75 bp, synthetic construct
  source 1..75: mol_type = other DNA
caatggcagatgaagcgtgccatgctttcaccacgttatacaacgcgaagttctgatttactgcgggtcaaataa

SEQ ID NO: 107979 - DNA, 75 bp, synthetic construct
  source 1..75: mol_type = other DNA
atggcgagcaaagtaagtattcataaagatgttgaataccaggatattgcaaaaatttacggaaaagctctggag

SEQ ID NO: 107980 - DNA, 75 bp, synthetic construct
  source 1..75: mol_type = other DNA
ctggcgcgctcacggggaaaacgcaccggtgtggcggttgcgctgtctcttgctgctgtcacgtcagtcccggta

SEQ ID NO: 107981 - DNA, 75 bp, synthetic construct
  source 1..75: mol_type = other DNA
atgtcaccctgaagcagggaggcgcactggtcaccagtacggcggcaaccgtcaccggcagcaaccgtctgggca

SEQ ID NO: 107982 - DNA, 75 bp, synthetic construct
  source 1..75: mol_type = other DNA
tctcggtaaccatcgattcctggcgggataaagacgggaaactgtgggaaccaaacacattgatccccgttgatc

SEQ ID NO: 107983 - DNA, 75 bp, synthetic construct
  source 1..75: mol_type = other DNA
tcttggaggcatctgtcagagcatgggtagctataaatgaacaaatatcccttggacgtggccctgaatttcaaa

SEQ ID NO: 107984 - DNA, 75 bp, synthetic construct
  source 1..75: mol_type = other DNA
ccgggaataccaccgttaatcagaagggcagactgcaggtggacgccggtggtacagccacgaatgtcaccccct

SEQ ID NO: 107985 - DNA, 75 bp, synthetic construct
  source 1..75: mol_type = other DNA
ccggctcaggtggtgccggggggaatggtaactattcatcaggaaaaggagcgaatggtttagtttaccttgaag

SEQ ID NO: 107986 - DNA, 75 bp, synthetic construct
  source 1..75: mol_type = other DNA
atattaatgagccagacggaccaacgaatctttctgcatgggtaagacttaagaacaaagaattacctccttcac

SEQ ID NO: 107987 - DNA, 75 bp, synthetic construct
  source 1..75: mol_type = other DNA
tatcggcagctcttgcggaagtagttcgtttttttgctgtgttaggttttttcttctatctgctaaaaaacggcc

SEQ ID NO: 107988 - DNA, 75 bp, synthetic construct
  source 1..75: mol_type = other DNA
tgcgccgccactaccagatgtcagagacgcagatttactccgttatccgtaaccagcgtcgcctgcatcaggagc

SEQ ID NO: 107989 - DNA, 75 bp, synthetic construct
  source 1..75: mol_type = other DNA
accttgtagaggcgttcgggcatgataacgaatggcatcctcatagtgcgctggattatcgctcaccacgggaat

SEQ ID NO: 107990 - DNA, 75 bp, synthetic construct
  source 1..75: mol_type = other DNA
atgattttgctgattttcttaacgataatctggcaaaaatcgttggcgtggttagcgttcgccattctgcgtcca

SEQ ID NO: 107991 - DNA, 75 bp, synthetic construct
  source 1..75: mol_type = other DNA
atggatgagatattatatctgaatggaaaaaggatcaggttaagaacatgtaaccatgttttttccgaacgtctt

SEQ ID NO: 107992 - DNA, 75 bp, synthetic construct
  source 1..75: mol_type = other DNA
ggaaaagggtcagactaagaacgtgtaaccatgttttttctgagcgccttgctgttatcagtcacggccgataca

SEQ ID NO: 107993 - DNA, 75 bp, synthetic construct
  source 1..75: mol_type = other DNA
agagagactgcgtgtcacgttcgcgctggactgctgtgatcgtgaggcactgcactgggcggtgactactggcgg

SEQ ID NO: 107994 - DNA, 75 bp, synthetic construct
  source 1..75: mol_type = other DNA
cccggaagcgttaaccaaaatccgtcgcgaactgaaagatgctggcgcagagcgtatctggtacatcgccgatgc

SEQ ID NO: 107995 - DNA, 75 bp, synthetic construct
  source 1..75: mol_type = other DNA
cagtcggtggtggatgacctcagccatgccggacagattcatttcacctccacccgcacagggaagttcgtaccg

SEQ ID NO: 107996 - DNA, 75 bp, synthetic construct
  source 1..75: mol_type = other DNA
tgaagtccccctgtatacatccatgctgacacaggcaatggactatgaccggattctggcaggctcccgcagcca

SEQ ID NO: 107997 - DNA, 75 bp, synthetic construct
  source 1..75: mol_type = other DNA
aaccttatcaggggcggagtcagtaattatgaagggaccctcaagcgaaatttctctggtggagaattagtaagt

SEQ ID NO: 107998 - DNA, 75 bp, synthetic construct
  source 1..75: mol_type = other DNA
agcaagtgattacctgccacagacaaattggtcaacaactcaattaccaccaggatatacttgtgcagaacccta

SEQ ID NO: 107999 - DNA, 75 bp, synthetic construct
  source 1..75: mol_type = other DNA
tctggacgggtaagcgctgggcgtacctcgccgttgttctcgatctgttcgcaagaaaaccagtgggctgggcca

SEQ ID NO: 108000 - DNA, 75 bp, synthetic construct
  source 1..75: mol_type = other DNA
gcgtacgaacctggatcttacgcaatttaccaatgggtattgctcacggtacaggtatcggtattggtctgttcc

SEQ ID NO: 108001 - DNA, 75 bp, synthetic construct
  source 1..75: mol_type = other DNA
gttcgcagtgacagagccaaatcaggtatggtgcggcgacgtgacgtacagtgtgcccggagttcagggcgggca

SEQ ID NO: 108002 - DNA, 75 bp, synthetic construct
  source 1..75: mol_type = other DNA
tgttatcggaatggcgagagacgttttaatcaatcacacacgagatgttgatattaatgagccagacggaccaac

SEQ ID NO: 108003 - DNA, 75 bp, synthetic construct
  source 1..75: mol_type = other DNA
tttttaaagttacatagtttggcgtttccacctgatgcaattctgatttttaaagattcagatggatacggctat

SEQ ID NO: 108004 - DNA, 75 bp, synthetic construct
  source 1..75: mol_type = other DNA
gggaagcacgggggaaaccggctaatttactgtatcactcggatcaaggcagtcactataccagcaggaatttca

SEQ ID NO: 108005 - DNA, 75 bp, synthetic construct
  source 1..75: mol_type = other DNA
aaaacggtaaggctgacggcgttgttctggagtccggcggtcgcctggatgtactggagggccattcagcgcaga

SEQ ID NO: 108006 - DNA, 75 bp, synthetic construct
  source 1..75: mol_type = other DNA
tgggggaggattcgcgggtaagtacactatgccatgaggtgtctcatttttatagagttgagcatataaatgcca

SEQ ID NO: 108007 - DNA, 75 bp, synthetic construct
  source 1..75: mol_type = other DNA
gttattaaggataaaacctcttacaagcattcaggtttctatagtaattgtgctataagttataaggagaatata

SEQ ID NO: 108008 - DNA, 75 bp, synthetic construct
  source 1..75: mol_type = other DNA
tcgagcgtggcaattccgctggcgctaagaatgttaccggcgggcgtctctatgctcacagtctggaacacatca

SEQ ID NO: 108009 - DNA, 75 bp, synthetic construct
  source 1..75: mol_type = other DNA
aatggacggcagattatcttattttccgggatagcccgtgacactctcatttacgcaggtggtgaccagtcggta

SEQ ID NO: 108010 - DNA, 75 bp, synthetic construct
  source 1..75: mol_type = other DNA
aaaactgatttttcacctgcagtcgtccgctctgttaccgatgtcattctctatccggcatcattgaccaacagg

SEQ ID NO: 108011 - DNA, 75 bp, synthetic construct
  source 1..75: mol_type = other DNA
aattatagagtgttagctcattttcaaagtctaaccgagcattccaaactagtattgataaatatttttaaaggg

SEQ ID NO: 108012 - DNA, 75 bp, synthetic construct
  source 1..75: mol_type = other DNA
agctttgtagtcctcttaaaatggaagaattatacacaaaagttgagaataattatagagtgctggcacattttc

SEQ ID NO: 108013 - DNA, 75 bp, synthetic construct
  source 1..75: mol_type = other DNA
ctatcgggcggcgtaaagaaggtgtgcttcagtatctggaaaatgaaggggaagcgattgaacttgccatcaact

SEQ ID NO: 108014 - DNA, 75 bp, synthetic construct
  source 1..75: mol_type = other DNA
caacagccacaacagccacaacagccacaacagccacaacagccagtgtcttctgtcatcaatgataagaagtca

SEQ ID NO: 108015 - DNA, 75 bp, synthetic construct
  source 1..75: mol_type = other DNA
atcttttggtataaaccctgaaaaaataaaactttcattatataataatggcgattatattgactttgaagaaag

SEQ ID NO: 108016 - DNA, 75 bp, synthetic construct
  source 1..75: mol_type = other DNA
ggaaataaaaccagccaaaggtgaagttcttgtcgttgtatctggttttactggttgcgggaaaagcgccattgc

SEQ ID NO: 108017 - DNA, 75 bp, synthetic construct
  source 1..75: mol_type = other DNA
cgaattgcttatcgcagaggtgacttatatcagagacagtgacggcacccatgcgcgcctttatctgatgccccc

SEQ ID NO: 108018 - DNA, 75 bp, synthetic construct
  source 1..75: mol_type = other DNA
atccttgacccgatagcgatggaaaacgccataaatgcgattcctggcgtggtgactgttggcttgtttgctaac

SEQ ID NO: 108019 - DNA, 75 bp, synthetic construct
  source 1..75: mol_type = other DNA
tcaaacattatcaatatcttgctgatcctcggtctgaccgcactggtgcgcccttttaccgtccattccgatgtt

SEQ ID NO: 108020 - DNA, 75 bp, synthetic construct
  source 1..75: mol_type = other DNA
tgctatcgaccgtgcagaagaccgtgaacgcttccagcatgcggttgaccgtctgaaactgaaacaaccggcgaa

SEQ ID NO: 108021 - DNA, 75 bp, synthetic construct
  source 1..75: mol_type = other DNA
cggcgctgacgcgtgaaaaaatcattgcctcggttgcagagaaatttatctgcatcgcggacgcctccaagcagg

SEQ ID NO: 108022 - DNA, 75 bp, synthetic construct
  source 1..75: mol_type = other DNA
gtctcaagattgccaaactgattgagtcaggcgctaaagtgtgggctgctgacgagttcggcgctgttctcgacc

SEQ ID NO: 108023 - DNA, 75 bp, synthetic construct
  source 1..75: mol_type = other DNA
ccgaaagcggtaagattgtcccaagccgtatcaccggtacccgtgcaaaataccagcgtcagctggctcgcgcta

SEQ ID NO: 108024 - DNA, 75 bp, synthetic construct
  source 1..75: mol_type = other DNA
taacagacccatacaataagcgctttatcattgaagagtgcaatcgacttgatttaagccctgagcaattattga

SEQ ID NO: 108025 - DNA, 75 bp, synthetic construct
  source 1..75: mol_type = other DNA
atgaaaattacctttatgaatccggtggcggagaaaatgagcggctggacgcaggaagaagcgttaggtgttcca

SEQ ID NO: 108026 - DNA, 75 bp, synthetic construct
  source 1..75: mol_type = other DNA
gggtggggctggctgggttcactggaaaccggtctgcccttcagtatcactgacaatctgatgctggagccgcaa

SEQ ID NO: 108027 - DNA, 75 bp, synthetic construct
  source 1..75: mol_type = other DNA
actacgacaaaagtatgggggatttgactaacgaaattctagcgagtggtcaaattgctaatggtaaatacgttg

SEQ ID NO: 108028 - DNA, 75 bp, synthetic construct
  source 1..75: mol_type = other DNA
ggcgcttagccatgctcttgaccgacgggtattccacgattttttccagcaggccgcaaaagcggttgccagtaa

SEQ ID NO: 108029 - DNA, 75 bp, synthetic construct
  source 1..75: mol_type = other DNA
gcgtgaaggtggtttacccgttgcttttttatggctcggcattgcactgatcatcatgccagtagcaacgcggat

SEQ ID NO: 108030 - DNA, 75 bp, synthetic construct
  source 1..75: mol_type = other DNA
ggtgactgttggtctgtttgccaaccgtggcgcggatgtcgcgctgatcggcacggctgatggcgttaaaaccat

SEQ ID NO: 108031 - DNA, 75 bp, synthetic construct
  source 1..75: mol_type = other DNA
ccagaatcaatcctgtgatttattttatgcttcttgcaggtttttcttatcataagacgttgcttgcaaggaata

SEQ ID NO: 108032 - DNA, 75 bp, synthetic construct
  source 1..75: mol_type = other DNA
atgagacgcgcccgcgtcttttttatatcgtttgcacagtcacattcgcgatttatggtgggctgtgtgggggag

SEQ ID NO: 108033 - DNA, 75 bp, synthetic construct
  source 1..75: mol_type = other DNA
gggatgccgtacgcacaaccatcaataaaaacggtcgccagattgtgagagctgaaggaacggcaaataccactg

SEQ ID NO: 108034 - DNA, 75 bp, synthetic construct
  source 1..75: mol_type = other DNA
tggtctgctttaacccgtcacaaccacatcacacctgttttcacttttatcttctgtcttcagaggtatcacact

SEQ ID NO: 108035 - DNA, 75 bp, synthetic construct
  source 1..75: mol_type = other DNA
tgtcgctggtgctctcctggtttgaacagaaagcgattgtcattctgctgacgctgctttctctgggtgtgaaaa

SEQ ID NO: 108036 - DNA, 75 bp, synthetic construct
  source 1..75: mol_type = other DNA
atgcgaaagatatttcttccgttgttactggtggcactttcgcctgttgcccacagcgaaggagtgcaggaagtc

SEQ ID NO: 108037 - DNA, 75 bp, synthetic construct
  source 1..75: mol_type = other DNA
gccccagatgctcacgaaaaagccaaaacttctttcatggctgagctggaaagacgggcagaagaattccagaac

SEQ ID NO: 108038 - DNA, 75 bp, synthetic construct
  source 1..75: mol_type = other DNA
tgacgatgggtctgacggcaattgctatcggaaccagcctgccggaactggcaaccgcaatagcgggggttcgca

SEQ ID NO: 108039 - DNA, 75 bp, synthetic construct
  source 1..75: mol_type = other DNA
tgatgctggagccacaactgcagtacacctggcagggactttccctggtgcgtattaccgtgaaggagatcggtg

SEQ ID NO: 108040 - DNA, 75 bp, synthetic construct
  source 1..75: mol_type = other DNA
acaatgacgttgacagcttcgcgccgcgcgcatttttctcaaccctgaccaacgttaatttcgattctccgcgta

SEQ ID NO: 108041 - DNA, 75 bp, synthetic construct
  source 1..75: mol_type = other DNA
cggtaactacggcagtggctggcagaatcagcaagtggagttcgctcgtttccctggccccatcgtgatgacctc

SEQ ID NO: 108042 - DNA, 75 bp, synthetic construct
  source 1..75: mol_type = other DNA
atataacggtgggttacccccaaacgaatcggaaaatcgatactggaaaaactctaactcggaggccagtttttg

SEQ ID NO: 108043 - DNA, 75 bp, synthetic construct
  source 1..75: mol_type = other DNA
tctcccacaaaattcaacttatgaattcaagagtagaattgcaaattgttttaatgctactgatataatagttga

SEQ ID NO: 108044 - DNA, 75 bp, synthetic construct
  source 1..75: mol_type = other DNA
gctatgacgtcatgataaatggtgaggttgtttgctcagacccttatgtatggacctcgacaaaagaaatagaat

SEQ ID NO: 108045 - DNA, 75 bp, synthetic construct
  source 1..75: mol_type = other DNA
agttagagagcaatctggcggagctgcgtggcggcagcgattacgcgcaacgtaaaatcaagatagccgctgcac

SEQ ID NO: 108046 - DNA, 75 bp, synthetic construct
  source 1..75: mol_type = other DNA
gaacgtcaggggactgacagcctgaccagagagcagcttgcagagctgccgcgtgacggtggattgcccgtcgcg

SEQ ID NO: 108047 - DNA, 75 bp, synthetic construct
  source 1..75: mol_type = other DNA
atggcggaaaatcgtgttgaggcatccaacgccattcatggccatatcaatgattttctggtgcgtaccgggttg

SEQ ID NO: 108048 - DNA, 75 bp, synthetic construct
  source 1..75: mol_type = other DNA
atggcaagcaaagtaagcattcataaagatgttgaataccaggacattgcaaaagtttacggaaaggctctggaa

SEQ ID NO: 108049 - DNA, 75 bp, synthetic construct
  source 1..75: mol_type = other DNA
gctattcggtccaatactcgccagttgcaggagcataacgcacgcctgaacagccagcagcgccagattcgtgaa

SEQ ID NO: 108050 - DNA, 75 bp, synthetic construct
  source 1..75: mol_type = other DNA
cgaatataatggtgggttaccaccaaacgaatcagaaaaccgatactggaaaaactctaacgcggtggccagttt

SEQ ID NO: 108051 - DNA, 75 bp, synthetic construct
  source 1..75: mol_type = other DNA
ccgtcgccggtcaggcgaatttgttggataaagacaaccagatcatcaacggcggcaaagccctgaccagtgact

SEQ ID NO: 108052 - DNA, 75 bp, synthetic construct
  source 1..75: mol_type = other DNA
ggggcgcagtaaatgtcaggaccttgtggattgttctgcggagtggcccaataacgttattaatgccagtaatgc

SEQ ID NO: 108053 - DNA, 75 bp, synthetic construct
  source 1..75: mol_type = other DNA
cgctggtagcgactcgacgcatatggaagatttccataacccggatggcaccatgcgcagcgccgatgatattac

SEQ ID NO: 108054 - DNA, 75 bp, synthetic construct
  source 1..75: mol_type = other DNA
gggaatacccacttcccgttctctgatttaaataatgtgcagattgctgatttggttagtcaatttttgaaggaa

SEQ ID NO: 108055 - DNA, 75 bp, synthetic construct
  source 1..75: mol_type = other DNA
ctttcgggtgaatgccacgaatgaagagctaaccgtggagtgtacgatgaatgccgctaaatgccgcatggtatc

SEQ ID NO: 108056 - DNA, 75 bp, synthetic construct
  source 1..75: mol_type = other DNA
agtgttctaccaaatcccggagaatccgcataaataccctatcgtcatgctgcacggcgcaggtcagttctcccg

SEQ ID NO: 108057 - DNA, 75 bp, synthetic construct
  source 1..75: mol_type = other DNA
cgctgactaatttgagtggaaaggatgtcgctggtcttctcgcataccttggtttgggagaagcggcaaaacgga

SEQ ID NO: 108058 - DNA, 75 bp, synthetic construct
  source 1..75: mol_type = other DNA
gcaaaagtttatgttgaaggcgcatggaatcggattacgaataaaaaaggtaatacttcactttatgatcacaat

SEQ ID NO: 108059 - DNA, 75 bp, synthetic construct
  source 1..75: mol_type = other DNA
aatcagtaccaacgctcttggtatcagagagaatacacaacggatccgggatgaggggcaggcacgaatccgggg

SEQ ID NO: 108060 - DNA, 75 bp, synthetic construct
  source 1..75: mol_type = other DNA
gattgcacagctcagtgcctatctgacgccgtcctgccgggcgtattttgagaaagaggccgcttaccgtactac

SEQ ID NO: 108061 - DNA, 75 bp, synthetic construct
  source 1..75: mol_type = other DNA
aatacaagtgaaaacagtgctgttaaagtgaatgccgcctgggacagtgaaagtggagtgggcgtttcagccggg

SEQ ID NO: 108062 - DNA, 75 bp, synthetic construct
  source 1..75: mol_type = other DNA
ttatgtcaccggagcccgcccggcacaactggccaagctggcaacaaaagatttgcgcattgatacccgaaaccc

SEQ ID NO: 108063 - DNA, 75 bp, synthetic construct
  source 1..75: mol_type = other DNA
acgctggacacgctgaaagaaattgccgcagccattaacaatgacccgaaattcagtaccactattaataatgcg

SEQ ID NO: 108064 - DNA, 75 bp, synthetic construct
  source 1..75: mol_type = other DNA
gcgggttcagtgaggataaagtccgggtgattgaccgggataactggatcgtgcgcctggatttggtagcggatg

SEQ ID NO: 108065 - DNA, 75 bp, synthetic construct
  source 1..75: mol_type = other DNA
agaatcccgcccattccctggcatatatgaggctgtttccgaacaactccttttgctcatttttaaggcacgtca

SEQ ID NO: 108066 - DNA, 75 bp, synthetic construct
  source 1..75: mol_type = other DNA
cgcatggctggagaagatccagcacagcttaacgaccctacctaccgccgtatgcgcctgattactggcaacatg

SEQ ID NO: 108067 - DNA, 75 bp, synthetic construct
  source 1..75: mol_type = other DNA
ggtaacttcaccaaaaatgctctgactccaaaactggcttccgaagcttgtagcaaagacgacaacatcatcacc

SEQ ID NO: 108068 - DNA, 75 bp, synthetic construct
  source 1..75: mol_type = other DNA
aggtccgccggatcttcaataaagttaataacttatcaaatacaattattaatcctgatttatttaaaagctcgg

SEQ ID NO: 108069 - DNA, 75 bp, synthetic construct
  source 1..75: mol_type = other DNA
cgtctctgaatgctccattgactgggattttatcgccgcttacaaacgcgccgaagaagagggcagggaagccgc

SEQ ID NO: 108070 - DNA, 75 bp, synthetic construct
  source 1..75: mol_type = other DNA
cgagcgtcgcatcaggcatctggcactgttgccggatgcggcgtaaacgccttatccggcctacggagggtgcgg

SEQ ID NO: 108071 - DNA, 75 bp, synthetic construct
  source 1..75: mol_type = other DNA
accgctgaaggtcctgcagagcctgatggggcataagtccatcagctcaacggaggtctacacgaaggtgtttgc

SEQ ID NO: 108072 - DNA, 75 bp, synthetic construct
  source 1..75: mol_type = other DNA
tgcaccactttgcctgctgctgacatgtcctctcgtacaccgcaccggcagactgattgccccctggttaccccg

SEQ ID NO: 108073 - DNA, 75 bp, synthetic construct
  source 1..75: mol_type = other DNA
gaattataaaggtagcaccggagtgattaacaatccatttggaggacgattacatgtggctccaaatactggtac

SEQ ID NO: 108074 - DNA, 75 bp, synthetic construct
  source 1..75: mol_type = other DNA
ttctcttggcattgcgtgataatacagagctccagaaaatttttaacaaacaaagaaaagaaaattttgctcttg

SEQ ID NO: 108075 - DNA, 75 bp, synthetic construct
  source 1..75: mol_type = other DNA
caggtacttgagttgcataacatcagccatggttctgccggggcaagaagcatcgccacaatggcaaccctgata

SEQ ID NO: 108076 - DNA, 75 bp, synthetic construct
  source 1..75: mol_type = other DNA
gcagactcaccgactggttccgctctccgacacctggtacgtcagccagctgcagacgatggtggccacactgaa

SEQ ID NO: 108077 - DNA, 75 bp, synthetic construct
  source 1..75: mol_type = other DNA
ttaatgccattcgtacgctgattactttacgcacgcgcagcttatgggtaatggcgatttttattgtgctgactg

SEQ ID NO: 108078 - DNA, 75 bp, synthetic construct
  source 1..75: mol_type = other DNA
ggttgaacctcaacacgccggggaaccttcgcggtatcacaacacgctgtgttctgttagatgaggtcagtagct

SEQ ID NO: 108079 - DNA, 75 bp, synthetic construct
  source 1..75: mol_type = other DNA
tatccggtcaggccagcggcctgctgctggaaaatggcggcagctttacggttaatgccgggggacaggccagca

SEQ ID NO: 108080 - DNA, 75 bp, synthetic construct
  source 1..75: mol_type = other DNA
aaaaatgcaacactatttgaagtctggatggttatgttggtgaaattaactgaaaacgagtttaaccgcttggtt

SEQ ID NO: 108081 - DNA, 75 bp, synthetic construct
  source 1..75: mol_type = other DNA
actttccctggatgacggccaggataacgccggttatgtgaagttcgggcatggcagtgcacaacatgtgcgtgc

SEQ ID NO: 108082 - DNA, 75 bp, synthetic construct
  source 1..75: mol_type = other DNA
aacgcttgaacgcgaccgctgtaacgccgcgtttctccccgatgtgccttttcccgatacgctccatcttgaaag

SEQ ID NO: 108083 - DNA, 75 bp, synthetic construct
  source 1..75: mol_type = other DNA
gttgcagtgcggtcgcagattggatctgctgcagctactgtacaggaaaggactgttgcgcacagagataccagg

SEQ ID NO: 108084 - DNA, 75 bp, synthetic construct
  source 1..75: mol_type = other DNA
aaagacgagtgacgacagagcggttatttctggcgatcccctcagaaattggggagttaattatgaactataccg

SEQ ID NO: 108085 - DNA, 75 bp, synthetic construct
  source 1..75: mol_type = other DNA
tccttgagtaaaaaacttgcaactgttagtgatgaaaaaatcacaccaatcgagctttatcggttcatgggtgaa

SEQ ID NO: 108086 - DNA, 75 bp, synthetic construct
  source 1..75: mol_type = other DNA
atttaccgtcaaatatcgagtcagccaaaattctgaaaatgtttgataaggaaataccgccttcgggccgtgttt

SEQ ID NO: 108087 - DNA, 75 bp, synthetic construct
  source 1..75: mol_type = other DNA
ccagtgggctgggccatgtcgttctcgccggacagcaggcttaccatgaaagcactggaaatggcatgggaaacc

SEQ ID NO: 108088 - DNA, 75 bp, synthetic construct
  source 1..75: mol_type = other DNA
attgatacaggcactatcgctccaggtaacacgatcatcctacgtgtgacgtcaccacggagtggactgggactt

SEQ ID NO: 108089 - DNA, 75 bp, synthetic construct
  source 1..75: mol_type = other DNA
cttggtttgggagaaggctcagcattacccgttggtgtgcctgttccgtggccttccgccactccgccaacaggc

SEQ ID NO: 108090 - DNA, 75 bp, synthetic construct
  source 1..75: mol_type = other DNA
gggggcagcgccgaagaaattgcgcatattctgggacatacctcacttactgttgccaagtattacatcctggcg

SEQ ID NO: 108091 - DNA, 75 bp, synthetic construct
  source 1..75: mol_type = other DNA
cgcttaccaatttgagtggaaaagatgtagctggtcttctcacataccttggtttgggagaattatctctggctg

SEQ ID NO: 108092 - DNA, 75 bp, synthetic construct
  source 1..75: mol_type = other DNA
atctaataagaaaagaatggtataatgcattttattcaggtaatactgaaatgctagattacttggaagctgatt

SEQ ID NO: 108093 - DNA, 75 bp, synthetic construct
  source 1..75: mol_type = other DNA
cccgcgatatgctgattcgccctgagacggtgctggctatcgcccattcccgctttagcaacgcccacacgcacc

SEQ ID NO: 108094 - DNA, 75 bp, synthetic construct
  source 1..75: mol_type = other DNA
gcgtcagtatcaatggtaagaaccatcctctggatgaaacagcctttactgcgctaaaagcgacgagtgaaaaag

SEQ ID NO: 108095 - DNA, 75 bp, synthetic construct
  source 1..75: mol_type = other DNA
cgtatcaagtactccactatataaagatgatctgattaatgctgaatataatctcagtgataaacgtcgatactt

SEQ ID NO: 108096 - DNA, 75 bp, synthetic construct
  source 1..75: mol_type = other DNA
acaaggccttcctctgtttcagtccgccagattatcaggcagccgtaaagcgtggcgaagcggctttgccaacca

SEQ ID NO: 108097 - DNA, 75 bp, synthetic construct
  source 1..75: mol_type = other DNA
gaacacattgtcataaccgaaaccaaatatgagcatcaacagtcaccaaccatagaagaggtaactgcattggct

SEQ ID NO: 108098 - DNA, 75 bp, synthetic construct
  source 1..75: mol_type = other DNA
gcattatacttcggataatatttatgaaatgatagtttcttgggaatggactaaagcattaggtgatagtgggta

SEQ ID NO: 108099 - DNA, 75 bp, synthetic construct
  source 1..75: mol_type = other DNA
ggggttatcagtcgaagagcgtcagcgttatcagcagagataactgggtggttcgtctcgacctggtggcggatg

SEQ ID NO: 108100 - DNA, 75 bp, synthetic construct
  source 1..75: mol_type = other DNA
tgggcgatggcggcggaacattgccaacgccggacgccaagcagacggcattggtaaatgagaaacgccgggctg

SEQ ID NO: 108101 - DNA, 75 bp, synthetic construct
  source 1..75: mol_type = other DNA
aagacgttgagcgtagcgtcagcgtgggttggcttcatagtgaacaagagtgtattgcgcgtatcgaatcggcgg

SEQ ID NO: 108102 - DNA, 75 bp, synthetic construct
  source 1..75: mol_type = other DNA
aaattcgacggaaaaataacggtggcatatgactcggccaccgcccccgccgacgtttatacatacaatctcatg

SEQ ID NO: 108103 - DNA, 75 bp, synthetic construct
  source 1..75: mol_type = other DNA
cgaacagcatcctgaacgttggggaaagcatctacgtaactgggactacatatcagaagtctacctgaatccaga

SEQ ID NO: 108104 - DNA, 75 bp, synthetic construct
  source 1..75: mol_type = other DNA
ggcgatgtcggggaaggggcatgcatggtgcataacccaggttacgacttcaacgatgcaagtctggttccggca

SEQ ID NO: 108105 - DNA, 75 bp, synthetic construct
  source 1..75: mol_type = other DNA
agcccccactgccgcacagtcagttaacaatacacagattgccaccacggcttttgtgaaatcggcaattgcggc

SEQ ID NO: 108106 - DNA, 75 bp, synthetic construct
  source 1..75: mol_type = other DNA
gtgtgtgatctcaaacataagcacggggatgatagccgctatcaggctggtgggcaatgtgatcagcctggtggg

SEQ ID NO: 108107 - DNA, 75 bp, synthetic construct
  source 1..75: mol_type = other DNA
gctacctggcggtgtttgtggtggcgatccgcctgcgtcatgatatccatgcctcgttgccgattcttatcgttg

SEQ ID NO: 108108 - DNA, 75 bp, synthetic construct
  source 1..75: mol_type = other DNA
taccatacccgactcgtttttgggcttctgcgttaatgacaaagccgcatgtcctgatggctgacagcatcatcc

SEQ ID NO: 108109 - DNA, 75 bp, synthetic construct
  source 1..75: mol_type = other DNA
gtgctggtgggctttcatgcgcgacatgatgcacctgatgccggaagaagtctgccgtatatcaataaataagat

SEQ ID NO: 108110 - DNA, 75 bp, synthetic construct
  source 1..75: mol_type = other DNA
caggaagccattgtggtggtgcgtattgagggtgccggcctggcccggcagtatcatgtactccagcccggggga

SEQ ID NO: 108111 - DNA, 75 bp, synthetic construct
  source 1..75: mol_type = other DNA
gtgatcaacgtcttcaaagggctgagctgggattacaaaaccaactcaccctgtaaatttggcagtaaaattatc

SEQ ID NO: 108112 - DNA, 75 bp, synthetic construct
  source 1..75: mol_type = other DNA
cggcaccaaagcaccgcataccggtattgcagctgcacgacgtgcagcaaagaaacgcaggagagcaaaacgatg

SEQ ID NO: 108113 - DNA, 75 bp, synthetic construct
  source 1..75: mol_type = other DNA
ttagccgctccgtcatctgtatgccattacacaccattcgcaattctcttatttgtagcaataaacatcctcgta

SEQ ID NO: 108114 - DNA, 75 bp, synthetic construct
  source 1..75: mol_type = other DNA
tgaaatctggagctaccatgcgttgttctggctggcgatagggatgttgggtattgcgatgatttgcctgctgtt

SEQ ID NO: 108115 - DNA, 75 bp, synthetic construct
  source 1..75: mol_type = other DNA
cttctggcaggcgctgcaccgccgcgatgtccaggttcctaaccttctctctctgcgaggtaacgctcatgcgta

SEQ ID NO: 108116 - DNA, 75 bp, synthetic construct
  source 1..75: mol_type = other DNA
ggtttaggaacggcggatcatagcgccctggcgtgctactacgaaaaactggcgaaagtcgaagttactcgctaa

SEQ ID NO: 108117 - DNA, 75 bp, synthetic construct
  source 1..75: mol_type = other DNA
atgactatgaaagttggttttattggcctggggattatgggtaaaccaatgagtaaaaaccttttgaaagcaggt

SEQ ID NO: 108118 - DNA, 75 bp, synthetic construct
  source 1..75: mol_type = other DNA
aatattcctgtcgttacccaacccgtagaaattttaccctccacccacaggaagcgggatacgcggctacttttt

SEQ ID NO: 108119 - DNA, 75 bp, synthetic construct
  source 1..75: mol_type = other DNA
tttaggaattgggaattatgaaaatgaaatggtccccatctgttcaggggtttttctcgttagaaaacaacagcg

SEQ ID NO: 108120 - DNA, 75 bp, synthetic construct
  source 1..75: mol_type = other DNA
ttctcaccatgcttcgctggtgattcgcacttaactgcattcaacgaagggcagcgcaacctggcactggcattg

SEQ ID NO: 108121 - DNA, 75 bp, synthetic construct
  source 1..75: mol_type = other DNA
aggcccaacattaaccggttttaattccgcttacagaactgcatcaaccagttccacagtatcgatgaattacag

SEQ ID NO: 108122 - DNA, 75 bp, synthetic construct
  source 1..75: mol_type = other DNA
aggggttagcgagggagcaactctggtcatggatggccgcaactatagcgtggcgggatatcctgaaggctttta

SEQ ID NO: 108123 - DNA, 75 bp, synthetic construct
  source 1..75: mol_type = other DNA
tgcacggcgtgtttgccgatgactcacaagtcattgattaccatcacagaccccagttcacgccaaatctgcaaa

SEQ ID NO: 108124 - DNA, 75 bp, synthetic construct
  source 1..75: mol_type = other DNA
cgtacaggccgtcagctttgtcggttcctccgccgtcgcggaacatatctataccaccgccagcgcccatggcaa

SEQ ID NO: 108125 - DNA, 75 bp, synthetic construct
  source 1..75: mol_type = other DNA
gctgcaggggttcgctgtgaggctgaagcggtcagaaaagatgtatttggtgcagacagtaataccgtgaaagcg

SEQ ID NO: 108126 - DNA, 75 bp, synthetic construct
  source 1..75: mol_type = other DNA
ggttaaatgaatccgttatcctcaaaacctcttccatccccgaaaattataagtccacaaatggcattatgcatc

SEQ ID NO: 108127 - DNA, 75 bp, synthetic construct
  source 1..75: mol_type = other DNA
tgattacctctatcgcaaggtggagcggttcgccatcgagaacggtgtgcaggtggttgatgccgggaagtgctc

SEQ ID NO: 108128 - DNA, 75 bp, synthetic construct
  source 1..75: mol_type = other DNA
aacgcgttggaaaaaatacaaagtcttatcaacagccttactgaagaagcgaaagaactgaatagcgaggcgaca

SEQ ID NO: 108129 - DNA, 75 bp, synthetic construct
  source 1..75: mol_type = other DNA
gtaccgtggcccatctgctggcggtcgattatgcccttaaaccagttttaagcgcactgaaagcccaggagatcc

SEQ ID NO: 108130 - DNA, 75 bp, synthetic construct
  source 1..75: mol_type = other DNA
atgaacacggaaaaagcgaaaacgcagctcaggataatgcttgccggtccggctgcgagttatgcgacacattca

SEQ ID NO: 108131 - DNA, 75 bp, synthetic construct
  source 1..75: mol_type = other DNA
cgccccggaagatttgctctatgcccgtttcgatagtccggcccttaaaacctttactgcacagttacaagaagc

SEQ ID NO: 108132 - DNA, 75 bp, synthetic construct
  source 1..75: mol_type = other DNA
gataaacagcagagctttgaaaataactatcttcgccagacaacagcgcaaagtatctctgaaactgtacaactt

SEQ ID NO: 108133 - DNA, 75 bp, synthetic construct
  source 1..75: mol_type = other DNA
gtgtagaaacgacgaaaccccgcactgtaggagcagtaacggggcttctaaccaccaacgatagcgaaagtatcg

SEQ ID NO: 108134 - DNA, 75 bp, synthetic construct
  source 1..75: mol_type = other DNA
tgttgattatgctgatgacggcggcgctaaatttaggctcactcgccagcgttgccagcgccacctttttgatct

SEQ ID NO: 108135 - DNA, 75 bp, synthetic construct
  source 1..75: mol_type = other DNA
agtctgattttcttagtttggaagtaccttttcctcccatcaatgatcaggctcgtatagctaatttattggcca

SEQ ID NO: 108136 - DNA, 75 bp, synthetic construct
  source 1..75: mol_type = other DNA
atgagtattgtctctgctgttaatggactatatgctggacaacaggactataatggattaactgagcaagttctt

SEQ ID NO: 108137 - DNA, 75 bp, synthetic construct
  source 1..75: mol_type = other DNA
tgataagacgcgcaagcgtcgcatcaggcatcgtgcaccgattgccggatgcggcgtgaacgccttatccggcct

SEQ ID NO: 108138 - DNA, 75 bp, synthetic construct
  source 1..75: mol_type = other DNA
cagttacctgctggcttcgaccttcgatatggacacccgataaatgctgatgagcgacatgtgatgatacctaaa

SEQ ID NO: 108139 - DNA, 75 bp, synthetic construct
  source 1..75: mol_type = other DNA
tttggcgtatgcagagaaggggaattgatccgtttaaagtagagaaaacaaccccttccgccgtagacgaaaggg

SEQ ID NO: 108140 - DNA, 75 bp, synthetic construct
  source 1..75: mol_type = other DNA
ctgcaccaaagcgccgccataccggtattgcggctgcacgacgcgaagcaaagaaacgcaggagagcaaaacgat

SEQ ID NO: 108141 - DNA, 75 bp, synthetic construct
  source 1..75: mol_type = other DNA
cccggatctgcattttgatactgaaagcggtcactaccgctttggtgagatcgactggcaggagtttaacgaagt

SEQ ID NO: 108142 - DNA, 75 bp, synthetic construct
  source 1..75: mol_type = other DNA
gcaaggcgatgctgtgaatatctttccttatgcttcgtcgctgtgggtcggtgacggagcaacattcgagactgg

SEQ ID NO: 108143 - DNA, 75 bp, synthetic construct
  source 1..75: mol_type = other DNA
gcgggtattatgttaaccaatacctacacctttcagcgagaagatgaactaaaacatggctataatgaaattgaa

SEQ ID NO: 108144 - DNA, 75 bp, synthetic construct
  source 1..75: mol_type = other DNA
aggcccagcattaactaattcagctggcgtaccctggactgcagcttatgttgatactattggcgaagtaacagc

SEQ ID NO: 108145 - DNA, 75 bp, synthetic construct
  source 1..75: mol_type = other DNA
tgatggccttgaagtcagtggcagcagcggaacggttatcggcagtcaggatgtggtagatcttgcaggtggcga

SEQ ID NO: 108146 - DNA, 75 bp, synthetic construct
  source 1..75: mol_type = other DNA
gacgacaacgggcgcggcagctttatctgcaatcagtgcggcgcgggcgacgggctggatttaatcaagcgggtt

SEQ ID NO: 108147 - DNA, 75 bp, synthetic construct
  source 1..75: mol_type = other DNA
ccgtttatcagccgatgctgaatgcaaaaatcggtggatatcttaataacctgcgggcggcaaatcaggcgtttg

SEQ ID NO: 108148 - DNA, 75 bp, synthetic construct
  source 1..75: mol_type = other DNA
gtgtcgaagaaggcaccctgaaaggtgatgttgcggatatcttcccttatgcttcgtcgctgtgggtcggtgacg

SEQ ID NO: 108149 - DNA, 75 bp, synthetic construct
  source 1..75: mol_type = other DNA
ctgctcgatagcgaattaaacggcgatgactcggtaagcgatcaattggtgatgaacggtaatactgctggcaac

SEQ ID NO: 108150 - DNA, 75 bp, synthetic construct
  source 1..75: mol_type = other DNA
tcgaaggtaactttaccgagtacgaagagtacaaaaaacgcacgctgggcgcaaacgcgctggagccgaagcgta

SEQ ID NO: 108151 - DNA, 75 bp, synthetic construct
  source 1..75: mol_type = other DNA
accggacatggcctcgtttgccagtggtgatggatggatgaaattacccaacgggaaaatcctgcaatatggtcg

SEQ ID NO: 108152 - DNA, 75 bp, synthetic construct
  source 1..75: mol_type = other DNA
gccatattcccggcgctgactacatcgataccaacgaagtggaaagcgaaccgctgtggaacaaagtttctgatg

SEQ ID NO: 108153 - DNA, 75 bp, synthetic construct
  source 1..75: mol_type = other DNA
acatggcattcgtcatgacaccacagtaattctgtacgggcgcgacgtttacgccgccgcgcgcgtggcgcagat

SEQ ID NO: 108154 - DNA, 75 bp, synthetic construct
  source 1..75: mol_type = other DNA
atgcgcccgctaactgttgccattatcgccgttgccggttttagtccttttcacctttccgtaccgtttatcgtg

SEQ ID NO: 108155 - DNA, 75 bp, synthetic construct
  source 1..75: mol_type = other DNA
ttgatgtgctattgaccgacccgcgcgtgcaggccgtgagctttgttggctctacgccgattgcggaatacatct

SEQ ID NO: 108156 - DNA, 75 bp, synthetic construct
  source 1..75: mol_type = other DNA
attgtcgggctttgcctgggcacgtttgtgctcggctatgcaggtttactgaaaaataagcgtgccgccacgcac

SEQ ID NO: 108157 - DNA, 75 bp, synthetic construct
  source 1..75: mol_type = other DNA
tacgttcccccagaaagttgggatcgcggcattgatgctttttatacctcctataatttaagtcagtatcgctct

SEQ ID NO: 108158 - DNA, 75 bp, synthetic construct
  source 1..75: mol_type = other DNA
ttaagcgacgcccttagcaatccttcccgattgcaaaaactaccgcactttgagcagttggtttacccgcaatgg

SEQ ID NO: 108159 - DNA, 75 bp, synthetic construct
  source 1..75: mol_type = other DNA
caatggtttcttttattttattttaaaaaatggtccggccatatcaaaatccataattgattcattgagggaact

SEQ ID NO: 108160 - DNA, 75 bp, synthetic construct
  source 1..75: mol_type = other DNA
cagccacaacgttcttatgtggatgcggttatcattttggaaatgacgttgatgcgtacgatttactgccccgcc

SEQ ID NO: 108161 - DNA, 75 bp, synthetic construct
  source 1..75: mol_type = other DNA
ttcagcgaccatctttacgaaaatgataaacacaatcatcatagtgaatatgatgatttttatgatattggcaga

SEQ ID NO: 108162 - DNA, 75 bp, synthetic construct
  source 1..75: mol_type = other DNA
gatgacgtccgatattctgccgcgcagtggcctgcattattcgccgatgttcgactatgaagtgcgtctggtgtt

SEQ ID NO: 108163 - DNA, 75 bp, synthetic construct
  source 1..75: mol_type = other DNA
cgaactgctgcgccggaagggatgcaggggcttttttatccatacggggcgtacggggaacatcagccgggcacg

SEQ ID NO: 108164 - DNA, 75 bp, synthetic construct
  source 1..75: mol_type = other DNA
tgtttacttaaccgccatgaccaaagccggcagtaatgtcggctttttacgtccatatattccactcatccggaa

SEQ ID NO: 108165 - DNA, 75 bp, synthetic construct
  source 1..75: mol_type = other DNA
gaaggtttacctgttgcgcttggtgcatttacctctttcccggtaatgatgagcttgttagggttagcggttatt

SEQ ID NO: 108166 - DNA, 75 bp, synthetic construct
  source 1..75: mol_type = other DNA
gaaggctggaccacgatgaccatcaccacgccaaccggtgaaggggtaaccagcgcgcggacgtttgtccgtctg

SEQ ID NO: 108167 - DNA, 75 bp, synthetic construct
  source 1..75: mol_type = other DNA
gtatgcgctcggtggggatcggcgcgggcttaaccggggcgcaattattgttgccctcaacggactccctgacct

SEQ ID NO: 108168 - DNA, 75 bp, synthetic construct
  source 1..75: mol_type = other DNA
gcagtgcacaacatgtgcgtgccggcttccgtctgggcagccacaacgatatgacctttggcgaaggcacctcat

SEQ ID NO: 108169 - DNA, 75 bp, synthetic construct
  source 1..75: mol_type = other DNA
taatggagctgatatttctgatgtatcagccttccgaaatgcgctccagttagggaccgccgcaacacgagatgt

SEQ ID NO: 108170 - DNA, 75 bp, synthetic construct
  source 1..75: mol_type = other DNA
aaatgctatcaaatcagccagtaattttaatatagaaaaaataggcgagttatggaatacattatttacatcaaa

SEQ ID NO: 108171 - DNA, 75 bp, synthetic construct
  source 1..75: mol_type = other DNA
tagcattcaattcattcatctgttggatgaaattgtgcaggaaccggccatctatctgatggccagaaaaattgc

SEQ ID NO: 108172 - DNA, 75 bp, synthetic construct
  source 1..75: mol_type = other DNA
taaaagtcagtatgcagagcaatgcgcccattccatcggacagcattgcttattccgcaatgatcgacgctttga

SEQ ID NO: 108173 - DNA, 75 bp, synthetic construct
  source 1..75: mol_type = other DNA
taatatgttcctggtagccagttggtatgagattcaggcaatgtacgatgattatgttaatctttatgccgatga

SEQ ID NO: 108174 - DNA, 75 bp, synthetic construct
  source 1..75: mol_type = other DNA
gcacctcagagttgctggcacacctgaagcagtatcatgaaatagatgaatcaacaatacttgccataaccattg

SEQ ID NO: 108175 - DNA, 75 bp, synthetic construct
  source 1..75: mol_type = other DNA
actgttaatcaaggcagttttgctggcaccatcgaaggtgctggtcagctcaccattgcgcaaaacggcagctac

SEQ ID NO: 108176 - DNA, 75 bp, synthetic construct
  source 1..75: mol_type = other DNA
atgtcaccgataataatagcgatatcacgcatccgtcaggtttcacaataataaataacaccgcatttacaaata

SEQ ID NO: 108177 - DNA, 75 bp, synthetic construct
  source 1..75: mol_type = other DNA
gtgaacgcatgttctcacgcttcgattttaaacgcgtgctggaggcaggcggtatttcgattctgcaaccggatc

SEQ ID NO: 108178 - DNA, 75 bp, synthetic construct
  source 1..75: mol_type = other DNA
ggtgctggcgaagcgtcacgactggcagctattcattgagataactggcgagggcggcagtggaaaatccgtatt

SEQ ID NO: 108179 - DNA, 75 bp, synthetic construct
  source 1..75: mol_type = other DNA
cgttgagcgcggaacgccaccgaaagtgaaagcggaaccggatttcggcgtgaagatcccggcacaaccgcaact

SEQ ID NO: 108180 - DNA, 75 bp, synthetic construct
  source 1..75: mol_type = other DNA
caggggaataagctgcaggccggtgcctttaactactccctcaaccgggacagtgatgagagctggtatctgcgc

SEQ ID NO: 108181 - DNA, 75 bp, synthetic construct
  source 1..75: mol_type = other DNA
acgttgtcgatctttatagtggtgaggatttgcatattggcgatgacgggaaaaaaggcgtctatgtagtggtag

SEQ ID NO: 108182 - DNA, 75 bp, synthetic construct
  source 1..75: mol_type = other DNA
taactctgtgggtgatggtgtgaattttgttgctgtcagaccgcgaaatattgcatttaactttctggtgagggc

SEQ ID NO: 108183 - DNA, 75 bp, synthetic construct
  source 1..75: mol_type = other DNA
atgcatatcgcaatacatgcgaaaaacctaaaagagcttgccgataaaaaaggccaatttattgctatttaccgc

SEQ ID NO: 108184 - DNA, 75 bp, synthetic construct
  source 1..75: mol_type = other DNA
ccagccagacaccggaagcattgcgtgaagccttagccacattagtcgcaccgttgcaagctcatgcgcagcagg

SEQ ID NO: 108185 - DNA, 75 bp, synthetic construct
  source 1..75: mol_type = other DNA
attagaagataatataaaaaatactttgtctatatataaaaatactcttgctgatattgtttctgattctttatg

SEQ ID NO: 108186 - DNA, 75 bp, synthetic construct
  source 1..75: mol_type = other DNA
aaagagaactgggcatttacctcgctggggattctaggcaatgacaacaccgcgcgtaaactaaccccgctcatc

SEQ ID NO: 108187 - DNA, 75 bp, synthetic construct
  source 1..75: mol_type = other DNA
gctttccacgcgacattacctcctacgctgggctggcgatcatcaaagagaccttcacccgcgaatcactggctg

SEQ ID NO: 108188 - DNA, 75 bp, synthetic construct
  source 1..75: mol_type = other DNA
aaagtaacaacctgcctctgccagatgacgctatgcgccacctcggcactatgttgagcttttcacgcgacatta

SEQ ID NO: 108189 - DNA, 75 bp, synthetic construct
  source 1..75: mol_type = other DNA
tcgatgacggcgttgcgggagtatagagagaaatttccggcatggcgggatgcggatgagtttaggttgtggtga

SEQ ID NO: 108190 - DNA, 75 bp, synthetic construct
  source 1..75: mol_type = other DNA
ctctgccaggccggacgcattgtcgggctggaacgcagaggctggcaacgtctggaagaaagcggcagcgtctat

SEQ ID NO: 108191 - DNA, 75 bp, synthetic construct
  source 1..75: mol_type = other DNA
agaacacgggcggtgcactggttaccagtacagctgcaaccgtcaccggcacaaaccgcctgggagcattctccg

SEQ ID NO: 108192 - DNA, 75 bp, synthetic construct
  source 1..75: mol_type = other DNA
cgaatgaaaaccatcactgcacgctggccggaaatgcagcaggagacagctgcagcgttctccatgccgacgctg

SEQ ID NO: 108193 - DNA, 75 bp, synthetic construct
  source 1..75: mol_type = other DNA
ctgggccatgtcgttctcgccggacagcaggctcaccatgaaagcgctggaaatggcatgggaaacccgtggtaa

SEQ ID NO: 108194 - DNA, 75 bp, synthetic construct
  source 1..75: mol_type = other DNA
acagcgcactaagaccgcacgaatataatggtgggttaccaccaaacgaatcagaaaaccgatactggaaaaact

SEQ ID NO: 108195 - DNA, 75 bp, synthetic construct
  source 1..75: mol_type = other DNA
agttcgttgctgctatggttgcttatattaccgccctttccttgatggccatcaccagggcgtattgaatagcgt

SEQ ID NO: 108196 - DNA, 75 bp, synthetic construct
  source 1..75: mol_type = other DNA
tatcccgcaggcgccagcgccattcttaatgccattcgaacattaattactttacgcacacgcagcctgtggata

SEQ ID NO: 108197 - DNA, 75 bp, synthetic construct
  source 1..75: mol_type = other DNA
aagaatgggaaggtcgacgcgtggttggtatggttggtgatcgattacactatgagattggtggctgtgcgagaa

SEQ ID NO: 108198 - DNA, 75 bp, synthetic construct
  source 1..75: mol_type = other DNA
aagcctggagttcaccaattccagcagaagcccggcaggggtattgccatcaggatctgtctgttgcgcactcct

SEQ ID NO: 108199 - DNA, 75 bp, synthetic construct
  source 1..75: mol_type = other DNA
ttcagaacgttaacagacgaagacatcgcgggctatgtcgccagcggcgaaccgttagataaagcaggtgcatac

SEQ ID NO: 108200 - DNA, 75 bp, synthetic construct
  source 1..75: mol_type = other DNA
actctgaagcagcggacagaaaaagccgccaggacggcaggaaggatgcccgccggtcagcagactcaccgtctg

SEQ ID NO: 108201 - DNA, 75 bp, synthetic construct
  source 1..75: mol_type = other DNA
tgcgcagcgatctgatgcccatccgcgaagaacgcccgacggaaaagccagtgcagagaaattgttcgcgatggc

SEQ ID NO: 108202 - DNA, 75 bp, synthetic construct
  source 1..75: mol_type = other DNA
ccatctagaaattattggttctcttgttggtatgctcaacaaaggcgcaaaaggagcactcgctgaaggaactga

SEQ ID NO: 108203 - DNA, 75 bp, synthetic construct
  source 1..75: mol_type = other DNA
cgctggagtatttgctgcagacgttgataccggaacattaactattaaagggaatattgcagaatctccgtgtaa

SEQ ID NO: 108204 - DNA, 75 bp, synthetic construct
  source 1..75: mol_type = other DNA
ttagctgcccgaaagaagttgctggtgtaaaactctcgttgatcacaaacgacaaaataaccggcaacgataagg

SEQ ID NO: 108205 - DNA, 75 bp, synthetic construct
  source 1..75: mol_type = other DNA
tcaaagtttgctgatgctctatataacttcaatcttcaaaccttttacaataacgaattgggcttgccattcgaa

SEQ ID NO: 108206 - DNA, 75 bp, synthetic construct
  source 1..75: mol_type = other DNA
tcgccagcgagacgctgttgatttatccggtgcagcgtagtcgactggatgtctggcggcattttcttcagccgg

SEQ ID NO: 108207 - DNA, 75 bp, synthetic construct
  source 1..75: mol_type = other DNA
agcggctacgtcaatatgggagcgtatgactacacgctggtggaagataacaacgactggtatctgcgatcgcaa

SEQ ID NO: 108208 - DNA, 75 bp, synthetic construct
  source 1..75: mol_type = other DNA
gtcagaaggtgaagacgtcagaggtagttggaacagtgatgaaaactttgactatatttccgatccagttccagc

SEQ ID NO: 108209 - DNA, 75 bp, synthetic construct
  source 1..75: mol_type = other DNA
ttgatcaccaaaacaggttccggcgatctggtacttaatgcagataacaatgactttactggtgagatgcagatt

SEQ ID NO: 108210 - DNA, 75 bp, synthetic construct
  source 1..75: mol_type = other DNA
cttcaggctgggatgctggaaaagcaccgtcatattgttgttgccaatgatggttacgacacaaaagatgaatgg

SEQ ID NO: 108211 - DNA, 75 bp, synthetic construct
  source 1..75: mol_type = other DNA
gagtatgagccggcgcggaaactgctgggataacagcccaatggaacgcttcttcaggagtctgaagaacgaatg

SEQ ID NO: 108212 - DNA, 75 bp, synthetic construct
  source 1..75: mol_type = other DNA
gctgtcaacatgcttctgctgctgattaccggctggattcttacttatgctggcatattactgctgggctttggc

SEQ ID NO: 108213 - DNA, 75 bp, synthetic construct
  source 1..75: mol_type = other DNA
aaaatggcgtcgctggcgacacgctgacggtaaatggtgattataccggcggcggtacgctactgctcgatagcg

SEQ ID NO: 108214 - DNA, 75 bp, synthetic construct
  source 1..75: mol_type = other DNA
gggttgactgctcaggctttgtggtcgtaacgatgcgcgatcgtttcgatttgcagttgccgcgtgaaacaaagc

SEQ ID NO: 108215 - DNA, 75 bp, synthetic construct
  source 1..75: mol_type = other DNA
cagcactgtttctggccgggtgtagccaccataaagcaccgccgccaaatgccagactttctgattcgattaccg

SEQ ID NO: 108216 - DNA, 75 bp, synthetic construct
  source 1..75: mol_type = other DNA
gccagactttctgactctattaccgtcattgccggtttgaacgatcaactacaaagctggcatggcacaccttat

SEQ ID NO: 108217 - DNA, 75 bp, synthetic construct
  source 1..75: mol_type = other DNA
ctgctgaagaatacccgaaactggcaaaggcttacccggcaaataaattacctgatttacgcggtgagtttattc

SEQ ID NO: 108218 - DNA, 75 bp, synthetic construct
  source 1..75: mol_type = other DNA
actactttaagagtaaagaggattatgctcagaccgttctgaacgcctatgacagtttcttcgagcataaactca

SEQ ID NO: 108219 - DNA, 75 bp, synthetic construct
  source 1..75: mol_type = other DNA
caggacagagaaagcgaggatctgggaagtgacggacagaacggtcaggacctggattggggaggcggttgccgc

SEQ ID NO: 108220 - DNA, 75 bp, synthetic construct
  source 1..75: mol_type = other DNA
attttggaagtggcaacaccaccatgaaaacattaattaaaaataaataccatgcaataaaacttgataaggcct

SEQ ID NO: 108221 - DNA, 75 bp, synthetic construct
  source 1..75: mol_type = other DNA
aaagaagtgatcaccgggaagctggatgaagtgaaagctaaagcaatggcctacgcctgcaagcaagcccggaag

SEQ ID NO: 108222 - DNA, 75 bp, synthetic construct
  source 1..75: mol_type = other DNA
ttaaaaaaattatgcccgaatatcatcgctgaaggtgttgaaaacattgagtgtcataagctatcaaaagggata

SEQ ID NO: 108223 - DNA, 75 bp, synthetic construct
  source 1..75: mol_type = other DNA
aaatcatctataacatataatggagttaacctagatgaaactaattgttctttttcatcaagtaatggattgacg

SEQ ID NO: 108224 - DNA, 75 bp, synthetic construct
  source 1..75: mol_type = other DNA
cgcgtggccaaccccgggatgtcgtgttccatagcgacagtaataatgccggtatcagtttttatcatcactctg

SEQ ID NO: 108225 - DNA, 75 bp, synthetic construct
  source 1..75: mol_type = other DNA
tgtcatttatccagaaaataaacgtaatacagaacaatatgattctattattatgttgcgtgatatatgggaata

SEQ ID NO: 108226 - DNA, 75 bp, synthetic construct
  source 1..75: mol_type = other DNA
cgaacaggcaggacagagaaagcgcggatctgggaagtgacggacagaacggtcaggacctggattgcggaggcg

SEQ ID NO: 108227 - DNA, 75 bp, synthetic construct
  source 1..75: mol_type = other DNA
agtttcagcgatgcagctcacgccataacggactatatcgttggatattacagcgcactaagaccgcacgaatat

SEQ ID NO: 108228 - DNA, 75 bp, synthetic construct
  source 1..75: mol_type = other DNA
gagtatggaatcttagttgagaatgggaatcttattaaatttagcgcggaattagcgaatttaatgtccgatgaa

SEQ ID NO: 108229 - DNA, 75 bp, synthetic construct
  source 1..75: mol_type = other DNA
cagaaccgatcctcaactttgcttatggctgggtacgggagaaagagaaagcaaaacaggtgcattaccattgct

SEQ ID NO: 108230 - DNA, 75 bp, synthetic construct
  source 1..75: mol_type = other DNA
gatgggcgtgggtcgcacttttgctgaagcgtttgccaaagcacaactgggtagcaactccaccatgaagaaaca

SEQ ID NO: 108231 - DNA, 75 bp, synthetic construct
  source 1..75: mol_type = other DNA
gttaacagcgagctatggtgggcgattcagaacggttatatgacggttaaagccgcaggggttcgtgtccgtgaa

SEQ ID NO: 108232 - DNA, 75 bp, synthetic construct
  source 1..75: mol_type = other DNA
cgatagcggcctggttggcagagaaccagcaaaatattgaagcgcattacggcaaaccgcttcatgaagttgtcg

SEQ ID NO: 108233 - DNA, 75 bp, synthetic construct
  source 1..75: mol_type = other DNA
ctgaccgataacggttcggcttatacaactcatgaaacacggcagttcgccagagagttgaatctggagctctgc

SEQ ID NO: 108234 - DNA, 75 bp, synthetic construct
  source 1..75: mol_type = other DNA
ctatagcagaacagcttgatgcaatactgtccatctacagccgggtttacttctctcgcttcgatttacgcttac

SEQ ID NO: 108235 - DNA, 75 bp, synthetic construct
  source 1..75: mol_type = other DNA
ctggactgttgcgatcgtgaagccatagactgggcagcaggcacgggaggttatgacaaagcaacggtgcaggat

SEQ ID NO: 108236 - DNA, 75 bp, synthetic construct
  source 1..75: mol_type = other DNA
accacctcggctgtaaagggccagaaaacttacggcaactgctcaacgctgcaattctgcgatgttggcggcgtg

SEQ ID NO: 108237 - DNA, 75 bp, synthetic construct
  source 1..75: mol_type = other DNA
tgagttttcagaactgcatggcaaagatgttccggtgcgtgaagccctcgccggacaagtgcccagcgcaggcgt

SEQ ID NO: 108238 - DNA, 75 bp, synthetic construct
  source 1..75: mol_type = other DNA
aaaactacgtgaacgtctgaagtctaaattaaaccgaccagtggggttggcagaaccgctcctcaactttgctta

SEQ ID NO: 108239 - DNA, 75 bp, synthetic construct
  source 1..75: mol_type = other DNA
cccggaagccctgaccaaaatccgccgcgaactgaaagatgcaggcgctgagcgtatctggtacatcgccgatgc

SEQ ID NO: 108240 - DNA, 75 bp, synthetic construct
  source 1..75: mol_type = other DNA
ttgcatatggatttcgaagagcttcccctgataaagcgaatgcaatcgaagaagctactcgtaatttcacggcct

SEQ ID NO: 108241 - DNA, 75 bp, synthetic construct
  source 1..75: mol_type = other DNA
aagtggatggcatggtggctgcaatcgatgcggcggatgccatgctgaaatccgccgacgtgcgtttgctgagtc

SEQ ID NO: 108242 - DNA, 75 bp, synthetic construct
  source 1..75: mol_type = other DNA
tctatggaggggatgaacgttttcgtaatggttcctttgttgttttggaggatgaagattactctcttatttata

SEQ ID NO: 108243 - DNA, 75 bp, synthetic construct
  source 1..75: mol_type = other DNA
agccagccagttatttctctggcgcaagcaataccaggagggaagtcttactgctgtggccgcaggagaacagta

SEQ ID NO: 108244 - DNA, 75 bp, synthetic construct
  source 1..75: mol_type = other DNA
tgcgggaaaaagaaatggcaaaacaggtgcattaccattgctggatagcccttccgcaccggcaggtaaaacgac

SEQ ID NO: 108245 - DNA, 75 bp, synthetic construct
  source 1..75: mol_type = other DNA
gagctgctttcgttaacaccggtagagcatgtttgccgtctggtgcgtgaatcttctcgcgttgccgcctggcgt

SEQ ID NO: 108246 - DNA, 75 bp, synthetic construct
  source 1..75: mol_type = other DNA
tcgatttccatctggatactcggtgacccatcggtagccctaagtgaaatagaccggttaattctggatagcgcc

SEQ ID NO: 108247 - DNA, 75 bp, synthetic construct
  source 1..75: mol_type = other DNA
gagccccgaaacgaaatggtgacagaatgaaattcagacatctgatttatccttgcctatctgtgatgctgatat

SEQ ID NO: 108248 - DNA, 75 bp, synthetic construct
  source 1..75: mol_type = other DNA
ttaaatacggagacgataacggcaaccatcctcaaactaatgaatatggtctgattagcaatgtcacacactgga

SEQ ID NO: 108249 - DNA, 75 bp, synthetic construct
  source 1..75: mol_type = other DNA
ttatgacaaagcaacggtgcaggatgtcatgtcaggagcaatagaaaaacgctttggcgataaaggagcggaacg

SEQ ID NO: 108250 - DNA, 75 bp, synthetic construct
  source 1..75: mol_type = other DNA
gacggtggtggcgaagacctgtatctcaaggaggtaacccactggatgccgctgccagaaccgccgcaggaagtt

SEQ ID NO: 108251 - DNA, 75 bp, synthetic construct
  source 1..75: mol_type = other DNA
gagatgttcgaaatatacagtgtgctgcgcaatctctgtcggcgtggctacgctactcaggtggggcgaatgact

SEQ ID NO: 108252 - DNA, 75 bp, synthetic construct
  source 1..75: mol_type = other DNA
atatgagtacgttgatttacgtggcgaaaccgcaagcgccggaacgcatcctgatgaaatttttgcaaacaagtt

SEQ ID NO: 108253 - DNA, 75 bp, synthetic construct
  source 1..75: mol_type = other DNA
ttcggtgagctaagctctggtaagaatgcaccgaaaacggggggaggggcgaaagggaacaatgcttcgcctgcc

SEQ ID NO: 108254 - DNA, 75 bp, synthetic construct
  source 1..75: mol_type = other DNA
attgtcccgttgtcaaaacaagcattatcccatctcaaaagtttgaaagaactaactgggaactacccgctgatg

SEQ ID NO: 108255 - DNA, 75 bp, synthetic construct
  source 1..75: mol_type = other DNA
caatcataatcattgatgaaaatgacaatgtgctttttagtgaattagtgaatgaaatcactaccgagccagatt

SEQ ID NO: 108256 - DNA, 75 bp, synthetic construct
  source 1..75: mol_type = other DNA
ctggcagactacttccgttcgcgcggtaaaaacgtccagtcacgccatcggacgctggaaaaacgtaaaccatga

SEQ ID NO: 108257 - DNA, 75 bp, synthetic construct
  source 1..75: mol_type = other DNA
atgatcactattaccaaagggcgactgctgacaatccagcagtggcgcgaaacatacggacctggcagcaacgtt

SEQ ID NO: 108258 - DNA, 75 bp, synthetic construct
  source 1..75: mol_type = other DNA
tcgtttctgtgatacagaaaatctgaataacataataactctttccacttttcgtaatatagagtttctacaaac

SEQ ID NO: 108259 - DNA, 75 bp, synthetic construct
  source 1..75: mol_type = other DNA
cagatcatcatccaggaagaatcagaactctgcgcaccgtcgatccactggccggatcctattacattgagtcgc

SEQ ID NO: 108260 - DNA, 75 bp, synthetic construct
  source 1..75: mol_type = other DNA
tcaactttgcttacggctgggtgagggaaaaggaaagagcaaaacatgtgcactaccattgttgggtagcccttc

SEQ ID NO: 108261 - DNA, 75 bp, synthetic construct
  source 1..75: mol_type = other DNA
gcgcaactggcacaacggatgaaaacatctggtaataagccgaataaacgttgtcgcagatgtgatgaggcttcg

SEQ ID NO: 108262 - DNA, 75 bp, synthetic construct
  source 1..75: mol_type = other DNA
ggcggctggtacgaatggagcagcgatccaaaaaatccggtagcaaccggtgaacgcggcccggacagcagcaaa

SEQ ID NO: 108263 - DNA, 75 bp, synthetic construct
  source 1..75: mol_type = other DNA
cacaggcgctggcagagcaaaacggcgtggcgtgggagtcgatcgacgcctggcagatcccttcatcactgattg

SEQ ID NO: 108264 - DNA, 75 bp, synthetic construct
  source 1..75: mol_type = other DNA
ggttctaaattttttggttttgatatggataacgaattcatcagtggttttgatgtaggggcatgggggacaata

SEQ ID NO: 108265 - DNA, 75 bp, synthetic construct
  source 1..75: mol_type = other DNA
cagtactgctgcaactgtcaccggcgcaaaccgcctggggcatttctccgtgggaaatggcatggcagataacgt

SEQ ID NO: 108266 - DNA, 75 bp, synthetic construct
  source 1..75: mol_type = other DNA
cggacaaaaactctattcgtggaatttataaccatgcccaatatctcgaagggagaagagaaatgatgcaatggt

SEQ ID NO: 108267 - DNA, 75 bp, synthetic construct
  source 1..75: mol_type = other DNA
atattaaatggcaatacctgcagggtgatggcgattttcgtagtgatgaaatcaaagaactacgcgatgaaagcg

SEQ ID NO: 108268 - DNA, 75 bp, synthetic construct
  source 1..75: mol_type = other DNA
cggttcgtagtaagcgacagttccaaatacagctgtttctcgaagataaattaggcgcgctgattgcaggaaatc

SEQ ID NO: 108269 - DNA, 75 bp, synthetic construct
  source 1..75: mol_type = other DNA
tgctgcttctgacaggcctcagaacgattgaactacggtccgctgaatggtcagaaattgattttgataatgccc

SEQ ID NO: 108270 - DNA, 75 bp, synthetic construct
  source 1..75: mol_type = other DNA
atttttcgctcgcgcctccgtatccgtttgtgcagcttgcgaccctgaaacaacggaccgaaaaagctgccagga

SEQ ID NO: 108271 - DNA, 75 bp, synthetic construct
  source 1..75: mol_type = other DNA
tcgaacagtgaataatgcagagttatttcagaaaatatgtaagcgtcaacggagcaccgtattgacgcttattta

SEQ ID NO: 108272 - DNA, 75 bp, synthetic construct
  source 1..75: mol_type = other DNA
gtgctttccgccgccttcggtcatcaggtcgaagagaacaaacataacgctctcgagaagtacaaagggcagtat

SEQ ID NO: 108273 - DNA, 75 bp, synthetic construct
  source 1..75: mol_type = other DNA
cccgactgaattgatcgagccgaaatcggtggtttctggcgctacgccggtaatgcgtgattctgaacacttctt

SEQ ID NO: 108274 - DNA, 75 bp, synthetic construct
  source 1..75: mol_type = other DNA
tgacaactatcactcgacgcacagcgaagagaaccgccagttgtctgagcttatctatactcgcctgaaagaaaa

SEQ ID NO: 108275 - DNA, 75 bp, synthetic construct
  source 1..75: mol_type = other DNA
ccgatgggacgcattctggtcagaggtgaagcaggtcatgacatcattcctgaactgtacccggtggcaggcgaa

SEQ ID NO: 108276 - DNA, 75 bp, synthetic construct
  source 1..75: mol_type = other DNA
ccgtgaaatcatggcgctggctgacctggctaaccgctatgtcgatgaacaggctccgtgggtggtggcgaaaca

SEQ ID NO: 108277 - DNA, 75 bp, synthetic construct
  source 1..75: mol_type = other DNA
ggctcgcaggccctccgtcagccggtgaagtatgcagagcctttacccgttctgttgacccgctatgcggcacag

SEQ ID NO: 108278 - DNA, 75 bp, synthetic construct
  source 1..75: mol_type = other DNA
atcctgaaatcccgacagattggggcgacctggtattttgcacaggaagcactgaggtgtactggcaatagcgga

SEQ ID NO: 108279 - DNA, 75 bp, synthetic construct
  source 1..75: mol_type = other DNA
cttacttccatgatttctttaactacgccgggatccatcgcagcgtaatgctctacaccacgccgaacacctggg

SEQ ID NO: 108280 - DNA, 75 bp, synthetic construct
  source 1..75: mol_type = other DNA
gggtcgccaactggtatgaaattaagtcaatatacgatgattatgtccatctttatgccaatgaaataattggtt

SEQ ID NO: 108281 - DNA, 75 bp, synthetic construct
  source 1..75: mol_type = other DNA
acagaataaaacaggaggtgacttcaaggaaatagacctgctgacccggcagcttaaaaaactacatgatggcca

SEQ ID NO: 108282 - DNA, 75 bp, synthetic construct
  source 1..75: mol_type = other DNA
caacaggcgtcagcaaaggtccggggcagcaggaagccgtcagccgtctggctgaagagctgacaggtaaaaagc

SEQ ID NO: 108283 - DNA, 75 bp, synthetic construct
  source 1..75: mol_type = other DNA
accgcgatggcgctgaatgccgatgcgactgaaaaagtaatttcggtgcaggaaatgcacgcgcagatcaaataa

SEQ ID NO: 108284 - DNA, 75 bp, synthetic construct
  source 1..75: mol_type = other DNA
taccatacccgactcgtttttgggcttctgcgctaattgcaaagccgcatgtactgatggctgacaacatcatcc

SEQ ID NO: 108285 - DNA, 75 bp, synthetic construct
  source 1..75: mol_type = other DNA
ttattcgcgagcaaaccggtgaagcacaaaggatatcaatgtgtacttataatattctgcaagaaatcgaggaaa

SEQ ID NO: 108286 - DNA, 75 bp, synthetic construct
  source 1..75: mol_type = other DNA
cttattgtgattgccgtgggcgttatcattttcttagtactcaatgacaaagaagaggcaccgtccgtggaggtg

SEQ ID NO: 108287 - DNA, 75 bp, synthetic construct
  source 1..75: mol_type = other DNA
catgggcgtgggccgcaccttcgctgaagcgtttgccaaagcgcagctgggcagcaactccaccatgaagaaaca

SEQ ID NO: 108288 - DNA, 75 bp, synthetic construct
  source 1..75: mol_type = other DNA
atttatcgcgatcggcgtcattatggtgtcctggattctgagcgtcagtctgttacaggcttttacactagagat

SEQ ID NO: 108289 - DNA, 75 bp, synthetic construct
  source 1..75: mol_type = other DNA
gcattctttcgctggtggtcgccgtttatatcattcagttgctagcattctgtttcaacattgacggcggcccca

SEQ ID NO: 108290 - DNA, 75 bp, synthetic construct
  source 1..75: mol_type = other DNA
gtggttgttgcaggtagcgatagcaaacgtcgaatcgtgttaaggaagttgcgattaagtggtccgcagctcccg

SEQ ID NO: 108291 - DNA, 75 bp, synthetic construct
  source 1..75: mol_type = other DNA
ttggctatatgggctctttcaagaatctgtgtgacaagcgcggcgacagcgtaagcttcgatgaatactggaaga

SEQ ID NO: 108292 - DNA, 75 bp, synthetic construct
  source 1..75: mol_type = other DNA
agaccgtcagacgcagcgggcagaccggcggaaacaccggcaatacggccccgccggcagccggaaccggggagc

SEQ ID NO: 108293 - DNA, 75 bp, synthetic construct
  source 1..75: mol_type = other DNA
atggagccatacagcctcacactcgatgaggcctgtcattttctcaagatatccagaccgactgccattaactgg

SEQ ID NO: 108294 - DNA, 75 bp, synthetic construct
  source 1..75: mol_type = other DNA
ttttttccacgcagtccacatgctgaatggaacggcagtgacttcattgtaaatttaacttatcgtaaagatggt

SEQ ID NO: 108295 - DNA, 75 bp, synthetic construct
  source 1..75: mol_type = other DNA
cgcttcaacttcgagaaattcgccggtgctaacgaccgtctgaccactcagatgaaatcggttggcgaagtgatg

SEQ ID NO: 108296 - DNA, 75 bp, synthetic construct
  source 1..75: mol_type = other DNA
aatggaacaatcattgatggtggaggccagtcagtatcaactcaggggcatgttgacggtacaacgataaataag

SEQ ID NO: 108297 - DNA, 75 bp, synthetic construct
  source 1..75: mol_type = other DNA
cctcatcccgtgacaccctgcgcgacagtgcaaaacacagtgtgagtgaactgccggtgaactggtgggtacagc

SEQ ID NO: 108298 - DNA, 75 bp, synthetic construct
  source 1..75: mol_type = other DNA
atcccggtcattgttattatgattaccttacatcctctgaatcttttcattgagcatgttacaggtatgatttta

SEQ ID NO: 108299 - DNA, 75 bp, synthetic construct
  source 1..75: mol_type = other DNA
caactagaaaaagtgaaatttcttcactttttcacacttatttatcgcactgatttggcaattgtgatgataaaa

SEQ ID NO: 108300 - DNA, 75 bp, synthetic construct
  source 1..75: mol_type = other DNA
tttccgtgcgggcctgtctgtagatggcgtctttaacctgaccaacattgaccgctggttcctggtacaaattga

SEQ ID NO: 108301 - DNA, 75 bp, synthetic construct
  source 1..75: mol_type = other DNA
agatgtcgatggttcatgatgaactgccaaaatacctgctcgcccctgaagtgagtgccctgctccattacgtcc

SEQ ID NO: 108302 - DNA, 75 bp, synthetic construct
  source 1..75: mol_type = other DNA
tgacgcaatggctggtctggtgtgtgccgtgttcatcgttctgacttgtaatatcgttaccggtattatgctggg

SEQ ID NO: 108303 - DNA, 75 bp, synthetic construct
  source 1..75: mol_type = other DNA
caaccggaaccatcgtcaacaccagtgcagaaggtggtccggagtctgaaaatgtgtccagcggtcagatggtcg

SEQ ID NO: 108304 - DNA, 75 bp, synthetic construct
  source 1..75: mol_type = other DNA
gctaccggcgctggatatggaacattttatgtatcgtcaggggttttccgatgtgttccaccgtgtggcgcaaat

SEQ ID NO: 108305 - DNA, 75 bp, synthetic construct
  source 1..75: mol_type = other DNA
ggccggtagcgattggtcacccgtgctatggctgtaacgaagaaggtatcggcttccataaaggtatccatcagc

SEQ ID NO: 108306 - DNA, 75 bp, synthetic construct
  source 1..75: mol_type = other DNA
gataacttcgaaatattaggcgagttgataatcatcaataaagtaaacacctacccttataaacacctgatacag

SEQ ID NO: 108307 - DNA, 75 bp, synthetic construct
  source 1..75: mol_type = other DNA
ggaagccgggatccgtaacaggatgatcctgaaatcccgacagattggggcgacctggtattttgcacaggaagc

SEQ ID NO: 108308 - DNA, 75 bp, synthetic construct
  source 1..75: mol_type = other DNA
gggtgtctttcgattgtgactgtggtcgtcatcaatactggtatcgttacatcgctactgcgggtaactttgcct

SEQ ID NO: 108309 - DNA, 75 bp, synthetic construct
  source 1..75: mol_type = other DNA
ccatagagaaatggtaaccactttatcagacaagataaatataagacacgtcgtaaacattcaaggccgtagtta

SEQ ID NO: 108310 - DNA, 75 bp, synthetic construct
  source 1..75: mol_type = other DNA
tccttatatcgctattgaaacagactactccacctcggatgtcgggcagctcagtacccgtgtcgcggcctttat

SEQ ID NO: 108311 - DNA, 75 bp, synthetic construct
  source 1..75: mol_type = other DNA
aaaccgtccgactttcgcctatggtcgtctgattcacgaacactgtgaacgtcgcccgcacttcgatgctggtcg

SEQ ID NO: 108312 - DNA, 75 bp, synthetic construct
  source 1..75: mol_type = other DNA
tgaacgctgaattcctgcgccagttgaaacgcaaaggctttgccgatgcgcgtctggcaaaactggcgggcgtgc

SEQ ID NO: 108313 - DNA, 75 bp, synthetic construct
  source 1..75: mol_type = other DNA
gcaaataccactgtggtttatgccggcggcgaccagactgtacatggtcacgcactggataccacgctgaatggg

SEQ ID NO: 108314 - DNA, 75 bp, synthetic construct
  source 1..75: mol_type = other DNA
agcttgccaacaaggagttgagccgtcgggaaaaaaccgtcgactcactggtacggcaaacggcggaagggatcg

SEQ ID NO: 108315 - DNA, 75 bp, synthetic construct
  source 1..75: mol_type = other DNA
ctggaaaatgatgagttaattgtcggcagtgaagatggtattgacccggtttcgctggcggccctgacgcgtaaa

SEQ ID NO: 108316 - DNA, 75 bp, synthetic construct
  source 1..75: mol_type = other DNA
ggatgaacctactgcggcgttaacagaaactgaaattgaaagcttatttcgcgtcacccggttattgaaagagca

SEQ ID NO: 108317 - DNA, 75 bp, synthetic construct
  source 1..75: mol_type = other DNA
gcgtgacagtgcaaaacacagtgtgagtgaattaccggtgaactggtgggtacagccttctgttatccgcacctt

SEQ ID NO: 108318 - DNA, 75 bp, synthetic construct
  source 1..75: mol_type = other DNA
gatgcggattatgtctttgacgtgcgtttcctgccgaacccgcactgggacccgaaactgcgtccgatgaccggc

SEQ ID NO: 108319 - DNA, 75 bp, synthetic construct
  source 1..75: mol_type = other DNA
tgtgtggtgtggccggtgaagtggtgattggcaactcattgtgtaatgagcggcgccgggtgctgctgacgcccg

SEQ ID NO: 108320 - DNA, 75 bp, synthetic construct
  source 1..75: mol_type = other DNA
gctggcgcattgtactgatgcagaggcgttatgtattgatagagtcataagtgaggtgctggcagagctgatcct

SEQ ID NO: 108321 - DNA, 75 bp, synthetic construct
  source 1..75: mol_type = other DNA
agttgcagatggccaatgaattgcaggctaaacattctgactggccgctgattacctgtcgtcgacgcattgaca

SEQ ID NO: 108322 - DNA, 75 bp, synthetic construct
  source 1..75: mol_type = other DNA
accgaaccggtggtgcggttgaatgttgaatcgcgcggtgatgtgccgctgatggaagaaaagacaaaacttatc

SEQ ID NO: 108323 - DNA, 75 bp, synthetic construct
  source 1..75: mol_type = other DNA
acggaagccgaaatgaagccgattcaggacgatatccgtcatgcccagtggcgttgggatctggcgatcgcttcc

SEQ ID NO: 108324 - DNA, 75 bp, synthetic construct
  source 1..75: mol_type = other DNA
atgaatatgatgaccgtgccgtttcacggcaactctctttatgtggttaaccataatggtgagccgtatgttcct

SEQ ID NO: 108325 - DNA, 75 bp, synthetic construct
  source 1..75: mol_type = other DNA
aacgtctcatggcagagcaacttcaaaagcgccatccagaatggtgctacatgacctgccgccgccgaattgatt

SEQ ID NO: 108326 - DNA, 75 bp, synthetic construct
  source 1..75: mol_type = other DNA
ggcagtgatgcaggagtcaccgttgggatcactgctgacctttgccgaacataaaggttatgccctggcggcgat

SEQ ID NO: 108327 - DNA, 75 bp, synthetic construct
  source 1..75: mol_type = other DNA
agacaaagagggatgcagacattgtcttgctgaaattatgcaacaaaatattgctattttataccagcaatacaa

SEQ ID NO: 108328 - DNA, 75 bp, synthetic construct
  source 1..75: mol_type = other DNA
aattggtaatgacgattacaactgtcttatcgaaggaaataaaaataacaaacgaacagcgacggggttgagtac

SEQ ID NO: 108329 - DNA, 75 bp, synthetic construct
  source 1..75: mol_type = other DNA
cgctactcaggtggggcgaatgactaacccactactctcatcctgtgatgaggatgactcggatgaggatgactc

SEQ ID NO: 108330 - DNA, 75 bp, synthetic construct
  source 1..75: mol_type = other DNA
tactcgcggggaaaaacaaaagcggcctggccttctgtacagacgatgaaggactgctgattgataaggtactgg

SEQ ID NO: 108331 - DNA, 75 bp, synthetic construct
  source 1..75: mol_type = other DNA
taaaactagtatctggtgattctgatattcagtttagcgggatcaagaagtttgattgtggcgacagagtgctga

SEQ ID NO: 108332 - DNA, 75 bp, synthetic construct
  source 1..75: mol_type = other DNA
agaaccagcaaaatattgaagcgcattacggcaaatcgcttcatgaagttgtcggtatcgtgacgccttttagcg

SEQ ID NO: 108333 - DNA, 75 bp, synthetic construct
  source 1..75: mol_type = other DNA
gaagaaatcgggtatctcaaagccggaactggaggcgttctttcgtgaaatactcgcggggaaaaacaaaagcgg

SEQ ID NO: 108334 - DNA, 75 bp, synthetic construct
  source 1..75: mol_type = other DNA
gaaacgtatgaccggccttcagtcacctgaagaaggcttgtaccaggctgccacacaaacagcaggtaaagtgta

SEQ ID NO: 108335 - DNA, 75 bp, synthetic construct
  source 1..75: mol_type = other DNA
cgtctggcaaacaccaaagcaggaacgccagcctatgaaagagcattaagtaacgctgcaaatgccatcagaccg

SEQ ID NO: 108336 - DNA, 75 bp, synthetic construct
  source 1..75: mol_type = other DNA
atcaaggccgagaagcaggacttcatcaaaacggtgatcccgcagtgggaagaacaggcacgtaaaaatggtctg

SEQ ID NO: 108337 - DNA, 75 bp, synthetic construct
  source 1..75: mol_type = other DNA
cggctttgtgagcgttaatggtgataggcattatggctttatggagagtcttaaatacggagacgataacggcaa

SEQ ID NO: 108338 - DNA, 75 bp, synthetic construct
  source 1..75: mol_type = other DNA
gacatttggtatgatggcgatgcaaggggaagggttgacaggcgtacttgctgaaatagttcgcttttttgccgt

SEQ ID NO: 108339 - DNA, 75 bp, synthetic construct
  source 1..75: mol_type = other DNA
catgcgcaatggcgctgggatctggcgatcgcttcccatggcattcatatgcatgccccggaagaaggtttacgg

SEQ ID NO: 108340 - DNA, 75 bp, synthetic construct
  source 1..75: mol_type = other DNA
ttaaaaaacagaataatcccgatgataacatgatgcaatattattggtgggatagtgaaactcaatcgaattgga

SEQ ID NO: 108341 - DNA, 75 bp, synthetic construct
  source 1..75: mol_type = other DNA
taccgcacctcgcattacccttacgctgaagagatgctcgactgggctgacgaacatggcattgtggtgattgat

SEQ ID NO: 108342 - DNA, 75 bp, synthetic construct
  source 1..75: mol_type = other DNA
tttttatttaaacaagactaaaatagtcagaaaacttataccatttggtcaaaccattcttcgcaaagtaacttt

SEQ ID NO: 108343 - DNA, 75 bp, synthetic construct
  source 1..75: mol_type = other DNA
cgccagcctatgaaagagcattaagtaacgctgcaaatgccatcagaccgctgcttgccactgaggcaacacagc

SEQ ID NO: 108344 - DNA, 75 bp, synthetic construct
  source 1..75: mol_type = other DNA
attgatggaacggaccggatatatcccgccagtggaggcagaaaaagcctattacgcttcgctgaatgaccggga

SEQ ID NO: 108345 - DNA, 75 bp, synthetic construct
  source 1..75: mol_type = other DNA
aagaggataacagcgtacaccactatatgctagtccttaataaatataatcccagccagcgcgagatgcaacctt

SEQ ID NO: 108346 - DNA, 75 bp, synthetic construct
  source 1..75: mol_type = other DNA
cattacctcgtacgcgcgcttggcgtgaagactttcgccatccttgcgtcaggaggttgtttgaatccagtggta

SEQ ID NO: 108347 - DNA, 75 bp, synthetic construct
  source 1..75: mol_type = other DNA
aacggatattgacccgctggcagccggcatggcgtatatacaactgtcgctgtgtggtgtggccggagaagtggt

SEQ ID NO: 108348 - DNA, 75 bp, synthetic construct
  source 1..75: mol_type = other DNA
atgcagaaaaaacactgactgaagcattacagaatttacgggatgcgcatacctgtgaagcagccgaggatgccc

SEQ ID NO: 108349 - DNA, 75 bp, synthetic construct
  source 1..75: mol_type = other DNA
ttgtcgggtgtttatcaacctgacgaaggtgaaatagtttttgaagatcaatctgtctcattttctgagccgtta

SEQ ID NO: 108350 - DNA, 75 bp, synthetic construct
  source 1..75: mol_type = other DNA
aactggcgctggatatcatcgacaaggtgactgagcaggggcatggtgtccttctgttcacaatggaaatggcga

SEQ ID NO: 108351 - DNA, 75 bp, synthetic construct
  source 1..75: mol_type = other DNA
caccgacatgtggagtgaagagtatcagtgtgcatggctggatatgtatcaccgcgtctttgatcgcgtcagcgc

SEQ ID NO: 108352 - DNA, 75 bp, synthetic construct
  source 1..75: mol_type = other DNA
ccgtattttagtgatgcgtagtggccgaattaccggcgagcttagtgcaaatgaagccacgcaagaaaaaattat

SEQ ID NO: 108353 - DNA, 75 bp, synthetic construct
  source 1..75: mol_type = other DNA
tttgctgccctgaccggcatacgctgcagtaccgcgcatatcacggcaaaggacaacgcctggctgtactcactg

SEQ ID NO: 108354 - DNA, 75 bp, synthetic construct
  source 1..75: mol_type = other DNA
atgccggtatcccgtcttaagtctgttgcccgttttgaagatgaagactgggcgcgtttctcacagggcgtggga

SEQ ID NO: 108355 - DNA, 75 bp, synthetic construct
  source 1..75: mol_type = other DNA
ttagtaaagatcttaatcaattatggaatgaaggcctggtggtaaaaagtcagggacgtcctgtttttttctaca

SEQ ID NO: 108356 - DNA, 75 bp, synthetic construct
  source 1..75: mol_type = other DNA
ggcgtgattgcgcaaagctatcatcagtcggaaaaatcagcttgcgaatttgatgccattgttgcgcaaacggaa

SEQ ID NO: 108357 - DNA, 75 bp, synthetic construct
  source 1..75: mol_type = other DNA
caatccaattatggcattgtttcaaaaattggaagctatcctttcttcatatatcttctggttggatttattgtc

SEQ ID NO: 108358 - DNA, 75 bp, synthetic construct
  source 1..75: mol_type = other DNA
gagcgccagctcaggcggctaaacaggaagcggctccggcagcaggcccgtgcatcagcggctggcgtgaaagaa

SEQ ID NO: 108359 - DNA, 75 bp, synthetic construct
  source 1..75: mol_type = other DNA
gactttaaccgatttcttacggcacggaatcgctccgtaataagaggctttaatgatgttagcattgctatttca

SEQ ID NO: 108360 - DNA, 75 bp, synthetic construct
  source 1..75: mol_type = other DNA
tagtgctgttacccgatctggctcgcacgctcgccgatcgcgagatttctgccgccgtcagcattgatgttcgta

SEQ ID NO: 108361 - DNA, 75 bp, synthetic construct
  source 1..75: mol_type = other DNA
gcaccgtttgctggcaccgtgaaagagatcaaagtgaacgtgggtgacaaagtgtctaccggctcgctgattatg

SEQ ID NO: 108362 - DNA, 75 bp, synthetic construct
  source 1..75: mol_type = other DNA
tgagctggatattacgggtgatctgacactcaatggcgtaaccaaaccagtaacgctggaagcaaaattgattgg

SEQ ID NO: 108363 - DNA, 75 bp, synthetic construct
  source 1..75: mol_type = other DNA
caagcaggacgctgaaaactcgtttgaggctatcactcgggagtggtatcagcgtcgctatgatcgctggtctgt

SEQ ID NO: 108364 - DNA, 75 bp, synthetic construct
  source 1..75: mol_type = other DNA
atatcggtcaccggccaatcaaagatatcaagccgatggagttgcttgcagttctttcaaagatagaagcacgag

SEQ ID NO: 108365 - DNA, 75 bp, synthetic construct
  source 1..75: mol_type = other DNA
cggcctgtttgccactttattgcaggcaaaaggtacattacggctggataaagacgcccgtccattattgctgat

SEQ ID NO: 108366 - DNA, 75 bp, synthetic construct
  source 1..75: mol_type = other DNA
acagtgtgcgtgaactgccggtgaactggtgggtacagccttctgttatccgcactttcagctcccggggtgaca

SEQ ID NO: 108367 - DNA, 75 bp, synthetic construct
  source 1..75: mol_type = other DNA
aaagatattgcccttgagtggcacagcagcaaattaaaaaaatggtctgctggttatgcttcagacatcctcgaa

SEQ ID NO: 108368 - DNA, 75 bp, synthetic construct
  source 1..75: mol_type = other DNA
aaaatacccatggagcggcgtaaccgtcgcacaggaaggacagagaaagcgcggatctgggaagtgacggacaga

SEQ ID NO: 108369 - DNA, 75 bp, synthetic construct
  source 1..75: mol_type = other DNA
caccatatcgccgcagagactgagcaggaagcccgccgcattctggcgcgggatcacgtttgcttttttgccgga

SEQ ID NO: 108370 - DNA, 75 bp, synthetic construct
  source 1..75: mol_type = other DNA
ctgccagaatggctacgaccccaaccccgttacaccctgaatttacctttcactttctggccgttcgccgttccg

SEQ ID NO: 108371 - DNA, 75 bp, synthetic construct
  source 1..75: mol_type = other DNA
ggcacaaaatgaaatcacccaaatggtctgagggctatgcttccgacatcattgaggcattcgagaaagacattt

SEQ ID NO: 108372 - DNA, 75 bp, synthetic construct
  source 1..75: mol_type = other DNA
tctttttttgtgtcatgccatcgcgcaaccatacccagcggcaaagcccgcacagtatctatggtggcgctggtg

SEQ ID NO: 108373 - DNA, 75 bp, synthetic construct
  source 1..75: mol_type = other DNA
gcgcggcagctccggcggctaaacaggaagcggctccggcagcaggcccctgcatcagcggctggcgtgaaagaa

SEQ ID NO: 108374 - DNA, 75 bp, synthetic construct
  source 1..75: mol_type = other DNA
ctgacacacccgggcttgggggaggaacgtttatagccttttccagttctgaagctgacgatggtgtgaatattt

SEQ ID NO: 108375 - DNA, 75 bp, synthetic construct
  source 1..75: mol_type = other DNA
tttcactgacactactttcgccaagctcagcagcaaacaaggttagaatggcaatagagaatcttttatctgaat

SEQ ID NO: 108376 - DNA, 75 bp, synthetic construct
  source 1..75: mol_type = other DNA
tttctgttctgtgtgaagatgccgaagccgcaggccgcgtactggggcaattgaaagcaaccgttcgccgcaact

SEQ ID NO: 108377 - DNA, 75 bp, synthetic construct
  source 1..75: mol_type = other DNA
gagcggtgcctcatgtctcttcatgaacgaattaccatagctgcacatagaaaaaaaacatttggaaagttagat

SEQ ID NO: 108378 - DNA, 75 bp, synthetic construct
  source 1..75: mol_type = other DNA
cgtctgctgggtaaacgtgaacgcgaactgaccatggtctttgagtctttcggcttcaaacacggtatccctatc

SEQ ID NO: 108379 - DNA, 75 bp, synthetic construct
  source 1..75: mol_type = other DNA
gggcgccagctcaggcggctaaacaggaagcggctccggcagcaggcccatgcatcagcggctggcgtgaaagaa

SEQ ID NO: 108380 - DNA, 75 bp, synthetic construct
  source 1..75: mol_type = other DNA
tcacgctggaagcgaaattaattggtcagggcgacgacccgtggggtggtaaacgtgcaggcttcgaggccgaag

SEQ ID NO: 108381 - DNA, 75 bp, synthetic construct
  source 1..75: mol_type = other DNA
tatcggctacctgattgaagtaaaggagtggtggcaactcaacgaggagccaggaacatttcgcattgttgtcgg

SEQ ID NO: 108382 - DNA, 75 bp, synthetic construct
  source 1..75: mol_type = other DNA
gtgatcgccaacttccgcgaaaccgatctgaaaaatattcgctcaggtacacctgcaacgattcgcctgatgagt

SEQ ID NO: 108383 - DNA, 75 bp, synthetic construct
  source 1..75: mol_type = other DNA
cagcagactcaccggctggttccgctctccgacgcctggtacgtcagccagctgcagacgatggtggccacactg

SEQ ID NO: 108384 - DNA, 75 bp, synthetic construct
  source 1..75: mol_type = other DNA
tatcaccctgggcgttcaggccggttatgcccacagcgtcagcggcagcagcgctgaagggtataacggtcaggc

SEQ ID NO: 108385 - DNA, 75 bp, synthetic construct
  source 1..75: mol_type = other DNA
ttatccgcaccaccattgaggcactggccgcgactctgggcggtactcagtcgctgcataccaacgcttttgatg

SEQ ID NO: 108386 - DNA, 75 bp, synthetic construct
  source 1..75: mol_type = other DNA
acgggggttccgttggatgccgggagctggcaggcaatttgtgacgccgcgcggcagattggtatatcagaagag

SEQ ID NO: 108387 - DNA, 75 bp, synthetic construct
  source 1..75: mol_type = other DNA
tccgcaaggtgcacgagaatatttcgcgccactggcggaagcaacgcgtaaactcgacccgacgcgtccgatcac

SEQ ID NO: 108388 - DNA, 75 bp, synthetic construct
  source 1..75: mol_type = other DNA
ggcagtcatgctggagtcaccgctaggagcgttgctggcctttgctgaacataaaggttatgccctggcagtgat

SEQ ID NO: 108389 - DNA, 75 bp, synthetic construct
  source 1..75: mol_type = other DNA
gggcgccagctcaggcggctaaacagaaagcggctccggcagcaggcccgtgcatcagcggctggcgtgaaagaa

SEQ ID NO: 108390 - DNA, 75 bp, synthetic construct
  source 1..75: mol_type = other DNA
acgtattgctaccaccaactctggcgagctgctttcgttaactccagtggaacatgtttgccgcctggtgcgtga

SEQ ID NO: 108391 - DNA, 75 bp, synthetic construct
  source 1..75: mol_type = other DNA
tttacctgaaataaaaccatttattgataaatgcattgataaatgggatgcactgcccttatcgatcgccggatg

SEQ ID NO: 108392 - DNA, 75 bp, synthetic construct
  source 1..75: mol_type = other DNA
tgataccagtttccaccagacgatggctccggaagcttatttatacggcctgccggtaatggtgccaacttactg

SEQ ID NO: 108393 - DNA, 75 bp, synthetic construct
  source 1..75: mol_type = other DNA
gtgcgccagctcaggcggctaaacaggaagcggctccggcagcaggcccttgcatcagcggctggcgtgaaagaa

SEQ ID NO: 108394 - DNA, 75 bp, synthetic construct
  source 1..75: mol_type = other DNA
ttaatttaagaggcattaaaatgaaaggattattatctttactcattttttctatggtccttcctgcacatgccg

SEQ ID NO: 108395 - DNA, 75 bp, synthetic construct
  source 1..75: mol_type = other DNA
gacagcggcaaaactttcgagggtaaagtggattcaattggctacggcgtgctaccggatgacggcggcctggtg

SEQ ID NO: 108396 - DNA, 75 bp, synthetic construct
  source 1..75: mol_type = other DNA
aaagagtggtgggagctcaacgaagagccgggaactttccggcttgtggttggcgtactcgagaccggcatcacc

SEQ ID NO: 108397 - DNA, 75 bp, synthetic construct
  source 1..75: mol_type = other DNA
gcgtcaccttctctacaggaatagcagaattagtagaaacagtacccagcaaggctgtaaaaggcatattcgatt

SEQ ID NO: 108398 - DNA, 75 bp, synthetic construct
  source 1..75: mol_type = other DNA
tgattaacgccagcgaaaaaggggccgatctccagattaccggcaccagcgatcagcctgttaacaccgccatca

SEQ ID NO: 108399 - DNA, 75 bp, synthetic construct
  source 1..75: mol_type = other DNA
ggggcgtcctcattctggtcactggcactgatgataaaacccctcatcgaacctgacggatacgctatctgcgaa

SEQ ID NO: 108400 - DNA, 75 bp, synthetic construct
  source 1..75: mol_type = other DNA
cggcatcattaaccaatactgtctgaaaatgattggtggaccgattggtggcatgatttcagataagatcctgaa

SEQ ID NO: 108401 - DNA, 75 bp, synthetic construct
  source 1..75: mol_type = other DNA
aaccgcctggggcatttctccgtgggaaatggcatggcagataacgtcgttctggaaaatggcggtcgcctggat

SEQ ID NO: 108402 - DNA, 75 bp, synthetic construct
  source 1..75: mol_type = other DNA
atgaaaaataaagatgatgaaaaaaataatgacgcgggaaatcgcggaattatcgaagtaaaaggtaaagcagca

SEQ ID NO: 108403 - DNA, 75 bp, synthetic construct
  source 1..75: mol_type = other DNA
ccatcaacaacatcggcggcaacgccggaacggcaacccgacttcagacggcccgcaggattaacaatgtgctgt

SEQ ID NO: 108404 - DNA, 75 bp, synthetic construct
  source 1..75: mol_type = other DNA
ctgcgttcagaactggcggcaaattacccgtttatcgaccccgataaaaagatgattctggtgaccggtcacagg

SEQ ID NO: 108405 - DNA, 75 bp, synthetic construct
  source 1..75: mol_type = other DNA
cttgaataatatcaaggctatcgttcgtgatatatatatagccgagccagccatgctcgataatttgaatacaaa

SEQ ID NO: 108406 - DNA, 75 bp, synthetic construct
  source 1..75: mol_type = other DNA
cggaacagcaacccgccttcagaacgcccgcagaatcaacaatgtgctgtttgatggctccagcgatatcacaat

SEQ ID NO: 108407 - DNA, 75 bp, synthetic construct
  source 1..75: mol_type = other DNA
atagttgtcaatggaacaagtgagaatttcaatgttgatgttgaacccttccgagaagggtcgtttgagtattta

SEQ ID NO: 108408 - DNA, 75 bp, synthetic construct
  source 1..75: mol_type = other DNA
gtttcttgatggcaccgatgccgccgcgctggatgaagaggggcgccgtcgctttcgcgccgagaaaatcggcct

SEQ ID NO: 108409 - DNA, 75 bp, synthetic construct
  source 1..75: mol_type = other DNA
atggatacagtagcggcggtacgctgcgtgaaatctgataaaaaagcagggggaacggagaagatttttcacgta

SEQ ID NO: 108410 - DNA, 75 bp, synthetic construct
  source 1..75: mol_type = other DNA
aagaaatttatgataatcataataaattagttgtgaagttaccctctaagttccttgaaaggcatctgtcaaaaa

SEQ ID NO: 108411 - DNA, 75 bp, synthetic construct
  source 1..75: mol_type = other DNA
actacagagtttccacagctaagcaaggaaagagcggcttagggttggcggctcaacgggaggcagtctgcgctt

SEQ ID NO: 108412 - DNA, 75 bp, synthetic construct
  source 1..75: mol_type = other DNA
tggcagcctgagttcacagataaaacactctccaggaaacccggggcggttcagccatatgcgtttccacgcata

SEQ ID NO: 108413 - DNA, 75 bp, synthetic construct
  source 1..75: mol_type = other DNA
cttcgagctggatgcaacccacggtacagcgattgtgctgggtgaagcgggcatcaacccgcgtctggttaacaa

SEQ ID NO: 108414 - DNA, 75 bp, synthetic construct
  source 1..75: mol_type = other DNA
cgtaatttccagtataccaacgaggtgtttcataatcccggcggtgctgaaattacatggacattccgggcacct

SEQ ID NO: 108415 - DNA, 75 bp, synthetic construct
  source 1..75: mol_type = other DNA
atggggtataaagaaagtgaatataatttagacaatttgtacgacgccttcctgaagctggcggacaaaaaaggt

SEQ ID NO: 108416 - DNA, 75 bp, synthetic construct
  source 1..75: mol_type = other DNA
atgacaggttcagaaatggcgaaagccggtctgcgcgaacagaaccgactttcaggtgcaaatcgtaacacactc

SEQ ID NO: 108417 - DNA, 75 bp, synthetic construct
  source 1..75: mol_type = other DNA
taacggcagcgtggaaaaatcaggaagtggcacactcactgtcagcaacaccacactcacccagaaagccgtcaa

SEQ ID NO: 108418 - DNA, 75 bp, synthetic construct
  source 1..75: mol_type = other DNA
atgctgataaaacgacatctgaataccagctacaggctggtatggaatcacattacaggcgctttcgtggttgcc

SEQ ID NO: 108419 - DNA, 75 bp, synthetic construct
  source 1..75: mol_type = other DNA
cgttaccggactaattgaaactgggattaactttgtggccgccgatatgccacaagctgacaaggtgatgatcca

SEQ ID NO: 108420 - DNA, 75 bp, synthetic construct
  source 1..75: mol_type = other DNA
agcacgtggcaaggttttaggtgtggcggggagcactaacctaaaaagtaacattgaagcgcgccaacaagcggc

SEQ ID NO: 108421 - DNA, 75 bp, synthetic construct
  source 1..75: mol_type = other DNA
gtgggttacgtaagcttcagcgaggcagctcacgccataacggactatatcgttggatattacagcgcactaaga

SEQ ID NO: 108422 - DNA, 75 bp, synthetic construct
  source 1..75: mol_type = other DNA
ctgtcagatggtggcaaaagatgtactcaatctgcgggttgaaaactgccagctcaaagacacttccagtgcaat

SEQ ID NO: 108423 - DNA, 75 bp, synthetic construct
  source 1..75: mol_type = other DNA
cgacaggggtattgccatcaggatctgtctgttgcgcactcctgcacctcagagttgctggcacacctgaagcag

SEQ ID NO: 108424 - DNA, 75 bp, synthetic construct
  source 1..75: mol_type = other DNA
atgatgaaaccattatcaaaaacagcaacgtatgaaggggttatccgcaagcaggccacctttgccagcgggccg

SEQ ID NO: 108425 - DNA, 75 bp, synthetic construct
  source 1..75: mol_type = other DNA
aatgctattgcttcaagccatatcctttccctgctatatgaacactggaaatttgcatttacactacgttatttt

SEQ ID NO: 108426 - DNA, 75 bp, synthetic construct
  source 1..75: mol_type = other DNA
gatgatggttatacgcgcattgcaaatgagttgctggaagctgtaatgctggccggattaacacagcaccagctt

SEQ ID NO: 108427 - DNA, 75 bp, synthetic construct
  source 1..75: mol_type = other DNA
gataatagcatcgattttttatttttgctctaatttgattgcatcaaaatggctgaagattgaaaatatagattt

SEQ ID NO: 108428 - DNA, 75 bp, synthetic construct
  source 1..75: mol_type = other DNA
tttcgaagtgagtacttacccctggtacgacaaagcaaccaacggcgtgcgttttaatgacctgttagcgacgct

SEQ ID NO: 108429 - DNA, 75 bp, synthetic construct
  source 1..75: mol_type = other DNA
attagaaagagtatagttattatacaaatattcttgataataataactgtatcctctaggcaaataggtataaat

SEQ ID NO: 108430 - DNA, 75 bp, synthetic construct
  source 1..75: mol_type = other DNA
gctggcgttttgttaggaaaagaggtgcgtaaacgtaaaacacctcaggaaaaaatcgcaattattcaacagact

SEQ ID NO: 108431 - DNA, 75 bp, synthetic construct
  source 1..75: mol_type = other DNA
gactggttgctcacgcaactggaagccatcccgcatatcaaacgtctgcggattcacagccgtctgccgattgtg

SEQ ID NO: 108432 - DNA, 75 bp, synthetic construct
  source 1..75: mol_type = other DNA
atatgatttcaactatccagcaaatgggacgttgtctcggatttgaagccttcattacgcaatcgaccttaaccc

SEQ ID NO: 108433 - DNA, 75 bp, synthetic construct
  source 1..75: mol_type = other DNA
gattacattaagaatcctgaaggagcgttatcggaacaggccaaatcattattgtcggattacaaggtaacagat

SEQ ID NO: 108434 - DNA, 75 bp, synthetic construct
  source 1..75: mol_type = other DNA
ggcactatgacgaagcagaccgcctcacgcaccgcaccgtgaatggcgaaaccgcagagcagtggcagtatgacg

SEQ ID NO: 108435 - DNA, 75 bp, synthetic construct
  source 1..75: mol_type = other DNA
ctctgaacttgctgccgccatgaagcagattaaagaactccagcgcctgctcggcaagaaaacgatggaaaatga

SEQ ID NO: 108436 - DNA, 75 bp, synthetic construct
  source 1..75: mol_type = other DNA
ggcgacacaccgctggtggattccacccgcgaccgcctgcaccgggaaacgctgcgcagcttcggtcgttatgaa

SEQ ID NO: 108437 - DNA, 75 bp, synthetic construct
  source 1..75: mol_type = other DNA
cagattaaagaactccagcgcctgctcggcaagaaaacgatggaaaatgaactcctcaaagaagccgttgaatat

SEQ ID NO: 108438 - DNA, 75 bp, synthetic construct
  source 1..75: mol_type = other DNA
tgatgcgtgagactgaacagcagatttaccgtcagttgactgacgaggtactggccctgcgattgtctgaaaacg

SEQ ID NO: 108439 - DNA, 75 bp, synthetic construct
  source 1..75: mol_type = other DNA
tcgctgacaaaaatgaaaaaatagactcactctccaccagactggagaagaaatcccgtattcagccgcctgagc

SEQ ID NO: 108440 - DNA, 75 bp, synthetic construct
  source 1..75: mol_type = other DNA
atggcgctgcgactgctgggtgaacagcaaaccgcacagcaactgtttagtgaaatgaaacagtgggcgcaagag

SEQ ID NO: 108441 - DNA, 75 bp, synthetic construct
  source 1..75: mol_type = other DNA
tatatcgaatcagcagccggaactgccgccgggggcaaaaccggtttaaccgcaacggtagttggcgcgttattc

SEQ ID NO: 108442 - DNA, 75 bp, synthetic construct
  source 1..75: mol_type = other DNA
taagaaagccaatgaggaaatacagcgttgtatggaggaaaaacaggcgggaaaagaggatttttttgatatcag

SEQ ID NO: 108443 - DNA, 75 bp, synthetic construct
  source 1..75: mol_type = other DNA
atgttaattcaaaatattaatgctaacgttctgaagaaaaatgagaaagaaacgtctcatgacaaaggctggggt

SEQ ID NO: 108444 - DNA, 75 bp, synthetic construct
  source 1..75: mol_type = other DNA
gttaccggcataaaccgcctgggagcattctctgttgtggagggtaaagctgataatgtcgtactggaaaatggc

SEQ ID NO: 108445 - DNA, 75 bp, synthetic construct
  source 1..75: mol_type = other DNA
ttagaatccctgtccgatgaggtcagtgccatgaaacgccgcatgggtggccttgcttccctgctgaaaggcatc

SEQ ID NO: 108446 - DNA, 75 bp, synthetic construct
  source 1..75: mol_type = other DNA
aacgcgctgaaagggccgattactgcgctggcggaagatctggcgcaacttcgcggtgtgctgggactggattaa

SEQ ID NO: 108447 - DNA, 75 bp, synthetic construct
  source 1..75: mol_type = other DNA
tatttgtgctgaatccggcaaatgagaatctgttacgcattatgtacattggagcgccgttggcgaaagacagag

SEQ ID NO: 108448 - DNA, 75 bp, synthetic construct
  source 1..75: mol_type = other DNA
attgtttttttcctgagcttttctgtgtttgccgacagcaacagtgattaccgggcaggttccgattttgcccgt

SEQ ID NO: 108449 - DNA, 75 bp, synthetic construct
  source 1..75: mol_type = other DNA
ccggtgccaatgcattaacactggcagcaattagctgcgtactctactccgccgtcgcggcaccgtttaagtcac

SEQ ID NO: 108450 - DNA, 75 bp, synthetic construct
  source 1..75: mol_type = other DNA
ctgatttgttaagggcaattgccaaggtggagtccaacgacaatcatctggcgataggtaaaaatccagtaaatg

SEQ ID NO: 108451 - DNA, 75 bp, synthetic construct
  source 1..75: mol_type = other DNA
acactggcgggcaccaccacgctgaataacggcgccatacttaccctttccgggaagacggtgaacaacgatacc

SEQ ID NO: 108452 - DNA, 75 bp, synthetic construct
  source 1..75: mol_type = other DNA
tgatggatttataaaaagtaagcaatatgaaaaatatgatagactaattgtactgaatataactgaaaagaaaaa

SEQ ID NO: 108453 - DNA, 75 bp, synthetic construct
  source 1..75: mol_type = other DNA
tatacggaattggtccggatgaatccttcctggttccacgctttagcaaaccgctgtcttcggatattgctctgc

SEQ ID NO: 108454 - DNA, 75 bp, synthetic construct
  source 1..75: mol_type = other DNA
attgctggcaaactggtggcgtttatgcaggggatcggttttatcatcgccgggcttgctccctggttttctggt

SEQ ID NO: 108455 - DNA, 75 bp, synthetic construct
  source 1..75: mol_type = other DNA
taaagccgtatcaagtaagagatggtgcatccgggaggattactcgccttgcggctcgcccttcgggccgttgct

SEQ ID NO: 108456 - DNA, 75 bp, synthetic construct
  source 1..75: mol_type = other DNA
caacaaatgaccagaacaccgctctgcaacgtaattcgttgaactgtgcagaatgtgagttgattttgaagataa

SEQ ID NO: 108457 - DNA, 75 bp, synthetic construct
  source 1..75: mol_type = other DNA
cctgacgggccgacgaaccttctggcatgggaaaggcttaagaacaaagagttgccgccttcactgcatcgctac

SEQ ID NO: 108458 - DNA, 75 bp, synthetic construct
  source 1..75: mol_type = other DNA
aaaacatgcacgcccgattactggaacatgccagtttactctggcagcctgaaacaaacgatgccattcgtgcag

SEQ ID NO: 108459 - DNA, 75 bp, synthetic construct
  source 1..75: mol_type = other DNA
accgccaggtgccacgcgagaaattctcgaacaattgctgacggcgctcgccagttcgcaaacagatgcttacac

SEQ ID NO: 108460 - DNA, 75 bp, synthetic construct
  source 1..75: mol_type = other DNA
caagcaggcagttccggcagttactgtggcgttaccagatcaaacagagtctgagtcgacgaggaaattgctggg

SEQ ID NO: 108461 - DNA, 75 bp, synthetic construct
  source 1..75: mol_type = other DNA
aatattacagcacactaagaccgcacgaatataacggtggttacccccccaaacgaatcggaaaatcgatactgg

SEQ ID NO: 108462 - DNA, 75 bp, synthetic construct
  source 1..75: mol_type = other DNA
aaaagaacggcgaaccagctatagccgtgaatttaaggtccgtctggctaagcaggcgttacagcctggggctgt

SEQ ID NO: 108463 - DNA, 75 bp, synthetic construct
  source 1..75: mol_type = other DNA
tcgaaaacttcgatgcgatgggcatccacaccggtgactccatcaccgtggcgccagcccagacgctgaccgaca

SEQ ID NO: 108464 - DNA, 75 bp, synthetic construct
  source 1..75: mol_type = other DNA
atgcgcaatcatcaaaagacgttcacgatactgctggttctggtgctgattggtcttaatatgcgaccactgctc

SEQ ID NO: 108465 - DNA, 75 bp, synthetic construct
  source 1..75: mol_type = other DNA
gtagtgccgggaatgctgggtaaagcaggttttcctcccgcagcggtcttcgttgccacctgtctggtcgcaggc

SEQ ID NO: 108466 - DNA, 75 bp, synthetic construct
  source 1..75: mol_type = other DNA
cttctctggtttcctgggttgtatcgtttattccgcgccgcccggagcggagcgaaacggcacaaccatcggatc

SEQ ID NO: 108467 - DNA, 75 bp, synthetic construct
  source 1..75: mol_type = other DNA
tataatagtttcgccaagaatactactaacacgtttatctttacaattataccagacaataactatgtgataaaa

SEQ ID NO: 108468 - DNA, 75 bp, synthetic construct
  source 1..75: mol_type = other DNA
aggatgatgagtttctggtacgtcacatttacgacaactactgcattgtcagggaaaaaggtgtgaatgttcctg

SEQ ID NO: 108469 - DNA, 75 bp, synthetic construct
  source 1..75: mol_type = other DNA
gtgacggcttatgactttgaagaccagcagctcgtccccgtggacattgaccgcgtttatatttgcaccgctttc

SEQ ID NO: 108470 - DNA, 75 bp, synthetic construct
  source 1..75: mol_type = other DNA
atttaccgtttgtctggctgatgaaccacgcctggctgattttgaccgactcaggcggcattcaggaagaagcgc

SEQ ID NO: 108471 - DNA, 75 bp, synthetic construct
  source 1..75: mol_type = other DNA
atctgaaaatgccgatgatgggatttggtgtttttcaggttaccgataaaaacgtgtgcaaacagtcagtgttga

SEQ ID NO: 108472 - DNA, 75 bp, synthetic construct
  source 1..75: mol_type = other DNA
ctgggtaaattcccgctgccagtagaagttatcccgatggcacgtagtgcagtggcgcgtcagctggtgaaactg

SEQ ID NO: 108473 - DNA, 75 bp, synthetic construct
  source 1..75: mol_type = other DNA
atgaccattaacttccgccgtaacgcattgcagttgagcgtggctgcgctgttctcttctgcttttatggctaac

SEQ ID NO: 108474 - DNA, 75 bp, synthetic construct
  source 1..75: mol_type = other DNA
tgaaaggtgcggcggcctatatggaacacgcacacgttctcggtcaatacgacaacgatatttacgcccagtacc

SEQ ID NO: 108475 - DNA, 75 bp, synthetic construct
  source 1..75: mol_type = other DNA
aacgttaacttcgattctccgcgtattgtcggctacgctcgtgaagcgattgccctgcgcgaggtgctgaaagca

SEQ ID NO: 108476 - DNA, 75 bp, synthetic construct
  source 1..75: mol_type = other DNA
gagaagatacaagaatagggagatgattatttattctttgcaaacagaaatcagggttggcctaataaaaatttt

SEQ ID NO: 108477 - DNA, 75 bp, synthetic construct
  source 1..75: mol_type = other DNA
tccgtaaccggtgtgcgtacctggatcttacgtaatttgccgatggggatcgctcacggtacaggtatcggtatc

SEQ ID NO: 108478 - DNA, 75 bp, synthetic construct
  source 1..75: mol_type = other DNA
gtggcagaagtgggtatcactggcctgaacgctgacttcctgcgccagttgaaacgcaaaggttttgccgatgcg

SEQ ID NO: 108479 - DNA, 75 bp, synthetic construct
  source 1..75: mol_type = other DNA
gatttggtgtgggacttatgcagatagactcgcagaactttgctcatttgagaaagtttaatatttcgccagaaa

SEQ ID NO: 108480 - DNA, 75 bp, synthetic construct
  source 1..75: mol_type = other DNA
tgctggtttttcaaagacaccacggcagaaaaaacgacgttatcaatatgcatcaaaagtacggcagcagtatca

SEQ ID NO: 108481 - DNA, 75 bp, synthetic construct
  source 1..75: mol_type = other DNA
ccaccgttggcggtgtgatcagcaaaagcctcggacgcatcgcgggtagtttgctgggagccatcgcggcattgc

SEQ ID NO: 108482 - DNA, 75 bp, synthetic construct
  source 1..75: mol_type = other DNA
atcgatatctcgcgttttgagaaaaaaggctatattactcctggtaaatatctcgttcgtgtgcagataaataaa

SEQ ID NO: 108483 - DNA, 75 bp, synthetic construct
  source 1..75: mol_type = other DNA
aattacgatccctccaacgtgattatgctcaccggacgcgcctcagttgtggaacggctgacggaagtgatccag

SEQ ID NO: 108484 - DNA, 75 bp, synthetic construct
  source 1..75: mol_type = other DNA
tcatctggatggcgaagatttctctgcggtcattgcccaagcgcaacagatggcgggcttcccgtacagcgaaat

SEQ ID NO: 108485 - DNA, 75 bp, synthetic construct
  source 1..75: mol_type = other DNA
atggcagatgatcaaaatatctcagcgcagatccgcggcaaaataaagaattatgctgcggcgggtaaagttcag

SEQ ID NO: 108486 - DNA, 75 bp, synthetic construct
  source 1..75: mol_type = other DNA
cgtgtggatcacgcgggtaatcgcactgaagaggtgatcccgctggataacgcctcggcttcggaaatcgcccgc

SEQ ID NO: 108487 - DNA, 75 bp, synthetic construct
  source 1..75: mol_type = other DNA
ggtcggcattcacaacctgacccgcgacgcgggcttccacattgtcaaagagctgatttttaccgcttcgccaat

SEQ ID NO: 108488 - DNA, 75 bp, synthetic construct
  source 1..75: mol_type = other DNA
agacggcgtaccacacaggaaaagatcgcaattgttcagcagagctttgaaccggggatgacggtctccctcgtt

SEQ ID NO: 108489 - DNA, 75 bp, synthetic construct
  source 1..75: mol_type = other DNA
tcgatggttgaagggagcgtctggggaggcgcatttgaaatgatcatgagttccgatctgatcatcgccgccagc

SEQ ID NO: 108490 - DNA, 75 bp, synthetic construct
  source 1..75: mol_type = other DNA
catcatatttacttacctgttaatgggattgatgttttgtcttatttttatactgaaaacatcaatgatggtttc

SEQ ID NO: 108491 - DNA, 75 bp, synthetic construct
  source 1..75: mol_type = other DNA
ggaaaatgaactcctcaaaattacaatgaaaaccatccgcatagtgtgttgggttatcgctctccgcgaaaatat

SEQ ID NO: 108492 - DNA, 75 bp, synthetic construct
  source 1..75: mol_type = other DNA
ggatagcgcacgcgcccttattgcccggggatggggaagtaagcttaagtcagcccgttgtctcgggtgtcgcgt

SEQ ID NO: 108493 - DNA, 75 bp, synthetic construct
  source 1..75: mol_type = other DNA
tcaatatctggaaattcagcataagctgacaagaactcatctgactgacgttccgctttatctgtcactggaacc

SEQ ID NO: 108494 - DNA, 75 bp, synthetic construct
  source 1..75: mol_type = other DNA
cggcaggaagaatgccagccggtcagcagactcaccggctggttccgctctccgacgcctggtacgtcagccagc

SEQ ID NO: 108495 - DNA, 75 bp, synthetic construct
  source 1..75: mol_type = other DNA
gggaataaggctacaggtattgatggtatgactaaagccgcttacagtgaacgccttgatgagaacattactgct

SEQ ID NO: 108496 - DNA, 75 bp, synthetic construct
  source 1..75: mol_type = other DNA
gaatgacgtggaaaacgctgaatataatcctgaaaatgctgggttttccatcgagatggaaaacccgttcactgt

SEQ ID NO: 108497 - DNA, 75 bp, synthetic construct
  source 1..75: mol_type = other DNA
gacagatatatcagcaagctggacgcttggtgcgattgaaccgccccgggaatcctggagactaaacttcctgag

SEQ ID NO: 108498 - DNA, 75 bp, synthetic construct
  source 1..75: mol_type = other DNA
cgtcattaatgataagggctggcaggtcgtcaaacccggcgcagtggcaaccgacaccgttgtgaataccggcgc

SEQ ID NO: 108499 - DNA, 75 bp, synthetic construct
  source 1..75: mol_type = other DNA
tctgccacttggtcgaaatattcaactttttgggctaaaacctgatgtgcaacacatcgactggtcaggatttta

SEQ ID NO: 108500 - DNA, 75 bp, synthetic construct
  source 1..75: mol_type = other DNA
ttgtctgtggttatggtgtcggtagtagcgtgatgttacaaacggttgttaaaaaagcgctgacgaaatatgagt

SEQ ID NO: 108501 - DNA, 75 bp, synthetic construct
  source 1..75: mol_type = other DNA
tcagtaatttgttacttgaggaacggatgcgggttgctgtaaatatgttatgctcccggcatggatatggacagg

SEQ ID NO: 108502 - DNA, 75 bp, synthetic construct
  source 1..75: mol_type = other DNA
aggcgggtgtgcactccggtgactccgcatgttcactgccagcctacaccttaagtcaggaaattcaggatgtga

SEQ ID NO: 108503 - DNA, 75 bp, synthetic construct
  source 1..75: mol_type = other DNA
tttcacaaagaacaataaacttaaatgaatatgaaactgcaattaacatcatcaatgaacatgttacaaaagaaa

SEQ ID NO: 108504 - DNA, 75 bp, synthetic construct
  source 1..75: mol_type = other DNA
tggaacagaagaaaaaaaataaaagatttccctacagtgaagatagagatgtgattcgacctttatggggcaaat

SEQ ID NO: 108505 - DNA, 75 bp, synthetic construct
  source 1..75: mol_type = other DNA
ttatccgctttttattttttcactttacctcccctcccccgctggtttatttaatgtttacccccataaccacat

SEQ ID NO: 108506 - DNA, 75 bp, synthetic construct
  source 1..75: mol_type = other DNA
gcattatttctctgaacagggggccggacaagcgcgatatcgtttaatgcggcggcgggccagtaatgagcaacg

SEQ ID NO: 108507 - DNA, 75 bp, synthetic construct
  source 1..75: mol_type = other DNA
gtgaataatttgtgtcaagtcgccaactggtatgaaattaagtcaatatacgatgaatatgtccgtctttatgcc

SEQ ID NO: 108508 - DNA, 75 bp, synthetic construct
  source 1..75: mol_type = other DNA
aggactcgtctgactgacattccgctttacctgttgctggaacccaacaatcctgcgttggctgcggctttaatt

SEQ ID NO: 108509 - DNA, 75 bp, synthetic construct
  source 1..75: mol_type = other DNA
acaaacaagctgcattacaaggccatagtgacgcgcaaaacaatctggccgatctttatgaagacggaaaaggcg

SEQ ID NO: 108510 - DNA, 75 bp, synthetic construct
  source 1..75: mol_type = other DNA
atgaaattactcacctcggcggcgctggccgccagcctctgcattacctctgtgaccccggccatcgcagaaaat

SEQ ID NO: 108511 - DNA, 75 bp, synthetic construct
  source 1..75: mol_type = other DNA
cggaaagaacaactgttgaaaacaggacgtacagaattcgtgaataatttgtgtcgggtcgccaactggtatgaa

SEQ ID NO: 108512 - DNA, 75 bp, synthetic construct
  source 1..75: mol_type = other DNA
aaatatcaccctgggcgttcaggccggttatgcccacagtgtcagcggcagcagcgctgaaggttataacggtca

SEQ ID NO: 108513 - DNA, 75 bp, synthetic construct
  source 1..75: mol_type = other DNA
atgaagaaattactgactacaactgcactggccgtcagtctctgcacaggcgctacctttccggcgtctgccgaa

SEQ ID NO: 108514 - DNA, 75 bp, synthetic construct
  source 1..75: mol_type = other DNA
acccgttatgctgcacaaagtctgtacgcgccgctgcgtacggtcgaagccgtgccgggtattcgcccggtgaat

SEQ ID NO: 108515 - DNA, 75 bp, synthetic construct
  source 1..75: mol_type = other DNA
ccgcaggagagcaggtcgttcctgcctctgaacttgctgctgccatgaagcagattaaagaactccagcgcctgc

SEQ ID NO: 108516 - DNA, 75 bp, synthetic construct
  source 1..75: mol_type = other DNA
taaaggcacctcatcccgtgacaccctgcgcgacagtgcaaaacacagtgtgcgtgaactgccggtgaactggtg

SEQ ID NO: 108517 - DNA, 75 bp, synthetic construct
  source 1..75: mol_type = other DNA
acaccactgtcggacatcgcggaacactgacgctggctgccgggggaagtctgagtggcagaacacagctcagta

SEQ ID NO: 108518 - DNA, 75 bp, synthetic construct
  source 1..75: mol_type = other DNA
aatgtcttaggaccggagaaacgcagacggcgtaccacacaggaaaagatcgcaattgttcagcagagctttgaa

SEQ ID NO: 108519 - DNA, 75 bp, synthetic construct
  source 1..75: mol_type = other DNA
gaatggcgcagtgctaccagtactggcgttttatatcgtcgccgcagaagagcaaggtgttacacctgataaact

SEQ ID NO: 108520 - DNA, 75 bp, synthetic construct
  source 1..75: mol_type = other DNA
gctcaactcccagtgctaataatcggtagtagatttctatttgttggtaaaacatttcttctcggagtaacattt

SEQ ID NO: 108521 - DNA, 75 bp, synthetic construct
  source 1..75: mol_type = other DNA
aagcaataccaggaaggaagtcttactgctgtcgccgccggagaacaggttgttcctgactctgaacttgctgcc

SEQ ID NO: 108522 - DNA, 75 bp, synthetic construct
  source 1..75: mol_type = other DNA
ggcaggggattgctatctccggcgcgctggcggttctgaccagcctgacgctttcaacgctagctggaaagatga

SEQ ID NO: 108523 - DNA, 75 bp, synthetic construct
  source 1..75: mol_type = other DNA
ccagaaattcccgaagccaatcatttcgatggtcgaaggcagcgtctgggggggcgcgtttgaaatgatcatgag

SEQ ID NO: 108524 - DNA, 75 bp, synthetic construct
  source 1..75: mol_type = other DNA
cctggagtctcacagagtcctgctgggcataccgggataaatatatcacgcagtcggcagataacggcacctgta

SEQ ID NO: 108525 - DNA, 75 bp, synthetic construct
  source 1..75: mol_type = other DNA
gaaggaccgctttgcggccaagctgaaaggcctgagagccttcctgtggaagaacctcaatgccaacagaaggca

SEQ ID NO: 108526 - DNA, 75 bp, synthetic construct
  source 1..75: mol_type = other DNA
ctcgcccaaaatttacatggctattccttggcacgccgcgaggtcactcttgtctcccgatagttctgcgcacca

SEQ ID NO: 108527 - DNA, 75 bp, synthetic construct
  source 1..75: mol_type = other DNA
gatctgtatcgtaaagctcagtcatccggtaccagggatgtcagtcaaaaaatccgtgagattgaagatttactg

SEQ ID NO: 108528 - DNA, 75 bp, synthetic construct
  source 1..75: mol_type = other DNA
gaatttgaacgtattcaggggatgcgccgagcggtttatgacagcgaggattatcaggaaggtatgaatgctttc

SEQ ID NO: 108529 - DNA, 75 bp, synthetic construct
  source 1..75: mol_type = other DNA
cgaaggggtggaccaggactataagcaagcgatgtactggtatctgaaggctgccgctcaggaaagcgtcggcgc

SEQ ID NO: 108530 - DNA, 75 bp, synthetic construct
  source 1..75: mol_type = other DNA
ttatcgcttcagccttgtttgcaactggcattgcaaatgctgaattgatgcagaatactatttctgctggttatg

SEQ ID NO: 108531 - DNA, 75 bp, synthetic construct
  source 1..75: mol_type = other DNA
gttcactggtatgtaaggcatggagagacgatttctaatcataatgtcataaagatttttgagcttcttcatcag

SEQ ID NO: 108532 - DNA, 75 bp, synthetic construct
  source 1..75: mol_type = other DNA
atttggtgcggggatggaggatgacgcttatgccattcgcgccattgccagcgccggattatctgccctggtcag

SEQ ID NO: 108533 - DNA, 75 bp, synthetic construct
  source 1..75: mol_type = other DNA
ctgccgaccagcaactggcgttcaacatccaggtgccgctcagccgctttatgccgaatgcctgggcgagctaca

SEQ ID NO: 108534 - DNA, 75 bp, synthetic construct
  source 1..75: mol_type = other DNA
atatgctgaaaggcgggatttccggccgcagtgcaaaaggaaaacgtatccacacccgtgccattcacaacatcg

SEQ ID NO: 108535 - DNA, 75 bp, synthetic construct
  source 1..75: mol_type = other DNA
ttttttttcgggtgtctgggaggctgtgcggcggaaaaattcttgaagaatacagaaggttcatgcaaactgaat

SEQ ID NO: 108536 - DNA, 75 bp, synthetic construct
  source 1..75: mol_type = other DNA
ctggcctgctcacgggggaaacgtactggcgtggcgctggcgctgtctcttgccaccgccacttcagtcccggcc

SEQ ID NO: 108537 - DNA, 75 bp, synthetic construct
  source 1..75: mol_type = other DNA
ctgccaatatatacaccaagtatcagtggcaaaactatggtgccgctaatgaaaatgaatgggacggatatcgat

SEQ ID NO: 108538 - DNA, 75 bp, synthetic construct
  source 1..75: mol_type = other DNA
ttcctcgcttcaacttcgaaaaattcgccggggcgaacgaccgtctgaccacacagatgaaatcggttggcgaag

SEQ ID NO: 108539 - DNA, 75 bp, synthetic construct
  source 1..75: mol_type = other DNA
aacaaaccagagtattgctgaccatcaaaaacgggaaagtaatattaattcgtcatgttcatgacgatgaatttg

SEQ ID NO: 108540 - DNA, 75 bp, synthetic construct
  source 1..75: mol_type = other DNA
acccaacgggcgccgatctcaccaacgaccaatgggatgcagtcattgaaattctcaaagcacgcgagcttatcc

SEQ ID NO: 108541 - DNA, 75 bp, synthetic construct
  source 1..75: mol_type = other DNA
ttctgccacaaacacccggccaccggcgtgatggtgggcaaaccgggcggcatcgaggtctggccggtgcaggtc

SEQ ID NO: 108542 - DNA, 75 bp, synthetic construct
  source 1..75: mol_type = other DNA
ttgaaattaacaagcgagtagcagaggttatttataaagacaggaatggtctatttgttgccagaaatctcccta

SEQ ID NO: 108543 - DNA, 75 bp, synthetic construct
  source 1..75: mol_type = other DNA
cgtttccccgccaaagaagtctttaagctttatcgacaaattttaagcagtgacaacatggttattgaggtcgga

SEQ ID NO: 108544 - DNA, 75 bp, synthetic construct
  source 1..75: mol_type = other DNA
tctgtggtggtgatgtcttctgccttgacggtgaatgcgataaggcgcagagcgggcagagtaatgattttgccg

SEQ ID NO: 108545 - DNA, 75 bp, synthetic construct
  source 1..75: mol_type = other DNA
ttcaaaagctcagagtttagtgatgaaggcgttccattactccgaggacaaaatatagaacccggagcattacgt

SEQ ID NO: 108546 - DNA, 75 bp, synthetic construct
  source 1..75: mol_type = other DNA
agttcaggctgaatatactgacggaactgaaaaatcgcgggatgaacgatatgatcttacccagcaatagtggac

SEQ ID NO: 108547 - DNA, 75 bp, synthetic construct
  source 1..75: mol_type = other DNA
tcgctggcgatcgtgaaagcgcccggtgcggatgatacgaaggtacagaacaacaccggggtttacaccgactgg

SEQ ID NO: 108548 - DNA, 75 bp, synthetic construct
  source 1..75: mol_type = other DNA
acctaaagttatattaaatattaagtctaaatatttatacatcggtctcatcaggctactttttgattggagaaa

SEQ ID NO: 108549 - DNA, 75 bp, synthetic construct
  source 1..75: mol_type = other DNA
ttcttgaagaatacagaaggttcatgcaaactgaatgaactggtttctgtcgccgcaaacaacagactccacagg

SEQ ID NO: 108550 - DNA, 75 bp, synthetic construct
  source 1..75: mol_type = other DNA
taccaggctgaaatagatagaaacaatgagtttcttaattcagtcgtgtatcggcaggataaaaatcccaagcag

SEQ ID NO: 108551 - DNA, 75 bp, synthetic construct
  source 1..75: mol_type = other DNA
ttgcagattactttcaactgaacgctaatgatgaattcatggggaaagatgaaaaaacagttatacgtgaaaggc

SEQ ID NO: 108552 - DNA, 75 bp, synthetic construct
  source 1..75: mol_type = other DNA
gtggatcactattgcaccgttcgtgacatgtacgcttgtttatctgtcctactttttttctgggatgcaaagcat

SEQ ID NO: 108553 - DNA, 75 bp, synthetic construct
  source 1..75: mol_type = other DNA
aaatatcgcaaggcaatcgtgagccgcatgtgttgcaggcattccgggaactggaaggtgacctgggctacggca

SEQ ID NO: 108554 - DNA, 75 bp, synthetic construct
  source 1..75: mol_type = other DNA
ttacattactttcacgtgccttaacggaccgggactggaatactcaggaactgttgagagagtttgaagcgggat

SEQ ID NO: 108555 - DNA, 75 bp, synthetic construct
  source 1..75: mol_type = other DNA
agactgcatggaaagctgtcgcagactccgcaaaatgggcatgggattccatgctggatattggccgtgaggcct

SEQ ID NO: 108556 - DNA, 75 bp, synthetic construct
  source 1..75: mol_type = other DNA
cggtcatcgtgttaacttttaataaagaaaggattatgccccggagtggagcggaacaatcccttactagcaaaa

SEQ ID NO: 108557 - DNA, 75 bp, synthetic construct
  source 1..75: mol_type = other DNA
caacaatcctgcgttggctgtggctttaattaccagccagagactttccggagagaccacggacatgtttcttat

SEQ ID NO: 108558 - DNA, 75 bp, synthetic construct
  source 1..75: mol_type = other DNA
ttaacaaatctttcatctttatttattatattccattatatttttgaatacaaaaagaacagtgagttcattacc

SEQ ID NO: 108559 - DNA, 75 bp, synthetic construct
  source 1..75: mol_type = other DNA
ccgatatggacaaggaaatccagatcctgcaacagcgtctggacaaaacccgccagcttaagcaagggatgatgc

SEQ ID NO: 108560 - DNA, 75 bp, synthetic construct
  source 1..75: mol_type = other DNA
gtccgctacttctgcgtggcgtgccatcagttatcggtggcctggtggtgtttgcgtcggcggcattcaatgcac

SEQ ID NO: 108561 - DNA, 75 bp, synthetic construct
  source 1..75: mol_type = other DNA
taccaggcggcgatgcgtggtgcaatacctcaggttgcgccggtattctggagtttccgcatcatggtgggctgt

SEQ ID NO: 108562 - DNA, 75 bp, synthetic construct
  source 1..75: mol_type = other DNA
aggccggatatagagctgcaacctaccgtcaatgtcaaaactacgaaagccttgcaaacgggatgcgttcatata

SEQ ID NO: 108563 - DNA, 75 bp, synthetic construct
  source 1..75: mol_type = other DNA
gatgattgccgaaaacggcgcggtgatccaactggatcatcaatggcaagatatcgacggttttccccggatcat

SEQ ID NO: 108564 - DNA, 75 bp, synthetic construct
  source 1..75: mol_type = other DNA
tattaacgaactggcgcgccagtgtgggcatcattttgatgctgaagggatcaaggtcattgaatttgcccagtc

SEQ ID NO: 108565 - DNA, 75 bp, synthetic construct
  source 1..75: mol_type = other DNA
tgaacccgtacaagaaaaaccgtattgcgctcgacaccagcacgcttggcgacgaagtggatatcgacactgccg

SEQ ID NO: 108566 - DNA, 75 bp, synthetic construct
  source 1..75: mol_type = other DNA
ttcatttgaattaaaaatacaggatggggaacctatactactattggttatcaattttaaattaggtgacatttt

SEQ ID NO: 108567 - DNA, 75 bp, synthetic construct
  source 1..75: mol_type = other DNA
gcatgggtgccgacctgaaaaaagctggtgtgcgctactgtaacccgtaccagacgcgccacacattcgccacca

SEQ ID NO: 108568 - DNA, 75 bp, synthetic construct
  source 1..75: mol_type = other DNA
tgataatcctgctgacgctgttgctggcaatggtgcttttgtctggctatttgcgtaatgccgaggcgcgtgagg

SEQ ID NO: 108569 - DNA, 75 bp, synthetic construct
  source 1..75: mol_type = other DNA
gataaccatacaacgagatgaactccttagattgattcgcactaatactctgcaggatgccgcaattcatctttc

SEQ ID NO: 108570 - DNA, 75 bp, synthetic construct
  source 1..75: mol_type = other DNA
cgcaggcgtccagctattcttcctggagaggaaccgaggctggtcggactttcgttgctcagaagtcacgatgca

SEQ ID NO: 108571 - DNA, 75 bp, synthetic construct
  source 1..75: mol_type = other DNA
tatcgaccgtgcggaagaccgtgaacgcttccagcatgcggttgaccgcctgaaactgaaacagccggcaaacgc

SEQ ID NO: 108572 - DNA, 75 bp, synthetic construct
  source 1..75: mol_type = other DNA
acggtatatctgataaccagaggcgtgtggggcagtttatattccaaagtacgcgaataatctacagatggttta

SEQ ID NO: 108573 - DNA, 75 bp, synthetic construct
  source 1..75: mol_type = other DNA
ttattaatttcatggagcaacaaaaaaaatctgtcaaccgaacttttttaagcacccgtgaaattgctgatgcag

SEQ ID NO: 108574 - DNA, 75 bp, synthetic construct
  source 1..75: mol_type = other DNA
attgcggaacgcagtccgacactgagggcagatatttttacacaactggaattactggttgaaaacgatgagcgc

SEQ ID NO: 108575 - DNA, 75 bp, synthetic construct
  source 1..75: mol_type = other DNA
aggttgtacgcacagatacttaccgctatattttcaatatactttgctacaataggtatcattctaagtgcagga

SEQ ID NO: 108576 - DNA, 75 bp, synthetic construct
  source 1..75: mol_type = other DNA
aatgcctggatgagaaagaacacggaaatgacatccgaaaagaaagttgctgttgcagctggtattggcccggcc

SEQ ID NO: 108577 - DNA, 75 bp, synthetic construct
  source 1..75: mol_type = other DNA
cgcgccgcaggtgccggaaccgctgacagctgaagaactaaagaattttgatcaagactatgcccgtgacgaaaa

SEQ ID NO: 108578 - DNA, 75 bp, synthetic construct
  source 1..75: mol_type = other DNA
gacccgctctgggaaaatgacctgcttacgctcgtattaaatcctgaggcagttgttttcgcaaatcctattgct

SEQ ID NO: 108579 - DNA, 75 bp, synthetic construct
  source 1..75: mol_type = other DNA
tctggagcaaggcacgccgggctttgaaccgccgctggaaggtgaagctcgcgcggcaattatcaacgcgcttca

SEQ ID NO: 108580 - DNA, 75 bp, synthetic construct
  source 1..75: mol_type = other DNA
tactattcaaagcaagagtcacgccggcttgataacgtgcaaacctactcaataaaagtgggtgattatagatac

SEQ ID NO: 108581 - DNA, 75 bp, synthetic construct
  source 1..75: mol_type = other DNA
tacttttgtgccggatgcgatggcaacctttatccattaaccggccacatttacgcaaatgatgacgctgtaagg

SEQ ID NO: 108582 - DNA, 75 bp, synthetic construct
  source 1..75: mol_type = other DNA
ggaaaacaccgtgtgattgtcgaaaagcaaaacgatgattatcgcatttcactggagcaaggcacgccgggtttt

SEQ ID NO: 108583 - DNA, 75 bp, synthetic construct
  source 1..75: mol_type = other DNA
tcaaatccgcgcaatttcagcttgtgcgcatcaccgagagatatgattcgtcttaactggaaaatggaatttgag

SEQ ID NO: 108584 - DNA, 75 bp, synthetic construct
  source 1..75: mol_type = other DNA
ggctggctggtggtgccctgacgggcgccagtgtttatggactgctgaccggaactgattacggcgttgtatttg

SEQ ID NO: 108585 - DNA, 75 bp, synthetic construct
  source 1..75: mol_type = other DNA
catgagcagcgacggtaattcatggatcccggaaggtaaaacacataacggactaccggagcgggacaaccatgg

SEQ ID NO: 108586 - DNA, 75 bp, synthetic construct
  source 1..75: mol_type = other DNA
atcgagataaacgcctgacgggtgagatctacttcagcgagaaatggaaaaaaggagcaagcccggtcactatta

SEQ ID NO: 108587 - DNA, 75 bp, synthetic construct
  source 1..75: mol_type = other DNA
gatgggttcaatttcttcacagactgctattttcaatttttatctgtgatgggaaaaacgtctatcgtgctccct

SEQ ID NO: 108588 - DNA, 75 bp, synthetic construct
  source 1..75: mol_type = other DNA
atcattaacgaagtggggttccttttatcacgccaaaagaatatgttctcaaaaagaggccgaattgcatctagg

SEQ ID NO: 108589 - DNA, 75 bp, synthetic construct
  source 1..75: mol_type = other DNA
gtctccagccgtgtgattgttaaaggttctcgtaacaccagcgtatcggaagaaggtgttgtgattggttatgac

SEQ ID NO: 108590 - DNA, 75 bp, synthetic construct
  source 1..75: mol_type = other DNA
aacgctgtggtgaatgcagacggcagtatcactacaccgacttatgccattgctggcggcagttacgacaatgtc

SEQ ID NO: 108591 - DNA, 75 bp, synthetic construct
  source 1..75: mol_type = other DNA
cgctttgccgaacgtgtgaagcgttcgcagaacctggtcaacaggtggtgcactggcatcaaaaacatcggacca

SEQ ID NO: 108592 - DNA, 75 bp, synthetic construct
  source 1..75: mol_type = other DNA
gcctgcgtcgcggtgaagtagttggcgcggtgagtattcaacatcaggcgctgcccagttgtcttgtcgataaac

SEQ ID NO: 108593 - DNA, 75 bp, synthetic construct
  source 1..75: mol_type = other DNA
gtatttccgcgcggtggaggctgtacgttgacttttccggttaaagccggggatgaatgcctggtgattttcgcc

SEQ ID NO: 108594 - DNA, 75 bp, synthetic construct
  source 1..75: mol_type = other DNA
agtctggcaacctggctgcttccggcgctcgctcctgtgctggctgactcgcctatccgtctgaatttacaggtg

SEQ ID NO: 108595 - DNA, 75 bp, synthetic construct
  source 1..75: mol_type = other DNA
gcagtgcgggctgacggcggaacagatggccgcgcaactggaggcggaatacatcccggagaggaaacttcatct

SEQ ID NO: 108596 - DNA, 75 bp, synthetic construct
  source 1..75: mol_type = other DNA
acgctatttctgaaataacgtcaatgttatttcagttacaacttgaaaaaaatgaattaaataaaatagcgttat

SEQ ID NO: 108597 - DNA, 75 bp, synthetic construct
  source 1..75: mol_type = other DNA
agtgactttccaatggtgcaacaaattaactcgcttgcagaatattcactgtttaataaaaatgatgatgtaatc

SEQ ID NO: 108598 - DNA, 75 bp, synthetic construct
  source 1..75: mol_type = other DNA
attgtttctgtggttgcaggaacgtatgcaatcacagccacggcaggaaatgaccagacttcggatgcgcagagc

SEQ ID NO: 108599 - DNA, 75 bp, synthetic construct
  source 1..75: mol_type = other DNA
cagcattatttttttgttgtgattttaaaaaaataatgctggtaattctatgctatttggctatgatattaccct

SEQ ID NO: 108600 - DNA, 75 bp, synthetic construct
  source 1..75: mol_type = other DNA
tgagtgggcaccatcttccaaggagttgatttcctttttatcaggaaagtccacagtgataagtggttcactcaa

SEQ ID NO: 108601 - DNA, 75 bp, synthetic construct
  source 1..75: mol_type = other DNA
tttccggtgatgccgcgtctggtagttcggttacaggctggagccataaaggcaacggcgaatacacggctattc

SEQ ID NO: 108602 - DNA, 75 bp, synthetic construct
  source 1..75: mol_type = other DNA
atgggtgcagccgtgtttctcgcaagtcaggcatcgaattatgtcaatgggcatttattagtggtcgatggcggt

SEQ ID NO: 108603 - DNA, 75 bp, synthetic construct
  source 1..75: mol_type = other DNA
cttctgcggaaatgttattccctggcgctgagtggcatccgcaatttgcaggtcaaaatatcagcaacatttcct

SEQ ID NO: 108604 - DNA, 75 bp, synthetic construct
  source 1..75: mol_type = other DNA
gatgaagaaaaattttgtaacgctgttagatcggcaattccatacgctgctgatgggaaattggtaacatttggt

SEQ ID NO: 108605 - DNA, 75 bp, synthetic construct
  source 1..75: mol_type = other DNA
ctgatccctacacgctgattttttcccgccccagcccgctgcggggcgtttatgacagcaataataatttcgtaa

SEQ ID NO: 108606 - DNA, 75 bp, synthetic construct
  source 1..75: mol_type = other DNA
gcttaataacggtaggggatataagactacattggttaacggtagcttacttgcaaagttttccgttgcaccaaa

SEQ ID NO: 108607 - DNA, 75 bp, synthetic construct
  source 1..75: mol_type = other DNA
gggaggcgttgaatgttttgtttatgcgccagaatatcgctgttgagcaattgatatggtcgctggaatcgcaac

SEQ ID NO: 108608 - DNA, 75 bp, synthetic construct
  source 1..75: mol_type = other DNA
agagcaggcacctgaaccttccgcagcttgactgtgactatacgtggaacgataacggacaactggtgcgcatca

SEQ ID NO: 108609 - DNA, 75 bp, synthetic construct
  source 1..75: mol_type = other DNA
gacggtgacaattcgtgataaccaaccggaaaaagtcaccatttctggcgcggcggtgattttgtttcatgccga

SEQ ID NO: 108610 - DNA, 75 bp, synthetic construct
  source 1..75: mol_type = other DNA
aaaattagatagtgatcggcatgacgcgatagaacaggaaataaaacacacgagtaagaccatcgaagacctgaa

SEQ ID NO: 108611 - DNA, 75 bp, synthetic construct
  source 1..75: mol_type = other DNA
cggccggacgcaacgttaccagtatgacctgaccggaaaactcacgcagagtgaagatgaggggcttatcaccct

SEQ ID NO: 108612 - DNA, 75 bp, synthetic construct
  source 1..75: mol_type = other DNA
tatggtggaaccattgtacttaacaaatattgggaaattgactgggatatttataatagatcaaaaaaagagcct

SEQ ID NO: 108613 - DNA, 75 bp, synthetic construct
  source 1..75: mol_type = other DNA
atcaggcagtttctacttcaacgctgactgtaaaagatgccaatcttgctattgaaagcacgacggaactgactt

SEQ ID NO: 108614 - DNA, 75 bp, synthetic construct
  source 1..75: mol_type = other DNA
cgtaatcgtttctgctttagccgtcaaaatcctgacattcctgaataatcaggatgtcggctcgctggtggcgct

SEQ ID NO: 108615 - DNA, 75 bp, synthetic construct
  source 1..75: mol_type = other DNA
cccgtgggctggaagagctgttaaaaactgaactggaaaacctgggggccgttgaatgccaggtggttcagggtg

SEQ ID NO: 108616 - DNA, 75 bp, synthetic construct
  source 1..75: mol_type = other DNA
aagccgatctgcaaaaaactcagggaaaccgtgcaccagcagcaattaaaaataacgacgtgattagttttatta

SEQ ID NO: 108617 - DNA, 75 bp, synthetic construct
  source 1..75: mol_type = other DNA
ttgacagtttacaaaagtcagaaagcatattcgaaaaaataaaaaaaataaatgaaagactttcacaaatcggaa

SEQ ID NO: 108618 - DNA, 75 bp, synthetic construct
  source 1..75: mol_type = other DNA
gccgggtccgagggtgcggcaaaacaactataaatccatctggctgctgtgaacaacacaaaggcgaaggctgga

SEQ ID NO: 108619 - DNA, 75 bp, synthetic construct
  source 1..75: mol_type = other DNA
caccagcaaatcggtatggaagtgcttaatcgcgtgaaagacgatttgcaagaactggcagtggtcgaatccttc

SEQ ID NO: 108620 - DNA, 75 bp, synthetic construct
  source 1..75: mol_type = other DNA
aatactcaaggcactgccaactcgtgacgcagtattaccttttatcatgctgctttctgccgctaagaactcggg

SEQ ID NO: 108621 - DNA, 75 bp, synthetic construct
  source 1..75: mol_type = other DNA
tgaaggcattccgcatctgttaacggaagtcgttactgatatgaaagatgccgccaacgcgctgcgctggtgtgt

SEQ ID NO: 108622 - DNA, 75 bp, synthetic construct
  source 1..75: mol_type = other DNA
agtttatagggttattatcagagcacgatgtattggaaaagtatcaactctcaaaagtaacagttgctgcaaatg

SEQ ID NO: 108623 - DNA, 75 bp, synthetic construct
  source 1..75: mol_type = other DNA
atttatggccccttcctcgggaggggctttcccgtttcagcgtcccgctgaaatcgtcggcttacctcctttcgc

SEQ ID NO: 108624 - DNA, 75 bp, synthetic construct
  source 1..75: mol_type = other DNA
gagatagtatcgagggtaatattgctgcatttgatgcgatggagcaaagcggcctgctcgataattgtagaacat

SEQ ID NO: 108625 - DNA, 75 bp, synthetic construct
  source 1..75: mol_type = other DNA
gtcatacgtttgcggcgcatttcatgatgtcgggtggaaacatccttgctttgcaaaaaatcctcggacatcacg

SEQ ID NO: 108626 - DNA, 75 bp, synthetic construct
  source 1..75: mol_type = other DNA
ttagtgcaaatcgttatatagaggaacttaaacaatttcggcctgatattttatccgcttgtgaaaaagcaattg

SEQ ID NO: 108627 - DNA, 75 bp, synthetic construct
  source 1..75: mol_type = other DNA
aggctggaaatcctacaaatcgggacaatcccggcatcagcgcggctacggttcgaagtgggatgttatccgtga

SEQ ID NO: 108628 - DNA, 75 bp, synthetic construct
  source 1..75: mol_type = other DNA
agaggctagctcatttattgcatgttgtggagttaaaataaatagcactatccatgaattactgaggagtaaaac

SEQ ID NO: 108629 - DNA, 75 bp, synthetic construct
  source 1..75: mol_type = other DNA
gcagcaatatcagcagccgcaacagccggttgcgccgcagcagcagtatcaacagctgcaacaaccggttgcacc

SEQ ID NO: 108630 - DNA, 75 bp, synthetic construct
  source 1..75: mol_type = other DNA
atcactgatgttgcaaacggtgcagtctcgtccaccagcagcgacgccattaacggttcgcaactttatggcgtt

SEQ ID NO: 108631 - DNA, 75 bp, synthetic construct
  source 1..75: mol_type = other DNA
gccattaaccgtggtgctgggtaaagatatcgccggtgagccggtggttgccgatctggcgaaaatgccgcactt

SEQ ID NO: 108632 - DNA, 75 bp, synthetic construct
  source 1..75: mol_type = other DNA
gaattgattccagataaattaattccagatgattgtagttataaatcagacataaaaaaaactagatgttcggga

SEQ ID NO: 108633 - DNA, 75 bp, synthetic construct
  source 1..75: mol_type = other DNA
gtaagagtgaatgtcaaattataaataatttaatcccagtttcttctgagcttgaaaatgatcactttaaatcat

SEQ ID NO: 108634 - DNA, 75 bp, synthetic construct
  source 1..75: mol_type = other DNA
cggtcattgtgcatcatggctacttctggaaaggtgaatctccggtcattcgcggaatgaagcgtaaccgtttaa

SEQ ID NO: 108635 - DNA, 75 bp, synthetic construct
  source 1..75: mol_type = other DNA
gagcgcgaaccgaatatcaccgggctcggcggcatttttgtgccgtccagcggcattgtcagctaccgcgaagta

SEQ ID NO: 108636 - DNA, 75 bp, synthetic construct
  source 1..75: mol_type = other DNA
gatcacggtcatgggcgaaattgagccgttggtgccgtggggcgaactgaccatgcctgtgccgggactggaact

SEQ ID NO: 108637 - DNA, 75 bp, synthetic construct
  source 1..75: mol_type = other DNA
gtattcccgcgcggcggcggctgcacgttaactttcccggtggaagccggcgatgaatgcctggtgatttttgcc

SEQ ID NO: 108638 - DNA, 75 bp, synthetic construct
  source 1..75: mol_type = other DNA
tgggccgaactccacgttgccggtacgtgtccatggtgcttttgttcgcgatcaggaagttcatgccgtggtgca

SEQ ID NO: 108639 - DNA, 75 bp, synthetic construct
  source 1..75: mol_type = other DNA
cccgtcagggcggagacagctccgctggctccgttcacgacagcccgccccgcaagcgggacgcccgggaaagcc

SEQ ID NO: 108640 - DNA, 75 bp, synthetic construct
  source 1..75: mol_type = other DNA
tttcaggcgcaactcaaacgtctgcaacagcagacgcccacgattattgtcgcacctgcccaggtattacgcgcg

SEQ ID NO: 108641 - DNA, 75 bp, synthetic construct
  source 1..75: mol_type = other DNA
accgtaacggaagctcgcctggctatcgctctggctcaggaaggcggtatcggctttatccacaaaaacatgtct

SEQ ID NO: 108642 - DNA, 75 bp, synthetic construct
  source 1..75: mol_type = other DNA
tgacgttctgctgatcgactcctctcacggtcactctgaaggcgttctgcagcgtatccgtgaaactcgtgctaa

SEQ ID NO: 108643 - DNA, 75 bp, synthetic construct
  source 1..75: mol_type = other DNA
acggatctcaaatcgttcgttgaaaccgttggagccaatcttaataaaaccatcgtgatggggcctggtgttgaa

SEQ ID NO: 108644 - DNA, 75 bp, synthetic construct
  source 1..75: mol_type = other DNA
gagcgcgcacaccatggacaatcgaagatattcgctaccttgaaacgcattatggcgtgaagaaaacccgcgaaa

SEQ ID NO: 108645 - DNA, 75 bp, synthetic construct
  source 1..75: mol_type = other DNA
atcgccgctggcgcaagcgcggtgatggtaggttccatgctggcgggtactgaagaatctccgggtgaaatcgaa

SEQ ID NO: 108646 - DNA, 75 bp, synthetic construct
  source 1..75: mol_type = other DNA
atgaaaattgttaaatttatcaaagacaaggcgttatctgcatccatcgcagcgtatcagctgcgcggaacggta

SEQ ID NO: 108647 - DNA, 75 bp, synthetic construct
  source 1..75: mol_type = other DNA
aaaacgttcaaccctgagcaggaagcaagcagcgcgcgtgtccttgcggaagccattcgaaaccagaggttgtaa

SEQ ID NO: 108648 - DNA, 75 bp, synthetic construct
  source 1..75: mol_type = other DNA
tgtcatccgttttacagggtgccgtgaatggcggggcgttcaccaacagtgtgcagacagtggattacggtaaca

SEQ ID NO: 108649 - DNA, 75 bp, synthetic construct
  source 1..75: mol_type = other DNA
caaaaccgcacgttaacgtcggtactatcggccacgttgaccaaggtaaaacaactctgaccgctgcaatcacca

SEQ ID NO: 108650 - DNA, 75 bp, synthetic construct
  source 1..75: mol_type = other DNA
gatgccgacagtaacctgcagagtctgtgctggccgtgtcataaggcgaagacggcccgtgaacggctgaagtaa

SEQ ID NO: 108651 - DNA, 75 bp, synthetic construct
  source 1..75: mol_type = other DNA
gctactttcgtacccgcaggctgcatttctccgatcgtcaggcgctggaaaactggcaggccaaaaggttgcatc

SEQ ID NO: 108652 - DNA, 75 bp, synthetic construct
  source 1..75: mol_type = other DNA
tgatgacagaatgcatgatttatcggatgcgttctgtatcgtcggtccgcagtctcaggcgcagaaaatcagcgg

SEQ ID NO: 108653 - DNA, 75 bp, synthetic construct
  source 1..75: mol_type = other DNA
acccatgagcagattgttgaattgctggctgattgtaaacgtcaggacccaattctggcactggtagttaagata

SEQ ID NO: 108654 - DNA, 75 bp, synthetic construct
  source 1..75: mol_type = other DNA
aacagccaggcagaaaacatgaaaaccgacgtgcaggttatcacgactaaatacagtacagccaactccacctac

SEQ ID NO: 108655 - DNA, 75 bp, synthetic construct
  source 1..75: mol_type = other DNA
gcgagaagcaataaatcttacccgttcacaggtgactaaataccgaattacctttgtcagaacgaaggggaagaa

SEQ ID NO: 108656 - DNA, 75 bp, synthetic construct
  source 1..75: mol_type = other DNA
atgcacgatgaatgcccatcactggcaagcctgcttaagcacgggtgccaggtcacacacttcaagaactcacgc

SEQ ID NO: 108657 - DNA, 75 bp, synthetic construct
  source 1..75: mol_type = other DNA
aggttctcgtaacaccagcgtatcggaagaaggtgttgtgattggttatgacaccacggatggcgaactgcttgg

SEQ ID NO: 108658 - DNA, 75 bp, synthetic construct
  source 1..75: mol_type = other DNA
gccattgctggcggcagttacgacaacgtcggtgacgcgctggaagcgatcgataccacgctggatgatgctctg

SEQ ID NO: 108659 - DNA, 75 bp, synthetic construct
  source 1..75: mol_type = other DNA
gaccctaacgatgatatcgatgccttacccgacggcatctacgcccaggtggcggtttactccgaccatttcagc

SEQ ID NO: 108660 - DNA, 75 bp, synthetic construct
  source 1..75: mol_type = other DNA
ccgtgatttcaaaccttgcatcggtaagttcagcgtcgggctttcatcagggacatccgggggtcgcggactttt

SEQ ID NO: 108661 - DNA, 75 bp, synthetic construct
  source 1..75: mol_type = other DNA
gccgttgttcgtatcgttacagacagtctcgggcgtcagaacctccagattcagtctctggcggattccaccaat

SEQ ID NO: 108662 - DNA, 75 bp, synthetic construct
  source 1..75: mol_type = other DNA
gggtactgtaacaccgaacgttgctgaagcggttaaaaacgctaaagctggccaagttcgttaccgtaacgacaa

SEQ ID NO: 108663 - DNA, 75 bp, synthetic construct
  source 1..75: mol_type = other DNA
taaataaaaatgttctcttgtgttgggggggatatgataatgaaggaaatgaagttttagttggtggaactgcag

SEQ ID NO: 108664 - DNA, 75 bp, synthetic construct
  source 1..75: mol_type = other DNA
ttgtggccaaagcgccatcagtagaccctattgttgacgcaatgaaacggcttaatttaggggacgtttctcgtg

SEQ ID NO: 108665 - DNA, 75 bp, synthetic construct
  source 1..75: mol_type = other DNA
aagaaaaaagggcgtgaattacctaaagagaactggcaatcctaccaagagttgttgtcatggctcgatagtaca

SEQ ID NO: 108666 - DNA, 75 bp, synthetic construct
  source 1..75: mol_type = other DNA
agagatccgctattactcagaagatgaagctgacgaacgcatgaactccttcatctctaaaatcgaacatcaaca

SEQ ID NO: 108667 - DNA, 75 bp, synthetic construct
  source 1..75: mol_type = other DNA
gggccagcttacggctacggctgaaggtggaacgacaatcacatccccgactatcacgctgaacggcaacgtaac

SEQ ID NO: 108668 - DNA, 75 bp, synthetic construct
  source 1..75: mol_type = other DNA
ccgactcaggcgaaaggcgtgtacatcaaaaaagttagcatctccaccaccatgggtgcaggtgttgcagttgac

SEQ ID NO: 108669 - DNA, 75 bp, synthetic construct
  source 1..75: mol_type = other DNA
gccaggaaacgtggcaaacgtcttattgttgtcacgactccttcagatggcggcgtgcagatacaaaaccttttc

SEQ ID NO: 108670 - DNA, 75 bp, synthetic construct
  source 1..75: mol_type = other DNA
ccagaagatcgccgttcgctcaaagatttggtggatgcctggtatagcgctcacggaattaccctcaaagatggc

SEQ ID NO: 108671 - DNA, 75 bp, synthetic construct
  source 1..75: mol_type = other DNA
cagtatcagaatattcagctaaacaggaatgcaaggacataaggaaagagttcatatcggtgcaacaaaatacat

SEQ ID NO: 108672 - DNA, 75 bp, synthetic construct
  source 1..75: mol_type = other DNA
gcagcggcacaacaggaaatggcccgggaggcgtcgaacagagcagaaagcgccctgcatgggttcagcagcagt

SEQ ID NO: 108673 - DNA, 75 bp, synthetic construct
  source 1..75: mol_type = other DNA
gcgccgatctgatgcaccatcaacggcggattatcggctcctgggtgaccagtctgttccatatggaaaaatgcg

SEQ ID NO: 108674 - DNA, 75 bp, synthetic construct
  source 1..75: mol_type = other DNA
ggttttgaagctaatggtggttttctccttgcctccgatttacaaattaatggcaaggaattaaaatcgttacct

SEQ ID NO: 108675 - DNA, 75 bp, synthetic construct
  source 1..75: mol_type = other DNA
gtaaattgttagagatcccatttaacccggtgtatcggaattttgacaaaggtcttcaggaaatcaccgactgga

SEQ ID NO: 108676 - DNA, 75 bp, synthetic construct
  source 1..75: mol_type = other DNA
atttttttagacaatcagaacccaccagtcctgtaccttatctccttgagagagcagttcgttggtcaacaatga

SEQ ID NO: 108677 - DNA, 75 bp, synthetic construct
  source 1..75: mol_type = other DNA
atttatcagagtatctgaaagcatatcctctgctggaggataaagaaataacactttctaaatggtataaggcgc

SEQ ID NO: 108678 - DNA, 75 bp, synthetic construct
  source 1..75: mol_type = other DNA
tggcattgcaatctaccgccgactgggggcgagtggtttacattggcgaaaccggaaaagtggaatttgaggtca

SEQ ID NO: 108679 - DNA, 75 bp, synthetic construct
  source 1..75: mol_type = other DNA
atggtctggtacgttcctccgctgtcaccgattcagtcctacgctgatgcgggcggcttgccgaaaagcgaaggc

SEQ ID NO: 108680 - DNA, 75 bp, synthetic construct
  source 1..75: mol_type = other DNA
atcatggtgtcattccgactcctgcattagctcattattcgatgcagaaaaatattccctgtataatggtcactg

SEQ ID NO: 108681 - DNA, 75 bp, synthetic construct
  source 1..75: mol_type = other DNA
catttcgccataaagggcttgaacactttttcaagacaggttcaaccgcaggcattcaggccaaacatgcggtta

SEQ ID NO: 108682 - DNA, 75 bp, synthetic construct
  source 1..75: mol_type = other DNA
acatgggcgctctggcaggacagctacccggaagataagccgctggaaagtctgctggatattctgaagctcggc

SEQ ID NO: 108683 - DNA, 75 bp, synthetic construct
  source 1..75: mol_type = other DNA
tgtaacaattataacaaaagaaatacctgatacgtgggctagagaaaaaataccgtattaccctgttggtgataa

SEQ ID NO: 108684 - DNA, 75 bp, synthetic construct
  source 1..75: mol_type = other DNA
tcattggtaaacggccaatagctgaaattaaacccctagaactgcttgaagtacttaaacgcatagaaaaacgtg

SEQ ID NO: 108685 - DNA, 75 bp, synthetic construct
  source 1..75: mol_type = other DNA
catagaggataacccagaggttaagttttatcgtcatcagaattatgtgcatttattttatcctagtgaggccgg

SEQ ID NO: 108686 - DNA, 75 bp, synthetic construct
  source 1..75: mol_type = other DNA
atgctcccgccttattttttgttcaaagagatgacagacacacagtatattggccgcttcgccccctctccttcc

SEQ ID NO: 108687 - DNA, 75 bp, synthetic construct
  source 1..75: mol_type = other DNA
gattacctgccacagcggcggataatgcatcgggcgacgattcttggggataaaccgttttatcgggcggggtaa

SEQ ID NO: 108688 - DNA, 75 bp, synthetic construct
  source 1..75: mol_type = other DNA
gagatgcaattagcacatgtggacaaaaacagtattcgtgggacatataaccatgcccagtatctggaaggcaga

SEQ ID NO: 108689 - DNA, 75 bp, synthetic construct
  source 1..75: mol_type = other DNA
atgacccctgaacaattcagacaatggttcgccacgctgccaccgaactatcagagcaccgcacgcaccatgtac

SEQ ID NO: 108690 - DNA, 75 bp, synthetic construct
  source 1..75: mol_type = other DNA
tattcagtctacgtttcttggggcgcacagcttgccgccagagtttgccgggcgcagtgatgattacattacggc

SEQ ID NO: 108691 - DNA, 75 bp, synthetic construct
  source 1..75: mol_type = other DNA
gagcgtacaactcgcaaggttacgttaacaaaagcaggaaaaaggttactcccggaggcacgggaattaataaag

SEQ ID NO: 108692 - DNA, 75 bp, synthetic construct
  source 1..75: mol_type = other DNA
acagggctttaattccgcttggattgaaacgcagttagctcatgtagataaaaacgctatcagggggacctataa

SEQ ID NO: 108693 - DNA, 75 bp, synthetic construct
  source 1..75: mol_type = other DNA
ttgctaattttcttccagaaaaaagagataggttatttacaatatgtaaaaataatccacatacaatagttgatc

SEQ ID NO: 108694 - DNA, 75 bp, synthetic construct
  source 1..75: mol_type = other DNA
atgctacgtatcgctaaagaagctctgacgtttgacgacgttctcctcgttcctgctcattctaccgtcctgccg

SEQ ID NO: 108695 - DNA, 75 bp, synthetic construct
  source 1..75: mol_type = other DNA
gaagcggttaaaaacgctaaagctggccaggttcgttaccgtaacgacaaaaatggcatcatccacaccaccatc

SEQ ID NO: 108696 - DNA, 75 bp, synthetic construct
  source 1..75: mol_type = other DNA
atcagaagatggaaaggaaaaattaatagaaagcgaaggtgatcactctgttgaatcgttcaaaaaaattgtagg

SEQ ID NO: 108697 - DNA, 75 bp, synthetic construct
  source 1..75: mol_type = other DNA
cgatctggcgggttataccggaagtatcatcactaaaacagctactcagatcattatgttaaccggtgtacgaac

SEQ ID NO: 108698 - DNA, 75 bp, synthetic construct
  source 1..75: mol_type = other DNA
ctataagcttgctgatggcggcggtatgtatctactgattaacactaatggttctaaatactggcgcatgaagta

SEQ ID NO: 108699 - DNA, 75 bp, synthetic construct
  source 1..75: mol_type = other DNA
gaagatgaagcgacctcatattgtgccgctctctgagcaggtcattatgctatttaagcagcttgaaccaatctc

SEQ ID NO: 108700 - DNA, 75 bp, synthetic construct
  source 1..75: mol_type = other DNA
gatcttaatcatccacgtgaactggcttactggtttgggcatcagccttgccaggggcttattgtcggcggaaaa

SEQ ID NO: 108701 - DNA, 75 bp, synthetic construct
  source 1..75: mol_type = other DNA
atggcagtacgaaaactcaccacaggaaaatggctttgcgaatgttaccccgccggacgtagcggacgccgtgtg

SEQ ID NO: 108702 - DNA, 75 bp, synthetic construct
  source 1..75: mol_type = other DNA
agatgcagaaaggcaagttctggagggaagttcatttgttttatgttgcggtgaaaaaataaacagcactataag

SEQ ID NO: 108703 - DNA, 75 bp, synthetic construct
  source 1..75: mol_type = other DNA
acagtattgttggtgtttccgcatttgtgaaagccaaagcagaaatgccgactaattacttgattgtcagcagcc

SEQ ID NO: 108704 - DNA, 75 bp, synthetic construct
  source 1..75: mol_type = other DNA
aaatcacaaccggttaatactcagcttgatcctgaaaaactgactacagcgcagttaatcgctgcctggcaaagt

SEQ ID NO: 108705 - DNA, 75 bp, synthetic construct
  source 1..75: mol_type = other DNA
cacaaagcaatggcgctggtgtttggcaacggtgattatcgcggctggtttgtaattacagagttaaccgccact

SEQ ID NO: 108706 - DNA, 75 bp, synthetic construct
  source 1..75: mol_type = other DNA
attattactccctttatgagcgctattttgcaccgcgcggcattgcgatgttgactattgatatgccttcggtcg

SEQ ID NO: 108707 - DNA, 75 bp, synthetic construct
  source 1..75: mol_type = other DNA
cgcgacagaggcggtgcgaccggaacggtcgctgcaagccagggtttcgcgtcagggatggaagcccgccagggg

SEQ ID NO: 108708 - DNA, 75 bp, synthetic construct
  source 1..75: mol_type = other DNA
gtagcgggcaaattggtcacaccatcgttaatccggatggcgtcgtctgcgactgcgggcgttacggctgcctgg

SEQ ID NO: 108709 - DNA, 75 bp, synthetic construct
  source 1..75: mol_type = other DNA
ttgactatcgatatgccttcggttggtttttcttcaaaatggaaactcacccaggattccagccttctgcatcag

SEQ ID NO: 108710 - DNA, 75 bp, synthetic construct
  source 1..75: mol_type = other DNA
tctgacactgagtgcagagcacaaacagggcaagagcggtcagaatgacactcgctttggcctggaagttaacta

SEQ ID NO: 108711 - DNA, 75 bp, synthetic construct
  source 1..75: mol_type = other DNA
cggggggggggggcagtctattttacagcggcatattgcctcgttctcgcatcatggtttgcctcaaggcagtga

SEQ ID NO: 108712 - DNA, 75 bp, synthetic construct
  source 1..75: mol_type = other DNA
gtgcgatcttcctgaaagagatggaagtggtcgatgcgacggtacaaccggaaaaaatgcaaacggtgatgcaaa

SEQ ID NO: 108713 - DNA, 75 bp, synthetic construct
  source 1..75: mol_type = other DNA
ggtaatgctaacggcccaatgggcgcctggctggtacatcacaacgtattgccccacgatggaaacgtattacgc

SEQ ID NO: 108714 - DNA, 75 bp, synthetic construct
  source 1..75: mol_type = other DNA
gacggtgacaattcgtgataaccaaccggaaaaagtcaccatttctggcacagcggtgattttgtttcatgccga

SEQ ID NO: 108715 - DNA, 75 bp, synthetic construct
  source 1..75: mol_type = other DNA
ttgaactaaaagctgagtgttcgataggtgaagaggatggcgtttatggtctaatccttgagtcgtgggggccgg

SEQ ID NO: 108716 - DNA, 75 bp, synthetic construct
  source 1..75: mol_type = other DNA
ggtcacgcgacagtagctgcgcactatgtacgtgcgaaggtgttaggtttaggaaattgcacgatctggcaaaca

SEQ ID NO: 108717 - DNA, 75 bp, synthetic construct
  source 1..75: mol_type = other DNA
taggaggacaacactggtggtcaacgattagcattgagcaaccttgtcactatgaatacatcctcaaataccgtg

SEQ ID NO: 108718 - DNA, 75 bp, synthetic construct
  source 1..75: mol_type = other DNA
agaaggctagtatggatccgacagcagcaagcacaatttcatgctcagccgcgccagagtgaacgagaaatgtgt

SEQ ID NO: 108719 - DNA, 75 bp, synthetic construct
  source 1..75: mol_type = other DNA
ctggggggcattttccctgaccacggtaaacggtgtctctcagtttcagccggagtggatatgctgggagtctgg

SEQ ID NO: 108720 - DNA, 75 bp, synthetic construct
  source 1..75: mol_type = other DNA
gtcgataatgactgcgtgatgctggcgctggcggagaaatggcaaaataattcgcaagtgcgtgatttctgcgta

SEQ ID NO: 108721 - DNA, 75 bp, synthetic construct
  source 1..75: mol_type = other DNA
atgaagttttgggataaaatagctagcgacatggtgtttaaatcaattaattattttatgtcccataatgaagtt

SEQ ID NO: 108722 - DNA, 75 bp, synthetic construct
  source 1..75: mol_type = other DNA
cgtatgctgaccttgcttaatcgcaccgatattccggtagcaggcggcgcggtaaaaccgttaatgcgtgagttg

SEQ ID NO: 108723 - DNA, 75 bp, synthetic construct
  source 1..75: mol_type = other DNA
ctgaacagcgagttcaggaagctcgaagcgtctgtagacagggaactgaacttaaacgggcagaaaatcagagac

SEQ ID NO: 108724 - DNA, 75 bp, synthetic construct
  source 1..75: mol_type = other DNA
ccgttaagcgataatcagtttgaacagctttaccatgcggtgctgcgccatcaggtggtgtttctgcgcgatcaa

SEQ ID NO: 108725 - DNA, 75 bp, synthetic construct
  source 1..75: mol_type = other DNA
tcagagtttgtcgagatgttcgtcggcgtgggtgcgggccgcccgcgcggcgtcggcggccacgacgagcgcgag

SEQ ID NO: 108726 - DNA, 75 bp, synthetic construct
  source 1..75: mol_type = other DNA
gtggcggatgtacatatcgtcctgacgaacctggccagtcagattgggcgcgaagaaccgaacaagattactcta

SEQ ID NO: 108727 - DNA, 75 bp, synthetic construct
  source 1..75: mol_type = other DNA
aaaacttaatcaataccaaaaagacattgatcacctgtctaaactattttctgaacagcaattactggaactaat

SEQ ID NO: 108728 - DNA, 75 bp, synthetic construct
  source 1..75: mol_type = other DNA
tgggccacccaggcaatgctgtggcaacagaaagcctgtgcggaagaagacccgcaagtcagcgggcgtcactgg

SEQ ID NO: 108729 - DNA, 75 bp, synthetic construct
  source 1..75: mol_type = other DNA
ccgattacctgccacagcggcggataatgcatcgagcgacgatcctcggggataaaccgttttatcgggcggggt

SEQ ID NO: 108730 - DNA, 75 bp, synthetic construct
  source 1..75: mol_type = other DNA
cacaaataggtgctcaaaaaggcattgtaatcccacaaccagataagaacacttggaaaagctggcgagagcgtt

SEQ ID NO: 108731 - DNA, 75 bp, synthetic construct
  source 1..75: mol_type = other DNA
gatcccgccattatcctggatgatggtcagggggctcggggcaggattttccagtgtgtacagccatttcgcttc

SEQ ID NO: 108732 - DNA, 75 bp, synthetic construct
  source 1..75: mol_type = other DNA
ctttgcgcgtagagctgaaccgctattcgttaaaagtgcaagggttgctggggcgtcgctgtccaacgccaatgt

SEQ ID NO: 108733 - DNA, 75 bp, synthetic construct
  source 1..75: mol_type = other DNA
agccggttgtaccacagccgcaatatcagcagccgcaacagccagttgcgccacagccgcaggataccctgcttc

SEQ ID NO: 108734 - DNA, 75 bp, synthetic construct
  source 1..75: mol_type = other DNA
cgttttctggccctgctcagcgtgatgcgcctgccgacgcgcacggcggaaggcgtcacggcactggtgggactg

SEQ ID NO: 108735 - DNA, 75 bp, synthetic construct
  source 1..75: mol_type = other DNA
attttaaaggggaaaagaataggggtatatgaacattctagtgcaggacgcgatttatatgctcctctttttaat

SEQ ID NO: 108736 - DNA, 75 bp, synthetic construct
  source 1..75: mol_type = other DNA
ggtattacaccggaaacaccgcaatttggtggtgatgcatacaacgtcaaccagcagcgcccatccgtcagtcag

SEQ ID NO: 108737 - DNA, 75 bp, synthetic construct
  source 1..75: mol_type = other DNA
cctggcccactgcgtggcgtgggcaaacatctctattcaggttcttttcccactggctgttacctttacaccgac

SEQ ID NO: 108738 - DNA, 75 bp, synthetic construct
  source 1..75: mol_type = other DNA
tttcacgtcgcactgcgaatcccacatttattttttcatgccatgcaaaaacaagcggcaacattaagattacac

SEQ ID NO: 108739 - DNA, 75 bp, synthetic construct
  source 1..75: mol_type = other DNA
gaacactgaaagacgtggttgagctatggttcaaactacatggtaaatctctgacagctgggcagcatgtctatg

SEQ ID NO: 108740 - DNA, 75 bp, synthetic construct
  source 1..75: mol_type = other DNA
gatcgttgtattgatttctggtggcagagcggcggaatacaggaaccggttgatgacagaatgcatgatttatcg

SEQ ID NO: 108741 - DNA, 75 bp, synthetic construct
  source 1..75: mol_type = other DNA
acgtataaaaaatacacttataaaaaatacaattataaagaagacacgtataaaaaagacactaattatgagtat

SEQ ID NO: 108742 - DNA, 75 bp, synthetic construct
  source 1..75: mol_type = other DNA
ttcagatatgctgttcactcagggggcaatacatcgtaccgacgatcgtactcagtcaaatattggtttcggctg

SEQ ID NO: 108743 - DNA, 75 bp, synthetic construct
  source 1..75: mol_type = other DNA
tgcaaaaccaaccgtgatgagctgacgaacggcggcaaaaccaaaactgccaatctgaccaccggaacggtgtca

SEQ ID NO: 108744 - DNA, 75 bp, synthetic construct
  source 1..75: mol_type = other DNA
atgtttgtagaagcattgaaacgccagaacccggcgctaatttccgccgcactaagcttgtggcaaaagggcaag

SEQ ID NO: 108745 - DNA, 75 bp, synthetic construct
  source 1..75: mol_type = other DNA
tctgggcagcagttctgtgtctaaccgtgtcatccttcagggctcccgtgataccagcgtaaccgaagatggcgt

SEQ ID NO: 108746 - DNA, 75 bp, synthetic construct
  source 1..75: mol_type = other DNA
aggctgagatctggatgcgggcgcatccggcagggtgttctgaaattgaagttggcgcgaacacggtttcattac

SEQ ID NO: 108747 - DNA, 75 bp, synthetic construct
  source 1..75: mol_type = other DNA
aatggcccgaaattcaggcagagatgcgcatctggaaaaaacgtcgcgaaggtgaacgcaaggaagccggaaaat

SEQ ID NO: 108748 - DNA, 75 bp, synthetic construct
  source 1..75: mol_type = other DNA
ttcacattctggacaaaaaacaaggccatagactggaatgaatattacagatttgttgaacgctggggtaatcac

SEQ ID NO: 108749 - DNA, 75 bp, synthetic construct
  source 1..75: mol_type = other DNA
accttgaaaccatgggaaaaaatcctgatgccccgattatctcaataggtgcaatatttttcgatccgcaaaccg

SEQ ID NO: 108750 - DNA, 75 bp, synthetic construct
  source 1..75: mol_type = other DNA
attgaaaacacatcaaaattggtaagaaaagaaaatgacagaaggattgtttcatttgataaaaaattacatata

SEQ ID NO: 108751 - DNA, 75 bp, synthetic construct
  source 1..75: mol_type = other DNA
gcaagttcttgtggaacgcattgaatcattcaacagtgccagttcacttaattacaacgctgaacgggacgtctt

SEQ ID NO: 108752 - DNA, 75 bp, synthetic construct
  source 1..75: mol_type = other DNA
ctgatggcgttgcaggtagctttgcaggaataagtcatgatgcgcttatatttgccggaggagctggcttcgaag

SEQ ID NO: 108753 - DNA, 75 bp, synthetic construct
  source 1..75: mol_type = other DNA
ttggtgatgacggtaaatatcgtcaaatcatcaacgtcgccgatggttccgaagcccatgacgccgttacggttc

SEQ ID NO: 108754 - DNA, 75 bp, synthetic construct
  source 1..75: mol_type = other DNA
ctggctggatgaagtgctggataaacttcatgctggcgggatttctgtcttcctcgcaacaccaagcggagcaaa

SEQ ID NO: 108755 - DNA, 75 bp, synthetic construct
  source 1..75: mol_type = other DNA
atttgttgaacgctggggtaatcaccctcgtttctcattcgcagttatcccggatgttatcggcggaaccagtga

SEQ ID NO: 108756 - DNA, 75 bp, synthetic construct
  source 1..75: mol_type = other DNA
cgcgattctgtgaaccagaaccagcaagaaacggaacagaacgaccagaaagcggaacaaaacagcccaaatacg

SEQ ID NO: 108757 - DNA, 75 bp, synthetic construct
  source 1..75: mol_type = other DNA
cagatggcgtggctggcggttttgcgggtatcagcgatggcaatcttatatttgccggaggtgccggatttaaag

SEQ ID NO: 108758 - DNA, 75 bp, synthetic construct
  source 1..75: mol_type = other DNA
taattatgcccagccgctcacccgcgagagcgtggcgcagttttttaatatcacgcccaatcatctgtcaaaact

SEQ ID NO: 108759 - DNA, 75 bp, synthetic construct
  source 1..75: mol_type = other DNA
attctcaaaaaaatgaaatcctggtggaagctgaaccatctgtagagcgtgaaggaccgttttatttcgtcttta

SEQ ID NO: 108760 - DNA, 75 bp, synthetic construct
  source 1..75: mol_type = other DNA
caaaaccgcacgttaacgtgggtactatcggccacgttgaccaaggtaaaacaactctgaccgctgcaatcacga

SEQ ID NO: 108761 - DNA, 75 bp, synthetic construct
  source 1..75: mol_type = other DNA
tacgacttcaacgatgcaagtctggtcccggcatgcagctactggggcgcactggtagaagcctggctgcaataa

SEQ ID NO: 108762 - DNA, 75 bp, synthetic construct
  source 1..75: mol_type = other DNA
tctcggtgttggcgaggaaaacatcacgcttgccggtgtgctttatcccgagctgaccggcggaaagctgacgat

SEQ ID NO: 108763 - DNA, 75 bp, synthetic construct
  source 1..75: mol_type = other DNA
ggaaaaaacgtcgcgaaggtgaacgcaaggaaaccggaaaatatacgtctgttgttgatctggccctcgccagag

SEQ ID NO: 108764 - DNA, 75 bp, synthetic construct
  source 1..75: mol_type = other DNA
tgggatgtcggtcagcgacagtgctaatcctgttcatcatgatggccatgtgcagggtggctacagtgttcccct

SEQ ID NO: 108765 - DNA, 75 bp, synthetic construct
  source 1..75: mol_type = other DNA
ccgaaaaatcctctgcaaccaccggcaatacgcacgaagctcccgggtgtcggggcggtctccggtgccattcct

SEQ ID NO: 108766 - DNA, 75 bp, synthetic construct
  source 1..75: mol_type = other DNA
tttgaatcttgactggcggcgctttgtcacatcgcaggtaaaagagttctaccaaatggagatcgcgccgttaaa

SEQ ID NO: 108767 - DNA, 75 bp, synthetic construct
  source 1..75: mol_type = other DNA
cgcggattataatccggagcaatgggagaatgaccccgatattattgataaagacattgccatgatgcagcaggc

SEQ ID NO: 108768 - DNA, 75 bp, synthetic construct
  source 1..75: mol_type = other DNA
tatcgctggccgtcaaattcccgtatcggtaaacgggatgcctttcagtttctcggtgttggcgaggaaaacatc

SEQ ID NO: 108769 - DNA, 75 bp, synthetic construct
  source 1..75: mol_type = other DNA
ggcacacggggccgatgccgtacagtacttccagtggcgtaaaagccgcggttcggtggagaaattccacggggc

SEQ ID NO: 108770 - DNA, 75 bp, synthetic construct
  source 1..75: mol_type = other DNA
atgcgtggcagtctcctttcggtcgataacagcagaacagcagaacagcagaacaaaagaaagagccaaaaaatg

SEQ ID NO: 108771 - DNA, 75 bp, synthetic construct
  source 1..75: mol_type = other DNA
cgctaacgtttccagttaaagccggtgatgaatgtttggtgatttttgccgatcgttgtattgatttctggtggc

SEQ ID NO: 108772 - DNA, 75 bp, synthetic construct
  source 1..75: mol_type = other DNA
acgcctgtaaagacgagcaaggccgtctgcgtgttggtgcagcggttggcgcaggtgcgggtaacgaagagcgtg

SEQ ID NO: 108773 - DNA, 75 bp, synthetic construct
  source 1..75: mol_type = other DNA
aaccaacggattttgcttctgcggtggattggctaaaaatctacaatctaccgggtaagcctgatattcaaatat

SEQ ID NO: 108774 - DNA, 75 bp, synthetic construct
  source 1..75: mol_type = other DNA
ctgagcggtgacctgtatcctgagctgaccggcggtaagctcacgatgctggcgctttatgcaatggctgaacag

SEQ ID NO: 108775 - DNA, 75 bp, synthetic construct
  source 1..75: mol_type = other DNA
ggctggcatatttccaacgaatatggcggcgaatgccattgcgatctctgccagaatcgttttcgcgactggctg

SEQ ID NO: 108776 - DNA, 75 bp, synthetic construct
  source 1..75: mol_type = other DNA
ataacagcagaacagcagaacagcagaacagcagaacagcagaacagcagaacaaaagaaagagccaaaaaatga

SEQ ID NO: 108777 - DNA, 75 bp, synthetic construct
  source 1..75: mol_type = other DNA
atcgattcgaaaaaacaagctctctacgaccatgtaggaattgtatcttcattgaatttagatagccaagataat

SEQ ID NO: 108778 - DNA, 75 bp, synthetic construct
  source 1..75: mol_type = other DNA
gtgatggatctttttgcccgcagggttatcggctggagtctgtccgcacataccgatactgcactgataagcgat

SEQ ID NO: 108779 - DNA, 75 bp, synthetic construct
  source 1..75: mol_type = other DNA
taagctgttcgccatcgggtgggttaaacataaatgtaagccgggtgccaaatggcccgaaattcaggcagaatt

SEQ ID NO: 108780 - DNA, 75 bp, synthetic construct
  source 1..75: mol_type = other DNA
ttggggctggatgatggcgcgctggataccgaattctcaattggcggtatggagtcactgctatacaagcagatg

SEQ ID NO: 108781 - DNA, 75 bp, synthetic construct
  source 1..75: mol_type = other DNA
tgggatgccatacgtgcgcgcatactgaagcgtgataatcatttgtgtcagaactgcctgcgcaatgggagagcc

SEQ ID NO: 108782 - DNA, 75 bp, synthetic construct
  source 1..75: mol_type = other DNA
accaccaatatcgctaccaataccggaaatattgcaactaacactgcaaatattgctaccaacaccaccaatatc

SEQ ID NO: 108783 - DNA, 75 bp, synthetic construct
  source 1..75: mol_type = other DNA
gatgcccgcatagcgttgctggaaaaagagcccggcccggcctgtcaccagacgggccacaacagcggcgtgatc

SEQ ID NO: 108784 - DNA, 75 bp, synthetic construct
  source 1..75: mol_type = other DNA
taaaactgaaggatgccctttcgcagtttcgggagttcatcaacgaatactcagatgaaaaattcgttcaggtat

SEQ ID NO: 108785 - DNA, 75 bp, synthetic construct
  source 1..75: mol_type = other DNA
tgcaacgtgacaaaggcctgtgtcagttatgtctgcgtgccggtgtggtgcgtgaggcgaaaaccgttgaccaca

SEQ ID NO: 108786 - DNA, 75 bp, synthetic construct
  source 1..75: mol_type = other DNA
gcaattcctggagcaatatccggctgctcaggactgcgcttataaatttcttgtctgcgaggataaacccggtat

SEQ ID NO: 108787 - DNA, 75 bp, synthetic construct
  source 1..75: mol_type = other DNA
gatgctaccgcaggtgaaaatggtgccttcagtgccagccacgatggcagtgccagcaaaataactaacgtcgcg

SEQ ID NO: 108788 - DNA, 75 bp, synthetic construct
  source 1..75: mol_type = other DNA
atgaaaatgccagaagttaacgccatgtatccggagcttaagttgcacgccattgggtgggttaagcataaatgt

SEQ ID NO: 108789 - DNA, 75 bp, synthetic construct
  source 1..75: mol_type = other DNA
atgaatagccccccttgcccctttgatccacaaaccgcacattacctcggcacagtgcaaatccactacacccaa

SEQ ID NO: 108790 - DNA, 75 bp, synthetic construct
  source 1..75: mol_type = other DNA
gtgcactggcggataaatcctctccgaaggtgattttcctgcacatgatggggtctcatccgaacccgtgtgacc

SEQ ID NO: 108791 - DNA, 75 bp, synthetic construct
  source 1..75: mol_type = other DNA
aaatcgatactggaaaaactctaactcggtggccagtttttgttgaccacttcaattttcaggcaatggaaaccc

SEQ ID NO: 108792 - DNA, 75 bp, synthetic construct
  source 1..75: mol_type = other DNA
tcagccgaagaattaatgattttaagtcaaaaaccaaacaggttacttttacgaaacccgtacgttatgagcttt

SEQ ID NO: 108793 - DNA, 75 bp, synthetic construct
  source 1..75: mol_type = other DNA
cacaaggagaacaatggcggcgatcagcatcacgatagccataatgaaactggcgaggcgacagattccttaatt

SEQ ID NO: 108794 - DNA, 75 bp, synthetic construct
  source 1..75: mol_type = other DNA
aattcccatcaatatgaataccctgaagctggaagtcagccgctcaaccattgatagcctgattacgaaagatcg

SEQ ID NO: 108795 - DNA, 75 bp, synthetic construct
  source 1..75: mol_type = other DNA
ggaaccgctggcttattggctatattgcccatgatcccacaatggttgaaaccttctcatgactttaaactcaac

SEQ ID NO: 108796 - DNA, 75 bp, synthetic construct
  source 1..75: mol_type = other DNA
acggcactaaatccacgaataacactggtgcgcatactcatagtttaagtggcagcacgaatgcagctggtaatc

SEQ ID NO: 108797 - DNA, 75 bp, synthetic construct
  source 1..75: mol_type = other DNA
tgaattcaaaatttgctgatatcgcttgtggctcaggtgcttttattattgaggcattccaattcatccaggata

SEQ ID NO: 108798 - DNA, 75 bp, synthetic construct
  source 1..75: mol_type = other DNA
catgagttacaggatacccgcgagaactttgtgcagggggtgcaaaatacagtggcagaagacctgtcgaaaaac

SEQ ID NO: 108799 - DNA, 75 bp, synthetic construct
  source 1..75: mol_type = other DNA
tcattttctattacctttattcctgcatttcttacaaacaggcaggaacttatatccagggggcttcttgttcca

SEQ ID NO: 108800 - DNA, 75 bp, synthetic construct
  source 1..75: mol_type = other DNA
aatttctgagccagagcggtaagatggttaccgccgccgcgctgtttggtacctcagtgccgctcgcccatgcgg

SEQ ID NO: 108801 - DNA, 75 bp, synthetic construct
  source 1..75: mol_type = other DNA
atccaccaatggcagtatcacggctaacggtactgccacagcaaacggcaaggccacgcatctggacggcaacgt

SEQ ID NO: 108802 - DNA, 75 bp, synthetic construct
  source 1..75: mol_type = other DNA
ggagattcagcgcaagagccgttggggccgacgaagtgatcgcacgattgttaatccctgtgaacgctaacatta

SEQ ID NO: 108803 - DNA, 75 bp, synthetic construct
  source 1..75: mol_type = other DNA
gccagtaacattactcttaccggggaaagtacgagtgggaatgccatcaaccttacagacactacaggcactacc

SEQ ID NO: 108804 - DNA, 75 bp, synthetic construct
  source 1..75: mol_type = other DNA
agacaggacggtgtaagattttatatcgatagttttgaacacatccccgcaaccgatacaaaactgcagaattcc

SEQ ID NO: 108805 - DNA, 75 bp, synthetic construct
  source 1..75: mol_type = other DNA
acagtcggagtaccaatcccgtggtcgtcgtgtaccgttccgtcttgttatgccctgatgcaggggcagactttt

SEQ ID NO: 108806 - DNA, 75 bp, synthetic construct
  source 1..75: mol_type = other DNA
ttctctggcggcagttatagcaggagcacctcctgaggttgctttggggtctttggctggtgcagtaatttttat

SEQ ID NO: 108807 - DNA, 75 bp, synthetic construct
  source 1..75: mol_type = other DNA
cgacgcgatacggtgaatccggtgcatgtcaggttgtgcagtgaaatacgccgggtgtggaaccaaagccggggc

SEQ ID NO: 108808 - DNA, 75 bp, synthetic construct
  source 1..75: mol_type = other DNA
aatgaaattggcgtttcaggcggctcgctggcggcattgacttcccccttaacctcaacaactcccgtcgcagaa

SEQ ID NO: 108809 - DNA, 75 bp, synthetic construct
  source 1..75: mol_type = other DNA
gcgaagactggaagcgtatctcagcatcaatgcgcaaacagcccgaagcacttggctatgaccgtcagactattt

SEQ ID NO: 108810 - DNA, 75 bp, synthetic construct
  source 1..75: mol_type = other DNA
tgatggtatccttcgccggcattcccgtcatttcgccatgctttacttttctgaccatgggatgtcggtcagcga

SEQ ID NO: 108811 - DNA, 75 bp, synthetic construct
  source 1..75: mol_type = other DNA
ttgctgatggtaacattggtgaagatagcaccgacgctatcaacggttctcagttgaatgcaaccaacatgatga

SEQ ID NO: 108812 - DNA, 75 bp, synthetic construct
  source 1..75: mol_type = other DNA
tatcggccacgttgaccatggtaaaacaaccctgaccgctgcaatcacaaccgtactggctaaaacctacggcgg

SEQ ID NO: 108813 - DNA, 75 bp, synthetic construct
  source 1..75: mol_type = other DNA
tggttctcagactacccgtggtgcgcagaccaactacactgcctacaacatggatgcaccgcagaactctgtggg

SEQ ID NO: 108814 - DNA, 75 bp, synthetic construct
  source 1..75: mol_type = other DNA
ctgcgcggcaataccgtttctgacgcaccgctgattatcggtagccttgatccctgctactcctgtaccgaccgt

SEQ ID NO: 108815 - DNA, 75 bp, synthetic construct
  source 1..75: mol_type = other DNA
gccaagaaaaaatcttcatcgcaccgttctccgcgccgtcagtgcgccggagtttctccctgtcaccccgtgagg

SEQ ID NO: 108816 - DNA, 75 bp, synthetic construct
  source 1..75: mol_type = other DNA
taaaggtgataaaacctggcttattaatggcgaagcaaaaccaggactgcgaactgatgctgtatttgagcttga

SEQ ID NO: 108817 - DNA, 75 bp, synthetic construct
  source 1..75: mol_type = other DNA
atggcattaccacgcaagttaaaacacctgaatctgttcaacgacgggaacaactggcaggggatcgttgagtcc

SEQ ID NO: 108818 - DNA, 75 bp, synthetic construct
  source 1..75: mol_type = other DNA
atctttggcataacgggaaatgggagaaatctggcgaactgtcgcaaggtcgggcctacggagtatcattgccct

SEQ ID NO: 108819 - DNA, 75 bp, synthetic construct
  source 1..75: mol_type = other DNA
taccgttataaacagatgtgatgtggtgttctgtggtgtgcctaatgaatatgaaaaaataaagaatgggtttga

SEQ ID NO: 108820 - DNA, 75 bp, synthetic construct
  source 1..75: mol_type = other DNA
cggtgaaactacgggcggcaaagctgtagcggactcagtactactctctgtgaaagataataaagttactgtgca

SEQ ID NO: 108821 - DNA, 75 bp, synthetic construct
  source 1..75: mol_type = other DNA
aagagccgcagaacaggctgttcgtgatgctaccaagcaagaagccgttgaagtctacaaaacattcagcgaact

SEQ ID NO: 108822 - DNA, 75 bp, synthetic construct
  source 1..75: mol_type = other DNA
atgactgaacaatccccatttttggttcaagtgaatcaagcgtttaatgttccggctcctgatgctttcgttctg

SEQ ID NO: 108823 - DNA, 75 bp, synthetic construct
  source 1..75: mol_type = other DNA
aaatcctcgccgaaggtgattttcctgcacatgattggctctcatccgaatccgtgtgaccgacttaactcctgg

SEQ ID NO: 108824 - DNA, 75 bp, synthetic construct
  source 1..75: mol_type = other DNA
gtgcactggcggataaatcctctccgaaggtgattttcctgcacatgattggctctcatccgaatccgtgtgacc

SEQ ID NO: 108825 - DNA, 75 bp, synthetic construct
  source 1..75: mol_type = other DNA
aatgctggcagcgctcaggatcacgccagcgatagtgaaactggcgagacggcagatcccttaattacggtgaac

SEQ ID NO: 108826 - DNA, 75 bp, synthetic construct
  source 1..75: mol_type = other DNA
caattaatccatttgatttgactaactaccaatttgatgtgatcgttggaaatcctccttatatggcgactgagc

SEQ ID NO: 108827 - DNA, 75 bp, synthetic construct
  source 1..75: mol_type = other DNA
tcctgcttcaagtctgtataacggcttcccacatatcggcaccttgctgaaagcgagtcgttatcagaatcaaat

SEQ ID NO: 108828 - DNA, 75 bp, synthetic construct
  source 1..75: mol_type = other DNA
atcagagcgacgattttctgttgtaattgaaactgcaacattatctgaaatggaactggctgattattgtcggag

SEQ ID NO: 108829 - DNA, 75 bp, synthetic construct
  source 1..75: mol_type = other DNA
ctgggttaacagtattgctgatcgtttgagttcggcgggtatcagtctaattgcgggaacagaataccgccactt

SEQ ID NO: 108830 - DNA, 75 bp, synthetic construct
  source 1..75: mol_type = other DNA
gtgcccccaacgcccttgaatacgctctggatcaagctctgcttatccgggcggccaaagaggagcgtgaagcca

SEQ ID NO: 108831 - DNA, 75 bp, synthetic construct
  source 1..75: mol_type = other DNA
taaaacgtcaatatcctaagttatttgagttcctgcaggttgtaaaagtccatttgaatgataagaaacgctcta

SEQ ID NO: 108832 - DNA, 75 bp, synthetic construct
  source 1..75: mol_type = other DNA
tgatgaagacagcaaccttgaaagcctgtgctggtcgtgtcacgccgcgaagaccgcgcgtgagcggctcaaatg

SEQ ID NO: 108833 - DNA, 75 bp, synthetic construct
  source 1..75: mol_type = other DNA
attcaggagatggccaccgccagcgaaaaccaactggatgtcaaaatcattctgatgaacaacgaagcgttaggg

SEQ ID NO: 108834 - DNA, 75 bp, synthetic construct
  source 1..75: mol_type = other DNA
cacctatccgggcaaaatcaactttatgcaaatagctgccggattcggtctcgaaacctgtgatttgaataacga

SEQ ID NO: 108835 - DNA, 75 bp, synthetic construct
  source 1..75: mol_type = other DNA
taacgggtcaagatggtgcttatcttgctgaacttcttctcagcaaagggtataaagtatttggtacataccgtc

SEQ ID NO: 108836 - DNA, 75 bp, synthetic construct
  source 1..75: mol_type = other DNA
agaatgtaaaaacgcttgaggagataaacggcgccaccgcgggcaccatctataaggatgcttcaaatttcctta

SEQ ID NO: 108837 - DNA, 75 bp, synthetic construct
  source 1..75: mol_type = other DNA
aataacccagggttttgtgctttgctgggaaaaacaaatttgcttgttgctgatttttcacagcatacattcaca

SEQ ID NO: 108838 - DNA, 75 bp, synthetic construct
  source 1..75: mol_type = other DNA
gtaaaaataattcaccaggcattaccaattaaaggggtttatcttgatgctgaccctgccgccattaacttttat

SEQ ID NO: 108839 - DNA, 75 bp, synthetic construct
  source 1..75: mol_type = other DNA
ccgataaactgcgcgtcggtgattttgccgtcgcggtcggtaacccgtttggactcgggcaaaccgctacctccg

SEQ ID NO: 108840 - DNA, 75 bp, synthetic construct
  source 1..75: mol_type = other DNA
tcaaccttgacgtacaacgcggagcatttgtcagcgaagtgctaccaggttctggctcagcaaaagcgggcgtga

SEQ ID NO: 108841 - DNA, 75 bp, synthetic construct
  source 1..75: mol_type = other DNA
agtggctgacctccggtgggctgggaaccatgggctttggcctgccagcggcgattggcgcggcgctggcaaacc

SEQ ID NO: 108842 - DNA, 75 bp, synthetic construct
  source 1..75: mol_type = other DNA
cgctgatccatgtgcgcattgatgccgaagaaaaagtttacccgatggtgccgccaggtgcggcgaatactgaaa

SEQ ID NO: 108843 - DNA, 75 bp, synthetic construct
  source 1..75: mol_type = other DNA
ggcaacacaaagccccacaaaatactctgcctttgagttggcttttgaattgggtcaccgggttattgctgaatt

SEQ ID NO: 108844 - DNA, 75 bp, synthetic construct
  source 1..75: mol_type = other DNA
tgatcccgctggtggaagcgcaaccgcgtgcagagtggcaccagttggtagcggatttgcagcgcgaattcccgt

SEQ ID NO: 108845 - DNA, 75 bp, synthetic construct
  source 1..75: mol_type = other DNA
gtgatgtggtgctggtatcgggtattcagcgtggcgaaccggaaatcgtcgatcgttatgacagtcttggaaact

SEQ ID NO: 108846 - DNA, 75 bp, synthetic construct
  source 1..75: mol_type = other DNA
aaacgctcttgtttgtgcaggatgtgaacaaatatttgaagataaataaagcggaacaaggacaggccgacctgg

SEQ ID NO: 108847 - DNA, 75 bp, synthetic construct
  source 1..75: mol_type = other DNA
gtgtgcctgtggcgcatccggcgtggcgggggttctctgctgctgatcccactggcctgtaatatgttcggtatt

SEQ ID NO: 108848 - DNA, 75 bp, synthetic construct
  source 1..75: mol_type = other DNA
cgcattgatgccgaagaaaaagtttacccgatggtgccgcctggtgcggcgaatactgaaatggtgggggaataa

SEQ ID NO: 108849 - DNA, 75 bp, synthetic construct
  source 1..75: mol_type = other DNA
actcatgccgaacccggccatgcgctgacggggacgattccggcaaaccagcagggcgaccaacctgaacgtatc

SEQ ID NO: 108850 - DNA, 75 bp, synthetic construct
  source 1..75: mol_type = other DNA
gaggcataaacagtcttgctttgggtagtcaatccaatgcaaacggtgataacgcagttgccctcggtgtaggat

SEQ ID NO: 108851 - DNA, 75 bp, synthetic construct
  source 1..75: mol_type = other DNA
tgatgattcagctccagaaaatgccagaactacatagaacagaaatgttgactgcctataatagtggacatatga

SEQ ID NO: 108852 - DNA, 75 bp, synthetic construct
  source 1..75: mol_type = other DNA
aatctgatcccgaccgactggcaggaagaagctgcgcggcaatccaacgatggcggcagcagtcagggcttcggc

SEQ ID NO: 108853 - DNA, 75 bp, synthetic construct
  source 1..75: mol_type = other DNA
atgtttgtagaagcattgaaacgccagaacccggcactgatttccgccgcactaagattgtggcaacagggcaag

SEQ ID NO: 108854 - DNA, 75 bp, synthetic construct
  source 1..75: mol_type = other DNA
gataaaccattacctgtcggaaagattattgatatagcgggatgttgcttcatcattggtgatattgaccattcc

SEQ ID NO: 108855 - DNA, 75 bp, synthetic construct
  source 1..75: mol_type = other DNA
gggaggggctttcccgtttcagcgtcccgctgaaatcttcggcttacctcctttcgccctgtatgcagtctatcg

SEQ ID NO: 108856 - DNA, 75 bp, synthetic construct
  source 1..75: mol_type = other DNA
aatcactctggtatggcatggaaaaaatatcgcgctttatgggcgttgcgaatcaaccacggatttaactccatt

SEQ ID NO: 108857 - DNA, 75 bp, synthetic construct
  source 1..75: mol_type = other DNA
ataggtaacctgtattatgcttgttcacaggcatttcctgtcgcgcttgataggggggatattaatgcaatacag

SEQ ID NO: 108858 - DNA, 75 bp, synthetic construct
  source 1..75: mol_type = other DNA
cgaatgtggatggcaggtcagggaaccattcaaatctccgaccaaatgaatatcaaagccaagaccgtttcatcg

SEQ ID NO: 108859 - DNA, 75 bp, synthetic construct
  source 1..75: mol_type = other DNA
gccacaaaaatactctgcctttgagttggcttttgaattgggtcaccgggttattgctgaattaatccttaatac

SEQ ID NO: 108860 - DNA, 75 bp, synthetic construct
  source 1..75: mol_type = other DNA
caacaacgggcaggcacccgccgcaacgacgtgaagcgcggtttgcgaaacggcgttgctccttacatcccggcg

SEQ ID NO: 108861 - DNA, 75 bp, synthetic construct
  source 1..75: mol_type = other DNA
ccgggattttattcccgacagctgtacgtccggcaccctttttccttttttcacgtagccaggtttccggcagtc

SEQ ID NO: 108862 - DNA, 75 bp, synthetic construct
  source 1..75: mol_type = other DNA
ttaaaaagcttctcagagaactgtagacaaaatggtcgtcatatctttagtaacaaggattttgtcattaagttt

SEQ ID NO: 108863 - DNA, 75 bp, synthetic construct
  source 1..75: mol_type = other DNA
aacgatgaatttgctcatggcaattggtcagaatcaccaacttacgcaactgatgattcagctccagaaaatgcc

SEQ ID NO: 108864 - DNA, 75 bp, synthetic construct
  source 1..75: mol_type = other DNA
aagttgcattattattaatgagagcaacggattacccttggtttattctaacttatatatgagtgttatttcacg

SEQ ID NO: 108865 - DNA, 75 bp, synthetic construct
  source 1..75: mol_type = other DNA
aaagtttatagcgacgatgattttctttatccgggccaggagagcggttttgccctcaaggtgttgccggagatt

SEQ ID NO: 108866 - DNA, 75 bp, synthetic construct
  source 1..75: mol_type = other DNA
cccatcacttccgtggtgacagctactgctacggcggcggttattaccgtcgtggtcatgcgcaacatgcgttgg

SEQ ID NO: 108867 - DNA, 75 bp, synthetic construct
  source 1..75: mol_type = other DNA
gcgattggcgcggcgctggcgaaccccgatcgcaaagtgttgtgtttttccggtgacggcagtctgatgatgaat

SEQ ID NO: 108868 - DNA, 75 bp, synthetic construct
  source 1..75: mol_type = other DNA
tgggacaccatacgcgctcgtatacttaagcgcgacaaaggactatgtcagaaccatcttcggcagggagtcgtg

SEQ ID NO: 108869 - DNA, 75 bp, synthetic construct
  source 1..75: mol_type = other DNA
gtcgccgaaatccagaatctgccggggttacatttggcgggacttacccatttcccttgcctgctttgggatgaa

SEQ ID NO: 108870 - DNA, 75 bp, synthetic construct
  source 1..75: mol_type = other DNA
atcatgggcttctatggctaacagatatctcgaatccgctggttcatcagaacgtattgatcatcgttctcttca

SEQ ID NO: 108871 - DNA, 75 bp, synthetic construct
  source 1..75: mol_type = other DNA
ataggtttctggatgactctttgttacctgaaaacgatttccgcaacaggaggagaaatttttcaggcaatattg

SEQ ID NO: 108872 - DNA, 75 bp, synthetic construct
  source 1..75: mol_type = other DNA
gtttaaaacgcctttaaccagccctgatgagttcataatcaaatctatttgcattaaaggtaagcaaaacactac

SEQ ID NO: 108873 - DNA, 75 bp, synthetic construct
  source 1..75: mol_type = other DNA
atgctggacaatattcaggaacacaaaatcgctcataaggtgttcgccatgaacaagcctctgcttatttttcat

SEQ ID NO: 108874 - DNA, 75 bp, synthetic construct
  source 1..75: mol_type = other DNA
ggcacgaataacgcgcggtgaaatccgtcctctggcccaggctgatgctgctgaactggatgcgttgattgtgcc

SEQ ID NO: 108875 - DNA, 75 bp, synthetic construct
  source 1..75: mol_type = other DNA
tcagaatgttgattacaaaccccatcaagatgattactcttcagctgaaaaatttctcacgcacttcaacaaaaa

SEQ ID NO: 108876 - DNA, 75 bp, synthetic construct
  source 1..75: mol_type = other DNA
gttattttcttcttttcattcctccgctctggctatatctgagaaccagagcgaagaaaaagaaagtcctgcagg

SEQ ID NO: 108877 - DNA, 75 bp, synthetic construct
  source 1..75: mol_type = other DNA
gccgccatgaaattgctccgctgaaagcggcgaattccgctctgccagtgaccaccaattttatggaatatttct

SEQ ID NO: 108878 - DNA, 75 bp, synthetic construct
  source 1..75: mol_type = other DNA
gcttgaacgtaagtatgggcttgaaaaagggattctgtcagcagttgcatccgcagagtctagtgcaggccagag

SEQ ID NO: 108879 - DNA, 75 bp, synthetic construct
  source 1..75: mol_type = other DNA
aaggcgcgttaccagaccctggagaatctcaaccaggcctggtggagcaccttctggagccatacctatactgac

SEQ ID NO: 108880 - DNA, 75 bp, synthetic construct
  source 1..75: mol_type = other DNA
gccatgctttggttaagtgaaatttcccatcacttccgtggcgacagttattgctatggcggtggctattaccgt

SEQ ID NO: 108881 - DNA, 75 bp, synthetic construct
  source 1..75: mol_type = other DNA
gcgccgcgccggtctgccgttggcgcatcaggggcatctggtgcaaatcccttgtcaccaggtttctgacgccgt

SEQ ID NO: 108882 - DNA, 75 bp, synthetic construct
  source 1..75: mol_type = other DNA
gtttattgagactgtgcggaccgagcactatcccacaggcagcgctcagtacaaaccatcttcgtggctgctggg

SEQ ID NO: 108883 - DNA, 75 bp, synthetic construct
  source 1..75: mol_type = other DNA
caacatcaagagcaccgatatctctgtcaaaaccgatcaaaaagtcgtgacattaagcggatttgttgaaagtca

SEQ ID NO: 108884 - DNA, 75 bp, synthetic construct
  source 1..75: mol_type = other DNA
gtggttaaacgccgaggaactgcgcgagcgcgaaccaaatatcaccgggctgggcggtatttttgtgccgtccag

SEQ ID NO: 108885 - DNA, 75 bp, synthetic construct
  source 1..75: mol_type = other DNA
atgccagacggcgttttgcagacgcgtaccgactttggtaaaaccgggtacgatggcgcagcaccgccgaaaggc

SEQ ID NO: 108886 - DNA, 75 bp, synthetic construct
  source 1..75: mol_type = other DNA
gattttatttttgcatatggatgctgggcattaataattctcccattactctggctatatctgaaaaccagagcg

SEQ ID NO: 108887 - DNA, 75 bp, synthetic construct
  source 1..75: mol_type = other DNA
gtatttccgcgcggcggaggctgcacgctaacgttcccggttaaaactggtgatgaatgtctggtaattttcgcc

SEQ ID NO: 108888 - DNA, 75 bp, synthetic construct
  source 1..75: mol_type = other DNA
ttcaataaaaagtcagaagattatttctttaataagtttctgttgtcttttgaccctgcgacacagcaatggcgt

SEQ ID NO: 108889 - DNA, 75 bp, synthetic construct
  source 1..75: mol_type = other DNA
agatgggcggcctgcgctcctgtatgggtctgaccggctgtggtactatcgacgaactgcgtactaaagcggagt

SEQ ID NO: 108890 - DNA, 75 bp, synthetic construct
  source 1..75: mol_type = other DNA
tgatgccgactgtaatctgcagagtctgtgctggccgtgtcataaggcgaagacggcccgtgaacgacttaagtg

SEQ ID NO: 108891 - DNA, 75 bp, synthetic construct
  source 1..75: mol_type = other DNA
aattaatcagcatgtctggcagggaaaggaattgccgggctatgtgcaacgggaatttgaagaatttctccaatg

SEQ ID NO: 108892 - DNA, 75 bp, synthetic construct
  source 1..75: mol_type = other DNA
gaatcatacatcttcgccaaagcggcccatgcgccgtttatttcgcatccggccgagttttgtcgcatgctggtg

SEQ ID NO: 108893 - DNA, 75 bp, synthetic construct
  source 1..75: mol_type = other DNA
gcacctgttaacggaagtcgttactgatatgaaagatgccgccaacgcgctgcgctggtgtgttaacgagatgga

SEQ ID NO: 108894 - DNA, 75 bp, synthetic construct
  source 1..75: mol_type = other DNA
gccggggataaaaccggatgtgctggcgggtttccagcagcagctaagtgaagattttcagcgtacggtggagcg

SEQ ID NO: 108895 - DNA, 75 bp, synthetic construct
  source 1..75: mol_type = other DNA
attcgcacattggcgctattcaggcgttaagtgaattactgtgcgaagaagaaatactcgaacaactcttaaccg

SEQ ID NO: 108896 - DNA, 75 bp, synthetic construct
  source 1..75: mol_type = other DNA
aataagcttgctcccgtctcatcaccagatggcgtcgctggcggttttgcaggcatgagcaatgactcactgata

SEQ ID NO: 108897 - DNA, 75 bp, synthetic construct
  source 1..75: mol_type = other DNA
gggattgcctgaccgacgcggcggtgtcggctccactgaccctgtcggcatgggattgccgtattctccgtcgtc

SEQ ID NO: 108898 - DNA, 75 bp, synthetic construct
  source 1..75: mol_type = other DNA
atgccgccacgaatcccaaaagcctgccgtgttcgcggttgccgccataccaccacagatccgtcaggatattgt

SEQ ID NO: 108899 - DNA, 75 bp, synthetic construct
  source 1..75: mol_type = other DNA
atgccatcacgaatcccccgcgcatgccgtaagcgaggctgcgcaggcacaacgacagacagttctggctactgc

SEQ ID NO: 108900 - DNA, 75 bp, synthetic construct
  source 1..75: mol_type = other DNA
cgcaacatgctctctcctgccgactttggcccgaaattgctggaagtgatcaaagagcatttcccgcaggacgtg

SEQ ID NO: 108901 - DNA, 75 bp, synthetic construct
  source 1..75: mol_type = other DNA
gtcctgtccactcagtgattgcagtcaccgacaattatcctggctataaacgccgccaggaaacgttaatcacac

SEQ ID NO: 108902 - DNA, 75 bp, synthetic construct
  source 1..75: mol_type = other DNA
ccaggaaaaatatcgtccaatgcattcgcaatgaagcagaagaattagaggatcatgtgcttctggccgtacatg

SEQ ID NO: 108903 - DNA, 75 bp, synthetic construct
  source 1..75: mol_type = other DNA
gatgacagcagcatcgactacaccttgcctttggctggtgagtttccggtgagtagcgcggtggtgctctgtttt

SEQ ID NO: 108904 - DNA, 75 bp, synthetic construct
  source 1..75: mol_type = other DNA
gagattatttataacgccgaagtcagcgccctcagtgagcataaaaacggcgtggtgatacgtacccgtcagggc

SEQ ID NO: 108905 - DNA, 75 bp, synthetic construct
  source 1..75: mol_type = other DNA
cagctgagcattaccgcaataaaatcgccatttatttgcactggtatcagaaaaaaggcatcgaggctccacaaa

SEQ ID NO: 108906 - DNA, 75 bp, synthetic construct
  source 1..75: mol_type = other DNA
tattttcaaacttgccagtcggatgagtagtggtctgaaagaaggagaagaagatcatgataaatatgaacttct

SEQ ID NO: 108907 - DNA, 75 bp, synthetic construct
  source 1..75: mol_type = other DNA
tctgttaggcatcaaaggcaccgagatgagtgccgatatcgccaaagccttcaaccttgacgtacagcgtggcgc

SEQ ID NO: 108908 - DNA, 75 bp, synthetic construct
  source 1..75: mol_type = other DNA
cgacgaccgggtgcatgatttatcagatgcattctgtatcgtagggccacagtcgcagacgcagaaaatcagcgg

SEQ ID NO: 108909 - DNA, 75 bp, synthetic construct
  source 1..75: mol_type = other DNA
atattcatgtggaaacattgattgtacaagcaagagctaaagcaaaaattcgtgggcaactggctaagttgggaa

SEQ ID NO: 108910 - DNA, 75 bp, synthetic construct
  source 1..75: mol_type = other DNA
tttacgacatcgaaattgttaaccaacaacaaaaaacggttgcgctgtttcgcggtaaatctcaccgcatcggcg

SEQ ID NO: 108911 - DNA, 75 bp, synthetic construct
  source 1..75: mol_type = other DNA
ggtgccaaccgatggctacacaggcaaagacgtggcccggcagcaaatcagcagttatattctgaattattacaa

SEQ ID NO: 108912 - DNA, 75 bp, synthetic construct
  source 1..75: mol_type = other DNA
gacccggaggctttgaccgttctgattttctgggggaaaagctttacttgtataccaccccgttttatgtagaag

SEQ ID NO: 108913 - DNA, 75 bp, synthetic construct
  source 1..75: mol_type = other DNA
acggtattagtgccactaataacttgaacccagcgaatgagtccgatgccagtagtgcaaccaatattagcggga

SEQ ID NO: 108914 - DNA, 75 bp, synthetic construct
  source 1..75: mol_type = other DNA
cgtgggcaactggctaagttgggaattcatgctggttcaattttcccggaaatggataaagcatcagaatacata

SEQ ID NO: 108915 - DNA, 75 bp, synthetic construct
  source 1..75: mol_type = other DNA
gaggcaatgagtattcttaaccagatagatgacagtgagtgcaagctgtcatgtatggaggtcagggagaaaaca

SEQ ID NO: 108916 - DNA, 75 bp, synthetic construct
  source 1..75: mol_type = other DNA
gctgagttgcgctctcgtatcgcaaccaccgagccgggcacgaaagtaaagctcggcctgctgcgtaatggcaaa

SEQ ID NO: 108917 - DNA, 75 bp, synthetic construct
  source 1..75: mol_type = other DNA
tgccacggcgggcagctattttcactggctgatactgcctttgcctacgcctgcaatagccaggggttggcagcc

SEQ ID NO: 108918 - DNA, 75 bp, synthetic construct
  source 1..75: mol_type = other DNA
tagcgcgacggttagcgatcaggccggaaaccccggcagcgccagccgtggcgtgacgctgaacggcgacgtccc

SEQ ID NO: 108919 - DNA, 75 bp, synthetic construct
  source 1..75: mol_type = other DNA
ttgttagccagcagcggatggaagatcagcagttacaaacgctgggcgaagtgatggaaaacacgctggggatca

SEQ ID NO: 108920 - DNA, 75 bp, synthetic construct
  source 1..75: mol_type = other DNA
attttatccactggccgctgtcgcgaccggctgaactgatctactggctgggcggtcaattgccctgcacggtgg

SEQ ID NO: 108921 - DNA, 75 bp, synthetic construct
  source 1..75: mol_type = other DNA
aggattacctaaattttggtgaagtatcccagttagctgtagacgtgcttactaccgaaaacatgttaccagtat

SEQ ID NO: 108922 - DNA, 75 bp, synthetic construct
  source 1..75: mol_type = other DNA
gtggtggtcaacggctcgctcaccgccgcgcttgccagtaacgagacggcacaaatcagtatcgacggcggcgta

SEQ ID NO: 108923 - DNA, 75 bp, synthetic construct
  source 1..75: mol_type = other DNA
ccccggcagcaccagccataatctggcggtagacaccaccgcgccggttctcaccattaacaccgtggcaggcga

SEQ ID NO: 108924 - DNA, 75 bp, synthetic construct
  source 1..75: mol_type = other DNA
aaatgctatacaaacattagaagcaatacgattatttttattcctaccaaatacggcatttgtgattgctgctga

SEQ ID NO: 108925 - DNA, 75 bp, synthetic construct
  source 1..75: mol_type = other DNA
ctccgtcaccatcaacacctttgcgggcgatgatgtggtgaatgcagcggagcacggctcgtcgctggtgatcag

SEQ ID NO: 108926 - DNA, 75 bp, synthetic construct
  source 1..75: mol_type = other DNA
tggtacgataactatctcaatatggaaaaaccgaccgcagcgccaacccttcgccgggcaacaagaaaggcggtc

SEQ ID NO: 108927 - DNA, 75 bp, synthetic construct
  source 1..75: mol_type = other DNA
gcgggcggcatacgtgcataaagcggagcatctggaggccagaaaggccatgatgcagtggtggtcggattatct

SEQ ID NO: 108928 - DNA, 75 bp, synthetic construct
  source 1..75: mol_type = other DNA
aacaactcgcccgcagcttacagataacgaaaccacgtttgctggaacgccagcagttacgcgaacagcgtttgc

SEQ ID NO: 108929 - DNA, 75 bp, synthetic construct
  source 1..75: mol_type = other DNA
gataaagacaagccagttaccatccgcattactgactacaagcgcaaccttgaccagaacgcaaaatttcacgcg

SEQ ID NO: 108930 - DNA, 75 bp, synthetic construct
  source 1..75: mol_type = other DNA
cgaatcaaacaaaaattttctcagttacattcgttccaataggagtctgcataaatgtaacttaccttattatgt

SEQ ID NO: 108931 - DNA, 75 bp, synthetic construct
  source 1..75: mol_type = other DNA
tatgatattttatatgtgcatgcagatggaaaatgtcagtattcgaacgacatttttaataataaaggtggtgcc

SEQ ID NO: 108932 - DNA, 75 bp, synthetic construct
  source 1..75: mol_type = other DNA
agcgcatcacgctggctaacgaagcgggcgggattggcatctgggagtgggagctgaagccgaatatttttagct

SEQ ID NO: 108933 - DNA, 75 bp, synthetic construct
  source 1..75: mol_type = other DNA
caggggcataaagtcgcattagtagatattcctgctaatggcgaaatcattcgttatggcgaagtgattggttat

SEQ ID NO: 108934 - DNA, 75 bp, synthetic construct
  source 1..75: mol_type = other DNA
aacgtcagcgccagcgacaatttacccgcgactggcaatctgcgctggaagcactggcggcgcttttacccgaac

SEQ ID NO: 108935 - DNA, 75 bp, synthetic construct
  source 1..75: mol_type = other DNA
atgcgcaaggcaattttgctggcaggcttactgctaagcacgggtcactcatgggccaatattgtcattaatggc

SEQ ID NO: 108936 - DNA, 75 bp, synthetic construct
  source 1..75: mol_type = other DNA
caaacggctgctggaggagatggagtggtacgataactatctcaatatgggaaaaaccgaccgcagcgccaaccc

SEQ ID NO: 108937 - DNA, 75 bp, synthetic construct
  source 1..75: mol_type = other DNA
tgattgacgcagcgggcaacgtcggtgccactgacagccagaatgtggtgatcgacaccatcgcgccagatccag

SEQ ID NO: 108938 - DNA, 75 bp, synthetic construct
  source 1..75: mol_type = other DNA
tttggcatttgctcgtgcggaccgtattgctcctgtgttagccaattcgccaattatccatggcaatcctagaat

SEQ ID NO: 108939 - DNA, 75 bp, synthetic construct
  source 1..75: mol_type = other DNA
atgcaaaactggataaaggccgcagtaatcaccgtgagcctggcgctacctggcgtggcgctggcgcaatcgctg

SEQ ID NO: 108940 - DNA, 75 bp, synthetic construct
  source 1..75: mol_type = other DNA
cgcctcggcggtcagtgcgctgggcgaagccacctacagcgtcacggcgagcgtcaccaatgctcagggtaacag

SEQ ID NO: 108941 - DNA, 75 bp, synthetic construct
  source 1..75: mol_type = other DNA
atgatagatttctcatcagaaaaaatacatgattatatcgacataatcattgaagattatgaaaatataaaagaa

SEQ ID NO: 108942 - DNA, 75 bp, synthetic construct
  source 1..75: mol_type = other DNA
tgctctgtaaacagctggccgttgcggatggttaaaggaactgttgtggggacaactgacacattgcgtgaaatg

SEQ ID NO: 108943 - DNA, 75 bp, synthetic construct
  source 1..75: mol_type = other DNA
ctgtgaaaccctgtatcatgactgccttgcaaaccttgaagaaagcaatcatggctgggttaacgacccaacctc

SEQ ID NO: 108944 - DNA, 75 bp, synthetic construct
  source 1..75: mol_type = other DNA
tgaggtcggggaatataacacatatgaagcatataactcagagaatcaatattttaccagagaggactatacgta

SEQ ID NO: 108945 - DNA, 75 bp, synthetic construct
  source 1..75: mol_type = other DNA
gttcacccaatttgtaccgggtcacgtccatctgcgcgatctcggtaaactggtcgccgaacaaattgaagcggc

SEQ ID NO: 108946 - DNA, 75 bp, synthetic construct
  source 1..75: mol_type = other DNA
ttagttacatatcaagcattggaaatgaaaggagaaatttaagacttttcttttgttatggtgtcatgcaatacg

SEQ ID NO: 108947 - DNA, 75 bp, synthetic construct
  source 1..75: mol_type = other DNA
ctttcaacggtgccggggttcgcgatactgcccgtacgctgaaaatcggcattaatacagtcatccgaactttaa

SEQ ID NO: 108948 - DNA, 75 bp, synthetic construct
  source 1..75: mol_type = other DNA
atgtattttttccttatgttaaccattggggtgtttattaagcaaaaaaagaattattattttgttttttgcaaa

SEQ ID NO: 108949 - DNA, 75 bp, synthetic construct
  source 1..75: mol_type = other DNA
gccgggacattattgccgcagcatgcagagcgttaaaccatgtctggcgtgaagggtaccgctatatgaaggcag

SEQ ID NO: 108950 - DNA, 75 bp, synthetic construct
  source 1..75: mol_type = other DNA
catcacaactgatgcgatgggcgccagaaagatattgcagaaaagatacaaaaacagggaggtgattatttattc

SEQ ID NO: 108951 - DNA, 75 bp, synthetic construct
  source 1..75: mol_type = other DNA
attagcgatgacaccgggttaagcagcagcgattttgttactcgcgacactacgcttactgtgcgcggcacgctc

SEQ ID NO: 108952 - DNA, 75 bp, synthetic construct
  source 1..75: mol_type = other DNA
cgtcttccgccggaaaccagacaccagaaaaaaccttacgcaatgttctgcgtatgctgaccttgcttaatcgca

SEQ ID NO: 108953 - DNA, 75 bp, synthetic construct
  source 1..75: mol_type = other DNA
gtgactatcagcagggccgggagttaacccggctggcggtggtgctgacactgcacctgttcatccgttccagcg

SEQ ID NO: 108954 - DNA, 75 bp, synthetic construct
  source 1..75: mol_type = other DNA
gtcaccgggtgtttcagctcacttactgttacgaggcccgtaaaccgggagttaaagaccaaatcactgaaatgg

SEQ ID NO: 108955 - DNA, 75 bp, synthetic construct
  source 1..75: mol_type = other DNA
ggcatatgatcaagtagaccggttggcacctatatttgctacctcaccaataatacatggcaatccaagaatagt

SEQ ID NO: 108956 - DNA, 75 bp, synthetic construct
  source 1..75: mol_type = other DNA
accgccagcaactataccgttagcgcggcagtgagcgacaaagccggaaacccggcctcggttaatcacaacctg

SEQ ID NO: 108957 - DNA, 75 bp, synthetic construct
  source 1..75: mol_type = other DNA
attacagcgtaacgtctacctctgcaggtaccaaaatgcagatgactcaacgtgatattcctcagtcggtcacta

SEQ ID NO: 108958 - DNA, 75 bp, synthetic construct
  source 1..75: mol_type = other DNA
cacataacggcgcagggggctgttataccgccagaacactgaaaatcggcatcaataccgtcatacggacattaa

SEQ ID NO: 108959 - DNA, 75 bp, synthetic construct
  source 1..75: mol_type = other DNA
aagcagtgaatgcggataattcccgttcacgctgtaaggtagtagcttacgctgctgatccagtgctgcaagatc

SEQ ID NO: 108960 - DNA, 75 bp, synthetic construct
  source 1..75: mol_type = other DNA
catccattacagcgctgttatttctgttctgttgtgcactgtatgcgcctgcgggtatgacgtacggtaaaatca

SEQ ID NO: 108961 - DNA, 75 bp, synthetic construct
  source 1..75: mol_type = other DNA
aaacatctgatgagaatggatatgaaagtgttctcgaatatagaatattgcgatgtcgatttcgacagaaaggaa

SEQ ID NO: 108962 - DNA, 75 bp, synthetic construct
  source 1..75: mol_type = other DNA
ataacgtgcgagaaattccgccgcgcgccaaagaacagaatgtcatgcaaatcgccatgcaaagccgtctgaagc

SEQ ID NO: 108963 - DNA, 75 bp, synthetic construct
  source 1..75: mol_type = other DNA
ggtcaacaccagctggggtggtttgcaggctaccgatgccactcacgcttatgacctcagcgctgaagcgggcac

SEQ ID NO: 108964 - DNA, 75 bp, synthetic construct
  source 1..75: mol_type = other DNA
acttaaccgcgctggctaataacggctacaccctgaccgctacggtcagtgatctggcgggtaaccctggcagcg

SEQ ID NO: 108965 - DNA, 75 bp, synthetic construct
  source 1..75: mol_type = other DNA
gaaaagtatcaccattaccggcatcagcgatgacaccggaaccagcagcagcgattttattaccagcgacaccac

SEQ ID NO: 108966 - DNA, 75 bp, synthetic construct
  source 1..75: mol_type = other DNA
atgagcgatgccttccgtattgcgcaatcaggccgccctggcccggtgtggatagacattcctaaggatgtgcaa

SEQ ID NO: 108967 - DNA, 75 bp, synthetic construct
  source 1..75: mol_type = other DNA
ccgacgcgtcgggcaactggatcttaaccgtgccggtgagcgatctggcggctctaggtcaggccaactatacgg

SEQ ID NO: 108968 - DNA, 75 bp, synthetic construct
  source 1..75: mol_type = other DNA
gcgtgctatacgacacctcactgtacacacgtagttacaaatttaccccagcgcaatggtctcaggagaggggcg

SEQ ID NO: 108969 - DNA, 75 bp, synthetic construct
  source 1..75: mol_type = other DNA
caatctctataaatggctgttgaatcttaactcggtagtgatgccgctgcgttatttatgggtatttgttgcatt

SEQ ID NO: 108970 - DNA, 75 bp, synthetic construct
  source 1..75: mol_type = other DNA
ggcggtggcaatcagcatcaacaccgttgccagcgacgacgtgattaacgccgcagaaaaaggcaccaatctgac

SEQ ID NO: 108971 - DNA, 75 bp, synthetic construct
  source 1..75: mol_type = other DNA
atgaaatcgctattaaccgcaacaggaatgatttgtttactggggatctgcaacttcgcccaggcgacagtctcc

SEQ ID NO: 108972 - DNA, 75 bp, synthetic construct
  source 1..75: mol_type = other DNA
ctagcgattaacggtattgcaccgactgccgaaaacattcgcaacggcaaatatccctatatcgtcgatgccttt

SEQ ID NO: 108973 - DNA, 75 bp, synthetic construct
  source 1..75: mol_type = other DNA
acaacagatgtctcctgtcaaggaaaagaaaaagcggtgtttattgagcccaatgagtgtgtaaaattacctacg

SEQ ID NO: 108974 - DNA, 75 bp, synthetic construct
  source 1..75: mol_type = other DNA
ctaacgaccgccaacgctcagggggaaatgagctcgcgtgttatggcaatcctcgattttgatgaaagaggtatt

SEQ ID NO: 108975 - DNA, 75 bp, synthetic construct
  source 1..75: mol_type = other DNA
gacacctacggcatctctatccccatcaccaaatacaactatctggtcagacatatcgaagaactcccgcaagtc

SEQ ID NO: 108976 - DNA, 75 bp, synthetic construct
  source 1..75: mol_type = other DNA
tattgttggcggagctcataatggggccgccgatgcaatgagacattgttacttgatgtgtcgggtgatgctgcc

SEQ ID NO: 108977 - DNA, 75 bp, synthetic construct
  source 1..75: mol_type = other DNA
gcagtatgtcaccagcaccgatgccagcggcaactggagcgtcggcgtgcctgccagcgtgatttccggccttgc

SEQ ID NO: 108978 - DNA, 75 bp, synthetic construct
  source 1..75: mol_type = other DNA
tcaaccggctgcgggcaacacaaattcgggaaatcgatagggaaacggggtgggatagggcctgcaaccttattt

SEQ ID NO: 108979 - DNA, 75 bp, synthetic construct
  source 1..75: mol_type = other DNA
tgaaatactctgacctggcctccactgccgggtatctttcagccatgatccccccgttgtcatggatgatggtaa

SEQ ID NO: 108980 - DNA, 75 bp, synthetic construct
  source 1..75: mol_type = other DNA
acaccacgctgaccgtgcgcggcacgctcggcgcggcgcttgccgccgatgaacgggcgcaaatcagcctcgacg

SEQ ID NO: 108981 - DNA, 75 bp, synthetic construct
  source 1..75: mol_type = other DNA
caccattaggttgggaatatatcaatctgacaggcgattatatctggaaaaacaaccggataccgacttcaggtc

SEQ ID NO: 108982 - DNA, 75 bp, synthetic construct
  source 1..75: mol_type = other DNA
tcctttatcccataactttactctcagctttattactggcgttgcatcatatttcaatccgcgaatagacgtttt

SEQ ID NO: 108983 - DNA, 75 bp, synthetic construct
  source 1..75: mol_type = other DNA
cattgaaactattctggcggccaaaagccattgaattagaagacgatggggtaatgacttacgaaaaagttgaaa

SEQ ID NO: 108984 - DNA, 75 bp, synthetic construct
  source 1..75: mol_type = other DNA
gtgatcacgccgcatacatggccattaacgatgcaattgagcgcattgaatcaggtaaaccattaagagattttg

SEQ ID NO: 108985 - DNA, 75 bp, synthetic construct
  source 1..75: mol_type = other DNA
gtacgataactatctcaatatgggaaaaaccgaccgcagcgccaacccttcgccgggcaacaagaaaggcggtct

SEQ ID NO: 108986 - DNA, 75 bp, synthetic construct
  source 1..75: mol_type = other DNA
cagcgtggagccacgcagcaagatgcacaaggacgctggcaatttgagtatcagttaacaaggacggttagcgat

SEQ ID NO: 108987 - DNA, 75 bp, synthetic construct
  source 1..75: mol_type = other DNA
accagaacaatggaaggttttgttgataagcggtcatgcagtggcaacgaaacaggaagctgatgttttacccgg

SEQ ID NO: 108988 - DNA, 75 bp, synthetic construct
  source 1..75: mol_type = other DNA
ttgctaattcagtttcttccgaagaagataaaagcagagcgctgtttgttttgtttggacttttatcaattctga

SEQ ID NO: 108989 - DNA, 75 bp, synthetic construct
  source 1..75: mol_type = other DNA
accggctgaactgatctactggctgggcggtcaattgccctgcacggtggtctatcgcgggaaaatacgaggaaa

SEQ ID NO: 108990 - DNA, 75 bp, synthetic construct
  source 1..75: mol_type = other DNA
tagagatagcctcggcctacactcttatcatacaccgactcatagataataatgcccgtgatgcattaaatacgg

SEQ ID NO: 108991 - DNA, 75 bp, synthetic construct
  source 1..75: mol_type = other DNA
ctgcatctctaactgcgacaaaatcaccccgggtatgctgatggcttccctgcgcctgaatattccggtgatctt

SEQ ID NO: 108992 - DNA, 75 bp, synthetic construct
  source 1..75: mol_type = other DNA
attgttgaagtgctgtcgcccggtcaacgcccgactaaacgcggattaatttacgccgcgacgccagccagcgat

SEQ ID NO: 108993 - DNA, 75 bp, synthetic construct
  source 1..75: mol_type = other DNA
ggtacccgtcattaaaatggcgacccgcaccgagctggcgaaccgctggtttgatttaatggatattaacgcggg

SEQ ID NO: 108994 - DNA, 75 bp, synthetic construct
  source 1..75: mol_type = other DNA
tcgcgcgggcaacagcgacagcacgactcacgatgtgaccgttgatcttagcggcccgacgctgaccattaacac

SEQ ID NO: 108995 - DNA, 75 bp, synthetic construct
  source 1..75: mol_type = other DNA
tgaactacgcgcagttgaagcaaagcgtgcaggaaacgaagcaatacaccgatcagcggatggttgagatggata

SEQ ID NO: 108996 - DNA, 75 bp, synthetic construct
  source 1..75: mol_type = other DNA
aaggaagacaggcgcacgttaaaagagctggttgattcatggtatagcgctcatggcattacactgaaagacggc

SEQ ID NO: 108997 - DNA, 75 bp, synthetic construct
  source 1..75: mol_type = other DNA
tgaagcgtatggcaagtctgattgagtacacgacatcatgggctattggtcagggtgtcagatttaccgacagga

SEQ ID NO: 108998 - DNA, 75 bp, synthetic construct
  source 1..75: mol_type = other DNA
agtgtgcgcagggattatatgtcggtatatggctatcccgtgccaaccacaccgtggctgaatactgctcccggt

SEQ ID NO: 108999 - DNA, 75 bp, synthetic construct
  source 1..75: mol_type = other DNA
taggttcttctactaaccaacgccgtatcaccaacgtagctgccggtgttaatgccaccgatgcggttaacgtgt

SEQ ID NO: 109000 - DNA, 75 bp, synthetic construct
  source 1..75: mol_type = other DNA
aatgataactcaggaaaaaattgctcaacttcctaaagacagagaaacgctcttctattttaacgtgcgagaaat

SEQ ID NO: 109001 - DNA, 75 bp, synthetic construct
  source 1..75: mol_type = other DNA
catagtaatctaaattggaaactatcgtcaaaaggaggtgatctaatgatgcagcttcgaactgttaaaaataaa

SEQ ID NO: 109002 - DNA, 75 bp, synthetic construct
  source 1..75: mol_type = other DNA
attaatgccgccgaacacggacaggcgctggtgatctccggttccagcactggcggcgaagcgggtgatgtcatc

SEQ ID NO: 109003 - DNA, 75 bp, synthetic construct
  source 1..75: mol_type = other DNA
gtttttaacggagagaggtatgtacaggaagacagtctgaaaccgcagccgcttattcttccggaccacaggtaa

SEQ ID NO: 109004 - DNA, 75 bp, synthetic construct
  source 1..75: mol_type = other DNA
attagccatccggtgaccgtcgatctcgcggccgtggcgatcaccatcaacaccctttccactgacaatgtgatt

SEQ ID NO: 109005 - DNA, 75 bp, synthetic construct
  source 1..75: mol_type = other DNA
gatcctgccgatgcgcccggtgatcctgaaagccgcagccgggagtggttcgatgtttgtggcgcactgcccgaa

SEQ ID NO: 109006 - DNA, 75 bp, synthetic construct
  source 1..75: mol_type = other DNA
ggctgatgcgctgatgatgtgtatgcattgcccggcattggtccgcgaagaaactgaaatatacgttccctcatc

SEQ ID NO: 109007 - DNA, 75 bp, synthetic construct
  source 1..75: mol_type = other DNA
tctcaatagcggcggtagtccggggacgccggtgccggcgctgcaaccggcggtgctgaagacactgggggatga

SEQ ID NO: 109008 - DNA, 75 bp, synthetic construct
  source 1..75: mol_type = other DNA
cggacgatccgaaatcgttcgcggcaatgcgttacaccgaatcccgcctgtcgaaatattccgagcttttattaa

SEQ ID NO: 109009 - DNA, 75 bp, synthetic construct
  source 1..75: mol_type = other DNA
aaatgggaggtgcatattcctggctgaccggcgggactgtcggtagcctgtcatcctatcagaatggagaaatga

SEQ ID NO: 109010 - DNA, 75 bp, synthetic construct
  source 1..75: mol_type = other DNA
cgccacgttgccgccgatgtactcgcgcgggcagaccattgatgtcaccgtctcgtcgattggcgatgcgaaaag

SEQ ID NO: 109011 - DNA, 75 bp, synthetic construct
  source 1..75: mol_type = other DNA
gttgttacaaatgaagaatatgtggactttgtgtctgctttgactatggaacataactactttaaggttacgaaa

SEQ ID NO: 109012 - DNA, 75 bp, synthetic construct
  source 1..75: mol_type = other DNA
gccgtttcagttctggataacgacgaggtaatgaccctagctttaaccgaggggcattccggtaagcgtggtggt

SEQ ID NO: 109013 - DNA, 75 bp, synthetic construct
  source 1..75: mol_type = other DNA
atgactaagctttatcaccgcatctcagcttttctctctgggtgctgggcgtttatcacgtctatttcgttcgcc

SEQ ID NO: 109014 - DNA, 75 bp, synthetic construct
  source 1..75: mol_type = other DNA
accggctccggcgtttcgcagctgcagctgttcgacgaacgcccgccacgccctcacagtgctgagctgatgagg

SEQ ID NO: 109015 - DNA, 75 bp, synthetic construct
  source 1..75: mol_type = other DNA
tccctcaaaaacaagcattcgtcatagagcgaattacgaaaggcaagcttaagtacgatgccagcctttaccaaa

SEQ ID NO: 109016 - DNA, 75 bp, synthetic construct
  source 1..75: mol_type = other DNA
gctgctggcaatcactcaggcaggccgtatgttgatgttcccggtaagtgatctgccgcagctgtcgaagggcaa

SEQ ID NO: 109017 - DNA, 75 bp, synthetic construct
  source 1..75: mol_type = other DNA
gtattccggtgcaatatctcgccaatatgttaagtgccggcgataccggtccggtactgcgggcgctgaaacgga

SEQ ID NO: 109018 - DNA, 75 bp, synthetic construct
  source 1..75: mol_type = other DNA
tgattggcgcgatcgccccgaaaacgccactgcgttatgtagcgatggttatctggttgtatagtgcgttccgcg

SEQ ID NO: 109019 - DNA, 75 bp, synthetic construct
  source 1..75: mol_type = other DNA
atctgaaacagtcatcgttatgcctgaacatcctggtacaacgcaggttgaaatattgctaaatacccttggatt

SEQ ID NO: 109020 - DNA, 75 bp, synthetic construct
  source 1..75: mol_type = other DNA
atgaacacgccaatggagctgggctatgtgaacgggagcgtcgtggagagtaattttctcgccagcctgaaatgg

SEQ ID NO: 109021 - DNA, 75 bp, synthetic construct
  source 1..75: mol_type = other DNA
ttgcaagagccgaagatgctccccgctcgcttgccgaatattttacttaacggcaccaccggcattgccgtcggc

SEQ ID NO: 109022 - DNA, 75 bp, synthetic construct
  source 1..75: mol_type = other DNA
ccgatggtctggtacgctgccgatggtctggtacgtgccgcctctgtcgccgattcagtctgcggcagacgcggg

SEQ ID NO: 109023 - DNA, 75 bp, synthetic construct
  source 1..75: mol_type = other DNA
cgcggtgtggaagaaagaagatggcgcggtggttatcagcgcactaccgcatcaggtttctggcgcgcgcgtgct

SEQ ID NO: 109024 - DNA, 75 bp, synthetic construct
  source 1..75: mol_type = other DNA
ctgtcaaacaggttgttgaacgtggcgattcagttagaacagcaatcaactattgctataataatatctattttt

SEQ ID NO: 109025 - DNA, 75 bp, synthetic construct
  source 1..75: mol_type = other DNA
tggagtgtcgcaacactgttgttgttatggacgatttttaatcgctgtcgcagcgcattgcgtgaagagggtgtg

SEQ ID NO: 109026 - DNA, 75 bp, synthetic construct
  source 1..75: mol_type = other DNA
atgccgtggctggcgtatgtgcatcaccggatgcccgtacaaaaaatctacttcaactggaagagcggtaagtct

SEQ ID NO: 109027 - DNA, 75 bp, synthetic construct
  source 1..75: mol_type = other DNA
ccatctgaacagggtacgctggtcttcccgggtaacctggggatgttcgaatggggcgggatttccgttgatccg

SEQ ID NO: 109028 - DNA, 75 bp, synthetic construct
  source 1..75: mol_type = other DNA
atggcacttgaagataaaatgattcgctatgcagcagcccaccgcgaggaagtgtgcgggctggtgatagataac

SEQ ID NO: 109029 - DNA, 75 bp, synthetic construct
  source 1..75: mol_type = other DNA
caatctcgaagcagatttaggccaggtctataacgtgaccgccaatctcggcgcaataccgttcgatgaagtcat

SEQ ID NO: 109030 - DNA, 75 bp, synthetic construct
  source 1..75: mol_type = other DNA
tgacgtggtatggctgggacggagacaggctgacgacggtgcagactgacaccacacgtatccagacggtatacg

SEQ ID NO: 109031 - DNA, 75 bp, synthetic construct
  source 1..75: mol_type = other DNA
atggaacagccgaaagatgccaaaggcacgggtacggaatccggcattcagccgcagtacggtgtaccgtatggc

SEQ ID NO: 109032 - DNA, 75 bp, synthetic construct
  source 1..75: mol_type = other DNA
atggcactaccccgcaaactcaaatatttgaacatgttcaatgacggcctgagctacatgggcgttgttgaatcc

SEQ ID NO: 109033 - DNA, 75 bp, synthetic construct
  source 1..75: mol_type = other DNA
ctctcagctcaaaaccactaacgatgccgtggcagccaacaccaccaatatcgccacgaacaccaccaacatcac

SEQ ID NO: 109034 - DNA, 75 bp, synthetic construct
  source 1..75: mol_type = other DNA
tctaaggcagaaactgataatttaagaaaggagtcatatcctctgaaaagaaaatgtcccacaggtacagataga

SEQ ID NO: 109035 - DNA, 75 bp, synthetic construct
  source 1..75: mol_type = other DNA
aatgccgggtgcagtggatgtggatttggggctggatgatagtgcgctggacacagaattttccattggtggtac

SEQ ID NO: 109036 - DNA, 75 bp, synthetic construct
  source 1..75: mol_type = other DNA
accttgcccggcttgttgaggcgatgcagccagatgattgcctggtcgtgatggcggatcacggtaacgatccga

SEQ ID NO: 109037 - DNA, 75 bp, synthetic construct
  source 1..75: mol_type = other DNA
agacgctggatgcgcaggtaatcagcggcgaaggtgaagataatctcctgacgttatcccttccggcatctgcct

SEQ ID NO: 109038 - DNA, 75 bp, synthetic construct
  source 1..75: mol_type = other DNA
atacacacggttcagatagtaatggagtgtatggagatgaagttttttctccggctgacaaggaattatctaaaa

SEQ ID NO: 109039 - DNA, 75 bp, synthetic construct
  source 1..75: mol_type = other DNA
tgcggctttacctttggtgatggctgccacggttcagataccaaattcaatctgttcaacagccgtcgtatcgat

SEQ ID NO: 109040 - DNA, 75 bp, synthetic construct
  source 1..75: mol_type = other DNA
aatcgcctgcctgaaggcgttaccagtgctctggtgatggacggagctgcggatatctccggtacattcacccag

SEQ ID NO: 109041 - DNA, 75 bp, synthetic construct
  source 1..75: mol_type = other DNA
gggtatcagaaaaacgggggcttatggtatcccgtggggtgcattacaggatttttcccgccgcaaagagcaata

SEQ ID NO: 109042 - DNA, 75 bp, synthetic construct
  source 1..75: mol_type = other DNA
caaaattggtcgtatcgtgcgtgagcaggtacaggtcggtcgggtcattacatttggcggcctgttaaccgacag

SEQ ID NO: 109043 - DNA, 75 bp, synthetic construct
  source 1..75: mol_type = other DNA
gtggcattgctgattagtggcggaatcctcacctgggcgggatttaacgatccgcaggaaatcaacggcacctta

SEQ ID NO: 109044 - DNA, 75 bp, synthetic construct
  source 1..75: mol_type = other DNA
caacgccacggcagcggttggtggttacagcgaccagcaggcactggcggtgggtgtgggttaccgcttcaacga

SEQ ID NO: 109045 - DNA, 75 bp, synthetic construct
  source 1..75: mol_type = other DNA
caccgccacgatgttcaagggcagcgaatcgccattcgatgaagatgcaccgtatcaggccggagcatgggctga

SEQ ID NO: 109046 - DNA, 75 bp, synthetic construct
  source 1..75: mol_type = other DNA
cccgttcctggagaccgtgacgctggttgattcctcaggcttgtcgttgattttgctgattatcggagtagccgg

SEQ ID NO: 109047 - DNA, 75 bp, synthetic construct
  source 1..75: mol_type = other DNA
cattcaacggagccggtgtccgggataccgcaaggacgctcaaaatcggtattaacaccgtcattcggacattaa

SEQ ID NO: 109048 - DNA, 75 bp, synthetic construct
  source 1..75: mol_type = other DNA
cgctggcgggtattacgttgtgtatgaggatggctatgcatccttctctcctgctgactcgtttgaatccgggta

SEQ ID NO: 109049 - DNA, 75 bp, synthetic construct
  source 1..75: mol_type = other DNA
acgaacctatccagcggcatgttctgatttttgaccgtggtgaggctgtggtcactattcgttatctgcctacgg

SEQ ID NO: 109050 - DNA, 75 bp, synthetic construct
  source 1..75: mol_type = other DNA
caggcagcgcgcaaactatcagcggccaggtaaccggtgcggcggcgggcagcaccgtcaccgttgaactgggcg

SEQ ID NO: 109051 - DNA, 75 bp, synthetic construct
  source 1..75: mol_type = other DNA
cgtgcagaaaagcctttgaacgggcagtaaagcgagctggcatcgagctgccagagggccaatgcactcacgtgc

SEQ ID NO: 109052 - DNA, 75 bp, synthetic construct
  source 1..75: mol_type = other DNA
ccaaagaaaccgtccgtaagctgatgactcaggccagtctgtgggtcccacgtaagcaacgtgcgccaaaaattc

SEQ ID NO: 109053 - DNA, 75 bp, synthetic construct
  source 1..75: mol_type = other DNA
ccgaggcattgcgccagaatggcagataaagcgtgagatgttgtcaccggcatacactacccgctggaacgaact

SEQ ID NO: 109054 - DNA, 75 bp, synthetic construct
  source 1..75: mol_type = other DNA
caggtaatatcaatgttcaggataaagggactgtcaccctcggaggggaaggggaactgagtcctgacctgactc

SEQ ID NO: 109055 - DNA, 75 bp, synthetic construct
  source 1..75: mol_type = other DNA
ggctgggactcccctgaacgtagaaccttcccacttcaactgtttggtttccattacaaatcccgtactcactcg

SEQ ID NO: 109056 - DNA, 75 bp, synthetic construct
  source 1..75: mol_type = other DNA
cgaactgctggatttcttcctcgaatatcataaagacgaaaaatggggctttgttggcgcaccgctgcatgaccc

SEQ ID NO: 109057 - DNA, 75 bp, synthetic construct
  source 1..75: mol_type = other DNA
gggccatcagttatctaaataccgcatcacttataccaagacgaagggcaagaaaaaccgcaccgtgccgatatc

SEQ ID NO: 109058 - DNA, 75 bp, synthetic construct
  source 1..75: mol_type = other DNA
tcccgatgcacatgaaaaagcaagaaaacatgatgtgatgagctatctggcgcgaattgcccagaattataaaga

SEQ ID NO: 109059 - DNA, 75 bp, synthetic construct
  source 1..75: mol_type = other DNA
agataatgaacctgttatggtttttaacggagagagaatagttcctgcggacggccttaagtcacagcctgtgat

SEQ ID NO: 109060 - DNA, 75 bp, synthetic construct
  source 1..75: mol_type = other DNA
ggcgaagaacgggacaaagcgagccgggaggcgacggccagacagcgcgagtgggagcagaaacagcaacaggcc

SEQ ID NO: 109061 - DNA, 75 bp, synthetic construct
  source 1..75: mol_type = other DNA
taaaccgacttatttttatttctcggtattatgtgcaattgcaactcattggtctgctttgccttttttgctttt

SEQ ID NO: 109062 - DNA, 75 bp, synthetic construct
  source 1..75: mol_type = other DNA
agatgttctgaattcaactgttcaaatgcctatcagtgtgtcatggggaggacaagtattatctacaacagccaa

SEQ ID NO: 109063 - DNA, 75 bp, synthetic construct
  source 1..75: mol_type = other DNA
aaatattttgcaaccgacatctaccattcctcttactgtctcatgggcagggaagacattaagtacaagtgctca

SEQ ID NO: 109064 - DNA, 75 bp, synthetic construct
  source 1..75: mol_type = other DNA
caccgttttacgaccggtcactggcaggaaaactcgccgccatgggtattccctcctttgcctgtacccctgatt

SEQ ID NO: 109065 - DNA, 75 bp, synthetic construct
  source 1..75: mol_type = other DNA
ggcgaagaacgggacaaagcgagccgggaggcgacggccagacaacgcgagtgggagcagaaacagcagcaggcc

SEQ ID NO: 109066 - DNA, 75 bp, synthetic construct
  source 1..75: mol_type = other DNA
tggtgatggccggtctggatgttactcacaaagcacaaatccacgttgaagacaccgagcgtttccgcgcgattg

SEQ ID NO: 109067 - DNA, 75 bp, synthetic construct
  source 1..75: mol_type = other DNA
acgacgacggtcgctttacgtttatcggattctcacccaacaaatcagttccatcagttaccaaagaacagaacg

SEQ ID NO: 109068 - DNA, 75 bp, synthetic construct
  source 1..75: mol_type = other DNA
tccctcaaaaacaagcattcgtcatagaacgaattacgaaaggcaagctgaagtacgacgccagcctttaccaaa

SEQ ID NO: 109069 - DNA, 75 bp, synthetic construct
  source 1..75: mol_type = other DNA
cgtatggcgtggaggaggatgtcttccatccggtgcgcgcgaagcagggaatggtggcttctgtcgatgccactg

SEQ ID NO: 109070 - DNA, 75 bp, synthetic construct
  source 1..75: mol_type = other DNA
ccatgatggccagccgtatgcgcagtgcggtggaaagctatgcgaaggcgcataatatcagtaatgagcaggcga

SEQ ID NO: 109071 - DNA, 75 bp, synthetic construct
  source 1..75: mol_type = other DNA
gtctgctcattatctgcattacgattctgacattcacactcctgacccgacaaacgctctacgaactgcggttcc

SEQ ID NO: 109072 - DNA, 75 bp, synthetic construct
  source 1..75: mol_type = other DNA
gggacggtgataaggaggttgctgcgctcatggcctgcacgtccaggttagggcaagcgcggggattttccccgc

SEQ ID NO: 109073 - DNA, 75 bp, synthetic construct
  source 1..75: mol_type = other DNA
tacagcgctgctcatggtagctcaactaccagcgtaatcaccgatgttgcaaatggtacgattgcagcagacagt

SEQ ID NO: 109074 - DNA, 75 bp, synthetic construct
  source 1..75: mol_type = other DNA
acaccatcagcgcgtcggtcgccgatcaggccggaaaccccggcagcgccagccgtggcgtgacgttgaacggcg

SEQ ID NO: 109075 - DNA, 75 bp, synthetic construct
  source 1..75: mol_type = other DNA
gtttcccggactggctgccactggataaatgggtaccgcaagtgtttgtcgcctctggcgattgcgccgaacgtc

SEQ ID NO: 109076 - DNA, 75 bp, synthetic construct
  source 1..75: mol_type = other DNA
ggcaaagtcacggtggatggtatccagttgcgctttaccggctctattcagcgtgacgataccggggaagtgcag

SEQ ID NO: 109077 - DNA, 75 bp, synthetic construct
  source 1..75: mol_type = other DNA
cgggaaatcaacttatcgcatcattaagggagaaaaagcgatgaagttgttgccgctggggacgaagttttatac

SEQ ID NO: 109078 - DNA, 75 bp, synthetic construct
  source 1..75: mol_type = other DNA
cagcgccgcagcctggcggatacccttcagcagtccggcggcgaagacggtggcagtgtggtgttcccgccggtg

SEQ ID NO: 109079 - DNA, 75 bp, synthetic construct
  source 1..75: mol_type = other DNA
cacccgacaccaggtatgcccgaacgggagaccgtaataacccgctcagaagcttggcatatgcgcaatggtcgt

SEQ ID NO: 109080 - DNA, 75 bp, synthetic construct
  source 1..75: mol_type = other DNA
gatgtatcgctatctcgccattgccaactatgaagatcgttttgtcatcccgaccagccatcgggaaatggcggg

SEQ ID NO: 109081 - DNA, 75 bp, synthetic construct
  source 1..75: mol_type = other DNA
agaaaggggccgtctggaacatcatattcaaagcggctgtacgactgtactgccgggacagttaaatatcttgga

SEQ ID NO: 109082 - DNA, 75 bp, synthetic construct
  source 1..75: mol_type = other DNA
gaacaaagtggtgcagcccgcgttcaaactggcacgcgatggttttatcgttaacgatgctttggcagacgatct

SEQ ID NO: 109083 - DNA, 75 bp, synthetic construct
  source 1..75: mol_type = other DNA
gattatggaatgaacgtcgccgaagcgaccaatgcgccgcgtttccaccatcagtggttgccggacgagctgcgt

SEQ ID NO: 109084 - DNA, 75 bp, synthetic construct
  source 1..75: mol_type = other DNA
atgacctgaactttgccggagctggtaaacagaacttccgcagccattcactgtatgcaggtgcagaagtcggat

SEQ ID NO: 109085 - DNA, 75 bp, synthetic construct
  source 1..75: mol_type = other DNA
ccgccatggtcagaaccctaaaggccgtgacagacttcgctgccgtgactgccaccgtgtgtttcagctcactta

SEQ ID NO: 109086 - DNA, 75 bp, synthetic construct
  source 1..75: mol_type = other DNA
gtccatctgcgcgatctcggtaaactggtcgccgaacaaattgaagcggctggcggcgttgccaaagagttcaac

SEQ ID NO: 109087 - DNA, 75 bp, synthetic construct
  source 1..75: mol_type = other DNA
cccgttgccagtccgttcaggtttaccgtcacgggaagaacccaaaaggacatgatcgatttcgctgccgtgact

SEQ ID NO: 109088 - DNA, 75 bp, synthetic construct
  source 1..75: mol_type = other DNA
attgcccaggagatgcagaaaaacggtggcttgatcactaaagaagatttagcggcgtataaagcggtcgaacgt

SEQ ID NO: 109089 - DNA, 75 bp, synthetic construct
  source 1..75: mol_type = other DNA
gtacaaatcctcaatattctggaaaacttcgatatgaagaaatacggctttggcagcgccgacgcgatgcaaatc

SEQ ID NO: 109090 - DNA, 75 bp, synthetic construct
  source 1..75: mol_type = other DNA
tatattcccgagtatgttgcagatggatatatcaaaagcggcaagctgattgctgttctgaccgagtggtgtcca

SEQ ID NO: 109091 - DNA, 75 bp, synthetic construct
  source 1..75: mol_type = other DNA
agaggcgggaagcccgctcaccatcagcggcaccagcaccgccgaaaccgggcagacggtgaccgtcacccttaa

SEQ ID NO: 109092 - DNA, 75 bp, synthetic construct
  source 1..75: mol_type = other DNA
ggaaatcgcagcagcagaacaggaagccaaagatgcaatcactactgagcaagccattctcgaagcgttcacgga

SEQ ID NO: 109093 - DNA, 75 bp, synthetic construct
  source 1..75: mol_type = other DNA
ggtaagattggtctggtcacgctgggcgttgcagtagtgatgctgttgatggtgccgtggctgaaacgcatgatt

SEQ ID NO: 109094 - DNA, 75 bp, synthetic construct
  source 1..75: mol_type = other DNA
aatacgatgaatggggcaaccagcttaatgaggagaacccgcatcacctgcaccagccgtaccggctgccggggc

SEQ ID NO: 109095 - DNA, 75 bp, synthetic construct
  source 1..75: mol_type = other DNA
gggatatttcgattacacatcacagcataacgtcattatgtggagatggctgatcgcaacagtattcatgctgga

SEQ ID NO: 109096 - DNA, 75 bp, synthetic construct
  source 1..75: mol_type = other DNA
taatctctgcattgcatctacaatatacatactttcgtacatttttgatgttatttctggtatcgttagttctta

SEQ ID NO: 109097 - DNA, 75 bp, synthetic construct
  source 1..75: mol_type = other DNA
gtgtcacggctgaacgcgccatgaatacccgtctggaaggcggttgtcaggtccccattggcagctatgcagaac

SEQ ID NO: 109098 - DNA, 75 bp, synthetic construct
  source 1..75: mol_type = other DNA
ggtgttagccgatcggcgaaagggctgggttatgaaaaagagattagagattacgggttaaatctgttcggtatg

SEQ ID NO: 109099 - DNA, 75 bp, synthetic construct
  source 1..75: mol_type = other DNA
cgatgattgctgccctggtgccgcagcatttgatgggctttattctcgggatgtggttcctgacgcaggctgccg

SEQ ID NO: 109100 - DNA, 75 bp, synthetic construct
  source 1..75: mol_type = other DNA
aagagctaaaggtcagagcttttggttctgattatgtattccctaaccgcagggtgagtacgtcgaggcatatgg

SEQ ID NO: 109101 - DNA, 75 bp, synthetic construct
  source 1..75: mol_type = other DNA
cttgccgtagccggattaaaacgtttaggactggaatcacgtattcgcgccgcactaccgcctgaagtttctctt

SEQ ID NO: 109102 - DNA, 75 bp, synthetic construct
  source 1..75: mol_type = other DNA
gcccgttgaattcccgcaaggtctgggattggtcaccatttgcgagcgtgaagatcctcgcgatgcctttgtgtc

SEQ ID NO: 109103 - DNA, 75 bp, synthetic construct
  source 1..75: mol_type = other DNA
catatcttcgcgcagaaaaacttgggcaactggatgatttttttatccacgtctgtcagttggtagcgttaatca

SEQ ID NO: 109104 - DNA, 75 bp, synthetic construct
  source 1..75: mol_type = other DNA
aaatatggcaaaacgccgctggaactggcgcgggaacggggctttgaagagattgcgcagttgctgatcgccgca

SEQ ID NO: 109105 - DNA, 75 bp, synthetic construct
  source 1..75: mol_type = other DNA
cgtccagtttacgtcgccagtgccaactggctgaacgccgcccggatctgattatccgctccctgcgcggcaacg

SEQ ID NO: 109106 - DNA, 75 bp, synthetic construct
  source 1..75: mol_type = other DNA
cacggtcgtatttcttaaaggctgttcgctgggctgccgctggtgtcagaacccggaaagccgcgcccgcacgca

SEQ ID NO: 109107 - DNA, 75 bp, synthetic construct
  source 1..75: mol_type = other DNA
gccatgtcttcatcttccggggccgcagcggcagtaaggtcaaactgctgtggtccaccggcgacgggctgtgcc

SEQ ID NO: 109108 - DNA, 75 bp, synthetic construct
  source 1..75: mol_type = other DNA
gcttgagcgtgcgggacttggtgatactttccatcaggatccgacaactctgtctggtggtcagcgggcacgggt

SEQ ID NO: 109109 - DNA, 75 bp, synthetic construct
  source 1..75: mol_type = other DNA
tttagaagaccaggttaaagccagatgttgggcgcgtgagtttaaattagatgctattttttctacggatggtga

SEQ ID NO: 109110 - DNA, 75 bp, synthetic construct
  source 1..75: mol_type = other DNA
cgattttcaggatgttcctgccgatagtcccgttctggatatggctcagtggtcagaaaattacaacaaactgcg

SEQ ID NO: 109111 - DNA, 75 bp, synthetic construct
  source 1..75: mol_type = other DNA
taccgggtgacgcgtttgatcatgttgttgtccaggacgacctggagattgttaccttcaggggtgacaagggag

SEQ ID NO: 109112 - DNA, 75 bp, synthetic construct
  source 1..75: mol_type = other DNA
atgggccgtttacacgccagcaggcagagtcagttgcgtctcaatattccaacgttgcgatagaggatgaccagg

SEQ ID NO: 109113 - DNA, 75 bp, synthetic construct
  source 1..75: mol_type = other DNA
cggcttaggtgtcaaaggtggtggtcgcgctggtattgattgggaagataatgatgcgcatacggcaagtagtaa

SEQ ID NO: 109114 - DNA, 75 bp, synthetic construct
  source 1..75: mol_type = other DNA
aaatctggctggttgccggtattaccgatatgagaaacggcttcaacgggctggctgcaaaagtgcagacggcgc

SEQ ID NO: 109115 - DNA, 75 bp, synthetic construct
  source 1..75: mol_type = other DNA
agacggtgaatgtgaataaaaccgaaatcacttctcatgtctgtgagcgaacgccggctgtggaactggcctgta

SEQ ID NO: 109116 - DNA, 75 bp, synthetic construct
  source 1..75: mol_type = other DNA
atgactgttcggattgtatctaacgcagtaaatgcgcttatttctggcgcagatgacaaggtaaagcaactggtg

SEQ ID NO: 109117 - DNA, 75 bp, synthetic construct
  source 1..75: mol_type = other DNA
accacacctggctttgcagaaggtgtattgcctattgatggcgcattcgattttggagttctgaaacgagattag

SEQ ID NO: 109118 - DNA, 75 bp, synthetic construct
  source 1..75: mol_type = other DNA
gtatttctgaggtgaccgcacgcgatgtgcgcgaagtattagagcgcattcgagaaagtaaccgccctaccattg

SEQ ID NO: 109119 - DNA, 75 bp, synthetic construct
  source 1..75: mol_type = other DNA
gtaacgcccaaaccatggcgaaagatatccgcgaactgcctggttatcgcatcgaacgggtacagctttttgata

SEQ ID NO: 109120 - DNA, 75 bp, synthetic construct
  source 1..75: mol_type = other DNA
gatattttatttggaatgtgggacgcatatccgaagtccggagaaagccgacagagaggcaaatgctcttgtcag

SEQ ID NO: 109121 - DNA, 75 bp, synthetic construct
  source 1..75: mol_type = other DNA
tcagaacggaagaaacgacgtgatatacagaaagttaagatcaatatgtcaggttgtggttatggtaatgttccg

SEQ ID NO: 109122 - DNA, 75 bp, synthetic construct
  source 1..75: mol_type = other DNA
acggtacagaccgacaccacgcgtatccagacggtataccagccggggagcttcacgccgctcatccgggtcgag

SEQ ID NO: 109123 - DNA, 75 bp, synthetic construct
  source 1..75: mol_type = other DNA
aatggctgggtgagtaatgagtccagtccgttgcagtcctccctgctggtcagtgaacgcatggcgttcaaacta

SEQ ID NO: 109124 - DNA, 75 bp, synthetic construct
  source 1..75: mol_type = other DNA
aggtggaatcgaaaaaagcagagaaagagcattaagtctggaagaaattggtcaggtgtttaaagttttcagaga

SEQ ID NO: 109125 - DNA, 75 bp, synthetic construct
  source 1..75: mol_type = other DNA
tctattttcaacggaggtttagtcacagcgtctggctctgaaatgaaagatgcaaacactgccgtggcgtttacc

SEQ ID NO: 109126 - DNA, 75 bp, synthetic construct
  source 1..75: mol_type = other DNA
accatcaaagagcatgggatatattatctgatacttatgaagatatgaagagattaaatttaggtgggactgatc

SEQ ID NO: 109127 - DNA, 75 bp, synthetic construct
  source 1..75: mol_type = other DNA
gataaaaaaaatgtgatgcaagtcactatgcagcacgcattgaaactattctggcggccaaaagccattgaatta

SEQ ID NO: 109128 - DNA, 75 bp, synthetic construct
  source 1..75: mol_type = other DNA
atgacagaacgcgttgagaccgtctcatatattgatgccgtaaatcgtctggatgccggggattatgacgataaa

SEQ ID NO: 109129 - DNA, 75 bp, synthetic construct
  source 1..75: mol_type = other DNA
atgactatatttgatagattacaaaataaaagtgatatacagacgctaaaaacagaatgttattgccttctagcg

SEQ ID NO: 109130 - DNA, 75 bp, synthetic construct
  source 1..75: mol_type = other DNA
ggtagtggtcttgatggatttaacaatgcattaacggaactaaccaacggtggaaagagcctgacaattactgta

SEQ ID NO: 109131 - DNA, 75 bp, synthetic construct
  source 1..75: mol_type = other DNA
cgctacagttcaaactcttgcaagtttcctcgaagaaccaccacgcgatgcaacaccagataaaaagagctacca

SEQ ID NO: 109132 - DNA, 75 bp, synthetic construct
  source 1..75: mol_type = other DNA
acagtttgcacagtatgtgatgaaacacgcgccgcaggatgcagaagctattctgacaaataccagttcaccgga

SEQ ID NO: 109133 - DNA, 75 bp, synthetic construct
  source 1..75: mol_type = other DNA
tgcatggcagttcactggcggcaaactatcacgccttgtcggcggatcaccttgaatacgccacccaggaagatg

SEQ ID NO: 109134 - DNA, 75 bp, synthetic construct
  source 1..75: mol_type = other DNA
atgacaactattttgcatccaaattatgttgttgtatcaaagctaatatctaagtttgacattacacatgacagt

SEQ ID NO: 109135 - DNA, 75 bp, synthetic construct
  source 1..75: mol_type = other DNA
gatgtcgggtggaaatatcctggccttacaaaaaattctcgggcatcacgatataaaaatgactatgcgttacgc

SEQ ID NO: 109136 - DNA, 75 bp, synthetic construct
  source 1..75: mol_type = other DNA
aagtttcgggcgatggttgagcacaagctggaagcgggagatcagcttgtcgtgctgaaactggacaggctgggg

SEQ ID NO: 109137 - DNA, 75 bp, synthetic construct
  source 1..75: mol_type = other DNA
cgctgtacgaattgtgtacaattgatgggtattgttgatgcacttggttcttgtattgtttactataattattga

SEQ ID NO: 109138 - DNA, 75 bp, synthetic construct
  source 1..75: mol_type = other DNA
gtcacaaagaagtggattccggtgagtggaagacgggcgaaagcaacaccaccaaagtgaccagtaccaacagct

SEQ ID NO: 109139 - DNA, 75 bp, synthetic construct
  source 1..75: mol_type = other DNA
atacacattgaacgatggacaaggtctgtcattgcttatcaatcctgatggctcgaaaggctggcgtttccgttt

SEQ ID NO: 109140 - DNA, 75 bp, synthetic construct
  source 1..75: mol_type = other DNA
ttggtaaacgaccaatatctgaaattaaaccgctagagttgcttgaagtacttaagcgtatagaaaaacgtgggg

SEQ ID NO: 109141 - DNA, 75 bp, synthetic construct
  source 1..75: mol_type = other DNA
tccacgccggtggcgtattccctaacccgcttctcaatcgtgaaggtgcggcagcggcagcaactaagccaggta

SEQ ID NO: 109142 - DNA, 75 bp, synthetic construct
  source 1..75: mol_type = other DNA
acacaatccgcgccgggatgggagttatataatacccctgatgattttgaccaacgcccaccattcgacgatgaa

SEQ ID NO: 109143 - DNA, 75 bp, synthetic construct
  source 1..75: mol_type = other DNA
cttctcccgatttgaaaccaagggttgaagcgattcgcaacggaaaaccaacaacggttatcgttatcgatataa

SEQ ID NO: 109144 - DNA, 75 bp, synthetic construct
  source 1..75: mol_type = other DNA
atgttgtcaatctgtttggcagaaggtgagggagttcctggtcgctgtacgaattgtgtacaatcgatgggtatt

SEQ ID NO: 109145 - DNA, 75 bp, synthetic construct
  source 1..75: mol_type = other DNA
cgcgggaacattgtgcggatgcgtggagaggtgctactggctggtgtgccacgccatgtcgctgagcgtgaaatc

SEQ ID NO: 109146 - DNA, 75 bp, synthetic construct
  source 1..75: mol_type = other DNA
gaaaatgcgccgaccacatcttgtaccactctccactcaagtagttgaaatttttcaacaactcaagctaatcac

SEQ ID NO: 109147 - DNA, 75 bp, synthetic construct
  source 1..75: mol_type = other DNA
cgacgagtcagtgcgctgctacgtcgaggaagacaaatcatacacaacggcagcaggcgatctgcttcgtgtcgt

SEQ ID NO: 109148 - DNA, 75 bp, synthetic construct
  source 1..75: mol_type = other DNA
gttgctctcgcaatagataatcgtccgagcagtttcggtatagccaaattttgtgcttctgctattattaacatg

SEQ ID NO: 109149 - DNA, 75 bp, synthetic construct
  source 1..75: mol_type = other DNA
attactgtacctgtacgcgtgcgcgtattcacagcattggcggtatttacgacggtcattgccgtgaattacatc

SEQ ID NO: 109150 - DNA, 75 bp, synthetic construct
  source 1..75: mol_type = other DNA
gaggcggtcgcgaaaaatccaccgttactccatccggttgtgcgaacgcatccggtgaccggtaaacaggcgctg

SEQ ID NO: 109151 - DNA, 75 bp, synthetic construct
  source 1..75: mol_type = other DNA
taaatatgaatatgaatatgaatatgaatatgatgaaagaagccattgatgttttgataaactctgaaaaacata

SEQ ID NO: 109152 - DNA, 75 bp, synthetic construct
  source 1..75: mol_type = other DNA
ccagggcgtgacagaaattgtccgtggcgcggatttgatcgaacccacggtgcgccaaatctcgctgtaccagct

SEQ ID NO: 109153 - DNA, 75 bp, synthetic construct
  source 1..75: mol_type = other DNA
gccgtttgaaacgccgctgggaactaacccgctgcatccaaacgttatctcgaatccggcggcgcgtatctttaa

SEQ ID NO: 109154 - DNA, 75 bp, synthetic construct
  source 1..75: mol_type = other DNA
gtaaatggatatgcgaatgctaccccgccgggcgcagcggacggcgcgtgcgtaagcaattcgccaccaaaggtg

SEQ ID NO: 109155 - DNA, 75 bp, synthetic construct
  source 1..75: mol_type = other DNA
ggcgcagatttgattgaaccgacggtgcgacaaatctcgctgtaccagctttttggctggcaggtgccagattac

SEQ ID NO: 109156 - DNA, 75 bp, synthetic construct
  source 1..75: mol_type = other DNA
tcagcccgtgatggcaaagtgttccttacgcaggcgcagctggcgatgctgctggaaggtatcgactggcgacag

SEQ ID NO: 109157 - DNA, 75 bp, synthetic construct
  source 1..75: mol_type = other DNA
caactcgatggtgttagaataacagcatctaatggtgatataattcatttgcgtgcatctggtaatgcgcctgaa

SEQ ID NO: 109158 - DNA, 75 bp, synthetic construct
  source 1..75: mol_type = other DNA
ttacgtcacttcgggattgaaaaaacgccccgtacatcatccacatctccgaatctccctgccagcggggataat

SEQ ID NO: 109159 - DNA, 75 bp, synthetic construct
  source 1..75: mol_type = other DNA
aatatttttctcgtcgcttgaactcgctctttcaaacagggatgcaggggcagcagcagatgccattagagagtc

SEQ ID NO: 109160 - DNA, 75 bp, synthetic construct
  source 1..75: mol_type = other DNA
ttgctgaaaggtacggggttcctgaatgtctccaatgctggcagcgagttatatgctgatgatttgtatgagtaa

SEQ ID NO: 109161 - DNA, 75 bp, synthetic construct
  source 1..75: mol_type = other DNA
ccgcagcgggcaaaaaaatcattatccgcgtgccactgattcagggctttaatgccgacgaaacctctgtgaaag

SEQ ID NO: 109162 - DNA, 75 bp, synthetic construct
  source 1..75: mol_type = other DNA
tgtccacttcagtggtttgaatgacaccatacgcaacagtcagtacggtgcgatgaaagtgaaagacgcgatcgt

SEQ ID NO: 109163 - DNA, 75 bp, synthetic construct
  source 1..75: mol_type = other DNA
ttaccttccgggaccaaaatttggctggttgccggtatcaccgatatgagaaatggcttcaacggcctggctgcg

SEQ ID NO: 109164 - DNA, 75 bp, synthetic construct
  source 1..75: mol_type = other DNA
gacacaagcacattggcaggattacagcgttgagcaaatcctccagtcagccgtcaaaaactgggcgctgactgc

SEQ ID NO: 109165 - DNA, 75 bp, synthetic construct
  source 1..75: mol_type = other DNA
atctgacggcgttaaccgactgctgcccgacacaggcgttaaccgtgtgtggtgaagtgaaaagcgttgaggaga

SEQ ID NO: 109166 - DNA, 75 bp, synthetic construct
  source 1..75: mol_type = other DNA
gacggagattatgtctgccagttcaagatccttttcgacagaaacatggatgcaagatcatttttctggaaaccg

SEQ ID NO: 109167 - DNA, 75 bp, synthetic construct
  source 1..75: mol_type = other DNA
atctggggcacgccacataactccccgcaatccaaaaagaacttcggatatctgctctggcgcaaacgcaactgc

SEQ ID NO: 109168 - DNA, 75 bp, synthetic construct
  source 1..75: mol_type = other DNA
ctcctctattgtgtgcagcctatccttccggtgctttcgcaggagtttggcttaacccccgcgaacagtagtatt

SEQ ID NO: 109169 - DNA, 75 bp, synthetic construct
  source 1..75: mol_type = other DNA
caatatgaggagccgctggtcgagagccgatacctttacgacccgctgggtcgccggacagggaaacgggtgtgg

SEQ ID NO: 109170 - DNA, 75 bp, synthetic construct
  source 1..75: mol_type = other DNA
catctaaggcagaaactgataatttaagaaaggagtcatatcctctgaaaagaaaatgtcccacaggtacagata

SEQ ID NO: 109171 - DNA, 75 bp, synthetic construct
  source 1..75: mol_type = other DNA
caattaagactgccatatcctattgaccaggccagtagtgcgcctaatgttttcaaaacattcttcagagcatta

SEQ ID NO: 109172 - DNA, 75 bp, synthetic construct
  source 1..75: mol_type = other DNA
aggtagggcagaaagttctggataaaattttgaattataccaacaccgaaatgaaagaagcgatagcgcagcgta

SEQ ID NO: 109173 - DNA, 75 bp, synthetic construct
  source 1..75: mol_type = other DNA
tccgcgccgccgggctgaaaatcttcgcccaaccgcaggtgcggcccaactggaagctcaaaagcgtttaccaaa

SEQ ID NO: 109174 - DNA, 75 bp, synthetic construct
  source 1..75: mol_type = other DNA
ttgattttggcaaagagaaccagagcatcgattaccgtattacggtgactgacaatgccaatctggtaatcaatg

SEQ ID NO: 109175 - DNA, 75 bp, synthetic construct
  source 1..75: mol_type = other DNA
atggcccagaaaacgcggctgtacgcattcggcaattacatccggttacgcagtttaccgatcagttgcgcggta

SEQ ID NO: 109176 - DNA, 75 bp, synthetic construct
  source 1..75: mol_type = other DNA
ggcaaaagctcgtagctcgggccaaaccgggggaatatgtacaagggataaacggtaaatgggtgcgaaaatttt

SEQ ID NO: 109177 - DNA, 75 bp, synthetic construct
  source 1..75: mol_type = other DNA
cggttcagtatatagattcaatgggactggcatcaaaatatggacacttaaataatggcggatatggagcgagac

SEQ ID NO: 109178 - DNA, 75 bp, synthetic construct
  source 1..75: mol_type = other DNA
atgaataataatgacaacaatttacgcaaagagtttttgcagataatgaacgaaaatgttaaatcagaattaaaa

SEQ ID NO: 109179 - DNA, 75 bp, synthetic construct
  source 1..75: mol_type = other DNA
tattctcgacaggaagcggaatcaatggacccgcagcagcgtctgtttttgcaagcggtctggcatgcgctggaa

SEQ ID NO: 109180 - DNA, 75 bp, synthetic construct
  source 1..75: mol_type = other DNA
agaaaaagctgcccaggaacgaatgcccggggcagatactcctgatgagttgctgaagaaggccaaagagtatca

SEQ ID NO: 109181 - DNA, 75 bp, synthetic construct
  source 1..75: mol_type = other DNA
ccatcgttgagcaattgtgttttacggtgatcacagttgagcgcgaagatctcgcttttaccttttttgatactc

SEQ ID NO: 109182 - DNA, 75 bp, synthetic construct
  source 1..75: mol_type = other DNA
aaaacacagaattaattccagttgaaataagtgatgcagaatttatttattcacttcgcattgattctcgtctca

SEQ ID NO: 109183 - DNA, 75 bp, synthetic construct
  source 1..75: mol_type = other DNA
gtttatcagccggggaacatgctgcacgcagtctggtctggccgaagttaaaatcgttcctcagagaatatcccg

SEQ ID NO: 109184 - DNA, 75 bp, synthetic construct
  source 1..75: mol_type = other DNA
acctgaggcaccactggccagagctgaaagcgcaactgctgtccggcagataccgcccatcccctgtgagaagag

SEQ ID NO: 109185 - DNA, 75 bp, synthetic construct
  source 1..75: mol_type = other DNA
gaaattaccgacaagaagggaaagggccttcccgagagtggtaaaggagaggccctggaaataccccacagcccc

SEQ ID NO: 109186 - DNA, 75 bp, synthetic construct
  source 1..75: mol_type = other DNA
ggcagtgaaccttccccgtcgcgttcgtccggcagcggtgccggggggatgtccgtttctctcaccacaccatag

SEQ ID NO: 109187 - DNA, 75 bp, synthetic construct
  source 1..75: mol_type = other DNA
cagcctttaaagctgcctccggcaatgtcgaggtcagcattctgtacctggtctgcatcggtgtgttgctggcct

SEQ ID NO: 109188 - DNA, 75 bp, synthetic construct
  source 1..75: mol_type = other DNA
gacgctcccgagctggcaggcaaactctacagcaacgctttcccgctggtagacgttacgatcattccggatgat

SEQ ID NO: 109189 - DNA, 75 bp, synthetic construct
  source 1..75: mol_type = other DNA
agtcgctcaaatattacctcgacccgtgctgataaccagaaccatggttattctgtagggctaacctcaagctgg

SEQ ID NO: 109190 - DNA, 75 bp, synthetic construct
  source 1..75: mol_type = other DNA
tttaaaaaattataacattttcagtaatgaagatccgaaatcatctgaagatgagttgccttctgatcccacagt

SEQ ID NO: 109191 - DNA, 75 bp, synthetic construct
  source 1..75: mol_type = other DNA
gaacaaaaaagggggatggagtgaaaatgatatcagtcactatgtcagcaatgacataaaactggaaaatgatac

SEQ ID NO: 109192 - DNA, 75 bp, synthetic construct
  source 1..75: mol_type = other DNA
aaaaacaatactagactccgacttttttataaataataactctggtaataagtcattacaaaagcaagcaatttc

SEQ ID NO: 109193 - DNA, 75 bp, synthetic construct
  source 1..75: mol_type = other DNA
gtggttaactaatgcgagtaaattaacgaccgagcttgataaaaatgggaaaattatatttaactttaatgcgtt

SEQ ID NO: 109194 - DNA, 75 bp, synthetic construct
  source 1..75: mol_type = other DNA
ggccttttgtttatcggcgttttaaacgcacccattaacgcttatgaaatggtgatctacccgattgcctttttt

SEQ ID NO: 109195 - DNA, 75 bp, synthetic construct
  source 1..75: mol_type = other DNA
caaaaccgcacgttaacgtaggtactatcggccacgttgaccaaggtaaaacaactctgaccgctgcaatcacaa

SEQ ID NO: 109196 - DNA, 75 bp, synthetic construct
  source 1..75: mol_type = other DNA
tgtgatttttacacataatcattgcctgtcaaaaatcgcaagaaaaatcaagaaaaatcgagtaggcagcctggc

SEQ ID NO: 109197 - DNA, 75 bp, synthetic construct
  source 1..75: mol_type = other DNA
tttttccgctggcgggtattcgcagccgcgtgcattgggtcgatacctggcagatggccgacgggcagcgtgatt

SEQ ID NO: 109198 - DNA, 75 bp, synthetic construct
  source 1..75: mol_type = other DNA
acgtctttggtcagtattttatgtttttcataggagagcagagagctattgcagaaaagatgctgatatcaacag

SEQ ID NO: 109199 - DNA, 75 bp, synthetic construct
  source 1..75: mol_type = other DNA
ggtgattacgaagaaatcatgaataaggccagcgccctgagtctggtatcgaatgcaatcctgtactggaacaca

SEQ ID NO: 109200 - DNA, 75 bp, synthetic construct
  source 1..75: mol_type = other DNA
tcggtgttccccgggcgaattcccgtcccaatgaatcccgcgttttttatgcgccgtccttttacggtatccatc

SEQ ID NO: 109201 - DNA, 75 bp, synthetic construct
  source 1..75: mol_type = other DNA
tttgacgcccattcagcacgcctactggctggggcgaacccacctcattggctatggcggcgtcgcctgtcacgt

SEQ ID NO: 109202 - DNA, 75 bp, synthetic construct
  source 1..75: mol_type = other DNA
gaatctgaatctggtacagtagatgttagcaaagtttcggaaaaaacaaatatatcattaaaaacaacacaaata

SEQ ID NO: 109203 - DNA, 75 bp, synthetic construct
  source 1..75: mol_type = other DNA
gactccatcccgctgatttgcatcactggtcaggttcccgcctcgatgatcggcaccgacgccttccaggaagtg

SEQ ID NO: 109204 - DNA, 75 bp, synthetic construct
  source 1..75: mol_type = other DNA
gcaatcccaggtcatgaaaaatgtccgcatgatctcgccgcaggaaacagaagtggcaagtatgatggagggaat

SEQ ID NO: 109205 - DNA, 75 bp, synthetic construct
  source 1..75: mol_type = other DNA
gcggggagaccacactttgctgaagggatgtttggtgtaagggaatgggattacctgttcaactttaccggaccg

SEQ ID NO: 109206 - DNA, 75 bp, synthetic construct
  source 1..75: mol_type = other DNA
ttactcagcctgcagccggtggaagaaatctggggcgtggggaaccggatagcgaaaaagctgcacgttatgggg

SEQ ID NO: 109207 - DNA, 75 bp, synthetic construct
  source 1..75: mol_type = other DNA
atgcgtatcggtctgggtattggcgaagcgccatttatgcctgcgggagtaaagtcgatcaccgactggtatgcg

SEQ ID NO: 109208 - DNA, 75 bp, synthetic construct
  source 1..75: mol_type = other DNA
gtaccatttcaccgatatctcggcgctgttcacccgtcgcgcccagcagaaattcgccgactacgattttgtgaa

SEQ ID NO: 109209 - DNA, 75 bp, synthetic construct
  source 1..75: mol_type = other DNA
tcatgcgcagtattaccttcttgataaggaaaatttcatggctcttttaagccgaacagataagaaatatgagaa

SEQ ID NO: 109210 - DNA, 75 bp, synthetic construct
  source 1..75: mol_type = other DNA
ctggcatcattgatgcttctggataatgggattttgtgtgattgtctgacaaaaggggatgaaaatgcagaataa

SEQ ID NO: 109211 - DNA, 75 bp, synthetic construct
  source 1..75: mol_type = other DNA
ctacttgccttgttttccggatagcgatgagccacgtatcctgcatcgtctaatgatgaaaagccagaggttttt

SEQ ID NO: 109212 - DNA, 75 bp, synthetic construct
  source 1..75: mol_type = other DNA
tattttcggggccggatgcccgtctcgcggaattttgcgccgctctttcgcagcaggatatcagctatcgtcgcc

SEQ ID NO: 109213 - DNA, 75 bp, synthetic construct
  source 1..75: mol_type = other DNA
accgatgaacaattaggcaccaagctgaggcgatggcgcaattggggactggatgaagaagcaaaagcgttttgt

SEQ ID NO: 109214 - DNA, 75 bp, synthetic construct
  source 1..75: mol_type = other DNA
aatctttcgtggtggcatctgccgcgcctgttactggaaaaccagacggcgtacctgctgtggatatttctgtcg

SEQ ID NO: 109215 - DNA, 75 bp, synthetic construct
  source 1..75: mol_type = other DNA
aaagcgcagaaaggaaagggagttaatgttgatttgcacaaggaattatgtggaatcttgataaagaaagaatgt

SEQ ID NO: 109216 - DNA, 75 bp, synthetic construct
  source 1..75: mol_type = other DNA
agcggctacgtcaatatgggggcgtatgactacacgctggtggaagataacaacgactggtatctgcgatcacaa

SEQ ID NO: 109217 - DNA, 75 bp, synthetic construct
  source 1..75: mol_type = other DNA
aattaaagagttaaacgttggcatctcaaaagaaattatcaaccaacttattcaactggaaatcagcactgaaaa

SEQ ID NO: 109218 - DNA, 75 bp, synthetic construct
  source 1..75: mol_type = other DNA
aaaatagcgaaaatacttgataattataaaccaattgacatggttagagccagtttatggattttcaatgattgg

SEQ ID NO: 109219 - DNA, 75 bp, synthetic construct
  source 1..75: mol_type = other DNA
tggctcccttcactggcgcccaatacgggatgcgccgctgaattaccggcaaacgtgtttaccggcgatagccgc

SEQ ID NO: 109220 - DNA, 75 bp, synthetic construct
  source 1..75: mol_type = other DNA
ctccagctcgctggttgccgtgcatctggcctgtgaaagcctgcgcgctggcgaatccgatatggcggttgccgg

SEQ ID NO: 109221 - DNA, 75 bp, synthetic construct
  source 1..75: mol_type = other DNA
tgacacttgatgttgcaaaaaaaatactcagcccaataacatcatttgattacattcattttatcactacacatc

SEQ ID NO: 109222 - DNA, 75 bp, synthetic construct
  source 1..75: mol_type = other DNA
aaggtgttaggtttaggaaattgcacggtctggcaaacatcgctggcaggaaaacatcgtgtgactatcgaaaag

SEQ ID NO: 109223 - DNA, 75 bp, synthetic construct
  source 1..75: mol_type = other DNA
tcagcatcgtacgtatcgtggcgtatttattaccggctttcagtgcagcctggtgataaaaataactgctacggg

SEQ ID NO: 109224 - DNA, 75 bp, synthetic construct
  source 1..75: mol_type = other DNA
ggttcgaatcctcgtaccccagccacattaaaaaagctcgcttcggcgagctttttgcttttctgcgttcattca

SEQ ID NO: 109225 - DNA, 75 bp, synthetic construct
  source 1..75: mol_type = other DNA
acgaagaaatttatgacttggtagaaatagcctccaaaaagtatagatcacctatcgaccgcgatattctcatcc

SEQ ID NO: 109226 - DNA, 75 bp, synthetic construct
  source 1..75: mol_type = other DNA
ggtttagcatattttgttctgccgatgaaaaatgcagggggcactaaagttggttcagtgaaagtgaatgcatct

SEQ ID NO: 109227 - DNA, 75 bp, synthetic construct
  source 1..75: mol_type = other DNA
aatatggctatggcattgagtttattaccagtgagcaggctgtattatttgtgttgctggtggcaggttcagtag

SEQ ID NO: 109228 - DNA, 75 bp, synthetic construct
  source 1..75: mol_type = other DNA
cgaaaacgctgctggccgtaatgttgacctctgccgtggcgacaggctctgcttttgcggaaaacaacgcgcaga

SEQ ID NO: 109229 - DNA, 75 bp, synthetic construct
  source 1..75: mol_type = other DNA
atgaagcaaagcctgtggctgctgatgttattccttcttgccggtcatgtccctgcggcgtcagcggatgctgcc

SEQ ID NO: 109230 - DNA, 75 bp, synthetic construct
  source 1..75: mol_type = other DNA
tatcaacgcgcttcatctcactgaagacgatattttgcctggcttgccaattcaggtggcaaccacaggacactc

SEQ ID NO: 109231 - DNA, 75 bp, synthetic construct
  source 1..75: mol_type = other DNA
cgctaacgttcccggtgaaagccggtgatgaatgcctggtgattttcgccgatcgctgcatcgatttctggtggc

SEQ ID NO: 109232 - DNA, 75 bp, synthetic construct
  source 1..75: mol_type = other DNA
tgcgcgagcgcgaaccgaatatcaccgggctcggcggcatttttgtgccgtccagcggcattgtcagctaccgcg

SEQ ID NO: 109233 - DNA, 75 bp, synthetic construct
  source 1..75: mol_type = other DNA
atgacaactgcggcaagatgctggtcgccacgtctgaactcgaaatggaacggatgcgcgccttatgggaacgca

SEQ ID NO: 109234 - DNA, 75 bp, synthetic construct
  source 1..75: mol_type = other DNA
ctgcgtaaggcgctgccgtggttacaggaacaactaccgcagctgaaagttattaccgtcaatattcagccggta

SEQ ID NO: 109235 - DNA, 75 bp, synthetic construct
  source 1..75: mol_type = other DNA
tgtggaataaaaccatcaaacaaactgtttgaaaacatgtatgcagcaacaacaatattaaattcacctgaacta

SEQ ID NO: 109236 - DNA, 75 bp, synthetic construct
  source 1..75: mol_type = other DNA
gcggctggtgtctgacgcagaaactggcactgcgcgatatgcaggggcgtgtgatcggaatggcggggatctcac

SEQ ID NO: 109237 - DNA, 75 bp, synthetic construct
  source 1..75: mol_type = other DNA
aagagtccggcccggcctttcaccagacgggccacaacagcggcgtgatccatgccggggtctattacacgcccg

SEQ ID NO: 109238 - DNA, 75 bp, synthetic construct
  source 1..75: mol_type = other DNA
gagtcgatcagcgaatttaacgccgacgccgacaaaggttaaccaccctgcccccaaaagtgcatttatgtgcag

SEQ ID NO: 109239 - DNA, 75 bp, synthetic construct
  source 1..75: mol_type = other DNA
ccaaaatggtggtgagtggtagcgttgaaaaaccactgctcggtatgctgcatcgcgacggcacaccggaagacc

SEQ ID NO: 109240 - DNA, 75 bp, synthetic construct
  source 1..75: mol_type = other DNA
gaaagattaggatggccgaaaggtgaaatcacaagaaaaattgaagtgttactgaatcagtttccagtaaacccg

SEQ ID NO: 109241 - DNA, 75 bp, synthetic construct
  source 1..75: mol_type = other DNA
ctaaaaccgtttatcgcccgtgcggggctgacgccctacaacgtggcgcgcaagcgtggcgaactgaaatatatt

SEQ ID NO: 109242 - DNA, 75 bp, synthetic construct
  source 1..75: mol_type = other DNA
tgcgccatacattcgctagccattttatgatgaacggcggaaacatactcgtgttgcgcgacatccttggtcact

SEQ ID NO: 109243 - DNA, 75 bp, synthetic construct
  source 1..75: mol_type = other DNA
taaagctcttttaatacgaattattacaaacgcttttagatcagcaatagaacgtggtctttcaggacgtaagga

SEQ ID NO: 109244 - DNA, 75 bp, synthetic construct
  source 1..75: mol_type = other DNA
ccaactcacttacagaacagctggcaaagcatatggttattgatcttcgcatccgtatgttggtgagtctgggtg

SEQ ID NO: 109245 - DNA, 75 bp, synthetic construct
  source 1..75: mol_type = other DNA
atgaccatcagaaagcagccaaacggaaaatggttgtgtgaatgctacccgaacgggcgcgacggcaagcgtgtg

SEQ ID NO: 109246 - DNA, 75 bp, synthetic construct
  source 1..75: mol_type = other DNA
atggaaataacaaaaaataaaaatgcaactataaaaaaacagtcatcagtcggctgcttttcaatgtttacttta

SEQ ID NO: 109247 - DNA, 75 bp, synthetic construct
  source 1..75: mol_type = other DNA
ccagaaggtcaatgtactcatgtgcttcggcatacattcgccagtcactttatgatgaacggcggaaacatactg

SEQ ID NO: 109248 - DNA, 75 bp, synthetic construct
  source 1..75: mol_type = other DNA
atggcatctaatcaaacgaccctgccgaacgtcagcgaaaatgaagaaacactgctgaacggcgtcaatgaaaac

SEQ ID NO: 109249 - DNA, 75 bp, synthetic construct
  source 1..75: mol_type = other DNA
gcctcattcagcagttcgttaagcgggcatctcggggtggggtatagccatggtgccggtgtggaatccccgtgg

SEQ ID NO: 109250 - DNA, 75 bp, synthetic construct
  source 1..75: mol_type = other DNA
tccaattccttgatgctccagatgattatgaattaaaaattcataaagacttcactgatagttataccatctcta

SEQ ID NO: 109251 - DNA, 75 bp, synthetic construct
  source 1..75: mol_type = other DNA
ttttcagtacggcactgttcagcgcggcggtgcacgccatgggccaggagcaacaatggggcaactggtttggca

SEQ ID NO: 109252 - DNA, 75 bp, synthetic construct
  source 1..75: mol_type = other DNA
tgatcccgcaggtggaagcccagccgcgagcagagtggcatcaactggtggctgatttacagcgcgaatacccgt

SEQ ID NO: 109253 - DNA, 75 bp, synthetic construct
  source 1..75: mol_type = other DNA
tcacatatcggttttgatcgcggaggacatggcagtgtgggcagttattctctggggggctatgccagctgggaa

SEQ ID NO: 109254 - DNA, 75 bp, synthetic construct
  source 1..75: mol_type = other DNA
ctcgctgaccctaagcgattaatggctaagctaaaaatcatttgtaatgggcttggcgatcccatcgcttctgaa

SEQ ID NO: 109255 - DNA, 75 bp, synthetic construct
  source 1..75: mol_type = other DNA
ttgaagtcagtgataattcgcaattgggggatacaagttacaaccgctcagtgatcttcacagatcctcaacaac

SEQ ID NO: 109256 - DNA, 75 bp, synthetic construct
  source 1..75: mol_type = other DNA
gcggatgatgaacagggagccgcccggtttttgtctgctctcgaaaactggaatcgcccgtggtctggcatgacg

SEQ ID NO: 109257 - DNA, 75 bp, synthetic construct
  source 1..75: mol_type = other DNA
ccgcaagcagatgctttttttctggattttgccatcaatgatgacggtgaacgtccggagctgacgacaataatg

SEQ ID NO: 109258 - DNA, 75 bp, synthetic construct
  source 1..75: mol_type = other DNA
gaatgtcggcgacacgcactgtcagagcgatccgcaggattgctttggtctgatggtcggcagcactgttcattc

SEQ ID NO: 109259 - DNA, 75 bp, synthetic construct
  source 1..75: mol_type = other DNA
gatggagtgaagcagaaaacctacagggccaccaaatatcgaaataccgaattacttatacaaagaccaaaggca

SEQ ID NO: 109260 - DNA, 75 bp, synthetic construct
  source 1..75: mol_type = other DNA
ttcactatctgggtctggtctacacgtttccaggatagagcaaatatctggggcaacaggcgcgttactgacaat

SEQ ID NO: 109261 - DNA, 75 bp, synthetic construct
  source 1..75: mol_type = other DNA
acacctcctacgactgggagagcggcggtaacccgatcctcgaaacctatctgagcgccaacgccatcaccgtgg

SEQ ID NO: 109262 - DNA, 75 bp, synthetic construct
  source 1..75: mol_type = other DNA
gtggaggggtattcagagctgtacttgatggaactggctataccgatgatgatggtgttgtaataaaaacagcag

SEQ ID NO: 109263 - DNA, 75 bp, synthetic construct
  source 1..75: mol_type = other DNA
agcggcaaatgatggatttaagtttattggtcagtgccctgatatattgacactaagaacaatagaacctgaaaa

SEQ ID NO: 109264 - DNA, 75 bp, synthetic construct
  source 1..75: mol_type = other DNA
aagacgggaagttattgcacggcaacgcggcaacgcttcacctggcaaaaaaagcgggtgggatggatcagttcc

SEQ ID NO: 109265 - DNA, 75 bp, synthetic construct
  source 1..75: mol_type = other DNA
atgtataccgcgagcggctcaaaagcctatgcacaaattggcgtcgaaagcgccgtaatgagcgccagccagcag

SEQ ID NO: 109266 - DNA, 75 bp, synthetic construct
  source 1..75: mol_type = other DNA
aaagtctaacgatcaacggatggctagggagtttctactttttttagaaaattatggatacctaaactccagacg

SEQ ID NO: 109267 - DNA, 75 bp, synthetic construct
  source 1..75: mol_type = other DNA
tatcggccacgttgaccacggtaaaacaactctgaccgctgcaatcacaaccgtactggctaaaacctacggcgg

SEQ ID NO: 109268 - DNA, 75 bp, synthetic construct
  source 1..75: mol_type = other DNA
tccgtaacggcgtcaactatgcgaaacaggcgcagtctgtactccagaccactatcagtgccgttcgggtggcgc

SEQ ID NO: 109269 - DNA, 75 bp, synthetic construct
  source 1..75: mol_type = other DNA
tttgacctgccggacgagccaacaggctatgtcgcgccttcatggctgactgagccgacgccacagattaacggg

SEQ ID NO: 109270 - DNA, 75 bp, synthetic construct
  source 1..75: mol_type = other DNA
gacttcgatataaataccaggaagaaactccaggaagaagctgcatattgcgtaccaatttctgcaatatctgta

SEQ ID NO: 109271 - DNA, 75 bp, synthetic construct
  source 1..75: mol_type = other DNA
tgggattatttcactctcagagaacggttgatgctgatgcagaagcagctggaaggggcgcaggaatatatccgc

SEQ ID NO: 109272 - DNA, 75 bp, synthetic construct
  source 1..75: mol_type = other DNA
cggagccagacagggtatggtgcggagatattacgtatatctgggcaggaaatcgctggtgctatctggcggtcg

SEQ ID NO: 109273 - DNA, 75 bp, synthetic construct
  source 1..75: mol_type = other DNA
atttgaacaaatgagcgccattacccgaattgatgccggaaaaattatcccacgtgatgccacgtacccgtttac

SEQ ID NO: 109274 - DNA, 75 bp, synthetic construct
  source 1..75: mol_type = other DNA
ctggagacgacgcagatctacacgaaggtggccataaagccgttgcagaaggttcatgcgcggacgcacccggca

SEQ ID NO: 109275 - DNA, 75 bp, synthetic construct
  source 1..75: mol_type = other DNA
ttggctctaccgctgtgggttataactctgttgccgatggcgataacagcgtggcaatcggtcatggcagcaaca

SEQ ID NO: 109276 - DNA, 75 bp, synthetic construct
  source 1..75: mol_type = other DNA
aaattgacgatactgattatgaagaggcagcaaaagaattagaatgcgaagttgcagcaattaaagctgtagcaa

SEQ ID NO: 109277 - DNA, 75 bp, synthetic construct
  source 1..75: mol_type = other DNA
aagcgcagcgcgataaaaaagtcagtgagctgaaactggcgaacgcgacaattactgatatgcagatacgccagc

SEQ ID NO: 109278 - DNA, 75 bp, synthetic construct
  source 1..75: mol_type = other DNA
tataaatcccctaaccttgagcagatcatggagaaattccgcgatccggcaaaagtgaaagggaatctgtcctct

SEQ ID NO: 109279 - DNA, 75 bp, synthetic construct
  source 1..75: mol_type = other DNA
ttgcttttttgatggtgtccttttcttgttatagtggaaattataatgttgcatctctctgggggtatccaaata

SEQ ID NO: 109280 - DNA, 75 bp, synthetic construct
  source 1..75: mol_type = other DNA
tagcgagtcaggttttcaggcgcaatggcaaagcagctggtttgcaaataatctcggtgagcgttttgcttcagg

SEQ ID NO: 109281 - DNA, 75 bp, synthetic construct
  source 1..75: mol_type = other DNA
gatgagggttgttgttccttagcgagcaatcatctttatgtagaaaagattaagagaactatcaatttccaaacc

SEQ ID NO: 109282 - DNA, 75 bp, synthetic construct
  source 1..75: mol_type = other DNA
cctgtggtgcgcttagtctggggctgaatcattaccgtgatcacgccatcatctacaaagagcagcgcgataaaa

SEQ ID NO: 109283 - DNA, 75 bp, synthetic construct
  source 1..75: mol_type = other DNA
gtgaaactaatctggtctgaggaatcatgggtctggtctgaggaatcatgggatgattatctgtactggcaggaa

SEQ ID NO: 109284 - DNA, 75 bp, synthetic construct
  source 1..75: mol_type = other DNA
agatgccagtgggaaaaacaccggtaacggcaatacgcagaataaaaccagtacagacggcggtatcggctggat

SEQ ID NO: 109285 - DNA, 75 bp, synthetic construct
  source 1..75: mol_type = other DNA
atactcgagggaattagccgatgcgagagctgaaaatgaaactctgcgtgctgatgttaccgctggtcgtaagcg

SEQ ID NO: 109286 - DNA, 75 bp, synthetic construct
  source 1..75: mol_type = other DNA
tcttcaacctgaccaacttactgaaaccgctgtcagaagaaaccgaaatcgccgtcctgaaagacaacaacctgg

SEQ ID NO: 109287 - DNA, 75 bp, synthetic construct
  source 1..75: mol_type = other DNA
gcattgcaatgggtaatggttctcagactacccgtggtgcgcagaccaactacactgcctacaacatggacgcac

SEQ ID NO: 109288 - DNA, 75 bp, synthetic construct
  source 1..75: mol_type = other DNA
ccttaaggacgattctctgctgtggaacaaagcggctggcgcattcagcgccgcgcacggtaccgaagctaccag

SEQ ID NO: 109289 - DNA, 75 bp, synthetic construct
  source 1..75: mol_type = other DNA
taccgcgataacgccatcacctacaaagcgcagcgagataaaaaagccagagagctggagctggcaaacgcaacc

SEQ ID NO: 109290 - DNA, 75 bp, synthetic construct
  source 1..75: mol_type = other DNA
aatctcacgcagagcatgttgcaaacatgggatgcttctgtaacacagaggaaacaaccaaacaggcattaatca

SEQ ID NO: 109291 - DNA, 75 bp, synthetic construct
  source 1..75: mol_type = other DNA
gcatcttaaatcaggtgtggtaaaactgtttgaccctctcactccggaaatgttacgggcgctaatccgcgaaat

SEQ ID NO: 109292 - DNA, 75 bp, synthetic construct
  source 1..75: mol_type = other DNA
caaaccggtccgtcaccgaagaaagaaacagtgatcccggagagaacgccggtcaaaagagagccgcctacgaat

SEQ ID NO: 109293 - DNA, 75 bp, synthetic construct
  source 1..75: mol_type = other DNA
tacggtatcacctcctcgctctccggggatgcggggaaagcggcgctgggcagtgccatcggcggcgggtttaag

SEQ ID NO: 109294 - DNA, 75 bp, synthetic construct
  source 1..75: mol_type = other DNA
accctccgggaacgactggtaatgatgcaggcccaacttgaaggtgctcagcaatacataaccgaacagtgttta

SEQ ID NO: 109295 - DNA, 75 bp, synthetic construct
  source 1..75: mol_type = other DNA
gctcgtcaaaggcaaatgtcctgtgccatcctcagccaaaacctccagcgcctccggcatgggcaatgatgccac

SEQ ID NO: 109296 - DNA, 75 bp, synthetic construct
  source 1..75: mol_type = other DNA
aagaagtggaagcattaatgcgcaatattgccgatgcctggaaagagtcgttactctccccttctttgattcagg

SEQ ID NO: 109297 - DNA, 75 bp, synthetic construct
  source 1..75: mol_type = other DNA
ctgttggcgaaagtacacctgctggagctgcggtaaagaaagaaagccaacaagccggaccgtcaccaaagaaag

SEQ ID NO: 109298 - DNA, 75 bp, synthetic construct
  source 1..75: mol_type = other DNA
gatcaatttatctcgtctggcgaaaccaagtgggatcgctatagcggtttaaccattcttctgccgcatggctat

SEQ ID NO: 109299 - DNA, 75 bp, synthetic construct
  source 1..75: mol_type = other DNA
tttgacctgccggacgagccaacaggcaatggcgcgccttcatggctgactgagccgacgccacagattaacggg

SEQ ID NO: 109300 - DNA, 75 bp, synthetic construct
  source 1..75: mol_type = other DNA
caaagctgatggctctatcgactacagcaacatcactctcggtggtggtaacggcggtacgactcgcatcagcaa

SEQ ID NO: 109301 - DNA, 75 bp, synthetic construct
  source 1..75: mol_type = other DNA
gagtgctgagcgcactggttagagcgcgactgtttatgcaggacaacaatcagcaaggcaaaggcgtctctttgt

SEQ ID NO: 109302 - DNA, 75 bp, synthetic construct
  source 1..75: mol_type = other DNA
caggtctattacgacgtactggaagcccgtaagcagcgtgagtgtgaagatgaggtagcgattgttcgcctggag

SEQ ID NO: 109303 - DNA, 75 bp, synthetic construct
  source 1..75: mol_type = other DNA
accacttccgctacggctacgtggtggacttcgccgacatccgccaggaatttgacgctaccaacaaagcctact

SEQ ID NO: 109304 - DNA, 75 bp, synthetic construct
  source 1..75: mol_type = other DNA
gcggcccttctttatttccacagggtgaggaggatatttttttcattcttgcatttattatttcatcacctgcag

SEQ ID NO: 109305 - DNA, 75 bp, synthetic construct
  source 1..75: mol_type = other DNA
taaaaatccccgtcatcctccacctgatacggctgggctaccgctacctgtctctgaaagaacaacactgggaca

SEQ ID NO: 109306 - DNA, 75 bp, synthetic construct
  source 1..75: mol_type = other DNA
tgaacgccagtgcgaagtgttcctcgatccacacgatccctcagtgatcgaggaagccctgaaacaaggtattcc

SEQ ID NO: 109307 - DNA, 75 bp, synthetic construct
  source 1..75: mol_type = other DNA
tgtccgcagccatttgtctggccgtatccggtgcgcctgcatgggcgtctgaacatcagtccacgctgaacgcgg

SEQ ID NO: 109308 - DNA, 75 bp, synthetic construct
  source 1..75: mol_type = other DNA
ccgcgcacggcaccgaagccaccagcaaaatcactaacgtcaccgctggcaacctgactgccagcagcactgacg

SEQ ID NO: 109309 - DNA, 75 bp, synthetic construct
  source 1..75: mol_type = other DNA
taacgggaaatacactgcacaggacgccaccacagcacgaaaaggccttgttcagctgagtagcgccatcaacag

SEQ ID NO: 109310 - DNA, 75 bp, synthetic construct
  source 1..75: mol_type = other DNA
gtgagcagagtcgccgcgattatttatgttctggttatttgcatcatcgtctgcctgttgtgggcggtcaatcat

SEQ ID NO: 109311 - DNA, 75 bp, synthetic construct
  source 1..75: mol_type = other DNA
tttatccatctaattagaagcaatgctatagcatccacacctgtatatgacaattattttaataacactactgct

SEQ ID NO: 109312 - DNA, 75 bp, synthetic construct
  source 1..75: mol_type = other DNA
tctgcggttacgatctcaggttggatggcgcgctggttggtcttgaagcggcgcatattcactggaaagcgtatg

SEQ ID NO: 109313 - DNA, 75 bp, synthetic construct
  source 1..75: mol_type = other DNA
ttaatcggatagcggttatcgggcttgcagttgtcgcagccgctacgcaggcaggtgtgccgccggttaagtttt

SEQ ID NO: 109314 - DNA, 75 bp, synthetic construct
  source 1..75: mol_type = other DNA
agcaatatgcgtcaatcattactcatgggcgaacattattccgtcgaaatagaaaatgaagaaataattttagat

SEQ ID NO: 109315 - DNA, 75 bp, synthetic construct
  source 1..75: mol_type = other DNA
ttcctgtgcgggtttctgctgaagaagggctaacggttattgttccaactcaggattataccgtcggtcaaacaa

SEQ ID NO: 109316 - DNA, 75 bp, synthetic construct
  source 1..75: mol_type = other DNA
taaaactacgcttgccaacatcgtcgccaatgaaatgggcgttaatttacgcacgacttctggtccggtgctgga

SEQ ID NO: 109317 - DNA, 75 bp, synthetic construct
  source 1..75: mol_type = other DNA
ttgtaaataaaatcccaacagtttgctcagacattgaagtgttcagagagttatttggctcaggagaagttgaat

SEQ ID NO: 109318 - DNA, 75 bp, synthetic construct
  source 1..75: mol_type = other DNA
aggtacgccacgtatcgctaatcgtttgctgcgtcgtgtgcgtgattttgccgaagtgaagcatgatggcaccat

SEQ ID NO: 109319 - DNA, 75 bp, synthetic construct
  source 1..75: mol_type = other DNA
caggctggcatttctatagtcagcgaaatacagataactcggtgatatttgctgttaacggtcagatacaaccca

SEQ ID NO: 109320 - DNA, 75 bp, synthetic construct
  source 1..75: mol_type = other DNA
caacgccaactgtccaggctccttgcgtaaagcccccatcacctccggcgtggataatgcaaccggtccccgact

SEQ ID NO: 109321 - DNA, 75 bp, synthetic construct
  source 1..75: mol_type = other DNA
gcagtacgcatttaatgcgccgtctaatgcagttggtggaaagtggtatccagttattttccggcgttccacagg

SEQ ID NO: 109322 - DNA, 75 bp, synthetic construct
  source 1..75: mol_type = other DNA
ggcagacaccgctgaacgggattatttcatcctcagagaacggttgatgacaatgcagaagcaggtgggaggggc

SEQ ID NO: 109323 - DNA, 75 bp, synthetic construct
  source 1..75: mol_type = other DNA
aacgaaacggccagtcgttgcatcttccttatgacaaatcgctatggcctaccgaacaatacgtcggctggcatc

SEQ ID NO: 109324 - DNA, 75 bp, synthetic construct
  source 1..75: mol_type = other DNA
aaagccgccgaggacatcatcaacggcgcttcatttgattacaacctgccgtgtatcgctgaaaaaagcctgatt

SEQ ID NO: 109325 - DNA, 75 bp, synthetic construct
  source 1..75: mol_type = other DNA
tttgacctgccggacgagccaacaggcgatgacgcgccttcatggctgactgagccgacgccacagattaacggg

SEQ ID NO: 109326 - DNA, 75 bp, synthetic construct
  source 1..75: mol_type = other DNA
atattctcgttatagcaatagtgatgatatatcactgaaattacgttcagatacctttgctgaattcatttccta

SEQ ID NO: 109327 - DNA, 75 bp, synthetic construct
  source 1..75: mol_type = other DNA
gaaatctacgaacctctgcacagtttactggaacgttttggtccacagcgttcacagtaccgacctgatatgccg

SEQ ID NO: 109328 - DNA, 75 bp, synthetic construct
  source 1..75: mol_type = other DNA
ttcgtgaacttctgtctcagtacgacttcccgggcgacgacactccgatcgttcgtggttctgctctgaaagcgc

SEQ ID NO: 109329 - DNA, 75 bp, synthetic construct
  source 1..75: mol_type = other DNA
acgcctcaggtgcattcaccgccaaacacggcaccgaagccaccaacaaaatcactaacgttacggcaggtgaac

SEQ ID NO: 109330 - DNA, 75 bp, synthetic construct
  source 1..75: mol_type = other DNA
acatcactaacctgacggattccgttggcgaccttaaggacgattctctgctgtggaacaaagcggctggcgcat

SEQ ID NO: 109331 - DNA, 75 bp, synthetic construct
  source 1..75: mol_type = other DNA
ccgactggcagaagccgctgaacgggattatttcatcctcagagaacggctgatggcaatgcagaagcaactgga

SEQ ID NO: 109332 - DNA, 75 bp, synthetic construct
  source 1..75: mol_type = other DNA
actcatgcgggctctaaaaaatacacgattggaagtgagttgattaaaggaaacaaccccagagcggggggatta

SEQ ID NO: 109333 - DNA, 75 bp, synthetic construct
  source 1..75: mol_type = other DNA
cgggattatttcatcctcagagaacggttgatgacaatgcagaagcaggtggaaggggcgcaggaatatatccgc

SEQ ID NO: 109334 - DNA, 75 bp, synthetic construct
  source 1..75: mol_type = other DNA
tatcggccacgttgaccagggtaaaaccactctgaccgctgcaatcaccaccgtactggctaaaacctacggcgg

SEQ ID NO: 109335 - DNA, 75 bp, synthetic construct
  source 1..75: mol_type = other DNA
ttaggtaacagagcgtcatcattaggagaaaaatcggtagcactaggggtagacagtaaggccactggtgacgat

SEQ ID NO: 109336 - DNA, 75 bp, synthetic construct
  source 1..75: mol_type = other DNA
actgcgcctctgggcatatggttttgttggtggtgtagcccttttacacattctctggaaagtattccaggcata

SEQ ID NO: 109337 - DNA, 75 bp, synthetic construct
  source 1..75: mol_type = other DNA
gatcatgaagatgaaagtggatcagtttttaacccagtcgaacatcgaccacacggtaaatagctgcgcggttgg

SEQ ID NO: 109338 - DNA, 75 bp, synthetic construct
  source 1..75: mol_type = other DNA
acgtgaaatacgcgcgtacccacaaacgcctgcgcgagcgcggcggcctgagcgagccggagcgtaaaatcttcg

SEQ ID NO: 109339 - DNA, 75 bp, synthetic construct
  source 1..75: mol_type = other DNA
gcagggaccttcactgcggaccggaagaacgctgagaaagttctgtccactctcggagactgcagcaacgactga

SEQ ID NO: 109340 - DNA, 75 bp, synthetic construct
  source 1..75: mol_type = other DNA
actggcgctctgtacgttgcaccatgacgcgtttgatatgggggcattcgggctggatgagagtatgaccatccg

SEQ ID NO: 109341 - DNA, 75 bp, synthetic construct
  source 1..75: mol_type = other DNA
gcatagccccggcacgtaacgccgcccgtggcgaaacggcgattggtattggcttcctgcatgactactcgctgg

SEQ ID NO: 109342 - DNA, 75 bp, synthetic construct
  source 1..75: mol_type = other DNA
ttgctatccgctattatccctatgggtttacatacgattcaacggcaccatcaattttttgccgtgacaacaagt

SEQ ID NO: 109343 - DNA, 75 bp, synthetic construct
  source 1..75: mol_type = other DNA
tcagcgccaaacacggtgataccaatagcattattactaacgttgcagacggtacaatttcctctaccagcagcg

SEQ ID NO: 109344 - DNA, 75 bp, synthetic construct
  source 1..75: mol_type = other DNA
tgaaattcattgttccagcagtagtggtggcggggctggctgtgggcctgaaaagctgtaaaggagagcgaccac

SEQ ID NO: 109345 - DNA, 75 bp, synthetic construct
  source 1..75: mol_type = other DNA
tgggcaatgatgccgccgtcgaactctctccggttgctggacgaaacgttctcggtatcagagacggaatcatca

SEQ ID NO: 109346 - DNA, 75 bp, synthetic construct
  source 1..75: mol_type = other DNA
actaacctgaatgcctacggtaccgccggaattaacgccggggcatggcgcttacgcagtgattaccagcttaat

SEQ ID NO: 109347 - DNA, 75 bp, synthetic construct
  source 1..75: mol_type = other DNA
gaagaacgcaagatcggcatttataccggtcaggtctggcacagtgatttaatgttgaaagccgatttcgatgtt

SEQ ID NO: 109348 - DNA, 75 bp, synthetic construct
  source 1..75: mol_type = other DNA
gctaagctcgcatattagcccggtagtgccagtgataatcggttcgaaagaggaagggctacgcatctggcgcga

SEQ ID NO: 109349 - DNA, 75 bp, synthetic construct
  source 1..75: mol_type = other DNA
cgtgaataacaacgacgcggtgaactatgcgcagttgaagcaaagtgtgcaggaaacgaagcaatacaccgatca

SEQ ID NO: 109350 - DNA, 75 bp, synthetic construct
  source 1..75: mol_type = other DNA
gcgcctgcaagtcgctgccacctgtgcaaagtcaacgaccagagccagcggcatgggcgatggagaaagtccaag

SEQ ID NO: 109351 - DNA, 75 bp, synthetic construct
  source 1..75: mol_type = other DNA
acacgggattatttcaccctcagagagcggctgatgacgatgcagaagcaactggaaggggcgcaggaatatatc

SEQ ID NO: 109352 - DNA, 75 bp, synthetic construct
  source 1..75: mol_type = other DNA
taaagaaatcgaacagcaacaagtcaccgaaatcgccaaccaaacgaaatcgatcgccattgcggccaaatcgga

SEQ ID NO: 109353 - DNA, 75 bp, synthetic construct
  source 1..75: mol_type = other DNA
ctttgtagcgccaatattaacttcagtatttacactattttgtgggacgacttatgtcgctttctccttataccc

SEQ ID NO: 109354 - DNA, 75 bp, synthetic construct
  source 1..75: mol_type = other DNA
cgggattatttcaccctcagagagcggttgatgatgatgcagaagcagctggaaggggcgcaggaatatatccgc

SEQ ID NO: 109355 - DNA, 75 bp, synthetic construct
  source 1..75: mol_type = other DNA
gtcggcgttgaagatgatgtggatattatcgttggtactttcagtaaaagtctggcctcgattggcggttttgct

SEQ ID NO: 109356 - DNA, 75 bp, synthetic construct
  source 1..75: mol_type = other DNA
aaattgcgggggaagcagccaaaactatcagataaacaacaaaaagaactttgccgtatgcatgaaactgggcag

SEQ ID NO: 109357 - DNA, 75 bp, synthetic construct
  source 1..75: mol_type = other DNA
cgccaatatcatgctttactgcctgtttatttttttctggattctcgttggtctggttttatgggtaaaaataag

SEQ ID NO: 109358 - DNA, 75 bp, synthetic construct
  source 1..75: mol_type = other DNA
aacgccacctgtccaggtcccgtgcgtgaagccaccggcaccgcccgcgtggataatgcaaccggcccccaactg

SEQ ID NO: 109359 - DNA, 75 bp, synthetic construct
  source 1..75: mol_type = other DNA
ccgacagccacgccagtatttatgacgcctgttctctcggcggcgcggagattattcgtttccgccataatgacg

SEQ ID NO: 109360 - DNA, 75 bp, synthetic construct
  source 1..75: mol_type = other DNA
tgtgccggtgctatccgggtcacagaccacttcaggggataacgtctttaataccgtcgaacgcaaaacggtggg

SEQ ID NO: 109361 - DNA, 75 bp, synthetic construct
  source 1..75: mol_type = other DNA
ccatcattaagaaaaattaacttttccgcaaaagatcgtgccgacgcattaaattctcaggcaaaatggtttcct

SEQ ID NO: 109362 - DNA, 75 bp, synthetic construct
  source 1..75: mol_type = other DNA
caaagtactcgagagaattagccaatgcgcaagctgaaaatgaaactctgcgcgctgatgttgccgctggccgta

SEQ ID NO: 109363 - DNA, 75 bp, synthetic construct
  source 1..75: mol_type = other DNA
ggacccaccagtgtggataatgcaaccatcccccgactggcagacaccgctgaacgggattatttcaccctcaga

SEQ ID NO: 109364 - DNA, 75 bp, synthetic construct
  source 1..75: mol_type = other DNA
tagcgccacacgggctggctcagaactatctaataggatcagagagcatagtagaaatatagcgaaagcagagaa

SEQ ID NO: 109365 - DNA, 75 bp, synthetic construct
  source 1..75: mol_type = other DNA
acacgcctccgttcaaggttagtgactttgcaccgcacatcaacgaagcgccattatctcttgaagaagctatga

SEQ ID NO: 109366 - DNA, 75 bp, synthetic construct
  source 1..75: mol_type = other DNA
gctggtgtatcacatttctggctgtggtttttgcccgaactgccgtcgcggctttcctatctcttgtactggcga

SEQ ID NO: 109367 - DNA, 75 bp, synthetic construct
  source 1..75: mol_type = other DNA
gggacgggtggtttacattggtgaaaccggaaaagtggagttcgaggtcagcgccgatctgatgcaccatcaacg

SEQ ID NO: 109368 - DNA, 75 bp, synthetic construct
  source 1..75: mol_type = other DNA
atgggtgattatttaaaaccgccaccgccaccgcgaacaaaagagcaagttctaagagaagcccgtgatcaaatc

SEQ ID NO: 109369 - DNA, 75 bp, synthetic construct
  source 1..75: mol_type = other DNA
ttaaaaagggggcctatatatacactatttcacagaacagataataaagatattatgaatatgcaatttctcatt

SEQ ID NO: 109370 - DNA, 75 bp, synthetic construct
  source 1..75: mol_type = other DNA
ttattaccgtctccgaggtggaatcgacaagataaccgcgcaggttaactacatgcaggactacatcaggacgca

SEQ ID NO: 109371 - DNA, 75 bp, synthetic construct
  source 1..75: mol_type = other DNA
catttcatattagcacctgttaatgctccagaacatattgttaaagattctacagcattgtggaatgaagttgaa

SEQ ID NO: 109372 - DNA, 75 bp, synthetic construct
  source 1..75: mol_type = other DNA
atgcgtaaagtttgtgcagccattttgtctgcagccatctgtctggccgtatccgtcgcgcctgcatgggcgtct

SEQ ID NO: 109373 - DNA, 75 bp, synthetic construct
  source 1..75: mol_type = other DNA
ttattaccgcctccgaagtggaatcgacaagataactgcacaggttaattacctacaggaatacatcagaactca

SEQ ID NO: 109374 - DNA, 75 bp, synthetic construct
  source 1..75: mol_type = other DNA
attactgctatgttaattattatttgtgttattagtgctgtcagtatattacaagctgttggaggattagattat

SEQ ID NO: 109375 - DNA, 75 bp, synthetic construct
  source 1..75: mol_type = other DNA
gcgggcaatgtccgtgtttgcctgtgagttcgatacccgctgggtggagcacgcgctggagaacggcaaatggcc

SEQ ID NO: 109376 - DNA, 75 bp, synthetic construct
  source 1..75: mol_type = other DNA
ctttatccgaagggaactggctaaagcagaacctgaagttaaatatgacgctgaatttaagcggtacgggtgatt

SEQ ID NO: 109377 - DNA, 75 bp, synthetic construct
  source 1..75: mol_type = other DNA
ggaatccagccaccgggagttacagcgttgccagcgaaacggcgaagagtcgtggaaaaaagagcgggcgtagta

SEQ ID NO: 109378 - DNA, 75 bp, synthetic construct
  source 1..75: mol_type = other DNA
tggataatgcaactggcccccaactggcagacaccgttacacgggattatttcaccctcagagagcggctgatga

SEQ ID NO: 109379 - DNA, 75 bp, synthetic construct
  source 1..75: mol_type = other DNA
tcattgccctgctggtggcctgtggtgcgcttagtctggggctgaatcattaccgcgataacgccattacctaca

SEQ ID NO: 109380 - DNA, 75 bp, synthetic construct
  source 1..75: mol_type = other DNA
caatccgttggtggtgatatgaaccgtgttctgtgtgtggtgattattgtcctgctggtagcctgtggtgtgctt

SEQ ID NO: 109381 - DNA, 75 bp, synthetic construct
  source 1..75: mol_type = other DNA
caggctagatcatgtaaatttctattaacagtgtcaggtatctgcacgcttatatcatttgctttattaccaagt

SEQ ID NO: 109382 - DNA, 75 bp, synthetic construct
  source 1..75: mol_type = other DNA
gcgaattggtacgcaatacggcgcagatatctgtggtctggatgaattaagagagcaacagcatgaacaaaatga

SEQ ID NO: 109383 - DNA, 75 bp, synthetic construct
  source 1..75: mol_type = other DNA
gccgcaggtcgcttactggcactgcaatccaccgctgactgggggcgggtggtttacattggtgaaaccggaaaa

SEQ ID NO: 109384 - DNA, 75 bp, synthetic construct
  source 1..75: mol_type = other DNA
ctgagcatgtatatagaaacgatgcatttttagagcttctaaaagacgccgtacgtttttttaatgggacacctg

SEQ ID NO: 109385 - DNA, 75 bp, synthetic construct
  source 1..75: mol_type = other DNA
catttcatattagcaccagttaatgctccagaacatatcgtgaaagactctacagcattgtggaatgaagttgaa

SEQ ID NO: 109386 - DNA, 75 bp, synthetic construct
  source 1..75: mol_type = other DNA
gacagcacgatgagcgcgcaggactccatgatggccagccgtatgcgcagcgcagtggaaagctatgcgaaggcg

SEQ ID NO: 109387 - DNA, 75 bp, synthetic construct
  source 1..75: mol_type = other DNA
ggtgataattttgaacggttacttggtgcttcccataccgaaattgaagcagccatgcgaggcatgacggacgct

SEQ ID NO: 109388 - DNA, 75 bp, synthetic construct
  source 1..75: mol_type = other DNA
ggtgataattttgaacggttacttggtgcttctcattcagaggcagaggcgattatgcgcggtatgacgaatgct

SEQ ID NO: 109389 - DNA, 75 bp, synthetic construct
  source 1..75: mol_type = other DNA
attctgaattattacaatagcgtcaggcctcaccattataacggagggctgacgccggaagagtcagagaacaga

SEQ ID NO: 109390 - DNA, 75 bp, synthetic construct
  source 1..75: mol_type = other DNA
tttattacctggatattaactcacctagttacagagtgatttatgatcaactgacgtttcgattaagttattttg

SEQ ID NO: 109391 - DNA, 75 bp, synthetic construct
  source 1..75: mol_type = other DNA
atccgcaatttctttctgcttgttgtctggctacccctgaatttttcgccattttggcctcagccgtgggtgatg

SEQ ID NO: 109392 - DNA, 75 bp, synthetic construct
  source 1..75: mol_type = other DNA
agtgatccactatatcaggggcttcgctgcaaagacctgaacttcttcgtttacttgatgatgctgcgaaaggcg

SEQ ID NO: 109393 - DNA, 75 bp, synthetic construct
  source 1..75: mol_type = other DNA
atgacaccactgacggtgagttgctcggtgcattgtcaattggtgatgacggtaaataccgtcaaatcatcaacg

SEQ ID NO: 109394 - DNA, 75 bp, synthetic construct
  source 1..75: mol_type = other DNA
gctgggtggccgtgtttgtgcttatcagcctgctggttaatgtccgtacatcggtgcagattattgataacagtg

SEQ ID NO: 109395 - DNA, 75 bp, synthetic construct
  source 1..75: mol_type = other DNA
gcggatatcatcatcgcttctacgcacattgcgggcgaaatcaccgtgaccggcaacaaatatgtggttggcgtg

SEQ ID NO: 109396 - DNA, 75 bp, synthetic construct
  source 1..75: mol_type = other DNA
gtgcgtccggtggggctgaagttcctgatgtaatgggcgaggacaatttttttattgagggtacgccatttctta

SEQ ID NO: 109397 - DNA, 75 bp, synthetic construct
  source 1..75: mol_type = other DNA
tttatttacattggataacgctgcttttcgttgcaataacctatgccgcgatggaactagactggccccctgaat

SEQ ID NO: 109398 - DNA, 75 bp, synthetic construct
  source 1..75: mol_type = other DNA
actactattggtcagtggagagataatcttcgggttggggtgttatcattcaataaagccaaaaatccccctatg

SEQ ID NO: 109399 - DNA, 75 bp, synthetic construct
  source 1..75: mol_type = other DNA
gagccgcctacgaataccggcagtcagctgccaactttcaattttaatcctggaaaaaagaaggggactaactaa

SEQ ID NO: 109400 - DNA, 75 bp, synthetic construct
  source 1..75: mol_type = other DNA
tttgacctgccggaagagccaacaggccatgccgcgccttcatggctgactgagccgacgccacagattaacggg

SEQ ID NO: 109401 - DNA, 75 bp, synthetic construct
  source 1..75: mol_type = other DNA
aatcagatctctttgcgatgtttatgcaacatgcattttctttgcttaaagaaaatggatttaatgcacaaataa

SEQ ID NO: 109402 - DNA, 75 bp, synthetic construct
  source 1..75: mol_type = other DNA
ttaaaagcgctggagcaacagtattctgggaaagtgaagtgtgtatttattgatcctccatataacactggaagc

SEQ ID NO: 109403 - DNA, 75 bp, synthetic construct
  source 1..75: mol_type = other DNA
aaccgctcactgaacgtttcgccgaagtggcccgccgtacgcagctcgctttcggtgaagccagtgagccgcctt

SEQ ID NO: 109404 - DNA, 75 bp, synthetic construct
  source 1..75: mol_type = other DNA
ggtgtgtgatgttttatggataaataaccgtaaggatatagactctgccaataaagcaatagagtcatattctct

SEQ ID NO: 109405 - DNA, 75 bp, synthetic construct
  source 1..75: mol_type = other DNA
gtgtaatagttaaaggttctcgtaacaccagcgtatcggaagaaggtgttgtgattggttatgacaccacggatg

SEQ ID NO: 109406 - DNA, 75 bp, synthetic construct
  source 1..75: mol_type = other DNA
cagaagtggaaactttaatgcgcaatcttgccgatgcctggaaagagtctctactctccccttcattgattcagg

SEQ ID NO: 109407 - DNA, 75 bp, synthetic construct
  source 1..75: mol_type = other DNA
ctcactttcaggctgagttattttgcgaaagagcgcaccaagtcatacagccgagatgaacgctcgtttggctgc

SEQ ID NO: 109408 - DNA, 75 bp, synthetic construct
  source 1..75: mol_type = other DNA
cgaagtcgggtgagggctgtccatgctctcagtcgtggcgcagtcggtagccgggcaatcagtcagatgttgcgc

SEQ ID NO: 109409 - DNA, 75 bp, synthetic construct
  source 1..75: mol_type = other DNA
tggtcttgcggaaagaaccgccagattggtcatgcaggcagctgttaaatattgctcaccagagttggagtcaaa

SEQ ID NO: 109410 - DNA, 75 bp, synthetic construct
  source 1..75: mol_type = other DNA
acaaaattgtaggcctgtcctggttagtcctgctcggcattgcatgctggggcggtttagttcgctacctgatcg

SEQ ID NO: 109411 - DNA, 75 bp, synthetic construct
  source 1..75: mol_type = other DNA
ctacttgctaattgcgatactattttcttttttgctgccggaaattcaaaccctctggccgtttatggtgcttat

SEQ ID NO: 109412 - DNA, 75 bp, synthetic construct
  source 1..75: mol_type = other DNA
ttgataaaaaagtgtatgaaacctggataacgctggcgggagacgtctggagattgatgctcacaccttatccac

SEQ ID NO: 109413 - DNA, 75 bp, synthetic construct
  source 1..75: mol_type = other DNA
tgcagtggcactgggctgcggcagaaccaccaggtgaagcctggcatgacggaaagatccttggccacctgttta

SEQ ID NO: 109414 - DNA, 75 bp, synthetic construct
  source 1..75: mol_type = other DNA
tgagctaaagctggcgaacgtgacaattactgatatgcaggtacgccagcgtgatgtcgctgcacttgatgccag

SEQ ID NO: 109415 - DNA, 75 bp, synthetic construct
  source 1..75: mol_type = other DNA
atgaaaccaagcacacactgcgtttattgcggtgttctcatgaataaggttgaaaatcacccccactgccgctca

SEQ ID NO: 109416 - DNA, 75 bp, synthetic construct
  source 1..75: mol_type = other DNA
cagagtggcggaaaaacctggcattattatgcccagcagctatttggtggacgccctgatccgaacctgttgttc

SEQ ID NO: 109417 - DNA, 75 bp, synthetic construct
  source 1..75: mol_type = other DNA
caaggtatataaaagaacaaaagaaaatgaggtagcaagaaaagacgtgtctgatatcgacccctatctaaaagc

SEQ ID NO: 109418 - DNA, 75 bp, synthetic construct
  source 1..75: mol_type = other DNA
ttaaaaaaacaggccgaagatttaatacaatcaacgcaattttttaatgccgaagtgcttgagtccattctcaaa

SEQ ID NO: 109419 - DNA, 75 bp, synthetic construct
  source 1..75: mol_type = other DNA
gatatgctggtgctgttgtttatgtataaaaacaaggcgcattacgagaaataccgcacccgtgaagagtttctc

SEQ ID NO: 109420 - DNA, 75 bp, synthetic construct
  source 1..75: mol_type = other DNA
atgaaaaaagttgttctttgcagtatttcatttgcctcatttcttttagcttttggggctaatgctgccaatcag

SEQ ID NO: 109421 - DNA, 75 bp, synthetic construct
  source 1..75: mol_type = other DNA
ttattgtcctgctggtagcctgtggtgcgcttagtctggggctgaatcattaccgcgataacgccattacctaca

SEQ ID NO: 109422 - DNA, 75 bp, synthetic construct
  source 1..75: mol_type = other DNA
ttgataaaaaagtgtatgaaacctggataacgctggcgggagacgtctggacattgatgctcacaccttatgcac

SEQ ID NO: 109423 - DNA, 75 bp, synthetic construct
  source 1..75: mol_type = other DNA
gttaactgtgagccaaataaaagtgtcaaagtaactttttctggagcaacgattgctagtgctgcaaatgaactg

SEQ ID NO: 109424 - DNA, 75 bp, synthetic construct
  source 1..75: mol_type = other DNA
acagcaggcgcagtcggcgctgagtggtgtggacaaaagaatattgcaggtgctctggataccgtttccgggcag

SEQ ID NO: 109425 - DNA, 75 bp, synthetic construct
  source 1..75: mol_type = other DNA
atatctagggtgtgtgatgttttatggataaataaccgtaaggatatagattctgctaataaagcaatagagtca

SEQ ID NO: 109426 - DNA, 75 bp, synthetic construct
  source 1..75: mol_type = other DNA
tcggtaacctcgcgcatacaactgggcagtgatgtgattgtctgcgctgaaatggacgaacattggggctacgtc

SEQ ID NO: 109427 - DNA, 75 bp, synthetic construct
  source 1..75: mol_type = other DNA
taattaaaaaattaatctctagatttaaggttgtaagtgccagtgagattatggaaagagctcgctctgatgcta

SEQ ID NO: 109428 - DNA, 75 bp, synthetic construct
  source 1..75: mol_type = other DNA
cgttctttgtttttgaaacgctcaccgcgcaacgcttacacccaatgcaatatttgctggtggggctttcattgg

SEQ ID NO: 109429 - DNA, 75 bp, synthetic construct
  source 1..75: mol_type = other DNA
ggacgcgttgtggcaaggcaaccacctttagattctgctggggatataagtctagatgatgcctgtgtaaattat

SEQ ID NO: 109430 - DNA, 75 bp, synthetic construct
  source 1..75: mol_type = other DNA
ggtaagcaaccgaaagatgccaccctgacggcgctggccgggcttgctactgcggcagacaggtttccgtatttt

SEQ ID NO: 109431 - DNA, 75 bp, synthetic construct
  source 1..75: mol_type = other DNA
agacacctgcttctgtgaatacacatctcacggtcactgcggtgttctgtgcgagcatggcgtcgacaacgacgc

SEQ ID NO: 109432 - DNA, 75 bp, synthetic construct
  source 1..75: mol_type = other DNA
agcaaacttactggcataccgatcaacaggatcggctattacagtttggctacaacacgcaaattaaagatctct

SEQ ID NO: 109433 - DNA, 75 bp, synthetic construct
  source 1..75: mol_type = other DNA
cttaccgatcccgcattagcggaccgtaaaccgctatggcaatacgctgaaaaacttgacgatacctattgcgct

SEQ ID NO: 109434 - DNA, 75 bp, synthetic construct
  source 1..75: mol_type = other DNA
gcgctcgttttggtgtgctggtggcgggggtcgaacccgcatacatgatcagcctgtacaggctggcaccgactc

SEQ ID NO: 109435 - DNA, 75 bp, synthetic construct
  source 1..75: mol_type = other DNA
cggcggcctgggcgatgttaccggcccccgacttactgactccgctgaacgggattatttcaccctcagagagcg

SEQ ID NO: 109436 - DNA, 75 bp, synthetic construct
  source 1..75: mol_type = other DNA
attagatatagaggctgacctttctaaactcgctgatcacatcattattgtacttgaaagttattcttcttttac

SEQ ID NO: 109437 - DNA, 75 bp, synthetic construct
  source 1..75: mol_type = other DNA
ctctccggttgctggacgaaacgttctcggtatcagagacggaatcatcagcgaccaggctgcattgagaatgct

SEQ ID NO: 109438 - DNA, 75 bp, synthetic construct
  source 1..75: mol_type = other DNA
tgaacgccctccgctctcgaaatccatgttgctggaagattccccacagttgcagtctgtgttacccgctcactg

SEQ ID NO: 109439 - DNA, 75 bp, synthetic construct
  source 1..75: mol_type = other DNA
tgcaaagttctggattagccgcgcggtgagggttaacgaccgtctggaaattcatgatgttattgggccagacga

SEQ ID NO: 109440 - DNA, 75 bp, synthetic construct
  source 1..75: mol_type = other DNA
ttcctcctgtcactagtggcctgtcagggcaggaaaacaaaaaaaccgaagagcattaccggatttcaggaaaat

SEQ ID NO: 109441 - DNA, 75 bp, synthetic construct
  source 1..75: mol_type = other DNA
gaactgatggactacatcaccgccctggaagaggcgctggggatggaagcgaagaagaatatgatgccgatccag

SEQ ID NO: 109442 - DNA, 75 bp, synthetic construct
  source 1..75: mol_type = other DNA
ccatcaatggatcacaactttatgccatcagtaagtctgtatccgacaggcttggaggatatcatgatgatcctg

SEQ ID NO: 109443 - DNA, 75 bp, synthetic construct
  source 1..75: mol_type = other DNA
cgtaaaagttaccctgaccggaacagaagacagtggacaaccgggattcctcgctctggatggtacctccggcgc

SEQ ID NO: 109444 - DNA, 75 bp, synthetic construct
  source 1..75: mol_type = other DNA
ctctggcgactgcccttgagcgtaccggcagcgatgagccgctggcgctggtgaaagatttaaaagctaacggtg

SEQ ID NO: 109445 - DNA, 75 bp, synthetic construct
  source 1..75: mol_type = other DNA
aagatagatatgctgcattccatctggtttctataaatgcaccagatgaacatcgaaccagatatttaaagaaat

SEQ ID NO: 109446 - DNA, 75 bp, synthetic construct
  source 1..75: mol_type = other DNA
attttatttggtgtaacgataacggtcaaaactcgataaacttgattgaaaacggtgaattacatattactggtg

SEQ ID NO: 109447 - DNA, 75 bp, synthetic construct
  source 1..75: mol_type = other DNA
agaggcttaaacaccattgccttaggcacagccagtaatgcaactggtgataagagtcttgcgcttggtagtaat

SEQ ID NO: 109448 - DNA, 75 bp, synthetic construct
  source 1..75: mol_type = other DNA
gacgcatcaaatatgcggtgacgctggcgaaatacagaaccaatagtaatgaccagcaagaaagtaaatttgctc

SEQ ID NO: 109449 - DNA, 75 bp, synthetic construct
  source 1..75: mol_type = other DNA
cgctctggacaatgacgccctgttgtgggatgcaaccgctaattcaaatactggcgcattcagtgctgcacacgg

SEQ ID NO: 109450 - DNA, 75 bp, synthetic construct
  source 1..75: mol_type = other DNA
cgggtatctgttgagtagaggggttaaaaaaagagaaatcaacgacattgaaaccgttgatgaccttgccatagc

SEQ ID NO: 109451 - DNA, 75 bp, synthetic construct
  source 1..75: mol_type = other DNA
tggctcgctctatatgtccggtttgcccgctcagggagcgataactgtacgctggggcgaagctcccgatcaaat

SEQ ID NO: 109452 - DNA, 75 bp, synthetic construct
  source 1..75: mol_type = other DNA
ttaataacacgacgggggtgacctttgtgctgaatgatggcaataacagtcttaatttcagagcatggttacagg

SEQ ID NO: 109453 - DNA, 75 bp, synthetic construct
  source 1..75: mol_type = other DNA
ctagactgcatgcatagtgataaaataatttcactgactgaaagttatataaatattagctcagatgactggaat

SEQ ID NO: 109454 - DNA, 75 bp, synthetic construct
  source 1..75: mol_type = other DNA
tataagaactaaaataaagcaaatagtatattatcatcagtcattacctctttcggatacattattctcaccgtt

SEQ ID NO: 109455 - DNA, 75 bp, synthetic construct
  source 1..75: mol_type = other DNA
ttgtaaaccccgtaaaggcaacacccaaccgaccaagaaagagctgattgataaccaggtagcgggcggttttga

SEQ ID NO: 109456 - DNA, 75 bp, synthetic construct
  source 1..75: mol_type = other DNA
aaacatcgccactacccactggagccattgatgctctggcgggtgaactttctcgccgtattcaatatgcgtttc

SEQ ID NO: 109457 - DNA, 75 bp, synthetic construct
  source 1..75: mol_type = other DNA
cgaggggactgaaatcgatcttggtgctgatccgcatagttgtgatgatggtatccatgctgccgcaactggcgc

SEQ ID NO: 109458 - DNA, 75 bp, synthetic construct
  source 1..75: mol_type = other DNA
ccataatgaatttaccgtgaagcgactactgctgaggcccagaccctgcctaatgccgatgaacaaagattttcc

SEQ ID NO: 109459 - DNA, 75 bp, synthetic construct
  source 1..75: mol_type = other DNA
tcgactttaaccacccggcgatcgattccagcactcagcgctacgcgatgaacttctctgctgatgcttttatgc

SEQ ID NO: 109460 - DNA, 75 bp, synthetic construct
  source 1..75: mol_type = other DNA
tcgacgctgacgacctggcagcatcattttattgatgtcatcacagggctggcggtaggtatgttgattgactag

SEQ ID NO: 109461 - DNA, 75 bp, synthetic construct
  source 1..75: mol_type = other DNA
gccattcaccgatacgctgtatttcatcgacgcggataacccgcagcagctggcgtggatgaaggcgcagaagcc

SEQ ID NO: 109462 - DNA, 75 bp, synthetic construct
  source 1..75: mol_type = other DNA
gtgaaaggggatgaattagcctatgaatcctatagtgcgaaaggcgcaaccgtctcgctggaagcgggttacggc

SEQ ID NO: 109463 - DNA, 75 bp, synthetic construct
  source 1..75: mol_type = other DNA
gcaactctatgacacgagcaagtacattgctgatgccctgggtggtgacgcagaagttaacgctgacggcaccat

SEQ ID NO: 109464 - DNA, 75 bp, synthetic construct
  source 1..75: mol_type = other DNA
tcggttattggcgcaacaaaagaagataaacagcgcattagcgaaatttctccaggaaacgtgggaaagcgccga

SEQ ID NO: 109465 - DNA, 75 bp, synthetic construct
  source 1..75: mol_type = other DNA
cctactggatagataataaactaagaaatttatttattgatatgaaacctgtgagggattttatcaaggtaactg

SEQ ID NO: 109466 - DNA, 75 bp, synthetic construct
  source 1..75: mol_type = other DNA
ttatggacctgaaaataaaagtttcggaaaatttaccgtgtgaatgtttaaaaaaattttgtgctaattcatatt

SEQ ID NO: 109467 - DNA, 75 bp, synthetic construct
  source 1..75: mol_type = other DNA
atgagaattgaagtcaccatagcgaaaacttctccattacctgccggagccattgacgctctggcagttgaactt

SEQ ID NO: 109468 - DNA, 75 bp, synthetic construct
  source 1..75: mol_type = other DNA
ttgccggtgatgctgccgaaggcatgttggtcactatgccaaaacgctatgaccaggacccggcaaaccagggca

SEQ ID NO: 109469 - DNA, 75 bp, synthetic construct
  source 1..75: mol_type = other DNA
gcccgaacggtcagtcgtgattgtcggtgccggaactattggtctggaactggctgccagcgccacgcagcgcag

SEQ ID NO: 109470 - DNA, 75 bp, synthetic construct
  source 1..75: mol_type = other DNA
tatgtcccgtaccgtatcgaaacacctgatgggagaattattcgtggtgtaacagatgaacagggttacacgcag

SEQ ID NO: 109471 - DNA, 75 bp, synthetic construct
  source 1..75: mol_type = other DNA
atgaaaaacttctttatgcttatgatctagatggttatcttcccagtgaagtttcgactaaaaatattacactaa

SEQ ID NO: 109472 - DNA, 75 bp, synthetic construct
  source 1..75: mol_type = other DNA
tacggaagacagcgaacagccaggatttctggcgcttgacccggcttcgggtgcgcagggggtagggattggtat

SEQ ID NO: 109473 - DNA, 75 bp, synthetic construct
  source 1..75: mol_type = other DNA
gcattctgaaatcaatccagcaactcaaagtgaaaacgtcgtcaccggaacttgctattggacgtttgagcggcg

SEQ ID NO: 109474 - DNA, 75 bp, synthetic construct
  source 1..75: mol_type = other DNA
tgctggggcagtgccacgccctgcaccacgtgatgccgttcctgtttgaagcggtagatgacgaagcggaactgc

SEQ ID NO: 109475 - DNA, 75 bp, synthetic construct
  source 1..75: mol_type = other DNA
ggtttaacggagacactactcgatgacggtaacctgagctacagcgtgcaacagggatataacagcgaggggaaa

SEQ ID NO: 109476 - DNA, 75 bp, synthetic construct
  source 1..75: mol_type = other DNA
caatagttacagcgtgcccttttccagcgtgccattgctccagcgtcaggggcgaatcaaatatgcggtgacact

SEQ ID NO: 109477 - DNA, 75 bp, synthetic construct
  source 1..75: mol_type = other DNA
catcacttccagggcgcgatgattaaactggaagggcgtgttccttatgccgcagatcaaggacttatccgtggt

SEQ ID NO: 109478 - DNA, 75 bp, synthetic construct
  source 1..75: mol_type = other DNA
aacgtaggacagatgacaccgttttgtttgatgtatccggttctttgaccgtgcatggacctaacggaataaccg

SEQ ID NO: 109479 - DNA, 75 bp, synthetic construct
  source 1..75: mol_type = other DNA
caaatcatgccgacagcattgcaatgggtaatggttctcagactacccgtggtgcgcagaccaactacacagcct

SEQ ID NO: 109480 - DNA, 75 bp, synthetic construct
  source 1..75: mol_type = other DNA
ctttgcctgtccgcaaggtgggctaaaagggctggctatttccgctgcaacactgcttagcggcgtggtgtgggc

SEQ ID NO: 109481 - DNA, 75 bp, synthetic construct
  source 1..75: mol_type = other DNA
ctgaatttaaacagtggcgttaatttaggcccatggagattgcgcaacaattcaacatggagtcgtagtagtggc

SEQ ID NO: 109482 - DNA, 75 bp, synthetic construct
  source 1..75: mol_type = other DNA
gtggataatgacctgcgaccggaggcgggtagctacattgcgaaccttgcagcagcgaatacaatgttcaccacg

SEQ ID NO: 109483 - DNA, 75 bp, synthetic construct
  source 1..75: mol_type = other DNA
ttatcaccatgatggtcgggcgagagttaaccgcgctttaccctaatgaaccacataccaccggagatgaaatat

SEQ ID NO: 109484 - DNA, 75 bp, synthetic construct
  source 1..75: mol_type = other DNA
tggcagtgctatcacaaacgcaccgacaagaagcagccgctgccgcttcgtcagcaatgtgctcgtatagaggtg

SEQ ID NO: 109485 - DNA, 75 bp, synthetic construct
  source 1..75: mol_type = other DNA
acggttcacgtttgcaaccgaaccgactatcgccgggatagagatcagttgtgacttttggcataaacaacagtc

SEQ ID NO: 109486 - DNA, 75 bp, synthetic construct
  source 1..75: mol_type = other DNA
aatcggccctgaagcagttcagggcaaccgccgtcatcgactggctcgacgttgagattcgcaccgaacgccgca

SEQ ID NO: 109487 - DNA, 75 bp, synthetic construct
  source 1..75: mol_type = other DNA
gtctgcaacgtgctcgtatagaggcgatattacagggtgacgcgctacagcaacacggcttcggtcttctctccg

SEQ ID NO: 109488 - DNA, 75 bp, synthetic construct
  source 1..75: mol_type = other DNA
tggcaagaaaacgagctacacataaagaactcagagtgttcattcctgctgcgttaaaagcgcaattgcaggaga

SEQ ID NO: 109489 - DNA, 75 bp, synthetic construct
  source 1..75: mol_type = other DNA
tgatggttctagcttccatattcttactaccgatttaaaagattcttttggtagttggaataatcgcagaccatt

SEQ ID NO: 109490 - DNA, 75 bp, synthetic construct
  source 1..75: mol_type = other DNA
aaccttcccggctgacagtgacggtatcctgccgctgatggatgacgagtggtttgacgacgacatcacctctcg

SEQ ID NO: 109491 - DNA, 75 bp, synthetic construct
  source 1..75: mol_type = other DNA
gttggctcgaaaccggcgcttctgtatttccggtgctggctatcgtattgattgtgcgttcgtttatttatgaac

SEQ ID NO: 109492 - DNA, 75 bp, synthetic construct
  source 1..75: mol_type = other DNA
ccctgggcttactaagctgggcgggcttcctgggctgtacggcctactttgcctgcccgcaaggtgggctgaaag

SEQ ID NO: 109493 - DNA, 75 bp, synthetic construct
  source 1..75: mol_type = other DNA
caccgggcaccaatcatcgccaatacaacggcgacaacaacagtaaccaatttcttgataagcccggcaatcgta

SEQ ID NO: 109494 - DNA, 75 bp, synthetic construct
  source 1..75: mol_type = other DNA
atacaattcagaggcgcaattgggaagtcatatcaccgactttatgagcaagttatcccgataaaagatgagtta

SEQ ID NO: 109495 - DNA, 75 bp, synthetic construct
  source 1..75: mol_type = other DNA
atgagcagagtaaccgcgattatctccgctctggttatttgcatcatcgtctgcctgtcatgggcggtaaatcat

SEQ ID NO: 109496 - DNA, 75 bp, synthetic construct
  source 1..75: mol_type = other DNA
aacgtgacgaccaacaccaccaacatcgccactaacaccaccaacatcaccaacctgacggattccgttggcgac

SEQ ID NO: 109497 - DNA, 75 bp, synthetic construct
  source 1..75: mol_type = other DNA
gtgactcaaaaggatttttcgcagaatttgaacgattgggtgataataccattaaaaacaccttcttcgggaaac

SEQ ID NO: 109498 - DNA, 75 bp, synthetic construct
  source 1..75: mol_type = other DNA
ttctatggcgctgggagcaagtagcaaagctaacggcacagacagcattgccttaggcagactatctctcgccag

SEQ ID NO: 109499 - DNA, 75 bp, synthetic construct
  source 1..75: mol_type = other DNA
aaaggtggtagctatagaaagtggtacggcaatcatgattacgttgttaattgggagaatgatggagaaaaaata

SEQ ID NO: 109500 - DNA, 75 bp, synthetic construct
  source 1..75: mol_type = other DNA
ttggggtaacagtaatatcgctcgtgacaacgttttgagtatgaaagactcaaaaggattccttgctgaatttga

SEQ ID NO: 109501 - DNA, 75 bp, synthetic construct
  source 1..75: mol_type = other DNA
tccatgttaaagaagacaatgttatcactatatattcaataccatggaaaaagtatgtaatactgtatcgagaag

SEQ ID NO: 109502 - DNA, 75 bp, synthetic construct
  source 1..75: mol_type = other DNA
gaatgcctctatcaataccaaaatgaaaatatagacaactggtattcatcaccaagaaatcgtcatgaagttttg

SEQ ID NO: 109503 - DNA, 75 bp, synthetic construct
  source 1..75: mol_type = other DNA
cactggacaagatgttcgtaatggttggtttggttttggtgatggaacaaccaaagattttatttggtggaacga

SEQ ID NO: 109504 - DNA, 75 bp, synthetic construct
  source 1..75: mol_type = other DNA
tttctgcattggatgtggcaaaactcctgattgataccttaagtattattaaagaacgtttgccggtaggatctc

SEQ ID NO: 109505 - DNA, 75 bp, synthetic construct
  source 1..75: mol_type = other DNA
gagtttttagcggcaaaatggttagccgggatcgttgacaaagggctacccatgggacgtctgagaagtatgctg

SEQ ID NO: 109506 - DNA, 75 bp, synthetic construct
  source 1..75: mol_type = other DNA
aaaggtgtcgaaatgactcatgtcaataacgttcgattctatgttcatggtgaacgttggactgctagccaatct

SEQ ID NO: 109507 - DNA, 75 bp, synthetic construct
  source 1..75: mol_type = other DNA
aaagggctggcgatctccgctgcaacgctgctaagcggcgtggtgtgggcgatggtcattatttacggtagcgcg

SEQ ID NO: 109508 - DNA, 75 bp, synthetic construct
  source 1..75: mol_type = other DNA
aattctcagtcggtagtgcggatggtcaacgtcagatcactaacgtcgcagcaggttcggctgataccgatgcgg

SEQ ID NO: 109509 - DNA, 75 bp, synthetic construct
  source 1..75: mol_type = other DNA
ttgaaactcattgcttcagagggttacaatcccaaatggaagcaatttgattttttgatggtgggcgaaaactct

SEQ ID NO: 109510 - DNA, 75 bp, synthetic construct
  source 1..75: mol_type = other DNA
gaagacggtcaacgtcagatcaccaacgtcgcagcaggttcggcggataccgatgcggtcaacgtgggtcaattg

SEQ ID NO: 109511 - DNA, 75 bp, synthetic construct
  source 1..75: mol_type = other DNA
tgtccaggtcccgtgcgtgaagccaccggcaccgcccgcgtggataatgcaaccggcccccaactggcagacacc

SEQ ID NO: 109512 - DNA, 75 bp, synthetic construct
  source 1..75: mol_type = other DNA
ctttacaacccacaaaatctgctaatgctggctgaagcagttaaagaaggaaattggccccgtacaaggtctgaa

SEQ ID NO: 109513 - DNA, 75 bp, synthetic construct
  source 1..75: mol_type = other DNA
tatcaaaagattgattgatgacgtttcttctttttcctcatacgatgccggtgaagtatttgaacgtttattatt

SEQ ID NO: 109514 - DNA, 75 bp, synthetic construct
  source 1..75: mol_type = other DNA
gatcctgagcctcctgtaacaccagaaccccctgtgacaccggagccgcctgttacgccatctgttccacaacca

SEQ ID NO: 109515 - DNA, 75 bp, synthetic construct
  source 1..75: mol_type = other DNA
aatgaatggtgagctgaaagagtttgccaaaaataatttcccagatagtaagtctgatttgtttgctatgtttat

SEQ ID NO: 109516 - DNA, 75 bp, synthetic construct
  source 1..75: mol_type = other DNA
cgcgccccctatttttccagtctgttgattggcttagttggtgtgtatatgggtgtgcatggctttatgggcata

SEQ ID NO: 109517 - DNA, 75 bp, synthetic construct
  source 1..75: mol_type = other DNA
gacagccgtggacagttaactgcggtgaaagacacgcagggccatgaaacgcggtatgaatacaacgccgccggt

SEQ ID NO: 109518 - DNA, 75 bp, synthetic construct
  source 1..75: mol_type = other DNA
ggataccggctcaaactctgccgataacattggtggcgtatattacagaccggtgcagaaatacattaacgggac

SEQ ID NO: 109519 - DNA, 75 bp, synthetic construct
  source 1..75: mol_type = other DNA
tggccacgctgcgttgagcaattaagcagcatatacaacatcgcatctgcttacggtgtacttaagggtgtagct

SEQ ID NO: 109520 - DNA, 75 bp, synthetic construct
  source 1..75: mol_type = other DNA
agcgagcagaccgacagcacaggcaacgtgctggccgtcaatgccaccgcatctctccgggagtacatcggcgac

SEQ ID NO: 109521 - DNA, 75 bp, synthetic construct
  source 1..75: mol_type = other DNA
gggcgttcgcgcttgactgccttacttgctagacataaaacagtgcttttcgatgaacgtgagatctggaatctg

SEQ ID NO: 109522 - DNA, 75 bp, synthetic construct
  source 1..75: mol_type = other DNA
gttgttgatatcccgcaaaatacctggattgagcagccgtgggatatgggcgtggtgttcgttccgcctatctct

SEQ ID NO: 109523 - DNA, 75 bp, synthetic construct
  source 1..75: mol_type = other DNA
aaattgtatttgttgataaaggcatcatcaacaaaacaagtaccgatgccgtcaatggctcgcagatttttgcgc

SEQ ID NO: 109524 - DNA, 75 bp, synthetic construct
  source 1..75: mol_type = other DNA
accgcattatggatgttctggcgcacatggcgcggtgaacgaaactggcttgagaatatgcacgggcatgatcat

SEQ ID NO: 109525 - DNA, 75 bp, synthetic construct
  source 1..75: mol_type = other DNA
cattgccaactatgaagatcgttttgttatcccgaccagccatcgggaaatggcgggcgatgccttcgcagaacg

SEQ ID NO: 109526 - DNA, 75 bp, synthetic construct
  source 1..75: mol_type = other DNA
aatttccgcggcgatcattcttggtaccgctttctggatgttctggcgtacctggcgcggcgagcgaaactggct

SEQ ID NO: 109527 - DNA, 75 bp, synthetic construct
  source 1..75: mol_type = other DNA
gatttccgcggtgatcattattggcaccgcgttctggatgttctggcgtacctggcgcggcgaacgtaactggct

SEQ ID NO: 109528 - DNA, 75 bp, synthetic construct
  source 1..75: mol_type = other DNA
aaacgatagcgccgctcttggtaatggagccagaacatcaggaaataattccgtcgcgcttggtgcgggtgctct

SEQ ID NO: 109529 - DNA, 75 bp, synthetic construct
  source 1..75: mol_type = other DNA
tccagtacggccaacacaccgtgactctggaaaccggcatgatggctcgtcaggctactgccgctgttatggtta

SEQ ID NO: 109530 - DNA, 75 bp, synthetic construct
  source 1..75: mol_type = other DNA
aatgatccggacactgtgcttaaggactttattcgcaaacacatcgccgaaccgtcgctcgctaacgatgcgatg

SEQ ID NO: 109531 - DNA, 75 bp, synthetic construct
  source 1..75: mol_type = other DNA
ttctgacgaacaaaccagtcttaagttcaagctggcgctgttgcagtctcttcctgcagtaatcgagaaatccgt

SEQ ID NO: 109532 - DNA, 75 bp, synthetic construct
  source 1..75: mol_type = other DNA
gctttgccctgaataaatcctttggtctggaagcggcgaaatacacgtggatattccagccacaggcacaggcta

SEQ ID NO: 109533 - DNA, 75 bp, synthetic construct
  source 1..75: mol_type = other DNA
tattcagcaggcgtggatactggcgcagcgatatgatgcggtggtggcgaatccgccttatatgggtaatggtgg

SEQ ID NO: 109534 - DNA, 75 bp, synthetic construct
  source 1..75: mol_type = other DNA
gcgcgaaacatatctgggaagatttcatgcagtcgcatggtaaggcattaatccagacattgagcctgctcaaaa

SEQ ID NO: 109535 - DNA, 75 bp, synthetic construct
  source 1..75: mol_type = other DNA
aaaaaacatggtttaccgggaatcagagtaggaagttatcgctcatttttacattttctttgctacggaaaagta

SEQ ID NO: 109536 - DNA, 75 bp, synthetic construct
  source 1..75: mol_type = other DNA
atgggctcagaacgtcagcaaggccaacgacaaagtcgtgatggacgtttacgtaaataaggcagtggcagacac

SEQ ID NO: 109537 - DNA, 75 bp, synthetic construct
  source 1..75: mol_type = other DNA
ggtaaatttaccccccttttagttgaacacacccacaactatcttgataaagtatttgaaatacttgttatgctt

SEQ ID NO: 109538 - DNA, 75 bp, synthetic construct
  source 1..75: mol_type = other DNA
aatgtcgatgctgaaggtttcgattatatggaccgcaaattgttgctggcggtaatcgataagttctttggtggg

SEQ ID NO: 109539 - DNA, 75 bp, synthetic construct
  source 1..75: mol_type = other DNA
tcttttaagtacggagcatggaataaagctaactaatttcggacgctcctacgcttctggggtaattactaaaga

SEQ ID NO: 109540 - DNA, 75 bp, synthetic construct
  source 1..75: mol_type = other DNA
aactggatatcatgatcggtgaagggcccgcggcgcgttcgattaaaatcgatcttccaccgtttacccttattg

SEQ ID NO: 109541 - DNA, 75 bp, synthetic construct
  source 1..75: mol_type = other DNA
ggcgagggttttattgttctcactcaatattcggtattaatgccatttttagcggaaatctggggattggaacgg

SEQ ID NO: 109542 - DNA, 75 bp, synthetic construct
  source 1..75: mol_type = other DNA
aaacatgtattgattgccataaaggaattgcccactttccgccggaaataaaaatggatgacaacgcggtgcatg

SEQ ID NO: 109543 - DNA, 75 bp, synthetic construct
  source 1..75: mol_type = other DNA
tcagatacaaccaagcaactgggataacattgattccagatatgtgaaagatgttcggcttggctcacagcaata

SEQ ID NO: 109544 - DNA, 75 bp, synthetic construct
  source 1..75: mol_type = other DNA
ggttattgctggcgcaaaaagccttacataaaacgtcggatacagcattttgcctttcctgccactcgatgagta

SEQ ID NO: 109545 - DNA, 75 bp, synthetic construct
  source 1..75: mol_type = other DNA
aactatgaagatcggtttgtcatcccaaccagtcatcgggaaatggcgggtgatgcgtttggagagcgtaacggc

SEQ ID NO: 109546 - DNA, 75 bp, synthetic construct
  source 1..75: mol_type = other DNA
tttggttctgttttgtgcatttcacacctcctcaagttatcagttacttgttgatggggaccagattgttaaaga

SEQ ID NO: 109547 - DNA, 75 bp, synthetic construct
  source 1..75: mol_type = other DNA
tatgtatcgctatctcgctatcgccaactatgaagatcggtttgtcattccgaccagtcatcgggaaatggcggg

SEQ ID NO: 109548 - DNA, 75 bp, synthetic construct
  source 1..75: mol_type = other DNA
aaaacacattctgccactgtttcccaaacaccgctgctacgttgaaccgttctgcggggcggcggcgttgttctt

SEQ ID NO: 109549 - DNA, 75 bp, synthetic construct
  source 1..75: mol_type = other DNA
tgacatgcaggtgcgccagcgtgatgttgctgcgctcgatgcaaaatactcgagggagttagccgatgcgagagc

SEQ ID NO: 109550 - DNA, 75 bp, synthetic construct
  source 1..75: mol_type = other DNA
ggcagacaccgctgaacgggattatttcatcctcagagaacggttgatgacaatgcagaagcaactggaaggggc

SEQ ID NO: 109551 - DNA, 75 bp, synthetic construct
  source 1..75: mol_type = other DNA
caaaatcaccaacgtcatggccggtgacctgtcagataccagcaccgatgccgtcaacggctcgcaactgaaaac

SEQ ID NO: 109552 - DNA, 75 bp, synthetic construct
  source 1..75: mol_type = other DNA
gaaaggaatacttgtagagcatcatggtcatctctatatcaactctaacattttcgcaaaagggatgagtcatca

SEQ ID NO: 109553 - DNA, 75 bp, synthetic construct
  source 1..75: mol_type = other DNA
atccagcgcgcggcgcgcttctactatctgcaaaagctggcattcggcggcaaagtggaaagccgcacgttcggt

SEQ ID NO: 109554 - DNA, 75 bp, synthetic construct
  source 1..75: mol_type = other DNA
aaaaggtcttgttcagctaagtagtgccatcaacagcgaatctgagacgctcgcagcaacgccgaaggcagttaa

SEQ ID NO: 109555 - DNA, 75 bp, synthetic construct
  source 1..75: mol_type = other DNA
atgatgtccctgccgcgcctgtgcgaacactgcctcaatcccagttgcgtggcgacctgcccaagcggcgctatc

SEQ ID NO: 109556 - DNA, 75 bp, synthetic construct
  source 1..75: mol_type = other DNA
ttgatgaagcggtctgcgcagcacaccaggcctttttacgctttcaacagtgcccgcttaaaacccgtagcgcca

SEQ ID NO: 109557 - DNA, 75 bp, synthetic construct
  source 1..75: mol_type = other DNA
ctggcgcaaatgctcttgcctttgggcaaaatgcacaagcatcaaacacaaacactattgcattaggccagaaca

SEQ ID NO: 109558 - DNA, 75 bp, synthetic construct
  source 1..75: mol_type = other DNA
cttcaagaccaacaccgatggcgcagacgccaacgcgcagggtaaagacagtgttgcgattggttctggttccat

SEQ ID NO: 109559 - DNA, 75 bp, synthetic construct
  source 1..75: mol_type = other DNA
atgcgtttaaggtgctgtttccgtccggtaagggctttaagttcctggcggaagtgcgtcagcacacctggtcat

SEQ ID NO: 109560 - DNA, 75 bp, synthetic construct
  source 1..75: mol_type = other DNA
ctggttgagttaggactcattgagccatacggggaatatgttattggtcagcacgcaagaaaatacagaatgctt

SEQ ID NO: 109561 - DNA, 75 bp, synthetic construct
  source 1..75: mol_type = other DNA
ggccttcagtggaaggcgccgcacttcctttttttgccgagcccgttgcggccggctttcccagcccggccgcag

SEQ ID NO: 109562 - DNA, 75 bp, synthetic construct
  source 1..75: mol_type = other DNA
ttcgtcggggctgctggggtgagcataaaccgaatgctttccgcgtttaccgttattctgctggtggtctgtggt

SEQ ID NO: 109563 - DNA, 75 bp, synthetic construct
  source 1..75: mol_type = other DNA
ccctctgtatctggtacctcagttaaggccatgcaaaaactaggtacccttaatattcaattaaccggttctcac

SEQ ID NO: 109564 - DNA, 75 bp, synthetic construct
  source 1..75: mol_type = other DNA
tgttatcggtaaaggcggttctgtaatccgtgctctgaccgaagaaaccggcaccaccatcgaaattgaagatga

SEQ ID NO: 109565 - DNA, 75 bp, synthetic construct
  source 1..75: mol_type = other DNA
ttgtactttttctttctttgttaattggcggaaaagtttctgctgatgcaggatggcagtccggcggagattttc

SEQ ID NO: 109566 - DNA, 75 bp, synthetic construct
  source 1..75: mol_type = other DNA
cttcaaagttgcgggttctcgcgacggtatctctgcattgcagatggatatcaaaattgaaggcatcaccaaaga

SEQ ID NO: 109567 - DNA, 75 bp, synthetic construct
  source 1..75: mol_type = other DNA
gatagggctacaggcagtagcagatggagaggggagtactgcattcggctatcaaagccactcatcgggcgatcg

SEQ ID NO: 109568 - DNA, 75 bp, synthetic construct
  source 1..75: mol_type = other DNA
agggttatcaaatgcagggcagtgaaaacacgctctacctggcggcaggtcaacggctggcgctagccacattaa

SEQ ID NO: 109569 - DNA, 75 bp, synthetic construct
  source 1..75: mol_type = other DNA
cggcattgccttgggtagcagctccgtttccagtcgcgtgattgttaaaggttctcgtaacaccagtgtaacgga

SEQ ID NO: 109570 - DNA, 75 bp, synthetic construct
  source 1..75: mol_type = other DNA
atgtaccgacgactgctcatactgcttgtcctgccctgcatggtacaggcaaaaaacctgggcacatggggggag

SEQ ID NO: 109571 - DNA, 75 bp, synthetic construct
  source 1..75: mol_type = other DNA
ctttagttatgatggataagcagggaatacagacattaacctttatgtataaagtaaggaagtatggcgaccatt

SEQ ID NO: 109572 - DNA, 75 bp, synthetic construct
  source 1..75: mol_type = other DNA
tcatgaatttgttagcggcaaaatagacagtgacgataagttcgaagcgcatcgccaggaaatggccgaaacagt

SEQ ID NO: 109573 - DNA, 75 bp, synthetic construct
  source 1..75: mol_type = other DNA
accttggtattctaatagctattagaataatatcatgcacaaatgggatttattattctttgtataaagaatatt

SEQ ID NO: 109574 - DNA, 75 bp, synthetic construct
  source 1..75: mol_type = other DNA
gctagattctattggaataaccggattatcctttatgtataaggtaaggaagtatggtgaccatttagtattaaa

SEQ ID NO: 109575 - DNA, 75 bp, synthetic construct
  source 1..75: mol_type = other DNA
agtaccgatgctgttaacggttcccagttaaacgcaaccaatattctggttacgcaaaatagccaaatgattaac

SEQ ID NO: 109576 - DNA, 75 bp, synthetic construct
  source 1..75: mol_type = other DNA
cggaacatcttttaatgccggaacgcataccgtgattaaagccggtgtctctgcggatacgcaatctgatttcgg

SEQ ID NO: 109577 - DNA, 75 bp, synthetic construct
  source 1..75: mol_type = other DNA
gttgcgcatcagagcagtctgtccagccgtgcgtgaagccaccggcaccaccggcgtggatgatgcagcccgccc

SEQ ID NO: 109578 - DNA, 75 bp, synthetic construct
  source 1..75: mol_type = other DNA
ccacaatgggccgggaagccagtgccgttgtgggtgtggtgaattcagttaatgacccggacacagtgctgaaag

SEQ ID NO: 109579 - DNA, 75 bp, synthetic construct
  source 1..75: mol_type = other DNA
gttgtactgtctgacattttgggcgacgaagatcatctgggcgatatggacttcaaagttgcaggttcccgcgac

SEQ ID NO: 109580 - DNA, 75 bp, synthetic construct
  source 1..75: mol_type = other DNA
tatttaacctgagtaacggtgctaataatcttaactttaaggcttggttgcaggcgaaatctgggcgtgaagtca

SEQ ID NO: 109581 - DNA, 75 bp, synthetic construct
  source 1..75: mol_type = other DNA
aagcacttagttgtaagccgggagcctgggctgaacaacctggagcgtgtccaacaacgtacgagttatacgaag

SEQ ID NO: 109582 - DNA, 75 bp, synthetic construct
  source 1..75: mol_type = other DNA
agcggcagcggataatattgcgacaatccgccagcgccgcgctgaaatggaagccacgacgaacgccctgaatga

SEQ ID NO: 109583 - DNA, 75 bp, synthetic construct
  source 1..75: mol_type = other DNA
cgttatcggtaaaggcggttctgtaatccgtgctctgactgaagaaaccggcaccactatcgaaatcgaagatga

SEQ ID NO: 109584 - DNA, 75 bp, synthetic construct
  source 1..75: mol_type = other DNA
gaaagatttgggggatgagttattggaaagagggcttctttgtaccttgccagacgctcccagcatcgctgaaat

SEQ ID NO: 109585 - DNA, 75 bp, synthetic construct
  source 1..75: mol_type = other DNA
aacactgccaatatcgccgataacactgctgatatcgccactaacactacggatattgccaccaacactgccaat

SEQ ID NO: 109586 - DNA, 75 bp, synthetic construct
  source 1..75: mol_type = other DNA
atccagacactgagcctgctcaaaaccacaatggggcgggaagccagtgccgttgtgggggtggtgaattcagtt

SEQ ID NO: 109587 - DNA, 75 bp, synthetic construct
  source 1..75: mol_type = other DNA
gacaacagcgtcgcactgggcacgggttccgtagcagacgaagaaaatacgatctctgtgggttcttctaccaac

SEQ ID NO: 109588 - DNA, 75 bp, synthetic construct
  source 1..75: mol_type = other DNA
cctgcaaggtggagttccgtcacggtaacatgatgctggaaaatccatcgccagagctgctcacggtgttgatcc

SEQ ID NO: 109589 - DNA, 75 bp, synthetic construct
  source 1..75: mol_type = other DNA
ctcgtggcgcacagacaggttacaccgcctacaacatggacgcgccgcagaactctgtgggtgagttctctgtcg

SEQ ID NO: 109590 - DNA, 75 bp, synthetic construct
  source 1..75: mol_type = other DNA
tgccaatggtggggaatgcaataggtactgttctgggtaacaaagccggagagaaattcaccaaagaaatgctat

SEQ ID NO: 109591 - DNA, 75 bp, synthetic construct
  source 1..75: mol_type = other DNA
accagtacgtactgaacccgactcaggatgaactgaaagagagcaaactggacctggttgttgccggtacagaag

SEQ ID NO: 109592 - DNA, 75 bp, synthetic construct
  source 1..75: mol_type = other DNA
taccgttgttggccagaaaaaagccaaaccaggtcaggacttcttcccactgaccgttaattatcaggagcgtac

SEQ ID NO: 109593 - DNA, 75 bp, synthetic construct
  source 1..75: mol_type = other DNA
atcgccaggaaatggccgaaacagtatggaaagaattaaaagcaactgattctgcaacgtgtcgtagttgccatt

SEQ ID NO: 109594 - DNA, 75 bp, synthetic construct
  source 1..75: mol_type = other DNA
aaccgcctggatgagatgctggccggtaccaactccgaccctatccacatttccaccggcctgctgtattccggc

SEQ ID NO: 109595 - DNA, 75 bp, synthetic construct
  source 1..75: mol_type = other DNA
gaaaaaagagcgggccaataacagcgaacaggcaccggcctggtttgccccgttcgcagaaaagcttaacaccat

SEQ ID NO: 109596 - DNA, 75 bp, synthetic construct
  source 1..75: mol_type = other DNA
tacgatcagtgattcagtcgccaagcgactcggaggaggcgctactgtaggcagcgatggcaccgtaaccgcagt

SEQ ID NO: 109597 - DNA, 75 bp, synthetic construct
  source 1..75: mol_type = other DNA
ctcagtatcgttggagatgggcttcaatgactccatctgaaagtctaaatattccagaagtcttctttggctgtt

SEQ ID NO: 109598 - DNA, 75 bp, synthetic construct
  source 1..75: mol_type = other DNA
atccgtgccctgaccgaagaaactggcactaccatcgaaatcgaagatgacggtacagtgaagatcgcagcgacc

SEQ ID NO: 109599 - DNA, 75 bp, synthetic construct
  source 1..75: mol_type = other DNA
aatggtaaagtgacccgtatcgttgactttggtgcatttgttgccatcggaggcggtaaagaaggtctggtacac

SEQ ID NO: 109600 - DNA, 75 bp, synthetic construct
  source 1..75: mol_type = other DNA
aaagcactaatccagacactaagcctgctcaaatcaacaatgggcagggaagccagcgcagttgtcggtgtggtg

SEQ ID NO: 109601 - DNA, 75 bp, synthetic construct
  source 1..75: mol_type = other DNA
aggatgggcaaatatccaaaacgctcaactagacagggctcagcgggcacaaatgcactcagatgagatgggatt

SEQ ID NO: 109602 - DNA, 75 bp, synthetic construct
  source 1..75: mol_type = other DNA
ccctgataagcagtgccctgcggatggcgtatgaggtgcgtggtcagccgcgggacgtcatgttccatagcgacc

SEQ ID NO: 109603 - DNA, 75 bp, synthetic construct
  source 1..75: mol_type = other DNA
actttctccggggattatctgcaggtgaccgacaatacggggaaaacgcacgatgtgctgaccggaagtgatgac

SEQ ID NO: 109604 - DNA, 75 bp, synthetic construct
  source 1..75: mol_type = other DNA
ttttaattggagattatgatccaataacattggatagccttaagatagcagaaagtacagattctttatgttttg

SEQ ID NO: 109605 - DNA, 75 bp, synthetic construct
  source 1..75: mol_type = other DNA
ccgctgacaacagcgtcgctctgggtacagggtctgtggcaaccgaagaaaatacgatctctgtaggttcctcta

SEQ ID NO: 109606 - DNA, 75 bp, synthetic construct
  source 1..75: mol_type = other DNA
cagagtgaatacatggatatttgcctggcaatggtgcgttctgctgatgcgatctatttgctcaatcgatgggaa

SEQ ID NO: 109607 - DNA, 75 bp, synthetic construct
  source 1..75: mol_type = other DNA
tattatgctggtgtcagtgaccgagcggacgcgggaaattggcattcgcatggctgtaggtgcgcgagcaagcga

SEQ ID NO: 109608 - DNA, 75 bp, synthetic construct
  source 1..75: mol_type = other DNA
ttataacgtcggcgatgcactggctgcgattaactcctcatttagcacgtctctcggcgatgctctgctttggga

SEQ ID NO: 109609 - DNA, 75 bp, synthetic construct
  source 1..75: mol_type = other DNA
attatgactatagtatatatcttgatggtaatattgtaatcaatgatgatttaactaacttaataaaaaaaatca

SEQ ID NO: 109610 - DNA, 75 bp, synthetic construct
  source 1..75: mol_type = other DNA
tggtggtgttgaaaccggcgttgaactcttttgggcgctgggatgcagaagatcatcgtaagcgagttgaacaac

SEQ ID NO: 109611 - DNA, 75 bp, synthetic construct
  source 1..75: mol_type = other DNA
taccatgcgcatcatcgatatcaatatcaacgtaatggatgcccgtgggcgaattatcggcagcggcgatcgtga

SEQ ID NO: 109612 - DNA, 75 bp, synthetic construct
  source 1..75: mol_type = other DNA
gctaaccttgcactcgcagaagcagtaagcgcccaacaaaacgttgaaaccactcgccagaccgcagaagccgat

SEQ ID NO: 109613 - DNA, 75 bp, synthetic construct
  source 1..75: mol_type = other DNA
gcgtcggtgtccgggattatgaccggtatcctgctggcgattgcccgtattgctggtgaaaccgcgccgctgctg

SEQ ID NO: 109614 - DNA, 75 bp, synthetic construct
  source 1..75: mol_type = other DNA
catcgtaataccctggagtatcggcttaatcgcatatcggaactgaccgggctggatttgggcaattttgatgac

SEQ ID NO: 109615 - DNA, 75 bp, synthetic construct
  source 1..75: mol_type = other DNA
aaccaatcaaccaatcaaccaatgtttcgttaaataaacattatgatagagtcttgcgggtgtattggaaatatg

SEQ ID NO: 109616 - DNA, 75 bp, synthetic construct
  source 1..75: mol_type = other DNA
agagtttttggcaccattgagaatctccctgcagcaacagaatttacagtaaagtcagaacaggaaattacacag

SEQ ID NO: 109617 - DNA, 75 bp, synthetic construct
  source 1..75: mol_type = other DNA
ttgatagcctgattacgaaagatcgtatgcgcgtcgatgtcgttgtcgctttctttgtgcgggtaaaaccttcag

SEQ ID NO: 109618 - DNA, 75 bp, synthetic construct
  source 1..75: mol_type = other DNA
aagcaataccaggaaggaagtcttactgctgtcgctgccggagaacaggtcgttcctgcctctgaacttgctgcc

SEQ ID NO: 109619 - DNA, 75 bp, synthetic construct
  source 1..75: mol_type = other DNA
cagcagccagtaccgtaccttccctgagccggacactgatttatgactatgagcagaaccctgattccggcaaca

SEQ ID NO: 109620 - DNA, 75 bp, synthetic construct
  source 1..75: mol_type = other DNA
cctgattcagtggcgcagcggcagccggaaaaaaccgcagccggaggctgcttctttaactcgctacacagcatc

SEQ ID NO: 109621 - DNA, 75 bp, synthetic construct
  source 1..75: mol_type = other DNA
gctggagattgaacaacaagaagcgtttatgacgcttgagcaggagcagcaggttaaaacccgtaccgctgagca

SEQ ID NO: 109622 - DNA, 75 bp, synthetic construct
  source 1..75: mol_type = other DNA
atggtggagtgcgtggatcgcttctatggggagtttaaaccctggctgaaaaaaacgatcaccaaaaactgggtt

SEQ ID NO: 109623 - DNA, 75 bp, synthetic construct
  source 1..75: mol_type = other DNA
tgccaatgaagtcgcaaccggggctaaaaatgtcggtgtcgttctctttttccattcaggacccgaccaatatat

SEQ ID NO: 109624 - DNA, 75 bp, synthetic construct
  source 1..75: mol_type = other DNA
agttattgatactacagagcttattcgtgtttttggttctctttcttttgacaatgaacgtgaccatgctgttgt

SEQ ID NO: 109625 - DNA, 75 bp, synthetic construct
  source 1..75: mol_type = other DNA
ttaaatacagcgaagccccgcagtggtggaacactcgcagggcttctaaccaccaacgataacgagagtatcgag

SEQ ID NO: 109626 - DNA, 75 bp, synthetic construct
  source 1..75: mol_type = other DNA
atgacacataaaacaaaggcgacctgtggcggtcgccaatgggaaaacactaaacataagcccgaacatcatagc

SEQ ID NO: 109627 - DNA, 75 bp, synthetic construct
  source 1..75: mol_type = other DNA
acactccgatcgttcgtggttctgctttgaaagcgctggaaggcgacgcagagtgggaagcgaaaatcctggaac

SEQ ID NO: 109628 - DNA, 75 bp, synthetic construct
  source 1..75: mol_type = other DNA
cgactgccgcgcttgctgctggcactgtttgtcggtgcagccctcgctgtggcgggcgtgctgatacaggggatt

SEQ ID NO: 109629 - DNA, 75 bp, synthetic construct
  source 1..75: mol_type = other DNA
ccattatcgaacgggatggcaaaattttactcgcacaacgccccgcccatagcgatcaggcggggttatgggagt

SEQ ID NO: 109630 - DNA, 75 bp, synthetic construct
  source 1..75: mol_type = other DNA
acgattggtgaagatggacttgacccatcaggtttatattgggtgccaagctcaaccagtaacgtgaataagcat

SEQ ID NO: 109631 - DNA, 75 bp, synthetic construct
  source 1..75: mol_type = other DNA
ttagagcccttagcggtgtcatggctgcaggttcaaggcaaatatttgccaatgaagtcgcaaccggggctaaaa

SEQ ID NO: 109632 - DNA, 75 bp, synthetic construct
  source 1..75: mol_type = other DNA
taataactctgacgggtgaccttatggctactttagcaatagatataggtggtacaaagatttcagcggcaatta

SEQ ID NO: 109633 - DNA, 75 bp, synthetic construct
  source 1..75: mol_type = other DNA
ttacgcttttggtcaggtcatcgaaggctgtgccagcgatcgcgaagaaggaacctggatcacgcgtggcgtggt

SEQ ID NO: 109634 - DNA, 75 bp, synthetic construct
  source 1..75: mol_type = other DNA
ctttaaatcagtggcttagcatgggttctctggctgctgtcattgccggggttcctccagaggtcgctcttggtg

SEQ ID NO: 109635 - DNA, 75 bp, synthetic construct
  source 1..75: mol_type = other DNA
aaaagcggcaggagatcctcgattcaacgcctgaagagattttttcctggtatctgagtagcgcagagaaggatt

SEQ ID NO: 109636 - DNA, 75 bp, synthetic construct
  source 1..75: mol_type = other DNA
accattataacggagggctgacgccggaagagtcagagaacagataccatttttactgtaaaaccgtggccagta

SEQ ID NO: 109637 - DNA, 75 bp, synthetic construct
  source 1..75: mol_type = other DNA
gggtggttgatattgacgatgcggtggcgcggcatcttcatggtgtgcgacaggggattaatctgccgttgcggt

SEQ ID NO: 109638 - DNA, 75 bp, synthetic construct
  source 1..75: mol_type = other DNA
gcggtttcatctggtcgggccatcatgggggcagcaaaaaataaacttgcaggatatagcaccaaatatattttt

SEQ ID NO: 109639 - DNA, 75 bp, synthetic construct
  source 1..75: mol_type = other DNA
tgaagttgaccatgaccagaacccgattccggatgaagatcaagttacacagcatgataacaatgaacgtatgct

SEQ ID NO: 109640 - DNA, 75 bp, synthetic construct
  source 1..75: mol_type = other DNA
cgttatcgctggcccccgtgatcgctgatagattcggttattcagtcacctacaacctgtgcggtgcggggttaa

SEQ ID NO: 109641 - DNA, 75 bp, synthetic construct
  source 1..75: mol_type = other DNA
agcataacgttcaaagcacattgcacctgccggatagcctcatgcacgagggattagagattatggaacatccag

SEQ ID NO: 109642 - DNA, 75 bp, synthetic construct
  source 1..75: mol_type = other DNA
gaattatcggcagcggcgatcgtgagcgtattggtgaattgcacgaaggtgcattgctggtactttcacagggac

SEQ ID NO: 109643 - DNA, 75 bp, synthetic construct
  source 1..75: mol_type = other DNA
aagctgcggctcttctcatgagcaagtatcttaagcaagccaatggagacttaaacgaggccatcactgcatata

SEQ ID NO: 109644 - DNA, 75 bp, synthetic construct
  source 1..75: mol_type = other DNA
gtcataaccacaattgcatgcggatacactgagaagaatgccaccgggaatgtgttgctgctgttccttcttctg

SEQ ID NO: 109645 - DNA, 75 bp, synthetic construct
  source 1..75: mol_type = other DNA
gaacaacatttcaaatggagtaattatattatttggtttgaaaattacggggcttatgataagatggggtctatc

SEQ ID NO: 109646 - DNA, 75 bp, synthetic construct
  source 1..75: mol_type = other DNA
tcagaatatttcggatggggtgattatagtctctggtttcaaggtttctcgatttatgataagacaggttttatc

SEQ ID NO: 109647 - DNA, 75 bp, synthetic construct
  source 1..75: mol_type = other DNA
agcctaacggtatgcggttagtaccttctaaatatgaggaaattcttcagtattgtaaacttaaaaacccattta

SEQ ID NO: 109648 - DNA, 75 bp, synthetic construct
  source 1..75: mol_type = other DNA
tataaacatcatttatatatggaggattataatctttggcttcgtatgatatcaattggttgcaaagtggaaaat

SEQ ID NO: 109649 - DNA, 75 bp, synthetic construct
  source 1..75: mol_type = other DNA
ctgccgccctttcttaccgcacacaagcaccgctgattgactccttgctcaatgaaatcggtgtttctggcggct

SEQ ID NO: 109650 - DNA, 75 bp, synthetic construct
  source 1..75: mol_type = other DNA
tggttatcagggttatttatataaacagctcaatcccggcgtcggtgtgcgtgaaaatattgatacctgggcctg

SEQ ID NO: 109651 - DNA, 75 bp, synthetic construct
  source 1..75: mol_type = other DNA
agaattagaactcgattttaataattatatggtatttccaaaagtatccgatggaattacccaggtctccgtaga

SEQ ID NO: 109652 - DNA, 75 bp, synthetic construct
  source 1..75: mol_type = other DNA
tatcttcgtcataatggccttgccacaatacaggttcccgaatcctgcaaagaattagaactcgatttcaataat

SEQ ID NO: 109653 - DNA, 75 bp, synthetic construct
  source 1..75: mol_type = other DNA
agtatcactacaccaacttatgccatcgctggcggcagttacaacaacgtcggtgacgcgctggaagcgatcgat

SEQ ID NO: 109654 - DNA, 75 bp, synthetic construct
  source 1..75: mol_type = other DNA
ttctcagactacccgtggcgcgcagaccaactacactgcctacaacatggacgcaccgcagaactctgtgggtga

SEQ ID NO: 109655 - DNA, 75 bp, synthetic construct
  source 1..75: mol_type = other DNA
cagcacggggctgacaactggaaaatccagccgggagcaccgttatatgatacgattgttattgtcactggtgag

SEQ ID NO: 109656 - DNA, 75 bp, synthetic construct
  source 1..75: mol_type = other DNA
actgatcggctttggtaaaggcttaacgcccgatggagatgactatttgttgggctatctggcagcgctctggtt

SEQ ID NO: 109657 - DNA, 75 bp, synthetic construct
  source 1..75: mol_type = other DNA
tcaacgttgaaagacggtacaacgaccgtatttgtttgtaactcgatggtggcaaaggaagatgtttcctgtttt

SEQ ID NO: 109658 - DNA, 75 bp, synthetic construct
  source 1..75: mol_type = other DNA
acttaccacatttacggtggcggagatccgcacgctgtcggtaatgaggttgcacgtcggcaacagtctgcaaat

SEQ ID NO: 109659 - DNA, 75 bp, synthetic construct
  source 1..75: mol_type = other DNA
attatgggaagaattaccacttataaaaaaacaaccatatacatgggaagactccagtcgcgcactagttgcagg

SEQ ID NO: 109660 - DNA, 75 bp, synthetic construct
  source 1..75: mol_type = other DNA
accggcagcattgtccttcatcatatttgcgacgatgtataacgcctacacacagcgatattgtactttacaggt

SEQ ID NO: 109661 - DNA, 75 bp, synthetic construct
  source 1..75: mol_type = other DNA
gcgaaagggccagaagctgaagaggcactgatcgctttccgtcagctggctgaagataactttggtgaaacgtag

SEQ ID NO: 109662 - DNA, 75 bp, synthetic construct
  source 1..75: mol_type = other DNA
atgtataattcattaactttatgcattgaagtaatccagattcatttgataaccatgttcttcggcaacgatcat

SEQ ID NO: 109663 - DNA, 75 bp, synthetic construct
  source 1..75: mol_type = other DNA
caatatcgccactaacaccaccaatatcactaacctgactgatacggtgaataatctcggtgaagacgccctgaa

SEQ ID NO: 109664 - DNA, 75 bp, synthetic construct
  source 1..75: mol_type = other DNA
aaactgtacgcggtacaacctgaagagacgttaactctggacgttaaaacccaacgttttagccatgatggctaa

SEQ ID NO: 109665 - DNA, 75 bp, synthetic construct
  source 1..75: mol_type = other DNA
ccaatgacaccggtttaaccttcaccgatgccagcgcacagggtgttggcgctacagcagtgggttataactctg

SEQ ID NO: 109666 - DNA, 75 bp, synthetic construct
  source 1..75: mol_type = other DNA
ttcattatctaaaatgatgaatagctccagtgatctcatggggttgagaaggcagccccagaacttctggcggct

SEQ ID NO: 109667 - DNA, 75 bp, synthetic construct
  source 1..75: mol_type = other DNA
ggttctgagcccgacttccggccaatgagcttcagcaaactgttgtacgtattacttggcagcgtggtgatgatc

SEQ ID NO: 109668 - DNA, 75 bp, synthetic construct
  source 1..75: mol_type = other DNA
ttttatttggtgcagcagtatctatgcaatcagttgttatgcataacccggatcttgcggttaagtttcatctct

SEQ ID NO: 109669 - DNA, 75 bp, synthetic construct
  source 1..75: mol_type = other DNA
aaatcggtgaaacaaattattataacgtcggcgatgcactggctgcgattaactcctcatttagcacgtctctcg

SEQ ID NO: 109670 - DNA, 75 bp, synthetic construct
  source 1..75: mol_type = other DNA
tttccggcagcctgcaacaggccgaacggtttgtacaattgaactacaaaatcggtgtaggcggcaccatcactt

SEQ ID NO: 109671 - DNA, 75 bp, synthetic construct
  source 1..75: mol_type = other DNA
acagcggtacgggcagcttgtgcgggaggggaaaaaatatcggctgggaccgaactggcaggaaaaatctgcatt

SEQ ID NO: 109672 - DNA, 75 bp, synthetic construct
  source 1..75: mol_type = other DNA
ctgccaatggcggtgctggagcctacaatgccagccatgacggtaaagccagcatcatcactaatgtcgctaatg

SEQ ID NO: 109673 - DNA, 75 bp, synthetic construct
  source 1..75: mol_type = other DNA
aaatggcgcaggatatcgtggcgcgcaccatgcgcatcattgataccaatattaacgtaatggatgcccgcgggc

SEQ ID NO: 109674 - DNA, 75 bp, synthetic construct
  source 1..75: mol_type = other DNA
tacatgtttaaaacattaaccaattatagaattcgccctattgttgtaagcttgatttatggattaaaaacgaaa

SEQ ID NO: 109675 - DNA, 75 bp, synthetic construct
  source 1..75: mol_type = other DNA
gcgaaagcagaagccagcgggcttgacgatattgccgcaatcttttctggtcaccatacactgttagggaaggtg

SEQ ID NO: 109676 - DNA, 75 bp, synthetic construct
  source 1..75: mol_type = other DNA
tcctcgtctcgcttggcttccgtgtggatgatgcaggagcgaaaaagttcggttctgtcctcgccggtacaactg

SEQ ID NO: 109677 - DNA, 75 bp, synthetic construct
  source 1..75: mol_type = other DNA
ggttctgtcctcgccggtacaactgcaaatgtcatcaaaatggggctggccgttgaaggagccgcgctgtccgtg

SEQ ID NO: 109678 - DNA, 75 bp, synthetic construct
  source 1..75: mol_type = other DNA
caagaaaatattatgtttataaagaatcattaacaaagttagagaataatagggttttttattcttttggtgaaa

SEQ ID NO: 109679 - DNA, 75 bp, synthetic construct
  source 1..75: mol_type = other DNA
gatgcatcttaaacgccacaatttgccgcgtgctggcgtggttcatggtttttctggcagccagcaacaggccga

SEQ ID NO: 109680 - DNA, 75 bp, synthetic construct
  source 1..75: mol_type = other DNA
ggtaatgctttttattcctggcgcaaaaaaaccttttttattcgaaaaaaatattgctgatttacgaattagtct

SEQ ID NO: 109681 - DNA, 75 bp, synthetic construct
  source 1..75: mol_type = other DNA
gcatttcgcatcaaaggtgaagcaaatgatttacttggtaactttagtgatgctcttgatgcctatgaaaaagct

SEQ ID NO: 109682 - DNA, 75 bp, synthetic construct
  source 1..75: mol_type = other DNA
cccgcgcggggaactggacccggaagccgaccccggcctgctgtatgcggggcagtggcgggatgcggaatcggg

SEQ ID NO: 109683 - DNA, 75 bp, synthetic construct
  source 1..75: mol_type = other DNA
aaatcaaagcgtcagtcggcggggaaactgctgggataacagccccatggaacgcttcttccgcagtctgaaaac

SEQ ID NO: 109684 - DNA, 75 bp, synthetic construct
  source 1..75: mol_type = other DNA
ttccgactgcgacaggtaataaaaaccagccccgcattaccggtcaaccatcaggggcacctgcctgacatcgcc

SEQ ID NO: 109685 - DNA, 75 bp, synthetic construct
  source 1..75: mol_type = other DNA
aactgggtttaccgtcctccgacactgaaatctctgacacatgtcctccgtacgatgaagaagcccgttctctgg

SEQ ID NO: 109686 - DNA, 75 bp, synthetic construct
  source 1..75: mol_type = other DNA
agggatcgtcttctctgctggcgcattcgtgtcagcaatagtcgcagtgcgcattggcatctggctctatcacca

SEQ ID NO: 109687 - DNA, 75 bp, synthetic construct
  source 1..75: mol_type = other DNA
atcgccagccacctgctggcccgtacacgcaaacagtggatttatgttttttatgtcatgcctgacccacagaaa

SEQ ID NO: 109688 - DNA, 75 bp, synthetic construct
  source 1..75: mol_type = other DNA
gagcgcgaaccgaatatcaccgggcttggcggcatttttgtgccgtccagcggtattgtcagctaccgcgaagtg

SEQ ID NO: 109689 - DNA, 75 bp, synthetic construct
  source 1..75: mol_type = other DNA
ctatcagtaaaccggaagacttgattggtaaacgcatcgccgtaccgtttatctccaccacccactacagcctgc

SEQ ID NO: 109690 - DNA, 75 bp, synthetic construct
  source 1..75: mol_type = other DNA
ggggggctgctatatccgggagtaatattgagataaataatacgggatatataacaggtggcccgggaggaactg

SEQ ID NO: 109691 - DNA, 75 bp, synthetic construct
  source 1..75: mol_type = other DNA
ccggcggcgatgttttctcccgcgtgatggtccgtgtcaaagagacgtttgattcgctggcaatgctggaatttg

SEQ ID NO: 109692 - DNA, 75 bp, synthetic construct
  source 1..75: mol_type = other DNA
ttggagaaggtggagaaaatggggctgattcagaagcacgtgcatgaatcccgcgcgtcgagaatatccctgtgg

SEQ ID NO: 109693 - DNA, 75 bp, synthetic construct
  source 1..75: mol_type = other DNA
gaaaacaccctgcaatgggaccaaatcaaaggcaaatacagcgccgttcatggtagctcaacgaccagcgtaatc

SEQ ID NO: 109694 - DNA, 75 bp, synthetic construct
  source 1..75: mol_type = other DNA
agtacaggtggtagtggtggcaccgggggggcggctatattcgggagtaatattgagataaataatacgggatat

SEQ ID NO: 109695 - DNA, 75 bp, synthetic construct
  source 1..75: mol_type = other DNA
tttgtgctggtggacgcctcctgttccgccgaggcggtggcgcgtatctcgccgagaacggcgacgttccataaa

SEQ ID NO: 109696 - DNA, 75 bp, synthetic construct
  source 1..75: mol_type = other DNA
actttcggccattggtgcgggtctgctcgcccgcaaagcgcttacccccggcaccgttgcagatttaaaaacgtt

SEQ ID NO: 109697 - DNA, 75 bp, synthetic construct
  source 1..75: mol_type = other DNA
atggcgacctgagcgcggatatccgccgtcttgagggcgcgctgaccgcctgcgcgctgcaggtcaaaaccgtca

SEQ ID NO: 109698 - DNA, 75 bp, synthetic construct
  source 1..75: mol_type = other DNA
gaaggcagttataacgtggtgattaatgcccaagatacattcaacaataccggtaacctcccttatcaaacagtt

SEQ ID NO: 109699 - DNA, 75 bp, synthetic construct
  source 1..75: mol_type = other DNA
caggctaagtgggtgaaagggcgcatattctacgacaaaaatattctggaagaactttgtaccaaacgaaccgat

SEQ ID NO: 109700 - DNA, 75 bp, synthetic construct
  source 1..75: mol_type = other DNA
tgggatgttatccgtgtgcgtgtgctgcaacgtgacaaaggcctgtgtcagttatgtctgcgtgctggtgtggcg

SEQ ID NO: 109701 - DNA, 75 bp, synthetic construct
  source 1..75: mol_type = other DNA
atcttggaatagaaatacaccgtactgaacgagatgatacagcgattgcaaaccagttttttggtacagcagaaa

SEQ ID NO: 109702 - DNA, 75 bp, synthetic construct
  source 1..75: mol_type = other DNA
cgagatgaacaacgttaaagaaagcgcctgtagattcaattggtcaacgcaacagttatgtgaaaacatggggtt

SEQ ID NO: 109703 - DNA, 75 bp, synthetic construct
  source 1..75: mol_type = other DNA
ccggctccggctccctgaatctcagcagtggtgagttcagtattactggtgccagcagtaccctgaccgccacca

SEQ ID NO: 109704 - DNA, 75 bp, synthetic construct
  source 1..75: mol_type = other DNA
tgcgcaaagattttgccgagaaacatcctgaggtcgtgaaagcgttcgctaaaagcgccatcgatgctcagcaac

SEQ ID NO: 109705 - DNA, 75 bp, synthetic construct
  source 1..75: mol_type = other DNA
tgaagcaggaatgattaaaactggacttaatggtgagaatcttggttcagttgttcattctgttggaaaaatgcg

SEQ ID NO: 109706 - DNA, 75 bp, synthetic construct
  source 1..75: mol_type = other DNA
tgaataccctgccagcctcagtggattcgactatgggcgtttattttgttcctgctctcacaggcctgggcgcgc

SEQ ID NO: 109707 - DNA, 75 bp, synthetic construct
  source 1..75: mol_type = other DNA
ctggaaaggggaatcgccagtaattcgcggtatgaagcgtaaccgcttaaaaacattgttggcgaatgatatcaa

SEQ ID NO: 109708 - DNA, 75 bp, synthetic construct
  source 1..75: mol_type = other DNA
atgcaggaaaaccgctgggatgaggagtctgcttcttttgtcccggttgagactgaatccgatccgatgaacgtc

SEQ ID NO: 109709 - DNA, 75 bp, synthetic construct
  source 1..75: mol_type = other DNA
agttcagccagcaggttgtgttgaatacccagattaaacagcaggaacagcggctcaggcagatcgctaatacgc

SEQ ID NO: 109710 - DNA, 75 bp, synthetic construct
  source 1..75: mol_type = other DNA
tatcggccacgttgaccatggtaaaaccacgctgaccgctgcaatcaccaccgtactggctaaaacctacggcgg

SEQ ID NO: 109711 - DNA, 75 bp, synthetic construct
  source 1..75: mol_type = other DNA
atccacctcgtactggcaacgcagcgtccatcggttgatgttattactggtctgattaaagcgaatattccgacc

SEQ ID NO: 109712 - DNA, 75 bp, synthetic construct
  source 1..75: mol_type = other DNA
aagtcttctgaagcaggcggcgtgcgctacgacaccaaagctgatggctctatcgactacagcaacatcactctc

SEQ ID NO: 109713 - DNA, 75 bp, synthetic construct
  source 1..75: mol_type = other DNA
atgattgcggtaattgttgatgagcttgcacctgaattgattaaacgtaatgctattggatacaaaagcgcttcg

SEQ ID NO: 109714 - DNA, 75 bp, synthetic construct
  source 1..75: mol_type = other DNA
tggctgcacaacacccgtgaatttggtacccgcatgaacggcgtgacggtacatcaggacggtgcccgcaatatc

SEQ ID NO: 109715 - DNA, 75 bp, synthetic construct
  source 1..75: mol_type = other DNA
ggatacggcgataacagcggcggtttaacggggactccggctgttggagggaccgccatatctggcaatcatctt

SEQ ID NO: 109716 - DNA, 75 bp, synthetic construct
  source 1..75: mol_type = other DNA
ctgccatttctggagattatattgagataacaaataatcagaatattatcggtggtcagggaggtactggtggcc

SEQ ID NO: 109717 - DNA, 75 bp, synthetic construct
  source 1..75: mol_type = other DNA
gtggtgaacactgacggcagtatcactacaccaacttatgccatcgcgggtggaagttacaacaacgtcggtgac

SEQ ID NO: 109718 - DNA, 75 bp, synthetic construct
  source 1..75: mol_type = other DNA
acctgaacctgtttaatgacgggaacaactggcagggaatcgttgagtcgctgacgctgccgaaattcacccgca

SEQ ID NO: 109719 - DNA, 75 bp, synthetic construct
  source 1..75: mol_type = other DNA
cgctactgaacgcggcggaattcgcgccttaagtgagtggctgagcgaaaataccaacctggatgtgacctttat

SEQ ID NO: 109720 - DNA, 75 bp, synthetic construct
  source 1..75: mol_type = other DNA
aaaaaatgcgctctatggctattgaaaaatacgttaaggaaaataaaaaactaattgctgcacaaatcagcgagc

SEQ ID NO: 109721 - DNA, 75 bp, synthetic construct
  source 1..75: mol_type = other DNA
gttttggcgtggatgcttttattactggcgaagtttctgaacagaccattcattcagcccgcgagcagggattgc

SEQ ID NO: 109722 - DNA, 75 bp, synthetic construct
  source 1..75: mol_type = other DNA
acacgcttaccgtgcaggccaaagacgagatgaacaacgttaaagaaagcgcctgtagattcaattggtcaacgc

SEQ ID NO: 109723 - DNA, 75 bp, synthetic construct
  source 1..75: mol_type = other DNA
caggtttcccagaatacccagagcattactaacctgaacactcaggtcactaatctggatactcgcgtgaccaat

SEQ ID NO: 109724 - DNA, 75 bp, synthetic construct
  source 1..75: mol_type = other DNA
gacccgcattactatctcgataacgtgctgctggaaaccggttttgactacgaaaatggcgtggcggtacagacc

SEQ ID NO: 109725 - DNA, 75 bp, synthetic construct
  source 1..75: mol_type = other DNA
cggacagcgactatttttgtcgcgttttccggcgtcagtttggcctgacgccgggagagtacagcgcccgttttc

SEQ ID NO: 109726 - DNA, 75 bp, synthetic construct
  source 1..75: mol_type = other DNA
atggtaacgtcctgttctggacaatgtcttgttaagctacgctccaccacttgcggagatttctcctccggtagc

SEQ ID NO: 109727 - DNA, 75 bp, synthetic construct
  source 1..75: mol_type = other DNA
tgttatcttgccagcatcagtaaactggataactttcttggtcagcttgatggtatccttcgccgacactcacat

SEQ ID NO: 109728 - DNA, 75 bp, synthetic construct
  source 1..75: mol_type = other DNA
gcgatcaacggtattgctatcggttctaacgcacgcgcaaatcatgccgacagcattgcaatgggtaatggttct

SEQ ID NO: 109729 - DNA, 75 bp, synthetic construct
  source 1..75: mol_type = other DNA
agtcgccattggtgcaaattcttccgcaggtgctgacaataccgtgtctgtaggtagctctagtttaaagcgcaa

SEQ ID NO: 109730 - DNA, 75 bp, synthetic construct
  source 1..75: mol_type = other DNA
gccgtattgtgccggaactggtctacagcccgtatgcctcaaatagcgtctttgcagaaacgggcgtgaaagcca

SEQ ID NO: 109731 - DNA, 75 bp, synthetic construct
  source 1..75: mol_type = other DNA
gggatcaccagcgacgggctggcgatggtgttaactccggatgataaaatctttcccgcgaggtttgaaccgtcc

SEQ ID NO: 109732 - DNA, 75 bp, synthetic construct
  source 1..75: mol_type = other DNA
tactcagctttctttgtggtcttctcttttacaaaccaacagcatcaattcttataggcatagccagtctaatcc

SEQ ID NO: 109733 - DNA, 75 bp, synthetic construct
  source 1..75: mol_type = other DNA
aacccgagcccgttatcagtcgatcatggcaagccacctgctggcacgtacccgcaagcagtggatttacgtttt

SEQ ID NO: 109734 - DNA, 75 bp, synthetic construct
  source 1..75: mol_type = other DNA
gtttaatgcactctctgaatccatgcccgatgccatcagtctggccagaacagccagtgaggcagccacgtatgt

SEQ ID NO: 109735 - DNA, 75 bp, synthetic construct
  source 1..75: mol_type = other DNA
tacatggatatttgcatggcaatgattcgttgtgtggatgcggtttatatgctgaaaggctggcagcggtcggca

SEQ ID NO: 109736 - DNA, 75 bp, synthetic construct
  source 1..75: mol_type = other DNA
taatcacgcgtttatctcaatccctggcaaatgccgaaccaactaatccgctacctaatgacgcaatgaattatc

SEQ ID NO: 109737 - DNA, 75 bp, synthetic construct
  source 1..75: mol_type = other DNA
acctgctgggcaactcgatgggcggccatagttctgtgaggtgtactggcaatagcggacactaccatttgttct

SEQ ID NO: 109738 - DNA, 75 bp, synthetic construct
  source 1..75: mol_type = other DNA
gttcctcccgaggtggctcttggtgctttatcaggcgcggtaatatttattacctctgccgttgagtacccaata

SEQ ID NO: 109739 - DNA, 75 bp, synthetic construct
  source 1..75: mol_type = other DNA
gaaaatggtattcctgttcacgataccatcgccagagttgtatcctgtatcagtcctgcaaaatttcacgagtgc

SEQ ID NO: 109740 - DNA, 75 bp, synthetic construct
  source 1..75: mol_type = other DNA
atgcccccccgaactccaaaagcctgccgcgttcgcggctgccgtaataccacgacagacccgtcaggctactgc

SEQ ID NO: 109741 - DNA, 75 bp, synthetic construct
  source 1..75: mol_type = other DNA
accagattgttaaccacctgatttaccccattcccgaccccgcgatgccatttttgggcgtgcatctcacccgca

SEQ ID NO: 109742 - DNA, 75 bp, synthetic construct
  source 1..75: mol_type = other DNA
cgctgcaatatccgctggcccctgctgacattccattattagaggcgtttatggctttacgcgccgccagaccag

SEQ ID NO: 109743 - DNA, 75 bp, synthetic construct
  source 1..75: mol_type = other DNA
ctgacatcgccatggtttatcgtgctggtgtacttattccagagcctgggtgaactgtttattagcgcccttggc

SEQ ID NO: 109744 - DNA, 75 bp, synthetic construct
  source 1..75: mol_type = other DNA
agatgactggaactttgcagaggcaggagcttcgtaaacgtaaaactcctcaggaaaaaattgccattattcagc

SEQ ID NO: 109745 - DNA, 75 bp, synthetic construct
  source 1..75: mol_type = other DNA
tttgaggataagtacggtaagcagcacagggcttgctggaaactactgaaacgagatgacaatggtagcgtttat

SEQ ID NO: 109746 - DNA, 75 bp, synthetic construct
  source 1..75: mol_type = other DNA
ttaccgaaagaggcaatgaattacctgaagtcctgcaacgttgtttctgaagatggcgttcttttggttagaagg

SEQ ID NO: 109747 - DNA, 75 bp, synthetic construct
  source 1..75: mol_type = other DNA
aacgttgacaggagcgcaaatatcgacctgagttttactattagacaaccgcaacgctgcgctgatgctggtatg

SEQ ID NO: 109748 - DNA, 75 bp, synthetic construct
  source 1..75: mol_type = other DNA
ttatgccggactgtcgtttgcacttccttatgcatttgagcgaatgttcccctatgaattcgccctggcgcagcg

SEQ ID NO: 109749 - DNA, 75 bp, synthetic construct
  source 1..75: mol_type = other DNA
cttctgacagagcagggagagttgagtgtggtaacagattacctgcttaagttagaagccgacgatgtaagccac

SEQ ID NO: 109750 - DNA, 75 bp, synthetic construct
  source 1..75: mol_type = other DNA
tcgggatggattaacggcgaccggaccacttttatcagcaagtatcaggtaaaacatcgcccagatgggttactg

SEQ ID NO: 109751 - DNA, 75 bp, synthetic construct
  source 1..75: mol_type = other DNA
gagcgcgaaccgaatatcaccgggcttggcggcatttttgtgccgtccagcggcattgtcagctatcgcgaagtg

SEQ ID NO: 109752 - DNA, 75 bp, synthetic construct
  source 1..75: mol_type = other DNA
acgacaactgcggcaagatgctggtcgccacgtctgaactcgaaatggaacggatgcgcgctttatgggaacgca

SEQ ID NO: 109753 - DNA, 75 bp, synthetic construct
  source 1..75: mol_type = other DNA
ccgggatgctgcaaaaactggaagcggcctggcaacaacagcagaccagcagtacgcctgccgcgacggtaacgc

SEQ ID NO: 109754 - DNA, 75 bp, synthetic construct
  source 1..75: mol_type = other DNA
gactgtaatttatgagtcaccaaccaacattgaatgccaggttgctccacatattttaccgggaactggtcaatg

SEQ ID NO: 109755 - DNA, 75 bp, synthetic construct
  source 1..75: mol_type = other DNA
tctatcgtttattttatggcaatgaattaccaacaattcttacggaaggtaaaactgacaatatttatctgaagg

SEQ ID NO: 109756 - DNA, 75 bp, synthetic construct
  source 1..75: mol_type = other DNA
ctctggtctgggaaagtttgatacctttgtggggtttgaaggtaagtatgggaaacttcgctttggccgcatgaa

SEQ ID NO: 109757 - DNA, 75 bp, synthetic construct
  source 1..75: mol_type = other DNA
ttgtagcaaaaatgctaaaggcagaacgctccaagctaccgccaaaagcaaaaaaaacgaatgatagtattgacg

SEQ ID NO: 109758 - DNA, 75 bp, synthetic construct
  source 1..75: mol_type = other DNA
cgtcagcatgcagtagaaagagctgtcgcaatcacccagcaacattgggatgagaagatcggtgaacttgcaggt

SEQ ID NO: 109759 - DNA, 75 bp, synthetic construct
  source 1..75: mol_type = other DNA
ataaggcgagtgattatgtggaggagaaacagaaccagcttgagtcatggataaacagcttttgtgacacggacg

SEQ ID NO: 109760 - DNA, 75 bp, synthetic construct
  source 1..75: mol_type = other DNA
aatagcgtcaggcctcaccattataacggagggctgacgccggaagagtcagagaacagatatcatttttactgt

SEQ ID NO: 109761 - DNA, 75 bp, synthetic construct
  source 1..75: mol_type = other DNA
acggacaattaagatttcattgtgggggatcaccagcgacgggctggcggtggtgttaaccttggatgataaaat

SEQ ID NO: 109762 - DNA, 75 bp, synthetic construct
  source 1..75: mol_type = other DNA
cttttttaactgacataaataacagcaccccaaatacatacttaaaaataaataaaaatgcatgggagcatttag

SEQ ID NO: 109763 - DNA, 75 bp, synthetic construct
  source 1..75: mol_type = other DNA
gaatcggttggtgctcgtgcagagcacgcgctggctgaaaagctggggctgactgtaatttatgagtcaccaacc

SEQ ID NO: 109764 - DNA, 75 bp, synthetic construct
  source 1..75: mol_type = other DNA
ttctgcaccttaatttaagtttaaaaaaaaccaatcagaattggccattgcaaaagaagcctatgataatacctt

SEQ ID NO: 109765 - DNA, 75 bp, synthetic construct
  source 1..75: mol_type = other DNA
agcgcccaacgacaaaaaagagatgggaactaaagaatggattaacccaaatccgaaaaaatacagtgtcggcat

SEQ ID NO: 109766 - DNA, 75 bp, synthetic construct
  source 1..75: mol_type = other DNA
taacagcccaatggagcgcttcttcaggagtctgaagaacgaatgggtgccagcgacgggctatgtaagcttcag

SEQ ID NO: 109767 - DNA, 75 bp, synthetic construct
  source 1..75: mol_type = other DNA
cgccggactgcaacagaaaatcactgcgatggataacgacggtaaccggaagccgattagtaacggcgcattcta

SEQ ID NO: 109768 - DNA, 75 bp, synthetic construct
  source 1..75: mol_type = other DNA
agcctggcagcaacagcaaaccagcagtacgcctgccgcaacggtaacgcgtgagaatgacaccattaatctggt

SEQ ID NO: 109769 - DNA, 75 bp, synthetic construct
  source 1..75: mol_type = other DNA
gggtcgggatatggctgtatcaccgctctgacaatccgcgtgatttaatcccgggaggaaaagacgatgacaggc

SEQ ID NO: 109770 - DNA, 75 bp, synthetic construct
  source 1..75: mol_type = other DNA
atcgccagccacctgctggcccgaacaaacaagtactggatttacattttttatgttgtgcccgatccacagaag

SEQ ID NO: 109771 - DNA, 75 bp, synthetic construct
  source 1..75: mol_type = other DNA
attttaccatgcgcatgtataatttatggtcctatgctctgacgtcatcagaagacttttatatcggcgatacca

SEQ ID NO: 109772 - DNA, 75 bp, synthetic construct
  source 1..75: mol_type = other DNA
aaaatcagcatttaatacagcatcatcaagcgtacgttccgctggaaaaaaactcatattattaatacctgataa

SEQ ID NO: 109773 - DNA, 75 bp, synthetic construct
  source 1..75: mol_type = other DNA
gtgagttacgcccggaaccagcggatgaaattgccgacgtgttgcttaataacacgtatgcggtgtttaacgtgc

SEQ ID NO: 109774 - DNA, 75 bp, synthetic construct
  source 1..75: mol_type = other DNA
ctttcccggcataacgcaattcttaatgatctgaataccatcagtattcatgataccgggcgggagtctgagttt

SEQ ID NO: 109775 - DNA, 75 bp, synthetic construct
  source 1..75: mol_type = other DNA
tacagcagatgctgaactcaattattaccgtctccgaagtggaatcgacaggataaccgcgcaggttaactacct

SEQ ID NO: 109776 - DNA, 75 bp, synthetic construct
  source 1..75: mol_type = other DNA
ctgatttatccactttatctgcgaatgaaaaagcggtttatcttgcaatcgcaaaattctacatttcgcaattca

SEQ ID NO: 109777 - DNA, 75 bp, synthetic construct
  source 1..75: mol_type = other DNA
cgccgccgggttctcctgtcgatgctcagctttctttgcggccttcttttttacaaaccagcgtcatcaattctt

SEQ ID NO: 109778 - DNA, 75 bp, synthetic construct
  source 1..75: mol_type = other DNA
ggcgagaaaaaatcattcaggccacgctggaggcagtgaaactttacgggatacatgccgttacgcaccgtaaaa

SEQ ID NO: 109779 - DNA, 75 bp, synthetic construct
  source 1..75: mol_type = other DNA
caccagagtgctcaaaaccacgctgggaaaactttcgacctggaccacaaatccggtaacagaagctgatcttga

SEQ ID NO: 109780 - DNA, 75 bp, synthetic construct
  source 1..75: mol_type = other DNA
gtaaagcaacgtggagttggataaatgctctggctcaaatagtggtatcaggattcaccggtgttattggtggcc

SEQ ID NO: 109781 - DNA, 75 bp, synthetic construct
  source 1..75: mol_type = other DNA
ggttatacccgaagggaggcctgtgaacgacatgaggtttctcaggggtatttttcaggtgcgctagggcgtttt

SEQ ID NO: 109782 - DNA, 75 bp, synthetic construct
  source 1..75: mol_type = other DNA
gtacagctcttcgaatgatgcctacgtcattgaagactacggctatggctgtctgatcgagggcatcaccgccgc

SEQ ID NO: 109783 - DNA, 75 bp, synthetic construct
  source 1..75: mol_type = other DNA
gcaatgttgtcgtaaggtctctgtctgagagttattctctgaatgcagatgtctccgaaatatcggtattgaagg

SEQ ID NO: 109784 - DNA, 75 bp, synthetic construct
  source 1..75: mol_type = other DNA
ttaacggctatatcgatcgccaggccaatttaagtggcgttcgttcagatgatgtcgccaagtccttcagcgttg

SEQ ID NO: 109785 - DNA, 75 bp, synthetic construct
  source 1..75: mol_type = other DNA
agcatgggcgatggagaaagcccaggacttacagcagatgctgaactcaattattaccgtctccgaggtggaatc

SEQ ID NO: 109786 - DNA, 75 bp, synthetic construct
  source 1..75: mol_type = other DNA
atatcagcgagaattacattcaggcaattaaagattccaccattaacaatggcccttattatattctcgcaccag

SEQ ID NO: 109787 - DNA, 75 bp, synthetic construct
  source 1..75: mol_type = other DNA
tgccgagtacaacaatgtcggtgacgctctggatgcgcttgatgagaacgcgctgctgtgggatgcaacggccaa

SEQ ID NO: 109788 - DNA, 75 bp, synthetic construct
  source 1..75: mol_type = other DNA
gcgcggggaacacttgctgaaaaagaaggctccggcgttatcagtcggtttatccccgctggcgcggggaacact

SEQ ID NO: 109789 - DNA, 75 bp, synthetic construct
  source 1..75: mol_type = other DNA
cgctggcgcggggaacacaattgcggatgctcccggaattgcgcgggcaacggtttatccccgctggcgcgggga

SEQ ID NO: 109790 - DNA, 75 bp, synthetic construct
  source 1..75: mol_type = other DNA
agcgcctgcaagtcgccgccacctgtgcaaagtcaacgaccggagccagcggcatgggcgatggagaaagcccag

SEQ ID NO: 109791 - DNA, 75 bp, synthetic construct
  source 1..75: mol_type = other DNA
atttccggcaggtatggagagattaagccgtatgaagaaccgccggaagctttaacacagtcacgtgaacggaag

SEQ ID NO: 109792 - DNA, 75 bp, synthetic construct
  source 1..75: mol_type = other DNA
caaatcatcaatgttgccgatggttctgaagcccatgatgccgttacggttcgccagttgcagaatgcgattggt

SEQ ID NO: 109793 - DNA, 75 bp, synthetic construct
  source 1..75: mol_type = other DNA
ccatcgggtgtggaggtaacaacgccgacagcagaagagcagcttgccggaatggtccgggacgttattgatgcg

SEQ ID NO: 109794 - DNA, 75 bp, synthetic construct
  source 1..75: mol_type = other DNA
cgtcgtcgcgtgctcttgtcgatgcttagctttctctgcggacttcttttctacaaaccagcagcatcaattctt

SEQ ID NO: 109795 - DNA, 75 bp, synthetic construct
  source 1..75: mol_type = other DNA
tgggcaattcctgatgaggccccagttgaagtactggctgtagttgacaggagatttaatttccctgagccatca

SEQ ID NO: 109796 - DNA, 75 bp, synthetic construct
  source 1..75: mol_type = other DNA
gggaccctgaaaaatatatacgtcggaatagcaccagatatcggcgcagaacatgagggcgactattatggccca

SEQ ID NO: 109797 - DNA, 75 bp, synthetic construct
  source 1..75: mol_type = other DNA
gtgctgaccggaagtgatgacgctcgccacagtaacacctctatggcgtggggagctggcgtgcagtttaacccg

SEQ ID NO: 109798 - DNA, 75 bp, synthetic construct
  source 1..75: mol_type = other DNA
taattttaaatctattaatacacaacaaatgccatctctggattctgctgttatgtatatgaatggcagaatgga

SEQ ID NO: 109799 - DNA, 75 bp, synthetic construct
  source 1..75: mol_type = other DNA
cgctacctgatagatgtgaagcagagtaaagcaacgtggagctggataaatgctctggctcagatagtggtatcg

SEQ ID NO: 109800 - DNA, 75 bp, synthetic construct
  source 1..75: mol_type = other DNA
aatggatattgaaaaattcattgatggtctatatgccgaagtaagcaatttagtcgcatctgcggatattaaaat

SEQ ID NO: 109801 - DNA, 75 bp, synthetic construct
  source 1..75: mol_type = other DNA
cagtcactgtatgactggatacagcaacagatgaaaacactgtcgcgtcactcagatacggcaaaagcgttcgca

SEQ ID NO: 109802 - DNA, 75 bp, synthetic construct
  source 1..75: mol_type = other DNA
gcaatgccctgaggtcccggttattcctgtttacatgcatggtctggagcgatcaatgggaaaagggcagaaaat

SEQ ID NO: 109803 - DNA, 75 bp, synthetic construct
  source 1..75: mol_type = other DNA
ggtgctctatgaggttgatgtggtcaacatgattgaaatcgttgacggcgtggacctgatggaagcgcaccgtaa

SEQ ID NO: 109804 - DNA, 75 bp, synthetic construct
  source 1..75: mol_type = other DNA
aaaaaaattggtgaactctatgaggttaaagaaggtcttggtacacgtgatgatgatatatttttgcgtagacac

SEQ ID NO: 109805 - DNA, 75 bp, synthetic construct
  source 1..75: mol_type = other DNA
tccgttcactcaacaaagcaatctgcggtggacgctgcaagagggattgctacaaatcaaaaaagtgagcttgtg

SEQ ID NO: 109806 - DNA, 75 bp, synthetic construct
  source 1..75: mol_type = other DNA
aggccaacgtcagcaaataccttgctgattttgaatcaaaagtgggtttaaaagtctttgaccgaaccacccggc

SEQ ID NO: 109807 - DNA, 75 bp, synthetic construct
  source 1..75: mol_type = other DNA
cgcctgttctctcggcggtgcggaaattattcgtttccgccataacgacgccaacgatctggagcgtcgcatggt

SEQ ID NO: 109808 - DNA, 75 bp, synthetic construct
  source 1..75: mol_type = other DNA
agcggctcaagttatcttcagccagtgctaagtaaaggtaaaatgtatacctgctacgtaattccttcctatcac

SEQ ID NO: 109809 - DNA, 75 bp, synthetic construct
  source 1..75: mol_type = other DNA
caaatcggaacaacagtcccaggcagaagcgcgtgctaaccttgcactcgcagaagcagtaagtgcgcaacaaaa

SEQ ID NO: 109810 - DNA, 75 bp, synthetic construct
  source 1..75: mol_type = other DNA
tgccaggcagtgatgacctgaagggcattaacgtgaaataccgttatgaatttacggacacgctggggctggtga

SEQ ID NO: 109811 - DNA, 75 bp, synthetic construct
  source 1..75: mol_type = other DNA
ttaatactatcagtattcatgataccgggcgggagtctgaatttgttcaggccgaagcaagaaggttgatggtca

SEQ ID NO: 109812 - DNA, 75 bp, synthetic construct
  source 1..75: mol_type = other DNA
aacaaaggtagattgtttaataaactcgcaatgataattgtactccttgtttttgcttttaagccattattaaat

SEQ ID NO: 109813 - DNA, 75 bp, synthetic construct
  source 1..75: mol_type = other DNA
acgccagcgtttatcaaaggcgtcacgaatctgcgcggcgttattgtgccgattgttgacttacgaattaagttc

SEQ ID NO: 109814 - DNA, 75 bp, synthetic construct
  source 1..75: mol_type = other DNA
aattataattgaaagggcgatacaagttttcataccagaaaggatgaatgacattgaggtaattacaaaagattt

SEQ ID NO: 109815 - DNA, 75 bp, synthetic construct
  source 1..75: mol_type = other DNA
atgaagctgcggcaaaggaggcggaagaaaaagccaaagctgacgaggcggcagctaaagacgctgaggagaaag

SEQ ID NO: 109816 - DNA, 75 bp, synthetic construct
  source 1..75: mol_type = other DNA
gcgcccggacattaagatggtcgttcactgcggcgacccggacgacgaaggccaacttctggtcgatgaagtgct

SEQ ID NO: 109817 - DNA, 75 bp, synthetic construct
  source 1..75: mol_type = other DNA
aatcacagtagattcgttaaaagataatacatataactatattgttaccgctgagatagatgggaaaaagaacta

SEQ ID NO: 109818 - DNA, 75 bp, synthetic construct
  source 1..75: mol_type = other DNA
tggcttacagccgtgtgtcgactttctccggggattatctccgcgtaactgacaacaaggggaaaacgcacgatg

SEQ ID NO: 109819 - DNA, 75 bp, synthetic construct
  source 1..75: mol_type = other DNA
tgagcagacgaactccatgacagggattgcacaacagctggctaatgataattacgttgttatcaatgaaacgct

SEQ ID NO: 109820 - DNA, 75 bp, synthetic construct
  source 1..75: mol_type = other DNA
gaaacatcttgggggtttaaaaaacaccctatcacaaaattagacaacctgaattatttgcaggctagttttgaa

SEQ ID NO: 109821 - DNA, 75 bp, synthetic construct
  source 1..75: mol_type = other DNA
tcatatataacaaaaatactcaacccaacaatacattttcatgttggctatttcaatagacttcctttccctgaa

SEQ ID NO: 109822 - DNA, 75 bp, synthetic construct
  source 1..75: mol_type = other DNA
cagtaaatcaggggttaagcctgactgcactggcgtccgtgttcgttggtataccgcctgaggtggctttaggtg

SEQ ID NO: 109823 - DNA, 75 bp, synthetic construct
  source 1..75: mol_type = other DNA
agcatctgctacaggagttgattcgacctcattaggatataatagtatcgctaatcactctaatagcatagccct

SEQ ID NO: 109824 - DNA, 75 bp, synthetic construct
  source 1..75: mol_type = other DNA
atcgcagctataactctggggctaatcgcatactgggttattcgcgacaggcctgaagattcgccaagagtgaat

SEQ ID NO: 109825 - DNA, 75 bp, synthetic construct
  source 1..75: mol_type = other DNA
atgttgatattatcgttggcaccttcagtaagagtctggcctctatcggcggttttgccgtaggctcggaagcga

SEQ ID NO: 109826 - DNA, 75 bp, synthetic construct
  source 1..75: mol_type = other DNA
ccgtcacttctgacctgctcccgatatgccggaatataacggtcagagaggcatatttcgatgcccctattctgg

SEQ ID NO: 109827 - DNA, 75 bp, synthetic construct
  source 1..75: mol_type = other DNA
atcaatgaagagcctcagttatattcggcattgtttttatatgaaagaaatgaagggctgttaagtctttcattt

SEQ ID NO: 109828 - DNA, 75 bp, synthetic construct
  source 1..75: mol_type = other DNA
tggcgcaggtgtcagaggtggtggtcgggcaggtattgactggagcgatgatgatgcgcatcaggccagcagtgg

SEQ ID NO: 109829 - DNA, 75 bp, synthetic construct
  source 1..75: mol_type = other DNA
tttgacgttttgtccaagattaaaggatatggataatgattacatgacgataacacgcgaactggaagatggggc

SEQ ID NO: 109830 - DNA, 75 bp, synthetic construct
  source 1..75: mol_type = other DNA
ccgatcgtggaaaactatgggaaatccaaagccgacttgattgctcttacggcgaagcaattgagattctgtacg

SEQ ID NO: 109831 - DNA, 75 bp, synthetic construct
  source 1..75: mol_type = other DNA
cacttcaaagtaacagacttcacaccacacattaacgagccttccatttcactggaacaggctatgcaggagtgg

SEQ ID NO: 109832 - DNA, 75 bp, synthetic construct
  source 1..75: mol_type = other DNA
ttattaccgtctccgacgtggaatcgacaagataaccgcgcaggttaactacgtgcaggaatacatcaggacgca

SEQ ID NO: 109833 - DNA, 75 bp, synthetic construct
  source 1..75: mol_type = other DNA
ttattaccgtctccgacgtggaatcgacaagataaccgcgcaggttaactacttgcaggattacatcaggacgca

SEQ ID NO: 109834 - DNA, 75 bp, synthetic construct
  source 1..75: mol_type = other DNA
ttattaccgtctccgatgtggaatcgacaagataaccgcgcaggttaactacctgcaggattacatcaggacgca

SEQ ID NO: 109835 - DNA, 75 bp, synthetic construct
  source 1..75: mol_type = other DNA
ttattaccgtctccgatgtggaatcgacaagataaccgcgcaggttaactacttgcaggactacatcaggacgca

SEQ ID NO: 109836 - DNA, 75 bp, synthetic construct
  source 1..75: mol_type = other DNA
gccgttatttcacgaaagcgtggctgatggagcagaaatcgcttatcgctctgctggtgctgatcgcgattgtct

SEQ ID NO: 109837 - DNA, 75 bp, synthetic construct
  source 1..75: mol_type = other DNA
actatcatgtgtgtgataatgcatattaaaaatgactttgagagtttaacacagagagaaggaaataatgtgaat

SEQ ID NO: 109838 - DNA, 75 bp, synthetic construct
  source 1..75: mol_type = other DNA
ttattaccgtctccgacgtggaatcgacaagataaccgcgcaggttaactacatgcaggagtacatcaggacgca

SEQ ID NO: 109839 - DNA, 75 bp, synthetic construct
  source 1..75: mol_type = other DNA
tcattgccctgctggtggcctgtggtgtgcttagtctggggctgaatcattaccgtgataacgccataacctaca

SEQ ID NO: 109840 - DNA, 75 bp, synthetic construct
  source 1..75: mol_type = other DNA
aggtgtggcttacagccgtgtttcgacgttctccggggattatctccgcgtaactgacaacaaggggaaaacgca

SEQ ID NO: 109841 - DNA, 75 bp, synthetic construct
  source 1..75: mol_type = other DNA
cgatacagggattgctggggacaatatcaccgctgattcacagcctgtgtttactggtcagactgaaccgctggc

SEQ ID NO: 109842 - DNA, 75 bp, synthetic construct
  source 1..75: mol_type = other DNA
aaggtaagacggaggcgttggccttggtaaccattgtggttgcaggtgtaacgtatcagacattcgcgaatgaaa

SEQ ID NO: 109843 - DNA, 75 bp, synthetic construct
  source 1..75: mol_type = other DNA
tggtccatatgctaaggctctggagtcaggagcgacagctattggctataacagttctgcaggcaattgggcgct

SEQ ID NO: 109844 - DNA, 75 bp, synthetic construct
  source 1..75: mol_type = other DNA
gatccgtatgtgtgcccggcaggtgtgctgactgacggtatgggtaatacgcatggcgtaaagctcggcaccgtt

SEQ ID NO: 109845 - DNA, 75 bp, synthetic construct
  source 1..75: mol_type = other DNA
atgaagttgagctataagctggttatcgttgctttcttcgttactgtcattggttctttcatctgttcagtgaat

SEQ ID NO: 109846 - DNA, 75 bp, synthetic construct
  source 1..75: mol_type = other DNA
cgggacttttggcttttgtagtttgtctggggggggctaatggcgcttcgcagcttgagtttccagtatgggatc

SEQ ID NO: 109847 - DNA, 75 bp, synthetic construct
  source 1..75: mol_type = other DNA
atggctatttttcatcttgattttaaaattgtgaaacgaagtgagggcaaatcttccgttgcgaaagctgcttat

SEQ ID NO: 109848 - DNA, 75 bp, synthetic construct
  source 1..75: mol_type = other DNA
aaaaaggcaatctgcagattgccgaggccgaaaccattggcgagaccgtgcgttacggtcagtttgattatccgt

SEQ ID NO: 109849 - DNA, 75 bp, synthetic construct
  source 1..75: mol_type = other DNA
ggtaaaaccagtgttgtaacgggcgataacagtcttgcgcttggtagtaacaccagtgccaacggtattaacgcc

SEQ ID NO: 109850 - DNA, 75 bp, synthetic construct
  source 1..75: mol_type = other DNA
ggacgccgcagccataccgcactgacatacagtgcaggcgtgcagattaacccgacagaaaatatcgtggtcgac

SEQ ID NO: 109851 - DNA, 75 bp, synthetic construct
  source 1..75: mol_type = other DNA
acttacagcagatgctgaactcaattattaccgtctccgaagtggaatcgacaggataaccgcgcaggttaacta

SEQ ID NO: 109852 - DNA, 75 bp, synthetic construct
  source 1..75: mol_type = other DNA
atggacctgaataaaaccccacgtctgctggttatgatgttcatacaatatttcatgcagggtgcctggaatatg

SEQ ID NO: 109853 - DNA, 75 bp, synthetic construct
  source 1..75: mol_type = other DNA
ggtaatatcgatctgggggtcgtcggtgtgggatacttttccgataatacatccccagaagattatcaacctggg

SEQ ID NO: 109854 - DNA, 75 bp, synthetic construct
  source 1..75: mol_type = other DNA
ttattaccgtctccgaagtggaatcgacaagataaccgcgcaggttaactacgtgcaggactacatcaggacgca

SEQ ID NO: 109855 - DNA, 75 bp, synthetic construct
  source 1..75: mol_type = other DNA
cgtgctgatgtttctgctggtcgtaagcgcctgcaagtcgccgccacctgtacaaagtcaacgaccggagccagc

SEQ ID NO: 109856 - DNA, 75 bp, synthetic construct
  source 1..75: mol_type = other DNA
caatggcccgtactcaggctccgcactctgcaactgcacagttcttcatcaacgtggttgataacgacttcctga

SEQ ID NO: 109857 - DNA, 75 bp, synthetic construct
  source 1..75: mol_type = other DNA
ataagtagttcggtattagaaggtaagggtatatctgtaaggatggatggtgatagattaatttttgatggaaaa

SEQ ID NO: 109858 - DNA, 75 bp, synthetic construct
  source 1..75: mol_type = other DNA
gtgtgttcggcacatttggctttatggtcatcggttttattattggtgaaatgggctattccggaaataccatca

SEQ ID NO: 109859 - DNA, 75 bp, synthetic construct
  source 1..75: mol_type = other DNA
gcgtaaccgctggttcagcgtgatggcggggccatctgtacgcgtgaatgaatggttcagtgcttatgcgatggc

SEQ ID NO: 109860 - DNA, 75 bp, synthetic construct
  source 1..75: mol_type = other DNA
gtgtgttcggcacatttggctttatggccatcggttttattattggcgaaatgggctattccggaaataccatca

SEQ ID NO: 109861 - DNA, 75 bp, synthetic construct
  source 1..75: mol_type = other DNA
cggaagtcatggtcggctccgaaacggcaactaaacgctggaaaaaccggttcaaagtctggcaggacctgcgac

SEQ ID NO: 109862 - DNA, 75 bp, synthetic construct
  source 1..75: mol_type = other DNA
gaatatgatgatcaactctcagagttcaaaagattaagagactttcaagaatatgtaaaaaaagcatgtgtttcg

SEQ ID NO: 109863 - DNA, 75 bp, synthetic construct
  source 1..75: mol_type = other DNA
gctaaagactacattgaacgcactctaaccatagagacaatttgcggcgtcacggctaacagcctggtgattgag

SEQ ID NO: 109864 - DNA, 75 bp, synthetic construct
  source 1..75: mol_type = other DNA
tcaaacccggcgtcatcttctgcctgaagaatatccgcagcggtaaaaaagcggttcaggtagatgataattatc

SEQ ID NO: 109865 - DNA, 75 bp, synthetic construct
  source 1..75: mol_type = other DNA
aaagtaaaaagatactcgatctactcaagcgtgaagcctctaagcacaaagcgcccgaacaacccgccatcaccg

SEQ ID NO: 109866 - DNA, 75 bp, synthetic construct
  source 1..75: mol_type = other DNA
gtgagttacgcctggaacccgcagatgaaattgccgaagtgttgcttaataacacgtatacgttgtttaacgtgc

SEQ ID NO: 109867 - DNA, 75 bp, synthetic construct
  source 1..75: mol_type = other DNA
cttcgatcaccgcggcgtgctgtggatccagaccgacgtgtcgtcatcaaccatcaaccgtaaagattacgaagg

SEQ ID NO: 109868 - DNA, 75 bp, synthetic construct
  source 1..75: mol_type = other DNA
ggcaccgccggtacagggaatgccggtacagactgccctgcgcaccctgcacggcgtcattaccggctttaaaca

SEQ ID NO: 109869 - DNA, 75 bp, synthetic construct
  source 1..75: mol_type = other DNA
tattttacgttttagtgataaaggaaatgggaaggaaggaagggccggtattggttatggatttcgctgcgtgct

SEQ ID NO: 109870 - DNA, 75 bp, synthetic construct
  source 1..75: mol_type = other DNA
tgaatcttacggaatggatcgcttcattgccgacattgaaatcagccgccagttctggcgcgacggcgaacacgt

SEQ ID NO: 109871 - DNA, 75 bp, synthetic construct
  source 1..75: mol_type = other DNA
aaaggaatggagagcgtaccttcgggcggtggcagccaggatattattgcagaccatcaggggcatcagggtatt

SEQ ID NO: 109872 - DNA, 75 bp, synthetic construct
  source 1..75: mol_type = other DNA
cttggcgggatatcaaaagaagttggtggatcgcttaatggtgccagaaagtctattgccgatgtgattcgtggc

SEQ ID NO: 109873 - DNA, 75 bp, synthetic construct
  source 1..75: mol_type = other DNA
agcacccggcagcttttgacgtggtttgataatgtctgggctgactcacagaattttcgtgatattaagaataat

SEQ ID NO: 109874 - DNA, 75 bp, synthetic construct
  source 1..75: mol_type = other DNA
tcaacatcagtgggatcatggtctgcagcactaggacagcaaagtgtggctttaggtgtgggagcatatgcctat

SEQ ID NO: 109875 - DNA, 75 bp, synthetic construct
  source 1..75: mol_type = other DNA
gcgttgatatccgcatggaaatgtccgccatcaggcgtgcagaaactgaggcgacgctggaagttatgcctggtg

SEQ ID NO: 109876 - DNA, 75 bp, synthetic construct
  source 1..75: mol_type = other DNA
tttcttatcccggatttgtttctaatgtggctgattggattgaaaaatcaagcgtatttgttcttccttcctatt

SEQ ID NO: 109877 - DNA, 75 bp, synthetic construct
  source 1..75: mol_type = other DNA
caagcgtgaagcctttaagcacaaagtgcccgatcaacccgccatcaccgaagttaaccgcatgacacgccacgg

SEQ ID NO: 109878 - DNA, 75 bp, synthetic construct
  source 1..75: mol_type = other DNA
cactgacgccgttaacggctctcagctcaaaaccaccaacgaaaacgtgtcgaccaacaccaccaacatcgccac

SEQ ID NO: 109879 - DNA, 75 bp, synthetic construct
  source 1..75: mol_type = other DNA
agcgcgatgttgctgcgctcgatgcaaaatactcgagggaattagccgatgcgagagctgaaaatgaaactctgc

SEQ ID NO: 109880 - DNA, 75 bp, synthetic construct
  source 1..75: mol_type = other DNA
cactgacgccgttaacggctcacagctcaaaaccaccaacgagaacgtgacgaccaacaccaccaacatcgccac

SEQ ID NO: 109881 - DNA, 75 bp, synthetic construct
  source 1..75: mol_type = other DNA
gatcgggtgcttgttctatgcccgaaaaagcttcgtgacaactggaccatgtacacggtcaacgataagcgcaac

SEQ ID NO: 109882 - DNA, 75 bp, synthetic construct
  source 1..75: mol_type = other DNA
agcagggtaaccgttattatctccgctctggttatctgcattatcgcctgccagtcatgggctgttaatcattac

SEQ ID NO: 109883 - DNA, 75 bp, synthetic construct
  source 1..75: mol_type = other DNA
cactgacgccgttaacggctcccagctcaaaaccaccaacgacaacgtgccgaccaacaccaccaacatcgccac

SEQ ID NO: 109884 - DNA, 75 bp, synthetic construct
  source 1..75: mol_type = other DNA
agttgcgccagaaacaatacgagtactatcgtgatttactgttcagtttcccaaaacctgaaacagccagtaatt

SEQ ID NO: 109885 - DNA, 75 bp, synthetic construct
  source 1..75: mol_type = other DNA
aatgccgggtgcagtggatgtggatctgggactggatgacggcgcactggatacggaattttccattggtggtac

SEQ ID NO: 109886 - DNA, 75 bp, synthetic construct
  source 1..75: mol_type = other DNA
gtgctgtcgttatctgcctgctcgtttccatggcctgggcgattaaccactaccgcgacaacgccatcgcttata

SEQ ID NO: 109887 - DNA, 75 bp, synthetic construct
  source 1..75: mol_type = other DNA
accgtcataccgttgccacagaattgatgcagaaaccggagcaaaatttgtatgtcacgcagaaactactcggac

SEQ ID NO: 109888 - DNA, 75 bp, synthetic construct
  source 1..75: mol_type = other DNA
gcgcgatggcaggcatggcccgtgacaaaatcggctctaatcttgcgggtgggcttgcaggttcgctggacaccc

SEQ ID NO: 109889 - DNA, 75 bp, synthetic construct
  source 1..75: mol_type = other DNA
tgctcttgatgcctatgaaaaagctttgagctttaatccaaaaataggggttcagagacgagttaatgctctgcg

SEQ ID NO: 109890 - DNA, 75 bp, synthetic construct
  source 1..75: mol_type = other DNA
caactggcaggggatcgtagagtcgctgacgctgccgaaattcacccgcaaatatgagaagtatcgcggcggtgg

SEQ ID NO: 109891 - DNA, 75 bp, synthetic construct
  source 1..75: mol_type = other DNA
cactgacgccgttaacggctcgcagctcaaaaccaccaacgaaaacgtgacgaccaacaccaccaacatcgccac

SEQ ID NO: 109892 - DNA, 75 bp, synthetic construct
  source 1..75: mol_type = other DNA
aagaaatatagatacaatagacttttacgctactcacaagaaaggaataataccgcatgaaagctatttgaatga

SEQ ID NO: 109893 - DNA, 75 bp, synthetic construct
  source 1..75: mol_type = other DNA
cttggcgacaccatttctaccaagttcgatgattacacagcaaagattggtgatgctgtttcagcatggtttagc

SEQ ID NO: 109894 - DNA, 75 bp, synthetic construct
  source 1..75: mol_type = other DNA
tgtaaagcttagtgatgaagataataaaatcgtcgctgtaaaagggaattctctgagcggcatctactatgaagt

SEQ ID NO: 109895 - DNA, 75 bp, synthetic construct
  source 1..75: mol_type = other DNA
cgaggcccaaaaactatcagcacaggttcagatatatcaggctggctggagaacggagaaaatgacattgggctt

SEQ ID NO: 109896 - DNA, 75 bp, synthetic construct
  source 1..75: mol_type = other DNA
atcttccgttgcgaaagctgcttatcatgctcgtacaaggataacagatgaaagaacaggcgatacgtatgatta

SEQ ID NO: 109897 - DNA, 75 bp, synthetic construct
  source 1..75: mol_type = other DNA
ctgacggcgataaggctggtcgtccgcgctcctcaactgtcgttatcgtaaaagccgacggcggcataatcggca

SEQ ID NO: 109898 - DNA, 75 bp, synthetic construct
  source 1..75: mol_type = other DNA
tgctggtggtctgtggtgcgctgtgtctggcaacaaaccattaccgcgataacgccatcacttacaaagagcagc

SEQ ID NO: 109899 - DNA, 75 bp, synthetic construct
  source 1..75: mol_type = other DNA
gcaaaccctgcgcctgaaacgcctcacgagctacaaaatcatcgctgcatcaacatgcgtttgccaactgccggt

SEQ ID NO: 109900 - DNA, 75 bp, synthetic construct
  source 1..75: mol_type = other DNA
tcagggtttgggatcgcttgtgtccctgaagacatggttcaggagtatatagagtcaggcaagcttattcaggtg

SEQ ID NO: 109901 - DNA, 75 bp, synthetic construct
  source 1..75: mol_type = other DNA
cgttatcgaccactggtcgccttacggcctgggcgacatgctggaaaaagccaatctgtacgcgcagctctatat

SEQ ID NO: 109902 - DNA, 75 bp, synthetic construct
  source 1..75: mol_type = other DNA
tgtaaaaccaaccgcaatgagctgacgaacggcggcgaaaccaaaactgccaatctgaccaccggaacggtgtca

SEQ ID NO: 109903 - DNA, 75 bp, synthetic construct
  source 1..75: mol_type = other DNA
taccgtgccgaatacctgtatcctgggttacaacaatgtgcgtttcgacgacgaagtcacacgtaacatctttta

SEQ ID NO: 109904 - DNA, 75 bp, synthetic construct
  source 1..75: mol_type = other DNA
gacttacagcagatgctgaactcaattattaccgtctccgaagtggaatcgacaagataaccgcgcaggttaact

SEQ ID NO: 109905 - DNA, 75 bp, synthetic construct
  source 1..75: mol_type = other DNA
acggtctaccgagttttcgtcttgaacatttaaccaaagcgaatggtatagagcatagcaacgcccacgatgcga

SEQ ID NO: 109906 - DNA, 75 bp, synthetic construct
  source 1..75: mol_type = other DNA
gatgtacttgtcagcgaagggtgcgaggccgccactatgcggttcgccgggagcatgtaccgaccgacagcgaca

SEQ ID NO: 109907 - DNA, 75 bp, synthetic construct
  source 1..75: mol_type = other DNA
gcaggattttactattcggcatggtgtttctgctgttatctggttgtgataataagccggaagaattaaaactgg

SEQ ID NO: 109908 - DNA, 75 bp, synthetic construct
  source 1..75: mol_type = other DNA
acgttgccgctggtcgtaagcgcctgcggatcaacgccacctgtccaggctccgtgcgtgaagcccccaccacct

SEQ ID NO: 109909 - DNA, 75 bp, synthetic construct
  source 1..75: mol_type = other DNA
tggcaatgttggcgacgccttagcggatctaaacacgaatacgatacaatgggacaaccttaaaaggggatatag

SEQ ID NO: 109910 - DNA, 75 bp, synthetic construct
  source 1..75: mol_type = other DNA
ccccgctggcgcggggaacactacggctcaattgatcgccccgcctcaaattccggtttatccccgctggcgcgg

SEQ ID NO: 109911 - DNA, 75 bp, synthetic construct
  source 1..75: mol_type = other DNA
gctcaacgggattatttcacccttagaaagcggattgaaaccagtgataaaatgatccgaggcttgcagcaataa

SEQ ID NO: 109912 - DNA, 75 bp, synthetic construct
  source 1..75: mol_type = other DNA
aactcgagagcgaggggagattccggcagggcgtgcacggtttatccccgctggcgcggggaactcgcgggtatg

SEQ ID NO: 109913 - DNA, 75 bp, synthetic construct
  source 1..75: mol_type = other DNA
aataaaataaatgctggagatgtgcctgaacattttcgggtcgttttgacttatgagagtatattggggtattcg

SEQ ID NO: 109914 - DNA, 75 bp, synthetic construct
  source 1..75: mol_type = other DNA
atgaatatatcatatgtgaatagcaacaaaatgacatctttacctgttgagctagatgcactaaataataaagat

SEQ ID NO: 109915 - DNA, 75 bp, synthetic construct
  source 1..75: mol_type = other DNA
caacgccacctgctccggtaccgtgcgtgaagccaccggcacctccggcgtgggcaatgatgccgccgtcgaact

SEQ ID NO: 109916 - DNA, 75 bp, synthetic construct
  source 1..75: mol_type = other DNA
cagcctttactgccctgagcgccgcgctggcgaaccgaattcaacttaattcgctttttgtcggagaaaccactt

SEQ ID NO: 109917 - DNA, 75 bp, synthetic construct
  source 1..75: mol_type = other DNA
aaatgtatagttgtagtttcatttattctgctgtatttacggtaatttttcttttattacttgcaggcttatata

SEQ ID NO: 109918 - DNA, 75 bp, synthetic construct
  source 1..75: mol_type = other DNA
caaaaacaccgggaaggtggccgccgaaaaagccgcccttgccgtcggcggtacggtcgcactggcccctgcgga

SEQ ID NO: 109919 - DNA, 75 bp, synthetic construct
  source 1..75: mol_type = other DNA
cggggcgacattaacctgccgcgaggtggtgatttcggagaaaaaaactaaaccgctgccgctgtttaccgaggc

SEQ ID NO: 109920 - DNA, 75 bp, synthetic construct
  source 1..75: mol_type = other DNA
atgggcgattttggcccgacaatgggggaacgcttacctttcagtccagagatagatgatgaccatctgcactag

SEQ ID NO: 109921 - DNA, 75 bp, synthetic construct
  source 1..75: mol_type = other DNA
aactcagtaatctccgatctgtttgtaaatctgctgccggtttatccccgctggcgcggggaactcgaggtcgca

SEQ ID NO: 109922 - DNA, 75 bp, synthetic construct
  source 1..75: mol_type = other DNA
ccgatgcggtcaacgtgggtcaattgaaagtaacggatgcgcaggtttcccagaatacccagagcattactaacc

SEQ ID NO: 109923 - DNA, 75 bp, synthetic construct
  source 1..75: mol_type = other DNA
tacagactccagaacgacagttggtgttaactccgacggaaccctgacccgtgcagaaggagccagcaaaaccct

SEQ ID NO: 109924 - DNA, 75 bp, synthetic construct
  source 1..75: mol_type = other DNA
agaaacacagttaaaaattgcaaaagatttttgtagacctggagaagaagtatcaagttctattgcaagtaaagt

SEQ ID NO: 109925 - DNA, 75 bp, synthetic construct
  source 1..75: mol_type = other DNA
ccagatacacaaaggagcttgctgatgctaacgcgactatcgaaagtcttcgtgctgatgtttctgctggtcgta

SEQ ID NO: 109926 - DNA, 75 bp, synthetic construct
  source 1..75: mol_type = other DNA
tatccccgctggcgcggggaactctcatcatgacgcacgggcgacccgacaaggttcggtttatccccgctggcg

SEQ ID NO: 109927 - DNA, 75 bp, synthetic construct
  source 1..75: mol_type = other DNA
tcaccaactttaaccagacctccaaagaacatttcaacccgaataatgcctttgacgctgagggtttgaccaagc

SEQ ID NO: 109928 - DNA, 75 bp, synthetic construct
  source 1..75: mol_type = other DNA
gaccacaaaatacacaatatttttttaaagatgctatatcttggaataaaattgggtctggagaaacttcgtttc

SEQ ID NO: 109929 - DNA, 75 bp, synthetic construct
  source 1..75: mol_type = other DNA
cactgacgccgttaacggctcacagctcaaaaccaccaacgaaaacgtggcgaccaacaccaccaacatcgccac

SEQ ID NO: 109930 - DNA, 75 bp, synthetic construct
  source 1..75: mol_type = other DNA
gcggtttatccccgctggcgcggggaactcagtaatctccgatctgtttgtaaatctgctgccggtttatccccg

SEQ ID NO: 109931 - DNA, 75 bp, synthetic construct
  source 1..75: mol_type = other DNA
tatctgaatctccctgatgccgccagagtcatcctgcctgagcgttgggactggcgaagagagatcgcccgttca

SEQ ID NO: 109932 - DNA, 75 bp, synthetic construct
  source 1..75: mol_type = other DNA
cctacaaagcgcagcgcgataaaaaagccagagagctggaacaggcgaatgccaccattactgacatgcaggtgc

SEQ ID NO: 109933 - DNA, 75 bp, synthetic construct
  source 1..75: mol_type = other DNA
tggcaggggataaaggcggcacgctggagatcgctaaacgctttgacagcggcgtggtggtgggtggctatgcca

SEQ ID NO: 109934 - DNA, 75 bp, synthetic construct
  source 1..75: mol_type = other DNA
aggtttcagtctggcgaaaaccggttgggtggcggcgattcctttcctcgcggcggcagtcgggatgtgggttaa

SEQ ID NO: 109935 - DNA, 75 bp, synthetic construct
  source 1..75: mol_type = other DNA
ctggtacgagagtgcaggcacatgcagtttatgatcttggtcggtcagtgcagaatggaagcataaaatattcct

SEQ ID NO: 109936 - DNA, 75 bp, synthetic construct
  source 1..75: mol_type = other DNA
tgggttccgggagtattgccgatgccgacaacacgattgctctgggcagtcaaagtcaggcaatagcagctggca

SEQ ID NO: 109937 - DNA, 75 bp, synthetic construct
  source 1..75: mol_type = other DNA
ggggaactctccggtacgcgcgggatcgaatccggcccagacggtttatccccgctggcgcggggaactcactaa

SEQ ID NO: 109938 - DNA, 75 bp, synthetic construct
  source 1..75: mol_type = other DNA
actatcgggcgcgcaacttcccggggacgctggattacgccgaacagcaacgctggctggaacatcgtcgccagg

SEQ ID NO: 109939 - DNA, 75 bp, synthetic construct
  source 1..75: mol_type = other DNA
tgttaattgttgcgctggtcgctttttcttttgattttggtcggcggtgggagctgtctaaaacagcagaatatt

SEQ ID NO: 109940 - DNA, 75 bp, synthetic construct
  source 1..75: mol_type = other DNA
aaactgtccaaaaccgaaagcaagctgagcggtggtatcgcttccgcaatggcaatgaccggtctgccgcaggct

SEQ ID NO: 109941 - DNA, 75 bp, synthetic construct
  source 1..75: mol_type = other DNA
ctgcctgtcatgggctgttaatcattaccgtgataacgccatgacctacaaagaacagcgcgacaaagccacatc

SEQ ID NO: 109942 - DNA, 75 bp, synthetic construct
  source 1..75: mol_type = other DNA
ataccgccaaagccgatctgggcgataacgccaccgttccggtgaaactggtgcatatcaataaatgtccggtac

SEQ ID NO: 109943 - DNA, 75 bp, synthetic construct
  source 1..75: mol_type = other DNA
agtcagagggaatgatggcattcttgaggtcatgaagccgcaaataaattatgcacccgcaatgttggtgggtaa

SEQ ID NO: 109944 - DNA, 75 bp, synthetic construct
  source 1..75: mol_type = other DNA
aaatcaaagacaagaaaaaatcaatggaagaaaccattgcccggtggctggcggcacaaaaaagccgccgggcgt

SEQ ID NO: 109945 - DNA, 75 bp, synthetic construct
  source 1..75: mol_type = other DNA
atgctgcagttggtagcgttgaccgccgggttactaaaaatacacaggctattcagtccaatactcgccagttgc

SEQ ID NO: 109946 - DNA, 75 bp, synthetic construct
  source 1..75: mol_type = other DNA
ccatcctgaacgtttggctgaccagtatgttgaagcgtaccgtagtggctgccgtacctatgccatttgataagt

SEQ ID NO: 109947 - DNA, 75 bp, synthetic construct
  source 1..75: mol_type = other DNA
gcgaagcagaaatttataacgaaaacgccagcaaagccggtggctgggaaggtacgcgcgatttccgcattgtgg

SEQ ID NO: 109948 - DNA, 75 bp, synthetic construct
  source 1..75: mol_type = other DNA
tgtggcgttgtaagccagtggataatccttggacattcagttcctttgcaaaaaaggtcatttgttcagtattac

SEQ ID NO: 109949 - DNA, 75 bp, synthetic construct
  source 1..75: mol_type = other DNA
ttctgtgaaccagaaccagcaagaaacggaacagaacgaccagaaagcggaacaaaacagcccaaatacgcaaca

SEQ ID NO: 109950 - DNA, 75 bp, synthetic construct
  source 1..75: mol_type = other DNA
tgcagcgatactaatagtgtattgttcaattttaaaatataacgcgagcatatacgttccgttatctttgtcaat

SEQ ID NO: 109951 - DNA, 75 bp, synthetic construct
  source 1..75: mol_type = other DNA
caccagcttcgaactggaaccggtcgacggtggcgcagtggcagaataccgtccggggcaatatctcggcgtctg

SEQ ID NO: 109952 - DNA, 75 bp, synthetic construct
  source 1..75: mol_type = other DNA
gttccatgcggcagaaaatggcgatgttcacgcctttgccgatgaagttaaggaactgggtcaatcactgccacg

SEQ ID NO: 109953 - DNA, 75 bp, synthetic construct
  source 1..75: mol_type = other DNA
gatgtttaatgatgatggaactgttgcaggctacagggaaacgcatcgcaataactggcagattgaaaatattgc

SEQ ID NO: 109954 - DNA, 75 bp, synthetic construct
  source 1..75: mol_type = other DNA
tctatctctgcggcccggttggcttcatgcagtttgccgcgaaacagttagtggatctgggcgtgaagcaggaaa

SEQ ID NO: 109955 - DNA, 75 bp, synthetic construct
  source 1..75: mol_type = other DNA
tccaactggctgcacaatcacgccaatgttggcgatgtcgtgaaactggtcgctccggcaggtgatttctttatg

SEQ ID NO: 109956 - DNA, 75 bp, synthetic construct
  source 1..75: mol_type = other DNA
catgcagtttgccgcgaaacaattagtggacctgggcgtgaaacaggaaaacattcattacgaatgctttggccc

SEQ ID NO: 109957 - DNA, 75 bp, synthetic construct
  source 1..75: mol_type = other DNA
tggctgatttcacttatagcgcaatttgtcataatggagaaccatgtccgccagaattaataatcacccccggca

SEQ ID NO: 109958 - DNA, 75 bp, synthetic construct
  source 1..75: mol_type = other DNA
tggcgtgtacaacaaggtgtatggcctggaaaaaacaaaaattacaggtttcagcgtcgaagatggggagaatgg

SEQ ID NO: 109959 - DNA, 75 bp, synthetic construct
  source 1..75: mol_type = other DNA
tacgaccatcattatcgtctgacgtttggagggcggtattatgatcaagctttccagaatctgcccaatgagttc

SEQ ID NO: 109960 - DNA, 75 bp, synthetic construct
  source 1..75: mol_type = other DNA
caggggatcccctgcccgtggcgttacaccaatgatcgcgatgtaagaacgatggttgctctgggactggtgatg

SEQ ID NO: 109961 - DNA, 75 bp, synthetic construct
  source 1..75: mol_type = other DNA
ggtacagcgccagtggctacgaaacaacccaggacggcccaactggttcgctgaatataagtgttggagcaaaaa

SEQ ID NO: 109962 - DNA, 75 bp, synthetic construct
  source 1..75: mol_type = other DNA
atgaatgactgtccacgacgctataccaaaagaaagcggcttatcggtcagtttcacctggtttacgtaaaaacc

SEQ ID NO: 109963 - DNA, 75 bp, synthetic construct
  source 1..75: mol_type = other DNA
cacaatcgttgagctggggaaagccatagacttcgatgccagaacggctattccattcgaaggtgagcgccataa

SEQ ID NO: 109964 - DNA, 75 bp, synthetic construct
  source 1..75: mol_type = other DNA
ccgcgaagactggaagcgtatctcggcatcaatgcgcaaacagcctgatgcccttcgctacgaccgccaaactat

SEQ ID NO: 109965 - DNA, 75 bp, synthetic construct
  source 1..75: mol_type = other DNA
gtccagggcaatatctcggcgtctggctgaagccggaaggtttcccgcatcaggaaattcgtcagtactctttga

SEQ ID NO: 109966 - DNA, 75 bp, synthetic construct
  source 1..75: mol_type = other DNA
ccggcgtggtcgtatacgttcagcatgggcgatttcgtcggggacaaggggcgcgggcttgagattgtagaggat

SEQ ID NO: 109967 - DNA, 75 bp, synthetic construct
  source 1..75: mol_type = other DNA
acgttggcagttgttgcagcaaatgacagtggcgatggcggttctcataacacctcaactgatcctacccacgta

SEQ ID NO: 109968 - DNA, 75 bp, synthetic construct
  source 1..75: mol_type = other DNA
gggcaatcctgccagtggtcgggccgtattatctcaggaacaggacggcattaaatcgcacacccacagcgccag

SEQ ID NO: 109969 - DNA, 75 bp, synthetic construct
  source 1..75: mol_type = other DNA
gggcaagcctgccagtggtcgggccgtattgtctcaggaacaggacggcattaaatcgcatacccacagcgccag

SEQ ID NO: 109970 - DNA, 75 bp, synthetic construct
  source 1..75: mol_type = other DNA
ggctggaaacccggtgataagctgacattacgtaccgaaggcgaagcagtgcaggtcaccgtcagcggtatcctc

SEQ ID NO: 109971 - DNA, 75 bp, synthetic construct
  source 1..75: mol_type = other DNA
gggcaaacctgccagtggtcgggccgtattttctcaggaacaggacggcattaaatcgcacacccacagcgccag

SEQ ID NO: 109972 - DNA, 75 bp, synthetic construct
  source 1..75: mol_type = other DNA
ccccgatgcgcggtcagattcaggatatcgaaccggaacagatccaccttgcgattaaagaagcgcgggtactgg

SEQ ID NO: 109973 - DNA, 75 bp, synthetic construct
  source 1..75: mol_type = other DNA
gaaaattcaacaggaaaaatcagcccggtcattgctgccattcatcgcgaatacaggcagacatggaaaacactg

SEQ ID NO: 109974 - DNA, 75 bp, synthetic construct
  source 1..75: mol_type = other DNA
cgcacggaagagcgattagggttacggcttttaacgcgaaccacacgcagcgttgttcccacagaggcgggtgaa

SEQ ID NO: 109975 - DNA, 75 bp, synthetic construct
  source 1..75: mol_type = other DNA
ccacgattactaccggcagtctgcctccgggagaccatacactttactcccctcagtatgtggttaccgccaaac

SEQ ID NO: 109976 - DNA, 75 bp, synthetic construct
  source 1..75: mol_type = other DNA
tgccgtttattgatggcacggaagtcgatttcgttcgcgaaggacttaatcagatattcaaatttcacaacccta

SEQ ID NO: 109977 - DNA, 75 bp, synthetic construct
  source 1..75: mol_type = other DNA
gtattttctcaggaacaggacggcattaaatcgcagacccacagcgccagcgcatccagtaccgatttggggacg

SEQ ID NO: 109978 - DNA, 75 bp, synthetic construct
  source 1..75: mol_type = other DNA
tcagataccgttccgtctggttatgccctgatgcaggggcagacttttgacaaatctgcatacccgaaacttgca

SEQ ID NO: 109979 - DNA, 75 bp, synthetic construct
  source 1..75: mol_type = other DNA
gctgaaaccggaaggtttcccgcatcaggaaattcgtcagtactctttgacccgtaaacctgatggcaaaggcta

SEQ ID NO: 109980 - DNA, 75 bp, synthetic construct
  source 1..75: mol_type = other DNA
atacgcagggggcagcaggtcttgagttatacgaggtgtataacaacggatatccaacagcgtatggaaatatca

SEQ ID NO: 109981 - DNA, 75 bp, synthetic construct
  source 1..75: mol_type = other DNA
tagcccaagctttacctcaagatcgggaagcgctgtaccacctggtctggcgcgagcctgtggagcgaattactt

SEQ ID NO: 109982 - DNA, 75 bp, synthetic construct
  source 1..75: mol_type = other DNA
cttacacctaagaagttaaataaattaaaactattagctcagctcggagtagttaattgtggatatatgaagcca

SEQ ID NO: 109983 - DNA, 75 bp, synthetic construct
  source 1..75: mol_type = other DNA
ccagcggtagaaaaaatcgcgcagaaacacaccagcttccagatcaaaccggaacaatacaacatcgttggcgaa

SEQ ID NO: 109984 - DNA, 75 bp, synthetic construct
  source 1..75: mol_type = other DNA
gaacgaccagaaagcggaacagaacagcccaaatacgcaacaaaacgagccagaaacgaaacaacctgaaccagt

SEQ ID NO: 109985 - DNA, 75 bp, synthetic construct
  source 1..75: mol_type = other DNA
gtgaatttgttgcagggattagcgacccgaatgatccgaaatgggtgaaggagattgaaacccgcgattcagtga

SEQ ID NO: 109986 - DNA, 75 bp, synthetic construct
  source 1..75: mol_type = other DNA
caactcaaacgttacctgacgatagggaagagctgtatcaccttgtctggcgtgagcctgcggagcgaatcactt

SEQ ID NO: 109987 - DNA, 75 bp, synthetic construct
  source 1..75: mol_type = other DNA
tatcgggtaacactggatgttcctggagaacggtttcatcgtgcggatattgatatcaaggaagatccaaaggga

SEQ ID NO: 109988 - DNA, 75 bp, synthetic construct
  source 1..75: mol_type = other DNA
gcatctggtgatagcaacgttagcagcgcgacgttaaaaaaacaggctgcggtaatgcaactgatcaatgcctgg

SEQ ID NO: 109989 - DNA, 75 bp, synthetic construct
  source 1..75: mol_type = other DNA
atcatccgagggtaaaaatacgagcgattcaggagcactggtttaatccagttccacaagacgaggacgcggtaa

SEQ ID NO: 109990 - DNA, 75 bp, synthetic construct
  source 1..75: mol_type = other DNA
ggcagcctgagttcacagataaaacactctccaggaaacccggggcggttcagatggatcattatcttgatactg

SEQ ID NO: 109991 - DNA, 75 bp, synthetic construct
  source 1..75: mol_type = other DNA
ttgaagccgacgttgaaaacatcaagataaacttagcggaaactcgcgcggatgtgagagagctgacaaaaatta

SEQ ID NO: 109992 - DNA, 75 bp, synthetic construct
  source 1..75: mol_type = other DNA
cggcttagccaaagagacgtggaaccacgccgactggaatcgtttttaccaaagcattttgtgttatagccacta

SEQ ID NO: 109993 - DNA, 75 bp, synthetic construct
  source 1..75: mol_type = other DNA
cgacgcttcttcaccatatatcgacaatcaacaggtttgacaatctgatgactcagccgttgttgtcagatgggc

SEQ ID NO: 109994 - DNA, 75 bp, synthetic construct
  source 1..75: mol_type = other DNA
ggataactggatcagcattatcctaggggattcggttactgttggcagtggagccattattctgtctccgtatat

SEQ ID NO: 109995 - DNA, 75 bp, synthetic construct
  source 1..75: mol_type = other DNA
acacgatgctggcgatggagcatatccggaaaccgctggcagcacgtcaggcactgacccggtcagaggcggtat

SEQ ID NO: 109996 - DNA, 75 bp, synthetic construct
  source 1..75: mol_type = other DNA
aaatgaacgtaacgttaattaccgccccgaaagggagtgacgagaaaacgttcacagccggaacgcagcagattg

SEQ ID NO: 109997 - DNA, 75 bp, synthetic construct
  source 1..75: mol_type = other DNA
atgaatccttttgataatattgctcctcttttccctgagggggatgatagaaataaccataaaaacggtggtagt

SEQ ID NO: 109998 - DNA, 75 bp, synthetic construct
  source 1..75: mol_type = other DNA
cacaacagcaattacttgaagagatggacaactggccaacttattatccttatcagttacagacgaaagaaattg

SEQ ID NO: 109999 - DNA, 75 bp, synthetic construct
  source 1..75: mol_type = other DNA
gaaatacccctgtgacgcctctggtcgatgccggatgcaatatctggaatctgtacaccctgaacaacggcgggg

SEQ ID NO: 110000 - DNA, 75 bp, synthetic construct
  source 1..75: mol_type = other DNA
ggtgagcgccataatgcacttgatgacgcccgttatcaggcaaaatacgtttcagttatctggcaaaaactgatc

SEQ ID NO: 110001 - DNA, 75 bp, synthetic construct
  source 1..75: mol_type = other DNA
acccgcacaataagccgatcgttcacccgaaagtcaccacctttacccatctttcgcagttaccggaactgtgga

SEQ ID NO: 110002 - DNA, 75 bp, synthetic construct
  source 1..75: mol_type = other DNA
gtgtttggcaatcggtatatcccttgcttcaaagtggtgaccttgatcctgtttttaaaatgaaagcagaaaaag

SEQ ID NO: 110003 - DNA, 75 bp, synthetic construct
  source 1..75: mol_type = other DNA
gggaacgatgctaaaaagtttgccggggctggtgcacgcgcgggactgccgcaaggtatgcgcttatctggtgaa

SEQ ID NO: 110004 - DNA, 75 bp, synthetic construct
  source 1..75: mol_type = other DNA
tgagttaagagacattatcaataacatgagcaaagataagactcctgaaaactgggaagggagggtaatgttaca

SEQ ID NO: 110005 - DNA, 75 bp, synthetic construct
  source 1..75: mol_type = other DNA
agacttatccaaaccatgctttcgttgccgtataccatgatgataaagaagatcatcctcatgtacatgttaata

SEQ ID NO: 110006 - DNA, 75 bp, synthetic construct
  source 1..75: mol_type = other DNA
agaatggacgccggatttattcaggcaggtcagtgacagagccgggaattttcagcgggatcatcgatatgccag

SEQ ID NO: 110007 - DNA, 75 bp, synthetic construct
  source 1..75: mol_type = other DNA
gggaacattgagtttaggacgtcgatagttcaaatgcagggcattaacttttggcaacctattgtttacggtata

SEQ ID NO: 110008 - DNA, 75 bp, synthetic construct
  source 1..75: mol_type = other DNA
cctgtatgttgtactgggtgtactggcgctgggcattctcgcaagcgtcatgttcccgggcaaacctgaatctga

SEQ ID NO: 110009 - DNA, 75 bp, synthetic construct
  source 1..75: mol_type = other DNA
tctaaagcaaagggaaatggcgttcctgggaaaggttgcgcgggggcgcatgagtatacagtttgtgaaggaatt

SEQ ID NO: 110010 - DNA, 75 bp, synthetic construct
  source 1..75: mol_type = other DNA
atgctccctgtttcatcaattggtaatgatattagtagtgatttagtccgtcgaaaaatgaatgaccttcctgaa

SEQ ID NO: 110011 - DNA, 75 bp, synthetic construct
  source 1..75: mol_type = other DNA
cagttttacatcggcacataccgacgcctggcgtcagcagggctatgaagacacgatgctggcgatggagcatat

SEQ ID NO: 110012 - DNA, 75 bp, synthetic construct
  source 1..75: mol_type = other DNA
agaacaagcgataaccgccatcctggaatacataagccttaaaaagggtgaggctattgagcatgtattgaacgg

SEQ ID NO: 110013 - DNA, 75 bp, synthetic construct
  source 1..75: mol_type = other DNA
cacctctcgcatgttgtcggtgatcccgttgttgttctttcggggatgagtcgccagatagcccctcaaacgcgc

SEQ ID NO: 110014 - DNA, 75 bp, synthetic construct
  source 1..75: mol_type = other DNA
tagccaaaaacaccgggaaaaagaagggcggcttgctgtccaaactatttagcctgttagggaagggggccggtg

SEQ ID NO: 110015 - DNA, 75 bp, synthetic construct
  source 1..75: mol_type = other DNA
gggcgcttatcaggcgggagtggttaaggcactggcagagtgtggtacacagatcagcatggtttcagggaccag

SEQ ID NO: 110016 - DNA, 75 bp, synthetic construct
  source 1..75: mol_type = other DNA
tggcgttactacaacgatcgcgatgtacgcacaatcgttgagctggggaaagccatagacttcgatgccagaacg

SEQ ID NO: 110017 - DNA, 75 bp, synthetic construct
  source 1..75: mol_type = other DNA
ggtattgattacattacccgtaatggtgaacttgaggcttactgttatgatggaaaaggttccgagcaaacaggg

SEQ ID NO: 110018 - DNA, 75 bp, synthetic construct
  source 1..75: mol_type = other DNA
atccgcaaaccggagatatgggaccggaatttagtaagactatcgatctggaaactgctggcggagtcattgatc

SEQ ID NO: 110019 - DNA, 75 bp, synthetic construct
  source 1..75: mol_type = other DNA
ccggcgtggtcgtatacattcagcctggcagagttcgtaggcgacaagggtcgcgggctggaagtagtcgagggt

SEQ ID NO: 110020 - DNA, 75 bp, synthetic construct
  source 1..75: mol_type = other DNA
cgcacccggtcagagtgggtttattgctcccgatggaacagttgataagcactatgaagatcagctgaaaatgta

SEQ ID NO: 110021 - DNA, 75 bp, synthetic construct
  source 1..75: mol_type = other DNA
gaattttttgttcaggtttggggaaatggagccaacttcgacaacacgattttgcgccgttcatacgaacggcag

SEQ ID NO: 110022 - DNA, 75 bp, synthetic construct
  source 1..75: mol_type = other DNA
tatcggggctctcaatggtgccattatcgcggcctctcccgatctgtcagaagccgccgcacgcctggaggctct

SEQ ID NO: 110023 - DNA, 75 bp, synthetic construct
  source 1..75: mol_type = other DNA
cttgccgtcaggaaatgtggatcaacccgcttgatgcgcaaaaacgcggtatcaacaacggcgataaagtcagga

SEQ ID NO: 110024 - DNA, 75 bp, synthetic construct
  source 1..75: mol_type = other DNA
atgtttcggttacatcgaggtagcagcaattttccctttcatatcactaactctctgggactcccacacacagag

SEQ ID NO: 110025 - DNA, 75 bp, synthetic construct
  source 1..75: mol_type = other DNA
tgatcgatccactgccgatctacacgccgggctttgaaagttatcaggatccgctgaacaaacagtatccgctgc

SEQ ID NO: 110026 - DNA, 75 bp, synthetic construct
  source 1..75: mol_type = other DNA
tggtgctgtccggcggcggggcggtgggcgcttatcaggcgggagtggttaaggcactggcagagtgtggtacac

SEQ ID NO: 110027 - DNA, 75 bp, synthetic construct
  source 1..75: mol_type = other DNA
ccggcgtggtcatatacgtttagcctgggcgacttcgtaggcgataaggggcgcggcttgcaagtagtcgagggt

SEQ ID NO: 110028 - DNA, 75 bp, synthetic construct
  source 1..75: mol_type = other DNA
attgagcttaaagaaccaaatggtaaagccccgacgaaagagcagatcgcctggatgcgcaggcttagagaggaa

SEQ ID NO: 110029 - DNA, 75 bp, synthetic construct
  source 1..75: mol_type = other DNA
tatcggggctcttaatggtgccattatcgcagcctctcccgacctgtcagaagccgccgcacgcctggaggctct

SEQ ID NO: 110030 - DNA, 75 bp, synthetic construct
  source 1..75: mol_type = other DNA
atgcgcaaggatgcaggtgttgacggtgatgctcagcgcctcggtcagctttcctggctgctgtttctgaaaatc

SEQ ID NO: 110031 - DNA, 75 bp, synthetic construct
  source 1..75: mol_type = other DNA
acatcctcaacggcaccttttgctatcaccgtaactacctgaaaaagcaccgttacgacgatgattgcaatttag

SEQ ID NO: 110032 - DNA, 75 bp, synthetic construct
  source 1..75: mol_type = other DNA
ctctgtcagacgggctaccgttgtatgtgtcgctgtaccccacgaagggggaatgcaggatattatcgactgcat

SEQ ID NO: 110033 - DNA, 75 bp, synthetic construct
  source 1..75: mol_type = other DNA
ggcgacaaaggggctgttgtggttcgtattcctgtcggtgaatcagataatgccttttcacctgaaaagctgcat

SEQ ID NO: 110034 - DNA, 75 bp, synthetic construct
  source 1..75: mol_type = other DNA
tcagttggaagctgcaattgcgccattggtcgatattctttgagccgcgcgcgctgtgctggatcctgatgcctg

SEQ ID NO: 110035 - DNA, 75 bp, synthetic construct
  source 1..75: mol_type = other DNA
atgccagaacggctattcaattcgaaggtgagcgccataatgcacttgatgacgcccgttaccaggcaaaatacg

SEQ ID NO: 110036 - DNA, 75 bp, synthetic construct
  source 1..75: mol_type = other DNA
catatttggttagagtgcatcactttgaagatctagttgcgcttttctcggaaaatccaattaattttctttttg

SEQ ID NO: 110037 - DNA, 75 bp, synthetic construct
  source 1..75: mol_type = other DNA
gtgatctcctttcatgaaaatacgcactccacgcacatcccggcggtaattctggccgtgaacaataacccgatg

SEQ ID NO: 110038 - DNA, 75 bp, synthetic construct
  source 1..75: mol_type = other DNA
gatttactgatccctgtggatgaaacaccgcctgtcatcaacgacgaacaatccacattaacaccgttaaccacc

SEQ ID NO: 110039 - DNA, 75 bp, synthetic construct
  source 1..75: mol_type = other DNA
atgctgacggaaaggtacaggctttcagctctgttaatattgccagcggtcgtccgacagttgtgctttccgacg

SEQ ID NO: 110040 - DNA, 75 bp, synthetic construct
  source 1..75: mol_type = other DNA
gatgacgtgattgcgcgtaacttcaatctggatattaaaaacccacatcaggcggaaaccgttagccatgatccg

SEQ ID NO: 110041 - DNA, 75 bp, synthetic construct
  source 1..75: mol_type = other DNA
gccagcatcatcccgcgtaattatcgtaaatatctctatcacgcgtatctggcctatatggaggctaacgggtat

SEQ ID NO: 110042 - DNA, 75 bp, synthetic construct
  source 1..75: mol_type = other DNA
aatgaacatgaactttttacagaaaatattattaatccagaacacatactcatccttaactactctttgagtaga

SEQ ID NO: 110043 - DNA, 75 bp, synthetic construct
  source 1..75: mol_type = other DNA
ttaatactggcgagggctttgacaactttcatcagtctaaagttaaaatcaatgagatagatcatccgtctgaat

SEQ ID NO: 110044 - DNA, 75 bp, synthetic construct
  source 1..75: mol_type = other DNA
atgaaaaaaagtgtattgacggcgtttataactgtggtatgtgcaacgtccagcgttatggcagctgatgataat

SEQ ID NO: 110045 - DNA, 75 bp, synthetic construct
  source 1..75: mol_type = other DNA
ggatgttaggcatacctctgccactgcttatatgccttgcagatatcagcacaacattaagccgcctgtctggta

SEQ ID NO: 110046 - DNA, 75 bp, synthetic construct
  source 1..75: mol_type = other DNA
atgatcttgctgcaactctcttcagctcagggaccggaagaatgttgtctcgcagtgaaaaaggcgctggacagg

SEQ ID NO: 110047 - DNA, 75 bp, synthetic construct
  source 1..75: mol_type = other DNA
agcccccagctacttcctgtgactcttgatgcagttgccgaacagccagaatcgctcgcagaggacccggaaacc

SEQ ID NO: 110048 - DNA, 75 bp, synthetic construct
  source 1..75: mol_type = other DNA
acagtgacctttaaagttgattatatcgctacggggaaagcgacttctggtaatgtgaatgcggtaacaaatttc

SEQ ID NO: 110049 - DNA, 75 bp, synthetic construct
  source 1..75: mol_type = other DNA
gtctgctgaaagcggttatcaaaggcgaaactgcgacgcgtccgcaggatgaaatcactgtccaaatggccgagc

SEQ ID NO: 110050 - DNA, 75 bp, synthetic construct
  source 1..75: mol_type = other DNA
actagaaccgaaagcggtcgcaggtgttgccggaattacagttaaatcgggaattgaagatttttccattattcc

SEQ ID NO: 110051 - DNA, 75 bp, synthetic construct
  source 1..75: mol_type = other DNA
tacgtggttacgcaccgcaaatcacgggtgtcgcacaaacgaatgcaaaggtcactgtctcacagaacaaccgta

SEQ ID NO: 110052 - DNA, 75 bp, synthetic construct
  source 1..75: mol_type = other DNA
cagaacattccttgctggtaactacctgaaaatcggctggccgtcagtcaatatcatgtcctcatcagattataa

SEQ ID NO: 110053 - DNA, 75 bp, synthetic construct
  source 1..75: mol_type = other DNA
atggcaatgccgcgcaaactcaaatacatgaatgtctttctgaacggctacagctatcagggcgttgcaacgtcc

SEQ ID NO: 110054 - DNA, 75 bp, synthetic construct
  source 1..75: mol_type = other DNA
agagaacccgcatcagctgcagcagcttatccgcctgccggggcagcagtatgatgaggagtccggcctgtatta

SEQ ID NO: 110055 - DNA, 75 bp, synthetic construct
  source 1..75: mol_type = other DNA
aactcgagcacggcgatgtgcttccccatgacatggtcgaatcctctgctgcagcatggcgggataaaatgagca

SEQ ID NO: 110056 - DNA, 75 bp, synthetic construct
  source 1..75: mol_type = other DNA
acgcgccgtcactcgctttatggtggatcgcgttgatccgaaactcggcgaatccattatggacccggcctgcgg

SEQ ID NO: 110057 - DNA, 75 bp, synthetic construct
  source 1..75: mol_type = other DNA
gagatcctgcgcatcaaactcgtcggcgtgatcccagaggatcaatcagtattgcgcgcctctaaccagggtgaa

SEQ ID NO: 110058 - DNA, 75 bp, synthetic construct
  source 1..75: mol_type = other DNA
ctggtgctcgacagtaacagtagcaaaagtcgtgtgttgtaccaggttgcaggcattgccggtattcactcccaa

SEQ ID NO: 110059 - DNA, 75 bp, synthetic construct
  source 1..75: mol_type = other DNA
ttagctgcgggtgtacagaataaaattttagagtacatggctatgggaataccggcaataacaacatcgattggt

SEQ ID NO: 110060 - DNA, 75 bp, synthetic construct
  source 1..75: mol_type = other DNA
tacttgtattgaccccgcgatttccatatccagttattggcggtgatagattaagaatctttgaactatgtaaag

SEQ ID NO: 110061 - DNA, 75 bp, synthetic construct
  source 1..75: mol_type = other DNA
aaaattggcaacgctttacgtactattgacacctggcatccgaaggttgatgagttgggggctatcgccgtggag

SEQ ID NO: 110062 - DNA, 75 bp, synthetic construct
  source 1..75: mol_type = other DNA
cgaaggtggtgaggtggtttgcgacgtttatctgactgatgccgcagcaatagagacgctcgaggagacggggat

SEQ ID NO: 110063 - DNA, 75 bp, synthetic construct
  source 1..75: mol_type = other DNA
tgctgaaatccaaaaagccaacctgcaacgggtggatgtggcttcgcttccggtagatacggatacgttaaaggt

SEQ ID NO: 110064 - DNA, 75 bp, synthetic construct
  source 1..75: mol_type = other DNA
tatatttatacgcgatattaatgttgttatttgtaatgtagtgaccgagtttgagaacaatccagcgctgggagg

SEQ ID NO: 110065 - DNA, 75 bp, synthetic construct
  source 1..75: mol_type = other DNA
atttcacattgtacgacctagtcgaaaaggtaatgggacagactttagaatttcagcgtgattttttgacccttg

SEQ ID NO: 110066 - DNA, 75 bp, synthetic construct
  source 1..75: mol_type = other DNA
gggcgtttttcgcccgacggcagtctatggccccggcgataaagagctaaaaccactgtttgactggatgctgcg

SEQ ID NO: 110067 - DNA, 75 bp, synthetic construct
  source 1..75: mol_type = other DNA
gtctttacgatagaatgaagggggctcgtaaagcaaaaattgtgtcatgcattacacttgaacccccctattttg

SEQ ID NO: 110068 - DNA, 75 bp, synthetic construct
  source 1..75: mol_type = other DNA
cttttgctcttgagaaattcctaaaagagtacaggaaaacgcgcccattgcaggtatggcaacgtaacgaacaaa

SEQ ID NO: 110069 - DNA, 75 bp, synthetic construct
  source 1..75: mol_type = other DNA
aagcggcacactaagcaggggatacaaaccaatctgtcgctgaaagaggaaagctacggcgactggctaccgaaa

SEQ ID NO: 110070 - DNA, 75 bp, synthetic construct
  source 1..75: mol_type = other DNA
ttaaaaatgctttccacgggcgcacgctgtttaccgttagtgcgggcgggcagccagcctattcacaggatttcg

SEQ ID NO: 110071 - DNA, 75 bp, synthetic construct
  source 1..75: mol_type = other DNA
ggatgactgggaatcggtattcagtgaattccacgacgccgatgcgcagaactctcacagctattgctttgagat

SEQ ID NO: 110072 - DNA, 75 bp, synthetic construct
  source 1..75: mol_type = other DNA
gaaaggcttgagtctaccatagcggcactcactttctttatatcaacgggtcaatgtgactgcgatgaaatagca

SEQ ID NO: 110073 - DNA, 75 bp, synthetic construct
  source 1..75: mol_type = other DNA
ttttcactggaacaggctgtgggtattgcctctatggtgaaatccgaccgtctgcaaatggcgatgatcgccagt

SEQ ID NO: 110074 - DNA, 75 bp, synthetic construct
  source 1..75: mol_type = other DNA
caccatcgcaaaaaacgaaaagagagcacgaaaatatggcgctcgagcatgaatcagaaagattcgcaccgtgtg

SEQ ID NO: 110075 - DNA, 75 bp, synthetic construct
  source 1..75: mol_type = other DNA
gtctttacgatagaatgaagggggctcgtaaagcaaatgtagtgtcatgcattacacttgaacaaccctattttg

SEQ ID NO: 110076 - DNA, 75 bp, synthetic construct
  source 1..75: mol_type = other DNA
ttaatggtaaagttattgctccagcttgtaccctggtagctgcgacgaaagattcagtagtcacattgccaaatg

SEQ ID NO: 110077 - DNA, 75 bp, synthetic construct
  source 1..75: mol_type = other DNA
tcaggttcgatcaggagctggctgccaagttcgaagcggaccacgaaatggctctgttgatgaacaaggattacg

SEQ ID NO: 110078 - DNA, 75 bp, synthetic construct
  source 1..75: mol_type = other DNA
acgcagcaagaacgccgagctgattgaaacggttagaacatcctatgaaattcaaaacaaacaaactcagcctta

SEQ ID NO: 110079 - DNA, 75 bp, synthetic construct
  source 1..75: mol_type = other DNA
ctgctggtggaacactaccgctctctattcctgatgatgcagacagtatcgcgcgaataaatgtctatccagtca

SEQ ID NO: 110080 - DNA, 75 bp, synthetic construct
  source 1..75: mol_type = other DNA
gccgtatcaaaaaaatcgaggcggaattacgcaagtcccaaaagcacattgcccggtctgaaaagtatatgacga

SEQ ID NO: 110081 - DNA, 75 bp, synthetic construct
  source 1..75: mol_type = other DNA
cttataccgggcagtgtcataccactcaggggaatccgtatattggcgttaatttcggcgtgagaacacttgagg

SEQ ID NO: 110082 - DNA, 75 bp, synthetic construct
  source 1..75: mol_type = other DNA
ttgtagttatcgactgccacatgacctcatcagcaaaatatgctgacatcctgttgccggattgcaccgcctctg

SEQ ID NO: 110083 - DNA, 75 bp, synthetic construct
  source 1..75: mol_type = other DNA
gccaaacgtctgggtaagcgtttcttaatgcgcgttgctgccgtgggtggcgtctgtttttacgcaggaatgctg

SEQ ID NO: 110084 - DNA, 75 bp, synthetic construct
  source 1..75: mol_type = other DNA
ggaatcgcaactactttgttttgctattcgttggcgtctttcttagcagctttggctcgaccgctaacccgcaaa

SEQ ID NO: 110085 - DNA, 75 bp, synthetic construct
  source 1..75: mol_type = other DNA
ttgaaatgtctgggaacataatgtcttggcaggacgttatgcaaaaaacatcattggtatacaaagagttagcag

SEQ ID NO: 110086 - DNA, 75 bp, synthetic construct
  source 1..75: mol_type = other DNA
ttacgaaggtggtccagcaaatatacctgaagcaattgcatcaggcacgccaataatatcgacccctgtggggat

SEQ ID NO: 110087 - DNA, 75 bp, synthetic construct
  source 1..75: mol_type = other DNA
catacgtaagtttggctcgtaatacttactgggacgccagcagtaatgtgaattattcattatcacttagccgcg

SEQ ID NO: 110088 - DNA, 75 bp, synthetic construct
  source 1..75: mol_type = other DNA
aatgtttcccgagctaacaacaaatcagcttaaagtctgcgttttttatgcgatgggtgttccttatgatgccat

SEQ ID NO: 110089 - DNA, 75 bp, synthetic construct
  source 1..75: mol_type = other DNA
gcagaaaattgagaacggcatgaaacgtgcggtgatgctgttcgagcgcgccgaatactgggaacagcgcgcgca

SEQ ID NO: 110090 - DNA, 75 bp, synthetic construct
  source 1..75: mol_type = other DNA
acgaagtaaacaaaattatgcaggcagccaatatcagccagcctgacgccgataaattgcttgctgcatcacgtg

SEQ ID NO: 110091 - DNA, 75 bp, synthetic construct
  source 1..75: mol_type = other DNA
gtattgtctcaggaacaggacggcattaaatcgcacacccacagcgccagcgcatccagtactgatttggggacg

SEQ ID NO: 110092 - DNA, 75 bp, synthetic construct
  source 1..75: mol_type = other DNA
gacaaatggaatgggattttgtcgtcagcccactccacccactggcagcgaagcggcatccattagaaaacagtg

SEQ ID NO: 110093 - DNA, 75 bp, synthetic construct
  source 1..75: mol_type = other DNA
atattaaacccgataatttcttatattataacgaaagactttgtttagctgactttggattggctaaaacatctg

SEQ ID NO: 110094 - DNA, 75 bp, synthetic construct
  source 1..75: mol_type = other DNA
gcgatcgcatccatggcgcataaggttgcccgctccaaaacctatatcgacaacgccggcaaggatctggttgcc

SEQ ID NO: 110095 - DNA, 75 bp, synthetic construct
  source 1..75: mol_type = other DNA
tgctggcggagtcattgatcgggacaccattaaacggtggcttaagcaatcacgcgaagcgcaatctgccattat

SEQ ID NO: 110096 - DNA, 75 bp, synthetic construct
  source 1..75: mol_type = other DNA
ttgttcattatccgttatcatcattggttgtgcgtcagcttagccgttgaattcaacaaagatttaatcgaagcc

SEQ ID NO: 110097 - DNA, 75 bp, synthetic construct
  source 1..75: mol_type = other DNA
accccgccctaccctcgattcctgggataccgaatatatgcaggaaaaccgctgggatgaggcgtctgcttcctt

SEQ ID NO: 110098 - DNA, 75 bp, synthetic construct
  source 1..75: mol_type = other DNA
tggctcaaccgctaacccgcaaatgtttgcccttgcccgtgaacatgctgacaaaaccggacgtgaggcggtgat

SEQ ID NO: 110099 - DNA, 75 bp, synthetic construct
  source 1..75: mol_type = other DNA
cgatacggtacttaaggacgacgtgctggcctcaaaagagctgctggtgatgcccggcggcagtgtgacgctcaa

SEQ ID NO: 110100 - DNA, 75 bp, synthetic construct
  source 1..75: mol_type = other DNA
tccagatgtgtcgggaaatcaagctgcctctgttcccggggtttacggagcgcgccagagaaacattgctgaatt

SEQ ID NO: 110101 - DNA, 75 bp, synthetic construct
  source 1..75: mol_type = other DNA
ccactattgctactggtagtctgcctccgggagaccatacactttactccccacagtatgtggttaccgccaaac

SEQ ID NO: 110102 - DNA, 75 bp, synthetic construct
  source 1..75: mol_type = other DNA
tggagatattacaggcccggcaccccgtgaggattcgtcttgttaatattgatgcaccggaaaagaaacagcctt

SEQ ID NO: 110103 - DNA, 75 bp, synthetic construct
  source 1..75: mol_type = other DNA
aaatagaaaggcatattttaaaacatatccctccagactttctgctgtatacgcgtttggtgattatgatacttg

SEQ ID NO: 110104 - DNA, 75 bp, synthetic construct
  source 1..75: mol_type = other DNA
tcactttttcttgccgtttgtttatggcgtgattgcgtcaattgtggcgccaatagttactctagctgtatctta

SEQ ID NO: 110105 - DNA, 75 bp, synthetic construct
  source 1..75: mol_type = other DNA
acagtcagggtgatggctggaaatatcgcggtcgtggcctgctacaaatcactggtcgtgagaactacaccaaat

SEQ ID NO: 110106 - DNA, 75 bp, synthetic construct
  source 1..75: mol_type = other DNA
gcttgtcggccaaaaacgctattttgattgttgagttcgctaaagatctcatggagaaagagggtaaaggtgttg

SEQ ID NO: 110107 - DNA, 75 bp, synthetic construct
  source 1..75: mol_type = other DNA
agtgcaacaggaaccggaaaaaatctgcaccgcctgcggtcagagcggtggtggcaactgccctgattgtggtgc

SEQ ID NO: 110108 - DNA, 75 bp, synthetic construct
  source 1..75: mol_type = other DNA
gcgcaacaggaagtggaaaaagtctgcaccgcctgcggtcaaagcggtggcggcaactgccctgattgtggcgcg

SEQ ID NO: 110109 - DNA, 75 bp, synthetic construct
  source 1..75: mol_type = other DNA
gggaagaattaactagctttgcaacgaaacttgctactcaaatcaagatgcaaaccagcagcaatttaaatgatc

SEQ ID NO: 110110 - DNA, 75 bp, synthetic construct
  source 1..75: mol_type = other DNA
atattgaaaaagatattgataatattaactatttttctcaaggcattaattacaaagaattagaaaaaaatgcgc

SEQ ID NO: 110111 - DNA, 75 bp, synthetic construct
  source 1..75: mol_type = other DNA
agcaaagcgcggagagcgtgccggagtacggcaaagcggtcaatatcaaaaccaaacgcggcgtaatcaagccgc

SEQ ID NO: 110112 - DNA, 75 bp, synthetic construct
  source 1..75: mol_type = other DNA
gatcgggacaccattaaatggtggcttaagcaatcacgcgaagcgcaatctgccattatgaccgatgaaatcccg

SEQ ID NO: 110113 - DNA, 75 bp, synthetic construct
  source 1..75: mol_type = other DNA
ggcggtttcacccggctggtggaaaacctgaactatgcggcagaaaacctggtacctacgttcggcaagcatcgc

SEQ ID NO: 110114 - DNA, 75 bp, synthetic construct
  source 1..75: mol_type = other DNA
aaaataaagtttgcattggttttatatcaaagagatatggacgaaaagtgaaaggagaagcttatctttatgaga

SEQ ID NO: 110115 - DNA, 75 bp, synthetic construct
  source 1..75: mol_type = other DNA
atctcggtacaggaagtgatacccgatggcatatttgcgatcccggtggtcaacgtttgggcggcaagggggcaa

SEQ ID NO: 110116 - DNA, 75 bp, synthetic construct
  source 1..75: mol_type = other DNA
tggcgaaacgcgaatgagcggtggtggggtgacttattaccttgagcaggctcgtcagaaatccaacgctcgtat

SEQ ID NO: 110117 - DNA, 75 bp, synthetic construct
  source 1..75: mol_type = other DNA
gcgaatgttccatcaccagattgaacgtggcaacccgcgacgaacgtttacagggatggcttttatcgaaggata

SEQ ID NO: 110118 - DNA, 75 bp, synthetic construct
  source 1..75: mol_type = other DNA
ttgtggggcataaaccccttggggccagaacggcagaactcacaatcccagttaggtgtaacactggaaacgctg

SEQ ID NO: 110119 - DNA, 75 bp, synthetic construct
  source 1..75: mol_type = other DNA
aatgtgttaaaggaaatacaagatcctcaagaattaaatatgatgcttaagcgtgtaatcgaaaatataattgtt

SEQ ID NO: 110120 - DNA, 75 bp, synthetic construct
  source 1..75: mol_type = other DNA
tcacattgctgcatattcctcctgagaagatcacccgccttgccgccagtgaaaatgaaaacggtcaacggggcc

SEQ ID NO: 110121 - DNA, 75 bp, synthetic construct
  source 1..75: mol_type = other DNA
tgcctccgggctttaaaaatgttccgcctgtgctgtgtctcggtgcggatctgaaaaataccttctgcctggtgc

SEQ ID NO: 110122 - DNA, 75 bp, synthetic construct
  source 1..75: mol_type = other DNA
tgcgcatccgggatactggtggctagcgatggactgggagaaccttttacccagttgcattgactgtaatcgtaa

SEQ ID NO: 110123 - DNA, 75 bp, synthetic construct
  source 1..75: mol_type = other DNA
aaccagcatgaatcggaacggaacgaccaaaaagcggaacaaaacagcccaaatgcgttacaaaacgagccagaa

SEQ ID NO: 110124 - DNA, 75 bp, synthetic construct
  source 1..75: mol_type = other DNA
agaatgcggatatttcgtctctgcgagaacgtattcagcagcaaatatgcggagaatatcacttaggtgatgttg

SEQ ID NO: 110125 - DNA, 75 bp, synthetic construct
  source 1..75: mol_type = other DNA
aacctggattatgaagtggagcgccacgcctcactcaccggcgacagcgtgcgttttaacaccgaagcgcggcgt

SEQ ID NO: 110126 - DNA, 75 bp, synthetic construct
  source 1..75: mol_type = other DNA
atggtttatgagaatattaaaaattattataagtgtattgttgtttataaaaaagaaaagaaaaaaataccggac

SEQ ID NO: 110127 - DNA, 75 bp, synthetic construct
  source 1..75: mol_type = other DNA
gcctgcgggcgcatgggctaaacataagttaactggagggggcgaatactggcgttgggttggtcagggcgtgcc

SEQ ID NO: 110128 - DNA, 75 bp, synthetic construct
  source 1..75: mol_type = other DNA
cccgccatagaaaaacattcgacgatgtaatgacggagccgccaaaatctggaattaaatgggatgatgttgttg

SEQ ID NO: 110129 - DNA, 75 bp, synthetic construct
  source 1..75: mol_type = other DNA
taatgacaccggattcaaacagaatggtgatggcctgctggatgtttatgccaatagcgtgcatgtgttgcgttt

SEQ ID NO: 110130 - DNA, 75 bp, synthetic construct
  source 1..75: mol_type = other DNA
attttcagtataccagtgaggtgttttacaacccgggcgggaacgagcacagctggacgtttcgagcaccttctg

SEQ ID NO: 110131 - DNA, 75 bp, synthetic construct
  source 1..75: mol_type = other DNA
gtgacgtttatcgccgatgtcagaacggcgcagatcgcgagtctggaggtgacgcaggataacgccgtggctgac

SEQ ID NO: 110132 - DNA, 75 bp, synthetic construct
  source 1..75: mol_type = other DNA
agccgacgttgagcgcacaacatggggcatttcagtcaataaacccaacgccgcgaaacagcaggggcaattgct

SEQ ID NO: 110133 - DNA, 75 bp, synthetic construct
  source 1..75: mol_type = other DNA
ctcgttaccttgaaggaagacgagaaatgatgcaatggtacgctgactaccttgatgctcttcgaaaagagtcac

SEQ ID NO: 110134 - DNA, 75 bp, synthetic construct
  source 1..75: mol_type = other DNA
acgttacgcaaaaacaggggccagtatcacttctgtaaggctggggtcaagacaaagctactcccccgcaggtaa

SEQ ID NO: 110135 - DNA, 75 bp, synthetic construct
  source 1..75: mol_type = other DNA
tggcgttttacagcgacaaagccagcgttttcaggatcaacaacaaacaggccaccggtggcgatggtcagactc

SEQ ID NO: 110136 - DNA, 75 bp, synthetic construct
  source 1..75: mol_type = other DNA
cgcgttacgtgcgcacttatgcgccagcacagcagcgttttgcggttggtgacgtatgggccgggatgcaggtga

SEQ ID NO: 110137 - DNA, 75 bp, synthetic construct
  source 1..75: mol_type = other DNA
aggtggagacgatggtcatgcagtctgtcagccgtggtcgtgaccttggctatctcactgatgaactggttaagc

SEQ ID NO: 110138 - DNA, 75 bp, synthetic construct
  source 1..75: mol_type = other DNA
gcgagggtgaccgatgcgttcggtaatacgcttgccgggcagacggtcagcgtgacggcaggcaacggcgcaacg

SEQ ID NO: 110139 - DNA, 75 bp, synthetic construct
  source 1..75: mol_type = other DNA
acgctgcaggtgaaggtcaccgatgctaacggtaatacgcttgccgggcagacggtcagcgtgatggcaggcaac

SEQ ID NO: 110140 - DNA, 75 bp, synthetic construct
  source 1..75: mol_type = other DNA
tggagatccctgtcaccagccagacggcaggaatcagtgtggtcaccgccagcatcaacagcagcagtcaaagcc

SEQ ID NO: 110141 - DNA, 75 bp, synthetic construct
  source 1..75: mol_type = other DNA
cggtaaaagataagtttggtccgggtaagaacggatttactgacggaaatcttcgcacaggacgtcttgctacct

SEQ ID NO: 110142 - DNA, 75 bp, synthetic construct
  source 1..75: mol_type = other DNA
ttattgcggatgtcaggacggcgaagatagcggatctggtcgttagccaggataacgcggtggcagacggcgcga

SEQ ID NO: 110143 - DNA, 75 bp, synthetic construct
  source 1..75: mol_type = other DNA
attgatagaggaagttgggatcgtataactaaaattgattttaaagatggaaatagacagcttgaattaacatgg

SEQ ID NO: 110144 - DNA, 75 bp, synthetic construct
  source 1..75: mol_type = other DNA
gagcgtatttgtcgtattcgccagctgccggacggtcacaactttaccctgatgtgtcgcgatctttctgaactc

SEQ ID NO: 110145 - DNA, 75 bp, synthetic construct
  source 1..75: mol_type = other DNA
cacgacctgattggaaaattactcgggcagcagctaaaacaaattaattctggtgaaggtaagaaaaaggttctc

SEQ ID NO: 110146 - DNA, 75 bp, synthetic construct
  source 1..75: mol_type = other DNA
tttgaatcctgcgtgaaagataatccagcattttttaataaagcctgggatggtgatctctatgaacacaaacgt

SEQ ID NO: 110147 - DNA, 75 bp, synthetic construct
  source 1..75: mol_type = other DNA
gcttaagttacaacatattcagtttaacgtggtgaacgccgacacgttgcgggaagcgcaacagcgcccacaaga

SEQ ID NO: 110148 - DNA, 75 bp, synthetic construct
  source 1..75: mol_type = other DNA
gcagcagcatgatgaggaatcagggctgtactataaccgtcaccggtactacgatccgttgcaggggcggtatat

SEQ ID NO: 110149 - DNA, 75 bp, synthetic construct
  source 1..75: mol_type = other DNA
atgaataacatcagagataccagtaatacatcacaaccacgagataacagtaaaaccgcaagacgatatctggat

SEQ ID NO: 110150 - DNA, 75 bp, synthetic construct
  source 1..75: mol_type = other DNA
ttcaggaaaacgatccggagaaaatggaaggcgctgaacatccacacaaggagaatgctggcagcgctcaggacc

SEQ ID NO: 110151 - DNA, 75 bp, synthetic construct
  source 1..75: mol_type = other DNA
acacgatgagtggatttcaagggcaatggctgaatcgtcatggtcattcattaagtcgatggtaatgaaagcaag

SEQ ID NO: 110152 - DNA, 75 bp, synthetic construct
  source 1..75: mol_type = other DNA
tttgtgaaaaattgcagttaaaaccagggatgcgcgtactggatattggctgtggctggggcggactggcgcact

SEQ ID NO: 110153 - DNA, 75 bp, synthetic construct
  source 1..75: mol_type = other DNA
tgcctgataatgcaatgttcatcggggatgattatcctgacgctacggtttttcattatattgcaaataacatag

SEQ ID NO: 110154 - DNA, 75 bp, synthetic construct
  source 1..75: mol_type = other DNA
aatgtgatggataaaggtgcagtagcaggtcttaaggagtggtttgttaactgtgtaggggtagattatgaataa

SEQ ID NO: 110155 - DNA, 75 bp, synthetic construct
  source 1..75: mol_type = other DNA
aattccgggcagcgtttatcgtcgcgcaaaagaagtagtcctgaacaaagaaagtccgttcaaagaatggtccgc

SEQ ID NO: 110156 - DNA, 75 bp, synthetic construct
  source 1..75: mol_type = other DNA
aaggacggctcagtggcagacggttcgacggcgaacacgctgcgggtgagggtgacggatgcgttcggtaatgcg

SEQ ID NO: 110157 - DNA, 75 bp, synthetic construct
  source 1..75: mol_type = other DNA
ccggacggcacggtggaaatcagtgtcaccagccagacggcgggagtcagtgcggtcaccgccagcatcaacagc

SEQ ID NO: 110158 - DNA, 75 bp, synthetic construct
  source 1..75: mol_type = other DNA
aatgctctcctttagtcgaacaaaacctgatgccatggctttccacaggcgctgctgcgttaatcacggccttag

SEQ ID NO: 110159 - DNA, 75 bp, synthetic construct
  source 1..75: mol_type = other DNA
atgccgccagtatcccttaacatagtgaagatcgttccgggttttgaacccaggacatcagaaacacaaactgat

SEQ ID NO: 110160 - DNA, 75 bp, synthetic construct
  source 1..75: mol_type = other DNA
tatttgcgtgcgctacaggagcgtgatgcgctgcgccaacttcgcgctgttaccacgggctatatggggacggca

SEQ ID NO: 110161 - DNA, 75 bp, synthetic construct
  source 1..75: mol_type = other DNA
gcgtactggaagtgatgcgctacacccagcagcatgagagcgatgaattgattttgccgccgctggcggaagcat

SEQ ID NO: 110162 - DNA, 75 bp, synthetic construct
  source 1..75: mol_type = other DNA
gcttaccacgcccgccgcgccgattgtgctggtggataaaaaatatgtacctgagctttgtgatgatatcgcccc

SEQ ID NO: 110163 - DNA, 75 bp, synthetic construct
  source 1..75: mol_type = other DNA
tgtgatatctatccgcaagccatcattaacacgcttcactatagatgattatgtccgaacagggcgttttgataa

SEQ ID NO: 110164 - DNA, 75 bp, synthetic construct
  source 1..75: mol_type = other DNA
ctcttgtgggaacagggcttgctaatgctgatgattcgcttccttccagtaactatgcgccgcccgccgggggaa

SEQ ID NO: 110165 - DNA, 75 bp, synthetic construct
  source 1..75: mol_type = other DNA
atcaaaattgggccgtcagcagttgcttaccggctctcagagatgcaagcttggattaaaggagattggttcgat

SEQ ID NO: 110166 - DNA, 75 bp, synthetic construct
  source 1..75: mol_type = other DNA
gatgggttaccagcgcctgggcgaagaaacatcacccgcgctggtaccgtgaggtccgcaagacaacggaaaaga

SEQ ID NO: 110167 - DNA, 75 bp, synthetic construct
  source 1..75: mol_type = other DNA
gcaagagcgcggcgtggcggcgatttatggtccaggtacacctatgctcgacagtgtgcgcgacgtactgaatct

SEQ ID NO: 110168 - DNA, 75 bp, synthetic construct
  source 1..75: mol_type = other DNA
tccgggcgtggtgagtttgccggagtcgagcagcctgaaaacgctggtcaatgcgttgaacagtttaggtgcgac

SEQ ID NO: 110169 - DNA, 75 bp, synthetic construct
  source 1..75: mol_type = other DNA
ttatcggtaggtattttatttatatgtttttctgcattctccccaactcgtggtatgtttactgcatggtgtggt

SEQ ID NO: 110170 - DNA, 75 bp, synthetic construct
  source 1..75: mol_type = other DNA
tggttcgcaggtcaatggtgcgctgggtatcggcgttcagaacgccctggggggggaattcaattgctttcgggg

SEQ ID NO: 110171 - DNA, 75 bp, synthetic construct
  source 1..75: mol_type = other DNA
cgccagtgcacgcattattggcgttggcctcaacacggttttacgtcacttaaaaaactcaggccgcagtcggta

SEQ ID NO: 110172 - DNA, 75 bp, synthetic construct
  source 1..75: mol_type = other DNA
atggagccgttcgttgagcgattgctgaatgctgggaatgacgttctgttccctggcaagttcctcgatcggcct

SEQ ID NO: 110173 - DNA, 75 bp, synthetic construct
  source 1..75: mol_type = other DNA
atgcgtgatgatttttgcgcctttattctgactcacgggcgaccggacaaagttctgacttaccggacgttgcgt

SEQ ID NO: 110174 - DNA, 75 bp, synthetic construct
  source 1..75: mol_type = other DNA
tcagtgacatacaaaatcagatattaggtatccccgtcgcaacaattatcgttgcgactcaaatgaagcaggcta

SEQ ID NO: 110175 - DNA, 75 bp, synthetic construct
  source 1..75: mol_type = other DNA
agaaagtaacaaccattgttgaatccacagcggcgacgaacgccgctaaggtcgcacaagcaatatctcctacat

SEQ ID NO: 110176 - DNA, 75 bp, synthetic construct
  source 1..75: mol_type = other DNA
acggtttccgtcaactggcgcgggaatatcccgatctggtacaggaagcgcgtggtaaagggatgttgatggcaa

SEQ ID NO: 110177 - DNA, 75 bp, synthetic construct
  source 1..75: mol_type = other DNA
ttcgcctgatcgtgaaaatcgcgcagctttattacgatcaggaaatgactcaggcgcaaatcgcccgcgagttag

SEQ ID NO: 110178 - DNA, 75 bp, synthetic construct
  source 1..75: mol_type = other DNA
ggagtattattgatggtcagcaacgactgacttcattaactttatttctaatttacctccataaccttcagaaag

SEQ ID NO: 110179 - DNA, 75 bp, synthetic construct
  source 1..75: mol_type = other DNA
cgtggtggtgggtgggatgaatgccaccggggccagcggttccagcgtgacggttaacacgccgaccgccgggtt

SEQ ID NO: 110180 - DNA, 75 bp, synthetic construct
  source 1..75: mol_type = other DNA
cacatgattcatttaaaaaacaagatgtcgatgaacgacagtctttgtataaaataatttgtgagaatatttggg

SEQ ID NO: 110181 - DNA, 75 bp, synthetic construct
  source 1..75: mol_type = other DNA
atacagcataactttaagtatgctttcatgcgtttcagatacgcaaaatgatgataactcttatgatgtgcttac

SEQ ID NO: 110182 - DNA, 75 bp, synthetic construct
  source 1..75: mol_type = other DNA
cgccagcgcgtactggtggccggaacgctcaataacgccaaaacgatccgcattgaaccgccactgacactgacc

SEQ ID NO: 110183 - DNA, 75 bp, synthetic construct
  source 1..75: mol_type = other DNA
cagaactatacagcagaatactccacaaaaaaatattgattttattaatctatataatgaaataaggaagaaata

SEQ ID NO: 110184 - DNA, 75 bp, synthetic construct
  source 1..75: mol_type = other DNA
tcctggtgcgttccggcgtgctggtatcggtacacgcgtttgcgtctgatccggcgcgcggtatgtttatcctcg

SEQ ID NO: 110185 - DNA, 75 bp, synthetic construct
  source 1..75: mol_type = other DNA
caggagattttccgtaacaatcttgatgcgttagtcgatgaaccgtggggtggcgtgatcaacaccggtagccgt

SEQ ID NO: 110186 - DNA, 75 bp, synthetic construct
  source 1..75: mol_type = other DNA
atgctgcacgcgctgttaaagcaacaagagaaactggtcaatgcagtcccctttctgggaggcagtgactcagaa

SEQ ID NO: 110187 - DNA, 75 bp, synthetic construct
  source 1..75: mol_type = other DNA
tggatcccccgcaagttacggccatcgcgtgtacatcagccacgtccgcgacgtgcctgtaccggagagctgatc

SEQ ID NO: 110188 - DNA, 75 bp, synthetic construct
  source 1..75: mol_type = other DNA
gctggaagatgatcacgcagttcaaaacgtttatcttcgcacagcataacagggtgctggtatctggtatccagc

SEQ ID NO: 110189 - DNA, 75 bp, synthetic construct
  source 1..75: mol_type = other DNA
cactcactttctttatatcaacgggtcaatgtgactgcgatgaaatagcagaatcaaattttaattatatgattg

SEQ ID NO: 110190 - DNA, 75 bp, synthetic construct
  source 1..75: mol_type = other DNA
taatggttacctataatcctgattggagtaaggtaattaataaagtgaagtctttttgtgttgcaggaacagttt

SEQ ID NO: 110191 - DNA, 75 bp, synthetic construct
  source 1..75: mol_type = other DNA
caccagccagacggcgggcaccagtgccgtcaccgccagtatcaacagcagtaccgcgagccggaacgtgacgtt

SEQ ID NO: 110192 - DNA, 75 bp, synthetic construct
  source 1..75: mol_type = other DNA
aggaaaatgatccggaggaaatggaaggcactgcgcatcagcacaaggagaacactggcggcaatcagcatcatg

SEQ ID NO: 110193 - DNA, 75 bp, synthetic construct
  source 1..75: mol_type = other DNA
gatgctttgggttataccaataactcactgaaaaagtttgctcttaatctgacgtccggtagcgatgaactgatc

SEQ ID NO: 110194 - DNA, 75 bp, synthetic construct
  source 1..75: mol_type = other DNA
gaccggacgtggcgacctcagccgaagccaaagccgtcagtggacggtccgcagagcgccgtcgtgacggggcct

SEQ ID NO: 110195 - DNA, 75 bp, synthetic construct
  source 1..75: mol_type = other DNA
ccggacggatgatcgactacaccacgaccagccgcttcacgctggcagtcacccttctgttactgacggcctgcc

SEQ ID NO: 110196 - DNA, 75 bp, synthetic construct
  source 1..75: mol_type = other DNA
ctttaaacgaatgtttacctattatctgaatgcttgcgcaggcgctttccgtgcgcgtgatattcagctctggca

SEQ ID NO: 110197 - DNA, 75 bp, synthetic construct
  source 1..75: mol_type = other DNA
acaaagtgtctgttggcggtggctctcaggtgaatggtgcgctgggtatcggtgttcagaatgcgctgggtggta

SEQ ID NO: 110198 - DNA, 75 bp, synthetic construct
  source 1..75: mol_type = other DNA
ctattcgtgtacgtcagtctttgttaaaaaatgaagtctgtctttatcctgatgagattaaagaaatcaggagac

SEQ ID NO: 110199 - DNA, 75 bp, synthetic construct
  source 1..75: mol_type = other DNA
atgcagttcatggtaaatgaatttgatatagtttattttgttgtaataaatgatttgcagggtattagatataaa

SEQ ID NO: 110200 - DNA, 75 bp, synthetic construct
  source 1..75: mol_type = other DNA
gaatccattcgtcataagccccgttacacagatgagcaaaaacaggttgccgttgacattatcttaaccacggct

SEQ ID NO: 110201 - DNA, 75 bp, synthetic construct
  source 1..75: mol_type = other DNA
caacgatccctgacaatatcccacattaaggcactttcagcccgatttggcgttaagccggaatggtttctttga

SEQ ID NO: 110202 - DNA, 75 bp, synthetic construct
  source 1..75: mol_type = other DNA
acacagatgagcaaaaacaggttgccgttgacattatcttaaccacggctgctgcctggcgtttaccagcagaac

SEQ ID NO: 110203 - DNA, 75 bp, synthetic construct
  source 1..75: mol_type = other DNA
tgacggcgatatcacccgctaccgttatgataatccacacagtgacttaccctgcgcaacggaagatgccaccgg

SEQ ID NO: 110204 - DNA, 75 bp, synthetic construct
  source 1..75: mol_type = other DNA
tcaggtgattaaccgctttaactctgcatttattgctttgacagaagcgttagacaatcaggaggaacctgaaaa

SEQ ID NO: 110205 - DNA, 75 bp, synthetic construct
  source 1..75: mol_type = other DNA
gccagtatctattcctgttaagaatgaggctgcaaaaccagttttcacttatctctaccctcatgaaatagaact

SEQ ID NO: 110206 - DNA, 75 bp, synthetic construct
  source 1..75: mol_type = other DNA
cttatgcacgagttttgcagttatatagttgggataataatgttgcaagtctattaaggattatgaatgaagaag

SEQ ID NO: 110207 - DNA, 75 bp, synthetic construct
  source 1..75: mol_type = other DNA
agtaagaccatcgatatggatactgctggcggagtcattgatcgtggcaccattaaatggtggcttaagcaatca

SEQ ID NO: 110208 - DNA, 75 bp, synthetic construct
  source 1..75: mol_type = other DNA
gatgctgaatatatgcaggaaaaccgctgggatgaggagtctgcttcttttgtcccggttgagactgaatccgat

SEQ ID NO: 110209 - DNA, 75 bp, synthetic construct
  source 1..75: mol_type = other DNA
ggacccattaaagccgggcggtcatgctgagttatggattaatcgccgtgagtgggacaagtacgcagcccaact

SEQ ID NO: 110210 - DNA, 75 bp, synthetic construct
  source 1..75: mol_type = other DNA
cagtcactgccgccatttgtcgcgaatacaagcagacatggaaaacactggatgacgaactggcctacgctctct

SEQ ID NO: 110211 - DNA, 75 bp, synthetic construct
  source 1..75: mol_type = other DNA
ataattattaccgtaacgccagtttttttatattcccctcattatacgaaggctttggtttgcctttgctggagg

SEQ ID NO: 110212 - DNA, 75 bp, synthetic construct
  source 1..75: mol_type = other DNA
acgatgttggagaaaaagtatctgatctcacaaaaagtaaaaaatgtgacatcaaacttgcagccgcaccgtcgg

SEQ ID NO: 110213 - DNA, 75 bp, synthetic construct
  source 1..75: mol_type = other DNA
caggatgataagaagtgtgagctgattgtggttatcgactgccacatgacatcatccgcgaaatacgctgatatc

SEQ ID NO: 110214 - DNA, 75 bp, synthetic construct
  source 1..75: mol_type = other DNA
gcgacgcaacataccaggaaacattcgatgaagagtatcaggttgaagttcaggaagatgatccggaggaaatgg

SEQ ID NO: 110215 - DNA, 75 bp, synthetic construct
  source 1..75: mol_type = other DNA
acaaaatactggtgcatctgacacgaccgcacaaccagagccggtaaaagttaccgctgacgaagtaaacaaaat

SEQ ID NO: 110216 - DNA, 75 bp, synthetic construct
  source 1..75: mol_type = other DNA
ttgtcgccgatgtcaggacggcgaagatagcggacctggtggttattaaggacggctcagtggcagacggcgcga

SEQ ID NO: 110217 - DNA, 75 bp, synthetic construct
  source 1..75: mol_type = other DNA
accgcgttggagtaacggtattgatggcaacgcacgacatcaacctgattgcacggcgttcctatcgcatgctga

SEQ ID NO: 110218 - DNA, 75 bp, synthetic construct
  source 1..75: mol_type = other DNA
gctttgtgccggagtggcagaattactctgaaacggcaagagtgcaacagcaaaactggagcgtgctggcgcggg

SEQ ID NO: 110219 - DNA, 75 bp, synthetic construct
  source 1..75: mol_type = other DNA
tttgattcaggggcttattttgacctgattggtaaatacctccatcacgataatgagtacacggcgagttttgcg

SEQ ID NO: 110220 - DNA, 75 bp, synthetic construct
  source 1..75: mol_type = other DNA
cctcagagcgcgcgctgaaaaagtttttacgtgaaagtgattttgcctttctggagatgctgagtgcacgtattt

SEQ ID NO: 110221 - DNA, 75 bp, synthetic construct
  source 1..75: mol_type = other DNA
cttatgcaagagttttgcagttatatagttgggataataatgttgcaagtctattaaggattatcaatgaagaaa

SEQ ID NO: 110222 - DNA, 75 bp, synthetic construct
  source 1..75: mol_type = other DNA
tttcgtcgattggcgatgcgaaaagtattcgtggcggcaccttgctgttgacccagttgcacggcgcagatggcg

SEQ ID NO: 110223 - DNA, 75 bp, synthetic construct
  source 1..75: mol_type = other DNA
gagatcagtgtcaccagccagacggcggggatcagtacagtcaccgcaaccatcaacagcagcagtcagagccgg

SEQ ID NO: 110224 - DNA, 75 bp, synthetic construct
  source 1..75: mol_type = other DNA
acacgtctgttgttgatctcgcccgcgccagaaccaatcaacagcacagtgaaaattcaacaggaaaaatcagcc

SEQ ID NO: 110225 - DNA, 75 bp, synthetic construct
  source 1..75: mol_type = other DNA
tccgacggtcatcacagggccggacggcacggcggagatctttgtcaccagtcagaccgccggaatcagtgcagt

SEQ ID NO: 110226 - DNA, 75 bp, synthetic construct
  source 1..75: mol_type = other DNA
cgactgaaacggtcattgtttttattgcgctttcagtcggtgccatctttattgacctgtttatgcaccgtgatg

SEQ ID NO: 110227 - DNA, 75 bp, synthetic construct
  source 1..75: mol_type = other DNA
gcaatggcgaacacgctgcgggtgaaggtcaccgatgcgttcggcaatgcgcttgccggacagacggtcagcgtg

SEQ ID NO: 110228 - DNA, 75 bp, synthetic construct
  source 1..75: mol_type = other DNA
gtgagggacatcagcgcgcgcattcagcacctccatcacattcacccactaactcacccaaacaccatgccaaca

SEQ ID NO: 110229 - DNA, 75 bp, synthetic construct
  source 1..75: mol_type = other DNA
cgccaataactccacattcctgatgcataccaacaacagtcaggctgaccagctgaatgtcacgaataaactgtc

SEQ ID NO: 110230 - DNA, 75 bp, synthetic construct
  source 1..75: mol_type = other DNA
gcttggtgactatgacgccatcatttttggcacacctacccgtttcggtaatatgtccggccagatgcgcaactt

SEQ ID NO: 110231 - DNA, 75 bp, synthetic construct
  source 1..75: mol_type = other DNA
ccttaattaccaggaagaaagcttgagttatcagcgactggttacgcatctgaagtttttatcctggcgtattct

SEQ ID NO: 110232 - DNA, 75 bp, synthetic construct
  source 1..75: mol_type = other DNA
ctgcttaacggcaacagagatacgaagatagtcaatattgcgcccgatgccagcaacgcgcaggtcaccctgaac

SEQ ID NO: 110233 - DNA, 75 bp, synthetic construct
  source 1..75: mol_type = other DNA
atgtttgttggtcagggcgatcagatattcatgaatgaagtgttcctgaaacgcctgacggcccccaccattacc

SEQ ID NO: 110234 - DNA, 75 bp, synthetic construct
  source 1..75: mol_type = other DNA
tcggtccaggggcattacgtgcgtcactggcatcttatgcgcagtcaccgcgctattaccgagccctggttgctg

SEQ ID NO: 110235 - DNA, 75 bp, synthetic construct
  source 1..75: mol_type = other DNA
ggggtaacacggaaacaccaaacggtacggttacagtcaccatcagcgatgatcataactttgaccgccagatta

SEQ ID NO: 110236 - DNA, 75 bp, synthetic construct
  source 1..75: mol_type = other DNA
aggaacgctcaacaatgtcacgattaaccagaactgtacgattaagggcatgctggaggcgacccaggtcagagg

SEQ ID NO: 110237 - DNA, 75 bp, synthetic construct
  source 1..75: mol_type = other DNA
agataacgccggatgaaccgaaagaaccggtggctgctcttactccgtctttatctactcagaccacagtcagtg

SEQ ID NO: 110238 - DNA, 75 bp, synthetic construct
  source 1..75: mol_type = other DNA
gactccgcccgccacacgctggcgctactggcaaaggccgattacgtgctcaccgataacagcggttttattttc

SEQ ID NO: 110239 - DNA, 75 bp, synthetic construct
  source 1..75: mol_type = other DNA
gcgtgaaaaagtggtggcgatattcgcggaagccgaaccgtttacaccttcagataacgtggatgcacagcttta

SEQ ID NO: 110240 - DNA, 75 bp, synthetic construct
  source 1..75: mol_type = other DNA
gccgcaattccggtttttggggaagaacagttgaaaacagaacggttcaggaatggaaaaaactacttacggctg

SEQ ID NO: 110241 - DNA, 75 bp, synthetic construct
  source 1..75: mol_type = other DNA
atactaccgtaacaaaaaatgcaacgttcacctttaatggcactgcggatactactcagattacagcgtttgcta

SEQ ID NO: 110242 - DNA, 75 bp, synthetic construct
  source 1..75: mol_type = other DNA
ggtcgggtatcgttaccacctgtcggaagaggcctgggtggagccacagatggagctggtttacggttctgtgtc

SEQ ID NO: 110243 - DNA, 75 bp, synthetic construct
  source 1..75: mol_type = other DNA
ggttaactcaactgttgatttaacccttacaaaacaatcagggactggcaatcgttttgttttacagaacttagg

SEQ ID NO: 110244 - DNA, 75 bp, synthetic construct
  source 1..75: mol_type = other DNA
ggagagcgtaactctcggcggtgaattgcgactaacggcgacgtcggcagccgaacaacaaagtcagtggaaaac

SEQ ID NO: 110245 - DNA, 75 bp, synthetic construct
  source 1..75: mol_type = other DNA
aggccgttatcgtgctgctgttcttcatcgcggcaaaactcggcctgaatgcgaccgatcacatctggcatcatg

SEQ ID NO: 110246 - DNA, 75 bp, synthetic construct
  source 1..75: mol_type = other DNA
gccggtacctatccagatggcagatcagacagtttacgtagcccagtcagcaacaactacgactacggatgtagg

SEQ ID NO: 110247 - DNA, 75 bp, synthetic construct
  source 1..75: mol_type = other DNA
cggcacctctggtctttccatcggccacgtctcaccggaagcggcaagcggcggcagcattggtctgattgaaga

SEQ ID NO: 110248 - DNA, 75 bp, synthetic construct
  source 1..75: mol_type = other DNA
aagtaccgttattctgggaagtgaccgtgtctttactgacaagaatgacggaaccggtaatgcggtctcctctgt

SEQ ID NO: 110249 - DNA, 75 bp, synthetic construct
  source 1..75: mol_type = other DNA
agctatggtcaaatgccgtcatctttagaattagcgcagcggccaagcggtggggtagtaccgcgaaaagtaggt

SEQ ID NO: 110250 - DNA, 75 bp, synthetic construct
  source 1..75: mol_type = other DNA
cacccattttgcgggtaaaaaaatcagcggtgctgacgacgcgcactgggcggtgaagaaagatggcggtgattt

SEQ ID NO: 110251 - DNA, 75 bp, synthetic construct
  source 1..75: mol_type = other DNA
aaatcctgagcatgaccacaaacgataattatggtgatccgtatgctggaagcataacactggcagcctttaata

SEQ ID NO: 110252 - DNA, 75 bp, synthetic construct
  source 1..75: mol_type = other DNA
aggcaacggcgcaacggtcgcttcgacggtcaccacgcagtcggacggcacggtggagatctttgtcaccagtca

SEQ ID NO: 110253 - DNA, 75 bp, synthetic construct
  source 1..75: mol_type = other DNA
actgggttgagaagcgtgtggatgttggttttcggattgctgtttcaccgcaggatgggctgattgccagacgcc

SEQ ID NO: 110254 - DNA, 75 bp, synthetic construct
  source 1..75: mol_type = other DNA
ctgaaggccgtacccaggaagagtggatgcggcatctgtatgcccagtcgcgggaagcgattcctgaactgccaa

SEQ ID NO: 110255 - DNA, 75 bp, synthetic construct
  source 1..75: mol_type = other DNA
ccgatgccagcacggcgcagatcgcggacctggtggtcattaaggatggttcagaggcggacggttcgacggcga

SEQ ID NO: 110256 - DNA, 75 bp, synthetic construct
  source 1..75: mol_type = other DNA
cctgtaaagttgagttccgccacgggaacatgacgctggaaaatccttcaccagagctgctcacagtgttgatcc

SEQ ID NO: 110257 - DNA, 75 bp, synthetic construct
  source 1..75: mol_type = other DNA
tcaacgggaccaattataattggtaaagatatggatgacaaaaatataaatgacaacgatctaattaacgaagat

SEQ ID NO: 110258 - DNA, 75 bp, synthetic construct
  source 1..75: mol_type = other DNA
acggcgcaacgactgccccgacggtcatcacagagccggacggcacggtggaaatcagtgtcaccagtcagacgg

SEQ ID NO: 110259 - DNA, 75 bp, synthetic construct
  source 1..75: mol_type = other DNA
cagcagccacaacgaaggctggtgaagccgctgaacaggccagtgcagcagagagatctgcttccgcagcgaaga

SEQ ID NO: 110260 - DNA, 75 bp, synthetic construct
  source 1..75: mol_type = other DNA
atgaaaacgaaaatccctgatgcggtattggctgctgaggtgagtcgccgtggtttggtaaaaacgacagcgatc

SEQ ID NO: 110261 - DNA, 75 bp, synthetic construct
  source 1..75: mol_type = other DNA
ttcgtgaagctgcaaacggaaactggctattcatcctggcggccctagcgccccatcttgaaccagctctccgta

SEQ ID NO: 110262 - DNA, 75 bp, synthetic construct
  source 1..75: mol_type = other DNA
cgagacacggaaaatggctattgttgtcacggccttgatcgcaattgctgccctcttggttgcggtgatttagat

SEQ ID NO: 110263 - DNA, 75 bp, synthetic construct
  source 1..75: mol_type = other DNA
acggacggtgccgggcgggagttccgtctggtgctgaccacgcaggcgcagcgtgcggaagaggcccgcacctct

SEQ ID NO: 110264 - DNA, 75 bp, synthetic construct
  source 1..75: mol_type = other DNA
cgcacctgcgcggctcgacgatatgctcgaaatacagactgaaataacatcaatgcgtggcacctctttggtttt

SEQ ID NO: 110265 - DNA, 75 bp, synthetic construct
  source 1..75: mol_type = other DNA
aattcagtacacatgagccacatccaaagaatgtgatggataaaggcgcagtagcaggtcttaaggagtggtttg

SEQ ID NO: 110266 - DNA, 75 bp, synthetic construct
  source 1..75: mol_type = other DNA
tcgaaggtgagcggcataatgcacttgatgacgcccgttaccaggcaaaatacgtttcagttatctggcaaaaac

SEQ ID NO: 110267 - DNA, 75 bp, synthetic construct
  source 1..75: mol_type = other DNA
gtaatgtgctgctcgaaaaccattcgtctctggaggtcagggagaattttactggtggtattgaggcttatgaca

SEQ ID NO: 110268 - DNA, 75 bp, synthetic construct
  source 1..75: mol_type = other DNA
atcaaaagagagcatgcctggttgtggtcttgtttttgagctataccaacgtcgtttgagtgctgcgattgataa

SEQ ID NO: 110269 - DNA, 75 bp, synthetic construct
  source 1..75: mol_type = other DNA
aggagcgcttgggaaagttgcaggacagtatttatatctcgctaactgaccattgccagtttgcgattaaacgct

SEQ ID NO: 110270 - DNA, 75 bp, synthetic construct
  source 1..75: mol_type = other DNA
ccgttagatgatgcactgttacaattgcgggaatttatcgacgaaaactccggtgaattttttgttcaggtctgg

SEQ ID NO: 110271 - DNA, 75 bp, synthetic construct
  source 1..75: mol_type = other DNA
caggccagccacgtttctgcgaaaacgcgggaaaaagtggaagcggcgatggcggagctgaattacattcccaac

SEQ ID NO: 110272 - DNA, 75 bp, synthetic construct
  source 1..75: mol_type = other DNA
aagggtatctcctgagattctcggagtagtttttactatgattcaaattcattcagaacaacctattgccgcgca

SEQ ID NO: 110273 - DNA, 75 bp, synthetic construct
  source 1..75: mol_type = other DNA
cagctcatgggagtacacgagaaatttaatcctgaaactggtatatcagagcttgggacaggaaagtcttctggc

SEQ ID NO: 110274 - DNA, 75 bp, synthetic construct
  source 1..75: mol_type = other DNA
gagtacgacctgaacctgttaatagtagatttgatagaaaaggtggatgtttggatttaatatcttcccacctcg

SEQ ID NO: 110275 - DNA, 75 bp, synthetic construct
  source 1..75: mol_type = other DNA
atgatatcgcttggatgaaagatcttagaaattcaattgagcattacgaattctcgtttactattaaatatgttc

SEQ ID NO: 110276 - DNA, 75 bp, synthetic construct
  source 1..75: mol_type = other DNA
atacccaagcattaagccagggtatcacatgaataaaaagggcactgttgcaaagttagcgatgaggcagccttt

SEQ ID NO: 110277 - DNA, 75 bp, synthetic construct
  source 1..75: mol_type = other DNA
tgacgaagtaaacaaaattatgcaggcagccaatatcagccagcctgacgccgataagttgcttgctgcatcacg

SEQ ID NO: 110278 - DNA, 75 bp, synthetic construct
  source 1..75: mol_type = other DNA
tagatactataatcttaaaattaataaatgttctattttttattgacaaggttatttccaaattatttaatttta

SEQ ID NO: 110279 - DNA, 75 bp, synthetic construct
  source 1..75: mol_type = other DNA
caaacaggattttcgcctgctgggacaaaccagcgtggatcgcttgctgcaattctcccagggccaggcggtgaa

SEQ ID NO: 110280 - DNA, 75 bp, synthetic construct
  source 1..75: mol_type = other DNA
agaagcggtgtcgaagcctgtaaagcggcagtacacaatcttctcgcgcaacgcgtaagtggtctgatcatcaac

SEQ ID NO: 110281 - DNA, 75 bp, synthetic construct
  source 1..75: mol_type = other DNA
tttgaatctaagcccaacaagtatagaattatttatatttatacttatatctctttttggatcgtccacataccc

SEQ ID NO: 110282 - DNA, 75 bp, synthetic construct
  source 1..75: mol_type = other DNA
acaggcaaaaccggaaatataaattatccaggtagcgtaactgtaccgccatacggtgaaagtcgcgtgcaagta

SEQ ID NO: 110283 - DNA, 75 bp, synthetic construct
  source 1..75: mol_type = other DNA
tagacttcctcaacggcgatccggaccagccgatcattatggggcgcacctaccaccaggaaaaccgcacccccg

SEQ ID NO: 110284 - DNA, 75 bp, synthetic construct
  source 1..75: mol_type = other DNA
gtacacgagaaatttaatcctgaaactggtatatcagagcttgggacaggaaagtcttctggcttgtgcgtagag

SEQ ID NO: 110285 - DNA, 75 bp, synthetic construct
  source 1..75: mol_type = other DNA
gctctgaatttacctttcattttctggctgttcgccgttccgacctgaacgaccgtccacaccgcgaatctatta

SEQ ID NO: 110286 - DNA, 75 bp, synthetic construct
  source 1..75: mol_type = other DNA
tgcatctggtcagtgcccaaatgagcggaaatatggaggatgttgcaggtgtcacgcaattaatgcgcgaaatgc

SEQ ID NO: 110287 - DNA, 75 bp, synthetic construct
  source 1..75: mol_type = other DNA
gtggcaaaagtcgtaatcagcataaccgatgcaccgcgcggcatcagtgtggagtgccaggtttttccagatgaa

SEQ ID NO: 110288 - DNA, 75 bp, synthetic construct
  source 1..75: mol_type = other DNA
agcaccaaaccggcatttatcagccagggatggggacctcagcgtcatgccaacggtgaaatcgccactcgtgct

SEQ ID NO: 110289 - DNA, 75 bp, synthetic construct
  source 1..75: mol_type = other DNA
atggtggaacgcagtggcgtcgaagcctgtaaagcggcggttcataatcttctcgcacaacgcgtcagcggcctg

SEQ ID NO: 110290 - DNA, 75 bp, synthetic construct
  source 1..75: mol_type = other DNA
gaggttcatattgaggcgaaagtgacgccacgaatgatgccgggtgtggtcgcactgggtgaaggtgcctggtat

SEQ ID NO: 110291 - DNA, 75 bp, synthetic construct
  source 1..75: mol_type = other DNA
tacgctgcaggtgaaggtcaccgatgcgttcgggaatgcgctgaatggacagacggtcagcgtgatggcaggtaa

SEQ ID NO: 110292 - DNA, 75 bp, synthetic construct
  source 1..75: mol_type = other DNA
aggacaactttatgaaagttatcaaaaaggatacaaagtattcgtttctggtttttcttacgagaaaatactgga

SEQ ID NO: 110293 - DNA, 75 bp, synthetic construct
  source 1..75: mol_type = other DNA
cgtgttgccgacaactctgaattttcaggtgttcttcgctgtattgttgtaggggcaataacactctatttcagt

SEQ ID NO: 110294 - DNA, 75 bp, synthetic construct
  source 1..75: mol_type = other DNA
gctctgaagtggcacactgaatttggccacctgaacagaggtgatatgctcacctcagaacaacacaggtgctcc

SEQ ID NO: 110295 - DNA, 75 bp, synthetic construct
  source 1..75: mol_type = other DNA
tcttaccagcagtttttccgtatggttagcgagtattttgactgtcgttatctggggcgttacggctgcctgtga

SEQ ID NO: 110296 - DNA, 75 bp, synthetic construct
  source 1..75: mol_type = other DNA
gctttttgttcgttatggccgtggtattcaaccgactgctcgcgcatttcaactttttggttcagttcgtggtga

SEQ ID NO: 110297 - DNA, 75 bp, synthetic construct
  source 1..75: mol_type = other DNA
ccaaaaacataataaacccaagactcagcaggtttaacaccaggttgagagggatttcaaataaatcagcaaggg

SEQ ID NO: 110298 - DNA, 75 bp, synthetic construct
  source 1..75: mol_type = other DNA
agactgaaactttctcgtttacaaacttacaatgggaaaatttgctgcaatactatagagaaaaccaccagcagc

SEQ ID NO: 110299 - DNA, 75 bp, synthetic construct
  source 1..75: mol_type = other DNA
gtcctggtgacttatattatgtttctgcatcaaatacttactttatcctgaaatcaaaggcgtacggtccatttt

SEQ ID NO: 110300 - DNA, 75 bp, synthetic construct
  source 1..75: mol_type = other DNA
ttaattggtattggagtgctaggtgagtacatagggcgtatctacgttgaggttaagcagcgtccaaagtatata

SEQ ID NO: 110301 - DNA, 75 bp, synthetic construct
  source 1..75: mol_type = other DNA
actgacagagttttccctaatccaggcaattcaagcctggggctgatgactgcttttttcgaagcatacatggac

SEQ ID NO: 110302 - DNA, 75 bp, synthetic construct
  source 1..75: mol_type = other DNA
tcgttcctggggcaataacactctattttagtattttaagcgtcctctttagaattactgtaacagttcttgaat

SEQ ID NO: 110303 - DNA, 75 bp, synthetic construct
  source 1..75: mol_type = other DNA
tggatattgaaggcaaagtcgaagatattgttctgcaattttcaccaatgaacaaagtaacggcgaaaagtttta

SEQ ID NO: 110304 - DNA, 75 bp, synthetic construct
  source 1..75: mol_type = other DNA
tggaaagccctggacatccgcatccggaagatgctgacaactatcagcataacgatagcggtgataaaactggca

SEQ ID NO: 110305 - DNA, 75 bp, synthetic construct
  source 1..75: mol_type = other DNA
gaaaagttgtatgaacttttaaatatagatagtaagaagtgcttcaatgctaaaaccaaaaatattttaatgcgg

SEQ ID NO: 110306 - DNA, 75 bp, synthetic construct
  source 1..75: mol_type = other DNA
aaccagcaagaaacggaacagaacgaccagaaagcggaacaaaacagcccaaatacgcaacaaaacgagccagaa

SEQ ID NO: 110307 - DNA, 75 bp, synthetic construct
  source 1..75: mol_type = other DNA
catgcagaaatgcacgcgattcttggcgcatctcgtgtggcaggagaaagaattttaggcggaaaaatatttgta

SEQ ID NO: 110308 - DNA, 75 bp, synthetic construct
  source 1..75: mol_type = other DNA
accagcagagcggggattcatctgatgatcgaccttgaaaccatgggaaaaaatcctgatgccccgatcatctca

SEQ ID NO: 110309 - DNA, 75 bp, synthetic construct
  source 1..75: mol_type = other DNA
attgtcgactccggcaatgatgcttgtgttgcgctggctgattatattgctggtgggcaacggcagtttgttgaa

SEQ ID NO: 110310 - DNA, 75 bp, synthetic construct
  source 1..75: mol_type = other DNA
ttgtcggtaccgtgctggattatgccgggcgcggcagtcagcgctggtcgaaatggcttccgacactctgtttat

SEQ ID NO: 110311 - DNA, 75 bp, synthetic construct
  source 1..75: mol_type = other DNA
tggtaataggtggtgtctggttaaataatgttctaaaacgactcaaggcattagccgtatgtctggtttatctgc

SEQ ID NO: 110312 - DNA, 75 bp, synthetic construct
  source 1..75: mol_type = other DNA
tagtatcacaattagcattggcttgcactctggctatcacctctcaggctaatgcaactacttataatacattcg

SEQ ID NO: 110313 - DNA, 75 bp, synthetic construct
  source 1..75: mol_type = other DNA
aaaaccgactcggcggtacgcgccacgcatctggcatccggtattagcgtgaaggttcagtcagagcgcagtcag

SEQ ID NO: 110314 - DNA, 75 bp, synthetic construct
  source 1..75: mol_type = other DNA
cgggcttgatgatggctctttctggcttgtactggaaggtatcccggcaacagagatgttcaacgtgattccact

SEQ ID NO: 110315 - DNA, 75 bp, synthetic construct
  source 1..75: mol_type = other DNA
cagggcaaaaatgaccgtaacgatttcgagaactacaccgaaggtaacggtgatggcttcggtttctctgctacc

SEQ ID NO: 110316 - DNA, 75 bp, synthetic construct
  source 1..75: mol_type = other DNA
tggagagggagtaccgttacctgattcttatgatcgccctgatccgagaattaagcagcttgcccgtcgacgtac

SEQ ID NO: 110317 - DNA, 75 bp, synthetic construct
  source 1..75: mol_type = other DNA
aaacgtcgtccagccagtgtggcaatcgtcgccatggcaaacaagctggcacgaacagtatgggcgataaccgcc

SEQ ID NO: 110318 - DNA, 75 bp, synthetic construct
  source 1..75: mol_type = other DNA
cagcgtcgtctcattgcagtggtaatgggggctgacagtgcaaaaggtcgtgaggaagaggcaagaaaattactg

SEQ ID NO: 110319 - DNA, 75 bp, synthetic construct
  source 1..75: mol_type = other DNA
ctcagggcccggcaggtccacagggtatacctggacctccggggccaacaggtagcgtcggtcctaagggggaaa

SEQ ID NO: 110320 - DNA, 75 bp, synthetic construct
  source 1..75: mol_type = other DNA
ccgcggggtgaaaacggccccgtggggaccgcaaggagtgccgggtattcaggggcctgctggtcctgcgggccc

SEQ ID NO: 110321 - DNA, 75 bp, synthetic construct
  source 1..75: mol_type = other DNA
gaccgcaaggagaggcgggtattcaggggcctgctggtcctgcgggcccgcgaggtgaaaccggagccagaggcg

SEQ ID NO: 110322 - DNA, 75 bp, synthetic construct
  source 1..75: mol_type = other DNA
atgaaatatacaccggttggcgttgatatcgcaaaacatgtcattcaggttcacttcatcaatgagcacacaggg

SEQ ID NO: 110323 - DNA, 75 bp, synthetic construct
  source 1..75: mol_type = other DNA
tatgaatacgaaggattcggtatcggtgcaacttatgcgaaatctgatcgtaccgacactcaagttaatgcaggg

SEQ ID NO: 110324 - DNA, 75 bp, synthetic construct
  source 1..75: mol_type = other DNA
gattaggtaatgttaataatgttgtcacactttatcttcataaggaaaaacaaataattaatcaaaaaataaaac

SEQ ID NO: 110325 - DNA, 75 bp, synthetic construct
  source 1..75: mol_type = other DNA
gctcagaacgttgaggctgttgcacaatatcagttcgattttgggctgcgtccgtccgtggcttacctgcaatct

SEQ ID NO: 110326 - DNA, 75 bp, synthetic construct
  source 1..75: mol_type = other DNA
gttatccctcatcttattgaaaagtggcaggcaggtgctgacatggtgcttgctaaacgttcagaccgctcaact

SEQ ID NO: 110327 - DNA, 75 bp, synthetic construct
  source 1..75: mol_type = other DNA
ttaatgcatatctatatcattcagattggattgtatgcttgttagtgcttgtgctgatttgttttctcaacgcta

SEQ ID NO: 110328 - DNA, 75 bp, synthetic construct
  source 1..75: mol_type = other DNA
atctgctaaaatatttaagaaacactcagattttcatctctatgtaagagatcaggaaagcctcactattggtta

SEQ ID NO: 110329 - DNA, 75 bp, synthetic construct
  source 1..75: mol_type = other DNA
gtcacgcgaagcacaatccgccattcttaccaatgaaatcccgttggatgacgcgctgttgcagtttagggagtt

SEQ ID NO: 110330 - DNA, 75 bp, synthetic construct
  source 1..75: mol_type = other DNA
acatttgtttctcaaagattacaatccgaaggaggtccggttgtcgatcaaactgaactaagggccgctaacgct

SEQ ID NO: 110331 - DNA, 75 bp, synthetic construct
  source 1..75: mol_type = other DNA
caggcatcgacagctttgagattagccagatggtggggcggcagctaccgtttatgaccattatcgtgctgttct

SEQ ID NO: 110332 - DNA, 75 bp, synthetic construct
  source 1..75: mol_type = other DNA
gcttaggtttgttgattggctgtgtactgaatgccgattacgccgggcaagcgaaacagatctctcaggaagcgg

SEQ ID NO: 110333 - DNA, 75 bp, synthetic construct
  source 1..75: mol_type = other DNA
aattcactgctacagaaatgcaatggttgacaaagataaatgaagccggaattgatgaaaaacgaagccaacggt

SEQ ID NO: 110334 - DNA, 75 bp, synthetic construct
  source 1..75: mol_type = other DNA
agatgacgaaggaacaaatcagggcacagctggtactctcccgtcaccagtaccagaaactgatgcagtggaaac

SEQ ID NO: 110335 - DNA, 75 bp, synthetic construct
  source 1..75: mol_type = other DNA
caaccaccttgtcgatcaatgagatatcgcaaatgtgcggttatccatcgctgcaatatttctactctgttttta

SEQ ID NO: 110336 - DNA, 75 bp, synthetic construct
  source 1..75: mol_type = other DNA
gccggatgacattatgtcgattttacaggcgttgcatgaagcgggtgcactggatgccgacctggaggtgatctg

SEQ ID NO: 110337 - DNA, 75 bp, synthetic construct
  source 1..75: mol_type = other DNA
gctggcgcgattgctgattgcctggaagctggagcagcagcaacaggaaaatagcgcggcgctgaaatcgcagcg

SEQ ID NO: 110338 - DNA, 75 bp, synthetic construct
  source 1..75: mol_type = other DNA
gacatcagaatagtttatgggaaatcagaactaaactctaaagaatatgaatggttaacaaacctgccttttgta

SEQ ID NO: 110339 - DNA, 75 bp, synthetic construct
  source 1..75: mol_type = other DNA
attaagctccctgccccactgggcagaaaaattgggccgcttaagcggcgatgtgaacctgatgtgcaaactgca

SEQ ID NO: 110340 - DNA, 75 bp, synthetic construct
  source 1..75: mol_type = other DNA
ctgagattcgccatcactattgcgatgcgtttatggatggcaaagcgggagaacgagcggcgttggtgattgtgg

SEQ ID NO: 110341 - DNA, 75 bp, synthetic construct
  source 1..75: mol_type = other DNA
aatgtgaacggtcatcacgaaatcacatccaccagcaggacgtgtgaccatctaatgatcgaccttgaaaccatg

SEQ ID NO: 110342 - DNA, 75 bp, synthetic construct
  source 1..75: mol_type = other DNA
aaattctgcccattcttcatggttgtcctgcagagtccatcgaactcattaagaatgcgaaacgaacggggcaat

SEQ ID NO: 110343 - DNA, 75 bp, synthetic construct
  source 1..75: mol_type = other DNA
gttgataacctacaaaggaaagctaccgggaagaattactgattctctgaagatgccgccgtcaacattgcggtc

SEQ ID NO: 110344 - DNA, 75 bp, synthetic construct
  source 1..75: mol_type = other DNA
cagcgaatccgcgaaatattaccggtagctcatgatatggctgagctgcgttacttattgtcagaggcgtttgac

SEQ ID NO: 110345 - DNA, 75 bp, synthetic construct
  source 1..75: mol_type = other DNA
cagaaacgaaacaacctgaaccagtagtgcaacaggaaccggaaaagatctgcaccgcctgcggtcagagcggcg

SEQ ID NO: 110346 - DNA, 75 bp, synthetic construct
  source 1..75: mol_type = other DNA
cttatggctgggtttgccatgtctgtatgttatttgtttttctcagtcctggagaaagttataaatgcaaggaaa

SEQ ID NO: 110347 - DNA, 75 bp, synthetic construct
  source 1..75: mol_type = other DNA
aatttggaagcaagggacaggctgcaaaccacgccgattacatcgagcgtaaaggagagtatgcgaaacggaaag

SEQ ID NO: 110348 - DNA, 75 bp, synthetic construct
  source 1..75: mol_type = other DNA
tttatgaagggtgtgctgagctgggttggtggtcgaaccgatgtcgtagaatatgcgcgagcagaacgcgttgca

SEQ ID NO: 110349 - DNA, 75 bp, synthetic construct
  source 1..75: mol_type = other DNA
cgttgacctgcaggatccaattgaggtcattcctcaccttattgagaaatggcaggccggtgcggatatggttct

SEQ ID NO: 110350 - DNA, 75 bp, synthetic construct
  source 1..75: mol_type = other DNA
tgtcccggtcgagactgaatccgatccgatgaacgtcacttttgacaagctggcccctgaagtacagaacgctgt

SEQ ID NO: 110351 - DNA, 75 bp, synthetic construct
  source 1..75: mol_type = other DNA
aacgaattggttattcagccagcagcctggccgggcagccgtataaaggccgcaacggtcgtgtggaaggtaccc

SEQ ID NO: 110352 - DNA, 75 bp, synthetic construct
  source 1..75: mol_type = other DNA
ggaaaaaattgcgaaacaaaatgcgaagaccattgaggagaagaatagtgaaaaaacaagaaagaaacaaatcct

SEQ ID NO: 110353 - DNA, 75 bp, synthetic construct
  source 1..75: mol_type = other DNA
gtatcagcggcggtagcgttgaacaggacatggatattgcacagaccgccattgcggcaataaacgtgagaacac

SEQ ID NO: 110354 - DNA, 75 bp, synthetic construct
  source 1..75: mol_type = other DNA
cccgaatgatccgaaatgggtgaaggggattgaaacccgcgattctgtaaaccagaaccagcaagaatcggaaca

SEQ ID NO: 110355 - DNA, 75 bp, synthetic construct
  source 1..75: mol_type = other DNA
tcttcgcgggtttgatctaaacactcgcgaaattcatgacgagcctgagcaaaatgatgagatggtcattacgct

SEQ ID NO: 110356 - DNA, 75 bp, synthetic construct
  source 1..75: mol_type = other DNA
cactattgcgatgcgtttatggatggcaaggcgggagaacgagcggcgatggcgattgtggaggcactagggtaa

SEQ ID NO: 110357 - DNA, 75 bp, synthetic construct
  source 1..75: mol_type = other DNA
tcaggagttgcataatatttctcgtgatggcagtccgcggtatgcagatttaatagagcaaataggatccaactc

SEQ ID NO: 110358 - DNA, 75 bp, synthetic construct
  source 1..75: mol_type = other DNA
gccgaatcctttaagatggatagatcccttaggattaaataaaggagcttcattatctaaaatgatgaatagctc

SEQ ID NO: 110359 - DNA, 75 bp, synthetic construct
  source 1..75: mol_type = other DNA
ataaggcactggctgctggcgccactgaaatcacaaaagaagaatattttgcccgaaaaaatggcacatacacgg

SEQ ID NO: 110360 - DNA, 75 bp, synthetic construct
  source 1..75: mol_type = other DNA
actggaagcgtatctcggcatcaatgcgcaaacagcctgatgcccttcgctacgaccgccaaactatttttggcc

SEQ ID NO: 110361 - DNA, 75 bp, synthetic construct
  source 1..75: mol_type = other DNA
atccacacaaggagaatgctggtagcgctcaggatcacgccagcgatagtgaaactggcgagacggcagatccct

SEQ ID NO: 110362 - DNA, 75 bp, synthetic construct
  source 1..75: mol_type = other DNA
aatatattggaagaatttatgtagaagcaaagcatcgcccaagatatataaaaaaaatcaataaatcaaatggag

SEQ ID NO: 110363 - DNA, 75 bp, synthetic construct
  source 1..75: mol_type = other DNA
acaatggccaggctgaccagttgaatgttaccggcaaactgcagggcagcaataatactattcttgttaactttt

SEQ ID NO: 110364 - DNA, 75 bp, synthetic construct
  source 1..75: mol_type = other DNA
ttatggagcatggatgattgctgataaattgatgtttggaaatagtgttccaggttacccttctatcattgtatc

SEQ ID NO: 110365 - DNA, 75 bp, synthetic construct
  source 1..75: mol_type = other DNA
tattttttataaaactgtgcgcgaatttgaagggcttcagcagcatgaagtcgagatagtcttcataaacgatgg

SEQ ID NO: 110366 - DNA, 75 bp, synthetic construct
  source 1..75: mol_type = other DNA
cttctgtggcttgaagcagagctgaagcgtcttgagaagcagataaaagacctgacagacgatgatccggatatg

SEQ ID NO: 110367 - DNA, 75 bp, synthetic construct
  source 1..75: mol_type = other DNA
aaacgctatagccggtaagttttttgatccggcaaccggagagatggggccagaattcagcaaaactatcgatct

SEQ ID NO: 110368 - DNA, 75 bp, synthetic construct
  source 1..75: mol_type = other DNA
gccagaagagcaacaaccagaaccagcagtgcaacaggaagtggagaaagtttgcaccgcatgcggtcagaccgg

SEQ ID NO: 110369 - DNA, 75 bp, synthetic construct
  source 1..75: mol_type = other DNA
ataccagatgaataatggatatttcagtacaacgcttgggcgccttaccaggttgaatgtcctcgttgccagact

SEQ ID NO: 110370 - DNA, 75 bp, synthetic construct
  source 1..75: mol_type = other DNA
tataactagcttctcaacattccctctgcgcgtatggacgtacatagggcttatcgttgctggcatagcgtttat

SEQ ID NO: 110371 - DNA, 75 bp, synthetic construct
  source 1..75: mol_type = other DNA
tcttcaacgaagaagacgcgatacctattttttataaaactgttcgggaatttgaaggacttcagcaacatgaag

SEQ ID NO: 110372 - DNA, 75 bp, synthetic construct
  source 1..75: mol_type = other DNA
taatcgctgaatacgatgaacaacgttgtagtggtagtaagaacgagcactgttatagtaatttaagaaggttat

SEQ ID NO: 110373 - DNA, 75 bp, synthetic construct
  source 1..75: mol_type = other DNA
gaacgccattgaattgaagactctcgcccgtctaccgctaagctggtgcgacgaacaagggcgccgatctacctt

SEQ ID NO: 110374 - DNA, 75 bp, synthetic construct
  source 1..75: mol_type = other DNA
cctcttcacagataaggatggcgaaaaatatggtcgcgcaaacaaactttctggtctgaataaggcgctgactgc

SEQ ID NO: 110375 - DNA, 75 bp, synthetic construct
  source 1..75: mol_type = other DNA
cagaaccagcaagaaacggaacagaacgaccagaaagcggaacaaaacagcccaaatacgcaacaaaacgagcca

SEQ ID NO: 110376 - DNA, 75 bp, synthetic construct
  source 1..75: mol_type = other DNA
ctgactacaaagggcgtgtttgaagatgaaggaacaaatcagagcgcaactgatactctctcgtcgccagtacca

SEQ ID NO: 110377 - DNA, 75 bp, synthetic construct
  source 1..75: mol_type = other DNA
ttgttgacgaagtggtttttcgccttaaacaacgtgcgggaaaaacactcgtgctgactgtttttcaactgcgag

SEQ ID NO: 110378 - DNA, 75 bp, synthetic construct
  source 1..75: mol_type = other DNA
ttacgcatgtggacctatatcggcctaattgttgctgtattatcgtttctgtacggagcttggatgattttcgac

SEQ ID NO: 110379 - DNA, 75 bp, synthetic construct
  source 1..75: mol_type = other DNA
ttgaaacgccgtcttattattgctgcttctttgttcgtttttaacttatcgtctggttttgcggcggaaaacatt

SEQ ID NO: 110380 - DNA, 75 bp, synthetic construct
  source 1..75: mol_type = other DNA
atcgtcactgtgtcaaatatgacagcagctatagagatagccctgcgtataattggatttaatgatggagatgaa

SEQ ID NO: 110381 - DNA, 75 bp, synthetic construct
  source 1..75: mol_type = other DNA
gaagaaaaagagcgtcaggatgaacttgaccggcgccagcgggaagcggaagaggaagaacggcgtcttgctgag

SEQ ID NO: 110382 - DNA, 75 bp, synthetic construct
  source 1..75: mol_type = other DNA
aatctccatatgataaaaattggctccttgagtttttaacagatgatgcggataaggtgatcatccatccgcttg

SEQ ID NO: 110383 - DNA, 75 bp, synthetic construct
  source 1..75: mol_type = other DNA
aaaccacatcgtcgtttgattacggcactaaatccacgaataacaccggggctcatacgcatagtctgagcggct

SEQ ID NO: 110384 - DNA, 75 bp, synthetic construct
  source 1..75: mol_type = other DNA
attgtttcgacttctcttctgacgccgaccagtttaaccgggggagaggagagtatgttaaaagatcaggtaaag

SEQ ID NO: 110385 - DNA, 75 bp, synthetic construct
  source 1..75: mol_type = other DNA
aacgcccggcaattctcgcggcgttaaaaggcggatggatcaacggtctggtgaccgatgaacacaccgcacgtt

SEQ ID NO: 110386 - DNA, 75 bp, synthetic construct
  source 1..75: mol_type = other DNA
gtttctttcaaaggcgaaaaagtcagcacatacatctttaatgctggaacaagcaacgtgaagactggcattttt

SEQ ID NO: 110387 - DNA, 75 bp, synthetic construct
  source 1..75: mol_type = other DNA
aaccatcaaactgatgtataccgccagcactcctctgccaaaagacaaagaaagtgtgttctggtttaacgtgct

SEQ ID NO: 110388 - DNA, 75 bp, synthetic construct
  source 1..75: mol_type = other DNA
tgtgcctgattgttaacaccgcgccagtggcatttggcgcgatgggcattccaatcctggttgccggacaagtaa

SEQ ID NO: 110389 - DNA, 75 bp, synthetic construct
  source 1..75: mol_type = other DNA
gttgagcacggtccgttgcccatcacaatgttaatgcatggtaatgtcatcccagcactggcagcggcaaaagtg

SEQ ID NO: 110390 - DNA, 75 bp, synthetic construct
  source 1..75: mol_type = other DNA
ttactcttgcaagcattggcactgtttgcggtgcattgtacgccatattttatatgggcagtatctctggtattg

SEQ ID NO: 110391 - DNA, 75 bp, synthetic construct
  source 1..75: mol_type = other DNA
attcaacttcctgagcttaatgtaaacggtttggtcgattctttaaagttatcactgcctttattgatggtcttt

SEQ ID NO: 110392 - DNA, 75 bp, synthetic construct
  source 1..75: mol_type = other DNA
cgaaaaaagcgattgaaagcggtaagctgggggagattgttgaagtggaaagccattttgactactaccgcccgg

SEQ ID NO: 110393 - DNA, 75 bp, synthetic construct
  source 1..75: mol_type = other DNA
ggtgagcgacggcgggcgcggcggtaaatttgaactgcgcgatatcctgagcgacgaaccgggcatgagcccgct

SEQ ID NO: 110394 - DNA, 75 bp, synthetic construct
  source 1..75: mol_type = other DNA
tgaagagatggcgcgcgccagaggattattgcccatcatcacctgtacgcggcgacaaccagaactggagataga

SEQ ID NO: 110395 - DNA, 75 bp, synthetic construct
  source 1..75: mol_type = other DNA
tccgctacaagcgggaattgtatatggagccagaaggactcaaatatcttcagatcatttccctgttggcgtatc

SEQ ID NO: 110396 - DNA, 75 bp, synthetic construct
  source 1..75: mol_type = other DNA
agatcagtatggtctcaggagccagtatcggggctctcaatggtgccattatcgcggcctctcccgatctgtcag

SEQ ID NO: 110397 - DNA, 75 bp, synthetic construct
  source 1..75: mol_type = other DNA
tcacatccatcaccacaaatacaggcaactaattggatgattttgggtgattttaatcgtcagcctgatgaactt

SEQ ID NO: 110398 - DNA, 75 bp, synthetic construct
  source 1..75: mol_type = other DNA
tcggaatagtgatggtcttctgcaagaagtaaacgttaatctaaaagtggtgacatttaactttggtgtaaatga

SEQ ID NO: 110399 - DNA, 75 bp, synthetic construct
  source 1..75: mol_type = other DNA
agaacgcacacgctatctgctggaaaattgccatcccgatctggtgattagcctggaaaatgcacagtttgacga

SEQ ID NO: 110400 - DNA, 75 bp, synthetic construct
  source 1..75: mol_type = other DNA
ggtgtgcatacgatggaccagattatttctctgttcggtcgcccggatcacgtcgcttatgacatccgcagcctg

SEQ ID NO: 110401 - DNA, 75 bp, synthetic construct
  source 1..75: mol_type = other DNA
cttaaagacgatattctcgttatcagcgacgcgacgaaagcaatccgtaaaatgaacggatacacctacacgctc

SEQ ID NO: 110402 - DNA, 75 bp, synthetic construct
  source 1..75: mol_type = other DNA
cattaccggaaaacagcctgatacggtgaagcccaccggaccttccggtgaaggtacggagagagagccggaagc

SEQ ID NO: 110403 - DNA, 75 bp, synthetic construct
  source 1..75: mol_type = other DNA
gttgcgccctttggtcaggctagttttgtcgtgacagatatggcgagcagtgtttcttcaggaaaggttatttac

SEQ ID NO: 110404 - DNA, 75 bp, synthetic construct
  source 1..75: mol_type = other DNA
gaaagagatcctcgcccagctttcgcaatacccggtatccacccgcttgtcgctcaccggcaccattattgtggg

SEQ ID NO: 110405 - DNA, 75 bp, synthetic construct
  source 1..75: mol_type = other DNA
ttatcgatattggcaccaccaattgcaaagtcacctgtttttcctgccgggacgcaacgacgttaggtgcgttca

SEQ ID NO: 110406 - DNA, 75 bp, synthetic construct
  source 1..75: mol_type = other DNA
atctgcactggcaaccggccctgaaacgcgacggcgaatacgtctgcgggctggatgatatcagccaggccgttc

SEQ ID NO: 110407 - DNA, 75 bp, synthetic construct
  source 1..75: mol_type = other DNA
tgattatacaaaagcattagcgttttttaagcaggctgatgccctcggagaaatgaaagcggcacgttatcttgg

SEQ ID NO: 110408 - DNA, 75 bp, synthetic construct
  source 1..75: mol_type = other DNA
gttaaccagtgcacctgcattcgccgatatcataatttccggcactcgtatcatatataatgcagataaaaaaga

SEQ ID NO: 110409 - DNA, 75 bp, synthetic construct
  source 1..75: mol_type = other DNA
caacagaaagggaaaacatcacaaaaagcacctgtatctcctgacaaaacccctgcatctcctgtcaggacaccc

SEQ ID NO: 110410 - DNA, 75 bp, synthetic construct
  source 1..75: mol_type = other DNA
gtatatttcaatatcattggtacgttaagcgacagtgaattaaataaaattaataattatgttgacgaatattat

SEQ ID NO: 110411 - DNA, 75 bp, synthetic construct
  source 1..75: mol_type = other DNA
gttggcgcgcatatcagtttttcgctgggatacggccggctggccgacaaggcatcctttaaccggcacgtccgg

SEQ ID NO: 110412 - DNA, 75 bp, synthetic construct
  source 1..75: mol_type = other DNA
tggcgggcgatgaaggtaccttcagcgaatccaccggcgcaagcgagacctcggcacgctggggtgtagataagc

SEQ ID NO: 110413 - DNA, 75 bp, synthetic construct
  source 1..75: mol_type = other DNA
acaagcaatcgacactgatacaattaacgctgaagattggcaaaaaggtgaccgattaaaatcggttgcgctgct

SEQ ID NO: 110414 - DNA, 75 bp, synthetic construct
  source 1..75: mol_type = other DNA
ttagccagccgcacgctgtgtctggacgtgcgcaaaggcgaatggtcagcgaaagcggcggcgttgttacacgtt

SEQ ID NO: 110415 - DNA, 75 bp, synthetic construct
  source 1..75: mol_type = other DNA
atgttcgagatgtggaacaaaagcccgagtaacagcgcacaggcggcagcagactcacaaactgcatcggcaaac

SEQ ID NO: 110416 - DNA, 75 bp, synthetic construct
  source 1..75: mol_type = other DNA
gattttgccaatatgaaagaactccgcgttcagcataaaggtaaccccatcagagcattctttgcatttgatcct

SEQ ID NO: 110417 - DNA, 75 bp, synthetic construct
  source 1..75: mol_type = other DNA
gcccggggaatacgacaggaaaaggagcaacttgccagacgccgtgaggaatttcataccgccagacagaaggcc

SEQ ID NO: 110418 - DNA, 75 bp, synthetic construct
  source 1..75: mol_type = other DNA
taaactgcatgtgacagacattaccaaaggtgcgatttacccggtactgatagacagcattacggtggaagtgaa

SEQ ID NO: 110419 - DNA, 75 bp, synthetic construct
  source 1..75: mol_type = other DNA
gcggcctgcatctgaaaagccgccccaagaagttgccgccaccgagagccgctatgtgacgcagttgttcggcgc

SEQ ID NO: 110420 - DNA, 75 bp, synthetic construct
  source 1..75: mol_type = other DNA
cagtgcggcactttatgacatttgcgggttaccactgcacagcaattactctgccttcaaaatgcgttggttgct

SEQ ID NO: 110421 - DNA, 75 bp, synthetic construct
  source 1..75: mol_type = other DNA
cagctgtatgcttcgccacttgtatgagcttaagcgcatcggcaatagcagatatcgtaatttcaggaactcgcg

SEQ ID NO: 110422 - DNA, 75 bp, synthetic construct
  source 1..75: mol_type = other DNA
atgcaatctccgtggacacgcgacgggaaaatacgcgcagaacaggtttctatcaccccacaggtgtcgggacgt

SEQ ID NO: 110423 - DNA, 75 bp, synthetic construct
  source 1..75: mol_type = other DNA
gggcaaatattatcaatggcctgccccgcgctatgcccagtcgcgggaagagcatcaaatgtggtcaaccaaccg

SEQ ID NO: 110424 - DNA, 75 bp, synthetic construct
  source 1..75: mol_type = other DNA
aaagcaatacaaagggatataattgaaatactcaaacagcatactcatatccacgatgcagccacagcgtatgtt

SEQ ID NO: 110425 - DNA, 75 bp, synthetic construct
  source 1..75: mol_type = other DNA
agaatattctcggtgattgtctggcctatttcatgatggtcagcgtgctgtacggcctgttgacctggatcccgc

SEQ ID NO: 110426 - DNA, 75 bp, synthetic construct
  source 1..75: mol_type = other DNA
ctggcagtcgctttgctgttttataaaatgccggtcgccaacgcgctggcctccgtgatttatggcttcttctac

SEQ ID NO: 110427 - DNA, 75 bp, synthetic construct
  source 1..75: mol_type = other DNA
ggagctgcagaccctgcgcattccgttcgacgacaccctcggctcgctcaccgcgcgcccgggcttcttacggct

SEQ ID NO: 110428 - DNA, 75 bp, synthetic construct
  source 1..75: mol_type = other DNA
aatacctggattttcgtgcgcacgggttaaacgtcgcttgtgaacaattgcggcaaaatatccatcaggtcgaag

SEQ ID NO: 110429 - DNA, 75 bp, synthetic construct
  source 1..75: mol_type = other DNA
aagtgttcgtgtaatatcgaaaacgaatgaagtccaatatataaaggcaaccgtatttcgtatcgataatccatc

SEQ ID NO: 110430 - DNA, 75 bp, synthetic construct
  source 1..75: mol_type = other DNA
gtacgttttgtggcaatggaacctgagcaaaaggaaaaaaactatcgggttaaatttgaagctgtacccagcatt

SEQ ID NO: 110431 - DNA, 75 bp, synthetic construct
  source 1..75: mol_type = other DNA
cgttacgcagccaggaaaacaaaaccatgctgctgccagccgatctggattacaaggcactgactgtgtcgccag

SEQ ID NO: 110432 - DNA, 75 bp, synthetic construct
  source 1..75: mol_type = other DNA
cccgaattaatgaagtacaacaaaaggcaatagataagttgattgccgaaggtaaagcaaaaactacggcagaag

SEQ ID NO: 110433 - DNA, 75 bp, synthetic construct
  source 1..75: mol_type = other DNA
aatctgtttccgctttatcatcacaacgtagagcgcagcctgctgtgggatgttctacagcgttatcagcatgtt

SEQ ID NO: 110434 - DNA, 75 bp, synthetic construct
  source 1..75: mol_type = other DNA
acgtttttgaggttggcacgtctgctgcgtatctgttttatgcgcaaaaaacgtcagcaggccagttgtttgatg

SEQ ID NO: 110435 - DNA, 75 bp, synthetic construct
  source 1..75: mol_type = other DNA
attgggaaaaccgtcagtttacaatggataaactgaagcttgatgcagcaacattccatctctccagaaatgctc

SEQ ID NO: 110436 - DNA, 75 bp, synthetic construct
  source 1..75: mol_type = other DNA
ctgatatcaatgaccttgccagatggattgatgatcatcttgagatggagctctcagttgatattgtggcaaaaa

SEQ ID NO: 110437 - DNA, 75 bp, synthetic construct
  source 1..75: mol_type = other DNA
ctttaattctgtctttatttatttcggtatttgcgcagcgattggcttagtgctgattatgcttctggaagaacc

SEQ ID NO: 110438 - DNA, 75 bp, synthetic construct
  source 1..75: mol_type = other DNA
catctctggggtatacccacagtggcgggtacagaacaacggatttcagcctgtccggctctgcggtggcctggg

SEQ ID NO: 110439 - DNA, 75 bp, synthetic construct
  source 1..75: mol_type = other DNA
aaacctatccgattgctgcgtcaattatcaatagcggcggtaatctcggcggatttgtttcaccgatgcttgcgg

SEQ ID NO: 110440 - DNA, 75 bp, synthetic construct
  source 1..75: mol_type = other DNA
gcaatcgtggaagagatggtaataagcggtgctcattctgttgatgatattcatgatgaagggtgtttgacttat

SEQ ID NO: 110441 - DNA, 75 bp, synthetic construct
  source 1..75: mol_type = other DNA
tgctgcattgctggtcggcctgggctttaaaccgttgtacgcagccggactgtgcctgattgttaacaccgctcc

SEQ ID NO: 110442 - DNA, 75 bp, synthetic construct
  source 1..75: mol_type = other DNA
ctttaattttaaccttgatggtaccttcagttcttatcagggattggttgttcacacagggcaaaactggagcac

SEQ ID NO: 110443 - DNA, 75 bp, synthetic construct
  source 1..75: mol_type = other DNA
gattttcagataagagaacattcagattttgatagtattgaacagatgattgagaatattgtttcttcgtttgca

SEQ ID NO: 110444 - DNA, 75 bp, synthetic construct
  source 1..75: mol_type = other DNA
acctgctcggcatcaccaccagcgtccactgtgtggcaggcgtggtggactacgtagtaaaaatcattgaacgcg

SEQ ID NO: 110445 - DNA, 75 bp, synthetic construct
  source 1..75: mol_type = other DNA
cgtaatcgaccaggttgttgaatggcaaaaccgtcctctggatgcgatttatcccattgtttatcttgactgtat

SEQ ID NO: 110446 - DNA, 75 bp, synthetic construct
  source 1..75: mol_type = other DNA
tggcgccagactgaagaaattaatgagcatcctgccggttgcggaagtctggggcgtcggccatcgtacagagaa

SEQ ID NO: 110447 - DNA, 75 bp, synthetic construct
  source 1..75: mol_type = other DNA
aattcactcttcaactgtgtgtgcttttagttttttgggactcatacctccactaaacccattaatagcgttata

SEQ ID NO: 110448 - DNA, 75 bp, synthetic construct
  source 1..75: mol_type = other DNA
gttccacctcaacaaccagttactaaattagaaattaattcagcaaaaaactactcaatgcaggaaatcagcgtc

SEQ ID NO: 110449 - DNA, 75 bp, synthetic construct
  source 1..75: mol_type = other DNA
gaacaaccagaaagcggaacaaaacagccaaaatgcgttacaaaacgagccagaaacgaaacaatccgaaccggt

SEQ ID NO: 110450 - DNA, 75 bp, synthetic construct
  source 1..75: mol_type = other DNA
cggcggtaggcctggtgggcaaagagtctgatttgttccgctttactgtcaaacacagcctgatcttcacctgta

SEQ ID NO: 110451 - DNA, 75 bp, synthetic construct
  source 1..75: mol_type = other DNA
accagagtgtttgcactggatatggctgccacgctggcagtgcctttcacaggtgacgggcgggatgctgcggag

SEQ ID NO: 110452 - DNA, 75 bp, synthetic construct
  source 1..75: mol_type = other DNA
tcagcctggaagaaagccctccggcgaagcaacagatcgttgtttcgcgttcattcggccaacgcgtagaagccc

SEQ ID NO: 110453 - DNA, 75 bp, synthetic construct
  source 1..75: mol_type = other DNA
ccacgctatgctcagtcccgcgaagagtaccaaatgtggtcaaccaatcgattgttccgcaacgtctctaccgta

SEQ ID NO: 110454 - DNA, 75 bp, synthetic construct
  source 1..75: mol_type = other DNA
gcttcgggcggcgcgctttatgaatgggtgatcaacattccggtgccgtatctcgacaaactggttgctcgtatg

SEQ ID NO: 110455 - DNA, 75 bp, synthetic construct
  source 1..75: mol_type = other DNA
taaactggttgcccgtatgccgccagtggtcagcgaagcgacagcgtatgccgccgtgtttaagttcgactggtt

SEQ ID NO: 110456 - DNA, 75 bp, synthetic construct
  source 1..75: mol_type = other DNA
cttgatgacgcccgttaccaggcaaaatacgtttcagttatctggcaaaaactgatcccgaatcaggctgatttt

SEQ ID NO: 110457 - DNA, 75 bp, synthetic construct
  source 1..75: mol_type = other DNA
gaccagcaggaaaccagcctgaaggctaatattatgccgggcgaaccgggattcgcggcggatgattcggtcggt

SEQ ID NO: 110458 - DNA, 75 bp, synthetic construct
  source 1..75: mol_type = other DNA
ggcagaagatcctgatattgaaggtattggctactccggttcgaagtggcgagacagttctgtcagctggacgtc

SEQ ID NO: 110459 - DNA, 75 bp, synthetic construct
  source 1..75: mol_type = other DNA
caacaaattggcgtctctgatctgttgctggttgctgccaacaccaccggcggcgtcaccggcaagatgatctcc

SEQ ID NO: 110460 - DNA, 75 bp, synthetic construct
  source 1..75: mol_type = other DNA
ccctgagttagcaaacgatgaagttgctctgcaagaagtgaatgctgcattgttcaaagagtatttaccgttatt

SEQ ID NO: 110461 - DNA, 75 bp, synthetic construct
  source 1..75: mol_type = other DNA
ttgcgctgttgaaagcgtgacgaaccccgcgttaaacggggtttataagatataccagattgaaaccagcgggca

SEQ ID NO: 110462 - DNA, 75 bp, synthetic construct
  source 1..75: mol_type = other DNA
atgaatcatgtgctgatgcaacgcattgttgacgaagtgatttttcgcctgaaacaacgtgcggaaaaaacactc

SEQ ID NO: 110463 - DNA, 75 bp, synthetic construct
  source 1..75: mol_type = other DNA
gcgcgctggaagccgggaaaaatgtgctggtcgaaaaaccgttcaccccgacgcttgcgcaggcgaaggagctgt

SEQ ID NO: 110464 - DNA, 75 bp, synthetic construct
  source 1..75: mol_type = other DNA
accaatgagcctgatacggatccggcaggcaaaaaagatactgactcgagtaccttagccaaatcctcgaaaggg

SEQ ID NO: 110465 - DNA, 75 bp, synthetic construct
  source 1..75: mol_type = other DNA
atgctatcttttttatccccgttacagcggttatgttttttcccgtttctctctctggcgatgagtgcggtatct

SEQ ID NO: 110466 - DNA, 75 bp, synthetic construct
  source 1..75: mol_type = other DNA
aagaatgcgaaacgaacggggcaatggtcatatgagatgactgataagaacgggcagagtattgaagtgtcctat

SEQ ID NO: 110467 - DNA, 75 bp, synthetic construct
  source 1..75: mol_type = other DNA
atgcgttgaacagtttaggcgcgacgccggatgacattatgtcgattttgcaggcgctgcatgaggcgggcgcgc

SEQ ID NO: 110468 - DNA, 75 bp, synthetic construct
  source 1..75: mol_type = other DNA
tttgaataaatatgatagtcggctttcagaagaaaaacttgcaattgataaggcagttagagatttatatctttg

SEQ ID NO: 110469 - DNA, 75 bp, synthetic construct
  source 1..75: mol_type = other DNA
aaaaagccgagtgccaaccaatgcaggaacagccagcaccactaaagacaccctcccgacgtatgacggagaagt

SEQ ID NO: 110470 - DNA, 75 bp, synthetic construct
  source 1..75: mol_type = other DNA
ctgggcttcgacgctggcgccctggatatggatatcacgctgggcggcatggatgcagggctaatgaaaaaatgg

SEQ ID NO: 110471 - DNA, 75 bp, synthetic construct
  source 1..75: mol_type = other DNA
acacgtctgttgttgatcttgcccgcgccagagtcaaccggcagcacactgaaaactcagcaggaaaaatcaccc

SEQ ID NO: 110472 - DNA, 75 bp, synthetic construct
  source 1..75: mol_type = other DNA
cctgcggtcagaccggcggcggcaactgccctgattgtggcgcggtgatgggcgacgcaacataccaggaaacat

SEQ ID NO: 110473 - DNA, 75 bp, synthetic construct
  source 1..75: mol_type = other DNA
acatcccctgcccgtggcgttactacaacgatcgcgatgtacgtacaatcgttgaactgggaaaaactatcgact

SEQ ID NO: 110474 - DNA, 75 bp, synthetic construct
  source 1..75: mol_type = other DNA
cgtctgataaaagatgagtggtggggcagccagctcaaggcgcagcggatgcgctggcgcgaggcgctgcttatt

SEQ ID NO: 110475 - DNA, 75 bp, synthetic construct
  source 1..75: mol_type = other DNA
cgagctgatcgccaaatatgacgacctgctgatgccagagatcgagggacggttgctgaccctgactcgctctct

SEQ ID NO: 110476 - DNA, 75 bp, synthetic construct
  source 1..75: mol_type = other DNA
cagaagcagaacaaaaatttacggctctggaaaacacgctgaatgctgtacgaccacatttaggagaattatatg

SEQ ID NO: 110477 - DNA, 75 bp, synthetic construct
  source 1..75: mol_type = other DNA
gttgccgttcccgggaaagttatcgaaaccctgtctaacccgtatgggattgccaccgttttcgccctcaatgct

SEQ ID NO: 110478 - DNA, 75 bp, synthetic construct
  source 1..75: mol_type = other DNA
tgagttgggggctatcgccgtggagccttatggttcagtaaccagccgcggtgttgcttgccgccaaccgaaaga

SEQ ID NO: 110479 - DNA, 75 bp, synthetic construct
  source 1..75: mol_type = other DNA
ccatgacatggtcgaatcctctgctgcatcatggcgggatgaaatgagcaggaagtttctcgaaaggacgtctgc

SEQ ID NO: 110480 - DNA, 75 bp, synthetic construct
  source 1..75: mol_type = other DNA
agtaaaagatattgataatgcgctagttataacaacgggtaatggaagttacgggtatccgttgcagggctttgt

SEQ ID NO: 110481 - DNA, 75 bp, synthetic construct
  source 1..75: mol_type = other DNA
ctgtagagcgtgaggggccgttctacttcctcttcaccgacaaggatggcgaaaaatacggtcgtgcaaacaaac

SEQ ID NO: 110482 - DNA, 75 bp, synthetic construct
  source 1..75: mol_type = other DNA
gaccgtacccgttgagggctggtctgaatccgccatcgtgacgcaccgtggccggatgctgcaactgtacggacg

SEQ ID NO: 110483 - DNA, 75 bp, synthetic construct
  source 1..75: mol_type = other DNA
tacactaaatcagtaagttggcagcatcaccttgtgtgcagtctaaacctttatgattttagtcagattaataac

SEQ ID NO: 110484 - DNA, 75 bp, synthetic construct
  source 1..75: mol_type = other DNA
ctgccgctggcgctcatcagcacggaaggggcaacagcgtggtgcgcagaatatgatgaatggggtaaccagctg

SEQ ID NO: 110485 - DNA, 75 bp, synthetic construct
  source 1..75: mol_type = other DNA
atagcagtgcattgcgaaactttgctgacgttgaatggtcgtctttgcaaccactggcagaaaatggatagccgt

SEQ ID NO: 110486 - DNA, 75 bp, synthetic construct
  source 1..75: mol_type = other DNA
atgtctatcagttcagtaatcaaatcattacaagatattatgcgcaaagatgccggtgtggacggcgatgcgcag

SEQ ID NO: 110487 - DNA, 75 bp, synthetic construct
  source 1..75: mol_type = other DNA
ggtgatgggcgacgcaacataccaggaaacattcaatgaaaaaaatcaggtcgaatctcaggaaaaagatccgga

SEQ ID NO: 110488 - DNA, 75 bp, synthetic construct
  source 1..75: mol_type = other DNA
aaatgcggacgttacaagctatgccgtcgaatcaggatcagaagttagtgatcatgttcaaatacggaataacaa

SEQ ID NO: 110489 - DNA, 75 bp, synthetic construct
  source 1..75: mol_type = other DNA
tgcggtttgttcagtgaaattcgtggcttaggtctgttgattggctgtgtgctgaatgcggattacgccggacaa

SEQ ID NO: 110490 - DNA, 75 bp, synthetic construct
  source 1..75: mol_type = other DNA
cgtagaacgtctgttgggagaagaacgccctttccgcttcattgaagaagagaagaaaggcttcctcaaacgctt

SEQ ID NO: 110491 - DNA, 75 bp, synthetic construct
  source 1..75: mol_type = other DNA
caaccgtaaattatgatgggaaaaaattcacgtatccggttgctgatgagtggccggggttctcgttacccattt

SEQ ID NO: 110492 - DNA, 75 bp, synthetic construct
  source 1..75: mol_type = other DNA
atattagtgataaaacgcaggatggagatgtctgtaaaggtgatattctaacttataacactaaaaacaattata

SEQ ID NO: 110493 - DNA, 75 bp, synthetic construct
  source 1..75: mol_type = other DNA
gtgctctggagtttgccgctgccgtggattgccattgaagcagggtggtttatgaccgagtttggccgtcagccg

SEQ ID NO: 110494 - DNA, 75 bp, synthetic construct
  source 1..75: mol_type = other DNA
gtatggcactgtaaacactgtagctatcaaaacacagccatctaagaacatcggggcgaatatgaaaaaacgtgt

SEQ ID NO: 110495 - DNA, 75 bp, synthetic construct
  source 1..75: mol_type = other DNA
tgcgggtggcaacgtggtgcgttttgcgccggcgctgaacgtcagcgaagaagaggtgacgaccggactggatcg

SEQ ID NO: 110496 - DNA, 75 bp, synthetic construct
  source 1..75: mol_type = other DNA
agcgaatctctggtatttgatcttagctttgagcaaataagattagtttcttatggcactgtaaacactgtagct

SEQ ID NO: 110497 - DNA, 75 bp, synthetic construct
  source 1..75: mol_type = other DNA
gattgaaatcaaagataataatccgataagtaatggagagtatctaaccactaaagacgaaagccatgctgtgaa

SEQ ID NO: 110498 - DNA, 75 bp, synthetic construct
  source 1..75: mol_type = other DNA
ctggtcaggagctgcccattcgctggcttgcgcaacacagcagcgaaaaaccagtaacgcacgttgcacgggaag

SEQ ID NO: 110499 - DNA, 75 bp, synthetic construct
  source 1..75: mol_type = other DNA
tgaaaaacaatgttgttggtctggctaaagcggcaaaactgtttaatgttcccaccaccataaccaccgtagaaa

SEQ ID NO: 110500 - DNA, 75 bp, synthetic construct
  source 1..75: mol_type = other DNA
gacatagaggggaaaggctcctatggcattcgttatcatagtgcaaaaggctatggtgaaagtataaagtggatt

SEQ ID NO: 110501 - DNA, 75 bp, synthetic construct
  source 1..75: mol_type = other DNA
cggcaacagtgcttaccagactatgcgtaaacataacgccccttccctggaggcagaacgcgatgcgttgcggga

SEQ ID NO: 110502 - DNA, 75 bp, synthetic construct
  source 1..75: mol_type = other DNA
cgatgatgattcgaaccttgaaagcctgtgctggccttgccaccgctcgaaaacagggcgtgaacgcttcaaatg

SEQ ID NO: 110503 - DNA, 75 bp, synthetic construct
  source 1..75: mol_type = other DNA
atggcaatgggtccgttaaccattggtcgcccgactgaggcgaaaatcaacagcacaagcaacgatagaacaacc

SEQ ID NO: 110504 - DNA, 75 bp, synthetic construct
  source 1..75: mol_type = other DNA
actgtgcggcgactgctggagacgctgcaggaagagggatatgtccgccgtagcccctccgatgacagttttcgt

SEQ ID NO: 110505 - DNA, 75 bp, synthetic construct
  source 1..75: mol_type = other DNA
attagtgcagagccagggatgtaaaattccttcgggttgtatcgaaacgctgtctgcttcgctatctcgtcaact

SEQ ID NO: 110506 - DNA, 75 bp, synthetic construct
  source 1..75: mol_type = other DNA
gatgtgaacgtgagacgttcggcagatgttacaagctaccccgtagaaaatggtgctactgtatcggatcacgtt

SEQ ID NO: 110507 - DNA, 75 bp, synthetic construct
  source 1..75: mol_type = other DNA
caccaacccggaagtctcctcagtgcgtgactctgaccgtattttaggtattctggcgtcgaaatcacgtcgcgc

SEQ ID NO: 110508 - DNA, 75 bp, synthetic construct
  source 1..75: mol_type = other DNA
ctgcgttcggcgctgatttctctggatggcgataacgcatgggcattaagcgaaagctggtgcggcactattcag

SEQ ID NO: 110509 - DNA, 75 bp, synthetic construct
  source 1..75: mol_type = other DNA
catccgccagcagaatgtggtaccacctgatgctcgacctcgagacgatgggaactaacaccaacgcgcccatag

SEQ ID NO: 110510 - DNA, 75 bp, synthetic construct
  source 1..75: mol_type = other DNA
gacattaaggtgcaggtcgccggtagtggtaaaaagttgcgtggcctgcgccatggcccgtatcgtccagacctg

SEQ ID NO: 110511 - DNA, 75 bp, synthetic construct
  source 1..75: mol_type = other DNA
aaaaatgcttcacgcgagatacggcgatccgctatctggctttcttcatgaccaccgaggcttttgagcgttcag

SEQ ID NO: 110512 - DNA, 75 bp, synthetic construct
  source 1..75: mol_type = other DNA
ccgaagaccagcattccccctccctgatgccgctgattaacgcgctggaatcacgtctggcgcagtcgggcggga

SEQ ID NO: 110513 - DNA, 75 bp, synthetic construct
  source 1..75: mol_type = other DNA
aaggtcgtggttttgtccgtctcaatgccggctgcccacgttcgaaactggaaaaaggtgtggctggattaatta

SEQ ID NO: 110514 - DNA, 75 bp, synthetic construct
  source 1..75: mol_type = other DNA
cgagtgggggcaataacagtttgctttctggattattacttacagggcttaatggtggtcctgaagcgctcaggg

SEQ ID NO: 110515 - DNA, 75 bp, synthetic construct
  source 1..75: mol_type = other DNA
aacaatcagacgactgcgcagactcatcgccaggaaacagtatacagaaaaatggttcagaaaatatgacacatg

SEQ ID NO: 110516 - DNA, 75 bp, synthetic construct
  source 1..75: mol_type = other DNA
aactcgagcgcggcgatgtgcttccccatgacatggtcgaatcttctgctgctgcatggcgggatgaaatgagca

SEQ ID NO: 110517 - DNA, 75 bp, synthetic construct
  source 1..75: mol_type = other DNA
cggacggtctggggatggatcttagccatttatttatgtttgacgatggcgcagaaaaggacgccgaatcaacga

SEQ ID NO: 110518 - DNA, 75 bp, synthetic construct
  source 1..75: mol_type = other DNA
tgggatattaagcgtgcccgcatccttaagcgtgataatcacttgtgtcagaactgtctgcgcaacggtcgtgcg

SEQ ID NO: 110519 - DNA, 75 bp, synthetic construct
  source 1..75: mol_type = other DNA
gtgcgggggccaagttcgatgtggtgtatatcgggacaatcctgcactacgattccgtgctttcccgcaccctta

SEQ ID NO: 110520 - DNA, 75 bp, synthetic construct
  source 1..75: mol_type = other DNA
cgagcaaatcttaccatcgactttatgtataacaaaaaaaataaaacaggaactgttgcgttgagtggaacctag

SEQ ID NO: 110521 - DNA, 75 bp, synthetic construct
  source 1..75: mol_type = other DNA
accggcggcgatgcggtgtccgttgacccgaaataccgggatgcgtactccacgcatatcccggcggtgattctg

SEQ ID NO: 110522 - DNA, 75 bp, synthetic construct
  source 1..75: mol_type = other DNA
cccgcaatccacttatctggcctggcttgatctacgtccgttgaatattgacgacaacgcgttgcaaaaagcgct

SEQ ID NO: 110523 - DNA, 75 bp, synthetic construct
  source 1..75: mol_type = other DNA
agtcaccgatgcattggcgcattatcgattggtcgccggacgggggaatatccgtggtagcgaaggtccgcgcaa

SEQ ID NO: 110524 - DNA, 75 bp, synthetic construct
  source 1..75: mol_type = other DNA
ttaaatacctggcgtgttggaatgaataatattgcccgtattgccgggggggaggatagcagaagcaatattcta

SEQ ID NO: 110525 - DNA, 75 bp, synthetic construct
  source 1..75: mol_type = other DNA
tattatctccggagtgtttaattcgtcctccatgtactggcgagagcagaatggactgattgaggtaaacagctc

SEQ ID NO: 110526 - DNA, 75 bp, synthetic construct
  source 1..75: mol_type = other DNA
aaccaggttacggaaggacgtctgcaacttgaacgcggtgacatggtcgaatcctctgctgcagcatggcgggat

SEQ ID NO: 110527 - DNA, 75 bp, synthetic construct
  source 1..75: mol_type = other DNA
aattaatggtgacttcataaataaatttagccccggagatattattcgtatcgaaaatgtagacggtacagatag

SEQ ID NO: 110528 - DNA, 75 bp, synthetic construct
  source 1..75: mol_type = other DNA
aacttattgtttcgggaaaagtattttccagaacctacaaatttcaaattctgaaagtaacagtgataattcaac

SEQ ID NO: 110529 - DNA, 75 bp, synthetic construct
  source 1..75: mol_type = other DNA
atgatgccaaatcagcgcgtgacgtgcgtgccgccgtactggtgagcactaaagcatttaacgatgctgaggtca

SEQ ID NO: 110530 - DNA, 75 bp, synthetic construct
  source 1..75: mol_type = other DNA
cctgcacgatgcgcgttaccaggcaaaatacgtttcagccatctggcaaaaactgctcccgagtcaggctgattt

SEQ ID NO: 110531 - DNA, 75 bp, synthetic construct
  source 1..75: mol_type = other DNA
aacgccaccagcgttaatgcagctatagcaatattgaaagaagagttaatcggctgtgggttcacgcaggtgatg

SEQ ID NO: 110532 - DNA, 75 bp, synthetic construct
  source 1..75: mol_type = other DNA
ctctaagacattgaatgaactggagcagctgacgggcgctcgcttgtttgagcgtggtcgtcagggggcgcaact

SEQ ID NO: 110533 - DNA, 75 bp, synthetic construct
  source 1..75: mol_type = other DNA
ctggtggtctggatttagatcttagtcatttgtttatgttcgaaacaaataccaaagaagaaatagaaaccacgc

SEQ ID NO: 110534 - DNA, 75 bp, synthetic construct
  source 1..75: mol_type = other DNA
gaatcgacgcagaactgaaggatgcttttatggccgctgcaaaaagcatggaccgtaatggctctcagttaatcc

SEQ ID NO: 110535 - DNA, 75 bp, synthetic construct
  source 1..75: mol_type = other DNA
gaacgaccagaaagcggaacaaaacagcccaaatacgcaacaaaacgagccagaaacgaaacaacctgagccagt

SEQ ID NO: 110536 - DNA, 75 bp, synthetic construct
  source 1..75: mol_type = other DNA
catcggctatctcgtcgcttgttactggctgaatacgcaaacgccggacttctccctaccttttggcccccgtcc

SEQ ID NO: 110537 - DNA, 75 bp, synthetic construct
  source 1..75: mol_type = other DNA
cctgtcggtcgaccttgaaacgatgggaacaaatcctgatgcgccaatcaactctattggcggtacattttttga

SEQ ID NO: 110538 - DNA, 75 bp, synthetic construct
  source 1..75: mol_type = other DNA
aagcgcaggttcgccttgggggcgggcaagaagttttcccgtcgcaggagctggtgctcgacagcaacagtagca

SEQ ID NO: 110539 - DNA, 75 bp, synthetic construct
  source 1..75: mol_type = other DNA
gattaatatggttacctccggtaccagttaatttagaagacgtaaacaaactaccggtggtaataacgcccattg

SEQ ID NO: 110540 - DNA, 75 bp, synthetic construct
  source 1..75: mol_type = other DNA
aagcgcaggttcgtcttggtgccgggcaagaagtttttccgtcgcaggagctggtactcgacagcaacagtagta

SEQ ID NO: 110541 - DNA, 75 bp, synthetic construct
  source 1..75: mol_type = other DNA
ccatttttggacaataatggaaatattatccggcttttcattattgatgatctgaaacaaagtcaaggaactaca

SEQ ID NO: 110542 - DNA, 75 bp, synthetic construct
  source 1..75: mol_type = other DNA
aaaactcgatttttacactttactggacaattgggtgactaaaggagtgaaaccagacgttgatcagcagcacta

SEQ ID NO: 110543 - DNA, 75 bp, synthetic construct
  source 1..75: mol_type = other DNA
ttccattcgaaggtgaacgccataacgctctgaacgatgcacgttaccaggcgaaatacgtttcagccatctggc

SEQ ID NO: 110544 - DNA, 75 bp, synthetic construct
  source 1..75: mol_type = other DNA
ttctgttagcgcgaacgccattaccagaggggccgccagtgaagtgatcggcgtcctcaaagtctgcgcgacttg

SEQ ID NO: 110545 - DNA, 75 bp, synthetic construct
  source 1..75: mol_type = other DNA
ggggtcgccaaagttcttgatgacctaaaagcaatggattttgagtttattgtttgtgactcaccggcgggtatt

SEQ ID NO: 110546 - DNA, 75 bp, synthetic construct
  source 1..75: mol_type = other DNA
caatacaaaggcaatatttctttgcgcgccgttccagcgttctctacaggtcgtcacgggtggcgatgttctcgt

SEQ ID NO: 110547 - DNA, 75 bp, synthetic construct
  source 1..75: mol_type = other DNA
gcggaaatgctggaaacggcagacagcactttttcccgaggtgccaatcatttatggctggatctgcagtggtat

SEQ ID NO: 110548 - DNA, 75 bp, synthetic construct
  source 1..75: mol_type = other DNA
atgtgcttccccatgacatggtcgaatcctctgctaccacatggcgggatgaaatgagcaggaaggtcgtcggta

SEQ ID NO: 110549 - DNA, 75 bp, synthetic construct
  source 1..75: mol_type = other DNA
ttccaggagcgagtgagcgaaaccacaggcggaaaactggctgcttcgatacgcgaaagcatggagccgaaagaa

SEQ ID NO: 110550 - DNA, 75 bp, synthetic construct
  source 1..75: mol_type = other DNA
aacatcaccgttgatatggtgattagcgcacaggaattgttgcaggaagacatggcaacattcgacggacatatc

SEQ ID NO: 110551 - DNA, 75 bp, synthetic construct
  source 1..75: mol_type = other DNA
gtactacccgcgctcacgttagcgataatctcatctgggtgcgcggttcgctggaagatacgcattcgcttagcg

SEQ ID NO: 110552 - DNA, 75 bp, synthetic construct
  source 1..75: mol_type = other DNA
aaatcagagcgcaactgatactctctcgtcgccagtaccagaaactgatgcagtggaaacggcaattccggacaa

SEQ ID NO: 110553 - DNA, 75 bp, synthetic construct
  source 1..75: mol_type = other DNA
gtgtattagaacaagcaggtatagtgaatactgccagtaataacagcatgataatggataagttattggactcag

SEQ ID NO: 110554 - DNA, 75 bp, synthetic construct
  source 1..75: mol_type = other DNA
ggcgacagattgcctgatgagcgtctcaccacttctgttgactgcgactacagtgcccggaaagatgatattgcg

SEQ ID NO: 110555 - DNA, 75 bp, synthetic construct
  source 1..75: mol_type = other DNA
ctgggctacggcatgttgctctcccgctatgcgccggatatgaatcatgtcacagccgcacagtaccaggcggcg

SEQ ID NO: 110556 - DNA, 75 bp, synthetic construct
  source 1..75: mol_type = other DNA
ctgaaagagatagatatctgttggagaggatttatttcaaatatattaagtttgatgagatagatgaaagctgcg

SEQ ID NO: 110557 - DNA, 75 bp, synthetic construct
  source 1..75: mol_type = other DNA
tcaccagaatcagcaccattgggcaaaccataatgaaacaatatctgcaagccagtacagagaacataaatatga

SEQ ID NO: 110558 - DNA, 75 bp, synthetic construct
  source 1..75: mol_type = other DNA
acatactcaggttcacaacaaaatactggtgcatctgacacgaccgcacaaccagagccggtaaaagttaccgct

SEQ ID NO: 110559 - DNA, 75 bp, synthetic construct
  source 1..75: mol_type = other DNA
gtagacgatcagaaaatcgcgcatatagtgaaagaaaaattatcgcagccgctagctcgccacggtgaattggct

SEQ ID NO: 110560 - DNA, 75 bp, synthetic construct
  source 1..75: mol_type = other DNA
gcagtaatcgctgcgtgcagtaacggacaggcagccagcgcagcttgtgccggtgaaagactgaaggttattgca

SEQ ID NO: 110561 - DNA, 75 bp, synthetic construct
  source 1..75: mol_type = other DNA
ccctgaaccagaaaatgacttggatatactcttatcattagatgttagaatagaaaatatctgggcttttgaaat

SEQ ID NO: 110562 - DNA, 75 bp, synthetic construct
  source 1..75: mol_type = other DNA
gctggaatgaggaaggcgcttcctttgtcccggtcgaagcagaatccgatccgatgaacgtcaattttgacaagc

SEQ ID NO: 110563 - DNA, 75 bp, synthetic construct
  source 1..75: mol_type = other DNA
atagggaagaatgtattcaccaatcaaaatgttagtatcaattgtcatacttttataagtattggtgataatacg

SEQ ID NO: 110564 - DNA, 75 bp, synthetic construct
  source 1..75: mol_type = other DNA
tattaatagagcaaattcctttgatacctctgctattgaattatatttatctataacaacgacaaatggactaag

SEQ ID NO: 110565 - DNA, 75 bp, synthetic construct
  source 1..75: mol_type = other DNA
actgccattgaagccggtgatgaacgtcgcgcccgcgcaaaatttcactggcaattcctggagcattatccggct

SEQ ID NO: 110566 - DNA, 75 bp, synthetic construct
  source 1..75: mol_type = other DNA
gctaatttatctaacggtgatttcactagttctgattttagtaaagttaactttacacaagcagaacttaattca

SEQ ID NO: 110567 - DNA, 75 bp, synthetic construct
  source 1..75: mol_type = other DNA
atatgcgcgagcagaacgcgttgcaggaagcacaaagttcaatggatggaagctatggaacttggcgctggaagg

SEQ ID NO: 110568 - DNA, 75 bp, synthetic construct
  source 1..75: mol_type = other DNA
agcgaactggatgtcgtcgcgtttgaaaatcagccgccggtaaaactggtgggggaatttgctatgccgctcgtg

SEQ ID NO: 110569 - DNA, 75 bp, synthetic construct
  source 1..75: mol_type = other DNA
ccacgacttggtgcgccagatacacagctctctttcctgcacgtcaccgatttcgcgcaagcagtgggtcagtga

SEQ ID NO: 110570 - DNA, 75 bp, synthetic construct
  source 1..75: mol_type = other DNA
ggtgaacgcaaggaaaccggaaaatacacgtctgttgttgatctcgcctgcgccagaaccaatcaacagcacagt

SEQ ID NO: 110571 - DNA, 75 bp, synthetic construct
  source 1..75: mol_type = other DNA
taagctcatgcctgagcgcaaccttttcatgaagggtgttttgagttgggttggtggtcgcactgatatcgttga

SEQ ID NO: 110572 - DNA, 75 bp, synthetic construct
  source 1..75: mol_type = other DNA
ttaattggtattggggtgctgggagaatacatcggcagaatttacgtagaagttaaaaatcgtcctagatatgta

SEQ ID NO: 110573 - DNA, 75 bp, synthetic construct
  source 1..75: mol_type = other DNA
ctgaggatgtggacatacattggattgtttgttgccggtctatcttttttatatggcgcgtggatgattgtaaac

SEQ ID NO: 110574 - DNA, 75 bp, synthetic construct
  source 1..75: mol_type = other DNA
atttatacagaagccaatataattcacagaaagcgaattatgttgaaaaggaaatccaagaagttagtaaaatta

SEQ ID NO: 110575 - DNA, 75 bp, synthetic construct
  source 1..75: mol_type = other DNA
gccacatattgtcaatattaacccagacattattaacgatataatacttcaaagtgaaaagaaattttcaaatgt

SEQ ID NO: 110576 - DNA, 75 bp, synthetic construct
  source 1..75: mol_type = other DNA
aatacatcggaaggatttatatcgaggttaaacagcgtccaagatatattttaaagggtaagaataaaaatgatt

SEQ ID NO: 110577 - DNA, 75 bp, synthetic construct
  source 1..75: mol_type = other DNA
ttatggcgcatggatgattctggacacgttggcttttggaaatcctgtgagagggtacccttcacttctagtgtc

SEQ ID NO: 110578 - DNA, 75 bp, synthetic construct
  source 1..75: mol_type = other DNA
cgtacagaacgggctgccgggtattacgttcgcttcaacctcacggggttgctccgtgggaccccacaggagcgt

SEQ ID NO: 110579 - DNA, 75 bp, synthetic construct
  source 1..75: mol_type = other DNA
gctccggcgctgaatgtcagcgaagaagatatggctaccgggctggatcgctttgcgctggcctgtgaacgcgtt

SEQ ID NO: 110580 - DNA, 75 bp, synthetic construct
  source 1..75: mol_type = other DNA
atcacatgcatttctgacgttaactggcgacgatcaggaacaggccacgctacgtgcctgcgcagaagccttttt

SEQ ID NO: 110581 - DNA, 75 bp, synthetic construct
  source 1..75: mol_type = other DNA
ggcccgccctgcccttgattcctgggataccgaatatatgcaggaaaaccactgggatgaggaatccgcttcctt

SEQ ID NO: 110582 - DNA, 75 bp, synthetic construct
  source 1..75: mol_type = other DNA
atgcttttagtcagtgtttgcataatgttgctcgtgatggcagtccacggtatgcaggtttactacaacaaatag

SEQ ID NO: 110583 - DNA, 75 bp, synthetic construct
  source 1..75: mol_type = other DNA
taatcgctgaatatgatgaacaacgttgtagtggtggtaagaatgatcactgttatagtaattacagaaggttat

SEQ ID NO: 110584 - DNA, 75 bp, synthetic construct
  source 1..75: mol_type = other DNA
gctcagcgtttcctgccccttaccgtgctacactggcggttcccacctgactgccgtcgttctcttcacgatata

SEQ ID NO: 110585 - DNA, 75 bp, synthetic construct
  source 1..75: mol_type = other DNA
aatcatccatatcaacaggatgcacgaaaaatgagagttccgtcacttccggaattaacttttccgtggcactat

SEQ ID NO: 110586 - DNA, 75 bp, synthetic construct
  source 1..75: mol_type = other DNA
atgattggaataggagtattaggtgaatatattggacgcacatacattgaaaccaaaaaacgcccgaaatacatc

SEQ ID NO: 110587 - DNA, 75 bp, synthetic construct
  source 1..75: mol_type = other DNA
ttgtccatacggtgatggcgggttatgtgaccggggcgatgttcattatggcgatcagcgcctggtatttactgc

SEQ ID NO: 110588 - DNA, 75 bp, synthetic construct
  source 1..75: mol_type = other DNA
cagatgtcattgataaactggttacaaagtgctggcaggaagaagcatatgctgaggcgcaattaagaaaagtga

SEQ ID NO: 110589 - DNA, 75 bp, synthetic construct
  source 1..75: mol_type = other DNA
aaaaacagcctaagtggtacgtgaaagctgtcagaaaaactatcgcagcgttgccggggggttacgctgaagctg

SEQ ID NO: 110590 - DNA, 75 bp, synthetic construct
  source 1..75: mol_type = other DNA
ggatgcagacagtaatctgcagagtctgtgctggccctgccataaagcaaaaacagcgcgcgaacgcattaattg

SEQ ID NO: 110591 - DNA, 75 bp, synthetic construct
  source 1..75: mol_type = other DNA
tcccgttagatgatgcactactgcaattgcgggaatttatcgccgaaaactccggtgaattttttgttcaggtct

SEQ ID NO: 110592 - DNA, 75 bp, synthetic construct
  source 1..75: mol_type = other DNA
taggaggaaagacagatattgttgaatacgtgcgagcggaaagaattgctggagatacaaaatttaatggatgga

SEQ ID NO: 110593 - DNA, 75 bp, synthetic construct
  source 1..75: mol_type = other DNA
atgagttattataagaattatgatgtcttagctaatgaagtaaagacacaggcaaaaaaagaaaatattataaat

SEQ ID NO: 110594 - DNA, 75 bp, synthetic construct
  source 1..75: mol_type = other DNA
gatggctcctggagtctgaggtacctgccgccgcgatgggaaatctgcctgacggcgcggtggcgattaccgctt

SEQ ID NO: 110595 - DNA, 75 bp, synthetic construct
  source 1..75: mol_type = other DNA
tgacggcgcggtggcgattaccgcttctgtgacggatctcagcggcaataccggcaacacctcgcgcaccattac

SEQ ID NO: 110596 - DNA, 75 bp, synthetic construct
  source 1..75: mol_type = other DNA
atcgggaagacggactctccattattcaataccttaatgaagggatataatgctgttttgcagggcaatattatg

SEQ ID NO: 110597 - DNA, 75 bp, synthetic construct
  source 1..75: mol_type = other DNA
gaaggttcagtcagagcgtagtcagcatgctaacagtaagcgtcgtctcagcaccgtctggcagatcctgaaatt

SEQ ID NO: 110598 - DNA, 75 bp, synthetic construct
  source 1..75: mol_type = other DNA
tggtcgccctgcttatcgttactggataagacatcaatattacccatatattaaaaaatatagtgaaaaaccgta

SEQ ID NO: 110599 - DNA, 75 bp, synthetic construct
  source 1..75: mol_type = other DNA
tgaggaggataacagctcagagggaaattcagaatcaacagaaacgcctacccccgtcctgcgccccgaagctgg

SEQ ID NO: 110600 - DNA, 75 bp, synthetic construct
  source 1..75: mol_type = other DNA
gaattccctctggggtttgccggggttattcgggtacaggataaagctttgctggaaattggcagtggcgctacg

SEQ ID NO: 110601 - DNA, 75 bp, synthetic construct
  source 1..75: mol_type = other DNA
tcagggcggcgtcgccgtcagaccttgctgaacgactgacacaaaaactgaaggagggttggcagccatttggca

SEQ ID NO: 110602 - DNA, 75 bp, synthetic construct
  source 1..75: mol_type = other DNA
ttgatgatgcgacagtgagagaacaggtctacatccacgcgcagaagaacatggatatctggatatccagccgga

SEQ ID NO: 110603 - DNA, 75 bp, synthetic construct
  source 1..75: mol_type = other DNA
gaaggtggttctggcggcgggctcgttgggcaacgaacccaaaccacgacggatctccttgttggtaataaaatt

SEQ ID NO: 110604 - DNA, 75 bp, synthetic construct
  source 1..75: mol_type = other DNA
agccgtttggtagtccggtggccatcacgccttataccctgatgcaggccattgcggcggaaggtgatgtcacca

SEQ ID NO: 110605 - DNA, 75 bp, synthetic construct
  source 1..75: mol_type = other DNA
atggcgcacagttcaggacacctgactgataaacccgagctgcgtgaatattatgggtctgccaacacatccact

SEQ ID NO: 110606 - DNA, 75 bp, synthetic construct
  source 1..75: mol_type = other DNA
gcatgggctttagcgctggtgcggcatacaccttgaaccgccccgggtttcctggagagtattttatctgtgaac

SEQ ID NO: 110607 - DNA, 75 bp, synthetic construct
  source 1..75: mol_type = other DNA
ggcgcgttaacacttgaactcgccggtatcattttctcctttatgctgatcaacctatttgattcatcaggaaca

SEQ ID NO: 110608 - DNA, 75 bp, synthetic construct
  source 1..75: mol_type = other DNA
atggcgaccgccgggattttaaccatacgtgcagcaaatactcaagaacaagatgtaaactctacaaaaaacgaa

SEQ ID NO: 110609 - DNA, 75 bp, synthetic construct
  source 1..75: mol_type = other DNA
gacgacgggaattgtatcgctcagagtatgcgttctgttggcgtggctgccgccaataaaaatcctgacgacaat

SEQ ID NO: 110610 - DNA, 75 bp, synthetic construct
  source 1..75: mol_type = other DNA
atgaaatcccgttagatgatgcactgttacaattgcgggaatttatcgacgaaaactccggtgaattttttgttc

SEQ ID NO: 110611 - DNA, 75 bp, synthetic construct
  source 1..75: mol_type = other DNA
accttgcgggagcgggcgacatggtgacgatgattattgccagggaactgggcttaaatgatcgctatctggcag

SEQ ID NO: 110612 - DNA, 75 bp, synthetic construct
  source 1..75: mol_type = other DNA
cctgcgtgagcggcgtggcgcatacttatatggcggcagaacggctggaaaagttgtgccagcaagaaaagtggg

SEQ ID NO: 110613 - DNA, 75 bp, synthetic construct
  source 1..75: mol_type = other DNA
gaattaactttaaggaagcacaattcaatcagcctgacattcacaaaagtcagtatcaggtagccacaggcaaca

SEQ ID NO: 110614 - DNA, 75 bp, synthetic construct
  source 1..75: mol_type = other DNA
cagtgatgctttgtggaaaagtgtcaaataatatcctggatgatattggtggttataaagaaagaaatatattaa

SEQ ID NO: 110615 - DNA, 75 bp, synthetic construct
  source 1..75: mol_type = other DNA
tactaattgagaaaacgaaagaaatgcttgatgtattggacataaaaatatctgagttaaaagatacacccgcta

SEQ ID NO: 110616 - DNA, 75 bp, synthetic construct
  source 1..75: mol_type = other DNA
ggccagcgtctggggtaatgtgggcgtgcagctgggtgataatggctacaatgacaccgcagtgatggtgggcct

SEQ ID NO: 110617 - DNA, 75 bp, synthetic construct
  source 1..75: mol_type = other DNA
aaaactgaaggtgaatatataaaaaccatctgcgtaatggtagcaagggcgacggtttaccagcgattcgatgac

SEQ ID NO: 110618 - DNA, 75 bp, synthetic construct
  source 1..75: mol_type = other DNA
atcgggacaccattaagtggtggctgaaacagtcacgcgaagcgcaatccgccattcttaccgatgaaatcccgt

SEQ ID NO: 110619 - DNA, 75 bp, synthetic construct
  source 1..75: mol_type = other DNA
atggcggcggaacggctggaaaagttgtgccagttagagaagtggggcgtcagcattgaaactcagggcgcgctg

SEQ ID NO: 110620 - DNA, 75 bp, synthetic construct
  source 1..75: mol_type = other DNA
gtgacatcaacgccttacgatccgttggttacacctgtttataccattagttttggtggccgggttgaagtaccg

SEQ ID NO: 110621 - DNA, 75 bp, synthetic construct
  source 1..75: mol_type = other DNA
ggtgatgtcaccacacccgtggtggtgaagccgtcggatggagaaggcacagttatcagcgccaccagcgaaccg

SEQ ID NO: 110622 - DNA, 75 bp, synthetic construct
  source 1..75: mol_type = other DNA
taaatcataataattttgatgtggatacatataacacatatataaaaaatgcacattatgaactttatcaaacca

SEQ ID NO: 110623 - DNA, 75 bp, synthetic construct
  source 1..75: mol_type = other DNA
gataacgagcttttcaaccttccctctgcgcatgtggacttacattggtctgttcgttgcaggtgcagcgttact

SEQ ID NO: 110624 - DNA, 75 bp, synthetic construct
  source 1..75: mol_type = other DNA
ctataacatcaatggttttggtatcgttggtgcatatagcaaatctgatcgcaccaacgatcaagttgccgatgg

SEQ ID NO: 110625 - DNA, 75 bp, synthetic construct
  source 1..75: mol_type = other DNA
aaatcatcatttgaacaatggtttaaaacattgctggagcaccacgaaaagctacttgggcaggtaaaagaagag

SEQ ID NO: 110626 - DNA, 75 bp, synthetic construct
  source 1..75: mol_type = other DNA
ccctcaacagccagaataatgccgtcacgtggatgggactcccagggcttgcggaaacatacagttcatacctgt

SEQ ID NO: 110627 - DNA, 75 bp, synthetic construct
  source 1..75: mol_type = other DNA
ctgagtggttttataaactgcacaacaaaattagtcatccgaagattgaagaaaacgttggtgacttccgtctga

SEQ ID NO: 110628 - DNA, 75 bp, synthetic construct
  source 1..75: mol_type = other DNA
aaaaagaatcaacggcaaatcaatatacttcgttgattctacatgatgtgattgaatataaacctcacaaatgga

SEQ ID NO: 110629 - DNA, 75 bp, synthetic construct
  source 1..75: mol_type = other DNA
atcccgaaacgactggagcatcttcggggtgctctggaagtggtgttcataacaaaacgcccccgaccatcaagg

SEQ ID NO: 110630 - DNA, 75 bp, synthetic construct
  source 1..75: mol_type = other DNA
gaatgttgcagaacacggatagctcgtgcttctatggactcagaagaatggccctggcttggaattgtaaaaaaa

SEQ ID NO: 110631 - DNA, 75 bp, synthetic construct
  source 1..75: mol_type = other DNA
tggcgagatggcagatcccttaattacggtgaacggtcatcacgttatcacatccaccagcaggacttgtgacca

SEQ ID NO: 110632 - DNA, 75 bp, synthetic construct
  source 1..75: mol_type = other DNA
accggaagaagacccggacattccgggtatcgggtattacggttcgaaatggcgtgacagctcagccacctggac

SEQ ID NO: 110633 - DNA, 75 bp, synthetic construct
  source 1..75: mol_type = other DNA
ccgaccgtctggcaacggcgattctgttgcatgccgggagaaccacagtaaaagtcgatgttccatcttctgaaa

SEQ ID NO: 110634 - DNA, 75 bp, synthetic construct
  source 1..75: mol_type = other DNA
cattgaatagtcagagtaacgcggtgacatggatgggtttgccagggcttgccgaaacatacagctcttatttat

SEQ ID NO: 110635 - DNA, 75 bp, synthetic construct
  source 1..75: mol_type = other DNA
ctgcgaaccagtatgttatggcgttttactggccggtctcttcactgccacagggcgttgccctgaccggagacg

SEQ ID NO: 110636 - DNA, 75 bp, synthetic construct
  source 1..75: mol_type = other DNA
cagccagcctattcacaggattttgcgccactgccaccggatattcgtcatgctgcatataacgatattaactct

SEQ ID NO: 110637 - DNA, 75 bp, synthetic construct
  source 1..75: mol_type = other DNA
acaataatgttaaacacgatggggataaaggctggaagcgcggcagcaaaggcatacttaggaatgaatttcgaa

SEQ ID NO: 110638 - DNA, 75 bp, synthetic construct
  source 1..75: mol_type = other DNA
aaacgtacagaaaaactctgttgtcgatctcggaacaaacagtaccattaaaaccaatggcgataatgcacacgg

SEQ ID NO: 110639 - DNA, 75 bp, synthetic construct
  source 1..75: mol_type = other DNA
tcgggaagttactgagataaaggaatggaccgaaccgggaaacggtaatcagaaagttgttcgcgtgtcttatac

SEQ ID NO: 110640 - DNA, 75 bp, synthetic construct
  source 1..75: mol_type = other DNA
ttgccggggagcgtcacctaagggtccatcatatccctgggttagatggttttcaagtggaggcgattccaggta

SEQ ID NO: 110641 - DNA, 75 bp, synthetic construct
  source 1..75: mol_type = other DNA
aggccaaagacattgggctgattgatggcctgggtagtttgaactccgtggcgcgagacgtcatccaccagagca

SEQ ID NO: 110642 - DNA, 75 bp, synthetic construct
  source 1..75: mol_type = other DNA
gtcattagctcagggtttggattcaccggcttgatggacaggctcggcatcgagcgccgggcaatcacttccgga

SEQ ID NO: 110643 - DNA, 75 bp, synthetic construct
  source 1..75: mol_type = other DNA
cagactacatgggaatgtacgccagttacatggcacaaaacggtttttacagcgatctcgttataaaagcatcac

SEQ ID NO: 110644 - DNA, 75 bp, synthetic construct
  source 1..75: mol_type = other DNA
tccagcgtcaagggtatgaatgaaccagaagagagcatgattaatcttgttaaaaccagcaatggctggaaagcg

SEQ ID NO: 110645 - DNA, 75 bp, synthetic construct
  source 1..75: mol_type = other DNA
gagttcggcgccctgacgctcgacgcccgcggcaactacagctatgtgctgaaccgcagcaacagccgcgtggcg

SEQ ID NO: 110646 - DNA, 75 bp, synthetic construct
  source 1..75: mol_type = other DNA
atgcaattatcttttcccccctgctgatagctgctgatacaggaagtcaatatggcaccaatattactattaatg

SEQ ID NO: 110647 - DNA, 75 bp, synthetic construct
  source 1..75: mol_type = other DNA
cctcagcgataatgtcaatggcgggaaactggacgttgcaatgaataacagcgtctggaacgtaacaagtaattc

SEQ ID NO: 110648 - DNA, 75 bp, synthetic construct
  source 1..75: mol_type = other DNA
aaagcaaagtgtcagccgacggggaaactgctgggataacagtccaatggaacgcttcttccgcagtctgaaaac

SEQ ID NO: 110649 - DNA, 75 bp, synthetic construct
  source 1..75: mol_type = other DNA
caactgataaaatatggcgctattggtttgaatgcaattatcttttcccccctgctgatagctgctgatttagga

SEQ ID NO: 110650 - DNA, 75 bp, synthetic construct
  source 1..75: mol_type = other DNA
cgaaggaaaaaaggctaaagtttggagcacaaatgatggtgcctgtgtaggtcgtagggctgttgacgagattaa

SEQ ID NO: 110651 - DNA, 75 bp, synthetic construct
  source 1..75: mol_type = other DNA
accgctttgtttcagtgcgttcccgacctggggttcattttgataggaggcggcggtgtcaatcagtcgataacc

SEQ ID NO: 110652 - DNA, 75 bp, synthetic construct
  source 1..75: mol_type = other DNA
acatgaaacgctttgcactgatagctgtgacactcgttgcctttactggttctagttctgcatctgctgcaaccg

SEQ ID NO: 110653 - DNA, 75 bp, synthetic construct
  source 1..75: mol_type = other DNA
agctattatttgttgttggggcatttgtttacatggttgggttatggagctcatgcccgctgttaagtggtaagg

SEQ ID NO: 110654 - DNA, 75 bp, synthetic construct
  source 1..75: mol_type = other DNA
aatcaattggatatggttgtaggatgtcgtcaagagaatggagatcaaaatacatacagaaaagggcatcgctga

SEQ ID NO: 110655 - DNA, 75 bp, synthetic construct
  source 1..75: mol_type = other DNA
ttgtacaacgacaatcccgaggttgtaacgctggctgcgcatttgatgttgctggcggcggtatatcagatttct

SEQ ID NO: 110656 - DNA, 75 bp, synthetic construct
  source 1..75: mol_type = other DNA
ggtttctgtttcagcaaactatccgggcgctgatgcgcagaccgtgcaggatacggtgacgcaggttatcgaaca

SEQ ID NO: 110657 - DNA, 75 bp, synthetic construct
  source 1..75: mol_type = other DNA
gtagatgttgttggtcaaacctctgccatcggcattaatttaattggtgactatacacatgctgacttaggcaca

SEQ ID NO: 110658 - DNA, 75 bp, synthetic construct
  source 1..75: mol_type = other DNA
tctatcacttttcgggaacgatccgtcgttttgctattccggaacgtttcaataatcgtgagctcgcagagaaag

SEQ ID NO: 110659 - DNA, 75 bp, synthetic construct
  source 1..75: mol_type = other DNA
tattgggtcatgttccttgccatggtttcttacattaaacgcgcccgctccatgcgcgatattcgtaacgaaaaa

SEQ ID NO: 110660 - DNA, 75 bp, synthetic construct
  source 1..75: mol_type = other DNA
gggcggcggtcccggcacgatcccggatcgcgtcaccaccattaccaaccgcgattccacctgggcgggcgtgga

SEQ ID NO: 110661 - DNA, 75 bp, synthetic construct
  source 1..75: mol_type = other DNA
aatattcagccagtcttgaaaatagtgttacagagtatatgccaccagtctttattgtgcatgcaacagatgata

SEQ ID NO: 110662 - DNA, 75 bp, synthetic construct
  source 1..75: mol_type = other DNA
tttccaggtccacggcagaaagctgacgaagttgtccagggagttattgacttgctgactaaactctcacagtga

SEQ ID NO: 110663 - DNA, 75 bp, synthetic construct
  source 1..75: mol_type = other DNA
cgatggcgatcgtgtagagatttatcgaccattgattgccgatccgaaagagcttcgcaggcagcgggcagagaa

SEQ ID NO: 110664 - DNA, 75 bp, synthetic construct
  source 1..75: mol_type = other DNA
caacaaagccattaccttatggcaacgttgcgtagagatgtcgccggagtttgccgacggctggcgcgggttagc

SEQ ID NO: 110665 - DNA, 75 bp, synthetic construct
  source 1..75: mol_type = other DNA
ttgataatgcttatcagcttgcgccgcaggatgcacgtctgcttttcgaacgggatttgcttgataagttaagcg

SEQ ID NO: 110666 - DNA, 75 bp, synthetic construct
  source 1..75: mol_type = other DNA
tacaaatacccggcagtgggagtgcctgttctggcggtctatcagggaacggcggctggcgataaggcaatcaaa

SEQ ID NO: 110667 - DNA, 75 bp, synthetic construct
  source 1..75: mol_type = other DNA
gtgtcgtcggaaaggcaaaggttcgccagctgcagcgccacgaaacaggcgccagaacgaacgaatttaaagcct

SEQ ID NO: 110668 - DNA, 75 bp, synthetic construct
  source 1..75: mol_type = other DNA
tggtgaaaatttcccctaaccagaaaaacgggcaggggaatcgccgttttcctgaaggtgctccttattatccgg

SEQ ID NO: 110669 - DNA, 75 bp, synthetic construct
  source 1..75: mol_type = other DNA
agcacagcggagatgaaaaagttcgtggggtgggcgcttaaacagcccgacaactggcaaaaatgggtcacgttg

SEQ ID NO: 110670 - DNA, 75 bp, synthetic construct
  source 1..75: mol_type = other DNA
gacggtgtcgctaccgaaatgctcgatgaaggtctggtacgtgaagacctgactgcactggactttgtcaccatt

SEQ ID NO: 110671 - DNA, 75 bp, synthetic construct
  source 1..75: mol_type = other DNA
cgggacaattccggagccgactcctaatcctgagcccacaccagctcccgctcagccccccatagtcaaccccga

SEQ ID NO: 110672 - DNA, 75 bp, synthetic construct
  source 1..75: mol_type = other DNA
aacaactcccgggagaagtacagtttcaaaggtaatggctggaataacggcgtgggagtcagtgcacagtataac

SEQ ID NO: 110673 - DNA, 75 bp, synthetic construct
  source 1..75: mol_type = other DNA
tgcctttttaactgcctccatcatgttatcgtcaataatggcatttgtatgtggcattattttgcattcaaatac

SEQ ID NO: 110674 - DNA, 75 bp, synthetic construct
  source 1..75: mol_type = other DNA
cgcaaagccgggagaaatccacttttaccccaccagcacataattgttcctgctgaaattgtggaatctctaccg

SEQ ID NO: 110675 - DNA, 75 bp, synthetic construct
  source 1..75: mol_type = other DNA
caaagatgaaaaagggcgcaactggacgaaatcgatctcaatggcgaatgagcgctacatggaagtgttgttaac

SEQ ID NO: 110676 - DNA, 75 bp, synthetic construct
  source 1..75: mol_type = other DNA
accatcgcgctggcggaagaaatttgtttgttggtagcggaaggccatagcctacgtgagatcgcgaagatgcca

SEQ ID NO: 110677 - DNA, 75 bp, synthetic construct
  source 1..75: mol_type = other DNA
gatgagcagagtcgcagtcagtcgccgcgacgaattatcctttcgcgcctgaaggccggggaagtcgacctgctg

SEQ ID NO: 110678 - DNA, 75 bp, synthetic construct
  source 1..75: mol_type = other DNA
tgatgtcagatttcgggagcattcgctcccttctgcccgctgatggcaaaatcgacaccgtgaaattcgatcagc

SEQ ID NO: 110679 - DNA, 75 bp, synthetic construct
  source 1..75: mol_type = other DNA
tcatggacgagacgaaaacaaaagcgccactggacagcccggcgttcaccggcacgccaaccacaccaaccccac

SEQ ID NO: 110680 - DNA, 75 bp, synthetic construct
  source 1..75: mol_type = other DNA
tgccatgaccaacagccagatcgacctcacgagcgatctggtcattgatatgagtacacccgaccagatggccat

SEQ ID NO: 110681 - DNA, 75 bp, synthetic construct
  source 1..75: mol_type = other DNA
ggacgagaccgacaaggtgcttccttcatggcaggttgattccctgcgcgaagaggcttaccgcgacaccgggaa

SEQ ID NO: 110682 - DNA, 75 bp, synthetic construct
  source 1..75: mol_type = other DNA
cagttaagcctttaagaaatacttatgcttatattgaaaaaagatttggtgataaaccagcttcacgttatcaag

SEQ ID NO: 110683 - DNA, 75 bp, synthetic construct
  source 1..75: mol_type = other DNA
ctgccacacaggatgcggcccgcgcagaacaggcggtcaaagatgccgataagatagtccagaaagcggtcgata

SEQ ID NO: 110684 - DNA, 75 bp, synthetic construct
  source 1..75: mol_type = other DNA
gatgttgacaagatcatcttcgttgtcactatccatgatgctcaggctcgtcgccagagctttggtcaggtatcc

SEQ ID NO: 110685 - DNA, 75 bp, synthetic construct
  source 1..75: mol_type = other DNA
aatggcaaggttcgtggcgatgcagatttcattttctataacaacctgaaatctgctgatggttccgttactcat

SEQ ID NO: 110686 - DNA, 75 bp, synthetic construct
  source 1..75: mol_type = other DNA
tgctggcggacttctttaaaccagccctgctggcgcgtatggaagtggtgccgtccctgcctctgtcgaaagaga

SEQ ID NO: 110687 - DNA, 75 bp, synthetic construct
  source 1..75: mol_type = other DNA
tttcactggctggcatgtcgccaaaatccagcaatatgacggcaaagtcaggcattaatacagcagatacaagca

SEQ ID NO: 110688 - DNA, 75 bp, synthetic construct
  source 1..75: mol_type = other DNA
gcattgcatgtaatgcctcggctagcgttctgatcaaaatggcaatgatgcctccgcgtaaatttccttccctgg

SEQ ID NO: 110689 - DNA, 75 bp, synthetic construct
  source 1..75: mol_type = other DNA
agaaaaccgtaatcggatcttgaagctactggggctgcagccagttggtgaggtctggggagtaggacgcagact

SEQ ID NO: 110690 - DNA, 75 bp, synthetic construct
  source 1..75: mol_type = other DNA
gccagcgtcaagggaatgaatgaacctgctgatgctgccatgaatctcgttaaaaccagcaatggctggaaagct

SEQ ID NO: 110691 - DNA, 75 bp, synthetic construct
  source 1..75: mol_type = other DNA
atcattttggcatctaatccgggtgggatgccgtggcaaagcgccaaggcaggagcccctcacaccgcgtatatc

SEQ ID NO: 110692 - DNA, 75 bp, synthetic construct
  source 1..75: mol_type = other DNA
tcttccgtcgccgcttgctgctggatggcgaattacgatagatcgtgtgcttgatgtggtgcaggagactgatct

SEQ ID NO: 110693 - DNA, 75 bp, synthetic construct
  source 1..75: mol_type = other DNA
ggcggcgtgctgaccgaagcgattcgccagaaaccctactcggtggtgctgcttgatgaagtggaaaaagcgcat

SEQ ID NO: 110694 - DNA, 75 bp, synthetic construct
  source 1..75: mol_type = other DNA
agacggcgaaggccgcctgattgactgtaaaaacatcgttttcttcctgacttccaaccttggctaccaggtgat

SEQ ID NO: 110695 - DNA, 75 bp, synthetic construct
  source 1..75: mol_type = other DNA
caatcctctaccgtaggtcgtgactacgataccagcaagaaaatcaccgaacaaagcgatggcttactggcgaaa

SEQ ID NO: 110696 - DNA, 75 bp, synthetic construct
  source 1..75: mol_type = other DNA
ggggtcgcgacttggtcctgtggctatcgactgtgcaattaataattccgggacatatgtttccacaccttcagt

SEQ ID NO: 110697 - DNA, 75 bp, synthetic construct
  source 1..75: mol_type = other DNA
cgtgatgtacaaacaataggaatgcagacttttattgaatattatcaatatgttgaaagtggaatggacgcaact

SEQ ID NO: 110698 - DNA, 75 bp, synthetic construct
  source 1..75: mol_type = other DNA
aaggccgcctgattgactgcaaaaatatcgtcttcttcctgacgtccaacctcggctaccaggtaatagtcgagc

SEQ ID NO: 110699 - DNA, 75 bp, synthetic construct
  source 1..75: mol_type = other DNA
cagaaaaagcccgcgcattactggcgctggacacgtctgaggccatgcgcacggagcttgaactgaaagcggctg

SEQ ID NO: 110700 - DNA, 75 bp, synthetic construct
  source 1..75: mol_type = other DNA
aagaaggtgcagtagcgctgcgagaaggtgagtttaacgctgcgtttaatcctgaggctgtggtgaaagtaaccg

SEQ ID NO: 110701 - DNA, 75 bp, synthetic construct
  source 1..75: mol_type = other DNA
cagcatactggatgtttcttcatggtagagcaagccgtggtagtattattatgcttgccacttttttattccaag

SEQ ID NO: 110702 - DNA, 75 bp, synthetic construct
  source 1..75: mol_type = other DNA
gagtttacaaatgaagattctgtaggtgttactcctgctacaccaaaagccatgagcgtagctgttagtatcaac

SEQ ID NO: 110703 - DNA, 75 bp, synthetic construct
  source 1..75: mol_type = other DNA
ctatatggaattgcctttttgttatatgctgttacactggcatttttacctttgaatgtagcacacccaatactg

SEQ ID NO: 110704 - DNA, 75 bp, synthetic construct
  source 1..75: mol_type = other DNA
tatgattttactctggaatatggctcgatagtgacatcgaatatttcaggcggttataacaaggatcggacggcg

SEQ ID NO: 110705 - DNA, 75 bp, synthetic construct
  source 1..75: mol_type = other DNA
caggaacatctgcagccgttaccgagttccgcattaagcgccgtttcgacagttaatttcgtcagcatacgggaa

SEQ ID NO: 110706 - DNA, 75 bp, synthetic construct
  source 1..75: mol_type = other DNA
tattcagatgatgaagataagatcactaatttactggttttatttctcaaaggtgttgggtacaacgcatctgaa

SEQ ID NO: 110707 - DNA, 75 bp, synthetic construct
  source 1..75: mol_type = other DNA
gtataaaccctgatgtttttgaacaatttcttaccctcctgaatacacactgtaaatcatcagaagctgcacttg

SEQ ID NO: 110708 - DNA, 75 bp, synthetic construct
  source 1..75: mol_type = other DNA
tagcaaaaattaccggcctgaccagcaaagccattcgcttctatgaagagaaggggctggtgacgccgccgatgc

SEQ ID NO: 110709 - DNA, 75 bp, synthetic construct
  source 1..75: mol_type = other DNA
atgcattccttgctgaaggctggaaggggctgtgtgaagaacatctgccagggcaaaatattcatgcagtgctta

SEQ ID NO: 110710 - DNA, 75 bp, synthetic construct
  source 1..75: mol_type = other DNA
aagccgacccggaacgtctggcgctgcatcagaaagcgctggaactgtcgaaaaaagaaggcatcagctacgacg

SEQ ID NO: 110711 - DNA, 75 bp, synthetic construct
  source 1..75: mol_type = other DNA
cctgaaggccaatgttgaaggggataagccatctttcgtcaatatcggtgggcgtggcaagcctgaatggtgctt

SEQ ID NO: 110712 - DNA, 75 bp, synthetic construct
  source 1..75: mol_type = other DNA
agcgctgctgccgctgacgctgtgggcataaccggcctgaacgcccagggtgatattttcccggacacgggcttc

SEQ ID NO: 110713 - DNA, 75 bp, synthetic construct
  source 1..75: mol_type = other DNA
aagcagaagcagatatttctgaatatataacaaaaaaattattgaacttaagaaaaagaccgggaaagaagttac

SEQ ID NO: 110714 - DNA, 75 bp, synthetic construct
  source 1..75: mol_type = other DNA
ccgcagcgggcaaaaaaatcattatccgcgtgccgctgattcagggctttaatgccgacgaaacctctgtaaaag

SEQ ID NO: 110715 - DNA, 75 bp, synthetic construct
  source 1..75: mol_type = other DNA
tcaactgccgggagcggtcgtggttttatgatgacaactgaagagccagggttaacagggttttattctgccttt

SEQ ID NO: 110716 - DNA, 75 bp, synthetic construct
  source 1..75: mol_type = other DNA
gccaaaaatccctgacaggaggacgagcggtagcctggctggaaagtgaagtcaatgagtggattgcttcccgtg

SEQ ID NO: 110717 - DNA, 75 bp, synthetic construct
  source 1..75: mol_type = other DNA
atcgattcagatgccattttgcaaccactgtgcagggagtcttgccggttatcttcgcatgctcaccgacagctc

SEQ ID NO: 110718 - DNA, 75 bp, synthetic construct
  source 1..75: mol_type = other DNA
catgaggatgtctgaagaggctgctggcatggccgcagatgctgagaacttcgccgacgagcttcgcaaaggagt

SEQ ID NO: 110719 - DNA, 75 bp, synthetic construct
  source 1..75: mol_type = other DNA
atgcgccaatcaatgcattcgaaatggtgatatatcctattgctttctttgtttgcttgtttggtcaggttcagt

SEQ ID NO: 110720 - DNA, 75 bp, synthetic construct
  source 1..75: mol_type = other DNA
gtggccgtcgaggtggtcatgcgtggacgtcagaaagaaatcgacaccggcgagggtaaacagggagaagacacc

SEQ ID NO: 110721 - DNA, 75 bp, synthetic construct
  source 1..75: mol_type = other DNA
aatgaagttatttatttctctgacataccaaaaccggagtcattgagtaatatacatcgatttaatttttctatt

SEQ ID NO: 110722 - DNA, 75 bp, synthetic construct
  source 1..75: mol_type = other DNA
atgagtctggcggatgaagtggcagagttacgccgcagggtggcgaatatagtcctgcgcggcgtggtggaggag

SEQ ID NO: 110723 - DNA, 75 bp, synthetic construct
  source 1..75: mol_type = other DNA
atcaggtgatgaaccacctctttgctaccaccgatctggaaaagagctatcgcattaacctcaatatgatcggtc

SEQ ID NO: 110724 - DNA, 75 bp, synthetic construct
  source 1..75: mol_type = other DNA
gatagcggaaggagggcaggggaaaaccgagaatgctacaaggcaggtggctatccatcccaaactgatcaagtg

SEQ ID NO: 110725 - DNA, 75 bp, synthetic construct
  source 1..75: mol_type = other DNA
tgaagttgctcaaaaagttcaggcgcgcgttgcggccggactgcgggcgccaggactggccgttgtgctggtggg

SEQ ID NO: 110726 - DNA, 75 bp, synthetic construct
  source 1..75: mol_type = other DNA
cgcgtatcgatatccccctgctgaagcgcattgccgaagtctgcccggtgccgctggttattcacggcggctccg

SEQ ID NO: 110727 - DNA, 75 bp, synthetic construct
  source 1..75: mol_type = other DNA
aactctctatcagcgacagccgcgaaggcgggaaagattacctgttacggccgtcattcgaggctatggcgagaa

SEQ ID NO: 110728 - DNA, 75 bp, synthetic construct
  source 1..75: mol_type = other DNA
ttgagccgctgcatatcgtttgccaaaagctggggctacggtggcgtatacatggccaacctgttcgcattcgtt

SEQ ID NO: 110729 - DNA, 75 bp, synthetic construct
  source 1..75: mol_type = other DNA
cgctttgaggaaatggtggcgcaggcgcagcagagcgcggaagcggcagcggaaagcgaacgacaggccgggcaa

SEQ ID NO: 110730 - DNA, 75 bp, synthetic construct
  source 1..75: mol_type = other DNA
gaagatcctcattttcagcagttaatggatgactttaatcaacgctcagaacagaaagattcgggtaataacagc

SEQ ID NO: 110731 - DNA, 75 bp, synthetic construct
  source 1..75: mol_type = other DNA
tgactggcttaaggtgatcgatttttgcatcaagtttcacatttttactttcctgttgcagtatttagctttcaa

SEQ ID NO: 110732 - DNA, 75 bp, synthetic construct
  source 1..75: mol_type = other DNA
tgccggacggtcacaactttaccctgatgtgtcgcgatctttctgagctctcgacctattcattcgtggataacg

SEQ ID NO: 110733 - DNA, 75 bp, synthetic construct
  source 1..75: mol_type = other DNA
ggaaacagttggaagctggcatgcacgctggagtgaccgggtggcagagcatgacctggaaaccctgttctggca

SEQ ID NO: 110734 - DNA, 75 bp, synthetic construct
  source 1..75: mol_type = other DNA
ctgtacaaattaaaggtgaaacggtttacaaagtaactgacgttattgacgtcaccattgccgaagtccgcatgg

SEQ ID NO: 110735 - DNA, 75 bp, synthetic construct
  source 1..75: mol_type = other DNA
tgctgattgaaactcagggcgaggtctgccttcttcccttcccggcgatgcagcagagcggctgttcccgtcggt

SEQ ID NO: 110736 - DNA, 75 bp, synthetic construct
  source 1..75: mol_type = other DNA
taaagccgcgaaaattcgcacattcaccaactacctgccgggcttcaacattccaatgctgccgcgtgagctttc

SEQ ID NO: 110737 - DNA, 75 bp, synthetic construct
  source 1..75: mol_type = other DNA
acagagctaatacctgaactgagcaaaataagctcccctgattcatggagtggtgctcttggttttctttatgga

SEQ ID NO: 110738 - DNA, 75 bp, synthetic construct
  source 1..75: mol_type = other DNA
tcttcggggggcgggcctggctggatccggaactgaataccgctgaaacgctggcagccggtgaactgtacatca

SEQ ID NO: 110739 - DNA, 75 bp, synthetic construct
  source 1..75: mol_type = other DNA
tacgaaaaagggtggtggtggtccaaatcaaaccaggatgtgatgaatatcaccggtctggagcaggtggacaca

SEQ ID NO: 110740 - DNA, 75 bp, synthetic construct
  source 1..75: mol_type = other DNA
cgcaccaatttctgaatgatgcgcggcgcaatattcagccgatagttgttcatgaagaccgcgaggttgtctctc

SEQ ID NO: 110741 - DNA, 75 bp, synthetic construct
  source 1..75: mol_type = other DNA
aacgaccgtccgacagctattgccagagagcacaatgtgcttcgtcttaaacgctacaggtgagccgaagcaccc

SEQ ID NO: 110742 - DNA, 75 bp, synthetic construct
  source 1..75: mol_type = other DNA
tcccggtgatgcagcagagcgcttgttcccgtcggtgcggtttcgtgtcagggaacgcagtcgccataaatccgc

SEQ ID NO: 110743 - DNA, 75 bp, synthetic construct
  source 1..75: mol_type = other DNA
cgctaagatggggatcactggtgagcagcttaaatcctggggagaaatggcagcatacgccgccggggtggctct

SEQ ID NO: 110744 - DNA, 75 bp, synthetic construct
  source 1..75: mol_type = other DNA
tattgattatgactttgggccgaagtcaccactggagcgcctgacactgcgggcaatgattaacaataaactggc

SEQ ID NO: 110745 - DNA, 75 bp, synthetic construct
  source 1..75: mol_type = other DNA
ggcgcgcgtcatttggcgggcgtgtggagctgctgcgtccgcgcgtgtctgtgacggatgacagcgggcagacga

SEQ ID NO: 110746 - DNA, 75 bp, synthetic construct
  source 1..75: mol_type = other DNA
gcggtggttatcagcgcattgccgcatcaggtttcaggtgcgcgcgtactggagcaaattgctgcgcaaatgcgc

SEQ ID NO: 110747 - DNA, 75 bp, synthetic construct
  source 1..75: mol_type = other DNA
ggcgcgaccaggtaaaaaaagacgctaaagaggtaagttcttcaatcattgctgtgggggctgcagcggctaccg

SEQ ID NO: 110748 - DNA, 75 bp, synthetic construct
  source 1..75: mol_type = other DNA
gctgtcgaacttctccaccgtcggtagcctgatgggtaacctgacgcgcggctcaatgatgattgaaggacgaat

SEQ ID NO: 110749 - DNA, 75 bp, synthetic construct
  source 1..75: mol_type = other DNA
caaagtcaaacatttggcgtcgcctgggacgatcctgctaccactgagccagacgcatttcgttttgatatttgc

SEQ ID NO: 110750 - DNA, 75 bp, synthetic construct
  source 1..75: mol_type = other DNA
gacgacttttttagagcagtttaatgctgtaaaagataaaaagaaggcatcttataagagatttacaattcttcc

SEQ ID NO: 110751 - DNA, 75 bp, synthetic construct
  source 1..75: mol_type = other DNA
tgcaactctgtagtgatacagacaacgatagcgaagaactggcagccacaccaaaggctgttaaaaccgtcatgg

SEQ ID NO: 110752 - DNA, 75 bp, synthetic construct
  source 1..75: mol_type = other DNA
actgtcaaacttctctaccgttggtagcctgatgggtaacctgacccgaggttcgatgatgattgaaggacgtat

SEQ ID NO: 110753 - DNA, 75 bp, synthetic construct
  source 1..75: mol_type = other DNA
ctcaggcgtatttactgagcaaaacagaccccgcacgttgggattatggtctgaatggtgggcgcctgaaatatt

SEQ ID NO: 110754 - DNA, 75 bp, synthetic construct
  source 1..75: mol_type = other DNA
cgggcaaagggggggttggtaagacaacctccagcgcggccatcgccactggtttggcccagaagggaaagaaaa

SEQ ID NO: 110755 - DNA, 75 bp, synthetic construct
  source 1..75: mol_type = other DNA
tgaaatcgtcaccacgccggaagacaccgctattggcggcgaactgctgaccaacgaccgcgacccggacggcga

SEQ ID NO: 110756 - DNA, 75 bp, synthetic construct
  source 1..75: mol_type = other DNA
gccaaatctgacatcattaattatcgataccgaagctcttgtgtcagcgaaaaaaggtggtatcacgccttattt

SEQ ID NO: 110757 - DNA, 75 bp, synthetic construct
  source 1..75: mol_type = other DNA
tgacctgcgcccgatgggtaacggtgacctggtggtgaccgttgaggatgaaagcggtaacaaaaccgaacaggt

SEQ ID NO: 110758 - DNA, 75 bp, synthetic construct
  source 1..75: mol_type = other DNA
cagggagatctattgctgggaaaatcacaaacccgtacggagcttttttctgactttaatttctacggtgcagct

SEQ ID NO: 110759 - DNA, 75 bp, synthetic construct
  source 1..75: mol_type = other DNA
accgtgaacgtcaggtttcctttgccctgcgcgcctacgccagcctggcaaccagcgccgacaaaggtgcggtgc

SEQ ID NO: 110760 - DNA, 75 bp, synthetic construct
  source 1..75: mol_type = other DNA
aatttaaagttacaatttctccagaatggttatccaatgataaaaactggaaactagatctcgaacgtggtaatg

SEQ ID NO: 110761 - DNA, 75 bp, synthetic construct
  source 1..75: mol_type = other DNA
ggtcaagcaactgcacagctacggttacaaaggtctgaccaacgaagccctgaacgtaacgctggtagaagcggg

SEQ ID NO: 110762 - DNA, 75 bp, synthetic construct
  source 1..75: mol_type = other DNA
ccgcgttccaaccgcgtggatatggatcaggtgatgaaccacctcttcgcaaccaccgatctggaaaagagctat

SEQ ID NO: 110763 - DNA, 75 bp, synthetic construct
  source 1..75: mol_type = other DNA
taccgaatgcatcagattgcgctgcatggttactttaaaaccggattaatgatgctggtggggagtattaaccgc

SEQ ID NO: 110764 - DNA, 75 bp, synthetic construct
  source 1..75: mol_type = other DNA
ctcaggcgtatttactgagtaaaacagaccctgcacgctgggattatggcgtgaatggtgggcgcctgaaatatt

SEQ ID NO: 110765 - DNA, 75 bp, synthetic construct
  source 1..75: mol_type = other DNA
aacagcgaatgctgcttttgtccgcaaactgcttgccgcactggttgactcgtcaccggaagccctggacacact

SEQ ID NO: 110766 - DNA, 75 bp, synthetic construct
  source 1..75: mol_type = other DNA
accaaaggatggtgatttacgtccggaggtgatgaagcgctttgaggaaatggtggatgcggttgcccggcagtc

SEQ ID NO: 110767 - DNA, 75 bp, synthetic construct
  source 1..75: mol_type = other DNA
atgcattacaatttgccacaactcttacagatgccaaaaagcaactccatcaggccatatggcaaatggctattt

SEQ ID NO: 110768 - DNA, 75 bp, synthetic construct
  source 1..75: mol_type = other DNA
caatacaaccggatttttcatgggtggatagcaaagcttggtctcgacgattcgctttacagcacacattccatg

SEQ ID NO: 110769 - DNA, 75 bp, synthetic construct
  source 1..75: mol_type = other DNA
ggcggcgttcgcgaaaccgccaacgtcaccgtcaccctgaccaacagcgtgccggtcgcaacgggcgagacagtg

SEQ ID NO: 110770 - DNA, 75 bp, synthetic construct
  source 1..75: mol_type = other DNA
caccggaagttatagcggcagccagttttatctcggttatatggatgattacggcgcattacgcatgacgacgct

SEQ ID NO: 110771 - DNA, 75 bp, synthetic construct
  source 1..75: mol_type = other DNA
gctgcgtggggaaaacctgtacataaaaaacctgccattgaacgggtttttcatggttgatgcgcaaagcattca

SEQ ID NO: 110772 - DNA, 75 bp, synthetic construct
  source 1..75: mol_type = other DNA
tacggcggtcagtttacgcttacttttaaagccggtactcataccgatatgcacggcaaaaaactgccgttcacg

SEQ ID NO: 110773 - DNA, 75 bp, synthetic construct
  source 1..75: mol_type = other DNA
gaatggcagctcaacaatctgcgcgaagaggcgtaccgcgacacactgtcgcaggatgcagcaggtgcacaattc

SEQ ID NO: 110774 - DNA, 75 bp, synthetic construct
  source 1..75: mol_type = other DNA
tttcccctaaccagaaaaacgggcaggggaatcgccgttttcctgaaggcgctccttattatccggcgtttctgt

SEQ ID NO: 110775 - DNA, 75 bp, synthetic construct
  source 1..75: mol_type = other DNA
caatacagccgaatttttcatgggtgggtagaaaagcttggtctcgaagcttcgctgtacagcacacaatccatg

SEQ ID NO: 110776 - DNA, 75 bp, synthetic construct
  source 1..75: mol_type = other DNA
cttgatgcctttaacgatttaagccagtcgggtgaatggcaattagcgttgttgggcttaaacccagatgttcgc

SEQ ID NO: 110777 - DNA, 75 bp, synthetic construct
  source 1..75: mol_type = other DNA
aaactacgtcgtgaactggatgcacaaccgaccggtttcctcgacagccgcatccgtcgtttccagtcttttgca

SEQ ID NO: 110778 - DNA, 75 bp, synthetic construct
  source 1..75: mol_type = other DNA
gatcggcaacgaccgcttcgttaacccggaccaggccattaccggcgtgacccagggcgcgcacggctccgtcgc

SEQ ID NO: 110779 - DNA, 75 bp, synthetic construct
  source 1..75: mol_type = other DNA
ggaatcagaatccggtgccttaccgcttggcgataccccaacaaattggtttttgaatttgccgaacgtattcga

SEQ ID NO: 110780 - DNA, 75 bp, synthetic construct
  source 1..75: mol_type = other DNA
gaagcgacagtggggtacccgtgaggatgtcgcctgtgcgcagtggatttggggacgggttgtggcgttgtatga

SEQ ID NO: 110781 - DNA, 75 bp, synthetic construct
  source 1..75: mol_type = other DNA
atgagtggaaccttactcgccttcgacttcggcaccaaaagcattggcgtagcggtcggccaacgcattaccggc

SEQ ID NO: 110782 - DNA, 75 bp, synthetic construct
  source 1..75: mol_type = other DNA
attattggcctgacttctgccgctattatgatgatgctgcgtatgcgtttcctgcaacgtctgccatcagccatc

SEQ ID NO: 110783 - DNA, 75 bp, synthetic construct
  source 1..75: mol_type = other DNA
agtggcgggtactaacatgacaaaaattggcaaagaatttgcggatgtgcgtaatcggcttggaattccatactt

SEQ ID NO: 110784 - DNA, 75 bp, synthetic construct
  source 1..75: mol_type = other DNA
ctggttcttgccgcatacctgccagatagcggcagcagtgatgtcacattacttcgtacacaatatgtgccggga

SEQ ID NO: 110785 - DNA, 75 bp, synthetic construct
  source 1..75: mol_type = other DNA
atgcgtgtgcgtctgatcgacaatggcgctattgcctttattccggcaccattcttacacgctgtacgcgacgaa

SEQ ID NO: 110786 - DNA, 75 bp, synthetic construct
  source 1..75: mol_type = other DNA
gactgggcggttgccgaaatgcgccgccatccgttgaaaggcgatcgctcattctatgcggaactgacacaatac

SEQ ID NO: 110787 - DNA, 75 bp, synthetic construct
  source 1..75: mol_type = other DNA
tcctaccgcgtattatctgaccattgcctacctgggacgaaatgaaaaaggcgttctccccggcttcaaaaccgt

SEQ ID NO: 110788 - DNA, 75 bp, synthetic construct
  source 1..75: mol_type = other DNA
tctctccaccggtttcgaccagttacaatacggtacgatgacggtagaaaagccgcgattaattctcgacaagcc

SEQ ID NO: 110789 - DNA, 75 bp, synthetic construct
  source 1..75: mol_type = other DNA
tctggtcgtactgaccgtattgatgcagcagttggtgccattgatggccgtgtcacccgtaacacgcaatccatt

SEQ ID NO: 110790 - DNA, 75 bp, synthetic construct
  source 1..75: mol_type = other DNA
ttcttgcctgatgctggtcgctggcagtggcgttactgggggaaaggcagttttacgccaatgcacgcgacatgg

SEQ ID NO: 110791 - DNA, 75 bp, synthetic construct
  source 1..75: mol_type = other DNA
gcgtttgtcacgattgggcagcgtcatatgcgtgatgcccgtcggctggtgatgcgccgtgcgcggtcggcaccg

SEQ ID NO: 110792 - DNA, 75 bp, synthetic construct
  source 1..75: mol_type = other DNA
ctgatgttttactacgatatagactggaagaaaatactatggctcgtcgagctgggctttcaaaggctaaaagcg

SEQ ID NO: 110793 - DNA, 75 bp, synthetic construct
  source 1..75: mol_type = other DNA
aagggagcgatcagcaggcaaccataaaagccatgcttcatcattttaaacaggcagctacgctcgcggtcaaca

SEQ ID NO: 110794 - DNA, 75 bp, synthetic construct
  source 1..75: mol_type = other DNA
gacactgaccattgaacagtgtgaactggtgatcaaagcggcgcgtaaggcgctggcggccatgcgagtaagtgt

SEQ ID NO: 110795 - DNA, 75 bp, synthetic construct
  source 1..75: mol_type = other DNA
accgtatcataggccaaaaaaggccacttcagatatctcatatctggggtatccgaatccgacttgaactggaag

SEQ ID NO: 110796 - DNA, 75 bp, synthetic construct
  source 1..75: mol_type = other DNA
tgtactgggcacgtctgagaccggaccgctctttactaaagagtcgtctgacaccgtgggtattgtcagtattcc

SEQ ID NO: 110797 - DNA, 75 bp, synthetic construct
  source 1..75: mol_type = other DNA
gttttggcatctataacgtgcatatgggctttgatccggcgaatgccgacgcgctggcagcgttgctgaaaacgc

SEQ ID NO: 110798 - DNA, 75 bp, synthetic construct
  source 1..75: mol_type = other DNA
aataacaccgataatgattatatagttacagcaaatgtagatagtaataaaaatactcaaaaaggggaggggaga

SEQ ID NO: 110799 - DNA, 75 bp, synthetic construct
  source 1..75: mol_type = other DNA
agtccgtccgccgtactgcggatgtgattgaagacagtatccaggaggcgatgctggcatatgttgaccgcccgc

SEQ ID NO: 110800 - DNA, 75 bp, synthetic construct
  source 1..75: mol_type = other DNA
tcgctggaatcgtgtgttaactcaactggtaccatccattaacggctttaatgagctcactgaagggatgcttcg

SEQ ID NO: 110801 - DNA, 75 bp, synthetic construct
  source 1..75: mol_type = other DNA
acgacagctcggaaggccgtattgcgctgccaggtgcatttggttacggaatgacgaatcccggaagcacggcaa

SEQ ID NO: 110802 - DNA, 75 bp, synthetic construct
  source 1..75: mol_type = other DNA
taacatgacgctggaaaatccttcaccagagctgctcacggtgttgatggggtcagtttggaattcggaaaataa

SEQ ID NO: 110803 - DNA, 75 bp, synthetic construct
  source 1..75: mol_type = other DNA
gtaaaactcgcgatttagctctgttcaacatggccctggatagtaagcttcgaggctgtgatctggtcaaactca

SEQ ID NO: 110804 - DNA, 75 bp, synthetic construct
  source 1..75: mol_type = other DNA
gggctgaatgcagggtttatttcaaacaatggtgttctgctgatgaacatgctggctgaaccgaaaacggtcagc

SEQ ID NO: 110805 - DNA, 75 bp, synthetic construct
  source 1..75: mol_type = other DNA
tggcagccagaaagcgacgcaattgctgaacaaattcgcctgttagcgcaaatttgccagcgccgcggcgaatgg

SEQ ID NO: 110806 - DNA, 75 bp, synthetic construct
  source 1..75: mol_type = other DNA
tataggtcaatgactattcagcagctggtagattgcgatgatgttccacctgatgagttggttggtgttgagaca

SEQ ID NO: 110807 - DNA, 75 bp, synthetic construct
  source 1..75: mol_type = other DNA
gtaacgccggccttacttagccagttgcgtaaagcgcctgtggtaggtagagcaaatcctgaattaaacagccaa

SEQ ID NO: 110808 - DNA, 75 bp, synthetic construct
  source 1..75: mol_type = other DNA
aacgacggcggcaccgctaccgcgttgctcgttatcaccgttacgccggtcgtggatgtgaaagatgaccgcgcc

SEQ ID NO: 110809 - DNA, 75 bp, synthetic construct
  source 1..75: mol_type = other DNA
agtccgggcaccaaattcatatcaacggacctccacggaggtccgtttttcgtttcagaacaccatgatttaagt

SEQ ID NO: 110810 - DNA, 75 bp, synthetic construct
  source 1..75: mol_type = other DNA
agtccgggcaccaaattcatatcaacggacctccacggaggtccgtttttcgtttcggaacgccacaatttaagc

SEQ ID NO: 110811 - DNA, 75 bp, synthetic construct
  source 1..75: mol_type = other DNA
tccgtgggccgtgactatgacaccagcaagaaaatcaccgaacaaagcgatggtttactggcgaaggtgggaatg

SEQ ID NO: 110812 - DNA, 75 bp, synthetic construct
  source 1..75: mol_type = other DNA
cgtaccatgacgaatggcgaatcgtacctgccttttccagcattaagaagttcgaagaatggctggaagtgaatg

SEQ ID NO: 110813 - DNA, 75 bp, synthetic construct
  source 1..75: mol_type = other DNA
ggatgaatatgatgatctcatatcaggaacttgttcgcaccttccttaactttcacggagttttagaatttacaa

SEQ ID NO: 110814 - DNA, 75 bp, synthetic construct
  source 1..75: mol_type = other DNA
atttgatgcctcgcggactgcaacggccaccccggataaagaccaggctgcgactgaagataaccaggggccatt

SEQ ID NO: 110815 - DNA, 75 bp, synthetic construct
  source 1..75: mol_type = other DNA
gatgtgcaaatgctaaagttcttaaacgatgtatattacccgctcctgatggtggcgtagaaaaactatcaaaac

SEQ ID NO: 110816 - DNA, 75 bp, synthetic construct
  source 1..75: mol_type = other DNA
accatcatcaaagagcagggaatcaataccggtaacgaaatggagaacgccggggaagccctggtgtggctggtc

SEQ ID NO: 110817 - DNA, 75 bp, synthetic construct
  source 1..75: mol_type = other DNA
gttttactttaaatagtggggagagatattgtcaggtaattgataaaacaagtggggttccattatattatccga

SEQ ID NO: 110818 - DNA, 75 bp, synthetic construct
  source 1..75: mol_type = other DNA
atgtgtgttacgtctaatattttagtgatgtttagtagttttgagatatttgacgttatttcttatgaggttgtt

SEQ ID NO: 110819 - DNA, 75 bp, synthetic construct
  source 1..75: mol_type = other DNA
gagaaaaaaatagagcatcataaaagtggtggcaaaaataaagttgagaggcatattgagcatttttacaggaaa

SEQ ID NO: 110820 - DNA, 75 bp, synthetic construct
  source 1..75: mol_type = other DNA
agaatcagatgttgtacagcctgtttaacgggtaccgcaatacctggagcgggagcctgaatgcaccggatgcca

SEQ ID NO: 110821 - DNA, 75 bp, synthetic construct
  source 1..75: mol_type = other DNA
atgaaaatcaagcatgagcacatcgaatcagtgttgttagccctggcagccgaaaaagggcaggcgtgggtcgct

SEQ ID NO: 110822 - DNA, 75 bp, synthetic construct
  source 1..75: mol_type = other DNA
gctaaagttcttaaacgatgtatattacccgctcctgatggtggcgtagaaaaactatcaaaacccaaactaaaa

SEQ ID NO: 110823 - DNA, 75 bp, synthetic construct
  source 1..75: mol_type = other DNA
tgtatgaacacgaaaaacgcgacttagccagccgtattgtctccacccagcaccatcaccacgatctctcggtcg

SEQ ID NO: 110824 - DNA, 75 bp, synthetic construct
  source 1..75: mol_type = other DNA
taagacgccagaaggggtgacggagaaggattatcagttcctgccgtcgaaaaatgaccatttcgtgagcggaaa

SEQ ID NO: 110825 - DNA, 75 bp, synthetic construct
  source 1..75: mol_type = other DNA
cacggcgtcggcaggaaatgaccagccttcgaatgcgcagtctgtaacgtttgtggccgataagactacggcgac

SEQ ID NO: 110826 - DNA, 75 bp, synthetic construct
  source 1..75: mol_type = other DNA
actggcgtgaccggggattaccgttattgttcgcagaaggctttttgctgatggggtcgttcgtcacgctgttta

SEQ ID NO: 110827 - DNA, 75 bp, synthetic construct
  source 1..75: mol_type = other DNA
aaaacgcctggcctctctcggtggcgcagctccggatatggaattagtgccacgcagacacgaggatgcaacaga

SEQ ID NO: 110828 - DNA, 75 bp, synthetic construct
  source 1..75: mol_type = other DNA
tggaagatgctcgaaggcacaccggagcagcacaaagcgcaggacgtttacaacatcagacgagacgaattagaa

SEQ ID NO: 110829 - DNA, 75 bp, synthetic construct
  source 1..75: mol_type = other DNA
gcgcaagagcacttcttagtcatcccccgcatttacagaagttcctgcacgaggctgattcgttggttcctaata

SEQ ID NO: 110830 - DNA, 75 bp, synthetic construct
  source 1..75: mol_type = other DNA
cacgagaggaagaaagcaagaaaggaatggattctgcacaagttactggagctacaagctcttatgcacgcaagt

SEQ ID NO: 110831 - DNA, 75 bp, synthetic construct
  source 1..75: mol_type = other DNA
ctgaataaagcaggatttcaggtagcagagcgccacgataatttaggcgttgggcatacattattgatatgccaa

SEQ ID NO: 110832 - DNA, 75 bp, synthetic construct
  source 1..75: mol_type = other DNA
taccacctgaaaactgggagcggggtattaatgcgttttatacctcttattatgtgagtcagtattacagcgact

SEQ ID NO: 110833 - DNA, 75 bp, synthetic construct
  source 1..75: mol_type = other DNA
tatctggtgggtgataaattacccgccgaacgttttattgccgatgaaaaaaacgtcagccgcaccgtggttcgt

SEQ ID NO: 110834 - DNA, 75 bp, synthetic construct
  source 1..75: mol_type = other DNA
gccgcagtttgaaggcaaaatcggtgagcaggagtacttcgataaaggcgtactgatgatcgcgatggtaaaagc

SEQ ID NO: 110835 - DNA, 75 bp, synthetic construct
  source 1..75: mol_type = other DNA
tggatgggcgtccggcggtgaaaaacctgctggaaatcctctccgaatggctggtgttccgtcgcgataccgtgc

SEQ ID NO: 110836 - DNA, 75 bp, synthetic construct
  source 1..75: mol_type = other DNA
taatgacaacagaggtgaataaaaccttgttggatgaattaaaaaatataaacagccatgataactcagctttta

SEQ ID NO: 110837 - DNA, 75 bp, synthetic construct
  source 1..75: mol_type = other DNA
atggcgacggacattccgccacacaacctgcgtgaagtcgcccaggcggcaatcgctttaatcgaccagccgaaa

SEQ ID NO: 110838 - DNA, 75 bp, synthetic construct
  source 1..75: mol_type = other DNA
agggaaaatcgtttttgctgtcggtagcttactctatgactatttacacagacgttttaggaatgcaaatctcag

SEQ ID NO: 110839 - DNA, 75 bp, synthetic construct
  source 1..75: mol_type = other DNA
attaatgatattaaaaatcatgatagcttagtacaagacatttgctttacccgtaattttggtaaagaacctgct

SEQ ID NO: 110840 - DNA, 75 bp, synthetic construct
  source 1..75: mol_type = other DNA
actgtctgtagttggcctggaatgggagaagtataaattagttacttactgcgatagtagagtattcaggcttgc

SEQ ID NO: 110841 - DNA, 75 bp, synthetic construct
  source 1..75: mol_type = other DNA
gagaatactaattttaaccagatcttaatgcaatcgagaatgagcaaggctgcattattgctgcttgaaaattca

SEQ ID NO: 110842 - DNA, 75 bp, synthetic construct
  source 1..75: mol_type = other DNA
tctattgcacttggttcaacggctggaggtctggtattcgacagtctgggatggagaagtgcttttggtttaagt

SEQ ID NO: 110843 - DNA, 75 bp, synthetic construct
  source 1..75: mol_type = other DNA
gagcagatggttaaggcacttggtggtaaagagaatattaagtcactggataattgcgtaactcgtttacgttta

SEQ ID NO: 110844 - DNA, 75 bp, synthetic construct
  source 1..75: mol_type = other DNA
ggacgggagaaggaaatttctggttatccctcaggggaaatcggcaacggtgattccctatcaggggaaggactg

SEQ ID NO: 110845 - DNA, 75 bp, synthetic construct
  source 1..75: mol_type = other DNA
accattgtgctgtcacagatgggctgggtacgcagcgccaaaggccatgacatcgacgcaccaggcctgaactat

SEQ ID NO: 110846 - DNA, 75 bp, synthetic construct
  source 1..75: mol_type = other DNA
ggacgcttaattagtggtgtcttcacggactttttcaactggcgaattgctctggcggcaatcggttgtttcgcg

SEQ ID NO: 110847 - DNA, 75 bp, synthetic construct
  source 1..75: mol_type = other DNA
atgtcgcaaaatgctttacttgaagagaagattatccgcttagtgctgtctgagctgggccaccctgtagaaggt

SEQ ID NO: 110848 - DNA, 75 bp, synthetic construct
  source 1..75: mol_type = other DNA
aattaccccatgtgcaccagtaggccaaagaacccaagattgggatgacaactccaaattgcgtttagcaaatgc

SEQ ID NO: 110849 - DNA, 75 bp, synthetic construct
  source 1..75: mol_type = other DNA
ttggtgatggtctgaaacccgttcagcgccgcattgtgtatgcgatgtctgagctgggtctgaatgctaccgcca

SEQ ID NO: 110850 - DNA, 75 bp, synthetic construct
  source 1..75: mol_type = other DNA
ttttactcagtctgtgggggctacttgcaacggctgcgccagtggggtggtggacatggatagcacgtgcgttac

SEQ ID NO: 110851 - DNA, 75 bp, synthetic construct
  source 1..75: mol_type = other DNA
gtcggcgctgaacaccagacgatgcgcttcaaggtgacgtttgatgcgtcagatcgggtcatcgaacagaagact

SEQ ID NO: 110852 - DNA, 75 bp, synthetic construct
  source 1..75: mol_type = other DNA
agactaagtgacagccacacggttgtcagcctgtgttctgctctggaaatacaccgcagcagttaccggtactgg

SEQ ID NO: 110853 - DNA, 75 bp, synthetic construct
  source 1..75: mol_type = other DNA
gagaggttaggcgactggcttaactttttctccacagggaaccatgatgaccgcactattgcggtgttgtggtaa

SEQ ID NO: 110854 - DNA, 75 bp, synthetic construct
  source 1..75: mol_type = other DNA
aaagacatttgctgaacgcattagagcaactgcaacaggactatatgcagcggctgaacgaatgggagaacgcct

SEQ ID NO: 110855 - DNA, 75 bp, synthetic construct
  source 1..75: mol_type = other DNA
ccgccagtcatggacatcaggttttactgtatgacatttctgctgaagcgctgacccgcgcaatcgacgggatac

SEQ ID NO: 110856 - DNA, 75 bp, synthetic construct
  source 1..75: mol_type = other DNA
ggcacgccgttcttgcctgtggagagatggtgcagtcaggccgcccgttgaagcaggaacccaccgaaatgattc

SEQ ID NO: 110857 - DNA, 75 bp, synthetic construct
  source 1..75: mol_type = other DNA
gaagccgttactgccgcgtaaaccttatgatgcgccaaactgggtacgcactgatcgtcctgtaactttcgcaga

SEQ ID NO: 110858 - DNA, 75 bp, synthetic construct
  source 1..75: mol_type = other DNA
ataatctgcaaaccgttctcggttatgacttgttagccggtcagcgagtgttgcgagagcaaattgcccgcctga

SEQ ID NO: 110859 - DNA, 75 bp, synthetic construct
  source 1..75: mol_type = other DNA
tctggtggatagccagcggattatggatatcaccctcgacgaatttaacacgcatccgacggcgtttatttgcat

SEQ ID NO: 110860 - DNA, 75 bp, synthetic construct
  source 1..75: mol_type = other DNA
tcaaatccggctacggcctggatctggctaacgaacgtaaaatgctgcgggtgatccgccgtttaggcgacatat

SEQ ID NO: 110861 - DNA, 75 bp, synthetic construct
  source 1..75: mol_type = other DNA
tgtagtaacccatttcccgattgcatttccaaacagatgtctgcgtgttttggtctcacaagactacacaccaga

SEQ ID NO: 110862 - DNA, 75 bp, synthetic construct
  source 1..75: mol_type = other DNA
ctccgtgtttacggggttgatggggatggtgaacaacattttcctgctgaagatcctgcgttttatggtgggcat

SEQ ID NO: 110863 - DNA, 75 bp, synthetic construct
  source 1..75: mol_type = other DNA
gtagcttcacgctttctgtttcaggtactggatatcaaaaattaccatctggttttattcttcagtggggctcaa

SEQ ID NO: 110864 - DNA, 75 bp, synthetic construct
  source 1..75: mol_type = other DNA
tgctgtggaacgctacggcgggtgcattcagcgccgcgcacggtaccgaagccaccagcaaaatcaccaacttac

SEQ ID NO: 110865 - DNA, 75 bp, synthetic construct
  source 1..75: mol_type = other DNA
gccgttactgaatggtctgtttttatcaatcagcgatgaagttgtgttgattggtaatcggtattacgtgaaagc

SEQ ID NO: 110866 - DNA, 75 bp, synthetic construct
  source 1..75: mol_type = other DNA
gacaccatcaacatgattgagaaggtgaacagcgtcgaccggctggagcaacaccgccgcaatatcggcctgtga

SEQ ID NO: 110867 - DNA, 75 bp, synthetic construct
  source 1..75: mol_type = other DNA
tgctctggctgccattaacacgtcatttagcacatcactcggtgacgccctactctgggatgcgaccgccaaggg

SEQ ID NO: 110868 - DNA, 75 bp, synthetic construct
  source 1..75: mol_type = other DNA
aacaggaccataaaaccaccaaagaccacgtcagcctgacagagggcaatcagggactggaggtgaaaggcgatc

SEQ ID NO: 110869 - DNA, 75 bp, synthetic construct
  source 1..75: mol_type = other DNA
cctgctcacgccgattacccgcgatttaggcgtgacggaggggctggcagggcaggggattgctatctccggcgc

SEQ ID NO: 110870 - DNA, 75 bp, synthetic construct
  source 1..75: mol_type = other DNA
tggttccggcaccggaaaaaccggtgccgcaaggcgcagcgaaaggtgattacgttacccctactcaaccgtttt

SEQ ID NO: 110871 - DNA, 75 bp, synthetic construct
  source 1..75: mol_type = other DNA
gcgccgccagtcaacaccgcaaatgagcacactacaacaaccgattagcgccccctggtatgtcttttttcgccg

SEQ ID NO: 110872 - DNA, 75 bp, synthetic construct
  source 1..75: mol_type = other DNA
gccaggggggaggtgaattgtctctgacaccaggcaaggactggaacaatcagcagaacatctatcgccgttggt

SEQ ID NO: 110873 - DNA, 75 bp, synthetic construct
  source 1..75: mol_type = other DNA
cggcgcttaaacagtcggagaaggaatttaataacttctgtcgtcaggagtactacggttgggaggacaacttca

SEQ ID NO: 110874 - DNA, 75 bp, synthetic construct
  source 1..75: mol_type = other DNA
aagcgtgcaggaaacgaagcaatataccgatcagcggatggttgagatggataacaaactgtccaaaaccgaaag

SEQ ID NO: 110875 - DNA, 75 bp, synthetic construct
  source 1..75: mol_type = other DNA
aagtgtactgggtaacggtggagggattggtttccaggccggagttaaggcaagcattaatggcagtgatcttga

SEQ ID NO: 110876 - DNA, 75 bp, synthetic construct
  source 1..75: mol_type = other DNA
aggtgaatcaaaatattgtcagtgagtttatggctgaaccgccacaaggaaaagtccgtattgcgggagaggatg

SEQ ID NO: 110877 - DNA, 75 bp, synthetic construct
  source 1..75: mol_type = other DNA
cttgaaataagtaataagccctatttggggaatatgttaaacgatttcgctggcgtggatcagcaacgagttatg

SEQ ID NO: 110878 - DNA, 75 bp, synthetic construct
  source 1..75: mol_type = other DNA
ccggtaaagggaattttgttcaggatgtggttattcctgagcacacggtcaccattccccccgtccgttcttccg

SEQ ID NO: 110879 - DNA, 75 bp, synthetic construct
  source 1..75: mol_type = other DNA
aagaggcgcagtttcctgaaaaactgtacgttttttccagcaattacgagctctacgctagcctgagtaaccgcg

SEQ ID NO: 110880 - DNA, 75 bp, synthetic construct
  source 1..75: mol_type = other DNA
gaatttggcggcactgtaaaaatcccggcgcatacccgggatttgaacttttacgttcgccgtgacggcgtttcg

SEQ ID NO: 110881 - DNA, 75 bp, synthetic construct
  source 1..75: mol_type = other DNA
catcaaaaccgccaccatgcaacaactcctcaccggccgcacccgcctgccgcagttcgccctgcgtgaagatgg

SEQ ID NO: 110882 - DNA, 75 bp, synthetic construct
  source 1..75: mol_type = other DNA
cggcataacgtgatggacctgctgggctgggtggcggtgtttgtgtttatcagtctgctggttaatgtgcgcaca

SEQ ID NO: 110883 - DNA, 75 bp, synthetic construct
  source 1..75: mol_type = other DNA
caaccctgactaatgttggacgggatattctggctaaaacaagcaaacaggaggttattcattatcttggtttgg

SEQ ID NO: 110884 - DNA, 75 bp, synthetic construct
  source 1..75: mol_type = other DNA
ggcgcaggtggcgggaaagtgggagttacaaatacaaacggcggtaacggaggtgtgccgagtactggcgatatc

SEQ ID NO: 110885 - DNA, 75 bp, synthetic construct
  source 1..75: mol_type = other DNA
tcgcaatcggggtggcgtggtcatcaatttccagttttttataatcagttaccggaaagcaatgctatagtcttt

SEQ ID NO: 110886 - DNA, 75 bp, synthetic construct
  source 1..75: mol_type = other DNA
gcgctccggcaagcgacactgacgagcaacccctttcccagccaaacgaattcattaaacgcggtacaccgcaat

SEQ ID NO: 110887 - DNA, 75 bp, synthetic construct
  source 1..75: mol_type = other DNA
gatacaagcggatacgtgggacgctgggtgaatacccgggttttcacgtcatcaggtacgtacaccccgacgcca

SEQ ID NO: 110888 - DNA, 75 bp, synthetic construct
  source 1..75: mol_type = other DNA
gttcagttactatctggggtcgagtattgccgggacgctgggtggtgttttctggcataactatggctggaacgg

SEQ ID NO: 110889 - DNA, 75 bp, synthetic construct
  source 1..75: mol_type = other DNA
atggtcatgtgcagggaggctacagcgttcccctgattattaccgccagtgacatcacgtctcatcagtccgtca

SEQ ID NO: 110890 - DNA, 75 bp, synthetic construct
  source 1..75: mol_type = other DNA
aggcctgataagcgtagcgcatcaggcaattatacgtttgtcatccgtctggaaggattatcgtccctgaatggc

SEQ ID NO: 110891 - DNA, 75 bp, synthetic construct
  source 1..75: mol_type = other DNA
ttcgatgacgtgcagccacggccgcacagcgatgcgctgatgaaggtgctcgacggcattaatcattccggactc

SEQ ID NO: 110892 - DNA, 75 bp, synthetic construct
  source 1..75: mol_type = other DNA
tgcccactcggtcgccagtagttggattggcccccgtgctaaacgggcaaaaggccaggcctcctcactgtattt

SEQ ID NO: 110893 - DNA, 75 bp, synthetic construct
  source 1..75: mol_type = other DNA
gacgagcataaacatcagcagaacgcagcagcaaagcaatcaaaaccatcacctacacctgaacaggttctaaaa

SEQ ID NO: 110894 - DNA, 75 bp, synthetic construct
  source 1..75: mol_type = other DNA
aaggggttggcaccaccgcgggcgggaaggattttaatattgagctgcagtgcagcggcggcctgactgaaacgg

SEQ ID NO: 110895 - DNA, 75 bp, synthetic construct
  source 1..75: mol_type = other DNA
gcgccattcttcgggacggtaatgggcaactttatcggcggcgtgctttctgaccgggtgctgaacaagcgtcgt

SEQ ID NO: 110896 - DNA, 75 bp, synthetic construct
  source 1..75: mol_type = other DNA
ccgtggcgggatccgggctgataacagtacggtaaatatttcctcagcggatgttgtgctggaaaattcaacgct

SEQ ID NO: 110897 - DNA, 75 bp, synthetic construct
  source 1..75: mol_type = other DNA
tcggtcagcgacagtgctaatcctgttcatcatgatggccatatacaaggaggctacagcgttcccctgattatt

SEQ ID NO: 110898 - DNA, 75 bp, synthetic construct
  source 1..75: mol_type = other DNA
caaagccggaaccatgaccacccgctatgggcgcggtccggtgatgttgttttcgacgggggttatgctgtttgg

SEQ ID NO: 110899 - DNA, 75 bp, synthetic construct
  source 1..75: mol_type = other DNA
gtggagcgccacgccacactcactggcgacagcgtgcgttttaacaccgaagcgcggcgcgcctggttggctttt

SEQ ID NO: 110900 - DNA, 75 bp, synthetic construct
  source 1..75: mol_type = other DNA
agctggacgatcgccagcgccagcttgatcaggagcgtcggcaactggaggatgaagagcggagaatggaagatg

SEQ ID NO: 110901 - DNA, 75 bp, synthetic construct
  source 1..75: mol_type = other DNA
accctgtaattttcggttttgttatcgtaccattattggtatggccggcggttattgccttagccgtacttatat

SEQ ID NO: 110902 - DNA, 75 bp, synthetic construct
  source 1..75: mol_type = other DNA
tgattagtctgcgaacaagctttgcagattttgccactgctttcacagaagtggtagacttcgttccttatgaag

SEQ ID NO: 110903 - DNA, 75 bp, synthetic construct
  source 1..75: mol_type = other DNA
tcaatcagcgatgaagttgtgctgattggtgatcggtattacgtgaaagccacggcaactattaccgatggcgaa

SEQ ID NO: 110904 - DNA, 75 bp, synthetic construct
  source 1..75: mol_type = other DNA
caaataaacaagaagttttcctcaaaaatgatgagggtgcaaaaacgtattcttttgatgacatcaaagagtggc

SEQ ID NO: 110905 - DNA, 75 bp, synthetic construct
  source 1..75: mol_type = other DNA
agcgaaagttgcattgctggaaaatatgcgcagtttctttctgaccgttgtctggctcccactgaatttttcgcc

SEQ ID NO: 110906 - DNA, 75 bp, synthetic construct
  source 1..75: mol_type = other DNA
aggaagaagtggggcgattgggtaacgtgcttaagtttggcgattttatctctggggccgttattcaattattca

SEQ ID NO: 110907 - DNA, 75 bp, synthetic construct
  source 1..75: mol_type = other DNA
taaaacaggcgcggcatcagtttagcggcgcgtttgtggaagtgaactgcgccaccctgcgcggcgataccgcca

SEQ ID NO: 110908 - DNA, 75 bp, synthetic construct
  source 1..75: mol_type = other DNA
gatcaggcgtgggatgtgttcgaaaaactggaagactgttatttcagccagaaacagccaccagcaacacaaaac

SEQ ID NO: 110909 - DNA, 75 bp, synthetic construct
  source 1..75: mol_type = other DNA
gtcaggccgtactggagcgctgcgccgtcagccgggcaacgctctaccgaatggttgcagcaggcacattcccgc

SEQ ID NO: 110910 - DNA, 75 bp, synthetic construct
  source 1..75: mol_type = other DNA
cgctggagttcacaccagctgaagtggctgcacaacgtcaggcatggattagcgaatggcaacgcgccgtcagcc

SEQ ID NO: 110911 - DNA, 75 bp, synthetic construct
  source 1..75: mol_type = other DNA
tggccaccagcatagaaacgctgatcgagctgctaaagaacctgcccgattatgggcgggtttcgtatgtggtga

SEQ ID NO: 110912 - DNA, 75 bp, synthetic construct
  source 1..75: mol_type = other DNA
taccggggcgcgagaatcgcgggaggggctgctacgtagcgccaacggcggaatgttgtttctcgatgagattgg

SEQ ID NO: 110913 - DNA, 75 bp, synthetic construct
  source 1..75: mol_type = other DNA
tattcaccctgctcacgctgaccaccgtaccggcccaggccgatattatcgacgacaccattggcaatattcagc

SEQ ID NO: 110914 - DNA, 75 bp, synthetic construct
  source 1..75: mol_type = other DNA
ggtatatacagcgtgatatcgcctcgctgcgttctcaactcattcttggtgagtcttatacaacgggcgaaacct

SEQ ID NO: 110915 - DNA, 75 bp, synthetic construct
  source 1..75: mol_type = other DNA
aaatcccatctctcccaaagcccgctccctcatcctctggacagaacgcggagcagcccgtcatgccaaaatgct

SEQ ID NO: 110916 - DNA, 75 bp, synthetic construct
  source 1..75: mol_type = other DNA
ttgactatctcgcatacgacctggtattggggaagaagccatacaacgacgttccgtggttactggcaagaaact

SEQ ID NO: 110917 - DNA, 75 bp, synthetic construct
  source 1..75: mol_type = other DNA
ggcggacagtattgttaactacatcaacactaacctgtcgacgctgacgctcgcgcgcatcctcggcgccagcgt

SEQ ID NO: 110918 - DNA, 75 bp, synthetic construct
  source 1..75: mol_type = other DNA
tgactcgtctgatacccctccgcatcgtatccggctattggcctatggtgagttccgcatatggggagtagtgct

SEQ ID NO: 110919 - DNA, 75 bp, synthetic construct
  source 1..75: mol_type = other DNA
gagcggattgctgcacgaaacgttacgactcatgcaacgcacggcgcaactactttgccaatggcgtaatccact

SEQ ID NO: 110920 - DNA, 75 bp, synthetic construct
  source 1..75: mol_type = other DNA
ctggggctggatgacagtgcgctggacacagaattttccattggtggtactgaactgctgctgtttaagcagatg

SEQ ID NO: 110921 - DNA, 75 bp, synthetic construct
  source 1..75: mol_type = other DNA
gcggtatatcagggagaaagttttggtgaaaatgcttctctgggactcggtgatactgtgccgggttcccgtctt

SEQ ID NO: 110922 - DNA, 75 bp, synthetic construct
  source 1..75: mol_type = other DNA
aacgtgaaactgtacgacggcgcatggagtgaatggggcgcacgagcagatttaccggttgagcccgtaaaataa

SEQ ID NO: 110923 - DNA, 75 bp, synthetic construct
  source 1..75: mol_type = other DNA
gattttcatgatctaccgggatgagaaatacaacccgaacacagaactgaaaggcatcaccgaaatcatctgtgt

SEQ ID NO: 110924 - DNA, 75 bp, synthetic construct
  source 1..75: mol_type = other DNA
aagtgggttgagtggggaacgtgcttaagtttggcgattttagctcaggggccgttattcaattatttacaatga

SEQ ID NO: 110925 - DNA, 75 bp, synthetic construct
  source 1..75: mol_type = other DNA
gttttgcgttgggatattactgccagtggcgtagcaaaaatagaagccaggggcagaagtgggttgagtggggaa

SEQ ID NO: 110926 - DNA, 75 bp, synthetic construct
  source 1..75: mol_type = other DNA
acatgaatgtctttctgaacggctacagctatcagggcgttgcaacgtccgtcacgctgccaaaactgacccgta

SEQ ID NO: 110927 - DNA, 75 bp, synthetic construct
  source 1..75: mol_type = other DNA
ataaataatgccggaatcgaccgtgcttttcataaatacgaactcgattgcggccctgtttacagagtctgccgc

SEQ ID NO: 110928 - DNA, 75 bp, synthetic construct
  source 1..75: mol_type = other DNA
ataataattgcaaatggcgatggttatccaatgttatctgacccacaacctatgagcttagaggatagagtcagc

SEQ ID NO: 110929 - DNA, 75 bp, synthetic construct
  source 1..75: mol_type = other DNA
ccggctgcacgttttaacgcagaagttgatgaacctcgcccaggtttacgtcgcggacatattcccggtgcattg

SEQ ID NO: 110930 - DNA, 75 bp, synthetic construct
  source 1..75: mol_type = other DNA
aagaggatttactcagcaagcagagcggcgtgatggatggtgcctggggaaaggtcggccactgcatgaaggatt

SEQ ID NO: 110931 - DNA, 75 bp, synthetic construct
  source 1..75: mol_type = other DNA
gtggcgtagcaaaaatagaagtcagaggaagaagtggggcgagtgggtaatgtgtctgagttttgttacgttggg

SEQ ID NO: 110932 - DNA, 75 bp, synthetic construct
  source 1..75: mol_type = other DNA
ggtggaacagctttctggctttatgctgaaagcagcgctggcagaacaggccgtgctggggtgcgttaaccggca

SEQ ID NO: 110933 - DNA, 75 bp, synthetic construct
  source 1..75: mol_type = other DNA
cagcaggccatcagcgccgatcatcctctggtgcaggagttctgggatattttcgacttcctcgatggcgacgac

SEQ ID NO: 110934 - DNA, 75 bp, synthetic construct
  source 1..75: mol_type = other DNA
tccggcattcttatgacaagagtcgccgcaagggagcgattcatgtcattagtgcgttctcaacaatgcacagtc

SEQ ID NO: 110935 - DNA, 75 bp, synthetic construct
  source 1..75: mol_type = other DNA
gtcgaaatgcgcggacgtgtgacggaaattgatatgggggaagccaaaacagggcgaagccacatcacacactta

SEQ ID NO: 110936 - DNA, 75 bp, synthetic construct
  source 1..75: mol_type = other DNA
acggctctctgctgatcgccacctctcccgccgccaaagccctgctgatgcacgaacagacagagcgtaaagagt

SEQ ID NO: 110937 - DNA, 75 bp, synthetic construct
  source 1..75: mol_type = other DNA
aacggacaggctgatttcgttgagtggttgaagaaagtcacgccggggcggtatgcggtcagtattgcggactcc

SEQ ID NO: 110938 - DNA, 75 bp, synthetic construct
  source 1..75: mol_type = other DNA
ggttgcttggcacgaatggaaagaatcaggatgcagaatgggcaaaggttggaaagtgcctggaagaattcggaa

SEQ ID NO: 110939 - DNA, 75 bp, synthetic construct
  source 1..75: mol_type = other DNA
gcggttacgaaatgcttaacgatgcggtgaacgatagcggcaaacgcgccaccatgttcggctcggtagcggtga

SEQ ID NO: 110940 - DNA, 75 bp, synthetic construct
  source 1..75: mol_type = other DNA
gatacagccactcctgagaaggtttatacctggcgagctcagtctcttgtggcgaagaaaacgtttcagagccac

SEQ ID NO: 110941 - DNA, 75 bp, synthetic construct
  source 1..75: mol_type = other DNA
aagcacagatggaaaccttactgaataccgttggctttatcggcgcgcagacgggcttcccggcgattaacctga

SEQ ID NO: 110942 - DNA, 75 bp, synthetic construct
  source 1..75: mol_type = other DNA
acgatcagatcgctttgcaacgcttaatcgaagaaattcagtctgaaattgactaccggttgtctgatatcgccc

SEQ ID NO: 110943 - DNA, 75 bp, synthetic construct
  source 1..75: mol_type = other DNA
aagccacctgacgcccagagagaaggatgttgtagctaacccaacgagcctgtttagtattctgtgtaaatgcct

SEQ ID NO: 110944 - DNA, 75 bp, synthetic construct
  source 1..75: mol_type = other DNA
tcgttagcgaattttccacgctgaaagcgcaggccgctgcgggtaactctggtgcagtgctggaaagcgtactgc

SEQ ID NO: 110945 - DNA, 75 bp, synthetic construct
  source 1..75: mol_type = other DNA
tacctgtcaaactctgaagtgtcggttatccggctggacattaatcatgaaaacctgctgcgtatgctgcagcag

SEQ ID NO: 110946 - DNA, 75 bp, synthetic construct
  source 1..75: mol_type = other DNA
tcaacatcgacgaagtgattgagatcattcgtaatgaagatgaaccgaaaccggcgctgatgtcgcggtttggcc

SEQ ID NO: 110947 - DNA, 75 bp, synthetic construct
  source 1..75: mol_type = other DNA
gatccgtaaagacatcaccgtagtaatggttgcgccgaaatgccctggcaccgaagtgcgtgaagagtacaaacg

SEQ ID NO: 110948 - DNA, 75 bp, synthetic construct
  source 1..75: mol_type = other DNA
aatctgctttcacgtttacggtgttgaaagattaccttgaaactcaggaaattgatcctcgatatttctactaca

SEQ ID NO: 110949 - DNA, 75 bp, synthetic construct
  source 1..75: mol_type = other DNA
gtaacattcgtttccgagaacacactgaggttgagaggtcttacattagcctttataagatcttctgccgcgctt

SEQ ID NO: 110950 - DNA, 75 bp, synthetic construct
  source 1..75: mol_type = other DNA
atttacgtattgatacccgaaactccgaaaccggattaatacgatatagcttactccttccttacgccaaacagc

SEQ ID NO: 110951 - DNA, 75 bp, synthetic construct
  source 1..75: mol_type = other DNA
ttctgacaagcggattatggtgatcgacaacgatgtttcgacggcggtgttgcagcgccctcgtcttgtcggcgt

SEQ ID NO: 110952 - DNA, 75 bp, synthetic construct
  source 1..75: mol_type = other DNA
gccgggaatatgatgaaccgggcaggctggtatcggagacatcgcgcagcggggagacagtacgctaccgctacg

SEQ ID NO: 110953 - DNA, 75 bp, synthetic construct
  source 1..75: mol_type = other DNA
cacaaccgctggcggcgactctggcgggggcgtgttcattaaatatcgagtgccagcaaagtagcatcgacttcc

SEQ ID NO: 110954 - DNA, 75 bp, synthetic construct
  source 1..75: mol_type = other DNA
aaaccttatgatgcgccaaactgggtacgcactgaccgtcctgtaactttcgcagagcttaaaaattatgaaggg

SEQ ID NO: 110955 - DNA, 75 bp, synthetic construct
  source 1..75: mol_type = other DNA
tggggggattgccgattaccaaagaacaactggggaagaaaacgctggcggaaataactcttaacccattgtatt

SEQ ID NO: 110956 - DNA, 75 bp, synthetic construct
  source 1..75: mol_type = other DNA
cgtgttggggggaattgttgctgggttattagtcgccagcatgtataaaaagatcgttaatttacgcattcctga

SEQ ID NO: 110957 - DNA, 75 bp, synthetic construct
  source 1..75: mol_type = other DNA
cggctatagcggatatcccaactcctgataaatcagagctgcaagcggcggagcagatggttaaggcacttggtg

SEQ ID NO: 110958 - DNA, 75 bp, synthetic construct
  source 1..75: mol_type = other DNA
atataatttcctctcatatctgttacgaagggctattccccaatgcggaaacggaggttcaagatttatcaatta

SEQ ID NO: 110959 - DNA, 75 bp, synthetic construct
  source 1..75: mol_type = other DNA
aataaaagccaagggctaccgcaaccgggagcgctttaagctgggagtgatgttccactatgggaaactgaatat

SEQ ID NO: 110960 - DNA, 75 bp, synthetic construct
  source 1..75: mol_type = other DNA
agcatgggcggctgcaaccggcggtcaccgtgcgggcgttctggaatcctctttcgttgcggaagtgaaatctga

SEQ ID NO: 110961 - DNA, 75 bp, synthetic construct
  source 1..75: mol_type = other DNA
ttgccatattctcagccgaagcgtaaatttgctgggtgggggactaatctttcacgtgttggtgcagaacttagc

SEQ ID NO: 110962 - DNA, 75 bp, synthetic construct
  source 1..75: mol_type = other DNA
ttggcttaattggctttatggcgatgcatcttggaacgaacttttatcttaaacagcacgacttattggtagctg

SEQ ID NO: 110963 - DNA, 75 bp, synthetic construct
  source 1..75: mol_type = other DNA
ccggcgaattctcctccggcatgatggctgactgggtcaacgacgataagaaattgctgacctggcgtgaagaga

SEQ ID NO: 110964 - DNA, 75 bp, synthetic construct
  source 1..75: mol_type = other DNA
aaccagggcctgaacatgcgtgattctggtctggacatctcctatgccttgcgtaaagaagcgatcgctgagaag

SEQ ID NO: 110965 - DNA, 75 bp, synthetic construct
  source 1..75: mol_type = other DNA
tggctatttcaccgcaaccagaatggccttggccggaagcaggatcctgagcattatccggaagtcactgtttac

SEQ ID NO: 110966 - DNA, 75 bp, synthetic construct
  source 1..75: mol_type = other DNA
agcctggctggcggtttttcttggttctgcacttttctgggtggttgtcgcactgtttatttggaaattgtgggg

SEQ ID NO: 110967 - DNA, 75 bp, synthetic construct
  source 1..75: mol_type = other DNA
ttcagcagagttcatgactgcgatagcaacagttcaggccatggcactggagaaagatgccataagggcatttga

SEQ ID NO: 110968 - DNA, 75 bp, synthetic construct
  source 1..75: mol_type = other DNA
ctactggctttcatatccttaaggaacttcccgccagtcccaccagcgacgcgaagcagccgcacgacgcggaca

SEQ ID NO: 110969 - DNA, 75 bp, synthetic construct
  source 1..75: mol_type = other DNA
acttctcgccagttccaccagcgacgcgaagcagctgcatgacgcgaacaccacagcagtagaccagccaccagc

SEQ ID NO: 110970 - DNA, 75 bp, synthetic construct
  source 1..75: mol_type = other DNA
atgcctgaggcgtatttaaatccaccacaagaagccccatatatgaaaaacgcaacgttctaccttctggacaat

SEQ ID NO: 110971 - DNA, 75 bp, synthetic construct
  source 1..75: mol_type = other DNA
gtgaatgcgtcgttactgccgctaaaaaatcaatacgcaactggatatctaaatccagcttccgaaccgggggtt

SEQ ID NO: 110972 - DNA, 75 bp, synthetic construct
  source 1..75: mol_type = other DNA
gatcctcaatctttttcaaccattcccacgcccgctgaatattttcgttaacgtggcgctgatttttaccgtgct

SEQ ID NO: 110973 - DNA, 75 bp, synthetic construct
  source 1..75: mol_type = other DNA
cggcgggaagcatatagggaatgacgcagaaaagaccgccgcgcttcccaccatcaaacgcctggcagaggccta

SEQ ID NO: 110974 - DNA, 75 bp, synthetic construct
  source 1..75: mol_type = other DNA
cgtagcgcaaatttgctggtttttgctggcagaagcgcgttacctgcccgcccgactggcgcaaacttccccgcc

SEQ ID NO: 110975 - DNA, 75 bp, synthetic construct
  source 1..75: mol_type = other DNA
agtttaattaaaaaagttctccatgtacaaatgaacaatcctgaagaggattttgtaaagttcttcgcagcaaga

SEQ ID NO: 110976 - DNA, 75 bp, synthetic construct
  source 1..75: mol_type = other DNA
tgtttggtcatgtgaaaggcgcatttaccggggcgcgggaatcgcgggaaggattattacgcagcgccaacggcg

SEQ ID NO: 110977 - DNA, 75 bp, synthetic construct
  source 1..75: mol_type = other DNA
atgccttctggaaatcaggaaccccgccgggaccctgaattaaaacgcaaagcctggctggcagtatttcttggt

SEQ ID NO: 110978 - DNA, 75 bp, synthetic construct
  source 1..75: mol_type = other DNA
cagaaacatatggacgacattatctctggcgaattttcctccggcatgatggcggactgggccaatgacgataag

SEQ ID NO: 110979 - DNA, 75 bp, synthetic construct
  source 1..75: mol_type = other DNA
ctgtggcgtgaatattcgcccgtcacgtatgccagaaccgatgccctgttgttctggctgggtattgatttctcg

SEQ ID NO: 110980 - DNA, 75 bp, synthetic construct
  source 1..75: mol_type = other DNA
ccgctgctggggccgaaggtgctgcccggcgagacggaccttgcgctgcccggcccgctgccgttcattctctcc

SEQ ID NO: 110981 - DNA, 75 bp, synthetic construct
  source 1..75: mol_type = other DNA
tccagaccggtaaaaactcatggtctacgcttacactagggaaaaataaagattggaaggtaatcgataaaggcg

SEQ ID NO: 110982 - DNA, 75 bp, synthetic construct
  source 1..75: mol_type = other DNA
cagatcatcaaaaacacatgcccgtggagataccgcggaccagagtgcggctacaccggtccgtacttcgacaaa

SEQ ID NO: 110983 - DNA, 75 bp, synthetic construct
  source 1..75: mol_type = other DNA
aacattatcttaatcatcttgatgtgatcattaaagaattcgaactaccatcaacatggcaacccaaaggtgtgt

SEQ ID NO: 110984 - DNA, 75 bp, synthetic construct
  source 1..75: mol_type = other DNA
ggacaccatatctgggctgttgccgttttactcagcctgtgggggctacttgcgacagctgcgccaacggggtgg

SEQ ID NO: 110985 - DNA, 75 bp, synthetic construct
  source 1..75: mol_type = other DNA
tttcaacaaataaatcgaatttctgaacattatcttaatcatcttgatgtgatcattaaagaattcgaactacca

SEQ ID NO: 110986 - DNA, 75 bp, synthetic construct
  source 1..75: mol_type = other DNA
ccaaccgtacccgctggtactgcgcgactgcgcttaacgctaaccgcagcgcatgaaatgcaggatatcgaccgt

SEQ ID NO: 110987 - DNA, 75 bp, synthetic construct
  source 1..75: mol_type = other DNA
aagggcaccacggctggggtaaggatgcagtgaactggtatctggaagcgcatgatactcgtaccaatatgagcc

SEQ ID NO: 110988 - DNA, 75 bp, synthetic construct
  source 1..75: mol_type = other DNA
cataacctcgaagcacgtcgcacaatcgagagttatcaaccgtttacacctgaacaaatgcaaaagctacttgat

SEQ ID NO: 110989 - DNA, 75 bp, synthetic construct
  source 1..75: mol_type = other DNA
tacagctgggatggagcggagatgtttatcagtcggtccgtttgaatacttcactgtggtacaccaacgctaaca

SEQ ID NO: 110990 - DNA, 75 bp, synthetic construct
  source 1..75: mol_type = other DNA
cattctctttacctctgctgcagaatcttgatcctgagctgaaagcaccacagattctggtgttggcaccgaccc

SEQ ID NO: 110991 - DNA, 75 bp, synthetic construct
  source 1..75: mol_type = other DNA
tgaagtcaggaaggcttataatcgctcaacttatcttcaacagagaattgagcttatgaactggtggggtaatga

SEQ ID NO: 110992 - DNA, 75 bp, synthetic construct
  source 1..75: mol_type = other DNA
tcagtaaagagcttcctctcaaggaagccaatggtcgccatgaacaaatcgcctatttccggtccatcagcgacc

SEQ ID NO: 110993 - DNA, 75 bp, synthetic construct
  source 1..75: mol_type = other DNA
ctactgctgcgctggggatcttgccttccgttatcggtcagtttcatcaacaacaaaaagacaccactctgcaag

SEQ ID NO: 110994 - DNA, 75 bp, synthetic construct
  source 1..75: mol_type = other DNA
gcgtgccgtgtcgttcaccggcggtacggcgaccgggcgcaacatcatgaaaaacgccgggctgaaaaaatactc

SEQ ID NO: 110995 - DNA, 75 bp, synthetic construct
  source 1..75: mol_type = other DNA
agcggcgagtggtgggatgtccacctccagggcaacgtcgaagggggagagcggatcagcaacggctcgcgcttc

SEQ ID NO: 110996 - DNA, 75 bp, synthetic construct
  source 1..75: mol_type = other DNA
gcgggcgaaccaattgggatccttactcgcgttgatacaacgttctcctccggttgtcagttattcattaacgct

SEQ ID NO: 110997 - DNA, 75 bp, synthetic construct
  source 1..75: mol_type = other DNA
caattcttaagcatactaagaaattttatcaccgataaagaatttcattttcaatcgggattgttagtcataaat

SEQ ID NO: 110998 - DNA, 75 bp, synthetic construct
  source 1..75: mol_type = other DNA
caaaagcaaaagcgttacccctgattacgcaaaagacatttggcgttcactggagaaagatgtattccctgccat

SEQ ID NO: 110999 - DNA, 75 bp, synthetic construct
  source 1..75: mol_type = other DNA
atgcctaagtaccgttccgccaccaccacccatggtcgtaatatggcgggtgctcgtgcgctgtggcgcgccacc

SEQ ID NO: 111000 - DNA, 75 bp, synthetic construct
  source 1..75: mol_type = other DNA
ggaggtgatgaagccaatcagtgctcaccgtgaacatgtttttccgagcaggaatgatccaaagcaagcgatgaa

SEQ ID NO: 111001 - DNA, 75 bp, synthetic construct
  source 1..75: mol_type = other DNA
ggcgttctctgtctcggcggggctgaccacgctcgatgctaacggcaacccggtgaccgatatctggacgccgac

SEQ ID NO: 111002 - DNA, 75 bp, synthetic construct
  source 1..75: mol_type = other DNA
tttttcataacatgatcagtgtcagatttttacccaatggaaacgatgatttttttatcagttttgccgcacttt

SEQ ID NO: 111003 - DNA, 75 bp, synthetic construct
  source 1..75: mol_type = other DNA
gcggatcagcaacggttcgcgcttcaatgccaacggcgcctacggcgcggtgaagttctggaaccagtggctctc

SEQ ID NO: 111004 - DNA, 75 bp, synthetic construct
  source 1..75: mol_type = other DNA
cgatattccattggcattgccatgagtgaagaaaaatacagcggaattattggttgcactgcgtggaaaatatat

SEQ ID NO: 111005 - DNA, 75 bp, synthetic construct
  source 1..75: mol_type = other DNA
ttttatggtggtgaagagagtgacgacctgaatgcccgccaggttgctggcgatatttgctcgcgcttttttgat

SEQ ID NO: 111006 - DNA, 75 bp, synthetic construct
  source 1..75: mol_type = other DNA
gccgaaatcgccagcatcgaagagatgcgacgggatatccaggcgctcaagggagcgaccaccgaacttcaaagg

SEQ ID NO: 111007 - DNA, 75 bp, synthetic construct
  source 1..75: mol_type = other DNA
cgcagacccttgctgatcaggcatcgcgcttcaaatccaccttcgtcatggacgtaggtgatcgagaagtcgggc

SEQ ID NO: 111008 - DNA, 75 bp, synthetic construct
  source 1..75: mol_type = other DNA
gataaccagcgctggagtacgcgcctcgtttacgcaaaagttaaccctgagaaccagtcgatcaacaaagcattc

SEQ ID NO: 111009 - DNA, 75 bp, synthetic construct
  source 1..75: mol_type = other DNA
tttgactatgccgatcgcaatctgctgacctatgctaacgacggcagtgaaaaccagggcaccgacagctttggc

SEQ ID NO: 111010 - DNA, 75 bp, synthetic construct
  source 1..75: mol_type = other DNA
gaaagaaaaggtgagaaattctcaagaggccaaaaccaacactttcttgttagtcgccgaacgttggtggaatgt

SEQ ID NO: 111011 - DNA, 75 bp, synthetic construct
  source 1..75: mol_type = other DNA
tacgctggcgaatctccctggtacggaacggctggtgcggcggttgtgaataaaggtgataaaacctggcttatt

SEQ ID NO: 111012 - DNA, 75 bp, synthetic construct
  source 1..75: mol_type = other DNA
gatgatgaactacctgacagaattcgacggtaaaccgttccagtccgtgtctaaagttgacgaatcgctggaaaa

SEQ ID NO: 111013 - DNA, 75 bp, synthetic construct
  source 1..75: mol_type = other DNA
cggtgagcttctacgggcagatgataggcgaggatgagtcgggttttctgccttcggcaaatatgttcctcggcg

SEQ ID NO: 111014 - DNA, 75 bp, synthetic construct
  source 1..75: mol_type = other DNA
tccgcggggatgcgatgcgaccgatgactggctttctgatgcagcgagccgagcaggcggcacctgaaatctggt

SEQ ID NO: 111015 - DNA, 75 bp, synthetic construct
  source 1..75: mol_type = other DNA
gcagagcaggcgatgtttaccaaaggtctggaaattcatgtcagacagcgcacgatgaaaaaagagattgaagcg

SEQ ID NO: 111016 - DNA, 75 bp, synthetic construct
  source 1..75: mol_type = other DNA
cgggtttgattttaaattcaaactcgagccgaccttgggttggccggtgagtttctacggccagatgatcggtga

SEQ ID NO: 111017 - DNA, 75 bp, synthetic construct
  source 1..75: mol_type = other DNA
gaacacgatacagttactggcatcatatttatactgacggttattaccaacaagggtatccacttggggatgcaa

SEQ ID NO: 111018 - DNA, 75 bp, synthetic construct
  source 1..75: mol_type = other DNA
attgttgctgaccggcttagccatgcctcattgctggaagctgccagtttaagcccgtcgcagcttcgccgtttt

SEQ ID NO: 111019 - DNA, 75 bp, synthetic construct
  source 1..75: mol_type = other DNA
atgtcgattaaactactcagtatctacaccgtgggttcgctgctttgtgtatttattaccgctccactcattcgt

SEQ ID NO: 111020 - DNA, 75 bp, synthetic construct
  source 1..75: mol_type = other DNA
ttgagagagatgttttcccggcaatcggtgatatcagtgtcactgagattaaggcgcatactctggttaaagcag

SEQ ID NO: 111021 - DNA, 75 bp, synthetic construct
  source 1..75: mol_type = other DNA
catgatacacgtaccaatatgagccggaccaattacagctatacccaccacatctacaaagatggttattaccaa

SEQ ID NO: 111022 - DNA, 75 bp, synthetic construct
  source 1..75: mol_type = other DNA
tggcagaaaaactgcgtcagcagggttgctgggtaacagcgattcgcccaccaaccgtacccgtcggcaccgcgc

SEQ ID NO: 111023 - DNA, 75 bp, synthetic construct
  source 1..75: mol_type = other DNA
ggaataatagtttattaattattggcggtgaaactgcaggcggcaaagcggtgacggattcagttttgatctctg

SEQ ID NO: 111024 - DNA, 75 bp, synthetic construct
  source 1..75: mol_type = other DNA
ctgcggcctggaagtcgtggagatcgacacttcagaagctctctgagaccttgcagcaatcagtcttacgggcgc

SEQ ID NO: 111025 - DNA, 75 bp, synthetic construct
  source 1..75: mol_type = other DNA
attttcttgatgccattcgtgatgacatcattgtcctggtaaggacaaagggttatacactggcagatgttcgtg

SEQ ID NO: 111026 - DNA, 75 bp, synthetic construct
  source 1..75: mol_type = other DNA
ggtttctactctgcgtttatcgtggccgacaaagtgaccgtgcgtactcgcgcggcaggcgaaaaaccagaaaac

SEQ ID NO: 111027 - DNA, 75 bp, synthetic construct
  source 1..75: mol_type = other DNA
cgacagcttcaactttgtggtggtggacaacaccgctgcgctgcgctggaacgccgacggcacgacctacagccg

SEQ ID NO: 111028 - DNA, 75 bp, synthetic construct
  source 1..75: mol_type = other DNA
gaattccgtgaccgtgatgaccgtggtccgcgcgatcgtaacgaccgtggcccgcgtggtgaccgtgaagatcgt

SEQ ID NO: 111029 - DNA, 75 bp, synthetic construct
  source 1..75: mol_type = other DNA
tatccgcctgtctgagcctttgtctgatgacaccggcaatgtctgccacggtaagcggaacgcttgcacccacag

SEQ ID NO: 111030 - DNA, 75 bp, synthetic construct
  source 1..75: mol_type = other DNA
ctggcgttgtcgtttgagattgaagagctgcacccgacgctgaattttaaacaaaacaacgtgcacgcgttgttt

SEQ ID NO: 111031 - DNA, 75 bp, synthetic construct
  source 1..75: mol_type = other DNA
catggaaggaccagggaatgcatctgtccatgaaggacaaggactacaatccgctgattggccgaactggtgtgg

SEQ ID NO: 111032 - DNA, 75 bp, synthetic construct
  source 1..75: mol_type = other DNA
gatttggatgcgattaacgagctttccgaactcgtctgcgccgcagaatgcggagaacgcattgaaccgtataag

SEQ ID NO: 111033 - DNA, 75 bp, synthetic construct
  source 1..75: mol_type = other DNA
aatctgttcacagtacctggagatcgcatcacggcgataaacagcctggacggcggcctgacaaaccaggagcag

SEQ ID NO: 111034 - DNA, 75 bp, synthetic construct
  source 1..75: mol_type = other DNA
cgccagagccaatcaacagaacactgaaaattcaacaggaaaaatcaacccggtcattgctgccactcatcgcga

SEQ ID NO: 111035 - DNA, 75 bp, synthetic construct
  source 1..75: mol_type = other DNA
atgccgcactttatcgtggaatgtactgaaaatattcgtcaagaagcccgcttacctgagctgtttgccagtgtt

SEQ ID NO: 111036 - DNA, 75 bp, synthetic construct
  source 1..75: mol_type = other DNA
tttaatcctgagttatatgactatgaaaaagataagccacatggtgttaagcaaggacaaactagttttgctgta

SEQ ID NO: 111037 - DNA, 75 bp, synthetic construct
  source 1..75: mol_type = other DNA
ggtgcggtgatgggtgacgcaacataccaggaaatattcgatggagagaatcagcctgaagttcaggaaaatgat

SEQ ID NO: 111038 - DNA, 75 bp, synthetic construct
  source 1..75: mol_type = other DNA
catggcaacattcgacggacatatcgttgaagcgttgatgaaaatgccagaagttaacgccatgtatccagaact

SEQ ID NO: 111039 - DNA, 75 bp, synthetic construct
  source 1..75: mol_type = other DNA
cgcttaacgctaaccgcagcgcatgaaatgcaggatatcgaccgtctgctggaggtgctgcatggcaacggttaa

SEQ ID NO: 111040 - DNA, 75 bp, synthetic construct
  source 1..75: mol_type = other DNA
tgaggcaatccgttggtatcagaagctgcaggagattacttatcttgaagcaggacaacacatgcgggctttaaa

SEQ ID NO: 111041 - DNA, 75 bp, synthetic construct
  source 1..75: mol_type = other DNA
gcaatttggcgtcggtagcggcggttccggtcacgtcagcggttatagcgtggcgcatcaggcgctggaagaaga

SEQ ID NO: 111042 - DNA, 75 bp, synthetic construct
  source 1..75: mol_type = other DNA
gaactttgcgacaacggttactaaagcactggcaggtaaacagccgcttaacaatacgttaaccaatatcagcaa

SEQ ID NO: 111043 - DNA, 75 bp, synthetic construct
  source 1..75: mol_type = other DNA
gcattgaagaacgaattcaaattagtaggctcattgctttttctccaacaaatgaaagtaagtgttcatttccaa

SEQ ID NO: 111044 - DNA, 75 bp, synthetic construct
  source 1..75: mol_type = other DNA
atgatgaacaactatgccgagaagctgcatctcaaggatacgcattttgaaacagtgcatggtctggatgcacca

SEQ ID NO: 111045 - DNA, 75 bp, synthetic construct
  source 1..75: mol_type = other DNA
tggagccaatcaaagcacgtggcgcattagagacggttcgtcgcctagttcagcgtattaacgaaataatgattt

SEQ ID NO: 111046 - DNA, 75 bp, synthetic construct
  source 1..75: mol_type = other DNA
tacagtctaaaaataaaccagacaacaccaggcatacttgttagctgtgatagcaataataactttgcctgtcag

SEQ ID NO: 111047 - DNA, 75 bp, synthetic construct
  source 1..75: mol_type = other DNA
attacagtcacgaagagaatatttttacgttatggcgcagtttacgctttggcgataatctccaggcgtggctgg

SEQ ID NO: 111048 - DNA, 75 bp, synthetic construct
  source 1..75: mol_type = other DNA
tgcaaacagcctatcacctggatttaaaaagcacgggcttgatggcggcaatacctttcctgttcggtgggatcg

SEQ ID NO: 111049 - DNA, 75 bp, synthetic construct
  source 1..75: mol_type = other DNA
tgctgattgcatggaagctggaacaacagcaacaggaaaatagcgcggtgctgaaatcgcagcggcgaatgttcc

SEQ ID NO: 111050 - DNA, 75 bp, synthetic construct
  source 1..75: mol_type = other DNA
ctatttttggccttgtccgtgagcgtccgatcgacattcacaaagatcccgtagcattgaacaaatacatcactg

SEQ ID NO: 111051 - DNA, 75 bp, synthetic construct
  source 1..75: mol_type = other DNA
agatcgatctcgatgcaaagctctggacgattccagccgaacggatgaaggctaagcgagagcatattgtccctc

SEQ ID NO: 111052 - DNA, 75 bp, synthetic construct
  source 1..75: mol_type = other DNA
aatatgtttaagcgtcgaacgggctactcacccggtaaatttactcgtcgattaacgatgcatgattatgcaatc

SEQ ID NO: 111053 - DNA, 75 bp, synthetic construct
  source 1..75: mol_type = other DNA
tcctattttgcatggcgttatttatgccctcactagtggcaggattctatatttccaattatccaggggaaagtg

SEQ ID NO: 111054 - DNA, 75 bp, synthetic construct
  source 1..75: mol_type = other DNA
caataaagataatataaaagtgacttacagtctaaaaataaaccagacaacaccaggcatacttgttagctgtga

SEQ ID NO: 111055 - DNA, 75 bp, synthetic construct
  source 1..75: mol_type = other DNA
attcactttcattgttgagacagaacgcggactgaatttctcaattcgtgccgttccgcgcgcgggggcaggccg

SEQ ID NO: 111056 - DNA, 75 bp, synthetic construct
  source 1..75: mol_type = other DNA
ccgcagatcgttgtcggtactccgggccgtctgctggaccacctgaaacgtggcactctggacctctctaaactg

SEQ ID NO: 111057 - DNA, 75 bp, synthetic construct
  source 1..75: mol_type = other DNA
gagcaatactggcagcatggacagccctcgaagcactgtcgcctcaaggttataaacgcccagaggatatggcaa

SEQ ID NO: 111058 - DNA, 75 bp, synthetic construct
  source 1..75: mol_type = other DNA
gagcagcccacacctggaactgctgcgtaagaaaggcatcgaagttctgctgctttccgaccgcatcgatgagtg

SEQ ID NO: 111059 - DNA, 75 bp, synthetic construct
  source 1..75: mol_type = other DNA
gtctcggtgccttccccgctctatcgcttgctgatgcccgagggttaagagcggattaccttgccttgttagcta

SEQ ID NO: 111060 - DNA, 75 bp, synthetic construct
  source 1..75: mol_type = other DNA
attgaaactttgctacagcaaaacaaacctttcatctatcttactgatgaaccagaattatcactacatattgca

SEQ ID NO: 111061 - DNA, 75 bp, synthetic construct
  source 1..75: mol_type = other DNA
taggggagcaagaagaacctagtaattctatttcatttgatgatggcagctctaaacaacaagaatcaaaaccaa

SEQ ID NO: 111062 - DNA, 75 bp, synthetic construct
  source 1..75: mol_type = other DNA
gagaatagtcaaagccggattcagatcgtatcgtcaatgcacgaaggggcgtggatcacactggaaggcaatgtt

SEQ ID NO: 111063 - DNA, 75 bp, synthetic construct
  source 1..75: mol_type = other DNA
gcgaacggcagacggtggagaacccggagacgggggaactgctgtggcagcatgagacgaaacacgcctacaacg

SEQ ID NO: 111064 - DNA, 75 bp, synthetic construct
  source 1..75: mol_type = other DNA
tcaacctacctggttcaaagaaaagatttaatgaactggtggggattattttgtattagttcgaagagtgtgaat

SEQ ID NO: 111065 - DNA, 75 bp, synthetic construct
  source 1..75: mol_type = other DNA
gatcctaatctgtttatggttccgggcgatcgcatcaccgccattaacagtctggatggcggtctgacgaaccag

SEQ ID NO: 111066 - DNA, 75 bp, synthetic construct
  source 1..75: mol_type = other DNA
ggtacgttttttgatccggcaaccggagagatggggccagaattcagcaaaactatcgatctggaaaccgcaggc

SEQ ID NO: 111067 - DNA, 75 bp, synthetic construct
  source 1..75: mol_type = other DNA
cgattatcgcggttgtgaactcgttcacccaatttgtaccgggtcacgtccatctgcgcgatctcggtaaactgg

SEQ ID NO: 111068 - DNA, 75 bp, synthetic construct
  source 1..75: mol_type = other DNA
tattggcggaccgtccggtaaactcgaaagccgctatcacgtaaacacattaacctacagcgcggcagcgaagct

SEQ ID NO: 111069 - DNA, 75 bp, synthetic construct
  source 1..75: mol_type = other DNA
gtggcgtttccgttatcaacgtccagcaacaaaacagcggacaatgatggggcttggtgctttccccgccctttc

SEQ ID NO: 111070 - DNA, 75 bp, synthetic construct
  source 1..75: mol_type = other DNA
tacaacgtaaaatcacagagtttaaatcgtggcgcgaagacatcccgttcggtcttgatgaagacgatcacaata

SEQ ID NO: 111071 - DNA, 75 bp, synthetic construct
  source 1..75: mol_type = other DNA
cagttgcgacgcaaaactgggggaacagcacgtacaagcaaacagactggaatacttcacatcctgattttgcag

SEQ ID NO: 111072 - DNA, 75 bp, synthetic construct
  source 1..75: mol_type = other DNA
ttatcaatatccttgaactggacggcatcgcaacaatgcaccagctacgccagaaaaccggattatcagcggaat

SEQ ID NO: 111073 - DNA, 75 bp, synthetic construct
  source 1..75: mol_type = other DNA
taattgagttctccgagctgggtgatttcattgacgaacctattcgcgtgtactcaagtggtatgcttgcgaagc

SEQ ID NO: 111074 - DNA, 75 bp, synthetic construct
  source 1..75: mol_type = other DNA
ttcttcgcaacgctttccttttaccattaacgttaatggtccgggggctacatcgcctggctggcgaccgcttac

SEQ ID NO: 111075 - DNA, 75 bp, synthetic construct
  source 1..75: mol_type = other DNA
gaacttcctgcaccgcaaccacttttacgcctgacgaccgaccatgccctgattaaaggcagtccggttttgatt

SEQ ID NO: 111076 - DNA, 75 bp, synthetic construct
  source 1..75: mol_type = other DNA
tgatgaacgaaggcgagttgctgtatcagggagaaccaaaagccctgacacaaaccatggccggacgcagctttc

SEQ ID NO: 111077 - DNA, 75 bp, synthetic construct
  source 1..75: mol_type = other DNA
gaaactggcatcccgtggaattacctttcgcgcacgctgcgtttaatggtgctggatgaaacactttgtattgat

SEQ ID NO: 111078 - DNA, 75 bp, synthetic construct
  source 1..75: mol_type = other DNA
ggagttggtaaaactcacttagtaaaagccctatctcaatatatatttaaagaagaacctaacagcagaatatta

SEQ ID NO: 111079 - DNA, 75 bp, synthetic construct
  source 1..75: mol_type = other DNA
gtttgattccttggactcttcagaatacagacagcaaataaagacctttcgtttgaagggtgatgctgccaactt

SEQ ID NO: 111080 - DNA, 75 bp, synthetic construct
  source 1..75: mol_type = other DNA
ttcaccgtgggtaaaggcgaggccgtagcgctgattggtcgtaacggcgcagggaaaagtacctccctcgggctg

SEQ ID NO: 111081 - DNA, 75 bp, synthetic construct
  source 1..75: mol_type = other DNA
ctgacgcagtgcttgcgttttgtgccggagtggcagagttatcccgaaacggtaagtgtgcaacagcaaaactgg

SEQ ID NO: 111082 - DNA, 75 bp, synthetic construct
  source 1..75: mol_type = other DNA
tggacaaggcgctggctgccggggctactgaaatcacgaaagaagaatatcttgcccgcaaaaacggaacataca

SEQ ID NO: 111083 - DNA, 75 bp, synthetic construct
  source 1..75: mol_type = other DNA
aagcatacaatttagcaaccgttgaattgcataatgaattatatggttatttgcaggagaaaaactcctgtccaa

SEQ ID NO: 111084 - DNA, 75 bp, synthetic construct
  source 1..75: mol_type = other DNA
gcaattgttgaagtgctgtcgcccggtcaacccccgactaaacgcgaattaatttacgccgcgacgccagccagt

SEQ ID NO: 111085 - DNA, 75 bp, synthetic construct
  source 1..75: mol_type = other DNA
gattggctcgctgctgatggcgaaagcgcgggtggatatcagctttaaattcaacgtattcaaaacctttctgtt

SEQ ID NO: 111086 - DNA, 75 bp, synthetic construct
  source 1..75: mol_type = other DNA
atatgtggttcgcttctaaaagaaattgctttaggccatattgaaacggatgagtatagagcgttttctgagcaa

SEQ ID NO: 111087 - DNA, 75 bp, synthetic construct
  source 1..75: mol_type = other DNA
tgcctctgattaccctgtgctggcaaaagtgtttccttcgctggtattacctgaagcccgcggtgatttcattcg

SEQ ID NO: 111088 - DNA, 75 bp, synthetic construct
  source 1..75: mol_type = other DNA
cgaccagatgtctccggcagacctgaatgctgcggcgtggcttgtggctggtttttcctccaggcctgacggctg

SEQ ID NO: 111089 - DNA, 75 bp, synthetic construct
  source 1..75: mol_type = other DNA
gctcttcccgcagagtttaccggcgggcgatggtggattgtctctggggcagggggttattgctgcggcgcgctg

SEQ ID NO: 111090 - DNA, 75 bp, synthetic construct
  source 1..75: mol_type = other DNA
atcgtgtggacgtttgttcgatgccgtagcggcggcgctgggctgtgcgccagccacgttaagttatgaaggtga

SEQ ID NO: 111091 - DNA, 75 bp, synthetic construct
  source 1..75: mol_type = other DNA
atgttggtactgaaaggcacgttggctattgcagccgtgatgacaatttattgtcttatcgttgttcttatggaa

SEQ ID NO: 111092 - DNA, 75 bp, synthetic construct
  source 1..75: mol_type = other DNA
gccagttactggttagtctttccattggtattttgcgagaaccgtaatgtcagtaagttaaccaatgctttgaat

SEQ ID NO: 111093 - DNA, 75 bp, synthetic construct
  source 1..75: mol_type = other DNA
aattaatgcagacattaatccgcagaacgctgtgttgctggaatgcattacgacaatggtgactaatctgttgtt

SEQ ID NO: 111094 - DNA, 75 bp, synthetic construct
  source 1..75: mol_type = other DNA
acgtccactggtcatgcctgccccggaaaaggttccggatgtcagcgaaccggtaaccactccggataactcaga

SEQ ID NO: 111095 - DNA, 75 bp, synthetic construct
  source 1..75: mol_type = other DNA
attcctggtgctaaatggcccgaaattcaggcagagatgcgcatctggaaaaaacgtcgcgaaggtgaacgcaag

SEQ ID NO: 111096 - DNA, 75 bp, synthetic construct
  source 1..75: mol_type = other DNA
agcttaatatttgctacaactaattcagattatgtagagagaatgataaaagaaagagcacaatttgattggtcg

SEQ ID NO: 111097 - DNA, 75 bp, synthetic construct
  source 1..75: mol_type = other DNA
tggattgcgtgctgttgcctttgtcgagagtgaagttgaggactggatacagtctgttattgaagcgaccagaaa

SEQ ID NO: 111098 - DNA, 75 bp, synthetic construct
  source 1..75: mol_type = other DNA
cagtatcccgtttctacgcgcttgtcgctgaatggcacgattatcgtcggtcgtgatattgcccacgccaagctg

SEQ ID NO: 111099 - DNA, 75 bp, synthetic construct
  source 1..75: mol_type = other DNA
attggcgcagggaagtattaagagcctggaatgtgttgaatatccggaactgggaatggaagccatctggaaaat

SEQ ID NO: 111100 - DNA, 75 bp, synthetic construct
  source 1..75: mol_type = other DNA
tgaccgtaatatcaaagcgaagatcaaccgtcaggggatctggatcgaaaaactggaacataatccaggcaaata

SEQ ID NO: 111101 - DNA, 75 bp, synthetic construct
  source 1..75: mol_type = other DNA
acgggaagagatatttacgcatgggtacagggaggattgctcgatttcaatagtggttattattccaatattatt

SEQ ID NO: 111102 - DNA, 75 bp, synthetic construct
  source 1..75: mol_type = other DNA
tggtgattggtctgggttgtgaaaagttgcagcctgaacgcctgctgactggaacggatgatgtgcaagctattc

SEQ ID NO: 111103 - DNA, 75 bp, synthetic construct
  source 1..75: mol_type = other DNA
tctcaatatgggaaaaaccgaccgcagcgccaacccttcgccgggcaacgaaaacggcgggctcgcaaacgtggt

SEQ ID NO: 111104 - DNA, 75 bp, synthetic construct
  source 1..75: mol_type = other DNA
tctcaatatgggaaaaaccgaccgcagcgccaacccttcgccgggcaacgagaacggcggactcgcaaacgtggt

SEQ ID NO: 111105 - DNA, 75 bp, synthetic construct
  source 1..75: mol_type = other DNA
gctggccaaagtggaaagcctgttcagtattcgtcacgagaatggcgcggtggagttctttcgggaagccctcag

SEQ ID NO: 111106 - DNA, 75 bp, synthetic construct
  source 1..75: mol_type = other DNA
gcaattgttgaagtgctgtcgcccggtcaactcccgactaaacgcgcattaatttacgccgcgacgccagccagc

SEQ ID NO: 111107 - DNA, 75 bp, synthetic construct
  source 1..75: mol_type = other DNA
attttagaagatgaagaacaagatgaaaagtttgaacagttagcaggtaaaggccaaaaacgaaaaaataaacta

SEQ ID NO: 111108 - DNA, 75 bp, synthetic construct
  source 1..75: mol_type = other DNA
atcgatgtcgtgacggcgaagagttatcttccccgcatttataagttcgataagatactttccgaccgcactgaa

SEQ ID NO: 111109 - DNA, 75 bp, synthetic construct
  source 1..75: mol_type = other DNA
atctcacagtaagcaatgaagatataattgcaaaagatataatggactcattggatgaatctaaacaaagagttt

SEQ ID NO: 111110 - DNA, 75 bp, synthetic construct
  source 1..75: mol_type = other DNA
aaattatgcaggcagccaatatcagccagcctgacgccgataagttacttgctgtatcgcgtggtgaatttgttg

SEQ ID NO: 111111 - DNA, 75 bp, synthetic construct
  source 1..75: mol_type = other DNA
tctcaatatgggaaaaaccgaccgcagcgccaacccttcgccgggcaacgacaaaggcggcctcgcaaacgtggt

SEQ ID NO: 111112 - DNA, 75 bp, synthetic construct
  source 1..75: mol_type = other DNA
caggcttttttgctgaagcgtctcaaaattataccgaacagggcgctactaagctcgctgagccaggagagactt

SEQ ID NO: 111113 - DNA, 75 bp, synthetic construct
  source 1..75: mol_type = other DNA
taattacattccaccagatgataatgatggttattgccttactgttgattcgttccaaggtggcgaagctgatat

SEQ ID NO: 111114 - DNA, 75 bp, synthetic construct
  source 1..75: mol_type = other DNA
caggaacaaatctgaagcagcctaccatcgtacggacctgttgaatgaacgacggccgatgatgcaggcatgggc

SEQ ID NO: 111115 - DNA, 75 bp, synthetic construct
  source 1..75: mol_type = other DNA
tgcgtggtctgattgactccagcgatctgccgctgaacgtttcccgtgaaatcctccaggacagcacggtaacgc

SEQ ID NO: 111116 - DNA, 75 bp, synthetic construct
  source 1..75: mol_type = other DNA
accgccaccgggcgcaacatcatgaaaaacgccgggctgaaaaaatactccatggaactgggcggtaaatcgccg

SEQ ID NO: 111117 - DNA, 75 bp, synthetic construct
  source 1..75: mol_type = other DNA
gatcatcttgcaactgtacggataaaattcacaaatacagctaagcgatatttttctaagttgattggttctgaa

SEQ ID NO: 111118 - DNA, 75 bp, synthetic construct
  source 1..75: mol_type = other DNA
gtctgtgaccgcagagaacatgaaaaacctcggcatgacagctcagcttctcgaacaggcagcaaaagaagttgg

SEQ ID NO: 111119 - DNA, 75 bp, synthetic construct
  source 1..75: mol_type = other DNA
taaaccattggatcaacggcaaaaatgttgcaggtaacgactacttccagaccaccaatccggcaacgggtgaag

SEQ ID NO: 111120 - DNA, 75 bp, synthetic construct
  source 1..75: mol_type = other DNA
taacggtgatatcttcgagttttgttgtttgtcttgcggctgattcagaaaagatattatcagtagatcctgttg

SEQ ID NO: 111121 - DNA, 75 bp, synthetic construct
  source 1..75: mol_type = other DNA
actttgagtctggctgaaaataatgagaaacatctttataattatgttgagggcggtatctgccctgtgggcggt

SEQ ID NO: 111122 - DNA, 75 bp, synthetic construct
  source 1..75: mol_type = other DNA
ccgatgatcgtcaattttgacaagctgtcccttgaagtacagaacgcggtcctggttaagttcggtacatgtgaa

SEQ ID NO: 111123 - DNA, 75 bp, synthetic construct
  source 1..75: mol_type = other DNA
atggcggccaagttgagccagaagtggattgacctgttcaacgccacccgtaaacgattccagaatgagatcgcc

SEQ ID NO: 111124 - DNA, 75 bp, synthetic construct
  source 1..75: mol_type = other DNA
ttccagaattatgtggggcagaaggtgatatggttaagcgttgtattaatcttgaggataaaaaaagttcctcaa

SEQ ID NO: 111125 - DNA, 75 bp, synthetic construct
  source 1..75: mol_type = other DNA
catgctgagctcgcagcccgagagtcattgaccagggccatcaagagtatatacgacacggctttttacattgac

SEQ ID NO: 111126 - DNA, 75 bp, synthetic construct
  source 1..75: mol_type = other DNA
aacgccaacggtgcctacggcgcggtgaagttctggaaccagtggctctcctttggtcaggtaccacagtggtgg

SEQ ID NO: 111127 - DNA, 75 bp, synthetic construct
  source 1..75: mol_type = other DNA
agcggtctggttctggatgaagctgacgaaatgctgcgcatgggcttcattgaagacgttgaaaccattatggcg

SEQ ID NO: 111128 - DNA, 75 bp, synthetic construct
  source 1..75: mol_type = other DNA
atagacctgatcattgatgctgcaattgatgggcatggattggcgtatctaccttatgatcaggttgagcgggct

SEQ ID NO: 111129 - DNA, 75 bp, synthetic construct
  source 1..75: mol_type = other DNA
actgggcaggataataccggtaccgataatgagccggggaaccagctggcaggatttgattttaaatttaaactc

SEQ ID NO: 111130 - DNA, 75 bp, synthetic construct
  source 1..75: mol_type = other DNA
tccctgtggtacaccaacgctaacaacagtgacagcgacgacgttggggccagtgcagggatagagataccgttt

SEQ ID NO: 111131 - DNA, 75 bp, synthetic construct
  source 1..75: mol_type = other DNA
gaaagcggagcaaaacagcccaaatacgcaacaaaacgagccagaaacgaaacaatccgaaccagtagcgcaaca

SEQ ID NO: 111132 - DNA, 75 bp, synthetic construct
  source 1..75: mol_type = other DNA
cgagcgtcgtctgctgcgcaacattgaacgtactatgaagctgactattccggaagtagaactgccgaacgcaga

SEQ ID NO: 111133 - DNA, 75 bp, synthetic construct
  source 1..75: mol_type = other DNA
aattaatttgtatcttcccacatcgggtacagcaaatcgctggagattaatacgcggtggacgtgaagttcgggt

SEQ ID NO: 111134 - DNA, 75 bp, synthetic construct
  source 1..75: mol_type = other DNA
ccgttaaagaaatcgaatctgctaaacccaaggaagcggactacgttctctatgatggcgatggccttgagctac

SEQ ID NO: 111135 - DNA, 75 bp, synthetic construct
  source 1..75: mol_type = other DNA
tgccagcactgcattaaatgaagccgaatttaattctgacattattgaatcagctcttgcacatgttgataaaaa

SEQ ID NO: 111136 - DNA, 75 bp, synthetic construct
  source 1..75: mol_type = other DNA
gaagagggtggtgatgtgaatgccgttattgtaatcaaaacaaaaaatagcgaaataaaacttaatatgtccggg

SEQ ID NO: 111137 - DNA, 75 bp, synthetic construct
  source 1..75: mol_type = other DNA
atgaaagagcttgagttaaagaaaccgattaccgctcatggcgagacactctccgtactggagtttgatgaaccc

SEQ ID NO: 111138 - DNA, 75 bp, synthetic construct
  source 1..75: mol_type = other DNA
agcgtaaaaaacttcagtatttatttgagatttcagcttttcagtatttcatagtatcctcaaaacttgaacagt

SEQ ID NO: 111139 - DNA, 75 bp, synthetic construct
  source 1..75: mol_type = other DNA
gcggcaactgccctgattgtggcgcggtgatgggcggcgcaacataccaagaaacattcgatgaagagtatcagg

SEQ ID NO: 111140 - DNA, 75 bp, synthetic construct
  source 1..75: mol_type = other DNA
acggtacgcaaagcgctggacgcgctgacgcgggagaatttccttacccgcgtttcaggcaaagggaccttcgtc

SEQ ID NO: 111141 - DNA, 75 bp, synthetic construct
  source 1..75: mol_type = other DNA
gtctgggcgtgctcctgaagggccatttgccgctggccgcgctgctggcagtgcaggttgccgcgggcgcactgg

SEQ ID NO: 111142 - DNA, 75 bp, synthetic construct
  source 1..75: mol_type = other DNA
tggggccagaattcagcaaaactatcgatctggaaactgctggcggagtcattgatcgggacaccattaagtggt

SEQ ID NO: 111143 - DNA, 75 bp, synthetic construct
  source 1..75: mol_type = other DNA
gcaattgttgaagtgctgtcgcccggtcaacccccgactaaacgcgtattaatttacgccgcgacgccagccaga

SEQ ID NO: 111144 - DNA, 75 bp, synthetic construct
  source 1..75: mol_type = other DNA
atgtatacaactattttcttcttcacttttaattatcgtattcattataaaactaagttaaaaaactcctggaga

SEQ ID NO: 111145 - DNA, 75 bp, synthetic construct
  source 1..75: mol_type = other DNA
cttgtgaagggatcgatagcagcggcgcactgtgggactccaatgccatcaacgctgattacaaatcgatgctat

SEQ ID NO: 111146 - DNA, 75 bp, synthetic construct
  source 1..75: mol_type = other DNA
gctggcgatgaccgcgatcctcggttatctggtcaatagtgcggtgagaacgctgctgtttggctactttggccg

SEQ ID NO: 111147 - DNA, 75 bp, synthetic construct
  source 1..75: mol_type = other DNA
atgtctcaattaatgaccattggctcacagccaatatttttaattattgtattttttctgttatcattactgcca

SEQ ID NO: 111148 - DNA, 75 bp, synthetic construct
  source 1..75: mol_type = other DNA
gtattcgctatgccgacgacgtaccggtgtcgctggaaaccgtgtggttcccgccacagtttgccgcgctgctga

SEQ ID NO: 111149 - DNA, 75 bp, synthetic construct
  source 1..75: mol_type = other DNA
atgaaaaaaatttgtacgctcttaatgtctattttcattctttccgcatgtggtgaagatacaaaatcatcagat

SEQ ID NO: 111150 - DNA, 75 bp, synthetic construct
  source 1..75: mol_type = other DNA
taccgtcctgacccatgacgcgatcacgccgacattattaaagctgtttgatgtcaccgcggacaaagtcaaaga

SEQ ID NO: 111151 - DNA, 75 bp, synthetic construct
  source 1..75: mol_type = other DNA
catttcgcaaatttgtctgtggcttctgccatccagcatccgcattgtgcgcacgtcattggcccaggcagtcca

SEQ ID NO: 111152 - DNA, 75 bp, synthetic construct
  source 1..75: mol_type = other DNA
cggcagcattgaagcgaaaaccttcgcctttgattacgacggcctgctggccgggccggaagtcaccgcgccgga

SEQ ID NO: 111153 - DNA, 75 bp, synthetic construct
  source 1..75: mol_type = other DNA
aagcagaatccgcgcgaattctggctgaacgtaagatagaggaagccgaaatcgaacgacagcagatagtgcgta

SEQ ID NO: 111154 - DNA, 75 bp, synthetic construct
  source 1..75: mol_type = other DNA
atggtgaacatgtcaagagattacgccaaaaaactaaaggcgatcagaaatgcagaaaaacttacacaatctcag

SEQ ID NO: 111155 - DNA, 75 bp, synthetic construct
  source 1..75: mol_type = other DNA
tcggcaaacatattgagcggaatacgaattcacctatgctgttacatagcacagattgtaataatttatttaaag

SEQ ID NO: 111156 - DNA, 75 bp, synthetic construct
  source 1..75: mol_type = other DNA
actgttcgtattaaatttactaatactgcaaaaagatacttttcaaaacttattggctctgaaaacagatataca

SEQ ID NO: 111157 - DNA, 75 bp, synthetic construct
  source 1..75: mol_type = other DNA
cgtcttgacagcatgtcgttcgggtgaagctcgtgcgatggaatggtgcgaaattgattttaaacgcaagatttg

SEQ ID NO: 111158 - DNA, 75 bp, synthetic construct
  source 1..75: mol_type = other DNA
gcgatgattcaaaactggaaatggataacgcgaaataccaggcatggcagtcaggctttaaggcccaggaagaga

SEQ ID NO: 111159 - DNA, 75 bp, synthetic construct
  source 1..75: mol_type = other DNA
ctaatcgagtgtgatgatgtcccgcccgaagatttggttggcgctgagtctatccacaagcatttgaagatttac

SEQ ID NO: 111160 - DNA, 75 bp, synthetic construct
  source 1..75: mol_type = other DNA
tacgtcaatgaccgtaaagcgggcactttcagtgctgacccgacgaatgccgcgaaggtcctgcccacacccgga

SEQ ID NO: 111161 - DNA, 75 bp, synthetic construct
  source 1..75: mol_type = other DNA
aatagctgcgccgatggtttctacaaagatcgttatgtttatcggcactttgcatcggccgcgctcccgattccg

SEQ ID NO: 111162 - DNA, 75 bp, synthetic construct
  source 1..75: mol_type = other DNA
aaaatcaggcacttagtttagctgagaacagtgtcaaaaacctctatgaaaaatataaaaacaaattagaggtaa

SEQ ID NO: 111163 - DNA, 75 bp, synthetic construct
  source 1..75: mol_type = other DNA
attgacgtgatgtggtccccgtacgccaacagtgaatctgacacagtccgcaaatttaaaaccctgatgtgttac

SEQ ID NO: 111164 - DNA, 75 bp, synthetic construct
  source 1..75: mol_type = other DNA
tcctgagaatcgaacattaccggccgcagaaccatgacaactggtatggtgccctgtcagagaccattgaagccc

SEQ ID NO: 111165 - DNA, 75 bp, synthetic construct
  source 1..75: mol_type = other DNA
aaaatagcgggcaattgattgtgctggcacgggataacggcgatccgttgctcgatttgccgtggcaaattactc

SEQ ID NO: 111166 - DNA, 75 bp, synthetic construct
  source 1..75: mol_type = other DNA
ttctggtctggataaggcactggctgccggggctactgaaatcacgaaagaagaatatcttgcccgcaaaaacgg

SEQ ID NO: 111167 - DNA, 75 bp, synthetic construct
  source 1..75: mol_type = other DNA
gcccattcggaccgcaaggaatcggtcaatacactacatggcgtgatttcatatgcgcgattgctgatccccatg

SEQ ID NO: 111168 - DNA, 75 bp, synthetic construct
  source 1..75: mol_type = other DNA
aagccgaacagaaagaagctcaggccgagaattcgggggcatatactttcgaaactatcgctcgtgaatggcatg

SEQ ID NO: 111169 - DNA, 75 bp, synthetic construct
  source 1..75: mol_type = other DNA
aacctgctcactctttacaagaatcggctattcattgtgccagatatgctaatatcttacatcttgttaaagata

SEQ ID NO: 111170 - DNA, 75 bp, synthetic construct
  source 1..75: mol_type = other DNA
gtcgttatatggcgctttcggggtcacgcagtaatcacgatacaaaacgtggctatattggtctttttgtgcgta

SEQ ID NO: 111171 - DNA, 75 bp, synthetic construct
  source 1..75: mol_type = other DNA
aaatacccggcagtgggagtgcctgttctggcggtctatcagggaacggcggctggcgataaggcaatcaaaatt

SEQ ID NO: 111172 - DNA, 75 bp, synthetic construct
  source 1..75: mol_type = other DNA
acagaaagattcgggtaataacagcacagcaacaaaaaatatcgagaagtcccttaatcaaccagatatcagtgg

SEQ ID NO: 111173 - DNA, 75 bp, synthetic construct
  source 1..75: mol_type = other DNA
tggatgggcaaaaaaaatggagtctggtgaacgctctgtgattaaaaatcctgaatacttttcaacatatatgca

SEQ ID NO: 111174 - DNA, 75 bp, synthetic construct
  source 1..75: mol_type = other DNA
tcccggtcgctatcaggcgctttctggattcagtaattcgtatggcgatgaaggccgcatttgtctgtttgtgcg

SEQ ID NO: 111175 - DNA, 75 bp, synthetic construct
  source 1..75: mol_type = other DNA
acctggaagagagcggcgagctggtgaatctgtttaacgacccgcagcggcacagcgccgacgtcaaacggcgca

SEQ ID NO: 111176 - DNA, 75 bp, synthetic construct
  source 1..75: mol_type = other DNA
ttctggcggtctatcagggaacggcggctggcgataaggcaatcaaaattgggctgggtgacattgtaccggggt

SEQ ID NO: 111177 - DNA, 75 bp, synthetic construct
  source 1..75: mol_type = other DNA
gatcggcaaagttttagcagatgtgcgagatcagcttggcattccttatcttgatgactatgggcagcggcgatt

SEQ ID NO: 111178 - DNA, 75 bp, synthetic construct
  source 1..75: mol_type = other DNA
gggaaagccagcgtcaacgacgcggatcggctacgcaaatacctggcgcgttttaatctgacgtgggaagccgtg

SEQ ID NO: 111179 - DNA, 75 bp, synthetic construct
  source 1..75: mol_type = other DNA
agccaatgcggaagtggaaacccagcgctcggtgatccgtgggcgggaagattctctcaccaggctcaactttac

SEQ ID NO: 111180 - DNA, 75 bp, synthetic construct
  source 1..75: mol_type = other DNA
aaattactcattgaatcagatgataaaacaatagagcgtgatgggataatagctaaaaatcttgggcagttcata

SEQ ID NO: 111181 - DNA, 75 bp, synthetic construct
  source 1..75: mol_type = other DNA
gggtcgatgtttgatgttatggagcagcaacgatgttacgcagcagggcagtcgccctaaaacaaagttagccat

SEQ ID NO: 111182 - DNA, 75 bp, synthetic construct
  source 1..75: mol_type = other DNA
gcaaaaaatgaagttatcgacaacgaccgcgaagactggaagcgcatctccgcatcaatgcgcaaacagcctgat

SEQ ID NO: 111183 - DNA, 75 bp, synthetic construct
  source 1..75: mol_type = other DNA
gtatccgaacggtgatggctgtgtcactataagctcaccagaaataaaaataaataccctgctgccatttgcctg

SEQ ID NO: 111184 - DNA, 75 bp, synthetic construct
  source 1..75: mol_type = other DNA
gaacgaccagaaagcagaacaaaacagccaaaatgcgttacaagacgagccagaaacgaaacaatccgaaccagt

SEQ ID NO: 111185 - DNA, 75 bp, synthetic construct
  source 1..75: mol_type = other DNA
cgcgactgcttgcttccccctgtccggggcagcaactggtggtgacagaaggcgtgttcagcatggacggcgata

SEQ ID NO: 111186 - DNA, 75 bp, synthetic construct
  source 1..75: mol_type = other DNA
cacttcgttaatgctgccgggtagcgaatttactgaatccgatccggaagagattaaagaccgtctggaaaaaca

SEQ ID NO: 111187 - DNA, 75 bp, synthetic construct
  source 1..75: mol_type = other DNA
atgtctattttcatatggttaattgtagcgttgtatcttttaaaaaaatactcatttaaagtagagaaactaagt

SEQ ID NO: 111188 - DNA, 75 bp, synthetic construct
  source 1..75: mol_type = other DNA
ttgctgggtgacggcgattcgcccgccaaccgtacccgctggcaccgcacggctgcgcctgactttaaccgcagg

SEQ ID NO: 111189 - DNA, 75 bp, synthetic construct
  source 1..75: mol_type = other DNA
aaagccttcgagaaaccgcagaagaaaaacatgccaagtatccgcccggatcaacttccacagttaatgcaaaca

SEQ ID NO: 111190 - DNA, 75 bp, synthetic construct
  source 1..75: mol_type = other DNA
tctcaataggtgcaatatttttcgatccgcaaaccggagatatggggccggaatttagtaagactatcgatctgg

SEQ ID NO: 111191 - DNA, 75 bp, synthetic construct
  source 1..75: mol_type = other DNA
taaatgctctggaaacggcacttcgccaggatacttcttttcagctcaaccagcgagggaccacacagcaggatg

SEQ ID NO: 111192 - DNA, 75 bp, synthetic construct
  source 1..75: mol_type = other DNA
gtgaaacaaggggcggcgagcaacgtggaagtgctgcgtttacagcgccaggctaatgaactggaaaacaaactt

SEQ ID NO: 111193 - DNA, 75 bp, synthetic construct
  source 1..75: mol_type = other DNA
agtcccgacccggttaaatttatatccagagcctgtattcctggcctcggcgcttcatttttagcgttaggctgt

SEQ ID NO: 111194 - DNA, 75 bp, synthetic construct
  source 1..75: mol_type = other DNA
tcgccatcggctggtatatgctttatcgcaaccgcgaacacgtggagctaaccgccgttgaacaagcctatctca

SEQ ID NO: 111195 - DNA, 75 bp, synthetic construct
  source 1..75: mol_type = other DNA
ttaaatatttaaaagaactgggagtacccgcgagtgccgctgatattacgacgcgagctgaccaggaaggctgga

SEQ ID NO: 111196 - DNA, 75 bp, synthetic construct
  source 1..75: mol_type = other DNA
cgttatcgccgcgactaaccgtccggacgttctcgacccggccctgctgcgtcctggccgtttcgaccgtcaggt

SEQ ID NO: 111197 - DNA, 75 bp, synthetic construct
  source 1..75: mol_type = other DNA
ccagcgctgaaatgtgcggtaactcgcgtcagcaggcaatgacctggcttatcgatctggaaatgctgaccgcgc

SEQ ID NO: 111198 - DNA, 75 bp, synthetic construct
  source 1..75: mol_type = other DNA
gatgaagtgcggcgcgatgtttattactatcgggtgtacattcgtactttcagcaaccatctggaaaataaacat

SEQ ID NO: 111199 - DNA, 75 bp, synthetic construct
  source 1..75: mol_type = other DNA
ctggcagggaaacagccactcagtgacgtgttaaccgcaatcagtaatctggaagaacgggcagataatcttctg

SEQ ID NO: 111200 - DNA, 75 bp, synthetic construct
  source 1..75: mol_type = other DNA
tgcaactgaccggtgaagcgaaacaggcggacctcattttatatgcccgcttacccgcgcagctaagtggaagtc

SEQ ID NO: 111201 - DNA, 75 bp, synthetic construct
  source 1..75: mol_type = other DNA
ccagttatcgccagtacatcctgagtttgtggctgccgttttatctctcgctgccgacgctggtggtcagttatg

SEQ ID NO: 111202 - DNA, 75 bp, synthetic construct
  source 1..75: mol_type = other DNA
gtttcgtcagttgctatgcagaatcatgctgctgttctttataacaatctgatacggagtctcttattttcaacg

SEQ ID NO: 111203 - DNA, 75 bp, synthetic construct
  source 1..75: mol_type = other DNA
gaactcaccacgttgtactggctgaacgtcgggctggggatcgtggcgtgtgtggcggtatttttgttgagtgat

SEQ ID NO: 111204 - DNA, 75 bp, synthetic construct
  source 1..75: mol_type = other DNA
gtgttctgctcatgaatatgctggctgagccgaagtctgtcagcgtgaatacgaggaacggaaaacagtgtcgtt

SEQ ID NO: 111205 - DNA, 75 bp, synthetic construct
  source 1..75: mol_type = other DNA
gcggtaactttcgcgaactttctgccagcgtcacgcggatggcaacctttgccactagcggacgcatcactctgg

SEQ ID NO: 111206 - DNA, 75 bp, synthetic construct
  source 1..75: mol_type = other DNA
cgtcgcgcagatttgctggtttctgctggcagaagcgcgttacctgcccgcccggttgatacaatcttcaccacc

SEQ ID NO: 111207 - DNA, 75 bp, synthetic construct
  source 1..75: mol_type = other DNA
gcggcaccaatcgcgaaccggagttccgtcttgaagaaacggggccgtgttcggcaattttacatgccgacaatg

SEQ ID NO: 111208 - DNA, 75 bp, synthetic construct
  source 1..75: mol_type = other DNA
cgagagctgcattgaagcattccatgaggctgaaaccagcctgaatcacactgcttttcgccgtaatcaatggga

SEQ ID NO: 111209 - DNA, 75 bp, synthetic construct
  source 1..75: mol_type = other DNA
caggctcacgacggtatcgactctgtgcccgaaacaggaacctggctcctgcagaaaggtgagcgcgttacgaca

SEQ ID NO: 111210 - DNA, 75 bp, synthetic construct
  source 1..75: mol_type = other DNA
aacgtgaggatgctcagaagaaagccgatcagctacggaaacaggcagaacaagtccaaaagcaggctgatacaa

SEQ ID NO: 111211 - DNA, 75 bp, synthetic construct
  source 1..75: mol_type = other DNA
ttattaccggttttattgtcgataccactcactcattccgtctggcgctactcatctgcggttgcgtcaccgcag

SEQ ID NO: 111212 - DNA, 75 bp, synthetic construct
  source 1..75: mol_type = other DNA
gtcgataaaaacggtgcaccaacaaccgatccgttcgcggtacatgctctgctccccgccgccgggccaaaaggg

SEQ ID NO: 111213 - DNA, 75 bp, synthetic construct
  source 1..75: mol_type = other DNA
cctctgtttttgattctgtctcggtatttctgaacggggcgtattcaaagtatgcctggtcggataaggcagatt

SEQ ID NO: 111214 - DNA, 75 bp, synthetic construct
  source 1..75: mol_type = other DNA
atggtgattgatgcaatgttaagcgttcagatgactccacaagcaaaagttagcttcgaggagcaatgttttttt

SEQ ID NO: 111215 - DNA, 75 bp, synthetic construct
  source 1..75: mol_type = other DNA
atggctacagtcccaacttccccattcctcaaaatcgaagtcgtcaacggcaaagctgttattttctccctgcat

SEQ ID NO: 111216 - DNA, 75 bp, synthetic construct
  source 1..75: mol_type = other DNA
gggtgacttattactggggaaatctcagacccggactgagctgttttctgactttaatttctacggtgtggcact

SEQ ID NO: 111217 - DNA, 75 bp, synthetic construct
  source 1..75: mol_type = other DNA
tgaatgctttcacccaatggataggggttccttatgttggtcctgctgttgcacctgcacaagcaatcgctgcgg

SEQ ID NO: 111218 - DNA, 75 bp, synthetic construct
  source 1..75: mol_type = other DNA
ggtcagcttgaagcctggcaggagaatgccatgttcgatacagggcgttacaggcgaaaaaaaaatccggtaccg

SEQ ID NO: 111219 - DNA, 75 bp, synthetic construct
  source 1..75: mol_type = other DNA
atgataatcaggacgcgatgaatgctgaattagcacagaatgatttactgttgaaaggtcatgaagactacgaaa

SEQ ID NO: 111220 - DNA, 75 bp, synthetic construct
  source 1..75: mol_type = other DNA
acctaacctggattatgaagtggagcgccacgcctcactcaccggcgacagcgtgcgttttaacaccgaagcgcg

SEQ ID NO: 111221 - DNA, 75 bp, synthetic construct
  source 1..75: mol_type = other DNA
caacggatagttgatgacctgaagggaagcaatgcttccacgacagaaaaaggcctggtgcaactctgtagtgat

SEQ ID NO: 111222 - DNA, 75 bp, synthetic construct
  source 1..75: mol_type = other DNA
atggctacagtcccaacttccccatacctgaaaattgaagttgtcaacggcaaggccgttattttctccctgcat

SEQ ID NO: 111223 - DNA, 75 bp, synthetic construct
  source 1..75: mol_type = other DNA
cttaccacatctatggtgactccctgcgtggttattacatcacccttgatggcctgatgatgcttcagcttgggt

SEQ ID NO: 111224 - DNA, 75 bp, synthetic construct
  source 1..75: mol_type = other DNA
cgctggcagaagaatttggggtgacgacgcgcacgctgcggcgggattttaacgtccgcctcacctatcttgata

SEQ ID NO: 111225 - DNA, 75 bp, synthetic construct
  source 1..75: mol_type = other DNA
cgacccactcacttttaccgaatggcgcagcctgtttcgtaaccgcacaatgtggggaatgatgctcggtttcag

SEQ ID NO: 111226 - DNA, 75 bp, synthetic construct
  source 1..75: mol_type = other DNA
ggtgtaaaagtcattaacgactggttcaacatcaaagagcgcggacgcccgatgggcttcttcaacgcagcttct

SEQ ID NO: 111227 - DNA, 75 bp, synthetic construct
  source 1..75: mol_type = other DNA
ttagtcttcctgtcggagcgggaagtattgttgaatggtcggtgataactgactacggttcaagttctgggaaac

SEQ ID NO: 111228 - DNA, 75 bp, synthetic construct
  source 1..75: mol_type = other DNA
attttgttcgaatgcctgttgccgacgtgaaaaaatggtgccgattattcggtatcagcaattcgttacttcgcg

SEQ ID NO: 111229 - DNA, 75 bp, synthetic construct
  source 1..75: mol_type = other DNA
cgcaggatacacacgatatctttcaggtacgactggacaatcagcatgaggcgcggtttctctgccgctacgtta

SEQ ID NO: 111230 - DNA, 75 bp, synthetic construct
  source 1..75: mol_type = other DNA
accattaagtggtggctgaaacagtcacgcgaagcacaatctgccattcttaccgatgaaatcccgttggatgac

SEQ ID NO: 111231 - DNA, 75 bp, synthetic construct
  source 1..75: mol_type = other DNA
caggcatggcgtgaagctacgtcgccgcagggcgaacacgacatttttcagatacgactggatgaggcgcacgag

SEQ ID NO: 111232 - DNA, 75 bp, synthetic construct
  source 1..75: mol_type = other DNA
tgtcccggttgagactgaatcagatccgatgaacgtcacttttgacaagctggtccctgaagtacagaacgctgt

SEQ ID NO: 111233 - DNA, 75 bp, synthetic construct
  source 1..75: mol_type = other DNA
ttgctcgttatttctgcattttcataaacgttggtttgggagaaggtgctccaactattggcgttccgttcttct

SEQ ID NO: 111234 - DNA, 75 bp, synthetic construct
  source 1..75: mol_type = other DNA
gaaaaagtggcgattaaatcccgcgcaccgatcctgctcaacggcccgaccggggcgggtaagtcatttctggcg

SEQ ID NO: 111235 - DNA, 75 bp, synthetic construct
  source 1..75: mol_type = other DNA
attcatcgcctgacttaccgctggagtggaaacaactggaatgcaacagtaagccctgtcatttacgacggcgat

SEQ ID NO: 111236 - DNA, 75 bp, synthetic construct
  source 1..75: mol_type = other DNA
acgttctacacgccggacttcgcggtgatgctaaccaccggagagatggaattgcacgaggtgaaagggttctgg

SEQ ID NO: 111237 - DNA, 75 bp, synthetic construct
  source 1..75: mol_type = other DNA
cacgtgtgtcagtcacaccgacgggatccggcttaaactgacgtaccatgccagcggctacctgaaagccattca

SEQ ID NO: 111238 - DNA, 75 bp, synthetic construct
  source 1..75: mol_type = other DNA
gggtatcaagctgcggttagctgataacacgttctatacgccagatttcgctgtgatgctcgccaccggagagat

SEQ ID NO: 111239 - DNA, 75 bp, synthetic construct
  source 1..75: mol_type = other DNA
agccacgcaagcaccttaaaatcaccatcatacactaaatcagtaagttggcagcattacccaaatttaacgatt

SEQ ID NO: 111240 - DNA, 75 bp, synthetic construct
  source 1..75: mol_type = other DNA
tgtttggtcatgtgaaaggcgcgtttaccggggcgcgggagtcgcgggaaggattattacgcagcgccaacggcg

SEQ ID NO: 111241 - DNA, 75 bp, synthetic construct
  source 1..75: mol_type = other DNA
ccgtcgctaaaatcagaatgcccaaagataaaatgaagctgcttcaccccggcattatcgaaacaaaggcgctga

SEQ ID NO: 111242 - DNA, 75 bp, synthetic construct
  source 1..75: mol_type = other DNA
gaatgttgtttcttgatgagattggcgaactgggcgcagacgaacaggcaatgctgctgaaagccattgaagaaa

SEQ ID NO: 111243 - DNA, 75 bp, synthetic construct
  source 1..75: mol_type = other DNA
atgaccattctgttattgcatagagtagttaacatgaagcggagtagaacggaagtgggacgctggcgtatgcag

SEQ ID NO: 111244 - DNA, 75 bp, synthetic construct
  source 1..75: mol_type = other DNA
cggattatttgatagcgaagaagtagccctggaagaaggcaggattcttgaatgtagtttaggccatccagtgaa

SEQ ID NO: 111245 - DNA, 75 bp, synthetic construct
  source 1..75: mol_type = other DNA
atcatcgaagcccgtaataaaggcggctacttccgcgaactgtttgatctctgcgcccgtaccgacaccaaaaag

SEQ ID NO: 111246 - DNA, 75 bp, synthetic construct
  source 1..75: mol_type = other DNA
cgagaattatctgctcaatatggctgttttacagaaatatgggttgatggttcatacaccacgtctaaaccagag

SEQ ID NO: 111247 - DNA, 75 bp, synthetic construct
  source 1..75: mol_type = other DNA
gtggtgcaattaccaactggcgtactgttggcggtaacgatcaggagatccagacctggcaacgcccggaagact

SEQ ID NO: 111248 - DNA, 75 bp, synthetic construct
  source 1..75: mol_type = other DNA
tatatggcgttatccggggtcagggactcttacggaacaagcggtcgtatctgcctgtttgtgcgcatcgagtaa

SEQ ID NO: 111249 - DNA, 75 bp, synthetic construct
  source 1..75: mol_type = other DNA
gggcttgcgccgcttgccgcggcgcatcaggcgatgcgtgaggtctccgggccgattatcgccattgcgctggtg

SEQ ID NO: 111250 - DNA, 75 bp, synthetic construct
  source 1..75: mol_type = other DNA
gcccagttatctaatttaggttctcttgctaacagtattggtagtatcttcgaaggtgcagcaggtaagcagaat

SEQ ID NO: 111251 - DNA, 75 bp, synthetic construct
  source 1..75: mol_type = other DNA
caacctgactgcttcgaagatatgatcgcactggtggcacttttccgccccggtccgttgcaatcagggatggtg

SEQ ID NO: 111252 - DNA, 75 bp, synthetic construct
  source 1..75: mol_type = other DNA
tgctgcgtcgtgcgatgggtaagaaaaagccggaagagatggctaagcagcgttctgtatttgctgaaggtgcag

SEQ ID NO: 111253 - DNA, 75 bp, synthetic construct
  source 1..75: mol_type = other DNA
gatacatcacatcgggtgtggtcaaggaaacgggaggcaccgaaacccgaccaagaaacatagcattcaactttt

SEQ ID NO: 111254 - DNA, 75 bp, synthetic construct
  source 1..75: mol_type = other DNA
catcagtgagtgacctactcggcaacctacaaaacacagccaactcagcgctgaataatatcagcgctgccgcat

SEQ ID NO: 111255 - DNA, 75 bp, synthetic construct
  source 1..75: mol_type = other DNA
cgccgctggtcgagtatacgcgggacaggctgcaccgtgagacggtgcgcagcttcggcagcagggcaggcagta

SEQ ID NO: 111256 - DNA, 75 bp, synthetic construct
  source 1..75: mol_type = other DNA
ttacagcgcatcaatgaagtgatggattttgctgccaacagtggactgattgacatcaacaccgccgcgaacgtc

SEQ ID NO: 111257 - DNA, 75 bp, synthetic construct
  source 1..75: mol_type = other DNA
agtctccgacgctgaccctggtggtgcatctgttctcccccggcgggaagtacgactcgctgtatatgcgcaact

SEQ ID NO: 111258 - DNA, 75 bp, synthetic construct
  source 1..75: mol_type = other DNA
atagtccagaaagcggtcgataaacttgctgatgccgcaacgctgaccggcgaggcaaaagccagcgccgaagcg

SEQ ID NO: 111259 - DNA, 75 bp, synthetic construct
  source 1..75: mol_type = other DNA
atggttaaactgtattcacaaccaggagcctctgttgcccgtattgcccgggaacacgatatcaatgataacctg

SEQ ID NO: 111260 - DNA, 75 bp, synthetic construct
  source 1..75: mol_type = other DNA
tgaggttagaagagcatataatcgaacaacctacttggaacaaagaaaagagcttatgaattggtggggtagttt

SEQ ID NO: 111261 - DNA, 75 bp, synthetic construct
  source 1..75: mol_type = other DNA
gattcactggacatcgatgaaattcgctggcctttagcgggggtaaaagtcactcaacgtggtgttgacggtcgc

SEQ ID NO: 111262 - DNA, 75 bp, synthetic construct
  source 1..75: mol_type = other DNA
acaccgacggcggcaatatcgccgacggcgaaaccgattttatgcaggtgacggtgcgcatcaccgacgccagcg

SEQ ID NO: 111263 - DNA, 75 bp, synthetic construct
  source 1..75: mol_type = other DNA
catcgtgaacatattttccctagtagaaatgatccaaagcggccgatgaatagtcagactgctaatgctgcttta

SEQ ID NO: 111264 - DNA, 75 bp, synthetic construct
  source 1..75: mol_type = other DNA
tatcaaccagtatttaaaagagattgagcgttatgtcggaggcgtaaggctgaaagacatgcacccgacagaacg

SEQ ID NO: 111265 - DNA, 75 bp, synthetic construct
  source 1..75: mol_type = other DNA
agccagcacctgaacagcctggtgtatgaccgtgactacgggtggaatgacaacggcgacctggtgcgcatcagc

SEQ ID NO: 111266 - DNA, 75 bp, synthetic construct
  source 1..75: mol_type = other DNA
atgatgattatcacgagttccagtttcgggtggatcgcaactatgaccaggcctattttccgataaggaaactgg

SEQ ID NO: 111267 - DNA, 75 bp, synthetic construct
  source 1..75: mol_type = other DNA
tgggacgcttcttaggagcatggttttactagatctttcatcagtaaatttcaatggtcagactatcggtattta

SEQ ID NO: 111268 - DNA, 75 bp, synthetic construct
  source 1..75: mol_type = other DNA
cttggtgtggcaccgtcgattcatgttattgcccggcaactgatggataaggcacttaaagaggtgaggctgtga

SEQ ID NO: 111269 - DNA, 75 bp, synthetic construct
  source 1..75: mol_type = other DNA
atcagatgcaatacgcaaattcaaaacgttgctgtgttttaaccagtattacgaaggtgagcacagtattcatcg

SEQ ID NO: 111270 - DNA, 75 bp, synthetic construct
  source 1..75: mol_type = other DNA
catgcgccgccagtcaacaccgcaaatgagcacactacaacaaccgattagcgccccctggtatgtctttttccg

SEQ ID NO: 111271 - DNA, 75 bp, synthetic construct
  source 1..75: mol_type = other DNA
tttaataaaaaagagtgtaaggatataatttcactgaatggttatattggttttttgaattcagaggaggaacga

SEQ ID NO: 111272 - DNA, 75 bp, synthetic construct
  source 1..75: mol_type = other DNA
tgccgattatggcggcatatcagggggagagttttggtgcagatgcgtctctggggctcggtgatattgtgccgg

SEQ ID NO: 111273 - DNA, 75 bp, synthetic construct
  source 1..75: mol_type = other DNA
agtaaatgacgaggagatggcgcgcttcgcctggcaggtggcgtgcaaaacatttggtgaagatcgggctgagtt

SEQ ID NO: 111274 - DNA, 75 bp, synthetic construct
  source 1..75: mol_type = other DNA
tgccagtacggccatgaatgaagctggatttaatgctgatgtgatagaggctgctttagcccattctgataaaaa

SEQ ID NO: 111275 - DNA, 75 bp, synthetic construct
  source 1..75: mol_type = other DNA
ttttaaataaagtaaaaaataatataattgcaaagaatatgtcttgggatgatgttgaatctaaatatagcgagg

SEQ ID NO: 111276 - DNA, 75 bp, synthetic construct
  source 1..75: mol_type = other DNA
tcgccatcggttggtatatgctctatcgcaaccgcgagcacgttgaactgactgccgttgaacaagcctatctca

SEQ ID NO: 111277 - DNA, 75 bp, synthetic construct
  source 1..75: mol_type = other DNA
gttgagtatatggtcaacgcccactgcgccgacgccatggtctgcatctctaactgcgacaaaatcaccccgggg

SEQ ID NO: 111278 - DNA, 75 bp, synthetic construct
  source 1..75: mol_type = other DNA
tggaaaaagacatattcccagccattggagagattcccgtccagcaaatcaaagcccggacgctagtcgaagctc

SEQ ID NO: 111279 - DNA, 75 bp, synthetic construct
  source 1..75: mol_type = other DNA
actactgctggtgatggcactgtttacacaagctttttagaatttaaaactgacagtggtggttattacgcatct

SEQ ID NO: 111280 - DNA, 75 bp, synthetic construct
  source 1..75: mol_type = other DNA
cgtttgcactgcaaacgacgccctaccagacgtcgaaccagtcgaatacatggcgacacgtcaaaaacgatcgcg

SEQ ID NO: 111281 - DNA, 75 bp, synthetic construct
  source 1..75: mol_type = other DNA
tacgatgcccagatgttcccgttggggcaatgcatctggaacggcgcacaaaaagatgtgcgccggattgaatcg

SEQ ID NO: 111282 - DNA, 75 bp, synthetic construct
  source 1..75: mol_type = other DNA
gacggcgattcgctggccttcctgctgtccaggacggcgggctcaggctcatatttcaaatacccggcagtgggt

SEQ ID NO: 111283 - DNA, 75 bp, synthetic construct
  source 1..75: mol_type = other DNA
attgatgtgatgtggtcaccctctgataacgatggttcagactcagcgcgtaaattcaaaacgctgctgtactac

SEQ ID NO: 111284 - DNA, 75 bp, synthetic construct
  source 1..75: mol_type = other DNA
tgcgtcaccgcagcgggagcactggcgtacatcttcctggttcgtcagccgatcaacgacccgcgtaaagattaa

SEQ ID NO: 111285 - DNA, 75 bp, synthetic construct
  source 1..75: mol_type = other DNA
agtgatagacccaatggggttagatgcgattgagaatatgacatcaggtggactaatttatgccgtatctggtgt

SEQ ID NO: 111286 - DNA, 75 bp, synthetic construct
  source 1..75: mol_type = other DNA
tttggtgaacaggtgctggtgttttccaaagccgatatcgccagtcgttttgacgaagccgataatttcggtgac

SEQ ID NO: 111287 - DNA, 75 bp, synthetic construct
  source 1..75: mol_type = other DNA
tgcaacgcgttgccagtcgggttattggtgcaattattggtgcaattattggtgtattcgcgctacgcctgattt

SEQ ID NO: 111288 - DNA, 75 bp, synthetic construct
  source 1..75: mol_type = other DNA
ctccatgaccggctccgccctgtcgaacgccgataacgcctggcgtgtggaagtgattgccgacgatcgcctgcg

SEQ ID NO: 111289 - DNA, 75 bp, synthetic construct
  source 1..75: mol_type = other DNA
ccctgctgcgtcctggccgtttcgaccgtcaggttgtggttggcttgccagatgttcgcggtcgtgagcagatcc

SEQ ID NO: 111290 - DNA, 75 bp, synthetic construct
  source 1..75: mol_type = other DNA
gcgccgcagcctggcggagaagctacagcaggaagggagcgaagacggtcacggtgtggtgttcccggctgaact

SEQ ID NO: 111291 - DNA, 75 bp, synthetic construct
  source 1..75: mol_type = other DNA
caacaacacgtcctgttcgtaagcccttgccttcacatcttccccgtgctgaaaaggttatcccgccagctgagg

SEQ ID NO: 111292 - DNA, 75 bp, synthetic construct
  source 1..75: mol_type = other DNA
ctgccttcactttgccagtacatcctgctggggactggttcacgtagcggtcgcttctcgcatgaccgcgtcagt

SEQ ID NO: 111293 - DNA, 75 bp, synthetic construct
  source 1..75: mol_type = other DNA
ccgtcaggttgtggttggtctgccagatgtgcgtggtcgtgagcaaatcctgaaagttcatatgcgtcgcgtacc

SEQ ID NO: 111294 - DNA, 75 bp, synthetic construct
  source 1..75: mol_type = other DNA
atcggcatcggccagctatgcgtttgacgctgttcagacaaatattggagtatcgcagacacattcgcgccaggg

SEQ ID NO: 111295 - DNA, 75 bp, synthetic construct
  source 1..75: mol_type = other DNA
tgttgaccaagaacgtcaaggttgtcggtgaaccgcctgaagaaccaagcctgctggcttctattttcatctcct

SEQ ID NO: 111296 - DNA, 75 bp, synthetic construct
  source 1..75: mol_type = other DNA
tcggagaaaaacacctgacactaaaagccatcattgcgcttatttataaaaacgatcagctttcctgcctgttgg

SEQ ID NO: 111297 - DNA, 75 bp, synthetic construct
  source 1..75: mol_type = other DNA
tccgctcgctggaacacgcctacagcaaagacggcggcctggcggtgctctacggtaactttgcggaaaacggct

SEQ ID NO: 111298 - DNA, 75 bp, synthetic construct
  source 1..75: mol_type = other DNA
caggctggaggaagaaatccgggcaaactgcgtgagcagtgaaagccgccagtggcttgcgcagtgcgggctgac

SEQ ID NO: 111299 - DNA, 75 bp, synthetic construct
  source 1..75: mol_type = other DNA
cgcagaaagaatcaacggcttaccacgaagcgggtcatgcgattattggtcgcctggtgccggaacacgatccgg

SEQ ID NO: 111300 - DNA, 75 bp, synthetic construct
  source 1..75: mol_type = other DNA
tggtcgccgaacaaattgaagcggctggcggcgttgccaaagagttcaacaccattgcggtggatgatgggatcg

SEQ ID NO: 111301 - DNA, 75 bp, synthetic construct
  source 1..75: mol_type = other DNA
atggccgtctggcccgcgatatccgcaaaagccgcgcccataccggctacatcttccaacaattcaacctggtga

SEQ ID NO: 111302 - DNA, 75 bp, synthetic construct
  source 1..75: mol_type = other DNA
aaaaagaaggtttcacagaaaaaattacatttaccgccaatgcagagcaacttctgcagccacagtttacggtag

SEQ ID NO: 111303 - DNA, 75 bp, synthetic construct
  source 1..75: mol_type = other DNA
ctgaaaacccgcaacagcgcctgattaatcaggcggtggagattgtgcgtaaaggtggggtgattgtctatccaa

SEQ ID NO: 111304 - DNA, 75 bp, synthetic construct
  source 1..75: mol_type = other DNA
aagaagctggcactcatggaacagttcagagagatgttagctgccgagggcattgaaggtatcagcatttccgag

SEQ ID NO: 111305 - DNA, 75 bp, synthetic construct
  source 1..75: mol_type = other DNA
tacacgaatctcggtcgccgtggtgaattgtttatgacgatcggtgctgtccagttagggcagaaacagacgtag

SEQ ID NO: 111306 - DNA, 75 bp, synthetic construct
  source 1..75: mol_type = other DNA
aaaaactggatattgcgagcatgggtgtctgattataattctaaaaataaaaatgataatttaataataacgccg

SEQ ID NO: 111307 - DNA, 75 bp, synthetic construct
  source 1..75: mol_type = other DNA
ggctttccgcctgatgttattgaggctgcacttgctcatgtggataagaatgaggttcgtcgcgcttacaatcga

SEQ ID NO: 111308 - DNA, 75 bp, synthetic construct
  source 1..75: mol_type = other DNA
tacgttgtacggtggtcgtctggcggaagagatcatttatggtcctgaacatgtttctaccggggcgtcaaacga

SEQ ID NO: 111309 - DNA, 75 bp, synthetic construct
  source 1..75: mol_type = other DNA
agggcgacatgacgcagtatggcggtagcattgttcagggttcagccggggtacgcattggtgcccccaccggcg

SEQ ID NO: 111310 - DNA, 75 bp, synthetic construct
  source 1..75: mol_type = other DNA
cgatgatgcaatggtgggctgattttgttaaaagagcagataaaggaagcatggtagaatctagtgccggtgcat

SEQ ID NO: 111311 - DNA, 75 bp, synthetic construct
  source 1..75: mol_type = other DNA
gatccggcgaccatcacggtgacggacaagtcagtcaacgaaggctcaacgaccgtcgccctgcccgccattacc

SEQ ID NO: 111312 - DNA, 75 bp, synthetic construct
  source 1..75: mol_type = other DNA
agatcgattttgaagctaaagaatggaaaattcctgcagctcgaatgaagatgaaccgggaccatacggttccat

SEQ ID NO: 111313 - DNA, 75 bp, synthetic construct
  source 1..75: mol_type = other DNA
aaaaaaggagaaatatctccaggaagaccagctgtttggaaaggtaatgatacgtatggtaaggaaatagaaatc

SEQ ID NO: 111314 - DNA, 75 bp, synthetic construct
  source 1..75: mol_type = other DNA
acaggccgattttcgccgcggtgctgtcgattttaatttttatcaccgggttaatcgctatcccactgctgccgg

SEQ ID NO: 111315 - DNA, 75 bp, synthetic construct
  source 1..75: mol_type = other DNA
cagcagcattcagacaggccagccgggaactgaatattccggtggaatggggcggcgactggaagaccctgaaag

SEQ ID NO: 111316 - DNA, 75 bp, synthetic construct
  source 1..75: mol_type = other DNA
caggcggttgcggatatcaacgctaaaggcggcattaaaggcaacaaactgcaaatcgtaaaatatgacgatgcc

SEQ ID NO: 111317 - DNA, 75 bp, synthetic construct
  source 1..75: mol_type = other DNA
caatgatgcaatggtgggcagatttcgtgatggcggcagatcgtggaagtatgattgacggtgggatgaaagaaa

SEQ ID NO: 111318 - DNA, 75 bp, synthetic construct
  source 1..75: mol_type = other DNA
tactctggctggtcattgccgttgtgctgatgtcagtattccagagctttgggcccagcgagtctaatggccgta

SEQ ID NO: 111319 - DNA, 75 bp, synthetic construct
  source 1..75: mol_type = other DNA
agaacatgccgagcatccggcctgatcaactgcctcaactgatgcagacgatgcgaacagcaaacatcagccaat

SEQ ID NO: 111320 - DNA, 75 bp, synthetic construct
  source 1..75: mol_type = other DNA
gcgccagccgtcagaaactggaaagtcagatctctacgctgtacggtggtcgtctggcggaagagatcatctacg

SEQ ID NO: 111321 - DNA, 75 bp, synthetic construct
  source 1..75: mol_type = other DNA
gaaaaacagcggcggaatgaccgagctgtatctggattccggaacctacgttaaaagtttttactccgtcatgta

SEQ ID NO: 111322 - DNA, 75 bp, synthetic construct
  source 1..75: mol_type = other DNA
gagcgagaactgtcatctcctgcggcaatcgcttctttctatgaggaaagttattcagatgacacaggattaccg

SEQ ID NO: 111323 - DNA, 75 bp, synthetic construct
  source 1..75: mol_type = other DNA
tacgcagatttacgcggcgggccagaccgcgacgcttgcaggcatgggcgacctgaccattaacgccgacggcag

SEQ ID NO: 111324 - DNA, 75 bp, synthetic construct
  source 1..75: mol_type = other DNA
acagacaacgacagcgaagaactggcagccacaccaaaggctgtcaaagccgtcatggacgagacgaaaacaaaa

SEQ ID NO: 111325 - DNA, 75 bp, synthetic construct
  source 1..75: mol_type = other DNA
ggccgtattgcgctgccaggtgcatttggttacggaatgacgaatcccggaagcacggcaattattgccagcgat

SEQ ID NO: 111326 - DNA, 75 bp, synthetic construct
  source 1..75: mol_type = other DNA
aatgctggatgccagtaaatatgatgatgtttataacagagaaaagaactgttatgagctggctaaaaaaaatca

SEQ ID NO: 111327 - DNA, 75 bp, synthetic construct
  source 1..75: mol_type = other DNA
cgccagtacagccctcaatgagcaaggatttcctcctgatgtcattgaagccgcacttgctcatgtagacaaaaa

SEQ ID NO: 111328 - DNA, 75 bp, synthetic construct
  source 1..75: mol_type = other DNA
cccgcacggattatcccgaagggcatcccggagccgggcctggtggcgcaggtgctggtcagcaagttctgcgac

SEQ ID NO: 111329 - DNA, 75 bp, synthetic construct
  source 1..75: mol_type = other DNA
ggttcgcagatggcgggagaacgcgccgcgcaaataatgagcttgctggaaaccgcgaaacgcaacggtctggag

SEQ ID NO: 111330 - DNA, 75 bp, synthetic construct
  source 1..75: mol_type = other DNA
cttaccaacggcgaaaatctgctgacgggcgccagcgacctgaacggcgacgcgctgacggtgaaatcgtttacg

SEQ ID NO: 111331 - DNA, 75 bp, synthetic construct
  source 1..75: mol_type = other DNA
tgaaagttcacatgcgtcgcgtaccattggcccccgatatcgacgcggcaatcattgcccgtggtactcctggtt

SEQ ID NO: 111332 - DNA, 75 bp, synthetic construct
  source 1..75: mol_type = other DNA
caggcgattttcgatattcagatcaaacgcctgcatgagtacaaacgccagcacctgaatctgctgcatattctg

SEQ ID NO: 111333 - DNA, 75 bp, synthetic construct
  source 1..75: mol_type = other DNA
agtgaagcacgtcaggcattaaatgaagagacagatgcgcaaggcgcaacgtactaccacgtgattctgatgcgg

SEQ ID NO: 111334 - DNA, 75 bp, synthetic construct
  source 1..75: mol_type = other DNA
aaagtggtttacggcgcaaccttccggttcgataaagaggcgttgatcaatgaactggacgcgatgaccgcccgc

SEQ ID NO: 111335 - DNA, 75 bp, synthetic construct
  source 1..75: mol_type = other DNA
aaaaccctgacgaaattacgcatatggatatgattcttggctacaaaaatcgcgactgtgttttgtacaaagatg

SEQ ID NO: 111336 - DNA, 75 bp, synthetic construct
  source 1..75: mol_type = other DNA
gccacaaatctctggtggtcattgccggcggtaccggcgttgcaccagtcaaagggttaatgcgctatttcgtcg

SEQ ID NO: 111337 - DNA, 75 bp, synthetic construct
  source 1..75: mol_type = other DNA
gattacggcgacgccaaaatcaggaggccctagctatgtatacgaaatccgtgtgaagagttggtgggtgaacgc

SEQ ID NO: 111338 - DNA, 75 bp, synthetic construct
  source 1..75: mol_type = other DNA
gtatatggtgaaagcatccctggcgaatggatcctcttatgagaaggatctggtggtaatcgatcaaaaactgac

SEQ ID NO: 111339 - DNA, 75 bp, synthetic construct
  source 1..75: mol_type = other DNA
cgggaataacggtgaacttcaccatgccacaggacgtggcagcaaactttaccctcgaaaataacggcattgcca

SEQ ID NO: 111340 - DNA, 75 bp, synthetic construct
  source 1..75: mol_type = other DNA
cagctacgcccggaattatttgaaggccgcactttattagtctggtgtggcgaaaaccaaacctctgcacaacag

SEQ ID NO: 111341 - DNA, 75 bp, synthetic construct
  source 1..75: mol_type = other DNA
atgactcaaactcctctattacttgcaatcatatttttattggttgttcttgttctttatatagctgcaatcaaa

SEQ ID NO: 111342 - DNA, 75 bp, synthetic construct
  source 1..75: mol_type = other DNA
ggcatgacacgacgtcttgatccgcaagaccgtgtaaatgagctcggtgatgcatctgttccttttatttttgat

SEQ ID NO: 111343 - DNA, 75 bp, synthetic construct
  source 1..75: mol_type = other DNA
cccacacgaccaacgctggcgaattaacttggcattactgattggccttgtgtcaatcgcaccaatgttctggaa

SEQ ID NO: 111344 - DNA, 75 bp, synthetic construct
  source 1..75: mol_type = other DNA
gtaatgcaactgccgaacagcgtgcaggacgatgcctctcgcgcattgtggaaagcggaaatgttgcgcttgcag

SEQ ID NO: 111345 - DNA, 75 bp, synthetic construct
  source 1..75: mol_type = other DNA
tggcgttgctttgtgatattaatcctgtcacgttacgcgcgtggcagaggcgttacggattgctgaaaccgcaac

SEQ ID NO: 111346 - DNA, 75 bp, synthetic construct
  source 1..75: mol_type = other DNA
attgcggcagggcaaacttattttgctatccagacccgacggcaggagctggctgacgatgaagctttcaggtaa

SEQ ID NO: 111347 - DNA, 75 bp, synthetic construct
  source 1..75: mol_type = other DNA
acaataatgccagcgatgcgcaaccagtcaccttcgtggcggataaggacagcgcggttgtcgttctgcaaacat

SEQ ID NO: 111348 - DNA, 75 bp, synthetic construct
  source 1..75: mol_type = other DNA
cgccacaatgaccgcgaccgtccgggatgcaaaaggcaacctgctcaatgacgtcatggtcactttcaatgttaa

SEQ ID NO: 111349 - DNA, 75 bp, synthetic construct
  source 1..75: mol_type = other DNA
gcgaaggggcctctaaaatctggtacgggcagattaaagacatgcccgtcagtgatgccagtgtgtcggcgctga

SEQ ID NO: 111350 - DNA, 75 bp, synthetic construct
  source 1..75: mol_type = other DNA
acaacaggcggtgcgggcgaacccgaaagacagtgaggctctgggggcgctgggccaggcatattctcagaaagg

SEQ ID NO: 111351 - DNA, 75 bp, synthetic construct
  source 1..75: mol_type = other DNA
caggttataagccggtttatctgaaccagcttcaactgctgtatgccgcacgcgatatgctgccgatgtgggaaa

SEQ ID NO: 111352 - DNA, 75 bp, synthetic construct
  source 1..75: mol_type = other DNA
attcgctggtctattatcagaacggcaatcaggtgctggattcgcgagtcattgtcggtcgccccgatcgcaaaa

SEQ ID NO: 111353 - DNA, 75 bp, synthetic construct
  source 1..75: mol_type = other DNA
cccggttaaagggactcgctggctatacagcagtaaaccttatgcactttcaacacctccgctttcggtgatcaa

SEQ ID NO: 111354 - DNA, 75 bp, synthetic construct
  source 1..75: mol_type = other DNA
gatacgccgggcaatacggggttgcaaaataatctggcgctattgctgtttagcagcgatcgccgtgacgaaggt

SEQ ID NO: 111355 - DNA, 75 bp, synthetic construct
  source 1..75: mol_type = other DNA
gttgttttcgcacgttcaatgtcgttgatgactttaatcgtgaggcgttgtcgattgaaatcgatccaaatctgc

SEQ ID NO: 111356 - DNA, 75 bp, synthetic construct
  source 1..75: mol_type = other DNA
tcgccagaaaggctttctcaccgtcatggatctcaaggagcgcggcattccgctggttggcacttactgcacctt

SEQ ID NO: 111357 - DNA, 75 bp, synthetic construct
  source 1..75: mol_type = other DNA
aagagacagatgcgcagggcgcaacgtactaccacgtgattctgatgcgggaaccggggagtaacggcaatatgc

SEQ ID NO: 111358 - DNA, 75 bp, synthetic construct
  source 1..75: mol_type = other DNA
aaaaaaaaaaaaaaaaacagccccgacgattcccctgtcggggcgggacgccatttcaagcgtgataaaactgct

SEQ ID NO: 111359 - DNA, 75 bp, synthetic construct
  source 1..75: mol_type = other DNA
gtcacgtcgctgtttttccggctgatacgtacggcctgtcgtcagcgtcttgaggggcgggaaccatgtcaaagc

SEQ ID NO: 111360 - DNA, 75 bp, synthetic construct
  source 1..75: mol_type = other DNA
cgaataacccggacgtcgttgccgcccgtttccgttctttgttacgtcagggcgatattgatggcgcgcaaaaac

SEQ ID NO: 111361 - DNA, 75 bp, synthetic construct
  source 1..75: mol_type = other DNA
aaaacaatctggcgctattgctgtttagtagcgatcgccgtgacgaaggttttgccgtcctggaacagatggcaa

SEQ ID NO: 111362 - DNA, 75 bp, synthetic construct
  source 1..75: mol_type = other DNA
caggaaggcattaagtgggctttcgtcagcaaagaagctcgcgatgtggccaacgataacgagatatgggaggag

SEQ ID NO: 111363 - DNA, 75 bp, synthetic construct
  source 1..75: mol_type = other DNA
catgagctggaagttccgcaccttacaggaaggcatcaagtgggctttcgtcagcaaagaagctcgcgatgtggc

SEQ ID NO: 111364 - DNA, 75 bp, synthetic construct
  source 1..75: mol_type = other DNA
tacgttgactcatctgtcggcggaaaaaatggttgctaaaagcgatccgcggctgggttttcgcgctgttctcga

SEQ ID NO: 111365 - DNA, 75 bp, synthetic construct
  source 1..75: mol_type = other DNA
gtgctggctgcccttgatgaaaaacggccaggccacgtgctgacgcgggacatagaacgggtgctggagcgaagc

SEQ ID NO: 111366 - DNA, 75 bp, synthetic construct
  source 1..75: mol_type = other DNA
ggcagccgtggctggcggatatccgttcgcgtcttggcaacattatgcgagctgatgcattggaggaaccgctgg

SEQ ID NO: 111367 - DNA, 75 bp, synthetic construct
  source 1..75: mol_type = other DNA
ccaaacctgcgcgcctcctgccggcgcatggaagcatcaggctggcttcgcacactgcgcgccccgaatctgcag

SEQ ID NO: 111368 - DNA, 75 bp, synthetic construct
  source 1..75: mol_type = other DNA
tttgcaaagcattttgaaaacggaagttttgttattgttgcgataatgtgcatgttcctttggagtgtttatgtt

SEQ ID NO: 111369 - DNA, 75 bp, synthetic construct
  source 1..75: mol_type = other DNA
cctccgggcagaacaacgcgcggcggaagttgtcgtactgccgctgatcccgttgtcagttccgcccgcagaagg

SEQ ID NO: 111370 - DNA, 75 bp, synthetic construct
  source 1..75: mol_type = other DNA
gtctggatggtgagggattcgctttgcggactccggctccagcagggaaacacagtgcttgtggcaacgttagcc

SEQ ID NO: 111371 - DNA, 75 bp, synthetic construct
  source 1..75: mol_type = other DNA
acggtcgctggtacccggaatttttccgcatcaacttctcacgctgcattttctgtggtctgtgcgaagaagcct

SEQ ID NO: 111372 - DNA, 75 bp, synthetic construct
  source 1..75: mol_type = other DNA
ttgcgcgcctcctgccggcgcatggaagcatcagactggctgcgcaccctgcgcgccccgaatctgcagctggct

SEQ ID NO: 111373 - DNA, 75 bp, synthetic construct
  source 1..75: mol_type = other DNA
ctgcaaattgaactggcggaaccgttgggctgccaggcgattgtcgggctttctgacgaagatctgcatcggctt

SEQ ID NO: 111374 - DNA, 75 bp, synthetic construct
  source 1..75: mol_type = other DNA
ggcgaactgtcggcagagaaaatcgatgaagtgatgctgattttaagcaacctgcgcgaaggctgggaagggctt

SEQ ID NO: 111375 - DNA, 75 bp, synthetic construct
  source 1..75: mol_type = other DNA
gcgcagtggctgcaggcctgtcacgatgcaggaatggaggttcgtgtgcaggttaatgaaagcatcaccccataa

SEQ ID NO: 111376 - DNA, 75 bp, synthetic construct
  source 1..75: mol_type = other DNA
tcgcgagctttttattaataggcttctttatacaaaaggtgaagagtggcttcctgaaaatgaaagtagaattat

SEQ ID NO: 111377 - DNA, 75 bp, synthetic construct
  source 1..75: mol_type = other DNA
ccaattcgaataacgacaggtacattgtcatacagcaaaacggtggcgcggctggtgaagaagcagtaacccgtg

SEQ ID NO: 111378 - DNA, 75 bp, synthetic construct
  source 1..75: mol_type = other DNA
aaaccaattggcgctattcctgcaatgcagacgagagaagggcgctttattttcaccgtagctttccaaaccatc

SEQ ID NO: 111379 - DNA, 75 bp, synthetic construct
  source 1..75: mol_type = other DNA
cactgcagcggagagtgctgattgtgctggctgcccttgatgaaaaacggccaggccacgtgctgacgcgggaca

SEQ ID NO: 111380 - DNA, 75 bp, synthetic construct
  source 1..75: mol_type = other DNA
actacttccgcatcctggttatttcagcgcgcaatgacgcaaatatcagtgaagtggaagatctcgccgacgcaa

SEQ ID NO: 111381 - DNA, 75 bp, synthetic construct
  source 1..75: mol_type = other DNA
aaataagggattggattcaatcccacggatacgatgaaggctatattttgcaggcccgtttctggaatgagcgaa

SEQ ID NO: 111382 - DNA, 75 bp, synthetic construct
  source 1..75: mol_type = other DNA
gcgtcgtttgtccggcggtcaacagcaacgtgtggcgattgcgcgtgcgctggcgatgcgcccggaagtcattct

SEQ ID NO: 111383 - DNA, 75 bp, synthetic construct
  source 1..75: mol_type = other DNA
cctcgcgcccagcgagccataactcaagccgcgcgatggtgtgggtgcgaaaaaatctgttctccagctggagca

SEQ ID NO: 111384 - DNA, 75 bp, synthetic construct
  source 1..75: mol_type = other DNA
atggaaaacgctaaaatgaattcgctcatcgcccagtatcagttggtagaggatctggttgctcttaaagaagcc

SEQ ID NO: 111385 - DNA, 75 bp, synthetic construct
  source 1..75: mol_type = other DNA
acctggtttaatcctggcacgacctcattggcagaaggtttaccttatgttggcctgaccgaacaggatgttcag

SEQ ID NO: 111386 - DNA, 75 bp, synthetic construct
  source 1..75: mol_type = other DNA
tcctgaaactgctgctactggggggattattgaatcagaactggttgccattccggctatgcaaaaacggctgga

SEQ ID NO: 111387 - DNA, 75 bp, synthetic construct
  source 1..75: mol_type = other DNA
gccatttgcctatttccggctccataaaagcacgcggcgggatttatgaagtcctggcacatgcagaaagactgg

SEQ ID NO: 111388 - DNA, 75 bp, synthetic construct
  source 1..75: mol_type = other DNA
gcgggggaagaagccatcacccgcgattatttccgcatcttggttatttccgcgcgcaatgatgaaaatatcagt

SEQ ID NO: 111389 - DNA, 75 bp, synthetic construct
  source 1..75: mol_type = other DNA
caccagccgctgcgttatctcgaccacgatcatctggtgccggaagccagccacgggcgcgatgcggcgttgctg

SEQ ID NO: 111390 - DNA, 75 bp, synthetic construct
  source 1..75: mol_type = other DNA
aaaccaactggtgctattccggcgatcatgacgaaggaagggcgctatatattcacagtagctttccaaaccata

SEQ ID NO: 111391 - DNA, 75 bp, synthetic construct
  source 1..75: mol_type = other DNA
tgcagatgtcaaaagatgagatcacaggtaatggcgtcgataacgcaacgctaactgcaacggttaaagatcagt

SEQ ID NO: 111392 - DNA, 75 bp, synthetic construct
  source 1..75: mol_type = other DNA
gttatttccagcgcctgctgggcgatggtagtgagttcggtatccagctggaatatgccgaacagcccagcccgg

SEQ ID NO: 111393 - DNA, 75 bp, synthetic construct
  source 1..75: mol_type = other DNA
atctcgctggtcgctgccgggtggatttttaccgcgctgatttatctcgtggcgtcgctgtttttccggctgata

SEQ ID NO: 111394 - DNA, 75 bp, synthetic construct
  source 1..75: mol_type = other DNA
gctatcaggtgatggacccggaacgctttggcgtggtggagtttgacgacaatttccgcgctatctcgctggaag

SEQ ID NO: 111395 - DNA, 75 bp, synthetic construct
  source 1..75: mol_type = other DNA
cggaaagtcagtatgtggtcctgaaagaggccgccacgaaacggcagttatctgagcaggaaaaatccctgctgg

SEQ ID NO: 111396 - DNA, 75 bp, synthetic construct
  source 1..75: mol_type = other DNA
ggtggcggcaatctgcttaagctctgttggcggtttgtctattgcgatggtcattccgggaatgaaatcaacctc

SEQ ID NO: 111397 - DNA, 75 bp, synthetic construct
  source 1..75: mol_type = other DNA
ccggcgcaaatgcggcgttcagagggtatcaggtttgagcagaacaacaacgtggtgattcagaacgacggtacg

SEQ ID NO: 111398 - DNA, 75 bp, synthetic construct
  source 1..75: mol_type = other DNA
ggcgtcgctgtttttccggctgatacgtacggcctgtcgtcagcgtcttgaggagcgggaaccatgtcaaagctg

SEQ ID NO: 111399 - DNA, 75 bp, synthetic construct
  source 1..75: mol_type = other DNA
cgcacgcaaggggcgacggtatttggctatcaggtaatggatccagaacgctttggcgtcgtggagtttgacgac

SEQ ID NO: 111400 - DNA, 75 bp, synthetic construct
  source 1..75: mol_type = other DNA
attgacgaacccatgaataacaccacgcgtctgcaatgcatgagtgctgccgtgattgcactgacacgatgggaa

SEQ ID NO: 111401 - DNA, 75 bp, synthetic construct
  source 1..75: mol_type = other DNA
gatttttatctctcctcccgtcgtaacagcaaagctgcataccggtttctgggtaaaatccgtacaacaacgtga

SEQ ID NO: 111402 - DNA, 75 bp, synthetic construct
  source 1..75: mol_type = other DNA
ggcgtcgctgttcttccggctgatacgtacggcctgtcgtcagcgttttgaggggcgggaaccatgtcaaagctg

SEQ ID NO: 111403 - DNA, 75 bp, synthetic construct
  source 1..75: mol_type = other DNA
acccttaccatccgggtgttgtgcacgatacagagcatctgcactgttctgtacgcgatattctgctcacacctc

SEQ ID NO: 111404 - DNA, 75 bp, synthetic construct
  source 1..75: mol_type = other DNA
cgtgattgcgctgacacgatgggaaccccgcattgccctggacgccatcgacgttgtctggaaagcgggaggccg

SEQ ID NO: 111405 - DNA, 75 bp, synthetic construct
  source 1..75: mol_type = other DNA
cccgaaactgcggcatgttgcggcgcgtacggaaggcgcgacgatttttggctatcaggtgatggatccagaacg

SEQ ID NO: 111406 - DNA, 75 bp, synthetic construct
  source 1..75: mol_type = other DNA
gaatctcgactacaaatggtttgtggtgccgtcgctgatcgccatgatcaccactattggcgtaatgatcgtcac

SEQ ID NO: 111407 - DNA, 75 bp, synthetic construct
  source 1..75: mol_type = other DNA
atccgctggcgatgttactgctgatggtggcggcaatctgcttaagctctgttggcggtttgtctattgcgatgg

SEQ ID NO: 111408 - DNA, 75 bp, synthetic construct
  source 1..75: mol_type = other DNA
agtgatccatcttattcatggtttgtttctgaatatgttgatattccggccgtaaaagttacggatttctgggaa

SEQ ID NO: 111409 - DNA, 75 bp, synthetic construct
  source 1..75: mol_type = other DNA
tgccctttattctctatgccatccatgatcgtagaggcaaagcgaataccggtgtaacactggagccaattaaca

SEQ ID NO: 111410 - DNA, 75 bp, synthetic construct
  source 1..75: mol_type = other DNA
aattgttcttttgcagatgttttagtttctaaaatactgccacaaatacagtattcagaagttattcatgttaat

SEQ ID NO: 111411 - DNA, 75 bp, synthetic construct
  source 1..75: mol_type = other DNA
atcttatttatggtttgtttctgaatatgttaatattccggatgtaaaagttacggatttttgggaagatgaaaa

SEQ ID NO: 111412 - DNA, 75 bp, synthetic construct
  source 1..75: mol_type = other DNA
agttgttcttttcctgatgtgttaatttccggaatactgccacaaatacagaaatcagaagttattcgtgctaat

SEQ ID NO: 111413 - DNA, 75 bp, synthetic construct
  source 1..75: mol_type = other DNA
ggcaccaacggacaggcggggccgcagctgatgaaggcggtgtatgacatggcccgcaagggggcgcaggatgag

SEQ ID NO: 111414 - DNA, 75 bp, synthetic construct
  source 1..75: mol_type = other DNA
atgtttcatcgcttatggacattaatccgcaaagagttgcagtcattgctgcgcgaaccgcagacgcgggcgatt

SEQ ID NO: 111415 - DNA, 75 bp, synthetic construct
  source 1..75: mol_type = other DNA
ttttgcccgtgccagcgcctttacccatgtgttgctgctgaaaagtccgcaggagatccgcccaaccatcgacac

SEQ ID NO: 111416 - DNA, 75 bp, synthetic construct
  source 1..75: mol_type = other DNA
ttatgacgtagcccgtaaggcggcaatggatgttgtgaccgggcagatgcgtgatggtggtctgttctccggagg

SEQ ID NO: 111417 - DNA, 75 bp, synthetic construct
  source 1..75: mol_type = other DNA
ggtatcgctgttcttccggctgatacgtacggcctgccgtcagcgttttgaggggcgggaaccatgtcaaagctg

SEQ ID NO: 111418 - DNA, 75 bp, synthetic construct
  source 1..75: mol_type = other DNA
caaaacatagctgggagaaaagtggctggatttccagactgcctagaaatataacaatatgtccagcagtacagg

SEQ ID NO: 111419 - DNA, 75 bp, synthetic construct
  source 1..75: mol_type = other DNA
gccagttaaattcagataaacacaattctagtcattctgaaatgcagggtaaaatatataaaaacattattggtt

SEQ ID NO: 111420 - DNA, 75 bp, synthetic construct
  source 1..75: mol_type = other DNA
ccgatagtgagatactcgaaaccgtcgctggtgagatgccctggtatgacctagattctacgtcagtacttcaaa

SEQ ID NO: 111421 - DNA, 75 bp, synthetic construct
  source 1..75: mol_type = other DNA
ggccccaactgaccggcaaagcaacgttgcgcccgggacagtggagtaacgacgtacctgcgttgcgcgaaatat

SEQ ID NO: 111422 - DNA, 75 bp, synthetic construct
  source 1..75: mol_type = other DNA
gcaacttctgatgggatttcgtaaatccggcaccagtgacattgttgatatcaaacaatgccctattttagtgcc

SEQ ID NO: 111423 - DNA, 75 bp, synthetic construct
  source 1..75: mol_type = other DNA
atgttcatcagagcttatttaagggcgtcaacagaagatcagtttgcagatcgggcaaaagagatgctggaacag

SEQ ID NO: 111424 - DNA, 75 bp, synthetic construct
  source 1..75: mol_type = other DNA
gcactacgcaaaggccaggcttcagcattttattatggcgatcccctgggcgagatgcgtctggtgagcagagtc

SEQ ID NO: 111425 - DNA, 75 bp, synthetic construct
  source 1..75: mol_type = other DNA
ccccgtcgcatcaacactgacaaggctcccacctatggacgcgcgctggcgttgctgaaatgcgagggccagtgt

SEQ ID NO: 111426 - DNA, 75 bp, synthetic construct
  source 1..75: mol_type = other DNA
acctgtaccgtgccgttgacagcagaggacgcaccatcgatttttatctctcttcacgccgtaacagcaaagcgg

SEQ ID NO: 111427 - DNA, 75 bp, synthetic construct
  source 1..75: mol_type = other DNA
ggcgtcgctgtttttccggctgatacgtacggcctgccgtcagcgtcttgaggggcgggaactatgtcaaagctg

SEQ ID NO: 111428 - DNA, 75 bp, synthetic construct
  source 1..75: mol_type = other DNA
gccgagttcaaatgcgtataaatcgtcgcggaccacaatgttactgtctacgccggatggtcgtcaggcactgca

SEQ ID NO: 111429 - DNA, 75 bp, synthetic construct
  source 1..75: mol_type = other DNA
caggaggtaaccctcagagtatcaccaagtgaaggcgtgacccccagtaataacgctatatatactaccaaccac

SEQ ID NO: 111430 - DNA, 75 bp, synthetic construct
  source 1..75: mol_type = other DNA
acagcaaagaagcaattgatccgtggcaagttgactggtcaacgatcacggcctcgaatttgccgttccgcttcc

SEQ ID NO: 111431 - DNA, 75 bp, synthetic construct
  source 1..75: mol_type = other DNA
acagcgcagcactcagaatgcaagctctggctatccttatctttctcaggtgaataacgttgaccctcaggccat

SEQ ID NO: 111432 - DNA, 75 bp, synthetic construct
  source 1..75: mol_type = other DNA
aagcaaacgacgtctcgtagtaaacctgcgcctgccgttcgcgccgcctacgataatgaactggtggaagccgtt

SEQ ID NO: 111433 - DNA, 75 bp, synthetic construct
  source 1..75: mol_type = other DNA
cttagtaaacctaagccaactgtacgtgccgcctacgataatgagctggttgaagcggttaaacgttttcaggca

SEQ ID NO: 111434 - DNA, 75 bp, synthetic construct
  source 1..75: mol_type = other DNA
tgagcatccgtgagactgcagaagcaacaggctacagtacttcgcaggtttgccgcattcaattgatttataaag

SEQ ID NO: 111435 - DNA, 75 bp, synthetic construct
  source 1..75: mol_type = other DNA
gccagcaaatcaacatcaataccttagacgtcacgcaaagtgtgattcttgaggcgctgtttgacccgtggttaa

SEQ ID NO: 111436 - DNA, 75 bp, synthetic construct
  source 1..75: mol_type = other DNA
aggtgatgcgtgcactacgcaaaggccaggcctcagcattttattatggtgatcccctgggcgaaatgcgcctgg

SEQ ID NO: 111437 - DNA, 75 bp, synthetic construct
  source 1..75: mol_type = other DNA
gttaaaaagattgttatatactttctttggtatgtctgactctgttaatctttgggaacaaaatgctaaagtaag

SEQ ID NO: 111438 - DNA, 75 bp, synthetic construct
  source 1..75: mol_type = other DNA
tctggtggtgatggtggcgacgtttatctcgctggttgccgccgggtggatttttaccgcgctgatttatctcgt

SEQ ID NO: 111439 - DNA, 75 bp, synthetic construct
  source 1..75: mol_type = other DNA
aaggcggtaaaaaagggaatatcacgctgtacagctttgacgggcgttacaagattcagcgcgccatgcaggacc

SEQ ID NO: 111440 - DNA, 75 bp, synthetic construct
  source 1..75: mol_type = other DNA
tgctctgaaggcggtgtatgacatggcccgtaaggcggcaatggatgttgtgaccgggcagatgcgtgatggtgg

SEQ ID NO: 111441 - DNA, 75 bp, synthetic construct
  source 1..75: mol_type = other DNA
tgaaaaagcagatagaacaacacgagttgcggattgtcagtcttgatgtgcccacatcatggcaggctctgtcag

SEQ ID NO: 111442 - DNA, 75 bp, synthetic construct
  source 1..75: mol_type = other DNA
gtgattgctgcctccgcctcactgcgtgaactgaaactgcgtgcgtttggtgatatccaggcatttattgacctg

SEQ ID NO: 111443 - DNA, 75 bp, synthetic construct
  source 1..75: mol_type = other DNA
ggcagggccgcagctgatgaaagcggtgtatgagatggcccgcaagggggcacaggatgaactccggctgcagtt

SEQ ID NO: 111444 - DNA, 75 bp, synthetic construct
  source 1..75: mol_type = other DNA
catggcaaactgaaacggataatcgacgccacgctgggatttaaatccatgaagacggcttacgccaccatcaaa

SEQ ID NO: 111445 - DNA, 75 bp, synthetic construct
  source 1..75: mol_type = other DNA
ttcagcgtgctgacggagcgcgagctggatgttctgcacgagctggcacaggggctgtcaaataaacagattgcc

SEQ ID NO: 111446 - DNA, 75 bp, synthetic construct
  source 1..75: mol_type = other DNA
caccgtttctttgcgctctacgctgatgtccaccttttcaaccagctcacactggtactgcaacccacagggaaa

SEQ ID NO: 111447 - DNA, 75 bp, synthetic construct
  source 1..75: mol_type = other DNA
tcagcttccccgtcgtgcgttgcagagtacgctgcttgatcggtgtgaacaggtactgcagaccccggtcagtgt

SEQ ID NO: 111448 - DNA, 75 bp, synthetic construct
  source 1..75: mol_type = other DNA
ggtgatgtggaaaaggccagccgcgtatttgtacgaaatgaattaatcccccttcaagaaaggattaaagaactc

SEQ ID NO: 111449 - DNA, 75 bp, synthetic construct
  source 1..75: mol_type = other DNA
gtcagactataagagttggcgttgtttctgatattgatgatggtgatgttacagcaagagttactttcgatgatc

SEQ ID NO: 111450 - DNA, 75 bp, synthetic construct
  source 1..75: mol_type = other DNA
ttgtttgtaatgaatgcggggccgattatccgcgctggcaggggcagtgcagtgcctgccatgcctggaacacca

SEQ ID NO: 111451 - DNA, 75 bp, synthetic construct
  source 1..75: mol_type = other DNA
gcgacgccgctctctgtcgccagcgggttacaacgcattgggcgcgccggacaccaggttggaggcatctctaaa

SEQ ID NO: 111452 - DNA, 75 bp, synthetic construct
  source 1..75: mol_type = other DNA
caacaacggctgcgcgccagtcagttgctggaaatcgctcagggatatccggattttccggtcattctcgaaacc

SEQ ID NO: 111453 - DNA, 75 bp, synthetic construct
  source 1..75: mol_type = other DNA
caaaatggcgatttgagaagggcaagccgcgtaaaggtatgaagaaaacatttatctttagtccttctgcgccct

SEQ ID NO: 111454 - DNA, 75 bp, synthetic construct
  source 1..75: mol_type = other DNA
taacaataatgtcggcggcgcagcgccagggaaaagctatcgtagctacgggcaactggaagccgagtaccgcct

SEQ ID NO: 111455 - DNA, 75 bp, synthetic construct
  source 1..75: mol_type = other DNA
ggtgaccgaaaccagtgccgatttagcgttactgctggcgatggtttccagcctgcgcgacaggccgctgccgca

SEQ ID NO: 111456 - DNA, 75 bp, synthetic construct
  source 1..75: mol_type = other DNA
atttcaacctgccgctgttggtgggcatgtcacgaaaatcgatgattggacagttgctgaacgtaggaccgtccg

SEQ ID NO: 111457 - DNA, 75 bp, synthetic construct
  source 1..75: mol_type = other DNA
tctcggcaccgtggtgccggggaatgacaacttctttgccgcgcttaatgcggcggtagcctctgacggtacgtt

SEQ ID NO: 111458 - DNA, 75 bp, synthetic construct
  source 1..75: mol_type = other DNA
ctggaagcggctgcagaaactggtttaccggtttgcctgatgcatatgcagggaaatccaaagaccatgcaggaa

SEQ ID NO: 111459 - DNA, 75 bp, synthetic construct
  source 1..75: mol_type = other DNA
ccttcaggttctcagcagcgtacgtggttattatattggtactcagtgtgatgagggaccggtgtcccgtgaatc

SEQ ID NO: 111460 - DNA, 75 bp, synthetic construct
  source 1..75: mol_type = other DNA
cgattgctcaacgatttgaagtctggatctcggttgatacatctaaaccggaagttattcgtgaatcagcgcgag

SEQ ID NO: 111461 - DNA, 75 bp, synthetic construct
  source 1..75: mol_type = other DNA
cccgccgtggggtggacctcgatacatactggtatgtgcaatatggattcaccacacagccctatgaattcacgc

SEQ ID NO: 111462 - DNA, 75 bp, synthetic construct
  source 1..75: mol_type = other DNA
cgattcttcttgatgagctgaaaagtgcccgggagcaacaaaaaagcgtgatgaacgtgctgatggttccgtccc

SEQ ID NO: 111463 - DNA, 75 bp, synthetic construct
  source 1..75: mol_type = other DNA
ggcgtaacaacgtttcacatggtgatacccgcttaatttcccagcgcattttttggcagattgttttccctgcaa

SEQ ID NO: 111464 - DNA, 75 bp, synthetic construct
  source 1..75: mol_type = other DNA
ttgacggacttcgggggaaaaatgagtatttttagtcatcctgtttacctctttctcaggaagtttagtctccag

SEQ ID NO: 111465 - DNA, 75 bp, synthetic construct
  source 1..75: mol_type = other DNA
cagagcggcaaatggggtgaaatcgccccgtttaccgtcacgcctgaacttattgctgtggcaaaggctgccaaa

SEQ ID NO: 111466 - DNA, 75 bp, synthetic construct
  source 1..75: mol_type = other DNA
taaatgaaaaaagcacgattttcagcaccaattataccttgtcattattgctacccctgatgatgtggggagcca

SEQ ID NO: 111467 - DNA, 75 bp, synthetic construct
  source 1..75: mol_type = other DNA
aagcaatttcgtttcttttgggatggaatgccgatgcaaccgcagattgcgtcagttactgctatgtgcgctcgc

SEQ ID NO: 111468 - DNA, 75 bp, synthetic construct
  source 1..75: mol_type = other DNA
tatggcatcatgctgcggattcaatacaagcaaaaactttctcactggctgtcacccttgctggaaccgggtgaa

SEQ ID NO: 111469 - DNA, 75 bp, synthetic construct
  source 1..75: mol_type = other DNA
aaatacgcgataaatggtgggggctgccgctaatcctgccttctttgattttgcctgttttcgcccatataaata

SEQ ID NO: 111470 - DNA, 75 bp, synthetic construct
  source 1..75: mol_type = other DNA
cgtaaaataaagcgactggaaaaccagctttcacctgcgactggcgtggcggtagcgcctgattcgtcagtagcg

SEQ ID NO: 111471 - DNA, 75 bp, synthetic construct
  source 1..75: mol_type = other DNA
cgatgcggcgcaatatgtccgccaggatattcaggcgtggacggcagattatcgcgtaagctggcatcagaaggt

SEQ ID NO: 111472 - DNA, 75 bp, synthetic construct
  source 1..75: mol_type = other DNA
accggggtattgaaatcagcatctgcatccctcgtcatgccagccatcaatttcagttgcttatgtccttactaa

SEQ ID NO: 111473 - DNA, 75 bp, synthetic construct
  source 1..75: mol_type = other DNA
tggtgttagcgatttttgtgatttctgtcacgttaggtgcgcagaatgatcagcaggtaacgtttaattatctgt

SEQ ID NO: 111474 - DNA, 75 bp, synthetic construct
  source 1..75: mol_type = other DNA
gatggaacaggaagactcattgcagtgtaccggattgacacatcccggcaaattacactgccgaaagatgccagg

SEQ ID NO: 111475 - DNA, 75 bp, synthetic construct
  source 1..75: mol_type = other DNA
gatgaacgtgctgatggttccgtccctctgaaactgtctgaaccgccccgggaatcctggagactaaactccctg

SEQ ID NO: 111476 - DNA, 75 bp, synthetic construct
  source 1..75: mol_type = other DNA
gccatcaatttcagttgcttatgtccttactaaaaataagatgtgatacccagggtgacgatgtcgctcatacgt

SEQ ID NO: 111477 - DNA, 75 bp, synthetic construct
  source 1..75: mol_type = other DNA
gaaaacagaaacggtttcaaaaacattagctgatgactttcatatcccggcaaccagtatgaacccggtcatttt

SEQ ID NO: 111478 - DNA, 75 bp, synthetic construct
  source 1..75: mol_type = other DNA
gataccggcaccaagatgatccacatcggtaaaaacaccaaatcgaccattatctcgaaagggatctctgccgga

SEQ ID NO: 111479 - DNA, 75 bp, synthetic construct
  source 1..75: mol_type = other DNA
attgagcgccgtgcttatgaaattgctctggcatcgctggaagcagagcctgttctgtatcagtcctgcactcgc

SEQ ID NO: 111480 - DNA, 75 bp, synthetic construct
  source 1..75: mol_type = other DNA
ccaccaacatgaatccggtgatctttgcgggcgataaaccagggcaaaatacaaaatcgcaatggctgcaggata

SEQ ID NO: 111481 - DNA, 75 bp, synthetic construct
  source 1..75: mol_type = other DNA
tctttgtgacgggccgtagtccgacgaaaacagaaacggtttcaaaaacgttggccgatgatttccatattccgg

SEQ ID NO: 111482 - DNA, 75 bp, synthetic construct
  source 1..75: mol_type = other DNA
tgcgggaaggcaaagaggtggcggtggatgccattttcgattctgtttcggttgccaccacttatcgcgaaaaac

SEQ ID NO: 111483 - DNA, 75 bp, synthetic construct
  source 1..75: mol_type = other DNA
atatccggattttccggtcattctcgaaaccctacgcgaatgtctgcaagatgtttatgatcttcccgcactgga

SEQ ID NO: 111484 - DNA, 75 bp, synthetic construct
  source 1..75: mol_type = other DNA
tgcgtgattctggcaaactggacaatacggtggtgattatcactgccgggcggggtattccgctgagcgaagagg

SEQ ID NO: 111485 - DNA, 75 bp, synthetic construct
  source 1..75: mol_type = other DNA
tcgccagtgatgacggcattgttgcgcgcattcctgacactgatggtaaattgcccgacgccgcgatttttttgt

SEQ ID NO: 111486 - DNA, 75 bp, synthetic construct
  source 1..75: mol_type = other DNA
cgtttctggcggcaaattgttactctatctggcgcaaggtggcaaaaaaatgctggtctggcaggaaaaagagga

SEQ ID NO: 111487 - DNA, 75 bp, synthetic construct
  source 1..75: mol_type = other DNA
acaccggcggtattctcaacttcgtcaccaagcgtgctttgtgcgaaggcgaaaacagcaaaatgtcatggacgc

SEQ ID NO: 111488 - DNA, 75 bp, synthetic construct
  source 1..75: mol_type = other DNA
ggttggataattcctggtgcgtcgtggaaaccgtcacactggatgccgctaccagaaccgccgcaggaggcaaaa

SEQ ID NO: 111489 - DNA, 75 bp, synthetic construct
  source 1..75: mol_type = other DNA
ccgatagcgccggaggccattgaatacgcaattgaatacatccgcagtatcgcttttcacatcgatgaagacgat

SEQ ID NO: 111490 - DNA, 75 bp, synthetic construct
  source 1..75: mol_type = other DNA
cagggagaaacttattgcgctgaacgatgccatgatggtggccatggtgacggagggctttaaaatccacgaacg

SEQ ID NO: 111491 - DNA, 75 bp, synthetic construct
  source 1..75: mol_type = other DNA
cgaatattttgataccgagcagcaggcagaagccgcgctgtctgcccggttatggacacaaaaactaaatccctg

SEQ ID NO: 111492 - DNA, 75 bp, synthetic construct
  source 1..75: mol_type = other DNA
ttggcgctcacattattaacgatatccgctccctttccgaacctggcgctctggaggcagctgcagaaaccggtt

SEQ ID NO: 111493 - DNA, 75 bp, synthetic construct
  source 1..75: mol_type = other DNA
gagcgatgccgataatcagcaggtgaaactgtcgatgccggaactggaagaactggcggcagcaatggtgcaggc

SEQ ID NO: 111494 - DNA, 75 bp, synthetic construct
  source 1..75: mol_type = other DNA
agtggcgctctctgccaacgatccggctaatgtgtggggaaatcttctgccctggcctgcacatccggcaacgct

SEQ ID NO: 111495 - DNA, 75 bp, synthetic construct
  source 1..75: mol_type = other DNA
caattgcgcaacgattcgaagtctggatctctgtggatacctccaaaccggaagttatccgtgagtcggcgaaag

SEQ ID NO: 111496 - DNA, 75 bp, synthetic construct
  source 1..75: mol_type = other DNA
cagagcggcaaatggggtgaaattgccccgtttaccgtcacgcctgaacttatcgcagcggcaaaggctgccaaa

SEQ ID NO: 111497 - DNA, 75 bp, synthetic construct
  source 1..75: mol_type = other DNA
aacgatgagatttatcgctgtcagcgggagatgaaagaacaactttctctgttgcccacactggacgaggtgaga

SEQ ID NO: 111498 - DNA, 75 bp, synthetic construct
  source 1..75: mol_type = other DNA
gggaaatccaaagaccatgcaggaagccccgaagtatgacgatgtctttgcagaagtgaatcgctactttattga

SEQ ID NO: 111499 - DNA, 75 bp, synthetic construct
  source 1..75: mol_type = other DNA
atccgggggaattactcgacccgcaggtcattcgccaggtggaagaagagttgcaacgactggctcctggcagaa

SEQ ID NO: 111500 - DNA, 75 bp, synthetic construct
  source 1..75: mol_type = other DNA
gatgaaagaagaagtggcagggctgaccgcactgccggatattcgtgcgtatcctgttggctggccggagggtga

SEQ ID NO: 111501 - DNA, 75 bp, synthetic construct
  source 1..75: mol_type = other DNA
gcggaatttatgtaccagagcgacgccccgctggcagagcgccgggcatccgtactgtcgctggacagcgagtta

SEQ ID NO: 111502 - DNA, 75 bp, synthetic construct
  source 1..75: mol_type = other DNA
cgcccctgccggacgtgttttcaccggcgacccgcgactggtttcttcgcgcctttaaacagccgaccgctgtcc

SEQ ID NO: 111503 - DNA, 75 bp, synthetic construct
  source 1..75: mol_type = other DNA
agcggctcgatgcgctgctccacacctcagcacagcgaattggcctttctgccactgtgcgctcagccagcgatg

SEQ ID NO: 111504 - DNA, 75 bp, synthetic construct
  source 1..75: mol_type = other DNA
aggcggcgcccggctcgccccgacgcttgctgagcaggttatcgccacctttgactgtaccctgcaacaggtttt

SEQ ID NO: 111505 - DNA, 75 bp, synthetic construct
  source 1..75: mol_type = other DNA
atgatgcagattaaagagattaaaaaccctcgttacctggaatctggcgcgattgactgcgaggtgctttttgaa

SEQ ID NO: 111506 - DNA, 75 bp, synthetic construct
  source 1..75: mol_type = other DNA
tatagcattaggcatttttgttcgtaagtatgcggagcttggcctttatgaaacgctttcgttaacagctaattt

SEQ ID NO: 111507 - DNA, 75 bp, synthetic construct
  source 1..75: mol_type = other DNA
ccggttatgacgatctcaacaaaaaaaccgctggcttgcagccgtcggatttgatcatcgtcgccgcgcgtccgt

SEQ ID NO: 111508 - DNA, 75 bp, synthetic construct
  source 1..75: mol_type = other DNA
ggggaactacgcgttgtttcaggcgaaacgttgctttcttaccgaatgccgcaggtgttgcagcgttttcggcaa

SEQ ID NO: 111509 - DNA, 75 bp, synthetic construct
  source 1..75: mol_type = other DNA
tcctgaaacggctgccactggggggattattgaatcagaactggttgctattcctgctatgcaaaaacggctgga

SEQ ID NO: 111510 - DNA, 75 bp, synthetic construct
  source 1..75: mol_type = other DNA
cggtacggaggtaaaagaagcctctacatctgtgagtggtatgaatacgcgccttaacaccacgacgaagcgtct

SEQ ID NO: 111511 - DNA, 75 bp, synthetic construct
  source 1..75: mol_type = other DNA
ccccgacagttaaggggagcaacggcgcagtaatcaataacctcgacaaacttctcgaaaaagcgcgcgacaccg

SEQ ID NO: 111512 - DNA, 75 bp, synthetic construct
  source 1..75: mol_type = other DNA
tggatgttctgcacgagctggcacaggggctgtcaaataaacagattgcctcggtgttgaatatttccgagcaga

SEQ ID NO: 111513 - DNA, 75 bp, synthetic construct
  source 1..75: mol_type = other DNA
gctaaaagcgctggcaaaagagctgaacgtgccggtggtggcactctcgcagttgaaccgctctctggaacaacg

SEQ ID NO: 111514 - DNA, 75 bp, synthetic construct
  source 1..75: mol_type = other DNA
gtgttttctgctgcgttaatccgccgtgcactgattgttgcagcggtctgtctggctgttgcgatggggctttaa

SEQ ID NO: 111515 - DNA, 75 bp, synthetic construct
  source 1..75: mol_type = other DNA
ctgctcctcatcatcgcgctggtctcaccccagcagttgccggtggtggtgtacaagctctctctcatctccctc

SEQ ID NO: 111516 - DNA, 75 bp, synthetic construct
  source 1..75: mol_type = other DNA
tgctacggctacttcaggtattaatcagcctgaagtgacttccgcgctggatttacaactggttaaatccacggc

SEQ ID NO: 111517 - DNA, 75 bp, synthetic construct
  source 1..75: mol_type = other DNA
ggcatattcgcttcaaaaactcaacgggcgagtggtggctggtggtttcgccgtggggaagactccggctttgtc

SEQ ID NO: 111518 - DNA, 75 bp, synthetic construct
  source 1..75: mol_type = other DNA
tcgtggaatatgagcaagattatggtgttgctgtcgaggaaggacgtaaagcatcgcagtctgacccgaactgtt

SEQ ID NO: 111519 - DNA, 75 bp, synthetic construct
  source 1..75: mol_type = other DNA
tgccgctggtcccggcagcaggtctgcccgcagacggcacttctgccactgatctggcggtggagctgaacggca

SEQ ID NO: 111520 - DNA, 75 bp, synthetic construct
  source 1..75: mol_type = other DNA
gttggtctttgtgccacgctggcccgacgtagaaatgaacgacctgacgccttcgctcactttctttggcctgcg

SEQ ID NO: 111521 - DNA, 75 bp, synthetic construct
  source 1..75: mol_type = other DNA
cgcgtaccgcaacgcttcagcagaaagcagccaattacatgcagagagtaaaagcactgaaagtggctggctacc

SEQ ID NO: 111522 - DNA, 75 bp, synthetic construct
  source 1..75: mol_type = other DNA
gggatttcgtttgccaattctttaggctcggggttaacgacggcaatcgatgggttgcgtcagcttgctcaatgg

SEQ ID NO: 111523 - DNA, 75 bp, synthetic construct
  source 1..75: mol_type = other DNA
ctcttgtcgattccgttgctcgttttggtggggatagcgaacttctgaagcgtgcatccattgctgttcagcaga

SEQ ID NO: 111524 - DNA, 75 bp, synthetic construct
  source 1..75: mol_type = other DNA
caacccgtgacgccgccacacagcatatccgagaccgtttaccggcgacacctgatgccttgactcagccacagc

SEQ ID NO: 111525 - DNA, 75 bp, synthetic construct
  source 1..75: mol_type = other DNA
cagcagcgccgtgatttatggaaagcggaaaatcagtatgtggtcctgaaagaggccgccacgaaacggcagtta

SEQ ID NO: 111526 - DNA, 75 bp, synthetic construct
  source 1..75: mol_type = other DNA
tgcggccgaaatggaacgtatgcgggtgatgcttcgagggttgaataaggagaagtccaacccgggccaggctgc

SEQ ID NO: 111527 - DNA, 75 bp, synthetic construct
  source 1..75: mol_type = other DNA
gacatggcgcaaaatgcgccgttcgcgatgcaggcgttaacagattccttcgtgaagtttcgttctgctggctta

SEQ ID NO: 111528 - DNA, 75 bp, synthetic construct
  source 1..75: mol_type = other DNA
ctcttctgctggcagaacaggaccgcctccgggcagaacaacgcgcggcggaagttgtcgtactgccgctgatcc

SEQ ID NO: 111529 - DNA, 75 bp, synthetic construct
  source 1..75: mol_type = other DNA
tggcttgacattcagcaaaaagtttatctgagaattgttgatattgtgcataatcacaaagcagattttgcatac

SEQ ID NO: 111530 - DNA, 75 bp, synthetic construct
  source 1..75: mol_type = other DNA
tatctttactgaaatggcgcgtttgcaggaaagcggtagtcctatcgatctgattactcttgcggaatcgctgga

SEQ ID NO: 111531 - DNA, 75 bp, synthetic construct
  source 1..75: mol_type = other DNA
cacgatggtgtaactggggtaaacactggctatgacgatctcaacaaaaaaaccgcgggcttgcagccgtcggac

SEQ ID NO: 111532 - DNA, 75 bp, synthetic construct
  source 1..75: mol_type = other DNA
aagaatgcgaccgagaagcaaatcgcgactcttaatgatcagcttgaaaaagccaaaaaggatggaaataccgag

SEQ ID NO: 111533 - DNA, 75 bp, synthetic construct
  source 1..75: mol_type = other DNA
caggaggctctggagaagatccagaaaatcaatgatgacggttcactttcagatgacgaaaagaacaagctattg

SEQ ID NO: 111534 - DNA, 75 bp, synthetic construct
  source 1..75: mol_type = other DNA
ctataaactcaaatttatcaccccaggcgttatcgattttatctgtacgtccctgattgcggttattctgacgat

SEQ ID NO: 111535 - DNA, 75 bp, synthetic construct
  source 1..75: mol_type = other DNA
atctgagaattgttgatattgtgcataatcacaaagcagattttgcataccccagtacaactctttacttttcat

SEQ ID NO: 111536 - DNA, 75 bp, synthetic construct
  source 1..75: mol_type = other DNA
tttttttacaacaagccccattcggcaacaccacctatcttggttggatctggagtggctttcaggtgacgatcg

SEQ ID NO: 111537 - DNA, 75 bp, synthetic construct
  source 1..75: mol_type = other DNA
tatcgtcccgccgatgacctccgagatgatgaacctggtgaaaaactccgccatcgcctcgactatcggtctggt

SEQ ID NO: 111538 - DNA, 75 bp, synthetic construct
  source 1..75: mol_type = other DNA
atcagcatccacagctatcaaaattacattcccatttatcctggctataccacgcagctgaccataacctcctcc

SEQ ID NO: 111539 - DNA, 75 bp, synthetic construct
  source 1..75: mol_type = other DNA
gtgatcttgtcgtattgcctgaatatcgtgatgaccctggcttggttgtgctgaataaggggagctacgatcagc

SEQ ID NO: 111540 - DNA, 75 bp, synthetic construct
  source 1..75: mol_type = other DNA
gtgacgccgataatcaacaggtgaaactgtcaatgccggaactggaagaactggcgacagcaatggcgcaggctc

SEQ ID NO: 111541 - DNA, 75 bp, synthetic construct
  source 1..75: mol_type = other DNA
aaagaagagaaagatcatgcgcggttcagccaaaggcttcaccagcagatagttctcaagcggataatggggtgc

SEQ ID NO: 111542 - DNA, 75 bp, synthetic construct
  source 1..75: mol_type = other DNA
atgaaaagaaatcttccgttaattattttgttgtcttctctggttatgggctgtacgcaacataaaacagatatg

SEQ ID NO: 111543 - DNA, 75 bp, synthetic construct
  source 1..75: mol_type = other DNA
tggtgcggttgactgcgaggtgttatttgaaggtgaaacggaattcgtcccgtataccgccatgcaggacgatac

SEQ ID NO: 111544 - DNA, 75 bp, synthetic construct
  source 1..75: mol_type = other DNA
tcgttcagagccgcaccatctgtttgatgagcaggttgtaaaggcgatggcaaaatggcgatttgagaaggacag

SEQ ID NO: 111545 - DNA, 75 bp, synthetic construct
  source 1..75: mol_type = other DNA
ccaacgccccggaaaatatgcagcgtcgcggagcaatgtatttgcaacgcgaattgaaagataaagtcgcgatga

SEQ ID NO: 111546 - DNA, 75 bp, synthetic construct
  source 1..75: mol_type = other DNA
gaagagttacagagcggcaagtgggggaaaatcgccccattcaccgtcacgcctgaacttatcgcagcggcaaaa

SEQ ID NO: 111547 - DNA, 75 bp, synthetic construct
  source 1..75: mol_type = other DNA
caatggcccgtctttatcctgtggtaatggctgcaaaatctgatacggcacgaaccgcccttgcatggggtgatg

SEQ ID NO: 111548 - DNA, 75 bp, synthetic construct
  source 1..75: mol_type = other DNA
actttccatcgtgaccaataccccggaaaatatgcaacgtcgtggggcaatgtatttacaacgggaattaaaaga

SEQ ID NO: 111549 - DNA, 75 bp, synthetic construct
  source 1..75: mol_type = other DNA
cttatcgcagcggcaaaagatgccaaaaagatggaaatcgaggcgtggcgagcagaacaggaggcgaaggcgttc

SEQ ID NO: 111550 - DNA, 75 bp, synthetic construct
  source 1..75: mol_type = other DNA
caacaccacctatcttggttggatctggagtggttttcaggtgacgatcgctttgtcgatctgcgcctggattat

SEQ ID NO: 111551 - DNA, 75 bp, synthetic construct
  source 1..75: mol_type = other DNA
gatttcttccgtaccgcctcaaccattggtgagcgtgatggcacgcaggttgagatgatcctgtttgccggattt

SEQ ID NO: 111552 - DNA, 75 bp, synthetic construct
  source 1..75: mol_type = other DNA
atgtctatagactggaactggggtatttttttgcaacaagccccattcggcaacaccacctatctcggctggatc

SEQ ID NO: 111553 - DNA, 75 bp, synthetic construct
  source 1..75: mol_type = other DNA
gaccggagacacgctatatttcgacaattggtctggcgcaaatcgccgcaaaccaatttttacatgtttaccgcc

SEQ ID NO: 111554 - DNA, 75 bp, synthetic construct
  source 1..75: mol_type = other DNA
gcggctgtgctgggctactggcttgaccgttcgcttttccccaaagcccgccccggtcagtacctgaagcacgat

SEQ ID NO: 111555 - DNA, 75 bp, synthetic construct
  source 1..75: mol_type = other DNA
aagtttacgaggcgctccgtgaagccgccacaattaaaggtgtaagtattccggccctggttaactccattgtca

SEQ ID NO: 111556 - DNA, 75 bp, synthetic construct
  source 1..75: mol_type = other DNA
gagtatgcattggcccttaattgttcacaagttaattgccttgcaggaaaacatccaggtggttattcgcatgaa

SEQ ID NO: 111557 - DNA, 75 bp, synthetic construct
  source 1..75: mol_type = other DNA
caacaggatcgtaacagtgacgacgccgacctttccggtgtcgtcgatgtggggctacctggcgaatcgggtgcg

SEQ ID NO: 111558 - DNA, 75 bp, synthetic construct
  source 1..75: mol_type = other DNA
caatacggcctgggccgggcatattcgtctcaaaaattcatcaggcgaatggtggctggtggtgtccgcatgggg

SEQ ID NO: 111559 - DNA, 75 bp, synthetic construct
  source 1..75: mol_type = other DNA
caacaccacctatctcggctggatctggagcggctttcaggtcactatcgctctgtcgatctgcgcctggattat

SEQ ID NO: 111560 - DNA, 75 bp, synthetic construct
  source 1..75: mol_type = other DNA
gtatgtcgaactgttccgcaacgtgccgttgattgtgcaattctttacctggtatctggtgatcccggagctgct

SEQ ID NO: 111561 - DNA, 75 bp, synthetic construct
  source 1..75: mol_type = other DNA
tgagatgatcctgtttgccggatttgtttatttcgttattagccttagcgcgtcgttgttggtcagctacttgaa

SEQ ID NO: 111562 - DNA, 75 bp, synthetic construct
  source 1..75: mol_type = other DNA
ctatcgcgtcaaccatcggtctggtggatatggcggcgcaggccggtaaattgctcgattactcggcccacgcct

SEQ ID NO: 111563 - DNA, 75 bp, synthetic construct
  source 1..75: mol_type = other DNA
gccggaaaaaatcggcatgtggtttaaggcagaactagaccccaatattcagtttttcctctcctccatgctctg

SEQ ID NO: 111564 - DNA, 75 bp, synthetic construct
  source 1..75: mol_type = other DNA
tgaatatgattcatcatatatattgtcatcattaaaatctaatattacgacagcaatatgccatgtacttgatga

SEQ ID NO: 111565 - DNA, 75 bp, synthetic construct
  source 1..75: mol_type = other DNA
gcgccagacgcacgccgtccaaccagtgccatgtcaccaacctgaaagacaacccggtacagattgccgccgatg

SEQ ID NO: 111566 - DNA, 75 bp, synthetic construct
  source 1..75: mol_type = other DNA
ttcagcaacggttcctgtccgaacatgccaaaaccggcatttcccccaaagaatggtgcgaagcgcagggactga

SEQ ID NO: 111567 - DNA, 75 bp, synthetic construct
  source 1..75: mol_type = other DNA
cgtacaggggctgcaaaacggtgcggtcagctgtattggcatgaccggcgcggtgccgtcggggatccgcgcggt

SEQ ID NO: 111568 - DNA, 75 bp, synthetic construct
  source 1..75: mol_type = other DNA
ccctggcgctgttggtcggttcgcagtgcggccgtcccggcgtgttgacgcagtgctcggtggaagaggccaccg

SEQ ID NO: 111569 - DNA, 75 bp, synthetic construct
  source 1..75: mol_type = other DNA
gtctacggcactgaagcggtatttaccgacggcgatgatactccgtggtcaaaggcgttcctcgcctcggcctac

SEQ ID NO: 111570 - DNA, 75 bp, synthetic construct
  source 1..75: mol_type = other DNA
acgaggaggtagaggccgccacctacgcgcacggtagcaacgagatgccgccgcgtaacgtggtggaggatctga

SEQ ID NO: 111571 - DNA, 75 bp, synthetic construct
  source 1..75: mol_type = other DNA
tcaaatcaacggctgccgggcgctaccagcttctttcccgctggtgggatgcataccgtaaacagcttggactga

SEQ ID NO: 111572 - DNA, 75 bp, synthetic construct
  source 1..75: mol_type = other DNA
gattacctgcaaacgtcggccattctggatcgccagtttgaggtggtaagcgccgttaacgacattaatgattat

SEQ ID NO: 111573 - DNA, 75 bp, synthetic construct
  source 1..75: mol_type = other DNA
ggccgctggcctccgatccttctcaacaaatgcgactgatggcaatggcggtggactccggcggtgaagacgggg

SEQ ID NO: 111574 - DNA, 75 bp, synthetic construct
  source 1..75: mol_type = other DNA
aagctttccttgatatggtggcatggtcagagggaacggataacgggcgacaaccgacacgtaaccacggttatg

SEQ ID NO: 111575 - DNA, 75 bp, synthetic construct
  source 1..75: mol_type = other DNA
aaacttgtcacgctaaactcgaaactcaaatcaacagcagccggacgttaccaactcctttcccgttggtgggat

SEQ ID NO: 111576 - DNA, 75 bp, synthetic construct
  source 1..75: mol_type = other DNA
cgtaccgaactacgacaacatgtttgccgggtcgaacttcgacgcggaagacttcgatgattacaacattctgca

SEQ ID NO: 111577 - DNA, 75 bp, synthetic construct
  source 1..75: mol_type = other DNA
tcaaatcaacagccgccgggcgttatcagcttctttcacgctggtgggatgcttaccgtaaacagcttggtttga

SEQ ID NO: 111578 - DNA, 75 bp, synthetic construct
  source 1..75: mol_type = other DNA
tcagcaacctacttcatgcgggcagcagatagccatcaccgtgagggaatattgcagggtgctttgctggtggtt

SEQ ID NO: 111579 - DNA, 75 bp, synthetic construct
  source 1..75: mol_type = other DNA
agcaacgcaaccactgatcaatgctgagccagctgtagccgcccagacggaacaaaatccgcaggtggggcaagt

SEQ ID NO: 111580 - DNA, 75 bp, synthetic construct
  source 1..75: mol_type = other DNA
acgcctgacggcgcaggaagcccaggcggcgaatttaattgatgaagtggtagaaaaagaacaggtggaaagctg

SEQ ID NO: 111581 - DNA, 75 bp, synthetic construct
  source 1..75: mol_type = other DNA
tattaaatcgtggtcagcctattcgccattagatatgggcagaaaatggattaaacgcggtaatgacgtttttaa

SEQ ID NO: 111582 - DNA, 75 bp, synthetic construct
  source 1..75: mol_type = other DNA
tggatagcggggtggcttccgcgccgtttgtgaatgcggtgaatgattacatcaacacgcagggacaccacggcc

SEQ ID NO: 111583 - DNA, 75 bp, synthetic construct
  source 1..75: mol_type = other DNA
ggtcttgagccagcagcgattaatgtttcgctaaacctgccgccagatctctacttgatgcgtagtaccggcatt

SEQ ID NO: 111584 - DNA, 75 bp, synthetic construct
  source 1..75: mol_type = other DNA
agcattgccaaaggatgacgatggatgcacgggcagcaatgccgtgtttggtgtgatcactcacattatcaacga

SEQ ID NO: 111585 - DNA, 75 bp, synthetic construct
  source 1..75: mol_type = other DNA
gaacgtgacggcgaagcccgccagcgccgcgcagggtgtgatccgcttctttaaggaagatgccagagccgttgt

SEQ ID NO: 111586 - DNA, 75 bp, synthetic construct
  source 1..75: mol_type = other DNA
attatgttgagagccgtatttctcttgatcagcagataattagacatccttcagcgacctacttcatgagggcag

SEQ ID NO: 111587 - DNA, 75 bp, synthetic construct
  source 1..75: mol_type = other DNA
cagggaccaggcaccggctatcgcatctctgccgagcgctgggcggaaattaaaaatatcgcgggcgtggttcag

SEQ ID NO: 111588 - DNA, 75 bp, synthetic construct
  source 1..75: mol_type = other DNA
atggggatgagtgcgttcccctcttttatgacgcaggcgacgccagcaacgcaaccactgatcaatgctgagcca

SEQ ID NO: 111589 - DNA, 75 bp, synthetic construct
  source 1..75: mol_type = other DNA
cattcagcgtgacctgaaggttgatggtgggctgcgaccagtacgcgaagaagatgttatcgctatccgcaataa

SEQ ID NO: 111590 - DNA, 75 bp, synthetic construct
  source 1..75: mol_type = other DNA
ctgaaaatcggctggccgtcagtcaatatcatgtcttcatcagattataaatgcgtggcgctgacggattatgac

SEQ ID NO: 111591 - DNA, 75 bp, synthetic construct
  source 1..75: mol_type = other DNA
atacaaaaagcataaagagcagttggaaaaattgtctattgagctggaagctgcaagaaagcgaattgtagaaca

SEQ ID NO: 111592 - DNA, 75 bp, synthetic construct
  source 1..75: mol_type = other DNA
atggcaaacatcgtgttatgtcgcattgacagccgtcttatccacggacaggtggtgacgaagtgggtggggcaa

SEQ ID NO: 111593 - DNA, 75 bp, synthetic construct
  source 1..75: mol_type = other DNA
aagatgcttattttatgagctatgcacaacattatgcaatcttcatatggttgttcaaaaaaaacaatataagat

SEQ ID NO: 111594 - DNA, 75 bp, synthetic construct
  source 1..75: mol_type = other DNA
cattaccgccttgatggcccgacgcgcctgaagtttattcaggatttgagcgagcggaaaacgcgtatcgaatgg

SEQ ID NO: 111595 - DNA, 75 bp, synthetic construct
  source 1..75: mol_type = other DNA
gccacggaaaccgaaggtattaccgcgcttccgggggcaatcgccttactcaatcatttgaataaagcaggtatt

SEQ ID NO: 111596 - DNA, 75 bp, synthetic construct
  source 1..75: mol_type = other DNA
atcccaaaaagggattaatacgctgcgtctccatttcgatattttaaagaattttgataatgttaaaatattatc

SEQ ID NO: 111597 - DNA, 75 bp, synthetic construct
  source 1..75: mol_type = other DNA
tggaaaaaatcgttaactataaagattcccctgcctgtaaagagaaacagcagtgttcgctggtggatggcaaaa

SEQ ID NO: 111598 - DNA, 75 bp, synthetic construct
  source 1..75: mol_type = other DNA
tctcaataagttgcaggcaggcggttatggatttgttatctccgactggaacatgcccaatatggatggcctgga

SEQ ID NO: 111599 - DNA, 75 bp, synthetic construct
  source 1..75: mol_type = other DNA
gcagcgcggcgtactgattgttccggtgaatacgcttatgcagcgtgtctgtccgcacagttttctccacggtca

SEQ ID NO: 111600 - DNA, 75 bp, synthetic construct
  source 1..75: mol_type = other DNA
atgggattaccccctatcaccgatgaagaggtcgaagcggcaacctatgcccacggttcgaaagatatgccagag

SEQ ID NO: 111601 - DNA, 75 bp, synthetic construct
  source 1..75: mol_type = other DNA
atgcaggtactaaattcccagcgtaaagctttcctcgatatgttggcgtggtcagaaggaacggataacgggcga

SEQ ID NO: 111602 - DNA, 75 bp, synthetic construct
  source 1..75: mol_type = other DNA
gggtctgaaagcggataacctgccttttcaaggtacggatatctggacgctgtatgaactttcctggctgaatgc

SEQ ID NO: 111603 - DNA, 75 bp, synthetic construct
  source 1..75: mol_type = other DNA
tgttcactggaagaagccaccgaactgaaactcggtatgctaggccatacctgttatgccgaaacgatttctgtc

SEQ ID NO: 111604 - DNA, 75 bp, synthetic construct
  source 1..75: mol_type = other DNA
ccgtgggcaattgtcacttcaggttctatgccagttgcgcgagcgcgccataaagtggccggacttcctgcgccg

SEQ ID NO: 111605 - DNA, 75 bp, synthetic construct
  source 1..75: mol_type = other DNA
tctcgcggcttaaaaatgcgctttacttccggctccggctctgaagtgcagatgggctatgcggaaggtaaatca

SEQ ID NO: 111606 - DNA, 75 bp, synthetic construct
  source 1..75: mol_type = other DNA
gcagcgtggcgtactgattgttccggtgaatacgcttatgcagcgcgtttgcccgcacagttttctccacggtca

SEQ ID NO: 111607 - DNA, 75 bp, synthetic construct
  source 1..75: mol_type = other DNA
gcgctgaaagccggacgcgagccgtcgctggaagatctcaccagtcagcaaacagaagtcgagctgcggatgccg

SEQ ID NO: 111608 - DNA, 75 bp, synthetic construct
  source 1..75: mol_type = other DNA
atggagggtccggcagctgcttatcagacactctcgcaactcgtttacaaactgcttactgcagaacaggaatac

SEQ ID NO: 111609 - DNA, 75 bp, synthetic construct
  source 1..75: mol_type = other DNA
aacgcgttatggcgtgactctccaggtcccggctatgtgcatttccctgactggctggggagctggttttacgac

SEQ ID NO: 111610 - DNA, 75 bp, synthetic construct
  source 1..75: mol_type = other DNA
atgctcacctatgccaacgacgccaaattgtatgttccggtgtcgtcgctgcatctgattagccgttacgcgggt

SEQ ID NO: 111611 - DNA, 75 bp, synthetic construct
  source 1..75: mol_type = other DNA
attcacttttatcatcgccattttgacgttgcccgcgtggtgctgccgcgcgtgttgtcgattcatcaggtgaaa

SEQ ID NO: 111612 - DNA, 75 bp, synthetic construct
  source 1..75: mol_type = other DNA
agtatgaacataaaatcagtgacctgatttcccggtttaaagaggctggtggggtggtaaatgaagttgagctat

SEQ ID NO: 111613 - DNA, 75 bp, synthetic construct
  source 1..75: mol_type = other DNA
gcctgaagtttattcaggatttgagcgagcggaaaacgcgtatcgaatgggtacgtcagtttatgcgagagctgg

SEQ ID NO: 111614 - DNA, 75 bp, synthetic construct
  source 1..75: mol_type = other DNA
tgatggtgaccgctgaggcgaagaaagagaacattatcgcggcagcacaagcgggggccagtggctatgtggtta

SEQ ID NO: 111615 - DNA, 75 bp, synthetic construct
  source 1..75: mol_type = other DNA
gggtacatcactcaggtcaactaccggagaacaccgatgaagaaatcacttgttcacacacattgcaggcgctgt

SEQ ID NO: 111616 - DNA, 75 bp, synthetic construct
  source 1..75: mol_type = other DNA
caacgtttcaacgtgctggtttgtaccaccattatcgaaaccgggatcgatatcccgactgccaacaccattatc

SEQ ID NO: 111617 - DNA, 75 bp, synthetic construct
  source 1..75: mol_type = other DNA
tttttccgctgccatcgctcattttgtgtcaatctgaacaaaatacgcgaaatcgaaccgtggtttaataacacc

SEQ ID NO: 111618 - DNA, 75 bp, synthetic construct
  source 1..75: mol_type = other DNA
cgctggaagatctcaccagccagcaaacggaagtcgaactgcggatgccgtcgctgttgccggatgacttcattc

SEQ ID NO: 111619 - DNA, 75 bp, synthetic construct
  source 1..75: mol_type = other DNA
cagccgacacgtaaccacggttatgatgttattgttggtggcgaactgttcactgattactccgatcaccctcgc

SEQ ID NO: 111620 - DNA, 75 bp, synthetic construct
  source 1..75: mol_type = other DNA
cgccaattaacgatatctattacgccgaagcgcacgagaaaatgacctttgtctatacgcggcgtgaatcctacg

SEQ ID NO: 111621 - DNA, 75 bp, synthetic construct
  source 1..75: mol_type = other DNA
atccgcgagtccggtatcaatagcctacgcgttggcgacgtctattacgttggccatctgccgtggttcgaacgc

SEQ ID NO: 111622 - DNA, 75 bp, synthetic construct
  source 1..75: mol_type = other DNA
tctcaatttgtacttatagatacaggaactggggattccttaaaaaaacatatacttgctggagaaaaagaagta

SEQ ID NO: 111623 - DNA, 75 bp, synthetic construct
  source 1..75: mol_type = other DNA
agaaattggtgtgccgttgcaggccgatatgttcagcaacggcggcacagatggcggggcggtgcatttaaccgg

SEQ ID NO: 111624 - DNA, 75 bp, synthetic construct
  source 1..75: mol_type = other DNA
gcctggcagtatttaaactcatcacaaaaaacagtaccagcagaacaaaaggcaccggagaaaaaggtacttttc

SEQ ID NO: 111625 - DNA, 75 bp, synthetic construct
  source 1..75: mol_type = other DNA
aagctttcctcgatatgttggcgtggtcagaaggaacggataacgggcgacaaccgacacgtaaccacggttatg

SEQ ID NO: 111626 - DNA, 75 bp, synthetic construct
  source 1..75: mol_type = other DNA
agtatgaacataaaatcggcgacctgattgcccgatttaaagaggcaggtggggtagtaaatgaagctgagatat

SEQ ID NO: 111627 - DNA, 75 bp, synthetic construct
  source 1..75: mol_type = other DNA
cactgattactccgatcatcctcgcaaacttgtcacgctaaacccgaaacttaaatcaacagctgccggacgtta

SEQ ID NO: 111628 - DNA, 75 bp, synthetic construct
  source 1..75: mol_type = other DNA
atatgagcatgtgtcttgatgcggcctgcggtgatctgtttgtcagtgacgatgttaaaccagaagaaatccgcc

SEQ ID NO: 111629 - DNA, 75 bp, synthetic construct
  source 1..75: mol_type = other DNA
ttttgccactaatgacaaacgcccggacttcctgcgcgatcatccggcggtaaaagccccggtgattgagatgat

SEQ ID NO: 111630 - DNA, 75 bp, synthetic construct
  source 1..75: mol_type = other DNA
acgctgcaggtacgtctgcaggtcacgaacaaagacgagctgcttaagccgggtatgaatgcgtatctgaaactg

SEQ ID NO: 111631 - DNA, 75 bp, synthetic construct
  source 1..75: mol_type = other DNA
ctaaccatcgccagattggtaacgggccgatgctggtattaagtaagcgacaagtcgctgattgcgccgccaaaa

SEQ ID NO: 111632 - DNA, 75 bp, synthetic construct
  source 1..75: mol_type = other DNA
gtgaagtggaaaatggttcgcaaggccgttgacgttcaggaggcgacagccgaccagggcgcttgcgccccttgg

SEQ ID NO: 111633 - DNA, 75 bp, synthetic construct
  source 1..75: mol_type = other DNA
ggttcttgctgcacgcttacgtatgacccaatgaaaccggataccaaatttgataaacccggaaaatcgcccttt

SEQ ID NO: 111634 - DNA, 75 bp, synthetic construct
  source 1..75: mol_type = other DNA
tcccagcgtggatcagacaacccgcacgcttcaggtccgcctccaggttactaacaaggatgagtttctcaagcc

SEQ ID NO: 111635 - DNA, 75 bp, synthetic construct
  source 1..75: mol_type = other DNA
tcactgccgggcgctggttacggtcaatatgaacataaaatcggtgacctgattgcccgattcaaagaggctggc

SEQ ID NO: 111636 - DNA, 75 bp, synthetic construct
  source 1..75: mol_type = other DNA
ctgtcattctgttactggagaagatgctcgaagcgctctccactgccccggagaatatcagcaatgaacgccgtc

SEQ ID NO: 111637 - DNA, 75 bp, synthetic construct
  source 1..75: mol_type = other DNA
aaatatgctgtcgcgcattcttcatgtggggcacccgggtttaccggaagcggaatggggcgtggataaccgtaa

SEQ ID NO: 111638 - DNA, 75 bp, synthetic construct
  source 1..75: mol_type = other DNA
taatgctgtatccaccgatggtgctcaggcattgcttcgtcaggaccatgctgacagaaagttctttattggtgg

SEQ ID NO: 111639 - DNA, 75 bp, synthetic construct
  source 1..75: mol_type = other DNA
acgctgaaatcactgctggaaagtggcaataacgcagcattatacgacctgtaccgcttccgctcggctcttgcc

SEQ ID NO: 111640 - DNA, 75 bp, synthetic construct
  source 1..75: mol_type = other DNA
ataacgcagcattatacgacctgtaccgcttccgctcggctctttccgcgtgcagaagtctgggatggcagattg

SEQ ID NO: 111641 - DNA, 75 bp, synthetic construct
  source 1..75: mol_type = other DNA
ctgtcattctgttactggagaatatgctcgaagcactctccaccgccccggacaacatcaacaacgaacggcgtc

SEQ ID NO: 111642 - DNA, 75 bp, synthetic construct
  source 1..75: mol_type = other DNA
ataccggcagcgaacagcgggtgattaccgttgatgccgacgggcgctttgtaccgaaacgcgttgccgttttcc

SEQ ID NO: 111643 - DNA, 75 bp, synthetic construct
  source 1..75: mol_type = other DNA
tcaaatcaacagcagcagggcgttaccagcttctttcccgttggtgggatgcttaccgtaaacagcttggtttga

SEQ ID NO: 111644 - DNA, 75 bp, synthetic construct
  source 1..75: mol_type = other DNA
aagacttctctccaaaaagccaggatgctgtggcattgcagcagattaaagagcgtggtgctttaccgatgattg

SEQ ID NO: 111645 - DNA, 75 bp, synthetic construct
  source 1..75: mol_type = other DNA
cttaatcaggttggtccggtggtcggtcgccagatgctgatgctgggtaaacgcctgacggcgcaggaagcccag

SEQ ID NO: 111646 - DNA, 75 bp, synthetic construct
  source 1..75: mol_type = other DNA
ccggacccggaagggatgatccgccgtctgaaagcgaaagggctgaaaatctgcgtctggattaaccctatattg

SEQ ID NO: 111647 - DNA, 75 bp, synthetic construct
  source 1..75: mol_type = other DNA
aaacgcccggacggttcgctgtggcagtgggataaatggcagccaggtctggcgatttatgactttaccaatccg

SEQ ID NO: 111648 - DNA, 75 bp, synthetic construct
  source 1..75: mol_type = other DNA
gtcgtccggcgctgccgcccgcgtggtccttcggcctgtggctaaccacttcatttaccaccaactacgacgaat

SEQ ID NO: 111649 - DNA, 75 bp, synthetic construct
  source 1..75: mol_type = other DNA
aacatcgttcttgagtaccgcaaatctgaagtgatccgtattgctctgaggcaacgattactgttagcgttgatg

SEQ ID NO: 111650 - DNA, 75 bp, synthetic construct
  source 1..75: mol_type = other DNA
tgaagcgcgtcgcagccaggagatggactacttcatggaagtatttgttcccagcttccatctttcgctcgatga

SEQ ID NO: 111651 - DNA, 75 bp, synthetic construct
  source 1..75: mol_type = other DNA
accgatgatggcagcaccattcagggtaaagatgccgacatcatgatcgtcggtagtatcccggacaaattaaaa

SEQ ID NO: 111652 - DNA, 75 bp, synthetic construct
  source 1..75: mol_type = other DNA
atgaaacagagccatttttttgcccatctctcccgcctgaaactcattaaccgctggccgctaatgcgcaacgtg

SEQ ID NO: 111653 - DNA, 75 bp, synthetic construct
  source 1..75: mol_type = other DNA
cttcccggcgattaacctgacggtgaccgatgatggcagcgccattcaggggaaagacgccgatatcatgatcat

SEQ ID NO: 111654 - DNA, 75 bp, synthetic construct
  source 1..75: mol_type = other DNA
ggcaccaccacgccgtggattattgaagcgattgataatgaaatcccttttaccgccgtttgttattcgctaaat

SEQ ID NO: 111655 - DNA, 75 bp, synthetic construct
  source 1..75: mol_type = other DNA
acaaagcagagtcttacgctaccgtagatctttctgctgatgacctgaaggaactgcaggcagaatggcagcatt

SEQ ID NO: 111656 - DNA, 75 bp, synthetic construct
  source 1..75: mol_type = other DNA
tagttctggatcctaaagggacggcgaaaactaatgagcaaggacaggctgttttcaccggctctaccactatcg

SEQ ID NO: 111657 - DNA, 75 bp, synthetic construct
  source 1..75: mol_type = other DNA
cgccgctggcgaacaatggcagtgtgctggagcagtcgacgccgaataaatggccagaatgggacgtccccggtg

SEQ ID NO: 111658 - DNA, 75 bp, synthetic construct
  source 1..75: mol_type = other DNA
taagttatttcttctgattaatcagtttgaaaaacaacagataaagaaaggccgtgatatcaccagtgcacgaat

SEQ ID NO: 111659 - DNA, 75 bp, synthetic construct
  source 1..75: mol_type = other DNA
acagttacgtaatgccgatgcgttaacgttgcaggctccggctcagcgggtgacgctggaattaagcggttgccc

SEQ ID NO: 111660 - DNA, 75 bp, synthetic construct
  source 1..75: mol_type = other DNA
gaatggcttgccgcccagcaggatgtttatttgaagattatcgatattgtacagtcacacggcgcggatttcgcg

SEQ ID NO: 111661 - DNA, 75 bp, synthetic construct
  source 1..75: mol_type = other DNA
tgagtaaagcaactcacggtctgaaaaatgctcaatgggaagcgccgtctttgctggccgcaggcggaaaaatta

SEQ ID NO: 111662 - DNA, 75 bp, synthetic construct
  source 1..75: mol_type = other DNA
ctttaccaagaccacggtctgggccgaatggctggccgcccagcaggatgtttatttgaagattatcgatattgt

SEQ ID NO: 111663 - DNA, 75 bp, synthetic construct
  source 1..75: mol_type = other DNA
actggcgcatttccggggtgtgatattccggtgcatcaccaggaaaaaatgggcactatggacccaacgtttaac

SEQ ID NO: 111664 - DNA, 75 bp, synthetic construct
  source 1..75: mol_type = other DNA
gcgaagaaacactcagggcggttatcaacaccgactggggattgccttatcttcctcgtgccagcatggagcaac

SEQ ID NO: 111665 - DNA, 75 bp, synthetic construct
  source 1..75: mol_type = other DNA
aaatggacaatatgaccggataccgcgacagcagcgatcctgtgcttgccagcgaagcggcgtttcttcagtgcc

SEQ ID NO: 111666 - DNA, 75 bp, synthetic construct
  source 1..75: mol_type = other DNA
ccctgataacaccggacgaacgggccgacgggcgcaggccgcaggtgatgtgccgctctggcttcttcagacgga

SEQ ID NO: 111667 - DNA, 75 bp, synthetic construct
  source 1..75: mol_type = other DNA
ccgtggtggtcagcggcctcttcctgattgactcggaggctaatatcaccggtgcactggagcgcatgcgccatc

SEQ ID NO: 111668 - DNA, 75 bp, synthetic construct
  source 1..75: mol_type = other DNA
ctggtcaacaaaaaagcgtccccgtatgtcagctatgaagccgtgatccacaagcgcgagcagcgccgcaaatcg

SEQ ID NO: 111669 - DNA, 75 bp, synthetic construct
  source 1..75: mol_type = other DNA
ctggagtttgtcggccattatcaggacgtgtgcgaaaacccggccagcaccacgctttggctggatgttgggcgg

SEQ ID NO: 111670 - DNA, 75 bp, synthetic construct
  source 1..75: mol_type = other DNA
agctgggcgaagcgattctgaaagcgatcgaacagtacgacggcaccgtggcggtccttgccagcggttcgttat

SEQ ID NO: 111671 - DNA, 75 bp, synthetic construct
  source 1..75: mol_type = other DNA
aggtggagtttattaccgagctgttcccaagctccggtactggtcaggttaacgctgttttcccgcttcccgcgt

SEQ ID NO: 111672 - DNA, 75 bp, synthetic construct
  source 1..75: mol_type = other DNA
tcgggcagctgctgcaagaattaaaacgcagcgataagttacatcttaaagacgccgccgccctgcttggggttt

SEQ ID NO: 111673 - DNA, 75 bp, synthetic construct
  source 1..75: mol_type = other DNA
gatcgaacagtacgacggcaccgtggcggtccttgccagcggttcgttatcgcaccgctttattgacgatcagcg

SEQ ID NO: 111674 - DNA, 75 bp, synthetic construct
  source 1..75: mol_type = other DNA
gacgataagcagatcgacctgttggtgcaggcgaccgaaagctgggtgaaaacaccgatgcgccagaccccgttc

SEQ ID NO: 111675 - DNA, 75 bp, synthetic construct
  source 1..75: mol_type = other DNA
ggactccggcggtgaagacggggtcactgataatgcctataaattctggcgtcgttgccgtcgtgatggccttgg

SEQ ID NO: 111676 - DNA, 75 bp, synthetic construct
  source 1..75: mol_type = other DNA
aatggagaaagagctcagcaaactccagcttaccgacagctaccagctactggaaaaaatcgttaactataaaga

SEQ ID NO: 111677 - DNA, 75 bp, synthetic construct
  source 1..75: mol_type = other DNA
aatatcatcaataaaattgagtgttgctctgtggataacttgcagagtttattaaggaaggtgcgaacaagttcc

SEQ ID NO: 111678 - DNA, 75 bp, synthetic construct
  source 1..75: mol_type = other DNA
gccagattatcgtgatgccgcattgcgatactgcggtgatccgtcgtgcccgtgcgctgggtatgtattgtgcgc

SEQ ID NO: 111679 - DNA, 75 bp, synthetic construct
  source 1..75: mol_type = other DNA
atgccatttaatacgcttttgcaaaaaaccggtttagtcgccattttacgcggtgtgaaaccggatgagattgtc

SEQ ID NO: 111680 - DNA, 75 bp, synthetic construct
  source 1..75: mol_type = other DNA
gttatatatcactgatggagacaggatcttcactaaaaaccagttgttaataataaagtcaagaaatgatgaaat

SEQ ID NO: 111681 - DNA, 75 bp, synthetic construct
  source 1..75: mol_type = other DNA
cccgctatttcagggaacgcaatatctcactttatgttgctttccacctggcgctggaaacagccatgcgacaag

SEQ ID NO: 111682 - DNA, 75 bp, synthetic construct
  source 1..75: mol_type = other DNA
ttcagaaaaaactacgcccggataatgtcgctaccgcaggaaacgaaagaggaaaaggaatttcgccactgtata

SEQ ID NO: 111683 - DNA, 75 bp, synthetic construct
  source 1..75: mol_type = other DNA
gtcacgtcgctgtttttgcagccggtgccgtggcgcagacgggcagcggctctggtggtgatggtggcgacgttt

SEQ ID NO: 111684 - DNA, 75 bp, synthetic construct
  source 1..75: mol_type = other DNA
atgttattgctctgtgcgctggttctctccatttttggcatcgaaacgcggaaggtgtcgttggaagagatttct

SEQ ID NO: 111685 - DNA, 75 bp, synthetic construct
  source 1..75: mol_type = other DNA
cagagcgtggccgtcagttttgtcgctgcctgggcgattctggcgacggttatctgtgtggttgccggtggtgtc

SEQ ID NO: 111686 - DNA, 75 bp, synthetic construct
  source 1..75: mol_type = other DNA
atgaagaaattatccctttcactgatgctgaacgtgtcgctggcgctgatgctggcactgtccctgatttatccg

SEQ ID NO: 111687 - DNA, 75 bp, synthetic construct
  source 1..75: mol_type = other DNA
gtatatggacacagcagggacagaataaacttcatatttggtatacacatataaaagaggcatatggtcgtgata

SEQ ID NO: 111688 - DNA, 75 bp, synthetic construct
  source 1..75: mol_type = other DNA
aagtaaagaagggttatctttccaatacctgtgtccattgtgaagcaatcatagggatacgatatattaattggg

SEQ ID NO: 111689 - DNA, 75 bp, synthetic construct
  source 1..75: mol_type = other DNA
aatgtatctggatatgattcttcatatatattatcatcattaaaatctaatattacgttatcaatatgcaatgtg

SEQ ID NO: 111690 - DNA, 75 bp, synthetic construct
  source 1..75: mol_type = other DNA
atgacccgcgccgctgttccggcaattccgtatcggaggtgctggataaattcaggaaaaactacgaccggataa

SEQ ID NO: 111691 - DNA, 75 bp, synthetic construct
  source 1..75: mol_type = other DNA
agacaatactattttggaggagtttcttccacgtttatttgatgcacgattaatccctggctttgcaaggcaaaa

SEQ ID NO: 111692 - DNA, 75 bp, synthetic construct
  source 1..75: mol_type = other DNA
gccgcatggtggaagaagatccggcacatccacgttacattcagaccgtctggggtctgggctacgtcttcgtgc

SEQ ID NO: 111693 - DNA, 75 bp, synthetic construct
  source 1..75: mol_type = other DNA
agtgatttggttgatgtggactggaacgcgactatttcatcttacatcatgcagcaaacggcgttgcaggcgtcg

SEQ ID NO: 111694 - DNA, 75 bp, synthetic construct
  source 1..75: mol_type = other DNA
ccaccagcgcgccggatcgcacaaccaccttcctgtacgcgctgggctggacgcagcacaccgtgggtgcgcaga

SEQ ID NO: 111695 - DNA, 75 bp, synthetic construct
  source 1..75: mol_type = other DNA
aagtggtaacattacaatatacccggatgggccagtaactttatctgcagggcaatcgtatgtaagttatgatga

SEQ ID NO: 111696 - DNA, 75 bp, synthetic construct
  source 1..75: mol_type = other DNA
gcgtgtttaatgactggatgtggtggtgtggagagctgaacttactcactttaaccaatccaacagaaaaacagg

SEQ ID NO: 111697 - DNA, 75 bp, synthetic construct
  source 1..75: mol_type = other DNA
ttcagccatcaataagacaatgtcagtattgggattcggtgcctcctttgtatcgaatttggaatgtgacagaag

SEQ ID NO: 111698 - DNA, 75 bp, synthetic construct
  source 1..75: mol_type = other DNA
catggctaatgtggatgcagtgctgagccaataccaacaagcaggccgcagtatcaaggatgtgggcgatttatt

SEQ ID NO: 111699 - DNA, 75 bp, synthetic construct
  source 1..75: mol_type = other DNA
tctctatgatgctaatggcgtgctgattgcgaagaaaggtcagttgctgagtagctttgcgcatctgcgtgatga

SEQ ID NO: 111700 - DNA, 75 bp, synthetic construct
  source 1..75: mol_type = other DNA
tcgccgcatatcgcgatatgcgactcgctgaaattaatccccggaccggaaaagccatcaccggcaataccgtcc

SEQ ID NO: 111701 - DNA, 75 bp, synthetic construct
  source 1..75: mol_type = other DNA
catcttccaacaaccaaaaacggtgctccacgcgatgttccgctatccaggaaagcccgtaattacctgcaaatg

SEQ ID NO: 111702 - DNA, 75 bp, synthetic construct
  source 1..75: mol_type = other DNA
ggaaaaggaatttcgccattgtatatggcttgcagagaaagaagaacgcgagcgaatttaccagacatcaatccg

SEQ ID NO: 111703 - DNA, 75 bp, synthetic construct
  source 1..75: mol_type = other DNA
ggcgtcactgtttttccggctgatacgtacggcctgccgtcagcgttttggggggcgggaaccatgtcaaagctg

SEQ ID NO: 111704 - DNA, 75 bp, synthetic construct
  source 1..75: mol_type = other DNA
ccaacttcggttggtttaacgtggtcatggctaatgtggatgcagtgctgagccaataccaacaagcaggccgca

SEQ ID NO: 111705 - DNA, 75 bp, synthetic construct
  source 1..75: mol_type = other DNA
accacagtgaagaagacctctatactgaccaaacgctggtagtcagtttggtgcaagccgcctataaagtattaa

SEQ ID NO: 111706 - DNA, 75 bp, synthetic construct
  source 1..75: mol_type = other DNA
aaaggataaacttaaagatttacaggtgaatctgagtaataagctgcttaccacacatagctgggagaaaagtgc

SEQ ID NO: 111707 - DNA, 75 bp, synthetic construct
  source 1..75: mol_type = other DNA
cgccggggtgacgctgtcgggtacagtcatgcagaccatgcagaatgttgaattaaccatcacactgagggagta

SEQ ID NO: 111708 - DNA, 75 bp, synthetic construct
  source 1..75: mol_type = other DNA
cagatcatgttactgcatggaaagactggcagaatgctctacgtaatgctgtaaattcagagttacatatggcat

SEQ ID NO: 111709 - DNA, 75 bp, synthetic construct
  source 1..75: mol_type = other DNA
atcgaagcggagggccgctcgctgcccgggtatgtccgcgaggcgttcgatgcctacctgcgttgcggcgtgctc

SEQ ID NO: 111710 - DNA, 75 bp, synthetic construct
  source 1..75: mol_type = other DNA
aaataaccagaccttatgataaaatatcatcagtagcttcacttgctatagaaagagacgagatacaaaaaaata

SEQ ID NO: 111711 - DNA, 75 bp, synthetic construct
  source 1..75: mol_type = other DNA
gcgttcagatcccaaaaacaagctggtaatattatttgatgaatttgaaaatgttcgttcagtgattaatagtaa

SEQ ID NO: 111712 - DNA, 75 bp, synthetic construct
  source 1..75: mol_type = other DNA
cgtggatgttgtggtagaagcggttgttgaaaacccgaaagtgaaaaaagccgtgctggcagaaaccgagcagaa

SEQ ID NO: 111713 - DNA, 75 bp, synthetic construct
  source 1..75: mol_type = other DNA
ccggtggtcagaatccctggctcatcctgctgcaacagggcggtcaggtgaaggactcattcggcgggatgatcc

SEQ ID NO: 111714 - DNA, 75 bp, synthetic construct
  source 1..75: mol_type = other DNA
ttgatggcgtagtcaaagcagaaaaactacttgaaggcgcgatggcaattttacgccaggccattaacggcgacc

SEQ ID NO: 111715 - DNA, 75 bp, synthetic construct
  source 1..75: mol_type = other DNA
tcattcctggaaatgaaatcaacctctccgccggggtaatgcaaaccttcaccgttctgatatctcacgtagcac

SEQ ID NO: 111716 - DNA, 75 bp, synthetic construct
  source 1..75: mol_type = other DNA
cataagtaaaaaaggaagaggcgtggtcccctggtttttacttactggtgattcagaaaaaaactcttccctgct

SEQ ID NO: 111717 - DNA, 75 bp, synthetic construct
  source 1..75: mol_type = other DNA
aagctaagcagctcacattactcggcttttttgccataacggcatcgatggtaatggctgtttatgaatacccta

SEQ ID NO: 111718 - DNA, 75 bp, synthetic construct
  source 1..75: mol_type = other DNA
ggtgtgacactggagccaattaacagccagaacgcaccgaaaggtcacttcttcctgcatccacgagctcgttca

SEQ ID NO: 111719 - DNA, 75 bp, synthetic construct
  source 1..75: mol_type = other DNA
atagtgcatattgttcatatcatatatatgatgtcagacaaggtcctgttgataccagccctgcctttctgacag

SEQ ID NO: 111720 - DNA, 75 bp, synthetic construct
  source 1..75: mol_type = other DNA
gaaaagctccgacgaaaccatcgcgaaagttgtcgcatgggcgagcaagatgggtaaaacgccaattgtggttaa

SEQ ID NO: 111721 - DNA, 75 bp, synthetic construct
  source 1..75: mol_type = other DNA
gttgaaaacccgaaagtgaaaaaagccgtactggcagaaaccgagcagaaagtacgcccggataccgtgctggcg

SEQ ID NO: 111722 - DNA, 75 bp, synthetic construct
  source 1..75: mol_type = other DNA
tgaagtgccggaaggtctgcgtaataaagcgcgtcataacgaaccgtactatcctccggttgagccagcccgtcc

SEQ ID NO: 111723 - DNA, 75 bp, synthetic construct
  source 1..75: mol_type = other DNA
gcaagggtgcgtaaaaattcacattcaggtttgatgacccctctacaacttagtaatattctacataatagttca

SEQ ID NO: 111724 - DNA, 75 bp, synthetic construct
  source 1..75: mol_type = other DNA
cgcagtacaaagagatcgatctcgcggcgcgtactgcggcggcctctccgcttgaactggtgctggtgctgtttt

SEQ ID NO: 111725 - DNA, 75 bp, synthetic construct
  source 1..75: mol_type = other DNA
caggagcaatttagccattttataatggctattgcaagggtgcgtaaacattcacattcaggtttaatgagtcca

SEQ ID NO: 111726 - DNA, 75 bp, synthetic construct
  source 1..75: mol_type = other DNA
atcagtggtatactcatataaaggaggcatatggtcgtagtatggttccagaagaatttacttcatttgtacatc

SEQ ID NO: 111727 - DNA, 75 bp, synthetic construct
  source 1..75: mol_type = other DNA
tttcacttaaagtggataacggaatgaaacgtcaaatagaacaatttgatctcatgttacgtatatacctgattt

SEQ ID NO: 111728 - DNA, 75 bp, synthetic construct
  source 1..75: mol_type = other DNA
ggcggcatcgcttaccagtctgcgtggaaaggtgtgccggttatcatgaaagatatcaacgacaagtcgttaacc

SEQ ID NO: 111729 - DNA, 75 bp, synthetic construct
  source 1..75: mol_type = other DNA
tgactgagttggttcagagtgacccgtcttattcatggtttgtttctgaagatgttaatattcctgctgtaagaa

SEQ ID NO: 111730 - DNA, 75 bp, synthetic construct
  source 1..75: mol_type = other DNA
gcagcaaacggcgctccaggcgtcgtacaaagcgtttaccgatatgcaggggttgtctctatttcagcttaataa

SEQ ID NO: 111731 - DNA, 75 bp, synthetic construct
  source 1..75: mol_type = other DNA
gctcaccaggggcattgtgatgccgatgcgctacacgtttcactcaacagtattattgatatgaaccccagctcc

SEQ ID NO: 111732 - DNA, 75 bp, synthetic construct
  source 1..75: mol_type = other DNA
atattaaaggcttctcatataagccaatgcttattggtgatgaattcctgtcaaaatctggtatattgcataagt

SEQ ID NO: 111733 - DNA, 75 bp, synthetic construct
  source 1..75: mol_type = other DNA
tgtaaaaaacagccacctcgtggcgttgttctcgtcatttctgctgataagctaattaatcatgattacacctat

SEQ ID NO: 111734 - DNA, 75 bp, synthetic construct
  source 1..75: mol_type = other DNA
tcgtgaccagttgctgaatctggcgaacactacggatggtaacgggcgctacatttttgccggttataaaacaga

SEQ ID NO: 111735 - DNA, 75 bp, synthetic construct
  source 1..75: mol_type = other DNA
ccattaagatgattttccccagcgcatcgggaaacagcagtgggcttccggccggtgaagagccatttatcgtgc

SEQ ID NO: 111736 - DNA, 75 bp, synthetic construct
  source 1..75: mol_type = other DNA
agaaccgggcgtttccgggccgctgaaagtgggtaattcgctggtcgatgcgtttactttgcaatactacgaagg

SEQ ID NO: 111737 - DNA, 75 bp, synthetic construct
  source 1..75: mol_type = other DNA
cacttgcgggcctgacacttggaaaatcaaccgattaccgggatacctatgacgccagcctactgcaaggcgttc

SEQ ID NO: 111738 - DNA, 75 bp, synthetic construct
  source 1..75: mol_type = other DNA
cggcagcactgcacgagtcaccggcaaacatcaaccgggcactcaacaccctcattgaagaaggactggccctga

SEQ ID NO: 111739 - DNA, 75 bp, synthetic construct
  source 1..75: mol_type = other DNA
ccagcttctttcacgctggtgggatgtctatcgcaagcaacttggtctgaaagatttttctccagaaagccagga

SEQ ID NO: 111740 - DNA, 75 bp, synthetic construct
  source 1..75: mol_type = other DNA
aactgtatgttccggtgtcatcgctgcacctgattagccgttacgccggtggcgcagaagaaaacgctccgctgc

SEQ ID NO: 111741 - DNA, 75 bp, synthetic construct
  source 1..75: mol_type = other DNA
gcatgggcggacaaaagagcagggttaccgcgcggagcatattgactggcaggcgattggcgagattcgccagcg

SEQ ID NO: 111742 - DNA, 75 bp, synthetic construct
  source 1..75: mol_type = other DNA
gcggttgatttgaaagcgttgggtgagttcaccattacgctggattgcgacgtacttcaggccgatggcggcacg

SEQ ID NO: 111743 - DNA, 75 bp, synthetic construct
  source 1..75: mol_type = other DNA
atcttctttgctacgtcgcgtacagtctacggaacgtcttgattatcctggggcgacaacatcaactcctttttc

SEQ ID NO: 111744 - DNA, 75 bp, synthetic construct
  source 1..75: mol_type = other DNA
ccgtggctggaatggttttactctcttcgaatgctcaggcacagacagtgccggaaggctatcagctacagcaag

SEQ ID NO: 111745 - DNA, 75 bp, synthetic construct
  source 1..75: mol_type = other DNA
caggttcccgcattttgcgtgttcttaaagctcttcgcggtcacacacttaatgggatctcaaatggtgagctgg

SEQ ID NO: 111746 - DNA, 75 bp, synthetic construct
  source 1..75: mol_type = other DNA
aggggatcctgatggaaagaggattatcttctttgttacgtcgcgtacagtctacggaacgtcttgagtatcctg

SEQ ID NO: 111747 - DNA, 75 bp, synthetic construct
  source 1..75: mol_type = other DNA
ttgttgtctcatcagtacccgaatcagatgggacatctggtaattgctctgctactggcctggggcggcaccttt

SEQ ID NO: 111748 - DNA, 75 bp, synthetic construct
  source 1..75: mol_type = other DNA
cgccatctggagcaatattgagtccgtgatggtggaagggatgaatcaggcaccaccacagtggccgatgatttt

SEQ ID NO: 111749 - DNA, 75 bp, synthetic construct
  source 1..75: mol_type = other DNA
gcggaatgcgcgacctgtcgattatcgccacgccgcccgcccgtcgtctggcagttaaaacctttgtccgtgagt

SEQ ID NO: 111750 - DNA, 75 bp, synthetic construct
  source 1..75: mol_type = other DNA
tgcggtggcgttacagcagattaaagaacgcggcgcgctgccgctgattgatcggggggatattcgtcaggctat

SEQ ID NO: 111751 - DNA, 75 bp, synthetic construct
  source 1..75: mol_type = other DNA
tggaaaaacgcccggttaaccaggatggtttcgttaaagagtggattgaagaaggcttcattgcgatggaaagcc

SEQ ID NO: 111752 - DNA, 75 bp, synthetic construct
  source 1..75: mol_type = other DNA
ttcgaagtgaagcgcgatccggaacatatttaccagcaagtgagtaaaggcacattacctgccgggatcgagtac

SEQ ID NO: 111753 - DNA, 75 bp, synthetic construct
  source 1..75: mol_type = other DNA
ccgtatcagttgcatgaccagaacgaacgccgattggcggcaaaatcgttttccagcgttggcatgacagcaaag

SEQ ID NO: 111754 - DNA, 75 bp, synthetic construct
  source 1..75: mol_type = other DNA
ttgacctgatcgaccactttatcgcccgctacggcatcaatctcgcgcgcgcagaagaagtcatcgcgatggatt

SEQ ID NO: 111755 - DNA, 75 bp, synthetic construct
  source 1..75: mol_type = other DNA
gatgggttacgcggaaggcaaatcaatgctttatctcgaggctcgttgcatttacatcactaaagccgcaggcgt

SEQ ID NO: 111756 - DNA, 75 bp, synthetic construct
  source 1..75: mol_type = other DNA
agcgtgctggagcagtccacaccgaataagtggccggagtgggatgtgcccggcgggcaactcaccaccaaaggc

SEQ ID NO: 111757 - DNA, 75 bp, synthetic construct
  source 1..75: mol_type = other DNA
tacagcctcaatgcgcaaactcgccatcaggagcaagggggcgaggactcacatgatatcagcggtaacggtaca

SEQ ID NO: 111758 - DNA, 75 bp, synthetic construct
  source 1..75: mol_type = other DNA
gtctatcgcaagcaacttggtctgaaagatttttctccagaaagccaggatgctgtagcgctgcagcagattaaa

SEQ ID NO: 111759 - DNA, 75 bp, synthetic construct
  source 1..75: mol_type = other DNA
actcttcatatatcgaatgatgatatagtagatgaactgcaacttaaagcacgcatgcagcagcgtcaccaccgg

SEQ ID NO: 111760 - DNA, 75 bp, synthetic construct
  source 1..75: mol_type = other DNA
cggtcaaacttgccaatatgttgtgcgatccaaatgtcaaacgtagcgatattgttcccctgaccacagcaatga

SEQ ID NO: 111761 - DNA, 75 bp, synthetic construct
  source 1..75: mol_type = other DNA
ttgaacgcgcggatcacttcggtctggcacagttgcaccagttgcgcggtcgcgtcgggcgttcgcaccaccagg

SEQ ID NO: 111762 - DNA, 75 bp, synthetic construct
  source 1..75: mol_type = other DNA
tcgcccaggagattatcaataaaaaccggaacagcctggaagtggtgaaagccctggcgcaaggcggttttaccg

SEQ ID NO: 111763 - DNA, 75 bp, synthetic construct
  source 1..75: mol_type = other DNA
attatcgcgtatgaccatccagaccgtgggcgatgaaaaagtgcttgagcagatcgaaaagcaattacacaagct

SEQ ID NO: 111764 - DNA, 75 bp, synthetic construct
  source 1..75: mol_type = other DNA
gatgtggcgaaaattgtggaagttgctcgctctggtgtggtcggactttcgcgcggcgataaaataatgcgttga

SEQ ID NO: 111765 - DNA, 75 bp, synthetic construct
  source 1..75: mol_type = other DNA
ttttagcatcgattcgcgatgtggcgaaaattgtggaagttgctcgctctggtgtggtcggactttcgcgcggcg

SEQ ID NO: 111766 - DNA, 75 bp, synthetic construct
  source 1..75: mol_type = other DNA
atgccagcgcctctgtatggtgcggatgacccgcgccgctgttccggcaattccatatcggaggtgctggataaa

SEQ ID NO: 111767 - DNA, 75 bp, synthetic construct
  source 1..75: mol_type = other DNA
atccagacgcgtgaagccttcaagtgccgaactaaaattgatgcgtttgattcaagccaacccggcattaagtaa

SEQ ID NO: 111768 - DNA, 75 bp, synthetic construct
  source 1..75: mol_type = other DNA
atggccttattcaatatgtcagagccgcaatttaacgccgtaaagactgccgcccgcgccgcgctttcggcctgc

SEQ ID NO: 111769 - DNA, 75 bp, synthetic construct
  source 1..75: mol_type = other DNA
accattccgtaaagccacatatacccacttccctgaaattgacccgcgcctgcgtaattaccgctcacgctatgg

SEQ ID NO: 111770 - DNA, 75 bp, synthetic construct
  source 1..75: mol_type = other DNA
gccaagagggtttttagtgaagatatttcaccatttaaatacgccatatgccaaagattttctaataacacaatc

SEQ ID NO: 111771 - DNA, 75 bp, synthetic construct
  source 1..75: mol_type = other DNA
atgtttcaagcagagcttaaggtatatggatatgtcaaaaaaaattttgaattcaaaaattacccaatagtcttt

SEQ ID NO: 111772 - DNA, 75 bp, synthetic construct
  source 1..75: mol_type = other DNA
ggttcagtaaactcattacaacttccattttcaaaaactataacctcatgtaatttgaaagagttaagtttgcca

SEQ ID NO: 111773 - DNA, 75 bp, synthetic construct
  source 1..75: mol_type = other DNA
tggaaaactcccaaaaatttatagagaataataaaatcttacgaaaagaattggagggaagcattgccaaacttg

SEQ ID NO: 111774 - DNA, 75 bp, synthetic construct
  source 1..75: mol_type = other DNA
gtgggcgatgaaaaagtgcttgagcaaatcgaaaagcaattacacaagctggtcgatgtgttgcgcgtgagcgag

SEQ ID NO: 111775 - DNA, 75 bp, synthetic construct
  source 1..75: mol_type = other DNA
gcttgtttaagtatccaggctatgttacttattctggatgctgggtgttcgcagattatgcctcgcgatattgct

SEQ ID NO: 111776 - DNA, 75 bp, synthetic construct
  source 1..75: mol_type = other DNA
agtaaaagtctttcatcgcatttgccctgagctacaaaatgccagccggacaccatccggtacgctggtgcgcgt

SEQ ID NO: 111777 - DNA, 75 bp, synthetic construct
  source 1..75: mol_type = other DNA
gcactggagcacggcgtattcatcggtgcggcgggcgatggcaacattgcctcagcaacgcgggcagattatgca

SEQ ID NO: 111778 - DNA, 75 bp, synthetic construct
  source 1..75: mol_type = other DNA
gcggtagactattcgaaggcactgcatcacagatgtatcaatcacttaaaaaattaagtgaacttcctgacgata

SEQ ID NO: 111779 - DNA, 75 bp, synthetic construct
  source 1..75: mol_type = other DNA
atcaagtcgagcaatattacatcgataaagtgccacttaagcgcggctgtgattatcaggatgtactgaatatgt

SEQ ID NO: 111780 - DNA, 75 bp, synthetic construct
  source 1..75: mol_type = other DNA
cgttctggcgctctctcgtgggatagatgaaatctttggtcgcgtcgatttactggtctacagcgccggaattgc

SEQ ID NO: 111781 - DNA, 75 bp, synthetic construct
  source 1..75: mol_type = other DNA
ggtgactaaaggtgcagaaggtgtggtggtctgttatcgaggacaagttcaccattttgctggaatgtctgttaa

SEQ ID NO: 111782 - DNA, 75 bp, synthetic construct
  source 1..75: mol_type = other DNA
cagtaatagcgattttgtcccatcgaccacaagactggttcggcaatacattttttctcaattttgcgtgctgga

SEQ ID NO: 111783 - DNA, 75 bp, synthetic construct
  source 1..75: mol_type = other DNA
ggctgcccgtcgaaaacggttaacggtagcggtggtggggcaacgttactgaaagatcctgaactcatctaccag

SEQ ID NO: 111784 - DNA, 75 bp, synthetic construct
  source 1..75: mol_type = other DNA
gatttcgcccgggttttgggtgtatcagtcgccatggtaaaggaatgggaatccagacgcgtgaagccttcaagt

SEQ ID NO: 111785 - DNA, 75 bp, synthetic construct
  source 1..75: mol_type = other DNA
agggggtcttaacggaaagaggattatcttctttattacgttgcgtacagtctactgaaaaccttgattatagta

SEQ ID NO: 111786 - DNA, 75 bp, synthetic construct
  source 1..75: mol_type = other DNA
gcttataccagcctgctacatgcagatacctccccgctcggcctcgccgatgagcacatcgagacggagaaaatg

SEQ ID NO: 111787 - DNA, 75 bp, synthetic construct
  source 1..75: mol_type = other DNA
tttgaaatcgccgatgcggttcaacaggctggtgctacagagctggtggtgcatgggcggacgaaagagcagggt

SEQ ID NO: 111788 - DNA, 75 bp, synthetic construct
  source 1..75: mol_type = other DNA
ttgatgatccgcgacgggattcagggtcgcattattcagatcaactcgaaatccggcaaagtgggcagcaaacac

SEQ ID NO: 111789 - DNA, 75 bp, synthetic construct
  source 1..75: mol_type = other DNA
ttgctattgatgacattattgaagcgaaacaacgactggctgggcgaatttataaaacaggcatgcctcgctcca

SEQ ID NO: 111790 - DNA, 75 bp, synthetic construct
  source 1..75: mol_type = other DNA
aacgagttccatgagcaatgcgtagagcgtatttttaatgacctgttacgcttctgtcagccagaaaaattaagc

SEQ ID NO: 111791 - DNA, 75 bp, synthetic construct
  source 1..75: mol_type = other DNA
tctctaaagaacaacgagcaatcaccgaacaggcgctgaaatcgggtgaattacgctgcgtggtcgcaacctcca

SEQ ID NO: 111792 - DNA, 75 bp, synthetic construct
  source 1..75: mol_type = other DNA
gatttgaatggtgtagcgtccgcaacgccagcaataacgccctcttccgggtattcttctcttgcagataccgat

SEQ ID NO: 111793 - DNA, 75 bp, synthetic construct
  source 1..75: mol_type = other DNA
cgcagaaaaatacacacaccgtctcaggctcaagaagcaattacccgctggactgccacttgttgcgatccggca

SEQ ID NO: 111794 - DNA, 75 bp, synthetic construct
  source 1..75: mol_type = other DNA
cgatattcagcccctgcgtttgcaggatttcgcgcaaacggcgcaggccttcaacctgaatctggcgaacacgtt

SEQ ID NO: 111795 - DNA, 75 bp, synthetic construct
  source 1..75: mol_type = other DNA
tggtgactacgtctgccggttcaaggatatctacgacgggccggtgctgttcgggttagggttctggaaattcac

SEQ ID NO: 111796 - DNA, 75 bp, synthetic construct
  source 1..75: mol_type = other DNA
tatggtcaactggaagggcaagatgttgattagctcggcacagcgttctgtaattcacagggcattgaaggagtc

SEQ ID NO: 111797 - DNA, 75 bp, synthetic construct
  source 1..75: mol_type = other DNA
tcgttatggtgggaagtcattttgggatgaaaaggagacaagcgatgtattgcatttgatggcattcttccgaca

SEQ ID NO: 111798 - DNA, 75 bp, synthetic construct
  source 1..75: mol_type = other DNA
agatcgcgtgggagctggatgatggttctcgcatggtgttgaaggcagaaaagcaggaggcaaccagtgagcaag

SEQ ID NO: 111799 - DNA, 75 bp, synthetic construct
  source 1..75: mol_type = other DNA
catcggcaacacgccaatagacaccctgaccgctcgcaggttcgttgaggtgcttacccccatcaaggaacgtgg

SEQ ID NO: 111800 - DNA, 75 bp, synthetic construct
  source 1..75: mol_type = other DNA
accaggtgaaaatcagccagaatctggcccccaacacgattaaagacatctggcgttcgctggaaaaatatgtat

SEQ ID NO: 111801 - DNA, 75 bp, synthetic construct
  source 1..75: mol_type = other DNA
atggacgatccccgccggacgcatgaagatgcggcgtgatcacgttatcccgctttgtagtcaggctatggcggt

SEQ ID NO: 111802 - DNA, 75 bp, synthetic construct
  source 1..75: mol_type = other DNA
cgggcaattcggtgcgctggcggcgtggctggctattgactggctgaaaacgcaatacggcgcgccgttacgtac

SEQ ID NO: 111803 - DNA, 75 bp, synthetic construct
  source 1..75: mol_type = other DNA
gtgcactcagtattttttcccttgtcggatgtgaggaaaccaaatctgttgattggtggttggagcatcatgaag

SEQ ID NO: 111804 - DNA, 75 bp, synthetic construct
  source 1..75: mol_type = other DNA
gtatttcgtatatacatacctcgctggtcagtattagcatagctaccctgttgagactgccaaatggcccccgaa

SEQ ID NO: 111805 - DNA, 75 bp, synthetic construct
  source 1..75: mol_type = other DNA
tggcaccgaatatccacaggaagtggttctgagcggttcgcatatcgataccgtggttaacggcggtaacctcga

SEQ ID NO: 111806 - DNA, 75 bp, synthetic construct
  source 1..75: mol_type = other DNA
aaggaaattaacgggtattactgctgtttttatactgcctttttccttatggcgtgttctgcatgcgcaccattg

SEQ ID NO: 111807 - DNA, 75 bp, synthetic construct
  source 1..75: mol_type = other DNA
ctcttccggaaccgcctgaatttatcaccggaagcgaatgacgattttctcgatcgttgcctggacggcggtgac

SEQ ID NO: 111808 - DNA, 75 bp, synthetic construct
  source 1..75: mol_type = other DNA
aacctcactaacttttcagatgtttacgcattaggaaaaactttaataagagtgatgtttttgggagtaaaaatg

SEQ ID NO: 111809 - DNA, 75 bp, synthetic construct
  source 1..75: mol_type = other DNA
aacctcactaacttttcagatgtttacgcattaggaaaaactttaataagagtgatattttttgggagcaaaaat

SEQ ID NO: 111810 - DNA, 75 bp, synthetic construct
  source 1..75: mol_type = other DNA
ccttcagaagcgatttagtgagttaaacgaatggattaatgaaaaaataatcacttactcacaatattctattgg

SEQ ID NO: 111811 - DNA, 75 bp, synthetic construct
  source 1..75: mol_type = other DNA
cgcaggaaaatacacacaccgtctcaggctcaagaagcaattacccgctgggctgccacttgttgcgatccggca

SEQ ID NO: 111812 - DNA, 75 bp, synthetic construct
  source 1..75: mol_type = other DNA
cgcagcaaaatacacacaccgtctcaggctcaagaagcaattacccgctgggctgccacttgttgcgatccgcca

SEQ ID NO: 111813 - DNA, 75 bp, synthetic construct
  source 1..75: mol_type = other DNA
gttgtcggtcaaatgcattcgggaaaaatgcgcacgttagatttgacacatttgatagtagacgaagttcaggat

SEQ ID NO: 111814 - DNA, 75 bp, synthetic construct
  source 1..75: mol_type = other DNA
cgcagtaaaatacacacaccgtctcaggctcaagaagcaattacccgctgggctgccacttgttgcgatccgtca

SEQ ID NO: 111815 - DNA, 75 bp, synthetic construct
  source 1..75: mol_type = other DNA
cgcagaaaaatacacacaccgtctcaggctcaagaagcaattacccgctgggctgccacttgttgcgatccgaca

SEQ ID NO: 111816 - DNA, 75 bp, synthetic construct
  source 1..75: mol_type = other DNA
acgccccgtcatggaatatgatgcatcccatctcggcaatatggttaaccgactggaagaagcattacccccgga

SEQ ID NO: 111817 - DNA, 75 bp, synthetic construct
  source 1..75: mol_type = other DNA
cgcagcaaaatacacacaccgtctcaggctcaagaagcaattacccgctggcctgccacttgttgcgatccggca

SEQ ID NO: 111818 - DNA, 75 bp, synthetic construct
  source 1..75: mol_type = other DNA
attgatgccacgccgtgggcgttcagtccgtggatggtgatgcaggcagccaatagtgaagcaagaaaattgttg

SEQ ID NO: 111819 - DNA, 75 bp, synthetic construct
  source 1..75: mol_type = other DNA
gttgtgggccagatgtactcggggaaaatgcagccacttaacttgacacatttagttgtagatgaagttcaggat

SEQ ID NO: 111820 - DNA, 75 bp, synthetic construct
  source 1..75: mol_type = other DNA
atgaagtgatggattatcaatggtgtgatttagcagatgtattacgcggtattgatgccacgccgtgggcgttca

SEQ ID NO: 111821 - DNA, 75 bp, synthetic construct
  source 1..75: mol_type = other DNA
ccgttgatatgatccgtcggaccgtaacccggtcaggtaaaaagatccatctcaccggaaaagagtacgtgctgc

SEQ ID NO: 111822 - DNA, 75 bp, synthetic construct
  source 1..75: mol_type = other DNA
aagaaatagatctcgatgccgaaacctggacgattccagccggacgcatgaagatgcgccgtgaccatgtgatcc

SEQ ID NO: 111823 - DNA, 75 bp, synthetic construct
  source 1..75: mol_type = other DNA
tggtgcttatgcgctggtggggtgaatttgtggaggctgcagctaccggagtgaccatagccagcggtaaaaggg

SEQ ID NO: 111824 - DNA, 75 bp, synthetic construct
  source 1..75: mol_type = other DNA
gcaacaaagcaacggacaatgatggggctaggagccttcccagccctttcacttgctgacgcccgacgcttaaga

SEQ ID NO: 111825 - DNA, 75 bp, synthetic construct
  source 1..75: mol_type = other DNA
acagctacagaatgagatagcccagctcaggcaggcactggaactggaaaagaaacggggattctggtccaggct

SEQ ID NO: 111826 - DNA, 75 bp, synthetic construct
  source 1..75: mol_type = other DNA
gagcaacaactgatcacaattcaaaaccaggcaatggcccaacagcagaggctttcagctttggcgatcctgttc

SEQ ID NO: 111827 - DNA, 75 bp, synthetic construct
  source 1..75: mol_type = other DNA
acggtttgcaccatagctgacatgaccgtcgatatggtgcggcggacagtgacacgctcaggtaaaaagatccat

SEQ ID NO: 111828 - DNA, 75 bp, synthetic construct
  source 1..75: mol_type = other DNA
gagagatgatgagttggtggggtaagcatgtggaggctgtttcttatggtaaaaccagcatcatttcagttgctc

SEQ ID NO: 111829 - DNA, 75 bp, synthetic construct
  source 1..75: mol_type = other DNA
tcatcatgtacatgaccgacgccgcgcagaatcaggaggatgtgaacaacctccgcaacgcgatgaaaagtgcca

SEQ ID NO: 111830 - DNA, 75 bp, synthetic construct
  source 1..75: mol_type = other DNA
cctgtagttggactggcaagtgcggcactattgttggatgaacgcttaacgggtctgcaatttttcggtgcggtg

SEQ ID NO: 111831 - DNA, 75 bp, synthetic construct
  source 1..75: mol_type = other DNA
gagctgcaggatttcaccaacgactgttactcgctggcgctgtatcagtggaagcagcgtgaccaggggatgacg

SEQ ID NO: 111832 - DNA, 75 bp, synthetic construct
  source 1..75: mol_type = other DNA
atttccattctttaatcagttcattttagctggttggggagtcgatgttgataaatataatatcgaaaaggaacc

SEQ ID NO: 111833 - DNA, 75 bp, synthetic construct
  source 1..75: mol_type = other DNA
gtatttcccggtgtatataatgtcaatgtgttcgttaatggggtaaaggttagtacaaacaaagatattactttc

SEQ ID NO: 111834 - DNA, 75 bp, synthetic construct
  source 1..75: mol_type = other DNA
actgacaaaaaacgaaccatcgttagtcttggtccgctgaatgatgtttctctgtcagaagccagagagcgacga

SEQ ID NO: 111835 - DNA, 75 bp, synthetic construct
  source 1..75: mol_type = other DNA
gctgcagaagcgactgcaggagcttaacgactggctgggtgaagaggtgatctgcttcgagccttattctttaca

SEQ ID NO: 111836 - DNA, 75 bp, synthetic construct
  source 1..75: mol_type = other DNA
ccggcgccaggaagccgaacgggaacagctacataaagagatagagcagctcaggcaggcactggagcaggaaaa

SEQ ID NO: 111837 - DNA, 75 bp, synthetic construct
  source 1..75: mol_type = other DNA
acgaacataaaacaggtagttacctgcagcagggactggttgaggagggctatcaggccgatctctttgataatg

SEQ ID NO: 111838 - DNA, 75 bp, synthetic construct
  source 1..75: mol_type = other DNA
ataaacaagcccaggatacggagcgccggcgccaggaagcagaacgggaacagctacagaatgagatagcccggc

SEQ ID NO: 111839 - DNA, 75 bp, synthetic construct
  source 1..75: mol_type = other DNA
gtatttcgtatatacatacctcgctggtcagtattaacatagctaccctgttgaggctgccaaatggcccccgaa

SEQ ID NO: 111840 - DNA, 75 bp, synthetic construct
  source 1..75: mol_type = other DNA
ttgctggggctatattactcttatcggggtgcgaggatgttaaatctgctgattggtggcaggaacatcatgcag

SEQ ID NO: 111841 - DNA, 75 bp, synthetic construct
  source 1..75: mol_type = other DNA
gtaacgcctacctggagaaacgcacgaaccgcttcggtgaagtgatcgcccttgaacctgccctggcgaaataca

SEQ ID NO: 111842 - DNA, 75 bp, synthetic construct
  source 1..75: mol_type = other DNA
aattgtagaaatgctaaagagggattgtttagatataaacagttacatgccgttgaaccttcctttaaagatgcg

SEQ ID NO: 111843 - DNA, 75 bp, synthetic construct
  source 1..75: mol_type = other DNA
ggtatggagtaagactgccagaagttcctgttatagatactatgttatcgggattgtgggccacagaagacggca

SEQ ID NO: 111844 - DNA, 75 bp, synthetic construct
  source 1..75: mol_type = other DNA
ctgtgggccacagaagacggtaaacgtccccgccttgaagagttggccttctctcttggctttatatacgatcat

SEQ ID NO: 111845 - DNA, 75 bp, synthetic construct
  source 1..75: mol_type = other DNA
gtcctgtttttaaccgcaaaggacaacgtacgggacaaagtgaaagggctggagcttggcgcagatgactatctt

SEQ ID NO: 111846 - DNA, 75 bp, synthetic construct
  source 1..75: mol_type = other DNA
gtcctgtttttaaccgcaaaggacaacgtgcgggacaaagtgaaaggactggagcttggcgcagatgactacctg

SEQ ID NO: 111847 - DNA, 75 bp, synthetic construct
  source 1..75: mol_type = other DNA
ttgacggactggcgcgcaccttccgcgctgccgtgcatcacagttccccgattgcagtaaagtgcaacattctga

SEQ ID NO: 111848 - DNA, 75 bp, synthetic construct
  source 1..75: mol_type = other DNA
caacgaagtcagacgggcatacaaccggagcaactacatagaaaaacgcatcgtgcttatgcgctggtggggcga

SEQ ID NO: 111849 - DNA, 75 bp, synthetic construct
  source 1..75: mol_type = other DNA
gcagtacctatattccgcatcgtcttctcagtcagcaggcatttacccgttttgtgcaggactatctggtttttg

SEQ ID NO: 111850 - DNA, 75 bp, synthetic construct
  source 1..75: mol_type = other DNA
gaacgcgaatctggcccgtgttatcgatcagaatgctctggagatcattttcgccgccggtatacaacaacgggc

SEQ ID NO: 111851 - DNA, 75 bp, synthetic construct
  source 1..75: mol_type = other DNA
tcttcgccttttgttcagagcattaaccagcacggcgtctgcgctggcaggattcgtattgctgtgtctgttcgg

SEQ ID NO: 111852 - DNA, 75 bp, synthetic construct
  source 1..75: mol_type = other DNA
aggagagctgagggaatttgaactggcagacggaaactggctactggacaatgcctggtatgaaagaaacatggc

SEQ ID NO: 111853 - DNA, 75 bp, synthetic construct
  source 1..75: mol_type = other DNA
aacatatcgcactggaggctcatacttttgactctgtaaaatttattctgaccaccgctctcgccggtggtctgc

SEQ ID NO: 111854 - DNA, 75 bp, synthetic construct
  source 1..75: mol_type = other DNA
ttacctggataggttcggtgacgtttatgaaaggggaatatcatcagatccagtcccggacaccacgggcgggct

SEQ ID NO: 111855 - DNA, 75 bp, synthetic construct
  source 1..75: mol_type = other DNA
gtgatgaaaaaacagggcttcaaagtcacatctaaagagcctccttcctatgataagcagtctgcgatgatccgc

SEQ ID NO: 111856 - DNA, 75 bp, synthetic construct
  source 1..75: mol_type = other DNA
gaaagcgaaagatcagggaaaaacacaggatgaaaaaacgttacaggatatcacctggataggctcggccacctt

SEQ ID NO: 111857 - DNA, 75 bp, synthetic construct
  source 1..75: mol_type = other DNA
gactcaggcggcggtggccagcattccgtgccggccggatttgcgtcaggtgcgttttgaggtgcagcacagcaa

SEQ ID NO: 111858 - DNA, 75 bp, synthetic construct
  source 1..75: mol_type = other DNA
tgagccgcgtgttctcaacggggggcgtggcgctggggagtctggcggcgtttccggccctggatgcgatgcgac

SEQ ID NO: 111859 - DNA, 75 bp, synthetic construct
  source 1..75: mol_type = other DNA
tggccaggattgcgggaacggctggcagtgcggtggcagcactgggggcattcccggcgcttgatgcaatgcgac

SEQ ID NO: 111860 - DNA, 75 bp, synthetic construct
  source 1..75: mol_type = other DNA
gatctggctgaaagtccgggaagagggggaagatgaaggtaacaagggattactttcgctgccccgtattgagaa

SEQ ID NO: 111861 - DNA, 75 bp, synthetic construct
  source 1..75: mol_type = other DNA
cggcgataagagcccggcgatttctgcaaccaaagcaatgaccggtcactctctgggcgctgctggcgtacagga

SEQ ID NO: 111862 - DNA, 75 bp, synthetic construct
  source 1..75: mol_type = other DNA
tctttcctttggcgcggataaaatttccatcaactcgcctgcgctggcggacccgacgttaattactcgcctggc

SEQ ID NO: 111863 - DNA, 75 bp, synthetic construct
  source 1..75: mol_type = other DNA
tgcgtaacggttacgacctcgagcagctgaaaaaagtgcgtgaagtttgccacgtcccgctgattgcctccggtg

SEQ ID NO: 111864 - DNA, 75 bp, synthetic construct
  source 1..75: mol_type = other DNA
tgcagatatgttgaaacaggctgggatgcaaggtgtatctggaggaggaaaaacaacaagtaaaaataataaatg

SEQ ID NO: 111865 - DNA, 75 bp, synthetic construct
  source 1..75: mol_type = other DNA
ggaatgacagcgcattcacaccatggatatctgcagggattggctacgccagagttcaccagaaaacaaccggta

SEQ ID NO: 111866 - DNA, 75 bp, synthetic construct
  source 1..75: mol_type = other DNA
aaaatattattttctctccggaatttctccgtgaaggtaaagccctttacgataatctccatccttcacgtattg

SEQ ID NO: 111867 - DNA, 75 bp, synthetic construct
  source 1..75: mol_type = other DNA
gcttctatacccttagcgatcaaaccatgtatgacatgcttggctggctggcgcaggaagaaggtattcgtcttg

SEQ ID NO: 111868 - DNA, 75 bp, synthetic construct
  source 1..75: mol_type = other DNA
ctgatcagggcaatcgtgatacgccggatggacgtctgccgaataccaactatcgtaacaatagtcagggtgtat

SEQ ID NO: 111869 - DNA, 75 bp, synthetic construct
  source 1..75: mol_type = other DNA
cgcgtggtgacggagtatcatataccgcaggcattagttcttgccccccttatttccagacaggggttgtatctt

SEQ ID NO: 111870 - DNA, 75 bp, synthetic construct
  source 1..75: mol_type = other DNA
tatgtaccgcggactttccaatgctttcaggaaacttagtgatgacgagcaaaaagaattagtccgtgaccatca

SEQ ID NO: 111871 - DNA, 75 bp, synthetic construct
  source 1..75: mol_type = other DNA
tcgtgctgcctctagtgcaaaagatgacagtaacggtaccgaaacaaatgttccgggctgggccactctcaactt

SEQ ID NO: 111872 - DNA, 75 bp, synthetic construct
  source 1..75: mol_type = other DNA
agcagaagcgattaaactgtttgccaatacctatctggcaatgcgcgtagcgtactttaacgaactggatagcta

SEQ ID NO: 111873 - DNA, 75 bp, synthetic construct
  source 1..75: mol_type = other DNA
gtctcggtgatccgcgtcgtacacgacgccttgtgtcactggcctcttctctcgctcagcatgcaggtctttcta

SEQ ID NO: 111874 - DNA, 75 bp, synthetic construct
  source 1..75: mol_type = other DNA
caaatagattctttaaaatcagatttcatcgagccgaaattaataatccattctacaagaagataattttatata

SEQ ID NO: 111875 - DNA, 75 bp, synthetic construct
  source 1..75: mol_type = other DNA
tccagcaacaaggtgaaagaggactgacgaacgcgcctgatgaagacccggacgatttaagcacgggatattacg

SEQ ID NO: 111876 - DNA, 75 bp, synthetic construct
  source 1..75: mol_type = other DNA
aggaagaaggtattcgtcttgaaccttcggcactggcgggtatggccggacctcagcgcgtgtgtgcatcagtaa

SEQ ID NO: 111877 - DNA, 75 bp, synthetic construct
  source 1..75: mol_type = other DNA
aaaaaataatctataaagaagtcacaatgtcaggtgtgtcaaagacgctccagtcgatgctaatggagctgctca

SEQ ID NO: 111878 - DNA, 75 bp, synthetic construct
  source 1..75: mol_type = other DNA
cagaatataatggctgggttttctcgccatatatcagtggcaatttaattcgtcggcaatatgatgtcaacgacg

SEQ ID NO: 111879 - DNA, 75 bp, synthetic construct
  source 1..75: mol_type = other DNA
tcggtaacgaggatcagtaccggattaacctagcactcaataacctgacagacaaacgctaccgtacagcacatg

SEQ ID NO: 111880 - DNA, 75 bp, synthetic construct
  source 1..75: mol_type = other DNA
ttcagggtatgctgaagcatattgatttttcgacggccagcccgactgtccggcaggcgcttcagaaggggaccg

SEQ ID NO: 111881 - DNA, 75 bp, synthetic construct
  source 1..75: mol_type = other DNA
tagcacaatctatcccggaacgtgaactgacggaaaccaaggagaaactagcgagtattgcgccatatcttgtaa

SEQ ID NO: 111882 - DNA, 75 bp, synthetic construct
  source 1..75: mol_type = other DNA
acgggtaatcgccgcaggaaaatacacacaccgtctcaggctcaagaagcaattgcccgctggactgccacttgt

SEQ ID NO: 111883 - DNA, 75 bp, synthetic construct
  source 1..75: mol_type = other DNA
ggaaagaatccactgactaattttgagttcaagttcattcgccctgcacaagacaagatttccgatatcgaatta

SEQ ID NO: 111884 - DNA, 75 bp, synthetic construct
  source 1..75: mol_type = other DNA
tacaaatgagaaaatgtttgcttccggagggcagggacatgggtttgccgctgaacggggaaaccatattgtcga

SEQ ID NO: 111885 - DNA, 75 bp, synthetic construct
  source 1..75: mol_type = other DNA
ggggatgtggagaaggcaagccgtgtgtttgttcgtaacgaactaataccattgcaaaaaagattggatgagtta

SEQ ID NO: 111886 - DNA, 75 bp, synthetic construct
  source 1..75: mol_type = other DNA
ggaaagagtccactgactaattttgagtttaagttcattcgccctgcacaagacaaaatttccgatattgaatta

SEQ ID NO: 111887 - DNA, 75 bp, synthetic construct
  source 1..75: mol_type = other DNA
gccagtaaactggttgcggtggtgaaagcgaacgcctacggtcacggtctgattgagaccgcgcgaacgctcccc

SEQ ID NO: 111888 - DNA, 75 bp, synthetic construct
  source 1..75: mol_type = other DNA
acgggtaatcgccgcagcaaaatacacacaccgcctcaggctcaagaagcaatttcccgctggactgccacttgt

SEQ ID NO: 111889 - DNA, 75 bp, synthetic construct
  source 1..75: mol_type = other DNA
acgggtaatcgccgcagtaaaatacacacaccggctcaggctcaagaagcaattgcccgctggactgccacttgt

SEQ ID NO: 111890 - DNA, 75 bp, synthetic construct
  source 1..75: mol_type = other DNA
gccctgcagacagctgctgtccaggcaggaaaaaccttcacccgcacactggctgtctacgtcacaacccagcaa

SEQ ID NO: 111891 - DNA, 75 bp, synthetic construct
  source 1..75: mol_type = other DNA
atggaaatcattattgtaccccgagagcaacgtattcctgccgcaggtattagtacggcttacctgcatgtggat

SEQ ID NO: 111892 - DNA, 75 bp, synthetic construct
  source 1..75: mol_type = other DNA
aaatcgtacaaaaagaaccacgctcccgactcattcccattcctgaaagaatggccgagatggtatgacccgaaa

SEQ ID NO: 111893 - DNA, 75 bp, synthetic construct
  source 1..75: mol_type = other DNA
tggatacaagcgggggcgggaatcatcgcgcaatctacaccggaacgcgaactgacggaaacccgggagaaatta

SEQ ID NO: 111894 - DNA, 75 bp, synthetic construct
  source 1..75: mol_type = other DNA
cacggattccttctgcagaatttcttctcccctctatttaaccagcgtaatgaccgatggggaggagatctcgaa

SEQ ID NO: 111895 - DNA, 75 bp, synthetic construct
  source 1..75: mol_type = other DNA
agccgcagaaaacctgaaaaatgacaaagttgcgattgtcggattcagtgaaccgccccggaaatcctggagact

SEQ ID NO: 111896 - DNA, 75 bp, synthetic construct
  source 1..75: mol_type = other DNA
gatggtaatggcatcgtactgttaccggagcgcgtgatattcaacaaagagaatatcggcaaatacgatttctga

SEQ ID NO: 111897 - DNA, 75 bp, synthetic construct
  source 1..75: mol_type = other DNA
atgggaaagagtaagaagaaccgcgctgcgtcgcagaaccagacccagcataaaagccagacttcagcagaggca

SEQ ID NO: 111898 - DNA, 75 bp, synthetic construct
  source 1..75: mol_type = other DNA
cctgcgggctgacagaagtacatcatgccccggaaaatcataagccggatccggaatggtactgctcctctcttt

SEQ ID NO: 111899 - DNA, 75 bp, synthetic construct
  source 1..75: mol_type = other DNA
ggataggggcactgagttgggcgggggttcatttaggaggctctattagtaacagtgtgaaagctggaacggaca

SEQ ID NO: 111900 - DNA, 75 bp, synthetic construct
  source 1..75: mol_type = other DNA
cgttttacgattattgcattgaagttactcgcaggagttttgtgaagatttttgaggagggtaaatctcttcagt

SEQ ID NO: 111901 - DNA, 75 bp, synthetic construct
  source 1..75: mol_type = other DNA
ctaaatacaacgacacccggaaaaagcctcccgtacttacgacgctcaccgtgacggtttcgttatcgctggcgg

SEQ ID NO: 111902 - DNA, 75 bp, synthetic construct
  source 1..75: mol_type = other DNA
atgtccgtctgtgtcagatgggcgtctaagttacccattcttgtctatgaagtggcagacagactggtcagcgga

SEQ ID NO: 111903 - DNA, 75 bp, synthetic construct
  source 1..75: mol_type = other DNA
atctggctgacgctcatttctcaacggatttcccggggagagctgagggaatttgaactggcagacggaaactgg

SEQ ID NO: 111904 - DNA, 75 bp, synthetic construct
  source 1..75: mol_type = other DNA
tcattgaccgcaaagttgtgcgctttatgagcgacgcatccatttatgcattcctttctatggagcaggcaatcg

SEQ ID NO: 111905 - DNA, 75 bp, synthetic construct
  source 1..75: mol_type = other DNA
tcatgaaattaaaacagcacttaatccaaagcaggttcctgaattaacaatcccggataaattatgggatgaaat

SEQ ID NO: 111906 - DNA, 75 bp, synthetic construct
  source 1..75: mol_type = other DNA
agcctgtcatttacccctgatgaactgaaaaccctcttccggaaccgcctgaatttatcaccggaagcgaatgac

SEQ ID NO: 111907 - DNA, 75 bp, synthetic construct
  source 1..75: mol_type = other DNA
gctcatatctacgctgaaatcgttggctacggcgcaacgtctgatggcgcagatatggttgctccgtctggcgaa

SEQ ID NO: 111908 - DNA, 75 bp, synthetic construct
  source 1..75: mol_type = other DNA
ctttctctcaggagctgaaggattccggcatgcgtagccacgtctggggcaacgtaaaactggataccacttgcc

SEQ ID NO: 111909 - DNA, 75 bp, synthetic construct
  source 1..75: mol_type = other DNA
accttcgcttatgggtgggagcgattattatccagattggtttaagattgaatttataagactggcccgaccggg

SEQ ID NO: 111910 - DNA, 75 bp, synthetic construct
  source 1..75: mol_type = other DNA
gtcagcgtcttccagcgcaggaacggcatcagcaaaggccactgaagcatcaaaaagtgctgccgctgcagagtc

SEQ ID NO: 111911 - DNA, 75 bp, synthetic construct
  source 1..75: mol_type = other DNA
ttaaagcagcaaatgacaatgcgaacagcagggtgccatctgaccgaaaagttaacgggaaagcactgactgcgg

SEQ ID NO: 111912 - DNA, 75 bp, synthetic construct
  source 1..75: mol_type = other DNA
agctcggtattccatctcctaacctggctgatgcgttgatgatgtgtatgcattgcccggagtcggctgcgcaac

SEQ ID NO: 111913 - DNA, 75 bp, synthetic construct
  source 1..75: mol_type = other DNA
gttcggtacattgcttggtgtgctggtgattacgctaatcggtaacggtctggtgctgctcggtattaactcctt

SEQ ID NO: 111914 - DNA, 75 bp, synthetic construct
  source 1..75: mol_type = other DNA
atagcggtgatatctggattggcgagacgcgactggaaggcgacgaagctacgctgactcgccgtgccgctgaac

SEQ ID NO: 111915 - DNA, 75 bp, synthetic construct
  source 1..75: mol_type = other DNA
cggcacctctcttacttaaggatcccgaaatccctgatggcatggttcatccagtacccggcaccgtcctcaaaa

SEQ ID NO: 111916 - DNA, 75 bp, synthetic construct
  source 1..75: mol_type = other DNA
ggaaaaaccttcacccgcacactggctgtctacgtcacaacccagcaactccaccggctcagtgttgttcagggt

SEQ ID NO: 111917 - DNA, 75 bp, synthetic construct
  source 1..75: mol_type = other DNA
tactggctggctatatcaccgaacgcataacccggttgttccatattcgctggctggcaggcgtatttctgacga

SEQ ID NO: 111918 - DNA, 75 bp, synthetic construct
  source 1..75: mol_type = other DNA
atttgccgccagagatgacgctaacacctgaacagcggcaactggcgcaaaactggaatcaggggaacgggaaaa

SEQ ID NO: 111919 - DNA, 75 bp, synthetic construct
  source 1..75: mol_type = other DNA
tatttgggagaaaactccgctcaactcacaggacggcaggtgttgaggatgcgtattgcgaactatacctcaaaa

SEQ ID NO: 111920 - DNA, 75 bp, synthetic construct
  source 1..75: mol_type = other DNA
gtcgttttcgcacgttcaatgtcgttgatgactttaatctcgaggcgttatcgattgaaatcgatctgaatctgc

SEQ ID NO: 111921 - DNA, 75 bp, synthetic construct
  source 1..75: mol_type = other DNA
caacacatccggcgatacatatgatatttacgttgagattggcaattatgcgacgagtgtaaatatccattggga

SEQ ID NO: 111922 - DNA, 75 bp, synthetic construct
  source 1..75: mol_type = other DNA
aataatggccccatgcaactggaagtcccccgtgatcagtatgccggcgctgttgaaaccatgaggaataagatc

SEQ ID NO: 111923 - DNA, 75 bp, synthetic construct
  source 1..75: mol_type = other DNA
ttggggactggcaatatcggggagcaatttactttcttgcggcccacagattcgtgcgacagcccttccactgga

SEQ ID NO: 111924 - DNA, 75 bp, synthetic construct
  source 1..75: mol_type = other DNA
cgcagggaagttgtctggtaacaggcgcagatggcgacgaacagtggtttgatggtttgccctggtatttgaccg

SEQ ID NO: 111925 - DNA, 75 bp, synthetic construct
  source 1..75: mol_type = other DNA
aggaaattgtggatcaggccgtgctggaagtccgtgcgttacgccataagcccaagctggaggatatcagcttta

SEQ ID NO: 111926 - DNA, 75 bp, synthetic construct
  source 1..75: mol_type = other DNA
gaagggctgacggtggcggaaaacctctgcctcggtcagtggccccgccgcaacggcatgattgattacctgcaa

SEQ ID NO: 111927 - DNA, 75 bp, synthetic construct
  source 1..75: mol_type = other DNA
gcttgatgtggatatatatcctgatgttgttttattcgaaaaatataaaaataaaatacaaaaaggagtaaaacc

SEQ ID NO: 111928 - DNA, 75 bp, synthetic construct
  source 1..75: mol_type = other DNA
agcaaggtaagttggtcacatttggcatcgttccaacagctccagagacagggtatggctatattaagtcaggtg

SEQ ID NO: 111929 - DNA, 75 bp, synthetic construct
  source 1..75: mol_type = other DNA
atgcaaaacaatcaacgatgggagccagactggttcctgagagcactcctgaataaccatatagacaaaatggtt

SEQ ID NO: 111930 - DNA, 75 bp, synthetic construct
  source 1..75: mol_type = other DNA
tacgcatcgatctattctaccaggatcataccgctaagtttttcttgcaggatcaccagcagctcgaatgggatg

SEQ ID NO: 111931 - DNA, 75 bp, synthetic construct
  source 1..75: mol_type = other DNA
atggcggtacatccgtttagcctctggaaacggatatcaccactggtgattgaggtacgttactaccaataccgg

SEQ ID NO: 111932 - DNA, 75 bp, synthetic construct
  source 1..75: mol_type = other DNA
ttatcagaaagaaacgttaatcattattctcagtgcaagtggcagaccatcaatgaccgttgacgccctctgcca

SEQ ID NO: 111933 - DNA, 75 bp, synthetic construct
  source 1..75: mol_type = other DNA
tcatctctccggtgatgccccgcacaggacggggcggttgtcacagtcagtcgttcagaacgggatatcatctga

SEQ ID NO: 111934 - DNA, 75 bp, synthetic construct
  source 1..75: mol_type = other DNA
gttgatcttgcaccggttgtagctcaggagattgcggaccagaccgtactggaagttcgcgcgttacgccacaga

SEQ ID NO: 111935 - DNA, 75 bp, synthetic construct
  source 1..75: mol_type = other DNA
ggctggtatcagccgttaccgcgtgaggtcatttgtctgaaccggtttaccgggcggatatcccttcgcaggacc

SEQ ID NO: 111936 - DNA, 75 bp, synthetic construct
  source 1..75: mol_type = other DNA
gacatgctgaaacgcggcattggctatacgccagaaaaccgcaaagaagcggggatcattcccataagcgctaac

SEQ ID NO: 111937 - DNA, 75 bp, synthetic construct
  source 1..75: mol_type = other DNA
aacgttccgcatcatcatgcagacgctggacgaactgggctatgacgtggctgatgcagaagataacgggccgga

SEQ ID NO: 111938 - DNA, 75 bp, synthetic construct
  source 1..75: mol_type = other DNA
gcgattttgcagccagagcagtttgtggaaatcggtgagtcgctggcgaataaacttggcattgctcagggcgat

SEQ ID NO: 111939 - DNA, 75 bp, synthetic construct
  source 1..75: mol_type = other DNA
aaacaatggcgcatcaggggccgatatcaataactatgccgggcagattaaatctgctatcgaaagtaagttcta

SEQ ID NO: 111940 - DNA, 75 bp, synthetic construct
  source 1..75: mol_type = other DNA
gcagcctgtgcgtattctttgcgctcgtgaactgcaaaacagtatcagcgattcggtaatccggttgcttgaaga

SEQ ID NO: 111941 - DNA, 75 bp, synthetic construct
  source 1..75: mol_type = other DNA
aagcgaaaggcgctgttgtctctgcgcatgacccatcagatacagggccagatgctaaaggttacgcatcgcgtc

SEQ ID NO: 111942 - DNA, 75 bp, synthetic construct
  source 1..75: mol_type = other DNA
taaggcgctggcgcagtgtgagggtgatgcggcgcaagcctttgcgctgtatgagtcggtacgtattccgcgcac

SEQ ID NO: 111943 - DNA, 75 bp, synthetic construct
  source 1..75: mol_type = other DNA
tgacaacctgcataaaatcggcgaaggaaccctggttgtacgtaagcgtaaactgaccgccgtatgtagccatca

SEQ ID NO: 111944 - DNA, 75 bp, synthetic construct
  source 1..75: mol_type = other DNA
tgggatatcctgataccaaccatccgcaagccattttccgaaatatgggtgagcttcaacccgaaaaacatcctc

SEQ ID NO: 111945 - DNA, 75 bp, synthetic construct
  source 1..75: mol_type = other DNA
aaggcttattgagttccaaagagtcccaggatgctcctctgtgttgaatggcactcgtttcccatttgatcgaac

SEQ ID NO: 111946 - DNA, 75 bp, synthetic construct
  source 1..75: mol_type = other DNA
gagccgtttgaaacgccgctgggaactaacccgctgcatccaaacgttatctcgaacccggctgcgcgtatcttt

SEQ ID NO: 111947 - DNA, 75 bp, synthetic construct
  source 1..75: mol_type = other DNA
aaaaaggctttattgccaatacgttaacgccattcgttggtgatgcgaacacgcagacgccggagtttaagtcct

SEQ ID NO: 111948 - DNA, 75 bp, synthetic construct
  source 1..75: mol_type = other DNA
atgaccactataaccgataagaaacagtatcccagcaagcaatatcttaatgagctgatcaccaacatagagttt

SEQ ID NO: 111949 - DNA, 75 bp, synthetic construct
  source 1..75: mol_type = other DNA
atgaaaaagctcaataatacgtatcgtctgttgcggactctcgttgtcatgtttgtcctgggcgcatctatttct

SEQ ID NO: 111950 - DNA, 75 bp, synthetic construct
  source 1..75: mol_type = other DNA
tgtgatcgtattatctctttagcgcaggagcgcttgggaaaattacaggacagtatttatatctcgctaaggaag

SEQ ID NO: 111951 - DNA, 75 bp, synthetic construct
  source 1..75: mol_type = other DNA
gtgctcaaccagtggtaacactgagcacgcagttcatccgtcaggcgtggtgcaccgtaacgctgttttgaccgg

SEQ ID NO: 111952 - DNA, 75 bp, synthetic construct
  source 1..75: mol_type = other DNA
catatggccgttggtaatattgagccaatggaaaacgagcaaccagactttgagtttgacccgtatattttggag

SEQ ID NO: 111953 - DNA, 75 bp, synthetic construct
  source 1..75: mol_type = other DNA
gacatgaaagaattcagtcaaaatcagacaaaaatagtagccgctttaaagaaaatgtatgacaacggatatgag

SEQ ID NO: 111954 - DNA, 75 bp, synthetic construct
  source 1..75: mol_type = other DNA
aatagctggagcggcgatattttgattggctgtgatggcgtgaagtcagtggtgcgccagagcttattaggcgat

SEQ ID NO: 111955 - DNA, 75 bp, synthetic construct
  source 1..75: mol_type = other DNA
attacaccgagggaacgttatatgccaacacgcaaaacaacaaagaacagcatcaagaactatctggctaatttt

SEQ ID NO: 111956 - DNA, 75 bp, synthetic construct
  source 1..75: mol_type = other DNA
ttcttgaagagagcaaagcaagaaacagaagcaacggttacagctacacagacacacccaccagctacgaaatac

SEQ ID NO: 111957 - DNA, 75 bp, synthetic construct
  source 1..75: mol_type = other DNA
tcccgcagaagcatcccggctgattcgtcggggacatctgacttatactcaggcccgtaatatcacccggttcgg

SEQ ID NO: 111958 - DNA, 75 bp, synthetic construct
  source 1..75: mol_type = other DNA
cctgactcgctcaccacgccgttagggagtttgtggaaactgtatgtttacgcctggctggaggatacccatcaa

SEQ ID NO: 111959 - DNA, 75 bp, synthetic construct
  source 1..75: mol_type = other DNA
tgcttcaagcatcaagagaacgcaacaagcacaactcctacgcttacacaaacaaccccaccagctacgaagccc

SEQ ID NO: 111960 - DNA, 75 bp, synthetic construct
  source 1..75: mol_type = other DNA
ttcttgaagagagcaaagcaagaaacagaagcaacggttacagctacacagacacccccaccaactacgaagtcc

SEQ ID NO: 111961 - DNA, 75 bp, synthetic construct
  source 1..75: mol_type = other DNA
cggaagcgttctccggcaagaaaatcaccgccacgatgttcaagggcagcgaatcgccattcgatgaagatgctc

SEQ ID NO: 111962 - DNA, 75 bp, synthetic construct
  source 1..75: mol_type = other DNA
tcgcaggcagagttttatcggagtatggagtggctgtacggctggaaagaagataactgcctgcaatcaagataa

SEQ ID NO: 111963 - DNA, 75 bp, synthetic construct
  source 1..75: mol_type = other DNA
cgcgatgtcgttgatgtctcttctgatgatgaattttacaaaattgcaatgaatgccattcgtgctggaagatca

SEQ ID NO: 111964 - DNA, 75 bp, synthetic construct
  source 1..75: mol_type = other DNA
ggcccttacgcggtgatccaccgggttgatattcatgcctcggtgtgggaagcggtactgacgcatccggacgtg

SEQ ID NO: 111965 - DNA, 75 bp, synthetic construct
  source 1..75: mol_type = other DNA
agggtggttttgccggctggttaaccgatggtacaccgctgtgggtgactgcagtggcaccagcaaaacggtact

SEQ ID NO: 111966 - DNA, 75 bp, synthetic construct
  source 1..75: mol_type = other DNA
cgggatgtagtcgatgtttcttctgacgacgaattttacaaaattgcgatgactgctattcgtgctggaagaaca

SEQ ID NO: 111967 - DNA, 75 bp, synthetic construct
  source 1..75: mol_type = other DNA
atcagcaacatcgtccacgtcggttaacgcctcgggaatgcgcgcgcttaatgggttttgaagcgccgggagaag

SEQ ID NO: 111968 - DNA, 75 bp, synthetic construct
  source 1..75: mol_type = other DNA
tccgggctatctggtggatattgtcgttgtcgatccggatcaaacccagttgtatggcggcgcaccggttaatcg

SEQ ID NO: 111969 - DNA, 75 bp, synthetic construct
  source 1..75: mol_type = other DNA
gttatcgccatcggttgtgagccgaacggcgtaaacatcaatgccgaagtgggggcaactgatgttcgtgcgcta

SEQ ID NO: 111970 - DNA, 75 bp, synthetic construct
  source 1..75: mol_type = other DNA
gatagctacgaacaattaccaagcaagattgatgacatttttattggcttctgtagaagcgaaggtcacccgaaa

SEQ ID NO: 111971 - DNA, 75 bp, synthetic construct
  source 1..75: mol_type = other DNA
agccaccacattaattaccgctcttgctgacaaatataaacaaacccagacaccgcgtaatttatcgattattag

SEQ ID NO: 111972 - DNA, 75 bp, synthetic construct
  source 1..75: mol_type = other DNA
cgaagaaaatcattttctgcggcacattaactgcgggcagtttaaaaacagaaattaccgacggcaaattaaata

SEQ ID NO: 111973 - DNA, 75 bp, synthetic construct
  source 1..75: mol_type = other DNA
tccgggctacctggtagatattgtcgttgtcgatccggatcaaacccagttgtatggcggcgcaccagttaaccg

SEQ ID NO: 111974 - DNA, 75 bp, synthetic construct
  source 1..75: mol_type = other DNA
gcagttactgaccgtaacccgtcccgccgaagcgtcatcaacgcggtgggatgaaatcaacctggacgcgaagca

SEQ ID NO: 111975 - DNA, 75 bp, synthetic construct
  source 1..75: mol_type = other DNA
caacgtgaagcgccacgacgcgcaccgtttttacctgcgtgaaggctacgagcagagccacttccgcttcaccaa

SEQ ID NO: 111976 - DNA, 75 bp, synthetic construct
  source 1..75: mol_type = other DNA
aggcattgacgaagtaattcgggcaattacaccgagggaacgttatatgccaaccagaaagagcacgaagaacag

SEQ ID NO: 111977 - DNA, 75 bp, synthetic construct
  source 1..75: mol_type = other DNA
gaacgaacttagcctcagtgaactgaagattgtggtggattgtgcaaacggtgcgacttatcacatcgcgccgaa

SEQ ID NO: 111978 - DNA, 75 bp, synthetic construct
  source 1..75: mol_type = other DNA
agcttgatgatatttttattgggttctgtagaagtgaaggccacccgaaatacaacaaaaaactattttatcttc

SEQ ID NO: 111979 - DNA, 75 bp, synthetic construct
  source 1..75: mol_type = other DNA
ggcagcgggactttccgcactttttaccggcccgatgccaacaccggcagtggcttatctgacgcgtaccttccg

SEQ ID NO: 111980 - DNA, 75 bp, synthetic construct
  source 1..75: mol_type = other DNA
tttgtacaggactatctggtatttggtaacgcctatctggagaaacgcacgaaccgcttcggtgaagttatcgcc

SEQ ID NO: 111981 - DNA, 75 bp, synthetic construct
  source 1..75: mol_type = other DNA
gtcgttccaatcgctaaagatcttgaatcactggtcaaagtaaaggcgaccggaagattaatgaaacctaattat

SEQ ID NO: 111982 - DNA, 75 bp, synthetic construct
  source 1..75: mol_type = other DNA
gctgataaatataaacagactcaaacgccacgtaatttatcgattattagcccgacagggcttggcgatcgcgcc

SEQ ID NO: 111983 - DNA, 75 bp, synthetic construct
  source 1..75: mol_type = other DNA
ttttaccgtgatatgcgcgcaggccttgtcagttaccgtaccagccaggacggacgacgggagtttgaaaccagt

SEQ ID NO: 111984 - DNA, 75 bp, synthetic construct
  source 1..75: mol_type = other DNA
tctattacggaatgggccaacctagtaagcaaactgaaaacaatattattttaaatactactatatcgattgttt

SEQ ID NO: 111985 - DNA, 75 bp, synthetic construct
  source 1..75: mol_type = other DNA
cggcgccaggaagccgaacgggaacagctacataaagagatagagcagctcaggcaggcactggagcaggaaaaa

SEQ ID NO: 111986 - DNA, 75 bp, synthetic construct
  source 1..75: mol_type = other DNA
ccggcgccaggaagcagaacgggaacagctacagaatgagatagcccggctcaggcaggcgctggagcaggaaaa

SEQ ID NO: 111987 - DNA, 75 bp, synthetic construct
  source 1..75: mol_type = other DNA
atttgatcgcagccgtgcccagacctgcggtgtgtggacaccgaaagcacccggtgataccgggtacagcggggt

SEQ ID NO: 111988 - DNA, 75 bp, synthetic construct
  source 1..75: mol_type = other DNA
tgatgtttgtgttgattgcggaattgatagagagcacgcgtcaacgtcacaaaccatagctggaatgggtgctgt

SEQ ID NO: 111989 - DNA, 75 bp, synthetic construct
  source 1..75: mol_type = other DNA
aaggcactggtgacagggggcgattctggtatcggtcgtgctgccgccatcgcttacgcgcgtgaaggcgctgac

SEQ ID NO: 111990 - DNA, 75 bp, synthetic construct
  source 1..75: mol_type = other DNA
atgggaaagagtaagaaaaaccgcactgcggcgacgaatcagatccagcataaaaaccagactacagccgaagca

SEQ ID NO: 111991 - DNA, 75 bp, synthetic construct
  source 1..75: mol_type = other DNA
cggacgaatgaagatgagacgtgatcacgttatcccgctttgtgatcaggctatggcagtactggaagccatgaa

SEQ ID NO: 111992 - DNA, 75 bp, synthetic construct
  source 1..75: mol_type = other DNA
gtgcaaaaaatggttaagaaagccacattgcatccaaaagcggtccgtattccggggtatctggtagatattgtg

SEQ ID NO: 111993 - DNA, 75 bp, synthetic construct
  source 1..75: mol_type = other DNA
agtcagcactggaagcgggtctggcggctgcgggcctttccgcactctttacaggcccgatgcctacacctgccg

SEQ ID NO: 111994 - DNA, 75 bp, synthetic construct
  source 1..75: mol_type = other DNA
aaggtcctggtaacttccgtaacctgtttatgtactcgcctaacggtaaaaaggacgggcttcagattatcccgt

SEQ ID NO: 111995 - DNA, 75 bp, synthetic construct
  source 1..75: mol_type = other DNA
cgaagaaaattattttctgcggcacgttaactgcgggcagtttaaaaacagaaattgccgatggcaaattgaata

SEQ ID NO: 111996 - DNA, 75 bp, synthetic construct
  source 1..75: mol_type = other DNA
acagctacataaagagatagagcagctcaggcaggcactggagcaggaaaaaaaacggggattctgggccagact

SEQ ID NO: 111997 - DNA, 75 bp, synthetic construct
  source 1..75: mol_type = other DNA
ttatcagatatcgccttgaattaatgaatcgcggaattaagcagtcaacggtaaatcgttattgtgcaatgatga

SEQ ID NO: 111998 - DNA, 75 bp, synthetic construct
  source 1..75: mol_type = other DNA
gttatacctatatcgtcagaactggagtgcatgattaagacgaaggctactggtcgtttaatttatccgagttat

SEQ ID NO: 111999 - DNA, 75 bp, synthetic construct
  source 1..75: mol_type = other DNA
cgcggttttgaatcgattggtggacagtgcgtgtttaccagcgaatggaacaaacatgcggtacgcacttataaa

SEQ ID NO: 112000 - DNA, 75 bp, synthetic construct
  source 1..75: mol_type = other DNA
aacgggcctggaagtactgctacgctggcggcatcctgtagcaggagaaataccccggatgccttcattaacttt

SEQ ID NO: 112001 - DNA, 75 bp, synthetic construct
  source 1..75: mol_type = other DNA
tatcaccggaaagttttctatttactgcgaagtcttgatgaaattaactcagccaccgtgacaaatcatcttcag

SEQ ID NO: 112002 - DNA, 75 bp, synthetic construct
  source 1..75: mol_type = other DNA
gagaaagttataaactatggggacgctcagaatgtattgataaaaattctggctatcttgttaataagatcacta

SEQ ID NO: 112003 - DNA, 75 bp, synthetic construct
  source 1..75: mol_type = other DNA
catagtgctccaataataatttgtaataatgaacataggtttttagtttctgaacaattaaaacaaattggttca

SEQ ID NO: 112004 - DNA, 75 bp, synthetic construct
  source 1..75: mol_type = other DNA
ctgctgctctacggctgcaacgaggtccctgcacgcccattaacagggagaccccgtagcagccagtcactctga

SEQ ID NO: 112005 - DNA, 75 bp, synthetic construct
  source 1..75: mol_type = other DNA
cacatcgctttatcgttgctgaacaattgcgtaaagagggtttaaagcatagcggtattttgcttgagcctgttg

SEQ ID NO: 112006 - DNA, 75 bp, synthetic construct
  source 1..75: mol_type = other DNA
attcatacagcaccgggaatgccgcacaggcaatgctggagcaactgctgcaaatttatgatgtcaaaacgctgg

SEQ ID NO: 112007 - DNA, 75 bp, synthetic construct
  source 1..75: mol_type = other DNA
attcatacagcaccgggaatgtcgttcaggcaatgctggagaaactgctgcaaatttatgatgttaaaacgctgg

SEQ ID NO: 112008 - DNA, 75 bp, synthetic construct
  source 1..75: mol_type = other DNA
gctgtttcgccgcaagtattacattaacggcagccacgcaggcttcatcatgtacatgaccgacgccgcacagaa

SEQ ID NO: 112009 - DNA, 75 bp, synthetic construct
  source 1..75: mol_type = other DNA
ttgtaaactagcgatggattcatcttattcagacctagattttgttcgtatttctaaagagttatttgctgagtg

SEQ ID NO: 112010 - DNA, 75 bp, synthetic construct
  source 1..75: mol_type = other DNA
ctggatatttcactgaccaaacgcggtgcttcggcgggagagccgatcccgatggcggggattccctaccatgcg

SEQ ID NO: 112011 - DNA, 75 bp, synthetic construct
  source 1..75: mol_type = other DNA
gcacgccggtacgtgaaaccaaaattgcaggccttccgctgaccgttcggctttatgctgatgactggacatgga

SEQ ID NO: 112012 - DNA, 75 bp, synthetic construct
  source 1..75: mol_type = other DNA
acataaagcagttgaagaagttattgattcccctctttcggaggtcgcaaatttaattaaagtattacaatcttg

SEQ ID NO: 112013 - DNA, 75 bp, synthetic construct
  source 1..75: mol_type = other DNA
caacgtgaagcgccacgacgcgcaccgtttctatctgcgcgaaggctacgagcagagccatttccgcttcaccaa

SEQ ID NO: 112014 - DNA, 75 bp, synthetic construct
  source 1..75: mol_type = other DNA
tatcaccggaaagttttctatttactgcgaagtcttgatgagattagttcaggcgcaataacaaattatcttcag

SEQ ID NO: 112015 - DNA, 75 bp, synthetic construct
  source 1..75: mol_type = other DNA
cggaaatgggaaatatcagccttacaaccagtgaaccagactttgaatttgacgtatacgcacaagcagaggaat

SEQ ID NO: 112016 - DNA, 75 bp, synthetic construct
  source 1..75: mol_type = other DNA
ggcagaactgggtaaagccagccgtatcgttgatgccgcgggtcgctatatcgagttttgcaaagccacgttccc

SEQ ID NO: 112017 - DNA, 75 bp, synthetic construct
  source 1..75: mol_type = other DNA
cgtgaagcgccacgacgcgcaccgtttctatctgcgagaaggctacgagcagagtcacttccgcttcacgaaggc

SEQ ID NO: 112018 - DNA, 75 bp, synthetic construct
  source 1..75: mol_type = other DNA
agctaccaagtgataaatattgcgctaacttagccactatttgcatgaaagttattgagacaattaatcatcatg

SEQ ID NO: 112019 - DNA, 75 bp, synthetic construct
  source 1..75: mol_type = other DNA
agctttaaagcagatatccagaaactgctcacttccctacccgcacaccatttccagattgtgctggaaattacc

SEQ ID NO: 112020 - DNA, 75 bp, synthetic construct
  source 1..75: mol_type = other DNA
cagcggcgatgaatcagatccagcataaaagtcagacttcagccgaagcattcagcttcggcgatcccgttcctg

SEQ ID NO: 112021 - DNA, 75 bp, synthetic construct
  source 1..75: mol_type = other DNA
tttccagattgtgctggaaattaccgagcgcgatatgctgaaagagcaagaagccacacaactcttcgcctggct

SEQ ID NO: 112022 - DNA, 75 bp, synthetic construct
  source 1..75: mol_type = other DNA
gaacaaacccgcaatcgtcatctggtatcgcaaccctttgctgaaaaatagcggcgtgtttgccgctctgaatct

SEQ ID NO: 112023 - DNA, 75 bp, synthetic construct
  source 1..75: mol_type = other DNA
agccttaataaagccgttgaatatatttctgatggtcattatagctggaatagcggaatttttctttttaaagct

SEQ ID NO: 112024 - DNA, 75 bp, synthetic construct
  source 1..75: mol_type = other DNA
ccggacatagcagttctgagcaagttcattataatagaacggaacattggattgttctttcaggcacagctctag

SEQ ID NO: 112025 - DNA, 75 bp, synthetic construct
  source 1..75: mol_type = other DNA
tggcctggcataagcacgaagtcaaatacgacacactgattatcgacgtacaaaagtatctcgatacctattttg

SEQ ID NO: 112026 - DNA, 75 bp, synthetic construct
  source 1..75: mol_type = other DNA
cgttggccaggcactacatattgcgcggaaattactgcccttcattcctgataatgcaggcgttcttatcgttcc

SEQ ID NO: 112027 - DNA, 75 bp, synthetic construct
  source 1..75: mol_type = other DNA
tgctctcagaaaaaaaagaagcaggcgtctccagagagcaaaaagtaaaactgataaattttaattgcgagaagt

SEQ ID NO: 112028 - DNA, 75 bp, synthetic construct
  source 1..75: mol_type = other DNA
aaggacgagaagcaggtgccgacaggcgctttcttcgctggtgctattgctgttttcgacaagacctggaaggga

SEQ ID NO: 112029 - DNA, 75 bp, synthetic construct
  source 1..75: mol_type = other DNA
gggggggggggggggggggggggggggggcaaaagggggaagccggctgccgatgacggactgttcccaccgatt

SEQ ID NO: 112030 - DNA, 75 bp, synthetic construct
  source 1..75: mol_type = other DNA
ccggaagatgctgaacatattccttttattcgcgggcgtattggttttgaactgcctgactggtttatcccgaag

SEQ ID NO: 112031 - DNA, 75 bp, synthetic construct
  source 1..75: mol_type = other DNA
tatcttaaagcaatggctgatttgctggcgcacggtcgcccggccagtgacattatgcatgcgcatttgctggtg

SEQ ID NO: 112032 - DNA, 75 bp, synthetic construct
  source 1..75: mol_type = other DNA
atgtataaaattaccgccactattgaaaaggaaggtggcactcctactaactggacaaggtactcaaaaacaaaa

SEQ ID NO: 112033 - DNA, 75 bp, synthetic construct
  source 1..75: mol_type = other DNA
ctggacaaggtactcaaaaacaaaattaaccaaatcagaatgcgaaaaaatgctctcaggtaaaaaagaagcagg

SEQ ID NO: 112034 - DNA, 75 bp, synthetic construct
  source 1..75: mol_type = other DNA
cattgctaataataaatatcagcatctctactgccaatgctgacagcatttccttatcattagctaatgatgatg

SEQ ID NO: 112035 - DNA, 75 bp, synthetic construct
  source 1..75: mol_type = other DNA
atggcggcttctgtggatacgcttggcagtcatatggcaacgcttttcgcacaactggaagatggccagcagcaa

SEQ ID NO: 112036 - DNA, 75 bp, synthetic construct
  source 1..75: mol_type = other DNA
ccatgcattccagccaggatgccctgcgagagaaaatgaccagcggtattgatcaattgggtagccaacttggca

SEQ ID NO: 112037 - DNA, 75 bp, synthetic construct
  source 1..75: mol_type = other DNA
gacaaaacgctgcaggaagccgctatcaaacacctctggacctatccctacacgccaaaaatgaacgctatctgt

SEQ ID NO: 112038 - DNA, 75 bp, synthetic construct
  source 1..75: mol_type = other DNA
taatattggcattggcgctggggcgctggtgggtaatcaggtcagtttgcacgggtcaatgtcgatgattggtta

SEQ ID NO: 112039 - DNA, 75 bp, synthetic construct
  source 1..75: mol_type = other DNA
tatttgattggtcaggatccatcgcgccggattctatcgcggcggtccgatcctgatgagcgccatcgccgggat

SEQ ID NO: 112040 - DNA, 75 bp, synthetic construct
  source 1..75: mol_type = other DNA
tgatctcaatggataaagaaggtgacagcacaatcctgttccgtaatagtgagggtattcctctggcggagatca

SEQ ID NO: 112041 - DNA, 75 bp, synthetic construct
  source 1..75: mol_type = other DNA
gctactacagccctggctgctttaggcgcgggtattgcaatggcatgtacagaaccgagtgagcctgcataccta

SEQ ID NO: 112042 - DNA, 75 bp, synthetic construct
  source 1..75: mol_type = other DNA
tatgctacttccaatctatctggtgcatacaatatgttttctgagttctggaatgttgctgtctcagctgcgcct

SEQ ID NO: 112043 - DNA, 75 bp, synthetic construct
  source 1..75: mol_type = other DNA
caaccaataattttcgggatattgcggaaacgtcaaccaactctccggtaactccggatagttggataagctgta

SEQ ID NO: 112044 - DNA, 75 bp, synthetic construct
  source 1..75: mol_type = other DNA
ccggaagatgcggatcatattccttttattcgcgggcgtattggttttgaactgcctgactggtttatcccgaag

SEQ ID NO: 112045 - DNA, 75 bp, synthetic construct
  source 1..75: mol_type = other DNA
agatgggcgaaagcagcaaaatgcgcagccgtctgaccaaacttgatgcgcagctgaaagagcagatgaaccgca

SEQ ID NO: 112046 - DNA, 75 bp, synthetic construct
  source 1..75: mol_type = other DNA
ttccataaagcaaaccaattcctcggtatggaaccgctgccgacatttatcgctaatgacgtgataaaaatgcct

SEQ ID NO: 112047 - DNA, 75 bp, synthetic construct
  source 1..75: mol_type = other DNA
ttcgcctgggtatcaaatactctggggccgagatggggatttgcagcgatctcatttggctatctgcaaatcgcc

SEQ ID NO: 112048 - DNA, 75 bp, synthetic construct
  source 1..75: mol_type = other DNA
ttggcctcacgcgcagatcacttggaagaatttattcgctttgtgaaaggcgagatcatcaagtcagttggtaaa

SEQ ID NO: 112049 - DNA, 75 bp, synthetic construct
  source 1..75: mol_type = other DNA
ttatatggatattaacgttccaccgagagaagttatttcaaaaataagaacaacaatcaaatatgatgagaaaaa

SEQ ID NO: 112050 - DNA, 75 bp, synthetic construct
  source 1..75: mol_type = other DNA
gtgtcgaccaggtaaattctggcaccgacgtagctttcgtcagaaatttttgctgcgctcgttgattatgccgcg

SEQ ID NO: 112051 - DNA, 75 bp, synthetic construct
  source 1..75: mol_type = other DNA
ccattgatttcatgaatatgtcgcagctaaccgaacggacctttacgtcatctgaatctctcagcagcctgtcac

SEQ ID NO: 112052 - DNA, 75 bp, synthetic construct
  source 1..75: mol_type = other DNA
ccggaagatgctgaccatattacttttattcgcgggcgtattggttttgaactgcctgactggtttatcccgaag

SEQ ID NO: 112053 - DNA, 75 bp, synthetic construct
  source 1..75: mol_type = other DNA
aaaatccagcgagccatgcaggacagaattgccctggacgagcgtatacagactgcaaaggcgcttattgatacc

SEQ ID NO: 112054 - DNA, 75 bp, synthetic construct
  source 1..75: mol_type = other DNA
ccggaagatgccgagcatatttcttttattcgcgggcgtattggttttgaactgcctgactggtttatcccgaag

SEQ ID NO: 112055 - DNA, 75 bp, synthetic construct
  source 1..75: mol_type = other DNA
gccagaaaacagacgaagtcacaaacaaaactaccctgtcaatgacggtagacacgatattttcgggcacaggtt

SEQ ID NO: 112056 - DNA, 75 bp, synthetic construct
  source 1..75: mol_type = other DNA
ggtttaaatatgtaagggattttttgtttctcctggcgagtttcgtcagactggaacggatgcatcccgcacaat

SEQ ID NO: 112057 - DNA, 75 bp, synthetic construct
  source 1..75: mol_type = other DNA
gctactttagggcttgacgtgctttacgttgttacaggacagagaggggatgtaatgaccaatgttgtcccaaaa

SEQ ID NO: 112058 - DNA, 75 bp, synthetic construct
  source 1..75: mol_type = other DNA
aatccaggagcgttacggttatcagaaagagcaggcagaaaaagaggttgatcgctgggaaaagcgcaatgatta

SEQ ID NO: 112059 - DNA, 75 bp, synthetic construct
  source 1..75: mol_type = other DNA
aatgtttgcatctctcttgattatatttgcgattgcgtttttcttttataaggattatgcatcagttggcagaaa

SEQ ID NO: 112060 - DNA, 75 bp, synthetic construct
  source 1..75: mol_type = other DNA
ctggctgcgaaagtacaaacggtcgctgaaagacgatcccatgtccggccatgttttcattttccggggccgcag

SEQ ID NO: 112061 - DNA, 75 bp, synthetic construct
  source 1..75: mol_type = other DNA
agcgataattccgcgcatatgctggtcgaagcctcacaagcggagggcagccatattgtgtctatcttgcttaac

SEQ ID NO: 112062 - DNA, 75 bp, synthetic construct
  source 1..75: mol_type = other DNA
atgaaatatggtgtgcagtttgataaaacaatgatgcagaatatttttgaaacaaatgcaggtgaaatgacatca

SEQ ID NO: 112063 - DNA, 75 bp, synthetic construct
  source 1..75: mol_type = other DNA
atgatgagggggattgtcagcatacctggctcaccgatggacgctctgtcctttgggcaggcaaagtcctgacaa

SEQ ID NO: 112064 - DNA, 75 bp, synthetic construct
  source 1..75: mol_type = other DNA
aatggctgcgttataacctgggtgtgggaggatggtcatcggtgaagcaacctccgagcggactaaaacccttat

SEQ ID NO: 112065 - DNA, 75 bp, synthetic construct
  source 1..75: mol_type = other DNA
tcttgtcgtgccatcttacagcgatttaagttttatctggcgcgggcatagcgacgatccactcccctgtatcga

SEQ ID NO: 112066 - DNA, 75 bp, synthetic construct
  source 1..75: mol_type = other DNA
tggattgggaaacccgcaatgaatatcgctgggaattaatccctcctgcccgacgtgtacaaggatgtacgccct

SEQ ID NO: 112067 - DNA, 75 bp, synthetic construct
  source 1..75: mol_type = other DNA
gcttatagttgtttttcaaacgataaagtctctgctaataaaatcatggctcctcacaaagaaaatatcactgaa

SEQ ID NO: 112068 - DNA, 75 bp, synthetic construct
  source 1..75: mol_type = other DNA
aacacaggcgcaggtgaactgtctgtgctctatggggtggattatttacaaggattctttttgggcagaccgaaa

SEQ ID NO: 112069 - DNA, 75 bp, synthetic construct
  source 1..75: mol_type = other DNA
gtcgccatgctgatgatggcggtgctgattatggcgctgtcactcccgctgtggcgcattacggagccgacgcga

SEQ ID NO: 112070 - DNA, 75 bp, synthetic construct
  source 1..75: mol_type = other DNA
ctggctgcgaaagtacaaacggcgctgaaagacgatcccatgtccggccatgttttcattttccggggtccgcag

SEQ ID NO: 112071 - DNA, 75 bp, synthetic construct
  source 1..75: mol_type = other DNA
ccctgcacgaacagactcaacgggtaatgagtgaggtagacgatcagattaaacaattggtcgaaactgttgcca

SEQ ID NO: 112072 - DNA, 75 bp, synthetic construct
  source 1..75: mol_type = other DNA
tgctgaacgttttgaacatgccggtgagcgggtgtcggaagcaaaccaccttaccgctgatgtgctgaataaagc

SEQ ID NO: 112073 - DNA, 75 bp, synthetic construct
  source 1..75: mol_type = other DNA
aaaatgggatggttgtgaatgtcattgtctgggatggcgaggctgaattcacggtgccggataatcagcagctca

SEQ ID NO: 112074 - DNA, 75 bp, synthetic construct
  source 1..75: mol_type = other DNA
tgaatacccccgggctgcaactggcgaagctggaaggcaaaaacggcgagcagttcacgcttgagctgaccatga

SEQ ID NO: 112075 - DNA, 75 bp, synthetic construct
  source 1..75: mol_type = other DNA
tcaccagccttcaggcctcagtggcgaaaattggcgcagaaggtgaaggtgccggtgaacgtatggctcgccaaa

SEQ ID NO: 112076 - DNA, 75 bp, synthetic construct
  source 1..75: mol_type = other DNA
ccattgatttcatgaatatgtcgcagctaactgaacggacctttacgccatctgaatctctcagcagcctgtcac

SEQ ID NO: 112077 - DNA, 75 bp, synthetic construct
  source 1..75: mol_type = other DNA
ggatggaactcgcaagcaaaacaggatcgggaaatgaatatcggtaaccgttttatttccggtttacgtgatgga

SEQ ID NO: 112078 - DNA, 75 bp, synthetic construct
  source 1..75: mol_type = other DNA
ggaaacgctgagtaactcaaaaagttatacagatacaagactgactgatatcagtaaaacaatcaatgacaggat

SEQ ID NO: 112079 - DNA, 75 bp, synthetic construct
  source 1..75: mol_type = other DNA
aatatctaagtattattgcaactatgtatctgtcatttgtatacactgctcatgcagaagacactaatattatca

SEQ ID NO: 112080 - DNA, 75 bp, synthetic construct
  source 1..75: mol_type = other DNA
tcggacagagtgcacgggcaaaagcttatggtactgccattggtcatgattcaaaggcaaccggacatatgtctg

SEQ ID NO: 112081 - DNA, 75 bp, synthetic construct
  source 1..75: mol_type = other DNA
atgctggagttgctcgccgcaaatacgcagtcagaacaaaccacgcgcaaccaattcatcgcagatcttaagcag

SEQ ID NO: 112082 - DNA, 75 bp, synthetic construct
  source 1..75: mol_type = other DNA
atcaacaatgcaaaaaatgaggcaatcagtacatcaaacaattatacagataaaaaatatcagcaaggtatcagt

SEQ ID NO: 112083 - DNA, 75 bp, synthetic construct
  source 1..75: mol_type = other DNA
ttgcagaggctttacggaaaactgaccaccgaccctacgtcggggctgattgcgatggcgcgccagttccgtaac

SEQ ID NO: 112084 - DNA, 75 bp, synthetic construct
  source 1..75: mol_type = other DNA
aaggggtgaagctggtcgtggctattgtcggtctgctgacttcaattatggcgtttattgtttccttcctgccgc

SEQ ID NO: 112085 - DNA, 75 bp, synthetic construct
  source 1..75: mol_type = other DNA
attcagttctgaatcattgccgcacaattttaatatggctgctgtcggtgtgatgaaggagggaatgtcgatgcg

SEQ ID NO: 112086 - DNA, 75 bp, synthetic construct
  source 1..75: mol_type = other DNA
cggcgtgattttctctgacgatttatcgatggaaggtgccgcgattatgggcagttatgccgaacgcgggcaggc

SEQ ID NO: 112087 - DNA, 75 bp, synthetic construct
  source 1..75: mol_type = other DNA
cttaccatgccgatcccgaaaaagcccttgcaatcgccagccagtttattgatggtatgcatgaagccggaatga

SEQ ID NO: 112088 - DNA, 75 bp, synthetic construct
  source 1..75: mol_type = other DNA
cacaaagagacgccgtgcgacccacgtccgcaagcggaaattcgcgccaaagatatgtcagtcttcagtacgtta

SEQ ID NO: 112089 - DNA, 75 bp, synthetic construct
  source 1..75: mol_type = other DNA
accgcgcagcagtatatcacaacgcaaattcaggcggtgctgcggcagaggcgttcagctttggcgacccggtgc

SEQ ID NO: 112090 - DNA, 75 bp, synthetic construct
  source 1..75: mol_type = other DNA
tggaaagtaatcccagacgaaacagagcgaagtttgcgataaactccttccagactctcggggttaaacagcata

SEQ ID NO: 112091 - DNA, 75 bp, synthetic construct
  source 1..75: mol_type = other DNA
gaacatgcgtaatattaatgttattacagcccgcgttgtgccggataaaaacgtatcagatgattttatgcatgc

SEQ ID NO: 112092 - DNA, 75 bp, synthetic construct
  source 1..75: mol_type = other DNA
aagagctggaggaacgttatagtattactctgcctgatttaactttaaaagttactgagctcgaaaatgcagtta

SEQ ID NO: 112093 - DNA, 75 bp, synthetic construct
  source 1..75: mol_type = other DNA
ggaactggaagaactggcagcagcaatggcgcaggcgcaggtcgatcgcaacgacgagatttatcaacgccagcg

SEQ ID NO: 112094 - DNA, 75 bp, synthetic construct
  source 1..75: mol_type = other DNA
ggcattcagccggtttgtgcaggactatctggtattcggtaacgcctatctggagaagcgcaccaaccgcctcgg

SEQ ID NO: 112095 - DNA, 75 bp, synthetic construct
  source 1..75: mol_type = other DNA
atccgcgaaaataaactcgacgccattatgcctgcgcatgtgatctacagtgatgttgatccgcgtccggcgagc

SEQ ID NO: 112096 - DNA, 75 bp, synthetic construct
  source 1..75: mol_type = other DNA
cagatgattttatgaatgctgttctcagtaactgcaccacaagaatcgtacttcctgcactgaaggaattcggtt

SEQ ID NO: 112097 - DNA, 75 bp, synthetic construct
  source 1..75: mol_type = other DNA
ttcctgttgcacatcatcaaaagcctgaaaagtaccggcaaaggtgctgtgatcttacctcacggcgttctgttc

SEQ ID NO: 112098 - DNA, 75 bp, synthetic construct
  source 1..75: mol_type = other DNA
caaagaaacgcccgatctggtaattggtaagaagaagtataaggctgaactattgccgccagcccttttagtggc

SEQ ID NO: 112099 - DNA, 75 bp, synthetic construct
  source 1..75: mol_type = other DNA
aattttaatatggcagctgtcggtgtgatgaagaacggtatgtcgatgagtttattttcttctccgggacatact

SEQ ID NO: 112100 - DNA, 75 bp, synthetic construct
  source 1..75: mol_type = other DNA
aacgatgagatttatcgccgtcagcgtgaaatgaaagaggagctgagcggtctggatgatttggcttcaattcgg

SEQ ID NO: 112101 - DNA, 75 bp, synthetic construct
  source 1..75: mol_type = other DNA
caagaagcactctacctgaaaatgaactagaggccttacgttatatcgtgcgacataatcaaaatgatgtcgcaa

SEQ ID NO: 112102 - DNA, 75 bp, synthetic construct
  source 1..75: mol_type = other DNA
gtgctcaaccggtgacgttcgcgcactggtgcctggcttacgtggagatgctggcgcgtgatgaaagccgcttgc

SEQ ID NO: 112103 - DNA, 75 bp, synthetic construct
  source 1..75: mol_type = other DNA
gggacttgcaattatttattggatatataaaataattggtccagtgaataaaaaacatgtttttggcttttcttt

SEQ ID NO: 112104 - DNA, 75 bp, synthetic construct
  source 1..75: mol_type = other DNA
aaaactatataccactccgccagcgccgatagcgttagaggccattgaaaacgcaattgaatacatccgcagtat

SEQ ID NO: 112105 - DNA, 75 bp, synthetic construct
  source 1..75: mol_type = other DNA
ggcgacccgcgactggtttcttcgcgcctttaaacagccgaccgctgtccagtcgcaaacctggcatgtggcggc

SEQ ID NO: 112106 - DNA, 75 bp, synthetic construct
  source 1..75: mol_type = other DNA
gcgaaaacagcaaaatgtcgtggacgcaatcggaaaccggttcagccattacctggaaatacccaagctgtattt

SEQ ID NO: 112107 - DNA, 75 bp, synthetic construct
  source 1..75: mol_type = other DNA
ttgaaagacactgatcccaaagccaagtcgtatcaggaatatcgtgactacgccggtgtcgatgaagggatgaac

SEQ ID NO: 112108 - DNA, 75 bp, synthetic construct
  source 1..75: mol_type = other DNA
gaaactgtggtgcaaagataccgttagtgagttactgacggctaaccggcagctgcaatcggcgctggtggaaac

SEQ ID NO: 112109 - DNA, 75 bp, synthetic construct
  source 1..75: mol_type = other DNA
ctctgaaactgtccggaaaaatccacaaacagcctgaaagtattgcccgaagtcgtggcgaccccccgcccaaaa

SEQ ID NO: 112110 - DNA, 75 bp, synthetic construct
  source 1..75: mol_type = other DNA
ccctgaaactgtccggaaaaatccacaaacagcttgaaagtattgcccgaagtcgtggcgaccccccgcccaaaa

SEQ ID NO: 112111 - DNA, 75 bp, synthetic construct
  source 1..75: mol_type = other DNA
tatccgttatatcgaatcagtcaatggttttacagtaaatcctgtatgcagtaatcatttctccatatttatggc

SEQ ID NO: 112112 - DNA, 75 bp, synthetic construct
  source 1..75: mol_type = other DNA
ggtggaagctattcgtcagggtaaaccactggaagagctgtcgctggccgagttgcagaaattcagtccggtgat

SEQ ID NO: 112113 - DNA, 75 bp, synthetic construct
  source 1..75: mol_type = other DNA
ataaaatccattctcattcatttgttgtaaatcctgatgaattctcttgcgacacacaatttcttaagtgcccaa

SEQ ID NO: 112114 - DNA, 75 bp, synthetic construct
  source 1..75: mol_type = other DNA
tgcaccagaaagatctcaacctggcactgcaaagtgcgaaagcactggcgctgaacctgccaaacactgcgacct

SEQ ID NO: 112115 - DNA, 75 bp, synthetic construct
  source 1..75: mol_type = other DNA
actgaatcgggtaaatctaaagggcagttttataccccagccgaagtctcgcggattatggcgaaaatcattggt

SEQ ID NO: 112116 - DNA, 75 bp, synthetic construct
  source 1..75: mol_type = other DNA
ctcaggtcggcatcatgttgaccatttacgcatgggtagtagcgctaatgtcattgccttttatgttaatgacca

SEQ ID NO: 112117 - DNA, 75 bp, synthetic construct
  source 1..75: mol_type = other DNA
tttaatccaggttttaaaattgcgctgcaccagaaagatctcaacctggcactgggtgatgctgccaacttactg

SEQ ID NO: 112118 - DNA, 75 bp, synthetic construct
  source 1..75: mol_type = other DNA
ctgcaaggcggcattccaaaccgcgatattgatgctttagagcgttactggcaggtgttcccgagtattcgcgcc

SEQ ID NO: 112119 - DNA, 75 bp, synthetic construct
  source 1..75: mol_type = other DNA
gaaaatggttgtaccaaagcctcgctgaagggcaaaaccattgttgatatgagctccatttcaccgattgaaact

SEQ ID NO: 112120 - DNA, 75 bp, synthetic construct
  source 1..75: mol_type = other DNA
aaacggatgacatgaaaacgggtaagaaggtttatctgaagtccggaaaagttcagctgactaacagcggctctg

SEQ ID NO: 112121 - DNA, 75 bp, synthetic construct
  source 1..75: mol_type = other DNA
cttcctcgcgcattctggaagttcacggtgagcgtatgattaaacgcacctttaatccgggcttcaaaatcgctc

SEQ ID NO: 112122 - DNA, 75 bp, synthetic construct
  source 1..75: mol_type = other DNA
ctgtcactggcagataaacccgacgaactggcggcgctggaacactattggcaactgatagagcgggaatcggta

SEQ ID NO: 112123 - DNA, 75 bp, synthetic construct
  source 1..75: mol_type = other DNA
gcgcagtggcggcgggaatggcatgggaacatgcaccgtcaggcagcaccactgtggcggtcaaaatcaatgcct

SEQ ID NO: 112124 - DNA, 75 bp, synthetic construct
  source 1..75: mol_type = other DNA
gggactgtgcagcctgccgcagacggtgcagtggcggcgggaatggcatgggagcatgcgccgtcaggcaccacc

SEQ ID NO: 112125 - DNA, 75 bp, synthetic construct
  source 1..75: mol_type = other DNA
ttaaagcgatccgtatggcccagtttaaattaatcagcaatgaagttatcgaaataattaaaccgcagatcccac

SEQ ID NO: 112126 - DNA, 75 bp, synthetic construct
  source 1..75: mol_type = other DNA
aaagctctaaataaaaagttggccgagaaaggagcatatgaccgtgttatagctgaaaaggcatataacaatcag

SEQ ID NO: 112127 - DNA, 75 bp, synthetic construct
  source 1..75: mol_type = other DNA
cgttatccattagatcacaagatttcaataaagaagattggatgccatctgtcttttatgccattgctcactcaa

SEQ ID NO: 112128 - DNA, 75 bp, synthetic construct
  source 1..75: mol_type = other DNA
aaagccgttctttatctggcgataccgctaagtatttttgtcacccttctgtcgatgtatggtcgtccgtgggct

SEQ ID NO: 112129 - DNA, 75 bp, synthetic construct
  source 1..75: mol_type = other DNA
aagtggcgtggctacgggtagttacgctggctgtggctgcctttatcttcaataccactgaatttgttcccgttg

SEQ ID NO: 112130 - DNA, 75 bp, synthetic construct
  source 1..75: mol_type = other DNA
gcgctggaagatgtcggctcgcaggcggtgcaggacaaaattggcgctgatccgaccggattaccttttaattca

SEQ ID NO: 112131 - DNA, 75 bp, synthetic construct
  source 1..75: mol_type = other DNA
gatgcagaaactggatgagctgcttactgcaatggcgcaggcacaggtcgatcgcaatgacgagatatatcgtcg

SEQ ID NO: 112132 - DNA, 75 bp, synthetic construct
  source 1..75: mol_type = other DNA
atgaggaggcattgcaagcgctggaaattttccttgaagaaaacactggtgaagatgggcttcttgctgatgcga

SEQ ID NO: 112133 - DNA, 75 bp, synthetic construct
  source 1..75: mol_type = other DNA
gtgaaacgcccgcgttgccaggaagcggcgcagcagggttacgcgaacgccactgaactggcggattacctggtg

SEQ ID NO: 112134 - DNA, 75 bp, synthetic construct
  source 1..75: mol_type = other DNA
tttaccgttctggtgatcagtcgcattggtgtggcttttgcgcatgcaattttctggtcgattacggcgtctctg

SEQ ID NO: 112135 - DNA, 75 bp, synthetic construct
  source 1..75: mol_type = other DNA
agttgcaatcggcgctggtggaaaccacgcaaaacaatcaggacgcggtaatgccgggttacacgcacctgcaac

SEQ ID NO: 112136 - DNA, 75 bp, synthetic construct
  source 1..75: mol_type = other DNA
gttcgccagttgcgggcaaagaaatttaacactaacgataacggacgaatgatcctttcgcagacggttgatcag

SEQ ID NO: 112137 - DNA, 75 bp, synthetic construct
  source 1..75: mol_type = other DNA
tgccaccggcacagcactggcgatggtattaggtttacctatcgggcgcattgtggggcagtatttcggctggcg

SEQ ID NO: 112138 - DNA, 75 bp, synthetic construct
  source 1..75: mol_type = other DNA
tgatgtggttgacccatcacccgagaaaccgaccgttatgttgcataacgggaccgcctatcttctcgatcatca

SEQ ID NO: 112139 - DNA, 75 bp, synthetic construct
  source 1..75: mol_type = other DNA
gatggtatgcatgaagccggaatgaagagcaccggcaagcacttcccgggtcatggcgcagtcacggcagactca

SEQ ID NO: 112140 - DNA, 75 bp, synthetic construct
  source 1..75: mol_type = other DNA
gatggcaaaaacatctggaaagaaacgcacgatttcgagtttaccaaacagcgctacaaggccgatgtgctaccc

SEQ ID NO: 112141 - DNA, 75 bp, synthetic construct
  source 1..75: mol_type = other DNA
gcagcaatggcgcaggcacaggtcgatcgcaatgacgagatttatcagcgtcagcgggagatgaagcaagagctg

SEQ ID NO: 112142 - DNA, 75 bp, synthetic construct
  source 1..75: mol_type = other DNA
tgatgtggttgacccatcacccgagaaaccgaccgttatgttgcacaacgactgcctatcttctcgatcatcagg

SEQ ID NO: 112143 - DNA, 75 bp, synthetic construct
  source 1..75: mol_type = other DNA
gtgttctggcgtaaaggacctgcttgtaaacaggaagaattacccggactcgatccggagcagtttcaccccatc

SEQ ID NO: 112144 - DNA, 75 bp, synthetic construct
  source 1..75: mol_type = other DNA
caggtggcgggcgatgtaatgctcgaaaatacctccacgcgtcatattgtgtcgctgatgctcgggcgcgatcac

SEQ ID NO: 112145 - DNA, 75 bp, synthetic construct
  source 1..75: mol_type = other DNA
gctgccgaaggaaaaagcgtggtgtttatctccagtgaagtggaggagttgccgctggtgtgcgaccgcatcctg

SEQ ID NO: 112146 - DNA, 75 bp, synthetic construct
  source 1..75: mol_type = other DNA
gtgctgggagcgtttttgccaggagctgggcaagcaaattccagtggcgatgactctggaaaagaatatgccgat

SEQ ID NO: 112147 - DNA, 75 bp, synthetic construct
  source 1..75: mol_type = other DNA
catcattgccattttaagcgctattggcattccggcttatcagaactacctgcgcaaagcagcactcaccgacat

SEQ ID NO: 112148 - DNA, 75 bp, synthetic construct
  source 1..75: mol_type = other DNA
aactggaatcaggggaacgggaaaaccggtccctatgtgaccgcgattaatttgattagtacaacagccagttta

SEQ ID NO: 112149 - DNA, 75 bp, synthetic construct
  source 1..75: mol_type = other DNA
ttcaaagtgacagcgcattgcagcaagcctgcgaagatgtcttccgctttgatgacgccaactaaggagcgacaa

SEQ ID NO: 112150 - DNA, 75 bp, synthetic construct
  source 1..75: mol_type = other DNA
ggcgctgcgtttcgacgctttcaacaaaaacgtgcttggcccgacctcaaaaattgcgcttaacgccattcgcga

SEQ ID NO: 112151 - DNA, 75 bp, synthetic construct
  source 1..75: mol_type = other DNA
aacaatggcgtgaccaacggtgccgcgatgcgcgtctcaccattgggttgtttacttccggcgcgcaatgttgat

SEQ ID NO: 112152 - DNA, 75 bp, synthetic construct
  source 1..75: mol_type = other DNA
ggtcagataacttccgtgcgtcttccattcaggggattatgaagcgtatcaaggcgaaaggcgttgaagtgatca

SEQ ID NO: 112153 - DNA, 75 bp, synthetic construct
  source 1..75: mol_type = other DNA
cgatgcgcgtctcgccattaggttgtttgcttccggcgcgtgatgttgattcctttattgatgatgtggcgctgg

SEQ ID NO: 112154 - DNA, 75 bp, synthetic construct
  source 1..75: mol_type = other DNA
gtcgctgatgcttggacgcgatcacgttgatattgcgccggttgccgcccaggaaattgctgaccagatcgtgct

SEQ ID NO: 112155 - DNA, 75 bp, synthetic construct
  source 1..75: mol_type = other DNA
cgccatcaaagagaagtacggtccggatgccatccagacgaccggctcctcgcgcggtacgggtaacgaaaccaa

SEQ ID NO: 112156 - DNA, 75 bp, synthetic construct
  source 1..75: mol_type = other DNA
tggatgcggtaaatcagcttgatttcaaccgctatgccacggcgctggcgaaatatcgtcaacaacgggaggcgg

SEQ ID NO: 112157 - DNA, 75 bp, synthetic construct
  source 1..75: mol_type = other DNA
tttgattcagtacaacagccagtttattggccaggacataaaccaggcgctgcctggcgatatgattttttcgat

SEQ ID NO: 112158 - DNA, 75 bp, synthetic construct
  source 1..75: mol_type = other DNA
acccactgaatatatgggtaaaggagagcgactgtggcatttcaacgtcatggttacgcatggcgactcgttcat

SEQ ID NO: 112159 - DNA, 75 bp, synthetic construct
  source 1..75: mol_type = other DNA
tacggttatctgggataacaacccaccggtggttaatgtcgctcaggtaaacaaggcctccaagacaatcactat

SEQ ID NO: 112160 - DNA, 75 bp, synthetic construct
  source 1..75: mol_type = other DNA
aagagtttgagttcttacttatctgacttcggtattaaccttgcggcatcctggaaagccaatcgtcctgttttg

SEQ ID NO: 112161 - DNA, 75 bp, synthetic construct
  source 1..75: mol_type = other DNA
cttattacactgcggaagacaacgcgctggcgcatgactggtcagaacgtcttgcggagcttaaaggtgctgcct

SEQ ID NO: 112162 - DNA, 75 bp, synthetic construct
  source 1..75: mol_type = other DNA
gctggaagagtcactcaaagccctgccgtgggacagtctgctggaaaatccacagttggtgttattgcaggcctg

SEQ ID NO: 112163 - DNA, 75 bp, synthetic construct
  source 1..75: mol_type = other DNA
gaaaattctggagatcgattccagagcgccctatagcgaggtgctggaacgggcgctacaggccgtttcgttagt

SEQ ID NO: 112164 - DNA, 75 bp, synthetic construct
  source 1..75: mol_type = other DNA
ttgtcctcgaagaactcaacgaaaatgcccgcagtctgcggctgatgagcgacctaaaccgcaacctgctgttac

SEQ ID NO: 112165 - DNA, 75 bp, synthetic construct
  source 1..75: mol_type = other DNA
gacaacgcgctggcgcatgactggtcagaacgtcttgcggagcttaaaggtgctgcctttggtaatcccccatac

SEQ ID NO: 112166 - DNA, 75 bp, synthetic construct
  source 1..75: mol_type = other DNA
gtgctgggagcgtttttgccaggagctgggtaagcaaattccagtggcgatgaccctggaaaagaatatgccgat

SEQ ID NO: 112167 - DNA, 75 bp, synthetic construct
  source 1..75: mol_type = other DNA
ccgccaggggccaagtccgcgctggtatcagcaggattgtgctggcctggtgcgattttcggcgaacgaggcgct

SEQ ID NO: 112168 - DNA, 75 bp, synthetic construct
  source 1..75: mol_type = other DNA
ttgcatttgcaggtttcagcgcaggagcttccgctgaaatcgcagaattcagctttaaagataccctgaacgtta

SEQ ID NO: 112169 - DNA, 75 bp, synthetic construct
  source 1..75: mol_type = other DNA
tgaatacgatctttggatgtacgtagtacagaattttagcaatggaagaacgccaagttttagtgattatcccac

SEQ ID NO: 112170 - DNA, 75 bp, synthetic construct
  source 1..75: mol_type = other DNA
acaggggatcgcctttggcgcgaacgtgaatacccgcgccattctggatatgacgtcccagtttgatttttatca

SEQ ID NO: 112171 - DNA, 75 bp, synthetic construct
  source 1..75: mol_type = other DNA
atttattcgggaactaccggaaataactttcagcggaaaaatcgctctcgagcgagggctggatgttcgttatat

SEQ ID NO: 112172 - DNA, 75 bp, synthetic construct
  source 1..75: mol_type = other DNA
gtgaatgttgattttgggaatgttcaggaagagaagataaaatctcgcatatatgataagaaaattattatcccg

SEQ ID NO: 112173 - DNA, 75 bp, synthetic construct
  source 1..75: mol_type = other DNA
agcacagcggtatttatcgctatcagcgcgtggggcgtcatgccgtccgtcaggagattcgtggttttttcaggg

SEQ ID NO: 112174 - DNA, 75 bp, synthetic construct
  source 1..75: mol_type = other DNA
agaagaacccgaaaaatgtgctgtttaccgtggtgtggatgcagggggaatttgattttgacggcacgcccggaa

SEQ ID NO: 112175 - DNA, 75 bp, synthetic construct
  source 1..75: mol_type = other DNA
aaagcggacctgtcaaaggggcagtacggtaccgtggggcaggggctgcatatcgccaaaaaactgctgccgttt

SEQ ID NO: 112176 - DNA, 75 bp, synthetic construct
  source 1..75: mol_type = other DNA
atcccctgcacgcgacagatgaccgcagaggagattaacggcgaatatgaatatcagaccggcgaagtgatcatt

SEQ ID NO: 112177 - DNA, 75 bp, synthetic construct
  source 1..75: mol_type = other DNA
ggccatgcgttgtatgttattaatccgagtaccctcgtgcagtatcctttgaacgatatcgcacaaaaggaagtc

SEQ ID NO: 112178 - DNA, 75 bp, synthetic construct
  source 1..75: mol_type = other DNA
atgaccgccgacgatatggtggtggttgagatagccagcggtaaggtggtggaaggcagcaaaaagccctcgtcc

SEQ ID NO: 112179 - DNA, 75 bp, synthetic construct
  source 1..75: mol_type = other DNA
acaccggcagaacaaaaaatctggttgaactggcgcaactggcgcgagaaaacgacgcaatggtgattgccctca

SEQ ID NO: 112180 - DNA, 75 bp, synthetic construct
  source 1..75: mol_type = other DNA
cgctggtgcgtcacgtcgccggaaaagtggcgattcagcgcggcccgctggtgtattgcctggaacaggccgaca

SEQ ID NO: 112181 - DNA, 75 bp, synthetic construct
  source 1..75: mol_type = other DNA
aagccgatatcattatctccaaccgtatggcagaagagcttaaagatgtcgctgataaggtctacacccgcgatc

SEQ ID NO: 112182 - DNA, 75 bp, synthetic construct
  source 1..75: mol_type = other DNA
cagagagcgctctgcaaatagtgagattctggataattttttaaaggggacgcatctcgccagtgattgtttcat

SEQ ID NO: 112183 - DNA, 75 bp, synthetic construct
  source 1..75: mol_type = other DNA
tgcttgtcgttggggaacggatactccgctgtaccaggatttagtcagcagaacgcgagccgcactggcaaaaaa

SEQ ID NO: 112184 - DNA, 75 bp, synthetic construct
  source 1..75: mol_type = other DNA
ccgctgtaccaggatttagtcagcagaacgcgagtcgcactggcaaaaaaatccgcagaacaaattcctcggcgt

SEQ ID NO: 112185 - DNA, 75 bp, synthetic construct
  source 1..75: mol_type = other DNA
gataaccttcatccgtcacgtattgtcatcggtgagcgttcagaacgcgcagaacgttttgcggcgttattacag

SEQ ID NO: 112186 - DNA, 75 bp, synthetic construct
  source 1..75: mol_type = other DNA
cgggcaggtgagtactgggtctacctcccagcctggaacaacggaatgaaaatggcgtatgagagtcgtcccaag

SEQ ID NO: 112187 - DNA, 75 bp, synthetic construct
  source 1..75: mol_type = other DNA
ccatgctgacctctccggcaatgactgaaactcatgattttagctatcgctccgtcattctcactctttcagagc

SEQ ID NO: 112188 - DNA, 75 bp, synthetic construct
  source 1..75: mol_type = other DNA
actttggctggattgaccgttttctgcctggaccaaaggagaataacgcagcctgttattttaaccgcgccgaat

SEQ ID NO: 112189 - DNA, 75 bp, synthetic construct
  source 1..75: mol_type = other DNA
gcaaccattacaacaatccgtcgtttggttatggtggttattgtctgccgaaagataccaagcagttactggcga

SEQ ID NO: 112190 - DNA, 75 bp, synthetic construct
  source 1..75: mol_type = other DNA
tgaaactcaggattttagctatcgcaccgtcattctgacactttcagagcgcaaggtactgcggttgttaggcaa

SEQ ID NO: 112191 - DNA, 75 bp, synthetic construct
  source 1..75: mol_type = other DNA
tggatgcggtaaatcagcttgatttcaaccgctatgccacagcgctggcgaagtatcgtcaacaacgggaggcgg

SEQ ID NO: 112192 - DNA, 75 bp, synthetic construct
  source 1..75: mol_type = other DNA
gtttatgtactcacctaacggcaaaaaggacgggcttcagattatcccgttgtcagaggtcgcggcgaaggatga

SEQ ID NO: 112193 - DNA, 75 bp, synthetic construct
  source 1..75: mol_type = other DNA
tctggtcaagaccgtacgtttccggcaatacgcacgcagagcgtatcagcgccatgctgacctctccggcaatga

SEQ ID NO: 112194 - DNA, 75 bp, synthetic construct
  source 1..75: mol_type = other DNA
gcttcggctttggcggcgaagagagcgcgggggcttccttcctgcgtttcgacggtacgccgtggtcaaccgata

SEQ ID NO: 112195 - DNA, 75 bp, synthetic construct
  source 1..75: mol_type = other DNA
agcatcgcccgcagtggggcaaagatgttgctgtcggtaaaacgctggtttcttctgcgatgatcgaccgtgtgg

SEQ ID NO: 112196 - DNA, 75 bp, synthetic construct
  source 1..75: mol_type = other DNA
atatcagaccggcgaagtgatcattgaaactttcgaagaacgcggcaggagtccggcacaaatcccggcggtgct

SEQ ID NO: 112197 - DNA, 75 bp, synthetic construct
  source 1..75: mol_type = other DNA
tgttgccgttggtaaaacgctggtttcttctgcgatgatcgaccgtgtggtcaatgatttgggccgtaagctggt

SEQ ID NO: 112198 - DNA, 75 bp, synthetic construct
  source 1..75: mol_type = other DNA
gaagatggtggtatcaagtacaacccgccaaatggtggcccggctgataccaacgtcactaaagtggtggaagac

SEQ ID NO: 112199 - DNA, 75 bp, synthetic construct
  source 1..75: mol_type = other DNA
aacggctggttcgccgcgcgtccgtcaggcacggaagacgcgtacaagatttattgcgaaagcttcctcggtgaa

SEQ ID NO: 112200 - DNA, 75 bp, synthetic construct
  source 1..75: mol_type = other DNA
acctgcgttcatttccgtcctggaagtactggcagcaaacggtgttgatgtcattgtgcaggaaaacaatggctt

SEQ ID NO: 112201 - DNA, 75 bp, synthetic construct
  source 1..75: mol_type = other DNA
caatcagctacatcgggcgcgatgaacttgaggcatgtggtgaggcgtttctggcgcaggttcgccagcaggcag

SEQ ID NO: 112202 - DNA, 75 bp, synthetic construct
  source 1..75: mol_type = other DNA
gtgagtaatgaagccgatgaagcatattcagtaacagaacaactgaccatgacaggaataaacctgatacgccag

SEQ ID NO: 112203 - DNA, 75 bp, synthetic construct
  source 1..75: mol_type = other DNA
atgatgacgacaaaactatcactccctgaacttgacacaactaaactgcctgacaggtgccaggcattacttgat

SEQ ID NO: 112204 - DNA, 75 bp, synthetic construct
  source 1..75: mol_type = other DNA
ggccgttgccgacatcctgacttccatggtggttgacgtttctgacctgcttgaccaggcgcgtcagcgtggcga

SEQ ID NO: 112205 - DNA, 75 bp, synthetic construct
  source 1..75: mol_type = other DNA
tgaacttcatgggctgatggggcagtttcaccagtctgtcgaaagccagctagggcagggtacagttgacgcgat

SEQ ID NO: 112206 - DNA, 75 bp, synthetic construct
  source 1..75: mol_type = other DNA
ttgattgtggaaaatccgcagcagcaattgaaacttttacgctgtttatttggcaagttacaacagcccgatatc

SEQ ID NO: 112207 - DNA, 75 bp, synthetic construct
  source 1..75: mol_type = other DNA
tgctgatttcctccgtacccagcccgttaacggcaatgatggcggccaatggaataatagcaatattgctaatca

SEQ ID NO: 112208 - DNA, 75 bp, synthetic construct
  source 1..75: mol_type = other DNA
atgactaacctgtttgttcgtagcggaatttcttttgtcgatcgtagcgaagttttaacccatatcggtaatgag

SEQ ID NO: 112209 - DNA, 75 bp, synthetic construct
  source 1..75: mol_type = other DNA
atggtggtcatttcagcctatttttccgggtccgaaaccggaatgatgaccctcaaccgctatcgtctgcgacat

SEQ ID NO: 112210 - DNA, 75 bp, synthetic construct
  source 1..75: mol_type = other DNA
tgattattgatggcactgccaacgtgcgagaaattaacaaagcctttaactggcatctaccggaagatgatgctc

SEQ ID NO: 112211 - DNA, 75 bp, synthetic construct
  source 1..75: mol_type = other DNA
tttcgctgcgaagaatggcgaatctacgcaaggttcagcgactggcgcaaagtggcgttctggtggtcagcgatc

SEQ ID NO: 112212 - DNA, 75 bp, synthetic construct
  source 1..75: mol_type = other DNA
cgtttggcgttactttctcacgtattcaacgtttcgcgtaaagaatggggcatggaaagcctgcttaaccctgta

SEQ ID NO: 112213 - DNA, 75 bp, synthetic construct
  source 1..75: mol_type = other DNA
agcacgtcgtggtctgcgtgttggcgaccttttcgacaaagaaaccttcgctgaaaaactgaaagaagtgatgga

SEQ ID NO: 112214 - DNA, 75 bp, synthetic construct
  source 1..75: mol_type = other DNA
taaaagccagacttcagcagaggcattcagcttcggtgatcccattccagtactggaccgccgcgaactgctgga

SEQ ID NO: 112215 - DNA, 75 bp, synthetic construct
  source 1..75: mol_type = other DNA
atgcacgagctgacaaaaatcacggggcataaagacccgagaatgctaatgcggtattatcatccaaaagctgag

SEQ ID NO: 112216 - DNA, 75 bp, synthetic construct
  source 1..75: mol_type = other DNA
cgaccctgcacagatgcagcgggcggttcagtacctgcaagaacgtatggctgctggttctgcttccgggtacgt

SEQ ID NO: 112217 - DNA, 75 bp, synthetic construct
  source 1..75: mol_type = other DNA
attgcagtgaaatgcaacattctgaccagcacctacatccctcacccgcttctcagccagcaggctttttcgcgt

SEQ ID NO: 112218 - DNA, 75 bp, synthetic construct
  source 1..75: mol_type = other DNA
taaggaaattgttaaagaattccatatatatcatagtgttgcgattgaatgtggtggcgaaatttatgatattga

SEQ ID NO: 112219 - DNA, 75 bp, synthetic construct
  source 1..75: mol_type = other DNA
acaggttatcggagcgcttctcggaagtcgggttggtcctgaatacagggaaaacgaatatcgcctacattgaca

SEQ ID NO: 112220 - DNA, 75 bp, synthetic construct
  source 1..75: mol_type = other DNA
actgtgccggataatctgcagctcattaatatttctgatatcagtgagcagcccggaatcggctgggcgtattca

SEQ ID NO: 112221 - DNA, 75 bp, synthetic construct
  source 1..75: mol_type = other DNA
cttacaaaaacgcatacacgaattaaacaaatggattaagaaaccgataatttcatttagtaattacgtgttaga

SEQ ID NO: 112222 - DNA, 75 bp, synthetic construct
  source 1..75: mol_type = other DNA
atgggcgcgccgtggacagtgaaaaaatatattgatgatgtattcaccgaaggtcatggaacgctgtatgccagc

SEQ ID NO: 112223 - DNA, 75 bp, synthetic construct
  source 1..75: mol_type = other DNA
aaaataaaaaagacgttactgactcatcagtttcgtttgaagaaaaaaacattgcactacaggagagaatgaatc

SEQ ID NO: 112224 - DNA, 75 bp, synthetic construct
  source 1..75: mol_type = other DNA
gcggtaaacctgccgacagcacggacaaaactgataacaccggcggggacgcgaaaaatgccaaaaaacagcagg

SEQ ID NO: 112225 - DNA, 75 bp, synthetic construct
  source 1..75: mol_type = other DNA
atatttcttttgctaatcgccgcgaagcactaacccatattggcaacgaaatggtcgcacaaggcgttgttcatg

SEQ ID NO: 112226 - DNA, 75 bp, synthetic construct
  source 1..75: mol_type = other DNA
gtcgagacactaatcactcttcctgaaactcagttaaaggaatacttcacaaagtatgttttagattcagacgaa

SEQ ID NO: 112227 - DNA, 75 bp, synthetic construct
  source 1..75: mol_type = other DNA
gcagcaatcgccatacatggctgcacctgttggagctgacaatggggcatcccgctttagctctgcgcctgctga

SEQ ID NO: 112228 - DNA, 75 bp, synthetic construct
  source 1..75: mol_type = other DNA
atggaaagagaatatcggggggtaccgtttgagaggtacgctgatgatattgtagtacattgttcacgaatgagt

SEQ ID NO: 112229 - DNA, 75 bp, synthetic construct
  source 1..75: mol_type = other DNA
atggctgacaatcaaaacccttatctcgctgctggcgctgatgctgcatcgcagcaatcgccatacatggctgca

SEQ ID NO: 112230 - DNA, 75 bp, synthetic construct
  source 1..75: mol_type = other DNA
tctaccttgagacacccgccgatgcggcaacgctgcgcgatttgctgaaaatgctggggatgaatagcgcccgtg

SEQ ID NO: 112231 - DNA, 75 bp, synthetic construct
  source 1..75: mol_type = other DNA
cgttaatgcagcaaaccgaacagatggcacgccagcacgatgtctggcactacgccttatggagtttaatccagc

SEQ ID NO: 112232 - DNA, 75 bp, synthetic construct
  source 1..75: mol_type = other DNA
gtttttattatcttttaatgtagcggtgtttttattaagtgtgtttgcgtggtgttttatgttttttataatttt

SEQ ID NO: 112233 - DNA, 75 bp, synthetic construct
  source 1..75: mol_type = other DNA
aacttcctgcgccagcgctgccagtgggaactggcggcggagctgccggaaatccaccgtgccgccgcagaaagc

SEQ ID NO: 112234 - DNA, 75 bp, synthetic construct
  source 1..75: mol_type = other DNA
gtattacgaagttcgtaaagagtctgttgacgtcatcagttatagacatccaatcactggagagattgcaacata

SEQ ID NO: 112235 - DNA, 75 bp, synthetic construct
  source 1..75: mol_type = other DNA
agcatttctggcagaacacccggagacagaactgaccatggacgaatggctctgtgcagtgtcctgcatcacctc

SEQ ID NO: 112236 - DNA, 75 bp, synthetic construct
  source 1..75: mol_type = other DNA
caatatgccagtctgacgtcactgtttgcccagcttttcatcgaactggcggaatggcatagcccactttacctg

SEQ ID NO: 112237 - DNA, 75 bp, synthetic construct
  source 1..75: mol_type = other DNA
actcaatgaaaacgcccgcagtctgcggttgatgagcgatctcaaccgtaacctgttgctgcttaatcaactgta

SEQ ID NO: 112238 - DNA, 75 bp, synthetic construct
  source 1..75: mol_type = other DNA
cccgcgttgcgggatcgtataagcatccgtgccaaggtggagcacccgtttcgcatcatcaagcggcagttcggc

SEQ ID NO: 112239 - DNA, 75 bp, synthetic construct
  source 1..75: mol_type = other DNA
ttacgcgcccgtcaggcaaaacgtattggtctggctgcggacgaggtggtggaagacgtgttattacgtttgcag

SEQ ID NO: 112240 - DNA, 75 bp, synthetic construct
  source 1..75: mol_type = other DNA
aaacacccatcattatggtaaaaaaacgtcgtactctttcccccccttacttatctgaaaaaacaggtgttatcg

SEQ ID NO: 112241 - DNA, 75 bp, synthetic construct
  source 1..75: mol_type = other DNA
caaatatcacagcgactggatctctaacgccaacaaagttcgggtgatttactggcaaatgactggcgacaaagc

SEQ ID NO: 112242 - DNA, 75 bp, synthetic construct
  source 1..75: mol_type = other DNA
gaaaatctcaccctggtggtgttgtcacgcaaccttccgcaactgggcattgccaatctgcgtgttcgtgaccag

SEQ ID NO: 112243 - DNA, 75 bp, synthetic construct
  source 1..75: mol_type = other DNA
ttgattgccgtctgtcatcgccgattgagcagtcggatttgcgatgacgtttccggttgggcgacggcactacag

SEQ ID NO: 112244 - DNA, 75 bp, synthetic construct
  source 1..75: mol_type = other DNA
attctgctgaatcacgcctggagtttgttcaaccacagcgaactgtcgctgctggaagagtcgcttaaagccctg

SEQ ID NO: 112245 - DNA, 75 bp, synthetic construct
  source 1..75: mol_type = other DNA
aaattggcataaacaatgatatatcggcatttctggcagaacacccggagacggggtttgaagcccaaccgtacg

SEQ ID NO: 112246 - DNA, 75 bp, synthetic construct
  source 1..75: mol_type = other DNA
aaggacgggcttcagattatcccgctatcagaagtcgcagcgaaggatgaatttcttaacatcaagaacgtgagt

SEQ ID NO: 112247 - DNA, 75 bp, synthetic construct
  source 1..75: mol_type = other DNA
gagttcaccaaagagacgatgctgcgtgctgcggacgagatctattttgtgccagaaggtacgccgctcagcacg

SEQ ID NO: 112248 - DNA, 75 bp, synthetic construct
  source 1..75: mol_type = other DNA
ggcacccgcgtgcgtattggcgagtacgatatcgatattctcgacgtacaggacaatatgattaagcaggtaaaa

SEQ ID NO: 112249 - DNA, 75 bp, synthetic construct
  source 1..75: mol_type = other DNA
ctgcgtcgacgaaccagatccagcataaaagccagactacagccgaagcattcagcttcggtgatcccattccag

SEQ ID NO: 112250 - DNA, 75 bp, synthetic construct
  source 1..75: mol_type = other DNA
cgtcctgaattaatcattcgtttggggattgatattgatactgccatctcccgcaagcctgaccatgactatgcc

SEQ ID NO: 112251 - DNA, 75 bp, synthetic construct
  source 1..75: mol_type = other DNA
tgattatcgatggcaccgccaacgtgcgagaaatcaacaaagcctttaactggcatctaccggaagatgatgccc

SEQ ID NO: 112252 - DNA, 75 bp, synthetic construct
  source 1..75: mol_type = other DNA
gatgcgggcgtggcaattgcgactggtgtgctgacctttgtggtgctggtttttgccgaagtgttgccgaaaact

SEQ ID NO: 112253 - DNA, 75 bp, synthetic construct
  source 1..75: mol_type = other DNA
cgccctgaaccaactgctggaagcacgtactcagcttgccaacctacaaacctatatggatggtaaagcaggagc

SEQ ID NO: 112254 - DNA, 75 bp, synthetic construct
  source 1..75: mol_type = other DNA
aacccactccacttttcaaaacttgttgccaccaaaggcggcaggcattgcgatggcgctaaatgtactgggtaa

SEQ ID NO: 112255 - DNA, 75 bp, synthetic construct
  source 1..75: mol_type = other DNA
acgagcagcatctggaacagctgccaatgcatgaatttctggtacgtatccgagcacaactgttatgggcctggg

SEQ ID NO: 112256 - DNA, 75 bp, synthetic construct
  source 1..75: mol_type = other DNA
ttcagcaatggctgaactcattgtggcaggaaaaagaccggcttctgacatcgttgatgtcatcacagcggcagg

SEQ ID NO: 112257 - DNA, 75 bp, synthetic construct
  source 1..75: mol_type = other DNA
ccgcgtgcagattgagtatgacgttgagatttacggctccgagaaaaaaatcgaactgccgtttgtcatggcggt

SEQ ID NO: 112258 - DNA, 75 bp, synthetic construct
  source 1..75: mol_type = other DNA
atgagtggctttcaaagtgtaattaatcagcaacaggcgccgggagttgaaggggatttcgcttcggctaaccct

SEQ ID NO: 112259 - DNA, 75 bp, synthetic construct
  source 1..75: mol_type = other DNA
caacgataatgaagcccggcaatccgccggtattctggacccgttactccagaaataaaatgacccggacagagt

SEQ ID NO: 112260 - DNA, 75 bp, synthetic construct
  source 1..75: mol_type = other DNA
atgaaaccagagcttctaaagacggtgttcagcgtagaagcggaaatccatcccgaaccggtatctggcagaccc

SEQ ID NO: 112261 - DNA, 75 bp, synthetic construct
  source 1..75: mol_type = other DNA
tgccaatctgagcacgcaattacccggttgggtggttgcttcacaacctctgggcagcgctcaggatacgctcaa

SEQ ID NO: 112262 - DNA, 75 bp, synthetic construct
  source 1..75: mol_type = other DNA
cagtaataacactgacgggatgtaccattactcgtcaggctcatgtgagtaatgttgatgcggcagcgggcattg

SEQ ID NO: 112263 - DNA, 75 bp, synthetic construct
  source 1..75: mol_type = other DNA
acgatgccgttgaaggactggcgaatggcaatgagccgctttattatcgagttcggtgaccgcctggacggtcac

SEQ ID NO: 112264 - DNA, 75 bp, synthetic construct
  source 1..75: mol_type = other DNA
aaaattccccgccagcaggcgttgctgaaaatcttatatcacaaatgtgaatttaatgatgagatgctggccgag

SEQ ID NO: 112265 - DNA, 75 bp, synthetic construct
  source 1..75: mol_type = other DNA
tggtgccttcagcggaattgttcaaaactggttaatgaatatggcgggttatgatctttataaacaagccccgct

SEQ ID NO: 112266 - DNA, 75 bp, synthetic construct
  source 1..75: mol_type = other DNA
agtttttgctgcctgcgtattgataatcttgagtttctgagtcgtcattacggcctggtgatgcgtgttcattgt

SEQ ID NO: 112267 - DNA, 75 bp, synthetic construct
  source 1..75: mol_type = other DNA
aaagtgctgccacgcagacctttgacggtattgcacagaatatggcagcgatgctgaccggcagcgaacagaact

SEQ ID NO: 112268 - DNA, 75 bp, synthetic construct
  source 1..75: mol_type = other DNA
gcgcatgccagcaggaaggctatacccacgcggtcccctttggtcagccagtaggcaactgtagccttttgcggg

SEQ ID NO: 112269 - DNA, 75 bp, synthetic construct
  source 1..75: mol_type = other DNA
gtaatgctggcaatcttgtttatctttggctggcgcggtgtcgttcctgttttaggcgggatgttttgcaccaat

SEQ ID NO: 112270 - DNA, 75 bp, synthetic construct
  source 1..75: mol_type = other DNA
ggataaggtggtgtttaatctgaactgtactggcaatccggatgcgcagaatattctgcaacacggcgttaatct

SEQ ID NO: 112271 - DNA, 75 bp, synthetic construct
  source 1..75: mol_type = other DNA
tactgcaaatcttatatcacaaatgtgaatttaatgatgagatgctggcagaggcagtaatacgcgagaagatgg

SEQ ID NO: 112272 - DNA, 75 bp, synthetic construct
  source 1..75: mol_type = other DNA
atattgaagcccgcctgaattttctggcaaaacagaccggtcggacaaaaacattctatgcaagagaagctattc

SEQ ID NO: 112273 - DNA, 75 bp, synthetic construct
  source 1..75: mol_type = other DNA
ttttgctaaaagcaggctacaacgcacagaactcccttaagccagatcatcaacttctcgatgactttcaggctc

SEQ ID NO: 112274 - DNA, 75 bp, synthetic construct
  source 1..75: mol_type = other DNA
tatcgtcgccagcctgcttagccactgccgcgatttgctcggcagccaaatacagaccgcctcacgcagccaggc

SEQ ID NO: 112275 - DNA, 75 bp, synthetic construct
  source 1..75: mol_type = other DNA
tgctgaaaatcttatatcacaaatgtgaatttaatgtaagcgtaaagccaatgccgtctgtaacacctgctcctt

SEQ ID NO: 112276 - DNA, 75 bp, synthetic construct
  source 1..75: mol_type = other DNA
cgggggccattggttttaacgaatacctgaatcacacgcgactggagcacgctaagacgttattgaaaggctatg

SEQ ID NO: 112277 - DNA, 75 bp, synthetic construct
  source 1..75: mol_type = other DNA
ggcggattaccggggaagctggagccttattcgcctgctggaacaggcgcaggtgacaccggtggacagcagcac

SEQ ID NO: 112278 - DNA, 75 bp, synthetic construct
  source 1..75: mol_type = other DNA
agatcacatggtagaatgctatgtgataaaaaatgaggttgtggttgcccgggcccagattgaagttcccataag

SEQ ID NO: 112279 - DNA, 75 bp, synthetic construct
  source 1..75: mol_type = other DNA
ccgttcaaagcctcacaaaacgatgcctctcttcccctgctggcacagtatctgcgcgatgacgggcgcatcaac

SEQ ID NO: 112280 - DNA, 75 bp, synthetic construct
  source 1..75: mol_type = other DNA
gtcctgtcggctcaagatatatgattcatgtcaaagctagtgaaaacggagatctcagcacaagccatgcctggg

SEQ ID NO: 112281 - DNA, 75 bp, synthetic construct
  source 1..75: mol_type = other DNA
agaccctctaaaaattgagcgactagatgattcgcttttagatgcgtttattaataaaggccctgatttatcttt

SEQ ID NO: 112282 - DNA, 75 bp, synthetic construct
  source 1..75: mol_type = other DNA
tgaccaacgcccccgacccgcaggagatgacccagcaactggcgcagacggttttacagggcaaaaccgttgacc

SEQ ID NO: 112283 - DNA, 75 bp, synthetic construct
  source 1..75: mol_type = other DNA
gcggacagcctgaaccgccagtggcagcgggcgattgtcagccactggaatcaggatttcgccggtcgctatccg

SEQ ID NO: 112284 - DNA, 75 bp, synthetic construct
  source 1..75: mol_type = other DNA
aatggagtggcttcggtcaggcgctgttcgtccgcccggtggagcagtcgtggcggcaggtgctgacgcctgcgg

SEQ ID NO: 112285 - DNA, 75 bp, synthetic construct
  source 1..75: mol_type = other DNA
ttcattgcgggagttaatccaggatcacttgactgctgggttagagcatgacccgtttcagcaattgcgtgaaaa

SEQ ID NO: 112286 - DNA, 75 bp, synthetic construct
  source 1..75: mol_type = other DNA
accatttaacgccagaggggatcacagtccaggagctggtttcgtatggtcgtaatccctggctgtcactctggg

SEQ ID NO: 112287 - DNA, 75 bp, synthetic construct
  source 1..75: mol_type = other DNA
ctgaaatatgacggcggcattatgacgccggataaatttctgccacttatcgcccagtttaacctaagcgcgcgt

SEQ ID NO: 112288 - DNA, 75 bp, synthetic construct
  source 1..75: mol_type = other DNA
ctgaacttcatttaccggaaggacggcaaggacattgtgcctgaccgtatccgttccgcgcttgggcttggctga

SEQ ID NO: 112289 - DNA, 75 bp, synthetic construct
  source 1..75: mol_type = other DNA
attaggttatgtgtctgcagccgaaagttatttgcgagctcttatcagaaatctaattaatcatgatgaatatat

SEQ ID NO: 112290 - DNA, 75 bp, synthetic construct
  source 1..75: mol_type = other DNA
agctgggacactgacgggcttgggtatgaccagggcatctggcaagggccatatgatcctgattctggctatacg

SEQ ID NO: 112291 - DNA, 75 bp, synthetic construct
  source 1..75: mol_type = other DNA
ttttacgtcgtagctcaggcacacccattttccgggctgtggtgtttgtgtgtacaccgtggttctttcaagata

SEQ ID NO: 112292 - DNA, 75 bp, synthetic construct
  source 1..75: mol_type = other DNA
agacggacgattatttatgttgcctcatcaggtccatgaataaaacctgcgaaatggcttacgaatatatcgata

SEQ ID NO: 112293 - DNA, 75 bp, synthetic construct
  source 1..75: mol_type = other DNA
atatgatccagatgcaggctataccacgctgagcgatacaacctatcgcatcgttcttaaggcaaaaatcgccat

SEQ ID NO: 112294 - DNA, 75 bp, synthetic construct
  source 1..75: mol_type = other DNA
ggcaaaagatgtgttgagtaatctcaacgaactggacggtctgtttcaacaggatgccaccagtatcagcggtaa

SEQ ID NO: 112295 - DNA, 75 bp, synthetic construct
  source 1..75: mol_type = other DNA
gttatagatggtttctttttaggcgcgaggagaatctcattctcttatcctcgactggaaagcgagttaatacag

SEQ ID NO: 112296 - DNA, 75 bp, synthetic construct
  source 1..75: mol_type = other DNA
caatatagatatgaataaattccgtgacagggttcataacactattgtacaggaggttcagagaaatttaaaatg

SEQ ID NO: 112297 - DNA, 75 bp, synthetic construct
  source 1..75: mol_type = other DNA
aatttatcggaaaatgcttcattttaatatttttagaacttcttgttatatgttcttttatattattgctgcatt

SEQ ID NO: 112298 - DNA, 75 bp, synthetic construct
  source 1..75: mol_type = other DNA
taacgatcgcccgttgtgggagattgacctgctgaacttcatttaccggaaggacggcaaggacattgtgcccga

SEQ ID NO: 112299 - DNA, 75 bp, synthetic construct
  source 1..75: mol_type = other DNA
cgctgctctctgctgtgatgttctttgtcctggcgggcgtctttatgggcgtgcaactcgagctggatggcacca

SEQ ID NO: 112300 - DNA, 75 bp, synthetic construct
  source 1..75: mol_type = other DNA
tctcattggatgcaagatgcgcccagacatccactcatcacatgattttaaatagtcagtattttcagaaaaaaa

SEQ ID NO: 112301 - DNA, 75 bp, synthetic construct
  source 1..75: mol_type = other DNA
gtgcaacttgacattctgggattgtggatcggacgtagccgtgttgtcagccagcctatttcaggtgtctatttc

SEQ ID NO: 112302 - DNA, 75 bp, synthetic construct
  source 1..75: mol_type = other DNA
tgaaatcgacgtgctgaacttcatctggcgcgttgatggcaaggatgtgctgcctgatcgcacccgctccatgct

SEQ ID NO: 112303 - DNA, 75 bp, synthetic construct
  source 1..75: mol_type = other DNA
gtgggaaactgtagcgtctttgccggttctttatgtctgaatactgaattcactttgtcatatcggtgccagcat

SEQ ID NO: 112304 - DNA, 75 bp, synthetic construct
  source 1..75: mol_type = other DNA
gacgtagcccgtaaggcggcaatggatgttgtgaccgggcagatgcgtgatggtggtctgttctccggaggtgga

SEQ ID NO: 112305 - DNA, 75 bp, synthetic construct
  source 1..75: mol_type = other DNA
aacacctactacaagctgagtgttaacgatcgcccgttgtgggagattgacctgctgaacttcatttaccggaag

SEQ ID NO: 112306 - DNA, 75 bp, synthetic construct
  source 1..75: mol_type = other DNA
agtatcggcagcgccattggaggtgctaccggtggcggctcatcagcgtcaggtggtgcagccattcaggccgct

SEQ ID NO: 112307 - DNA, 75 bp, synthetic construct
  source 1..75: mol_type = other DNA
atgccttatcattcatgataataataaactcggtgatttaattgtattaagttcgatttatcgtgagctttatag

SEQ ID NO: 112308 - DNA, 75 bp, synthetic construct
  source 1..75: mol_type = other DNA
tctctaacaataaaaatatatttgagttctgtattaaagaatcaaccggttttcttaaaatgcttactctatgta

SEQ ID NO: 112309 - DNA, 75 bp, synthetic construct
  source 1..75: mol_type = other DNA
tttttacgctgtttgtggatggtgaaaacgaagtgggtaaggtgacctccgtcactcagcccaaactgacgcgca

SEQ ID NO: 112310 - DNA, 75 bp, synthetic construct
  source 1..75: mol_type = other DNA
tttttacggtgtttgtggatggtgaaaacgaagtgggtaacgtgacctccgtcactcagcccaaactgacgcgca

SEQ ID NO: 112311 - DNA, 75 bp, synthetic construct
  source 1..75: mol_type = other DNA
gcggctgtccgtcgcgcagaccgtcatccccgtatctgtatgcttcgcaccgtcgccggtgatgaacgcagcgcc

SEQ ID NO: 112312 - DNA, 75 bp, synthetic construct
  source 1..75: mol_type = other DNA
tgagcgttaacgatcgcccgctgttggaaatcgacctgttgaaccacatctaccggaaggacggcaaggacattg

SEQ ID NO: 112313 - DNA, 75 bp, synthetic construct
  source 1..75: mol_type = other DNA
tgatgaacgcagtgcccgccgttcccttgtccgtgactatgtgctctcccttgctgcccgtctgccggtggtgga

SEQ ID NO: 112314 - DNA, 75 bp, synthetic construct
  source 1..75: mol_type = other DNA
aatgaccgctggcgcaaagtgttcggacgagccttccccagacgtaaagtgggtattatggaagcccgtcttggt

SEQ ID NO: 112315 - DNA, 75 bp, synthetic construct
  source 1..75: mol_type = other DNA
ttccttaacgaacgctggaaaggcgtgcaacccatcgcctggggagatgcactgcgcgaaagcgaatttacccgc

SEQ ID NO: 112316 - DNA, 75 bp, synthetic construct
  source 1..75: mol_type = other DNA
tcgaagcgaaaagccgtggtatttacgaggctccggggatggcactgctacatatcgcttatgaacgtctgttga

SEQ ID NO: 112317 - DNA, 75 bp, synthetic construct
  source 1..75: mol_type = other DNA
ggggaatattcatattggttcgaaaagtcccttctgattcctgcttctgcgaatgttgaaatgccaaatccagac

SEQ ID NO: 112318 - DNA, 75 bp, synthetic construct
  source 1..75: mol_type = other DNA
agcgaccaaatcgaaaaccgtatcatcgaagcgaaaagccgtggcatctacgaagctccggggatggcgctgctg

SEQ ID NO: 112319 - DNA, 75 bp, synthetic construct
  source 1..75: mol_type = other DNA
gcgtaaagcatggattggactggcaaaccgctcgcgaaccgttagccagcctgttttacaatcgtaagcatcata

SEQ ID NO: 112320 - DNA, 75 bp, synthetic construct
  source 1..75: mol_type = other DNA
gtccgtatccatacagcatgagctggctggactgttttgagaattcggctcttgcggctaaaacctgcacagagc

SEQ ID NO: 112321 - DNA, 75 bp, synthetic construct
  source 1..75: mol_type = other DNA
acctggatatcaccgatacccgcgagaaacttttcggttatgccaaaactggcctgctttcctcctctgccgctt

SEQ ID NO: 112322 - DNA, 75 bp, synthetic construct
  source 1..75: mol_type = other DNA
acctgttggcgtttactaccgccgcacgttttggcagctttagtaaagccgcggatgaattggggctaaccactt

SEQ ID NO: 112323 - DNA, 75 bp, synthetic construct
  source 1..75: mol_type = other DNA
tgcgctgaaacagacatgggcttcggaagaccagctgaatggcagctggatggccgggcttcagtcgggctggag

SEQ ID NO: 112324 - DNA, 75 bp, synthetic construct
  source 1..75: mol_type = other DNA
gtggcggcattgattacaccgagattggtgcgattcgctgggcttttgctatcgccccggatcacccgttagcct

SEQ ID NO: 112325 - DNA, 75 bp, synthetic construct
  source 1..75: mol_type = other DNA
caacccaattatgggcgtgaaattctgggatgagagcgtgaagatcccggcagaagaagtcacagtacgctttga

SEQ ID NO: 112326 - DNA, 75 bp, synthetic construct
  source 1..75: mol_type = other DNA
ccggcagtctttttgaacgtatccgtgaggcggcaaacccaccttcataccagaatccaaaagaagcactgatac

SEQ ID NO: 112327 - DNA, 75 bp, synthetic construct
  source 1..75: mol_type = other DNA
acaaattaatatttgggaaacctttattgtcaatagcacaaatgttaatcaagacgacgcaatgctttttcctta

SEQ ID NO: 112328 - DNA, 75 bp, synthetic construct
  source 1..75: mol_type = other DNA
gtgacgtgattatcattggcggcggcgcaacgggagccgggattgcccgcgactgtgccctgcgcgggctgcgcg

SEQ ID NO: 112329 - DNA, 75 bp, synthetic construct
  source 1..75: mol_type = other DNA
ggtctgattcgcgaaggcgcgacggtgtgtggcgtgcatgtgcgtaatcatctcactggcgaaaaacagtcgcta

SEQ ID NO: 112330 - DNA, 75 bp, synthetic construct
  source 1..75: mol_type = other DNA
tgtgcggcgttcatgtacgtaaccacctcaccggcgaaacccaggcacttcatgcgcctgtcgtggttaatgccg

SEQ ID NO: 112331 - DNA, 75 bp, synthetic construct
  source 1..75: mol_type = other DNA
gaatcaggtggtttgtagggcgccagataaagatctcgctcatctgactgcagagacagtattaaaaaaaatcaa

SEQ ID NO: 112332 - DNA, 75 bp, synthetic construct
  source 1..75: mol_type = other DNA
atcgaacgtagtgaactgaaaaacggcgacctggtctttttccgtactcagggacgcggtacagccgatcatgtc

SEQ ID NO: 112333 - DNA, 75 bp, synthetic construct
  source 1..75: mol_type = other DNA
gagtctggaaggtgttgccagcgtgctggctggggcgaaattcgtggtttcggtggatacgggattaagccattt

SEQ ID NO: 112334 - DNA, 75 bp, synthetic construct
  source 1..75: mol_type = other DNA
cccgctttacggttctggaagaggccgcgaagacccgaacgctttctgctgaggaaaaatccctgctggccagta

SEQ ID NO: 112335 - DNA, 75 bp, synthetic construct
  source 1..75: mol_type = other DNA
cgaatatgccgatctgcgcattcgcatgttcccggcgaaaggatcgctgctgattatggatcaccgcattaatca

SEQ ID NO: 112336 - DNA, 75 bp, synthetic construct
  source 1..75: mol_type = other DNA
catggattactacacagcggcgcgcgctatgcggtgacagatgcagaatcagcgcgcgaatgtattagcgaaaac

SEQ ID NO: 112337 - DNA, 75 bp, synthetic construct
  source 1..75: mol_type = other DNA
aataacaccacgcagattgcgaccaccgagtttgttcaggcggctctgacggctcttattaatggtgcgccagcc

SEQ ID NO: 112338 - DNA, 75 bp, synthetic construct
  source 1..75: mol_type = other DNA
attatgttcctgcatcagcagataactccataatgggtactcaaaggacagcggaggataattttaccggggcat

SEQ ID NO: 112339 - DNA, 75 bp, synthetic construct
  source 1..75: mol_type = other DNA
gcgctggtgacgcgtctggcgcatggcgtaaagcatggattggactggcaaaccgctcgcgaaccgttagccagc

SEQ ID NO: 112340 - DNA, 75 bp, synthetic construct
  source 1..75: mol_type = other DNA
gtcatgggacgcgtgggataacacggtactggtgccaaatgacaaaggaggggatagtctgttgtcgacagataa

SEQ ID NO: 112341 - DNA, 75 bp, synthetic construct
  source 1..75: mol_type = other DNA
gatgctggcgaatatgctgtatttctccacgcgacaacccgtgatgataaacactggccggaagcgcactggcga

SEQ ID NO: 112342 - DNA, 75 bp, synthetic construct
  source 1..75: mol_type = other DNA
gctctgccattgtggttggggatttgcttgcccacatggaagaaattacgggagaaagcggggtagacgctttcg

SEQ ID NO: 112343 - DNA, 75 bp, synthetic construct
  source 1..75: mol_type = other DNA
gtcagccggtgaacgtcaggaagaccaggcgcatgctgccctgctggcgcttgaaaccgagctccggacgctgga

SEQ ID NO: 112344 - DNA, 75 bp, synthetic construct
  source 1..75: mol_type = other DNA
tttcactggctggtatgtcaccaaaatccagcaatatgacagcaaagtctggcattaatacagcagatacaagca

SEQ ID NO: 112345 - DNA, 75 bp, synthetic construct
  source 1..75: mol_type = other DNA
tggattaacagtaccaattattcggtagaagagattgccaccaagatcctcgatatcatgggccttagtcgccga

SEQ ID NO: 112346 - DNA, 75 bp, synthetic construct
  source 1..75: mol_type = other DNA
atgattctgactctgaatgataagcgtgaaatatcgcaaataatcgcaagttttactgatgaagattacgaacga

SEQ ID NO: 112347 - DNA, 75 bp, synthetic construct
  source 1..75: mol_type = other DNA
ccgagatcagtcgcgaagtggcctctgaagaagtccgcgtcatcgacgtattgggctttaaaacgctccctgctg

SEQ ID NO: 112348 - DNA, 75 bp, synthetic construct
  source 1..75: mol_type = other DNA
cgcgcagaagacaaaataatgagcggtacagtatcagtcaatggtactgacctaccgacaactacattcccttcg

SEQ ID NO: 112349 - DNA, 75 bp, synthetic construct
  source 1..75: mol_type = other DNA
cacctggtcggcgagaacttcgccaccctgcgccgttacacgccggccttgctggaggtgctggaactgcgcgcc

SEQ ID NO: 112350 - DNA, 75 bp, synthetic construct
  source 1..75: mol_type = other DNA
actccttcagaccctcggcaggatgaccataaacagcggatcattgatttgttgactccggttgcactgggtgag

SEQ ID NO: 112351 - DNA, 75 bp, synthetic construct
  source 1..75: mol_type = other DNA
tgaagagcagcgtcttcgtgacgtgtatggcgataatccgcaggcgctggcccgggtcaccggggcactgaaaca

SEQ ID NO: 112352 - DNA, 75 bp, synthetic construct
  source 1..75: mol_type = other DNA
atcagccagcagcgccgggatttatggaaggcggaaagtcagttcgcggtactggcggaggcggcacaacgtcgc

SEQ ID NO: 112353 - DNA, 75 bp, synthetic construct
  source 1..75: mol_type = other DNA
tcgacttcatttaaaaatgcatctgtaagtacttcaacgccagctgatgaagccagtattttcgttaatggcggg

SEQ ID NO: 112354 - DNA, 75 bp, synthetic construct
  source 1..75: mol_type = other DNA
caggatggcgatcaaacgtcatggcagttatcccatactttttataacgattcattcagccataaagaacttggc

SEQ ID NO: 112355 - DNA, 75 bp, synthetic construct
  source 1..75: mol_type = other DNA
ttcctaaaggaagaaatcgctcaatttgaagattctctctatgacgaaaaaatagaaaaagtggttgattttttt

SEQ ID NO: 112356 - DNA, 75 bp, synthetic construct
  source 1..75: mol_type = other DNA
caatgaggcggtgacattcacgctaccggcagatgtgagcgcaagctttactctcggacaaggcggttccgccat

SEQ ID NO: 112357 - DNA, 75 bp, synthetic construct
  source 1..75: mol_type = other DNA
ttcctgaaatgtccgctgagtgttttgaagaaacgcgccagcattcgctatagcggggatgtgaattgtagcgtg

SEQ ID NO: 112358 - DNA, 75 bp, synthetic construct
  source 1..75: mol_type = other DNA
cctgctgcagcagggcggacaggtgaaggactccttcggcgggctgatccccatgttccggagccttgctggtgc

SEQ ID NO: 112359 - DNA, 75 bp, synthetic construct
  source 1..75: mol_type = other DNA
gaatgttgaaatgccgaacccagacatgccggaggattgtaagtccgactacatggaagccaggagcatcgtcaa

SEQ ID NO: 112360 - DNA, 75 bp, synthetic construct
  source 1..75: mol_type = other DNA
tggtgcgattcgctgggcttttgctatcgccccggatcacccgttagcctttgtgccggagccgatcgccgaaag

SEQ ID NO: 112361 - DNA, 75 bp, synthetic construct
  source 1..75: mol_type = other DNA
attttcttgaaatccgcatttctcttgtcatttgcatcctgttttctggatgaacttattacatatccacaaaaa

SEQ ID NO: 112362 - DNA, 75 bp, synthetic construct
  source 1..75: mol_type = other DNA
taacaatacagacacagacaaccgtgaaagtcactggcaactcaagcaccgcccatgttgctagctttatcgctg

SEQ ID NO: 112363 - DNA, 75 bp, synthetic construct
  source 1..75: mol_type = other DNA
taaagaacttggcgtaaccgtcggaggcctgaacaccgataccataaacagcgcggttaacgggcgttgggatgg

SEQ ID NO: 112364 - DNA, 75 bp, synthetic construct
  source 1..75: mol_type = other DNA
cattgtggtgaaagtgcctattggttcgaagaaaaaatgatggtccctgctgcgggtaatgttgagttgcctaat

SEQ ID NO: 112365 - DNA, 75 bp, synthetic construct
  source 1..75: mol_type = other DNA
tatgatgcgcgcattgcggcgattgattacaccctcgcccacgatgacggcatttcgttgcgcaatctggatcag

SEQ ID NO: 112366 - DNA, 75 bp, synthetic construct
  source 1..75: mol_type = other DNA
atgatatccattaagagctattttaactggaataagttatttatgtttttagctgcggccttatattggttttgg

SEQ ID NO: 112367 - DNA, 75 bp, synthetic construct
  source 1..75: mol_type = other DNA
attaccggagtccattcaggttcaggcacagttgaaacagcctaaattacgtggaaacgttcagacggcgcaaag

SEQ ID NO: 112368 - DNA, 75 bp, synthetic construct
  source 1..75: mol_type = other DNA
gagcagattgcgtatgttgcgcaactgcagcgttcgggtgatgaggccggggcattgcaggccgcaaacgaggcc

SEQ ID NO: 112369 - DNA, 75 bp, synthetic construct
  source 1..75: mol_type = other DNA
tttctcttgtcatttacatcctgttttctggatgaacttattacatatccacaaaaaggtgaacataagttatga

SEQ ID NO: 112370 - DNA, 75 bp, synthetic construct
  source 1..75: mol_type = other DNA
cgacggaccacccgcaacgcacgcttattctggcggaactggaaaagctggatgctctttttgcggatgacgcaa

SEQ ID NO: 112371 - DNA, 75 bp, synthetic construct
  source 1..75: mol_type = other DNA
aagataaaaagcgtagcgaggctgttcgcgccttagattcatggatgcgagatgggtatagtgctgcgcaaattt

SEQ ID NO: 112372 - DNA, 75 bp, synthetic construct
  source 1..75: mol_type = other DNA
ccggcacagtttatcgcctgaaatgcagaataaagccttagaaaaagcgggattgccatttaccggtaatgctgc

SEQ ID NO: 112373 - DNA, 75 bp, synthetic construct
  source 1..75: mol_type = other DNA
ttaccgaaggactgggagaaaacgactcagaaatatatcaatgagttgcaggcgaatccggcgaaaatcgctacc

SEQ ID NO: 112374 - DNA, 75 bp, synthetic construct
  source 1..75: mol_type = other DNA
caacagcaggatccgggctgcgaatgcagattgtcgataaccaggacatgacgatatcggtctgggtctttcctg

SEQ ID NO: 112375 - DNA, 75 bp, synthetic construct
  source 1..75: mol_type = other DNA
gcaggaactggcgtatggtttccaacgcctgagattgcctgttcaattgtatttattgccgttatcggcggaatt

SEQ ID NO: 112376 - DNA, 75 bp, synthetic construct
  source 1..75: mol_type = other DNA
aaaacgtaaccagacattaatgttgtatcctactgtaaaagaaacgctggaattattgaagaaacggggggtaaa

SEQ ID NO: 112377 - DNA, 75 bp, synthetic construct
  source 1..75: mol_type = other DNA
atgccatctgagtatgatgaacaacgggatgcgaatgatacgcagcttcccggcgaatatgacctttttgattta

SEQ ID NO: 112378 - DNA, 75 bp, synthetic construct
  source 1..75: mol_type = other DNA
aacctgttcaggtctttactgatgatttagggcgcaaagtcactgttcctgctcatccaaagagaattgtctctt

SEQ ID NO: 112379 - DNA, 75 bp, synthetic construct
  source 1..75: mol_type = other DNA
ctcctgtcgccagccacgggcgaacacggcctgatggtagccatttcattcgatcaggcgcgttactgacaggcg

SEQ ID NO: 112380 - DNA, 75 bp, synthetic construct
  source 1..75: mol_type = other DNA
accttcggtggaaaccccatcggaaggttcaaaatttttggttttgatatggataacgaatttatcagtggtttt

SEQ ID NO: 112381 - DNA, 75 bp, synthetic construct
  source 1..75: mol_type = other DNA
acccggccacttattgatgttgcggctgccaccagagggctgattactgcatttgatattgactctgcggttggt

SEQ ID NO: 112382 - DNA, 75 bp, synthetic construct
  source 1..75: mol_type = other DNA
catagatggtgcagctgcagaactactacgcataggcttaagcgaagcttcaatcaaaaacaccaccaaatcgaa

SEQ ID NO: 112383 - DNA, 75 bp, synthetic construct
  source 1..75: mol_type = other DNA
gttacgaaggcgcgcgtaaagcgctgaccgggctttctccggacgaaatcgttaatcaggtaaaagactctggcc

SEQ ID NO: 112384 - DNA, 75 bp, synthetic construct
  source 1..75: mol_type = other DNA
aaaaaataaggtaatcaatggagagctaacctatgaagaggcaaagagagaagtattaaattatcacattgaaca

SEQ ID NO: 112385 - DNA, 75 bp, synthetic construct
  source 1..75: mol_type = other DNA
gcacggtgtgcctgtaaacacattgaagtaaccgaggatttctttgccatccttggcattccgttaaaactggtt

SEQ ID NO: 112386 - DNA, 75 bp, synthetic construct
  source 1..75: mol_type = other DNA
agtgttgacgctgaaacgcctgcggtgtctgccagccagttcggtatggtcggtaaaagcccggcgatgcaacac

SEQ ID NO: 112387 - DNA, 75 bp, synthetic construct
  source 1..75: mol_type = other DNA
acaagtctggcaacaagctcaggcgcaggtatcccgtactctcggtcagttaacgattattagtgagcgttatcc

SEQ ID NO: 112388 - DNA, 75 bp, synthetic construct
  source 1..75: mol_type = other DNA
atcgccagtattaaaggttattccagccatgaaaaagaagtactggaagccgtaacattggcgcgtagtcaggct

SEQ ID NO: 112389 - DNA, 75 bp, synthetic construct
  source 1..75: mol_type = other DNA
gtgtaaaggaggaaataaataaagatgctattctgaatgaaaaagaggctgtgaaaaatattcccggtatttcca

SEQ ID NO: 112390 - DNA, 75 bp, synthetic construct
  source 1..75: mol_type = other DNA
tgccaatttaaccaccggtgaagtgcaatggcgaaatcgccctccgtcagtgaatatccgtggcgctgatgccgt

SEQ ID NO: 112391 - DNA, 75 bp, synthetic construct
  source 1..75: mol_type = other DNA
ttgaatcaatatcaacgtcgcgccgatcttattcctaatcttgtcgccagcattaaaggttattccagccatgaa

SEQ ID NO: 112392 - DNA, 75 bp, synthetic construct
  source 1..75: mol_type = other DNA
cgtaacattggcacgtagtcaggctaatcgcgccagtagcgatcttcagcaaactccgggagatgaacaaaaatt

SEQ ID NO: 112393 - DNA, 75 bp, synthetic construct
  source 1..75: mol_type = other DNA
aaactgatatttctgatgcgtctctcgaactgatcgccgctatcaaacagggctatctcaccgttaaatcagctg

SEQ ID NO: 112394 - DNA, 75 bp, synthetic construct
  source 1..75: mol_type = other DNA
gtcatgaaaaaggcgttttggaagccgtaacattggctcgtagacaggctaatcgcgccagtaacgatcttcagc

SEQ ID NO: 112395 - DNA, 75 bp, synthetic construct
  source 1..75: mol_type = other DNA
ttggctcgtagccaggctaatcgcgccagcagcgatcttcagcaaactccgggaaatgaacaaaaattacaagcc

SEQ ID NO: 112396 - DNA, 75 bp, synthetic construct
  source 1..75: mol_type = other DNA
ctgcacgccgtgaatactggcaggaacagggctacatccgggccgctgatattccgggttacaccgtgttgcaac

SEQ ID NO: 112397 - DNA, 75 bp, synthetic construct
  source 1..75: mol_type = other DNA
gcgttttcgccaggatctctactatcgcctgaacgtggtggcgattgaagtaccatcgctgcggcaacggcggga

SEQ ID NO: 112398 - DNA, 75 bp, synthetic construct
  source 1..75: mol_type = other DNA
gtgccggactggttacacgcagcgatgcggggcataaatccatttctcgcgccagtcgcggttgtgatcgcctgg

SEQ ID NO: 112399 - DNA, 75 bp, synthetic construct
  source 1..75: mol_type = other DNA
agaattattgagatacgttctggttcttatttagaagaagatgatattatcaggttttctgacaatgatggatat

SEQ ID NO: 112400 - DNA, 75 bp, synthetic construct
  source 1..75: mol_type = other DNA
gtgtgctgtgtcggtccgtctacaatgggggcttagggtgatggccgagcggatgattaagtgcctgccacgtga

SEQ ID NO: 112401 - DNA, 75 bp, synthetic construct
  source 1..75: mol_type = other DNA
ggaaggcggaaagtcagtatgcggtcctgaaagaggctgccacgaaacgacagttatctgagcaggaaaaatccc

SEQ ID NO: 112402 - DNA, 75 bp, synthetic construct
  source 1..75: mol_type = other DNA
gaccgggcactggcagtggatgagcacttttatcatcaggtgattggggaggcataccggcataaagtgctgttt

SEQ ID NO: 112403 - DNA, 75 bp, synthetic construct
  source 1..75: mol_type = other DNA
cggcgaatatgacctttttgatttaatggcgcaggttactgaagagaacctgcacgccccggtggattttgggct

SEQ ID NO: 112404 - DNA, 75 bp, synthetic construct
  source 1..75: mol_type = other DNA
acatctgcactgaagaacacctggtctgcggaggagcagcttcgtggaagctggatggccgggctgaagtccggc

SEQ ID NO: 112405 - DNA, 75 bp, synthetic construct
  source 1..75: mol_type = other DNA
cgccgcaaaatctgcctgttacatgaactgttccagccggtaaacccggtttgtgcagtgtcagtacgtctgcaa

SEQ ID NO: 112406 - DNA, 75 bp, synthetic construct
  source 1..75: mol_type = other DNA
tagtggcgatttatatgccaatggtgccggaagctgcggtcgcaatgctggcctgcgcccgcattggcgcggtgc

SEQ ID NO: 112407 - DNA, 75 bp, synthetic construct
  source 1..75: mol_type = other DNA
atcgactctaactcacgactggtgatcacctctgatgaaggcgtgcgtgccgggcgcagcattccgctgaagaaa

SEQ ID NO: 112408 - DNA, 75 bp, synthetic construct
  source 1..75: mol_type = other DNA
aaaatcgactggcaggaagggcgcgacctgtggtggcacgacctggttgagcaagccagcgatcagcaccaggcg

SEQ ID NO: 112409 - DNA, 75 bp, synthetic construct
  source 1..75: mol_type = other DNA
acggctcggaagaaagcattattactgacgatgaacacccttttgtggcacatcgaccgtcagcggtgcagaggg

SEQ ID NO: 112410 - DNA, 75 bp, synthetic construct
  source 1..75: mol_type = other DNA
cgtttcagcagtcgcttgatggtctgccacaatgggtatctgaacgtatattgcagcagataaatcagttaaccc

SEQ ID NO: 112411 - DNA, 75 bp, synthetic construct
  source 1..75: mol_type = other DNA
gtgcgggccgtcattcaggccgtgcgcaccaccgtggtgtcagtggcccgcgccgtctgggatttcttcttctga

SEQ ID NO: 112412 - DNA, 75 bp, synthetic construct
  source 1..75: mol_type = other DNA
gtccacagagcagaagcagaacatcagccgcaaaatctgcctgctgcatgagctgttccagcccgtgcatccggt

SEQ ID NO: 112413 - DNA, 75 bp, synthetic construct
  source 1..75: mol_type = other DNA
cggtgtcggtgaaagtgaaaggcacgatgaagaatatgctgcgctttacagcgaacagcttccccggctggacct

SEQ ID NO: 112414 - DNA, 75 bp, synthetic construct
  source 1..75: mol_type = other DNA
agcttgtgcaatgccctctttgctggggaggtgtcaccggtcagtgatattgcagcctgcacacgcgaaccctta

SEQ ID NO: 112415 - DNA, 75 bp, synthetic construct
  source 1..75: mol_type = other DNA
ccaggtgaattttcgtctccctcgcctggagaatgaacgagaagctaaccattttgacgctgcgccgaacctgga

SEQ ID NO: 112416 - DNA, 75 bp, synthetic construct
  source 1..75: mol_type = other DNA
ggcgtttccgaactggatgcgattccaccgcaatctcaggtgctcactgaacaacggctgaagtattggtttaag

SEQ ID NO: 112417 - DNA, 75 bp, synthetic construct
  source 1..75: mol_type = other DNA
aaacgcatccgctgacatggcgtctgcgcgatgacaaacagcctgtgtggctggacgaataccgcagcaaaaacg

SEQ ID NO: 112418 - DNA, 75 bp, synthetic construct
  source 1..75: mol_type = other DNA
agctctgttcagggggctatttatgccttacagcagatagcttctgctgagggagaagcagatcttgttcgcagc

SEQ ID NO: 112419 - DNA, 75 bp, synthetic construct
  source 1..75: mol_type = other DNA
aaatttacgcgactgcacaacaaaagctgcaggacggtaactggagacaggcaataacgcaactggaagcgttag

SEQ ID NO: 112420 - DNA, 75 bp, synthetic construct
  source 1..75: mol_type = other DNA
gcctgatggggttcctgctggtatgtatgggtgtgcagtttattattaacggcatcctggaaatcattaaaacgt

SEQ ID NO: 112421 - DNA, 75 bp, synthetic construct
  source 1..75: mol_type = other DNA
tgctggcgcataaagacgagacgctggagtacaaacgccagctggctgagctgggagacaaggttgaataccaga

SEQ ID NO: 112422 - DNA, 75 bp, synthetic construct
  source 1..75: mol_type = other DNA
agcctgtgtaatgcgctttttgccgggaacgtttcgccggtcagtgatgttgcagcctgtacccgtaaaccgcta

SEQ ID NO: 112423 - DNA, 75 bp, synthetic construct
  source 1..75: mol_type = other DNA
ggcattgtcgttaatgatgttactgtcacctggcgtaacgggcacacagcactgcgcgatgcatccttcacagta

SEQ ID NO: 112424 - DNA, 75 bp, synthetic construct
  source 1..75: mol_type = other DNA
agcttatgtaatgccctgtttaccggtgagatttcaccggtcagcgatgtgaccgcctgcacacgcgaaccctta

SEQ ID NO: 112425 - DNA, 75 bp, synthetic construct
  source 1..75: mol_type = other DNA
tcatttgatgatattggtaaagaacacagaagtttctactatttaatatcgtttgtataccttgaggaaggtagg

SEQ ID NO: 112426 - DNA, 75 bp, synthetic construct
  source 1..75: mol_type = other DNA
taccccattgtttatcttgactgtgtcgtcctgaaagttcggcagggcagtcgcgtcatcaacaaatcggtgttc

SEQ ID NO: 112427 - DNA, 75 bp, synthetic construct
  source 1..75: mol_type = other DNA
cactcatatggaacttggcggtaaagcgccagtgattgtctttaatgatgctgacgttgaagcggttgtcgaagg

SEQ ID NO: 112428 - DNA, 75 bp, synthetic construct
  source 1..75: mol_type = other DNA
cgcgataccgcgctggtacgttcctgtgggctctattttgcgccgcagcggttgcatattggcgcagatgtgtgg

SEQ ID NO: 112429 - DNA, 75 bp, synthetic construct
  source 1..75: mol_type = other DNA
tgtcgctggcaccgcaggattctgtgttgctgtgccagccttttattcatggtcaatgagtgaggtgattgataa

SEQ ID NO: 112430 - DNA, 75 bp, synthetic construct
  source 1..75: mol_type = other DNA
gactgaagaaaatgaaaatgagtaaagatgaggtgaaacgagaagccaaggatactgatggtaaccctgaaatta

SEQ ID NO: 112431 - DNA, 75 bp, synthetic construct
  source 1..75: mol_type = other DNA
tcctctgccgcagaagccggtggtggagcagcacaacagttcatgaaccagtatggcgatgagttcaaagagaca

SEQ ID NO: 112432 - DNA, 75 bp, synthetic construct
  source 1..75: mol_type = other DNA
ttccggtgctgcgtctgcgcggtgactatctggcgatcgttaccctcggtttcggcgaaattgtgcgcatattgc

SEQ ID NO: 112433 - DNA, 75 bp, synthetic construct
  source 1..75: mol_type = other DNA
acgggggacgttttactggagattgccgaggcatccgtagagcaggtggatgctgctgtgcgcgcggcagatgca

SEQ ID NO: 112434 - DNA, 75 bp, synthetic construct
  source 1..75: mol_type = other DNA
gtacagtgtccagaaagttacttgatacacagctttgtagtcgtctgttcagcaaactatcacagctacacgatg

SEQ ID NO: 112435 - DNA, 75 bp, synthetic construct
  source 1..75: mol_type = other DNA
gtgcgggcgggtgtgactgataagagtctctctctcaaatcgaccgtatcacctacgggcgtcgcaaagcaaagc

SEQ ID NO: 112436 - DNA, 75 bp, synthetic construct
  source 1..75: mol_type = other DNA
cacccacatggaactgggcggtaaagcaccagtgattgtctttgatgatgcagatattgaagcagtggtcgaagg

SEQ ID NO: 112437 - DNA, 75 bp, synthetic construct
  source 1..75: mol_type = other DNA
tggctccggcgctggcggcagggaactgcgtggtgcttaaaccatcagaaatcaccccgctaacagcgttgaagc

SEQ ID NO: 112438 - DNA, 75 bp, synthetic construct
  source 1..75: mol_type = other DNA
cgttgctctctgccgcgatgttttttgtgctggcgggcgtctttatgggcgtacaactggagctggatggcacca

SEQ ID NO: 112439 - DNA, 75 bp, synthetic construct
  source 1..75: mol_type = other DNA
tcctgatacaggacttatgatactgaacaatataagaaaaaaaggagtagatataacaaggtcagtattcacagg

SEQ ID NO: 112440 - DNA, 75 bp, synthetic construct
  source 1..75: mol_type = other DNA
gaacatacataaaggacaatacataacagaagacttttttgaacctgtagcacaattgattcgtatagcaataga

SEQ ID NO: 112441 - DNA, 75 bp, synthetic construct
  source 1..75: mol_type = other DNA
aagcctggctggcgaaaaaaaagccgcagtggcggcgtatattacaagctgagacggggtacaacgaaccagacg

SEQ ID NO: 112442 - DNA, 75 bp, synthetic construct
  source 1..75: mol_type = other DNA
ccaggctattcagcaacggaacacacagtgggccgcagagcagtcgatgttcatgaccgtcgtccgaccaatgct

SEQ ID NO: 112443 - DNA, 75 bp, synthetic construct
  source 1..75: mol_type = other DNA
gacgccggactcagctcactggcgaaccagctcgatgatatcgcccatgccagctacaacggggtgtcgattgtt

SEQ ID NO: 112444 - DNA, 75 bp, synthetic construct
  source 1..75: mol_type = other DNA
ctaaacagcctactgggtattgacacatcaaccggagacaacgctctaacgaagctgactgattcgcttcaagcg

SEQ ID NO: 112445 - DNA, 75 bp, synthetic construct
  source 1..75: mol_type = other DNA
tacacttttgcgctgctcaatcactattacggcctgggcttctggacctgtctgccgattgccgggttaatggcg

SEQ ID NO: 112446 - DNA, 75 bp, synthetic construct
  source 1..75: mol_type = other DNA
ttccgaacatggagctacagaccggaaaacgcctccagccgtactacgaccgcgcagacaggcctagaattgatg

SEQ ID NO: 112447 - DNA, 75 bp, synthetic construct
  source 1..75: mol_type = other DNA
atggcagcgcttgtggtaacctggtttaatccggtgaaagaggcgttttacatgcatctgccagcatccggaaaa

SEQ ID NO: 112448 - DNA, 75 bp, synthetic construct
  source 1..75: mol_type = other DNA
ggcacactcgatgttgacgaagctgcgtccatgcttatgcctatggttggcaaggccagggcagcaatgaaggcc

SEQ ID NO: 112449 - DNA, 75 bp, synthetic construct
  source 1..75: mol_type = other DNA
aagcaaacggagctggatgccgaaagcagcggcctggactcgctcagctcagcgttgagcgatttccagagcgcc

SEQ ID NO: 112450 - DNA, 75 bp, synthetic construct
  source 1..75: mol_type = other DNA
ggtgtatcacaaacaggattcatctttgcggtagaaaaaataaagccctcggctcagaaaatcagtgtaaaaaat

SEQ ID NO: 112451 - DNA, 75 bp, synthetic construct
  source 1..75: mol_type = other DNA
gatctcactacctttaacatcagcgaagattccagcgccagccaggagaaagtacagacctttgtcgatgcctat

SEQ ID NO: 112452 - DNA, 75 bp, synthetic construct
  source 1..75: mol_type = other DNA
cccaggacgcgattattcatctcggcagcgccacggggccagccatcaccaacagcagcaacacttttgatgatg

SEQ ID NO: 112453 - DNA, 75 bp, synthetic construct
  source 1..75: mol_type = other DNA
gagctccgcacaggcattacaaagtcagaaatcggaggctttccaaagcactcttggtcgaggtttttctgatgg

SEQ ID NO: 112454 - DNA, 75 bp, synthetic construct
  source 1..75: mol_type = other DNA
ccgccaccggcaccttcgaactgacgatgggcgacagcaccatggatatcgatctgtcggcggcagatcagaacg

SEQ ID NO: 112455 - DNA, 75 bp, synthetic construct
  source 1..75: mol_type = other DNA
tggcgattgccagtacgccgatcccgctggggcaaagtcaggatattcagccgctggtggaagtcgaaaaagaag

SEQ ID NO: 112456 - DNA, 75 bp, synthetic construct
  source 1..75: mol_type = other DNA
gcacgaagaaaccattgcagacagttaaggacccggtgacccgggtcagcattcattgtacggctaaggatgaga

SEQ ID NO: 112457 - DNA, 75 bp, synthetic construct
  source 1..75: mol_type = other DNA
tacccgggtactgacatcagggcaaaaatcagacgcactgcaaggtttatcaaaaattatggaacttattgccca

SEQ ID NO: 112458 - DNA, 75 bp, synthetic construct
  source 1..75: mol_type = other DNA
aactgaaaaacggcgacctggtcttcttccgtactcagggacgcggtacagccgatcatgtcggcgtgtatgtcg

SEQ ID NO: 112459 - DNA, 75 bp, synthetic construct
  source 1..75: mol_type = other DNA
aagtgggtggctgttggtattgctgtgtctccgatgctgtatgggctggcaaaactggtcattgcgctgaaatcg

SEQ ID NO: 112460 - DNA, 75 bp, synthetic construct
  source 1..75: mol_type = other DNA
gatgctccgccgggttatgacagcactggaaaagcaggcaaacgcagaactgaatacaaaccactattcgcgtat

SEQ ID NO: 112461 - DNA, 75 bp, synthetic construct
  source 1..75: mol_type = other DNA
tgcggcgacccatcgcgatcttgccgcagaggtgaatgccgggcgttttcgccaggatctctactatcgcctgaa

SEQ ID NO: 112462 - DNA, 75 bp, synthetic construct
  source 1..75: mol_type = other DNA
actctccgaccaagagatcgaacagactctgcaagcattcgaagctcgcgtgaagtcttctgctcaggcgaagat

SEQ ID NO: 112463 - DNA, 75 bp, synthetic construct
  source 1..75: mol_type = other DNA
aattatttgccggatgatgtcgccgctgtgagtaaagccccaacaatagattttagccagaatgctaatgctcat

SEQ ID NO: 112464 - DNA, 75 bp, synthetic construct
  source 1..75: mol_type = other DNA
atcgtatcagttcatctgtcactgctgtaatgcagcgtaaaaataaggtagttatggcagtcgccggggcaacag

SEQ ID NO: 112465 - DNA, 75 bp, synthetic construct
  source 1..75: mol_type = other DNA
ctccggtgatgccagacttatagctatcagagtccagaactggacgcggaaagcggcagccggattagccaggat

SEQ ID NO: 112466 - DNA, 75 bp, synthetic construct
  source 1..75: mol_type = other DNA
gatctcgtgctttgcgatgtgcgaatggctgagatggacggtattgccacgctgaaagagatcaaagcgttaaat

SEQ ID NO: 112467 - DNA, 75 bp, synthetic construct
  source 1..75: mol_type = other DNA
ttatggccggagcaggagtccgtgcagaaaacctgcaccacttcctcgatgccggagtgctggaagtccatagct

SEQ ID NO: 112468 - DNA, 75 bp, synthetic construct
  source 1..75: mol_type = other DNA
actgaaatccgtgcgccagcgggtgacgatccctgtgcatccgattatccgcccacgcggtggtgatttttgcta

SEQ ID NO: 112469 - DNA, 75 bp, synthetic construct
  source 1..75: mol_type = other DNA
atgaaatccactcgtcctgttgccgtgattaccggagccgctcgcggtattggaaagggctgtgcgctggagctt

SEQ ID NO: 112470 - DNA, 75 bp, synthetic construct
  source 1..75: mol_type = other DNA
tatccgcgccacgcgcctaccggtacccctgttttagtggacggcgtgcgcaccatgacggtggggaccgtctcg

SEQ ID NO: 112471 - DNA, 75 bp, synthetic construct
  source 1..75: mol_type = other DNA
tattgagcgtatctggagcgcgctcggggccaccgatggctttgcattgcttaacctggaagaggcaataacgtt

SEQ ID NO: 112472 - DNA, 75 bp, synthetic construct
  source 1..75: mol_type = other DNA
ccgccgttggcatgtgccagttgcacttcaatggcgtcggcaggccattcgtgctcgttcataatcgtgctgaat

SEQ ID NO: 112473 - DNA, 75 bp, synthetic construct
  source 1..75: mol_type = other DNA
aataccgggttgcgtccggtgatgacattaagcagtgagatcatcggtatccagacgttaaaggcaggggaccag

SEQ ID NO: 112474 - DNA, 75 bp, synthetic construct
  source 1..75: mol_type = other DNA
atcgccaccggcgagcacatcatcagccataccgcgtcgtccattaagcgtactcatatggaacttggtggcaaa

SEQ ID NO: 112475 - DNA, 75 bp, synthetic construct
  source 1..75: mol_type = other DNA
acgggggaagttttactggagattgcagaagcatcggcagagcaggttgatgcagctgtccacgcggcagaggca

SEQ ID NO: 112476 - DNA, 75 bp, synthetic construct
  source 1..75: mol_type = other DNA
ccggatacgctctccacgccgttgggtagcttatggaagctgtatgtttacgcatggctggaagatacccatcaa

SEQ ID NO: 112477 - DNA, 75 bp, synthetic construct
  source 1..75: mol_type = other DNA
gaaagcgaaacgcgacgcagctcgacaacgcaaaaaagaatattacgctcacccacctacccctattccggtctg

SEQ ID NO: 112478 - DNA, 75 bp, synthetic construct
  source 1..75: mol_type = other DNA
aggcagatcctaatgaaattatttactccggtgatgccagactgatagctatcagagtccagaactggacacgga

SEQ ID NO: 112479 - DNA, 75 bp, synthetic construct
  source 1..75: mol_type = other DNA
caagaatgtctggcggaaggcgtggaagtgatttgcttccctgctgatgtgggcgatctctccctgcatgaagag

SEQ ID NO: 112480 - DNA, 75 bp, synthetic construct
  source 1..75: mol_type = other DNA
atggagaagtataaacgaattctgtttaggttgactatgaaaaacggccttgaattgaaagcgcctgtaactgat

SEQ ID NO: 112481 - DNA, 75 bp, synthetic construct
  source 1..75: mol_type = other DNA
attaagtgggtggcggtcggtattgctgtgtctccgatgctgtatgggctggcaaaactggtcattgcgttgaaa

SEQ ID NO: 112482 - DNA, 75 bp, synthetic construct
  source 1..75: mol_type = other DNA
aggccgctgccgggttagccaggatgaaggcgaagcgtgaagtagctcgccagcgtaaacaggaatactactccc

SEQ ID NO: 112483 - DNA, 75 bp, synthetic construct
  source 1..75: mol_type = other DNA
ctgctcagtgaaatcgcccttgtcgcgccatcggaagccacggtgcttatccacggtgattccggtacgggtaaa

SEQ ID NO: 112484 - DNA, 75 bp, synthetic construct
  source 1..75: mol_type = other DNA
gcattaagcatggaatggactggcaaaccgctcgcgaaccactggcaagcctgttttacaatcgcaaacatcata

SEQ ID NO: 112485 - DNA, 75 bp, synthetic construct
  source 1..75: mol_type = other DNA
tttttagtttggctatcaaaagatgatggatgcaaagttcatcaagaaaaagaaggcaaaataaccaaagttgac

SEQ ID NO: 112486 - DNA, 75 bp, synthetic construct
  source 1..75: mol_type = other DNA
atgtctgagtacagaccttcttgtcagtcttggcataaaaaatctgcgttattagacaataaggaacattctgca

SEQ ID NO: 112487 - DNA, 75 bp, synthetic construct
  source 1..75: mol_type = other DNA
cagacacaatttattgattattttaatctgttctacagtaagcgtggtcaggaacaaataagcatctctcagcag

SEQ ID NO: 112488 - DNA, 75 bp, synthetic construct
  source 1..75: mol_type = other DNA
tccgggaaatcaggaagattgctgaaatgcaactggagggcgggctggacagagtgatggcgagaggagaatggg

SEQ ID NO: 112489 - DNA, 75 bp, synthetic construct
  source 1..75: mol_type = other DNA
tgaatttacagagtggcatcaacattggtagttggcgactacgcgataactcaacgtggagttataacagtggga

SEQ ID NO: 112490 - DNA, 75 bp, synthetic construct
  source 1..75: mol_type = other DNA
tgaaagagtttccccggaattacttcccctcgcactggctatcgggattatgcagacagcggataaacctcactt

SEQ ID NO: 112491 - DNA, 75 bp, synthetic construct
  source 1..75: mol_type = other DNA
ggcgctgataacagtttacgatcaggagctcgttttgatggagttacgccaggtagtaactggaattcagacggg

SEQ ID NO: 112492 - DNA, 75 bp, synthetic construct
  source 1..75: mol_type = other DNA
gatatttttgacagtgtgaactttcgtggcctcaaaataaattcaacagaagcgatgttgcccgatagccaacat

SEQ ID NO: 112493 - DNA, 75 bp, synthetic construct
  source 1..75: mol_type = other DNA
ttccagaatcgaatcacatgctaacacttgataaccacgatccattaagtggcattcctggctataaaagtattc

SEQ ID NO: 112494 - DNA, 75 bp, synthetic construct
  source 1..75: mol_type = other DNA
tatttcagatttttaattcttgtttttattgtcttttttatagaaagcttagtattaatccaattaagtcacatt

SEQ ID NO: 112495 - DNA, 75 bp, synthetic construct
  source 1..75: mol_type = other DNA
gctggcaattgtggattgtggctttcggcttctttatgcagtcgctggacaccaccatcgttaacaccgcgcttc

SEQ ID NO: 112496 - DNA, 75 bp, synthetic construct
  source 1..75: mol_type = other DNA
atgtctgcggtgaagggctgcaactggcgttaatggcaaatcgtgaattctggtcaacatacgatccggaagaca

SEQ ID NO: 112497 - DNA, 75 bp, synthetic construct
  source 1..75: mol_type = other DNA
gatttccggtgcgaacggggaatacagccatcagttgcttgccccggcggacaatatcaccattgcgaaaaatga

SEQ ID NO: 112498 - DNA, 75 bp, synthetic construct
  source 1..75: mol_type = other DNA
cggtcagattggtccactactcggcccggcactcggcggcctgctggtagaatacgcgtcgtggcactggatctt

SEQ ID NO: 112499 - DNA, 75 bp, synthetic construct
  source 1..75: mol_type = other DNA
gcacgggcgtataaaatcgatcagcagaaaacgttgcggtaagtgcggcgagagagttccagttaattcatgccc

SEQ ID NO: 112500 - DNA, 75 bp, synthetic construct
  source 1..75: mol_type = other DNA
ctgcaaagaatgctgacgcgctcgtttgcagccaaagctttggctgtcaggcgggttaccgaaaatcgaggcaaa

SEQ ID NO: 112501 - DNA, 75 bp, synthetic construct
  source 1..75: mol_type = other DNA
gcatcggaacatacattattgccgcactagccccgtatataaccgacatcggcagaacctatcagccaggagaaa

SEQ ID NO: 112502 - DNA, 75 bp, synthetic construct
  source 1..75: mol_type = other DNA
ccgacatcggcagaacctatcagccaggagaaactgtatcgggttcacgccttaagcgatgcgccctaatcaaag

SEQ ID NO: 112503 - DNA, 75 bp, synthetic construct
  source 1..75: mol_type = other DNA
gacgctgctggcgctcggttacccattagctgacctgctgaaaaccgccgcgcgtctgcaaccggtttgcggacg

SEQ ID NO: 112504 - DNA, 75 bp, synthetic construct
  source 1..75: mol_type = other DNA
ggaggctgcgccattgaggtgatggggacgtataacgcagccatagtccgggtcaccatcggcgaatacggtggc

SEQ ID NO: 112505 - DNA, 75 bp, synthetic construct
  source 1..75: mol_type = other DNA
gatggaggcggtgacgaaatcgataatttaatgatgttacatccgaattgtcatcggttaatccataaccataag

SEQ ID NO: 112506 - DNA, 75 bp, synthetic construct
  source 1..75: mol_type = other DNA
cagtggtatcagagtcgcagccaccgtcgcggaaaaacatcctccttccgtgccaatcttcagggcgcatgggat

SEQ ID NO: 112507 - DNA, 75 bp, synthetic construct
  source 1..75: mol_type = other DNA
cgtatctgtcggacgaatgagctgcttcaggagcaactcatgaaggtgttacgcaaactcaccggtcagacaaca

SEQ ID NO: 112508 - DNA, 75 bp, synthetic construct
  source 1..75: mol_type = other DNA
cggtggcaggctctgatttgtatgtattcaggccggtggcgcatacggtggattttcatatccgcgtgacgccgg

SEQ ID NO: 112509 - DNA, 75 bp, synthetic construct
  source 1..75: mol_type = other DNA
aaccagcctccccggttcttcgacgaataccttctgacaccggaaaataaagctgagcatgaagagatcaaagcg

SEQ ID NO: 112510 - DNA, 75 bp, synthetic construct
  source 1..75: mol_type = other DNA
gtgatcatggatatcaatctgccgggtaagaacggtcttctgttagcgcgtgaactgcgcgagcaggcgaatgtt

SEQ ID NO: 112511 - DNA, 75 bp, synthetic construct
  source 1..75: mol_type = other DNA
caacaggtcccgctggtccgcggggagcgcagggaccgaaaggggagaaaggcgaccccggtcccagaggtgagc

SEQ ID NO: 112512 - DNA, 75 bp, synthetic construct
  source 1..75: mol_type = other DNA
gctgtcccgtaccatgaatctgggtactgtcagcgaagaacgtcgtagcgttgaaagctacaagttcaatggttg

SEQ ID NO: 112513 - DNA, 75 bp, synthetic construct
  source 1..75: mol_type = other DNA
aaaaggggcatttgaccagtcttactggatgatgaaggcatcactgcatgcgggattcaataaagtcatcacgga

SEQ ID NO: 112514 - DNA, 75 bp, synthetic construct
  source 1..75: mol_type = other DNA
ccatcatgaccagttgcaaagcatgtttctgtggagcactggaacgctgacgcaaaccgactggggcggcgttga

SEQ ID NO: 112515 - DNA, 75 bp, synthetic construct
  source 1..75: mol_type = other DNA
ttggaagcagtaggtatcgtatttttagtggtgctcttcatcatcatcatgacagcagtagatatacaaaagaaa

SEQ ID NO: 112516 - DNA, 75 bp, synthetic construct
  source 1..75: mol_type = other DNA
gggcgatcccaggggcgatggcgagtcagtttgctgcgctggcgggcgcttgcgttgttggcttaatcgtctttg

SEQ ID NO: 112517 - DNA, 75 bp, synthetic construct
  source 1..75: mol_type = other DNA
ggtggtgataccgcacgagccgtggggatggcgctgacgccgacgcgagttgcgttgctgatgctggcggcctgt

SEQ ID NO: 112518 - DNA, 75 bp, synthetic construct
  source 1..75: mol_type = other DNA
ttcgagctggaactgaatgcgttagtacgccgccacttcccacactggggtgcgcgcgatttactgggaggtaaa

SEQ ID NO: 112519 - DNA, 75 bp, synthetic construct
  source 1..75: mol_type = other DNA
tggtatgcgtcagaataccataatggcaggcaagttctcgatgagatacaaacgccttcagcaattaacagtgag

SEQ ID NO: 112520 - DNA, 75 bp, synthetic construct
  source 1..75: mol_type = other DNA
cggcattattgctggcgctgctggtgattgtcgctacggcgctgacctggatgaacttctcgcaggcgctgccgc

SEQ ID NO: 112521 - DNA, 75 bp, synthetic construct
  source 1..75: mol_type = other DNA
gctgatttttatcgatcgcctgagcaacgtgaccgttggtgccggtatggtgcatgagccgaaaaatgaggctgc

SEQ ID NO: 112522 - DNA, 75 bp, synthetic construct
  source 1..75: mol_type = other DNA
gggcggcgggaatgctggtgacatccgcagaagcatttgctgattatcagaaaaacgaggcctggacgtgggaac

SEQ ID NO: 112523 - DNA, 75 bp, synthetic construct
  source 1..75: mol_type = other DNA
tgacggcggagcagattgcgtatgttgcacagctgcagcgttccggagacgaggccggtgccttacaggcggcga

SEQ ID NO: 112524 - DNA, 75 bp, synthetic construct
  source 1..75: mol_type = other DNA
atacccacgcaaacatattcaccgtgtgcagctggaggaccggaccgttgatgctctggttacgccagtttacgc

SEQ ID NO: 112525 - DNA, 75 bp, synthetic construct
  source 1..75: mol_type = other DNA
gtgagtaaacgtattgcgcttttcccggcattattgctggcgctgttggtggttgccgcagcggtgctcacctgg

SEQ ID NO: 112526 - DNA, 75 bp, synthetic construct
  source 1..75: mol_type = other DNA
tgaatgtcagcgaaccgggatcgtcatagacaccaaacagcgcaccattcgttttttcgataaagaaagagacaa

SEQ ID NO: 112527 - DNA, 75 bp, synthetic construct
  source 1..75: mol_type = other DNA
agtgaaatcgacatgctgtacatcgacgacaccccgggcctgtcactggcgcacattgttagcgaaagccgccga

SEQ ID NO: 112528 - DNA, 75 bp, synthetic construct
  source 1..75: mol_type = other DNA
cggttaatcgtcccttcatcggatattgacctgggggagaccgagcttccggtgctcggcgagatcacctggcag

SEQ ID NO: 112529 - DNA, 75 bp, synthetic construct
  source 1..75: mol_type = other DNA
atcgagaagctgcttaaagctgactttaaggtgctggtggatgaaaccagtgggaccattgctagtgaaagcggc

SEQ ID NO: 112530 - DNA, 75 bp, synthetic construct
  source 1..75: mol_type = other DNA
cattccacaggggggcgcaggtaatgactccaacttattgatagtgttttatgttcagataatgcccgatgactt

SEQ ID NO: 112531 - DNA, 75 bp, synthetic construct
  source 1..75: mol_type = other DNA
actgaaagacgggaaaatcctgcaggcagattacaacacgctgatggcgtcggcgaaaaaggactatgagtcgac

SEQ ID NO: 112532 - DNA, 75 bp, synthetic construct
  source 1..75: mol_type = other DNA
tatgcgatgggatggcgtaacgaacggactcaaggtgagtgcaggatcggtcattcagcgtgacgacctcgtcca

SEQ ID NO: 112533 - DNA, 75 bp, synthetic construct
  source 1..75: mol_type = other DNA
ttggccgacgcatcaactgagtttgatgttggtcagcaacatttgtcactctccgttccgcaaatttatgttggc

SEQ ID NO: 112534 - DNA, 75 bp, synthetic construct
  source 1..75: mol_type = other DNA
ggaacattcggcagaaaaacatgtgccggacaacagcgcatgcacaccacttcaggatcgtttggctgacgcatc

SEQ ID NO: 112535 - DNA, 75 bp, synthetic construct
  source 1..75: mol_type = other DNA
ctacagtaaatctttctatcagacgggaacgaatatccagatcgcaggatatcgatattctacgcaaggatttta

SEQ ID NO: 112536 - DNA, 75 bp, synthetic construct
  source 1..75: mol_type = other DNA
taccagttacctgtggtgcagagcggtacacaaagtaccgccagccagggtaatcgcctgttatgggtagagcag

SEQ ID NO: 112537 - DNA, 75 bp, synthetic construct
  source 1..75: mol_type = other DNA
tgtgttgttggcttaattgtctttggcgtcgcgtgggggaaacggctttcgccggtaacgctgatcctcgcgggg

SEQ ID NO: 112538 - DNA, 75 bp, synthetic construct
  source 1..75: mol_type = other DNA
ttttctttcagtatcgcgtacaggaaagggattttcagccctgggtattttgctattactgattaccgcatggag

SEQ ID NO: 112539 - DNA, 75 bp, synthetic construct
  source 1..75: mol_type = other DNA
tcggtgcaattgtcactcacggagagaataaaaatggcagcattgtcgcggaaaatggtcaggtttatctgactg

SEQ ID NO: 112540 - DNA, 75 bp, synthetic construct
  source 1..75: mol_type = other DNA
caggtgactctcaagacccgtcatgccgatggcagagcagcaatcatcgtcgggatggaaagatacagagagtta

SEQ ID NO: 112541 - DNA, 75 bp, synthetic construct
  source 1..75: mol_type = other DNA
gaactggcgcagctttacccgttccgtgctgtccatgatgacggaaattctgcttaagcaggccatggtggggat

SEQ ID NO: 112542 - DNA, 75 bp, synthetic construct
  source 1..75: mol_type = other DNA
tggaaattacggtacgacctttttcagtgccagtcgccaaagttactggaacacgtcacgcagcgatcagcaaat

SEQ ID NO: 112543 - DNA, 75 bp, synthetic construct
  source 1..75: mol_type = other DNA
agaaaacgttgcggtaagtgcggcgagagagttcctgttaattcatgcccgtgtaatggtgactcacaatgctgg

SEQ ID NO: 112544 - DNA, 75 bp, synthetic construct
  source 1..75: mol_type = other DNA
taagtatcgaggaaaaatctcttcttgctcatgaaaaagagacgctggagtacaaacgccagctggctgcacttg

SEQ ID NO: 112545 - DNA, 75 bp, synthetic construct
  source 1..75: mol_type = other DNA
tctggcggcgcaaaccgaaggctacgcgtgcgatggcgtgagcaccgcgcggatggcggaacaaagccttgaggc

SEQ ID NO: 112546 - DNA, 75 bp, synthetic construct
  source 1..75: mol_type = other DNA
aaaccgacagtggtggtcgattacgctcacaccccggatgcgctggaaaaagccttacaggcagcgcgcctgcac

SEQ ID NO: 112547 - DNA, 75 bp, synthetic construct
  source 1..75: mol_type = other DNA
aaaaatgcaagttgaaatattcaaaatctcaaattgatagggctgctcaattgataaggcacgggtgtagtgacg

SEQ ID NO: 112548 - DNA, 75 bp, synthetic construct
  source 1..75: mol_type = other DNA
gatgccgtctacaccgacgccccgccgccagcgggcgtgatgcaggtgctgacggaccaccatattcaactggag

SEQ ID NO: 112549 - DNA, 75 bp, synthetic construct
  source 1..75: mol_type = other DNA
ttatctcccagttccgccttgatttcggcattctggggataagcggcatcgatagcgacggctcgctgctggagt

SEQ ID NO: 112550 - DNA, 75 bp, synthetic construct
  source 1..75: mol_type = other DNA
catagtcagaaacttagatcagttgaaacagctaagggaacgtcttttaaaaagcaaatctgttcatagaattgt

SEQ ID NO: 112551 - DNA, 75 bp, synthetic construct
  source 1..75: mol_type = other DNA
cggaagtccggcgcagatgcggcgggctgaaggcattaattttaatcagaacaatcacgtggtgattcagaacga

SEQ ID NO: 112552 - DNA, 75 bp, synthetic construct
  source 1..75: mol_type = other DNA
ttatatccattgatgctaatgaaaaatcatcttgatagggctgcaaaaaaagttgataaagagaataagattatt

SEQ ID NO: 112553 - DNA, 75 bp, synthetic construct
  source 1..75: mol_type = other DNA
tatcatcgcgcctggccgtgtttatcgtaacgactacgaccagactcacacgccgatgttccatcagatggaagg

SEQ ID NO: 112554 - DNA, 75 bp, synthetic construct
  source 1..75: mol_type = other DNA
ggccttacaggcggcgaacgatatcgccacaaaaggctttgatgagcagacccgtcgcctgaaagaaaacatggg

SEQ ID NO: 112555 - DNA, 75 bp, synthetic construct
  source 1..75: mol_type = other DNA
ggcgggatcattggcgaagcgacgctcgattttatctcccagttccgccttgatttcggcattctggggataagc

SEQ ID NO: 112556 - DNA, 75 bp, synthetic construct
  source 1..75: mol_type = other DNA
atgtcacatctcgcagaactggttgccagtgcgaaggcggccattagccaggcgtcagatgttgccgcgttagat

SEQ ID NO: 112557 - DNA, 75 bp, synthetic construct
  source 1..75: mol_type = other DNA
ccgccatgcgtgtataatggacggtcctggcaggaagtagacgatcttttccgccgccagaagcgcatgccgtca

SEQ ID NO: 112558 - DNA, 75 bp, synthetic construct
  source 1..75: mol_type = other DNA
aggtaagcgcccactaatgggggcgattgctgaagagtttgctgatgtggcggtagtaacggacgataacccgcg

SEQ ID NO: 112559 - DNA, 75 bp, synthetic construct
  source 1..75: mol_type = other DNA
gtattattgaactggttaaacagcagggttatgtcagcaccgaagaactggtggaacacttctccgtcagtccgc

SEQ ID NO: 112560 - DNA, 75 bp, synthetic construct
  source 1..75: mol_type = other DNA
tgatcaggcatatgatgacgatacgccccgccttggctggctgacaacccgtcagagcaaacctgttctgaccga

SEQ ID NO: 112561 - DNA, 75 bp, synthetic construct
  source 1..75: mol_type = other DNA
taaaaatattatcctgaaagcgcgccagctgggattttccacagccattgatatttatcttctcgaccaggcatt

SEQ ID NO: 112562 - DNA, 75 bp, synthetic construct
  source 1..75: mol_type = other DNA
aatcgtatcaagctggagcacatcctcgaatatgccaggcagcagaggcatattggtcagcattgtaaaattcca

SEQ ID NO: 112563 - DNA, 75 bp, synthetic construct
  source 1..75: mol_type = other DNA
ttcctcgatgccggagtgctggaagtccatagctccgcgggagcgtggcaagcctcaccgatgcgttatcgtaat

SEQ ID NO: 112564 - DNA, 75 bp, synthetic construct
  source 1..75: mol_type = other DNA
atgtccagaaataataaacagtggttgggtttgccactgcatctgatatggggatatatcgccatcgcagtattt

SEQ ID NO: 112565 - DNA, 75 bp, synthetic construct
  source 1..75: mol_type = other DNA
agtgttactccattacttggatattatctttatccaccgacagaaaagaaaaacaatcaggtccccgtctgggct

SEQ ID NO: 112566 - DNA, 75 bp, synthetic construct
  source 1..75: mol_type = other DNA
gatgccgtttacaccgacaccatgccgcctgcgggggtgatgcaggtgctgacggaccatcatattcaactggaa

SEQ ID NO: 112567 - DNA, 75 bp, synthetic construct
  source 1..75: mol_type = other DNA
cgcagcaaaagtgggcttgtgtgcaattcatcgccgaggtatctctgattgcaaactgcaaaccatcagacctaa

SEQ ID NO: 112568 - DNA, 75 bp, synthetic construct
  source 1..75: mol_type = other DNA
atatccgggaattgaactggaattaagcagcaatgaccgtccggtagatattcttcatgatggctttgattgcgt

SEQ ID NO: 112569 - DNA, 75 bp, synthetic construct
  source 1..75: mol_type = other DNA
actgactgccgccgatatttatgccagacccgctatccgtgagcacagtgaatttatctccgaatgtgttgatgg

SEQ ID NO: 112570 - DNA, 75 bp, synthetic construct
  source 1..75: mol_type = other DNA
ctgattgtgcagatggtgtccggtgaacgttttccggccggtgagttcagtctggtaccggatgagggggcgatt

SEQ ID NO: 112571 - DNA, 75 bp, synthetic construct
  source 1..75: mol_type = other DNA
acgtggtgattcagaacgacggtacgaatggtctgccaggtccacagatgatgaaggcagtgtatgacatggccc

SEQ ID NO: 112572 - DNA, 75 bp, synthetic construct
  source 1..75: mol_type = other DNA
agactattcgtcgcgacctcaacgagctggcagagcaaaacctgatcctgcgccatcatggcggtgcggcgctgc

SEQ ID NO: 112573 - DNA, 75 bp, synthetic construct
  source 1..75: mol_type = other DNA
gaatgccggtgtgcgtggtggtgaacagtttgatgccattaaccagagtgtcgcgcgttttgcgtctgcatccgg

SEQ ID NO: 112574 - DNA, 75 bp, synthetic construct
  source 1..75: mol_type = other DNA
ttcaccaacattttctggggcgtactggcagagaaaattggctggatgaaagttgttcgctggttcggctgtgtg

SEQ ID NO: 112575 - DNA, 75 bp, synthetic construct
  source 1..75: mol_type = other DNA
gagattgaaaatcacagggcggagcgactggctgatataaaaagctattgtaatcggaaagaaaatatcagactg

SEQ ID NO: 112576 - DNA, 75 bp, synthetic construct
  source 1..75: mol_type = other DNA
atgattaatcgtatcaagctggagcacatcctcgaatatgccaggcagcagaaatgtattgggcaactttgtaaa

SEQ ID NO: 112577 - DNA, 75 bp, synthetic construct
  source 1..75: mol_type = other DNA
ccacctctgagtggttgcaggtctgggcagtcttcttctttaccaccatcttctctaacgtattctggggcgtgc

SEQ ID NO: 112578 - DNA, 75 bp, synthetic construct
  source 1..75: mol_type = other DNA
agagccaggtccggcaggcagcgctgcaaatgtggctgatgcgacgacggcacagaagggaattgtgcagttaag

SEQ ID NO: 112579 - DNA, 75 bp, synthetic construct
  source 1..75: mol_type = other DNA
ttcttaagcccggcattacaaaatccactggcattaggtgccgatctggtgttgcattcatgtacgaaatatctg

SEQ ID NO: 112580 - DNA, 75 bp, synthetic construct
  source 1..75: mol_type = other DNA
atgttcacccttcacccattattcaccacctatcatactgaaataaaaggagaaaaaagaaaggtgaacagtgtg

SEQ ID NO: 112581 - DNA, 75 bp, synthetic construct
  source 1..75: mol_type = other DNA
aagttggggcgatggcgaaattgaaagccatctgatgggcgcttttaacgtcagcaacctgctgctggcgctggc

SEQ ID NO: 112582 - DNA, 75 bp, synthetic construct
  source 1..75: mol_type = other DNA
gcgtcgccccgggcgtgcgccttacgaatttggtgagtatatagcgttactgacccgccaggatgatgcacgcgt

SEQ ID NO: 112583 - DNA, 75 bp, synthetic construct
  source 1..75: mol_type = other DNA
tccgaaagatatgagtgaagcatattcttttagtaaagcatgcattaaggactatcgaagatttctgcggcacga

SEQ ID NO: 112584 - DNA, 75 bp, synthetic construct
  source 1..75: mol_type = other DNA
atatgctgaaagtggaacaaatcaggcatgtgctggttcactccgaaggtgagatagagaaacacagggcggagc

SEQ ID NO: 112585 - DNA, 75 bp, synthetic construct
  source 1..75: mol_type = other DNA
attgaaaagcacagggcggagcgactggctgatatagaaatctattgtaataggaaagaaaatatcagactgaac

SEQ ID NO: 112586 - DNA, 75 bp, synthetic construct
  source 1..75: mol_type = other DNA
ctgagctcaggacgctggagaagcacagcggtgcgaatgaaaaaatcagccagcagcgccgtgatttatggaaag

SEQ ID NO: 112587 - DNA, 75 bp, synthetic construct
  source 1..75: mol_type = other DNA
attttgataataccgcaaatactctgatcccgatgggcacaaaagaggacccgttctggcagggttcaggacgta

SEQ ID NO: 112588 - DNA, 75 bp, synthetic construct
  source 1..75: mol_type = other DNA
taccgggtcttgctgatgcgcgttgatacatcaaatcccgtctggcctacgcctccgggggagcaggccaattga

SEQ ID NO: 112589 - DNA, 75 bp, synthetic construct
  source 1..75: mol_type = other DNA
tttatccggaagcacttaaagaagcatatatttctgccggagcgtggccggagaatgccgccagtgtgagcgatg

SEQ ID NO: 112590 - DNA, 75 bp, synthetic construct
  source 1..75: mol_type = other DNA
acaggatgcttttgatgcggaaatcgcgacggcagaagaaaccgccgcgttatcagaatggaaaaaataccgggt

SEQ ID NO: 112591 - DNA, 75 bp, synthetic construct
  source 1..75: mol_type = other DNA
tatggaacactatttatatgcaggcagccctggatcatctccgggcgcagggtgaaacactgaatgatgaagata

SEQ ID NO: 112592 - DNA, 75 bp, synthetic construct
  source 1..75: mol_type = other DNA
ccttaaaaaggccgcagacgacaaggaacgacaggatgccgaggataaagcccgtgcagatgctgcctttgcgct

SEQ ID NO: 112593 - DNA, 75 bp, synthetic construct
  source 1..75: mol_type = other DNA
caaagaaacggcgccgcttttgttacgagttatctgatcgctataggtgacgctgtactcttagaggaaatataa

SEQ ID NO: 112594 - DNA, 75 bp, synthetic construct
  source 1..75: mol_type = other DNA
atgaaaattctaattgttgaagacgatacactgttattgcagggattgattctggcggcacaaactgaaggctac

SEQ ID NO: 112595 - DNA, 75 bp, synthetic construct
  source 1..75: mol_type = other DNA
aatgctgcctttgacctggtttattacaatggtgtccgttctaagtttgtgccggagtgcattattcgcggcggt

SEQ ID NO: 112596 - DNA, 75 bp, synthetic construct
  source 1..75: mol_type = other DNA
gtctgaaaaagccgccggagctgatgcagaaaaagccagacagcatgctgaaaaggccaggctggcgcaggagag

SEQ ID NO: 112597 - DNA, 75 bp, synthetic construct
  source 1..75: mol_type = other DNA
accacgccggaagcggtggcgcacgcgctgcttaatcacagcaatttgcgtattgtcaccaacaatctcaacgtc

SEQ ID NO: 112598 - DNA, 75 bp, synthetic construct
  source 1..75: mol_type = other DNA
tcgttgttggtcaggttctggaaactggtcgctatggtcgcgctgtcatcgctcgcattcatgatcgttctcaag

SEQ ID NO: 112599 - DNA, 75 bp, synthetic construct
  source 1..75: mol_type = other DNA
agaatcaacggaaacggcggcaagacaacatatcgggccactggccccggtggcaggctctgatttgtatgtgtt

SEQ ID NO: 112600 - DNA, 75 bp, synthetic construct
  source 1..75: mol_type = other DNA
acgccataataatcagggcgaaagtgagctgattgttggcaatctgacgctgaatatgggtcgccgccaggtatg

SEQ ID NO: 112601 - DNA, 75 bp, synthetic construct
  source 1..75: mol_type = other DNA
atacgctgttattgcagggattgattctggcggcgcaaaccgaaggctacgcgtgcgatggcgtgacaaccgcgc

SEQ ID NO: 112602 - DNA, 75 bp, synthetic construct
  source 1..75: mol_type = other DNA
gtcggggcgggaattaccctggcggtgctgatactctcagggtcgattgagtttatcccgatgcaagtgattcct

SEQ ID NO: 112603 - DNA, 75 bp, synthetic construct
  source 1..75: mol_type = other DNA
cgtctgatggacgaacagcagcagcaggtgaaagacgacatcgctcagttgctgaataaagactggcgagcagcg

SEQ ID NO: 112604 - DNA, 75 bp, synthetic construct
  source 1..75: mol_type = other DNA
aaagcattagactttacactgtccagcggtaatgactccaacttattgatagtgttttatgttcagataatgccc

SEQ ID NO: 112605 - DNA, 75 bp, synthetic construct
  source 1..75: mol_type = other DNA
ggctatgaccgccacgtacataaatttatccgtactgctatcgatatggataaaaaccgcgtctttgcccagcga

SEQ ID NO: 112606 - DNA, 75 bp, synthetic construct
  source 1..75: mol_type = other DNA
tcgtgagggcagctttaaaatgccggacgggacaacattcagcgatcctgtcgtggcaatgtcagacaatggtat

SEQ ID NO: 112607 - DNA, 75 bp, synthetic construct
  source 1..75: mol_type = other DNA
aatggcagtcttggagttggtacgacgaatgcgttaggtggtagctctattgttcttggtgataatgacaccgga

SEQ ID NO: 112608 - DNA, 75 bp, synthetic construct
  source 1..75: mol_type = other DNA
caggagacacattaggttcatggaacggtttgcgaccgattacaattaacaataccagcggtgctgtgtccattg

SEQ ID NO: 112609 - DNA, 75 bp, synthetic construct
  source 1..75: mol_type = other DNA
gcaggcttcagcgatattgattcgcgacagtattcgcgcggctttaattccgacggtcgattcagcaaaaacggt

SEQ ID NO: 112610 - DNA, 75 bp, synthetic construct
  source 1..75: mol_type = other DNA
taccgtctgacgccgctcggcatcggcatcactgactattacattcgtcagcgcgagttttctacgctgcgcctt

SEQ ID NO: 112611 - DNA, 75 bp, synthetic construct
  source 1..75: mol_type = other DNA
cgccaatgccgatcgtctgctggatatgcgtgacgaagagatggcactgcgtgacgaagaagtgaccggggaact

SEQ ID NO: 112612 - DNA, 75 bp, synthetic construct
  source 1..75: mol_type = other DNA
gtcggggcgggaattactctggcggtgctgattttatcgggatcgattgagtttatcccgatgcaggtgatccct

SEQ ID NO: 112613 - DNA, 75 bp, synthetic construct
  source 1..75: mol_type = other DNA
cggtacgtcttggcgtagcgcaagcagatttcaccggactgccagcgaaatggcagccgattaatgattacggag

SEQ ID NO: 112614 - DNA, 75 bp, synthetic construct
  source 1..75: mol_type = other DNA
ggctacgaccgccacgtacacaaatttatccgtactgcgatcgatatggataaaaaccgcgtctttgctcagcgg

SEQ ID NO: 112615 - DNA, 75 bp, synthetic construct
  source 1..75: mol_type = other DNA
tgctgtccatgatgacagaaatcctgcttaaacaggccatggtgggcatggtcgggcgtatcggcagcgccattg

SEQ ID NO: 112616 - DNA, 75 bp, synthetic construct
  source 1..75: mol_type = other DNA
cgccaaccgctgccgatggatggttaaatagtggtaacggaacggcatttacgactgctcaatttataacttggc

SEQ ID NO: 112617 - DNA, 75 bp, synthetic construct
  source 1..75: mol_type = other DNA
gagcggaactgagcgaaagcgagaagagaatcagcgccgccatcctcgaccacgaccggaagctgtcctcagcca

SEQ ID NO: 112618 - DNA, 75 bp, synthetic construct
  source 1..75: mol_type = other DNA
atatggcagcgatgctgaccggcagcgaacagaactggcgtggtttcacccgttctgtgctgtccatgctgacag

SEQ ID NO: 112619 - DNA, 75 bp, synthetic construct
  source 1..75: mol_type = other DNA
cccacgagcagggtatgaccgcggcgatgcagtcgaaccgcctgagcgtgctgcgtatggtcggccggacgtggc

SEQ ID NO: 112620 - DNA, 75 bp, synthetic construct
  source 1..75: mol_type = other DNA
ctcgtcggctttacgatttattgcccgtcaaatttgatcatgactggtgcggcgtcacgcagttaggctgggatg

SEQ ID NO: 112621 - DNA, 75 bp, synthetic construct
  source 1..75: mol_type = other DNA
atctcagacattgttaacgcctggcaggatgcagatacactggaaaaaatactgcttgtcaaactgtatctgaag

SEQ ID NO: 112622 - DNA, 75 bp, synthetic construct
  source 1..75: mol_type = other DNA
ccacgaaaggctttgatgaccagacccgccgcctgaaagagaacatggggacgctggaaacctgggcggataaaa

SEQ ID NO: 112623 - DNA, 75 bp, synthetic construct
  source 1..75: mol_type = other DNA
tcgtctgcaaacagttcgaaatctgcggcagaagcgtcagcaaatgcagcctcagcaagtgcggatagtgcttca

SEQ ID NO: 112624 - DNA, 75 bp, synthetic construct
  source 1..75: mol_type = other DNA
cgacagtttctatttatacctcgccaacatattcagcgagtaagccttccagcgttaccgatggtgttgtttata

SEQ ID NO: 112625 - DNA, 75 bp, synthetic construct
  source 1..75: mol_type = other DNA
aggcggcagctgctgaatctgcaagttctgcgtctgcatcagccacctcagcatccgcttcaaaagatgaggcga

SEQ ID NO: 112626 - DNA, 75 bp, synthetic construct
  source 1..75: mol_type = other DNA
tccgtcttcccgatttacgcggtgagtttatccgtggatgggacgacgggcgaaaagtggatacagggcgcgatc

SEQ ID NO: 112627 - DNA, 75 bp, synthetic construct
  source 1..75: mol_type = other DNA
tgactgcggatatcacattaacgccgaaagatattggtactttaaattcagtaacgatgtctttctctggcgggg

SEQ ID NO: 112628 - DNA, 75 bp, synthetic construct
  source 1..75: mol_type = other DNA
aataaagtgaacgagcattatcatgtgcctttgttactcagccaatatgggtattcaacctatcgtggcagttaa

SEQ ID NO: 112629 - DNA, 75 bp, synthetic construct
  source 1..75: mol_type = other DNA
gagtcactggcagccctggtgaatgccggtgtgcgtggtggtgaacagtttgatgccatcaaccagagtgtcgcg

SEQ ID NO: 112630 - DNA, 75 bp, synthetic construct
  source 1..75: mol_type = other DNA
atgaaccgcgcgcgcatgattactcgtcgcggcaacccaacgcgcgatgtggttcagcgtgcgctggcagaactg

SEQ ID NO: 112631 - DNA, 75 bp, synthetic construct
  source 1..75: mol_type = other DNA
agctgcagcgtgccggtgatgaggctggcgcactgcaggcggctaacgaggcggctacagccggattcaacgatc

SEQ ID NO: 112632 - DNA, 75 bp, synthetic construct
  source 1..75: mol_type = other DNA
cagcaccatgaccgggtggtagtcatctgcccggggcgtattgagagctacgtaaaatatgcggaactggcctac

SEQ ID NO: 112633 - DNA, 75 bp, synthetic construct
  source 1..75: mol_type = other DNA
tgtctgccggtgagcgccaggaagaccgggcgcatgcagccctgctggcgcttgaaaccgagctccggacgctgg

SEQ ID NO: 112634 - DNA, 75 bp, synthetic construct
  source 1..75: mol_type = other DNA
ttctctttttttgggtagaaaaaggaaatttataacattagtattatttgcgtcaactttccatataactgcttt

SEQ ID NO: 112635 - DNA, 75 bp, synthetic construct
  source 1..75: mol_type = other DNA
atgcgggttttgatcgttaaaacatcgtcgatgggcgatgttctccatacgttgcccgcactcactgatgcccag

SEQ ID NO: 112636 - DNA, 75 bp, synthetic construct
  source 1..75: mol_type = other DNA
gttctgcggtttatcgtcacggtgatcgcacgccagcctggttaagtgaaggccgcttgcaccggagcctggtgt

SEQ ID NO: 112637 - DNA, 75 bp, synthetic construct
  source 1..75: mol_type = other DNA
gaatcaggtggtttgtagggcgccagataaagatcttgctcatctgactgcagaaacggtatctgataaaatcaa

SEQ ID NO: 112638 - DNA, 75 bp, synthetic construct
  source 1..75: mol_type = other DNA
cgtatgcacgaccgtttttgtgaactccgcgccgcagcgggtcatcctgtagaaggggagcgaccgctggtaatt

SEQ ID NO: 112639 - DNA, 75 bp, synthetic construct
  source 1..75: mol_type = other DNA
cgttgtcactgaactggcctggtgggcaaacaatattggcgtgacgggcggcgcgtttgacagctatctgctgct

SEQ ID NO: 112640 - DNA, 75 bp, synthetic construct
  source 1..75: mol_type = other DNA
ccacgccaacgctcctcttgcaggctgaagaggatcgggtggtcgataaccgtatgcacgaccgtttttgtgaac

SEQ ID NO: 112641 - DNA, 75 bp, synthetic construct
  source 1..75: mol_type = other DNA
gttgcattcatgcactaaatatttgaacggtcactctgatgtagtggctggcgtggtgattgccaaagagccgga

SEQ ID NO: 112642 - DNA, 75 bp, synthetic construct
  source 1..75: mol_type = other DNA
tgtggtcaccgaactggcctggtgggcaaacaatattggcgtgacgggtggtgcgtttgacagttatttgttgct

SEQ ID NO: 112643 - DNA, 75 bp, synthetic construct
  source 1..75: mol_type = other DNA
ggttgccagcgatgacgacccgagcggacgtaacgtcagtcgcggcatcgtgctgctcgatcacgccgaacgcga

SEQ ID NO: 112644 - DNA, 75 bp, synthetic construct
  source 1..75: mol_type = other DNA
tttgaagagcagcagagcgtgaagcaggccgccatcagcgcaaaagcccgcggtctcactgaccgtcaggcgcag

SEQ ID NO: 112645 - DNA, 75 bp, synthetic construct
  source 1..75: mol_type = other DNA
tccgcgtgcacgtcactttgacgttgcgcgtattgttattgatcaggcggtacgtcttggcgtagcgcaagcaga

SEQ ID NO: 112646 - DNA, 75 bp, synthetic construct
  source 1..75: mol_type = other DNA
gtagaccgtctctcttttctgctggcggtggccacgctgaacggcgagcgtctggacggcgagatgagtgaaggt

SEQ ID NO: 112647 - DNA, 75 bp, synthetic construct
  source 1..75: mol_type = other DNA
tgcgggcatggcgccagaagcgcgtgctgccgccgggatctccgagacgttactgcgtatctccaccggtattga

SEQ ID NO: 112648 - DNA, 75 bp, synthetic construct
  source 1..75: mol_type = other DNA
gtgcgctggcagaactggaaggtggtgccggtgcagtgctcaccaataccggcatgtcagccatccatctggtaa

SEQ ID NO: 112649 - DNA, 75 bp, synthetic construct
  source 1..75: mol_type = other DNA
gaaatcctgcttaaacaggccatggtgggcattgtcgggcgtatcggcagcgccattgggggagccattggtggt

SEQ ID NO: 112650 - DNA, 75 bp, synthetic construct
  source 1..75: mol_type = other DNA
caacaacatgatcgggtggtcgtcatttgtccggggcgtattgagagctatgtaaagtatgcggagctggcctac

SEQ ID NO: 112651 - DNA, 75 bp, synthetic construct
  source 1..75: mol_type = other DNA
aaacaagagaaaatgcattcgctgcttttaccatgggaccactgactgacttctggcaccagcgagatgaagcag

SEQ ID NO: 112652 - DNA, 75 bp, synthetic construct
  source 1..75: mol_type = other DNA
gcacgcattatcgaaccttccgttaacccagcactgattggcgcggtaaaagttccggatggcactgttgaccca

SEQ ID NO: 112653 - DNA, 75 bp, synthetic construct
  source 1..75: mol_type = other DNA
tgctgcgtatctccaccggtattgaagatggcgaagatttaattgtcgacctggaaaatggcttccgggcggcaa

SEQ ID NO: 112654 - DNA, 75 bp, synthetic construct
  source 1..75: mol_type = other DNA
cagaagcgcatccacgttttcgtgatggctatgcgattggcaccgggcgctggcgcgcgctgccgtttaccatca

SEQ ID NO: 112655 - DNA, 75 bp, synthetic construct
  source 1..75: mol_type = other DNA
atatactggcacattcgatgggcggggcgatctccacactatttttgcagcgtcatccgggcgtgtgcgatgcca

SEQ ID NO: 112656 - DNA, 75 bp, synthetic construct
  source 1..75: mol_type = other DNA
agaggatattgcatccgccgtggcgcttgaggatgcaagtacgacgaaaaaggggatagtacagctcagcagtgc

SEQ ID NO: 112657 - DNA, 75 bp, synthetic construct
  source 1..75: mol_type = other DNA
tctgtgggtggagcacgcggacaaggggcgtctggagctgaactttctgatccccaataccgagctgctgaccgg

SEQ ID NO: 112658 - DNA, 75 bp, synthetic construct
  source 1..75: mol_type = other DNA
atggttcaaatcaaaacagataaacatcccaagcttattcgtttacctgaagtaatgagcagaactggattcggg

SEQ ID NO: 112659 - DNA, 75 bp, synthetic construct
  source 1..75: mol_type = other DNA
ttacgggctgcatgacccgaacgccccggagaaccgcaggacgctgacactctctgataatctgccggaaacgaa

SEQ ID NO: 112660 - DNA, 75 bp, synthetic construct
  source 1..75: mol_type = other DNA
agcgaccatcggttcatgaaactctgcagctggtttggtcttccacgccagagtcagtttgccgaggccatatca

SEQ ID NO: 112661 - DNA, 75 bp, synthetic construct
  source 1..75: mol_type = other DNA
gtgagtaaacgtattgcgcttttcccggcgttattgttggcgctgctggtgattgccgcagcgatgctcacctgg

SEQ ID NO: 112662 - DNA, 75 bp, synthetic construct
  source 1..75: mol_type = other DNA
gaatgccatcgagctccggcagagggagaatgagtatcagaaaagcctggagttgcagcgccagccgcagaaaac

SEQ ID NO: 112663 - DNA, 75 bp, synthetic construct
  source 1..75: mol_type = other DNA
acagtgttgccagtatggcgctttatgcagaccgctggctggaagaagcaaaaaagaatgtcagaaaaagcggca

SEQ ID NO: 112664 - DNA, 75 bp, synthetic construct
  source 1..75: mol_type = other DNA
acgctggcggcgttaaatccgaatcggttatgggtgcggaaattgttgaagggtaaagcgattaaggcggggtaa

SEQ ID NO: 112665 - DNA, 75 bp, synthetic construct
  source 1..75: mol_type = other DNA
gatctggcaaacggaaaacaaccggaagatgccacgctcactgctctggcaggacttgccactgcagcagatcgg

SEQ ID NO: 112666 - DNA, 75 bp, synthetic construct
  source 1..75: mol_type = other DNA
tttgtcattaagacctgtttggtatcgttcaatttgtcgaggtgaccgaaaggattgggggtattacggccttat

SEQ ID NO: 112667 - DNA, 75 bp, synthetic construct
  source 1..75: mol_type = other DNA
ttcccatcgtcagtgcgtttgccacggaagataaatggtcattccagatgaaagtgctggccggcatgtcggaat

SEQ ID NO: 112668 - DNA, 75 bp, synthetic construct
  source 1..75: mol_type = other DNA
cgcctgattagtcgtaatgaattcccggcccaagtaaaacttggtgaaagagcaatagcattcttagaaagtgat

SEQ ID NO: 112669 - DNA, 75 bp, synthetic construct
  source 1..75: mol_type = other DNA
ttttcatcgggtacggattctggctctgcggggccagtttcaccctgactgttctgatccgtttttcattcagcc

SEQ ID NO: 112670 - DNA, 75 bp, synthetic construct
  source 1..75: mol_type = other DNA
gggacgctctggtatcttggcgggaggatacaggcgaacctggaagaaatcaggaagcaggaagagacattgcag

SEQ ID NO: 112671 - DNA, 75 bp, synthetic construct
  source 1..75: mol_type = other DNA
cgctgccggtcgcggtggattttccccacaccggatgctgcttgcggggatggcgttaagcaccgcgttcaccat

SEQ ID NO: 112672 - DNA, 75 bp, synthetic construct
  source 1..75: mol_type = other DNA
agtgaagagacgttcacccgtattcgtgaagattatttgacctttgccgggcaactgccgggtaatctggatatc

SEQ ID NO: 112673 - DNA, 75 bp, synthetic construct
  source 1..75: mol_type = other DNA
tggtcgcgctgatcggttatagcgtcagtttcgataaaactacgtttcggctgttacgtggcgagagcaatctgt

SEQ ID NO: 112674 - DNA, 75 bp, synthetic construct
  source 1..75: mol_type = other DNA
gtgcagagcataataaatggttaaaggagagaattcaggcaataagaaaaaatgtattatccggtcagaatctgg

SEQ ID NO: 112675 - DNA, 75 bp, synthetic construct
  source 1..75: mol_type = other DNA
tgtcgttgagcaggggctgagccgccaggcgctggctgcacaaaaagccgggatttccgtcgggcagtataaaca

SEQ ID NO: 112676 - DNA, 75 bp, synthetic construct
  source 1..75: mol_type = other DNA
gattcagtcgctgcgcaacatgaaagggatgattgcccgtgaagtgcgtcgacgcggtttgaccgacaacatcaa

SEQ ID NO: 112677 - DNA, 75 bp, synthetic construct
  source 1..75: mol_type = other DNA
aaatgaatttattcgactccctgaacagcgcgcgccgtctgaccgaacttgccggtgcggtactggaacgcagca

SEQ ID NO: 112678 - DNA, 75 bp, synthetic construct
  source 1..75: mol_type = other DNA
gtgagtaaacgaattgcgctttttccggcgttattgctggcgctgctggtgattgtcgctacggcgctcacctgg

SEQ ID NO: 112679 - DNA, 75 bp, synthetic construct
  source 1..75: mol_type = other DNA
ggcgtgctgtttcagcaagtgctgcgtaacccgctggcggaaccgacgacgttgggcgttgcaacaggcgcgcaa

SEQ ID NO: 112680 - DNA, 75 bp, synthetic construct
  source 1..75: mol_type = other DNA
gcattattcagcggttgaccggaaacctgatggcaagcccggaagtgctggggattagctccggtgcggcgtttg

SEQ ID NO: 112681 - DNA, 75 bp, synthetic construct
  source 1..75: mol_type = other DNA
gccgctgctactgtggctgctgccgcgtttacgcagcattagcgcgccggatatgaaggtcaacgatcgtgtcgc

SEQ ID NO: 112682 - DNA, 75 bp, synthetic construct
  source 1..75: mol_type = other DNA
acgatttcccgtccagaatatgtatcaataaactgctcctgaattccgaaagggaggacagtgtggcagccatgg

SEQ ID NO: 112683 - DNA, 75 bp, synthetic construct
  source 1..75: mol_type = other DNA
gcggcatgttatccggtgccctgttaacctgggtgccaccggaggaagccacgttaatcagaaacggggaagagc

SEQ ID NO: 112684 - DNA, 75 bp, synthetic construct
  source 1..75: mol_type = other DNA
tcgggccgttgagttttgttggcctgatggcaccgcatatcgcacggatgatgggctttcgacggacgatgccgc

SEQ ID NO: 112685 - DNA, 75 bp, synthetic construct
  source 1..75: mol_type = other DNA
caagtgttggacgtgccattcttggtaaaaccagcactcagggagttcttgattaccttggtttgggggaattgg

SEQ ID NO: 112686 - DNA, 75 bp, synthetic construct
  source 1..75: mol_type = other DNA
gcgttaatgttgacggcgtatctttcaatgcagctgcgatgattcaacgtaaagacgccatagtaagccgcctga

SEQ ID NO: 112687 - DNA, 75 bp, synthetic construct
  source 1..75: mol_type = other DNA
tgcgtcgcggctggcaggtaacgctttattgcgcggatgaagcccccgcactgggtgcttccggcaatcgccagg

SEQ ID NO: 112688 - DNA, 75 bp, synthetic construct
  source 1..75: mol_type = other DNA
gcgaagcgcatccacaggcgcaattacaacgcttacatttcattagttttgaaaaatttcccctcgcccgtgcgg

SEQ ID NO: 112689 - DNA, 75 bp, synthetic construct
  source 1..75: mol_type = other DNA
aatttattcgtggctgggatgatggacgtagtgcggatgcggggagaacaatattatccgctcaaggtgatgcca

SEQ ID NO: 112690 - DNA, 75 bp, synthetic construct
  source 1..75: mol_type = other DNA
gctcgatgacggacgcgtaacgctggatttatggtttggcgacattaacgaactgaccagccaactggacgattc

SEQ ID NO: 112691 - DNA, 75 bp, synthetic construct
  source 1..75: mol_type = other DNA
acatggcccgcaagggggcgcaggatgagctccggctgcagttgcgtgatggcggtatgttatccggggagcggg

SEQ ID NO: 112692 - DNA, 75 bp, synthetic construct
  source 1..75: mol_type = other DNA
tctttatgtttgctgctttaggttcgcgcggtttgtgttctgccccgctgtgtgccgagattctggcggcgcaga

SEQ ID NO: 112693 - DNA, 75 bp, synthetic construct
  source 1..75: mol_type = other DNA
ttctctaatgcgtttacttttgctcgtcggttttacgaccaattacccgttaaatttgatcatgactggtgcggc

SEQ ID NO: 112694 - DNA, 75 bp, synthetic construct
  source 1..75: mol_type = other DNA
tctattggtaatggactaaatgttactggtggcgtaaatggtagtttgaacggtaatgcttcaacagctacgaag

SEQ ID NO: 112695 - DNA, 75 bp, synthetic construct
  source 1..75: mol_type = other DNA
atattcagcgagtaagcctgccagcgttaccgatggtgttgtttatacgatgtatagctcacatcagaaacctac

SEQ ID NO: 112696 - DNA, 75 bp, synthetic construct
  source 1..75: mol_type = other DNA
cgggtcggctcagacgtcacgttgctggagatggcgccaacgttcttgcctgcactggaagctcgtttgtccaat

SEQ ID NO: 112697 - DNA, 75 bp, synthetic construct
  source 1..75: mol_type = other DNA
atccgtgagattggtctttatgatgatgaaggtgtactcattgcggtggcaaactgcccggaaacgtacaaaccg

SEQ ID NO: 112698 - DNA, 75 bp, synthetic construct
  source 1..75: mol_type = other DNA
taataagttatagcctattaattttcagtagcttctttttcgctttttctgaaaccatattaagtgcactccttg

SEQ ID NO: 112699 - DNA, 75 bp, synthetic construct
  source 1..75: mol_type = other DNA
agatattggtactttaaattcagtaacgatgtctttctctggcggggctgggtggttcaaactggctacggttac

SEQ ID NO: 112700 - DNA, 75 bp, synthetic construct
  source 1..75: mol_type = other DNA
cggtaatcagtccggactgactgccgatcgcatgctgacgctctccagagccggacaggcagcagggctgacgtt

SEQ ID NO: 112701 - DNA, 75 bp, synthetic construct
  source 1..75: mol_type = other DNA
tccagtatggtgtttttgaagttcaacggggcgaaattttctgcctctgattaccctgtgctggcaaaagtgttt

SEQ ID NO: 112702 - DNA, 75 bp, synthetic construct
  source 1..75: mol_type = other DNA
aatgccacaagcgagttccatcgtttacatcgcattgattggtggcgctggttacaacgtcggctccccacatca

SEQ ID NO: 112703 - DNA, 75 bp, synthetic construct
  source 1..75: mol_type = other DNA
gattgattgtttcccacaggcgcaatgggcgacagaagtcgatgtcagtgaaaaagaggctcgttgcggtgtgcg

SEQ ID NO: 112704 - DNA, 75 bp, synthetic construct
  source 1..75: mol_type = other DNA
gcaggctggttacagtgcaacggagctacgttcaccaaagaacaatatcctgttctggccagagtctacccgacc

SEQ ID NO: 112705 - DNA, 75 bp, synthetic construct
  source 1..75: mol_type = other DNA
gcgcggggtggatgccggaaggggcatcttaagcatgcaggggtggttaacaggaagtcattatcataatattcg

SEQ ID NO: 112706 - DNA, 75 bp, synthetic construct
  source 1..75: mol_type = other DNA
ttgtgccacccgagatcatctgccaatggtaggcaatgtccctgattatgatgcaacgctcgcagaatatgcatc

SEQ ID NO: 112707 - DNA, 75 bp, synthetic construct
  source 1..75: mol_type = other DNA
taaaaccagcactcagggagttcttgattaccttggtttaggagaagcggcaaaacggaatgtgggcacaggaga

SEQ ID NO: 112708 - DNA, 75 bp, synthetic construct
  source 1..75: mol_type = other DNA
gtctaaggcagcaaaaacgtcagaggcaaacgcaaaagcatctgaaacggcagccgaacagagtgcatcgtctgc

SEQ ID NO: 112709 - DNA, 75 bp, synthetic construct
  source 1..75: mol_type = other DNA
gctcttcagagtcagtgattatcgtacaaaagaaataccagcatcagaagttatgggtagaggatatattgccag

SEQ ID NO: 112710 - DNA, 75 bp, synthetic construct
  source 1..75: mol_type = other DNA
ggtaatgctgccaccgccacaaaattgcagacagcaaggaaaattgctggtgtggcgtttgatggctctgccgat

SEQ ID NO: 112711 - DNA, 75 bp, synthetic construct
  source 1..75: mol_type = other DNA
aacccttacagctattggtcgcgctattatcgctaagggcagtataaaagatgtcctcaattaccttggtttggg

SEQ ID NO: 112712 - DNA, 75 bp, synthetic construct
  source 1..75: mol_type = other DNA
aactacagacagcgcgtacaatcaacggtgttaagtttgatggttctgcggacataacgctgactcctgcgaacc

SEQ ID NO: 112713 - DNA, 75 bp, synthetic construct
  source 1..75: mol_type = other DNA
tgccagtacgctggcggcgttaaacccgaatcggttatgggtacggaaattgttgaaaggtaaaacggtgaagtc

SEQ ID NO: 112714 - DNA, 75 bp, synthetic construct
  source 1..75: mol_type = other DNA
cacttctgctcgccctggcctcatccacagtgctcgccgcgtcggattcttgtgagcgtataaaaagcgatattt

SEQ ID NO: 112715 - DNA, 75 bp, synthetic construct
  source 1..75: mol_type = other DNA
acgcgattttaaccaaatattcaccggtgacctggaggtggaaatccgtgaggcagatggcactattcgccattt

SEQ ID NO: 112716 - DNA, 75 bp, synthetic construct
  source 1..75: mol_type = other DNA
gatataacttatctgcgagttactcgctgccattccgctatatctcggcaatgctatcgctcgggtataataaaa

SEQ ID NO: 112717 - DNA, 75 bp, synthetic construct
  source 1..75: mol_type = other DNA
ttgaaagttttattaaaaaaatccttattactggtaaggatcgcactcctgtgcccggcgttcagttggggggca

SEQ ID NO: 112718 - DNA, 75 bp, synthetic construct
  source 1..75: mol_type = other DNA
acgtcccacctggaccgtttgaattacgcgattttaaccaaatattcaccggtgacctggaggtggaaatccgtg

SEQ ID NO: 112719 - DNA, 75 bp, synthetic construct
  source 1..75: mol_type = other DNA
cagatggctcatgccactgacctgctggccgggggcaaggacgatgtaaaagcgacctttggtgccgactcattc

SEQ ID NO: 112720 - DNA, 75 bp, synthetic construct
  source 1..75: mol_type = other DNA
agcaaaataataatggctacggtagccgtagtcagtttttatctctggacagttctctgaaccttggtggatggc

SEQ ID NO: 112721 - DNA, 75 bp, synthetic construct
  source 1..75: mol_type = other DNA
ccggatatgtccgccagtatgttacgggcaatgctggttaatcatgcatctgtccctcaggagatgacgcaggct

SEQ ID NO: 112722 - DNA, 75 bp, synthetic construct
  source 1..75: mol_type = other DNA
tacgccagcacgggcaaatgctgttgacgcaactccataccttgcgcccaacgctggcacaagtacccggcagcg

SEQ ID NO: 112723 - DNA, 75 bp, synthetic construct
  source 1..75: mol_type = other DNA
cgacggctgcgtatatgcgtggcgttgaatttcctaacccacctggtgaggatgattttattgcagcttatggag

SEQ ID NO: 112724 - DNA, 75 bp, synthetic construct
  source 1..75: mol_type = other DNA
cagcccgaaaaaggccattaacccttatctggacccggcggaagttgcgccggtttctacgctttcaaacctgat

SEQ ID NO: 112725 - DNA, 75 bp, synthetic construct
  source 1..75: mol_type = other DNA
cgtatcggcagcgccattggtggtgctttcggtggtggcgcatccgcttccacgggaacggccattgaggctgcg

SEQ ID NO: 112726 - DNA, 75 bp, synthetic construct
  source 1..75: mol_type = other DNA
cacggagaaattacatttggtcgttctgtcaaaattagaaagtatcattagaacgaagaaatcttatatgcaaaa

SEQ ID NO: 112727 - DNA, 75 bp, synthetic construct
  source 1..75: mol_type = other DNA
gagcgcaactgcgtaagcaaatcgtcggtcagtggttgatggtgctggcgctttcagccgttaccggtggggcga

SEQ ID NO: 112728 - DNA, 75 bp, synthetic construct
  source 1..75: mol_type = other DNA
acgcgccagtgaaatcagtgcgctgattgttgaagaagggggcaagatccagcagctggctgaagtcgaagtggc

SEQ ID NO: 112729 - DNA, 75 bp, synthetic construct
  source 1..75: mol_type = other DNA
ttacttacgctatcgatgaaatcatcgaaaccgtccagaacctgacgccaatggcgtccaaagtgacaaaataca

SEQ ID NO: 112730 - DNA, 75 bp, synthetic construct
  source 1..75: mol_type = other DNA
gttgaacagggcctgagccgccaggcgctggctgcacaaaaagccgggatttccgtcgggcagtataaagcggcc

SEQ ID NO: 112731 - DNA, 75 bp, synthetic construct
  source 1..75: mol_type = other DNA
ggatggcgtaagtcgggtattggcggtgcggatggtaaacatggtttgcatgaatacctgcaaacccaggtcgtt

SEQ ID NO: 112732 - DNA, 75 bp, synthetic construct
  source 1..75: mol_type = other DNA
atgagtcatgccgatatgaacaactgctgcggctttaacgaggctaccgcagcattctcatggaacagcccgaaa

SEQ ID NO: 112733 - DNA, 75 bp, synthetic construct
  source 1..75: mol_type = other DNA
agtcaagaggatttgatggcagcgagaaagaggtcgatttactccttcgcggtggcagtattccgtcaggagcag

SEQ ID NO: 112734 - DNA, 75 bp, synthetic construct
  source 1..75: mol_type = other DNA
gccagcggtaatacacctcagacgcgcgatgaaatgctgcagcaacttgccaatgtgcgccgccagatggaacag

SEQ ID NO: 112735 - DNA, 75 bp, synthetic construct
  source 1..75: mol_type = other DNA
gcagcggaaaccctgcgtctggatgtcatcccacctgcgtttgagcaactccgtcggaaaagaaaccgccgtaaa

SEQ ID NO: 112736 - DNA, 75 bp, synthetic construct
  source 1..75: mol_type = other DNA
ttcaaccatgaacggcggcggtgatgatagctcaatgggtagtgccggtggtggtggcggtggtatgcagctggc

SEQ ID NO: 112737 - DNA, 75 bp, synthetic construct
  source 1..75: mol_type = other DNA
aagggcagggcgaccgctggttactggatgagaaagtcaccgcaccgcacagcccgtatgaactacgcgcgggtt

SEQ ID NO: 112738 - DNA, 75 bp, synthetic construct
  source 1..75: mol_type = other DNA
ggtggcagtattccgtcaggagcaggcctgcgtatcttctatcggaaccagcgtctgcaggaggatgataaatgg

SEQ ID NO: 112739 - DNA, 75 bp, synthetic construct
  source 1..75: mol_type = other DNA
aagcagggcggcgtactggtcccccgcaaatatcacctcatcagaaccgcttatgaaatcaacgaagagccgacc

SEQ ID NO: 112740 - DNA, 75 bp, synthetic construct
  source 1..75: mol_type = other DNA
ggcgtgcgggtggctgagccgcatcatgatggcacagttcactggcacctgttgtgtttcatgcgcaaaaaagac

SEQ ID NO: 112741 - DNA, 75 bp, synthetic construct
  source 1..75: mol_type = other DNA
ttcctggtgttggagtgaacggcatcttcgccactcaaggtgacatctctacgctgtcaggaaaagcgcgtatcg

SEQ ID NO: 112742 - DNA, 75 bp, synthetic construct
  source 1..75: mol_type = other DNA
cgcattcagttcactacgcaggccgggaggtacgagatagggcaaataaatgcctacgaagaaggccagtttcag

SEQ ID NO: 112743 - DNA, 75 bp, synthetic construct
  source 1..75: mol_type = other DNA
cgcgtctgctggactctctgggcaaagcagaaggtattcttggcaccattgccggtgatgacaccatctttacca

SEQ ID NO: 112744 - DNA, 75 bp, synthetic construct
  source 1..75: mol_type = other DNA
ttgggttggcccggagatggaagcgttcatgcaaaaccggtaagtaaattaccagaagccaaacaggtaacgatt

SEQ ID NO: 112745 - DNA, 63 bp, synthetic construct
  source 1..63: mol_type = other DNA
atgaaaatcaagcatgaacacatccgcatggcgatgaatgtttgggcgcatccggacggcgaa

SEQ ID NO: 112746 - DNA, 75 bp, synthetic construct
  source 1..75: mol_type = other DNA
gccggtgatgacaccatctttaccacccctgctaaaggttttaccgtcaaagacctgtacgaagcgattttagag

SEQ ID NO: 112747 - DNA, 75 bp, synthetic construct
  source 1..75: mol_type = other DNA
aacggcgagttaagcgatactgctgctggttctcgccgtgctgtagcagatagtggctcttccgatcgtacccgc

SEQ ID NO: 112748 - DNA, 75 bp, synthetic construct
  source 1..75: mol_type = other DNA
tcagagaaggaaacctgcgatataccgagttcagaaatttgcagatcgccggacagtatataggctctttccgca

SEQ ID NO: 112749 - DNA, 75 bp, synthetic construct
  source 1..75: mol_type = other DNA
ctgcctaccagctgaactgggcgtaccaaccacctccagtccgctgaaaaatctggtgctggatatcgactacaa

SEQ ID NO: 112750 - DNA, 75 bp, synthetic construct
  source 1..75: mol_type = other DNA
tggttaccggcaggccggggcataagtggcagtggtggtttgatgaacagacgtatgtgactgcgcaccggacgg

SEQ ID NO: 112751 - DNA, 75 bp, synthetic construct
  source 1..75: mol_type = other DNA
acgtatttgatgaatttgatgaccacggcgtcgcgccgttactttttatggagacgccgtaccgacagcgcattg

SEQ ID NO: 112752 - DNA, 75 bp, synthetic construct
  source 1..75: mol_type = other DNA
tttacaggtatgcacctaatcctttaagttggtttgatcctcttggtttaagtaaaactcaagatatggttaatg

SEQ ID NO: 112753 - DNA, 75 bp, synthetic construct
  source 1..75: mol_type = other DNA
tgatgaacaggggctggctgtcagccgcacggatgcgcggggtggcggggtggcgctggtgcacgatgcgcgcgg

SEQ ID NO: 112754 - DNA, 75 bp, synthetic construct
  source 1..75: mol_type = other DNA
ctgcctacctgctgaactgggcgtaccaaccacgtccagcccgctgaaaaatctggtgctggatatcgactacaa

SEQ ID NO: 112755 - DNA, 75 bp, synthetic construct
  source 1..75: mol_type = other DNA
tccgcattgctcagggatccggcaacatctacatcaacagccagcccgccgcccgtaaggaggaccacactgaat

SEQ ID NO: 112756 - DNA, 75 bp, synthetic construct
  source 1..75: mol_type = other DNA
gaagatgtgaaaccgctgctgatgaaaagtattcacggcgatgatgatgatcacgaccacgcggaaaaaagtgac

SEQ ID NO: 112757 - DNA, 75 bp, synthetic construct
  source 1..75: mol_type = other DNA
tacgatgcgatgacctgtcagtttcgtgaaatgaaactgatgcgtaacccggggtgtgaggtgtgtgggcagtaa

SEQ ID NO: 112758 - DNA, 75 bp, synthetic construct
  source 1..75: mol_type = other DNA
gaaaaagccgaagtcgtcaggcgttaaagtgtcagccggtgagcgtcaggaagaccagacgcatgccgcactgct

SEQ ID NO: 112759 - DNA, 75 bp, synthetic construct
  source 1..75: mol_type = other DNA
tcaccctgtctgcaactaccggcctgaaacgcggagacaaaatttcgtttgctggcgtgaagttccttggtcaga

SEQ ID NO: 112760 - DNA, 75 bp, synthetic construct
  source 1..75: mol_type = other DNA
gaaaaagccgaagtcgtcaggcgtaaaagtgtcagccggtgagcgtcaggaagaccagtcgcatgccgccctgct

SEQ ID NO: 112761 - DNA, 75 bp, synthetic construct
  source 1..75: mol_type = other DNA
aaaggcgtggtatcaggcgaaattgacaatgatatctggaaacaggctgttaacgtagctacaggtggcgtgcat

SEQ ID NO: 112762 - DNA, 75 bp, synthetic construct
  source 1..75: mol_type = other DNA
ttcgacgcagggattctcatcgtttcagacaccaaatgtcggtgatgtacttggcgatgttgcagagcaatatgc

SEQ ID NO: 112763 - DNA, 75 bp, synthetic construct
  source 1..75: mol_type = other DNA
acttccatttcgcgaccgggggatttacggggacggggggtaaatatgaacctgcgggaattgttcatcgcgggg

SEQ ID NO: 112764 - DNA, 75 bp, synthetic construct
  source 1..75: mol_type = other DNA
gcccgccagatgatgattgcgcagatgtgtatgcgcgaagcacagcgtctggaacatatggaggcaaatagtgat

SEQ ID NO: 112765 - DNA, 75 bp, synthetic construct
  source 1..75: mol_type = other DNA
tcagaacatgattattcactgcgtccatcggatgtaaaacgcttacagaacgcggacttagtcgtttgggttggc

SEQ ID NO: 112766 - DNA, 75 bp, synthetic construct
  source 1..75: mol_type = other DNA
aacagacggcagaacataatttgtcgtgagtgccgccagagcgaagttatgcagcgtgtgctggcgttctatcgg

SEQ ID NO: 112767 - DNA, 75 bp, synthetic construct
  source 1..75: mol_type = other DNA
gaaaaagccgaagtcgtcaggcgtgaaagtgtcagccggtgagcgtcaggaagaccagacgcatgccgctctgct

SEQ ID NO: 112768 - DNA, 75 bp, synthetic construct
  source 1..75: mol_type = other DNA
tccgcaagacatgggaaaaggtggcagcggaaaccctgcgtctggatgttatcccgcctgcgtttgagcaactcc

SEQ ID NO: 112769 - DNA, 75 bp, synthetic construct
  source 1..75: mol_type = other DNA
aaattgctgagacaaatgaaaattttttcaaaaaaggtagtattactactaatgaattattggatgatgacattc

SEQ ID NO: 112770 - DNA, 75 bp, synthetic construct
  source 1..75: mol_type = other DNA
gaacaaaagctagaatgtgtatattgtcatgagcctattggggtaagagctgcacaagctgctcctatagagcat

SEQ ID NO: 112771 - DNA, 75 bp, synthetic construct
  source 1..75: mol_type = other DNA
cctgccgcagtcaccagcgctaacccgcaagaagcaacggcaatgctggcggacgggacgtcagtcacgctaagt

SEQ ID NO: 112772 - DNA, 75 bp, synthetic construct
  source 1..75: mol_type = other DNA
actatgacatgcgccacggctaccgcggcccggccaatgtgttgtggaaagtgggcgagtcagcatgggatagca

SEQ ID NO: 112773 - DNA, 75 bp, synthetic construct
  source 1..75: mol_type = other DNA
ggctacgcggtaatggcgaacggcggcttctggtggacccgtggtttatcagcaaaattgaaaacgatcagggcg

SEQ ID NO: 112774 - DNA, 75 bp, synthetic construct
  source 1..75: mol_type = other DNA
gtggctgaccgtctgacggttcgcagcgcagaaatcatcccgtaccgcgtggaagccaccatttttctttatccg

SEQ ID NO: 112775 - DNA, 75 bp, synthetic construct
  source 1..75: mol_type = other DNA
ctgcgtgtgcctgcagcctttgaagggctttctgttgcggggccaactgccgcttatgaatttcatgcccgaagc

SEQ ID NO: 112776 - DNA, 75 bp, synthetic construct
  source 1..75: mol_type = other DNA
ctgcgtattcagcaggcgtttgagggcttaagcgtcgccgggtcagtgggagcctatcagtatcatggtcgcagt

SEQ ID NO: 112777 - DNA, 75 bp, synthetic construct
  source 1..75: mol_type = other DNA
acggtgaatatcgatcgcagcaccggtcaactggctaatggcggcaacagccgcgaggagtatttcattgagggt

SEQ ID NO: 112778 - DNA, 75 bp, synthetic construct
  source 1..75: mol_type = other DNA
acggtacgtccggtattcgcggcgctgggtgccgggatcgcaatgagcggcagcctgttaggtccgctgctgttc

SEQ ID NO: 112779 - DNA, 75 bp, synthetic construct
  source 1..75: mol_type = other DNA
gcgtatgttgtgcgccgactggtggtatcggaaattgtggaagatgcgttgtgaatggcgggaagagcagttgcg

SEQ ID NO: 112780 - DNA, 75 bp, synthetic construct
  source 1..75: mol_type = other DNA
gagcagattgcgtatgttgcgcagctgcagcgttcgggtgatgaggcaggggccttacaggcggcgaacgatatc

SEQ ID NO: 112781 - DNA, 75 bp, synthetic construct
  source 1..75: mol_type = other DNA
ataatcactttctttctcctgaattacaagataaacttgatgttatggtctctatatattcatgtgccagaaata

SEQ ID NO: 112782 - DNA, 75 bp, synthetic construct
  source 1..75: mol_type = other DNA
atatcacccaacaacagttcgatcagacacgcactgaggcgattaacgctaactatcacgcgccggagattgctt

SEQ ID NO: 112783 - DNA, 75 bp, synthetic construct
  source 1..75: mol_type = other DNA
tgacgcgacgctctacgtttaccccggccccgaatctgaacccatcaggcaggcatcagagcagaagctgcagag

SEQ ID NO: 112784 - DNA, 75 bp, synthetic construct
  source 1..75: mol_type = other DNA
acagggggacaaaaaagcaggtgcggcggtactggataacccacgccttgatgccatcctggctgctgctgatgc

SEQ ID NO: 112785 - DNA, 75 bp, synthetic construct
  source 1..75: mol_type = other DNA
gcccgttcatcgcggactggaaacgttgatgctggtgctggcggtgttgttggggcttataccggctttctgctg

SEQ ID NO: 112786 - DNA, 75 bp, synthetic construct
  source 1..75: mol_type = other DNA
acgcaacctacacagcaggcggtgcgcgaggtagggacaaccattattgataatggtgaggctcaggaattgttc

SEQ ID NO: 112787 - DNA, 75 bp, synthetic construct
  source 1..75: mol_type = other DNA
tgtggggccagtctggtcggcgtgttgatgctgcgctttttcattctctacgccgggcagttaacggtggcgtaa

SEQ ID NO: 112788 - DNA, 75 bp, synthetic construct
  source 1..75: mol_type = other DNA
tttaccctgaagaacaacaggacgctgttgcgcgtactctcgcccttgagtctgagccactggtgaagtatctgg

SEQ ID NO: 112789 - DNA, 75 bp, synthetic construct
  source 1..75: mol_type = other DNA
cctatcccgccgaacagcgtgaagccgtttccgccgcactggagctggaatcggaaccccttaacgttatcgctc

SEQ ID NO: 112790 - DNA, 75 bp, synthetic construct
  source 1..75: mol_type = other DNA
cataatgagtttcttgttaaaggacctggtattattgttggaaggaaaggaactgttggttcattgtattgggag

SEQ ID NO: 112791 - DNA, 75 bp, synthetic construct
  source 1..75: mol_type = other DNA
cggaatggctggaaacccagcagcaatttaaaaaaagaatggcagcaagcgggctggaaacacgtttcgatgaag

SEQ ID NO: 112792 - DNA, 75 bp, synthetic construct
  source 1..75: mol_type = other DNA
acgcagcctacacagcaggcggtgcgcgaggtgggaacgaccattatcgataatggtgaggcgcaggaattgttc

SEQ ID NO: 112793 - DNA, 75 bp, synthetic construct
  source 1..75: mol_type = other DNA
tggatgccaaagaacacggtgccgttatccttaccgctcatgaagtcacggggctgattcgtgaaggcgcgacgg

SEQ ID NO: 112794 - DNA, 75 bp, synthetic construct
  source 1..75: mol_type = other DNA
ccgcaaagtgcagcaggccgcacagcaagccgtgcgtaataacgtactggactacgacatgcgtcacggctatcg

SEQ ID NO: 112795 - DNA, 75 bp, synthetic construct
  source 1..75: mol_type = other DNA
gaaaaagcgaaaaagatgggcgacccgctggtgctgacctttggcaaggtggagccgcgcccgaatacggtgaat

SEQ ID NO: 112796 - DNA, 75 bp, synthetic construct
  source 1..75: mol_type = other DNA
ggtggtgctgactgtccttagccgcgaaggcgatggaactgcagaaaaagacctgctggacgtggtgggaaaagc

SEQ ID NO: 112797 - DNA, 75 bp, synthetic construct
  source 1..75: mol_type = other DNA
tggtgaacctggctggcagggcactggctggcgcgcaggtcgtgatttgcaacgtcatgatatcggcgggaaaac

SEQ ID NO: 112798 - DNA, 75 bp, synthetic construct
  source 1..75: mol_type = other DNA
atgcgcaaaaaagaccgccgcgccattacagcattgttgcgtaagtttgctatccgtgaagaccgcgaggagctg

SEQ ID NO: 112799 - DNA, 75 bp, synthetic construct
  source 1..75: mol_type = other DNA
acagggagaccgggctcgccatcactgacgccgatcacatccgtcagagctgtggcgatattttgcgaacgccag

SEQ ID NO: 112800 - DNA, 75 bp, synthetic construct
  source 1..75: mol_type = other DNA
agatacggcaaatgcactggctgaaaatggcccggaatgccggtgagctgggacgatttatgtcggtggcccgtg

SEQ ID NO: 112801 - DNA, 75 bp, synthetic construct
  source 1..75: mol_type = other DNA
ttgaaaatctgaacaaatcagggggtgatttgccagatattaaaaccatgaatgagcaggaactgcacgattacc

SEQ ID NO: 112802 - DNA, 75 bp, synthetic construct
  source 1..75: mol_type = other DNA
ccccgcgtcaccctgtcatccgtcaccacggcgcgcagctttgacgggcgaatgacagttacattaaccggccag

SEQ ID NO: 112803 - DNA, 75 bp, synthetic construct
  source 1..75: mol_type = other DNA
ccgcaaacccgcgacgaaatgctgcaggaaatcgctaacgttcgccgtcagatggaacagaacaatgctggcgat

SEQ ID NO: 112804 - DNA, 75 bp, synthetic construct
  source 1..75: mol_type = other DNA
ggggacggccattcaggctgcggcggcgaacttccatttcgcgaccgggggatttacgggaaccggtggcaaata

SEQ ID NO: 112805 - DNA, 75 bp, synthetic construct
  source 1..75: mol_type = other DNA
cagcattccgtccggggccgggctgcgcattttctaccgcaaccagcggctacaggaagatgataaatggcggca

SEQ ID NO: 112806 - DNA, 75 bp, synthetic construct
  source 1..75: mol_type = other DNA
gggcggtgatgctggcctgtgccgccggtaatgaccttgatgtgattggtgccaattacaacaccacgcgcctga

SEQ ID NO: 112807 - DNA, 75 bp, synthetic construct
  source 1..75: mol_type = other DNA
ggagagacagatgaaaatgaatgtaaggtgggctttaatttgaaaaaatcagtgaacaaatattcggaaataacc

SEQ ID NO: 112808 - DNA, 75 bp, synthetic construct
  source 1..75: mol_type = other DNA
gaaaagcaacgtgcctgcgctggaagcatgcccgcaaaaacgtggcgtatgtactcgtgtatatactaccactcc

SEQ ID NO: 112809 - DNA, 75 bp, synthetic construct
  source 1..75: mol_type = other DNA
gatcaccctgccgatggtcggggtcacctcgctggcggtggcgacgaggtgcgctggcgtacgcctggtaccagg

SEQ ID NO: 112810 - DNA, 75 bp, synthetic construct
  source 1..75: mol_type = other DNA
tgcgtttgagaaacttcgtcggaaaagaaaccgccgcaaacccgtgccctatgaactcataccgggttcgctggc

SEQ ID NO: 112811 - DNA, 75 bp, synthetic construct
  source 1..75: mol_type = other DNA
cggctgcgctggtgaaggccacatctgcactgaagaacacctggtctgcggaggagcagcttcgtggaagctgga

SEQ ID NO: 112812 - DNA, 75 bp, synthetic construct
  source 1..75: mol_type = other DNA
atggttgtcatgtcttttctcagtctgatgattatactggacgtactctgaccaacccaacgattcctaaaaaat

SEQ ID NO: 112813 - DNA, 75 bp, synthetic construct
  source 1..75: mol_type = other DNA
gctgaagtataccggagaggcgcagaaggcgtatgagcgcctgcagacgccgctggataaatataccgcccgtca

SEQ ID NO: 112814 - DNA, 75 bp, synthetic construct
  source 1..75: mol_type = other DNA
tgtaggcgacccgatcttctggggaacggtacgtccggtatttgcagcgctgggtgccggtatcgcgatgagcgg

SEQ ID NO: 112815 - DNA, 75 bp, synthetic construct
  source 1..75: mol_type = other DNA
gttacgccagcgggtcaatgagggtgcacgcgcctgcatgttaagccacagcgccggaacagacctggacaacct

SEQ ID NO: 112816 - DNA, 75 bp, synthetic construct
  source 1..75: mol_type = other DNA
tttatgccgcgctgcatgtcgagggtgtccagcgtgtggagctggccgcgccggtggctgacctcgtgctcagca

SEQ ID NO: 112817 - DNA, 75 bp, synthetic construct
  source 1..75: mol_type = other DNA
gaacacgttaccactgtccagactattcttgaccagttaatgccgggcctggtaccactgctgctgacctttgct

SEQ ID NO: 112818 - DNA, 75 bp, synthetic construct
  source 1..75: mol_type = other DNA
atggcagtgattgacctttcgcagttgcctgcgccgcagattgtggatgtgcccgactttgagacgctgcttgcc

SEQ ID NO: 112819 - DNA, 75 bp, synthetic construct
  source 1..75: mol_type = other DNA
cgtctccggccaacgtgacggtttccatcctgtccactgagggcgacggcacagcaacggaggcgttgcttaata

SEQ ID NO: 112820 - DNA, 75 bp, synthetic construct
  source 1..75: mol_type = other DNA
cgctatgagcatgttaaatctgaagatggatgttacagtttagcaactaagaaaattatatcgcatcaatttgag

SEQ ID NO: 112821 - DNA, 75 bp, synthetic construct
  source 1..75: mol_type = other DNA
caaatcgatgaagattatagcggtattgttttagcaagagacttaagtgggagatatagatgtattgacctattt

SEQ ID NO: 112822 - DNA, 75 bp, synthetic construct
  source 1..75: mol_type = other DNA
acctgctggccgtggtgcgtaacgcccttaatggcgaggacgtcagaccggtggccgaccgcgtgaccgtgcagt

SEQ ID NO: 112823 - DNA, 75 bp, synthetic construct
  source 1..75: mol_type = other DNA
ctgcgtattcagcaggcgtttgagggcttaagcgtcgccgggtcggtgggggcctatcagtatcatggtcgcagt

SEQ ID NO: 112824 - DNA, 75 bp, synthetic construct
  source 1..75: mol_type = other DNA
atgtgggtgctgccggaagtccggcgcagatgcggcgggccgaaggcattaattttaatcagaacaatcacgtgg

SEQ ID NO: 112825 - DNA, 75 bp, synthetic construct
  source 1..75: mol_type = other DNA
gcagggtgacaaaaaagtaggtgcgccggtactggatgatccgcgtcttgatgccatcctggctgctgctgatgc

SEQ ID NO: 112826 - DNA, 75 bp, synthetic construct
  source 1..75: mol_type = other DNA
acccgtgaagagtgcaaaattccaggcctgcttgacggcgaccggcaggggaatgacgtcagcgccatgcgcgtg

SEQ ID NO: 112827 - DNA, 75 bp, synthetic construct
  source 1..75: mol_type = other DNA
gtatgactattttgctggctttcagtgttagtttcggcttcattctgccgattaatgcgccacaaaatatggtct

SEQ ID NO: 112828 - DNA, 75 bp, synthetic construct
  source 1..75: mol_type = other DNA
acaatgtaattaatcaggttattgatgatatggctcgtggtcatatcccttccccgctcccatcgcaaagcgcgc

SEQ ID NO: 112829 - DNA, 75 bp, synthetic construct
  source 1..75: mol_type = other DNA
gctgcacgaacagttcttgaaaatggtttacgtggtggtttgccagaaccgtctcgcccggctgctgtttctttt

SEQ ID NO: 112830 - DNA, 75 bp, synthetic construct
  source 1..75: mol_type = other DNA
tagcgcgatcagaagtaccctggatctggcctcatttgccgggcgtattgcctatacgggttggccaaaacagga

SEQ ID NO: 112831 - DNA, 75 bp, synthetic construct
  source 1..75: mol_type = other DNA
aaaactttcggcgccgggcattctgtcagctggcttgactggctgttagcgggcgcgccctggagcctcaccatg

SEQ ID NO: 112832 - DNA, 75 bp, synthetic construct
  source 1..75: mol_type = other DNA
gacgatgccggtatgctcagcaaaaattcccttttacgagcatttaaagagatgtggaatgagctttatccaaat

SEQ ID NO: 112833 - DNA, 75 bp, synthetic construct
  source 1..75: mol_type = other DNA
aatggtttcccgctatatccgtaacattgacgcaggtaagaaagcgatgacgaagttcatgcgtgaggcgctgga

SEQ ID NO: 112834 - DNA, 75 bp, synthetic construct
  source 1..75: mol_type = other DNA
gtggtgtttatctccagtgaagtggaggagttgccgctggtgtgtgaccgcatcctgttattacagcacggcacg

SEQ ID NO: 112835 - DNA, 75 bp, synthetic construct
  source 1..75: mol_type = other DNA
gtagtactgctgaccagtgccagtgaaaaagcgttttgtgtcggcgcggatattcatcgctggacctctctttct

SEQ ID NO: 112836 - DNA, 75 bp, synthetic construct
  source 1..75: mol_type = other DNA
tggctgctatctatgttgatgtgattagcccgcttggcccgcgcattcaggtcaccggttcccctgctgtactgc

SEQ ID NO: 112837 - DNA, 75 bp, synthetic construct
  source 1..75: mol_type = other DNA
cagtacaccgggcgaccatgaatggaagcgcctttatactacgcttcgtcgtcgcgccgatgatcgacgccaatg

SEQ ID NO: 112838 - DNA, 75 bp, synthetic construct
  source 1..75: mol_type = other DNA
ataaggcaacaaacaccgctctggatgcactaaagaaacctgctggagcaaccaggaaattacaaatgaatattc

SEQ ID NO: 112839 - DNA, 75 bp, synthetic construct
  source 1..75: mol_type = other DNA
gcaacggacaaagaagccattgtgaatgcgtggaaagcatttaatgctgaggatatggggaataaatttgctgcg

SEQ ID NO: 112840 - DNA, 75 bp, synthetic construct
  source 1..75: mol_type = other DNA
actgctacgtgaagaccaacaagcgcggataaatgtgcgcttggtggcatccgatgggggccaatggactaacga

SEQ ID NO: 112841 - DNA, 75 bp, synthetic construct
  source 1..75: mol_type = other DNA
gaacttcaggatgcggaggccattcagcgttacgttgtgggctggcccacaacggaagaacccgccaccgaaaga

SEQ ID NO: 112842 - DNA, 75 bp, synthetic construct
  source 1..75: mol_type = other DNA
cgctcaagcatggataatgcgattgcctgtagttcttcgttagtcattgtctgcacctggaaagcaatttaccgg

SEQ ID NO: 112843 - DNA, 75 bp, synthetic construct
  source 1..75: mol_type = other DNA
cgtaagaaagcagcggagcgcaaacgtgctaatcgcctggcaaaactgccgtatgatgaacagcgaaacgaaatt

SEQ ID NO: 112844 - DNA, 75 bp, synthetic construct
  source 1..75: mol_type = other DNA
cgctggagcaggtgctggacaaggctgaatccgaagggcgcatcttcaaaagcgaacgcggctatctggaacaac

SEQ ID NO: 112845 - DNA, 75 bp, synthetic construct
  source 1..75: mol_type = other DNA
atgaaaccaaaaactacatataagctttatattggctgctttagcttccatgaaaccaaaaactacacggcgggt

SEQ ID NO: 112846 - DNA, 75 bp, synthetic construct
  source 1..75: mol_type = other DNA
cctgtgggcgcaactggaagcagcggatcgtatcaaccagcaacgtctggcgctgtggcaaaactactacgatgc

SEQ ID NO: 112847 - DNA, 75 bp, synthetic construct
  source 1..75: mol_type = other DNA
gatgcaacgcttgcactacgtaaccatttgaattcagctaaacaagcgatgattcgttccatcaagaagaacaag

SEQ ID NO: 112848 - DNA, 75 bp, synthetic construct
  source 1..75: mol_type = other DNA
tcgaacgtcatcggctactgcgtgacaacatcggcaatagctttcgcatgttctcgcaacttgacagagattttc

SEQ ID NO: 112849 - DNA, 75 bp, synthetic construct
  source 1..75: mol_type = other DNA
taaatacaaggcgctttcccgtgaaattgcagagaatataaataattttcagggaaaaacgattcgtagttatga

SEQ ID NO: 112850 - DNA, 75 bp, synthetic construct
  source 1..75: mol_type = other DNA
tagatgagcatatgactattctcagtgctttggtttgccgcagctatgtggatgcaacgcttgcactacgtaacc

SEQ ID NO: 112851 - DNA, 75 bp, synthetic construct
  source 1..75: mol_type = other DNA
gaaggcgctattgacgtgctgccggttggcaacgtgcgcatggctgcccgccagctgcagccggtgcgcatcacc

SEQ ID NO: 112852 - DNA, 75 bp, synthetic construct
  source 1..75: mol_type = other DNA
gtttacgtagtggtttgccagaaccatcacgcccggctgctgtttcttttgcccgtctggagcctgcttccggaa

SEQ ID NO: 112853 - DNA, 75 bp, synthetic construct
  source 1..75: mol_type = other DNA
gatgcgactctggcactacgtaaccatttgaattcagccaaacaatcgatgattcgttcaattaatgaaaacaaa

SEQ ID NO: 112854 - DNA, 75 bp, synthetic construct
  source 1..75: mol_type = other DNA
gcaatggtggcttctttcaggctatggaagtagataagacacagtttgttaaactttatgttgatggcgtatcgg

SEQ ID NO: 112855 - DNA, 75 bp, synthetic construct
  source 1..75: mol_type = other DNA
cgatccgctggaagtggcgcagtggctgcaggcctgtcatgatgccggaatggaggttcgcgtacagataaatga

SEQ ID NO: 112856 - DNA, 75 bp, synthetic construct
  source 1..75: mol_type = other DNA
gactggtaaaaccgaagcggaaaaaagcctacaaacagagtatttcggagcagcagcgtctgcagcttgaagcgg

SEQ ID NO: 112857 - DNA, 75 bp, synthetic construct
  source 1..75: mol_type = other DNA
tggctgagccgcaccatgacggtactgtgcactggcatctcatgtgcttcatgcgtaaaaaagaccgccgcgcca

SEQ ID NO: 112858 - DNA, 75 bp, synthetic construct
  source 1..75: mol_type = other DNA
aatatttccatagcctgggcagagcaaaagcctattcccgctacctgcgcgaaacaattaggccctgtcttgagc

SEQ ID NO: 112859 - DNA, 75 bp, synthetic construct
  source 1..75: mol_type = other DNA
ctgcagctgtggagcgtggccgggcaggtgacgcgcctcgaaggcgatcccctgcaggtcgccgcctggctgcag

SEQ ID NO: 112860 - DNA, 75 bp, synthetic construct
  source 1..75: mol_type = other DNA
agtatgaacataaaatcggcgacctgattgcccgatttaaagaggctggtggggaagtaaatgaagctgagatat

SEQ ID NO: 112861 - DNA, 75 bp, synthetic construct
  source 1..75: mol_type = other DNA
actggaacagcgacagctgtactgcaaccgcgggcagctgacggagattgtgttttcgccggtccgcaaacccgg

SEQ ID NO: 112862 - DNA, 75 bp, synthetic construct
  source 1..75: mol_type = other DNA
acgaggcggtagcatcccatccggagccgggctacgccttttctaccgggatcagcgtctgcaggaggatgacaa

SEQ ID NO: 112863 - DNA, 75 bp, synthetic construct
  source 1..75: mol_type = other DNA
aaggtatttggtgaaatgttgaaagctggaaatccaccggatgactgggatacccttctctgtgaggccagtaaa

SEQ ID NO: 112864 - DNA, 75 bp, synthetic construct
  source 1..75: mol_type = other DNA
atttatggtgcgcagcatctcccgcgaaggggcgattgatgtgttgccggttggcaatgtacgcatggctgcccg

SEQ ID NO: 112865 - DNA, 75 bp, synthetic construct
  source 1..75: mol_type = other DNA
cggcgcaccgccgtaatgaaatgatggcctgtgttaaagggctggaactgatcgcggaaatgcgcggagactgcg

SEQ ID NO: 112866 - DNA, 75 bp, synthetic construct
  source 1..75: mol_type = other DNA
acccggatatcaccgccgatgagctggcgttctccagttcgccggatgaaagcggcaacagcgacaacctccagg

SEQ ID NO: 112867 - DNA, 75 bp, synthetic construct
  source 1..75: mol_type = other DNA
gggatgacgatagatgacagggatggttatatcagggagcttttttttctgtattcattgaaagtaaaaattgag

SEQ ID NO: 112868 - DNA, 75 bp, synthetic construct
  source 1..75: mol_type = other DNA
gacattggtgcgcgctcctatgacgaagtgatgcaggcgggaattcgtccaggcgatcgcgtcacctttgataca

SEQ ID NO: 112869 - DNA, 75 bp, synthetic construct
  source 1..75: mol_type = other DNA
ataaataaaccaattagtaataaaataaatgaattaaaacgatttagtaaatttgtaaatgactcagctattaaa

SEQ ID NO: 112870 - DNA, 75 bp, synthetic construct
  source 1..75: mol_type = other DNA
atctgtataagtactaaaactgaagtattcaagaaattcagtagatttgtaaatgataaagaagtcgaaataatt

SEQ ID NO: 112871 - DNA, 75 bp, synthetic construct
  source 1..75: mol_type = other DNA
cagaaaccgggctggcgaccgtgcctggctggtcaggtactcagcggctgacggcactgattgggcgctcactgg

SEQ ID NO: 112872 - DNA, 75 bp, synthetic construct
  source 1..75: mol_type = other DNA
gggcagcaactttcgccagttcgccatcagtaccggctacgaaccccggacggttacgcaagctgttgatcgctg

SEQ ID NO: 112873 - DNA, 75 bp, synthetic construct
  source 1..75: mol_type = other DNA
cttcatgaaaacttattacttgaaggacaaaaaagctaaaactaaagagaacaaaattaattgccaaggcaaaac

SEQ ID NO: 112874 - DNA, 75 bp, synthetic construct
  source 1..75: mol_type = other DNA
cgctgatcaatatctccaccgaaccgctggagatagccaacctcggcagcgtgacggtcgggcaggcgtgctcgt

SEQ ID NO: 112875 - DNA, 75 bp, synthetic construct
  source 1..75: mol_type = other DNA
tgctgtggcattgcagcagattaaagagcgtggtgctttaccgatgattgatcgcggcgatatccgtcaggctat

SEQ ID NO: 112876 - DNA, 75 bp, synthetic construct
  source 1..75: mol_type = other DNA
ggaagtagacaagacacagttcgtgaagctttatgtggatggcgtatcagctattgagggtttatcctcatcagg

SEQ ID NO: 112877 - DNA, 75 bp, synthetic construct
  source 1..75: mol_type = other DNA
gctgttttgttgaagtccctaacgatgatgttttctgcaattatgaatttaaagacagcttaggcagatctcatg

SEQ ID NO: 112878 - DNA, 75 bp, synthetic construct
  source 1..75: mol_type = other DNA
cgctgttgcgctgcagcagattaaggaacgtggcgctttgccgatgattgatcgcggtgatatccgtcaggcaat

SEQ ID NO: 112879 - DNA, 75 bp, synthetic construct
  source 1..75: mol_type = other DNA
agcttccatgaaaccaaaaactacacggcgggtggtgaaggcggcgcgacgctgattaacgataaagcgttgatc

SEQ ID NO: 112880 - DNA, 75 bp, synthetic construct
  source 1..75: mol_type = other DNA
atgtttaaccgggtatttaatggcaggcaacggcgcagcgatgaagcggaaaaacccttctggatctcctatgca

SEQ ID NO: 112881 - DNA, 75 bp, synthetic construct
  source 1..75: mol_type = other DNA
ccgcagctgatgaaagcggtgtatgagatggcccgtaaaggtgcgcaggatgagctccggctgcagttgcgtgat

SEQ ID NO: 112882 - DNA, 75 bp, synthetic construct
  source 1..75: mol_type = other DNA
aaaaacgccgcagcgatgaagcggagaaacccttctggatctcctatgccgatttgatgactgccatgatggtgt

SEQ ID NO: 112883 - DNA, 75 bp, synthetic construct
  source 1..75: mol_type = other DNA
tcgccgcacctgatgttgtggaagagttggattatgaaaccatcctgacagagcgaaaggtgacgctcgtctcac

SEQ ID NO: 112884 - DNA, 75 bp, synthetic construct
  source 1..75: mol_type = other DNA
ctgacggcaggtaaagtgtggtacgacaccccaaccgatgattataacggtctgcaacttgcagcccatctgacc

SEQ ID NO: 112885 - DNA, 75 bp, synthetic construct
  source 1..75: mol_type = other DNA
aaacggcggtgggatgtgacaccggcaatcatccgtgcagtggaatacctttcccgggtaccggtatcacactga

SEQ ID NO: 112886 - DNA, 75 bp, synthetic construct
  source 1..75: mol_type = other DNA
gatgttgcagaaatgcattgaggaaggccacaaagaagaagaagtaaaagcgtttatgccgctgttttacggtga

SEQ ID NO: 112887 - DNA, 75 bp, synthetic construct
  source 1..75: mol_type = other DNA
aaacggcggtgggatgtgacaccggcaattatccgcgcggtggaatacctttcccgggtaccggtatcacactga

SEQ ID NO: 112888 - DNA, 75 bp, synthetic construct
  source 1..75: mol_type = other DNA
ggttttcatttaaccagggacggacaacggctgttcactgaacgttatatcagaaaccttaatgagctgttaccg

SEQ ID NO: 112889 - DNA, 75 bp, synthetic construct
  source 1..75: mol_type = other DNA
cactcggcagcgacggtatgttaatcactcgctacactgacgacgcgagctttcacgaagtgttaactaaggact

SEQ ID NO: 112890 - DNA, 75 bp, synthetic construct
  source 1..75: mol_type = other DNA
cataaccaatttttcctgaacgccgaggggcaaaaagcgttgcaggatgtagttcctcttgtactggaagcgtcc

SEQ ID NO: 112891 - DNA, 75 bp, synthetic construct
  source 1..75: mol_type = other DNA
atgaacccgttatttaatgatattcagatacgtcttttttatctgaatcattcgccgtattcctggcactggaat

SEQ ID NO: 112892 - DNA, 75 bp, synthetic construct
  source 1..75: mol_type = other DNA
cgttcggaagtgctgttattttcccgttgaacaaggatctgcttggcagtgtttcactgcattctatgcgcggcc

SEQ ID NO: 112893 - DNA, 75 bp, synthetic construct
  source 1..75: mol_type = other DNA
gttctgaagcggcggtgggatgtcacacccgcaatcatccgcgcagtggaatacctttcccgggtaccggtagca

SEQ ID NO: 112894 - DNA, 75 bp, synthetic construct
  source 1..75: mol_type = other DNA
aaccggtaagcaaattaccagaagcgaagcaggtaacgattgcgcagcttgaagatgtgaaaccgctactgatga

SEQ ID NO: 112895 - DNA, 75 bp, synthetic construct
  source 1..75: mol_type = other DNA
ccgccggtaacgacctcgacgtcgtagccgggaacaataataccgaacgcctgaccatcaccccggcggatgaca

SEQ ID NO: 112896 - DNA, 75 bp, synthetic construct
  source 1..75: mol_type = other DNA
atgtttgagtttatcgatctgttaatgttcttagtttgctctggcgtgcttattatcgcgttaatgttatgcgta

SEQ ID NO: 112897 - DNA, 75 bp, synthetic construct
  source 1..75: mol_type = other DNA
agatgccgccgttgtcgcttcgcttaaacccgttgggttcatcgcttctgccattgctgatggggtaacagaaac

SEQ ID NO: 112898 - DNA, 75 bp, synthetic construct
  source 1..75: mol_type = other DNA
tcgagaaaaagtgatagagaacaaaaggttataaaggatgagcaagacagattacgtaagttgcttctggaaaaa

SEQ ID NO: 112899 - DNA, 75 bp, synthetic construct
  source 1..75: mol_type = other DNA
agcgggtggctgacggcagagcacagcgtgcacggcagtataaaatatcagcgcgacgcgctgggcaatcccacc

SEQ ID NO: 112900 - DNA, 75 bp, synthetic construct
  source 1..75: mol_type = other DNA
gctgaacgccgaagatgtgcgcccggtggctgaccgggtgaccgtccagtcagccgagattgtgccgtaccagat

SEQ ID NO: 112901 - DNA, 75 bp, synthetic construct
  source 1..75: mol_type = other DNA
ctagtcctggtggtggtggcagccggggcggccagaacgctgtcaataatcagggcggtggtgctaaaggcggag

SEQ ID NO: 112902 - DNA, 75 bp, synthetic construct
  source 1..75: mol_type = other DNA
gaaatcaccgctctggctgcggcgacgctggcgctggagatgctgtatattcaggcggcgaaaaagggcgagtaa

SEQ ID NO: 112903 - DNA, 75 bp, synthetic construct
  source 1..75: mol_type = other DNA
ctgtatgtccggtgccgggcaatgctgcgcgacgagttcgaacagacgctgtcttctgccgacggaacccgcctg

SEQ ID NO: 112904 - DNA, 75 bp, synthetic construct
  source 1..75: mol_type = other DNA
gcggctgtggaaactgccggtgacccccttactcaccttctccgtgaatggtcagtccgttcacgtcaccccgga

SEQ ID NO: 112905 - DNA, 75 bp, synthetic construct
  source 1..75: mol_type = other DNA
agctaccgccgcccgtggtggttgaaccgctggacttcgaaacgcttttcgcgcagcgcaaggcggcatttattg

SEQ ID NO: 112906 - DNA, 75 bp, synthetic construct
  source 1..75: mol_type = other DNA
gcagcatgaagagcgtaagcttgcaacgtatccagccgctgacagaacaacttaatctggggctaacggcaggta

SEQ ID NO: 112907 - DNA, 75 bp, synthetic construct
  source 1..75: mol_type = other DNA
cggcagttacagcaatatgatttccgtgcgtctgaatgaccctcgcggcggcggttatactcaactttggcttag

SEQ ID NO: 112908 - DNA, 75 bp, synthetic construct
  source 1..75: mol_type = other DNA
ttctttatgatgagcataaattcaaacagaggaccatcatatttgtatattttacaacgattgctttatttggtt

SEQ ID NO: 112909 - DNA, 75 bp, synthetic construct
  source 1..75: mol_type = other DNA
aatgatcttcatgaacaagaatcatccctatttagaacaatcaaagaacctgaaacattaaagtctataaatcaa

SEQ ID NO: 112910 - DNA, 75 bp, synthetic construct
  source 1..75: mol_type = other DNA
taatctttcgcgtattaatgatacaaatgccctcataaaatctcttgaagatagtcgagagaaattacttttaga

SEQ ID NO: 112911 - DNA, 75 bp, synthetic construct
  source 1..75: mol_type = other DNA
ttaacctgaataatcccactattgaaccactttcagataatgacttagcaaaaatcacaaaatcattacgtacat

SEQ ID NO: 112912 - DNA, 75 bp, synthetic construct
  source 1..75: mol_type = other DNA
aaagcatcaagacttattttatggagaacggttacataaacaagtatttggagacatgggagcaaattttttatc

SEQ ID NO: 112913 - DNA, 75 bp, synthetic construct
  source 1..75: mol_type = other DNA
ctgaaaatttgaaccaacaggagaaagataaatcaacagatggggatcccagaactgacattacctgtatggatg

SEQ ID NO: 112914 - DNA, 75 bp, synthetic construct
  source 1..75: mol_type = other DNA
gaagatatcgccgccgcacgtctgttgggtaaaaccgaagccgagttcctgaaaatgaaagaggaaatgcaataa

SEQ ID NO: 112915 - DNA, 75 bp, synthetic construct
  source 1..75: mol_type = other DNA
ccagcggggattgttcaccgtggtgaatttgtcttcacgaaggaggcaaccagccggattggtgtcggcaacctg

SEQ ID NO: 112916 - DNA, 75 bp, synthetic construct
  source 1..75: mol_type = other DNA
aggcggataaaaaatggcagtggtaccagagccggagccagcgccggggaaagacctcctcttttcgtgcgaacc

SEQ ID NO: 112917 - DNA, 75 bp, synthetic construct
  source 1..75: mol_type = other DNA
tattgctgcaggatgggttaagccggaaaacatcgaatggcgtgagggtcaggggattttcattaaacctgaatg

SEQ ID NO: 112918 - DNA, 75 bp, synthetic construct
  source 1..75: mol_type = other DNA
gcacaggcattacgtaaagcatggccggagattggtcaacaagccacagctgaggaaatggaaggtaaatatatc

SEQ ID NO: 112919 - DNA, 75 bp, synthetic construct
  source 1..75: mol_type = other DNA
gcaagctgcttgcgcgtcttggggtgacggtccccgaaaatgcagacatcaccgatgaacaggccagcgcggccc

SEQ ID NO: 112920 - DNA, 75 bp, synthetic construct
  source 1..75: mol_type = other DNA
ccactggcgtaaagttgcacctgacagttttgaagttttaggaacaattgaaaacctgcattattttggtaaaca

SEQ ID NO: 112921 - DNA, 75 bp, synthetic construct
  source 1..75: mol_type = other DNA
ccgaatcacagcgggcgctggtcgggtctggcattgaagcgcaggttaacggtgagcgcgtattgatttgcgctg

SEQ ID NO: 112922 - DNA, 75 bp, synthetic construct
  source 1..75: mol_type = other DNA
tagaccgtctggtgacgttggaagtattgtccgaaccgggagccagcgccattgaccggattctgaaactgatcg

SEQ ID NO: 112923 - DNA, 75 bp, synthetic construct
  source 1..75: mol_type = other DNA
gctttttcgctggtgcggcgcgctgtctgaatggtctggcggcaggtgaatatcttgaaggtcatacttcgatga

SEQ ID NO: 112924 - DNA, 75 bp, synthetic construct
  source 1..75: mol_type = other DNA
tgtacgtacttttggctattacaatgccggacaggattgtactgcggcttgtcggatctacgcgcaaaaaggcat

SEQ ID NO: 112925 - DNA, 75 bp, synthetic construct
  source 1..75: mol_type = other DNA
ggtttgcccgtaaggatgagtttccggcgggtaaactgggggagctaatgcaaatcacgctgctgattaaaaccg

SEQ ID NO: 112926 - DNA, 75 bp, synthetic construct
  source 1..75: mol_type = other DNA
atcacgaagtattgaaagatatggaagctggcgcgtatgacgctgatttaaatctggcgctacaggttgttgata

SEQ ID NO: 112927 - DNA, 75 bp, synthetic construct
  source 1..75: mol_type = other DNA
aatacacgaaaactcaagcgcctgaaggttactgggtggatgcccgtggcgtaatgacacctgaaagccttatca

SEQ ID NO: 112928 - DNA, 75 bp, synthetic construct
  source 1..75: mol_type = other DNA
atgcggaaggtggttatgtgggcggtgccggaagtccggcgcagatgcggcgggctgaaggcattaattttaatc

SEQ ID NO: 112929 - DNA, 75 bp, synthetic construct
  source 1..75: mol_type = other DNA
cccgtgtgcgttagttatctcaacgcctgcggcgattacctccgggctggcagcagcagcgcgtcgtggggcgtt

SEQ ID NO: 112930 - DNA, 75 bp, synthetic construct
  source 1..75: mol_type = other DNA
actggcgtttatcgcgaccacgctggttgggctgtacccgattgctcgtcaggcattacggctgatcaaatccgg

SEQ ID NO: 112931 - DNA, 75 bp, synthetic construct
  source 1..75: mol_type = other DNA
gcgataatccgcgtgcagcggcagccattgccggtgaactggggctggagtttaaagctggattactgccggaag

SEQ ID NO: 112932 - DNA, 75 bp, synthetic construct
  source 1..75: mol_type = other DNA
tccggtggagcgcgcaacgggcgataaagtccctgctggtgccaccagcgtagaccgtctggtaacgctggaagt

SEQ ID NO: 112933 - DNA, 75 bp, synthetic construct
  source 1..75: mol_type = other DNA
aaacgttaatgagcgtagccgccattggcgcgctgtttattggcgcaacggctgaagctgcgatggtgttgctgc

SEQ ID NO: 112934 - DNA, 75 bp, synthetic construct
  source 1..75: mol_type = other DNA
tcacatgagaaaacacatattcgtttacttagtgcattcctggtaggaataacctggccaatgagtttacctgtg

SEQ ID NO: 112935 - DNA, 75 bp, synthetic construct
  source 1..75: mol_type = other DNA
ggttactttctcttgctcaaaaatgggctacagataaacacagtgaaaatgtttatcttacaaaggaaaaagaat

SEQ ID NO: 112936 - DNA, 75 bp, synthetic construct
  source 1..75: mol_type = other DNA
gtgaacgatcactatcgcattgattactttgcttcccatattcgggaaatgaaaaaagccgttgttgaagatggt

SEQ ID NO: 112937 - DNA, 75 bp, synthetic construct
  source 1..75: mol_type = other DNA
ccggtactggataacccgcgccttgatgccatcctggctgctgctgatgcaggttgttttgccacctacatcatg

SEQ ID NO: 112938 - DNA, 75 bp, synthetic construct
  source 1..75: mol_type = other DNA
actcgtggcaataactgtccccttactgaaaatttgccccaacaagggaaagacaaatcagctgatggggatacc

SEQ ID NO: 112939 - DNA, 75 bp, synthetic construct
  source 1..75: mol_type = other DNA
gtttctgccggaacaggggaaatgaaaaagcgctacggaatgatttatgtcgataaagacaacgaagggaaggga

SEQ ID NO: 112940 - DNA, 75 bp, synthetic construct
  source 1..75: mol_type = other DNA
ggccacattattgcggccaacgcagcgggttttgctgtaccaggcagcgccactgcagccaataccaccctcggc

SEQ ID NO: 112941 - DNA, 75 bp, synthetic construct
  source 1..75: mol_type = other DNA
cggcggaagttgcgccggagtctgcactttcaaacatgatcactctgtacgctgctgataacgagcaggaacagc

SEQ ID NO: 112942 - DNA, 75 bp, synthetic construct
  source 1..75: mol_type = other DNA
ggtttatgacatggcccgtaagggagcccgtgatgagatccaggcacagatgcgtgatggcggtatgttctccgg

SEQ ID NO: 112943 - DNA, 75 bp, synthetic construct
  source 1..75: mol_type = other DNA
aaaacctcctctttccgggccaaccttcagggcgcatggaatgaccgggaaaatgcccgtctggggctggcagcg

SEQ ID NO: 112944 - DNA, 75 bp, synthetic construct
  source 1..75: mol_type = other DNA
agctggagacaataagcgactgccttaacttactggcaaaaatcaaagaagctattgaagagattaaatttcagc

SEQ ID NO: 112945 - DNA, 75 bp, synthetic construct
  source 1..75: mol_type = other DNA
tgctgtctgtctggtcagcaaaaaagcatctccctatgtcagctatgaagcagtgacgcataaacgtgagcagcg

SEQ ID NO: 112946 - DNA, 75 bp, synthetic construct
  source 1..75: mol_type = other DNA
gacgctgtgggagcacctggcggaattaaatatgaaatcacaacagagccgaatggggttcaggaggaatactga

SEQ ID NO: 112947 - DNA, 75 bp, synthetic construct
  source 1..75: mol_type = other DNA
ggtggctgagccgcatcatgacggcacagttcactggcacctgttgtgtttcatgcgcaaaaaagaccgccgcgc

SEQ ID NO: 112948 - DNA, 75 bp, synthetic construct
  source 1..75: mol_type = other DNA
gtgaccgtggcaaaaaccgacaacagcagcgcccgccctgtcgccgggaaagtgatcggcatcggtgacgatggc

SEQ ID NO: 112949 - DNA, 75 bp, synthetic construct
  source 1..75: mol_type = other DNA
agagttgtatcctgtatcagtcctgcaaaatttcatgagtgctttattaactggatgcgtgactgccattcttca

SEQ ID NO: 112950 - DNA, 75 bp, synthetic construct
  source 1..75: mol_type = other DNA
gtgaagaactgtaaaataccggaggtgcatatgacgattaagcgtttttttgtgtgtgcaggtattatgggatgt

SEQ ID NO: 112951 - DNA, 75 bp, synthetic construct
  source 1..75: mol_type = other DNA
ctggctttgggggaaattgttggtcgaaaactttcttcacaagacattattcgcgggctgcgcgtagatggtgtc

SEQ ID NO: 112952 - DNA, 75 bp, synthetic construct
  source 1..75: mol_type = other DNA
gggtgcccagactcaagcaggtactgtagatgctagtgccattcttacaattcgggctagtcatactgcgccata

SEQ ID NO: 112953 - DNA, 75 bp, synthetic construct
  source 1..75: mol_type = other DNA
ctggcctttttaccggatataaagaccgaatctaccaccgcttcaggtctgccggtgttctataaaaacaaaccg

SEQ ID NO: 112954 - DNA, 75 bp, synthetic construct
  source 1..75: mol_type = other DNA
tcgcccctggtagcgaagagacagaagcggttaccactatcgacctgctggttcgcggcggcatcaacgtcacca

SEQ ID NO: 112955 - DNA, 75 bp, synthetic construct
  source 1..75: mol_type = other DNA
acactccaggcgcatgccggggcgaatgagaaaatcagccagcagcggcgggagctgtggaaggcggaaagtcag

SEQ ID NO: 112956 - DNA, 75 bp, synthetic construct
  source 1..75: mol_type = other DNA
ttataaggaggcacttgcactgacatcaattgatcttggtcatggtgatggcagaggacgatatattgaacaggt

SEQ ID NO: 112957 - DNA, 75 bp, synthetic construct
  source 1..75: mol_type = other DNA
ccattgggatgaaccccgatatcggcctgctggggatttttggcgcgactatcgcagcagggtttatcacaacat

SEQ ID NO: 112958 - DNA, 75 bp, synthetic construct
  source 1..75: mol_type = other DNA
gcataatgtctggttatgttcagatgaaatccatagtgattttgttttaatcgtagctttacatccgcgcttaaa

SEQ ID NO: 112959 - DNA, 75 bp, synthetic construct
  source 1..75: mol_type = other DNA
cgccctttgtgaaggcattaacgtccaatgcccttgttgggttatcgacctgcgccacatcgactgaatgttttg

SEQ ID NO: 112960 - DNA, 75 bp, synthetic construct
  source 1..75: mol_type = other DNA
cgtctgaacctggcctgcggtcgagaaaaattatatatggggcttacgcgtcttgtaagtgtaattaaaaatatt

SEQ ID NO: 112961 - DNA, 75 bp, synthetic construct
  source 1..75: mol_type = other DNA
acgccgccgaaccggtagcaagcctggtccgtgaatgcccgaaatgggatggattaccgctcacgctggatgtca

SEQ ID NO: 112962 - DNA, 75 bp, synthetic construct
  source 1..75: mol_type = other DNA
ccaacgttgatgatttcgatccaaaacaccgccgaaccagtagcaaccccaatccgtgaatgcccgaaatgggat

SEQ ID NO: 112963 - DNA, 75 bp, synthetic construct
  source 1..75: mol_type = other DNA
gcaaatatcacttgatcagaaccgcttatgaaatcaacgaagagccgaccgcctatggtgatcacggtattcgta

SEQ ID NO: 112964 - DNA, 75 bp, synthetic construct
  source 1..75: mol_type = other DNA
cccgacagtttctaatatcacctatgtgattcgtgatggtaatgcttctccggccactgggggaaatacctcaga

SEQ ID NO: 112965 - DNA, 75 bp, synthetic construct
  source 1..75: mol_type = other DNA
tatttatcacttttgatcccatggagaatcctgttgatttcctgaaacgtacatctatcgcacttcacgatatgc

SEQ ID NO: 112966 - DNA, 75 bp, synthetic construct
  source 1..75: mol_type = other DNA
cgttactgtcacttttgggttgcaaacaggaagatattgatagcggcacagtagggttgataaatacacccaaag

SEQ ID NO: 112967 - DNA, 75 bp, synthetic construct
  source 1..75: mol_type = other DNA
cagaaataataatgagcttgaggaaatttttcaagagctaagtgcttttgtaagtgggctgatggataagagaaa

SEQ ID NO: 112968 - DNA, 75 bp, synthetic construct
  source 1..75: mol_type = other DNA
tcgatgaagagtatcaggttgaagttcaggaagatgatccggaggaaatggaaggcgctgaacatccacacaagg

SEQ ID NO: 112969 - DNA, 75 bp, synthetic construct
  source 1..75: mol_type = other DNA
tacactaaatattacgatgatgtcgaagtcgatgcctggcaaggcggcatatcactctatactggcccggtgatc

SEQ ID NO: 112970 - DNA, 75 bp, synthetic construct
  source 1..75: mol_type = other DNA
ctgggaaaaaaacatccggggatctgatgcggtcagtaacataatggacaggttgtatgcgcagttcgctgtggg

SEQ ID NO: 112971 - DNA, 75 bp, synthetic construct
  source 1..75: mol_type = other DNA
ggttatcgctacactaaatattacgatgatgtcgaagtcgatgcctggcaaggcggcgtatctctctatactggc

SEQ ID NO: 112972 - DNA, 75 bp, synthetic construct
  source 1..75: mol_type = other DNA
acatgggaaaaggtggcagcggaaaccctacgtttggatgtcatcccgcctgcgtttgagcaactccgtcggaaa

SEQ ID NO: 112973 - DNA, 75 bp, synthetic construct
  source 1..75: mol_type = other DNA
tccaccgacaccgacatgcaacgcacgctgtgggtgagcgatgacgcggaagagcagcgtattcgcggctttggt

SEQ ID NO: 112974 - DNA, 75 bp, synthetic construct
  source 1..75: mol_type = other DNA
aagatacagcaagagagcgttcttggcagttgtatgccagtaagaatggagtaatttatgttaaaaactattctt

SEQ ID NO: 112975 - DNA, 75 bp, synthetic construct
  source 1..75: mol_type = other DNA
acaaagagttgcacgaatacctgcacagtctgagcaaaaaagagcgccgggaactggtagcaaggttacgcctgg

SEQ ID NO: 112976 - DNA, 75 bp, synthetic construct
  source 1..75: mol_type = other DNA
ctcaacctgcctgatcatgatccccgctggctgcaggcgaaaaccatgctcgaacgtcatcggctactgcgtgac

SEQ ID NO: 112977 - DNA, 75 bp, synthetic construct
  source 1..75: mol_type = other DNA
cacacacgccgcgtattggtatgagtgcttatggcgcatcgaaagcggcgctgaaaagcctggcgttgagcgtcg

SEQ ID NO: 112978 - DNA, 75 bp, synthetic construct
  source 1..75: mol_type = other DNA
gatcgccaacacgattttgttcctcgcctccgatctcgccagccatatcacgctacaggatatcgtggtggatgg

SEQ ID NO: 112979 - DNA, 75 bp, synthetic construct
  source 1..75: mol_type = other DNA
cgaacagggatggttaagcctctccggcggcgagcggcagcgggtgcatatcgcccgcgcgctggcgcagagccc

SEQ ID NO: 112980 - DNA, 75 bp, synthetic construct
  source 1..75: mol_type = other DNA
gggacggggggtaaatatgaacctgcgggaattgttcatcgcggggagtttgtcttcacgaaggaagcaaccagc

SEQ ID NO: 112981 - DNA, 75 bp, synthetic construct
  source 1..75: mol_type = other DNA
tcgccctgcgtgaaactaccgccgggacaggaaatattggcaaattccatgctaaagccacctttaacttcacct

SEQ ID NO: 112982 - DNA, 75 bp, synthetic construct
  source 1..75: mol_type = other DNA
cgctagttggccttgggttacccacaactggctcagcgacaaatattaatgtcgattttaccgcacaattgctgg

SEQ ID NO: 112983 - DNA, 75 bp, synthetic construct
  source 1..75: mol_type = other DNA
cgggagtcggaagagcagcgccttcgtgacgtgtacggtgataatccggatgcgctggcgaaggccacatctgca

SEQ ID NO: 112984 - DNA, 75 bp, synthetic construct
  source 1..75: mol_type = other DNA
atatttctattatccccgattacagacaagcctggaaagtggagcataaattgtcagatattctacttttgacta

SEQ ID NO: 112985 - DNA, 75 bp, synthetic construct
  source 1..75: mol_type = other DNA
tctggtgcagaaagttgggaagatatagaggatttcggggaaacacatctcgatttcttgaagcaatatggtgat

SEQ ID NO: 112986 - DNA, 75 bp, synthetic construct
  source 1..75: mol_type = other DNA
cacgtttccattccacgctcaataacggcagacccaacccgacctggaaaaacgcgacggtaagacaaagcagcg

SEQ ID NO: 112987 - DNA, 75 bp, synthetic construct
  source 1..75: mol_type = other DNA
tcagggcgcatggaatgaccgggaaaatgcccgtctggggctggcagcggccacgctgcagtcggatatggaaaa

SEQ ID NO: 112988 - DNA, 75 bp, synthetic construct
  source 1..75: mol_type = other DNA
cctgtccaccttggtagctgcgcatatgagcatgtgccttgatgctgcttgtggcgatttgtatgccaccgatga

SEQ ID NO: 112989 - DNA, 75 bp, synthetic construct
  source 1..75: mol_type = other DNA
tctacctccggcaacctgattaaaaacgaagcaacaggcacgcaagtggccaataacatcggtatgggaattaag

SEQ ID NO: 112990 - DNA, 75 bp, synthetic construct
  source 1..75: mol_type = other DNA
tcattcctgacgttgggttggataaactggttaattttgacagcgccgcagaaaccacttttaaactcgtcgcat

SEQ ID NO: 112991 - DNA, 75 bp, synthetic construct
  source 1..75: mol_type = other DNA
acaagatggtggtccagtagtgacgggtagtaacggtgaatacagcctgacaattcccgatgttggcctggataa

SEQ ID NO: 112992 - DNA, 75 bp, synthetic construct
  source 1..75: mol_type = other DNA
tcaactggtctgcaatgcataaagctatctcggcaacgggcttgcggatcattggtgtcagtggctgcaaaaatg

SEQ ID NO: 112993 - DNA, 75 bp, synthetic construct
  source 1..75: mol_type = other DNA
attggcgtaagtggctgcaaagatgcgcaacttaaagccgaaattgaaaaaatggggctgcctatcctgacggaa

SEQ ID NO: 112994 - DNA, 75 bp, synthetic construct
  source 1..75: mol_type = other DNA
gtatttcttcgggaattatattaatcctgtttggcatggtgccaaaaatggcggtgctggtagcctccattccgc

SEQ ID NO: 112995 - DNA, 75 bp, synthetic construct
  source 1..75: mol_type = other DNA
atgaaaatcatagcctgcagtgccgcacttctgctcaccctggcctcatcatccacagtgctcgccgcgtcggat

SEQ ID NO: 112996 - DNA, 75 bp, synthetic construct
  source 1..75: mol_type = other DNA
taccgtgcatttacgtgaagatcgccgtcacattactgaccgcgacgtgcgcatcctgcgtcagacgctggatac

SEQ ID NO: 112997 - DNA, 75 bp, synthetic construct
  source 1..75: mol_type = other DNA
acaggcgcaagagctggcgcgaatcgagaaagccgcgacctttgccgcaagcctcggtttgaaagttaatgctgg

SEQ ID NO: 112998 - DNA, 75 bp, synthetic construct
  source 1..75: mol_type = other DNA
cttttggcgataaggttaacggcattgcggataaggcagaaaacgttgaagctgtagcgcaatatcagtttgatt

SEQ ID NO: 112999 - DNA, 75 bp, synthetic construct
  source 1..75: mol_type = other DNA
ggtaattatcggaatgaaccgccccgggtttcctggagagtgttttatctgtgaactcaggctgccagatcatcg

SEQ ID NO: 113000 - DNA, 75 bp, synthetic construct
  source 1..75: mol_type = other DNA
gcccagccttcccagcaatcgtcgattgttataccagtccacccacgttagtgtggccagttccacttctgcacg

SEQ ID NO: 113001 - DNA, 75 bp, synthetic construct
  source 1..75: mol_type = other DNA
ataccaagtcagatcgtactgataagcaggttcaggggttgaatggtactgcagatgttcttgatcctgcatcag

SEQ ID NO: 113002 - DNA, 75 bp, synthetic construct
  source 1..75: mol_type = other DNA
cacattcaagcactagatcttgcaactatagcatcgcgactgatagagcttgagcatgatgttgagaagttaaaa

SEQ ID NO: 113003 - DNA, 75 bp, synthetic construct
  source 1..75: mol_type = other DNA
aacaagagaagaaaaccaacgagctttctgcaaaagaagcaaacagccttgtatggctatgggattatgccaacc

SEQ ID NO: 113004 - DNA, 75 bp, synthetic construct
  source 1..75: mol_type = other DNA
atggatgtttttaatactcctatttcccgcaaaggaacatattgtacccaatgggacttttgcgaggacagattt

SEQ ID NO: 113005 - DNA, 75 bp, synthetic construct
  source 1..75: mol_type = other DNA
ctgcctggcgctaccgagctgaaagccggttcggcaacacgtccgttcttcggcgtgcaaccggcgctggtcgat

SEQ ID NO: 113006 - DNA, 75 bp, synthetic construct
  source 1..75: mol_type = other DNA
aaaagaagcaaacagccttgtatggctatgggattatgccaaccgctcacaggcattattccgcgaactgtatcc

SEQ ID NO: 113007 - DNA, 75 bp, synthetic construct
  source 1..75: mol_type = other DNA
tgaattgccaacgactccgggatagtggttttacttatataaaaacttatatttttagtacattagtagtctata

SEQ ID NO: 113008 - DNA, 75 bp, synthetic construct
  source 1..75: mol_type = other DNA
cttttacattatctcgtcatcaatatgaattgccaacggctccgtgatagtggtttcacatatataaaaacttat

SEQ ID NO: 113009 - DNA, 75 bp, synthetic construct
  source 1..75: mol_type = other DNA
aaagaacacgcccagcgcggcaaatatttgtgcttatgcggatatcgttcgtgaacgcgcggttgttcgtgaaat

SEQ ID NO: 113010 - DNA, 75 bp, synthetic construct
  source 1..75: mol_type = other DNA
catgcagccctgctggcgcttgaaaccgagctcaggacgctggaaaaacacagcggtgtgaatgagaaaatcagc

SEQ ID NO: 113011 - DNA, 75 bp, synthetic construct
  source 1..75: mol_type = other DNA
acgagctaaactggaagcatgggagcgttatagcgtgttggtttatcgcgtagatacagctaaaccagaatggcc

SEQ ID NO: 113012 - DNA, 75 bp, synthetic construct
  source 1..75: mol_type = other DNA
actggtatgaatgtcagaagttattttcggaatgtacaaaggtaattgcgtatgatagcaacaacatcgttgtca

SEQ ID NO: 113013 - DNA, 75 bp, synthetic construct
  source 1..75: mol_type = other DNA
atgaacaactttaaaaatttcacaccatatacaccaagcgaagataaaagagagcttgttgatgcaggagtttta

SEQ ID NO: 113014 - DNA, 75 bp, synthetic construct
  source 1..75: mol_type = other DNA
cggcgtgggggaaagtggtgcacgcgatactgagtatgctgcgctgtaccgcgaacagctaccccggctcgacct

SEQ ID NO: 113015 - DNA, 75 bp, synthetic construct
  source 1..75: mol_type = other DNA
ttattcccgccccgatgcgggccgtcattcaggccgtgcgcggcacagtggtgtcggttgcccgtgccgtctgga

SEQ ID NO: 113016 - DNA, 75 bp, synthetic construct
  source 1..75: mol_type = other DNA
atccacagtgctcgccgcgtcggattcatgtgagcgcataaaaagtgatatttcacagcgtattatcaataacgg

SEQ ID NO: 113017 - DNA, 75 bp, synthetic construct
  source 1..75: mol_type = other DNA
atcgaaaagacggaacggcttagctcaaacatcaaaagcaaaatggcaggaatttatggttgtccaccagagttg

SEQ ID NO: 113018 - DNA, 75 bp, synthetic construct
  source 1..75: mol_type = other DNA
gcgtcgcgatgaagatggctattactggatcaccgggcgtgtggacgacgtgctgaacgtctccggtcaccgtct

SEQ ID NO: 113019 - DNA, 75 bp, synthetic construct
  source 1..75: mol_type = other DNA
gggggactggccttaaatatgatgcaaacaatctgtatctggctgcaatttattccgaaacccagaatatgacca

SEQ ID NO: 113020 - DNA, 75 bp, synthetic construct
  source 1..75: mol_type = other DNA
tggcagaccgaaactggcggtttcatgatcacgccgctgcctggcgctaccgagctgaaagccggttcggcaaca

SEQ ID NO: 113021 - DNA, 75 bp, synthetic construct
  source 1..75: mol_type = other DNA
gagcatgtggtggtactgaagcgtactggcgggaaaattgactggcaggaagggcgcgacctgtggtggcacgac

SEQ ID NO: 113022 - DNA, 75 bp, synthetic construct
  source 1..75: mol_type = other DNA
cgcagtattccgctgaagaaaaacgttgatgacgcgctgaaaaacccgaacgtcaccagcgtagagcatgtggtg

SEQ ID NO: 113023 - DNA, 75 bp, synthetic construct
  source 1..75: mol_type = other DNA
ccagcgtatttcctggctagccgccgtgcgtatcaggcataaattatcgcttgctgaagtaagtaaaatgttagg

SEQ ID NO: 113024 - DNA, 75 bp, synthetic construct
  source 1..75: mol_type = other DNA
ttttaatcaatcacacacgagatgttgatattaatgagccagacggaccaacgaatctttccgcatggatgagac

SEQ ID NO: 113025 - DNA, 75 bp, synthetic construct
  source 1..75: mol_type = other DNA
gagctttctgcaaaagaagcaaacagccttgtatggttatgggattatgctaaccgttcacaggcattattccgc

SEQ ID NO: 113026 - DNA, 75 bp, synthetic construct
  source 1..75: mol_type = other DNA
tgctgtaaatatgctagtcagcaaaaagcatctaatgtacccagatgaaccgccccgggtttcctggagagtgtt

SEQ ID NO: 113027 - DNA, 75 bp, synthetic construct
  source 1..75: mol_type = other DNA
gggttgctatttttcgtggatagattgctcggccattggctatccctttgataaattttaccgacgattaattga

SEQ ID NO: 113028 - DNA, 75 bp, synthetic construct
  source 1..75: mol_type = other DNA
ttacggctggtcggcgaaaaactgattaaagaaaatactgccgctatgtacgcaacgctaaacgttaatagtgaa

SEQ ID NO: 113029 - DNA, 75 bp, synthetic construct
  source 1..75: mol_type = other DNA
caatgccctgcaacagcgtgcttctcattgcctgtataccattgccgaagaacaagcgacaaacagtgcttcaat

SEQ ID NO: 113030 - DNA, 75 bp, synthetic construct
  source 1..75: mol_type = other DNA
ctggactaaaggccatgtagttaacccacgcaaagctaaaaaggcgttgccgggtaaaattaccactgaacagca

SEQ ID NO: 113031 - DNA, 75 bp, synthetic construct
  source 1..75: mol_type = other DNA
atgaaaagtatagcaaaggcacaaaacgatttcaccatattcaaatttggcgacagtgaaatccgcgtaattaac

SEQ ID NO: 113032 - DNA, 75 bp, synthetic construct
  source 1..75: mol_type = other DNA
atgaaaacaaagattgctatcgcaagcgatgatgtaggttttgcacgtaaagaggagataaaaaaatacctcata

SEQ ID NO: 113033 - DNA, 75 bp, synthetic construct
  source 1..75: mol_type = other DNA
cggcgaaaaaggactatgaatcgacgctgaaaaagccgaaacggtcaggcgtgaaagtgtctgcgggtgaccgtc

SEQ ID NO: 113034 - DNA, 75 bp, synthetic construct
  source 1..75: mol_type = other DNA
aactgcaattcagggtttggaaatacagtcacatgcaacagtagcagtaacatcagataacaatcagcaaaggta

SEQ ID NO: 113035 - DNA, 75 bp, synthetic construct
  source 1..75: mol_type = other DNA
gcctggaaactgatgaagattggtttcaatgctgccgcagaacgcgatatgcatgcgttgctcgctactgtacag

SEQ ID NO: 113036 - DNA, 75 bp, synthetic construct
  source 1..75: mol_type = other DNA
ggtattgtcgccgcagtgatgggggtggttcacgcgttaggttcagccgatcgtcctgccgccgaactgggggcg

SEQ ID NO: 113037 - DNA, 75 bp, synthetic construct
  source 1..75: mol_type = other DNA
acccaacacgcgttgacacatatacaaactgcaattcaggatttggaaacacggtaacatgcaacagtagcagca

SEQ ID NO: 113038 - DNA, 75 bp, synthetic construct
  source 1..75: mol_type = other DNA
taacaaagtccgccctgaaatccgcgacaaggtaatccagtatcaggaagagtgtgacgatgtgctctacgagta

SEQ ID NO: 113039 - DNA, 75 bp, synthetic construct
  source 1..75: mol_type = other DNA
aatggcggcgaactcaaaccgcaggaaaatccgaacgcacaagcgattcaggatgatttaaaagatattgattct

SEQ ID NO: 113040 - DNA, 75 bp, synthetic construct
  source 1..75: mol_type = other DNA
atgggacttttgcgaggacagatttggtgtaaaagatgtattaccattctctatttcagatatggatcttccgat

SEQ ID NO: 113041 - DNA, 75 bp, synthetic construct
  source 1..75: mol_type = other DNA
atgaatgtttttaatacccctatctcccgtaaaggaacatattgcactcaatgggacttttgtgaggacagattt

SEQ ID NO: 113042 - DNA, 75 bp, synthetic construct
  source 1..75: mol_type = other DNA
ctgacctggccgatgtctatcggtaaatggacgcttgaaggtatcgaaactcgtgcgcaattgctggattctgat

SEQ ID NO: 113043 - DNA, 75 bp, synthetic construct
  source 1..75: mol_type = other DNA
gcgccatgtcacacttaacggctcggaagaaagcattattactgacgatgaacacccttttgtggcacatcgacc

SEQ ID NO: 113044 - DNA, 75 bp, synthetic construct
  source 1..75: mol_type = other DNA
aagcaggcggcaatcagcgcaaaagcccgcggcctcactgaccgtcaggcgcagcgggagtcggaagagcagcgc

SEQ ID NO: 113045 - DNA, 75 bp, synthetic construct
  source 1..75: mol_type = other DNA
agcagtttaccgaagctctgtcacttgctgctcgcgttccgcttgaaggagagttaatcggcaaacaagagaaga

SEQ ID NO: 113046 - DNA, 75 bp, synthetic construct
  source 1..75: mol_type = other DNA
ctggggcgagtgggcggaaagtgtgacggacagtttttcgcaggtcaggagtgtagccacgcagacctttgacgg

SEQ ID NO: 113047 - DNA, 75 bp, synthetic construct
  source 1..75: mol_type = other DNA
cagaaaaacctggttgcctacgtccctcagtcagaagatgttgactggtcatttcctgtactggtggaagatgtg

SEQ ID NO: 113048 - DNA, 75 bp, synthetic construct
  source 1..75: mol_type = other DNA
agctgatgaagattggcttcaatgctgccgcagtgcgcgatatgcatgcgctactcgcaacagtacaggcgtcgt

SEQ ID NO: 113049 - DNA, 75 bp, synthetic construct
  source 1..75: mol_type = other DNA
cccttatcaggggatggtccactttacccgctttttcctgaacaccattttggggatgggcggttttattgatgt

SEQ ID NO: 113050 - DNA, 75 bp, synthetic construct
  source 1..75: mol_type = other DNA
cacgcctgtttataacgcattttttgatgtgattaagcataatggtcgaaacatgctaacaacctctttgatgaa

SEQ ID NO: 113051 - DNA, 75 bp, synthetic construct
  source 1..75: mol_type = other DNA
gaagaaagcattattactgacgatgaactcccttttgtggcacatcgaccgtcagcggtgcagagggaaggaaga

SEQ ID NO: 113052 - DNA, 75 bp, synthetic construct
  source 1..75: mol_type = other DNA
ggcgtgattatgttccgcaaccggcgcgtaacggtttgagcaactttaccggcaaccttgaagaacctgcggtga

SEQ ID NO: 113053 - DNA, 75 bp, synthetic construct
  source 1..75: mol_type = other DNA
tactgacagacagaggcacagaatattgtggcaaagtggagcagcatgattaccagctttatctggcaataaatg

SEQ ID NO: 113054 - DNA, 75 bp, synthetic construct
  source 1..75: mol_type = other DNA
cgaccccatgagggaaaaatgagcaatgggcggacgccaatggaaacgttacttgatggaaagcgcatctgggcc

SEQ ID NO: 113055 - DNA, 75 bp, synthetic construct
  source 1..75: mol_type = other DNA
atgtccgcatcactcttcagagctatatggtgatctacgagcaatgaaatgcctcgtggaaggatgcagtgatga

SEQ ID NO: 113056 - DNA, 75 bp, synthetic construct
  source 1..75: mol_type = other DNA
tatactggcccggtgatcaccagttaccgctatacccattatgactccagcgatgcaggtggtagttacagcaat

SEQ ID NO: 113057 - DNA, 75 bp, synthetic construct
  source 1..75: mol_type = other DNA
ccgtggtctgaacgtcagcgaagcttctgtactggttacgcgcgcttccgatcacaatccgctactcgttgaatt

SEQ ID NO: 113058 - DNA, 75 bp, synthetic construct
  source 1..75: mol_type = other DNA
aacgccggaattgctctgcgttttcgggactgcgagtttgataattatctggaggttaatcctgacgcagccaga

SEQ ID NO: 113059 - DNA, 75 bp, synthetic construct
  source 1..75: mol_type = other DNA
aggcggcgtatcactctatactggcccggtgatcaccagctaccgctatacccaatatgactccagcgatgcagg

SEQ ID NO: 113060 - DNA, 75 bp, synthetic construct
  source 1..75: mol_type = other DNA
gcaactgcccggctgggtggttgcctcccagcctctgggaagcgcccaggacacgctcaatgttaccgtaacgga

SEQ ID NO: 113061 - DNA, 75 bp, synthetic construct
  source 1..75: mol_type = other DNA
cgctgctacggatctggttcaccacttttcagcaatgaaaaaccagcaagccatgctcgaatctgcacatcgtga

SEQ ID NO: 113062 - DNA, 75 bp, synthetic construct
  source 1..75: mol_type = other DNA
gagatgtttaaagtcgaatgtaattccatccaatccctctgccaaagctctcctgctaagaaggggaaaatatga

SEQ ID NO: 113063 - DNA, 75 bp, synthetic construct
  source 1..75: mol_type = other DNA
acagggaaggcattcaaatcgatgtgggatgccattctggatatcggtcgtcctgagtcctcagcggatatgctc

SEQ ID NO: 113064 - DNA, 75 bp, synthetic construct
  source 1..75: mol_type = other DNA
actgcttgatcgctgaggccagtgatttgaccatggaactgtcgtccctcaaggcggaagaactgactgataacg

SEQ ID NO: 113065 - DNA, 75 bp, synthetic construct
  source 1..75: mol_type = other DNA
cgccaaacccaccggtatcatcgcacgcattatcagcgtgatttcgaccaccttcaccccagtgatcccggccat

SEQ ID NO: 113066 - DNA, 75 bp, synthetic construct
  source 1..75: mol_type = other DNA
ccgccgccggtctgaccctgaataacccgacgccttatcatattaccgtcggttatatcggcactaatggcaaga

SEQ ID NO: 113067 - DNA, 75 bp, synthetic construct
  source 1..75: mol_type = other DNA
ttcttccgttcgctctcttacaccatgggcgtgacgctacacctgaaaaccaaaggtaaaaacgatcaccaccgt

SEQ ID NO: 113068 - DNA, 75 bp, synthetic construct
  source 1..75: mol_type = other DNA
gaaatgtcgctgcgccaggtgcgttttactgatgatcagcgccgtcgggcgtttggtcgcccgctcgattttgtt

SEQ ID NO: 113069 - DNA, 75 bp, synthetic construct
  source 1..75: mol_type = other DNA
agcttaaggagtccattggtgaacgaattgtggatcgcgttactgatggtgggcgtaattgcctggtgtttggtt

SEQ ID NO: 113070 - DNA, 75 bp, synthetic construct
  source 1..75: mol_type = other DNA
atcttccggtaactgaagcacgcaccattcgtcgcgctctccgcttactggaaaaatatcagcgtcagcctggcg

SEQ ID NO: 113071 - DNA, 75 bp, synthetic construct
  source 1..75: mol_type = other DNA
gaccgccgtcgcctgctgcgcaccgaatggggcgtggtgcatcagcatccgctcgacggcctgcgccgccaggtg

SEQ ID NO: 113072 - DNA, 75 bp, synthetic construct
  source 1..75: mol_type = other DNA
gttgaaatccggtctgaaacataacgccgccgctgtcattgtggcgcattgtcatccgtcggggcttgccgatcc

SEQ ID NO: 113073 - DNA, 75 bp, synthetic construct
  source 1..75: mol_type = other DNA
caggctgaaagcggtggcgtggatgagttcgtcgtgcagcggttcggtggtgtgtatcacctcttcgctgtgaat

SEQ ID NO: 113074 - DNA, 75 bp, synthetic construct
  source 1..75: mol_type = other DNA
ttaaccgaccgcgtgctcgacgacccgcatcatccgtatacccagctgctggtgtcatcggttttgcagaattga

SEQ ID NO: 113075 - DNA, 75 bp, synthetic construct
  source 1..75: mol_type = other DNA
aatcaacgtcaaaggcgacctctatatcgacgatcaccacactgtcgaagataccggtctggcgctgggcgaagc

SEQ ID NO: 113076 - DNA, 75 bp, synthetic construct
  source 1..75: mol_type = other DNA
aggcggcctatcactctatactggcccggtgatcaccaggtaccgctatacccaatatgactccagcgatgcagg

SEQ ID NO: 113077 - DNA, 75 bp, synthetic construct
  source 1..75: mol_type = other DNA
ggttatcgctacactaaatattacgatgatgtcgaagtcgatgcctggcaaggtggcatatcactctatactggc

SEQ ID NO: 113078 - DNA, 75 bp, synthetic construct
  source 1..75: mol_type = other DNA
ggctggcggacgctgggctgaattccacacggcaaggcggggatttatccggctgggaaaacgtctgggctttga

SEQ ID NO: 113079 - DNA, 75 bp, synthetic construct
  source 1..75: mol_type = other DNA
ctggctggcggacgttgggctgaatttcatacggcaaggcggggatttatccggctgggaaaacgtctgggcttt

SEQ ID NO: 113080 - DNA, 75 bp, synthetic construct
  source 1..75: mol_type = other DNA
atgacggcaacggcaccctggcgcgcagtcgcaagaagagcttctggtggtataaagaggtcattgccactaacg

SEQ ID NO: 113081 - DNA, 75 bp, synthetic construct
  source 1..75: mol_type = other DNA
ctgcaatccagactaatggttttaaaactcttgctgaaggtcagcgagtagagttcgaaatcactaacggtgcca

SEQ ID NO: 113082 - DNA, 75 bp, synthetic construct
  source 1..75: mol_type = other DNA
cgccccactaactccgcgtcaggatattaaagcctttgtcgaactgcatatcgaacagggctgtgtgctggaaag

SEQ ID NO: 113083 - DNA, 75 bp, synthetic construct
  source 1..75: mol_type = other DNA
ttgaatcactggtgtgggactggccgattgccatctatctgtttttggtggggatttctgccgggctggtgacgc

SEQ ID NO: 113084 - DNA, 75 bp, synthetic construct
  source 1..75: mol_type = other DNA
agcaaagacgtgttcgtacacttctccgctatccagggtaatggcttcaaaactctggctgaaggtcagaacgtt

SEQ ID NO: 113085 - DNA, 75 bp, synthetic construct
  source 1..75: mol_type = other DNA
gtaggtttaataaacacacctaaaggggttctggttacccagcgagcgcgctgcacgggttgccatcgctgtgaa

SEQ ID NO: 113086 - DNA, 75 bp, synthetic construct
  source 1..75: mol_type = other DNA
acagctgaatcggaagatgacacctacatcgatgatgagaatgccgactggacatcaacgatgcaggggcagaaa

SEQ ID NO: 113087 - DNA, 75 bp, synthetic construct
  source 1..75: mol_type = other DNA
agcaaagatgtgtttgtacacttctccgctatccagggtaatggcttcaaaactctggccgaaggccagaacgtt

SEQ ID NO: 113088 - DNA, 75 bp, synthetic construct
  source 1..75: mol_type = other DNA
cggcgctgaaatcgtatccgttcctcaataacccgatcctgccggtgctgttcctcttctccggcatctcgtccg

SEQ ID NO: 113089 - DNA, 75 bp, synthetic construct
  source 1..75: mol_type = other DNA
tttatggttctggtggggtggatggttcccataatgagtttcttgttaaaggacctggtattattgttggaagaa

SEQ ID NO: 113090 - DNA, 75 bp, synthetic construct
  source 1..75: mol_type = other DNA
atcttatctctggctctgcagtgcctcaactacccgcgagagatattaggaaatttatattaccagttattaata

SEQ ID NO: 113091 - DNA, 75 bp, synthetic construct
  source 1..75: mol_type = other DNA
aacactggaagatggtggtggtgctactggcaatctgtggcgctatgttgttgctacgttgggcagcaatgattt

SEQ ID NO: 113092 - DNA, 75 bp, synthetic construct
  source 1..75: mol_type = other DNA
acacgatttgcttgccctgcaacaacgctggttgccgaagctggggatcgtgcaaaaggttctgaacctgctgac

SEQ ID NO: 113093 - DNA, 75 bp, synthetic construct
  source 1..75: mol_type = other DNA
aatcaccaacaacggcaaaccatcactggcagaagacagtggtgccgcgccgattgctgtcacggggatcagcct

SEQ ID NO: 113094 - DNA, 75 bp, synthetic construct
  source 1..75: mol_type = other DNA
ggacgtggtggttctggcttggtgtcgccgggctggggctgattgtgccaatgttgctcaaaccgtgggtcaatc

SEQ ID NO: 113095 - DNA, 75 bp, synthetic construct
  source 1..75: mol_type = other DNA
cgtttttcgtcggtctggcgttgggcgatgacggtaaagtgcgggcgctggtggcagcattgggcggcggtttct

SEQ ID NO: 113096 - DNA, 75 bp, synthetic construct
  source 1..75: mol_type = other DNA
cctggccattacctgctcgcgcggcgtgaagctgctggcggatgcgccgctggtcgaggtggctgatggcgaata

SEQ ID NO: 113097 - DNA, 75 bp, synthetic construct
  source 1..75: mol_type = other DNA
ctgccagaccggaggtttcagtcttccccggacagctcagcaactgtcttgaacgtaaaaattatggagcaacgt

SEQ ID NO: 113098 - DNA, 75 bp, synthetic construct
  source 1..75: mol_type = other DNA
ggtgttccggggatcccaccgaattctaccctggtgtttgacgtagagctgctggatgtgaaaccagcgccgaag

SEQ ID NO: 113099 - DNA, 75 bp, synthetic construct
  source 1..75: mol_type = other DNA
gacgacaacggcattgttactcatacgcaggaaatactggatacagacaccgggcgtattgttcagggcatgatt

SEQ ID NO: 113100 - DNA, 75 bp, synthetic construct
  source 1..75: mol_type = other DNA
gggcgggcagggccgcagctgatgaaagcggtgtatgagatggcccgcaagggggcacaggatgaactccggctg

SEQ ID NO: 113101 - DNA, 75 bp, synthetic construct
  source 1..75: mol_type = other DNA
aaagatcagctgatcgctggtgttcaggatgcatttgctgataagagcaaactttccgaccaagagatcgaacag

SEQ ID NO: 113102 - DNA, 75 bp, synthetic construct
  source 1..75: mol_type = other DNA
cgcaggaaatactggatacagacaccgggcgtattgttcagggcatgattaattctggtgctggtggttggtcgt

SEQ ID NO: 113103 - DNA, 75 bp, synthetic construct
  source 1..75: mol_type = other DNA
cctgacagaattgtgtgaaagcgaaaaactgaattaccgggtgatgcacagtggtgccgggcacgacgcgcaaat

SEQ ID NO: 113104 - DNA, 75 bp, synthetic construct
  source 1..75: mol_type = other DNA
ggtgcgaatgagaaaatcagccagcagcgtcgcgatttatggaaagcggaaaatcagtatgcggtcctgaaagag

SEQ ID NO: 113105 - DNA, 75 bp, synthetic construct
  source 1..75: mol_type = other DNA
gggctggaaacacgtttcgatgaagtagggaatttatacggtcgcctgaatggtaccgaatatccacaggaagtg

SEQ ID NO: 113106 - DNA, 75 bp, synthetic construct
  source 1..75: mol_type = other DNA
gatttcacccaacagttagaaaacgacatgcgggcgatttgcgatgaaatggacattggtattgatatcgattta

SEQ ID NO: 113107 - DNA, 75 bp, synthetic construct
  source 1..75: mol_type = other DNA
cttacacccgtggcgaaccgctctctttccgtctggacggtgtgatcccaggctggactgaaggtctgaaaaaca

SEQ ID NO: 113108 - DNA, 75 bp, synthetic construct
  source 1..75: mol_type = other DNA
cgctgaaagtaggcgataaggtggaggtcggacaggagctaatccgctttgatatccccgccatcgaacaggccg

SEQ ID NO: 113109 - DNA, 75 bp, synthetic construct
  source 1..75: mol_type = other DNA
tcctgaaagaggctgccacgaaacgacagttatctgagcaggaaaaatccctgctggcgcataaagacgagacgc

SEQ ID NO: 113110 - DNA, 75 bp, synthetic construct
  source 1..75: mol_type = other DNA
ccgccacattaccggcatccgcacaacaaatcatccgggaagccttaaccctgctggagagccagttacgcgaac

SEQ ID NO: 113111 - DNA, 75 bp, synthetic construct
  source 1..75: mol_type = other DNA
atgagccatgccgatatgagcaactgctgcggctttaacgaggctgccgcatcgttctcatggaacagcccgaaa

SEQ ID NO: 113112 - DNA, 75 bp, synthetic construct
  source 1..75: mol_type = other DNA
attaaagcattcattaaatcttctgaattatttgatagatgtattggtatgtcatggtttcatgtttctgtatgt

SEQ ID NO: 113113 - DNA, 75 bp, synthetic construct
  source 1..75: mol_type = other DNA
acagggtgacaaaaagcaggtgcgccgatactggatgacccgcgccttgatgccatcctggctgctgctgatgct

SEQ ID NO: 113114 - DNA, 75 bp, synthetic construct
  source 1..75: mol_type = other DNA
tggttgcgctgatcggttatagcgtcagtttcgataaaaccacgtttcggctgttacgtggcgagagcaatctgt

SEQ ID NO: 113115 - DNA, 75 bp, synthetic construct
  source 1..75: mol_type = other DNA
atgaaaaaattactgcatctttttttcccgctctcgctgcgggtacgttttctgttagcaacggcagcagtagta

SEQ ID NO: 113116 - DNA, 75 bp, synthetic construct
  source 1..75: mol_type = other DNA
aaaggctgtgaagtggctatggtttctgttagttcaattagtgaattaaaaaatgcatatcctgcttacttttta

SEQ ID NO: 113117 - DNA, 75 bp, synthetic construct
  source 1..75: mol_type = other DNA
cagccgtttcactctccagcggtaaagctgtgcattatctttgcgacgagtcttctgactggttcccggatctcg

SEQ ID NO: 113118 - DNA, 75 bp, synthetic construct
  source 1..75: mol_type = other DNA
acgctatttaccggcaccatcaaccatacgcaggtccatccccgcgaagtggtgaaggccggtctgaagcataac

SEQ ID NO: 113119 - DNA, 75 bp, synthetic construct
  source 1..75: mol_type = other DNA
cgtggggaatctctaccggctgatgcgcggctatgccaccggtggttatgtcggtggcaccgggcagtctggctg

SEQ ID NO: 113120 - DNA, 75 bp, synthetic construct
  source 1..75: mol_type = other DNA
tgttcccgaaaatcgacgccaaacgctttaacattcacgacgatcagaaaatggtgctggatttcctgttgcagg

SEQ ID NO: 113121 - DNA, 75 bp, synthetic construct
  source 1..75: mol_type = other DNA
ctcgttgaatgcagtccggcgtataaactaatcaatattctgacaaaagcggggtatgacgtttcagcagtaaga

SEQ ID NO: 113122 - DNA, 75 bp, synthetic construct
  source 1..75: mol_type = other DNA
tatatatcgagtttaagtggtgaggtgtatgtgaataatatagctgcaaagcaatataatattttgcctgattca

SEQ ID NO: 113123 - DNA, 75 bp, synthetic construct
  source 1..75: mol_type = other DNA
gtagcgtttacaaaatccatagatacatatgcttttgctgtaacggccatgtttttggctaagaccccactacca

SEQ ID NO: 113124 - DNA, 75 bp, synthetic construct
  source 1..75: mol_type = other DNA
gcgacaaaaagagtgcgggttttctctcttaatataaccaaaaacgggaacattaaaggcaaccgagaggggggc

SEQ ID NO: 113125 - DNA, 75 bp, synthetic construct
  source 1..75: mol_type = other DNA
aacggcagaccaaacccaacctggacaaatgcgacggtaagacaaagcagcgattatctggtcggcatgtttgct

SEQ ID NO: 113126 - DNA, 75 bp, synthetic construct
  source 1..75: mol_type = other DNA
gaacttgactcactagtcatcaatccagtaggtataattattgcggaaaattatctcaaagctcatggatatatc

SEQ ID NO: 113127 - DNA, 75 bp, synthetic construct
  source 1..75: mol_type = other DNA
caacgtattgaatacttcagcagccttggcaggccaaaggcttattcccgctatttacgtgagacgattaagcca

SEQ ID NO: 113128 - DNA, 75 bp, synthetic construct
  source 1..75: mol_type = other DNA
tggggaaaatcgcccgtccacaggagatcgccaatacgattttgttcctcgcctctgacctcgccagccatatca

SEQ ID NO: 113129 - DNA, 75 bp, synthetic construct
  source 1..75: mol_type = other DNA
cctgtctactcttgtcgctgcgcatatgagtatgtgtcttgatgccgcttgtggtgatttgtacgcctccgatga

SEQ ID NO: 113130 - DNA, 75 bp, synthetic construct
  source 1..75: mol_type = other DNA
caatctgggactggtgattgaatgctccggtgccaatatcgcactgaaacaagccatcgaaatgctccgcccgaa

SEQ ID NO: 113131 - DNA, 75 bp, synthetic construct
  source 1..75: mol_type = other DNA
tattgtctggttcctggtgaaattctcaaaattcatcgtcatgcgttgtgggaaatccctgatggtgttgattat

SEQ ID NO: 113132 - DNA, 75 bp, synthetic construct
  source 1..75: mol_type = other DNA
tcccagctacaaaattagttctcgactcttttggtatttcaacccttacagaacttgactcactagtcatcaatc

SEQ ID NO: 113133 - DNA, 75 bp, synthetic construct
  source 1..75: mol_type = other DNA
gcaggcgagagagattggcgcactgccttccgcgcaggttctgctatctagccattccccatctatcctgagccg

SEQ ID NO: 113134 - DNA, 75 bp, synthetic construct
  source 1..75: mol_type = other DNA
tccttttttaattaatgatgtgtttaaatcacatctattttttgcctcgatgtcttatcaatggggaaaatcagt

SEQ ID NO: 113135 - DNA, 75 bp, synthetic construct
  source 1..75: mol_type = other DNA
gatgcattcgctttagtcgactcacgggctcaagaatttggtcaccaaattgcagaaaaactatctaaagatgtt

SEQ ID NO: 113136 - DNA, 75 bp, synthetic construct
  source 1..75: mol_type = other DNA
ccacgctgcagtcggatatggaaaaagccggtgaactggccgccagggaccgggccgaacgggacgcatcacagc

SEQ ID NO: 113137 - DNA, 75 bp, synthetic construct
  source 1..75: mol_type = other DNA
gctctctgttccatatcgctcttacagcggcaacgctcgaaaccgagcgggaagcattttctttgcctgctgatg

SEQ ID NO: 113138 - DNA, 75 bp, synthetic construct
  source 1..75: mol_type = other DNA
gtagtccgtcactttaaaggttctatggaagagtggcaggcgatgggcgtaatgaactatgaaatggaatctgca

SEQ ID NO: 113139 - DNA, 75 bp, synthetic construct
  source 1..75: mol_type = other DNA
gcttgacggcctgcgccgccaggtgtcggcaggcggcaatatcggcgaacggttgatggcaaccggagcgcgtca

SEQ ID NO: 113140 - DNA, 75 bp, synthetic construct
  source 1..75: mol_type = other DNA
ttacctcaagtactgctgcccgtgactggcttcggttacagctggcaggacaagaacgggaagtgtttatggtgc

SEQ ID NO: 113141 - DNA, 75 bp, synthetic construct
  source 1..75: mol_type = other DNA
gaattgataacccaacatcgcggcgttatgccgtcatcaccgcctataacggcggcgcaggcagcgtgctgcgag

SEQ ID NO: 113142 - DNA, 75 bp, synthetic construct
  source 1..75: mol_type = other DNA
atgaatatcgcattatccccggtatcatcacagcctgaactttttccgctggcggttatggctcaacatgattac

SEQ ID NO: 113143 - DNA, 75 bp, synthetic construct
  source 1..75: mol_type = other DNA
acgatttgaccatggagctgtcgtccctcaaggcggaagagctgactgataacgccggaatagccctgcgttttc

SEQ ID NO: 113144 - DNA, 75 bp, synthetic construct
  source 1..75: mol_type = other DNA
atcgtcgcggctatttgcgccgcgccagccaccgtgctggtcccgcacgatatcttcccgattggcaatatgacc

SEQ ID NO: 113145 - DNA, 75 bp, synthetic construct
  source 1..75: mol_type = other DNA
tgacgtgattgtgctgcctggtggcattaaaggcgcagagtgttttcgcgatagcaccctgctggttgaaaccgt

SEQ ID NO: 113146 - DNA, 75 bp, synthetic construct
  source 1..75: mol_type = other DNA
actgttcaccggcactatcagtcataccgaagtccatccccgggaagtggtgaaagccgccctgaaacataacgc

SEQ ID NO: 113147 - DNA, 75 bp, synthetic construct
  source 1..75: mol_type = other DNA
taaccgggccgatgatttgctgtaacggcagctatctttatcatccgcgccagcggcaaatattgcgtccgctgc

SEQ ID NO: 113148 - DNA, 75 bp, synthetic construct
  source 1..75: mol_type = other DNA
gaacatatacaaacagcaacgcgctgaatggttgtcggtattaaagaactacggcaaagatgcacatctggtgtt

SEQ ID NO: 113149 - DNA, 75 bp, synthetic construct
  source 1..75: mol_type = other DNA
atttagacggcacattgctgaacagcaagaagatgatttcccctgcgtctgtttcggcactgcaaagcgcacaac

SEQ ID NO: 113150 - DNA, 75 bp, synthetic construct
  source 1..75: mol_type = other DNA
cgcagccacatcaacttcgatgacggtacgattactatcgaaaccatcgccgggacagaacctgccgcgcatctg

SEQ ID NO: 113151 - DNA, 75 bp, synthetic construct
  source 1..75: mol_type = other DNA
ctggcttcggttacagctggcaggacaagaacgggaagtgtttatggtgctctatctcgataaccagcatcgttt

SEQ ID NO: 113152 - DNA, 75 bp, synthetic construct
  source 1..75: mol_type = other DNA
tgggcatcgtcggggaatccggctccgggaagaccacgctgctgaagtcgatctccgcgcgcctgacgccgcagc

SEQ ID NO: 113153 - DNA, 75 bp, synthetic construct
  source 1..75: mol_type = other DNA
ctgccctattatcagcaattgcagttaaccgagccgatgatttgctgtaacggcagttatctttatcatccgcga

SEQ ID NO: 113154 - DNA, 75 bp, synthetic construct
  source 1..75: mol_type = other DNA
actggagagcgaaacgctgtttgccggttcggttaaccatgtccaggtccatccgcgtgaggtggtgaagtcagc

SEQ ID NO: 113155 - DNA, 75 bp, synthetic construct
  source 1..75: mol_type = other DNA
gattgtggatcgcgttactgatggtgggtgtaactgcctggtgtttggttgggaaagctaccgtgcgcatatcag

SEQ ID NO: 113156 - DNA, 75 bp, synthetic construct
  source 1..75: mol_type = other DNA
gacggttatggcacaacatggttacctgctccctgcgacttccggattgacaccctatgcccaacggaccattcg

SEQ ID NO: 113157 - DNA, 75 bp, synthetic construct
  source 1..75: mol_type = other DNA
ggtacaggcactggccctggtggatatccgggtgccggaccatctgataatcggtggcagccaggttttctcctt

SEQ ID NO: 113158 - DNA, 75 bp, synthetic construct
  source 1..75: mol_type = other DNA
atggagcaacagttaccgttgtttgcccgtgaattagcccctgccgaccagcagacagtcaggaaagccttatct

SEQ ID NO: 113159 - DNA, 75 bp, synthetic construct
  source 1..75: mol_type = other DNA
agaaattagccagacgcgcaacaacccgtctggatgactctctggttagctttaagcatatgggagacatgcagt

SEQ ID NO: 113160 - DNA, 75 bp, synthetic construct
  source 1..75: mol_type = other DNA
atctgcgctacggcacaatgccgcagcagtgatccttgcgcataaccatccctccggcgtgacggaacccagtcg

SEQ ID NO: 113161 - DNA, 75 bp, synthetic construct
  source 1..75: mol_type = other DNA
ttctgattttgagcgctgtatttaatcttcctttattatttattatattctgcttatacctattattacatgtca

SEQ ID NO: 113162 - DNA, 75 bp, synthetic construct
  source 1..75: mol_type = other DNA
atctagacggcacattgctgaacagcaagaagatgatttcccctgcgtcggtttcggcgctgcaaagcgcacaac

SEQ ID NO: 113163 - DNA, 75 bp, synthetic construct
  source 1..75: mol_type = other DNA
catcgcagcctgaactctttccgctggcggctatgacccggcatggttgcctgctcccagcgacatccggattga

SEQ ID NO: 113164 - DNA, 75 bp, synthetic construct
  source 1..75: mol_type = other DNA
agccgttccgatgcgctgggattaatgcaggtagtacagcacaccgccgggaaagacgtgttccgctcacagggg

SEQ ID NO: 113165 - DNA, 75 bp, synthetic construct
  source 1..75: mol_type = other DNA
ccctgcgtgataatgctgaatacgttaatgcctgggcgtctttgcatcgtgttccgcaattccgcttctttggca

SEQ ID NO: 113166 - DNA, 75 bp, synthetic construct
  source 1..75: mol_type = other DNA
agaaaccgccgtaaaccagtgccctatgaactcattccgggctcgctggcgcgtatgctgtgcgccgactggtgg

SEQ ID NO: 113167 - DNA, 75 bp, synthetic construct
  source 1..75: mol_type = other DNA
tgcaggtggtacaacatactgccgggaaagatgtgttccgctcgcaggggaaatccggcacgccgagccgcagtt

SEQ ID NO: 113168 - DNA, 75 bp, synthetic construct
  source 1..75: mol_type = other DNA
acgcaacactccgttggtgcgcaaaacattcgtacgatggcgatgatccagctgctgctcggcaacatggggatg

SEQ ID NO: 113169 - DNA, 75 bp, synthetic construct
  source 1..75: mol_type = other DNA
cataaaggtaatcaggcagccgattttgataccttcggcaaaggtgcctggacttttgaattgcgcgttaatgcc

SEQ ID NO: 113170 - DNA, 75 bp, synthetic construct
  source 1..75: mol_type = other DNA
cgctcaatgaggatggttctctgcaactggtagataaagacagcggtgtgcgctatgaccgggtattgcaaattg

SEQ ID NO: 113171 - DNA, 75 bp, synthetic construct
  source 1..75: mol_type = other DNA
cgatagcgccgggagtcggatgttcgaagagctggcagcgggaagcgatcgtttctatgccacgcttccctggca

SEQ ID NO: 113172 - DNA, 75 bp, synthetic construct
  source 1..75: mol_type = other DNA
ttccctgatgccggattaccgttgatcccaacggtgcctggctacttgatgaagccatttctctatgcaaagggc

SEQ ID NO: 113173 - DNA, 75 bp, synthetic construct
  source 1..75: mol_type = other DNA
agagtccgtggaaaaagtgaatgaactggcccgcccccaggatacaaactttcaggatgaaatggtggagcaata

SEQ ID NO: 113174 - DNA, 75 bp, synthetic construct
  source 1..75: mol_type = other DNA
aaataatccagagcatgacagttacgcaattagtgaaaagagtcacggcagagaagaaatccgtcttcatattgt

SEQ ID NO: 113175 - DNA, 75 bp, synthetic construct
  source 1..75: mol_type = other DNA
gcccggagatattgtcccgttatgcacagagagagaacacgcgctgggagcatcacgcgctcatcaggcagcatt

SEQ ID NO: 113176 - DNA, 75 bp, synthetic construct
  source 1..75: mol_type = other DNA
gtgtcgtaacgcttaacacgactgatgtaaaatataccgatccagttaacggcattgtgaccggcagccctgcga

SEQ ID NO: 113177 - DNA, 75 bp, synthetic construct
  source 1..75: mol_type = other DNA
tcaaacttgatcctgataaaaataacgtcttacgtatcgtcaatattgaagataccttacctaaagatcgtgaat

SEQ ID NO: 113178 - DNA, 75 bp, synthetic construct
  source 1..75: mol_type = other DNA
aaggtctgactcaggccgcacgtaacgccaacgacggtatctctctggcgcagaccactgaaggcgcactgtctg

SEQ ID NO: 113179 - DNA, 75 bp, synthetic construct
  source 1..75: mol_type = other DNA
gggcgtaagtgatacctctggtctttcattgcacaacgtacagaaagctgatggtaccgcaactggaacttacgt

SEQ ID NO: 113180 - DNA, 75 bp, synthetic construct
  source 1..75: mol_type = other DNA
tgaaatccgtgagcgggcaaatcgccgcctgtggcgaaagctggcatcgctacctgacagctggcagaccgcaca

SEQ ID NO: 113181 - DNA, 75 bp, synthetic construct
  source 1..75: mol_type = other DNA
gcgaatggaccatgatgccgactatggcgtgctgaatgatattgccagagggcaatcagatccccgaaaaatagt

SEQ ID NO: 113182 - DNA, 75 bp, synthetic construct
  source 1..75: mol_type = other DNA
tcgggtaatgcgctgaaagttagtgatgctattacgagtgttccaggtgctgcggcaggtgatgctccgattgcc

SEQ ID NO: 113183 - DNA, 75 bp, synthetic construct
  source 1..75: mol_type = other DNA
atgcatggcagtctcctttcggtcaataatagcagaacaaaagaaagagcccgaaatgacggtcagatattatat

SEQ ID NO: 113184 - DNA, 75 bp, synthetic construct
  source 1..75: mol_type = other DNA
gccatgatttgggtagtcgttgagagcgcgctgatgtgcagtgggacgtcacgtaaccgtgggcgtttgcttgct

SEQ ID NO: 113185 - DNA, 75 bp, synthetic construct
  source 1..75: mol_type = other DNA
agaagaaaatgactttcgcatctcggttgctggcgcacaggagaagactgcgctgctaaagatcgctatgatttt

SEQ ID NO: 113186 - DNA, 75 bp, synthetic construct
  source 1..75: mol_type = other DNA
aagcgcagcgagataatctggcaaccctgaaaggggaatttattgatggcaaatatatgcgcgtgcatcgcacca

SEQ ID NO: 113187 - DNA, 75 bp, synthetic construct
  source 1..75: mol_type = other DNA
ataaaatcaatcagtttcaaagcactgatgaaaatgcacgttacaactacggtgaagatctggaaaaagttttga

SEQ ID NO: 113188 - DNA, 75 bp, synthetic construct
  source 1..75: mol_type = other DNA
gtggtaattggtgcatctattcgctacggtcattaccattctgcgttccaggagtttgtcaaaacgcatgccaca

SEQ ID NO: 113189 - DNA, 75 bp, synthetic construct
  source 1..75: mol_type = other DNA
caattacgtcaatgctaaaactccgtcaggcgcggcttggcgtgaatggctgcattatctcaggaatcgtgctgg

SEQ ID NO: 113190 - DNA, 75 bp, synthetic construct
  source 1..75: mol_type = other DNA
tcggtaagtacttacctgccgacgaagacggattacgcaaacgcctcgacagttattttgacgtgctggaaaaag

SEQ ID NO: 113191 - DNA, 75 bp, synthetic construct
  source 1..75: mol_type = other DNA
tgatgcacgggcatatcaatatgctggggcattatacgttcacgctaccggaggatattttgaagggggaactga

SEQ ID NO: 113192 - DNA, 75 bp, synthetic construct
  source 1..75: mol_type = other DNA
caaggcagggttaagacgtaagatgcgaaaagcagccatggacagaaactacctggcgtcagtccttacggggag

SEQ ID NO: 113193 - DNA, 75 bp, synthetic construct
  source 1..75: mol_type = other DNA
agccgagtcagacaattgcttccacccgttgacctgacagaactgttgctcgagattgacgccagaactggcttc

SEQ ID NO: 113194 - DNA, 75 bp, synthetic construct
  source 1..75: mol_type = other DNA
acgtttgaatggaaagggctaaagaaattatgcgtggcagtctcctttcggtccataatagcagaacaaaagaaa

SEQ ID NO: 113195 - DNA, 75 bp, synthetic construct
  source 1..75: mol_type = other DNA
aaaatatatcgctcgaatgccacagcagagaaagcttgctgtacttactgcattcgttaaagcacaggaaataac

SEQ ID NO: 113196 - DNA, 75 bp, synthetic construct
  source 1..75: mol_type = other DNA
tgatgtgctcgatatgcttatactggatatcactcgtgcggcgaagaaaacggggcagaaaaaacggctcaggac

SEQ ID NO: 113197 - DNA, 75 bp, synthetic construct
  source 1..75: mol_type = other DNA
aagagcataaatcaagatggaaccgcgccgaacgctctatagatgaaatccgggagatgtacggaacggatggag

SEQ ID NO: 113198 - DNA, 75 bp, synthetic construct
  source 1..75: mol_type = other DNA
aaaatggtattcctgttcacgatactattgccagagttgtatcctgtatcagtcctgcaaaatttcacgagtgct

SEQ ID NO: 113199 - DNA, 75 bp, synthetic construct
  source 1..75: mol_type = other DNA
tattgctcagaccattgatctggatacggctgatgaatttactggggcttccactgctgatccactggcactttt

SEQ ID NO: 113200 - DNA, 75 bp, synthetic construct
  source 1..75: mol_type = other DNA
ataccgataccgctaatggcgttactgccggttccatgactggtaagtacgttaaagttggtgctgatgcaaatg

SEQ ID NO: 113201 - DNA, 75 bp, synthetic construct
  source 1..75: mol_type = other DNA
tcggacagatcaagacggatgagaaatctaatgagattacagctatcccagaacttcttaacatgctggatatta

SEQ ID NO: 113202 - DNA, 75 bp, synthetic construct
  source 1..75: mol_type = other DNA
ccggaactggttaaagagaaaatcgaacaagtgcgggcgaaagctgccgcgcatggacgcaaaattcgtttcggt

SEQ ID NO: 113203 - DNA, 75 bp, synthetic construct
  source 1..75: mol_type = other DNA
ggcttcttctgctgatccactggcacttttagacaaagcgattgcacaggttgatactttccgctcctccctcgg

SEQ ID NO: 113204 - DNA, 75 bp, synthetic construct
  source 1..75: mol_type = other DNA
ttctcggcgtatgctggcgacccgacaccagcggtcccgaatctgctgaatcgcgactttcacgcgtcggcgccg

SEQ ID NO: 113205 - DNA, 75 bp, synthetic construct
  source 1..75: mol_type = other DNA
cagccacaaccgctgaatccgcaaggcgaagcggtggcgaatgattttatcccccgtaaagccgcgcaaagctaa

SEQ ID NO: 113206 - DNA, 75 bp, synthetic construct
  source 1..75: mol_type = other DNA
aacatgtctcgtgcccagatcctgcaacaggcaggcacttctgttttggcgcaagcaaaccaaactactcagaac

SEQ ID NO: 113207 - DNA, 75 bp, synthetic construct
  source 1..75: mol_type = other DNA
cataaagaaaaaggcaaaaacatttaccatcctcgccattggtgaatttgttgtaatttgcattcttggtttcgc

SEQ ID NO: 113208 - DNA, 75 bp, synthetic construct
  source 1..75: mol_type = other DNA
gctaaccgctttactgcaaatattcgtggtcttacacaagcttcacgcaatgctaatgatggtatttctgtcgct

SEQ ID NO: 113209 - DNA, 75 bp, synthetic construct
  source 1..75: mol_type = other DNA
accggtactaactctgagtctgatctgtcttctatccaggacgaaattaaatcccgtctggatgaaattgaccgc

SEQ ID NO: 113210 - DNA, 75 bp, synthetic construct
  source 1..75: mol_type = other DNA
ggccttgcgtgcctggatccgtgatttacgccctgaattcgctaggacggtcgtcggcagcagcgctcccacagt

SEQ ID NO: 113211 - DNA, 75 bp, synthetic construct
  source 1..75: mol_type = other DNA
tggcgtagtggatgcagcacacgttattggcacccagggaggctggtcgttgaccgtgaaatacggccacactga

SEQ ID NO: 113212 - DNA, 75 bp, synthetic construct
  source 1..75: mol_type = other DNA
tgattaagctgttgactggattattgctgctcgcctggccgtttgtgatttggtttggcttagcgcataacggcc

SEQ ID NO: 113213 - DNA, 75 bp, synthetic construct
  source 1..75: mol_type = other DNA
cattgcttaccttctgataggtttcctgactgcaggggaatggctgatacgttgtcagatgatcaaacggaaaac

SEQ ID NO: 113214 - DNA, 75 bp, synthetic construct
  source 1..75: mol_type = other DNA
gttactggtgactggcgaaggaaagcaggatgcgacagaacgttttctcacggctaaagtctctaccgctatccc

SEQ ID NO: 113215 - DNA, 75 bp, synthetic construct
  source 1..75: mol_type = other DNA
tcggttccacgcgcatggatatcaaaattgcccacgcacgtattgaaaataagattgttaatctgctggaaccgc

SEQ ID NO: 113216 - DNA, 75 bp, synthetic construct
  source 1..75: mol_type = other DNA
agcgcacgttcacgactggcagggtaaaccgctggattacactccgcgcgagtcgttcctgaatccggggttcag

SEQ ID NO: 113217 - DNA, 75 bp, synthetic construct
  source 1..75: mol_type = other DNA
agattgtcccttctatgggctatcgcacgctttatatcgaagcgaatcagcctggcaacgtgattgcggcaaaaa

SEQ ID NO: 113218 - DNA, 75 bp, synthetic construct
  source 1..75: mol_type = other DNA
accggtactaactctgattctgacctatcttcaatccaggacgaaatcaaatcccgtctcgatgaaattgaccgc

SEQ ID NO: 113219 - DNA, 75 bp, synthetic construct
  source 1..75: mol_type = other DNA
gcaggtctacgacgggacgaaaccgatggacgtcgtcagcaaagcggacaattctccggtaacggcagcggatat

SEQ ID NO: 113220 - DNA, 75 bp, synthetic construct
  source 1..75: mol_type = other DNA
cgttatggaccgcctggaacggcatgattgcttatttgttgatggggacgttaatggctggtgaatggctggtgc

SEQ ID NO: 113221 - DNA, 75 bp, synthetic construct
  source 1..75: mol_type = other DNA
atggcaatgctcggcgcaatcgaatctctgctctgcgccgtggtgctggatggtatgaccgggacaaaacacaag

SEQ ID NO: 113222 - DNA, 75 bp, synthetic construct
  source 1..75: mol_type = other DNA
tgcgatgtccctgatgaacttattgatttcacgtttgaatggaaagggctgaagaaattatgcgtggcagtctcc

SEQ ID NO: 113223 - DNA, 75 bp, synthetic construct
  source 1..75: mol_type = other DNA
attatttattcgcggtaaaaggaaaccaggggcggcttaataaagcctttgaggaaaaatttccgctgaaagaat

SEQ ID NO: 113224 - DNA, 75 bp, synthetic construct
  source 1..75: mol_type = other DNA
gaaaaaacggccatcttgggctgaacgaaccgggagaaagtctgcaaccagcaagccatatcagccagcttgata

SEQ ID NO: 113225 - DNA, 75 bp, synthetic construct
  source 1..75: mol_type = other DNA
acaagcctggaaagtggaacataaattatcggatattctactgttgactatttgcgccgttatttcgggtgcaga

SEQ ID NO: 113226 - DNA, 75 bp, synthetic construct
  source 1..75: mol_type = other DNA
aaggcagggttaagacgtaagatgcgaaaagcagccatggacagaaagtatctggcgccagtccttgcggggagc

SEQ ID NO: 113227 - DNA, 75 bp, synthetic construct
  source 1..75: mol_type = other DNA
accaacagctacgcgcggaagtttctgatgaactcgcaatggcgtcccgatcgctgtgccgtcattgccggggcg

SEQ ID NO: 113228 - DNA, 75 bp, synthetic construct
  source 1..75: mol_type = other DNA
gcgcaaatcagagagtgggcgccactggtgatggaagggcgtgatccgcagcagaaaatagcggccacgcgtaca

SEQ ID NO: 113229 - DNA, 75 bp, synthetic construct
  source 1..75: mol_type = other DNA
gcaatctcttgatatgcaaggcaacgtggttacctttaccggtaatgtcatcgtcacccagggcaccatcaaaat

SEQ ID NO: 113230 - DNA, 75 bp, synthetic construct
  source 1..75: mol_type = other DNA
cttctgaaatgtaccccaggctggcaaaggcttatccgaccaataaattaccggatttacggggcgaatttatcc

SEQ ID NO: 113231 - DNA, 75 bp, synthetic construct
  source 1..75: mol_type = other DNA
ggccagaccccggcacagaagaaggtaattaatcgttatggcaacattaactgcaaagaaccttgcaaaagccta

SEQ ID NO: 113232 - DNA, 75 bp, synthetic construct
  source 1..75: mol_type = other DNA
aagctggataaccatcttattagtgagcggatggtggcaattcgcacagctgtgcccgatgcgacgctgatcgtt

SEQ ID NO: 113233 - DNA, 75 bp, synthetic construct
  source 1..75: mol_type = other DNA
gatgtagcggcaacggagcgcgagttgcagtacaccagcgaagtgctggggctgaaatacgacaagccgcaggca

SEQ ID NO: 113234 - DNA, 75 bp, synthetic construct
  source 1..75: mol_type = other DNA
acctacaaaagtggggtcagttactaatatcccgtatggaatagaacaggttatatctgatgaaaccattttttc

SEQ ID NO: 113235 - DNA, 75 bp, synthetic construct
  source 1..75: mol_type = other DNA
cgatgcgcggcgtatcgtcagccactacgaacgacgctggctgatagaggaatatcataaggcgtggaaaagtgg

SEQ ID NO: 113236 - DNA, 75 bp, synthetic construct
  source 1..75: mol_type = other DNA
caattacaatgtcgtctttacgattaacgccgatgtgccgccaccgcctcctccgccgcccgtggttgcgaaacg

SEQ ID NO: 113237 - DNA, 75 bp, synthetic construct
  source 1..75: mol_type = other DNA
tgacggggattactttatttcggtgatggggcgcagtgatgtggcacgtaagcaaaacgccaatttcctcgtgtc

SEQ ID NO: 113238 - DNA, 75 bp, synthetic construct
  source 1..75: mol_type = other DNA
tgcttatgcgttagatccgtatcaggtatggcgcggatataataaatctaaaaaatatgcagcgtttaacgcaaa

SEQ ID NO: 113239 - DNA, 75 bp, synthetic construct
  source 1..75: mol_type = other DNA
ggcttatccgaccaataaattaccggatttacggggcgaatttatccgtggctgggatgacggacgaggtattga

SEQ ID NO: 113240 - DNA, 75 bp, synthetic construct
  source 1..75: mol_type = other DNA
gttacagcgaagtcagcataaaaaatcccgacaacagcggccaggcgctcccgctcacgtatgtctgttgccggg

SEQ ID NO: 113241 - DNA, 75 bp, synthetic construct
  source 1..75: mol_type = other DNA
aaaggtgcccaaaaatatgactggtgggcttatgtatcagctcgtccgcgtaatattgcatttaattacatcgta

SEQ ID NO: 113242 - DNA, 75 bp, synthetic construct
  source 1..75: mol_type = other DNA
tttattcgtggctgggatgacgggcgtggagtggatagcggtcgtactttattaacgaatcaagagcatgcagta

SEQ ID NO: 113243 - DNA, 75 bp, synthetic construct
  source 1..75: mol_type = other DNA
tgctgttaaacaaacaaatggtttaggtggtgtttctgtagcaaaaagtaaaaatgctgaaactttatctacttc

SEQ ID NO: 113244 - DNA, 75 bp, synthetic construct
  source 1..75: mol_type = other DNA
ctgaaatgtacccaaaactggcaaaggcctaccccaccaataaattaccggatttacgcggtgaatttatccgtg

SEQ ID NO: 113245 - DNA, 75 bp, synthetic construct
  source 1..75: mol_type = other DNA
cctgttccatggccttcagccacaccgccaacaggctggctgaaatgcaacggtgcagctttttctgctgaagaa

SEQ ID NO: 113246 - DNA, 75 bp, synthetic construct
  source 1..75: mol_type = other DNA
taccagtcaatacagaacggagttatctggggggaatgaaacccgcccacgtaacattgccttcaattatattgt

SEQ ID NO: 113247 - DNA, 75 bp, synthetic construct
  source 1..75: mol_type = other DNA
atgaagattttacttattgaagataatcaaaggacccaggagtgggtaacgcaggggctttccgaagcgggttat

SEQ ID NO: 113248 - DNA, 75 bp, synthetic construct
  source 1..75: mol_type = other DNA
tgtgcccgataccacgctgatcgttgatgcaaatgaatcctggcatgcagaagggttggcggcacgttgccagct

SEQ ID NO: 113249 - DNA, 75 bp, synthetic construct
  source 1..75: mol_type = other DNA
taccatttatcagcaaaattccggtaattggctggcttttcaggagtaaagctgacagtaatgagcaacgcatta

SEQ ID NO: 113250 - DNA, 75 bp, synthetic construct
  source 1..75: mol_type = other DNA
tcagtttggctggaaaggtactgtcagcaaccacaagaaagcactaaaaaacggcctcagcgttatacagggcgg

SEQ ID NO: 113251 - DNA, 75 bp, synthetic construct
  source 1..75: mol_type = other DNA
tcattcgcggctgggatgacgggcgcggtgcggataatggtcgcgttttgctgtctactcaggacgatgcgttta

SEQ ID NO: 113252 - DNA, 75 bp, synthetic construct
  source 1..75: mol_type = other DNA
ccccaatctggcaaaagcctaccccaccaataaattaccggatttacggggcgaatttattcgtggctgggatga

SEQ ID NO: 113253 - DNA, 75 bp, synthetic construct
  source 1..75: mol_type = other DNA
ctgtgggagcgtaattttatggagtatctctctatggggatttaccgggtaacggtaactgtggaaagttgttga

SEQ ID NO: 113254 - DNA, 75 bp, synthetic construct
  source 1..75: mol_type = other DNA
ctccaaagtagtcaaaacttgtcgcattctcacgatgatcttgggtctatgggggggagcgcggttggtgtccct

SEQ ID NO: 113255 - DNA, 75 bp, synthetic construct
  source 1..75: mol_type = other DNA
gttcggctggaaaggtactgtcagcaaccacaaaaaagcactgaaaaacggcctcagcgttatacagggcggcag

SEQ ID NO: 113256 - DNA, 75 bp, synthetic construct
  source 1..75: mol_type = other DNA
aaattgcctgatttacgcggtgaattcattcgcggctgggatgacgggcgcggtgcggataatggtcgcgttttg

SEQ ID NO: 113257 - DNA, 75 bp, synthetic construct
  source 1..75: mol_type = other DNA
tatcgccggtaccgcctggcgttctggtaaagcgaaaggcgcaaccggtcgcccggtggcgttgctggcacagtt

SEQ ID NO: 113258 - DNA, 75 bp, synthetic construct
  source 1..75: mol_type = other DNA
ctgagggagaccatattcaacagcataccgaaaagcaggctggcagaatccgtcagcaaggtaaatgagctggcc

SEQ ID NO: 113259 - DNA, 75 bp, synthetic construct
  source 1..75: mol_type = other DNA
tatcaggagcaactggagtccaattttgccgatatggcgaatattggcggacgtccaggcggggcgattaccgct

SEQ ID NO: 113260 - DNA, 75 bp, synthetic construct
  source 1..75: mol_type = other DNA
aactggccgcgttgccggacagctggcagaccgcccgcgtgactgagctgctggacattcctgaggggcagcgaa

SEQ ID NO: 113261 - DNA, 75 bp, synthetic construct
  source 1..75: mol_type = other DNA
actggcaggactgctggttgcgaccttgctgtcggggatctttttgattctgatggggctggcacgctttgggcg

SEQ ID NO: 113262 - DNA, 75 bp, synthetic construct
  source 1..75: mol_type = other DNA
ctggtacaacttcatttcagatcagtacaccgggttccacggtattgtcattcccggcacattacgcgactccat

SEQ ID NO: 113263 - DNA, 75 bp, synthetic construct
  source 1..75: mol_type = other DNA
gattggggaatattatcgctccgttctttggtggtattaccgctacagctgccatcgcgcgttctgccgctaacg

SEQ ID NO: 113264 - DNA, 75 bp, synthetic construct
  source 1..75: mol_type = other DNA
ttgcaacagtgccgatattttcaccttgatgaagcagacaaggaatttatcggaaaaagcagaggtgatcacaac

SEQ ID NO: 113265 - DNA, 75 bp, synthetic construct
  source 1..75: mol_type = other DNA
ggctcgcgaattctccattgacgttcttgaagaaatgctcgaaaaattcagggttgtcactaaagaaagacgtga

SEQ ID NO: 113266 - DNA, 75 bp, synthetic construct
  source 1..75: mol_type = other DNA
gaactggaaggaaaaccagggcagacactgttgctgcaccatgttccaaatgtactttccgagcgaattctcctc

SEQ ID NO: 113267 - DNA, 75 bp, synthetic construct
  source 1..75: mol_type = other DNA
gattttgccaccgcgtggctgcttcagaataaggtcctgctgcccggagcaaccacacttgtacgtctcgtcagt

SEQ ID NO: 113268 - DNA, 75 bp, synthetic construct
  source 1..75: mol_type = other DNA
cccggcttgccgatgccggtgaagcggtattctggcgagtggataaatcggcaaattacggtgcactggacgaac

SEQ ID NO: 113269 - DNA, 75 bp, synthetic construct
  source 1..75: mol_type = other DNA
cgggcatatcaatatgctggggcattatacgtttacgctaccggaggatattttgaagggggaactgagagaact

SEQ ID NO: 113270 - DNA, 75 bp, synthetic construct
  source 1..75: mol_type = other DNA
attggctgcggtaaagaacgtgagcttgatgagcgccagtataagcaggtcattcaaaaaaccattaatacgctg

SEQ ID NO: 113271 - DNA, 75 bp, synthetic construct
  source 1..75: mol_type = other DNA
cgctgggacaccccactgacggcagaaaagcggtacaacagctagcagcgcaactggatgagacctggaaaacgg

SEQ ID NO: 113272 - DNA, 75 bp, synthetic construct
  source 1..75: mol_type = other DNA
tggtggtcttatcgcttccggttttggtcctatcctggcgggtattttctgcaccatgacggaatcctggtatcc

SEQ ID NO: 113273 - DNA, 75 bp, synthetic construct
  source 1..75: mol_type = other DNA
cagcaaagtctcaaccgagttgatgagtgtattgccgtgggttacaggtttgacgttggcaggaatcttaccgct

SEQ ID NO: 113274 - DNA, 75 bp, synthetic construct
  source 1..75: mol_type = other DNA
gcgcctggctcagcaatgagcgtccaggtctgctgtttgattttgctaccgcatggttgctgcaaaataagatcc

SEQ ID NO: 113275 - DNA, 75 bp, synthetic construct
  source 1..75: mol_type = other DNA
gggttaagacgtaagatgcgaaaagcagctatggacagaaactatctggcgtcagtccttgcggagagcgggctt

SEQ ID NO: 113276 - DNA, 75 bp, synthetic construct
  source 1..75: mol_type = other DNA
cagggaggtatcagtgaagaaacacaaaatgacagctgtgagaaaatactggcgccgacactgaaatgggccagt

SEQ ID NO: 113277 - DNA, 75 bp, synthetic construct
  source 1..75: mol_type = other DNA
ctgtccttttctggctggtcactcccctcacctttgcacaactacctggcatcaccagtcaaccgctgcctggtg

SEQ ID NO: 113278 - DNA, 75 bp, synthetic construct
  source 1..75: mol_type = other DNA
cgaaagactacgccggttttccggtaggtggacagttccttgtctcggaaaacccggatgtggttaaccatcatc

SEQ ID NO: 113279 - DNA, 75 bp, synthetic construct
  source 1..75: mol_type = other DNA
cggccattattccttcacgctggcagaactggtgaccaaaggtcatctgagaccattaaaagaggcgtcagaggc

SEQ ID NO: 113280 - DNA, 75 bp, synthetic construct
  source 1..75: mol_type = other DNA
tgacgaaaatactgatgagagtgcgttgcgaaagaccatattcaaaagcgtgccggtcgcaaggattgcggagtc

SEQ ID NO: 113281 - DNA, 75 bp, synthetic construct
  source 1..75: mol_type = other DNA
agagaacagtgtgcttaaaggcgacttagtcgcgcgatttggtgccgatccgacactaaaacgtcaggatcttcg

SEQ ID NO: 113282 - DNA, 75 bp, synthetic construct
  source 1..75: mol_type = other DNA
tatacgttcacactaccggaggatattatgaagggggaattgaggccgttaaatctcaatttaaacaatgaatta

SEQ ID NO: 113283 - DNA, 75 bp, synthetic construct
  source 1..75: mol_type = other DNA
cagcgaccagcaagggactattgccgcgctgctggggcatcgccaggtgcgtcaaccgccgcgccgattatgttg

SEQ ID NO: 113284 - DNA, 75 bp, synthetic construct
  source 1..75: mol_type = other DNA
atgaaatggtggaacaatatggacgggtgaagcgcttcctgtccgcgatgttgcgtgacttacactttcaggccg

SEQ ID NO: 113285 - DNA, 75 bp, synthetic construct
  source 1..75: mol_type = other DNA
gcgcagcgggttccagtgtgccgggcattgggtcaccccaccaatggcagtaaagcatcggtgcaattggcagca

SEQ ID NO: 113286 - DNA, 75 bp, synthetic construct
  source 1..75: mol_type = other DNA
ggaaacccagaaattactggttaccaatatgtttcaacggctggggctcgtgttcccgacatatgccgatgaaat

SEQ ID NO: 113287 - DNA, 75 bp, synthetic construct
  source 1..75: mol_type = other DNA
ggagatgaaggttatgttggaactgatcatctgacagttgaaccgccccggaaatcctggagactaaactccctg

SEQ ID NO: 113288 - DNA, 75 bp, synthetic construct
  source 1..75: mol_type = other DNA
gctgatggcattgtctgggtaacttccggactaagtgaaacattatccgcaccactgacagaagatgccctggac

SEQ ID NO: 113289 - DNA, 75 bp, synthetic construct
  source 1..75: mol_type = other DNA
ttggtcaatttgactctgtaagtgccattcatggtaattctggcattggtgtgtattcagttacgaaagctgcaa

SEQ ID NO: 113290 - DNA, 75 bp, synthetic construct
  source 1..75: mol_type = other DNA
cagagtgaagccaataagagcatttctggtgcaatggcggggtttctcagctccagcgttatcaatggcagaaag

SEQ ID NO: 113291 - DNA, 75 bp, synthetic construct
  source 1..75: mol_type = other DNA
ttgactgcgttattctccgaaacagttattcgctgacagggcagccagttccgtggcagtggtggaatgaccgcg

SEQ ID NO: 113292 - DNA, 75 bp, synthetic construct
  source 1..75: mol_type = other DNA
aaatgggatgctatccgttcccgcgaagccaagcagttgcgcgataacactattccacaaaccggtgaatacctc

SEQ ID NO: 113293 - DNA, 75 bp, synthetic construct
  source 1..75: mol_type = other DNA
tcagcagagtatctgagtcgtattgagaatgagttccctattttatgggagtttttccccatctttgagatcaaa

SEQ ID NO: 113294 - DNA, 75 bp, synthetic construct
  source 1..75: mol_type = other DNA
aacaaccattcgcgtaacattctcacggttgaagaccccatcgaatacatgattgaagggatcggtcagacgcag

SEQ ID NO: 113295 - DNA, 75 bp, synthetic construct
  source 1..75: mol_type = other DNA
tgcggcaaatcgacgaagccgaatttgaacagcggctgaatgcggtctggcagcgggactcttccgaggctcgcc

SEQ ID NO: 113296 - DNA, 75 bp, synthetic construct
  source 1..75: mol_type = other DNA
gtccgagaacaatatccctggctggtccctgttcatgctgatggaaaaataggcggaaaagcagatttcatacgg

SEQ ID NO: 113297 - DNA, 75 bp, synthetic construct
  source 1..75: mol_type = other DNA
tctgcctggagaaaaaacgcagttactgtcagtttgattcgaagctggcgcagatagtccagcagcaggggcgca

SEQ ID NO: 113298 - DNA, 75 bp, synthetic construct
  source 1..75: mol_type = other DNA
atgttgccgccctgaatggtgtggatgtcagggctttcacgggtgaggcgaaattctgccgtaaggccgcagccg

SEQ ID NO: 113299 - DNA, 75 bp, synthetic construct
  source 1..75: mol_type = other DNA
ggcatctacaggatttgaatgttgttgttgaaagtgcgtatcacgaagaaaaggggtatggaccacctgatcttc

SEQ ID NO: 113300 - DNA, 75 bp, synthetic construct
  source 1..75: mol_type = other DNA
agaagccagaaaatcgctaaccagcaacactcaagagctttcaacggctctttcatggttatctgaattcatcat

SEQ ID NO: 113301 - DNA, 75 bp, synthetic construct
  source 1..75: mol_type = other DNA
actggataacagctctgttgataacgttgttgctgcaaccggtaactacaaagttcgtatcgacaacgcaactgg

SEQ ID NO: 113302 - DNA, 75 bp, synthetic construct
  source 1..75: mol_type = other DNA
caagcaaactaccggataaagcgatggactacctgaagcgaaacggactgataaacgaggagaatattttacgat

SEQ ID NO: 113303 - DNA, 75 bp, synthetic construct
  source 1..75: mol_type = other DNA
agtgatcgaatgccggaagacaccaaaatgttactggcatttagtcaaggtcaaatagtggcagcatattggaac

SEQ ID NO: 113304 - DNA, 75 bp, synthetic construct
  source 1..75: mol_type = other DNA
gaagtcagcgctggcgctggatacccagacgggtggaaaaacctggaactattatgtccgccagatttttggtgg

SEQ ID NO: 113305 - DNA, 75 bp, synthetic construct
  source 1..75: mol_type = other DNA
gaagggatgaattaccgggatccaaatgtggatttggcatggatattctggaaatccagtcgagagcacatattg

SEQ ID NO: 113306 - DNA, 75 bp, synthetic construct
  source 1..75: mol_type = other DNA
ctggacgtggtaatgaatgaagacgactgcaaaataagaagaggaaatgcagcagaattattttcagggatacgg

SEQ ID NO: 113307 - DNA, 75 bp, synthetic construct
  source 1..75: mol_type = other DNA
cagaacaaaagaaagagccagaaatgacggtcagatattatattagttctgctgatttaaccgcagagaagttcg

SEQ ID NO: 113308 - DNA, 75 bp, synthetic construct
  source 1..75: mol_type = other DNA
tttgtcgcgcagaaagtcaccatgccggaaatctggaagctggatcgttcacaggaagactacgcagagggtctg

SEQ ID NO: 113309 - DNA, 75 bp, synthetic construct
  source 1..75: mol_type = other DNA
gaaggtaataggattcgaccctaagcgagatatgccattcaaaggaactcgccacaacgcgcttgatgatgccat

SEQ ID NO: 113310 - DNA, 75 bp, synthetic construct
  source 1..75: mol_type = other DNA
cgagatatgccattcaaaggaactcgccacaacgcgcttgatgatgccattcaccaagccaaatacgtttcagcg

SEQ ID NO: 113311 - DNA, 75 bp, synthetic construct
  source 1..75: mol_type = other DNA
atgaatcacttaatggttgaccttgaaacaatgggcaacgggccatatgcgccagttatttctattggggcggta

SEQ ID NO: 113312 - DNA, 75 bp, synthetic construct
  source 1..75: mol_type = other DNA
ggaggagaagggaggaagtgccaactgtactgccagtcatggtacaaccgacaatccaccagtaccaggcaaaca

SEQ ID NO: 113313 - DNA, 75 bp, synthetic construct
  source 1..75: mol_type = other DNA
ttcgcgccgatttcgatgattttgacggtgacaggcgaggtatcggtgattgtctggatgaggccgagcaagagc

SEQ ID NO: 113314 - DNA, 75 bp, synthetic construct
  source 1..75: mol_type = other DNA
gagtcacatgacagtagacacgatactagcagtcaggcagccaaagacttcagagaagcttctgattactttact

SEQ ID NO: 113315 - DNA, 75 bp, synthetic construct
  source 1..75: mol_type = other DNA
atccgaaagtggtggcggcggtagaagcgcaactgaaaaaactgtcgcatacctgcttccaggtgctggcttacg

SEQ ID NO: 113316 - DNA, 75 bp, synthetic construct
  source 1..75: mol_type = other DNA
gctgatgccgggtcatgtttatcgcgcgctttatccttgcccgctgcacggcataagcgaggatgacgctatcgc

SEQ ID NO: 113317 - DNA, 75 bp, synthetic construct
  source 1..75: mol_type = other DNA
tgatggtcacctgactgttaatggcaacaacgatattaacaacggcgacgaagttgacaacagctctgttgacaa

SEQ ID NO: 113318 - DNA, 75 bp, synthetic construct
  source 1..75: mol_type = other DNA
aatggcgacgaagttgacaacagctctgttgacaacgttgtagctgcaaccggtaactacaaagttcgtatcgac

SEQ ID NO: 113319 - DNA, 75 bp, synthetic construct
  source 1..75: mol_type = other DNA
atgcgtagtatttgtgtggattcttttatgttcgaaaatggtgagagatattgtcatatcgtaaataaaaatact

SEQ ID NO: 113320 - DNA, 75 bp, synthetic construct
  source 1..75: mol_type = other DNA
atgaaaaagtcaattatctcagcgttaattttgagcttaccgcttctggctaatgcggctcccggtagtgatccg

SEQ ID NO: 113321 - DNA, 75 bp, synthetic construct
  source 1..75: mol_type = other DNA
attgggtagatggtgacatcttcactctgaacatcgctaagtctactattgacgacgattttgacgcattctact

SEQ ID NO: 113322 - DNA, 75 bp, synthetic construct
  source 1..75: mol_type = other DNA
agcggcgcagggcgtaccggcacgctgtttgcgatggagcaaatgggcgtggcgccggatctcaccacctttgcg

SEQ ID NO: 113323 - DNA, 75 bp, synthetic construct
  source 1..75: mol_type = other DNA
agtgatggatgccgtcgctccaggcggtctgggcggcacctatgccggtaacccgattgcctgcgtagcggcgct

SEQ ID NO: 113324 - DNA, 75 bp, synthetic construct
  source 1..75: mol_type = other DNA
ctacccggaagatgccaaggctaaatgggatgcaattcggacgcgtgaagccaaacaattgcgtgataacacaat

SEQ ID NO: 113325 - DNA, 75 bp, synthetic construct
  source 1..75: mol_type = other DNA
catctaattataaagccacttgatgtgggacttgatacttccctagtagtgacaactgaccgtcgtacatatcgt

SEQ ID NO: 113326 - DNA, 75 bp, synthetic construct
  source 1..75: mol_type = other DNA
tgacggtcgaggatcctgttgaatatgaactggacggtatcagtcagacccaggtcaacccgaaggtggacatga

SEQ ID NO: 113327 - DNA, 75 bp, synthetic construct
  source 1..75: mol_type = other DNA
tgaaatggatttttataccgtcgcaggggagttgcctgaccgtgaggacttactggatgcgaatgacgatgcgcc

SEQ ID NO: 113328 - DNA, 75 bp, synthetic construct
  source 1..75: mol_type = other DNA
aaatggcagaccggtgctggcagcgtaaccagtaaaccatttgcagggccggacggtgcaatcagttacgtgtat

SEQ ID NO: 113329 - DNA, 75 bp, synthetic construct
  source 1..75: mol_type = other DNA
ttatgttcgaaaatggtgagagatattgtcatgttgtaaataaagatactggtgaaccattgtattatcctaact

SEQ ID NO: 113330 - DNA, 75 bp, synthetic construct
  source 1..75: mol_type = other DNA
caacgagagaaataattaactcgcaaaaaaataggcttttttttatactaaaaaatcaagctctatttactgtca

SEQ ID NO: 113331 - DNA, 75 bp, synthetic construct
  source 1..75: mol_type = other DNA
agatgatgtgcgctttgtagcgacctctgcgaccattgccggcagcgacgctgaaaagcagctgaaaaaatttct

SEQ ID NO: 113332 - DNA, 75 bp, synthetic construct
  source 1..75: mol_type = other DNA
tgaaggaatgcgttttgtgcgcggtggcgtggtcaatccgttgatgcgcctgccgcgcagtaatctgatctccgt

SEQ ID NO: 113333 - DNA, 75 bp, synthetic construct
  source 1..75: mol_type = other DNA
atggtggtaggtgttaagcatacctacttgacatttagatataatattgaactagaaaagactttcttgtacatt

SEQ ID NO: 113334 - DNA, 75 bp, synthetic construct
  source 1..75: mol_type = other DNA
agtgttgaggaaacccgggtggtgtttatgcaggacggctatccgcatccctgcatgcgaccgatgtacaacttt

SEQ ID NO: 113335 - DNA, 75 bp, synthetic construct
  source 1..75: mol_type = other DNA
tttcctgtaacaagcgagccgtcaactacgcgctttgaacttgccatttgtgaagatggtgaggaagtctctggc

SEQ ID NO: 113336 - DNA, 75 bp, synthetic construct
  source 1..75: mol_type = other DNA
acgctcttgcgtcgcaaaatcggtatcttgcctgctgatttcagtattgagataaaaggtggaatgcacgcaaat

SEQ ID NO: 113337 - DNA, 75 bp, synthetic construct
  source 1..75: mol_type = other DNA
cgatgctggaatatatgatggttcgccaggtcgacgccccgattatccagcaatccaaagcacaaaaatcactac

SEQ ID NO: 113338 - DNA, 75 bp, synthetic construct
  source 1..75: mol_type = other DNA
gaaaacggcggacctctaaagctttcggaaatgttgttgttccgggaattcatgcgtcgccctaaacgaaccaac

SEQ ID NO: 113339 - DNA, 75 bp, synthetic construct
  source 1..75: mol_type = other DNA
acgtgactccttacggcagcatttctggtctgttccagtctggtgatgactaccagctgagcaacgacatgaaag

SEQ ID NO: 113340 - DNA, 75 bp, synthetic construct
  source 1..75: mol_type = other DNA
agtccgtgtttataacgatggcgtgaaaactatcatccagttccccaaaaatatttcttctggcgaaaccccgat

SEQ ID NO: 113341 - DNA, 75 bp, synthetic construct
  source 1..75: mol_type = other DNA
ccgatgccgcaggcagcgtgaagccaataatgcaaaaattgattccggcagattcactccatttgcagttctacg

SEQ ID NO: 113342 - DNA, 75 bp, synthetic construct
  source 1..75: mol_type = other DNA
cacgattatctgacttatggtggttatgtatatgaccacgcagctgatggttactttgataccactttcagcggc

SEQ ID NO: 113343 - DNA, 75 bp, synthetic construct
  source 1..75: mol_type = other DNA
tgccacgcagcaatctgctcaccgtcggttaccgcattcatgacggctatctcgaacggttagcctggccgctga

SEQ ID NO: 113344 - DNA, 75 bp, synthetic construct
  source 1..75: mol_type = other DNA
gaaagcattgagctagaaattgttgaagatcatgaactgcccaaacgctatgcagtgacttatccagataagaac

SEQ ID NO: 113345 - DNA, 75 bp, synthetic construct
  source 1..75: mol_type = other DNA
cggactcggacaggagtggtatggcttcggacagacggtctttgttcgcccgatggagcaggcgtggcagcaggt

SEQ ID NO: 113346 - DNA, 75 bp, synthetic construct
  source 1..75: mol_type = other DNA
atgaatttaagggtgatgagattgatgtagcaacactaaactatatttttatgattatggaatattattaccaac

SEQ ID NO: 113347 - DNA, 75 bp, synthetic construct
  source 1..75: mol_type = other DNA
tcgtgaagaaatggactgggtactgacggatggcaggcagaaggcaccgtcaccggtatcgccggaagcactcag

SEQ ID NO: 113348 - DNA, 75 bp, synthetic construct
  source 1..75: mol_type = other DNA
ccacaagcgggagctattttttacagttattccctctgcatgatgaggtgggaataaactttggtgcactccctg

SEQ ID NO: 113349 - DNA, 75 bp, synthetic construct
  source 1..75: mol_type = other DNA
tacccagcaccgttccgggtatctctggtaaatatggtgtccagctaaacattgtaaaaccagatattcatccta

SEQ ID NO: 113350 - DNA, 75 bp, synthetic construct
  source 1..75: mol_type = other DNA
tgctggagcaggatcgtatcgatcagttggtgcaactggttggcgacaaagcggctgtgcggcaaatgctggttt

SEQ ID NO: 113351 - DNA, 75 bp, synthetic construct
  source 1..75: mol_type = other DNA
accactgcagtgtcgactattgcatcgactggaacatcagccactacttcgacggtaaccaccgagccaaaaggc

SEQ ID NO: 113352 - DNA, 75 bp, synthetic construct
  source 1..75: mol_type = other DNA
cgcagtatgcgcggcctgcgcatgaacactcttggttggtttgattttaaatcagcctggtttgctccgccggat

SEQ ID NO: 113353 - DNA, 75 bp, synthetic construct
  source 1..75: mol_type = other DNA
cgatcgccgctgcaatatgattaagcgcggcggagagaacgtctcctgtgtggagctggaaaatattatctccac

SEQ ID NO: 113354 - DNA, 75 bp, synthetic construct
  source 1..75: mol_type = other DNA
tgccgcgctggcatcatgcccacccggcgcagtgcgaaaaacctgccgggctggaaagcctcaccctgacctttt

SEQ ID NO: 113355 - DNA, 75 bp, synthetic construct
  source 1..75: mol_type = other DNA
agtgctggaagctgatggctggctgcataccggcgataccggataccgcgacgaagaaggcttttttatttcgtc

SEQ ID NO: 113356 - DNA, 75 bp, synthetic construct
  source 1..75: mol_type = other DNA
tgcaggcgttgctgaatctgcagaaatccctggcccgccttcagtaccgggaggagcacggggcgccatggtacc

SEQ ID NO: 113357 - DNA, 75 bp, synthetic construct
  source 1..75: mol_type = other DNA
tcaatatcagaatgaaattgagcaaagaatattaacagagaaaggagggcatgaagtactgccgggaattttatc

SEQ ID NO: 113358 - DNA, 75 bp, synthetic construct
  source 1..75: mol_type = other DNA
gtatcgccgcttattacgccgcgctgcgtagtaccgatgaagacaaggaacgcatccgtgaactccaccacgcca

SEQ ID NO: 113359 - DNA, 75 bp, synthetic construct
  source 1..75: mol_type = other DNA
atgagtttgagggtgatgagattaatgtagaaacgctaaactatatttttctgattatggaatattattaccaac

SEQ ID NO: 113360 - DNA, 75 bp, synthetic construct
  source 1..75: mol_type = other DNA
tatgtggtcgaggcgtatgccgccgggtgcctgctggaaaatatcaccctgggcgatttcaccgcgccagcagca

SEQ ID NO: 113361 - DNA, 75 bp, synthetic construct
  source 1..75: mol_type = other DNA
agtcggggtcggcgtcaacggtacgattgcgagcaccacggacaccgccgccgatgacgagcgtaagaccgctga

SEQ ID NO: 113362 - DNA, 75 bp, synthetic construct
  source 1..75: mol_type = other DNA
atgcgtaaagatacccgctttaaatttaatgcttacctgtcccgcgtggcggaactgaacggcgtcgacaccgac

SEQ ID NO: 113363 - DNA, 75 bp, synthetic construct
  source 1..75: mol_type = other DNA
ccgcgaactggcgcagcagctggttaacagcgctccgctggcgattgcggcgctgaaagagatctaccgcaccac

SEQ ID NO: 113364 - DNA, 75 bp, synthetic construct
  source 1..75: mol_type = other DNA
gaacaccgtgcaggagtcatccgcgtttctgaaaatgattaatatcctgccggtcgcagaaatgaagggggaaaa

SEQ ID NO: 113365 - DNA, 75 bp, synthetic construct
  source 1..75: mol_type = other DNA
tttttgcagatgattaacattctgccggtcgcagaaatgaagggcgagaaaatcggcgtcggtgtgaccggcacc

SEQ ID NO: 113366 - DNA, 75 bp, synthetic construct
  source 1..75: mol_type = other DNA
atcgccagcacgaccgacacctcgggtgacaaagagcgccagaccgcagatttcaccgcgcttgagtccaacaag

SEQ ID NO: 113367 - DNA, 75 bp, synthetic construct
  source 1..75: mol_type = other DNA
acagcaatccgatgctgcaggatgtggcggtcggctggctgcagaaataccgcaatgaagccccggcgcgcgtga

SEQ ID NO: 113368 - DNA, 75 bp, synthetic construct
  source 1..75: mol_type = other DNA
agcagtcgctaattaccatccgcgaagaggaaggcggcaagaagcagattgcgctgaccgaacagggcgcacagt

SEQ ID NO: 113369 - DNA, 75 bp, synthetic construct
  source 1..75: mol_type = other DNA
atatttctattatccccgattacagacaagcctggaaagtggaacataaattgtcggatattctacggttgacta

SEQ ID NO: 113370 - DNA, 75 bp, synthetic construct
  source 1..75: mol_type = other DNA
atttttatatccgctacaaaacgctggacctgtgggcgcgttatcaggatttccagctccgtatccgtaacgcca

SEQ ID NO: 113371 - DNA, 75 bp, synthetic construct
  source 1..75: mol_type = other DNA
gatttacgcgtcaaccagagcgatatcagtgatgcacaaataaaaaagatcattgcggtgatcgaccgcgccgct

SEQ ID NO: 113372 - DNA, 75 bp, synthetic construct
  source 1..75: mol_type = other DNA
cctggtgctgacggtttactgcctgcatcaacgttatcttaatcgcaccatgccggtaggcttgccgggtctggc

SEQ ID NO: 113373 - DNA, 75 bp, synthetic construct
  source 1..75: mol_type = other DNA
tttcacgacataacctgattgcgccagccaccatgatgcaagtgctacaatacattgcccagcatgataatgagc

SEQ ID NO: 113374 - DNA, 75 bp, synthetic construct
  source 1..75: mol_type = other DNA
ttccgggcttggtgcaacatcgcaggcggcttccggcgtggtggatggcaattactcgtttgccaacatgcagat

SEQ ID NO: 113375 - DNA, 75 bp, synthetic construct
  source 1..75: mol_type = other DNA
catcgcccaccactggcaacaaatttccccgcttcactggcgcttctttttacgtccgggtgtccattttcatca

SEQ ID NO: 113376 - DNA, 75 bp, synthetic construct
  source 1..75: mol_type = other DNA
cgcagtatgcgcggcctgcgcatgaacactctcggctggttcgattttaaatccgcgtggtttgcgccaccggat

SEQ ID NO: 113377 - DNA, 75 bp, synthetic construct
  source 1..75: mol_type = other DNA
gttgctactatttactgttcgacagccgcacccatcgcggggcgaatcagcaagtcagagactgggtaagctatg

SEQ ID NO: 113378 - DNA, 75 bp, synthetic construct
  source 1..75: mol_type = other DNA
ctgcaacatccgctgcatccactgcagtgtcggctattacatcggctgcaacatcagccactacttcgacggtaa

SEQ ID NO: 113379 - DNA, 75 bp, synthetic construct
  source 1..75: mol_type = other DNA
catgcgaagaggcctcacgggatctgaaatcggctcttgcgctggatactcagacaggcgggaaaacctggaact

SEQ ID NO: 113380 - DNA, 75 bp, synthetic construct
  source 1..75: mol_type = other DNA
aaagaacggcactattgagtttgatacaagatgaaggtctgctctctgggctggataaatatcttgcacctcatc

SEQ ID NO: 113381 - DNA, 75 bp, synthetic construct
  source 1..75: mol_type = other DNA
acagctcaggttgttcgtaaccatggtctggagctaccgatagtcaaaacagacaatgggtggaaactcgttgga

SEQ ID NO: 113382 - DNA, 75 bp, synthetic construct
  source 1..75: mol_type = other DNA
cttcgcggaagaacagtaccagcaactctggttcccggcctacggactgctcccccgttggcaccatgcccgccc

SEQ ID NO: 113383 - DNA, 75 bp, synthetic construct
  source 1..75: mol_type = other DNA
tcgttcgaagacctgatgcattcaacagatccctatacgctgattttttctaaccccagcccgttaagaggcata

SEQ ID NO: 113384 - DNA, 75 bp, synthetic construct
  source 1..75: mol_type = other DNA
acaccacttacacctgaagggcctaaagcaaattatacggaagaatgggtcatcagacctggtgagtttgactta

SEQ ID NO: 113385 - DNA, 75 bp, synthetic construct
  source 1..75: mol_type = other DNA
ggggcggcacatcctgcgcgtgctctactatcgtccgttgcgtaatctgctacctggcagcgcattgcgccgttc

SEQ ID NO: 113386 - DNA, 75 bp, synthetic construct
  source 1..75: mol_type = other DNA
tctttggcagcaacctggtggcgaaaagtaccgattttatgtcgcagaatccggagattgtcacgctgttctccg

SEQ ID NO: 113387 - DNA, 75 bp, synthetic construct
  source 1..75: mol_type = other DNA
gttcgtctgcatgtgattgttcgtgaaaccaacgacgaagcgtggcaggccgccgagcggttaatctcgcatctt

SEQ ID NO: 113388 - DNA, 75 bp, synthetic construct
  source 1..75: mol_type = other DNA
tgctgaaattgtgtcgccgacaccctggacgttagatatccatctcacgcaaccagaccgctggttgccgttact

SEQ ID NO: 113389 - DNA, 75 bp, synthetic construct
  source 1..75: mol_type = other DNA
gctgggcattattggcatcttcactttccttgcgctgggttggcagtttagccagaaacgcgccgcgcgtcgttt

SEQ ID NO: 113390 - DNA, 75 bp, synthetic construct
  source 1..75: mol_type = other DNA
agccggatcgctggttaccgttactgctggggcaagttccggcaatgatcctgccgcgcgaatgggaaacactca

SEQ ID NO: 113391 - DNA, 75 bp, synthetic construct
  source 1..75: mol_type = other DNA
ttttttgtggtgatattgatgagatgctaagtgaattgtctgggctgaaaaatataggttgtgtttttggtgggc

SEQ ID NO: 113392 - DNA, 75 bp, synthetic construct
  source 1..75: mol_type = other DNA
atgacagtaggaagaatgaaaaggccatggaatgttgttggcgctggatttaacgatgatggggtttatttcacg

SEQ ID NO: 113393 - DNA, 75 bp, synthetic construct
  source 1..75: mol_type = other DNA
agttgtacaggcggcggggtgtctgctgcctgacagatgtactgcggaaggcctggctgagcaacttactgccct

SEQ ID NO: 113394 - DNA, 75 bp, synthetic construct
  source 1..75: mol_type = other DNA
cggaagaaacccgcaaacaaatcctggatgcggcagagttctgcttttgtgagacgggcttttcgaagacgacac

SEQ ID NO: 113395 - DNA, 75 bp, synthetic construct
  source 1..75: mol_type = other DNA
caggcagcgatccacaagagctggcaggcgacggcgtgttccttgatcatagcgagcgctacgcagcctcggcgg

SEQ ID NO: 113396 - DNA, 75 bp, synthetic construct
  source 1..75: mol_type = other DNA
caaaactgaaaatggatggaagcttgttggagaaacgcctcttactcctgatgggccaaaagcaaattacacgga

SEQ ID NO: 113397 - DNA, 75 bp, synthetic construct
  source 1..75: mol_type = other DNA
taagatggctgaaaagtcaggctatcgttcagccttgctggtgctgaattctaaagattttggcgttcctcagaa

SEQ ID NO: 113398 - DNA, 75 bp, synthetic construct
  source 1..75: mol_type = other DNA
ttgttgttaatattccagaggatatacagcaacacactccggaatgcggtgaaacaacagctctgttgggtttaa

SEQ ID NO: 113399 - DNA, 75 bp, synthetic construct
  source 1..75: mol_type = other DNA
caatgctacactccaggattaaagccagacactattttatggtgggctggtgcgacactgggggctgccgattta

SEQ ID NO: 113400 - DNA, 75 bp, synthetic construct
  source 1..75: mol_type = other DNA
caagtagttcgtaaccatggtgtggaacttcctatagtcaaaactgaaaatggatggaagcttgttggagaaacg

SEQ ID NO: 113401 - DNA, 75 bp, synthetic construct
  source 1..75: mol_type = other DNA
cactaaaaaatgtattgtcaccggatgcagtgccttggtttggattaacggctcaggttgttcgtaaccatggtg

SEQ ID NO: 113402 - DNA, 75 bp, synthetic construct
  source 1..75: mol_type = other DNA
attaattttaaagaccttcctggtccattaaaaaatgcattaagcaacagcaatataccaaccactgtatcgact

SEQ ID NO: 113403 - DNA, 75 bp, synthetic construct
  source 1..75: mol_type = other DNA
cgtgagtccaatctccagcctgacgttgtgggacagcacttccagccagttgacgctgagtattatgttggtaat

SEQ ID NO: 113404 - DNA, 75 bp, synthetic construct
  source 1..75: mol_type = other DNA
gaggataaacagaacaaacaagagaaatcagaaaccgcaattcgagaaagcatcggcgttgtaccgctcgcattg

SEQ ID NO: 113405 - DNA, 75 bp, synthetic construct
  source 1..75: mol_type = other DNA
ttcttggtcgtgggcttgcgtacagtagaacagtgtcaggggtagaggctatcaaacactctttaggtgctggcc

SEQ ID NO: 113406 - DNA, 75 bp, synthetic construct
  source 1..75: mol_type = other DNA
ctatcattttccaagagtccttactataacgcagtattgagttcatcgttcaattttgctctgccaggttgtgat

SEQ ID NO: 113407 - DNA, 75 bp, synthetic construct
  source 1..75: mol_type = other DNA
catttcattggtgagcaagaccttattgatctttctgatgagcgaattaattcggagcaatcaaacgtgctagaa

SEQ ID NO: 113408 - DNA, 75 bp, synthetic construct
  source 1..75: mol_type = other DNA
tagaggtatttctccaaagcatcaagaagacagatatcaccttagataaagttgggcggcggctcgtttcagagt

SEQ ID NO: 113409 - DNA, 75 bp, synthetic construct
  source 1..75: mol_type = other DNA
ttgacctttggtcttgcagcgatcggctttatcatggtgacttcggcgtcgatgcctattgggcagcgtttaacc

SEQ ID NO: 113410 - DNA, 75 bp, synthetic construct
  source 1..75: mol_type = other DNA
tgcttcggcgcggcattcctgtcgctgcacccgactcagtacgcagaagtgctggtgaaacgtatgcaggcggcg

SEQ ID NO: 113411 - DNA, 75 bp, synthetic construct
  source 1..75: mol_type = other DNA
tgtttcataaactgcaccttcagatgtcagattatgtccaacatttggggtgcagttcatcagtcgctctatccg

SEQ ID NO: 113412 - DNA, 75 bp, synthetic construct
  source 1..75: mol_type = other DNA
cggaacagtggcaggaaaaagccgaaaccctggcgaaactgtttatcgacaacttcgataaatacaccgacaccc

SEQ ID NO: 113413 - DNA, 75 bp, synthetic construct
  source 1..75: mol_type = other DNA
agtcttgaaaatggtgcgatagttgtcaatcgtagtaatcatccagcattacttgcaggcctcgatattatgaag

SEQ ID NO: 113414 - DNA, 75 bp, synthetic construct
  source 1..75: mol_type = other DNA
cattaccacacccgcaactattccagcagagcggggaaaaccagcatcaccaaaattgacagatgtcagtaaaga

SEQ ID NO: 113415 - DNA, 75 bp, synthetic construct
  source 1..75: mol_type = other DNA
tactaatctcgttccagattttcagacagccaccaaagggaaaccttcaacgccaaagttaaaagacctttgcga

SEQ ID NO: 113416 - DNA, 75 bp, synthetic construct
  source 1..75: mol_type = other DNA
tatcgtcatgaacggtgcaaaatgcaccaacccacagtggaaagagcagggcctgaactctgaaaacttcgtggc

SEQ ID NO: 113417 - DNA, 75 bp, synthetic construct
  source 1..75: mol_type = other DNA
acgtgcttaggctctctctacgaatttgcaaagcgccgctacgatggcataccagaccgcaatccttttcacggt

SEQ ID NO: 113418 - DNA, 75 bp, synthetic construct
  source 1..75: mol_type = other DNA
gaatacctactgccccaatcaaacaagattaaacgcgccgatggtaagcgcggcccgtggtattctcaggcattc

SEQ ID NO: 113419 - DNA, 75 bp, synthetic construct
  source 1..75: mol_type = other DNA
tgggtttgatttcaatcctcgtgaaatagacgctattaataaagggaagttaaatcctccaggagtatctgttat

SEQ ID NO: 113420 - DNA, 75 bp, synthetic construct
  source 1..75: mol_type = other DNA
ccacggcggggtggaacagaacctgcgctaccagggacagtacctcgacagggaaacggggctgcactacaatct

SEQ ID NO: 113421 - DNA, 75 bp, synthetic construct
  source 1..75: mol_type = other DNA
tcaatcgtagtaatcatccagcattacttgcaggcctcgatattatgaagagtaaagttgacgctcatccatatt

SEQ ID NO: 113422 - DNA, 75 bp, synthetic construct
  source 1..75: mol_type = other DNA
acaatgcacagtctggtcatcggacagatcaagacggataagaaatctaatgagattacagctatccctgaactt

SEQ ID NO: 113423 - DNA, 75 bp, synthetic construct
  source 1..75: mol_type = other DNA
tgaaaatttcgtgcaaaaggaacttggcgatcgccatgcataccagtacgcgatccacaatccgccaggtgcaat

SEQ ID NO: 113424 - DNA, 75 bp, synthetic construct
  source 1..75: mol_type = other DNA
tgtccctgatgaacttattgattttacgtttgaatggaaaggtctgaagaaattatgcgtggcagtctcctttcg

SEQ ID NO: 113425 - DNA, 75 bp, synthetic construct
  source 1..75: mol_type = other DNA
ccaaagagtggaaacatttttaatgctgatatatgcattggaaaaaatagcgatctaaaattatgcaatagttat

SEQ ID NO: 113426 - DNA, 75 bp, synthetic construct
  source 1..75: mol_type = other DNA
agctggctggttttaaacctgactttatcgttatgaacggcgcaaaatgcactaacccccagtggaaagagcagg

SEQ ID NO: 113427 - DNA, 75 bp, synthetic construct
  source 1..75: mol_type = other DNA
gcatctgacgccctatgccgggctgaaatcggtggtggacgaggttcagtatctgctgaatgctgtgctaatacg

SEQ ID NO: 113428 - DNA, 75 bp, synthetic construct
  source 1..75: mol_type = other DNA
gatcctcgatccgcgtaatacctacgcttctccggaacagtggcaggaaaaagctgaaaccctggcgaaactgtt

SEQ ID NO: 113429 - DNA, 75 bp, synthetic construct
  source 1..75: mol_type = other DNA
tatatatcttgatgcagatatgattattaccgataaattaggtgtcctgtatgctcctgatggtatcgctgtgta

SEQ ID NO: 113430 - DNA, 75 bp, synthetic construct
  source 1..75: mol_type = other DNA
ccggaagagatggtgtcggtataccatttctggacaattgtgctggcgattgccggaatggtgctttacttcatc

SEQ ID NO: 113431 - DNA, 75 bp, synthetic construct
  source 1..75: mol_type = other DNA
tatgcagaaaaaagagaacatacttggtttgattttttcaggaatttggccatgttgaaggctggaagtttgttt

SEQ ID NO: 113432 - DNA, 75 bp, synthetic construct
  source 1..75: mol_type = other DNA
ttccaatcaattacgggaacagcagggcgagctgacgtcaacctgggatttaatgctgcaaacgcgggtaatgac

SEQ ID NO: 113433 - DNA, 75 bp, synthetic construct
  source 1..75: mol_type = other DNA
ctggctgcaaggctggatgcagcactgacaacgcaactcaccaccggcagcaccgacggtcatctggcctggctg

SEQ ID NO: 113434 - DNA, 75 bp, synthetic construct
  source 1..75: mol_type = other DNA
attatatgaacgcggcagcgacacagttcccgctgccggaggggattaatctgcccctgaccctgcggcattacc

SEQ ID NO: 113435 - DNA, 75 bp, synthetic construct
  source 1..75: mol_type = other DNA
tgatggaaaaacactccggcattcttatgacaagagtcgccgcaagggagcgattcatgtcattagtgcgttctc

SEQ ID NO: 113436 - DNA, 75 bp, synthetic construct
  source 1..75: mol_type = other DNA
cgcgaacagaaagaaatctccaggcatttaaaacctgctaaaagtatatctgtaacagttaaaaatggcggaaga

SEQ ID NO: 113437 - DNA, 75 bp, synthetic construct
  source 1..75: mol_type = other DNA
aggttgggaagatatagaggattttggggaaactcatctcgattttttgaagcaatatggtgattttgaaaatgg

SEQ ID NO: 113438 - DNA, 75 bp, synthetic construct
  source 1..75: mol_type = other DNA
gcataaactggtggcgggtgaaattcgtcagcagcgtatagacgcctggcgggcagcgtgcctgcaaaatccgca

SEQ ID NO: 113439 - DNA, 75 bp, synthetic construct
  source 1..75: mol_type = other DNA
gctgactggaacgtgaaccagcaggcgtatcgcgctgcgctggcacacatgatggaaggacgtagcccagatgtt

SEQ ID NO: 113440 - DNA, 75 bp, synthetic construct
  source 1..75: mol_type = other DNA
tctgctgtggttgtggtatgaacaggccattcatggtgcgccacagaacaatcacgcacaggcccaacgcatcga

SEQ ID NO: 113441 - DNA, 75 bp, synthetic construct
  source 1..75: mol_type = other DNA
tatcgcaacgctgatccccgtattgaatggtgttcatcaggcgggcctgagtaccacgatagaattcattagcgc

SEQ ID NO: 113442 - DNA, 75 bp, synthetic construct
  source 1..75: mol_type = other DNA
cacacaccgggcaggccgcaaaagcggcgatgactgttgccgcactgtgtgaaaagcataacgtcgaactggtgg

SEQ ID NO: 113443 - DNA, 75 bp, synthetic construct
  source 1..75: mol_type = other DNA
ggtcgtgacccacgcccggaatttaaaaccgctcagtttgccgatggcgtcgagacgatgaacgacctgcaaccg

SEQ ID NO: 113444 - DNA, 75 bp, synthetic construct
  source 1..75: mol_type = other DNA
ttggggaaacacatctcgattttttaaaacaatacggtgattttgaaaatggtattcctgttcacgataccatcg

SEQ ID NO: 113445 - DNA, 75 bp, synthetic construct
  source 1..75: mol_type = other DNA
tgagtataaagccactgttacaggcggcggagagggtatcgcaacgctgatccccgtgttgaatggtgttcacca

SEQ ID NO: 113446 - DNA, 75 bp, synthetic construct
  source 1..75: mol_type = other DNA
aaagaggccggtgtggttcagcgcgcagagagctttaatgtggccaacctgatgccgttagtggcggataacccc

SEQ ID NO: 113447 - DNA, 75 bp, synthetic construct
  source 1..75: mol_type = other DNA
tggatgataagaaataatctcttggttgatttatcaaaaataaataaacacaaggattatgaagaaattaattca

SEQ ID NO: 113448 - DNA, 75 bp, synthetic construct
  source 1..75: mol_type = other DNA
aggtattctctgctgcgcccgaggcggtcaacgttcacatattgtgcaacgctggttgcatgaagcggggattga

SEQ ID NO: 113449 - DNA, 75 bp, synthetic construct
  source 1..75: mol_type = other DNA
ggtgattgtctggcttttactgcgtcagctgccgattcgcaccacgcgccattttccggcaatggctgccgtgcg

SEQ ID NO: 113450 - DNA, 75 bp, synthetic construct
  source 1..75: mol_type = other DNA
aacctgtcggtagcgattattttgtggatatcgctttttcttggcgacacgattctgcagctttttggtatttcg

SEQ ID NO: 113451 - DNA, 75 bp, synthetic construct
  source 1..75: mol_type = other DNA
gtgggtaggatcatttcactcagctatgagcaactgacccgaatagcggaaaaaaatatccgtcaatgtgggctg

SEQ ID NO: 113452 - DNA, 75 bp, synthetic construct
  source 1..75: mol_type = other DNA
tttgccgccgcgaaagatggctataccttcgtatctcaccagcaggaagtgggtacaggttacttcgataaagtg

SEQ ID NO: 113453 - DNA, 75 bp, synthetic construct
  source 1..75: mol_type = other DNA
tgattctggtactggcagtgttgctgctggcgcagcctgacctcggtacggtggtggtgttgtttgtgaccacgc

SEQ ID NO: 113454 - DNA, 75 bp, synthetic construct
  source 1..75: mol_type = other DNA
atgaatatcaaaatataaaaataatctaccgagcagatgtggatttcagcatgtatgataaaaaactatctgata

SEQ ID NO: 113455 - DNA, 75 bp, synthetic construct
  source 1..75: mol_type = other DNA
tgcgtatgcatcatgattttacccacgcgtacggcgacgaacagggctggcaggagtattgcgaatacctgcatc

SEQ ID NO: 113456 - DNA, 75 bp, synthetic construct
  source 1..75: mol_type = other DNA
actcaaagcacagtccgcagcagcaggttgctcaatgattcaggtgttaagcgcgaaggttcatcaactggcgga

SEQ ID NO: 113457 - DNA, 75 bp, synthetic construct
  source 1..75: mol_type = other DNA
ctgaattcaatacccctaacattgaactctcagcagttagccaaaagtactttggcatgagtccagccacggcag

SEQ ID NO: 113458 - DNA, 75 bp, synthetic construct
  source 1..75: mol_type = other DNA
ggaagcgcacactgactttattttcgccattatcggcgaagaactggggtatatcggtgtggtgctggcgctttt

SEQ ID NO: 113459 - DNA, 75 bp, synthetic construct
  source 1..75: mol_type = other DNA
attctggaaatggaaaacctggtgaaaatcatccgggcgtctctgcagggagcatatatcaccacgcagacggtg

SEQ ID NO: 113460 - DNA, 75 bp, synthetic construct
  source 1..75: mol_type = other DNA
ggggatgaataacaccaactacaacatggcggtctgtggcacctccggggccggtaaaaccgggctgatacagcc

SEQ ID NO: 113461 - DNA, 75 bp, synthetic construct
  source 1..75: mol_type = other DNA
tccccgttttttactgaagcatttcagtacgccgggaaagggtaagcggcagcgcttatacgcctttgacaaggc

SEQ ID NO: 113462 - DNA, 75 bp, synthetic construct
  source 1..75: mol_type = other DNA
ttacagaaaagcgtattcaaaattagatgacatcagagttgatgttaaatctccaaatggaacttatacgctagg

SEQ ID NO: 113463 - DNA, 75 bp, synthetic construct
  source 1..75: mol_type = other DNA
gaacgcctgaacgaagagtatttcttgcgtatgcatcatgattttacccacgcgtacggcgacgaacagggctgg

SEQ ID NO: 113464 - DNA, 75 bp, synthetic construct
  source 1..75: mol_type = other DNA
agccatgtttcggtgatgcggaaagtgctgctaagaatgaccagttggatgcattatctttatttggatcattga

SEQ ID NO: 113465 - DNA, 75 bp, synthetic construct
  source 1..75: mol_type = other DNA
ggaagacccgtttgagatccgtcttgaacgtctgaacgaagaatatttcttgcgtatgcatcatgattttaccca

SEQ ID NO: 113466 - DNA, 75 bp, synthetic construct
  source 1..75: mol_type = other DNA
aatatgcgccagggcgcgtcgtatgccattactaccatccttaactacatcattattgccgttggtgcgatgacg

SEQ ID NO: 113467 - DNA, 75 bp, synthetic construct
  source 1..75: mol_type = other DNA
cgcaattagtgaaaagagtcacggcagagaagaaatccgtcttcatattgtttgcgatgtccctgatgaacttat

SEQ ID NO: 113468 - DNA, 75 bp, synthetic construct
  source 1..75: mol_type = other DNA
ctttgatgtcgatctgttgctgcagaccctggagctgacagacggtatggatatgccggaccagtcacgggcgcg

SEQ ID NO: 113469 - DNA, 75 bp, synthetic construct
  source 1..75: mol_type = other DNA
taagctcgacccggtacgttatcaggcgcgagtcgacaggcttcaggctgacctgatgacggcgacgcataatat

SEQ ID NO: 113470 - DNA, 75 bp, synthetic construct
  source 1..75: mol_type = other DNA
ttcgtcatacctgctgtatcctcgcatggctggcgctaaattctttgccatcgagacaatcaatatgtcggctgc

SEQ ID NO: 113471 - DNA, 75 bp, synthetic construct
  source 1..75: mol_type = other DNA
cgcaaatgaatttgatatgtatttcattccagtaacaccggaagataaagccatcaaagaaagtatgaaaacggc

SEQ ID NO: 113472 - DNA, 75 bp, synthetic construct
  source 1..75: mol_type = other DNA
gatgcggtaagagctggatagccaatgcgctgggcgaacaggcatgtcgacagaaagtaagcgttaacggagcgc

SEQ ID NO: 113473 - DNA, 75 bp, synthetic construct
  source 1..75: mol_type = other DNA
caaaccgtattagtccagacagtgaagtagaagatgtgctggcgccggtgtttgagtttgtcaaagaaacgaaga

SEQ ID NO: 113474 - DNA, 75 bp, synthetic construct
  source 1..75: mol_type = other DNA
cgcaacgcgaagaaagagaaagaagggaataagccgccgaaatccgcacgccagattttccagtatctgcgcgaa

SEQ ID NO: 113475 - DNA, 75 bp, synthetic construct
  source 1..75: mol_type = other DNA
ttcatgcaggtgagcgtccgctggaatgggcatagagtttcttctccagcagagcttctcgacccagagaccaac

SEQ ID NO: 113476 - DNA, 75 bp, synthetic construct
  source 1..75: mol_type = other DNA
tacgggagaaaaacttccggcaggcagggaatcactgttctggctgaatgttcttgatattccggccaaaccttc

SEQ ID NO: 113477 - DNA, 75 bp, synthetic construct
  source 1..75: mol_type = other DNA
gaaacgcagcagaattattttcagggatacggcacattgctattactcttttgacgaatgagcaggtattcaagg

SEQ ID NO: 113478 - DNA, 75 bp, synthetic construct
  source 1..75: mol_type = other DNA
ataaagcgcgtcataacgaaccgtactatcctccggttgagccagcccgtccggttggcgacctgaaaacggctt

SEQ ID NO: 113479 - DNA, 75 bp, synthetic construct
  source 1..75: mol_type = other DNA
cgcaggatgctgatgtactgtgcggtcagactgttcgggcgggggaattacaggtcagacagacataatgcagga

SEQ ID NO: 113480 - DNA, 75 bp, synthetic construct
  source 1..75: mol_type = other DNA
gatgcctgtcatcaggtacgcagtattttagggatggcttttcgttaccggcaaattctgattaatcgtcataac

SEQ ID NO: 113481 - DNA, 75 bp, synthetic construct
  source 1..75: mol_type = other DNA
atggcgcgggcctggacggcacccggagcgatgctgtatccattattgcccgtgcaacggaagtgaatgccgcgc

SEQ ID NO: 113482 - DNA, 75 bp, synthetic construct
  source 1..75: mol_type = other DNA
gatgaacctgaagccaccgaggtggctgaacaggacgccgtgcaggtaaaagcgaaggtgaagaaagagaaacag

SEQ ID NO: 113483 - DNA, 75 bp, synthetic construct
  source 1..75: mol_type = other DNA
ggatagccccggcacaccggcactgacggcgggagactggccggtaatggaaaccgataccccgacgctgaaacg

SEQ ID NO: 113484 - DNA, 75 bp, synthetic construct
  source 1..75: mol_type = other DNA
agagcgcaatgcttgccgccatcggctttgatgccgatctgttgctgcagacactggagctgacagacggtctgg

SEQ ID NO: 113485 - DNA, 75 bp, synthetic construct
  source 1..75: mol_type = other DNA
caaactgactagtattttacctgtcgtgccaggcggttcgtatcaggcgcaaggggtattgcaatcattaacggt

SEQ ID NO: 113486 - DNA, 75 bp, synthetic construct
  source 1..75: mol_type = other DNA
ttaagacggatgagaaatccaatgagattacagccattcctgaacttcttaacatgctggatattaaaggaaaaa

SEQ ID NO: 113487 - DNA, 75 bp, synthetic construct
  source 1..75: mol_type = other DNA
atgatatcgatgccttacccgacggcatttacgcccaggtggcagtttactccgaccatttcagccatgtttcgg

SEQ ID NO: 113488 - DNA, 75 bp, synthetic construct
  source 1..75: mol_type = other DNA
accgctatcagcttgataaaaaagctgaaaaaatcgtttttcgcggtgagtgggcggaagtgatggagtgggtta

SEQ ID NO: 113489 - DNA, 75 bp, synthetic construct
  source 1..75: mol_type = other DNA
aaatggatgatccccagtcttccgatgtttatttcccgggcgggtcatattactgatgatgcaaagaagggatac

SEQ ID NO: 113490 - DNA, 75 bp, synthetic construct
  source 1..75: mol_type = other DNA
acgaacccatgccggaagtcttctttacggcgtttggtgccagcacgttggatcacgagctgcgcctttacgtgc

SEQ ID NO: 113491 - DNA, 75 bp, synthetic construct
  source 1..75: mol_type = other DNA
gactcggactattcagaaattactttcagaggttgaacaacaattagttcagttacctgcggttgcggttatttc

SEQ ID NO: 113492 - DNA, 75 bp, synthetic construct
  source 1..75: mol_type = other DNA
tcgcagcaactgcaacaaattcgcagtcggctggatggcactgacgttggtgaagccgcgttacgccccagccaa

SEQ ID NO: 113493 - DNA, 75 bp, synthetic construct
  source 1..75: mol_type = other DNA
cattatgtctgtccctcactgcatgtggtaatggtttaaataccggtaaaccaaattccggtgtcattccaaaac

SEQ ID NO: 113494 - DNA, 75 bp, synthetic construct
  source 1..75: mol_type = other DNA
cctgcgaagggcagcagacagaaactctccagcagaaacgtcccgagaaagatgcgcacatcgagtgggaacggg

SEQ ID NO: 113495 - DNA, 75 bp, synthetic construct
  source 1..75: mol_type = other DNA
accatgcagctcaacatcagcgaattgctatggtcgttcagcaaaaaactggcgattttctggctggtgtttggc

SEQ ID NO: 113496 - DNA, 75 bp, synthetic construct
  source 1..75: mol_type = other DNA
aattcacccgcggtgatatgctgaaggtctgtccgaaatttgtcacatcacttgccggtttttccccgaaacaga

SEQ ID NO: 113497 - DNA, 75 bp, synthetic construct
  source 1..75: mol_type = other DNA
acacaaaatgttgaagtgtttattcttcaagataaaaatagtccgactgaaaaagaaccgcatacgaatggcaac

SEQ ID NO: 113498 - DNA, 75 bp, synthetic construct
  source 1..75: mol_type = other DNA
tcgcatctctaataattgcgttaacactaacagggtgtaacgaatctgaaatagatgaattaacgttaataggca

SEQ ID NO: 113499 - DNA, 75 bp, synthetic construct
  source 1..75: mol_type = other DNA
gccagatgttatctctggagcctgaactcagtatatctggagatgaaaaagctcaaatgcgacatgagttactgg

SEQ ID NO: 113500 - DNA, 75 bp, synthetic construct
  source 1..75: mol_type = other DNA
gtaccgagggatataagtacgttggggatctggacaggtacagagaacgtgagattctggccgcggcatctttag

SEQ ID NO: 113501 - DNA, 75 bp, synthetic construct
  source 1..75: mol_type = other DNA
aactaagccaggaaagccccggcgacattctgatctttatgagcggcgagcgggaaattcgcgataccgccgatg

SEQ ID NO: 113502 - DNA, 75 bp, synthetic construct
  source 1..75: mol_type = other DNA
aaggtttgaacgtaatgcagaacctgttgaccgctcatccggatgttcaggctgtattcgcgcagaatgatgaaa

SEQ ID NO: 113503 - DNA, 75 bp, synthetic construct
  source 1..75: mol_type = other DNA
gaaagatgaatttaagtcgatgaaaatcacggtgaactgggaaaaagcctggcctgccgtttttatcgctttcct

SEQ ID NO: 113504 - DNA, 75 bp, synthetic construct
  source 1..75: mol_type = other DNA
attgcttccgataacgtactgggcggtaaaattgcgggcgattacatcgcgaaaaaagcaggtgaaggtgccaaa

SEQ ID NO: 113505 - DNA, 75 bp, synthetic construct
  source 1..75: mol_type = other DNA
atggcaagctaccattgcaccgttaaaaccggagcaaaaggcgcagccttaaaacatgctgattacatttccaga

SEQ ID NO: 113506 - DNA, 75 bp, synthetic construct
  source 1..75: mol_type = other DNA
attaaggaaagccaggatcttgctaatgctgttcaggcaaagagtatccagctaaatgttctctcgcaacagtgg

SEQ ID NO: 113507 - DNA, 75 bp, synthetic construct
  source 1..75: mol_type = other DNA
ctgaattgaaaaaaagcaccccaacaaaaaatgaggtgcttgcagcagatgaaatgaaagaaactattcttgatc

SEQ ID NO: 113508 - DNA, 75 bp, synthetic construct
  source 1..75: mol_type = other DNA
actggtacataactcacacagactgctccttcagggagagtctctgaggaaaaatcccccggtagtggaaagcat

SEQ ID NO: 113509 - DNA, 75 bp, synthetic construct
  source 1..75: mol_type = other DNA
tggcgctggggctttctgacattaaagcgcagatgggcgggctggtatatcgcggttttgtcactggtaacggct

SEQ ID NO: 113510 - DNA, 75 bp, synthetic construct
  source 1..75: mol_type = other DNA
ttgaagcgctggccagtggtgctgataaggatgcaattgtgcgggaggctcttcttcgtgattttaatactccac

SEQ ID NO: 113511 - DNA, 75 bp, synthetic construct
  source 1..75: mol_type = other DNA
cgctggaacaaaagcaggcaatgtggaacggtcttcgccgtctactgctgctaaatattccatcgccgatcaagt

SEQ ID NO: 113512 - DNA, 75 bp, synthetic construct
  source 1..75: mol_type = other DNA
aactcacacagactggtccttcagggagagtccctgaggaaaaatcccccggtagtggaaagcatcgaaaaaacg

SEQ ID NO: 113513 - DNA, 75 bp, synthetic construct
  source 1..75: mol_type = other DNA
ctccggtcgactggacagcaaaatcactgagccggtatggggtggcgttggagttatggagtgcattgctcccgc

SEQ ID NO: 113514 - DNA, 75 bp, synthetic construct
  source 1..75: mol_type = other DNA
cacggtggtggcgtatgacttatctgctcatatgctggatgtcgtggcacaagctgccgaagcccggcaactgaa

SEQ ID NO: 113515 - DNA, 75 bp, synthetic construct
  source 1..75: mol_type = other DNA
tgagaaaaaatgccggcctgaaataccaggcaacaccggaagggctgcgttatccggcctcaagaggtctgcggg

SEQ ID NO: 113516 - DNA, 75 bp, synthetic construct
  source 1..75: mol_type = other DNA
cagcgaaaaccggttcgttgcagggggtatataacctggcgggattcattaccacagcgagcgggcaacgaatgg

SEQ ID NO: 113517 - DNA, 75 bp, synthetic construct
  source 1..75: mol_type = other DNA
tgaggtgttcaatcctggctaccgtacatacgacaaagtgaccgtcacggttggtgctgacggtaatgccaccag

SEQ ID NO: 113518 - DNA, 75 bp, synthetic construct
  source 1..75: mol_type = other DNA
agcagacgggattcagggctgttgaggtggaagccggacaggcgccggaaatggtcaaaaaagccgttcactcca

SEQ ID NO: 113519 - DNA, 75 bp, synthetic construct
  source 1..75: mol_type = other DNA
tgaggaacgcgagttctcagatggttttcatagcaccaccaataaccgcatggagatgatgggggcacttatcgg

SEQ ID NO: 113520 - DNA, 75 bp, synthetic construct
  source 1..75: mol_type = other DNA
aagacgtgaaagagatccgttggatgatagaagagctgcgcgtcagctattttgcccaacaactcggtacacctt

SEQ ID NO: 113521 - DNA, 75 bp, synthetic construct
  source 1..75: mol_type = other DNA
tttcgttaacgtcaatttcaccctgccgaaagctgtctcttatacacaaatccccacccggggatttgtgatgtc

SEQ ID NO: 113522 - DNA, 75 bp, synthetic construct
  source 1..75: mol_type = other DNA
ttggctggattacctggatgcgctggaagtagtagacacctccagcgcgccaaacattaactggcctgatcctcc

SEQ ID NO: 113523 - DNA, 75 bp, synthetic construct
  source 1..75: mol_type = other DNA
cgcctctccatgcgacaggagcatcgtgctggcgaaaagctctttatcgacttctgtggtcctacggtccctgtt

SEQ ID NO: 113524 - DNA, 75 bp, synthetic construct
  source 1..75: mol_type = other DNA
cggaagcgatatcatgatgagcgatgctataccgtcaggaaaagccagctactccggctttacgttagtgctcga

SEQ ID NO: 113525 - DNA, 75 bp, synthetic construct
  source 1..75: mol_type = other DNA
gcggcaaaacttcctcgcgcaggatgcgctggtgaaaggttcggtggcggaacaggcgcaaatccagagccagct

SEQ ID NO: 113526 - DNA, 75 bp, synthetic construct
  source 1..75: mol_type = other DNA
gcaacttactgaagcaaaatataaccttgagcagactgtcattcgcgcgccgagcaatggctacgttactcaggt

SEQ ID NO: 113527 - DNA, 75 bp, synthetic construct
  source 1..75: mol_type = other DNA
atggatctgttgattgtcttaacttacgtggcgctggcgtgggcggtatttaaaatcttccgtattcccgtgaat

SEQ ID NO: 113528 - DNA, 75 bp, synthetic construct
  source 1..75: mol_type = other DNA
ctgttacgttgccctgcactataacgccccggacagacgctttatcgacaatctgctgcgtcatcatcgggataa

SEQ ID NO: 113529 - DNA, 75 bp, synthetic construct
  source 1..75: mol_type = other DNA
cccgaaatgacggtcagatattatatcagttctgctgatttaaccgcagagaagttcgccacagcaatccgaaac

SEQ ID NO: 113530 - DNA, 75 bp, synthetic construct
  source 1..75: mol_type = other DNA
acttttcttacatcatgtgaaagatcagcgcggtattgccgctctggtcgccttaatgtgcgcagtgggtgcggt

SEQ ID NO: 113531 - DNA, 75 bp, synthetic construct
  source 1..75: mol_type = other DNA
gattgataccgccgcttcatatcagaatgaaacccaggttgggaatgcgctaaaacaaagtggtattgcgcgtaa

SEQ ID NO: 113532 - DNA, 75 bp, synthetic construct
  source 1..75: mol_type = other DNA
aatgggggcgtccaactatacctatgttgaagcgtgcgaaggtcaggacatgatgtcatggttaaatgcccacag

SEQ ID NO: 113533 - DNA, 75 bp, synthetic construct
  source 1..75: mol_type = other DNA
aacgccgaaagcggtaaaggccgcttatgatcttgctaacgggaaatataccgcgcaggatgccaccacagcgcg

SEQ ID NO: 113534 - DNA, 75 bp, synthetic construct
  source 1..75: mol_type = other DNA
actggcgtctggacgtggtaatgaatgaagacgactgcaaaataagaagaggaaacgccgcagaattattttcag

SEQ ID NO: 113535 - DNA, 75 bp, synthetic construct
  source 1..75: mol_type = other DNA
gtgtggcatccagctggtcgaaagacagcgctggtgcggcggcgctggcgggggcgggagggtactttttgttta

SEQ ID NO: 113536 - DNA, 75 bp, synthetic construct
  source 1..75: mol_type = other DNA
tgaaacagaccggcatcgcccgtgatgaactgtttgtcaccaccaaactgtggctacaggatactaattatgaag

SEQ ID NO: 113537 - DNA, 75 bp, synthetic construct
  source 1..75: mol_type = other DNA
tttatggtaaagctgtaggcagtggcggaggtagtgaatgcagaagtgctgaaaaggatttttttaatatactga

SEQ ID NO: 113538 - DNA, 75 bp, synthetic construct
  source 1..75: mol_type = other DNA
gaccctcaaaaaacgtaaaggtttcctggggggctgcccgtcacttgatagcggcattcagaagaaattgctctc

SEQ ID NO: 113539 - DNA, 75 bp, synthetic construct
  source 1..75: mol_type = other DNA
tacaaaaacagggcggtgattatttattcgctgtaaaaggaaaccaggggcggcttaataaagcctttgaggaaa

SEQ ID NO: 113540 - DNA, 75 bp, synthetic construct
  source 1..75: mol_type = other DNA
ctgaaaaacgccagtgacagcgagcagtatgccgagtcaccgaccatccgcagccgtctggatgaaatgattgtg

SEQ ID NO: 113541 - DNA, 75 bp, synthetic construct
  source 1..75: mol_type = other DNA
tttttaaatcagtgttcaacggcagacccggctgcaatcttactgatcatgagtaagtttggtcgcgtcagaggt

SEQ ID NO: 113542 - DNA, 75 bp, synthetic construct
  source 1..75: mol_type = other DNA
gaaaaggatttttttaatattctgaaaaagaaaaaggaagcattcgctggagtaaaacttttgatgcccgtaaag

SEQ ID NO: 113543 - DNA, 75 bp, synthetic construct
  source 1..75: mol_type = other DNA
tactgcaaattaccgccctggataccgcaaccagcgcgttcttctctcaccgcaacccggcgatggtggaatggc

SEQ ID NO: 113544 - DNA, 75 bp, synthetic construct
  source 1..75: mol_type = other DNA
gatctaccaacgaggcatcgtttcgctggcgaaatcagtacgaaaagaacgcatggaagaaaacattaacattct

SEQ ID NO: 113545 - DNA, 75 bp, synthetic construct
  source 1..75: mol_type = other DNA
ggttaagacgtaagatgcgaaaagcagccatggacagaaactatctggcgtcagtccttgcggggagcgggcttt

SEQ ID NO: 113546 - DNA, 75 bp, synthetic construct
  source 1..75: mol_type = other DNA
tctggattttaacaatgggcgagggttttattgttctcactcaatattcggtattaatgccatttttagcggaaa

SEQ ID NO: 113547 - DNA, 75 bp, synthetic construct
  source 1..75: mol_type = other DNA
ggattgaaatgcccctgctgggctttggtgtgtttcagatgtctgatgccgctgaatgcgaaagagccgttattg

SEQ ID NO: 113548 - DNA, 75 bp, synthetic construct
  source 1..75: mol_type = other DNA
gtattgaaatgcccctgctgggctttggtgtctttcagatgacggatgctgctgaatgcgaaagagcggttattg

SEQ ID NO: 113549 - DNA, 75 bp, synthetic construct
  source 1..75: mol_type = other DNA
cggatgccagtcggctaccaatttgcagtgtgcttaaactgcaacctgacgaagacaggattggcgcaacgctcc

SEQ ID NO: 113550 - DNA, 75 bp, synthetic construct
  source 1..75: mol_type = other DNA
cgcataaagtgatcgatttgctacgccatgcaccgaaagatgacattatcgtcatgctgttatgtatgtcgttaa

SEQ ID NO: 113551 - DNA, 75 bp, synthetic construct
  source 1..75: mol_type = other DNA
tgtttcgatggttacagatgctgctggcatactggttactgacgctatggcgctgcttgatggattgaggaaagg

SEQ ID NO: 113552 - DNA, 75 bp, synthetic construct
  source 1..75: mol_type = other DNA
cttgattttgcgtcaacaattggtactgataaatctggtgtatcctccgatgtttcaatggtgacagatgccgcg

SEQ ID NO: 113553 - DNA, 75 bp, synthetic construct
  source 1..75: mol_type = other DNA
cgcttcattcacgaggaagtattggtaacactggtggtagtgaaactcgcccccgcaatattgcatttaactata

SEQ ID NO: 113554 - DNA, 75 bp, synthetic construct
  source 1..75: mol_type = other DNA
ctttccaccgggttggtttcactaatcagcatactaaccaccgacgaacaattcctgagttggggctggcgtatt

SEQ ID NO: 113555 - DNA, 75 bp, synthetic construct
  source 1..75: mol_type = other DNA
tggcggacacgttgccactatcggttcacaattccactacgtactggccgatggttcccagggtaacgggatccc

SEQ ID NO: 113556 - DNA, 75 bp, synthetic construct
  source 1..75: mol_type = other DNA
caccgctgctttcctggctgccgctttccgccatggctgccctgctgctgatggtggcgtggaacatgagtgaag

SEQ ID NO: 113557 - DNA, 75 bp, synthetic construct
  source 1..75: mol_type = other DNA
aatgtgggatgccggcctggtcatcggcagtctggtgccgccggtcgtctttggtatcgtattcggcaacttgtt

SEQ ID NO: 113558 - DNA, 75 bp, synthetic construct
  source 1..75: mol_type = other DNA
gggagcgattcatgtcattagtgcgttctcaacaatgcacagtctggtcatcgggcagatcaagacggataagaa

SEQ ID NO: 113559 - DNA, 75 bp, synthetic construct
  source 1..75: mol_type = other DNA
aacagcgttggcgcgcactgggaaggcaatcaggtctggttgatcctcgcaggtggggcattatttgccgcctgg

SEQ ID NO: 113560 - DNA, 75 bp, synthetic construct
  source 1..75: mol_type = other DNA
tatcgtttgcggcaggttctgcatccggtcataaggttgcggggggctttaatacttctgcactgggtagcgctc

SEQ ID NO: 113561 - DNA, 75 bp, synthetic construct
  source 1..75: mol_type = other DNA
taaattatttcagcagcacatcgttacgcttctggcagaacaatctcagcaaacatcggtcagggcagtagtcat

SEQ ID NO: 113562 - DNA, 75 bp, synthetic construct
  source 1..75: mol_type = other DNA
gcacagtctggttctcgggcagattaagacggatgagaaatccaatgagattacagccattcctgaacttcttaa

SEQ ID NO: 113563 - DNA, 75 bp, synthetic construct
  source 1..75: mol_type = other DNA
accgagaaacaactcgctatctttaataccttttgcgaaggcaaacctggtcaacgttccattgccgcgtcgggt

SEQ ID NO: 113564 - DNA, 75 bp, synthetic construct
  source 1..75: mol_type = other DNA
tcttcagcctttcattttttcttgccgcatgtagttcgattccgcaaaatattaaaggcaataatcaacctgata

SEQ ID NO: 113565 - DNA, 75 bp, synthetic construct
  source 1..75: mol_type = other DNA
gcctatttttctaagtatactttcgaaattgatttagtgctatcaggcgcggtaagatactttgatgcgatagcc

SEQ ID NO: 113566 - DNA, 75 bp, synthetic construct
  source 1..75: mol_type = other DNA
ggtattcaaggcagggttaagacgtaagatgcaaaaagcagccatggagagaaactatctggcgtcagtccttgc

SEQ ID NO: 113567 - DNA, 75 bp, synthetic construct
  source 1..75: mol_type = other DNA
acgccgcagaatgatgcaatggtggtctaattatctggaactaaataaggacgaattccatgctccttatgactt

SEQ ID NO: 113568 - DNA, 75 bp, synthetic construct
  source 1..75: mol_type = other DNA
acatagatgcagctttggacatatttaaagcacattaccctaacgatcctttaactactttgcttgaggttcatc

SEQ ID NO: 113569 - DNA, 75 bp, synthetic construct
  source 1..75: mol_type = other DNA
gccactgattgttgtcgcaattctttcactgctgatggcgatttttggactttgcgccggaagagacaaagaaat

SEQ ID NO: 113570 - DNA, 75 bp, synthetic construct
  source 1..75: mol_type = other DNA
acacgccgttccgtggatgcaaagccgtggtattcagccagaagcctgggcaccgtttgcagttacagggcggta

SEQ ID NO: 113571 - DNA, 75 bp, synthetic construct
  source 1..75: mol_type = other DNA
cgtgctgatatttttgcccattgtgttgctctacactctctggagctactacaaaatgtggggacgcatgacgac

SEQ ID NO: 113572 - DNA, 75 bp, synthetic construct
  source 1..75: mol_type = other DNA
aatgtgggacaccggtctggtgattggcagcctggtgccgcccgtcgtctttggtattgcattcggcaacttgtt

SEQ ID NO: 113573 - DNA, 75 bp, synthetic construct
  source 1..75: mol_type = other DNA
ccaacgggctggctgaaatgtaacggcgcagcattttcttctgaaatgtaccccaggctggcaaaggcttatccg

SEQ ID NO: 113574 - DNA, 75 bp, synthetic construct
  source 1..75: mol_type = other DNA
catcagacaggtttacgttactatcaggcatatcgcctcagaatcagatgaaaactataaagaaatatctattat

SEQ ID NO: 113575 - DNA, 75 bp, synthetic construct
  source 1..75: mol_type = other DNA
atggagataataagcctgattatttatctcaagatgattataataaagctgtgaactcagcagagtctggtgtcg

SEQ ID NO: 113576 - DNA, 75 bp, synthetic construct
  source 1..75: mol_type = other DNA
tcggacagatcaagacggatgagaaatctaatgagattacagctatcactgagcttcttaacatgttggatatta

SEQ ID NO: 113577 - DNA, 75 bp, synthetic construct
  source 1..75: mol_type = other DNA
aatatcaaaaattgatagctatacagggaggccgttaactaagctggcagtattattttctcttcatacttttgt

SEQ ID NO: 113578 - DNA, 75 bp, synthetic construct
  source 1..75: mol_type = other DNA
tttggtatagagcgcagcctggtggcagcattacttttgatttgtgctggcatagcaattcgctctcttccttcg

SEQ ID NO: 113579 - DNA, 75 bp, synthetic construct
  source 1..75: mol_type = other DNA
ggcacgggacctgatgccactcattctcgcctggccgcaggaaggaaaatccgcccgtgccgtcagtgggttgaa

SEQ ID NO: 113580 - DNA, 75 bp, synthetic construct
  source 1..75: mol_type = other DNA
gcggtaacgatcgtccgcaaaacaaccgcccggcagcaaaaccgcgtggccgtgaaacgcagcctgccggtaaca

SEQ ID NO: 113581 - DNA, 75 bp, synthetic construct
  source 1..75: mol_type = other DNA
tatttacaggttccgtctatcgactggagcgattccggctacgtccaacatttcatcaacgtgatcgagaagatg

SEQ ID NO: 113582 - DNA, 75 bp, synthetic construct
  source 1..75: mol_type = other DNA
ggaatgcaaacagtagatataacgctggtggctggcccggcagacacctcgcagtccgtccttaagaacaatcgg

SEQ ID NO: 113583 - DNA, 75 bp, synthetic construct
  source 1..75: mol_type = other DNA
gtgatttaatcgaatacgtaaatacagtcaaagaactaaaaaatcacattccaatagaagaatacagaaatgaat

SEQ ID NO: 113584 - DNA, 75 bp, synthetic construct
  source 1..75: mol_type = other DNA
cgggtctgcgtaccggggtaaaagtagcggtagtcgatgcgaccggtaaactggtggcaaccgacaccatttatc

SEQ ID NO: 113585 - DNA, 75 bp, synthetic construct
  source 1..75: mol_type = other DNA
cgtgaaaggagcgataacggggagcgtcactgtaagcacagtcacaagcgcaggtggaatgcaaacagtagatat

SEQ ID NO: 113586 - DNA, 75 bp, synthetic construct
  source 1..75: mol_type = other DNA
taccgatagtgctgagctacatcttgttctgcacgatatatcaggcaatccgatcaaagtttctgaagggatgga

SEQ ID NO: 113587 - DNA, 75 bp, synthetic construct
  source 1..75: mol_type = other DNA
tcattagtgcgttctcaacaatgcacagtctggtcatcggacagatcaggacggatgagaaatctaatgagatta

SEQ ID NO: 113588 - DNA, 75 bp, synthetic construct
  source 1..75: mol_type = other DNA
gctgtgaaattattggtcgggcagcgtcaaaacataaagagctggttgttgttgaaggttattctcattacgacc

SEQ ID NO: 113589 - DNA, 75 bp, synthetic construct
  source 1..75: mol_type = other DNA
tcaggtgtcagtggaccatcattttccacactgaaaaaatttgcccgcgcaacaggaaaaaaactccagatccgc

SEQ ID NO: 113590 - DNA, 75 bp, synthetic construct
  source 1..75: mol_type = other DNA
cctgaaaagttgagcatattaatcgcggatgatcatccgaccaacaggctattactcaaacgccagctaaatcta

SEQ ID NO: 113591 - DNA, 75 bp, synthetic construct
  source 1..75: mol_type = other DNA
aaggcagggttaagacgtaagatgcgaaaagcagccatgggcagaaactacctggcgtcagtccttacggggagc

SEQ ID NO: 113592 - DNA, 75 bp, synthetic construct
  source 1..75: mol_type = other DNA
tttcatcaacgtgatcgagaggatgttgacccgctaataaatgatgcgttgatttatataagagatgagtgtatt

SEQ ID NO: 113593 - DNA, 75 bp, synthetic construct
  source 1..75: mol_type = other DNA
gatgagcgaaaattacgaggtgaatcacctgaaactgtaatagcaatttttaatcgtgaactacagaatatattc

SEQ ID NO: 113594 - DNA, 75 bp, synthetic construct
  source 1..75: mol_type = other DNA
aacagagtcttgaccaactatctcgtatttcgtcagagttcgaaccatcaagccagaagcgcaggaaaatgtcta

SEQ ID NO: 113595 - DNA, 75 bp, synthetic construct
  source 1..75: mol_type = other DNA
aaaattacgaacaaaccaaagcgctcattgatgccgatcagcagcgcctcagaaaactcatctgggcagagacgg

SEQ ID NO: 113596 - DNA, 75 bp, synthetic construct
  source 1..75: mol_type = other DNA
ggtctgagggcattagcgcgtaacgatttttcgcaagcgctggcaatccgaccggatatgcctgaagtattcaat

SEQ ID NO: 113597 - DNA, 75 bp, synthetic construct
  source 1..75: mol_type = other DNA
ggcgaaaattaatcagattatttttgaagaactgtgtctggggcaatttaccgaagcgtcacgcgcttattatgc

SEQ ID NO: 113598 - DNA, 75 bp, synthetic construct
  source 1..75: mol_type = other DNA
tgacagttacgcaattagtgaaaagagtcacggcagagaagaaacccgtcttcatattgtttgcgatgtccctga

SEQ ID NO: 113599 - DNA, 75 bp, synthetic construct
  source 1..75: mol_type = other DNA
cgttcacccggaagcctatccggtggtggaacgcattctggcggcaacgcaacaggcgctgaaagatctgatggg

SEQ ID NO: 113600 - DNA, 75 bp, synthetic construct
  source 1..75: mol_type = other DNA
atggatgaagaaagggtgttttcactcagctatgaacaactaacccagtttgcggaacgacgcatccgggaatgt

SEQ ID NO: 113601 - DNA, 75 bp, synthetic construct
  source 1..75: mol_type = other DNA
ggccgacaatacattgtttccctggaaaacggggcgcatggctctgttcaaacatctgaatattttcatgtggca

SEQ ID NO: 113602 - DNA, 75 bp, synthetic construct
  source 1..75: mol_type = other DNA
tcctggtaaatatgttgttgtcaatgatcgtactggtgaggttactcagattagtgataagacagatccgggttg

SEQ ID NO: 113603 - DNA, 75 bp, synthetic construct
  source 1..75: mol_type = other DNA
cgaatcctcttatattcttttagatgcgaagtatcactcaacagatgggtgtacctcctttacacttactgattg

SEQ ID NO: 113604 - DNA, 75 bp, synthetic construct
  source 1..75: mol_type = other DNA
ctgttggcgaaagtgcgtgattatctgtggaagaacgcacatctggtctcaaccgtagtgagcggtaaagaagag

SEQ ID NO: 113605 - DNA, 75 bp, synthetic construct
  source 1..75: mol_type = other DNA
ccgcccggcagccaaaccgcgtgggcgtgaagcgcagcctgccggtaacagcgcgatgatggacgcgctggcggc

SEQ ID NO: 113606 - DNA, 75 bp, synthetic construct
  source 1..75: mol_type = other DNA
agattatttttgaagaactgtgtcttgggcaatttagcgaaacatcacgcgcttattatgcgcaagtgattgctc

SEQ ID NO: 113607 - DNA, 75 bp, synthetic construct
  source 1..75: mol_type = other DNA
aatttccgctgaaagaattaaataatcccaagcatgacagttgtagattcaatctgtcaatgcaacacccctttc

SEQ ID NO: 113608 - DNA, 75 bp, synthetic construct
  source 1..75: mol_type = other DNA
atgaccaataaattatttgaacatacggtgttatatgatagtggtgatgccttttttgaattaaaaggaaatgct

SEQ ID NO: 113609 - DNA, 75 bp, synthetic construct
  source 1..75: mol_type = other DNA
agagaagttcgccacagcaatccgaaaccactggcacgtggagaataagctgcactggcgtctggacgtggtagt

SEQ ID NO: 113610 - DNA, 75 bp, synthetic construct
  source 1..75: mol_type = other DNA
cccttgtatttaatgaacagaaactttatagcttgataggtttttcacgacaaagtattcagactctgatgatgt

SEQ ID NO: 113611 - DNA, 75 bp, synthetic construct
  source 1..75: mol_type = other DNA
agattaattagtcaggattatgatatctttttaacggataatccgtctaatcttactgcctctggcttgctttta

SEQ ID NO: 113612 - DNA, 75 bp, synthetic construct
  source 1..75: mol_type = other DNA
gttaaacgttatcatgctaaactgagcgaacggttttacttcgcttgccacaggaggatatgtgccagacattcg

SEQ ID NO: 113613 - DNA, 75 bp, synthetic construct
  source 1..75: mol_type = other DNA
atatcagttctgctgatttaaccgcagaaaagttcgccacagcaatccgaaaccactggcacgtggagaataagc

SEQ ID NO: 113614 - DNA, 75 bp, synthetic construct
  source 1..75: mol_type = other DNA
atgctggaagctcacaccctgccgctgacggaatcgatccggtacgggcagcggtattgtgtgatacgcaacata

SEQ ID NO: 113615 - DNA, 75 bp, synthetic construct
  source 1..75: mol_type = other DNA
acagggaggtgattatttattcgctgtaaaaggaaaccaggggcggcttaataaagcctttgaggaaaaatttcc

SEQ ID NO: 113616 - DNA, 75 bp, synthetic construct
  source 1..75: mol_type = other DNA
gtacaaattaaccatccgctggtcatccgtaccttgctgttagtagccgataaaaacaaacccagcctgcagcgt

SEQ ID NO: 113617 - DNA, 75 bp, synthetic construct
  source 1..75: mol_type = other DNA
gacctaaaatttactcgtttgcggtgtactggatgatcctgacgctggggccgctgctggcgggggccagtctgg

SEQ ID NO: 113618 - DNA, 75 bp, synthetic construct
  source 1..75: mol_type = other DNA
cgtggcattcagccagaagcctgggcaccgtttgcggaagggaaaaatggtctgttccagcatcctgttctcacg

SEQ ID NO: 113619 - DNA, 75 bp, synthetic construct
  source 1..75: mol_type = other DNA
ttttccaagaaagaatgcaagatattaatgaatacttctcattcattcagttactaataaacaaaaaaccatctc

SEQ ID NO: 113620 - DNA, 75 bp, synthetic construct
  source 1..75: mol_type = other DNA
tgaagaaattatgcgtggcagtctcctttcggtcaataatagcagaacaaaagaaagagccagaaatgacggtca

SEQ ID NO: 113621 - DNA, 75 bp, synthetic construct
  source 1..75: mol_type = other DNA
caactggcacgtaaactgggcggtcatttaaacatcaaaacgcgggatgggcttggtacacgctactctgtgcat

SEQ ID NO: 113622 - DNA, 75 bp, synthetic construct
  source 1..75: mol_type = other DNA
tatgtgaaacgctggaacatctgattcgtgagaaggatgttccaggaatagaaaaatacatcagcgacattgaca

SEQ ID NO: 113623 - DNA, 75 bp, synthetic construct
  source 1..75: mol_type = other DNA
atgctaaaaaccattcaggacaaagccaggcaccgtacccgtccactatgggcctggctaaaactactctggcaa

SEQ ID NO: 113624 - DNA, 75 bp, synthetic construct
  source 1..75: mol_type = other DNA
gaccttgtcagaaccggcgcgtttctggtggcgatgtccctgtggcataaccatccacagaaaacggagtcaccg

SEQ ID NO: 113625 - DNA, 75 bp, synthetic construct
  source 1..75: mol_type = other DNA
tagagcaggaagtgctcaccacctggcctgcgatgccattgcccgggcggaagacgtggtgttgtgcctgtccgg

SEQ ID NO: 113626 - DNA, 75 bp, synthetic construct
  source 1..75: mol_type = other DNA
gatatggccggcggacaccgttttcgccagtctgcgggagaacgtttacgttaccgtgcacttcataaagtcaat

SEQ ID NO: 113627 - DNA, 75 bp, synthetic construct
  source 1..75: mol_type = other DNA
aatgccatgtcgcggctggattatatgtatttatcaaacggaaataattctgattacagttatcagcgattgcgt

SEQ ID NO: 113628 - DNA, 75 bp, synthetic construct
  source 1..75: mol_type = other DNA
gaccttgtcagaaccggggcgtttctggtggcgatgtccctgtggcataaccatccacagaaaacgcagtcaccg

SEQ ID NO: 113629 - DNA, 75 bp, synthetic construct
  source 1..75: mol_type = other DNA
ggaaatgcagcagaattattttcagggatacggcacattgctattaatattttgacgaatgataaggtattcaag

SEQ ID NO: 113630 - DNA, 75 bp, synthetic construct
  source 1..75: mol_type = other DNA
gcacagtctggtcatcggacagatcaagacggatgagaaatctaatgagattacagctatcccagaacttcttaa

SEQ ID NO: 113631 - DNA, 75 bp, synthetic construct
  source 1..75: mol_type = other DNA
tgacggtcagcaaggattacttcctgcaacgtatgactccaacctacgcttcctcgaacggtcgcctggatatct

SEQ ID NO: 113632 - DNA, 75 bp, synthetic construct
  source 1..75: mol_type = other DNA
cagataacgcgcaactggaactgaaatataaaaaaggcaaaacaccactcagccatcgcaattggccgggggaac

SEQ ID NO: 113633 - DNA, 75 bp, synthetic construct
  source 1..75: mol_type = other DNA
aatctttgcccgggcttgtgatattaacgccatgtcccgtctggattttatgtacttatcaaatgggaataattc

SEQ ID NO: 113634 - DNA, 75 bp, synthetic construct
  source 1..75: mol_type = other DNA
ggtggttacggcaacattttccaggatgagcgtgacgtgaaattcatggtaatcgcaccattcaccatcttctga

SEQ ID NO: 113635 - DNA, 75 bp, synthetic construct
  source 1..75: mol_type = other DNA
tttctggtggcgatgtccctgtggcataaccatccacagaaaacggcgtcaccgtcaatgaatgaggccgtgatg

SEQ ID NO: 113636 - DNA, 75 bp, synthetic construct
  source 1..75: mol_type = other DNA
atatttggtattgcttgaatgatgaatcatattataaagataagtttttagaatgtactggtttacatttggaaa

SEQ ID NO: 113637 - DNA, 75 bp, synthetic construct
  source 1..75: mol_type = other DNA
atcacaactgatgcgatgggatgccagaaagatattgcagagaagatacaaaaacagggcggtgattatttattc

SEQ ID NO: 113638 - DNA, 75 bp, synthetic construct
  source 1..75: mol_type = other DNA
ctgggggcgatgatcgctatagagctgtttgaaggtggcgatcacagtaaaccggacgccaaactcaccgccgag

SEQ ID NO: 113639 - DNA, 75 bp, synthetic construct
  source 1..75: mol_type = other DNA
tggcagactttagtggcgaatggggctggctgctggtgttgttcggctttctgctgacgatagccaataagttgc

SEQ ID NO: 113640 - DNA, 75 bp, synthetic construct
  source 1..75: mol_type = other DNA
atataaaccaaccgggaaaaaagtacgtatttctctgatgatgctgctgactattgaaggcggtaaaattaagga

SEQ ID NO: 113641 - DNA, 75 bp, synthetic construct
  source 1..75: mol_type = other DNA
ctctgtttgcaattagtgagaacaggagaggcctccggctcgctggatctcatgttagacaacctcgcccatcat

SEQ ID NO: 113642 - DNA, 75 bp, synthetic construct
  source 1..75: mol_type = other DNA
ggaattatcggcacgctggtggtggcaatgtatttgccaatttttcatctgggcgacgcgatgagtgggatggga

SEQ ID NO: 113643 - DNA, 75 bp, synthetic construct
  source 1..75: mol_type = other DNA
ggtagcggcgaaccattgatactggatgatgattctcatgtgccaccggaattacgtgcgggggagaggtatccg

SEQ ID NO: 113644 - DNA, 75 bp, synthetic construct
  source 1..75: mol_type = other DNA
actttgactttaacgcctccggtgatttccaagctggacgcaatggtaactttaacgatgtttatattcgttctg

SEQ ID NO: 113645 - DNA, 75 bp, synthetic construct
  source 1..75: mol_type = other DNA
tctgaaactgccacacttgatggattccggggcttcagcatgaagcctgaagttcttatcagtgaagcggataaa

SEQ ID NO: 113646 - DNA, 75 bp, synthetic construct
  source 1..75: mol_type = other DNA
ctgggtggacggcgataacgctttccatcagcccggtcgggtttcctttgtggtcagccctgcggactgggttct

SEQ ID NO: 113647 - DNA, 75 bp, synthetic construct
  source 1..75: mol_type = other DNA
atgaaacgtgaagagatttgccgcctgctgacggacaaaattaataatctgaaaaataaagaaaatagtttgtct

SEQ ID NO: 113648 - DNA, 75 bp, synthetic construct
  source 1..75: mol_type = other DNA
aaaactggcgtgattaatattaatgtcgataccggccaggcgttttataacgacggtacagggacaatcctgaat

SEQ ID NO: 113649 - DNA, 75 bp, synthetic construct
  source 1..75: mol_type = other DNA
ccagaccgtgcgttgtgataatcccggctctgtacatcctctgcgcagccaggatcgcatagccaccgtctggat

SEQ ID NO: 113650 - DNA, 75 bp, synthetic construct
  source 1..75: mol_type = other DNA
atcccgattatgggttcactgatgcggggacaaaaactcacgcagatttttacgattctggcgctgacacaaagt

SEQ ID NO: 113651 - DNA, 75 bp, synthetic construct
  source 1..75: mol_type = other DNA
aaacaggcgggaaagccggctgcgggcgggctgccttccctggttaatcttcctgccgcctctgcggcggcggtt

SEQ ID NO: 113652 - DNA, 75 bp, synthetic construct
  source 1..75: mol_type = other DNA
cgaaggtgcattagttcttgaaagagatagccgtgctgcccgttttagcaacaatgtattcttagaaaaaggact

SEQ ID NO: 113653 - DNA, 75 bp, synthetic construct
  source 1..75: mol_type = other DNA
ctaaagcagaagttgataagatgtttgttaaaaacgtcgttatgtctgttcctaattctagcgaaaacgtatctg

SEQ ID NO: 113654 - DNA, 75 bp, synthetic construct
  source 1..75: mol_type = other DNA
ctgatggaagatacagcaaacttttgaccaggctgaataatagcgatctgctgcttctggatgactgggggctgg

SEQ ID NO: 113655 - DNA, 75 bp, synthetic construct
  source 1..75: mol_type = other DNA
aaactgaatgcctggctggatagtccggaaatacgccaattctgcaaacttgagagcgaagatgcgatgtggttg

SEQ ID NO: 113656 - DNA, 75 bp, synthetic construct
  source 1..75: mol_type = other DNA
tgacacagtgctgatggcggggagtgagttcaccgctggtgagcatcagttcaagctgtttgagcagcagtggaa

SEQ ID NO: 113657 - DNA, 60 bp, synthetic construct
  source 1..60: mol_type = other DNA
atgaaacattcatttgaagtaaaacttgccgctgtaaatcattacctggctggtcatgca

SEQ ID NO: 113658 - DNA, 75 bp, synthetic construct
  source 1..75: mol_type = other DNA
cgctcccggaggtgggcgacagcgacaggtcgatgtcctgtctggccttggtgccatgtctgacaaattcggtaa

SEQ ID NO: 113659 - DNA, 75 bp, synthetic construct
  source 1..75: mol_type = other DNA
acgttctttggccccgatcgtcacttcgaagatttctggcaacagccagccgctcccggaggtgggcgacagcga

SEQ ID NO: 113660 - DNA, 75 bp, synthetic construct
  source 1..75: mol_type = other DNA
ggaagtggcgcagtggctgcaggcctgtcacaatgcaggaatggaagttcgtgtgcaggttaatgaaagcgtcgc

SEQ ID NO: 113661 - DNA, 75 bp, synthetic construct
  source 1..75: mol_type = other DNA
ccacgccggaggtgccgttggcaggcttgcgtcttaatgtcgatatgttgcagttacaggaattgttgatggaca

SEQ ID NO: 113662 - DNA, 75 bp, synthetic construct
  source 1..75: mol_type = other DNA
ggcgttatgaagtggatatcagaccccgcgggcgtgaaggacgtcgcatccgccggaaatttgaaagaaaagctg

SEQ ID NO: 113663 - DNA, 75 bp, synthetic construct
  source 1..75: mol_type = other DNA
ctgatatacctcccaatcaggcaacccacattctgcggcatacattcgcaagccatttcatgatgaatgggggca

SEQ ID NO: 113664 - DNA, 75 bp, synthetic construct
  source 1..75: mol_type = other DNA
ctggatgtgcggttacttgatcactttattgtggcaggaactgaaacggtgtcgatggctgaacgggggctgatg

SEQ ID NO: 113665 - DNA, 75 bp, synthetic construct
  source 1..75: mol_type = other DNA
cgaaaaatctttgccctgaaatcaaaggctcaggagtttgagaagtatgtgttacagaactttcatgacaagcca

SEQ ID NO: 113666 - DNA, 75 bp, synthetic construct
  source 1..75: mol_type = other DNA
attatcggtacgctggtggtggcaatgtatctgccaattttccatttaggcgatgcgatgagtgggatgggataa

SEQ ID NO: 113667 - DNA, 75 bp, synthetic construct
  source 1..75: mol_type = other DNA
gctggcaccgcttgaacatgaagagtttggcatcatcctgctcgataatcagaatcagctgctgcacaaggaaat

SEQ ID NO: 113668 - DNA, 75 bp, synthetic construct
  source 1..75: mol_type = other DNA
ggaaatggacgccaaatataaagcccagatcgaagcattacagaaagaaattgccgaactgaaagcaactaaata

SEQ ID NO: 113669 - DNA, 75 bp, synthetic construct
  source 1..75: mol_type = other DNA
gtcgttatcggatcctttcagtggctgtataagatcagacccaccagtgataatacggtactggcgtggtcagta

SEQ ID NO: 113670 - DNA, 75 bp, synthetic construct
  source 1..75: mol_type = other DNA
acgccgtaaagagatggaaaagcgcgccaccgaactgatggcatcttacggtttctccctcgacgtgcgcgaacc

SEQ ID NO: 113671 - DNA, 75 bp, synthetic construct
  source 1..75: mol_type = other DNA
ggctcttttcttcgacgaaagcgaagtcaaaccggtaaagccgaaacctgatgatgaagaacacctgtccccgct

SEQ ID NO: 113672 - DNA, 75 bp, synthetic construct
  source 1..75: mol_type = other DNA
ttaacaaggaagaattacaggacggcgcattagagaaagtaaactcactgaaagtctacacctacgataaagtta

SEQ ID NO: 113673 - DNA, 75 bp, synthetic construct
  source 1..75: mol_type = other DNA
ttttatatctggcacaatggccccgatagttatcggatcctttcagtggctgtataaaatcagactcaccagtga

SEQ ID NO: 113674 - DNA, 75 bp, synthetic construct
  source 1..75: mol_type = other DNA
atgccaaatttaaaatggtttaccgggttatggatccggatacagcagactggatagcgagaatgtcaggaacga

SEQ ID NO: 113675 - DNA, 75 bp, synthetic construct
  source 1..75: mol_type = other DNA
taattggtatcaaggggaatggccgtgagacgacaattaataacgcacaaagcggtgtaattaacgtttacgcag

SEQ ID NO: 113676 - DNA, 75 bp, synthetic construct
  source 1..75: mol_type = other DNA
cgataaaaatgtctattttgtgcccagcccaactttttttaaagtggcggatcagcataaacaaatcttacgcat

SEQ ID NO: 113677 - DNA, 75 bp, synthetic construct
  source 1..75: mol_type = other DNA
aatgtatcacgaaggggataaaccgactcctgctgaaattggcgcatataccaaaggcgaaattgataagatgtt

SEQ ID NO: 113678 - DNA, 75 bp, synthetic construct
  source 1..75: mol_type = other DNA
accattagtgcagcagcgaatgtctataaccgtgcatcgggtagcattattaccgacctgttaatgttaacgagt

SEQ ID NO: 113679 - DNA, 75 bp, synthetic construct
  source 1..75: mol_type = other DNA
acaccactgttagtaacttaacccagacagttacggcaaataaaaccgatgccgacactaagatcaataacctta

SEQ ID NO: 113680 - DNA, 75 bp, synthetic construct
  source 1..75: mol_type = other DNA
ttagcaacttaactaaaactgttactgcaaataaaaccgatgcagataacaaaatttctagcttaactagcacgg

SEQ ID NO: 113681 - DNA, 75 bp, synthetic construct
  source 1..75: mol_type = other DNA
caccccctactactttgcaataatcagtgttaaacaaaatggaacagccataaaagttagcgaggatattaaaga

SEQ ID NO: 113682 - DNA, 75 bp, synthetic construct
  source 1..75: mol_type = other DNA
taacgctcttgttcgtctccatgttcatgatactaactttgactttaacgctgctggtgactttaccgcaggtcg

SEQ ID NO: 113683 - DNA, 75 bp, synthetic construct
  source 1..75: mol_type = other DNA
aacgcactggcaataagcacatctggtttagagatccaaacggcttagagttaggcttgatgtactgcgatgatg

SEQ ID NO: 113684 - DNA, 75 bp, synthetic construct
  source 1..75: mol_type = other DNA
gcggataagatgattcatcttgaatctggtagcgtcggcgggtctgataaaggtttgattcgtggtaacgtttct

SEQ ID NO: 113685 - DNA, 75 bp, synthetic construct
  source 1..75: mol_type = other DNA
tatattcggcaccatatcaccgctaactattcaggggttgagctacttttttaagtcactcgacaacaacatact

SEQ ID NO: 113686 - DNA, 75 bp, synthetic construct
  source 1..75: mol_type = other DNA
aagaaattgctttagttaactcaattaatgccaaaaatggattttcattaaaagaggtttttgatgaaggtggtt

SEQ ID NO: 113687 - DNA, 75 bp, synthetic construct
  source 1..75: mol_type = other DNA
gggattatcggcacactgatggtggcaatgtatttgccaattttccatttaggcgacgcaatgagtgggatgggg

SEQ ID NO: 113688 - DNA, 75 bp, synthetic construct
  source 1..75: mol_type = other DNA
aattaaaccttccgttggtgttatcggtggtcgcaacgtaactctttttaacacagaaaataaacgtggtgtgtt

SEQ ID NO: 113689 - DNA, 75 bp, synthetic construct
  source 1..75: mol_type = other DNA
accaacgccatatctggcacccgtacacatccatgacctccccactaccggtttatccagtggcgagcgcagaag

SEQ ID NO: 113690 - DNA, 75 bp, synthetic construct
  source 1..75: mol_type = other DNA
cactgtcgccgatagtgaacgggatgctggcactgctcgcttttgtgcaacagcaacaactgatgctggcgttat

SEQ ID NO: 113691 - DNA, 75 bp, synthetic construct
  source 1..75: mol_type = other DNA
aactggtgctgatatttcgtttaaacgcgctggcaataagcacatctggtttagagatccaaacggtttagagtt

SEQ ID NO: 113692 - DNA, 75 bp, synthetic construct
  source 1..75: mol_type = other DNA
gattgctgacgaaatagccaccggatttggtcgtactggtaaactgtttgcctgcgaacatgcagatatcgcgcc

SEQ ID NO: 113693 - DNA, 75 bp, synthetic construct
  source 1..75: mol_type = other DNA
tagcggggctgacgatgccgttttttacgtcgatgaaaagcgatgaacggcagaaatccccgttatggaaaaggt

SEQ ID NO: 113694 - DNA, 75 bp, synthetic construct
  source 1..75: mol_type = other DNA
atgttcatgactctggttttgactttaacgcctccggtgattttaccgcaggtcgtaacggttcgtttaacgatg

SEQ ID NO: 113695 - DNA, 75 bp, synthetic construct
  source 1..75: mol_type = other DNA
tttacattcgttcggaccgtcgtctgaaagttaatctggaagaattaaaagatgatgctttagagaaagtaaact

SEQ ID NO: 113696 - DNA, 75 bp, synthetic construct
  source 1..75: mol_type = other DNA
ccgcgactatttccgtttgagtcattggggcgatagcaataacgctcgtgataacgttatacagcttgaagatag

SEQ ID NO: 113697 - DNA, 75 bp, synthetic construct
  source 1..75: mol_type = other DNA
aaatttacgcaaacaataggtgcttgccgctcttttcatggtgctattagcacaggtgcaggaaactggacgacg

SEQ ID NO: 113698 - DNA, 75 bp, synthetic construct
  source 1..75: mol_type = other DNA
tgctgaagcaatctgcgaagcggtaacccgtccgaatatgcgttttgttcagataaaaaccgaagagcagcaggc

SEQ ID NO: 113699 - DNA, 75 bp, synthetic construct
  source 1..75: mol_type = other DNA
ccagttcacaatttgcgaaagattgtgatgatattgtagcgcgcgcttttgctgcgggagttgatggactactca

SEQ ID NO: 113700 - DNA, 75 bp, synthetic construct
  source 1..75: mol_type = other DNA
aagagatgcaggcatgtgtggcgcgaggcatttatattggcattactggttgggtttgcgatgaacgacgcggac

SEQ ID NO: 113701 - DNA, 75 bp, synthetic construct
  source 1..75: mol_type = other DNA
cacgccgaatcggaagatcgtccgcagcatccatgaggctgcccgcgacgtggctcgacgcatcgccaagacacc

SEQ ID NO: 113702 - DNA, 75 bp, synthetic construct
  source 1..75: mol_type = other DNA
gttgcaattagaattgaatggctgggcatcattcaatgctaaccaattaaccactttagatccattcggaaatta

SEQ ID NO: 113703 - DNA, 75 bp, synthetic construct
  source 1..75: mol_type = other DNA
atcagtgatatgacgggcacccgcccctttattgtgatgccggaaggaaagaccggcggcattggcctgccagtc

SEQ ID NO: 113704 - DNA, 75 bp, synthetic construct
  source 1..75: mol_type = other DNA
gtcaaggatgaagtatggctacgggctgccagcatggcggagggttactggcggaacggacaactggtgccgctg

SEQ ID NO: 113705 - DNA, 75 bp, synthetic construct
  source 1..75: mol_type = other DNA
tatgggacatctgcgacaaaaactggaacaggatccggcccggcctcgccacttcattactgaaaccggtattgg

SEQ ID NO: 113706 - DNA, 75 bp, synthetic construct
  source 1..75: mol_type = other DNA
tatgactgcgtgatgcctgtttatcagttccggcgtgatttttctctggtacagaacgtaacacgcggtaagccc

SEQ ID NO: 113707 - DNA, 75 bp, synthetic construct
  source 1..75: mol_type = other DNA
acatgccggtatttatgcactgtcgcgatgcccacgagcggtttatgacattgctggagccgtggctggataaac

SEQ ID NO: 113708 - DNA, 75 bp, synthetic construct
  source 1..75: mol_type = other DNA
ccagctgcattattagctcatgttgggctattgtttcttttcatcccatactatttaatgtggaaagcgaaggcg

SEQ ID NO: 113709 - DNA, 75 bp, synthetic construct
  source 1..75: mol_type = other DNA
tacttgaacaactggttacaaccataaaagcagctgacgcacgggaagcgagagcgatgtttgatgatgctgatt

SEQ ID NO: 113710 - DNA, 75 bp, synthetic construct
  source 1..75: mol_type = other DNA
aagcattgatattgatacctgcttcaaaaccctggttaatgagtcctctttaaccagaataaacatcgaaacatg

SEQ ID NO: 113711 - DNA, 75 bp, synthetic construct
  source 1..75: mol_type = other DNA
acgcttccacctgaactgaaaaacggtggtattaaaatttcacgtcaggcgctaaaagagtgggtgcaacgccag

SEQ ID NO: 113712 - DNA, 75 bp, synthetic construct
  source 1..75: mol_type = other DNA
ggagcgcgggtgctgcccgtgaatccacagttgccgcaaccgttgcttgaggagttgttgcccaatctgacgctg

SEQ ID NO: 113713 - DNA, 75 bp, synthetic construct
  source 1..75: mol_type = other DNA
aaaatcgttatggttgccttgatggtctgcgtggtcattatgaccattcagccaatgaccttaatcagaattttt

SEQ ID NO: 113714 - DNA, 75 bp, synthetic construct
  source 1..75: mol_type = other DNA
cctggatttttttccggttaaacgttaatcaggctggtgggttttacctgttctgtaggagtggtcattatgacc

SEQ ID NO: 113715 - DNA, 75 bp, synthetic construct
  source 1..75: mol_type = other DNA
ggagcgatgctgtggcggctgatgcagtattccccccgtggtcacgacgacgcggtgttggtgatgcggaaagcc

SEQ ID NO: 113716 - DNA, 75 bp, synthetic construct
  source 1..75: mol_type = other DNA
gttaatgacgaaggctggtacgccacgcgcgatcgcggtgagatgcataatggcaagctgaccattgtcggacgt

SEQ ID NO: 113717 - DNA, 75 bp, synthetic construct
  source 1..75: mol_type = other DNA
ccgccggagctgaaaaacggcggtattaaaatttcacgtcaggcgctaaaagagtgggtgcaacgtcagcaataa

SEQ ID NO: 113718 - DNA, 75 bp, synthetic construct
  source 1..75: mol_type = other DNA
ttactgccttgcagcagcggctggattcgctgatgctgcgtgacagactgcgtttttctcgccgtctgcacggcg

SEQ ID NO: 113719 - DNA, 75 bp, synthetic construct
  source 1..75: mol_type = other DNA
ccggttagccgtatcgaacagatccgccgcgaaatcatgggtatcgcccgtgaactggaagaggcgggcgaaatt

SEQ ID NO: 113720 - DNA, 75 bp, synthetic construct
  source 1..75: mol_type = other DNA
ggggcagtgacacgccgtcgggcagcacggcctcgtcgctttcaacgtggcttgccaccacggatgcggatgatg

SEQ ID NO: 113721 - DNA, 75 bp, synthetic construct
  source 1..75: mol_type = other DNA
aatgggtgaaagataagctggcccgttttcagcaaccggtgcgttggttaacgttgccgcctgaactgaaaaacg

SEQ ID NO: 113722 - DNA, 75 bp, synthetic construct
  source 1..75: mol_type = other DNA
gactgaacaagccgcgcaggcagcagctgcccgacaggtcacagaggaacgaatcagtcccccctggcccggact

SEQ ID NO: 113723 - DNA, 75 bp, synthetic construct
  source 1..75: mol_type = other DNA
aaatccggtgtaagggagagtatccgggatttacgattgggtgtgaatacctgggctgtatggggtatggccctt

SEQ ID NO: 113724 - DNA, 75 bp, synthetic construct
  source 1..75: mol_type = other DNA
ggaattgttgcccaatcttactctgcaattcgcgttggtgccggaaggagaaaacacgtttccggcgttaacttc

SEQ ID NO: 113725 - DNA, 75 bp, synthetic construct
  source 1..75: mol_type = other DNA
tgggtttacgattggttgcgaatacttgggccgtatggggtacggccctttcggtgaattagggatgaatacgct

SEQ ID NO: 113726 - DNA, 75 bp, synthetic construct
  source 1..75: mol_type = other DNA
ctgctccgtgcaggaccggtcggcggcggagtcggcgacagcggtgctggaggatatcacatccgtgtccggtgc

SEQ ID NO: 113727 - DNA, 75 bp, synthetic construct
  source 1..75: mol_type = other DNA
gtgcggaggataaattccgggcgttcgataaagcaggtatggcatggacacgaaatccagcattacttggcgaaa

SEQ ID NO: 113728 - DNA, 75 bp, synthetic construct
  source 1..75: mol_type = other DNA
gaatgataagtggcagagtaaaatgtcggtcgttaatgccagcatcagcggcgacacctcacaacaagggctggc

SEQ ID NO: 113729 - DNA, 75 bp, synthetic construct
  source 1..75: mol_type = other DNA
gggaataaaaccggagaccatgcttgatggcgtgaagcggtatgccgcctgggtacgtgctacaggaaataccgg

SEQ ID NO: 113730 - DNA, 75 bp, synthetic construct
  source 1..75: mol_type = other DNA
ccgacactggatatggtgaaagttcgtcggctgcttgactgccacccggatgtgcggctgattgggccaaactgc

SEQ ID NO: 113731 - DNA, 75 bp, synthetic construct
  source 1..75: mol_type = other DNA
tcctgttaaccttccgtgccgccgcagcggacacgttattgattctgggtgatagcctgagcgccgggtatcgaa

SEQ ID NO: 113732 - DNA, 75 bp, synthetic construct
  source 1..75: mol_type = other DNA
gcaccagttgagcgttacgactcaggaaacgttaaagccggtgacagtcagggatgcccttgaatactggatcag

SEQ ID NO: 113733 - DNA, 75 bp, synthetic construct
  source 1..75: mol_type = other DNA
tcgcgcgctgctgtcagccgattcctggtgatgaaatagttggtttcattactcagggacgcggtatttcagtac

SEQ ID NO: 113734 - DNA, 75 bp, synthetic construct
  source 1..75: mol_type = other DNA
cctgggtggtgggtatcgaccagacgttggtagatattgaagcaaaagtggaagacgattttattaaacgttatg

SEQ ID NO: 113735 - DNA, 75 bp, synthetic construct
  source 1..75: mol_type = other DNA
tgagggggtaaaccccgaaaccatgctggaaggtgtgaaacgctacgcgggctgggtatctgcgatgggtaacag

SEQ ID NO: 113736 - DNA, 75 bp, synthetic construct
  source 1..75: mol_type = other DNA
aacattattaagtgggcagaagaaacaaaatgcgaaagcatggcatcaacgcactggatggtcatatggccactt

SEQ ID NO: 113737 - DNA, 75 bp, synthetic construct
  source 1..75: mol_type = other DNA
tggattgcagacacaagcgtagctattctcctgaagataaactttgcgtggttctttatgctctcgggcattctg

SEQ ID NO: 113738 - DNA, 75 bp, synthetic construct
  source 1..75: mol_type = other DNA
taagggcgggcaacggcatctggatcgcccggtttttgattcaatgaaagaagcgatgcgacaaactgaggctga

SEQ ID NO: 113739 - DNA, 75 bp, synthetic construct
  source 1..75: mol_type = other DNA
aaaatacaacgtgccggtggtgctgacgctgggaaccaaatttgttattgcggagaacccacagtggtggcaggc

SEQ ID NO: 113740 - DNA, 75 bp, synthetic construct
  source 1..75: mol_type = other DNA
ccagtatgagtttagccgcgccatgcgccacaaggattgccagaatccgctgcgtgtctattcgcacattgcgcc

SEQ ID NO: 113741 - DNA, 75 bp, synthetic construct
  source 1..75: mol_type = other DNA
tggttttcagccacagcaaacggagcagacgctgcgccagattttgcaggatgtcaaagccgccaacgctgaacc

SEQ ID NO: 113742 - DNA, 75 bp, synthetic construct
  source 1..75: mol_type = other DNA
gcatttttgcgttttctggatgcagatatccagaacaacccgcaaaaaactcgtccattcaacattcaacattca

SEQ ID NO: 113743 - DNA, 75 bp, synthetic construct
  source 1..75: mol_type = other DNA
tcactgcgttgaccaaaatggtaaagcagttctggttaaacccaaggtgtcacgtgcagcacttcctgaactcat

SEQ ID NO: 113744 - DNA, 75 bp, synthetic construct
  source 1..75: mol_type = other DNA
ttacacgcgcacactgtggacttgccgcccgagtgcgcaaacttacggacagatgttgccaacgctggacaggac

SEQ ID NO: 113745 - DNA, 75 bp, synthetic construct
  source 1..75: mol_type = other DNA
gcaggcagcgccccgtagtgtgcccaccagcagggagaaagcacgcgccaatattcaggaaataaaaaagatgct

SEQ ID NO: 113746 - DNA, 75 bp, synthetic construct
  source 1..75: mol_type = other DNA
ctgccagcggcaaacctcgccctgaatttaagcgcggtgatatttaccgcgaccagtacggtggcacggtaatga

SEQ ID NO: 113747 - DNA, 75 bp, synthetic construct
  source 1..75: mol_type = other DNA
tatgattgcgtgatgcctgtttatcagttttcccgtgatttttctctggtgcaggcggtaccgcgtaacgtgccc

SEQ ID NO: 113748 - DNA, 75 bp, synthetic construct
  source 1..75: mol_type = other DNA
atgccgcgccgtcagtttgagcgtgattttattctggttgaaaacaaacaacaggcggtggcgagacgtgcagcc

SEQ ID NO: 113749 - DNA, 75 bp, synthetic construct
  source 1..75: mol_type = other DNA
ctgggaaataatacacagtacgacatgatggcgctgcgtaaatccatgacactgactgaatatcagaatctgagt

SEQ ID NO: 113750 - DNA, 75 bp, synthetic construct
  source 1..75: mol_type = other DNA
ccagtaaagacagtaaaagcgcaactggaagaggcgcttacgctccatcaacgtctgaaccgccgcgagaaagaa

SEQ ID NO: 113751 - DNA, 75 bp, synthetic construct
  source 1..75: mol_type = other DNA
acgcgctgcagaatttattcgccatgaaatgattaaacccgtcgtaggttatattgccggtgttactgcaccaaa

SEQ ID NO: 113752 - DNA, 75 bp, synthetic construct
  source 1..75: mol_type = other DNA
ccatcgacatgaccattgagatttacaatctgcaagtgctgggccgcgtgctgggtaaactcaatcaggtgccag

SEQ ID NO: 113753 - DNA, 75 bp, synthetic construct
  source 1..75: mol_type = other DNA
tcaaaacgttagaccataacaatgccttgcttgacgatattatccgaagaaagatgggtaggtactacaacacga

SEQ ID NO: 113754 - DNA, 75 bp, synthetic construct
  source 1..75: mol_type = other DNA
acgaatatgattgcgtgatgcctgtttatcagttccggcgtgatttttctctggtacagaccgcgccgcataacg

SEQ ID NO: 113755 - DNA, 75 bp, synthetic construct
  source 1..75: mol_type = other DNA
gccatctgcgcgctgagatgaaagctgaaggcgttaaagctgaagtgtatggtcgtccgaaacacatctacagca

SEQ ID NO: 113756 - DNA, 75 bp, synthetic construct
  source 1..75: mol_type = other DNA
ttctctcataatcattgtctctctcgcattgcaaaagatatgagatggtggaagttaaaaccagaatatctcgag

SEQ ID NO: 113757 - DNA, 75 bp, synthetic construct
  source 1..75: mol_type = other DNA
gatcccggtcgagatccgcggcacttataaagccctggggcatccggtgatgatcaactatttgaaacagttggg

SEQ ID NO: 113758 - DNA, 75 bp, synthetic construct
  source 1..75: mol_type = other DNA
cttatgtcttctaaagcgggatataaaatgccatcactaaacagtgacgatccaatggccgttcgccagctttta

SEQ ID NO: 113759 - DNA, 75 bp, synthetic construct
  source 1..75: mol_type = other DNA
caccccactatttttataataagacacggagaaagatgtgaccgttcaaagaatgaatgtttttctgaaccagat

SEQ ID NO: 113760 - DNA, 75 bp, synthetic construct
  source 1..75: mol_type = other DNA
ttcacgccctgttaacaacgttgttgctctcccagggtacgccgatgttactggccggtgacgaacatggtcaca

SEQ ID NO: 113761 - DNA, 75 bp, synthetic construct
  source 1..75: mol_type = other DNA
ttctcgacatcgttcttaaccatagtgcggaactggacctcgacggtccacttttctcactgcgcgggattgaca

SEQ ID NO: 113762 - DNA, 75 bp, synthetic construct
  source 1..75: mol_type = other DNA
actacccgtagtttgggtagtaagagcaacacccagattttggggcttactcgtgatacccaaatttggggtatc

SEQ ID NO: 113763 - DNA, 75 bp, synthetic construct
  source 1..75: mol_type = other DNA
atggggcgtagtgacgtcgcacgtaagcaaaatgccaatttcctcgtgtcgattcacgccgatgccgcaccgaac

SEQ ID NO: 113764 - DNA, 75 bp, synthetic construct
  source 1..75: mol_type = other DNA
ttacctacccgtgagatgtgggcgcagctgcgcgacgacgtgatgcgctacggcatatacaaccagaatcttcag

SEQ ID NO: 113765 - DNA, 75 bp, synthetic construct
  source 1..75: mol_type = other DNA
cgaaatggccagctggctggagcagcacgagaaacagtcggagctgctgggtggggcgggtgatgtgctggcgaa

SEQ ID NO: 113766 - DNA, 75 bp, synthetic construct
  source 1..75: mol_type = other DNA
gccctggcggtacgcgggagaaaaatgtcaccatcgccatcgcgcgtaaattgcgtactttgctcaatgatgatc

SEQ ID NO: 113767 - DNA, 75 bp, synthetic construct
  source 1..75: mol_type = other DNA
gcccgggcatcattctttatggcgtctcgccgctggaagatcgctccaccggtgccgattttggctgtcagccag

SEQ ID NO: 113768 - DNA, 75 bp, synthetic construct
  source 1..75: mol_type = other DNA
acgctggaagatctgatggcctccgctgacccctacacgctgatttttcccgacccagcccgctacggggcgttt

SEQ ID NO: 113769 - DNA, 75 bp, synthetic construct
  source 1..75: mol_type = other DNA
cctccgcctttaagtcgggacgggaattcgccgcgtttatcggtctggtgcccagacagacaggctcaggaggaa

SEQ ID NO: 113770 - DNA, 75 bp, synthetic construct
  source 1..75: mol_type = other DNA
tgactcatattctgatatacagagtaatcttctctattccattgttattgggaataagactattatttaacagga

SEQ ID NO: 113771 - DNA, 75 bp, synthetic construct
  source 1..75: mol_type = other DNA
gaaaaatagcgctgccgcgccgtggtgcggtcattacgctggcgctgggttggaaggggcagccgcttttcccga

SEQ ID NO: 113772 - DNA, 75 bp, synthetic construct
  source 1..75: mol_type = other DNA
atcaccgtactggaagaccagtacagcaggctgagtgaactggattcgctgatagatggccttgaaaaacagctc

SEQ ID NO: 113773 - DNA, 75 bp, synthetic construct
  source 1..75: mol_type = other DNA
ggaaacgctgaatactcgccgtgaaaaatcgtggcataagaccaccgtcggggaagtggtgaaggaaatagccgc

SEQ ID NO: 113774 - DNA, 75 bp, synthetic construct
  source 1..75: mol_type = other DNA
cttttctgcagtctggttggggttattgttgtgcattatcgaaagctgttatcgtcattaccgtcagattcctgt

SEQ ID NO: 113775 - DNA, 75 bp, synthetic construct
  source 1..75: mol_type = other DNA
ttgaatcgcaacaacgctgatgtgcaaaaggctttcgcagccaatattaagggattgagtactaagaagaagggt

SEQ ID NO: 113776 - DNA, 75 bp, synthetic construct
  source 1..75: mol_type = other DNA
tagctgcacggcacaaactgaagatggcactgggtaaagacctgtctgataaacccgtagagcatatagaccaga

SEQ ID NO: 113777 - DNA, 75 bp, synthetic construct
  source 1..75: mol_type = other DNA
tggcgcaccaatcccgtggccatcagataccgttccgtctggctatgccctgatgcaggggcaggcttttgacaa

SEQ ID NO: 113778 - DNA, 75 bp, synthetic construct
  source 1..75: mol_type = other DNA
gaaacttgtcatgttgatggcttccgcttcgatctcgctacagtcatggggcgaacgccggagtttcgtcaggat

SEQ ID NO: 113779 - DNA, 75 bp, synthetic construct
  source 1..75: mol_type = other DNA
tatcacacgtaaggacggcgacagtcaccgctttaccttggcagatcgcggagcctatacgggcgtaattgccag

SEQ ID NO: 113780 - DNA, 75 bp, synthetic construct
  source 1..75: mol_type = other DNA
catgagtaaggaaaatacgctgcaacaggccgtggggttgcccgatcagaaaacgcttaatatcattatgggaaa

SEQ ID NO: 113781 - DNA, 75 bp, synthetic construct
  source 1..75: mol_type = other DNA
ccgtcgtgaaaaatcgtggcacaagaccacggtcggggaagtggtgaaggaaatagctgcgcgtcacaaactgaa

SEQ ID NO: 113782 - DNA, 75 bp, synthetic construct
  source 1..75: mol_type = other DNA
cggcgtccgactggcgtggctgtcgtggcgatggcgaacaaacttgcacggactgtgtgggcgatagcagctcat

SEQ ID NO: 113783 - DNA, 75 bp, synthetic construct
  source 1..75: mol_type = other DNA
gcaagcttaagctaaacgtgcctgcaaacgtaagtacagagcaaatgaaagtgttaagcgataacgagaaactca

SEQ ID NO: 113784 - DNA, 75 bp, synthetic construct
  source 1..75: mol_type = other DNA
atgacagtgataggttatgccttttactcgacttttgcactgactgaaaagaacaaattaatgttaaaaaagata

SEQ ID NO: 113785 - DNA, 75 bp, synthetic construct
  source 1..75: mol_type = other DNA
tttttctgccggtccccggaaagagcaaaaggatgtcgccgcaggctccgctttacccggccatgcggggcatgg

SEQ ID NO: 113786 - DNA, 75 bp, synthetic construct
  source 1..75: mol_type = other DNA
tttctaaaaaaaataaaatacggaaaatacaaaagcctttagaaaaattagatgtagtgcatacacgtattgcga

SEQ ID NO: 113787 - DNA, 75 bp, synthetic construct
  source 1..75: mol_type = other DNA
gaactctttgaacatattgctgattatagctggccgtggacgtgggtggttttccgactcttaccgccaggcggt

SEQ ID NO: 113788 - DNA, 75 bp, synthetic construct
  source 1..75: mol_type = other DNA
aaccggaaatctggggttatcaatcggcattatgagcgcccgcattggctttaaggtgacagttcatatgtctgc

SEQ ID NO: 113789 - DNA, 75 bp, synthetic construct
  source 1..75: mol_type = other DNA
cgctgattttatccgcccgaacagcggcagcctacttaagcagattgaggcaaaaaccgccgccagattaaagca

SEQ ID NO: 113790 - DNA, 75 bp, synthetic construct
  source 1..75: mol_type = other DNA
agtggaccattaccaccctgacgcattctgtcagcccggataatggatttacgaccagcatggagcttgaagtaa

SEQ ID NO: 113791 - DNA, 75 bp, synthetic construct
  source 1..75: mol_type = other DNA
tgatatcaaccagaccctctctaccgccttcggcagtagctacgtcaacgacttcctcaatcaggggcgtgtgaa

SEQ ID NO: 113792 - DNA, 75 bp, synthetic construct
  source 1..75: mol_type = other DNA
gagtaatatctttggtgtgcaaactatgttgactcatggatataaaaaacaatttagcaatatattgactgtaag

SEQ ID NO: 113793 - DNA, 75 bp, synthetic construct
  source 1..75: mol_type = other DNA
atctgaacagcaaaagcccggctttcagtatcgtcattgaaggtaaggacgtgacgaccgtgctggatacccgcc

SEQ ID NO: 113794 - DNA, 75 bp, synthetic construct
  source 1..75: mol_type = other DNA
aactgctgtttctcaaagcggggctgggggtgacggccagcggtaaaaaaatcccgcagattaccatcacccgca

SEQ ID NO: 113795 - DNA, 75 bp, synthetic construct
  source 1..75: mol_type = other DNA
cgcttcaagggctattaaatcctatcacccaagcaatatacccaagaatatcaagtacgcttgttcttaatcgtg

SEQ ID NO: 113796 - DNA, 75 bp, synthetic construct
  source 1..75: mol_type = other DNA
attaagtaatgtctatggcattcaagttatgctgacccataattataagaaagaattcagtaagattttaatcgc

SEQ ID NO: 113797 - DNA, 75 bp, synthetic construct
  source 1..75: mol_type = other DNA
gaacgcccccgcaccgaacatcaccataaaaaatcccgtgaacggtcacgcccacctgctctacgcactcaatat

SEQ ID NO: 113798 - DNA, 75 bp, synthetic construct
  source 1..75: mol_type = other DNA
acggtgggggaggtggtaaaggaaatagccgcccggcataacctcaaaatggcgctgggtaaagacctgacggat

SEQ ID NO: 113799 - DNA, 75 bp, synthetic construct
  source 1..75: mol_type = other DNA
ctgaagcactggagcggatgaaagagagacttccaccgtatctcattacggtgctggaagaccagtacaacagac

SEQ ID NO: 113800 - DNA, 75 bp, synthetic construct
  source 1..75: mol_type = other DNA
ccccgcaagcctgaagacggtttatccttacgacaccacaccgtttatcaaaatttctattcaggaagttttcaa

SEQ ID NO: 113801 - DNA, 75 bp, synthetic construct
  source 1..75: mol_type = other DNA
cagcatcagtattgaaggcaaggatatcaccactgtgctggacaaccgcctgatggggcttacgctgacggataa

SEQ ID NO: 113802 - DNA, 75 bp, synthetic construct
  source 1..75: mol_type = other DNA
aagcggtgaagcggcagaatggcagcaattacactgttgtctttacgattaacgccgatgcgccgccaccgcctc

SEQ ID NO: 113803 - DNA, 75 bp, synthetic construct
  source 1..75: mol_type = other DNA
ttaccgccgggagcacgcccaaaggcatgtacgaatacctcaccactctggtaaaaggtaagccctggtacgata

SEQ ID NO: 113804 - DNA, 75 bp, synthetic construct
  source 1..75: mol_type = other DNA
ccatgagcaaaccgtggagttcccgatccagggagagatggttgatattgtggcgcatggcgagttgggcggcga

SEQ ID NO: 113805 - DNA, 75 bp, synthetic construct
  source 1..75: mol_type = other DNA
tcggttaaggcactgaagtacgctgccgcgatagagcgtgcgctgtgtgagaaacttggtgcagatgtgaactac

SEQ ID NO: 113806 - DNA, 75 bp, synthetic construct
  source 1..75: mol_type = other DNA
ctcacctgctctacgcactcaacatcgccgtgagaaccgcgcctgatgcctcggttaaggcgctgaaatatgccg

SEQ ID NO: 113807 - DNA, 75 bp, synthetic construct
  source 1..75: mol_type = other DNA
ccggtgatcgaactggtaaatgctcttgatgatcccctggtgaaaagccgcgttggtgtaccctggtttcagatg

SEQ ID NO: 113808 - DNA, 75 bp, synthetic construct
  source 1..75: mol_type = other DNA
acgcgcatggaaactgtgcgcgctttatcccagcctgaaagattcatactggttatcgttgaactatggtatgca

SEQ ID NO: 113809 - DNA, 75 bp, synthetic construct
  source 1..75: mol_type = other DNA
tctgcaccggacccgcaggcaactggtgaagttccggaccgcacaaattaatgccctgcacgggacgttactgga

SEQ ID NO: 113810 - DNA, 75 bp, synthetic construct
  source 1..75: mol_type = other DNA
aagtccgattttctcggttggggattaaacttgccgagacgcacaacaaaggttatcgctggcagcatgaagcgg

SEQ ID NO: 113811 - DNA, 75 bp, synthetic construct
  source 1..75: mol_type = other DNA
ggcggtcaggatcctggcgctatcggccctggtggtacgcgggagaaaaatgtcaccatcgccatcgcgcgtaaa

SEQ ID NO: 113812 - DNA, 75 bp, synthetic construct
  source 1..75: mol_type = other DNA
atccgccgctcgctgtcgccagggggatttcgtccggtctatttttatcagcacacatcagcggctaagaaataa

SEQ ID NO: 113813 - DNA, 75 bp, synthetic construct
  source 1..75: mol_type = other DNA
gataatgccgggggcagtaaagagatggtcgagggttttcgcgcagccattgccggaagcccggtgcgtattgtt

SEQ ID NO: 113814 - DNA, 75 bp, synthetic construct
  source 1..75: mol_type = other DNA
tgcggtcattacgctggcgctgggctggaagggacagccgcttttcccgaaaggggcattcacggtggacgagat

SEQ ID NO: 113815 - DNA, 75 bp, synthetic construct
  source 1..75: mol_type = other DNA
tggataatggatattctcagaaagctattgcggcgatgctgaatgtacatcgtaatacgatccgtaattgggcaa

SEQ ID NO: 113816 - DNA, 75 bp, synthetic construct
  source 1..75: mol_type = other DNA
gacgtatttagcgatcgcgaagccagctacatgtcacaagaaaaccgcttcggctacgcggcctgcgcctccctt

SEQ ID NO: 113817 - DNA, 75 bp, synthetic construct
  source 1..75: mol_type = other DNA
atgatgagtatatacaagggataatcaacgaactggacaggaacgggatttctatttcttcaaatgctgctccct

SEQ ID NO: 113818 - DNA, 75 bp, synthetic construct
  source 1..75: mol_type = other DNA
gttatgagagtgatcctctggtagtgacattgcagtatcagaacgaggactatggctatggttatcgctcagaaa

SEQ ID NO: 113819 - DNA, 75 bp, synthetic construct
  source 1..75: mol_type = other DNA
ttttggcaaactgatttacctgatgccgccttatattattcgcccgcaacagttgcagcgcctgaccgcagcggt

SEQ ID NO: 113820 - DNA, 75 bp, synthetic construct
  source 1..75: mol_type = other DNA
accctggcaacttacttagccagttggacgcgtgattacgaaacggtttatcgctacgggggcgaagaatttatc

SEQ ID NO: 113821 - DNA, 75 bp, synthetic construct
  source 1..75: mol_type = other DNA
atgagcgccgtacttcaacgcttcagggaaaaattaccgcacaaaccgtactgtacgaacgatttcgcgtacggc

SEQ ID NO: 113822 - DNA, 75 bp, synthetic construct
  source 1..75: mol_type = other DNA
tcagggctggcctgtattctcacaatggcttgatgccgtgatccagcgtgtcgaaatgtacaacgtatcgcttcc

SEQ ID NO: 113823 - DNA, 75 bp, synthetic construct
  source 1..75: mol_type = other DNA
ctgggggcgatgatcgccatcgagctgtttgaagatggcgatcacagcaaaccggacgccaaactcaccgccgag

SEQ ID NO: 113824 - DNA, 75 bp, synthetic construct
  source 1..75: mol_type = other DNA
attccaactggcgttatagtgatttacccattaaagcggtttatccgccaaaatataaaatcaagcctgaatcag

SEQ ID NO: 113825 - DNA, 75 bp, synthetic construct
  source 1..75: mol_type = other DNA
atgagcagcaataaagagttaatgcagcgccgcagtcaggcgattccccgtggcgttgggcaaattcaccccatt

SEQ ID NO: 113826 - DNA, 75 bp, synthetic construct
  source 1..75: mol_type = other DNA
cgataaaaattacgggctggggcgaaactgctatctgttcgaaaagggccgtaaatgggcttaccgggctattcg

SEQ ID NO: 113827 - DNA, 75 bp, synthetic construct
  source 1..75: mol_type = other DNA
cttccctttgacgtggaccggacgggggcatcaatcgactggagcgaccggaattgtccggccccgaacatcacc

SEQ ID NO: 113828 - DNA, 75 bp, synthetic construct
  source 1..75: mol_type = other DNA
aaaaaacaaaaagcctcttaaaccagcataaatccggtagcgccttcctccgggtttgtgcttcactttatccca

SEQ ID NO: 113829 - DNA, 75 bp, synthetic construct
  source 1..75: mol_type = other DNA
cacatccatgacctcccctctgccggtttatccggtggcgagcgccgaaggttgcgagctaattttgtctgacgg

SEQ ID NO: 113830 - DNA, 75 bp, synthetic construct
  source 1..75: mol_type = other DNA
tttaatcattggggcgatagcaacaacgcccgtgataacgttttatacctcgaagacagcaaaggtcgccatttc

SEQ ID NO: 113831 - DNA, 75 bp, synthetic construct
  source 1..75: mol_type = other DNA
tggttatcatggcgatacttttggcgcgatgtcggtgtgcgatccagacaactcaatgcacagcctgtggaaagg

SEQ ID NO: 113832 - DNA, 75 bp, synthetic construct
  source 1..75: mol_type = other DNA
taaccgtgcggtgcaggatttaaccgtgcggtgcaggatgaaacatttttttgccaataacgggaagtcagcgtg

SEQ ID NO: 113833 - DNA, 75 bp, synthetic construct
  source 1..75: mol_type = other DNA
tcgattgcgctgcatactcaggtcaaaatgttttatcgtcctgacgcattgaaagagaaaagggaaaacgccgag

SEQ ID NO: 113834 - DNA, 75 bp, synthetic construct
  source 1..75: mol_type = other DNA
ataacgttaactcctatgatcaggttgatttccttgaaattgttatccgttccggtaacaataacccgaaaggcg

SEQ ID NO: 113835 - DNA, 75 bp, synthetic construct
  source 1..75: mol_type = other DNA
aacagcataaacaaatcctgcgtattctgaaaattaatgatgcgcttccaaaggacaaagaatcgctattttgga

SEQ ID NO: 113836 - DNA, 75 bp, synthetic construct
  source 1..75: mol_type = other DNA
gtgactaagaaaaatacacttcagaaattattcacgtttgcttcactgtgtttatttacggcatcaagtcatgcg

SEQ ID NO: 113837 - DNA, 75 bp, synthetic construct
  source 1..75: mol_type = other DNA
agtggtatgaacgattagaacttcttgcgggtaatcatcaaaatgtggttctgttacctgtaatgaatagagatt

SEQ ID NO: 113838 - DNA, 75 bp, synthetic construct
  source 1..75: mol_type = other DNA
ctaactgtcatgatgatattatgtctgtaactaaaggaaggtgtctttcaggcaaacaatttgaattattagttg

SEQ ID NO: 113839 - DNA, 75 bp, synthetic construct
  source 1..75: mol_type = other DNA
gtgcggaactgccgaaatatgcgaactggccgaccttcccgcaactgtgggttgacggcgagctggtgggcggtt

SEQ ID NO: 113840 - DNA, 75 bp, synthetic construct
  source 1..75: mol_type = other DNA
ccgaaatggttgccgatgtgcgcgtactgggggcaatcggcgtggtcgaaaccactcgtccggtgaatatggcag

SEQ ID NO: 113841 - DNA, 75 bp, synthetic construct
  source 1..75: mol_type = other DNA
acgggaggccgtgaggttgccgcagagcggttaaagctgggggcttaccctgaattgtcgctgaaagccgcaagg

SEQ ID NO: 113842 - DNA, 75 bp, synthetic construct
  source 1..75: mol_type = other DNA
catgacctccccgctgccggtttatccggtggcgagcgcggaaggttgcgagctgattttgtctgacggcagacg

SEQ ID NO: 113843 - DNA, 75 bp, synthetic construct
  source 1..75: mol_type = other DNA
gcagcagaagcatttaaggaagctattaagtctgacacatctgattatcagcctgaacctttaagtcttggtaag

SEQ ID NO: 113844 - DNA, 75 bp, synthetic construct
  source 1..75: mol_type = other DNA
cttaatcgcacttatgccaaccgtagcaacgccgaacgagcggcaaaaatgcagtgggaacgcctgcaacgcggt

SEQ ID NO: 113845 - DNA, 75 bp, synthetic construct
  source 1..75: mol_type = other DNA
cagcatcagtattgagggcagggatatcaacactgtgctggataaccgcctgatgagtttgactctgacggacaa

SEQ ID NO: 113846 - DNA, 75 bp, synthetic construct
  source 1..75: mol_type = other DNA
gaaaaatcgtgctgccgcgtcgtggtgcggtcgttacgctggcgctgggttggaaggggcagccgcttttcccga

SEQ ID NO: 113847 - DNA, 75 bp, synthetic construct
  source 1..75: mol_type = other DNA
atgagcgccgtgcttcaatacttcgaagaaaatttaccccttcgcccctatcacacggatgatctcgctttcggt

SEQ ID NO: 113848 - DNA, 75 bp, synthetic construct
  source 1..75: mol_type = other DNA
ttaattatcagcatgaacctttaagtcttggtaaggcaaataaaatcgcatcagaatgcagaaaaggaatgaaat

SEQ ID NO: 113849 - DNA, 75 bp, synthetic construct
  source 1..75: mol_type = other DNA
tggtgccatcagcgaaaatatcctgaacctgctgatacgggagctcaaaccagctggcgatgctgctggaaggta

SEQ ID NO: 113850 - DNA, 75 bp, synthetic construct
  source 1..75: mol_type = other DNA
attttcgggaaacgctgaatacccgccgtgaaaagtcgtggcacaagaccactgtcggggaagtggtgaaggaaa

SEQ ID NO: 113851 - DNA, 75 bp, synthetic construct
  source 1..75: mol_type = other DNA
tgatgagtctgacgttgacggacaatcggggctttgaagcagaccagattgatctggagctggacgacgccgacg

SEQ ID NO: 113852 - DNA, 75 bp, synthetic construct
  source 1..75: mol_type = other DNA
ggggcataaagtccggttgttgcaggcccgcttcgttaaggcatttgtcatgggcaataagaatgacgtgatgga

SEQ ID NO: 113853 - DNA, 75 bp, synthetic construct
  source 1..75: mol_type = other DNA
tgttgctgcggtaaacggcccgatcgctcaggcgctgattggcaaagacgctaaagatcaggctggcattgacaa

SEQ ID NO: 113854 - DNA, 75 bp, synthetic construct
  source 1..75: mol_type = other DNA
atctgttattcatccgacagggacagggcaaaagcgccacaggtaaaccactgccagtgatcactatcacacgca

SEQ ID NO: 113855 - DNA, 75 bp, synthetic construct
  source 1..75: mol_type = other DNA
agagattacacaggatatcccctgtgcagcagaagcatttaaggaagctattaagtctgacacatctgattatca

SEQ ID NO: 113856 - DNA, 75 bp, synthetic construct
  source 1..75: mol_type = other DNA
aaacgtaatggccgtctgccgagtgctgcgattaatctggtcacagcgcatgacggttttacgcttcgcgactgc

SEQ ID NO: 113857 - DNA, 75 bp, synthetic construct
  source 1..75: mol_type = other DNA
acaccatctgcttggttatatgtcgaagacgcgtcgtgttaacctggcaattaccgccggtagcacgcccaaagg

SEQ ID NO: 113858 - DNA, 75 bp, synthetic construct
  source 1..75: mol_type = other DNA
atctcaacctcgctcccgttcagaaggctctcgccaatatgcagcctaacgagaaattcaggggcatgacaaata

SEQ ID NO: 113859 - DNA, 75 bp, synthetic construct
  source 1..75: mol_type = other DNA
ttgtccggtggacttacttttgaaaacgactcaatccttgcctggattcggaatactgactgggcgaagattggt

SEQ ID NO: 113860 - DNA, 75 bp, synthetic construct
  source 1..75: mol_type = other DNA
ggcaagaaagatttcaggtgtggcttttgatggttctgccgatattacattaactgctgaacatgtatcagcatt

SEQ ID NO: 113861 - DNA, 75 bp, synthetic construct
  source 1..75: mol_type = other DNA
aaggtaaatccgtactctgcgggtatggggctgatgccaggccatgtttatcgcgcgctttatccttgcccgctg

SEQ ID NO: 113862 - DNA, 75 bp, synthetic construct
  source 1..75: mol_type = other DNA
cacagagcgttctggtacaaaagggctgggaagtgctgggtaaagacaatgatgatgaggaaaaaactgaagatg

SEQ ID NO: 113863 - DNA, 75 bp, synthetic construct
  source 1..75: mol_type = other DNA
ttagcggcgcgtatcacgggcgcacgcattacacgctggcgctgaccggcaaggtgaatccgtactctgcgggca

SEQ ID NO: 113864 - DNA, 75 bp, synthetic construct
  source 1..75: mol_type = other DNA
atgagactttttattgcagaaaaaccgtctttagcaaaggctatttttgaaggactgggcggaaatcccaataca

SEQ ID NO: 113865 - DNA, 75 bp, synthetic construct
  source 1..75: mol_type = other DNA
tattagctgggtgtttacttaccgactcgacgggcagaagctgcatcgtcttactctgggacgatacccggatat

SEQ ID NO: 113866 - DNA, 75 bp, synthetic construct
  source 1..75: mol_type = other DNA
aaatgacgcggcgccggaagatatcgccgccatcgtgattgagccggttcagggcgaaggcggtttctacgccgc

SEQ ID NO: 113867 - DNA, 75 bp, synthetic construct
  source 1..75: mol_type = other DNA
catcaataatcacctggtctgcaatctgaatatttttctctttaacattaagcttcagatagtttttcagttcct

SEQ ID NO: 113868 - DNA, 75 bp, synthetic construct
  source 1..75: mol_type = other DNA
acctgcttccaggtgctggcctacgagccgtatctggagctgtgcgagattatgaatcagaaggtgccgggcgat

SEQ ID NO: 113869 - DNA, 75 bp, synthetic construct
  source 1..75: mol_type = other DNA
acagacactgtttctcagacagacttaacgtcagtcggtcgcgatattctggccaaaacaagcgttcttgctgtt

SEQ ID NO: 113870 - DNA, 75 bp, synthetic construct
  source 1..75: mol_type = other DNA
gccgatctggaggcagtaccgatgaattagcctcacgagttgtgataactacttattcctcagctggcggatacg

SEQ ID NO: 113871 - DNA, 75 bp, synthetic construct
  source 1..75: mol_type = other DNA
gcaggtaaagcgcaggcactgaaaaatgtgctgcaaggtccggttaccgaagatgttccagcttccgtgttgtag

SEQ ID NO: 113872 - DNA, 75 bp, synthetic construct
  source 1..75: mol_type = other DNA
ggcagacgcgtcacgcattcttccgtgaaaacctgaaactacgggcggaagtagaagagctggaacacaaatcac

SEQ ID NO: 113873 - DNA, 75 bp, synthetic construct
  source 1..75: mol_type = other DNA
aaagaaaagaaagcttggaacacaatcagttggatggcttgaatcagaaattgatgagtggttgttacatcgtag

SEQ ID NO: 113874 - DNA, 75 bp, synthetic construct
  source 1..75: mol_type = other DNA
gccacgataacaaagccgttgcgactgaattgctgagcgtggcgcaaagcctgcgtgggtttgcttacctgtcag

SEQ ID NO: 113875 - DNA, 75 bp, synthetic construct
  source 1..75: mol_type = other DNA
ctgctgaaccagaacgacgtcaccacacttgtgcgtaaagacggcttccgcttctggggttcccgctgcctgagt

SEQ ID NO: 113876 - DNA, 75 bp, synthetic construct
  source 1..75: mol_type = other DNA
atcactgatgtgcttaccgccagcggtaaagcgggtgagtccggcacgctggcccgttcgctggatgccatctct

SEQ ID NO: 113877 - DNA, 75 bp, synthetic construct
  source 1..75: mol_type = other DNA
cccctccggcgtgcttatcacgaagccgcacgactccgcaggcgcacaccgccgggcatgcgccagaatcgctga

SEQ ID NO: 113878 - DNA, 75 bp, synthetic construct
  source 1..75: mol_type = other DNA
cagctcaccgggatgactgtggaccagtgccacaatctccccctgcatctctgcccgcagccagtcttccggtgc

SEQ ID NO: 113879 - DNA, 75 bp, synthetic construct
  source 1..75: mol_type = other DNA
tactccgcttacctgctgttatccataaaactggtgtctcacgagccacgatctatgactggttgaacccgagat

SEQ ID NO: 113880 - DNA, 75 bp, synthetic construct
  source 1..75: mol_type = other DNA
ttgctgaccggtttgctttcgcatatcggcatgaaagatgccgataaacaagaatataccggcgcacgtaacgcg

SEQ ID NO: 113881 - DNA, 75 bp, synthetic construct
  source 1..75: mol_type = other DNA
tgagacgatgtttgccgatgatggcgtgaacaagttgattaaggatctggacaagcggcgcagggcggtagggaa

SEQ ID NO: 113882 - DNA, 75 bp, synthetic construct
  source 1..75: mol_type = other DNA
cagtacaacactggggagacttatacggctgaatgctcttgcagcaaggcttgcaccttattatacagatgagtc

SEQ ID NO: 113883 - DNA, 75 bp, synthetic construct
  source 1..75: mol_type = other DNA
cgcaaaggaagaagcgatactgatgacgatggaaatagcgattacgaagaaaaattacttatcgccagatggaaa

SEQ ID NO: 113884 - DNA, 75 bp, synthetic construct
  source 1..75: mol_type = other DNA
aaaaaacaggtatgaaagccctgttatctgcccagtcactgctcggcgttaaaccgcgcattcttggcgtgccag

SEQ ID NO: 113885 - DNA, 75 bp, synthetic construct
  source 1..75: mol_type = other DNA
ctgcccgcagccagtcttccggtgcgatacgaaaatacgcctccggctctgcggaaatattcacacaagggatat

SEQ ID NO: 113886 - DNA, 75 bp, synthetic construct
  source 1..75: mol_type = other DNA
cttcgcagattgcagaaattaccgggtgccccggtctcgaataagcgagggcaactggatctggatgcctggcgc

SEQ ID NO: 113887 - DNA, 75 bp, synthetic construct
  source 1..75: mol_type = other DNA
cggcataatttgactgagcaacagtggcgcatcgtgcgtattctggcggaaagcccatcaatggattttcacgat

SEQ ID NO: 113888 - DNA, 75 bp, synthetic construct
  source 1..75: mol_type = other DNA
tcacgccttcggcggtgagcaagtcattggcaaaacttcgggcatggtttgatgatccgctctttgtgaactcac

SEQ ID NO: 113889 - DNA, 75 bp, synthetic construct
  source 1..75: mol_type = other DNA
ctttagccgtgccgatcaaatcgatatgctgatcaccggcaaaaatgctaacccggaaatcctgcaacaactgga

SEQ ID NO: 113890 - DNA, 75 bp, synthetic construct
  source 1..75: mol_type = other DNA
tttcgtcgaaaggccgcctgactggctacaaattctacgaagcggtgatgagctctcacgcgcgtctgacctaca

SEQ ID NO: 113891 - DNA, 75 bp, synthetic construct
  source 1..75: mol_type = other DNA
ccggagaaacattttaatcgttatacggtgcgttatctgtacctgcttagcataatggcacttgagctaaggtca

SEQ ID NO: 113892 - DNA, 75 bp, synthetic construct
  source 1..75: mol_type = other DNA
atttatggcggcgcagcctgacaatctgctactggcgaccgcgccacgctactgtcagtactacaaccagctcca

SEQ ID NO: 113893 - DNA, 75 bp, synthetic construct
  source 1..75: mol_type = other DNA
atattcttcagccaggtcctggtgtaggagggcactgcatagcggtagacccttggtttattgtgtcaaaaacgc

SEQ ID NO: 113894 - DNA, 75 bp, synthetic construct
  source 1..75: mol_type = other DNA
aggtgaaattccagctcctgatttaacctacattgaatctgcttgccgtggtatatcactagtgcttaaaaaagg

SEQ ID NO: 113895 - DNA, 75 bp, synthetic construct
  source 1..75: mol_type = other DNA
tttccgccgatgtgttctgggatttgcaggacccggcaaccgacgcgggactgttgaaccagaacgacgtcacca

SEQ ID NO: 113896 - DNA, 75 bp, synthetic construct
  source 1..75: mol_type = other DNA
tgaagacctcactgccaggctggctgaatattttccacgacaacatcgtctccacggcgattgtcatgaccatct

SEQ ID NO: 113897 - DNA, 75 bp, synthetic construct
  source 1..75: mol_type = other DNA
actacacccgcacggcgcaggtgctggctgacaccatcgcagaggggcacatgtgggcagtggataaaccactta

SEQ ID NO: 113898 - DNA, 75 bp, synthetic construct
  source 1..75: mol_type = other DNA
agtgccacaatctccccctgcatctctgcccgcagccagtcttccggtgcgatacgaaaatagtaagcgtgcagc

SEQ ID NO: 113899 - DNA, 75 bp, synthetic construct
  source 1..75: mol_type = other DNA
ggtaatggatacgctgcatcaggcgggttacctgaagataggtctggtcggcgaagaaaccgccaaagcgaagta

SEQ ID NO: 113900 - DNA, 75 bp, synthetic construct
  source 1..75: mol_type = other DNA
atgaagtgcctattttatgtgactttagtctcgcatctataagagatatacatggggaggtaggctatctattct

SEQ ID NO: 113901 - DNA, 75 bp, synthetic construct
  source 1..75: mol_type = other DNA
agaaggctggtttgctgaagatacggctgcccgttttcgtgcctacggctggcatgtcattgaaggcgttgatgg

SEQ ID NO: 113902 - DNA, 75 bp, synthetic construct
  source 1..75: mol_type = other DNA
tgctgcaccagcggctgtgtggctggatcgaccccggcaaaaccggcaaggcttccatagataccttgtgcggct

SEQ ID NO: 113903 - DNA, 75 bp, synthetic construct
  source 1..75: mol_type = other DNA
aaaaagaaaataataattttaacaatttggttctggatattagaatgcaacatgcagcaagactgataactacgt

SEQ ID NO: 113904 - DNA, 75 bp, synthetic construct
  source 1..75: mol_type = other DNA
ggcagaacttaaggcagtgcttgaggatggcggtattgcccgagtgaaaaagcaggatttgggaagcgatgaaat

SEQ ID NO: 113905 - DNA, 75 bp, synthetic construct
  source 1..75: mol_type = other DNA
ccttggtttgctcattatctgtttccacagactctactttcacagaaaaattaaagttaataatagaatctgatc

SEQ ID NO: 113906 - DNA, 75 bp, synthetic construct
  source 1..75: mol_type = other DNA
gggaaaatgggagatcaagaggcctggccccacggcaactgcacccgtttaccgtcgtaacgttcccttgttacc

SEQ ID NO: 113907 - DNA, 75 bp, synthetic construct
  source 1..75: mol_type = other DNA
atggcgcaccgttcgctgatcggtggttcaggcggcatgacggcggggtgctcaagcccgccgtgctggagaggc

SEQ ID NO: 113908 - DNA, 75 bp, synthetic construct
  source 1..75: mol_type = other DNA
cagggaaaacgaatatcgcctacattgacacgtttaaaaggagaaacgtcgcaacgagtttcacctttctcggat

SEQ ID NO: 113909 - DNA, 75 bp, synthetic construct
  source 1..75: mol_type = other DNA
tccccagatgggtggttgatgctgggattataaaagaaggttcttttatagagaggtatttcaggttttttgaga

SEQ ID NO: 113910 - DNA, 75 bp, synthetic construct
  source 1..75: mol_type = other DNA
ccaaagtgcagcgtctgccgattgagcccatttcgcaggcttcagctaatcagcgtaaaggccgctgtggtcgtg

SEQ ID NO: 113911 - DNA, 75 bp, synthetic construct
  source 1..75: mol_type = other DNA
gggtgaacaaacgcacgggcgaagaggaagaggtgccggaagggattgatccgggctggaactacaatcccggta

SEQ ID NO: 113912 - DNA, 75 bp, synthetic construct
  source 1..75: mol_type = other DNA
tcactttccgcaagtcattcgtcgcataactttcctggaaagctgttaggatatatggtgcaatcagttcccatt

SEQ ID NO: 113913 - DNA, 75 bp, synthetic construct
  source 1..75: mol_type = other DNA
cggtgccagaggtgatgctggcccggcaggtccgagaggtgaacagggaccagtgggaccacggggagaaccggg

SEQ ID NO: 113914 - DNA, 75 bp, synthetic construct
  source 1..75: mol_type = other DNA
ggcacagggcaccattcacaccgaagcgccggaaatcagaactgtccgctgggtgaacaaacgcacgggcgaaga

SEQ ID NO: 113915 - DNA, 75 bp, synthetic construct
  source 1..75: mol_type = other DNA
tgtcaaaatcatggcgattagttgatctggcaaatgttttacatatgtctgaagtctcaattcggaaaaaacttg

SEQ ID NO: 113916 - DNA, 75 bp, synthetic construct
  source 1..75: mol_type = other DNA
atgacagaacaacaaaaattgacctttactgctttgcaacagcggctggattcgctgatgctgcgcgacagactg

SEQ ID NO: 113917 - DNA, 75 bp, synthetic construct
  source 1..75: mol_type = other DNA
aaactgcggcgcattacgaattgaccatgtgatgtcgatgctgcgtttgtggtggataccgtatggcgagacggc

SEQ ID NO: 113918 - DNA, 75 bp, synthetic construct
  source 1..75: mol_type = other DNA
ggcccggtctggacggaagaaggctttgctgcgctgcatgaaaaagtccgcgctgaactgaacgacacggtggtg

SEQ ID NO: 113919 - DNA, 75 bp, synthetic construct
  source 1..75: mol_type = other DNA
cgcgatccggcggtatttttgtttgatgagccgctctcgaaccttgatgccaagctgcgcgtgcagatgcgcctt

SEQ ID NO: 113920 - DNA, 75 bp, synthetic construct
  source 1..75: mol_type = other DNA
cgtctggcgcgaatggtgctggaagcgcaaaaacatggctgcgtgcgtgaggcgatgattatcacgtccgcgctc

SEQ ID NO: 113921 - DNA, 75 bp, synthetic construct
  source 1..75: mol_type = other DNA
cgcaaaaaccgtaagcgtataaatcgtcttgtggaactctggcctgagttattcagccgggaaaaaccaaaacca

SEQ ID NO: 113922 - DNA, 75 bp, synthetic construct
  source 1..75: mol_type = other DNA
tgctctgcataaatatggttgtctgccaaaacgtgccgggcataaggcatcgttgatgtcgatgacgccgacgct

SEQ ID NO: 113923 - DNA, 75 bp, synthetic construct
  source 1..75: mol_type = other DNA
gccatcaggcgcagtttcctcacacaccgtcaggtgtgcagggagcgcaggtcacggcgcgacaggggcggcgcg

SEQ ID NO: 113924 - DNA, 75 bp, synthetic construct
  source 1..75: mol_type = other DNA
ctaccgtcagtatgccggacgtaaaatgactcttggcattcgcccggaacatattgcgttaagctcgcaggcaga

SEQ ID NO: 113925 - DNA, 75 bp, synthetic construct
  source 1..75: mol_type = other DNA
agccagaaatgacggtcagatattatatcagttctgctgatttaaccgcagagaagttcgccacagcaatccgaa

SEQ ID NO: 113926 - DNA, 75 bp, synthetic construct
  source 1..75: mol_type = other DNA
ctgaaaattcgcggcatgggcaagcagcaaattgccgaacgtgttaaagaagcggcgcgcattctggagctggac

SEQ ID NO: 113927 - DNA, 75 bp, synthetic construct
  source 1..75: mol_type = other DNA
tcgacacatgggcaaaccatcattctggggatccagtcctacaataccagcgtgttgggggaattgttgctgggt

SEQ ID NO: 113928 - DNA, 75 bp, synthetic construct
  source 1..75: mol_type = other DNA
tatacgctgcgatcggaaaaaaactggggtattggggattttggcgatctcaaagcgatgctggtggatgtggca

SEQ ID NO: 113929 - DNA, 75 bp, synthetic construct
  source 1..75: mol_type = other DNA
ggcgcccgttacaacctgaacggtcagccgtgcggggaagtgacaccacaggaacagaaagaggcagagacccgt

SEQ ID NO: 113930 - DNA, 75 bp, synthetic construct
  source 1..75: mol_type = other DNA
gatgtggcggatggcgaatttatcgtgatggtcgggccatctggctgcgggaaatcgacgctgctgcgcatggtt

SEQ ID NO: 113931 - DNA, 75 bp, synthetic construct
  source 1..75: mol_type = other DNA
cggtcaccagcagcagtttgcatcatggattgcctatgaaagttgcgccgttcctcggcaaaaaagaggaaagcg

SEQ ID NO: 113932 - DNA, 75 bp, synthetic construct
  source 1..75: mol_type = other DNA
gcgtattgccgtgggctacagggttgaccctggcagggatcttgccgctgctgtttactcgtatcgtgaatcagc

SEQ ID NO: 113933 - DNA, 75 bp, synthetic construct
  source 1..75: mol_type = other DNA
ggacgccgggcaggaagtggagatgccggagccggagaagaagaaacgagaaatgattcagttgtggggggacgt

SEQ ID NO: 113934 - DNA, 75 bp, synthetic construct
  source 1..75: mol_type = other DNA
gaatcaaaagatcctgaagataatcagaacagacgctggcctcaaattcgtaatggcaacgtatcccatcgttta

SEQ ID NO: 113935 - DNA, 75 bp, synthetic construct
  source 1..75: mol_type = other DNA
gaggctattggtggaaatctggcattactatatcgttttttttctctcaggggaatagatataagagagagaata

SEQ ID NO: 113936 - DNA, 75 bp, synthetic construct
  source 1..75: mol_type = other DNA
tattgatattatcaatacatggctgaaagaagcatgggcccaacttaccggaccgcttgcagtactgaaacccga

SEQ ID NO: 113937 - DNA, 75 bp, synthetic construct
  source 1..75: mol_type = other DNA
cagggaaaaccattgtctttttctgcatatcataaaattattaatatgataagcgagacttcacctgaactggcc

SEQ ID NO: 113938 - DNA, 75 bp, synthetic construct
  source 1..75: mol_type = other DNA
tcgagttaattcaaaatatcggctattctttgagtggaacgatggcgtacataacgtccacctgtcggcgcatga

SEQ ID NO: 113939 - DNA, 75 bp, synthetic construct
  source 1..75: mol_type = other DNA
tgatgttgaacaggtttgtagcgccagtggctgtggctacagaggcatgagtgggaaacagcccttccggcgtgc

SEQ ID NO: 113940 - DNA, 75 bp, synthetic construct
  source 1..75: mol_type = other DNA
gcggtgcgcatgactctgcattcgccgcaatggggcgagattgaacgcatctggttgttacgcgggccgcaatta

SEQ ID NO: 113941 - DNA, 75 bp, synthetic construct
  source 1..75: mol_type = other DNA
tttcagtggagaaggatttaatgagtgaaatatattattatataacggtaaatcgaaataaaataaataaatcaa

SEQ ID NO: 113942 - DNA, 75 bp, synthetic construct
  source 1..75: mol_type = other DNA
tgccacgcagcaatctgctcaccgtcggttaccgcattcatggtggttatctcgaacggttagcctggccactga

SEQ ID NO: 113943 - DNA, 75 bp, synthetic construct
  source 1..75: mol_type = other DNA
gcgtccggtaagaggcgagcagggccagcgtgaaccagcgttactggcgggcgctggcgtgctggcgtctgagag

SEQ ID NO: 113944 - DNA, 75 bp, synthetic construct
  source 1..75: mol_type = other DNA
cggtgctggctatggtctggtgctgtcgttaactatgcgcccggcactgatggttacaggactgatagccgctta

SEQ ID NO: 113945 - DNA, 75 bp, synthetic construct
  source 1..75: mol_type = other DNA
atggtatgcgctggcaggagagctggtcgtcagtacaggcgatccccgtggcggtacgcataaccctgcattcgc

SEQ ID NO: 113946 - DNA, 75 bp, synthetic construct
  source 1..75: mol_type = other DNA
atgagtgaaaaactgatgaaagaatctcaaaaagtatttatgcatatggcaggtttgttttatgaaatgaaaatg

SEQ ID NO: 113947 - DNA, 75 bp, synthetic construct
  source 1..75: mol_type = other DNA
aatggtagccaccagtaagactgagtgggacgggcgttccgcgaccgtctggcggctaatggcaagaaaggaaag

SEQ ID NO: 113948 - DNA, 75 bp, synthetic construct
  source 1..75: mol_type = other DNA
cggctcttcagggaaataatgccgcagcaggttcagtcggtgctgtgagcggtgaacttatcgcaggtgcaatcg

SEQ ID NO: 113949 - DNA, 75 bp, synthetic construct
  source 1..75: mol_type = other DNA
tgaccgcaaatggtcaatggggactaaacgtcctacaaaccgccgaccacaaagtgcaccatacttttattgagg

SEQ ID NO: 113950 - DNA, 75 bp, synthetic construct
  source 1..75: mol_type = other DNA
ccgcttgaacgcgcgttgcgtgccctggtagtccgccaccaggcgctgacagatatgcacacgcaggaactgaat

SEQ ID NO: 113951 - DNA, 75 bp, synthetic construct
  source 1..75: mol_type = other DNA
tcttcaaagtaaagcgtctcctatagagagttttaagactccgggtaaaggtgatgggggcggatcttctggtgg

SEQ ID NO: 113952 - DNA, 75 bp, synthetic construct
  source 1..75: mol_type = other DNA
tccatttaattctaattcaactaattgcctggagaagttatgtaatgaagttagtattctttttaagaatcaacc

SEQ ID NO: 113953 - DNA, 75 bp, synthetic construct
  source 1..75: mol_type = other DNA
gaccagggtaaagcaagcccgtgagcaggcagaagaatatcgaagctggggattgccggatcaagcgaaattatc

SEQ ID NO: 113954 - DNA, 75 bp, synthetic construct
  source 1..75: mol_type = other DNA
taagactgagtggggacgggcgttccgcgaccgtctggcggctaatggcaagaaaggaaaggtgattctcggcgc

SEQ ID NO: 113955 - DNA, 75 bp, synthetic construct
  source 1..75: mol_type = other DNA
gcgagtgggcgcatcacctggggtcagttggcgaaaaactggctaaatgtctattttggcaacctggtcggcgca

SEQ ID NO: 113956 - DNA, 75 bp, synthetic construct
  source 1..75: mol_type = other DNA
aaggattgtatcaaaaatgcaagcgcatcttttaaaaaggtagtcagatgggagtactttgaacaagggcattca

SEQ ID NO: 113957 - DNA, 75 bp, synthetic construct
  source 1..75: mol_type = other DNA
atcgtactgccgagcactctgcccagcagtcgtcagaacgtctgcaaagctatgaaaagatgttcaagaatgggc

SEQ ID NO: 113958 - DNA, 75 bp, synthetic construct
  source 1..75: mol_type = other DNA
atacttttattgaggccgtctgccttggtatcctggcaaacctgatggtatgtctggcagtatggatgagttatt

SEQ ID NO: 113959 - DNA, 75 bp, synthetic construct
  source 1..75: mol_type = other DNA
cagccagcatgaagtactgcgttggatcgacgtctgttcagggacccaacctaatgcaaaggatcccgcatttct

SEQ ID NO: 113960 - DNA, 75 bp, synthetic construct
  source 1..75: mol_type = other DNA
actgatttgttgtactttattctctttcattggtacttcctcgctttaaaaaagagcgcacttcgtaagtgcctt

SEQ ID NO: 113961 - DNA, 75 bp, synthetic construct
  source 1..75: mol_type = other DNA
gtctgcgcagtcgcagctgggcgttaagccgcgcatcctcggtgtgccgggccatgatacgcaggcggtttccac

SEQ ID NO: 113962 - DNA, 75 bp, synthetic construct
  source 1..75: mol_type = other DNA
gccggaggtttttgtgcagctcaggttatggtgttatggctgataaatcagggcgtaggtcttgccgatacggtc

SEQ ID NO: 113963 - DNA, 75 bp, synthetic construct
  source 1..75: mol_type = other DNA
cattctgggataaagtccatcttgatcccacgatgctgctgattttactggcattgctggtctacagtgctctgg

SEQ ID NO: 113964 - DNA, 75 bp, synthetic construct
  source 1..75: mol_type = other DNA
gatcaggcaaagcctgtcaccgtggttatccgcgtggcccagggtgaaaccgaagctgaaaccaccgccaatatt

SEQ ID NO: 113965 - DNA, 75 bp, synthetic construct
  source 1..75: mol_type = other DNA
tttattttttactcttgctacagccattagggatatcatatgccagtgtggaaacaagtaaacataaatcagatg

SEQ ID NO: 113966 - DNA, 75 bp, synthetic construct
  source 1..75: mol_type = other DNA
tggtcaggatcgctgatagttttggaatctggcactatagctatatgccagactggggaatcccacttcttctga

SEQ ID NO: 113967 - DNA, 75 bp, synthetic construct
  source 1..75: mol_type = other DNA
gagtcacggcagagaagaaatccgtcttcatattgtttgcgatgtccctgatgagcttattgatttcacgtttga

SEQ ID NO: 113968 - DNA, 75 bp, synthetic construct
  source 1..75: mol_type = other DNA
tcaactgccgttggttgctcttcctctcccgtttgacgaaagccagcaaaaaaaagctggaagttccttttaccc

SEQ ID NO: 113969 - DNA, 75 bp, synthetic construct
  source 1..75: mol_type = other DNA
aacgccgcgcggcctgaaatttgagctggcggcggagtcgccgctgatgatgatcatgtttaatgcgctatcgaa

SEQ ID NO: 113970 - DNA, 75 bp, synthetic construct
  source 1..75: mol_type = other DNA
tctccccggccctaaacacaacacccactcaccacaacctaaactcatccgcatcccgccatgccggaaactttt

SEQ ID NO: 113971 - DNA, 75 bp, synthetic construct
  source 1..75: mol_type = other DNA
attatagaatgaggatgataaagattaaatttggtgctgaaacaacacgtaagcttccaagtctttttaggtgtt

SEQ ID NO: 113972 - DNA, 75 bp, synthetic construct
  source 1..75: mol_type = other DNA
aaagccgttgcgactgagttgctgagtgtggcgcaaagcctgcgtgggtttgcctacctgtcagcgtatggctgc

SEQ ID NO: 113973 - DNA, 75 bp, synthetic construct
  source 1..75: mol_type = other DNA
aaaccgcgcattctcggcgtgccaggccacgacaccaaggcggtagctactgagttgctaagcgtggcgcaaagc

SEQ ID NO: 113974 - DNA, 75 bp, synthetic construct
  source 1..75: mol_type = other DNA
ggccagatcgcaatgggtctggtgattatggttgttatggcgcaaattccgccgcgcgtttatgaaggttgggcg

SEQ ID NO: 113975 - DNA, 75 bp, synthetic construct
  source 1..75: mol_type = other DNA
attgcgtttcattataaaactccagcagggtatatttctgatcatgatattatcagtttcattaatggagatgtc

SEQ ID NO: 113976 - DNA, 75 bp, synthetic construct
  source 1..75: mol_type = other DNA
aatgagcgatttcaaaaacgagggtgtggttgcttccagtgcctggccctatcaggccaacgccctgaaagccga

SEQ ID NO: 113977 - DNA, 75 bp, synthetic construct
  source 1..75: mol_type = other DNA
caacatagtttgatccatcgctactggcatgacactaccgtgcaaatgagcgatttcaaaaacgagggtgtggtt

SEQ ID NO: 113978 - DNA, 75 bp, synthetic construct
  source 1..75: mol_type = other DNA
tggaggccttttacgcaccagttagccagttggaaagctttgctggaaaagaaacattcagtggtggtaaccagt

SEQ ID NO: 113979 - DNA, 75 bp, synthetic construct
  source 1..75: mol_type = other DNA
taatggatttaactatttcgacaaaatcgccttctggaaaacgcccatcgcagaagggggaaaatttgtcccata

SEQ ID NO: 113980 - DNA, 75 bp, synthetic construct
  source 1..75: mol_type = other DNA
atgaaaataaaaatggagcaacgctctttggatataatgaggataggatacgtcccggcagccattctttttatg

SEQ ID NO: 113981 - DNA, 75 bp, synthetic construct
  source 1..75: mol_type = other DNA
ttgaacaaacaattaatatagtcaataagtccgaactaaagaaaaactttattatctacgggccctcagctcatt

SEQ ID NO: 113982 - DNA, 75 bp, synthetic construct
  source 1..75: mol_type = other DNA
cgattaatacctcattgatccccaactggaaaacgctcgatccccgcgtggttaaaggcgactggttcaatgttg

SEQ ID NO: 113983 - DNA, 75 bp, synthetic construct
  source 1..75: mol_type = other DNA
gcgaagtacgatttcaaaaataacctcgtgctggaagcggcatttggtcaggctgaagggtatatcgatcagtat

SEQ ID NO: 113984 - DNA, 75 bp, synthetic construct
  source 1..75: mol_type = other DNA
caatccggatgcgtactacgacaagaaccggactattgaagagtctgcatacagcctggatgcggtctacaccat

SEQ ID NO: 113985 - DNA, 75 bp, synthetic construct
  source 1..75: mol_type = other DNA
gcaactatccggatattccggatagttcggtgccagcgccaggaaagggcgtcaccggtgaacgtatccgcatta

SEQ ID NO: 113986 - DNA, 75 bp, synthetic construct
  source 1..75: mol_type = other DNA
ggacgcatcgccccgccagcgccggtagtgccggaagaagcaactccggaaaacgtagaaatgctctctggctat

SEQ ID NO: 113987 - DNA, 75 bp, synthetic construct
  source 1..75: mol_type = other DNA
cgtcagctgcgagcattaggcaagttaatgccgggcgaagaagaggtggctgagaatcctcgtgcccgtagttca

SEQ ID NO: 113988 - DNA, 75 bp, synthetic construct
  source 1..75: mol_type = other DNA
cgatggtcagcagggatacttcctgcaacgtatgaccccaacctacgcttcctcgaacggtcgcctggatatctg

SEQ ID NO: 113989 - DNA, 75 bp, synthetic construct
  source 1..75: mol_type = other DNA
caaatgccgaaaactatataccactccgccagttccggtaatgcaggctgatgtcgcgcaagcaattgaaaacct

SEQ ID NO: 113990 - DNA, 75 bp, synthetic construct
  source 1..75: mol_type = other DNA
cccagactatccggggtaataaagggcagggaaccgcgacctacgggacaacttccgtcacggtgccggatacct

SEQ ID NO: 113991 - DNA, 75 bp, synthetic construct
  source 1..75: mol_type = other DNA
cgctggcgattcatgatgccaataacacggccattaccgtttacaactgcttctcacctgctacgggttacggcg

SEQ ID NO: 113992 - DNA, 75 bp, synthetic construct
  source 1..75: mol_type = other DNA
tacgggcatatcacactgaaagcctttacgggctacacgtcgcaaattggcgtgcagattcagcaggccgtcgcg

SEQ ID NO: 113993 - DNA, 75 bp, synthetic construct
  source 1..75: mol_type = other DNA
aatggtatgttatttcgctcgcgttttgctcgtaaaatgctcacaccagatgcctttaatccctccggtttttgt

SEQ ID NO: 113994 - DNA, 75 bp, synthetic construct
  source 1..75: mol_type = other DNA
tgaattgcgtgtccggcaatcacagagcgttgctttaccgtctctgacgccgtttgaggcggtagatggtgcgat

SEQ ID NO: 113995 - DNA, 75 bp, synthetic construct
  source 1..75: mol_type = other DNA
gagcgatactcacgagcaggtcaatttgctggtcgttgaatctggcgaaaatgccgcactatgcctgctggcaca

SEQ ID NO: 113996 - DNA, 75 bp, synthetic construct
  source 1..75: mol_type = other DNA
ctgggtagccactatcgccgccgcttccgggcagataacgcgattgctgcggcctgctactttgccggtcatttc

SEQ ID NO: 113997 - DNA, 75 bp, synthetic construct
  source 1..75: mol_type = other DNA
tttaagaccaaaaagtagctcacgtgcagatttaaacacatcggaaacaaaaatatctttaagtaatgacgctct

SEQ ID NO: 113998 - DNA, 75 bp, synthetic construct
  source 1..75: mol_type = other DNA
aaccccgagactattaatgtatcaagttttacagatacatctgaggaagtgaaaatattctctaatgtaaaagga

SEQ ID NO: 113999 - DNA, 75 bp, synthetic construct
  source 1..75: mol_type = other DNA
tcctctcacacctgctgtacaccatctatttcgccagccagatgacgctctcattcttctggcctttgccgctgg

SEQ ID NO: 114000 - DNA, 75 bp, synthetic construct
  source 1..75: mol_type = other DNA
agacgcggcagaagcacagcgccaatcactgattgatgcagcaatggcttccattagtctgattcagctgagtta

SEQ ID NO: 114001 - DNA, 75 bp, synthetic construct
  source 1..75: mol_type = other DNA
tccggtgcggaaatggcgcaggcggaaatccgcatctgggtgcgcggtcagtccggtcgggaaatcacggcagcg

SEQ ID NO: 114002 - DNA, 75 bp, synthetic construct
  source 1..75: mol_type = other DNA
taacgggatcacgcgaaaagtagcgacaaactctactgctgaccttctgttaaccggtacggcgggcacgactat

SEQ ID NO: 114003 - DNA, 75 bp, synthetic construct
  source 1..75: mol_type = other DNA
gttcagaggacggtaacgggttaccgccacactctgttgctgtaattgtggatggcggtgatgtgacggatattg

SEQ ID NO: 114004 - DNA, 75 bp, synthetic construct
  source 1..75: mol_type = other DNA
agcgccgcactagacgcggcagaagcacagcgccagtcactgattaatgcagcaatggcttccattagtctgatt

SEQ ID NO: 114005 - DNA, 75 bp, synthetic construct
  source 1..75: mol_type = other DNA
acctgcgatttattacatgagtccagagaacacattgcagcaggctgtcggattaccggatcaaaagaccttaaa

SEQ ID NO: 114006 - DNA, 75 bp, synthetic construct
  source 1..75: mol_type = other DNA
attctaagtgccaatgaggcgttgatggacgaattgggtgcaaatgtcacacctgcgatttattacatgagtcca

SEQ ID NO: 114007 - DNA, 75 bp, synthetic construct
  source 1..75: mol_type = other DNA
cgccaacgttgcgggcgtgacacgtcacaagctctacgaaaatgatactggagcaaccgacagcaacgggttgcc

SEQ ID NO: 114008 - DNA, 75 bp, synthetic construct
  source 1..75: mol_type = other DNA
catttccggctggctgatcgccactatggtatggatgtttcctgcagcgggtgcggcaaagattgtggtgattat

SEQ ID NO: 114009 - DNA, 75 bp, synthetic construct
  source 1..75: mol_type = other DNA
tgtcggttctgttgaaatcctctatctggtgtttaacggcacgctgcactggagcgatttcatctggcccttcgc

SEQ ID NO: 114010 - DNA, 75 bp, synthetic construct
  source 1..75: mol_type = other DNA
acagcgacgaacttgaagtagagagtgaagaaaaagaatgcgggaaaaaaatagaaatagatgaagaccgactcc

SEQ ID NO: 114011 - DNA, 75 bp, synthetic construct
  source 1..75: mol_type = other DNA
gcttaacgccgtgcttgattacattgacgcggtgacgacaacagataccagcaccgcgccggatgtcatctggcc

SEQ ID NO: 114012 - DNA, 75 bp, synthetic construct
  source 1..75: mol_type = other DNA
tgctaatgttaatggcgtgacacgtcacaaactgtacgagaatgacactggctcgacagatagcaacgggctgcc

SEQ ID NO: 114013 - DNA, 75 bp, synthetic construct
  source 1..75: mol_type = other DNA
agtgccgcagtagaagcggcagaagcacagcgccagtcactgattgatgcagcaatggcttccatcagtctgatt

SEQ ID NO: 114014 - DNA, 75 bp, synthetic construct
  source 1..75: mol_type = other DNA
ggggataagtgcgcctgattatcagacgatactcagcaccctgattagctattttcagcagatttatggcagtga

SEQ ID NO: 114015 - DNA, 75 bp, synthetic construct
  source 1..75: mol_type = other DNA
aatatattgttgaaagaacaattctccgttgagtctgcggcacagacgatagaaatgaggttggaggcatgcaat

SEQ ID NO: 114016 - DNA, 75 bp, synthetic construct
  source 1..75: mol_type = other DNA
tttgtagccattaccctgaaagtttttaccgggtatacatctcaaatcggcgagcagataaaacaggctgttgcc

SEQ ID NO: 114017 - DNA, 75 bp, synthetic construct
  source 1..75: mol_type = other DNA
taacgtgctcatcgccaaaaagaacatcccgttctcatcggccttttactggatgatgaaggggcttgatgcccg

SEQ ID NO: 114018 - DNA, 75 bp, synthetic construct
  source 1..75: mol_type = other DNA
taagtcgtctggcagcgtatcggcatcaaacattgatattgcctatgatgcttctgcgtcctgtagcaccgcgaa

SEQ ID NO: 114019 - DNA, 75 bp, synthetic construct
  source 1..75: mol_type = other DNA
atgaaacttaaatatcctggcttaactgccagcggcaaaactcgcactaaattcatgtgcggggatatttaccgc

SEQ ID NO: 114020 - DNA, 75 bp, synthetic construct
  source 1..75: mol_type = other DNA
cacagatgataagtgttctgaacccggtgttaacccgtaatgctgccggagaaatgacggaagagtgggtgtcat

SEQ ID NO: 114021 - DNA, 75 bp, synthetic construct
  source 1..75: mol_type = other DNA
gccgctgttattttgctcatgccctggccgcttagttacaccccgttatggctggtgttgctttcgctggtggtg

SEQ ID NO: 114022 - DNA, 75 bp, synthetic construct
  source 1..75: mol_type = other DNA
gttgagcgtctgggaatttcgcctgccactgcgcgacgcgatatcaataaacttgacgaaagcggcaaactgaaa

SEQ ID NO: 114023 - DNA, 75 bp, synthetic construct
  source 1..75: mol_type = other DNA
atgaaaaataaaaattctggcgttaatgccagcggccccgctcgtcctgaaatccgtcccggcgatattttccgt

SEQ ID NO: 114024 - DNA, 75 bp, synthetic construct
  source 1..75: mol_type = other DNA
gaatgataagtggcagagtaaaacgtcggtagtcaatgccagcatcagcggcgacacctcgcaacaagggctggc

SEQ ID NO: 114025 - DNA, 75 bp, synthetic construct
  source 1..75: mol_type = other DNA
ggagagaggattgatttatacccaattcgttgcgcaaaccgctatatgctgtggggaagggggaatcaaagcctg

SEQ ID NO: 114026 - DNA, 75 bp, synthetic construct
  source 1..75: mol_type = other DNA
atgggttaaaggcttcgccgtaggtcgcaccatctttggcgagccatcacggcagtggttcagcggccagattaa

SEQ ID NO: 114027 - DNA, 75 bp, synthetic construct
  source 1..75: mol_type = other DNA
aaaaatcctcccggatttcagcaaaatcagtccgttaaaaggcattgggcggctgttttccagtgaacatctggc

SEQ ID NO: 114028 - DNA, 75 bp, synthetic construct
  source 1..75: mol_type = other DNA
caggtcgctgctgagaatcaggtggaagtggtcgagttcccgcggctggcgcgctcggtttactacaccacccag

SEQ ID NO: 114029 - DNA, 75 bp, synthetic construct
  source 1..75: mol_type = other DNA
ttaagggcgtggaggaacggcgcgtaacttaccgccgtgaaggttacgaatatgattgcgtgatgcccgtttatc

SEQ ID NO: 114030 - DNA, 75 bp, synthetic construct
  source 1..75: mol_type = other DNA
atgacagaacaacaaaaattgacctttactgccttgcagcagcggctggattcgttgatgctgcgtgacagattg

SEQ ID NO: 114031 - DNA, 75 bp, synthetic construct
  source 1..75: mol_type = other DNA
caccgagatcgccagcagcgtgatcaacggcatctacggcgatgagatccgctcgcggatggcgcgcctgcaatg

SEQ ID NO: 114032 - DNA, 75 bp, synthetic construct
  source 1..75: mol_type = other DNA
tttcccttgtaaagcagtttattatagataattatttaaaaaactgtacgtatttaccatccataacacaatcag

SEQ ID NO: 114033 - DNA, 75 bp, synthetic construct
  source 1..75: mol_type = other DNA
caaacctgatggtatgtctggcagtatggatgagttattctggccgcagcctgatggacaaagcgttcattatgg

SEQ ID NO: 114034 - DNA, 75 bp, synthetic construct
  source 1..75: mol_type = other DNA
tgattacagtcgtgcggcagagctgcaacgtctgaacccgcagttacgtgacccgaacaacataaccgccgggat

SEQ ID NO: 114035 - DNA, 75 bp, synthetic construct
  source 1..75: mol_type = other DNA
ctgtcaatgcttttgctctaagaggtgcaaaaataatttttgctgatagttatgatgataatccaaatatggatc

SEQ ID NO: 114036 - DNA, 75 bp, synthetic construct
  source 1..75: mol_type = other DNA
ctgccaatgtattatgaactggagtgcaaacaagttaactacatttctgaaaaaatagctgatttctttaaaaaa

SEQ ID NO: 114037 - DNA, 75 bp, synthetic construct
  source 1..75: mol_type = other DNA
gccacactggtgaataccctgctgtcgttcaaaagtgattttgtctccactgtcgataatatcgtgtcactggca

SEQ ID NO: 114038 - DNA, 75 bp, synthetic construct
  source 1..75: mol_type = other DNA
gatatgctcgatgaaaaaggtatcgcctggagtctgcatagcgccatcgaagaagtgatggcggaagtggatatt

SEQ ID NO: 114039 - DNA, 75 bp, synthetic construct
  source 1..75: mol_type = other DNA
tgtcgcgccattgcacacgccgttcgttttgagtgccagacgtatcctcgtccttacaaagtcgccatgctgatg

SEQ ID NO: 114040 - DNA, 75 bp, synthetic construct
  source 1..75: mol_type = other DNA
tgcaatggcttccatcagtctgattcagctgaaattacaggccgggcggaagctgacgcaggcagaaaccacccg

SEQ ID NO: 114041 - DNA, 75 bp, synthetic construct
  source 1..75: mol_type = other DNA
gcctttatcgaagaaattttgctcgacagaagtcgtgaagagagccgccgtgagcgttctctgcgtcgtctggag

SEQ ID NO: 114042 - DNA, 75 bp, synthetic construct
  source 1..75: mol_type = other DNA
aaaaatcatactgttcataacttccctggtaaattgttagggtatatggcaaataaactccctatattaggtagt

SEQ ID NO: 114043 - DNA, 75 bp, synthetic construct
  source 1..75: mol_type = other DNA
aaaaaacctaggatgtaatgcttactctttattacaagaaaaattctctgtggaaatggctgctgaaaagatatt

SEQ ID NO: 114044 - DNA, 75 bp, synthetic construct
  source 1..75: mol_type = other DNA
atgaaaaagaaaaattctggcattactgccagcggcctctctcggcctgaaatccgcccaggcgatattttccgg

SEQ ID NO: 114045 - DNA, 75 bp, synthetic construct
  source 1..75: mol_type = other DNA
gttaaccctgttaccacgccagcgtctgatgtacgccatcggcgcgtttttcctctcacacctgctgtacaccat

SEQ ID NO: 114046 - DNA, 75 bp, synthetic construct
  source 1..75: mol_type = other DNA
aaaccaatcaactggtttgtcacttccgttttgacagccaccagacgattactcagttgacgcaagattcccgcg

SEQ ID NO: 114047 - DNA, 75 bp, synthetic construct
  source 1..75: mol_type = other DNA
ttaaaggcgtggcagaacggcgcatcacctaccgtcgtgaaggctacgaatatgattgcgtgatgcctgtttatc

SEQ ID NO: 114048 - DNA, 75 bp, synthetic construct
  source 1..75: mol_type = other DNA
ggtgacagatactgaggcacagcatagtgccgcagtagacgcggcagaagcacagcgccagtcgctgattgatgc

SEQ ID NO: 114049 - DNA, 75 bp, synthetic construct
  source 1..75: mol_type = other DNA
ggccatacccagccgcgtcgtctggcggcacgaacggtggcgaaccgtattgcggaagagctgaaaacggagccg

SEQ ID NO: 114050 - DNA, 75 bp, synthetic construct
  source 1..75: mol_type = other DNA
cgatcacgtcagtgataacacgatggtcaagctgatgaccgacggtatcctgctggcagagatccagcaagaccg

SEQ ID NO: 114051 - DNA, 75 bp, synthetic construct
  source 1..75: mol_type = other DNA
tggcggatgtttactactcgccggaccaagtatcgcagggttcgttagacttattggtagataatattaaatcag

SEQ ID NO: 114052 - DNA, 75 bp, synthetic construct
  source 1..75: mol_type = other DNA
aaagaaatatgcatatggagaatcttttatattaaacaatgcagatctagctattgattcaaatatcatagagaa

SEQ ID NO: 114053 - DNA, 75 bp, synthetic construct
  source 1..75: mol_type = other DNA
gggattgggttgagaaaaaagaaggcctagaccaaatttaccaagcgtttgatggttttaaacgcaaacatggca

SEQ ID NO: 114054 - DNA, 75 bp, synthetic construct
  source 1..75: mol_type = other DNA
gtgttgggtctcgtttgcggcccatgactaatagtaaacctaagtgtcttgtgactgttgctggcaagcctatct

SEQ ID NO: 114055 - DNA, 75 bp, synthetic construct
  source 1..75: mol_type = other DNA
tacatcgcgtacaccggcagcatgaatatggtcgatcctcgctacttcaaacaagatgcgggcgtagggcaatgg

SEQ ID NO: 114056 - DNA, 75 bp, synthetic construct
  source 1..75: mol_type = other DNA
ccacctaccgtaatcagctggcgtttatcgatattttcttccgggggatgaataacaccaactacaacatggcgg

SEQ ID NO: 114057 - DNA, 75 bp, synthetic construct
  source 1..75: mol_type = other DNA
atgctgcgtgacagactgcgtttttcccgccgtctgcacggcgtgaagaaggttaaaaatcctgatgcacaacag

SEQ ID NO: 114058 - DNA, 75 bp, synthetic construct
  source 1..75: mol_type = other DNA
tcaccaggtggtgatcgtcgccggggaaacgggttccggtaaaacgactcagctaccgaaaatctgtatggagct

SEQ ID NO: 114059 - DNA, 75 bp, synthetic construct
  source 1..75: mol_type = other DNA
tgtcgtgaactctttattcgccacgcgctggtggaaggtgactggcagacgcgtcacgcattcttccgtgaaaac

SEQ ID NO: 114060 - DNA, 75 bp, synthetic construct
  source 1..75: mol_type = other DNA
gcacgtttaaagaccccgtgtgggggattcgggcattggcagtgacactcattacttaccacgacaagcgccgcg

SEQ ID NO: 114061 - DNA, 75 bp, synthetic construct
  source 1..75: mol_type = other DNA
aggtttccgctgctatggataaagcacaaggtcatatctctagcggggatacagtacgcatcatcttcggtattg

SEQ ID NO: 114062 - DNA, 75 bp, synthetic construct
  source 1..75: mol_type = other DNA
ctttttatcgttcctgttcagattgctgctgattttgctgttctgctttttcctgtacgaactgttgttcaagac

SEQ ID NO: 114063 - DNA, 75 bp, synthetic construct
  source 1..75: mol_type = other DNA
ttcggagataaatcgatccgcagaggaacagcaatcgcgacttttgtgaatgggaaatatccaccgagggaagat

SEQ ID NO: 114064 - DNA, 75 bp, synthetic construct
  source 1..75: mol_type = other DNA
aacaaaaatgactggttgttaaatgccagtgaattaccgttcagcccgccagaagagggggaaacgctggcaaca

SEQ ID NO: 114065 - DNA, 75 bp, synthetic construct
  source 1..75: mol_type = other DNA
cctatccggtggaggtgcgttatcgcccgattgttgaagaagctgatgacaccgagcgcgaccagttgcaggcga

SEQ ID NO: 114066 - DNA, 75 bp, synthetic construct
  source 1..75: mol_type = other DNA
ccaggacgaagccagacgcctgttatatgagcagcagaaatctgaagaagcactggcgataaagcgagaggggga

SEQ ID NO: 114067 - DNA, 75 bp, synthetic construct
  source 1..75: mol_type = other DNA
tggtcgatggcgagttaagtctggtgggcaccgttaacctcgatatgcgtagtctttggctgaactttgaaatca

SEQ ID NO: 114068 - DNA, 75 bp, synthetic construct
  source 1..75: mol_type = other DNA
gggattatcgcctatcttgctgttggtgaactccacttgggcaaacgccgtgccgaacgcgccagagcgatgtgg

SEQ ID NO: 114069 - DNA, 75 bp, synthetic construct
  source 1..75: mol_type = other DNA
ggcccgttattcaagctttgcgagcgtcgtcaggggatcgccggggtcaaaggaaatcagctacaactgatgacc

SEQ ID NO: 114070 - DNA, 75 bp, synthetic construct
  source 1..75: mol_type = other DNA
ttaatctgatgcgcgtatttttacgccgtatggatctgcgccagcaccgcaagatgatcatgatcgataactaca

SEQ ID NO: 114071 - DNA, 75 bp, synthetic construct
  source 1..75: mol_type = other DNA
ccgccacggttcaacattttgcctgtgatatcgcgacgctgaagcggaacaacgccgagctatcgggtcggcctg

SEQ ID NO: 114072 - DNA, 75 bp, synthetic construct
  source 1..75: mol_type = other DNA
cgtttaagtaccagtcgtgtaatggccatcgcctttatatttatgtcagtgcttattgttctcagcctctctgtt

SEQ ID NO: 114073 - DNA, 75 bp, synthetic construct
  source 1..75: mol_type = other DNA
acgattcagttttctattgatgattttatcaaaaatataaaaagaaaagttaaatcccgaggttccaggcctccc

SEQ ID NO: 114074 - DNA, 75 bp, synthetic construct
  source 1..75: mol_type = other DNA
ggttaaaatttatcagtttgaaggcgggttattgcataccaagagcgtgctggtcgatggcgaattaagtctggt

SEQ ID NO: 114075 - DNA, 75 bp, synthetic construct
  source 1..75: mol_type = other DNA
tagccacaaaaaatattgacctatctaggccagcactaaatcagatgggagccagccagagaggggaagtgttac

SEQ ID NO: 114076 - DNA, 75 bp, synthetic construct
  source 1..75: mol_type = other DNA
gatggcaaaaacatctggaaagaaacgcacgatttcgagtttaccaaacggcgctacaaggccgatgtgctgccc

SEQ ID NO: 114077 - DNA, 75 bp, synthetic construct
  source 1..75: mol_type = other DNA
aagctaaaggcagcggaatatgaattccagctgtctacggaaacgttatatgcccggcgcaggattgttctgaca

SEQ ID NO: 114078 - DNA, 75 bp, synthetic construct
  source 1..75: mol_type = other DNA
gttctgctgatttaaccgcagaaaagttcgccacagcaatccgaaaccactggcacgtggagaataagctgcact

SEQ ID NO: 114079 - DNA, 75 bp, synthetic construct
  source 1..75: mol_type = other DNA
tggttcgtggcgtatgggaaacactggcaatgaccttcgtattccggttttttggctttgtgattggtctgccgg

SEQ ID NO: 114080 - DNA, 75 bp, synthetic construct
  source 1..75: mol_type = other DNA
gcatcaacaaaggctactgaaacatcaaaaagtgctgccgctgcagagtcctcaaaaagcgcggcggctaccagt

SEQ ID NO: 114081 - DNA, 75 bp, synthetic construct
  source 1..75: mol_type = other DNA
gttgccgggtctggtaaatgcggcaactatcaccctgattaccctggtcggttattccgcgatgggtggtgcagt

SEQ ID NO: 114082 - DNA, 75 bp, synthetic construct
  source 1..75: mol_type = other DNA
acccagttggcgcaccaatcccgtggccatcagataccgttccgtctggttatgccctgatgcaggggcagactt

SEQ ID NO: 114083 - DNA, 75 bp, synthetic construct
  source 1..75: mol_type = other DNA
tgccagaaagatattgcagagaagatacaaaaacagggaggtgattatttattcgctgaaaatgaaaccaggggc

SEQ ID NO: 114084 - DNA, 75 bp, synthetic construct
  source 1..75: mol_type = other DNA
cgccgtggcgcttgaggatgcaagtacgacgaaaaaggggatagtacagctcagcagtgcgaccaacagtacgtc

SEQ ID NO: 114085 - DNA, 75 bp, synthetic construct
  source 1..75: mol_type = other DNA
taagggatggagctatgaagaagaccatcgcaatgagactgtttactcaacagaaaatggcgtagctgttacagt

SEQ ID NO: 114086 - DNA, 75 bp, synthetic construct
  source 1..75: mol_type = other DNA
cacagcagcatctgcaggtgcacacgcgcatactgtcggtattggtgctcatacgcactccgttgcgattggttc

SEQ ID NO: 114087 - DNA, 75 bp, synthetic construct
  source 1..75: mol_type = other DNA
ggtgacagatactgaggcacagcatagcgccgcagtagacgcggcagaagcacagcgtcagtcactgattgatgc

SEQ ID NO: 114088 - DNA, 75 bp, synthetic construct
  source 1..75: mol_type = other DNA
ttacaatacgcccttgattcattgagaaatggaaaaggcaaagtcaacctgattaaacattactcctctgttgaa

SEQ ID NO: 114089 - DNA, 75 bp, synthetic construct
  source 1..75: mol_type = other DNA
gaaatggaaaaggcaaagtcaacctgattaaacattactcctctgttgaatccatacagcagcatgtctccttag

SEQ ID NO: 114090 - DNA, 75 bp, synthetic construct
  source 1..75: mol_type = other DNA
tgcagatgaaggcgcattacagaaatggtggtctgttctaccgttcttcaagagacggttatggttttgaggatg

SEQ ID NO: 114091 - DNA, 75 bp, synthetic construct
  source 1..75: mol_type = other DNA
aaatacctggggtgtacaaggctcagtaggtatgtctacggggtggttagctaataccagtacagatggtaatca

SEQ ID NO: 114092 - DNA, 75 bp, synthetic construct
  source 1..75: mol_type = other DNA
cacggcgatttgatcgcggtgggcaatactgccgaaagttacaagccagccgttgccgaagggtccggacgtgca

SEQ ID NO: 114093 - DNA, 75 bp, synthetic construct
  source 1..75: mol_type = other DNA
aaagtttgagaaacgcgatctggcacaggcggtgattaacgctgcatacctggtggcctgtgcagatggtgaatg

SEQ ID NO: 114094 - DNA, 75 bp, synthetic construct
  source 1..75: mol_type = other DNA
cagggcggagtctttatgctggcggggaaagcctgcgatacgacgcttgcgggcggagccatgaataacataggc

SEQ ID NO: 114095 - DNA, 75 bp, synthetic construct
  source 1..75: mol_type = other DNA
gtttggggctgatggaaataatgtaccgagacttaagcgttttcttagtgaagttcaatcgggcatggttgcaac

SEQ ID NO: 114096 - DNA, 75 bp, synthetic construct
  source 1..75: mol_type = other DNA
attcacacaattgcttctggccccggctttccggaagatctcattcaccaggcattattgactgcggcttattcg

SEQ ID NO: 114097 - DNA, 75 bp, synthetic construct
  source 1..75: mol_type = other DNA
aggacattctcgaagcgattcgtgatcaccaggtggtgatcgtcgccggggaaacgggttccggtaaaacgactc

SEQ ID NO: 114098 - DNA, 75 bp, synthetic construct
  source 1..75: mol_type = other DNA
tgcgtttgagctatcagtttgagccaggcgcggacgcggacggtgtgaccgtgcatattccgctgccgctgctta

SEQ ID NO: 114099 - DNA, 75 bp, synthetic construct
  source 1..75: mol_type = other DNA
ggtaatggtggcggaactggtagaaaccagccgcctgtgggggcgcattgcggcacgcatcgatccagaatgggt

SEQ ID NO: 114100 - DNA, 75 bp, synthetic construct
  source 1..75: mol_type = other DNA
attacctgcccaatagtacccgtgttggtgcaaaaatgtttcatgagttagctcaggaatttattcgccgtggcc

SEQ ID NO: 114101 - DNA, 75 bp, synthetic construct
  source 1..75: mol_type = other DNA
atgggatctgatgcgaaaaacttgatgagcgacgggaacgtgcaaattgttaagaccggcgaggtcattggcgcg

SEQ ID NO: 114102 - DNA, 75 bp, synthetic construct
  source 1..75: mol_type = other DNA
acgctggaaaacgcggtaatacaaggtgggacagtgatcctgttgtcacccaccagcgcggacgaaaattttgtc

SEQ ID NO: 114103 - DNA, 75 bp, synthetic construct
  source 1..75: mol_type = other DNA
gcatgccggtacgctggaaaatgcggtaatacaaggtgggacagtcatcctgttgtcacccaccagcgcggacga

SEQ ID NO: 114104 - DNA, 75 bp, synthetic construct
  source 1..75: mol_type = other DNA
ctgaacgacacggtggtggatattgcgaagcaggtcgagcaaatccttacggcagtgttcaatatcaacaaacgc

SEQ ID NO: 114105 - DNA, 75 bp, synthetic construct
  source 1..75: mol_type = other DNA
gagaaaagcgtttgtttcagagttgagctctgaacaaactgggttctcttcaatcatcggcaaagatatctacac

SEQ ID NO: 114106 - DNA, 75 bp, synthetic construct
  source 1..75: mol_type = other DNA
agataacagatgccagtcggcaaactctgtgtaacgcactgaaactacagccagacgaagacgggattggcgcaa

SEQ ID NO: 114107 - DNA, 75 bp, synthetic construct
  source 1..75: mol_type = other DNA
tggcatttggcgggattctctttttccaaaagttcggtatggggctggcagggggctttatcggaatcgctttag

SEQ ID NO: 114108 - DNA, 75 bp, synthetic construct
  source 1..75: mol_type = other DNA
gtgttccgctctttgcgcccattgctgctttgcgtgatttccatcggcatcggcgcgctggcgggaacggtcgcc

SEQ ID NO: 114109 - DNA, 75 bp, synthetic construct
  source 1..75: mol_type = other DNA
aagagttagtggcggagatgggtagcgccttcctgtgtgcccattgcggcattcagggcaggctccagcacgcca

SEQ ID NO: 114110 - DNA, 75 bp, synthetic construct
  source 1..75: mol_type = other DNA
aatattcctctgctctggaacagcgcagaacgacagggatatgaaagcgatcgctggctgaccttcactcaaatt

SEQ ID NO: 114111 - DNA, 75 bp, synthetic construct
  source 1..75: mol_type = other DNA
tcattggctgtgagcgtactgggctttgtcgtcacggctcccttgtggatttatgtcagtcgactggtttcataa

SEQ ID NO: 114112 - DNA, 75 bp, synthetic construct
  source 1..75: mol_type = other DNA
gcgggtacctgaatgcaggtgtgatggaagcgggtctggtaatgccggtgacagaagggacgccgcagggcggcc

SEQ ID NO: 114113 - DNA, 75 bp, synthetic construct
  source 1..75: mol_type = other DNA
gcactgggaatatttgtcgttcgcccataggggagcgctttctcaggaatttgttacctaataaaaaaattgact

SEQ ID NO: 114114 - DNA, 75 bp, synthetic construct
  source 1..75: mol_type = other DNA
agagatctgaacaggtggataaggcgaaggttgcgaagtgttgtggaaacagtggaaaacgggcagcaagcgctt

SEQ ID NO: 114115 - DNA, 75 bp, synthetic construct
  source 1..75: mol_type = other DNA
cacattaacgcgctataactcccgctacagtgacagacctttcgcggaaaaacgcgatattgaagatggctttaa

SEQ ID NO: 114116 - DNA, 75 bp, synthetic construct
  source 1..75: mol_type = other DNA
gggcatcccgacggtggtggatcgcttcatccagcaggcgatgatgcaggtattgcaggcacagtgggatagctc

SEQ ID NO: 114117 - DNA, 75 bp, synthetic construct
  source 1..75: mol_type = other DNA
atggctgaaaataaaatttacgcagtactgacagaccgtggcgcacaacttgaagccgctgcgctggcatcgggt

SEQ ID NO: 114118 - DNA, 75 bp, synthetic construct
  source 1..75: mol_type = other DNA
ggtagggagttgccataagcaatggcggataagctgtagtccggcactgagcatagcacttcccaatcgcctgtt

SEQ ID NO: 114119 - DNA, 75 bp, synthetic construct
  source 1..75: mol_type = other DNA
caatcgtaacaggttatgatgtatccccgtacgcgataaatccaaccaatgtaaacgccgatgtggaaacttatt

SEQ ID NO: 114120 - DNA, 75 bp, synthetic construct
  source 1..75: mol_type = other DNA
ctatgttgccttcaaagcggagacgaattttgttgatgtggtgccgcaaaaaagtcgcttacgtttatcactaaa

SEQ ID NO: 114121 - DNA, 75 bp, synthetic construct
  source 1..75: mol_type = other DNA
atgaaacttacaataaatgaaaagataggttttggtgctggtgatatggctatcgcgatagtaatgatgtctttg

SEQ ID NO: 114122 - DNA, 75 bp, synthetic construct
  source 1..75: mol_type = other DNA
acctgatgacgctggtgatgagcatgagcgttatcggcatttccgctgactacacgctctattacctcaccgagc

SEQ ID NO: 114123 - DNA, 75 bp, synthetic construct
  source 1..75: mol_type = other DNA
ttctatccatgcaactacggttacatcaaccacaccctgtctctggacggtgacccggttgacgtactggtcccg

SEQ ID NO: 114124 - DNA, 75 bp, synthetic construct
  source 1..75: mol_type = other DNA
ggaaaaagccattaccgccctgaccggacaaagcgtcgatcaaaaatggtttgtggtttacggcgattcgccaca

SEQ ID NO: 114125 - DNA, 75 bp, synthetic construct
  source 1..75: mol_type = other DNA
tattaaaaatgagctggaaccgaaaatgggcatggatcttaatctggttcaactgattgcctatactgactggaa

SEQ ID NO: 114126 - DNA, 75 bp, synthetic construct
  source 1..75: mol_type = other DNA
tggtttcatcatcaggaagggaaagatattgcggctaaaaccctggaagtgctgaaaaaatacggttacaccggt

SEQ ID NO: 114127 - DNA, 75 bp, synthetic construct
  source 1..75: mol_type = other DNA
tggcactcaacatccagcgattgcgcttgctgccaacagagctttctaccgggatcatggttaacattccggcct

SEQ ID NO: 114128 - DNA, 75 bp, synthetic construct
  source 1..75: mol_type = other DNA
gaatggggattttcacaatatccgctggttgccgggcatgaggtgattgggcgcgtggtggcactcgggagcgcc

SEQ ID NO: 114129 - DNA, 75 bp, synthetic construct
  source 1..75: mol_type = other DNA
tggctatagagtctggcacccctttgggtatcgttcctggctccaactatgccaaggctttaaaccgagactctg

SEQ ID NO: 114130 - DNA, 75 bp, synthetic construct
  source 1..75: mol_type = other DNA
tatctgacggcctttgttggtgcagatggtcgtacccagtatcgtacagatatttacaattatgatctgcctgcg

SEQ ID NO: 114131 - DNA, 75 bp, synthetic construct
  source 1..75: mol_type = other DNA
ctgatgcaggaagacggggtgaagcccctgacgccggttctcagggggctgaaaccgtgcaggcaccgacgacca

SEQ ID NO: 114132 - DNA, 75 bp, synthetic construct
  source 1..75: mol_type = other DNA
gtttcggttactgatcaaaaatgatcaatggctcattttgggcgctgtaattgcgatcattatgtttggcgggat

SEQ ID NO: 114133 - DNA, 75 bp, synthetic construct
  source 1..75: mol_type = other DNA
aaaaagaggggcttatcagcaactaccgcaccattccgctgaactcccttgcgcggcaggaggaagatttacaac

SEQ ID NO: 114134 - DNA, 75 bp, synthetic construct
  source 1..75: mol_type = other DNA
gattgctccagaggcaagaggtaaaacaatgctttttggacattggatagatcaacgggaaatcccggatcccta

SEQ ID NO: 114135 - DNA, 75 bp, synthetic construct
  source 1..75: mol_type = other DNA
ctcattggtaaagtatggcctgttgttgttgctgtggttggcgctgggcttgccattcgtattttcaaaaaattc

SEQ ID NO: 114136 - DNA, 75 bp, synthetic construct
  source 1..75: mol_type = other DNA
cttgaatttctctgcgagatcgaaaccgattttggcgctaaaaaagggacatctggcatctattttttggcccag

SEQ ID NO: 114137 - DNA, 75 bp, synthetic construct
  source 1..75: mol_type = other DNA
ccgcaccattccactgaactcccttgcgcggcaggaggaagatttacatctgctgacaacagcggccccgacagt

SEQ ID NO: 114138 - DNA, 75 bp, synthetic construct
  source 1..75: mol_type = other DNA
tatccgcagctggcaggatctgttcgacccctgcctgaatattcagataggtgcctgggtgctggcccgccactt

SEQ ID NO: 114139 - DNA, 75 bp, synthetic construct
  source 1..75: mol_type = other DNA
tgggtgatgagctgcgcgaatttatcgattccctggttaaggctggagattaccgtacccagagcgaagtcatgc

SEQ ID NO: 114140 - DNA, 75 bp, synthetic construct
  source 1..75: mol_type = other DNA
aatagctcctgaagctagaggcaaaacaatgctgttcggtcattggttaaaacaaagggaaattcctgacccgta

SEQ ID NO: 114141 - DNA, 75 bp, synthetic construct
  source 1..75: mol_type = other DNA
aaacaactaattttatcaactgcggctgtgttacgcttgaaggcttagaacttgattcctttgcattaaatattg

SEQ ID NO: 114142 - DNA, 75 bp, synthetic construct
  source 1..75: mol_type = other DNA
ggttgagtagtggtgaagctcagccgtgggaaaaggacgcgttcttacggaaggtgaaagcagggatggtaatga

SEQ ID NO: 114143 - DNA, 75 bp, synthetic construct
  source 1..75: mol_type = other DNA
ttacaaagatggcgcggaaattttaatcgatcgcggctgggatatggccacgggtgagaaagactttgacgatcc

SEQ ID NO: 114144 - DNA, 75 bp, synthetic construct
  source 1..75: mol_type = other DNA
atttgctgcagtggcaaaattgcttgagccaaaaatcaaacaggcggtggcgttgcgtcagcaagaggtacaaca

SEQ ID NO: 114145 - DNA, 75 bp, synthetic construct
  source 1..75: mol_type = other DNA
gctgagtatttcaaaatgggtcgcattgcaagagatcttacacatttcattatcaatagtttgcaaggctgaaaa

SEQ ID NO: 114146 - DNA, 75 bp, synthetic construct
  source 1..75: mol_type = other DNA
ttgcaagagatcttacacatttcattatcaatagtttgcaaggctgaaaacaaacagcaaattataaatatgaaa

SEQ ID NO: 114147 - DNA, 75 bp, synthetic construct
  source 1..75: mol_type = other DNA
gctttcgctgggctgcggtctggcggtgctggcgattagcgggcaggcggtgaatctcttttcgctgctggcgct

SEQ ID NO: 114148 - DNA, 75 bp, synthetic construct
  source 1..75: mol_type = other DNA
gcgagctgtactgcaatgccgattatcttgggcgcgtctaccggcgggtgtttcatctgacgttaacagaagcaa

SEQ ID NO: 114149 - DNA, 75 bp, synthetic construct
  source 1..75: mol_type = other DNA
cccaaaccaccggaacatcatccgcattatgcgtttcgctttatcgatctatttgccggaattggcggcatccgt

SEQ ID NO: 114150 - DNA, 75 bp, synthetic construct
  source 1..75: mol_type = other DNA
ggcggttcagcgttatttccttgcgctggaagaaggggtgaatttattgccgggattttcgccggagctgcaagg

SEQ ID NO: 114151 - DNA, 75 bp, synthetic construct
  source 1..75: mol_type = other DNA
gtacaactacaaaatcggaatgcaaatccgctcccctcttgcacggtacatctacaagcgaatgagccactactg

SEQ ID NO: 114152 - DNA, 75 bp, synthetic construct
  source 1..75: mol_type = other DNA
tgctgattgtggatgtcgccttgaatcgcggtcaggataatccgcaactaatcttcgaaagcatgaactcaacag

SEQ ID NO: 114153 - DNA, 75 bp, synthetic construct
  source 1..75: mol_type = other DNA
cgatgttgaaataggtttcagcgatctttctgagcttccttatgtgatgggattaattcgtcaggcatttaaaaa

SEQ ID NO: 114154 - DNA, 75 bp, synthetic construct
  source 1..75: mol_type = other DNA
cccacgaatgcccgagaacgtcagggccatgaagctcgccctggaggccctcatcaagcaagaggtcataagcga

SEQ ID NO: 114155 - DNA, 75 bp, synthetic construct
  source 1..75: mol_type = other DNA
aggcgaagaagaagatggtgagctggcaaattttgctgctgaccgcttctacgatctgtgtaaagacctgacagc

SEQ ID NO: 114156 - DNA, 75 bp, synthetic construct
  source 1..75: mol_type = other DNA
tacagcctgagtgattatccttttcttgctgatggttcgcatagccgggtgttattcgatcatcttagcgatgaa

SEQ ID NO: 114157 - DNA, 75 bp, synthetic construct
  source 1..75: mol_type = other DNA
gtgagagagcgcatctaccatccaaaacccagtctcggtatggccgcgcagtttcggttactgatcaaaaatgat

SEQ ID NO: 114158 - DNA, 75 bp, synthetic construct
  source 1..75: mol_type = other DNA
ttgatgattttcttgctaagaatatatcggctgaatattttaccgacacttatatggcgaagtggaagggtgagc

SEQ ID NO: 114159 - DNA, 75 bp, synthetic construct
  source 1..75: mol_type = other DNA
gtcgttttttcagttttgagccgggggcgaagtggcacggctttgaaggatatgccgcggatcagtattttgttg

SEQ ID NO: 114160 - DNA, 75 bp, synthetic construct
  source 1..75: mol_type = other DNA
aaacaatccttccctaaaagctggctggttaaccttcgcacccaacgcgaagcctgcggcttaacaaccgccgaa

SEQ ID NO: 114161 - DNA, 75 bp, synthetic construct
  source 1..75: mol_type = other DNA
cggagagtatgaaccaaccatcagtatgcttatcccactggcaaatattcttggctgcgatccgatgtggctgtt

SEQ ID NO: 114162 - DNA, 75 bp, synthetic construct
  source 1..75: mol_type = other DNA
tatgccgcggagcagtattttgtcgatccgtgtaagctgttactgaccacaccaggtattgatgctgaaaccggt

SEQ ID NO: 114163 - DNA, 75 bp, synthetic construct
  source 1..75: mol_type = other DNA
attgcggcgcatttgctggatctgccttcctaccgtcgtttcccggatgatgatgaatttcaacgtgaactgaaa

SEQ ID NO: 114164 - DNA, 75 bp, synthetic construct
  source 1..75: mol_type = other DNA
gggttacgcgagaaatattgaagctctatgttgccttcaaagcggagacgaattttgttgatgtggtgccgcaaa

SEQ ID NO: 114165 - DNA, 75 bp, synthetic construct
  source 1..75: mol_type = other DNA
ttccgcacagcaagctgagcaaagaatacgatcacattaaagacgttaacgatctgaccagaatcgacaatcaaa

SEQ ID NO: 114166 - DNA, 75 bp, synthetic construct
  source 1..75: mol_type = other DNA
gtgaccagcctgcgcaaagtggactgggaaagtctgcggcctaatttctattttattttcccggaaggggcatta

SEQ ID NO: 114167 - DNA, 75 bp, synthetic construct
  source 1..75: mol_type = other DNA
cgggggcggttgaagatatggccgccctgtttgagtatctggccgaaaatgcctcgctatgggacgccagaaacg

SEQ ID NO: 114168 - DNA, 75 bp, synthetic construct
  source 1..75: mol_type = other DNA
ggtcatgttccgcgcacagctcaatgagcaggatttaccgatttcactaaccgtggtcggcattgcaccggaaga

SEQ ID NO: 114169 - DNA, 75 bp, synthetic construct
  source 1..75: mol_type = other DNA
gctatctgcatgggctgacgcagacgctgaacgcctgacagttacggccctgccagccgttaccacttatggcga

SEQ ID NO: 114170 - DNA, 75 bp, synthetic construct
  source 1..75: mol_type = other DNA
gccagtttgaagcggtgcgtaaactattgggtaacgaccaacgggcgcatctgttgcccttagggattgaacaac

SEQ ID NO: 114171 - DNA, 75 bp, synthetic construct
  source 1..75: mol_type = other DNA
gccattgcggggctgaatgtggacgggctgaagaaaaacgcgcgggatatcagtctgcagaggtatgtgccagcc

SEQ ID NO: 114172 - DNA, 75 bp, synthetic construct
  source 1..75: mol_type = other DNA
agcggtgcgctgctgctgtcgctttgcggcggctggctgggcgcgcgactggtaaaagggaaggcgctgttcagg

SEQ ID NO: 114173 - DNA, 75 bp, synthetic construct
  source 1..75: mol_type = other DNA
gcgatcgccagtaccctgaaatccgcatcactttccgacattgagatgcgtggtttcacctttgatcaaaaacgc

SEQ ID NO: 114174 - DNA, 75 bp, synthetic construct
  source 1..75: mol_type = other DNA
tatgggcgatacccaggagttccgcgctaaagtgaccagcctgcgcaaagtggactgggaaagtctgcggcctaa

SEQ ID NO: 114175 - DNA, 75 bp, synthetic construct
  source 1..75: mol_type = other DNA
ccgtggtcggtattgcgccggaagagctatctacatgggctgatgcggacgcagaacgcctgacaatcacggcac

SEQ ID NO: 114176 - DNA, 75 bp, synthetic construct
  source 1..75: mol_type = other DNA
tgagaaatggttgttaccccagcttaaacccgaacaacgctggtacggtctggaacaggacgaaggcgcgctggg

SEQ ID NO: 114177 - DNA, 75 bp, synthetic construct
  source 1..75: mol_type = other DNA
ttgatttcccgtgggagccagactggcgattgtggattgtgctgccgtgcagcggtgcgctgctgctgtcgcttt

SEQ ID NO: 114178 - DNA, 75 bp, synthetic construct
  source 1..75: mol_type = other DNA
tcccggagcagaagcggattgtgaatttacgctcgcaggtgacgatggcgctgaaaaaatatcgcccacaggccg

SEQ ID NO: 114179 - DNA, 75 bp, synthetic construct
  source 1..75: mol_type = other DNA
gctggaggaagcgcaaaagcgcggcctgaaagtcggcaagcagctgactttcgccaccatgacctttgcaggcga

SEQ ID NO: 114180 - DNA, 75 bp, synthetic construct
  source 1..75: mol_type = other DNA
gcgcatctgctgccgttaggcattgaacaacttccggcactgaaagcctttgataccgtcttttcgatgggcgtg

SEQ ID NO: 114181 - DNA, 75 bp, synthetic construct
  source 1..75: mol_type = other DNA
ctgggcagtgtgaccatcaccggtattgacccggctgaacgcactgtgaccaccaccggcggagtgatccactaa

SEQ ID NO: 114182 - DNA, 75 bp, synthetic construct
  source 1..75: mol_type = other DNA
ttcccattatcggcggtattctgctggccattgtcgcccttgtcgtcacgtcactgccctcctcaccgccggcag

SEQ ID NO: 114183 - DNA, 75 bp, synthetic construct
  source 1..75: mol_type = other DNA
ggtattccgtggcatgagctgccagcttcacacaggggaaacaatcagatgagtttgcctttacctcagaattaa

SEQ ID NO: 114184 - DNA, 75 bp, synthetic construct
  source 1..75: mol_type = other DNA
cagataacaaaactgtccgggggcgtcgccgccctgtcagatgccctgcgcaaggatgaagacgccctgcgtaac

SEQ ID NO: 114185 - DNA, 75 bp, synthetic construct
  source 1..75: mol_type = other DNA
gaacggcgggaagaatatcaggctgaaaggagcattttatgagcaatcttttgcagacgggcgcggagttcgaga

SEQ ID NO: 114186 - DNA, 75 bp, synthetic construct
  source 1..75: mol_type = other DNA
tcgatggacagcggcatggcctggatacgctggaaagacagtacctggtctgtccgtcagggagaccggctgggc

SEQ ID NO: 114187 - DNA, 75 bp, synthetic construct
  source 1..75: mol_type = other DNA
actcttcggagagtatcccttggcatgatctgccagcttcacacagaggaaacaatcagatgagtttgcccttac

SEQ ID NO: 114188 - DNA, 75 bp, synthetic construct
  source 1..75: mol_type = other DNA
gtcagcgatcgccagcaccctgaaaacggcgtcactttccgacatcgagatgcgtggtttcacctttgatcaaaa

SEQ ID NO: 114189 - DNA, 75 bp, synthetic construct
  source 1..75: mol_type = other DNA
agcagcacgggttgtttaagcagtggtcaaatgcggtggagtttctacctgaaattaaaccgtatcgtcttgatt

SEQ ID NO: 114190 - DNA, 75 bp, synthetic construct
  source 1..75: mol_type = other DNA
gaatgaaggcgaactggtgctggaaacgctgattgttgatggcgatgagcacacagtactggtgccaggcgatcg

SEQ ID NO: 114191 - DNA, 75 bp, synthetic construct
  source 1..75: mol_type = other DNA
gagcaggatttaccgctttcactaaccgtggtcggcattgcaccggaagaactgtctgcatgggctggtgcggac

SEQ ID NO: 114192 - DNA, 75 bp, synthetic construct
  source 1..75: mol_type = other DNA
accggaagggaacctgctaacagggccgtggcagcctcgcgtcagctaccgaaaacagtgggcgcgctggcgggt

SEQ ID NO: 114193 - DNA, 75 bp, synthetic construct
  source 1..75: mol_type = other DNA
atcgctggcagattttcttgattcacatgatccgggtaaaacggttgaaggttatcctgcgcctaaacgcgcggt

SEQ ID NO: 114194 - DNA, 75 bp, synthetic construct
  source 1..75: mol_type = other DNA
atcgctggccgattttctcgacccgcatgatccgggtaagacggtagaaggttatcctgcgcctaaacgcgcggt

SEQ ID NO: 114195 - DNA, 75 bp, synthetic construct
  source 1..75: mol_type = other DNA
ggttaaaggtatcggatctgatggcgcacttcgtccgggagccgacacatggcgcattgccagttacggcaccac

SEQ ID NO: 114196 - DNA, 75 bp, synthetic construct
  source 1..75: mol_type = other DNA
ataccagcaacagtgtgcagaactacatcgtcagcatgaacaatttcatcgggccggtgcagatgatggtcagcg

SEQ ID NO: 114197 - DNA, 75 bp, synthetic construct
  source 1..75: mol_type = other DNA
tgattgaacagtgcgtggcgctgacgtcatctccggtgattagtgatgcgctggtggagcaggcgctggaaggag

SEQ ID NO: 114198 - DNA, 75 bp, synthetic construct
  source 1..75: mol_type = other DNA
agcctgaaaattccggcactggcggagcgcacggaagacattccactgctggcaaatcacttgttgcgccaggca

SEQ ID NO: 114199 - DNA, 75 bp, synthetic construct
  source 1..75: mol_type = other DNA
atcagcggcgtgcgtggcggcactattgatatggagatgtctggctcgaataactttgccggattatcacctgtg

SEQ ID NO: 114200 - DNA, 75 bp, synthetic construct
  source 1..75: mol_type = other DNA
tattggtcgatgatgatcccggattgttgaaattacttggtctgcgcctgaccagcgaaggctacagcgtggtca

SEQ ID NO: 114201 - DNA, 75 bp, synthetic construct
  source 1..75: mol_type = other DNA
ggcaacgtgcgccagttggtcaacgtgattgaacagtgtgtggcgctgacatcatctccggtaattagtgatgcg

SEQ ID NO: 114202 - DNA, 75 bp, synthetic construct
  source 1..75: mol_type = other DNA
gttgtgataaagacagggtgaaaaatatttatatccgtttggtttcagaactcacacagatgagtgaagaaacta

SEQ ID NO: 114203 - DNA, 75 bp, synthetic construct
  source 1..75: mol_type = other DNA
ggtaagaaagtgcagactttccctggacgcttcccgatgggtaaatctgacttccgggtgcatactttcgaagaa

SEQ ID NO: 114204 - DNA, 75 bp, synthetic construct
  source 1..75: mol_type = other DNA
gactggcaccgcagcatccgcaatatgcggcgatgcatgaatcgttactggccttactcagtgacaccaaaccgt

SEQ ID NO: 114205 - DNA, 75 bp, synthetic construct
  source 1..75: mol_type = other DNA
gttctgcatgaccattacctcgatcgtgttactgatgttgccgatcgtttcccggatcgggcgcgcaaagacggt

SEQ ID NO: 114206 - DNA, 75 bp, synthetic construct
  source 1..75: mol_type = other DNA
ctggtggagcaggcgctggagggcgaaaatacggcgctgccaacttttgttgaggcgcgtaatcaatttgagctc

SEQ ID NO: 114207 - DNA, 75 bp, synthetic construct
  source 1..75: mol_type = other DNA
atgaaaaaagctggcctgtcaattagccgcgtattgtgcggtgatgaaaacgagatccgcatagaaattaaattt

SEQ ID NO: 114208 - DNA, 75 bp, synthetic construct
  source 1..75: mol_type = other DNA
gccagtgatgatgctttcggcggtagcgggtttaatgcaggcggggaatggaattttggcgttcagatggaaacc

SEQ ID NO: 114209 - DNA, 75 bp, synthetic construct
  source 1..75: mol_type = other DNA
atgaataatatcaaaatgatcacactcttccatccacatgacaaaacaccatttatgatctgtattgtaaacaca

SEQ ID NO: 114210 - DNA, 75 bp, synthetic construct
  source 1..75: mol_type = other DNA
gaggatggagagctacagcctgaagtggtagtccccatcctcgataccattgtccgccatcttgaagcagcggcc

SEQ ID NO: 114211 - DNA, 75 bp, synthetic construct
  source 1..75: mol_type = other DNA
ctttccctgacccatcacgcctattccccgcttctggtggtgatcaacaaagcgaagtttgatggcttaacgcct

SEQ ID NO: 114212 - DNA, 75 bp, synthetic construct
  source 1..75: mol_type = other DNA
ccaaaatgcatgaaggtgtcagcggtcgtaatatgtggatggattgtgtggtaaatggcattaatgcccgcaaac

SEQ ID NO: 114213 - DNA, 75 bp, synthetic construct
  source 1..75: mol_type = other DNA
ttgggcattatcgcctttatcgctggcctggatatgtttaacggcttaacccatatgcaccgcccggtggtcctc

SEQ ID NO: 114214 - DNA, 75 bp, synthetic construct
  source 1..75: mol_type = other DNA
acgctatggtgaaggggttcgccgtattagcttacttggacagcatgtactttatgaagtgaatgatgaggccag

SEQ ID NO: 114215 - DNA, 75 bp, synthetic construct
  source 1..75: mol_type = other DNA
atggcttccgataacctggtcagtatcaccattaacgataaatccctgcgccggagcctccgtgcgctggatctt

SEQ ID NO: 114216 - DNA, 75 bp, synthetic construct
  source 1..75: mol_type = other DNA
atgagttatgaaatagaatggcgaccaggtgcaattgaagatataactgcgctgtttgaatatctggctgagaat

SEQ ID NO: 114217 - DNA, 75 bp, synthetic construct
  source 1..75: mol_type = other DNA
gcgcaaactggttgccgaagatcagcaaaaaatcatcgacggtatgaaagaagcgggcgtggaagtcatcaccga

SEQ ID NO: 114218 - DNA, 75 bp, synthetic construct
  source 1..75: mol_type = other DNA
ttgcaggagagaaccaaaggcgagctgaaattaaaactgttcccggacagtactctcggtaacgcacaagcgatg

SEQ ID NO: 114219 - DNA, 75 bp, synthetic construct
  source 1..75: mol_type = other DNA
cgacggtaaaaatgaccattatcagcgaagcgggtactcagaccacgcagacgccagacgcctttttaaccagct

SEQ ID NO: 114220 - DNA, 75 bp, synthetic construct
  source 1..75: mol_type = other DNA
actcagaccacgcagacgcctgacgcctttttaaccagctatcaacgacaaatgtgcgctgacccaacagtgaaa

SEQ ID NO: 114221 - DNA, 75 bp, synthetic construct
  source 1..75: mol_type = other DNA
tggatgaaatggacggtatgcagctgtttgctgaaattcagaaagtgcagccgggaatgccagtaattattctta

SEQ ID NO: 114222 - DNA, 75 bp, synthetic construct
  source 1..75: mol_type = other DNA
aatccggcgaaagagcaggaagtgctggcgatgggtgccgataaagtggtgaatagccgcgatccgcaggcactg

SEQ ID NO: 114223 - DNA, 75 bp, synthetic construct
  source 1..75: mol_type = other DNA
tactggtcgatgacgatccaggattgctgaaactgcttggtctgcgtctgaccagcgaaggttatagcgtggtta

SEQ ID NO: 114224 - DNA, 75 bp, synthetic construct
  source 1..75: mol_type = other DNA
gggtgtggcaaatgcaatgcaaacattatggtctgagatagcgctgcgtgagactcgagtcggtcgcttggttcg

SEQ ID NO: 114225 - DNA, 75 bp, synthetic construct
  source 1..75: mol_type = other DNA
gctattgctacgactggcagcatcagttatcactgtgaacaaggtgggaaagctctgcaggtaaaattgtgggat

SEQ ID NO: 114226 - DNA, 75 bp, synthetic construct
  source 1..75: mol_type = other DNA
aattgaaaacaaagcagagatccagcatctgccacagtattttgattaccaccagaaaccctgcatgcagcaaat

SEQ ID NO: 114227 - DNA, 75 bp, synthetic construct
  source 1..75: mol_type = other DNA
tagggatggccccattattagtccaacagttatgtcagttacatcgtacgctgaatcccttgatggtgacatatg

SEQ ID NO: 114228 - DNA, 75 bp, synthetic construct
  source 1..75: mol_type = other DNA
ccccgtatctgtatgcttcgcaccgtcgccggtgatgaacgcagtgcccgccgttcccttgtccgagactatgtg

SEQ ID NO: 114229 - DNA, 75 bp, synthetic construct
  source 1..75: mol_type = other DNA
ccccgtatctgtatgcttcgcaccgttgccggtgatgaacacgccgcacgtctttccctcgttcgcgattacgtc

SEQ ID NO: 114230 - DNA, 75 bp, synthetic construct
  source 1..75: mol_type = other DNA
ggtcagtttacgccggggaccacgaatattttcatttacggcaagcagggccatctggtcggtaaacttgataaa

SEQ ID NO: 114231 - DNA, 75 bp, synthetic construct
  source 1..75: mol_type = other DNA
ttacattgttgcggaagctggatattatcaatgccgcaactacctggaaggacttgagatcaccaccaggtaatc

SEQ ID NO: 114232 - DNA, 75 bp, synthetic construct
  source 1..75: mol_type = other DNA
gtttttctgttcggcgctatgtgggggatcggtaatatcaactacggtctgaccatgcgttatctcggcatgtcg

SEQ ID NO: 114233 - DNA, 75 bp, synthetic construct
  source 1..75: mol_type = other DNA
tcgccgtccggtaacggtgttgagcgttggttgtgtggtgattattgtcgccgccaacatcgtcggtataggcat

SEQ ID NO: 114234 - DNA, 75 bp, synthetic construct
  source 1..75: mol_type = other DNA
gaatactggcgcaatatgttgcaggacgaagtgttgcaaagcgccctgttctactcagtgaaagtgtcactgctg

SEQ ID NO: 114235 - DNA, 75 bp, synthetic construct
  source 1..75: mol_type = other DNA
tcgaagcgaccggcacctatatggaacctgtcgcagagtgcctttacgatgctggctacatagtgtcagtcatta

SEQ ID NO: 114236 - DNA, 75 bp, synthetic construct
  source 1..75: mol_type = other DNA
acaaaaatggtaattgcacccatgtgtataccaatggcggatttcttgttgggggaaccgtcagcgcgctgaact

SEQ ID NO: 114237 - DNA, 75 bp, synthetic construct
  source 1..75: mol_type = other DNA
cctcggtttctgttttattcgtctggcaaaagtgaaggatttgtcgctaaaagccgacttctcgctggcaaaacc

SEQ ID NO: 114238 - DNA, 75 bp, synthetic construct
  source 1..75: mol_type = other DNA
ctggcttagttgttactgatagccaagggtcgatggaaatcgatatgctaattattactgctgaccgtctgctat

SEQ ID NO: 114239 - DNA, 75 bp, synthetic construct
  source 1..75: mol_type = other DNA
cgcgtctgtggctgacccgtgccacgttatggatcctcgacgagccttttaccgcgattgacgttaacggcgtcg

SEQ ID NO: 114240 - DNA, 75 bp, synthetic construct
  source 1..75: mol_type = other DNA
cgactgcgatcagttccagagcagccgaatgatgaagcttatcaacgcgatgatgaatataatcagcaatcgaac

SEQ ID NO: 114241 - DNA, 75 bp, synthetic construct
  source 1..75: mol_type = other DNA
acatcctggcgcgggtaacccggatggcacggtactgaatgcgttgcttcattactatccgcccattgccgatgt

SEQ ID NO: 114242 - DNA, 75 bp, synthetic construct
  source 1..75: mol_type = other DNA
tactctgcgaacgggatgaacgaactttatttagcggtttgtcctttacgctgaatgcaggagagtgggtacaaa

SEQ ID NO: 114243 - DNA, 75 bp, synthetic construct
  source 1..75: mol_type = other DNA
tttgctgggacgcaaagattatcaacagctgccgggggctgcgaactctggattacgtgctgatgtttattcccg

SEQ ID NO: 114244 - DNA, 75 bp, synthetic construct
  source 1..75: mol_type = other DNA
agccaatacgggaaagaacaacaacgccagcaaagcggcgatgaacctgctggtcggtgccggcattccggtgcg

SEQ ID NO: 114245 - DNA, 75 bp, synthetic construct
  source 1..75: mol_type = other DNA
aaatctgcgcattgcaacaaaaacttgaagccaagaaaaaggatatcgaatcaaatgtatgggctgctttaaact

SEQ ID NO: 114246 - DNA, 75 bp, synthetic construct
  source 1..75: mol_type = other DNA
taattcaacaaggagtaaatggaatatcccactgtacagttttctggtttttataaggtattttgggatttttat

SEQ ID NO: 114247 - DNA, 75 bp, synthetic construct
  source 1..75: mol_type = other DNA
tatcgttaatttatcagaagtatttgtattacttcaactctgatttaacgcaaaaaatggataatcaggaaacgg

SEQ ID NO: 114248 - DNA, 75 bp, synthetic construct
  source 1..75: mol_type = other DNA
tcaacgcttagatcaagctttggctgaaatgttcccggattattcacgttcgcgaataaaagaatggatcctcga

SEQ ID NO: 114249 - DNA, 75 bp, synthetic construct
  source 1..75: mol_type = other DNA
gaaatgttcccggattattcacgttcgcggataaaagaatggctcctcgaccagcgcgtgctggttaacggcaaa

SEQ ID NO: 114250 - DNA, 75 bp, synthetic construct
  source 1..75: mol_type = other DNA
ccagcgcgtgctggtaaacggcaaagtttgtgataagccgaaagaaaaagtattgggtggcgagcaggttgccat

SEQ ID NO: 114251 - DNA, 75 bp, synthetic construct
  source 1..75: mol_type = other DNA
cccggcaggaagagtcggtgctgcttcccgtcctgctggcactggatgctgaactggtttttggcaacggcgaaa

SEQ ID NO: 114252 - DNA, 75 bp, synthetic construct
  source 1..75: mol_type = other DNA
tcgccggtgatgaacgcagtgcccgccgttcccttgtccgagactatgtgctctcccttgctgcccgtctgccgg

SEQ ID NO: 114253 - DNA, 75 bp, synthetic construct
  source 1..75: mol_type = other DNA
gtgtcgatcttcacactggagaaagcatattccgcaggcgtaacgccggaacaatcgcaaacgctgattaatcag

SEQ ID NO: 114254 - DNA, 75 bp, synthetic construct
  source 1..75: mol_type = other DNA
ccgcgcaagaagcgggtagctaccagcgcaaactggttgctgaagatcagcaaaaaatcatcgacggtatgaaag

SEQ ID NO: 114255 - DNA, 75 bp, synthetic construct
  source 1..75: mol_type = other DNA
gccgatacagccggaagagcggctttaacgtgccgtttggcaagtataagagcgtctactttcctgaaaatgaaa

SEQ ID NO: 114256 - DNA, 75 bp, synthetic construct
  source 1..75: mol_type = other DNA
gttgcgtcaggcggagcgactggtcggcaaacgcttctcggaggtgatcaatgagatcccgtcggaactgctgga

SEQ ID NO: 114257 - DNA, 75 bp, synthetic construct
  source 1..75: mol_type = other DNA
atggaaacatctctggctgaccctgtttcggctgaatgcccatgtggcccggatctggagtacgatcctgaatac

SEQ ID NO: 114258 - DNA, 75 bp, synthetic construct
  source 1..75: mol_type = other DNA
acagtaagtttcagctctgtttcaggcttcagcccgacacccctcattactggtataaccggtattgtcgtcact

SEQ ID NO: 114259 - DNA, 75 bp, synthetic construct
  source 1..75: mol_type = other DNA
atctacgatctaacagaggcccaacaactaacagctgaagagcaggtggaaaaatgggtagacggaaagaaaaag

SEQ ID NO: 114260 - DNA, 75 bp, synthetic construct
  source 1..75: mol_type = other DNA
ctgttggggatgatcacccgccagaccaaagccgacatcgtggtggttgggctgattggcgaacgcgggcgcgaa

SEQ ID NO: 114261 - DNA, 75 bp, synthetic construct
  source 1..75: mol_type = other DNA
aagcggaggcacgacgaattgagagctgggtgcagcggcaaatcgcagatcttgggacaaccaggatcgccgaag

SEQ ID NO: 114262 - DNA, 75 bp, synthetic construct
  source 1..75: mol_type = other DNA
ctgaacagatgcaggcagagcagattgcgctaccggtgcatatcgcggaggaaatatcaccgatgaccggcgcag

SEQ ID NO: 114263 - DNA, 75 bp, synthetic construct
  source 1..75: mol_type = other DNA
tgcgcccgcgcagtgctggacggacatatcgtattaacccgcaaactggcggaagcggggcactatccggccatt

SEQ ID NO: 114264 - DNA, 75 bp, synthetic construct
  source 1..75: mol_type = other DNA
aatcttaattttgatgacacattatcaatgctgacattcgggcctaatctcgttatttactgcgatccgccatat

SEQ ID NO: 114265 - DNA, 75 bp, synthetic construct
  source 1..75: mol_type = other DNA
gttcagcacatcttctctggcggcacaatcattacgtttcggttatgaaacctcacaaaccgattcacaacatat

SEQ ID NO: 114266 - DNA, 75 bp, synthetic construct
  source 1..75: mol_type = other DNA
gaattccagcaagcgctaatttcatctgcacaagaggcaggcaactaccagcgcaaactggttgccgaagatcag

SEQ ID NO: 114267 - DNA, 75 bp, synthetic construct
  source 1..75: mol_type = other DNA
atgttcgatgttgacgatactgcacccgatactcccgccccccgtgaactcagtcaggatgtgcaggcgctgatc

SEQ ID NO: 114268 - DNA, 75 bp, synthetic construct
  source 1..75: mol_type = other DNA
tatcgttaattgaccagaagtatttgtattacttacactctgatttaacgcaaaaaatggataatcaggaaacgg

SEQ ID NO: 114269 - DNA, 75 bp, synthetic construct
  source 1..75: mol_type = other DNA
cgcttaaaacgttattgctggagcgcggcgacatatcatttggacaagttgtagatagtgatgtggcagagatct

SEQ ID NO: 114270 - DNA, 75 bp, synthetic construct
  source 1..75: mol_type = other DNA
gggaatcgcctagtgaatgtagtggggcaaagaaaaaatttttcagcattatcaaaaggaagcatggcagttttc

SEQ ID NO: 114271 - DNA, 75 bp, synthetic construct
  source 1..75: mol_type = other DNA
ttacattgttgcggaagctggatattatcaatgctgcaactacttggaaggacttgagatcaccaccaggtaatc

SEQ ID NO: 114272 - DNA, 75 bp, synthetic construct
  source 1..75: mol_type = other DNA
catgatgatgttcaggaaaatccgcctgcgggagccggggttctatcgccacggacgcgttaccagacggaaaaa

SEQ ID NO: 114273 - DNA, 75 bp, synthetic construct
  source 1..75: mol_type = other DNA
gagtactggcgcacgatgttacaggacgatgtactgcacagtgcactgttttactcagtcaaagtttcactgctg

SEQ ID NO: 114274 - DNA, 75 bp, synthetic construct
  source 1..75: mol_type = other DNA
acgccgtccggttaccgtattgagcctcggttgtgtggtgattattgtcgccgccaacatcgtcggcatgggcat

SEQ ID NO: 114275 - DNA, 75 bp, synthetic construct
  source 1..75: mol_type = other DNA
cgggacctttcatccgacagcaggccgaagcgattacccgccggtatcacaacatcgcaattgaagacgaccagg

SEQ ID NO: 114276 - DNA, 75 bp, synthetic construct
  source 1..75: mol_type = other DNA
attgcaaccggcgaccgtttgcgtcgtatgtacacccgcgatagtgacatgattacccgaagtggtagcggcgct

SEQ ID NO: 114277 - DNA, 75 bp, synthetic construct
  source 1..75: mol_type = other DNA
tggatgaggagttgttccacagtgtggatgaacagctactctccgtatttcctgctggatgtaccaattgcatga

SEQ ID NO: 114278 - DNA, 75 bp, synthetic construct
  source 1..75: mol_type = other DNA
aactcatatgcagtgattaatcagatggatgagatgatacctatgcagcttatgaaaatggcctccggagccaat

SEQ ID NO: 114279 - DNA, 75 bp, synthetic construct
  source 1..75: mol_type = other DNA
caatagaaataaacagcaatatcagcgacggcgtaatagcttcatcccacaagacaattctcatgggcgcacgac

SEQ ID NO: 114280 - DNA, 75 bp, synthetic construct
  source 1..75: mol_type = other DNA
atacgcactccgttgcgattggttcacatggacacaccatcaccgttaacgctgctggtaacgcggaaaacaccg

SEQ ID NO: 114281 - DNA, 75 bp, synthetic construct
  source 1..75: mol_type = other DNA
tatcatccaagttaatggctataagcgaagaacttgaaaagctgggatgttcattttactcatgcgatgcccgtt

SEQ ID NO: 114282 - DNA, 75 bp, synthetic construct
  source 1..75: mol_type = other DNA
gcaatggatgatctccgggttggggtacttgcagagagtttaccaattttgttcaaaagtgaacctgttatccag

SEQ ID NO: 114283 - DNA, 75 bp, synthetic construct
  source 1..75: mol_type = other DNA
ttgtatgtacaaagcggtgtgcgctggatctgggggggaggattgttgatgattgcgggcgcattgttaagcgga

SEQ ID NO: 114284 - DNA, 75 bp, synthetic construct
  source 1..75: mol_type = other DNA
cgcccaacatagctacagcctgctgtcgtgggaactcaaactggcggcagtgtggggagggcatgaaggttcgtt

SEQ ID NO: 114285 - DNA, 75 bp, synthetic construct
  source 1..75: mol_type = other DNA
taataaaaagcattattttaattttagaacaaatctttttaattctgagtcgagatggattagtattaatttctt

SEQ ID NO: 114286 - DNA, 75 bp, synthetic construct
  source 1..75: mol_type = other DNA
tagccttgcgtctctggctctgtatggctggcgagcgcgggacggtggcccggcggtgcgtttttcggggttatc

SEQ ID NO: 114287 - DNA, 75 bp, synthetic construct
  source 1..75: mol_type = other DNA
cattaacagcggggatcatcctcggttcctggtgggcctattgcgaactgggctggggcggctggtggttctggg

SEQ ID NO: 114288 - DNA, 75 bp, synthetic construct
  source 1..75: mol_type = other DNA
gcgctgctgctgtttgtgttgctgtggtctgatccctttgtgcgcatattcccaccagcaatagaaggccgcgat

SEQ ID NO: 114289 - DNA, 75 bp, synthetic construct
  source 1..75: mol_type = other DNA
tttattaagttgggctgtgatactcgcaagctgctattactcaattgcttctttgtttggtgtttttaatcctat

SEQ ID NO: 114290 - DNA, 75 bp, synthetic construct
  source 1..75: mol_type = other DNA
tatatgtggaagataaaattagttttttgagtaatgatgagaaaaccataaggaaatacttgaaagattcacata

SEQ ID NO: 114291 - DNA, 75 bp, synthetic construct
  source 1..75: mol_type = other DNA
ttgagcattataaaaagtggaaaaccttctataaaagtgacctgagctttgatgagtggaaaaacaaagtcctga

SEQ ID NO: 114292 - DNA, 75 bp, synthetic construct
  source 1..75: mol_type = other DNA
cgggattatcctgttctggcaaatacctacctgcagcactggcaaactcgttgggagatgggaaaagactggagt

SEQ ID NO: 114293 - DNA, 75 bp, synthetic construct
  source 1..75: mol_type = other DNA
tgtatcgataaattatacagcatgggagttttgtaccttacatttactggtggtgaggcttttttatataaaaga

SEQ ID NO: 114294 - DNA, 75 bp, synthetic construct
  source 1..75: mol_type = other DNA
ttttccgccactggtcgctgttgctggcgatagttactctgatgctgtcgctgctgggcaccttaattgtccgtt

SEQ ID NO: 114295 - DNA, 75 bp, synthetic construct
  source 1..75: mol_type = other DNA
atttaagcgtcgatttcagttatggctaaacactctctggcaagagaaagatcagtacctgaacacgcttatctc

SEQ ID NO: 114296 - DNA, 75 bp, synthetic construct
  source 1..75: mol_type = other DNA
aggcaagagtagcacaaggtgtaccaatgacgcctgcgacgaggaacccagaggaagtcgttcgcacagtagcag

SEQ ID NO: 114297 - DNA, 75 bp, synthetic construct
  source 1..75: mol_type = other DNA
gctgctttgggtgctgctgctttccgcctggagcgcgctgtttgcctggcattatcggcagcaaaccgatccgct

SEQ ID NO: 114298 - DNA, 75 bp, synthetic construct
  source 1..75: mol_type = other DNA
agatatacaccgatagtgctggctacccggtaaaaattactcacagtactgttcactcggtattctttcggagga

SEQ ID NO: 114299 - DNA, 75 bp, synthetic construct
  source 1..75: mol_type = other DNA
agcttctcatcaccgatcttttactgcgtattgagcattacctgcaaccgggcgttgtgttaccggttcctcatc

SEQ ID NO: 114300 - DNA, 75 bp, synthetic construct
  source 1..75: mol_type = other DNA
gttcgcccatttgcaaacgttgttacccaaaccgccagcacatcatccgcattatacgtttcgctttatcgatct

SEQ ID NO: 114301 - DNA, 75 bp, synthetic construct
  source 1..75: mol_type = other DNA
tgtaattgtatacgctacatttcatgcaactgttattataactggatatgtatctgaattcttggaacgaaatta

SEQ ID NO: 114302 - DNA, 75 bp, synthetic construct
  source 1..75: mol_type = other DNA
gctcgcctttggcgtactgacgtattgttttctcatcagcgatttctcggtcatttatgtcgcccaacatagcta

SEQ ID NO: 114303 - DNA, 75 bp, synthetic construct
  source 1..75: mol_type = other DNA
aacccagtgataacgatttggccgaagaggaactgttatcgcagggagcctgtgttggacgcgactcagctttac

SEQ ID NO: 114304 - DNA, 75 bp, synthetic construct
  source 1..75: mol_type = other DNA
aagtgacgatcaaaaaaatggcatcccgtgactttattcagttatgtgtggttgccgtaaattttttgagcggtg

SEQ ID NO: 114305 - DNA, 75 bp, synthetic construct
  source 1..75: mol_type = other DNA
aatgtttatactgctttttcggattatgtttatatttccgcggagctaagctatttgatgatggttattcatggc

SEQ ID NO: 114306 - DNA, 75 bp, synthetic construct
  source 1..75: mol_type = other DNA
atgacaatgctactgccgctcttcattctggttggttttattgcaggttattttgttaatgctatcacctctcgc

SEQ ID NO: 114307 - DNA, 75 bp, synthetic construct
  source 1..75: mol_type = other DNA
cgatgaacccggacttcccttccctgtacccggatccggaaacgctgcaaattttcggcgtggtgacggccttca

SEQ ID NO: 114308 - DNA, 75 bp, synthetic construct
  source 1..75: mol_type = other DNA
gcgtgcgctgaaaggcgacaataaaacccagggcaactggggcgaagtggtattaacgcgagtactggaggcatc

SEQ ID NO: 114309 - DNA, 75 bp, synthetic construct
  source 1..75: mol_type = other DNA
gtgagcgagctgaaagagctaattaccgaattagattttgaacaatggttggacactgaaggtatcgtttatcga

SEQ ID NO: 114310 - DNA, 75 bp, synthetic construct
  source 1..75: mol_type = other DNA
acactatggccgcagccaggcgactgagcagtattggtcttaatgtgaaaattgcatgtttgggcgaggaaggac

SEQ ID NO: 114311 - DNA, 75 bp, synthetic construct
  source 1..75: mol_type = other DNA
acgtggagccaataggaacgttcgggatgcatctatctggtaacaccactcaggatgcagaagatcagttaggcg

SEQ ID NO: 114312 - DNA, 75 bp, synthetic construct
  source 1..75: mol_type = other DNA
atgttcgctctgattcaacgtggtcagatatacaccgatagcgccggttacccggtaaaaattgttcgctgcata

SEQ ID NO: 114313 - DNA, 75 bp, synthetic construct
  source 1..75: mol_type = other DNA
atgcctatcaaataggtcacgcgccatttaaccctgaatcacgcacgcttgatatcaacattcatctaaaagatc

SEQ ID NO: 114314 - DNA, 75 bp, synthetic construct
  source 1..75: mol_type = other DNA
actgaacttgaagaagtaacaaagttaaagaaccagcttgcacttgacgccagagttattgcgtttggcgggaaa

SEQ ID NO: 114315 - DNA, 75 bp, synthetic construct
  source 1..75: mol_type = other DNA
tatgggacgacacggtcgttgcgcagaaatacctgagccactgggcatcccgctgggcacggggggcggactgga

SEQ ID NO: 114316 - DNA, 75 bp, synthetic construct
  source 1..75: mol_type = other DNA
tgttgaaatacgatgatgagctacgcaagttgggcattcggtggatggcggaagaacccgtcaagtttatcgata

SEQ ID NO: 114317 - DNA, 75 bp, synthetic construct
  source 1..75: mol_type = other DNA
cgcccagaaaatcgccgatcgcgccagcaagctgtacgacaaaatgcgcttgtttgtcgatgacatgtccgcgat

SEQ ID NO: 114318 - DNA, 75 bp, synthetic construct
  source 1..75: mol_type = other DNA
catttatcgccatgaagagctgaaaaacctgacgccacaacaactccagcgttacttcatgcgcggcacggggcc

SEQ ID NO: 114319 - DNA, 75 bp, synthetic construct
  source 1..75: mol_type = other DNA
ctgaaccagcactgtccaccgcaccacttttcacagagcgctgtccggcaggttttccgtcaccggccgcggact

SEQ ID NO: 114320 - DNA, 75 bp, synthetic construct
  source 1..75: mol_type = other DNA
atgtttgctttgattaatcagggacaactgtataccgacagtgccggttacccggtaaaaattattcgctgcata

SEQ ID NO: 114321 - DNA, 75 bp, synthetic construct
  source 1..75: mol_type = other DNA
tgattgccgatgcccgcccggtcagccgccacatgacagggctgaatatcattcaggaaattccgggggatattt

SEQ ID NO: 114322 - DNA, 75 bp, synthetic construct
  source 1..75: mol_type = other DNA
tccgcccgtttatcccgcctgttgttgatggcaaattgtggcaggattatccgacgtcagtgttagccagcgacc

SEQ ID NO: 114323 - DNA, 75 bp, synthetic construct
  source 1..75: mol_type = other DNA
cagccagcaatttcatgcgttgtgccgaagttgtcggaacgcgcattacagacatcccggtagacctcaacacgc

SEQ ID NO: 114324 - DNA, 75 bp, synthetic construct
  source 1..75: mol_type = other DNA
atccgcacatcagcatctaccatttgaatgtagtttcggcgcgttttgcggtgtattacgtcctgagaaacttat

SEQ ID NO: 114325 - DNA, 75 bp, synthetic construct
  source 1..75: mol_type = other DNA
gcaacggttattatagctggttatattgctgaactcttagagcgcaattatattaaatacatttttggcgctcgc

SEQ ID NO: 114326 - DNA, 75 bp, synthetic construct
  source 1..75: mol_type = other DNA
agcggttataaagagaaatatatctcacatggtgccagagatttaactacactcggctattcctcatgttcagca

SEQ ID NO: 114327 - DNA, 75 bp, synthetic construct
  source 1..75: mol_type = other DNA
ggtaaattatatccaacaccaaaaaaatattgtacaaaaccaactaagattgcgtccgctggggatattttatta

SEQ ID NO: 114328 - DNA, 75 bp, synthetic construct
  source 1..75: mol_type = other DNA
ctggtgttcctcaagcactacagcggtaaatcacggcgacagttcgaagaatatgtgcagaacgcccttctttct

SEQ ID NO: 114329 - DNA, 75 bp, synthetic construct
  source 1..75: mol_type = other DNA
gcaatgcaacggaggttgaaccgccccgggtttcctggagagtattttatctgtgaactcaggctgccagatcat

SEQ ID NO: 114330 - DNA, 75 bp, synthetic construct
  source 1..75: mol_type = other DNA
gaacggctcgatcaccagaaataccgacaaattctggcagaaacagaacaggaaactcatctgaaaaaattacgg

SEQ ID NO: 114331 - DNA, 75 bp, synthetic construct
  source 1..75: mol_type = other DNA
agctaataccggaaagaacaacaacgccagtaaagcagccatgaacattctggttggtgctggtatcccggttcg

SEQ ID NO: 114332 - DNA, 75 bp, synthetic construct
  source 1..75: mol_type = other DNA
ctgcaggtgccgctgcgtgacttgtggaatccggcgacctgtccggtcagtttccttccttatctcgcctgggcg

SEQ ID NO: 114333 - DNA, 75 bp, synthetic construct
  source 1..75: mol_type = other DNA
aaattatgcgtttcggtttattgatctgtttgccggaattggtggtatccgcaaggggtttgaggcaattggtgg

SEQ ID NO: 114334 - DNA, 75 bp, synthetic construct
  source 1..75: mol_type = other DNA
ggcggttcaacgttatttccttgcgctggaagaaggggtgaatttgttgccgggattttcgccggagctgcaagg

SEQ ID NO: 114335 - DNA, 75 bp, synthetic construct
  source 1..75: mol_type = other DNA
tgttgaagtgcaggtggattactgcgggatctgccattccgatctgtcgatgatcgataacgaatggggattttc

SEQ ID NO: 114336 - DNA, 75 bp, synthetic construct
  source 1..75: mol_type = other DNA
cggtgccgcgtcatgattatcgcttcggcattaaccagccgggcaaatggcgtgaaatcctcaataccgattcca

SEQ ID NO: 114337 - DNA, 75 bp, synthetic construct
  source 1..75: mol_type = other DNA
gcactggcgctggcagacgcagctggtttgccacgcgccagtagcctgaaagcgttaactacgttcactggtttg

SEQ ID NO: 114338 - DNA, 75 bp, synthetic construct
  source 1..75: mol_type = other DNA
agcattaaccacattcactggtctgccgcatcgctttgaagttgtgctggagcataacggcgtacgttggattaa

SEQ ID NO: 114339 - DNA, 75 bp, synthetic construct
  source 1..75: mol_type = other DNA
aaacctgattgatgatccttaccgttttggtccgctaatccaggaaatggatgcctggctattatctgaaggtac

SEQ ID NO: 114340 - DNA, 75 bp, synthetic construct
  source 1..75: mol_type = other DNA
tctacgaaccggtgatgaaagaagattcattcttcaactctcggctggaacgtgatctcgccactttcaaacaac

SEQ ID NO: 114341 - DNA, 75 bp, synthetic construct
  source 1..75: mol_type = other DNA
tgcatgttgacggtacgctgcacttgttgttaggcggcgatggcaaatcggcggattttagtccgctggcgcgct

SEQ ID NO: 114342 - DNA, 75 bp, synthetic construct
  source 1..75: mol_type = other DNA
tggcattaatcagccgggtaaatggcgtgaaatcctcaacactgactccatgcactatcacggcagcaatgcggg

SEQ ID NO: 114343 - DNA, 75 bp, synthetic construct
  source 1..75: mol_type = other DNA
gactgctgtgatcgtgaggcactgcactgggcggtgactatcggcggcttcaacagtgaaacagtgtcagcgcca

SEQ ID NO: 114344 - DNA, 75 bp, synthetic construct
  source 1..75: mol_type = other DNA
cgctaccgatgtgtgggtgattgaaccgaaaaccgggcgcaaactcgcaaaactggagtgtctcgactcacgggg

SEQ ID NO: 114345 - DNA, 75 bp, synthetic construct
  source 1..75: mol_type = other DNA
gtgtgttctggcgcacaccggatacaccagagaacgatgctgccttcccccgccagacacatgccgggaacccgg

SEQ ID NO: 114346 - DNA, 75 bp, synthetic construct
  source 1..75: mol_type = other DNA
ccacttgatgaacgctacgatctgaaagactcatctaacggcaagtcctattttaacctacgggcggctaatcat

SEQ ID NO: 114347 - DNA, 75 bp, synthetic construct
  source 1..75: mol_type = other DNA
atagagtcaatttatatatcggctgtaagcttcttttccgataaggtcagaaataccatcgagaaagacttatca

SEQ ID NO: 114348 - DNA, 75 bp, synthetic construct
  source 1..75: mol_type = other DNA
gattgatgccaatggcaacttgcgtctgaagtccgacccttatgccttcgaagcgcaaatgcgcccggaaaccgc

SEQ ID NO: 114349 - DNA, 75 bp, synthetic construct
  source 1..75: mol_type = other DNA
ccgaaaaccgggcgcaaactcgcaaaactggagtgtctcgactcacggggattctttagcggtgtcattccgcga

SEQ ID NO: 114350 - DNA, 75 bp, synthetic construct
  source 1..75: mol_type = other DNA
acagcagtatcgtgcggcaaaactgcgcatttatgaaaatgcgaaagtttgcgtggttaatgctgatgatgcctt

SEQ ID NO: 114351 - DNA, 75 bp, synthetic construct
  source 1..75: mol_type = other DNA
ggcaaccgccgccaataaagcgagtggcaataacaacgacaacagtattaaagtcgataatacagaagatgctgc

SEQ ID NO: 114352 - DNA, 75 bp, synthetic construct
  source 1..75: mol_type = other DNA
tgcagaaagtttgagtctgaatactcgccagattatcgaaggcgtttgtctcgatccgcgtatcggcaaccatta

SEQ ID NO: 114353 - DNA, 75 bp, synthetic construct
  source 1..75: mol_type = other DNA
ccagcccgcaggcacgaaaaaagtggccgggactgggaaatgaggtgacagcccgcctgctgaccgtgacgcgca

SEQ ID NO: 114354 - DNA, 75 bp, synthetic construct
  source 1..75: mol_type = other DNA
taacaatccttcctttggctatggcggatattgtttaccaaaagatacgaagcaactgctcgccaattaccactc

SEQ ID NO: 114355 - DNA, 75 bp, synthetic construct
  source 1..75: mol_type = other DNA
gatgtatctggcatttgtcgcgacaattgtcggttatgggatctggggaacattgctcggacgttatgaaacctg

SEQ ID NO: 114356 - DNA, 75 bp, synthetic construct
  source 1..75: mol_type = other DNA
tctccagatataataacggatgtatctcatgctaacagcattagaaaaatatacatatgcagaatgcatgatgta

SEQ ID NO: 114357 - DNA, 75 bp, synthetic construct
  source 1..75: mol_type = other DNA
ccttcagtgcgaagatgattccgcaaaacggaaaatgaccgaaatactgtctgatgagttttatgctgctgaaaa

SEQ ID NO: 114358 - DNA, 75 bp, synthetic construct
  source 1..75: mol_type = other DNA
ctggattgaacgttttggtattgatgcgctgcgtgtcgatgcggtggcgtcgatgatttatcgcgactacagccg

SEQ ID NO: 114359 - DNA, 75 bp, synthetic construct
  source 1..75: mol_type = other DNA
gagtgcgaactgtacgtgctcgagctgtcgagcttccagcttgaaaccacctccagcttacaggcggtagcagcg

SEQ ID NO: 114360 - DNA, 75 bp, synthetic construct
  source 1..75: mol_type = other DNA
tatggcggactgcctgaaactacgcgaagaagcccgccatcttgataaggttctgggttgtggttgccggtcagt

SEQ ID NO: 114361 - DNA, 75 bp, synthetic construct
  source 1..75: mol_type = other DNA
tcgtccgcaggacatgggcggtctgggcttctggtacaagtggaatctcggctggatgcatgacaccctggacta

SEQ ID NO: 114362 - DNA, 75 bp, synthetic construct
  source 1..75: mol_type = other DNA
acagcgcagctctggcataacgccacgccgcatccgcactggtgcggcctgaccctgctggccatcgatggtgtg

SEQ ID NO: 114363 - DNA, 75 bp, synthetic construct
  source 1..75: mol_type = other DNA
atggcgaaagcagcaggtgttaacgttggcgtaggtggcaacattggtctgccagcgttgatgttacttgatgat

SEQ ID NO: 114364 - DNA, 75 bp, synthetic construct
  source 1..75: mol_type = other DNA
gaaggcgctattaagcaagacataccaacattgtttactgactcaaccgaggctgaggcgattaaactttttgcc

SEQ ID NO: 114365 - DNA, 75 bp, synthetic construct
  source 1..75: mol_type = other DNA
tggtgaagttgcgcttaactactgcatgagagcctatggaggctttgagggtaacggacagacgctgcgtatact

SEQ ID NO: 114366 - DNA, 75 bp, synthetic construct
  source 1..75: mol_type = other DNA
accgcccccgtacttcccccgccgtttccggtgacgccatcatggggaaacatcgggatatggagcgacagcctc

SEQ ID NO: 114367 - DNA, 75 bp, synthetic construct
  source 1..75: mol_type = other DNA
ttctttatcaaataatattgacagtattactttttctccctagttctattttttcaggattaattatagagtaca

SEQ ID NO: 114368 - DNA, 75 bp, synthetic construct
  source 1..75: mol_type = other DNA
ccgggctcttgttacaaatcctcgaattcttatttttgatgaagcaaccagtgctcttgattatgagtcggaaaa

SEQ ID NO: 114369 - DNA, 75 bp, synthetic construct
  source 1..75: mol_type = other DNA
ctgtttctgcttttattcagtttcttgcgttaataacacctcttttttttcaggttgtaatggataaggttttag

SEQ ID NO: 114370 - DNA, 75 bp, synthetic construct
  source 1..75: mol_type = other DNA
gtgtcatgtggtattacagccctcaattaacactggttatattattgtcactaccttgttatgttatatggtcat

SEQ ID NO: 114371 - DNA, 75 bp, synthetic construct
  source 1..75: mol_type = other DNA
agttaatcgcgtttaatatgcttgcaggtcaggtcattgctcctgttatcagactggctcatctttggcaggatt

SEQ ID NO: 114372 - DNA, 75 bp, synthetic construct
  source 1..75: mol_type = other DNA
ttctggtgtgcgctgggcgcattatgttttttgtttatcagtagcttgttcaggccgcagcacagaaaaaatcaa

SEQ ID NO: 114373 - DNA, 75 bp, synthetic construct
  source 1..75: mol_type = other DNA
catccgggaagcacacagatgacgtgcactggtcaggcgcatcgtggtggcgaacaccggctgaacacggggcca

SEQ ID NO: 114374 - DNA, 75 bp, synthetic construct
  source 1..75: mol_type = other DNA
aagcgtatagcgatctcgacgccattatcgcccccgacgccaacgccctgcccgctgccgcacaagccgcagaaa

SEQ ID NO: 114375 - DNA, 75 bp, synthetic construct
  source 1..75: mol_type = other DNA
ataatgttattttctctcctgagtttctgcgtgaaggccgtgcgctgtacgacaacctgcacccgtcgcgcattg

SEQ ID NO: 114376 - DNA, 75 bp, synthetic construct
  source 1..75: mol_type = other DNA
tatattcggaatttttgagcacgaaatagaaaaattctgtaacaactttgctaatagacatcattctcctataaa

SEQ ID NO: 114377 - DNA, 75 bp, synthetic construct
  source 1..75: mol_type = other DNA
ttctggtgtgcgctgggggcactgtgtttcttatttatcagtagtttgtttaaaccacagcacagaaaaaatcaa

SEQ ID NO: 114378 - DNA, 75 bp, synthetic construct
  source 1..75: mol_type = other DNA
gattgtggcgatcactgaacacatgtgcgatgtcgatgaactggcgcatttcatcgagaaagaaaccggtcgtga

SEQ ID NO: 114379 - DNA, 75 bp, synthetic construct
  source 1..75: mol_type = other DNA
ggttattgtctgccgaaagataccaagcagttactggcaaattaccagtctgtgccgaataacctgatctcggca

SEQ ID NO: 114380 - DNA, 75 bp, synthetic construct
  source 1..75: mol_type = other DNA
gtgttcacgaaaacagcgcagccctggcataacgccacgccgcatccgcactggtgcggcctgaccctgctggcc

SEQ ID NO: 114381 - DNA, 75 bp, synthetic construct
  source 1..75: mol_type = other DNA
acccgcactgggactggatttcagcgcaacaatattcgggccgctccagtggttccgtgttggtgatgtgattta

SEQ ID NO: 114382 - DNA, 75 bp, synthetic construct
  source 1..75: mol_type = other DNA
atcgacagtctgctgatccctgaagagcacggtggtctggacgcggggtttgttactctcgccgccgtgtggatg

SEQ ID NO: 114383 - DNA, 75 bp, synthetic construct
  source 1..75: mol_type = other DNA
atccctctcagaaagggagcgcaatatgaagagatcagaaaactgggtaaaggcgatcatctggtgaagctgaaa

SEQ ID NO: 114384 - DNA, 75 bp, synthetic construct
  source 1..75: mol_type = other DNA
caagagctgtggggtgtcttactggcttataatctggtgagatatcagatgattaaaatggcggaacatctgaaa

SEQ ID NO: 114385 - DNA, 75 bp, synthetic construct
  source 1..75: mol_type = other DNA
catcgcgtcggtgcgtagcaacagcccgcaagaagaacgctatgagaaaaaacggcaagcaatggcaaattctat

SEQ ID NO: 114386 - DNA, 75 bp, synthetic construct
  source 1..75: mol_type = other DNA
ttgtatccctccagcagcctgcactgtgtgacgccagtaacgcacggcgtacgggtggcgtcatttatgtggata

SEQ ID NO: 114387 - DNA, 75 bp, synthetic construct
  source 1..75: mol_type = other DNA
gtaaaggcgatcatctggtgaagctgaaaaccagcccgcaggcacgaaaaaagtggccgggactgggaaatgaag

SEQ ID NO: 114388 - DNA, 75 bp, synthetic construct
  source 1..75: mol_type = other DNA
gtggatggcgcagtacgcagccatccacaaaacggctggatgcgcactgacctttctgccacgctgtttttaagc

SEQ ID NO: 114389 - DNA, 75 bp, synthetic construct
  source 1..75: mol_type = other DNA
cagtcatcgctgggaaatcgaactgggatacagggagataaaacagacgatgcaactgagcaggctgacgctgag

SEQ ID NO: 114390 - DNA, 75 bp, synthetic construct
  source 1..75: mol_type = other DNA
agcagttactggcgaactatcagtctgtgccgaataacctgatctcggcaattgtcgatgcaaaccgcacgcgta

SEQ ID NO: 114391 - DNA, 75 bp, synthetic construct
  source 1..75: mol_type = other DNA
caacaatattcagtcactcaaaagccgctacggcgaaggagaagagatcctgtcgctactcaatctttatcataa

SEQ ID NO: 114392 - DNA, 75 bp, synthetic construct
  source 1..75: mol_type = other DNA
gccccaaaaatataacgccagaacaagaaactttgattatctggaaggaaaagcttttgcagataaagtcgtctc

SEQ ID NO: 114393 - DNA, 75 bp, synthetic construct
  source 1..75: mol_type = other DNA
actttcgctgccattgcagaggaggaatatcacctctgatgccgtatttaacttcttcgataacctgttacccga

SEQ ID NO: 114394 - DNA, 75 bp, synthetic construct
  source 1..75: mol_type = other DNA
gcgaattactgcacgagtttccagactttacatggcaggtggcgattgctgaccttgagcaaagcgaggccatcg

SEQ ID NO: 114395 - DNA, 75 bp, synthetic construct
  source 1..75: mol_type = other DNA
tccacaaacagattattaatattggtgaactaaaagcgtacctggcaacacagggcgtggagattcgggtatgtt

SEQ ID NO: 114396 - DNA, 75 bp, synthetic construct
  source 1..75: mol_type = other DNA
caggaagcaaaatctatctacaagaagaatccatctgcggtttctggtatctcaaccacggcgtcatcggtttac

SEQ ID NO: 114397 - DNA, 75 bp, synthetic construct
  source 1..75: mol_type = other DNA
gagaaagaagctgaaatattaaaaattataaaaaaaatagaaacactggtatcaaaattccccgaagcattaaaa

SEQ ID NO: 114398 - DNA, 75 bp, synthetic construct
  source 1..75: mol_type = other DNA
attgtcttttctctttctttattaatttgcggaaaagtttctgctgataccggatggcagtccggcggggatttt

SEQ ID NO: 114399 - DNA, 75 bp, synthetic construct
  source 1..75: mol_type = other DNA
cctccttggttgtggaaaacgggcggatataccgggttcagcaacaaaatcagtgagctgaccagtaatagaaca

SEQ ID NO: 114400 - DNA, 75 bp, synthetic construct
  source 1..75: mol_type = other DNA
atggtttatacgccctggagattttagcccaataccataacgtctctgttaacacgaaagaaattaaacatagat

SEQ ID NO: 114401 - DNA, 75 bp, synthetic construct
  source 1..75: mol_type = other DNA
atgcagacaccggcaaatatcacgtcaatcaatacaccggcgatgaaagccgcacccgcgtgacccaatgggaaa

SEQ ID NO: 114402 - DNA, 75 bp, synthetic construct
  source 1..75: mol_type = other DNA
cattgtgatcccggtgcttttttatcacggtgaacccagtccgtatccgtacagcctgaactggctggactgtct

SEQ ID NO: 114403 - DNA, 75 bp, synthetic construct
  source 1..75: mol_type = other DNA
gttacaagaagctataaatttaatagccacatatggcatagataaaacattaaagttgtacactgatgagttaga

SEQ ID NO: 114404 - DNA, 75 bp, synthetic construct
  source 1..75: mol_type = other DNA
aacatatgcaggaacgccgccgaatgttgcaatggtgggctgattatctcgacacctgcaagacggcatatattg

SEQ ID NO: 114405 - DNA, 75 bp, synthetic construct
  source 1..75: mol_type = other DNA
ggattgaaggacgcatggaaggacgcatggaaggagcgcttgaaaaagccctggctattgcgtgccagcttcaga

SEQ ID NO: 114406 - DNA, 75 bp, synthetic construct
  source 1..75: mol_type = other DNA
cacgagatcatcggcgacatcgtcccactggcaaaacgctatgccgatgaaggtgcagacgagctgggattttat

SEQ ID NO: 114407 - DNA, 75 bp, synthetic construct
  source 1..75: mol_type = other DNA
aaaaagttagaaatataaactctttcgttacagagaaagaatttctaaattactgttctagatattctgttttta

SEQ ID NO: 114408 - DNA, 75 bp, synthetic construct
  source 1..75: mol_type = other DNA
atatttacacgccttgtaagggccatatcagagcgtcgtcgcgtgacgctgctggctgaaggttgtcgttgctca

SEQ ID NO: 114409 - DNA, 75 bp, synthetic construct
  source 1..75: mol_type = other DNA
gaatcaatataccggcgatgaaagccgcacccgcgtcactcagtgggaaacactcgactgggtacaggaagtaca

SEQ ID NO: 114410 - DNA, 75 bp, synthetic construct
  source 1..75: mol_type = other DNA
gtggtatggcccttgcggccaccgcactaccggtcatcaccctgatacgtattctggtctgcctgttactgatga

SEQ ID NO: 114411 - DNA, 75 bp, synthetic construct
  source 1..75: mol_type = other DNA
gccttctccagaggctctacgttcccgaacaggggcagatattgatcgatggccatgacatttccctggttaacc

SEQ ID NO: 114412 - DNA, 75 bp, synthetic construct
  source 1..75: mol_type = other DNA
cgtcttgttgaagacccgggctttattcagtccttaccccattttcgctttatccagcagtcattgcttacattt

SEQ ID NO: 114413 - DNA, 75 bp, synthetic construct
  source 1..75: mol_type = other DNA
gattattggtcgtctggtggcaggcgaaacgctggatatgcgcaaactggccgctgagtttggcgtgtcagtccg

SEQ ID NO: 114414 - DNA, 75 bp, synthetic construct
  source 1..75: mol_type = other DNA
tataccgccccgttttatgtagaagcaaccggccccggtatgcctgaaatgaatgaaaaggtaagggtgttgaac

SEQ ID NO: 114415 - DNA, 75 bp, synthetic construct
  source 1..75: mol_type = other DNA
gagtggacatcacgcagaatcagtattatcaacatctggcgcttgcagaacggcgaaaagccgcctcgttggtgc

SEQ ID NO: 114416 - DNA, 75 bp, synthetic construct
  source 1..75: mol_type = other DNA
gcgtgagaaagcgcgtggcgcgaaagccatcggcaccaccggtcgtggtatcgggcctgcttatgaagataaagt

SEQ ID NO: 114417 - DNA, 75 bp, synthetic construct
  source 1..75: mol_type = other DNA
ttttacttattattgtcttttctctttctttattaatttgcggaaaagtttctgctggtaccggatggcagtccg

SEQ ID NO: 114418 - DNA, 75 bp, synthetic construct
  source 1..75: mol_type = other DNA
gtatcgcgtttgatgaacgcattcagaccgcgaagtcgctgattgatgattgcctggctgactggacggaaggtg

SEQ ID NO: 114419 - DNA, 75 bp, synthetic construct
  source 1..75: mol_type = other DNA
atctcctattgttgataaggaaattcagcagtttttgcaatcagataaaatacactttaatgccacattagataa

SEQ ID NO: 114420 - DNA, 75 bp, synthetic construct
  source 1..75: mol_type = other DNA
gaaacagggcttactgaaaatgaaaacccttgccgatgcgggattcccccaggccgtgatcccgccgcacgagcg

SEQ ID NO: 114421 - DNA, 75 bp, synthetic construct
  source 1..75: mol_type = other DNA
ttgatttcaaacaaccggaggagatggagtttaaccgtgccaggctccgaagggcattcgttcaaatcgggcgtg

SEQ ID NO: 114422 - DNA, 75 bp, synthetic construct
  source 1..75: mol_type = other DNA
atgctggcaaaacgcataattccatgtctcgacgttcgtgatggtcaggtggtgaaaggcgtacagtttcgcaac

SEQ ID NO: 114423 - DNA, 75 bp, synthetic construct
  source 1..75: mol_type = other DNA
acttcctgaccggccaggcgttgacgtcggttctggatatgcttttctcgtttatctttctggcggtaatgtgga

SEQ ID NO: 114424 - DNA, 75 bp, synthetic construct
  source 1..75: mol_type = other DNA
atgcttttggccgggagtagtttactgacgttgctcgatgatatcgccacactgctggacgatatctccgtgatg

SEQ ID NO: 114425 - DNA, 75 bp, synthetic construct
  source 1..75: mol_type = other DNA
cattcaggggatcatgaagcgtattaaagcgaagggtgttcaggtcattatttatgaacctgcaatgcaggaaga

SEQ ID NO: 114426 - DNA, 75 bp, synthetic construct
  source 1..75: mol_type = other DNA
tagtgaccgtgggcgtctacggtctggtaggggttatcgttaagattgatgacctggggtattggctggcggaaa

SEQ ID NO: 114427 - DNA, 75 bp, synthetic construct
  source 1..75: mol_type = other DNA
gggatattttgttacctcgcacaatggatgagttatgaagaagtcgatcaatccgcactcatccatctcggcgct

SEQ ID NO: 114428 - DNA, 75 bp, synthetic construct
  source 1..75: mol_type = other DNA
gaaggtgccattaagcaggatgtgaaggtgctgttaaccggcagtaccgaagccgaggcgatcaagctgtttgcc

SEQ ID NO: 114429 - DNA, 75 bp, synthetic construct
  source 1..75: mol_type = other DNA
gttatgtcggtctttccaatgcagtactactggcccaacaccatcacatagtagcccttgatgtagtatccgaga

SEQ ID NO: 114430 - DNA, 75 bp, synthetic construct
  source 1..75: mol_type = other DNA
gtcagccattgatctggtggcttatcagcatgtggcggatatcccgctggagaaatacgacgggacggggacgag

SEQ ID NO: 114431 - DNA, 75 bp, synthetic construct
  source 1..75: mol_type = other DNA
acacccaggcggcgcactgggtcgtaaacttctgctgcgcgtaaacgatattatgcatacgggcgatgagatccc

SEQ ID NO: 114432 - DNA, 75 bp, synthetic construct
  source 1..75: mol_type = other DNA
cgtatgccagaaccgatgccctgttgttctggctgggcattgatttctcagcaatcctgtatggccctgtggagt

SEQ ID NO: 114433 - DNA, 75 bp, synthetic construct
  source 1..75: mol_type = other DNA
gttttgatgctgatgagctgaaacgcattaaaaatgagctggaaccgaaaatgggcatggacctcaatcttgtac

SEQ ID NO: 114434 - DNA, 75 bp, synthetic construct
  source 1..75: mol_type = other DNA
acatcccggcggcgcactgggtcgtaaacttctgctgcgcgtaaacgatattatgcatacgggtgatgagatccc

SEQ ID NO: 114435 - DNA, 75 bp, synthetic construct
  source 1..75: mol_type = other DNA
ggctactgtctgccgaaagatactaagcagttgctggctaactacgcgtctgtaccgaataacattattggcgcg

SEQ ID NO: 114436 - DNA, 75 bp, synthetic construct
  source 1..75: mol_type = other DNA
tcctggtggtggggacagtggcggaacggatactggggaaatggcgactcctgattatctggttattctccggca

SEQ ID NO: 114437 - DNA, 75 bp, synthetic construct
  source 1..75: mol_type = other DNA
tattaagaatgagctggaacctaaaatgggcatggatctcaatctggtacagctgattgcctataccgactggaa

SEQ ID NO: 114438 - DNA, 75 bp, synthetic construct
  source 1..75: mol_type = other DNA
gacaggacgcgctcgcttgatccgcaggcaattattcgtcatccccaatatggcaatgtggcttgtatccctgaa

SEQ ID NO: 114439 - DNA, 75 bp, synthetic construct
  source 1..75: mol_type = other DNA
tatctcggctgccgatgatataaacattaaggctggtggcgatatggggattgaggctgccggaacgctgtccat

SEQ ID NO: 114440 - DNA, 75 bp, synthetic construct
  source 1..75: mol_type = other DNA
caccaaacaggatgatgtgagcaaactgggtgtgaactggaccggcggtaacctgctggcgggcgcaaccgctaa

SEQ ID NO: 114441 - DNA, 75 bp, synthetic construct
  source 1..75: mol_type = other DNA
cagcattgttgttttcgacctcggacaaaagaaaatcctgcatacctttacagcgcccatagcgaaagaaaagtc

SEQ ID NO: 114442 - DNA, 75 bp, synthetic construct
  source 1..75: mol_type = other DNA
ataataacggcggggccatatttgctaaagaaaactcaacgctgaatcttactgatgttattttttccggtaacg

SEQ ID NO: 114443 - DNA, 75 bp, synthetic construct
  source 1..75: mol_type = other DNA
gaaacaactcgcgctttgggtatttacccggccgtcacgcttgcagaagccaggaacgcccgcgatgaatatctg

SEQ ID NO: 114444 - DNA, 75 bp, synthetic construct
  source 1..75: mol_type = other DNA
ttcggatatgaccaataacgccagcggtggggccgtatttttgcaacaaggagcggaattttcactattaccaga

SEQ ID NO: 114445 - DNA, 75 bp, synthetic construct
  source 1..75: mol_type = other DNA
ttggagcagcgaaatccccgtgttctcgaacagtctgagtttgaggcgttatatcaggggcatattattcttatt

SEQ ID NO: 114446 - DNA, 75 bp, synthetic construct
  source 1..75: mol_type = other DNA
ctggcgatttatcccgaatatcacactagactattccctgattcaaaacttgtaaatgaatcaccagatattgtc

SEQ ID NO: 114447 - DNA, 75 bp, synthetic construct
  source 1..75: mol_type = other DNA
tctctgattttgatcacaatgacccattttttgactctttaaaaaaagattataaagagtttcctctttggttag

SEQ ID NO: 114448 - DNA, 75 bp, synthetic construct
  source 1..75: mol_type = other DNA
caacaatccgtcgtttggttatggtggttattgtttgccgaaagataccaaacagttattggcgaattatcagtc

SEQ ID NO: 114449 - DNA, 75 bp, synthetic construct
  source 1..75: mol_type = other DNA
aacacctacctggcgatgcgcgtggcgtactttaacgaactggatagctatgcagaaagtttaggtctgaattcc

SEQ ID NO: 114450 - DNA, 75 bp, synthetic construct
  source 1..75: mol_type = other DNA
cgttgcatcattctcgctacaaccggcggaagggcgggcagatctctacacagaaatgcctgtgaaggtcagtgg

SEQ ID NO: 114451 - DNA, 75 bp, synthetic construct
  source 1..75: mol_type = other DNA
gatcaggccgtcagatcgctggcgttaagcccggatgaaacgttgctttatgcaacttcatttgaagcgaatgcg

SEQ ID NO: 114452 - DNA, 75 bp, synthetic construct
  source 1..75: mol_type = other DNA
tttgccgatagccaggggatttcacgtataagagctgaggatcaacaagccagcattatgacgcaatggtgtagc

SEQ ID NO: 114453 - DNA, 75 bp, synthetic construct
  source 1..75: mol_type = other DNA
atgcgtgatgaacgatttattcttctggagcaaaaattcagtgaagcgccaaaaaatgaaattgatgctcttttg

SEQ ID NO: 114454 - DNA, 75 bp, synthetic construct
  source 1..75: mol_type = other DNA
ccttccggcacgatgctggacggcgtactggaaggaaaactgaatgcggcatttattgatgggccgattaaccat

SEQ ID NO: 114455 - DNA, 75 bp, synthetic construct
  source 1..75: mol_type = other DNA
cgcagggcgatgccgtatccatctacgtagcccgcgatctggatttcagcactgtatatgggttagaaatgaatg

SEQ ID NO: 114456 - DNA, 75 bp, synthetic construct
  source 1..75: mol_type = other DNA
gacgattatgacgaacgctacaagtcatggtcactggagaccctccctattgcaccagagtcatggcggtacaac

SEQ ID NO: 114457 - DNA, 75 bp, synthetic construct
  source 1..75: mol_type = other DNA
ctgcaagagcaacgcatcgacaccttgcaactggcgagcgtcggtaatactgaaccgccccgggaatcctggaga

SEQ ID NO: 114458 - DNA, 75 bp, synthetic construct
  source 1..75: mol_type = other DNA
gctggcacttggcgcaagtaaatacctgcaagagcaacgcatcgacaccttgcaactggcgagcgtaggtaatac

SEQ ID NO: 114459 - DNA, 75 bp, synthetic construct
  source 1..75: mol_type = other DNA
tcagaaaatctcgccgttcaaaccatgctgccagcgttctatgaacaaggttacgacccaatcatgatggaaagt

SEQ ID NO: 114460 - DNA, 75 bp, synthetic construct
  source 1..75: mol_type = other DNA
ggttaacaacatggctggtctggcgacgtggggcgaagacacgcccgcttgaggcgtttattgaattgttgggta

SEQ ID NO: 114461 - DNA, 75 bp, synthetic construct
  source 1..75: mol_type = other DNA
tccgcgccaattgttcgtatcgtcgccacttcgagagctggtttcatgctgacggtgccgctccgggaactattc

SEQ ID NO: 114462 - DNA, 75 bp, synthetic construct
  source 1..75: mol_type = other DNA
ggcccatccggcaccatgctggacggcgtactggaggggaaactgaatgcggcatttatcgatgggccaatcagc

SEQ ID NO: 114463 - DNA, 75 bp, synthetic construct
  source 1..75: mol_type = other DNA
tggcaacaggaataaacaaggttcgttgtgatgcaggaatggaagagaaacatgtaaatatactggatatcttta

SEQ ID NO: 114464 - DNA, 75 bp, synthetic construct
  source 1..75: mol_type = other DNA
gtcaaagaagtatttctggattcttcagtcctggagcaaatggtgaaaacgcaagtaataaaccgtcaagtggta

SEQ ID NO: 114465 - DNA, 75 bp, synthetic construct
  source 1..75: mol_type = other DNA
tactggagggaaaactgaatgccgcatttattgatggcccaattagtcatccagtcattgacggaatcccggttt

SEQ ID NO: 114466 - DNA, 75 bp, synthetic construct
  source 1..75: mol_type = other DNA
cgcgccagtctggtcgatggctgtaacatttatgcttttcgggctaactgttcgtatcgacgtcattttgagagc

SEQ ID NO: 114467 - DNA, 75 bp, synthetic construct
  source 1..75: mol_type = other DNA
aaaggcgagcaccatttacatctccacggactatgaccgcgaaggtgaggctatcgcccgctcgcttctggatcg

SEQ ID NO: 114468 - DNA, 75 bp, synthetic construct
  source 1..75: mol_type = other DNA
agtcctactcactttatggacagcgacggcaaagtgggcgcggaagtggctccgcgtcgttatttctgtctgcaa

SEQ ID NO: 114469 - DNA, 75 bp, synthetic construct
  source 1..75: mol_type = other DNA
ggataaagcccgtgaagaacgcggtgggatctcatttgagagcgaagaagcgaagttcattttcaacgctgaacg

SEQ ID NO: 114470 - DNA, 75 bp, synthetic construct
  source 1..75: mol_type = other DNA
gtgaaaaattattacccatctctgaattgttacccgtcttcgtatccggaattgtccgggaagctgttagctcta

SEQ ID NO: 114471 - DNA, 75 bp, synthetic construct
  source 1..75: mol_type = other DNA
gtacctcaatgttatgtttcggttcgctggcagccatttttaccgttcctattctctcagcattgcagaacgttt

SEQ ID NO: 114472 - DNA, 75 bp, synthetic construct
  source 1..75: mol_type = other DNA
gtgttcgaaagcaaccgctggctgctgaatgacgtgtgccgtctggcggtggagaatctgctgtatgccgcccga

SEQ ID NO: 114473 - DNA, 75 bp, synthetic construct
  source 1..75: mol_type = other DNA
catcccggagaagttttttaagatggtgaggtacttcgggttccttgccaaccgtgtgtgtggagagaagctgcc

SEQ ID NO: 114474 - DNA, 75 bp, synthetic construct
  source 1..75: mol_type = other DNA
attcaggatacgccctttatgcaagccttgcttacaatggaaacaacaaaaatacacacagtaatcttaaacaaa

SEQ ID NO: 114475 - DNA, 75 bp, synthetic construct
  source 1..75: mol_type = other DNA
atgcaaaatcggctgaccatcaaagacatcgcgcgcttaagcggcgtggggaaatctacggtttcccgggtgctg

SEQ ID NO: 114476 - DNA, 75 bp, synthetic construct
  source 1..75: mol_type = other DNA
cgcatgaatgcttcaactgtggtggagagctccacagaatcaaagggaagaacggcttcttctggggttgtcaga

SEQ ID NO: 114477 - DNA, 75 bp, synthetic construct
  source 1..75: mol_type = other DNA
tccgcgtcgttatttctgtctgcaatgtcacgtgccgcaggctgataccgcgccaatcgtggggaatacctttac

SEQ ID NO: 114478 - DNA, 75 bp, synthetic construct
  source 1..75: mol_type = other DNA
gttatgatgcaggaatggaagagaaatatgtaaatacactggatatatttacacatagctacccagaaatttatg

SEQ ID NO: 114479 - DNA, 75 bp, synthetic construct
  source 1..75: mol_type = other DNA
aatttcagctggcaggcgtgccatgagatgtttgcgcgtaaagggcttatgttgcagaaacagcatcatggtctt

SEQ ID NO: 114480 - DNA, 75 bp, synthetic construct
  source 1..75: mol_type = other DNA
attgacgctgtcaataacgctatctgcgagacaacttatttatcaaacctttaccagattgcccaaaatatagcg

SEQ ID NO: 114481 - DNA, 75 bp, synthetic construct
  source 1..75: mol_type = other DNA
ctcaaccttatcggccaggtgctgactcgccgataactgtgagatcattcctacaaatcacactttccaacaata

SEQ ID NO: 114482 - DNA, 75 bp, synthetic construct
  source 1..75: mol_type = other DNA
ggggatcatgatcgatgatattgtcgctggggtgatttctgctggaatactctattttatcggccatcactggcc

SEQ ID NO: 114483 - DNA, 75 bp, synthetic construct
  source 1..75: mol_type = other DNA
gctgtctgttccggcctttacgttaattgcgggcgaccgcagcgtctctggttcagcaaccggtacaccttatga

SEQ ID NO: 114484 - DNA, 75 bp, synthetic construct
  source 1..75: mol_type = other DNA
tggcggtaatttccatacggtcggtgcggttctcacgccgctgtctgttccggcctttacgttaattgcgggcga

SEQ ID NO: 114485 - DNA, 75 bp, synthetic construct
  source 1..75: mol_type = other DNA
tttgcgctctcaggtgacgatggcgatgaaaaaatatcgcccacagactgacgataccaggctacttgccgagtt

SEQ ID NO: 114486 - DNA, 75 bp, synthetic construct
  source 1..75: mol_type = other DNA
ccagcaatggctgcaaactgatgcgattcgactctacattcccggcgaatggatcagcgtctggcaggttgaact

SEQ ID NO: 114487 - DNA, 75 bp, synthetic construct
  source 1..75: mol_type = other DNA
ctggttgcgctggcagtggaacggggcgtgacgttatggagcgtcagcgaacaggtggcgcaaagccgcgcccag

SEQ ID NO: 114488 - DNA, 75 bp, synthetic construct
  source 1..75: mol_type = other DNA
ggatgtccattccctgtggctatatggctggcgatgcgcaacgggttatctgccgaatcgatgaatgccggggat

SEQ ID NO: 114489 - DNA, 75 bp, synthetic construct
  source 1..75: mol_type = other DNA
gactcgataaagaccagtacagcgtactgtgggttgagcaccgggacaaagggcggctggagctgaacttcctga

SEQ ID NO: 114490 - DNA, 75 bp, synthetic construct
  source 1..75: mol_type = other DNA
cacgccgtccgcactgccggaaacgaagctggaagccgctcaggcgattacacggggtttgctggccttagcctc

SEQ ID NO: 114491 - DNA, 75 bp, synthetic construct
  source 1..75: mol_type = other DNA
taacgattaatgaaagacccagtgcacgatggggaagctggatcacaataacggtgaatcaggacgttattttcc

SEQ ID NO: 114492 - DNA, 75 bp, synthetic construct
  source 1..75: mol_type = other DNA
cgaggcgcaccgggagcaggagcgcgcggcgcagcaccagaaagcgctggagctggaacgatcgcagcggcagaa

SEQ ID NO: 114493 - DNA, 75 bp, synthetic construct
  source 1..75: mol_type = other DNA
ccacgctacttgccggttggttgtcagacaaactgtttaaagggcgtcgtatgccattggcgatgatttgtatgg

SEQ ID NO: 114494 - DNA, 75 bp, synthetic construct
  source 1..75: mol_type = other DNA
tctactcgctggtggtgatgctggggatctgtatcggcgtctatctttgtcatcaaacggcgaaagacatgggcg

SEQ ID NO: 114495 - DNA, 75 bp, synthetic construct
  source 1..75: mol_type = other DNA
gctgaaaagcattgcaggtgaattgtgtccgttcctcacgaaccaaccttctatcgacagatttcgttgttggct

SEQ ID NO: 114496 - DNA, 75 bp, synthetic construct
  source 1..75: mol_type = other DNA
cgctctcaggtgacgatggcgctgaaaaaatatcgcccacaggccgacgatacccggctgctcgccgagttgtca

SEQ ID NO: 114497 - DNA, 75 bp, synthetic construct
  source 1..75: mol_type = other DNA
gcgagtctgagcttccgttacctggaccacaaaacgggagaaacggcgacggaaacgctgacacagcgggagctg

SEQ ID NO: 114498 - DNA, 75 bp, synthetic construct
  source 1..75: mol_type = other DNA
gtcaaagatgtatctctggattcttcactactggttcaagcgatgaaaacgcaaataataaaccgtcaagcgata

SEQ ID NO: 114499 - DNA, 75 bp, synthetic construct
  source 1..75: mol_type = other DNA
tcccgctttgcgcctccgacaccatccgctggcagcgccgtacacccgacgtggaacacggtatctggcctgacg

SEQ ID NO: 114500 - DNA, 75 bp, synthetic construct
  source 1..75: mol_type = other DNA
accctgatggccattcctgcgatgaactggcaatgggtattagctggatttcttatttttcgtattttcgatatg

SEQ ID NO: 114501 - DNA, 75 bp, synthetic construct
  source 1..75: mol_type = other DNA
ccttccggcactatgctggaaggtgtgctggagggaaaactgaatgcggcatttattgatgggcccattaaccat

SEQ ID NO: 114502 - DNA, 75 bp, synthetic construct
  source 1..75: mol_type = other DNA
gcgaaaacgcgtccgcttgaggcatttattcaactactggatgtgcctgactcggcaaaacagggttaccaatga

SEQ ID NO: 114503 - DNA, 75 bp, synthetic construct
  source 1..75: mol_type = other DNA
ggggctagcggtaatgatgaacaggctatgtataatattacacaagaaaccgtccgtatccttcacgaaactgaa

SEQ ID NO: 114504 - DNA, 75 bp, synthetic construct
  source 1..75: mol_type = other DNA
acggcgtcactttccgacatcgagatgcgtggtttcacctttgatcaaaaacgccagacgctccaccttcagtta

SEQ ID NO: 114505 - DNA, 75 bp, synthetic construct
  source 1..75: mol_type = other DNA
tctattcgctggtggtgatgctggggatctgtatcggtgtctatctttgccatcagacggcgaaagatatgggcg

SEQ ID NO: 114506 - DNA, 75 bp, synthetic construct
  source 1..75: mol_type = other DNA
tcccggagcagaagcggattgtgaatttgcgctctcaggtgacgatggcgctgaaaaaatatcgcccacaggctg

SEQ ID NO: 114507 - DNA, 75 bp, synthetic construct
  source 1..75: mol_type = other DNA
ggcacgcagctgcgggcattgcgacgcctgtattagcggtaatcagatcaactgcgagcaaggtgcggtgccaac

SEQ ID NO: 114508 - DNA, 75 bp, synthetic construct
  source 1..75: mol_type = other DNA
cgatatcgagtccgccgggccgctgctgtgcggtggtatcacggtctttaaaccactgttgatgcaccatatcac

SEQ ID NO: 114509 - DNA, 75 bp, synthetic construct
  source 1..75: mol_type = other DNA
gtggagcacggtatctggtctgacgttgctaacgaacagctccagcaatggctgcaaactgatgcgattcgactc

SEQ ID NO: 114510 - DNA, 75 bp, synthetic construct
  source 1..75: mol_type = other DNA
cctcgactggcagccttattttgaggcgctgacctatggcggtaatttccatacggtcggtgcggttctccgccg

SEQ ID NO: 114511 - DNA, 75 bp, synthetic construct
  source 1..75: mol_type = other DNA
attggccagtacggtctgcgcattacctccggcattcctgctgacaccttaatccctgaaagcgtattcgcttaa

SEQ ID NO: 114512 - DNA, 75 bp, synthetic construct
  source 1..75: mol_type = other DNA
atgaaatccactacaccgccaaacgaatccttgctgagccagctgggcggaagcgttacatcagcattcggggga

SEQ ID NO: 114513 - DNA, 75 bp, synthetic construct
  source 1..75: mol_type = other DNA
tgaacgtctcacatctccccgctcgtccacatgtcactgccggatgcggtggatttattgatatcacctcacatg

SEQ ID NO: 114514 - DNA, 75 bp, synthetic construct
  source 1..75: mol_type = other DNA
gccagaaatcccggcgaattggaatattaatccccagcgtggttgtttctgaaaagcattctgatgcgctcgaaa

SEQ ID NO: 114515 - DNA, 75 bp, synthetic construct
  source 1..75: mol_type = other DNA
agcagcagagccggaaaatagggatgattgtccccagtgtggttgtttctgaaaagcataccgacacgctggaga

SEQ ID NO: 114516 - DNA, 75 bp, synthetic construct
  source 1..75: mol_type = other DNA
gcggtaaatattggctttggtatttctgccaacgtaccacgcattttactggaacaaggtcgccacggtgacgtc

SEQ ID NO: 114517 - DNA, 75 bp, synthetic construct
  source 1..75: mol_type = other DNA
atagaacaaaccggcgataacactctgacgttaatggataaaggttattactcactgggactgttaaatgcctgg

SEQ ID NO: 114518 - DNA, 75 bp, synthetic construct
  source 1..75: mol_type = other DNA
atgagattgatttgcttatggaaggattattcgagagattaaatatagggataggcgaaattaatgcatatccaa

SEQ ID NO: 114519 - DNA, 75 bp, synthetic construct
  source 1..75: mol_type = other DNA
cagcattttttacaatcaggtgatatgcagtttaaagcgacattagataaaaaaattgcctaccagaatgccgat

SEQ ID NO: 114520 - DNA, 75 bp, synthetic construct
  source 1..75: mol_type = other DNA
gcgcaaaggaaaagtctgccatctgctgacgtcgatgacggacgccatgcgcttccccggaggagaaatggggga

SEQ ID NO: 114521 - DNA, 75 bp, synthetic construct
  source 1..75: mol_type = other DNA
ccagcgaagtcacaatggaatgcggcttcgctggtggcggttcgttgctggacttcattgatacatcttcaatcg

SEQ ID NO: 114522 - DNA, 75 bp, synthetic construct
  source 1..75: mol_type = other DNA
atccagcctgattcaggctttattgaaaactcaaccgttgtatgacacccaggtttctgtttcacacaccacgcg

SEQ ID NO: 114523 - DNA, 75 bp, synthetic construct
  source 1..75: mol_type = other DNA
atggctcaaggcacgctttatattgtttctgcccccagtggcgcgggtaaatccagcctaattcaggctttatta

SEQ ID NO: 114524 - DNA, 75 bp, synthetic construct
  source 1..75: mol_type = other DNA
gaaggcgcgatcaagcaggatatcccaaccctgtttaccgactccaccgaagcggaagcgatcaaactgttcgct

SEQ ID NO: 114525 - DNA, 75 bp, synthetic construct
  source 1..75: mol_type = other DNA
ggttttattgatatcacttcacatgcgaagcggattattttctctggctttttcaatgcaggtgcacagctacaa

SEQ ID NO: 114526 - DNA, 75 bp, synthetic construct
  source 1..75: mol_type = other DNA
atgggacgtcgcagcagcattgattctctgccgaaggaggtccgccgctggctggagcgggcactgacggagaat

SEQ ID NO: 114527 - DNA, 75 bp, synthetic construct
  source 1..75: mol_type = other DNA
ttgtcagagtcagacataatagaaaaatcttaccttttctgtgtaggtttctatatcaagtataaaaatgacatt

SEQ ID NO: 114528 - DNA, 75 bp, synthetic construct
  source 1..75: mol_type = other DNA
gtcaggttattggcctgtctgaaacacaggaaaatgcagaagaaaccatcatccaaacagagtcacagcctgaga

SEQ ID NO: 114529 - DNA, 75 bp, synthetic construct
  source 1..75: mol_type = other DNA
cgccagacacatgccgggaactcggcgctctacccgcaggtcaaaatggtctgccagatggaactgaccagccat

SEQ ID NO: 114530 - DNA, 75 bp, synthetic construct
  source 1..75: mol_type = other DNA
tggcacccgatggtatgttactggatatcaaacctgaaggtggcgatcccgcactttgtcaagctgcgttggcag

SEQ ID NO: 114531 - DNA, 75 bp, synthetic construct
  source 1..75: mol_type = other DNA
gctgcagcaaaagctgccgctgaggcagatgatattttcggtgagctaagctctggtaagaatgcaccgaaaacg

SEQ ID NO: 114532 - DNA, 75 bp, synthetic construct
  source 1..75: mol_type = other DNA
ctaatgtgattttctcgcctgagtttttacgcgaaggccgtgcactttgggataacctgcacccttcccgtattg

SEQ ID NO: 114533 - DNA, 75 bp, synthetic construct
  source 1..75: mol_type = other DNA
gattcagggtattatgaagcgaatcaaggcgaaaggcgtgcctgtaatcgtttatgagccagctatgaaagagga

SEQ ID NO: 114534 - DNA, 75 bp, synthetic construct
  source 1..75: mol_type = other DNA
tgtggagcaagagctgtggggtgtcttactggcttataatctggtgagatatcagatgattaaaatggcggaaca

SEQ ID NO: 114535 - DNA, 75 bp, synthetic construct
  source 1..75: mol_type = other DNA
ctcttcattgattaactttatagtcagtaatggtagccgaacagagaaagtctatgctaatgagaaaaggaaata

SEQ ID NO: 114536 - DNA, 75 bp, synthetic construct
  source 1..75: mol_type = other DNA
acctgagcaatgccagtgacgatattgtcgaagataattttggtgataacagtgctatttccacacggatccgtc

SEQ ID NO: 114537 - DNA, 75 bp, synthetic construct
  source 1..75: mol_type = other DNA
aagtggacatgcttaacaagaagcagtcaccgattgttgataaggagattgaagagtatctggcgactaaagatc

SEQ ID NO: 114538 - DNA, 75 bp, synthetic construct
  source 1..75: mol_type = other DNA
gtgattatgacgaacaggcgtttgaacaggcattgactgattggcatgagaaaaaaggccgtgtcgaacagcagc

SEQ ID NO: 114539 - DNA, 75 bp, synthetic construct
  source 1..75: mol_type = other DNA
atgtcgataaaacagatgccagggagggtattaatatcgctattgttgagcgttacaggattattaagtggctgt

SEQ ID NO: 114540 - DNA, 75 bp, synthetic construct
  source 1..75: mol_type = other DNA
ctccaaaaccaaagaaagccatcaagccagagccggaagtacgtggtggcggtgctgatgcgaaacaagacgaat

SEQ ID NO: 114541 - DNA, 75 bp, synthetic construct
  source 1..75: mol_type = other DNA
cagtcatattgctgagtggatgcttaacagcaccaccaaaagaagccgccaagccgacattaatgccccgagctc

SEQ ID NO: 114542 - DNA, 75 bp, synthetic construct
  source 1..75: mol_type = other DNA
aaatcagcctcgcttgctgaaatatcagcgacatctcccgtcgctgataacatcaaaaatgaaaacggtgaacag

SEQ ID NO: 114543 - DNA, 75 bp, synthetic construct
  source 1..75: mol_type = other DNA
gagcctgtaggttatggcggaacatggatcagcgaacgtgatacccgtcttggcgttgtggcgatgggttatggc

SEQ ID NO: 114544 - DNA, 75 bp, synthetic construct
  source 1..75: mol_type = other DNA
gcccagagtgaagcgctcgaccgcgccgccacctggcttgagcgcattggtttgctggaacacgccaaccgccag

SEQ ID NO: 114545 - DNA, 75 bp, synthetic construct
  source 1..75: mol_type = other DNA
gcggcaccattttactgcgcgatcagcatctggaaggtttgccggggcagcaaatcgcccgcatgggcgtggtgc

SEQ ID NO: 114546 - DNA, 75 bp, synthetic construct
  source 1..75: mol_type = other DNA
ctgtgggacttgcagaataaatcagatcggcagaatgacattctggtgaaataccgccatctgtcagtaccgccg

SEQ ID NO: 114547 - DNA, 75 bp, synthetic construct
  source 1..75: mol_type = other DNA
cacctcgaacgaacccgttatgctgtgcctgatgtcggctatcgaaacaggggtcattttcctgattaatgatgg

SEQ ID NO: 114548 - DNA, 75 bp, synthetic construct
  source 1..75: mol_type = other DNA
tggtgatagcaataatgaaaatattatgcagtttagtgatatttatcttaccacgcgtggttttttaccttttgc

SEQ ID NO: 114549 - DNA, 75 bp, synthetic construct
  source 1..75: mol_type = other DNA
atgcagcgcttatttcttttggttgccgtcatgttactgagcggatgcttaaccgccccgcctaaagaagccgcc

SEQ ID NO: 114550 - DNA, 75 bp, synthetic construct
  source 1..75: mol_type = other DNA
tgctgatgacattgcagggcgcttcaccgggacgtataccggagctgatgcgcgatcttgcaagaatgggacaac

SEQ ID NO: 114551 - DNA, 75 bp, synthetic construct
  source 1..75: mol_type = other DNA
cgaagatgtttatagttatgaaagtggcgctcatagtgattttgacagtattcgcactgtaataagaccggcctg

SEQ ID NO: 114552 - DNA, 75 bp, synthetic construct
  source 1..75: mol_type = other DNA
tgctgtatgccgcccgaaaacgggggctggaacccggtatcttctgcgtcatccatacgtatggtcgtcgtctca

SEQ ID NO: 114553 - DNA, 75 bp, synthetic construct
  source 1..75: mol_type = other DNA
agaagcctggtgctgaaagccggcggaaaatactggcatgtgtacatgtcgaagaagacagccggagggcggaat

SEQ ID NO: 114554 - DNA, 75 bp, synthetic construct
  source 1..75: mol_type = other DNA
cgaatatcatggttgaaggttcgattattggttatgaaagcaacgttaagtccggtggcgttggggcaagatatt

SEQ ID NO: 114555 - DNA, 75 bp, synthetic construct
  source 1..75: mol_type = other DNA
ggatgagctgattgccgaactgcgcaatcatcacaacaccactatcttgttgattgaacacgatatgaagctggt

SEQ ID NO: 114556 - DNA, 75 bp, synthetic construct
  source 1..75: mol_type = other DNA
tgcggcgatggaccagcgtacctggcaggcactgacaaccggtcacgtggagctgccgcgccgacgcatccacgc

SEQ ID NO: 114557 - DNA, 75 bp, synthetic construct
  source 1..75: mol_type = other DNA
cttcctgaaagacgcgatgcgttcgcggtggatgtggaatatgcggcagctgcttctgaaagcgtggtcagaggg

SEQ ID NO: 114558 - DNA, 75 bp, synthetic construct
  source 1..75: mol_type = other DNA
gattcgctcttggataaagccttccgtcccaagacacctcaggctgcaaaggcggttgaggcggcagttcagacg

SEQ ID NO: 114559 - DNA, 75 bp, synthetic construct
  source 1..75: mol_type = other DNA
gcaagcgcgggtgatcgcagaaattatccgtaatggcagcgtctatgcccgcaaattctggctgtctggcggtgg

SEQ ID NO: 114560 - DNA, 75 bp, synthetic construct
  source 1..75: mol_type = other DNA
atcatgctgccgggcaatcgccccttcgttgcccccagtgccgttattcaggcccgccagcgcctgggaagtgag

SEQ ID NO: 114561 - DNA, 75 bp, synthetic construct
  source 1..75: mol_type = other DNA
caatattgttaacggatagcactgaagctgaagccattaaactttttgcaaatacttaccttgcaatgcggattg

SEQ ID NO: 114562 - DNA, 75 bp, synthetic construct
  source 1..75: mol_type = other DNA
actcgtaacgaactcaaaaacctactggcgcatggattcattcgacaccgtgccgggaaaggctatcagttagcg

SEQ ID NO: 114563 - DNA, 75 bp, synthetic construct
  source 1..75: mol_type = other DNA
gccgggccatcgcggggctgaatgtggaggggctgaagaaaaacgcgcgggatatcagtctgctgaggtatatgc

SEQ ID NO: 114564 - DNA, 75 bp, synthetic construct
  source 1..75: mol_type = other DNA
atgaagctcgccccatatattttagaacgtctcacttcggtcaatcgtaccaatggtactgcggatctcttggtc

SEQ ID NO: 114565 - DNA, 75 bp, synthetic construct
  source 1..75: mol_type = other DNA
atggaaacagccttcttctggtatgtcacctttatgtcagttattgcatttctggtttcactaacattgcatcgc

SEQ ID NO: 114566 - DNA, 75 bp, synthetic construct
  source 1..75: mol_type = other DNA
gcaatgccgcctatgcaatgggtgtaaatatcaaccgttctttcaaacattacggttggtgtacgttgatccgtg

SEQ ID NO: 114567 - DNA, 75 bp, synthetic construct
  source 1..75: mol_type = other DNA
ggcgataacactctgacgttaatggataaaggttattactcactgggactgttaaatgcctggagcctggcggga

SEQ ID NO: 114568 - DNA, 75 bp, synthetic construct
  source 1..75: mol_type = other DNA
atggaaacatctttcttctggtatgtcacctttatggcagtgattgcattcctggtatcactaacattgcaccgt

SEQ ID NO: 114569 - DNA, 75 bp, synthetic construct
  source 1..75: mol_type = other DNA
ccgtgcattcatcatggttctcggtttaccgctgcgggctccctttgtttctataccttcaccacttatatgcag

SEQ ID NO: 114570 - DNA, 75 bp, synthetic construct
  source 1..75: mol_type = other DNA
aatcattatctattatggttcgccagcgtctgaaacaggttcgcgcccttattttcgaacagcttgatttagcaa

SEQ ID NO: 114571 - DNA, 75 bp, synthetic construct
  source 1..75: mol_type = other DNA
gccagtgccagtgccagtgccagtgccagtgccatcatgcgagtctgaagagcaggctgcaaaccgggaaacgat

SEQ ID NO: 114572 - DNA, 75 bp, synthetic construct
  source 1..75: mol_type = other DNA
cgtttgggtaatggtattggctacatcgactatagcgattgtccgctggcatttgaaccgccccgggtttcctgg

SEQ ID NO: 114573 - DNA, 75 bp, synthetic construct
  source 1..75: mol_type = other DNA
atgctggttcccctgaaatcagaaaaacgccccaaaggtgaacccatgtatcgtgacccggataacccttttaat

SEQ ID NO: 114574 - DNA, 75 bp, synthetic construct
  source 1..75: mol_type = other DNA
aaagtatctggtgaatcatcattccgagatgcagttgtagctactcgggataaaaattttgttcgtaaagtgatt

SEQ ID NO: 114575 - DNA, 75 bp, synthetic construct
  source 1..75: mol_type = other DNA
cgtcagtatcgtttgagtgactttaacgtctgtcacggtttcgaagaagctgacagccaggacatctggcttcag

SEQ ID NO: 114576 - DNA, 75 bp, synthetic construct
  source 1..75: mol_type = other DNA
cccggcgaagttcacgccattatggggccaaacggttcgggcaaaagtaccttatcggcaacgcttgccgggcgc

SEQ ID NO: 114577 - DNA, 75 bp, synthetic construct
  source 1..75: mol_type = other DNA
taacaagcgtgtcgtgaaatgtcccgaagaagtcgcgcagcagctggcggtcgaagcgggaagtgatgtcttttt

SEQ ID NO: 114578 - DNA, 75 bp, synthetic construct
  source 1..75: mol_type = other DNA
atataccggcgatggcggcattgatggccggttctgcgttgacggccgcaaatttctcattcaggccaaacgtta

SEQ ID NO: 114579 - DNA, 75 bp, synthetic construct
  source 1..75: mol_type = other DNA
aaccgcaaacaccatcccgtcctgccagtgagcaaccaccggcacagccacgactgcgaattgctgaacaagatc

SEQ ID NO: 114580 - DNA, 75 bp, synthetic construct
  source 1..75: mol_type = other DNA
atgagcgggtgatgattataagcggtgagagattggtaagccttgtcgaaggagataccaggctggcgaaccggc

SEQ ID NO: 114581 - DNA, 75 bp, synthetic construct
  source 1..75: mol_type = other DNA
cggccatttttagcgcattgcccgcttatgccgggttaacttccattaccgcgggctacgattttaccgattatt

SEQ ID NO: 114582 - DNA, 75 bp, synthetic construct
  source 1..75: mol_type = other DNA
tagcctgcggtgttctctatgaatgtcaacgaagacggatcaaagttccagacgagctcgccgtagtaggatttg

SEQ ID NO: 114583 - DNA, 75 bp, synthetic construct
  source 1..75: mol_type = other DNA
gatagtgttgttaatgtcgataaattaacgtacgccggaaacctggaatcacttgctgatgtttctgattctgaa

SEQ ID NO: 114584 - DNA, 75 bp, synthetic construct
  source 1..75: mol_type = other DNA
cgaccccaggaacgcagaaaatacctggtccgggactggccgtcgacccacatggctcaaagagctgcttgatag

SEQ ID NO: 114585 - DNA, 75 bp, synthetic construct
  source 1..75: mol_type = other DNA
aaattattagagcgtgcgggacctgcgccaaaaggttcaataactgcgatttatacggtgctgttagaaagcgat

SEQ ID NO: 114586 - DNA, 75 bp, synthetic construct
  source 1..75: mol_type = other DNA
cccgaattattaaagctgctggctattcctggaaaggtttacgcgctgcatggatcaacgaagcggcattccgtc

SEQ ID NO: 114587 - DNA, 75 bp, synthetic construct
  source 1..75: mol_type = other DNA
tgacgttagtgaaggcgttgctgttaatcttaatgtagaaagtaacatcaatatctccaataactcccgcgttgc

SEQ ID NO: 114588 - DNA, 75 bp, synthetic construct
  source 1..75: mol_type = other DNA
agtgctcaatagcactgtgccggcattatcattaaattcgtctaccagatatgaaggcaagattatcaatatcgg

SEQ ID NO: 114589 - DNA, 75 bp, synthetic construct
  source 1..75: mol_type = other DNA
gaggtaagaacttcgctggcgtagtgttttatgcattgaggccagcttcgcatcataaaacccccccatcagtga

SEQ ID NO: 114590 - DNA, 75 bp, synthetic construct
  source 1..75: mol_type = other DNA
aacttcagacactatcgatttaactaatggctcttctctgaacattggtgaaggtggttatgttgataccgatca

SEQ ID NO: 114591 - DNA, 75 bp, synthetic construct
  source 1..75: mol_type = other DNA
gtgatattggttgtctggagattcagggggccagtctactattatttgaaccatgattatgcagacagtactgct

SEQ ID NO: 114592 - DNA, 75 bp, synthetic construct
  source 1..75: mol_type = other DNA
gcgttatatgccggataacacgatgatcctgggcaacacaaaaaatcgcggactccgcacctatggcgcgatcca

SEQ ID NO: 114593 - DNA, 75 bp, synthetic construct
  source 1..75: mol_type = other DNA
agcggcggataacacgccgctttatattaagtttgccgaaacggtaaaaaatgccgtgcgcagcggggtgctgga

SEQ ID NO: 114594 - DNA, 75 bp, synthetic construct
  source 1..75: mol_type = other DNA
cggttgagtttaaaggcaaagatttgcttgcgctgtcgccggaagatcgtgcaggtgaaggcatctttatggcct

SEQ ID NO: 114595 - DNA, 75 bp, synthetic construct
  source 1..75: mol_type = other DNA
gatgctacaaaaacgcttcgctcagatgttgcaaaaccagtgtggcacaattcgcttcgtttgccgaggaacgag

SEQ ID NO: 114596 - DNA, 75 bp, synthetic construct
  source 1..75: mol_type = other DNA
gtgattatccccattaacagtactggtctgggcgaagagtgtttacacgaagctgacgaaagccctcaaggttta

SEQ ID NO: 114597 - DNA, 75 bp, synthetic construct
  source 1..75: mol_type = other DNA
tgttgagctgcttattcgtattggtgagtacacgatggggcaagatcctgaagcggataaggcaataaaaaatag

SEQ ID NO: 114598 - DNA, 75 bp, synthetic construct
  source 1..75: mol_type = other DNA
agcatatttccggcatgtattgtggccagtggctaagttatcagggggaagagttcaagattcgtgttggggacg

SEQ ID NO: 114599 - DNA, 75 bp, synthetic construct
  source 1..75: mol_type = other DNA
gtgaaatccggcgatttcacgttggtcaaacaactggaggagcagggttatggctggcttagtgaacagcagtaa

SEQ ID NO: 114600 - DNA, 75 bp, synthetic construct
  source 1..75: mol_type = other DNA
ctataaaacttctgcacgcaatgggatgcgaggtgacagcctttagttcaaatccggcgaaagagcaggaagtac

SEQ ID NO: 114601 - DNA, 75 bp, synthetic construct
  source 1..75: mol_type = other DNA
atttgagtaaccaggactgggttaacaacgttaaaagcggtgcctataagacctggatcgaacagaactacggag

SEQ ID NO: 114602 - DNA, 75 bp, synthetic construct
  source 1..75: mol_type = other DNA
gatgaacccccaggatgcgcatagcgcttatattcgcggtgaagtggagttggtgcggattcgtgatgccgaagg

SEQ ID NO: 114603 - DNA, 75 bp, synthetic construct
  source 1..75: mol_type = other DNA
ccctgctgcgtttattgaaacgaatattgttggaacatacgttttgcttgaagcagccagaaaatactggcaaac

SEQ ID NO: 114604 - DNA, 75 bp, synthetic construct
  source 1..75: mol_type = other DNA
gcattaaaccggaagaaattatggcgattggcgatcaggaaaacgacatcgcaatgattgaatatgcaggcgtcg

SEQ ID NO: 114605 - DNA, 75 bp, synthetic construct
  source 1..75: mol_type = other DNA
atgaacgcccttcaagccgctttcgcggcatatcctcgccgtcaaaaagacgacggctgcggtattccacggtcg

SEQ ID NO: 114606 - DNA, 75 bp, synthetic construct
  source 1..75: mol_type = other DNA
cattgctggaagtcatggcggcactggcgatcttctcaatgcttggcgtgctggcgtttatggttttttcgcaag

SEQ ID NO: 114607 - DNA, 75 bp, synthetic construct
  source 1..75: mol_type = other DNA
tggcgatgggtgccgataaagtggtgaatagccgcgatccgcaggcactgaaaactctggcggggcagtttgatc

SEQ ID NO: 114608 - DNA, 75 bp, synthetic construct
  source 1..75: mol_type = other DNA
gttttgccaaacgcattgcccgcgccattgttgagcgtaaccgcgaacagccgatgacccgcaccaaagaactgg

SEQ ID NO: 114609 - DNA, 75 bp, synthetic construct
  source 1..75: mol_type = other DNA
gcgatctgcttattcatgaaggatcggcgaaggatgcgcagaaattcgcagccaaagtctttcatgccgataaaa

SEQ ID NO: 114610 - DNA, 75 bp, synthetic construct
  source 1..75: mol_type = other DNA
gccaaaatccatgaaggggagagtggtcgtcggctgtgggctgagtgcgttgagatgggaattgaagcgcgtaag

SEQ ID NO: 114611 - DNA, 75 bp, synthetic construct
  source 1..75: mol_type = other DNA
gcgaccaaaatcgctggtcgatagcgaaacgcttatcgtggtgtacatctccagccacccttacacgcgccagta

SEQ ID NO: 114612 - DNA, 75 bp, synthetic construct
  source 1..75: mol_type = other DNA
cggcaagatcgacggcattctcctcgatcttggcgtctcttcaccgcaacttgatgatgctgagcgcggcttttc

SEQ ID NO: 114613 - DNA, 75 bp, synthetic construct
  source 1..75: mol_type = other DNA
atgaaatcaatgaatattgccgccagtagtgaactggtatcccgactttcttctcatcgtcgcgtggtggcgttg

SEQ ID NO: 114614 - DNA, 75 bp, synthetic construct
  source 1..75: mol_type = other DNA
cggcatatcctcgccgtcaaaaagacgacggctgcggtattccacggtcggcctgacccgttaccggacgcggtg

SEQ ID NO: 114615 - DNA, 75 bp, synthetic construct
  source 1..75: mol_type = other DNA
gccacgtggatcgctccattaccggcccggccgattttatcgaaaccaacattgtcggcacctatacgctgctcg

SEQ ID NO: 114616 - DNA, 75 bp, synthetic construct
  source 1..75: mol_type = other DNA
cgctggtgatcctcaatgcgctggatggcaaagcgctgcccatctacggcaaaggcgatcagatccgcgactggc

SEQ ID NO: 114617 - DNA, 75 bp, synthetic construct
  source 1..75: mol_type = other DNA
cccggatgaagtgagcgcaggcaccgagttaccgctattcaccgagaccaccccgtacgcgccgagcagcccgta

SEQ ID NO: 114618 - DNA, 75 bp, synthetic construct
  source 1..75: mol_type = other DNA
ttccgtttccaccacatctccaccgacgaagtgtatggcgacctgccgcacccggatgaagtgagttcgggtagt

SEQ ID NO: 114619 - DNA, 75 bp, synthetic construct
  source 1..75: mol_type = other DNA
gttatataccgttttaaccgaaggtaaagcaggtgaaacttataacattggtggacacaacgaaaagaaaaacat

SEQ ID NO: 114620 - DNA, 75 bp, synthetic construct
  source 1..75: mol_type = other DNA
gtggacacaacgaaaagaaaaacattgatgtagtgctcactatttgtgatttgttggatgagattgtacccaaag

SEQ ID NO: 114621 - DNA, 75 bp, synthetic construct
  source 1..75: mol_type = other DNA
tgccagcggtgccgcactggctgccgatagcggagcgcaaactaataacggccaggcaaacgccgcagctgatgc

SEQ ID NO: 114622 - DNA, 75 bp, synthetic construct
  source 1..75: mol_type = other DNA
gcgaagcgacatatcgataaaagaccaacctgcggctcctgctcctgctcctgctcctgctcctgctcctgctcc

SEQ ID NO: 114623 - DNA, 75 bp, synthetic construct
  source 1..75: mol_type = other DNA
gggtcaggttgccccggacgcccgtgaaaatgtcgcaccaaataacgttgataatagcggggttaataacaactc

SEQ ID NO: 114624 - DNA, 75 bp, synthetic construct
  source 1..75: mol_type = other DNA
tatttctgactgccactcttagtcttgccagcggagctgcactgtctgccgatagcggcgcacaaactaataacg

SEQ ID NO: 114625 - DNA, 75 bp, synthetic construct
  source 1..75: mol_type = other DNA
cacaattacctgaaagagctgcatatggaacagccgggcgactactgcattacttataacggcgcgctggtacag

SEQ ID NO: 114626 - DNA, 75 bp, synthetic construct
  source 1..75: mol_type = other DNA
cgctggaccgcaccacgctgtacaccgccaaccgtgatatcagctactacacggtgcatgaatccttcgttgcca

SEQ ID NO: 114627 - DNA, 75 bp, synthetic construct
  source 1..75: mol_type = other DNA
gatcgccgctatgccattgatgccagtaaaatcactctggacctcggttggaaacctcaagagacctttgaatct

SEQ ID NO: 114628 - DNA, 75 bp, synthetic construct
  source 1..75: mol_type = other DNA
gatagcggagcgcaaaccaataatggccaggcaaacgccgcagctgatgcgggtcaggttgccccggacgcccgt

SEQ ID NO: 114629 - DNA, 75 bp, synthetic construct
  source 1..75: mol_type = other DNA
ggcatcggtaaatcacttgattcgttttttttgatggcggtgagagcatgtgttttgccccgcgtaaatgagaag

SEQ ID NO: 114630 - DNA, 75 bp, synthetic construct
  source 1..75: mol_type = other DNA
acccgttacttgctgttcccttcaatgctgctacggattttaccgtactggccaaccactgccaaaacttcgccg

SEQ ID NO: 114631 - DNA, 75 bp, synthetic construct
  source 1..75: mol_type = other DNA
tcgacccggccaccggcacgctcgacaccagcaattcgcgcattattcacgatctacaaacgccggaagaacctc

SEQ ID NO: 114632 - DNA, 75 bp, synthetic construct
  source 1..75: mol_type = other DNA
ttgaaagcctgaccgttgatacccttcctgctaattcccctcagtttgggcccgaatgcaccgaactttgcaact

SEQ ID NO: 114633 - DNA, 75 bp, synthetic construct
  source 1..75: mol_type = other DNA
gtctggtattttgccgccgaaatgaaagccccgcgctggctccgcaccgccgacggcgtgaagtttatcgacgag

SEQ ID NO: 114634 - DNA, 75 bp, synthetic construct
  source 1..75: mol_type = other DNA
ccggtaaccgttacaggccaccagcacgctaccaccgtcagaacatgacacggcattgcatggcggttcgtggct

SEQ ID NO: 114635 - DNA, 75 bp, synthetic construct
  source 1..75: mol_type = other DNA
gccgccagaacattaatgctgaatgagcaagcgccgacactacaaattaaagatgtcgatttaacacaatatgcg

SEQ ID NO: 114636 - DNA, 75 bp, synthetic construct
  source 1..75: mol_type = other DNA
ccatgggtaatgccaaaagcttgcgtggcggtacgttgttgatgacaccgcttaagggcgttgacagtcaggtgt

SEQ ID NO: 114637 - DNA, 75 bp, synthetic construct
  source 1..75: mol_type = other DNA
atggtcagcacgtaattattttatgtgatggcgcattcgttctttatgcgcaatatcgagacggtgagttttttg

SEQ ID NO: 114638 - DNA, 75 bp, synthetic construct
  source 1..75: mol_type = other DNA
tgttgcttgatgagccatcgctcgggctggcaccgattatcatccagcaaattttcgacaccatcgaacaactgc

SEQ ID NO: 114639 - DNA, 75 bp, synthetic construct
  source 1..75: mol_type = other DNA
cgacttgccgcctgtctcactttgctgcaacccacgctgaacgaccccatcccgtctcatctgactgacagcctg

SEQ ID NO: 114640 - DNA, 75 bp, synthetic construct
  source 1..75: mol_type = other DNA
atcttcgacaccatcgagcagttgcgcgagcagggaatgaccatcttcctcgtcgaacagaacgccaatcaggcg

SEQ ID NO: 114641 - DNA, 75 bp, synthetic construct
  source 1..75: mol_type = other DNA
gaaaccgtggtaaccccacaaacgcagatcgacttacgtcagagcggtggttcgctgcaaagcgtgcgttcaagc

SEQ ID NO: 114642 - DNA, 75 bp, synthetic construct
  source 1..75: mol_type = other DNA
gccagatacgccgtttggtggtggagaaaccgtggtaaccccacaaacgcagatcgacttacgtcagagcggtgg

SEQ ID NO: 114643 - DNA, 75 bp, synthetic construct
  source 1..75: mol_type = other DNA
gtgattgtcggcggcgggaatactttccagttgctgaaacagtgccgcgagcgcgggctgctggcaccaattact

SEQ ID NO: 114644 - DNA, 75 bp, synthetic construct
  source 1..75: mol_type = other DNA
aagtcagaggagcctttcacatggctgtatccgcacgcccttactttgtctggcgctttatgcagtgcctgacag

SEQ ID NO: 114645 - DNA, 75 bp, synthetic construct
  source 1..75: mol_type = other DNA
ctctgttgcacgcacggttctgcgtgccgtccgtgactcagtggtctctgttgcccgcgccgtatggaactggat

SEQ ID NO: 114646 - DNA, 75 bp, synthetic construct
  source 1..75: mol_type = other DNA
tcccgcatcatgtacacgctccacgctacgatcgccagcagttgcaatcacgtatcgttcattttggctttggag

SEQ ID NO: 114647 - DNA, 75 bp, synthetic construct
  source 1..75: mol_type = other DNA
ctctgttgcacgcacggttctgcgtgccgtccgtgactccgtggtctctgttgcccgcgcagtatggaactggat

SEQ ID NO: 114648 - DNA, 75 bp, synthetic construct
  source 1..75: mol_type = other DNA
cctgaagttgtgcgtgagctggcacgaattgcactggcatcactggaagcagaacctgtaagccaaacttacaag

SEQ ID NO: 114649 - DNA, 75 bp, synthetic construct
  source 1..75: mol_type = other DNA
tgcgtgaaaaggcagagaaagcaacgtgtggtgtgtggtcgctcgaatatggagagagccgatttgatggtgatg

SEQ ID NO: 114650 - DNA, 75 bp, synthetic construct
  source 1..75: mol_type = other DNA
ctctgttgcacgcacggttctgcgagccgtccgtgactccgtggtctctgttgcccgcgctgtatggaactggat

SEQ ID NO: 114651 - DNA, 75 bp, synthetic construct
  source 1..75: mol_type = other DNA
ctctcgcctttggaggataaaacggcgttaacgtttcgccaggtattggttcatttcaggcaaaaaaaatatgcc

SEQ ID NO: 114652 - DNA, 75 bp, synthetic construct
  source 1..75: mol_type = other DNA
atcactctgcgattactgtctggcgctgacgcagatactgaatggtcactcactgttaccggaaaccgaaacgac

SEQ ID NO: 114653 - DNA, 75 bp, synthetic construct
  source 1..75: mol_type = other DNA
aatatcctgatatatgtcattccgtatgcgttatatgcgcttgcagccgggtttcttgttacattttttctgttc

SEQ ID NO: 114654 - DNA, 75 bp, synthetic construct
  source 1..75: mol_type = other DNA
atgatgacagaaaacaaaaagaatcaggaattcaaaatcagaaaaattaaacgggatattgagcgcagttgtgat

SEQ ID NO: 114655 - DNA, 75 bp, synthetic construct
  source 1..75: mol_type = other DNA
ctctgttgcacgcacggttctgcgcgccgtccgtgactcagtggtctctgttgcccgcgctgtatggaactggat

SEQ ID NO: 114656 - DNA, 75 bp, synthetic construct
  source 1..75: mol_type = other DNA
tgcaggacgtccagcctgggaagtcgcaggtgtacaactggtggatgatgttttgccctgggaggagatgaaact

SEQ ID NO: 114657 - DNA, 75 bp, synthetic construct
  source 1..75: mol_type = other DNA
ttgttttccttgttgccggaattgttttatgggcagttatgcacgttattttcgatgtctgtattgattcgtgga

SEQ ID NO: 114658 - DNA, 75 bp, synthetic construct
  source 1..75: mol_type = other DNA
ggtcacgctacgctgggtggcccgaataccacttatgtgtttaaagctggtgaggaagcggtgccgctagaagct

SEQ ID NO: 114659 - DNA, 75 bp, synthetic construct
  source 1..75: mol_type = other DNA
aagtactggctctgcagagttcagctgcgggtagcgcaacaaatgttggtgtgcagatactggacagaacaggaa

SEQ ID NO: 114660 - DNA, 75 bp, synthetic construct
  source 1..75: mol_type = other DNA
ggggattacggcgaaaagcaacatcgcctcaactggcaagatgaatggattttcgtttgaatgcaaaggtgttgt

SEQ ID NO: 114661 - DNA, 75 bp, synthetic construct
  source 1..75: mol_type = other DNA
tgattttaatgcaactatatggtgctcagaaccagctctgttaaatcaacgagtatgtaaaattgaagttcagga

SEQ ID NO: 114662 - DNA, 75 bp, synthetic construct
  source 1..75: mol_type = other DNA
cacaacagcagccgttaacagccccatagaagcgcttatccatgataaccataaccgtgctggtcaggacgaata

SEQ ID NO: 114663 - DNA, 75 bp, synthetic construct
  source 1..75: mol_type = other DNA
aagggtggcttggtgatgatatcagcatccctgaatgcgatgtaatcaattggatgccgctaccggaaccgccgc

SEQ ID NO: 114664 - DNA, 75 bp, synthetic construct
  source 1..75: mol_type = other DNA
gtgaagcaaataacgatgattatcttgcctatcttcgcatacataatgagataacgatcacgtcaggtttagcca

SEQ ID NO: 114665 - DNA, 75 bp, synthetic construct
  source 1..75: mol_type = other DNA
ggttctgatagaactgctggtcaatcaggggttaataaaaagcatttagaatcatacccagttcttctcccccca

SEQ ID NO: 114666 - DNA, 75 bp, synthetic construct
  source 1..75: mol_type = other DNA
gcgagcgggatgaacgaaccttatttagtggcttatcatttacgctgaacgcaggagagtgggtacaaatcaccg

SEQ ID NO: 114667 - DNA, 75 bp, synthetic construct
  source 1..75: mol_type = other DNA
tccgccgcggtgctgattgccattatcgtcgccgtgattacctggtgcatcctgttatggtcgcattttggataa

SEQ ID NO: 114668 - DNA, 75 bp, synthetic construct
  source 1..75: mol_type = other DNA
attgatgctacgcatactgatgtactggctctgcagagttcagctgcgggtagcgcaacaaacgttggtgtgcag

SEQ ID NO: 114669 - DNA, 75 bp, synthetic construct
  source 1..75: mol_type = other DNA
cagcgcaacaaatgttggtgtgcagatcctggacagaacgggtactgcgctggcgctggacggtgcgacatttag

SEQ ID NO: 114670 - DNA, 75 bp, synthetic construct
  source 1..75: mol_type = other DNA
gaggaaaatgtttctcaggaattattcactatgctttgaaatcagtatctcatcataaaactgtaccaagagtaa

SEQ ID NO: 114671 - DNA, 75 bp, synthetic construct
  source 1..75: mol_type = other DNA
tacactaccgaatctcatacttgggataacaatatctctgtaaaagattccacagtgacttcgggttcaaattat

SEQ ID NO: 114672 - DNA, 75 bp, synthetic construct
  source 1..75: mol_type = other DNA
tggtagcttgagctactctcacttcaacaacgacctgtctgcaaccatgagcaacggtacttacgttgacggtag

SEQ ID NO: 114673 - DNA, 75 bp, synthetic construct
  source 1..75: mol_type = other DNA
tagcgcaacaaacgttggtgtgcagatcctggacagaacgggtgctgcgctgacgctggatggtgcgacattcag

SEQ ID NO: 114674 - DNA, 75 bp, synthetic construct
  source 1..75: mol_type = other DNA
tggtgcaattattgagcgcgaattgcccagccagtttggtgctggcaataccttcaatttgcagctaaatgagga

SEQ ID NO: 114675 - DNA, 75 bp, synthetic construct
  source 1..75: mol_type = other DNA
gcgttggggcagcaaaaactttatgtactggtctttaccactgaaaaagatctccagcagacgacgcaactgctc

SEQ ID NO: 114676 - DNA, 75 bp, synthetic construct
  source 1..75: mol_type = other DNA
tccgctccagctccggttacggtaggtaacacggcggcacctgctgtggctgcaccagctcctgcaccggcgaag

SEQ ID NO: 114677 - DNA, 75 bp, synthetic construct
  source 1..75: mol_type = other DNA
agatcgacttacgccagagcggcggttcgctgcaaagcgtacgttccagcgccagcctcaataacgtggtgcgcg

SEQ ID NO: 114678 - DNA, 75 bp, synthetic construct
  source 1..75: mol_type = other DNA
aggtaactggatcacagtgagtaaaggtcacgctacgctgggtggcccgaacaccacttatgtgtttaaagctgg

SEQ ID NO: 114679 - DNA, 75 bp, synthetic construct
  source 1..75: mol_type = other DNA
agagaacaaccttattgatagtgagtgccacggtgctgaacttgaagaatcgctacgcgataagcaggcgttact

SEQ ID NO: 114680 - DNA, 75 bp, synthetic construct
  source 1..75: mol_type = other DNA
agagaacaaccttattgatagtgaatgccatgttgctgaactggaagaagcgctacgcgataagcaggcgttact

SEQ ID NO: 114681 - DNA, 75 bp, synthetic construct
  source 1..75: mol_type = other DNA
ctaacggtggtgtgctggatgtgaacgttgatcagttcgatactgaagctttccgtaccgataaactggaactga

SEQ ID NO: 114682 - DNA, 75 bp, synthetic construct
  source 1..75: mol_type = other DNA
tggacaccagtcgatcaatctaaaacccagaccacccggttagctactggcggtcaacaactgaacgtccctggc

SEQ ID NO: 114683 - DNA, 75 bp, synthetic construct
  source 1..75: mol_type = other DNA
tggcgctggacggtgcgacatttagtgcacaaacaaccctgaataacggtactaacaccattccgttccaggcgc

SEQ ID NO: 114684 - DNA, 75 bp, synthetic construct
  source 1..75: mol_type = other DNA
accaagcacacaaatgagacatttgatacaagtgaaggcgttgctgttaatcttgatgtagaaagtaacatcaat

SEQ ID NO: 114685 - DNA, 75 bp, synthetic construct
  source 1..75: mol_type = other DNA
gtgatactggttgtctggagattcagggggccagtctatgtcggtcttgggctggcagtgaatcttgatgtcgaa

SEQ ID NO: 114686 - DNA, 75 bp, synthetic construct
  source 1..75: mol_type = other DNA
tgcgtgccaaggcagaaaaagcaacgtgtggtgtgtggtcgctcgaatatggagagggccgatttgatggtgatg

SEQ ID NO: 114687 - DNA, 75 bp, synthetic construct
  source 1..75: mol_type = other DNA
gacatttagtgcacaaacaaccctgaataacggtaccaacaccattccgttccaggcgcgttattatgcaatcgg

SEQ ID NO: 114688 - DNA, 75 bp, synthetic construct
  source 1..75: mol_type = other DNA
ggaagcgcgtcagcaatctccggctggctgcgtgatggtattcgctgcccgtattcgccaggggtcacatcatgc

SEQ ID NO: 114689 - DNA, 75 bp, synthetic construct
  source 1..75: mol_type = other DNA
tggagctgttgccgaaatatgccgcctgggcggagggcgtcctggctgccggaggcgctcagcaggatgacgtgc

SEQ ID NO: 114690 - DNA, 75 bp, synthetic construct
  source 1..75: mol_type = other DNA
ccactgaatcgctggtctggcctgattcggtggatgcggtgaaaaaagccaacgcatttgtgggaagtgccatca

SEQ ID NO: 114691 - DNA, 75 bp, synthetic construct
  source 1..75: mol_type = other DNA
gtcatggatgggtgatgccgctgggcaaccgcaacgtgcagaccgtgctgacagaggaaatggcagatgcagcgc

SEQ ID NO: 114692 - DNA, 75 bp, synthetic construct
  source 1..75: mol_type = other DNA
tgctgctgcaactggcagaagaccgtcgccgcctcaggggcatccagtccacggtgaaaaaggcggcgattaagg

SEQ ID NO: 114693 - DNA, 75 bp, synthetic construct
  source 1..75: mol_type = other DNA
aaatgcatccgggatctcgtttgatggagacccaccgacatttcatgaactacgtagtctgtccgcgaggctata

SEQ ID NO: 114694 - DNA, 75 bp, synthetic construct
  source 1..75: mol_type = other DNA
gccgcttgaaggcacagagacggtactgacctattacaagtcggggacctttgcgacggaggcaatccgctggcc

SEQ ID NO: 114695 - DNA, 75 bp, synthetic construct
  source 1..75: mol_type = other DNA
gaaggtgcttaaggttccggcctggcggcggagcctgatgtacttcgcagtacggttgtttggtaaagggaagta

SEQ ID NO: 114696 - DNA, 75 bp, synthetic construct
  source 1..75: mol_type = other DNA
gcgcgtcctgggtgtctctcgttggcgtcgcgggctgatgtatatggccgtgaggctgtttggtcgcgggagcta

SEQ ID NO: 114697 - DNA, 75 bp, synthetic construct
  source 1..75: mol_type = other DNA
ttatgttgccgatcgtccgggacacgatcgccgttatgcgattgatgctgagaagattagtcgcgaattgggatg

SEQ ID NO: 114698 - DNA, 75 bp, synthetic construct
  source 1..75: mol_type = other DNA
gcactctcttcttcgaagaaagatcgcggtaaaggtgcgcttattggcgcagccgctggcgcggcactgggcggc

SEQ ID NO: 114699 - DNA, 75 bp, synthetic construct
  source 1..75: mol_type = other DNA
ccaccgaatcgctggtctggccggattcggtggatgcagtgaaaaaagccaacgcgtttgtgggaagtgccatca

SEQ ID NO: 114700 - DNA, 75 bp, synthetic construct
  source 1..75: mol_type = other DNA
gaatcagattggcgataagtttgctcaacgtcttctcgggcataaatcagattcaatggcggcgcgttacaggga

SEQ ID NO: 114701 - DNA, 75 bp, synthetic construct
  source 1..75: mol_type = other DNA
atgaagaaacgtgtttatcttattgctgccgtagtcagcggcgctctggcggtatctggttgtacaactaaccct

SEQ ID NO: 114702 - DNA, 75 bp, synthetic construct
  source 1..75: mol_type = other DNA
ctgagcgaaagcaacccggcgtctgccctgaatcaccttaaccatgcgctgcagcttgatccccgctgcggtgtg

SEQ ID NO: 114703 - DNA, 75 bp, synthetic construct
  source 1..75: mol_type = other DNA
actggcaggactgctggttgcgaccttgctgtcggggatctttttgattctgatgggtctggcacgctttggtcg

SEQ ID NO: 114704 - DNA, 75 bp, synthetic construct
  source 1..75: mol_type = other DNA
tggagctgctgccgaagtacgccgcctgggcagagggtgtcctggctgccggaggcgcacagcaggatgacgtgc

SEQ ID NO: 114705 - DNA, 75 bp, synthetic construct
  source 1..75: mol_type = other DNA
gccgggcttaaattcactgatatccagccgacctatctgacgcccgccgatgcgcgcgctgcattccagcagggt

SEQ ID NO: 114706 - DNA, 75 bp, synthetic construct
  source 1..75: mol_type = other DNA
cttccggccttgctggctggttgcgcggtgatggggattgttaacctgctcggcgggcatgttgctaccatcgga

SEQ ID NO: 114707 - DNA, 75 bp, synthetic construct
  source 1..75: mol_type = other DNA
acgaccgtaccaacgatactaccaagtcaaactacggttatggcttaatcgcaatgaactctgatggtcacctga

SEQ ID NO: 114708 - DNA, 75 bp, synthetic construct
  source 1..75: mol_type = other DNA
agtcgtagacgttccagacgatgtcctggttctgcgcgttattggcccgctgttctttgctgcggctgaaggcct

SEQ ID NO: 114709 - DNA, 75 bp, synthetic construct
  source 1..75: mol_type = other DNA
cgccacgcgtcgggctatgacctgatgctgctgcaattggcggaagaccgtcgccgtctcaagggcgttcagtcc

SEQ ID NO: 114710 - DNA, 75 bp, synthetic construct
  source 1..75: mol_type = other DNA
acaatatgcatcacaatataaagaattggttggtggttttggcacaacccccatctcacactttggacatcgcat

SEQ ID NO: 114711 - DNA, 75 bp, synthetic construct
  source 1..75: mol_type = other DNA
tcctggcaggctcgacgcaccgaaaatgcgctcaatgttaacggaacttgaaagagaactttgtcgccaagtgaa

SEQ ID NO: 114712 - DNA, 75 bp, synthetic construct
  source 1..75: mol_type = other DNA
cagatctgcaagtaaagcgtctcaaacaatatgcattacaatataaagaactggttgatggttttggcacaaccc

SEQ ID NO: 114713 - DNA, 75 bp, synthetic construct
  source 1..75: mol_type = other DNA
attcagggcgtactggcaacctttagcgaggccgatgcgttaacccatagccagcgcgaacaaagcatcgccctg

SEQ ID NO: 114714 - DNA, 75 bp, synthetic construct
  source 1..75: mol_type = other DNA
cgctgacgctaacgattgacgcactcaatatctcattggctgatatactacagaaatgcagggaggccagcggca

SEQ ID NO: 114715 - DNA, 75 bp, synthetic construct
  source 1..75: mol_type = other DNA
tgtgggcgctggcggcctgcaccacgcttatcctgcccacacagacaatattgccagtctatagcgcggcgacct

SEQ ID NO: 114716 - DNA, 75 bp, synthetic construct
  source 1..75: mol_type = other DNA
gtcatggctgggtgatgccgttgggtaaccgcaacgtgcagaccgtgctggctgaggaaatggcagacgcggcgc

SEQ ID NO: 114717 - DNA, 75 bp, synthetic construct
  source 1..75: mol_type = other DNA
tgaatggcccggtgctggatgatattactgccggacaatcgggaaccttgtcagatgatgatcgtggcggtttta

SEQ ID NO: 114718 - DNA, 75 bp, synthetic construct
  source 1..75: mol_type = other DNA
ggcacggcagaaggtgcggttattacactgactgtgacccgtccggacaaaaccacggagaacgtgacgcatacc

SEQ ID NO: 114719 - DNA, 75 bp, synthetic construct
  source 1..75: mol_type = other DNA
tctgtttctgttgagctgccgggtgatgccaataaaggcgataccgtggatgtcacctttgaagagcgataccgt

SEQ ID NO: 114720 - DNA, 75 bp, synthetic construct
  source 1..75: mol_type = other DNA
gatacaactgccgccatcttctggctcaagaacagacagaaagataaatggcgagagaagcaggacgtcaaccat

SEQ ID NO: 114721 - DNA, 75 bp, synthetic construct
  source 1..75: mol_type = other DNA
tgccgtggacccgcgttactgctgataccagtccgtttgtactgatcttccacgaattgggcgatacctttgtgg

SEQ ID NO: 114722 - DNA, 75 bp, synthetic construct
  source 1..75: mol_type = other DNA
ttatgcacggatttatggccctgaagcatcatttcatcgataaagacgacactctgaagcgcatgctgggaaagt

SEQ ID NO: 114723 - DNA, 75 bp, synthetic construct
  source 1..75: mol_type = other DNA
gatcagctgtgccgtgaaaacgacatcaacattgcctttaaccagcttgaagtgcatctgcacaacgagaagggc

SEQ ID NO: 114724 - DNA, 75 bp, synthetic construct
  source 1..75: mol_type = other DNA
tgaccgccacgggttatttctacaccacactgcgcctctccggacgttggattgaaaccgtgtatctggtgatta

SEQ ID NO: 114725 - DNA, 75 bp, synthetic construct
  source 1..75: mol_type = other DNA
caaaagtggtaaaaccatacctggaaatattctggagtcaacccagtaaaaaaggggccgaagcccctttgaatt

SEQ ID NO: 114726 - DNA, 75 bp, synthetic construct
  source 1..75: mol_type = other DNA
cccgccgtttttatcgctttcctcgctggtttgccgctgctgttgattgccgggctgatccactggcgtctgggc

SEQ ID NO: 114727 - DNA, 75 bp, synthetic construct
  source 1..75: mol_type = other DNA
atgaacaaaacagaattttacgcggatttaaatcgcgactttaacgcgctgatggcgggagaaaccagttttctg

SEQ ID NO: 114728 - DNA, 75 bp, synthetic construct
  source 1..75: mol_type = other DNA
gtgttggggtgtttattcagaccgccgatcatcaagatgtaaccattggtcaggacaagaatttagctgtagtta

SEQ ID NO: 114729 - DNA, 75 bp, synthetic construct
  source 1..75: mol_type = other DNA
gcggcactgtccagggtaaccatgtcacgattcgtcagaacagtgtcaccaacagtggcacgctcaccgggatag

SEQ ID NO: 114730 - DNA, 75 bp, synthetic construct
  source 1..75: mol_type = other DNA
aagaatggatgctgatgatatatctcgactcgataggattgaaaaacaagtaatatttatgcagacccataagga

SEQ ID NO: 114731 - DNA, 75 bp, synthetic construct
  source 1..75: mol_type = other DNA
atgttaaatcataccacacacccgcaagggcgggactcacacaacctgaataaatacatctggcgttttattgcc

SEQ ID NO: 114732 - DNA, 75 bp, synthetic construct
  source 1..75: mol_type = other DNA
tgtatgtagaggatcatgctcgagcgttatataccgtcgtaaccgaaggtaaagcgggcgaaacttataacattg

SEQ ID NO: 114733 - DNA, 75 bp, synthetic construct
  source 1..75: mol_type = other DNA
ccgcatcctgattttctacattggttccttagccgttctgctctcgctgatgccgtggacacgcgttaccgccga

SEQ ID NO: 114734 - DNA, 75 bp, synthetic construct
  source 1..75: mol_type = other DNA
tgtatgtcgaggatcatgctcgagcgttatatacagtcgttactgaaggtaaagcaggcgaaacctataatattg

SEQ ID NO: 114735 - DNA, 75 bp, synthetic construct
  source 1..75: mol_type = other DNA
attgtataccgtggtgactcaggggatagtaggtgaaacctacaatatcggtggtcataacgaaaaaaaaaacct

SEQ ID NO: 114736 - DNA, 75 bp, synthetic construct
  source 1..75: mol_type = other DNA
gaacggacgcgcatggcgctgaaccggtgagcgaaaatctggtggaagtgaaatctgataccgctgttttttccc

SEQ ID NO: 114737 - DNA, 75 bp, synthetic construct
  source 1..75: mol_type = other DNA
tattttttcacaacaccagccagatgcggtaatgcacctggcggctgagagccacgttgaccgctcaataactgg

SEQ ID NO: 114738 - DNA, 75 bp, synthetic construct
  source 1..75: mol_type = other DNA
tcgccgtctcaagggcgttcagtccacggtaaaaaaagcggaaatcaaggtggagctgctgccgaaatatgccgc

SEQ ID NO: 114739 - DNA, 75 bp, synthetic construct
  source 1..75: mol_type = other DNA
gcagaggaaatggcagatgcagcgcagagcgcaatgcttgccgctaccggctttgatgccgatctgttgctgcag

SEQ ID NO: 114740 - DNA, 75 bp, synthetic construct
  source 1..75: mol_type = other DNA
gcgttaccgctatttacggaaacgacagcttacgcgccaagtagcccatattctgcttctaaagcttccagcgat

SEQ ID NO: 114741 - DNA, 75 bp, synthetic construct
  source 1..75: mol_type = other DNA
gcgatttcggtttacctgattccagtatggctggtcgtgttaggtatcggctatctgttcaaagagaaaaccgca

SEQ ID NO: 114742 - DNA, 75 bp, synthetic construct
  source 1..75: mol_type = other DNA
gagatttatttcaccagcagacagaataagtcaatgagtaaatttaccaccccggtgatactggaaaagccgggt

SEQ ID NO: 114743 - DNA, 75 bp, synthetic construct
  source 1..75: mol_type = other DNA
tctgcgatgctgtagcgatgaagcgtattttttctcagcaccagccagacgcggtaatgcacctggctgctgaaa

SEQ ID NO: 114744 - DNA, 75 bp, synthetic construct
  source 1..75: mol_type = other DNA
ttgttggatgagattgtaccgaaagagaaatcttatcgtgagcaaatcacttatgttgccgatcgtccgggacac

SEQ ID NO: 114745 - DNA, 75 bp, synthetic construct
  source 1..75: mol_type = other DNA
cagctcgatccccgctgtggcgtgaaaaaagacaaacagcagctggagcgccgactgcgcaatgacagccgctga

SEQ ID NO: 114746 - DNA, 75 bp, synthetic construct
  source 1..75: mol_type = other DNA
tcgaaagcaaccgcttcgtacttgatgcagacctgaccaacgaccgtaccaacgatactaccaagtcaaactacg

SEQ ID NO: 114747 - DNA, 75 bp, synthetic construct
  source 1..75: mol_type = other DNA
ggtcgcacttatccggtggaagtgcgctatcgcccgattgttgaagaagcggatgacaccgaacgagaccagttg

SEQ ID NO: 114748 - DNA, 75 bp, synthetic construct
  source 1..75: mol_type = other DNA
aaatgggtcggtgcggcaatgtccgcacaccaggttgtcactgcttacggtagcactgattacaacatcggtacc

SEQ ID NO: 114749 - DNA, 75 bp, synthetic construct
  source 1..75: mol_type = other DNA
cgtgaagcgcagcctgccggtaatagcgcaatgatggatgcgctggcggcagcaatgggcaaaaacgttaaacgc

SEQ ID NO: 114750 - DNA, 75 bp, synthetic construct
  source 1..75: mol_type = other DNA
gatccgcatcgtgatcgcgcccagatgctgaaagtcgaaaacgtccagcaggcgtggcagcaatggatcaacaag

SEQ ID NO: 114751 - DNA, 75 bp, synthetic construct
  source 1..75: mol_type = other DNA
gggggcggatgctgacggcgtgaccgtgcatattccgctgccgttacttaaccaggttgaggaaagcggatttga

SEQ ID NO: 114752 - DNA, 75 bp, synthetic construct
  source 1..75: mol_type = other DNA
gctatcgcccgattgttgaagaagcggatgacaccgaacgagaccagttgcaggccattttcgatgccgtagaag

SEQ ID NO: 114753 - DNA, 75 bp, synthetic construct
  source 1..75: mol_type = other DNA
cagaacgattctcacgccattttaataatgcgccaattattgaagtctccggtcgcacttatccggtggaagtgc

SEQ ID NO: 114754 - DNA, 75 bp, synthetic construct
  source 1..75: mol_type = other DNA
accgtgtagctgcggcaaccggtaactacaaagttcgtatcgacaacgcaactggcgcaggttctgttgctgact

SEQ ID NO: 114755 - DNA, 75 bp, synthetic construct
  source 1..75: mol_type = other DNA
acggtattctggatgtcggtaacactgcggcgaatgctctgcaggttgatactctgaacctgaccagcactactg

SEQ ID NO: 114756 - DNA, 75 bp, synthetic construct
  source 1..75: mol_type = other DNA
gagttgcgcgtcagttacttcgcccaacaactcggtacgccgtatccgatttcagataagcgtattctgcaagcg

SEQ ID NO: 114757 - DNA, 75 bp, synthetic construct
  source 1..75: mol_type = other DNA
agcaggcactgaaagatctgatgggtaacagcagcgagctgcgtaacctgaaagcgtctgactttactgatgaaa

SEQ ID NO: 114758 - DNA, 75 bp, synthetic construct
  source 1..75: mol_type = other DNA
tgtccatctctaataactctcatgtagcaggtattacgctgactcagggttatgagtgggaagatatcgacgaca

SEQ ID NO: 114759 - DNA, 75 bp, synthetic construct
  source 1..75: mol_type = other DNA
ggggccaaaagccttcgagcagtgcgcaggcttcttgcgcattaaccacggtgacaacccgctggacgcctctac

SEQ ID NO: 114760 - DNA, 75 bp, synthetic construct
  source 1..75: mol_type = other DNA
ataacagatgtctggaaatataggggcaaatccaccgaggcaactgcaactctgattgatattgaggataatagc

SEQ ID NO: 114761 - DNA, 75 bp, synthetic construct
  source 1..75: mol_type = other DNA
ctggagcaacagctacctgtccaactggaaaacgtgttacaggtggcggcggaatatgcacctcacgaactggtt

SEQ ID NO: 114762 - DNA, 75 bp, synthetic construct
  source 1..75: mol_type = other DNA
tcgtcacattataaataatacgcaggatagtgttgttaatgtcgataaattaacgtacgccggaaacctagaatc

SEQ ID NO: 114763 - DNA, 75 bp, synthetic construct
  source 1..75: mol_type = other DNA
gaattacccttatttactgagacgacagcttacgcgccaagcagcccttattccgcatccaaagcatccagcgat

SEQ ID NO: 114764 - DNA, 75 bp, synthetic construct
  source 1..75: mol_type = other DNA
tgatcgccgatacggttttccgcatgataggccatgcgcgcttcaatgtgcctggaacatggcgggccgggtcgg

SEQ ID NO: 114765 - DNA, 75 bp, synthetic construct
  source 1..75: mol_type = other DNA
tctcagctattcagagcaacgatttcaaaacgttaactgagaatcaggaagtcgaatttggtattgagaacggac

SEQ ID NO: 114766 - DNA, 75 bp, synthetic construct
  source 1..75: mol_type = other DNA
tgaaaacggtattgtgccggaaaagtgcgatctcaactccattctgttcttattaaccccggcggaaagtcacga

SEQ ID NO: 114767 - DNA, 75 bp, synthetic construct
  source 1..75: mol_type = other DNA
catctggtgcgcgcctggcgtcgtacctatggcctgccgactatcgtcaccaactgctccaacaactacggcccg

SEQ ID NO: 114768 - DNA, 75 bp, synthetic construct
  source 1..75: mol_type = other DNA
gtctggtcattagcgccagaggaagcgaaacggatgcagcaggcaggcgaagaggaatttaatcgcgcgttaaat

SEQ ID NO: 114769 - DNA, 75 bp, synthetic construct
  source 1..75: mol_type = other DNA
ccaacgtcaccaactttggcgcgtttgtcgatattggcgtgcatcaggacggcctggttcacatctcttcattgt

SEQ ID NO: 114770 - DNA, 75 bp, synthetic construct
  source 1..75: mol_type = other DNA
cagctttccaccacaggttatctggggcaattcgacttctgtgccattgccagaatgggcaacgcagaggatgcc

SEQ ID NO: 114771 - DNA, 75 bp, synthetic construct
  source 1..75: mol_type = other DNA
gcatcggttataaagtccgtttcagcgatcacgtcagtgataacacgatggtcaagctgatgaccgacggtattc

SEQ ID NO: 114772 - DNA, 75 bp, synthetic construct
  source 1..75: mol_type = other DNA
gtggctataatgaaatgaagaatattgatgtcgttcagaaggtctgcgaaatattagatgaaatccaaccattga

SEQ ID NO: 114773 - DNA, 75 bp, synthetic construct
  source 1..75: mol_type = other DNA
cgtcacacacgccagaagtcgccgctgcacaatatgttgatgccgataaaggcgtggcagataccaaagccgcgc

SEQ ID NO: 114774 - DNA, 75 bp, synthetic construct
  source 1..75: mol_type = other DNA
atgtctaacacaatgactggtttagtgaaatggtttaaccctgaaaaaggttttggtttcatcacgccgaaagat

SEQ ID NO: 114775 - DNA, 75 bp, synthetic construct
  source 1..75: mol_type = other DNA
gcaattttgcagaagaccgcgaaagagcatcagaagcaggtaaaaaaggtggacagcacagcgggggtaatttca

SEQ ID NO: 114776 - DNA, 75 bp, synthetic construct
  source 1..75: mol_type = other DNA
ggatgacgatgtgattttggctaactatgctataacattaatgtattatggttatacattgggactaattctatg

SEQ ID NO: 114777 - DNA, 75 bp, synthetic construct
  source 1..75: mol_type = other DNA
ttagtaaaatggtttaacgctgataaaggtttcggctttatttctcctgttgatggtagtaaagatgtgtttgtg

SEQ ID NO: 114778 - DNA, 75 bp, synthetic construct
  source 1..75: mol_type = other DNA
aagactatcacttatttaagtgatattggttgtctggagattcagggggccagtctaggttcacagtgggatacc

SEQ ID NO: 114779 - DNA, 75 bp, synthetic construct
  source 1..75: mol_type = other DNA
tcgcgtggatattggcaacctgcattatattgataccggtgctgtctttgggggcgaactgactcttgtgcaatt

SEQ ID NO: 114780 - DNA, 75 bp, synthetic construct
  source 1..75: mol_type = other DNA
tgccgattatccagatgatgtttatgaatggcaaaaggacgtcgatttgcatcaggtcttgtggagccgctcgcg

SEQ ID NO: 114781 - DNA, 75 bp, synthetic construct
  source 1..75: mol_type = other DNA
aacccaggcgcaaatctttcgcctgctgacgcgtctcaaccaaaacagcaataccactattttgcttatcagcca

SEQ ID NO: 114782 - DNA, 75 bp, synthetic construct
  source 1..75: mol_type = other DNA
tgcagcgattgcaaatccgtatgctgacaatgcgatgcagactacagtaactttagacaactcaacactgatggg

SEQ ID NO: 114783 - DNA, 75 bp, synthetic construct
  source 1..75: mol_type = other DNA
gtattgatctcggcagtaccggggatattccgccaatctttgcccaggctgccggggctgatttggtgtacgtgg

SEQ ID NO: 114784 - DNA, 75 bp, synthetic construct
  source 1..75: mol_type = other DNA
atgacgattttattgagcgacatggctatcacggagtgagtgctcaacagcttgagagaagactgcttctgacag

SEQ ID NO: 114785 - DNA, 75 bp, synthetic construct
  source 1..75: mol_type = other DNA
cgtgctgactttgaagcccggcaacgggcggcgcggacggatgaaaccacctatgtggtgcagggctggcgacag

SEQ ID NO: 114786 - DNA, 75 bp, synthetic construct
  source 1..75: mol_type = other DNA
ttacgactggaaagtgggtgacgcaggttatgtaactccttacggcagcatttctggtctgttccagtctggtga

SEQ ID NO: 114787 - DNA, 75 bp, synthetic construct
  source 1..75: mol_type = other DNA
tctgaaactggtaagcatatttctcgaagctgaagatgatgcccaaataatttttgaaacattaaatggccgagg

SEQ ID NO: 114788 - DNA, 75 bp, synthetic construct
  source 1..75: mol_type = other DNA
gcaaagcggaaaatatcattaagacctgccgtatcttactggaacagcataatggcgaagttccggaagatcgcg

SEQ ID NO: 114789 - DNA, 75 bp, synthetic construct
  source 1..75: mol_type = other DNA
atgatgtttctgcgggctggggtttagaagatgctgcactgtacgcaaataccatcaccgtaactaacgacggtc

SEQ ID NO: 114790 - DNA, 75 bp, synthetic construct
  source 1..75: mol_type = other DNA
gcgcgccagtttgccgcgcaccgtctggcgctggtgggcgacgccgcgcataccattcacccgctggcggggcag

SEQ ID NO: 114791 - DNA, 75 bp, synthetic construct
  source 1..75: mol_type = other DNA
taaagaagacgaagaaggttttcagcgctgcccggacattattttgtcttcattccttaatggtctgatttacga

SEQ ID NO: 114792 - DNA, 75 bp, synthetic construct
  source 1..75: mol_type = other DNA
tgcaggaaaatgggatgcggaacaggttgctccaatagctaaaaacaaattgtggtttatggcctcagaagatga

SEQ ID NO: 114793 - DNA, 75 bp, synthetic construct
  source 1..75: mol_type = other DNA
ttcgcgataccgccgatgcgctgaacaagctgaacttacgccataccgaaatcttgccgctttatgcgcggcttt

SEQ ID NO: 114794 - DNA, 75 bp, synthetic construct
  source 1..75: mol_type = other DNA
tccaatggtccgcgggcattgagccgggcgatccgcgctatgtcgattacttcctgccgatcgtcgccgatgcgg

SEQ ID NO: 114795 - DNA, 75 bp, synthetic construct
  source 1..75: mol_type = other DNA
gctatgaacgtagccgcaagcacagcgcggcgctgatgctggctggtatgcagggttttcgcgatctcttttccg

SEQ ID NO: 114796 - DNA, 75 bp, synthetic construct
  source 1..75: mol_type = other DNA
ccgatgagcagataagtaaaattatgcgaaaaggtaacacaaaagaagatacctggtatatctttaatggggtca

SEQ ID NO: 114797 - DNA, 75 bp, synthetic construct
  source 1..75: mol_type = other DNA
ttgcccggcctggttcatcagagcaatacgtggcgttaaaaacggctgttcagtcctttatgtcgcaggttattg

SEQ ID NO: 114798 - DNA, 75 bp, synthetic construct
  source 1..75: mol_type = other DNA
gatgttatcgcctgagtcagtcagcgatatatcccgtactataaagcttcagcagtttttccccgctattgggag

SEQ ID NO: 114799 - DNA, 75 bp, synthetic construct
  source 1..75: mol_type = other DNA
ttcgctgatgctgcgcgacagactgcgtttttctcgccgtctgcacggtgtgaagaaggttaaaaatcctgatgc

SEQ ID NO: 114800 - DNA, 75 bp, synthetic construct
  source 1..75: mol_type = other DNA
gaactgcgcgtcagttacttcgcccaacaacttggtacgccgtatccgatatcggataagcgtattttgcaggcg

SEQ ID NO: 114801 - DNA, 75 bp, synthetic construct
  source 1..75: mol_type = other DNA
cgtggtgcggcgctggatatgcgggcatttcggatccacaaccgacgaacaacgttgtgggcaccagccgatagc

SEQ ID NO: 114802 - DNA, 75 bp, synthetic construct
  source 1..75: mol_type = other DNA
gaaatttcgccgaagaccgtgagaaggcatccaacgcaggccgtaaaggcggtcagcatagcggcggtaatttta

SEQ ID NO: 114803 - DNA, 75 bp, synthetic construct
  source 1..75: mol_type = other DNA
cgcatgctattacgctctggttgcggattctggcgattgtttcaacctcgcagttgtggatgcagtacgtcccag

SEQ ID NO: 114804 - DNA, 75 bp, synthetic construct
  source 1..75: mol_type = other DNA
ttatcggttgttggcggaagggaaggcattgcctgggtggcacccactgattaccggttcgaaagcggcaatgca

SEQ ID NO: 114805 - DNA, 75 bp, synthetic construct
  source 1..75: mol_type = other DNA
aataacccgtggggtggtggttccggtagcggcattcactggggcggtggttccggtcatggtaatggcgggggg

SEQ ID NO: 114806 - DNA, 75 bp, synthetic construct
  source 1..75: mol_type = other DNA
tcgctgatgagcagtcagagcttgttaagaagatggtgtttgatacgctgaaggatttgtacaaaaaaacccacc

SEQ ID NO: 114807 - DNA, 75 bp, synthetic construct
  source 1..75: mol_type = other DNA
taatatgctccgcacgctatacaggaagcacattccggcgaggagaagcaacgattaagccgggtaatggtattg

SEQ ID NO: 114808 - DNA, 75 bp, synthetic construct
  source 1..75: mol_type = other DNA
tggctgatcagcaggctgagcagttcaaggctatagtgtttgagacacttaaaaagatttatgaaaaggatttga

SEQ ID NO: 114809 - DNA, 75 bp, synthetic construct
  source 1..75: mol_type = other DNA
aaatgatacgaaaacggagcgaaaagagcttttctgatggtggtgatgggtttgttttcgcttcgatgcttgctt

SEQ ID NO: 114810 - DNA, 75 bp, synthetic construct
  source 1..75: mol_type = other DNA
tcgcagcagaccttctcccgcgttttccgtcggcagtttgatcgcactcccagcgattatcgccaccgcctgtaa

SEQ ID NO: 114811 - DNA, 75 bp, synthetic construct
  source 1..75: mol_type = other DNA
atcgtattttttcttacagcaataagccattaacgccagcgcaattaaaagaaacagtagaggtagcagcaagga

SEQ ID NO: 114812 - DNA, 75 bp, synthetic construct
  source 1..75: mol_type = other DNA
attcaggccgtaaacgataaacaaaatatcgcctcagcggtcgccagtatgatggggttagggattggccttacg

SEQ ID NO: 114813 - DNA, 75 bp, synthetic construct
  source 1..75: mol_type = other DNA
gcattatctgaacataaaacactatcaataagttggagtcattaccataaagcactacatattaaacgtcgggca

SEQ ID NO: 114814 - DNA, 75 bp, synthetic construct
  source 1..75: mol_type = other DNA
gattgacgtgaaattccacatcctggtggtgtttatcatctccggtgtttgtgcaggtctggcaggcgtcgtctc

SEQ ID NO: 114815 - DNA, 75 bp, synthetic construct
  source 1..75: mol_type = other DNA
gtgtatctgtgtgaagtggggacggacaccgcaaaagaaattctctatgcccgtatgaaagccgatcccactcct

SEQ ID NO: 114816 - DNA, 75 bp, synthetic construct
  source 1..75: mol_type = other DNA
tgttactggccgccgttgagttgcgcaccaccgagcgtccgatttttgatatcgcaatggacctgggttatgtct

SEQ ID NO: 114817 - DNA, 75 bp, synthetic construct
  source 1..75: mol_type = other DNA
gtgtgggcgctaactgcggatgctgattttctggcgcagcgggggcaaggacaggttgaacaggtctttgccaga

SEQ ID NO: 114818 - DNA, 75 bp, synthetic construct
  source 1..75: mol_type = other DNA
aaaaagcggcgtaacgaagcgctggactgcctggtgtatgcctacgcggcattacgtgtgtccgtgcaacgctgg

SEQ ID NO: 114819 - DNA, 75 bp, synthetic construct
  source 1..75: mol_type = other DNA
cttttgaaagtggttgggcgaggcgtaggaagggaacataagtatcagactacaaagatatttaaccagttaatc

SEQ ID NO: 114820 - DNA, 75 bp, synthetic construct
  source 1..75: mol_type = other DNA
cacaaactgcgctttcaaagacctgcaggacttctacatagtcacggctgaagatctgaaggataaagagcagta

SEQ ID NO: 114821 - DNA, 75 bp, synthetic construct
  source 1..75: mol_type = other DNA
cgaacgataaatcttttatttcaccgggtgctcttgttgcgggtggcatcctttataacaccgatggaaatatat

SEQ ID NO: 114822 - DNA, 75 bp, synthetic construct
  source 1..75: mol_type = other DNA
atgaatacagaaaacccacaatcctttattcttaaggctgtaaaagaactggcagctattagcgatgactcaata

SEQ ID NO: 114823 - DNA, 75 bp, synthetic construct
  source 1..75: mol_type = other DNA
ccgagcgccatgccggaagacgttgagaggttggctgattcattacgggagcgcggagtgagcaggttgatattt

SEQ ID NO: 114824 - DNA, 75 bp, synthetic construct
  source 1..75: mol_type = other DNA
ccattttcgccagccacgataaagcccccggctggccatggaatgacatgacacaatgctttagcgctccgcctg

SEQ ID NO: 114825 - DNA, 75 bp, synthetic construct
  source 1..75: mol_type = other DNA
ggcatgcaatgtttttgcattttccatttctggtggtggaagtgagaggagctataaagagacggaaaaaacatc

SEQ ID NO: 114826 - DNA, 75 bp, synthetic construct
  source 1..75: mol_type = other DNA
atgacacttcatcgctttaagaaaatcgccttacttagcgctcttggcattgccgcaatctctatgaatgtgcag

SEQ ID NO: 114827 - DNA, 75 bp, synthetic construct
  source 1..75: mol_type = other DNA
gtaattattggcgatcgcgtggagatcggcgcatgtaccactatcgatcgtggcgcgttggatgacacggtgatc

SEQ ID NO: 114828 - DNA, 75 bp, synthetic construct
  source 1..75: mol_type = other DNA
tctgaacacgacgcagtcatgtccatgagttctggtcaggtgtctgcccttagccttgctttcttccttgcgctc

SEQ ID NO: 114829 - DNA, 75 bp, synthetic construct
  source 1..75: mol_type = other DNA
gcctatatgcgctaccggttcgacagagccggtttgacaacaagttcgctcaacatgcagcttttggcgaaagaa

SEQ ID NO: 114830 - DNA, 75 bp, synthetic construct
  source 1..75: mol_type = other DNA
atttctggtggtgtaagtgagaggagctataaagagactgaaaaaacatcagcgatgacaaccacacactctaca

SEQ ID NO: 114831 - DNA, 75 bp, synthetic construct
  source 1..75: mol_type = other DNA
cggcaataacactactacgggagaagctgcagagcgagaacattcaatttactgattcatttactgaaattgatg

SEQ ID NO: 114832 - DNA, 75 bp, synthetic construct
  source 1..75: mol_type = other DNA
ctgctgatatggccggcggccatgcttcttggagttgccatcaccgtgaccatggcgtccttcaagaagtattta

SEQ ID NO: 114833 - DNA, 75 bp, synthetic construct
  source 1..75: mol_type = other DNA
aggcgtttataaaaaaacatcagcctgaaaagcagcatgcccacaatctacctttaagttttttgaaatggcatt

SEQ ID NO: 114834 - DNA, 75 bp, synthetic construct
  source 1..75: mol_type = other DNA
attgtatttgtcagcgccgttcgcggtatatccgaatttgttgctgttaccggcagcattgctgatggggctggc

SEQ ID NO: 114835 - DNA, 75 bp, synthetic construct
  source 1..75: mol_type = other DNA
caggcagggcatgaacgggcacgtcgtgaatatcacgaacaggcgctggcgggaacgaatgccgccgtggatgca

SEQ ID NO: 114836 - DNA, 75 bp, synthetic construct
  source 1..75: mol_type = other DNA
actgttttaaatctgattcttggatttatcatcggcggcatcgtggtgctgggagtgaaagccgtagcgaaaata

SEQ ID NO: 114837 - DNA, 75 bp, synthetic construct
  source 1..75: mol_type = other DNA
cgcagcacgcaccgctgccggaaagtctgacacagccaacgccggtgccgtccctgccccgtccgctgacgtggg

SEQ ID NO: 114838 - DNA, 75 bp, synthetic construct
  source 1..75: mol_type = other DNA
ctgctgatatggccggcggccatgcttctgggggtggccatcaccgtgaccatggcgtcattcaaaaaatacctc

SEQ ID NO: 114839 - DNA, 75 bp, synthetic construct
  source 1..75: mol_type = other DNA
atcggttttattatcacaatgaaaaatgaaggaacataccctgcccactctacaaaattagaacttgaagataaa

SEQ ID NO: 114840 - DNA, 75 bp, synthetic construct
  source 1..75: mol_type = other DNA
aagcaacaagggctttcatgcacaatcaccttcggtaaagagattgatgaaagtaaaaattatatttgccagtaa

SEQ ID NO: 114841 - DNA, 75 bp, synthetic construct
  source 1..75: mol_type = other DNA
ttttttggtattcaggaaccagttaaaccattaaatgctaaaaatggctcttatttcagaaccatttgcagccac

SEQ ID NO: 114842 - DNA, 75 bp, synthetic construct
  source 1..75: mol_type = other DNA
gcacgggcaaacacgtgattgctcatgctgattaccccagcgatatttatgaatggcaaaaggaagtcgatctac

SEQ ID NO: 114843 - DNA, 75 bp, synthetic construct
  source 1..75: mol_type = other DNA
ggaagaagcaaaaacaatgacacttgcagccagaagttcttcggctcaggtaaatgaagcatcacttgctctgtt

SEQ ID NO: 114844 - DNA, 75 bp, synthetic construct
  source 1..75: mol_type = other DNA
atcaaagcagctgccagtgaagggaaaggatacactttacttccttcttatgagatttctttaaaagccattgat

SEQ ID NO: 114845 - DNA, 75 bp, synthetic construct
  source 1..75: mol_type = other DNA
atgccctaaccgaaaaacagttaaaacaaatcgaactcctcaaagaacgccgcaccgcccttatctccgccgccg

SEQ ID NO: 114846 - DNA, 75 bp, synthetic construct
  source 1..75: mol_type = other DNA
gtggccgtggttgaggggctgggcagacgtgatctgcgccggtatggtgccgcatatgaatccagctttgtttat

SEQ ID NO: 114847 - DNA, 75 bp, synthetic construct
  source 1..75: mol_type = other DNA
cctttctggtggataaaatcatcatcatgggacgtcctgatgaggaagagacgctgttacgtgtggatgcggcga

SEQ ID NO: 114848 - DNA, 75 bp, synthetic construct
  source 1..75: mol_type = other DNA
aaaatgggtagacggaaagaaaaagatcgtctgggacagcaaaaaacgacgaaatgaggcgctcgattgctttgt

SEQ ID NO: 114849 - DNA, 75 bp, synthetic construct
  source 1..75: mol_type = other DNA
ggtattgcgccgctgcatcacgcgattgaacatttcgccgggcagcaaagtgcagtggtggcgatgatattaccg

SEQ ID NO: 114850 - DNA, 75 bp, synthetic construct
  source 1..75: mol_type = other DNA
aaaagattgcgattctttgcctgagtacaggagcacgttggggagaagcagctcgtttgaaagcagaaaatatca

SEQ ID NO: 114851 - DNA, 75 bp, synthetic construct
  source 1..75: mol_type = other DNA
atgacggagacgggcgggcaaccgcccgtttcttttccgacaaaggatgtcgccgtgctcctctttttactgcgc

SEQ ID NO: 114852 - DNA, 75 bp, synthetic construct
  source 1..75: mol_type = other DNA
tggattcggggctgaatgtacgtgtagccgatcttgattactactggttacaggaacgtggaagcatgtgtcagc

SEQ ID NO: 114853 - DNA, 75 bp, synthetic construct
  source 1..75: mol_type = other DNA
agccgatcttgattactactggttacaggaacgtggaagcatgtgtcagccagcgtacatggtacttaatcgctt

SEQ ID NO: 114854 - DNA, 75 bp, synthetic construct
  source 1..75: mol_type = other DNA
aagtgagcgccgaggggaaagtttattacctggcgctggtacgggatgccagcgtagaaatggcgcatgaacatt

SEQ ID NO: 114855 - DNA, 75 bp, synthetic construct
  source 1..75: mol_type = other DNA
attatcattatgggtcgtcatgatgatgagtcgactctcgctcgagttgatgaagcgatcaacaggacgtataag

SEQ ID NO: 114856 - DNA, 75 bp, synthetic construct
  source 1..75: mol_type = other DNA
gctgctaaggagtctgaacattttcttcggttccatgttccatgcccacactgtggggaagagcagtatctgaaa

SEQ ID NO: 114857 - DNA, 75 bp, synthetic construct
  source 1..75: mol_type = other DNA
caatacgctgagcatgaagcgtttctcgaatggtcgtggtttctggtgcctgggcggtaaggctgcaaaaaacta

SEQ ID NO: 114858 - DNA, 75 bp, synthetic construct
  source 1..75: mol_type = other DNA
tatgtcattacagggcttgggattattggtgaagttgatggtgacgacccagcaagattgaggcctttacagtat

SEQ ID NO: 114859 - DNA, 75 bp, synthetic construct
  source 1..75: mol_type = other DNA
ttgtcatgacccaggacgatcttcctttcgcgaaaagtgccgcgctggtagtgaagaatccctacctgacttacg

SEQ ID NO: 114860 - DNA, 75 bp, synthetic construct
  source 1..75: mol_type = other DNA
tggttaggccgcgtggtgaatggcctcggcgaaccgctggatggcaaaggccgcctgaacggcaacgaccttctg

SEQ ID NO: 114861 - DNA, 75 bp, synthetic construct
  source 1..75: mol_type = other DNA
tggacccgtgatggcattctctggttttcgtcaaccgcgttgcgtcatccgcgatatcgcagtctgcgtcacagg

SEQ ID NO: 114862 - DNA, 75 bp, synthetic construct
  source 1..75: mol_type = other DNA
taccttactggaaatgctgtgcgccacgtacccggacaccatccatccacaactgctcgcgactgaagatatcac

SEQ ID NO: 114863 - DNA, 75 bp, synthetic construct
  source 1..75: mol_type = other DNA
ggctcgattggcacgacaagttgcttcgattctcaccaataaaaaacgctcggtgtgcaagaccgagcgttctga

SEQ ID NO: 114864 - DNA, 75 bp, synthetic construct
  source 1..75: mol_type = other DNA
ggaagcggggcattatccggccattgatatcggccagtcgatcagccgctgcatgaaccaggtgaccagcctgga

SEQ ID NO: 114865 - DNA, 75 bp, synthetic construct
  source 1..75: mol_type = other DNA
attgacctagaacagcgatttttgaccaaaaatttcttcaaaccttacgaactggacgatctgcgggattttgct

SEQ ID NO: 114866 - DNA, 75 bp, synthetic construct
  source 1..75: mol_type = other DNA
ccaagagcagctccgttcttacttaatgggttggagagatggttcgggaactgcagcgacttacaacaagcgttt

SEQ ID NO: 114867 - DNA, 75 bp, synthetic construct
  source 1..75: mol_type = other DNA
gaccggacaactgtgccgcatagaaagcgccaatcatacgctgattgacgcgcaggccgtgggctttaatcgcga

SEQ ID NO: 114868 - DNA, 75 bp, synthetic construct
  source 1..75: mol_type = other DNA
tgcactggtgatgaacattgatgacatgagcaagcgtctgaaatcgcttgagcgcaaggttaatcaacaagacta

SEQ ID NO: 114869 - DNA, 75 bp, synthetic construct
  source 1..75: mol_type = other DNA
tgggcgcggacgggctggcaaagtctatcgtcgtcgtcgcgcccgccgatgaatcgccgctgatgcgcctgaaag

SEQ ID NO: 114870 - DNA, 75 bp, synthetic construct
  source 1..75: mol_type = other DNA
gctggacgcatttcgccaggccgccgagatcactgagcgactgcaacaccatgctcgtgaaacgctgaatgacct

SEQ ID NO: 114871 - DNA, 75 bp, synthetic construct
  source 1..75: mol_type = other DNA
tgtcgcaagtcacagaattatttgaaaaaccgttgctggatctgctgtttgaagcgcagcaggtgcatcgccagc

SEQ ID NO: 114872 - DNA, 75 bp, synthetic construct
  source 1..75: mol_type = other DNA
ggaccggatactggcaacgttggctggatcttactggcaatggtcatcggtggggcgattggtatccgtctggcg

SEQ ID NO: 114873 - DNA, 75 bp, synthetic construct
  source 1..75: mol_type = other DNA
atgacgcgggaatggcaccgattctggtcaatattcacctgacggaagtgttcctcggtatcttcatcggggcgg

SEQ ID NO: 114874 - DNA, 75 bp, synthetic construct
  source 1..75: mol_type = other DNA
actggttgtttccttcctgctgctgattgtgtttgttcgcactgaaagcgttggcctgcaagttctggcattgct

SEQ ID NO: 114875 - DNA, 75 bp, synthetic construct
  source 1..75: mol_type = other DNA
agcagtatccgtcagaaacccgttttgttgtctggcttaacccgtattggggcgcggtggaatccgatcagggag

SEQ ID NO: 114876 - DNA, 75 bp, synthetic construct
  source 1..75: mol_type = other DNA
cgcaattaccggattaagaatcattggtgaagtagatggcgatgatgaagccatcttcagaccaatacaaaaata

SEQ ID NO: 114877 - DNA, 75 bp, synthetic construct
  source 1..75: mol_type = other DNA
caccctcggtaatgcgcaggcgatgatcagcggcgtgcgcggcggcactattgatatggagatgtctggctccaa

SEQ ID NO: 114878 - DNA, 75 bp, synthetic construct
  source 1..75: mol_type = other DNA
ttttattcgcaccattgcggtggcgcggatcatgatgccgacttcttacgtgcgcctttctgccggacgcgaaca

SEQ ID NO: 114879 - DNA, 75 bp, synthetic construct
  source 1..75: mol_type = other DNA
cacgctggacattgtcgcaagtcacagaattatttgaaaaaccgttgctggatctgctgtttgaagcgcagcagg

SEQ ID NO: 114880 - DNA, 75 bp, synthetic construct
  source 1..75: mol_type = other DNA
cgcagattgaaccggaaatgatgccggtacgccattccgttcacagcgctcaacagggtaaaggtgggtgcggaa

SEQ ID NO: 114881 - DNA, 75 bp, synthetic construct
  source 1..75: mol_type = other DNA
agttttacggcaatatcatcaccacacgtacttatcaggaacgccttgatacgctggaaaaagtgcgcgatgccg

SEQ ID NO: 114882 - DNA, 75 bp, synthetic construct
  source 1..75: mol_type = other DNA
gacgttgagccgttggctgatgcattaaaggtgcgcggggtgagccgcttaatattcccggcgctgtatttgtga

SEQ ID NO: 114883 - DNA, 75 bp, synthetic construct
  source 1..75: mol_type = other DNA
aacggcctgaaaacctttgtgaacaccacgctgggcgagacctgggaagaggctgtgggcgaaaaactcgatcac

SEQ ID NO: 114884 - DNA, 75 bp, synthetic construct
  source 1..75: mol_type = other DNA
cggcgcgctggatgacactgttattggcaatggcgtgatcattgataaccagtgccagattgcacataacgtcgt

SEQ ID NO: 114885 - DNA, 75 bp, synthetic construct
  source 1..75: mol_type = other DNA
cggtgttgcacagatgctggcccctaaacccaaaaccccccgcacacagacaacggataacggcaaacagaacac

SEQ ID NO: 114886 - DNA, 75 bp, synthetic construct
  source 1..75: mol_type = other DNA
tgcagattgtcgacggcaaagtggcgtggagcgcggctgtctgcgagcaatgtgatacctgcctgaagatgtgtc

SEQ ID NO: 114887 - DNA, 75 bp, synthetic construct
  source 1..75: mol_type = other DNA
atcaggcgttgcagattgttaacggcaaagtggtgtggaacgctgtggtctgcgagcaatgtgatacctgcctga

SEQ ID NO: 114888 - DNA, 75 bp, synthetic construct
  source 1..75: mol_type = other DNA
gacttggcgatgttccggtacgcctgaacgcgtttcatgcccacggcgtgtatggcgaagcgcaaagctggccga

SEQ ID NO: 114889 - DNA, 75 bp, synthetic construct
  source 1..75: mol_type = other DNA
gcgccacaccggaagatgttgagcagttggctgatgcgttaaaggtgcgcggggtgagccggttgatatttccgg

SEQ ID NO: 114890 - DNA, 75 bp, synthetic construct
  source 1..75: mol_type = other DNA
ggctcgcgtctttgggcaaacgtcaccatttaccatgaaatccagatcggccaaaattgcctgatccagtcagga

SEQ ID NO: 114891 - DNA, 75 bp, synthetic construct
  source 1..75: mol_type = other DNA
cggcaaagctgggtagcaatgtctcaattggcgctaacgcggtaattgagtccggcgttgagttaggcgataacg

SEQ ID NO: 114892 - DNA, 75 bp, synthetic construct
  source 1..75: mol_type = other DNA
gcgccacgccggaagacgttgagcaattggctgatgcgttacgggagcacggggtgagccgattaatatttccgg

SEQ ID NO: 114893 - DNA, 75 bp, synthetic construct
  source 1..75: mol_type = other DNA
gttcctgcattgctggagctggctccatggttcggaagaaagcaccgcgataatacactcaccctgaagcgtttt

SEQ ID NO: 114894 - DNA, 75 bp, synthetic construct
  source 1..75: mol_type = other DNA
cacactcgggtagacgaacggaaggataaactaggaaacctatttaatatcagtgatatcgaagccgagattgaa

SEQ ID NO: 114895 - DNA, 75 bp, synthetic construct
  source 1..75: mol_type = other DNA
aaggccagcgcgtcgggctaatggcgggcagcggcgtcgggaaaagcgtgctgctggggatgatcacccgccaga

SEQ ID NO: 114896 - DNA, 75 bp, synthetic construct
  source 1..75: mol_type = other DNA
aaggacgtacttgaaagacccctagacagagaaacggacagtgcttttgataaggtcagaaagcaccgcaaccgc

SEQ ID NO: 114897 - DNA, 75 bp, synthetic construct
  source 1..75: mol_type = other DNA
gggcgttgaaggggtgaaaacctatatcaaaacgattgggctttataacagcaaagcagaaaatatcatcaaaac

SEQ ID NO: 114898 - DNA, 75 bp, synthetic construct
  source 1..75: mol_type = other DNA
gaagtgatggcagagcggaaagagcattattcagcgcccgttcccgccgtcacatgccgggaccatcaccgtgta

SEQ ID NO: 114899 - DNA, 75 bp, synthetic construct
  source 1..75: mol_type = other DNA
atggggtgcttcaacccgtccagtagttgcagagttaggcgatgaggcaggatggcatttctatagccagcgaaa

SEQ ID NO: 114900 - DNA, 75 bp, synthetic construct
  source 1..75: mol_type = other DNA
cgttcccggcgttaatgccaaagggaatcaggacacctctggtaatgcggctacagcgaccaaattgcagacagc

SEQ ID NO: 114901 - DNA, 75 bp, synthetic construct
  source 1..75: mol_type = other DNA
caggcgacaacggcaatgaatatttcaaatggagaagcaaacaaagcaccacaacaaaagacctgatgacgctga

SEQ ID NO: 114902 - DNA, 75 bp, synthetic construct
  source 1..75: mol_type = other DNA
aggagataatgttctctacgtattcgtcagtggaccatgcagcctaccaggaatcagttcgtaagattattgccc

SEQ ID NO: 114903 - DNA, 75 bp, synthetic construct
  source 1..75: mol_type = other DNA
aatggcagccttggagttggtacgacgaatgcgttaggtggtagctctattgttcttggtgataatgataccgga

SEQ ID NO: 114904 - DNA, 75 bp, synthetic construct
  source 1..75: mol_type = other DNA
caaaggcacctgccagatcgaaaaagcggccaacgagtcggcgcatttcatgcgtttttatgtgccctgcccaca

SEQ ID NO: 114905 - DNA, 75 bp, synthetic construct
  source 1..75: mol_type = other DNA
actctgcgattcgacgctgtgagcttatgacccgcattcgtgggtttgaaaatatctgcaatgagctcggttatg

SEQ ID NO: 114906 - DNA, 75 bp, synthetic construct
  source 1..75: mol_type = other DNA
gaaaggtgctttccctccagcccgagtgtgtacgttttgacgtttatcgcactgctgcggtgctggagcaaaatc

SEQ ID NO: 114907 - DNA, 75 bp, synthetic construct
  source 1..75: mol_type = other DNA
gccatcacatcaggcgaaagttaaggcgtatcggaccaaagctacagaaatcctcaatcgtgttgcggttttagc

SEQ ID NO: 114908 - DNA, 75 bp, synthetic construct
  source 1..75: mol_type = other DNA
agtttgcggctgtccatgatgccgccgatgccggtgattgggctggctatgttaatgcgcagggcggtccgtttg

SEQ ID NO: 114909 - DNA, 75 bp, synthetic construct
  source 1..75: mol_type = other DNA
tagcaggtggcaaaagttgtattaacggtaaatggttgcgtggaacgtccaaaggtgaaattttctccgcagcgc

SEQ ID NO: 114910 - DNA, 75 bp, synthetic construct
  source 1..75: mol_type = other DNA
ggagatggtttaaatcaaatactactcctaatggttataagttggctggttgtgattgtagagatcctgaactca

SEQ ID NO: 114911 - DNA, 75 bp, synthetic construct
  source 1..75: mol_type = other DNA
actgtacgggaagcgaaagcgatccaccggaactcgatttatcaaaacccctgagtcgacgtgaaaggcgagagc

SEQ ID NO: 114912 - DNA, 75 bp, synthetic construct
  source 1..75: mol_type = other DNA
gtgacgccacgtttgacgggggcgaaaaatcatctctatgcctgtcatttcccgctgaacatggagaaagagtga

SEQ ID NO: 114913 - DNA, 75 bp, synthetic construct
  source 1..75: mol_type = other DNA
ctgtatctggtcgacgagagcgggcaagacgtttgcttccgcattgaattaccgtcgtcgaaaaacacgaaataa

SEQ ID NO: 114914 - DNA, 75 bp, synthetic construct
  source 1..75: mol_type = other DNA
attctggtgatcgccgcggacgaacgttatttgccgaccgataacggaaaactgttctcgaccggtaaccatccg

SEQ ID NO: 114915 - DNA, 75 bp, synthetic construct
  source 1..75: mol_type = other DNA
atgcgcgccggtattatttctctgcaattcaatgtcacccctccgcattgggagcgggtgactaaaaaatatgtc

SEQ ID NO: 114916 - DNA, 75 bp, synthetic construct
  source 1..75: mol_type = other DNA
cgaagacgatgaagaatttaaacgcgcattgacaaataaagaaattacgccggaagcattccgcactaaggcact

SEQ ID NO: 114917 - DNA, 75 bp, synthetic construct
  source 1..75: mol_type = other DNA
cattgccgcgtcttgaactggtcgtaaaaaaatatgagtgtgtaggtatcaacagcaacgtatcagccgctgttt

SEQ ID NO: 114918 - DNA, 75 bp, synthetic construct
  source 1..75: mol_type = other DNA
agcttctgcaaaaaggcattgccgcgtcttgaactggtcgcaaaaaaatacgaatgcgctggtatcaacagcaag

SEQ ID NO: 114919 - DNA, 75 bp, synthetic construct
  source 1..75: mol_type = other DNA
aaaaaacttttgacctgaacaacgtaattcgctctctggtagatggtgaagctctgggtgctcacgaagccgagt

SEQ ID NO: 114920 - DNA, 75 bp, synthetic construct
  source 1..75: mol_type = other DNA
aatttcattcgcgctgaactggcagagcatgacgacgctgattctgattttggtgagctggcgacgctgcatggt

SEQ ID NO: 114921 - DNA, 75 bp, synthetic construct
  source 1..75: mol_type = other DNA
agttggtagagcgtcgactcatccctctaactactgagcgcgaggttttaggcgaggaagggagttcgcgccgtc

SEQ ID NO: 114922 - DNA, 75 bp, synthetic construct
  source 1..75: mol_type = other DNA
gatgattgccatcgcgctggcaaatcaaccacgtctgctgatagctgacgaaccgacaaactcgatggagccaac

SEQ ID NO: 114923 - DNA, 75 bp, synthetic construct
  source 1..75: mol_type = other DNA
gaagatgtggcgtagtaactatgccccacctttgctacgtctcgcatggaaagctggcctgaaggttccaccatt

SEQ ID NO: 114924 - DNA, 75 bp, synthetic construct
  source 1..75: mol_type = other DNA
gagatccgcaatcaggtgccagatatggaggtagagatcttcgttcacggcgcgctgtgcatggcctactccggt

SEQ ID NO: 114925 - DNA, 75 bp, synthetic construct
  source 1..75: mol_type = other DNA
attcaaccacgaaaatcttcagctcggcatcaatgaagcccacgcgctggggaaaaagttttatgtcgtggtcaa

SEQ ID NO: 114926 - DNA, 75 bp, synthetic construct
  source 1..75: mol_type = other DNA
acatggcgtaaaagccattgaagatcgggcgctgatggattttctcgccgagcaacaaattggtattgaatcctg

SEQ ID NO: 114927 - DNA, 75 bp, synthetic construct
  source 1..75: mol_type = other DNA
ctgacgatacggttggtttaaatcgctctctaaatactatcacagttaatttggaggctaaacgcgatatgacta

SEQ ID NO: 114928 - DNA, 75 bp, synthetic construct
  source 1..75: mol_type = other DNA
tgactctgaattagcacgcgcattggcaattaaagacatgacgccggaagcattccgcactaaggcactaaataa

SEQ ID NO: 114929 - DNA, 75 bp, synthetic construct
  source 1..75: mol_type = other DNA
ttacccgaatcattcatgccaccaattatagtatgaaggggctttcttcagcttggagacatgaagcggcttttc

SEQ ID NO: 114930 - DNA, 75 bp, synthetic construct
  source 1..75: mol_type = other DNA
acagggcggcgtgcgggtgctaaaagacggcaccgatctcaatcaaacaggttcgttttatctggcagcccgtcc

SEQ ID NO: 114931 - DNA, 75 bp, synthetic construct
  source 1..75: mol_type = other DNA
gtcattttgatacccagcttaagcaatatctggcgtcacgcatggtcaatatggtcgccagatttaaccgcctcc

SEQ ID NO: 114932 - DNA, 75 bp, synthetic construct
  source 1..75: mol_type = other DNA
atacggcgaaaattcatccacggaacggatgagcaaaacgcagctatagctaaaactatcgacgagatacaactt

SEQ ID NO: 114933 - DNA, 75 bp, synthetic construct
  source 1..75: mol_type = other DNA
tgatgcagaaggcaaaaattggcacggtagggacagacattttctgtcattacttacctgccaatgtcaaatccg

SEQ ID NO: 114934 - DNA, 75 bp, synthetic construct
  source 1..75: mol_type = other DNA
tttgctgaaagcaggaaggcaaagcggggaaagcggagtcgatcgttactttgagcaacaggtttcgctggcggc

SEQ ID NO: 114935 - DNA, 75 bp, synthetic construct
  source 1..75: mol_type = other DNA
cagagtaccttcaggacgccatttctcttaatccgctaagaggtggtactgaagccgagagtgtccacagtagag

SEQ ID NO: 114936 - DNA, 75 bp, synthetic construct
  source 1..75: mol_type = other DNA
atcctcaaactaatgaatatggtctgattagcaatgtcacacactggatgcctctaccagaaccgcctcaggagg

SEQ ID NO: 114937 - DNA, 75 bp, synthetic construct
  source 1..75: mol_type = other DNA
agacaacgagcgcggtccggctggtctggttaagcaactggttgatgcaagccgtgttactaagaaagccgcttt

SEQ ID NO: 114938 - DNA, 75 bp, synthetic construct
  source 1..75: mol_type = other DNA
atgacaattaagaagctcgatgatggtcgatacgaagtggacgttagacctgcagggcgcaacggaaagcgcatc

SEQ ID NO: 114939 - DNA, 75 bp, synthetic construct
  source 1..75: mol_type = other DNA
acattcacggatagagcagacaatggtttatgcgcactttgccccggagtatcttcaggatgctgtttcactcaa

SEQ ID NO: 114940 - DNA, 75 bp, synthetic construct
  source 1..75: mol_type = other DNA
atgcttaaatttcgccgcgatcttaacggttacggtggagttattaacgaagggcataatgatcaatacgaattt

SEQ ID NO: 114941 - DNA, 75 bp, synthetic construct
  source 1..75: mol_type = other DNA
aaatatcaatacagagaatgtgttagagaagtaacccactggatgcctctaccagaaccgccgcaggagatgaag

SEQ ID NO: 114942 - DNA, 75 bp, synthetic construct
  source 1..75: mol_type = other DNA
ctgcgcaacccgcccatcggcggcgcggaaaaccaactctgtcagtttcaaaccgatctcatcaccgataacatg

SEQ ID NO: 114943 - DNA, 75 bp, synthetic construct
  source 1..75: mol_type = other DNA
gtcggctatgacattaaagagtatcacatcgactacgctaaatcgcaactcattgtttctaaatggattccgcac

SEQ ID NO: 114944 - DNA, 75 bp, synthetic construct
  source 1..75: mol_type = other DNA
taatcgcggatggaagtaagcgcatagcagaactgtctgctagccacagcaaattgcgcgacacaatggctggca

SEQ ID NO: 114945 - DNA, 75 bp, synthetic construct
  source 1..75: mol_type = other DNA
gtatttatcaggaaatatcttggatgacgtaactcactggatgccgctaccggaaccgccgcaggaggttaaccg

SEQ ID NO: 114946 - DNA, 75 bp, synthetic construct
  source 1..75: mol_type = other DNA
tttccggttatatcatcgaaaacggtaaactggctggttacgaagtagttacttctggtgttattccggtagacc

SEQ ID NO: 114947 - DNA, 75 bp, synthetic construct
  source 1..75: mol_type = other DNA
ttcacgcaagggctgattgatatctttaaatccctgtcgtgggattataaaaccaataacccctgcatgtttggc

SEQ ID NO: 114948 - DNA, 75 bp, synthetic construct
  source 1..75: mol_type = other DNA
atggatttgatttcagttttagcgttatggccttacctgttgcctgttgtggccggtggggccgtctgggcgatg

SEQ ID NO: 114949 - DNA, 75 bp, synthetic construct
  source 1..75: mol_type = other DNA
ctgctcttcacgcggatgattatcggcccggtgaaaaatattgaacggatgatcaaccgtctgggggaagggcgt

SEQ ID NO: 114950 - DNA, 75 bp, synthetic construct
  source 1..75: mol_type = other DNA
ggataacgtaggtcgtgctctggttaaattctctaagcatggcactttggctaatgatattcgtaataaagtcat

SEQ ID NO: 114951 - DNA, 75 bp, synthetic construct
  source 1..75: mol_type = other DNA
ttccacgccgagtccattgacccggagaaaggcagcgcaaccggctatgttgctaaatacatctcaaaaaatatc

SEQ ID NO: 114952 - DNA, 75 bp, synthetic construct
  source 1..75: mol_type = other DNA
ggctcactcagtggaagattgttccgaagcgtgctgttgatttggccgttgaccttcaggacggcaaagccgtcc

SEQ ID NO: 114953 - DNA, 75 bp, synthetic construct
  source 1..75: mol_type = other DNA
tggtacaggccacgcgcacagtggtgttctctcgtgggcagcagcttcagcgtgaaatcgccgaacgtgggcaat

SEQ ID NO: 114954 - DNA, 75 bp, synthetic construct
  source 1..75: mol_type = other DNA
ggggaatagcgtttcgttcagcggccctcgtgaattacgttcggtcgggcaacgaattatctggttaagcgagcg

SEQ ID NO: 114955 - DNA, 75 bp, synthetic construct
  source 1..75: mol_type = other DNA
ggcgtgaccgtcctgtctggtctgaatagcccgatcgctgtaccgaaaatgactgcttccagcgttgatgccttt

SEQ ID NO: 114956 - DNA, 75 bp, synthetic construct
  source 1..75: mol_type = other DNA
aaccgtatcagcctgattgaaaaatatgatggctcagttgctaaccctgcgattcgccgctgtgagctcatgacc

SEQ ID NO: 114957 - DNA, 75 bp, synthetic construct
  source 1..75: mol_type = other DNA
cggaaaagggcagcgctaccggctatgtcgctaaatacatttccaaaaatatcgacggctatgctctcgatggtg

SEQ ID NO: 114958 - DNA, 75 bp, synthetic construct
  source 1..75: mol_type = other DNA
atgctggcatttttgctgattctgctacccctgttggtgctggcatggcaagcctggcaaagcctgaatgcgctt

SEQ ID NO: 114959 - DNA, 75 bp, synthetic construct
  source 1..75: mol_type = other DNA
gaacaacgtaattcgctctctggtagatggtgctgctctgggtgctaacgaagctgaatattccgctatggctgc

SEQ ID NO: 114960 - DNA, 75 bp, synthetic construct
  source 1..75: mol_type = other DNA
gccgctgacgccggtgactgggctggttacgttaatgcgcagggtgggccgtttgtccgtcgcgatgatttgcag

SEQ ID NO: 114961 - DNA, 75 bp, synthetic construct
  source 1..75: mol_type = other DNA
gatcaaccggctgggggaagggcgttctctgggcaatagcgtttcgttcagtggaccgagcgagttacgctcggt

SEQ ID NO: 114962 - DNA, 75 bp, synthetic construct
  source 1..75: mol_type = other DNA
ccgcgcacggcctgagtattgaatttgccgccgttcatgacgccgctgatgccggtgattgggctggatatgtca

SEQ ID NO: 114963 - DNA, 75 bp, synthetic construct
  source 1..75: mol_type = other DNA
gcaggtgctggaacaccgggggatggggaccagataatgaagaaaaagcccgtcatcaggaggttcagcaacaac

SEQ ID NO: 114964 - DNA, 75 bp, synthetic construct
  source 1..75: mol_type = other DNA
aaaacgtgaatatcacaccattgccgggctgttgatggagtatttgcagcgtattccaaaacctcgaagaagttc

SEQ ID NO: 114965 - DNA, 75 bp, synthetic construct
  source 1..75: mol_type = other DNA
aagatttgctcggtgttgttcacgttatcgacctgctacaacagtcactgcgtggcgaaccgctcaacctgcggg

SEQ ID NO: 114966 - DNA, 75 bp, synthetic construct
  source 1..75: mol_type = other DNA
gaaacgcgaatatcacaccattgccgggctgttgatggaatatttgcagcgtattccaaaacctggcgaagaagt

SEQ ID NO: 114967 - DNA, 75 bp, synthetic construct
  source 1..75: mol_type = other DNA
atggaatggattgccgatccgtctatctgggctgggttaatcacgctgattgtgatcgaactggtcctcggcatt

SEQ ID NO: 114968 - DNA, 75 bp, synthetic construct
  source 1..75: mol_type = other DNA
ggcaacgagaaccagctcgacggctatgagaaatggttgttaccccagcttaaacccgaacaacgctggtacggt

SEQ ID NO: 114969 - DNA, 75 bp, synthetic construct
  source 1..75: mol_type = other DNA
tggaagggaaagatagcaataaccccacgcaacgcaaaggtgcgaagttctggggcgtggtgacacaaatagtgg

SEQ ID NO: 114970 - DNA, 75 bp, synthetic construct
  source 1..75: mol_type = other DNA
cgcacgcactttgcttttgtggtggatgagtttggctcggtggaagggattgtgacattaagtgacgtcactgaa

SEQ ID NO: 114971 - DNA, 75 bp, synthetic construct
  source 1..75: mol_type = other DNA
gtcgaccatttactggtcatgatggccgccgtggttatcgctatcagcctgatgttgatggccagcaagccgtta

SEQ ID NO: 114972 - DNA, 75 bp, synthetic construct
  source 1..75: mol_type = other DNA
aaccggtatccacgcctgttaaaaaacaaaaacggaagaaaacagtaactgacgatgttaacccttggctgactt

SEQ ID NO: 114973 - DNA, 75 bp, synthetic construct
  source 1..75: mol_type = other DNA
agtgtgatgaaaaaccgttgacggtaaaactgaataatccgcgtcaggaagtcagttttgtctacgacaatcaat

SEQ ID NO: 114974 - DNA, 75 bp, synthetic construct
  source 1..75: mol_type = other DNA
tacttaatcttaaccagcgtaccgtcagcagcattatgacgtcgcgccacgatattgagcatatcgatctcaacg

SEQ ID NO: 114975 - DNA, 75 bp, synthetic construct
  source 1..75: mol_type = other DNA
cgattgtcagtgtggtggttgtgctgctgctcgccggattaatgggtggcagtatgctgctctgggcggtgctgg

SEQ ID NO: 114976 - DNA, 75 bp, synthetic construct
  source 1..75: mol_type = other DNA
atgagcgcattttcttttaacaccacttatcagccaaccggcgatcagcagaaggacgcaatcgcacaaatcgac

SEQ ID NO: 114977 - DNA, 75 bp, synthetic construct
  source 1..75: mol_type = other DNA
agtgtgatgaaaaaccgttgacggtcaaactgaataatccgcgccaggaggtcagttttgtttacgataatcaac

SEQ ID NO: 114978 - DNA, 75 bp, synthetic construct
  source 1..75: mol_type = other DNA
cgcgtctggtcgttaccgacggcgatgatgcagaagatttgctcggtgtcgttcacgttatcgacctgttacaac

SEQ ID NO: 114979 - DNA, 75 bp, synthetic construct
  source 1..75: mol_type = other DNA
aatagtgaacgttactgggtttcctgtatttataaccatggacaggtttggttatcacaaccggtgcctgcattg

SEQ ID NO: 114980 - DNA, 75 bp, synthetic construct
  source 1..75: mol_type = other DNA
cggtaactttgattcccgttatgtgaaagatgttcgacttggttcacagcaatattatggagtgaacaactggca

SEQ ID NO: 114981 - DNA, 75 bp, synthetic construct
  source 1..75: mol_type = other DNA
actaatgaagtgaccattgatttatcttataacctggcaatcacaaatatcgataccagtgatgaacatcttgta

SEQ ID NO: 114982 - DNA, 75 bp, synthetic construct
  source 1..75: mol_type = other DNA
aattagaggctaaagcccaaattattatcggtatgtactataaaacaagagataatcatctttttgcatctccga

SEQ ID NO: 114983 - DNA, 75 bp, synthetic construct
  source 1..75: mol_type = other DNA
cttggtgatgatatcagcatccctgaatgcgatgtaatcaattggatgccgctaccggaaccgccgcaggaggtg

SEQ ID NO: 114984 - DNA, 75 bp, synthetic construct
  source 1..75: mol_type = other DNA
aggcgcttataaaaaaacatcagcctgaaaagcagcatacccacaatctacctttaagttttttgaaatggtatt

SEQ ID NO: 114985 - DNA, 75 bp, synthetic construct
  source 1..75: mol_type = other DNA
tatgaatataaatcgctggcgatgaatgctgagcagcgttatgtcaacccgctgggtttccgcgtgacgagttat

SEQ ID NO: 114986 - DNA, 75 bp, synthetic construct
  source 1..75: mol_type = other DNA
cgcgctaaagtgaccagcctgcgcaaagtggactgggaaagtctgcggcctaatttctattttattttccctgaa

SEQ ID NO: 114987 - DNA, 75 bp, synthetic construct
  source 1..75: mol_type = other DNA
ccacgcctgttaaaaaacaaaaacggaagaaaacagtaactgacgatgttaacccctggctgacttccggaggat

SEQ ID NO: 114988 - DNA, 75 bp, synthetic construct
  source 1..75: mol_type = other DNA
ggtcttgatgttacaggggatatatttgcaaaccgttttgcaattaacagtagtaccggcatgtggattcatatg

SEQ ID NO: 114989 - DNA, 75 bp, synthetic construct
  source 1..75: mol_type = other DNA
atgaaaaaactgttaattatcattttgccggtccttctctccggctgtagcgcctttaatcagctggttgagcgc

SEQ ID NO: 114990 - DNA, 75 bp, synthetic construct
  source 1..75: mol_type = other DNA
agtatgctgctctgggcggtgctggcgggcgcggtcgtgctggcattgctgtgcggcgtgctgggctggatgctg

SEQ ID NO: 114991 - DNA, 75 bp, synthetic construct
  source 1..75: mol_type = other DNA
ggaatctatgttttctggtcgaaaggcgatgaagcgactgtctataaacgcgaccgcatcgtcttgaataactgt

SEQ ID NO: 114992 - DNA, 75 bp, synthetic construct
  source 1..75: mol_type = other DNA
ctgctggtggggctacgaccataccgcttgttgctggcaacgcagcctttacgcgtattacgtaatgatgtggta

SEQ ID NO: 114993 - DNA, 75 bp, synthetic construct
  source 1..75: mol_type = other DNA
ttgccgacctgaacatcgggattttgttcttcctgatgatggcaggtctggcggtttacgcggtgctgtttgcgg

SEQ ID NO: 114994 - DNA, 75 bp, synthetic construct
  source 1..75: mol_type = other DNA
tggagctcgaaatcttcgttcacggcgcactgtgcatggcctactccggccgctgcctgctctctggctacatca

SEQ ID NO: 114995 - DNA, 75 bp, synthetic construct
  source 1..75: mol_type = other DNA
gcgcataaatatgagtaatctctgctcagaaattttgcaggttaacagcgcctcagagtatgacgagaatctcga

SEQ ID NO: 114996 - DNA, 75 bp, synthetic construct
  source 1..75: mol_type = other DNA
cgcatgtgcgtccgaacagtgtgaccttcagtagccagcagcagcgcctgaactggctggtcaacgaaggttact

SEQ ID NO: 114997 - DNA, 75 bp, synthetic construct
  source 1..75: mol_type = other DNA
tgacgcaggaaacgatggattaccacgcgctgaatgcgatgcttaacctttacgatagcgcaggtcgcattcagt

SEQ ID NO: 114998 - DNA, 75 bp, synthetic construct
  source 1..75: mol_type = other DNA
ttagccaatatctgcaaggtaactggcagccgaaaacggcgaaagttggcgaactgtttgcccgtagcggtatta

SEQ ID NO: 114999 - DNA, 75 bp, synthetic construct
  source 1..75: mol_type = other DNA
ccagaatctgacggataaacagatccacaattacgcacaacagctggcaggagatacaccgctgaaagaggttcg

SEQ ID NO: 115000 - DNA, 75 bp, synthetic construct
  source 1..75: mol_type = other DNA
gcaggccaacgccgtaaactgggcgacggtgaaattctggcagcaaatggggttgacccgcgtgatcctctcccg

SEQ ID NO: 115001 - DNA, 75 bp, synthetic construct
  source 1..75: mol_type = other DNA
gcatattaccgtccatgcaggcgaagctgccgggccggaaagcatctggcaggcgattcgtgaactgggtgcgga

SEQ ID NO: 115002 - DNA, 75 bp, synthetic construct
  source 1..75: mol_type = other DNA
cagagaaacaacgtcaggaatatcttgcgaaactgcgtgacacgcaggcttacaggaatgaaatggcgaagtatg

SEQ ID NO: 115003 - DNA, 75 bp, synthetic construct
  source 1..75: mol_type = other DNA
ggcgcaatcactggctgaagaaagccaagaagctggcggaagatttgggattaggttttcttaattttgctgcat

SEQ ID NO: 115004 - DNA, 75 bp, synthetic construct
  source 1..75: mol_type = other DNA
ttttagaggcgcaggatgtgttgataacctacagaggaaaactaccgggaataattactggttctctgaagacgc

SEQ ID NO: 115005 - DNA, 75 bp, synthetic construct
  source 1..75: mol_type = other DNA
aaaacctttatccgtgacctgaaaccggtagtggaaatggggccggatgcgctgattatgtccgatccggggctg

SEQ ID NO: 115006 - DNA, 75 bp, synthetic construct
  source 1..75: mol_type = other DNA
atgagttggatatcaccggaactgattgagatcttgctgaccgtccttaaagcggtggtgatcctgctggtggtt

SEQ ID NO: 115007 - DNA, 75 bp, synthetic construct
  source 1..75: mol_type = other DNA
ttccagcggctggcggagatccagtttgaatccggctatccctacatcatgtatgaagacacggttaaccgtgct

SEQ ID NO: 115008 - DNA, 75 bp, synthetic construct
  source 1..75: mol_type = other DNA
tgggatgtgttccgcaaagacagctcggtacgctcacgcgttgaaaaaagcgaagccaacgcgcaagcaaccaat

SEQ ID NO: 115009 - DNA, 75 bp, synthetic construct
  source 1..75: mol_type = other DNA
tgaatcttaaatgggatgctttgtctgtccttgttaaagcccttttcagcagtgaagtaaaaatatcgacagtca

SEQ ID NO: 115010 - DNA, 75 bp, synthetic construct
  source 1..75: mol_type = other DNA
atgagaaccaaggtacaggctttacggaagaaacaaaaaaatacattggatcaaatagttaaaactcctgttcct

SEQ ID NO: 115011 - DNA, 75 bp, synthetic construct
  source 1..75: mol_type = other DNA
tacaggggatatatttgcaaaccgttttgcaattaacagtagtaccggcatgtggattcatatgcgtgaccagaa

SEQ ID NO: 115012 - DNA, 75 bp, synthetic construct
  source 1..75: mol_type = other DNA
tcatactcctcttgtcagaaaaaacgctgatgagttgatcgcgctgttactgcttttcacccggcaggttggtca

SEQ ID NO: 115013 - DNA, 75 bp, synthetic construct
  source 1..75: mol_type = other DNA
accagtaatgacgatacgttagcgctgcagagttcagcggcaggctctgcccaaaatgtcggtattcaaattttg

SEQ ID NO: 115014 - DNA, 75 bp, synthetic construct
  source 1..75: mol_type = other DNA
ctgcaagtactgattataaactgaccgacggcactaacaaaattccgttccaggctcgctatattgctgttgatg

SEQ ID NO: 115015 - DNA, 75 bp, synthetic construct
  source 1..75: mol_type = other DNA
tccaggctcgttatattgctctcgggcagtccgtagctggtactgcaaacgctgatgcgaccttcaaagttcaat

SEQ ID NO: 115016 - DNA, 75 bp, synthetic construct
  source 1..75: mol_type = other DNA
caagggattaagtggtctgatatagagtcactggttaaagcattaggcggagaaattaaggaaggaagaggttcg

SEQ ID NO: 115017 - DNA, 75 bp, synthetic construct
  source 1..75: mol_type = other DNA
gttcttaatcgctactctcgcgactttgtcattacgctgtttgcccacgcacacaccagcggttttcgtttccag

SEQ ID NO: 115018 - DNA, 75 bp, synthetic construct
  source 1..75: mol_type = other DNA
agctatccggaagactgggatgtcctgctgacggatgtttttcataaaagctggccgctggcctccgatccttct

SEQ ID NO: 115019 - DNA, 75 bp, synthetic construct
  source 1..75: mol_type = other DNA
aggcgcgttattttgcaaccggtgccgcaacccctggcgcagctaatgcggatgcgaccttcaaggttcagtatc

SEQ ID NO: 115020 - DNA, 75 bp, synthetic construct
  source 1..75: mol_type = other DNA
ggcatttatgttttctggtcaaaaggtgatgaggcaacggtctataagcgtgaccgcatcgtcttgaataactgt

SEQ ID NO: 115021 - DNA, 75 bp, synthetic construct
  source 1..75: mol_type = other DNA
tcacgcagtctggggagcgcttgctgcacaactgggtggaaacaatgcggcttccggtgctgcaggggcattcag

SEQ ID NO: 115022 - DNA, 75 bp, synthetic construct
  source 1..75: mol_type = other DNA
gccagagtgccggaaagcgggctgaagctgtcacgggaaaaaatgacgtatttttctgcggttgagaaggcaatg

SEQ ID NO: 115023 - DNA, 75 bp, synthetic construct
  source 1..75: mol_type = other DNA
gacatccatgctgtccgagcattccgctgtactggcggaggactgccatttccggtttggtgttattacaccaga

SEQ ID NO: 115024 - DNA, 75 bp, synthetic construct
  source 1..75: mol_type = other DNA
cgttaacctctttattatccggggcggtttttgcccagtccagtaacattgcgcacgacgcacatcgtttcgtca

SEQ ID NO: 115025 - DNA, 75 bp, synthetic construct
  source 1..75: mol_type = other DNA
gtgtggaaagataaagatatggatttttcgggtaaattgcctactgggggcaatgcagaggcgaatctggggttt

SEQ ID NO: 115026 - DNA, 75 bp, synthetic construct
  source 1..75: mol_type = other DNA
atttgcatttcatttgatactgctgaaaaacgccgatacgcaacttatttgatactaaatcggcgcttttctttt

SEQ ID NO: 115027 - DNA, 75 bp, synthetic construct
  source 1..75: mol_type = other DNA
atttgacacaaacctgactaaaaccgagctaatgaagttgccctacgggggcgtatgggttgcacagatgcagtt

SEQ ID NO: 115028 - DNA, 75 bp, synthetic construct
  source 1..75: mol_type = other DNA
cagcatacccggatctacaacgccgttttgcaacgtctgccgctcatcgcccaacgcgctgcccgcgatcatgtg

SEQ ID NO: 115029 - DNA, 75 bp, synthetic construct
  source 1..75: mol_type = other DNA
ggattattgaaacggcgcagggtcgcgattctcgtgtcgcacggcttaatcgggtgcaggacaccagcccgctga

SEQ ID NO: 115030 - DNA, 75 bp, synthetic construct
  source 1..75: mol_type = other DNA
cactctctccggttccgttgcaggacgcaaacatcaatcgtcgtcgtatttatcgttctgtctcagggggcggag

SEQ ID NO: 115031 - DNA, 75 bp, synthetic construct
  source 1..75: mol_type = other DNA
gtattgccgccggatttgccggtaatgaggtaatgttttcggaagcgtatctgccgtatgcatggcccgaagtga

SEQ ID NO: 115032 - DNA, 75 bp, synthetic construct
  source 1..75: mol_type = other DNA
caatcatgccgttcattgcacagcagtttccattcttaaccgaccaatccccgctattcactacatgattgcggc

SEQ ID NO: 115033 - DNA, 75 bp, synthetic construct
  source 1..75: mol_type = other DNA
actggatgtatccgtgctcagttacacggataaaataccggcgaaaaatcttggaccttcgctggcgacatggga

SEQ ID NO: 115034 - DNA, 75 bp, synthetic construct
  source 1..75: mol_type = other DNA
ggaagtggtggtggcaaaccatgcgctggtgatggcggcgatggaaagcgaagcggtattgccagacccgaaaaa

SEQ ID NO: 115035 - DNA, 75 bp, synthetic construct
  source 1..75: mol_type = other DNA
aagaagcgcgggccagtggtcgtttatatatcaaagattgtgatattgagtatctgccacagttaccaaacgaaa

SEQ ID NO: 115036 - DNA, 75 bp, synthetic construct
  source 1..75: mol_type = other DNA
caccggtaatacgaaaatcactcattcgttcgatcagcaacagcagaatggccttctgattctggacggtgatgt

SEQ ID NO: 115037 - DNA, 75 bp, synthetic construct
  source 1..75: mol_type = other DNA
aggaccgagtttaaaacagaggccgattttctcggctgggtaaaaacggcaaaacccggacgctatgccgattat

SEQ ID NO: 115038 - DNA, 75 bp, synthetic construct
  source 1..75: mol_type = other DNA
aacgtcgactgtgtgaaaagctcggcttctcgcgttccgcactgcgtgaagggctgaccgtgctgcgcggacgcg

SEQ ID NO: 115039 - DNA, 75 bp, synthetic construct
  source 1..75: mol_type = other DNA
actgaaatcggacaaaaaagcgttgttccgggccgccgggcaggcccgccaggcctgtgagtttttactgaatgc

SEQ ID NO: 115040 - DNA, 75 bp, synthetic construct
  source 1..75: mol_type = other DNA
agtccgtcacaggaccggattgtgatgccactgtcgtcacagtttgaccgggatgctgattactgggccacctta

SEQ ID NO: 115041 - DNA, 75 bp, synthetic construct
  source 1..75: mol_type = other DNA
tgggagattatcgcgttctgtgtgagatccgagatgacgagcttgttatccttgccgccacgattggacatcgcc

SEQ ID NO: 115042 - DNA, 75 bp, synthetic construct
  source 1..75: mol_type = other DNA
tgtttatggggttaaccctggcaaatatcggtggcgtgccggcggcgacctggttgggcgaaaccatcggctggc

SEQ ID NO: 115043 - DNA, 75 bp, synthetic construct
  source 1..75: mol_type = other DNA
tgtattgttctttgtctttagctgcctgctttctattccaccttcgtatattgaagcggctaaagaagaaggggt

SEQ ID NO: 115044 - DNA, 75 bp, synthetic construct
  source 1..75: mol_type = other DNA
cccgaatgatgatgaaacccggttttatacggaaacctttgtctcagattatggtgaagaaggtccgccaggtcc

SEQ ID NO: 115045 - DNA, 75 bp, synthetic construct
  source 1..75: mol_type = other DNA
tggtggcgacaaagggggagccttatctgttcagtggtgtatcgccttccacaatttctggctccagaattcctt

SEQ ID NO: 115046 - DNA, 75 bp, synthetic construct
  source 1..75: mol_type = other DNA
ctgatagtgtccggtctcttgagttgacgggtagggctgcggagacgcttaccggcgtaccatcagggttgtgtt

SEQ ID NO: 115047 - DNA, 75 bp, synthetic construct
  source 1..75: mol_type = other DNA
cgttgctgaaggatttcccgaagagatggatcttgatttacagaatgtacagctttctccagatgtgattaaaga

SEQ ID NO: 115048 - DNA, 75 bp, synthetic construct
  source 1..75: mol_type = other DNA
atgccttatatcgatataaccactatgcgcgggatgatgccgggcgttgttgcatctatgctgccagatcattct

SEQ ID NO: 115049 - DNA, 75 bp, synthetic construct
  source 1..75: mol_type = other DNA
tgatgcgcgtggtgacaggagacaaaatgtcagtgcttgccgggggctctctgccgtccacgataaggtggcatt

SEQ ID NO: 115050 - DNA, 75 bp, synthetic construct
  source 1..75: mol_type = other DNA
cgggtgcaggacaccagcccgctaatccatctgttcagtacgcagccgcgaacgctgtacgatctgctcgacgtt

SEQ ID NO: 115051 - DNA, 75 bp, synthetic construct
  source 1..75: mol_type = other DNA
gccgaagaagtatggtggcgatggagggattcgtgctgtatgcaggaacaaatggcctggtatcggttgatgcag

SEQ ID NO: 115052 - DNA, 75 bp, synthetic construct
  source 1..75: mol_type = other DNA
ggagatcatttaaaaataggattaagtatatattaaaagatgaccatgattttatttgtagcaatatgtcagcag

SEQ ID NO: 115053 - DNA, 75 bp, synthetic construct
  source 1..75: mol_type = other DNA
gatcaggcgaagaaggtgcaggagcatctgaacaaaaccggtatacctgatgccgataaagtgaacattcaaatc

SEQ ID NO: 115054 - DNA, 75 bp, synthetic construct
  source 1..75: mol_type = other DNA
tgattgcggacgtcgccaaaacgctggccggagaagaagggcggcatctggcgattgaagcccccaccggcgttg

SEQ ID NO: 115055 - DNA, 75 bp, synthetic construct
  source 1..75: mol_type = other DNA
ttgctgcgtgagcaggacagcacttattaccctgagtcgctgaaaaaactggaagacgcggcggatgcggctgtc

SEQ ID NO: 115056 - DNA, 75 bp, synthetic construct
  source 1..75: mol_type = other DNA
aatgacctgctcaatgagggagagccaaacgggatttataggccggaggaacaccccatgatagtcccggccagg

SEQ ID NO: 115057 - DNA, 75 bp, synthetic construct
  source 1..75: mol_type = other DNA
gtcagcttggggcgaaatatccaaatctgcatttagcagggaaaacgggtactaccaacaacaacgtagatacct

SEQ ID NO: 115058 - DNA, 75 bp, synthetic construct
  source 1..75: mol_type = other DNA
atgcgccaatcgcgctgcgtcagccgaatggccaggtctggtcaccgcagaacgatgaccgtcgttatagcgaaa

SEQ ID NO: 115059 - DNA, 75 bp, synthetic construct
  source 1..75: mol_type = other DNA
ccagccgaaaatctatcgcctgaatacgtggattgccgatgcgccaatcgcgctgcgtcagcctaacggtcaggt

SEQ ID NO: 115060 - DNA, 75 bp, synthetic construct
  source 1..75: mol_type = other DNA
gagcgtccatctacaacccgtggcgtaacccaaaactggcgctggagcgacgtaatctggtgctgcgtctgctgc

SEQ ID NO: 115061 - DNA, 75 bp, synthetic construct
  source 1..75: mol_type = other DNA
tgagcaaccagaagtccctgaaggtatagttaaaaagaaagaaaaagcaaaatccccacgccgtcggcggcgtta

SEQ ID NO: 115062 - DNA, 75 bp, synthetic construct
  source 1..75: mol_type = other DNA
ggttgattttgcagatgaaccgcgcgctggggatgttcgaggcgcaaagcaaactctggcggctggcttcgctgg

SEQ ID NO: 115063 - DNA, 75 bp, synthetic construct
  source 1..75: mol_type = other DNA
taccgtgcaggccaacagcattgagatgatccgccgtccgtttgatttcccggacagtaaagaagggcaggtgcg

SEQ ID NO: 115064 - DNA, 75 bp, synthetic construct
  source 1..75: mol_type = other DNA
ccgaaagatcagttgcatccggttccggcaatgctgctgggggcgttgaacttaacgccaatcgaagtggcgcag

SEQ ID NO: 115065 - DNA, 75 bp, synthetic construct
  source 1..75: mol_type = other DNA
cgctgaacagtttttcgcgtttgcaggagatgagtggtctgaaagagaaagcgggcgaccgttttgtggcgctgg

SEQ ID NO: 115066 - DNA, 75 bp, synthetic construct
  source 1..75: mol_type = other DNA
atcattactgcgctgatggtggtgttcctgcgtctgatgatgttccgtaaaggcaaattgttaatcgatagcctg

SEQ ID NO: 115067 - DNA, 75 bp, synthetic construct
  source 1..75: mol_type = other DNA
ccgctattcactacatgattgcggcggctggcggtaattctattccttgcgcgccttatgcgacctttggaactc

SEQ ID NO: 115068 - DNA, 75 bp, synthetic construct
  source 1..75: mol_type = other DNA
tgcctcactgcatcatggtgtggggggaactgcccgccggatggtgccggggctgatgatacgggaggcgtcatg

SEQ ID NO: 115069 - DNA, 75 bp, synthetic construct
  source 1..75: mol_type = other DNA
acggagtcgcatattgtctttattgatggcaacggtaaacatgaggaaggaaaactcccctcaagcgaatggcgt

SEQ ID NO: 115070 - DNA, 75 bp, synthetic construct
  source 1..75: mol_type = other DNA
acagcaacccgtacaggcatagttggcgggtcaatgtcttaccgaacaacaaacgttaataccaaccttgtttcc

SEQ ID NO: 115071 - DNA, 75 bp, synthetic construct
  source 1..75: mol_type = other DNA
ttgtagcgggatggcctcaattgccggttcgacaatgattggttacgccgcactgggcgtgcctgtggactatct

SEQ ID NO: 115072 - DNA, 75 bp, synthetic construct
  source 1..75: mol_type = other DNA
cggtaccagctcggacgtcatttcaacctgggataaccgtcgcctgcaacggaaggctttcactgaaagtattcg

SEQ ID NO: 115073 - DNA, 75 bp, synthetic construct
  source 1..75: mol_type = other DNA
acagagtcgcatattgtctttattgatggcaacggtaaacatgaggaaggaaagctcccctcaagcgaatggcgt

SEQ ID NO: 115074 - DNA, 75 bp, synthetic construct
  source 1..75: mol_type = other DNA
cagcggacgggcgatgcagcgctttctcgactatgtgacggatttacgtctgatgttgctggtgcagggcgatca

SEQ ID NO: 115075 - DNA, 75 bp, synthetic construct
  source 1..75: mol_type = other DNA
ctacctgcatggagcagtttcgcccgaagaccatcccgccgctggcgatccctgaacgtttgaatgcgcattgtg

SEQ ID NO: 115076 - DNA, 75 bp, synthetic construct
  source 1..75: mol_type = other DNA
tccatccaatccgtacgtctggtgcgtactggtggtgctggtaggttacggcatcattggctttgttgatgacta

SEQ ID NO: 115077 - DNA, 75 bp, synthetic construct
  source 1..75: mol_type = other DNA
tgtaccaaatggattctaccctgctggtgtggatgatgtgttgcgattaccagagcctgtgtgggtgattggcgg

SEQ ID NO: 115078 - DNA, 75 bp, synthetic construct
  source 1..75: mol_type = other DNA
gtttattgattcgccacaacgcttaacggcagtgggaaatgccagcacagacgatgcactgtttgcgctggtatc

SEQ ID NO: 115079 - DNA, 75 bp, synthetic construct
  source 1..75: mol_type = other DNA
gatgaattacgcattatttcttatattggcatcccaactattcttgattcacttcagacgtttgatgtccctgaa

SEQ ID NO: 115080 - DNA, 75 bp, synthetic construct
  source 1..75: mol_type = other DNA
tcgtctgcatctcatccagacgatgaccaaaaaagtgattagcgaagccgtcgccgcggcgggggggaaattgca

SEQ ID NO: 115081 - DNA, 75 bp, synthetic construct
  source 1..75: mol_type = other DNA
tctggtctaaagctacctcaactaacgcaacactggagaaaaatttcccggaagataatgctgtcggtgtgcttg

SEQ ID NO: 115082 - DNA, 75 bp, synthetic construct
  source 1..75: mol_type = other DNA
taaacatggctaaatttttacaggcacaaagtctactcttactggaaaagctcaatgaacttaattcaaataaac

SEQ ID NO: 115083 - DNA, 75 bp, synthetic construct
  source 1..75: mol_type = other DNA
acaggaattgatgccgaaggcccggatagtggtaaacatgatgtcgacttaaccaccatcgtttattcaccaccg

SEQ ID NO: 115084 - DNA, 75 bp, synthetic construct
  source 1..75: mol_type = other DNA
gaggcgctttgatggcgttaacgtatggcaacgttatacaaccgccggaacaggtgcaacccttaaaggtcgcac

SEQ ID NO: 115085 - DNA, 75 bp, synthetic construct
  source 1..75: mol_type = other DNA
catccagtgggcgaactttatgaaccgcgtatcctgaacatttacattgtcgataacgctaacaatgtggtgtcg

SEQ ID NO: 115086 - DNA, 75 bp, synthetic construct
  source 1..75: mol_type = other DNA
agagcttgagttaaaaatagatgctttttccgaacggtttgataattactttaataatgaaaagagcaatttaaa

SEQ ID NO: 115087 - DNA, 75 bp, synthetic construct
  source 1..75: mol_type = other DNA
gcgttgctgccaaacttgaacaaagccgcattgtgttttggtacgacccagagcaaagctttactgaagagcttg

SEQ ID NO: 115088 - DNA, 75 bp, synthetic construct
  source 1..75: mol_type = other DNA
atgacgaaaccacagaaaactgcgcttaatatggcgaagtttattaaggggcagaccctgcttttgctggaaaaa

SEQ ID NO: 115089 - DNA, 75 bp, synthetic construct
  source 1..75: mol_type = other DNA
aaattattccgccctgggcgcaatattgggttgcgtcggcttatctcaaagaacatcagccaaaaaaagcacagt

SEQ ID NO: 115090 - DNA, 75 bp, synthetic construct
  source 1..75: mol_type = other DNA
atgctggcggagttccagaagatcaacgcgcagtatcagggcgcagaccgcgtgaaagcgctgctgggcctgagc

SEQ ID NO: 115091 - DNA, 75 bp, synthetic construct
  source 1..75: mol_type = other DNA
aacgaggcgctttcccgccaggtaccgagcattacggacgttctgtattgggagcgccgttgctctggtttccag

SEQ ID NO: 115092 - DNA, 75 bp, synthetic construct
  source 1..75: mol_type = other DNA
tcttcaatgaggtggtgaagccgcagttccaaaatccgcaaatcaaacgcgtgttcgtgataatttccgatgccc

SEQ ID NO: 115093 - DNA, 75 bp, synthetic construct
  source 1..75: mol_type = other DNA
cacggcgcgtatttgttgctgatgttcaattactggcaaacagggaagccaatacccaaaaacagactggcaaaa

SEQ ID NO: 115094 - DNA, 75 bp, synthetic construct
  source 1..75: mol_type = other DNA
acacatcttattcacttcccctgaatctgggtatcggtggcgcagtggcaaaactcaccagcctggactggcaga

SEQ ID NO: 115095 - DNA, 75 bp, synthetic construct
  source 1..75: mol_type = other DNA
aaacaggttattaccgtttacagccgctaccgtcatcagcaattaccagcgcgtggttatgcagctgtcgccgtc

SEQ ID NO: 115096 - DNA, 75 bp, synthetic construct
  source 1..75: mol_type = other DNA
cgctggtagtcatgcgcccggaccgcttcgtggccgccatcgccattccgcaaaccctgggcagcaccctgaata

SEQ ID NO: 115097 - DNA, 75 bp, synthetic construct
  source 1..75: mol_type = other DNA
aggtgaaggctcaggaagcggttacagagtaaccgctggtctggacacaacaacatcaacatttactttcatgtc

SEQ ID NO: 115098 - DNA, 75 bp, synthetic construct
  source 1..75: mol_type = other DNA
agggttagttcaggccataaaaattgtcagaagtcgttctgaaatgacaatgactcttgttatgtcgatgattta

SEQ ID NO: 115099 - DNA, 75 bp, synthetic construct
  source 1..75: mol_type = other DNA
ccgaggtccacgcagatggtgaagtccgtgatatacagcacgccgtacctaagctacatcaacgactacggtgga

SEQ ID NO: 115100 - DNA, 75 bp, synthetic construct
  source 1..75: mol_type = other DNA
attccacgctgattatgcggcgatcaccctgaattctctgggtatcccgcaactcggtttacgcgaacatattca

SEQ ID NO: 115101 - DNA, 75 bp, synthetic construct
  source 1..75: mol_type = other DNA
attctggaaactatctggttacttgatacgccggggcaattaattgaacccgaaatgtacgatgaaattgatgga

SEQ ID NO: 115102 - DNA, 75 bp, synthetic construct
  source 1..75: mol_type = other DNA
tagggcttctgcgaagaattagtgctggagtaatgttagattttctcgaagtaattttgagcagcattattcgtg

SEQ ID NO: 115103 - DNA, 75 bp, synthetic construct
  source 1..75: mol_type = other DNA
tagatagagctattcacgccgtgaagagatcattttcacatgcgggtaggcgtgcgacttctgaacatatattgg

SEQ ID NO: 115104 - DNA, 75 bp, synthetic construct
  source 1..75: mol_type = other DNA
gctggcggcaattcaccacattgacttacagcacctcgatccacgattgaaaaatgtgaaatttattgcagcctg

SEQ ID NO: 115105 - DNA, 75 bp, synthetic construct
  source 1..75: mol_type = other DNA
ggtgaccgcgacggcaacccgaacgtcactgccgatatcacccgccacgtcctgctgctcagtcgctggaaagcc

SEQ ID NO: 115106 - DNA, 75 bp, synthetic construct
  source 1..75: mol_type = other DNA
cgtcgcctgcgccagttgatcgcccagtcatggcataccgatgaaatccgtaagctgcgtccaagcccggtagat

SEQ ID NO: 115107 - DNA, 75 bp, synthetic construct
  source 1..75: mol_type = other DNA
gagctacatcaacgactacggcggacgtccggttctgcagttcagctgcagcggagatcgttgtacggcggtgaa

SEQ ID NO: 115108 - DNA, 75 bp, synthetic construct
  source 1..75: mol_type = other DNA
gaaaaaagagccgctattcttgcgaaggtgaatggtgtagcgctgaaagcaaaggacttgcagaacgccaataac

SEQ ID NO: 115109 - DNA, 75 bp, synthetic construct
  source 1..75: mol_type = other DNA
gcaggtggccgccgcaccgttgcgcgccctgtttgcgccagcgacggcgagtgccacgctgctgctgtggttgtg

SEQ ID NO: 115110 - DNA, 75 bp, synthetic construct
  source 1..75: mol_type = other DNA
aacgcagtatggcaggaccagctggtgctgaataagaccggtggagggtatcagattgataatccgacaccgtat

SEQ ID NO: 115111 - DNA, 75 bp, synthetic construct
  source 1..75: mol_type = other DNA
ttacggcaattttgatggccgatacgtgagggatgtccgacttggcacacgtgttgttcagaccatgcaaaaagg

SEQ ID NO: 115112 - DNA, 75 bp, synthetic construct
  source 1..75: mol_type = other DNA
ggtttttgatgaacgcggtgctgatgtgcatcttcatcgttccagtggccgtcgcgttttggctgtctgcttttg

SEQ ID NO: 115113 - DNA, 75 bp, synthetic construct
  source 1..75: mol_type = other DNA
aactaacactactctggcgcttaacgctccccgtggattcacttccacaacgtattgttttgacgacggagcaga

SEQ ID NO: 115114 - DNA, 75 bp, synthetic construct
  source 1..75: mol_type = other DNA
gcaggcggagtatggtcgcgatggagggctttgtgctgtatgcaggaacaaatggcctggtgtctgttgatgcaa

SEQ ID NO: 115115 - DNA, 75 bp, synthetic construct
  source 1..75: mol_type = other DNA
ccgggcaaaagctcgtagctcgggccaaaccgggggaatatgtacaagggataaacggtaaatgggtgcgaaaat

SEQ ID NO: 115116 - DNA, 75 bp, synthetic construct
  source 1..75: mol_type = other DNA
gaagacggtgatacgtaccgtgcgtgatgctgtggtgtctgtagcccgcgcggtctgggactggatcttcttctg

SEQ ID NO: 115117 - DNA, 75 bp, synthetic construct
  source 1..75: mol_type = other DNA
aaacgaaggagaattacccgccatccctgttaaaccagtccacatctataaacggggcgacgatgatgaaaataa

SEQ ID NO: 115118 - DNA, 75 bp, synthetic construct
  source 1..75: mol_type = other DNA
accttctatgaggatgacctggatgatttgatgtctccaggtatttacagtgtgacaggcaaagcgacccacacc

SEQ ID NO: 115119 - DNA, 75 bp, synthetic construct
  source 1..75: mol_type = other DNA
cgaaaaatcagaacggtgcagatatccaggataaatcagcttttctggacaatattggtgttaccagcctgacgt

SEQ ID NO: 115120 - DNA, 75 bp, synthetic construct
  source 1..75: mol_type = other DNA
ttttgcaacgactgccgcatgtggcccagcgcgctgcccgcgatcatgtgatgaccgtgaaaaagaatctccaca

SEQ ID NO: 115121 - DNA, 75 bp, synthetic construct
  source 1..75: mol_type = other DNA
gcgtctgtgttgcctctgttgtccgtacggccctgcgcgccgtccgtgactcggtggtctctgttgcccgcgcgg

SEQ ID NO: 115122 - DNA, 75 bp, synthetic construct
  source 1..75: mol_type = other DNA
actggctgcagcgggaacgggataactggcaagaagtggtcgacttacagctcggttgggatatcaccgattttg

SEQ ID NO: 115123 - DNA, 75 bp, synthetic construct
  source 1..75: mol_type = other DNA
tggaagatatcctcaatcggggcggtggagacttatgcatgcagttggcctgggccaacgaagccaatctctgtg

SEQ ID NO: 115124 - DNA, 75 bp, synthetic construct
  source 1..75: mol_type = other DNA
cgttattacgacggggatttgaatgaggtgacttcaccaggtatttacagcgttacaggtaaagcgaccaacggt

SEQ ID NO: 115125 - DNA, 75 bp, synthetic construct
  source 1..75: mol_type = other DNA
aggtttttgctgccggcaattttgcaggcacgcaacgctttatcacgagagacggcaatgtatacatgcgtaaac

SEQ ID NO: 115126 - DNA, 75 bp, synthetic construct
  source 1..75: mol_type = other DNA
gaccatgaataccgcgccctgtaccggcgtatgctgccagagcttgacctggtgctgtgggtcatcaaagctgat

SEQ ID NO: 115127 - DNA, 75 bp, synthetic construct
  source 1..75: mol_type = other DNA
ccattacggcgatgtttcgtccccttcatccggtctgtgtggtgtcagcgctggccggatggggtacggaagaaa

SEQ ID NO: 115128 - DNA, 75 bp, synthetic construct
  source 1..75: mol_type = other DNA
cgactctgtcggtggaaaacagcgtgtacaggcttcaggaaacaatcaggtgtccagcaccgccggagcgcacgc

SEQ ID NO: 115129 - DNA, 75 bp, synthetic construct
  source 1..75: mol_type = other DNA
gatcatgagtaccgggccctgtaccgtcgaatgctgccggagctggacctggtgctgtgggtcattaaggccgat

SEQ ID NO: 115130 - DNA, 75 bp, synthetic construct
  source 1..75: mol_type = other DNA
tttttagtgaaaatggcctctatgctgtgcgcgttgagaatggcgttattgtcagtcaccgctgcattaaatgtt

SEQ ID NO: 115131 - DNA, 75 bp, synthetic construct
  source 1..75: mol_type = other DNA
gatgaaaactcttcggtcgtcacgctctcctgtgctctgcggactttgacaccttctttgcgccgccatcatgtg

SEQ ID NO: 115132 - DNA, 75 bp, synthetic construct
  source 1..75: mol_type = other DNA
ggcgcgccgttaatctggtttccggccactgcagccagtcgcgaaagtggtttgattctggctggcactcacggt

SEQ ID NO: 115133 - DNA, 75 bp, synthetic construct
  source 1..75: mol_type = other DNA
ggcggctttttgctctcaataaaaaagggattgccgttttcattgaaaaagcccgtggtggtatccgcgaatggg

SEQ ID NO: 115134 - DNA, 75 bp, synthetic construct
  source 1..75: mol_type = other DNA
gcaagcggttcgcggaaatcgccagcggagacttaggatacgttccggacgcgctgggctgcgttttgaaagtgc

SEQ ID NO: 115135 - DNA, 75 bp, synthetic construct
  source 1..75: mol_type = other DNA
tcaggcccgtgaacagtttaccggtgcggtggaccggatatttgacacagcggagagcgtctgtgttgcctctgt

SEQ ID NO: 115136 - DNA, 75 bp, synthetic construct
  source 1..75: mol_type = other DNA
cgatgatccagttgctgctcggtaacatgggtatggccggtggcggcgtgaacgcattgcgtggtcactccaaca

SEQ ID NO: 115137 - DNA, 75 bp, synthetic construct
  source 1..75: mol_type = other DNA
gggcgtgggcgaaaacgggcaacaggaccatgaataccgtgccctgtaccggcgtatgctgccggggctggacct

SEQ ID NO: 115138 - DNA, 75 bp, synthetic construct
  source 1..75: mol_type = other DNA
agctattggtgaagggccttcttgggggacaacatataaagtacacccggtagttcaggctggcggtgatgttag

SEQ ID NO: 115139 - DNA, 75 bp, synthetic construct
  source 1..75: mol_type = other DNA
atcaacaaaatggcggaaggtccgttcccggaacactacgagccaattgaaacgccgctgggcactaacccgctg

SEQ ID NO: 115140 - DNA, 75 bp, synthetic construct
  source 1..75: mol_type = other DNA
tgatattgcttatgatttggagttaggcaaaacattgagtgagatacgagccttaaccgcaaatggttttattaa

SEQ ID NO: 115141 - DNA, 75 bp, synthetic construct
  source 1..75: mol_type = other DNA
gattgatacaaatgataagaaacagcctcagtttgtgattcaggtaaagcccttaaaagagctcatcaaagaaag

SEQ ID NO: 115142 - DNA, 75 bp, synthetic construct
  source 1..75: mol_type = other DNA
atgatgaaagcaaaacgacacactttttgtccgccggtgctgacactgatggtgttatgcagcgtaccggcattc

SEQ ID NO: 115143 - DNA, 75 bp, synthetic construct
  source 1..75: mol_type = other DNA
ctgaagtgcaaattgcccgtcgtattaaagaggggcgtggccaagggcatggtaaagactatattccatggctaa

SEQ ID NO: 115144 - DNA, 75 bp, synthetic construct
  source 1..75: mol_type = other DNA
atgcaaacacaaaaaccgactctcgaactgctaacctgcgaaggcgcttatcgcgacaacccgactgcgcttttt

SEQ ID NO: 115145 - DNA, 75 bp, synthetic construct
  source 1..75: mol_type = other DNA
cagctacggttagagggtaagtctatctgggagattgtcagaactcttaatgatgaaggtcaccagtcgatgagc

SEQ ID NO: 115146 - DNA, 75 bp, synthetic construct
  source 1..75: mol_type = other DNA
ttagcatttgataatcaagccgatgcagggtatggcctgactttattattaaatgcaaacgatgatatgcaagat

SEQ ID NO: 115147 - DNA, 75 bp, synthetic construct
  source 1..75: mol_type = other DNA
ctagttattacccgtctgtaattgatgagacaacattctacaaagtccagcaactatcacattctcgttacggtc

SEQ ID NO: 115148 - DNA, 75 bp, synthetic construct
  source 1..75: mol_type = other DNA
cattcctgatcgtgtagtcgagcaactgggtagtgactccaacttactgatagtgttttatgttcagataatgcc

SEQ ID NO: 115149 - DNA, 75 bp, synthetic construct
  source 1..75: mol_type = other DNA
gtttctcatcagagaagcaagctaaaggcgactcactccgcagacaatctaagatggtcactgattggcttaagg

SEQ ID NO: 115150 - DNA, 75 bp, synthetic construct
  source 1..75: mol_type = other DNA
acaactgataatcaaaagtgctgttaaagaggtcgttttaaatactgctaaacgtcgctgtaaagtaacttttca

SEQ ID NO: 115151 - DNA, 75 bp, synthetic construct
  source 1..75: mol_type = other DNA
aaggcgcatccttcgatttcccgatcctgaaatccgccataacacgcacagccggagaaaaaagcatcccctggt

SEQ ID NO: 115152 - DNA, 75 bp, synthetic construct
  source 1..75: mol_type = other DNA
agagacccgttatccctgattaaaagcattttgataatgcagcggtcgcatgaagagagtctgcgtaaatctgaa

SEQ ID NO: 115153 - DNA, 75 bp, synthetic construct
  source 1..75: mol_type = other DNA
aaccgatggtacattgcttgccctgctatctcgtcttgaccgatttgatagcgatacgacgaataccatcgatac

SEQ ID NO: 115154 - DNA, 75 bp, synthetic construct
  source 1..75: mol_type = other DNA
cgcgacattggtggctttgccaatatatctacgttagtaaaacaagagaaagccaaaaataaagccaccttttat

SEQ ID NO: 115155 - DNA, 75 bp, synthetic construct
  source 1..75: mol_type = other DNA
acacctaaaggctgtgaggagatatctggttattatcctgcaattatagatgaaacaacattctacaaagttcaa

SEQ ID NO: 115156 - DNA, 75 bp, synthetic construct
  source 1..75: mol_type = other DNA
acaaggcacagctgaactgccagaacatggcgaagcgcatgatggagttctcggacagcagcaagtggacacagg

SEQ ID NO: 115157 - DNA, 75 bp, synthetic construct
  source 1..75: mol_type = other DNA
caagatttctaaacgttgtcctgcatggcttaagcttaatgatgaccgtaaaagcttctctgtgatacctgagaa

SEQ ID NO: 115158 - DNA, 75 bp, synthetic construct
  source 1..75: mol_type = other DNA
acttactgaaatggatctcagcggtaaggatctgcgtaacctactggaacacggggcatcgcttaccaatggcat

SEQ ID NO: 115159 - DNA, 75 bp, synthetic construct
  source 1..75: mol_type = other DNA
acgggatccggataatgctgcactgaccggacgtctggccggcgaactggcaatggcggatacggtggagacggc

SEQ ID NO: 115160 - DNA, 75 bp, synthetic construct
  source 1..75: mol_type = other DNA
aaagacccgttagctctgattaaaagcattttgataatgcagcggtcgcatgaggaaagtttgaggaagtctgag

SEQ ID NO: 115161 - DNA, 75 bp, synthetic construct
  source 1..75: mol_type = other DNA
gttagcgggttcactggtaagcacttgaaaggtggcttaggtgactttttaaccgctatcgagaaagggcttgtt

SEQ ID NO: 115162 - DNA, 75 bp, synthetic construct
  source 1..75: mol_type = other DNA
tgaccagctggatcgcgaaatcgggatgctgcaaacggaaatggcagtgcgtaaatccattgccaataatgcgat

SEQ ID NO: 115163 - DNA, 75 bp, synthetic construct
  source 1..75: mol_type = other DNA
gcaaaccagccgggcagttcccagccgggaaccgggctggcaccggtgctggagaccaccacccgggaaaatctg

SEQ ID NO: 115164 - DNA, 75 bp, synthetic construct
  source 1..75: mol_type = other DNA
gtattgctgctacgctggagcgcgaaggaaaacaggtccgtctgggggcgttattgtggtttgattccaccagtt

SEQ ID NO: 115165 - DNA, 75 bp, synthetic construct
  source 1..75: mol_type = other DNA
gaaatggggcagatcctgcgtcaggcacgtgcggcagggctgaaaactcagtttatggggccagaaggcgtggct

SEQ ID NO: 115166 - DNA, 75 bp, synthetic construct
  source 1..75: mol_type = other DNA
cggtgatggggccgctgacctgggatgagaaaggtgatctgaaaggctttgagttcggtgtgtttgactggcacg

SEQ ID NO: 115167 - DNA, 75 bp, synthetic construct
  source 1..75: mol_type = other DNA
atccgcaaggagatcagcaacaactccattctgatggcgctaacccgacaggaaagccgtgaagccgatcatggc

SEQ ID NO: 115168 - DNA, 75 bp, synthetic construct
  source 1..75: mol_type = other DNA
acaggacccaagcggcgcattcgtctggaccacctacgccgcgctgcaatctttgcaggcgggcctgaatcagtc

SEQ ID NO: 115169 - DNA, 75 bp, synthetic construct
  source 1..75: mol_type = other DNA
cgaatgcttcagcgtcacaacaatcagccgccacttctgcatccaccgcgaccacgaaagcgtcagaagctgcca

SEQ ID NO: 115170 - DNA, 75 bp, synthetic construct
  source 1..75: mol_type = other DNA
gttccggtggttttctgcgcaacattggcaaagagtaccaggaagccgcagaaaactttatgcggttcatgaatg

SEQ ID NO: 115171 - DNA, 75 bp, synthetic construct
  source 1..75: mol_type = other DNA
atctgcgcaaccgggcttttctctttgttgcatacaatacgctgatgcgtatgtcggaaatctcgcgtattcgtg

SEQ ID NO: 115172 - DNA, 75 bp, synthetic construct
  source 1..75: mol_type = other DNA
ctgatctggagaatgctttagataaagttagtagaggcgttgcttctgaaggtgaaaaggcaattgatgctttaa

SEQ ID NO: 115173 - DNA, 75 bp, synthetic construct
  source 1..75: mol_type = other DNA
cgttgcccacaccagacagtaagcagacccgtctggtgcatgaggtgtggcgacacactgttaatcgcgtcatcc

SEQ ID NO: 115174 - DNA, 75 bp, synthetic construct
  source 1..75: mol_type = other DNA
atggtgcgagctggatagatatcgaagaggctgaatatgcaacatgcaaaaaagaaaaaaagattgttcggattt

SEQ ID NO: 115175 - DNA, 75 bp, synthetic construct
  source 1..75: mol_type = other DNA
cgggcgttacttactggtatttctcgccacaggtgtgatcctcttttcgctggtttgcggcattattattctgcc

SEQ ID NO: 115176 - DNA, 75 bp, synthetic construct
  source 1..75: mol_type = other DNA
atgtctgaatctgtacagagcaatagcgccgtcctggtgcacttcacgctgaaactcgatgatggcaccaccgct

SEQ ID NO: 115177 - DNA, 75 bp, synthetic construct
  source 1..75: mol_type = other DNA
aatatccggtgttccatttgatggttctactgatatcactttaaccgctgcgcatgttgccgctttcgcaagaag

SEQ ID NO: 115178 - DNA, 75 bp, synthetic construct
  source 1..75: mol_type = other DNA
tggttatatggcaaagggctgctgttgatcagtcgatatgctcacgatgaaccttccattcagattgtattgatg

SEQ ID NO: 115179 - DNA, 75 bp, synthetic construct
  source 1..75: mol_type = other DNA
ttcaaaagatattactttaaccgccgcgcatgtggctgcttttgccagaagggcaacggatacatatgccgatgc

SEQ ID NO: 115180 - DNA, 75 bp, synthetic construct
  source 1..75: mol_type = other DNA
aagagttccggtgcatttggtggcacgaacacgagcattttccctaatggttataccgcgatttcaaatctaagc

SEQ ID NO: 115181 - DNA, 75 bp, synthetic construct
  source 1..75: mol_type = other DNA
agatcatgcaggaaggaacctggaagaaaccggaaacacttatgcggtatcttcgccgtggcggcgtgtctgtgg

SEQ ID NO: 115182 - DNA, 75 bp, synthetic construct
  source 1..75: mol_type = other DNA
gaaactaaaacaagaaaacataacggaactatttatcctgaatatttgaaatatataagagataattttgatatt

SEQ ID NO: 115183 - DNA, 75 bp, synthetic construct
  source 1..75: mol_type = other DNA
tatacgctgggtggcggctcggtgatctcccagccagccacgcgcagcaacatgcagaagctgggtatggacctg

SEQ ID NO: 115184 - DNA, 75 bp, synthetic construct
  source 1..75: mol_type = other DNA
ctgacactggcaccgccgctgttgcgccagttcgcttcggtcggcaataacctgaatcagatagcccggaagata

SEQ ID NO: 115185 - DNA, 75 bp, synthetic construct
  source 1..75: mol_type = other DNA
gtttcatcacagctgcctgacggcgcatctgacggtaataaggcaatcagtgaaacagagcatgatgcggtgaaa

SEQ ID NO: 115186 - DNA, 75 bp, synthetic construct
  source 1..75: mol_type = other DNA
gttgcaggaacggggtttgcgccggtgctggaagaggcgacccgggtgaacacggaacaactggtccgtctggtg

SEQ ID NO: 115187 - DNA, 75 bp, synthetic construct
  source 1..75: mol_type = other DNA
ttaaatattagaaaacctgttattcagcccaaaaataaagaaaaagtgattaaagaagaaataaagaaaaaacca

SEQ ID NO: 115188 - DNA, 75 bp, synthetic construct
  source 1..75: mol_type = other DNA
aagatttaccgcaactgtcagcggaaaataactgccctgatttctgtttttatctcgctgaaacgctgatggtga

SEQ ID NO: 115189 - DNA, 75 bp, synthetic construct
  source 1..75: mol_type = other DNA
tcctattctttcttctcaacttattttgaattttgcgaataatcccaacggtatagatgcagggatgtttgcttc

SEQ ID NO: 115190 - DNA, 75 bp, synthetic construct
  source 1..75: mol_type = other DNA
gcgccgtcctggtgcacttcacgctaaaactcgacgatggcaccaccgccgagtctacccgcaacaacggtaaac

SEQ ID NO: 115191 - DNA, 75 bp, synthetic construct
  source 1..75: mol_type = other DNA
ggcgtctgcttcaaaagatgaggcgaccagacaggcgtcagcagcgaagagcagcgccacgacggcatccacgaa

SEQ ID NO: 115192 - DNA, 75 bp, synthetic construct
  source 1..75: mol_type = other DNA
gagccggttgcccgttccgggaggctgccgacactggcaccgccgttactgcgtcagctggcagccatcgggaat

SEQ ID NO: 115193 - DNA, 75 bp, synthetic construct
  source 1..75: mol_type = other DNA
tatcggcattggtgctcatgcccattctgtcattattggtccccacggacacaccatcaccgttaatgctacggg

SEQ ID NO: 115194 - DNA, 75 bp, synthetic construct
  source 1..75: mol_type = other DNA
cactgagtgtgatgctgtgctgcagtactccggtgatggctgatcttctttccctgccgaaactgaatgacagca

SEQ ID NO: 115195 - DNA, 75 bp, synthetic construct
  source 1..75: mol_type = other DNA
tgataatggccgcagccgcatcatgctcgtcagtctatgccgcgacattaccgaccagtgaggtagacgcataca

SEQ ID NO: 115196 - DNA, 75 bp, synthetic construct
  source 1..75: mol_type = other DNA
ctggttatttcccccctatcatccctgagactgatttctacaaagtccagcaactatcatattctcgttatggaa

SEQ ID NO: 115197 - DNA, 75 bp, synthetic construct
  source 1..75: mol_type = other DNA
caggatgcgcagaagcgtaatctcggtatggttggtatctggtcaatcgcgcgcgacctgccgggcggcactaac

SEQ ID NO: 115198 - DNA, 75 bp, synthetic construct
  source 1..75: mol_type = other DNA
agagtttagaccgtttgtcacgtcaggatattgatattgcttctgagctattacgtcgtatcttaagggctggtg

SEQ ID NO: 115199 - DNA, 75 bp, synthetic construct
  source 1..75: mol_type = other DNA
atgtatgaggagggtgtgacatttttcatgacagtaaaacaggtgataacctcctttcgtaagggggattcacag

SEQ ID NO: 115200 - DNA, 75 bp, synthetic construct
  source 1..75: mol_type = other DNA
ggcgttttaccgatctggtgaaaaaaggtagccgtttctggaacgtttccggcgttgatgccaacgtcagtgtca

SEQ ID NO: 115201 - DNA, 75 bp, synthetic construct
  source 1..75: mol_type = other DNA
ggtaatcctcgccgtgactttgagttgcaagaagccaccattaccgattctcgttaccttgatggcttaagcatt

SEQ ID NO: 115202 - DNA, 75 bp, synthetic construct
  source 1..75: mol_type = other DNA
gaccagcaatagcgtgttctgggcagaaggcggggcgaaagttcagctgaatggtagtggcctgaccgtacaggc

SEQ ID NO: 115203 - DNA, 75 bp, synthetic construct
  source 1..75: mol_type = other DNA
agaaattgacgctatgatgggtaccacgccgatggttggcgtgaacgacgttcagggcgaggtgttctatctctc

SEQ ID NO: 115204 - DNA, 75 bp, synthetic construct
  source 1..75: mol_type = other DNA
atgtatgaggagcgtgtgacatttttcatgaaagtaaaacaggtgataacctcctttcgtaaggggaattcacag

SEQ ID NO: 115205 - DNA, 75 bp, synthetic construct
  source 1..75: mol_type = other DNA
cgcagcaacctgcgcaacaggagcagaaagacagcgacggcgtagcaggctggatcaaggacatgtttggcagta

SEQ ID NO: 115206 - DNA, 75 bp, synthetic construct
  source 1..75: mol_type = other DNA
ttcctctccagcgagcgttcttactggcgtaaagcgaacgaagcctacatggcgctgatcatggacgcgcgttac

SEQ ID NO: 115207 - DNA, 75 bp, synthetic construct
  source 1..75: mol_type = other DNA
atgtatgaggagcgtgtgacatttttcatgatagtaaaacaggtgataacctcctttcgtaaggggtattcacag

SEQ ID NO: 115208 - DNA, 75 bp, synthetic construct
  source 1..75: mol_type = other DNA
aggtcgtcgacgcggcagctacggcggcgcggtaggttattttaccgcgcatggcgatctcgacacctgcattgt

SEQ ID NO: 115209 - DNA, 75 bp, synthetic construct
  source 1..75: mol_type = other DNA
atgtatgaggagcgtgtgacatttttcatgagagtaaaacaggtgataacctcctttcgtaagggggattcacag

SEQ ID NO: 115210 - DNA, 75 bp, synthetic construct
  source 1..75: mol_type = other DNA
atgtatgaggagcgtgtgacatttttcatgacagtaaaacaggtgataacctcctttcgtaaggggcattcacag

SEQ ID NO: 115211 - DNA, 75 bp, synthetic construct
  source 1..75: mol_type = other DNA
agcctgtattactttgggcgtccggtggaagagttgagccttgatcagcaggcgctgctagttggtatggtgaaa

SEQ ID NO: 115212 - DNA, 75 bp, synthetic construct
  source 1..75: mol_type = other DNA
tcactgtgcaatgaattgtttcggggtgaaatctcaccggtcagcgatgtgagtgcctgtacccgtgacgtcctg

SEQ ID NO: 115213 - DNA, 75 bp, synthetic construct
  source 1..75: mol_type = other DNA
ggatgcgcgttacagcaaagaccgcattcttgagctgtatatgaacgaggtgtatctcggtcagagcggtgacaa

SEQ ID NO: 115214 - DNA, 75 bp, synthetic construct
  source 1..75: mol_type = other DNA
ggaacaaatttactcgctattcatgccgcatgttgaagagatttggctctcccacatcggcgttgatgtgccaaa

SEQ ID NO: 115215 - DNA, 75 bp, synthetic construct
  source 1..75: mol_type = other DNA
ctggattaaactgggcgtaccgaaagatcagctgcatccggttccggcgatgctgctgggggcgttgaacttaac

SEQ ID NO: 115216 - DNA, 75 bp, synthetic construct
  source 1..75: mol_type = other DNA
ggtgatttatgataaacgcttgttaaccaaaaactacggcaagcggttacttgatgccttaccggtgtttccgat

SEQ ID NO: 115217 - DNA, 75 bp, synthetic construct
  source 1..75: mol_type = other DNA
caaggtctggcaattgccagcggcagtttatggtcggatggtaaaccttgagccagacatgaccatcagcaagaa

SEQ ID NO: 115218 - DNA, 75 bp, synthetic construct
  source 1..75: mol_type = other DNA
agttctggcatcatgtgatgaaaaatcatcgccagcaggttctgttcgtcatcaaccaggcggacaaaatggaac

SEQ ID NO: 115219 - DNA, 75 bp, synthetic construct
  source 1..75: mol_type = other DNA
gtgcctgttgaaacagcttatacccaacgagccagcgaggaagagcctggcttttcgcagatcgtatacagaagg

SEQ ID NO: 115220 - DNA, 75 bp, synthetic construct
  source 1..75: mol_type = other DNA
tcatccggtctgtgtggtgtccgcccgcactggatggggcattgaggagatggtggcagccatgatgcgctgtct

SEQ ID NO: 115221 - DNA, 75 bp, synthetic construct
  source 1..75: mol_type = other DNA
tctctctgcaacgaacttttccagggcgaggtgtccccggtgagtgatgtgaacgcctgtactcgcgacgtactg

SEQ ID NO: 115222 - DNA, 75 bp, synthetic construct
  source 1..75: mol_type = other DNA
tgaccggcaaaaccttcgaactggtgcccggcgatggcgagccacgtaaagagtttgttgttgtgccaggcgaaa

SEQ ID NO: 115223 - DNA, 75 bp, synthetic construct
  source 1..75: mol_type = other DNA
agccactgccagccagttttataccgttaagtctggcgacactctgagtgccatttccaaacaggtctacggtaa

SEQ ID NO: 115224 - DNA, 75 bp, synthetic construct
  source 1..75: mol_type = other DNA
tgcttcgtgaaaatacccgcatcgaattacgtaatccaaaattatcccttagcgatgctaatctcagtgccctgc

SEQ ID NO: 115225 - DNA, 75 bp, synthetic construct
  source 1..75: mol_type = other DNA
aaagcccaggaaggcaaacacttcttgttactggaaagcgaaccgaaagagtggcgtgagtggggaaccgcgctc

SEQ ID NO: 115226 - DNA, 75 bp, synthetic construct
  source 1..75: mol_type = other DNA
aaatcagcggtatcagtaccagcgccgcgcagctgcgaaccgatgatggtgcggcgttcgtagaggttgccgcag

SEQ ID NO: 115227 - DNA, 75 bp, synthetic construct
  source 1..75: mol_type = other DNA
aagaagatggttctatcgctaactccggtcgctggttgcagtggcactggaaaggtcaggatgcgccgggcgaag

SEQ ID NO: 115228 - DNA, 75 bp, synthetic construct
  source 1..75: mol_type = other DNA
taacgatgtgaaggctggaggtaagagcctcatccagcatacccatggcggtgtgcagaatggcagcgggaatac

SEQ ID NO: 115229 - DNA, 75 bp, synthetic construct
  source 1..75: mol_type = other DNA
actctggatgccgcgaccgaacagctatgcaaattaagccgaccacacctgattaaaattcgaaaactaattcag

SEQ ID NO: 115230 - DNA, 75 bp, synthetic construct
  source 1..75: mol_type = other DNA
agctatcacttgaaattgaagatttgtcagctgcgtattttcatgaaaggagatcactcaataacttccatcgag

SEQ ID NO: 115231 - DNA, 75 bp, synthetic construct
  source 1..75: mol_type = other DNA
aaacctcagtgcaagaccttctgaagaatcgctctgtaattggttacttcacacctaaaggctgtgaggagatag

SEQ ID NO: 115232 - DNA, 75 bp, synthetic construct
  source 1..75: mol_type = other DNA
agcccgttcctgcgagccgagcaaactctggatgtcgtaggtgattgtatggaactgccatccagtgtcgaagtt

SEQ ID NO: 115233 - DNA, 75 bp, synthetic construct
  source 1..75: mol_type = other DNA
catgatttatccgatgccttctgcattgtcggcccgcagtcgcaggcgaagaaaatcggcggtatcagcaccagt

SEQ ID NO: 115234 - DNA, 75 bp, synthetic construct
  source 1..75: mol_type = other DNA
tacctgaaagcgaacccggttgatacggtgatggggccgctgacctgggatgagaaaggcgatctgaaaggtttc

SEQ ID NO: 115235 - DNA, 75 bp, synthetic construct
  source 1..75: mol_type = other DNA
tttaatgatcaccccagcggcaaccgcgccagagctgactgcccgtggctataacttgattatgcgcaccaccgg

SEQ ID NO: 115236 - DNA, 75 bp, synthetic construct
  source 1..75: mol_type = other DNA
ttgccgcaacattgctgactattttttcgacctcagtcatggcgcaggatgtcacgattatttataccaatgatc

SEQ ID NO: 115237 - DNA, 75 bp, synthetic construct
  source 1..75: mol_type = other DNA
tacggcgatgccgcgcagaaagagaacaactggggctacgactggctgccgaagtgggaccagacctacgacgtc

SEQ ID NO: 115238 - DNA, 75 bp, synthetic construct
  source 1..75: mol_type = other DNA
cgcgacattggcggctttgccaatatatctactttagtaaaacaagagaaagcgaaaaataaagccaccttttat

SEQ ID NO: 115239 - DNA, 75 bp, synthetic construct
  source 1..75: mol_type = other DNA
cagtaggtcagcgcattgtatcttttaaaattaatggtgaagagatcgttgatacgaatatttaccatgttgcga

SEQ ID NO: 115240 - DNA, 75 bp, synthetic construct
  source 1..75: mol_type = other DNA
tggtgttgccgcaccaacgccgattcgctgccaacatgctgaacaggctgcacaaaacgcgccattaactcagca

SEQ ID NO: 115241 - DNA, 75 bp, synthetic construct
  source 1..75: mol_type = other DNA
ggacgtagaccaagcaagcgagctactcagaaacattcttcgctctggtgtagatgtagtcaccctgtccgatgg

SEQ ID NO: 115242 - DNA, 75 bp, synthetic construct
  source 1..75: mol_type = other DNA
gtccccgtgtcagtctccggtattgctgtacttatcgtcggaagtcttggtattgttttgtttactcccctgttg

SEQ ID NO: 115243 - DNA, 75 bp, synthetic construct
  source 1..75: mol_type = other DNA
cagatgttagtcaaaacgattaatgaatcgcgtaaaaagagctatcaaaaactcgccataaaaaataatttgccg

SEQ ID NO: 115244 - DNA, 75 bp, synthetic construct
  source 1..75: mol_type = other DNA
tcggcggagagcagcagaccgcgcaggccattgccgattcggtgtctacccagatgcgcgtggcgatgccaggca

SEQ ID NO: 115245 - DNA, 75 bp, synthetic construct
  source 1..75: mol_type = other DNA
atgtatgaggagagtgtgacatttttcatgacagtaaaacaggtgataacctcctttcgtaaggggaattcacag

SEQ ID NO: 115246 - DNA, 75 bp, synthetic construct
  source 1..75: mol_type = other DNA
ttgtattgccccgaagaagcggggaatggtgttatgtatgaggtgtgtgtgacatttttcatgaaaataaaacag

SEQ ID NO: 115247 - DNA, 75 bp, synthetic construct
  source 1..75: mol_type = other DNA
tgtcaacaatcggagttacatccaatgtggctgataaggttattctccttattgatgatgttactacaactgggg

SEQ ID NO: 115248 - DNA, 75 bp, synthetic construct
  source 1..75: mol_type = other DNA
gtcagctgcgtattttcatgaaaggagatcactcaataacttccatcgagatcgggtaataacatttgaacagat

SEQ ID NO: 115249 - DNA, 75 bp, synthetic construct
  source 1..75: mol_type = other DNA
gcgaaacgtataatggttatctggttgcattaaaggcggataccgaaacacagatgttagtcaaaaggattaatg

SEQ ID NO: 115250 - DNA, 75 bp, synthetic construct
  source 1..75: mol_type = other DNA
ctgccagaattgacgccctgcggcgatgtcggtctggttagtgcttatcttcaggcattgaccaacgagggagtc

SEQ ID NO: 115251 - DNA, 75 bp, synthetic construct
  source 1..75: mol_type = other DNA
agttcgtttcgtcccgattaatggctttcacacagggccaggcaaagtctctcttgagcatgacgaaattcttgt

SEQ ID NO: 115252 - DNA, 75 bp, synthetic construct
  source 1..75: mol_type = other DNA
tgcattaaagacggatgccgaaacacagatgttagtcaaaaggattaatgaatcgcgtaaaaagagctatcaaca

SEQ ID NO: 115253 - DNA, 75 bp, synthetic construct
  source 1..75: mol_type = other DNA
cttcgcggtattgttggcgacggttccaccgaattaaaaccgctggtggatgtaccggttatctttccgcgcggc

SEQ ID NO: 115254 - DNA, 75 bp, synthetic construct
  source 1..75: mol_type = other DNA
atgtttgattttgcttcttaccatcgcgcagcaacccttgccgatgccatcaccctgctggctgacaatccgcag

SEQ ID NO: 115255 - DNA, 75 bp, synthetic construct
  source 1..75: mol_type = other DNA
caatatcgaatatcagcagcaggatattgctgaagctgaacaaattttaaatacaatcaaaaataatctgggtag

SEQ ID NO: 115256 - DNA, 75 bp, synthetic construct
  source 1..75: mol_type = other DNA
gcgtcgatatttgttgcggaatactcacctgaccgtaaacgtggctttatgggcagctggctggacttcggttct

SEQ ID NO: 115257 - DNA, 75 bp, synthetic construct
  source 1..75: mol_type = other DNA
cagtgatcgctgggccggtggtaagggggaccccatcggggtgattgaagccggtatggaagcggtccgtacggc

SEQ ID NO: 115258 - DNA, 75 bp, synthetic construct
  source 1..75: mol_type = other DNA
cgttgtttgcgctggcgatcccggcgtttatcctgattaacagcaatattatcggcctgattttcgccgggttgc

SEQ ID NO: 115259 - DNA, 75 bp, synthetic construct
  source 1..75: mol_type = other DNA
ccgtccatgaaagcggcgatggataaggacagcgtgccggcggatatctggggagataatctgatgctgcactat

SEQ ID NO: 115260 - DNA, 75 bp, synthetic construct
  source 1..75: mol_type = other DNA
gcaggtaatggacaagaaagcgacgtttcgccatatgtggcatgaaagtgaagcgcagccagttttcggatctta

SEQ ID NO: 115261 - DNA, 75 bp, synthetic construct
  source 1..75: mol_type = other DNA
acgattcaagcatttggacaacaggctaaggccattaacagcatgaatatgctgataccattgcaatacttttgt

SEQ ID NO: 115262 - DNA, 75 bp, synthetic construct
  source 1..75: mol_type = other DNA
accacaacccggtcagggagtgcaagcaggtaatggacaagaaagcgacgtttcgccatgtgtggcaggaaagtg

SEQ ID NO: 115263 - DNA, 75 bp, synthetic construct
  source 1..75: mol_type = other DNA
gctcgcaactggcaatgctcctcgataagctggactggcgtcagccaaaaacatcccgccttaacgcactgacaa

SEQ ID NO: 115264 - DNA, 75 bp, synthetic construct
  source 1..75: mol_type = other DNA
gtctgacgccaacactggcggcctggctggtcgaaagctcgcagaatctgatgatgcctgcctattacctgatgg

SEQ ID NO: 115265 - DNA, 75 bp, synthetic construct
  source 1..75: mol_type = other DNA
agagggaaagaaagcgggaacaaaatggcgattgtcacggcgcgtcacgaaatgtcacgcacatgtcacgacgag

SEQ ID NO: 115266 - DNA, 75 bp, synthetic construct
  source 1..75: mol_type = other DNA
aaaagttcagcgggtgaatattggttccgtcaggcgctggcaggaatgggatattgcgcctggcgatcaaattct

SEQ ID NO: 115267 - DNA, 75 bp, synthetic construct
  source 1..75: mol_type = other DNA
cgctgtttgcactggcgatcccggcgtttattctgattaacagtaatatcatcggtctgatttttgccggactgt

SEQ ID NO: 115268 - DNA, 75 bp, synthetic construct
  source 1..75: mol_type = other DNA
ggtgatcggcgagccggtctctatggcctccatgaaagacgcgcagaacaaggacaaagtcccggctgatatctg

SEQ ID NO: 115269 - DNA, 75 bp, synthetic construct
  source 1..75: mol_type = other DNA
ctggggctggatggcattggtgaggccggttggcgcgcgctgcatcagactcatcgctttgaacatatcttttcc

SEQ ID NO: 115270 - DNA, 75 bp, synthetic construct
  source 1..75: mol_type = other DNA
gttttattaaacaacgtggcgtaaatgttttcattcaggacgtccctggcgatcaaaaagaacaaatccctgact

SEQ ID NO: 115271 - DNA, 75 bp, synthetic construct
  source 1..75: mol_type = other DNA
ggatcttagcagcgctcctgctgtgatagttaaaaaaccacaaaaaagaaaccatcccgaagtcaatttcgaaga

SEQ ID NO: 115272 - DNA, 75 bp, synthetic construct
  source 1..75: mol_type = other DNA
accgatggcgtagttgtacgagcggcgaaagagccagaatcccgccattggctaccgggccaggcagagtggctg

SEQ ID NO: 115273 - DNA, 75 bp, synthetic construct
  source 1..75: mol_type = other DNA
atcgggacgggaaactgaacaaagcaatcagtcgcggcaatggcctgaaaggcgaggactggacgcagaaagttc

SEQ ID NO: 115274 - DNA, 75 bp, synthetic construct
  source 1..75: mol_type = other DNA
ttatgctggcgacgctctggtgccacgaccatctggtgcacttctatcagctcgccgggatggactggatagatg

SEQ ID NO: 115275 - DNA, 75 bp, synthetic construct
  source 1..75: mol_type = other DNA
gcggaaaacctccgaactggcgcaaagtctctcctcatggccgaaatcatcccctggctatttcttcgacgtaca

SEQ ID NO: 115276 - DNA, 75 bp, synthetic construct
  source 1..75: mol_type = other DNA
ggcgggcagttggggatcttccgcaatggctactgggggcacccgcagtacaaactgccgccagaagccaacctg

SEQ ID NO: 115277 - DNA, 75 bp, synthetic construct
  source 1..75: mol_type = other DNA
cgcgccagtgcacgcattatgggcgttggcctcaacacggttttacgtcacttaaaaaactcaggccgtagtcgg

SEQ ID NO: 115278 - DNA, 75 bp, synthetic construct
  source 1..75: mol_type = other DNA
atgggcgttggcctcaacacgattttacgtcacttaaaaaactcaggccgcagggtaatgactccaacttattga

SEQ ID NO: 115279 - DNA, 75 bp, synthetic construct
  source 1..75: mol_type = other DNA
gggcgtcgctggccatgtataacacccatgaagaagtggatcgtctggtgaccggcctgcaacgtattcaccgtt

SEQ ID NO: 115280 - DNA, 75 bp, synthetic construct
  source 1..75: mol_type = other DNA
aaagaaattggcgctgacagttcaggacggcccgtatggattaattccccacccccttcaaaagaggatgaggtg

SEQ ID NO: 115281 - DNA, 75 bp, synthetic construct
  source 1..75: mol_type = other DNA
gcactggaactggtcgacacttccggtgcgcctgatattgaatggcctacgcctccggaaactcaggccagataa

SEQ ID NO: 115282 - DNA, 75 bp, synthetic construct
  source 1..75: mol_type = other DNA
tttagccatatggatccgtatatgacctatatggcgcagcagatccgtttgcagaaatctccggctggggtgatg

SEQ ID NO: 115283 - DNA, 75 bp, synthetic construct
  source 1..75: mol_type = other DNA
atgaaggtagcgcgaatcggctgcgaatgcggggcgaatgtgtcgacattttcctgcttcaagctgtttgggcca

SEQ ID NO: 115284 - DNA, 75 bp, synthetic construct
  source 1..75: mol_type = other DNA
atggaagtctatccattaccaagtctgagtataatggcagcgcagcgaaaacagtttgcgctagtggatacaatt

SEQ ID NO: 115285 - DNA, 75 bp, synthetic construct
  source 1..75: mol_type = other DNA
atgcagcatcaaaaggcagcgatgcgaaaatagcaattaatattcactggggagttcttgtttataatgaaccag

SEQ ID NO: 115286 - DNA, 75 bp, synthetic construct
  source 1..75: mol_type = other DNA
ggtgcatgactttatctatcagggcgtgctgagcgtgctacagcagcaactggaaacgccgctaccgctggacga

SEQ ID NO: 115287 - DNA, 75 bp, synthetic construct
  source 1..75: mol_type = other DNA
aatgcatccagttgctcatactggagtgcgtaagctggcggataaaaatgcattgagcctttggatgcgtgaacg

SEQ ID NO: 115288 - DNA, 75 bp, synthetic construct
  source 1..75: mol_type = other DNA
aactccagggttgaatcaaccgcgcattacccagcgggtggagcaggtgctggctgatgcgtttcatgcaccagc

SEQ ID NO: 115289 - DNA, 75 bp, synthetic construct
  source 1..75: mol_type = other DNA
agcacactgcaaggagaaatatttctccggagcgaaggtcatatccagcagcaaatgggcggaatgaatgcgcgt

SEQ ID NO: 115290 - DNA, 75 bp, synthetic construct
  source 1..75: mol_type = other DNA
gatacaaagattatctactaaagcgttacagcatttctcgtgaaggttacttgatgaaagatactcatggggagg

SEQ ID NO: 115291 - DNA, 75 bp, synthetic construct
  source 1..75: mol_type = other DNA
ggtgtgacagatttaaagattgacgctttgaggtttgcagtgatgtatcattttgatgtctgggattcagtccac

SEQ ID NO: 115292 - DNA, 75 bp, synthetic construct
  source 1..75: mol_type = other DNA
ccacgaaccaggcaggggatgttcagaccgtcaatcctggtcagccagcaggcacgacaccggaagccgattcag

SEQ ID NO: 115293 - DNA, 75 bp, synthetic construct
  source 1..75: mol_type = other DNA
cgttgcaacgaaggctacgcatctttcatttataaaggccctactaagagccgcagagcgtgaatggaaaatgct

SEQ ID NO: 115294 - DNA, 75 bp, synthetic construct
  source 1..75: mol_type = other DNA
tcagtccaccagctacgattaaaagacggtgaccccagcaacttaaaggccaccaatatcatcacaaaacgttag

SEQ ID NO: 115295 - DNA, 75 bp, synthetic construct
  source 1..75: mol_type = other DNA
atgaagacgtttcctttgcaaagcctgacgcttattgaagcgcagcaaaagcagtttgcgttggtggatacgatt

SEQ ID NO: 115296 - DNA, 75 bp, synthetic construct
  source 1..75: mol_type = other DNA
ccaacagtggtccttcacagatcctctacattgttcgatattaagatggccgtaaccaatctggcttctgtagat

SEQ ID NO: 115297 - DNA, 75 bp, synthetic construct
  source 1..75: mol_type = other DNA
atggctaacgcctggctcagattatggcatgacatgccaaatgaccccaagtggcgaacgattgccagggtatca

SEQ ID NO: 115298 - DNA, 75 bp, synthetic construct
  source 1..75: mol_type = other DNA
gcgtgcaggaaattatcgagctggcgctggtggcagctgtgccgcgtcagacagaagtgaaccgcgaaagcagtt

SEQ ID NO: 115299 - DNA, 75 bp, synthetic construct
  source 1..75: mol_type = other DNA
acgatctggccgcgccggtggactaccgcgagcaggcggagtcgatgttcaacgaagaggccaaggccattcgtc

SEQ ID NO: 115300 - DNA, 75 bp, synthetic construct
  source 1..75: mol_type = other DNA
gatgaatgggtacgtcatgacgttgggcgggtattcgttcagctttttgataactcactggcggcgtggttgggc

SEQ ID NO: 115301 - DNA, 75 bp, synthetic construct
  source 1..75: mol_type = other DNA
ccattgtccagaccgataaggaaggtgtgaccgtcccgaccttcggtaaatccgcctttgttgagtacgacaccg

SEQ ID NO: 115302 - DNA, 75 bp, synthetic construct
  source 1..75: mol_type = other DNA
ccattacggtaaaatgacactggaaaatccttcaccagagctgctcactgtgttgatccgtgaactgaccgggag

SEQ ID NO: 115303 - DNA, 75 bp, synthetic construct
  source 1..75: mol_type = other DNA
gcaggcacgacaccggaagccgattcagcgtatgcgctgaaagccgattcgggcgctgtgcagcaggtgatgacc

SEQ ID NO: 115304 - DNA, 75 bp, synthetic construct
  source 1..75: mol_type = other DNA
atgccgatgttattagtcggattcgcgccacgctttactccggcggcagccagatccagggcgcacaggcgctgg

SEQ ID NO: 115305 - DNA, 75 bp, synthetic construct
  source 1..75: mol_type = other DNA
gcgcagtcgaaggtgttgattgtcgagtttcatcagccgattgccgccagagtactggaagaggcgcaaaagcgc

SEQ ID NO: 115306 - DNA, 75 bp, synthetic construct
  source 1..75: mol_type = other DNA
gaagtaactggttctggtaaaaaaccgtggcgccagaaaggcaccggccgtgcgcgttctggttctatcaagagc

SEQ ID NO: 115307 - DNA, 75 bp, synthetic construct
  source 1..75: mol_type = other DNA
acaccgggcagtctgtgggacgagtggattatccggatgtgttcgaacaggtctggcgggagtacccgttgcgtg

SEQ ID NO: 115308 - DNA, 75 bp, synthetic construct
  source 1..75: mol_type = other DNA
gcaccacaggcgtcggttccaccgtaccggacggtggaggagtggcgggaatggcaacttgttgaaggacgaaaa

SEQ ID NO: 115309 - DNA, 75 bp, synthetic construct
  source 1..75: mol_type = other DNA
tttgcgcatcgaagcgattcatcgtcacaccacaccctacgggctggtgtggttcgatcgcagttatcacgcgct

SEQ ID NO: 115310 - DNA, 75 bp, synthetic construct
  source 1..75: mol_type = other DNA
aataagacatattgaccgtgaatttgactcaaaagagcaagcaagattagatgagttacagaaagaaatagaaca

SEQ ID NO: 115311 - DNA, 75 bp, synthetic construct
  source 1..75: mol_type = other DNA
ggtggcatttgctcagcttgaacttaaccgccttaagtctctggaaaaatcagagcgaaagaaagttgaaacaag

SEQ ID NO: 115312 - DNA, 75 bp, synthetic construct
  source 1..75: mol_type = other DNA
atctggcattctggaagcatcaaaacaggctatgtttgagcacgttgcagagaaattcgctgctcggatcaatga

SEQ ID NO: 115313 - DNA, 75 bp, synthetic construct
  source 1..75: mol_type = other DNA
atgatgttttcgattatgtgatgctcagaaaggagtttacagaggataatcaaggtaaccccacccctgaagggc

SEQ ID NO: 115314 - DNA, 75 bp, synthetic construct
  source 1..75: mol_type = other DNA
ctgtcctgagttctgtatctgcgggagttagtgcagcctccagtgcatccctcataggggccccgataagcatgc

SEQ ID NO: 115315 - DNA, 75 bp, synthetic construct
  source 1..75: mol_type = other DNA
cagatagagcagatttttgataaagacggcagggtaatcacaccagattcccttaaaaaggcacttgagtatcaa

SEQ ID NO: 115316 - DNA, 75 bp, synthetic construct
  source 1..75: mol_type = other DNA
aggggttatcgacaacagctgcaagtgcgggtctgatcacatcggctgttatgctggctatcagtcctctttctt

SEQ ID NO: 115317 - DNA, 75 bp, synthetic construct
  source 1..75: mol_type = other DNA
tacacatattcacgctcattaatacaatcatttaaaggaaacaacaaactcattgaggattatgaaaaaatcctt

SEQ ID NO: 115318 - DNA, 75 bp, synthetic construct
  source 1..75: mol_type = other DNA
ccagataagtggcattctggattaaaagcccaggttgaatgggaaattaccccaaatacagtacctccgccacca

SEQ ID NO: 115319 - DNA, 75 bp, synthetic construct
  source 1..75: mol_type = other DNA
aaaacccagcatgttgacgggcggtagccgggtgccatatgacgccgcggattccttcagcgatcaactggcgaa

SEQ ID NO: 115320 - DNA, 75 bp, synthetic construct
  source 1..75: mol_type = other DNA
atgccggatgcgacgcttgccgcgtcatatccgacctgggggattgcacatgtagggcggataaagcgttcacgc

SEQ ID NO: 115321 - DNA, 75 bp, synthetic construct
  source 1..75: mol_type = other DNA
cgcatccgccagtggcgcggtgcagatgccggatgcgacgcttgtcgcgtcttatccgacctacgggaacgcaca

SEQ ID NO: 115322 - DNA, 75 bp, synthetic construct
  source 1..75: mol_type = other DNA
tcagtgtcctatcagcaaagcaccctggctgatctgctggccctgattcaacttctgcaggcgcaactggggatt

SEQ ID NO: 115323 - DNA, 75 bp, synthetic construct
  source 1..75: mol_type = other DNA
atcttcattcttatgcctatacagcatatcaatctggtgatgttataaccgcaagaaatctatttcatctgctaa

SEQ ID NO: 115324 - DNA, 75 bp, synthetic construct
  source 1..75: mol_type = other DNA
ggtttaacgaagctatctgggggtgtggtgaatgtaagatcagatgataaatcaaaagagctaataaaaatatca

SEQ ID NO: 115325 - DNA, 75 bp, synthetic construct
  source 1..75: mol_type = other DNA
ccctgtaagtgcattaatgccaagtaacctaactatagaagagattcagtcaaacgacaagaatattactgttca

SEQ ID NO: 115326 - DNA, 75 bp, synthetic construct
  source 1..75: mol_type = other DNA
tcctggctgaacaggatgtaaaagacgttgacgtcctgtacttccgtgagctgctggccggggtggcgactaaca

SEQ ID NO: 115327 - DNA, 75 bp, synthetic construct
  source 1..75: mol_type = other DNA
gtcgctttactggtgccgcaacgtgaaattgactggcaacccaccgtgttctgggcgctggcctacagtgcgatt

SEQ ID NO: 115328 - DNA, 75 bp, synthetic construct
  source 1..75: mol_type = other DNA
aatggtagattatgctcaagggataaaaaatattgatgcagagctaagagatgctgtcaataagggattcgacat

SEQ ID NO: 115329 - DNA, 75 bp, synthetic construct
  source 1..75: mol_type = other DNA
tgaatggttcattaaatgttaataaaagtaaaacatccggtaagatgactcactcaatgagtgcaaactataact

SEQ ID NO: 115330 - DNA, 75 bp, synthetic construct
  source 1..75: mol_type = other DNA
tgttgacgtcctgtacttccgtgagctgctggccggggtggcgactaacaccgcatacctcgacggactgatgaa

SEQ ID NO: 115331 - DNA, 75 bp, synthetic construct
  source 1..75: mol_type = other DNA
ctgttggattattgctggtgttacaaccgtggcaacttgatttctcttcgatgaaaagcgctatcctggcgatcc

SEQ ID NO: 115332 - DNA, 75 bp, synthetic construct
  source 1..75: mol_type = other DNA
tctttgcaccacaattagacaaattactgcaaaagtatcaaaaagcgggtaataaattaggcggcagtgctgaaa

SEQ ID NO: 115333 - DNA, 75 bp, synthetic construct
  source 1..75: mol_type = other DNA
acaacgaaagtactgggtaatgttggaaaaggtatttctcaatatattatcgcacagcgtgcagcacaggggtta

SEQ ID NO: 115334 - DNA, 75 bp, synthetic construct
  source 1..75: mol_type = other DNA
cagcagcctaccacctcgtgcatgaacaggtgattagcccactgcactgccacctcacacgcctgatcgccgcct

SEQ ID NO: 115335 - DNA, 75 bp, synthetic construct
  source 1..75: mol_type = other DNA
ggcagggtaatcacaccagattcccttaaaaaggcacttgagtatcaacagagtaataataaggcaagttatgtg

SEQ ID NO: 115336 - DNA, 75 bp, synthetic construct
  source 1..75: mol_type = other DNA
ccacgctggcgcggtaacgcgatggaagtggggccgctggcgcgcacgttaatcgcttatcacaaaggcgatgct

SEQ ID NO: 115337 - DNA, 75 bp, synthetic construct
  source 1..75: mol_type = other DNA
aatgctaagaaggcaggggaagagaccgatcaggatactgacccacagccggacgcagaataatttacttttggc

SEQ ID NO: 115338 - DNA, 75 bp, synthetic construct
  source 1..75: mol_type = other DNA
gcaaaacgtcagcaatttaagaacatagaagcaggactaccaacagccagttcatgggagcagaaaagagctcat

SEQ ID NO: 115339 - DNA, 75 bp, synthetic construct
  source 1..75: mol_type = other DNA
gaaaccgatattcacggtgcataccgtcaggctgatggccgctataccgttaaggtattgaaagaagaaagcaaa

SEQ ID NO: 115340 - DNA, 75 bp, synthetic construct
  source 1..75: mol_type = other DNA
acccgtaacgcttacggtattcttggtggtatcccacagagtgaattccagcacgctaccattgctaagcgcgtg

SEQ ID NO: 115341 - DNA, 75 bp, synthetic construct
  source 1..75: mol_type = other DNA
gttttgttatctccctttgccacggcccggcggcttttctggcgcttcgccacggcgataacccactgaatggtt

SEQ ID NO: 115342 - DNA, 75 bp, synthetic construct
  source 1..75: mol_type = other DNA
cccctggttacttctttgatgtgcaaaatcgactgaagaaatttgtcgaaggcgggcagttagggatcttccgca

SEQ ID NO: 115343 - DNA, 75 bp, synthetic construct
  source 1..75: mol_type = other DNA
aacctgaaaaacggcaatcttaccaccgcctccaccgaaaaatgggagcctgcgacctggccgaaagtgtgccgt

SEQ ID NO: 115344 - DNA, 75 bp, synthetic construct
  source 1..75: mol_type = other DNA
actatgtttcgcgggctggagatcatcctgcaaggccgcgatccgcgtgatgcgtgggcgttcgttgagcgtatc

SEQ ID NO: 115345 - DNA, 75 bp, synthetic construct
  source 1..75: mol_type = other DNA
gtcgggaagttgaaagtcgctgggcattttttgtcgtggcggagttgctgaacggggaaccggtaaaccggcccg

SEQ ID NO: 115346 - DNA, 75 bp, synthetic construct
  source 1..75: mol_type = other DNA
cgatcacctggtgcatttctatcagctggctgggatggactggatcgacgtgttagatgcgctgaaagccgatcc

SEQ ID NO: 115347 - DNA, 75 bp, synthetic construct
  source 1..75: mol_type = other DNA
ggactgcggaacgcagaaagccgacaccgccagaaaaccgctttaactcgttgacctgttactttgcttctgatg

SEQ ID NO: 115348 - DNA, 75 bp, synthetic construct
  source 1..75: mol_type = other DNA
tcggcgggatgccttgcgccattaacattgacgaaagcggcgcggtcggggcagtcaatatggaacgcctgaacc

SEQ ID NO: 115349 - DNA, 75 bp, synthetic construct
  source 1..75: mol_type = other DNA
gccggaagcagaacgccaaccagcaatagcatctattcttcagcatgctgtggcgcagggagagaagggaggaat

SEQ ID NO: 115350 - DNA, 75 bp, synthetic construct
  source 1..75: mol_type = other DNA
tgcccgcagctacggcgaagcgtgggccagttatcctgtcctcaagcgttaccagatgcggcgtatggcggataa

SEQ ID NO: 115351 - DNA, 75 bp, synthetic construct
  source 1..75: mol_type = other DNA
gaacagaaaaaacattaaaacaaaaggtggcatttgctcagcttgaacttaaccgccttaagtctctggaaaaat

SEQ ID NO: 115352 - DNA, 75 bp, synthetic construct
  source 1..75: mol_type = other DNA
ccattgtcggcggaggaatggtcggcggcgcactggcgctggggctggcacagcatggattttcggtaatggtta

SEQ ID NO: 115353 - DNA, 75 bp, synthetic construct
  source 1..75: mol_type = other DNA
tgaaaagattgtgagcaaacctctactgtccagtcagatagaagactcactggatcaaattattcttgagcggaa

SEQ ID NO: 115354 - DNA, 75 bp, synthetic construct
  source 1..75: mol_type = other DNA
acgaccacagaaaagcggaagtaattcatgggaaaatatgggataaagcacctgcgtcagcgtggaaaaatgtta

SEQ ID NO: 115355 - DNA, 75 bp, synthetic construct
  source 1..75: mol_type = other DNA
atcattgatatggccatgaatggcgttggatgccgggcaactgcccgcattatgggcgtttgcgtattttcatga

SEQ ID NO: 115356 - DNA, 75 bp, synthetic construct
  source 1..75: mol_type = other DNA
atacagttgaacgcctttatgaacataagcgggacattgtttcttctgaacatcttagcgattttctgagtgctt

SEQ ID NO: 115357 - DNA, 75 bp, synthetic construct
  source 1..75: mol_type = other DNA
tggtggcgcgctgagaaatactgtggctaagattggggcgacaagaagtggtcgatatgcgatagagaaagccgt

SEQ ID NO: 115358 - DNA, 75 bp, synthetic construct
  source 1..75: mol_type = other DNA
ctggtacagccgaattgcgcgagctgggttttgctgaaaccagacacacagcaactgaataccagaaagaaaatc

SEQ ID NO: 115359 - DNA, 75 bp, synthetic construct
  source 1..75: mol_type = other DNA
cagaaggcaatcgacgagctggaccagcgtattcgtgacaccgtctccttcgagcctattcgcaatggagtgcca

SEQ ID NO: 115360 - DNA, 75 bp, synthetic construct
  source 1..75: mol_type = other DNA
acggcgcaaattcgcaggtgcggcagatggcgggaattggcgttcatgcctggcagtatgcgcagtcgtgtatgt

SEQ ID NO: 115361 - DNA, 75 bp, synthetic construct
  source 1..75: mol_type = other DNA
tcatgaactgcgtcagtgtatgtccgaagggactgaacccgacgcgcgccatcggccatatcaagtcgatgttgt

SEQ ID NO: 115362 - DNA, 75 bp, synthetic construct
  source 1..75: mol_type = other DNA
ggatgcaccctgatgaaacaaaagctggcaatgcgatcggagttcctcttaacgaaaccgcatgccagatattaa

SEQ ID NO: 115363 - DNA, 75 bp, synthetic construct
  source 1..75: mol_type = other DNA
tgaccaatcagggcgcggcgcggctggcgaacgcggcggctctcggtaccagactcaacctgacgcagatggccg

SEQ ID NO: 115364 - DNA, 75 bp, synthetic construct
  source 1..75: mol_type = other DNA
caggtattgcgcgggcaaaagcggcagggaaacgttttggccgtccctctgccctgaacgaagaacaaaaacagg

SEQ ID NO: 115365 - DNA, 75 bp, synthetic construct
  source 1..75: mol_type = other DNA
agggagtatgcggaggtgctgatcgctattacggagtatcaccgggccctgttatccaggcttatggcagattag

SEQ ID NO: 115366 - DNA, 75 bp, synthetic construct
  source 1..75: mol_type = other DNA
actgcacgcgctgtcgcctgagcagtttacccagcgagtacgcagccacctgtatcagctcgatctggggctgga

SEQ ID NO: 115367 - DNA, 75 bp, synthetic construct
  source 1..75: mol_type = other DNA
ttacaacgtctgagcggagagaaagaaacgcgtgatgcccatacattcctggctgattcgttagccagagcctgt

SEQ ID NO: 115368 - DNA, 75 bp, synthetic construct
  source 1..75: mol_type = other DNA
ggtgaaaggggacctgcgggggcacagggtgttccggggccggttggtccggcaggtcctgcgggtaaaacgggg

SEQ ID NO: 115369 - DNA, 75 bp, synthetic construct
  source 1..75: mol_type = other DNA
agggacaaaccggataaatgaaatctattacaggccgttacagataacaacagatggcgtttactggcgtactat

SEQ ID NO: 115370 - DNA, 75 bp, synthetic construct
  source 1..75: mol_type = other DNA
acaacattgcgcttatttgcaggctgtccatgcttatatcgctgttgtgtctgagcaaacgtatagtattcaagg

SEQ ID NO: 115371 - DNA, 75 bp, synthetic construct
  source 1..75: mol_type = other DNA
ctggaaaaatgatgatgcaagtaatttcagcagtcgctgaatttgagcgagaccttttacttgagcgtactcatt

SEQ ID NO: 115372 - DNA, 75 bp, synthetic construct
  source 1..75: mol_type = other DNA
ggaaaaaggaagactcgctctccggcattctcgaccagctgacactgatggccgatgcccgtcagtcgccactga

SEQ ID NO: 115373 - DNA, 75 bp, synthetic construct
  source 1..75: mol_type = other DNA
ccgaacaggtggccgctgaagctgcaggctggataacccgtgatgaacatggccaggcggaagaaatctctgtta

SEQ ID NO: 115374 - DNA, 75 bp, synthetic construct
  source 1..75: mol_type = other DNA
cctggatttatccgactgcttgaccgtatggaaagtggcgatgttctgatagtcaccaagcttgatcgcctgggc

SEQ ID NO: 115375 - DNA, 75 bp, synthetic construct
  source 1..75: mol_type = other DNA
gaaactttctgtgattgcacgtattaaggccggggccagtatcagcgccattgctcgggagtttaatacaacccg

SEQ ID NO: 115376 - DNA, 75 bp, synthetic construct
  source 1..75: mol_type = other DNA
gggagtttttttgcgataacggcgaggaatgggtgcatcttcggattgaggaagatctggcatcagtcagggaaa

SEQ ID NO: 115377 - DNA, 75 bp, synthetic construct
  source 1..75: mol_type = other DNA
tttacagccaagacgttatgcctaacatcaatccggataatctccaataccatgattacgaaaaggttagcagta

SEQ ID NO: 115378 - DNA, 75 bp, synthetic construct
  source 1..75: mol_type = other DNA
cctagttttaaccggttgcttgctcgcctgaaatgtggtgatcaattgattgtgacaaaactggatcgccttggt

SEQ ID NO: 115379 - DNA, 75 bp, synthetic construct
  source 1..75: mol_type = other DNA
ctgatcggtgtcgatgctattcgtggggctgcaatgagagtaatcggtaacaagtttggtggctctaaggagtaa

SEQ ID NO: 115380 - DNA, 75 bp, synthetic construct
  source 1..75: mol_type = other DNA
atgtcacgagtttttgcttactgccgggtttcgactcttgagcaaaccaccgagaatcagcgaagggaaattgaa

SEQ ID NO: 115381 - DNA, 75 bp, synthetic construct
  source 1..75: mol_type = other DNA
cgcgggactggccggcgacgttcttaaaaaccttggtttgggagaaggttcggcattacccgttggcgtgcctgt

SEQ ID NO: 115382 - DNA, 75 bp, synthetic construct
  source 1..75: mol_type = other DNA
catcagcaacagcggggcgtactttgagcagccgctgcggctgccggggcagtattatgatgaagagacggggct

SEQ ID NO: 115383 - DNA, 75 bp, synthetic construct
  source 1..75: mol_type = other DNA
ttatgaatggcctggtgattacttcactacgggcgaaggcgagatgctgacgcgcattcgtatggaagcgcagcg

SEQ ID NO: 115384 - DNA, 75 bp, synthetic construct
  source 1..75: mol_type = other DNA
catgaatgacagaaaggcagatataccaccgcctggaaaattagagaaaacagctcttcagacggcgatagatat

SEQ ID NO: 115385 - DNA, 75 bp, synthetic construct
  source 1..75: mol_type = other DNA
ggcgaacgcggcgacactcggtaccaagctcaacctgacgcagatggcggtcggtgatgcgaatggtacgctgcc

SEQ ID NO: 115386 - DNA, 75 bp, synthetic construct
  source 1..75: mol_type = other DNA
gggtacgccaaaattaacagcacaaggtgtggaaggtattgccataggtgataatactatcgggcgaagagctga

SEQ ID NO: 115387 - DNA, 75 bp, synthetic construct
  source 1..75: mol_type = other DNA
atgacgattgaaagctgttttattggcacccgcctctctggtaaacgttacgggcctcagagcggggatatgcag

SEQ ID NO: 115388 - DNA, 75 bp, synthetic construct
  source 1..75: mol_type = other DNA
atagaacgtaaggttgtggatttcactgatgcatctgttgcaggcacgtggattgagaagcaaattcagcggctt

SEQ ID NO: 115389 - DNA, 75 bp, synthetic construct
  source 1..75: mol_type = other DNA
aaacggcatatcagcgggctggtgacggctgcgagggtagtcggtcacgaggggcgcccggtcacgtatgaattg

SEQ ID NO: 115390 - DNA, 75 bp, synthetic construct
  source 1..75: mol_type = other DNA
ccgaagcgcaaaaaatcgaccttgaataccgttcggagggcaacgtatcggagtacatcaagcaacagctttttg

SEQ ID NO: 115391 - DNA, 75 bp, synthetic construct
  source 1..75: mol_type = other DNA
atgcgcagaaagttgccggtggtgaaattcgccggttagggctggagccgtggtcagcagagctggcccaggaga

SEQ ID NO: 115392 - DNA, 75 bp, synthetic construct
  source 1..75: mol_type = other DNA
tgaaaatagagaatttaatattagatcatccgactcaatagaatgtacgttctctgaatgcacaaattctataga

SEQ ID NO: 115393 - DNA, 75 bp, synthetic construct
  source 1..75: mol_type = other DNA
cgactacgggcgattaattgccgccagtctgggtgaggaatggaatggcttcggtcaggcgctgttcgtccgccc

SEQ ID NO: 115394 - DNA, 75 bp, synthetic construct
  source 1..75: mol_type = other DNA
tgtgtataccgaatcagtgaacacgacaaatatttatgtcgtgaactttataaagaagggctggatattcatgtc

SEQ ID NO: 115395 - DNA, 75 bp, synthetic construct
  source 1..75: mol_type = other DNA
atgatttctgtcattgatagaacttttaattatgaaaggactgctgaagtaatacacgatttactgcttctgaag

SEQ ID NO: 115396 - DNA, 75 bp, synthetic construct
  source 1..75: mol_type = other DNA
acccgcgtcacccgcgtgcgtctcaaactgcaacaggtgaccaacgcccccgacccgcaggagatgacccagcaa

SEQ ID NO: 115397 - DNA, 75 bp, synthetic construct
  source 1..75: mol_type = other DNA
gcaaaaaagttgccctgtgggcgcaaactcttggctggccgctgattggcgatgtgctgtcacaaaccgggcagc

SEQ ID NO: 115398 - DNA, 75 bp, synthetic construct
  source 1..75: mol_type = other DNA
tgactggcgagcagcaattttcattaacactcaatattcctctctctcgctggctgccagattcatgggcgatgt

SEQ ID NO: 115399 - DNA, 75 bp, synthetic construct
  source 1..75: mol_type = other DNA
atgaagcctcataaagcattattaaaccctgacctaaccgcaaggaatgtacttacatacagtcattgggatttt

SEQ ID NO: 115400 - DNA, 75 bp, synthetic construct
  source 1..75: mol_type = other DNA
ctaccttcaggttcacaacattttatttcaacaatgcagagggagctcgcaagtgatttatctgcaggatttaga

SEQ ID NO: 115401 - DNA, 75 bp, synthetic construct
  source 1..75: mol_type = other DNA
gttaatggcgtgatccctggctggattgaagcactgactctgatgccggtaggttctaaatgggaactgactatc

SEQ ID NO: 115402 - DNA, 75 bp, synthetic construct
  source 1..75: mol_type = other DNA
tggctcggcgttgcccgttggcgtccctgttccgtggcctaccgcaacagcaccggctgggtggctgaaatgtaa

SEQ ID NO: 115403 - DNA, 75 bp, synthetic construct
  source 1..75: mol_type = other DNA
taaagaagggctggatattcatgtcattgcccgaaagatggaattaagcaatcgtgctgtatccagcattgtata

SEQ ID NO: 115404 - DNA, 75 bp, synthetic construct
  source 1..75: mol_type = other DNA
tatcaccaaatcacagttctatataattgttggcggtatatctcagggagaaattgtcaaatatgaaaggtcctg

SEQ ID NO: 115405 - DNA, 75 bp, synthetic construct
  source 1..75: mol_type = other DNA
tgccagaaggcacggaatatcattgtgtgtataccgaatcagtgagcacgacaaatatttgtgtcgtgaacttta

SEQ ID NO: 115406 - DNA, 75 bp, synthetic construct
  source 1..75: mol_type = other DNA
gtaatacgcaactgctgaccttctggatggcgaacctgccggaacacccgcagtggaaaacctcaccgccaccgg

SEQ ID NO: 115407 - DNA, 75 bp, synthetic construct
  source 1..75: mol_type = other DNA
ttttcgtttcaagctattaaacatttaacaacgattgatggtggttttttatccatgaaagatggaaaaaaacta

SEQ ID NO: 115408 - DNA, 75 bp, synthetic construct
  source 1..75: mol_type = other DNA
tgtcacaaaactggatcgcctcggttgtaatccaatggatatcagtaaaacggtggaacaactgaccaaagcagg

SEQ ID NO: 115409 - DNA, 75 bp, synthetic construct
  source 1..75: mol_type = other DNA
ttgatgttcctgaactaaaggaaaaattaagaagaaaaataaatagaaaaattaagattattgaagactgtgcac

SEQ ID NO: 115410 - DNA, 75 bp, synthetic construct
  source 1..75: mol_type = other DNA
attacaatgaaaatatagctaaaatctcagggttaaaaagcgcaaaaatattaaaaggagcagagccatcttttt

SEQ ID NO: 115411 - DNA, 75 bp, synthetic construct
  source 1..75: mol_type = other DNA
gctgctgcggttgctgggcgataaggccggaggcggtggtggtgatacgcaactcagcctgcaaacgtatctgac

SEQ ID NO: 115412 - DNA, 75 bp, synthetic construct
  source 1..75: mol_type = other DNA
aataccagaagaaaatatctctgggaaagtatttgtagagccagtagttttagaaggtggtgctggtggcaattg

SEQ ID NO: 115413 - DNA, 75 bp, synthetic construct
  source 1..75: mol_type = other DNA
ccgcgtgcgtctcaaactgcaacaggtgaccaacgcccccgacccgcaggagatgacccagcaactggcgcagac

SEQ ID NO: 115414 - DNA, 75 bp, synthetic construct
  source 1..75: mol_type = other DNA
aaccgacgctggcgattgtgggcgatctctccgcactttacgatctcaacgcgctggcgttattacgtcaggttt

SEQ ID NO: 115415 - DNA, 75 bp, synthetic construct
  source 1..75: mol_type = other DNA
ccgctgaattacctgctgcgggttgaacagggtaaagggccgctggcgctgctggaactgaaaaacttccgcctg

SEQ ID NO: 115416 - DNA, 75 bp, synthetic construct
  source 1..75: mol_type = other DNA
tgaacaacgctataagcagcttaaggcattgctgatgacttcccgcccggaaaaggccgacgctgcctttttcag

SEQ ID NO: 115417 - DNA, 75 bp, synthetic construct
  source 1..75: mol_type = other DNA
gtgaagatggagaggtttatattacaggtgtgcaagaatcaatgacatttacggtacagtggggaaaagagatta

SEQ ID NO: 115418 - DNA, 75 bp, synthetic construct
  source 1..75: mol_type = other DNA
tgtttttggggttgcaacagcgatatatggtttgccttatggaataacgatttatggtggcatacttggagcctc

SEQ ID NO: 115419 - DNA, 75 bp, synthetic construct
  source 1..75: mol_type = other DNA
ctgaaaaacttccgcctgccgggacaggtattcctgaccggcaggagtatgagggatgcggaagaatatggggaa

SEQ ID NO: 115420 - DNA, 75 bp, synthetic construct
  source 1..75: mol_type = other DNA
atcagcgactatttgcctgaacaggggcaattgtttgtcggtaacagcctggtggtacgtctgattgatgcgctt

SEQ ID NO: 115421 - DNA, 75 bp, synthetic construct
  source 1..75: mol_type = other DNA
actacccgaccgccgaagtgaatcaggaatacctgctggtacagaccacgctatttatacaggacaatgcgcaac

SEQ ID NO: 115422 - DNA, 75 bp, synthetic construct
  source 1..75: mol_type = other DNA
tttacatctgcaatgagtgcgtggatttgtgcaatgaaattatcaggagagaagtgacagacaaaaagggaaaaa

SEQ ID NO: 115423 - DNA, 75 bp, synthetic construct
  source 1..75: mol_type = other DNA
ttatgatgttgagaaagggatacgatatgctcgccagtgtttgtcttcaatcacaacgatgcgtgtcgcaaccgc

SEQ ID NO: 115424 - DNA, 75 bp, synthetic construct
  source 1..75: mol_type = other DNA
gctgctgctcggcaatatggggatggcaggcggcggcgttaacgccctgcgcggtcactccaatattcaggggct

SEQ ID NO: 115425 - DNA, 75 bp, synthetic construct
  source 1..75: mol_type = other DNA
cgatgccgttcgtcgtcagcgtttccaggcgatggctgctgaaggtgtgaaatacctggaagaaaacgccaaaaa

SEQ ID NO: 115426 - DNA, 75 bp, synthetic construct
  source 1..75: mol_type = other DNA
aacaaagtgtcgagtccctggttgaaacaaaaactgcggttgcagggatttgggaagaatgtaaagaaattcctc

SEQ ID NO: 115427 - DNA, 75 bp, synthetic construct
  source 1..75: mol_type = other DNA
gtgtgaaatacctggaagaaaacgccaaaaaagaaggtgtgaatagcaccgaatctggcctgcaattccgcgtga

SEQ ID NO: 115428 - DNA, 75 bp, synthetic construct
  source 1..75: mol_type = other DNA
catccggcgcactaactggatcgggtacacataacgtgactttgagcggcagcgcagttcctgatggaatgttac

SEQ ID NO: 115429 - DNA, 75 bp, synthetic construct
  source 1..75: mol_type = other DNA
aagatatcggtaactggtatgtccgcgcggctaatggtcagatggtgccattctcggcgttctcctcttcccgtt

SEQ ID NO: 115430 - DNA, 75 bp, synthetic construct
  source 1..75: mol_type = other DNA
atgcgaaacatattgttaataattaaagggagtaacgtattatgtcagaagaaaataaagaaaatggatttaatc

SEQ ID NO: 115431 - DNA, 75 bp, synthetic construct
  source 1..75: mol_type = other DNA
ttcacgccagagcaggtcgcccgacagattcggcagctgaagctgctcccagaagactctccgcaacgtcagcag

SEQ ID NO: 115432 - DNA, 75 bp, synthetic construct
  source 1..75: mol_type = other DNA
tttgtgcaatgaaattatcaggagagaagtgacagacaaaagtaagcgtcgtctcagcaccgtctggcagatcct

SEQ ID NO: 115433 - DNA, 75 bp, synthetic construct
  source 1..75: mol_type = other DNA
gccagatagttcttcgtcgtgaaaaagacctcaaacaactgatgtctggcgaaaccagcaaaacatggacttcag

SEQ ID NO: 115434 - DNA, 75 bp, synthetic construct
  source 1..75: mol_type = other DNA
tttacatctgcaatgagtgcgttgatttgtgcaatgaagttatcaggagagaagtgacagaccatgaagaaaaaa

SEQ ID NO: 115435 - DNA, 75 bp, synthetic construct
  source 1..75: mol_type = other DNA
gaagcaggccaggcattcaacaaaaggtgtggaagttggcagaatttttgccggtatcatcttctgtgtatgcct

SEQ ID NO: 115436 - DNA, 75 bp, synthetic construct
  source 1..75: mol_type = other DNA
ccggtatgaccgtggaaacggcccgccgcattctggcagcaggtaacccggcatctgatgccgttaacgatttgc

SEQ ID NO: 115437 - DNA, 75 bp, synthetic construct
  source 1..75: mol_type = other DNA
ggcctgctgcatggcggcgcgtcagcggcgctggctgaaacgctgggatcgatggccggatttatgatgacccgt

SEQ ID NO: 115438 - DNA, 75 bp, synthetic construct
  source 1..75: mol_type = other DNA
gtgcattgcttagcattgggtggcattgacctgaccagtccaacaggaaaaatgatgatgcaagtaatttcagca

SEQ ID NO: 115439 - DNA, 75 bp, synthetic construct
  source 1..75: mol_type = other DNA
caggcacgcgtgctggccggaacccccggtatgaccgtggaaacggcccgccgcattctggcagctgcaccacag

SEQ ID NO: 115440 - DNA, 75 bp, synthetic construct
  source 1..75: mol_type = other DNA
gatggtgtgacagatttaaagattgacgctttgaggtttgcagtgctgtatcattatgatatctgggattcagtc

SEQ ID NO: 115441 - DNA, 75 bp, synthetic construct
  source 1..75: mol_type = other DNA
tacggtaatcctgagttcgtcgtgatgccatgccgtgatgatgctttcaaaattattgaggagcatctggcatga

SEQ ID NO: 115442 - DNA, 75 bp, synthetic construct
  source 1..75: mol_type = other DNA
ccgcaggaactggcttatggcgagcgcggcgctggcgcctccattcctccgttcagcaccctggtgtttgaagtc

SEQ ID NO: 115443 - DNA, 75 bp, synthetic construct
  source 1..75: mol_type = other DNA
agaccagggcgtatttatgaccatggttcagttgccagcaggtgcaacgcaggaacgtacacagaaagtccttaa

SEQ ID NO: 115444 - DNA, 75 bp, synthetic construct
  source 1..75: mol_type = other DNA
cataagctgcctgtatccgaagcggcttatgacatggcgtatgccacaatcccgcagtaccaggcagccgaagga

SEQ ID NO: 115445 - DNA, 75 bp, synthetic construct
  source 1..75: mol_type = other DNA
gaacagaggccgccgtttttgaaggtcagtccggcattgatgccgggctggcggatgaattagtcaatgcgtcgg

SEQ ID NO: 115446 - DNA, 75 bp, synthetic construct
  source 1..75: mol_type = other DNA
tattcgccgttaacggcttcggctttgcagggcgtggtcagaacacaggtattgcgttcgtttcgttgaaagact

SEQ ID NO: 115447 - DNA, 75 bp, synthetic construct
  source 1..75: mol_type = other DNA
gttgggagagatggcgttctggttattttggaggccatgaaggcaacaggaaatatgccagccaccgatgctttc

SEQ ID NO: 115448 - DNA, 75 bp, synthetic construct
  source 1..75: mol_type = other DNA
tgcgtatctggatgaacccgaatgaactgaacaaataccagctaacgccggttgatgtcattaccgctatcaaag

SEQ ID NO: 115449 - DNA, 75 bp, synthetic construct
  source 1..75: mol_type = other DNA
gataccgctgcggcaatccgtgctgaactggcgaagatggaaccgttcttcccgtcaggtctgaaaattgtttac

SEQ ID NO: 115450 - DNA, 75 bp, synthetic construct
  source 1..75: mol_type = other DNA
tggatatcgaagagttgccgcacgtcgtcaactatgagctgccaaacgtaccggaagattatgtccaccgtatcg

SEQ ID NO: 115451 - DNA, 75 bp, synthetic construct
  source 1..75: mol_type = other DNA
gggaatacggttcgccgcgtctggaacgttacaacggtctgccatccatggagatcttaggtcaggcggcaccgg

SEQ ID NO: 115452 - DNA, 75 bp, synthetic construct
  source 1..75: mol_type = other DNA
tgtgaagaaagtttacgtaatgtcagaagcgaaataccgcatgctgccggaagatatcggtaactggtatgttcg

SEQ ID NO: 115453 - DNA, 75 bp, synthetic construct
  source 1..75: mol_type = other DNA
taacgggtgctgctcaggatgcggcggtgtcgcttgctgccggtggaccgggagcgcataacgtcacggtaagtg

SEQ ID NO: 115454 - DNA, 75 bp, synthetic construct
  source 1..75: mol_type = other DNA
aatatgagcattacgaatggcctggtgattacttcactatgggggaaggcgagatgctgacgcgcattcgtatgg

SEQ ID NO: 115455 - DNA, 75 bp, synthetic construct
  source 1..75: mol_type = other DNA
cggtggaacaactgaccaaagcaggtatcaaagtgcattgcttagcattggggggcgttgacctgaccagtccac

SEQ ID NO: 115456 - DNA, 75 bp, synthetic construct
  source 1..75: mol_type = other DNA
aatcagttgggggcggcgggcctgccatcactacgccgccagtcgtcggagaaagtggtggtgtgagtgcagatt

SEQ ID NO: 115457 - DNA, 75 bp, synthetic construct
  source 1..75: mol_type = other DNA
cacatttactgctatctgatcgtcgtctgcgcgatctcgcaaaacttccgggagcaccagtcccacaaggacgtg

SEQ ID NO: 115458 - DNA, 75 bp, synthetic construct
  source 1..75: mol_type = other DNA
ttattatggctggtttgcgcattgcctattttggcggtggcggcggctggaaacgaaaaacgcttgagattctgc

SEQ ID NO: 115459 - DNA, 75 bp, synthetic construct
  source 1..75: mol_type = other DNA
ttcagtcactcgttaaagggcgggccgacgaacggaaacatgctgcgctttgatgacaaaacgggtgcggaagaa

SEQ ID NO: 115460 - DNA, 75 bp, synthetic construct
  source 1..75: mol_type = other DNA
tggagacacaccgctgggcgcagtgattatgtcgatcgttatggctggtttacgtattgcctattttggcggcgg

SEQ ID NO: 115461 - DNA, 75 bp, synthetic construct
  source 1..75: mol_type = other DNA
gggccgctcggtaacgtatgaattacgcattgagccgtggctgaaactgctgacccacagcagcgactacaaggc

SEQ ID NO: 115462 - DNA, 75 bp, synthetic construct
  source 1..75: mol_type = other DNA
taagtggaccggctgggatattccggactacagcgcagcgcctccgggtagcggcgtcgggccgtttatcatgca

SEQ ID NO: 115463 - DNA, 75 bp, synthetic construct
  source 1..75: mol_type = other DNA
gggcatggcgtcgcaaagcgggatattcagccactcgctgtatggcgggccgaccaacggaaacatgctgcgctt

SEQ ID NO: 115464 - DNA, 75 bp, synthetic construct
  source 1..75: mol_type = other DNA
gcaacgtggcggcggtcgtggacaaggcggtggtcgcggtcaacagcaaccacgccgcgctgaaggtggtgcaaa

SEQ ID NO: 115465 - DNA, 75 bp, synthetic construct
  source 1..75: mol_type = other DNA
tttaagaagtggtggtatagatctagctaaaaagggtaagcgggcctcattacaaagtgcttataactttgaacg

SEQ ID NO: 115466 - DNA, 75 bp, synthetic construct
  source 1..75: mol_type = other DNA
accgcatgctcgatatgggctttatccacgatatccgtcgtgtgttgactaagctgccagcgaagcgccagaacc

SEQ ID NO: 115467 - DNA, 75 bp, synthetic construct
  source 1..75: mol_type = other DNA
tgattgaccaggccggcctcggtcacgaaaaactgactcaggcacgtaaccagttgctgggcgaagcggcgaagc

SEQ ID NO: 115468 - DNA, 75 bp, synthetic construct
  source 1..75: mol_type = other DNA
agagcaacggtaaggcgctggccgatattaccgatccggcaaccggtgcggttatcgtcaagaaaggccaacaac

SEQ ID NO: 115469 - DNA, 75 bp, synthetic construct
  source 1..75: mol_type = other DNA
aatcagaatcaggcagcgtcggggccgtttactttggccaccggtgggcctgctgatggatcgtctacaggtgtt

SEQ ID NO: 115470 - DNA, 75 bp, synthetic construct
  source 1..75: mol_type = other DNA
atttgcgtgctgaatttatccgtgggtgggacgatggtcgaggggtcgatgcgggccgaattttgctaagtcagc

SEQ ID NO: 115471 - DNA, 75 bp, synthetic construct
  source 1..75: mol_type = other DNA
tgaggtaacgaattactatctgaccaaagaaaagaacaacgttgaatcggtgttcgccgttaacggcttcggctt

SEQ ID NO: 115472 - DNA, 75 bp, synthetic construct
  source 1..75: mol_type = other DNA
cccgtgaactggcggcgcagattggtgaaaacgtccgtgattacagcaaatacctgaacattcgttcgctggtgg

SEQ ID NO: 115473 - DNA, 75 bp, synthetic construct
  source 1..75: mol_type = other DNA
gcattttacctatgtcaccacgtttgaactgcaccccaccagcgaagtttaccgcccacagcgaaccctgagcaa

SEQ ID NO: 115474 - DNA, 75 bp, synthetic construct
  source 1..75: mol_type = other DNA
aagcgcagcgcagccccggcagccgggcacatggggcaggtcatatccgcaccctcatgacgggttacaccttta

SEQ ID NO: 115475 - DNA, 75 bp, synthetic construct
  source 1..75: mol_type = other DNA
ccatcgttgtagtagaaaacgttgagcgtgtaatggcagaagaaggtctgccaccgaaagaagctacgcgtaagt

SEQ ID NO: 115476 - DNA, 75 bp, synthetic construct
  source 1..75: mol_type = other DNA
aagtctgaaccgatcaaaggcgatgtcctgaactatgatgaagtgatggagcgcatggatcacttcatggactgg

SEQ ID NO: 115477 - DNA, 75 bp, synthetic construct
  source 1..75: mol_type = other DNA
tggtttctattgtggtgacgtcttgctgtggattatttttcggtgatgttcattttagcggcgtctattccattc

SEQ ID NO: 115478 - DNA, 75 bp, synthetic construct
  source 1..75: mol_type = other DNA
gggtacgccaaccgggccgtttatcatgcagccggaagggatgggacgcctgtttgccatcaacaaaatggcgga

SEQ ID NO: 115479 - DNA, 75 bp, synthetic construct
  source 1..75: mol_type = other DNA
ggctggaactgattgacagaattaacgatataatagccaggtactttccttctgtgctctcagcctgctcccgag

SEQ ID NO: 115480 - DNA, 75 bp, synthetic construct
  source 1..75: mol_type = other DNA
ggcgagctggaagagcaaaaaatctttaccggcgatctgctgacaccgtggcgtaaccatgtagataacaatatg

SEQ ID NO: 115481 - DNA, 75 bp, synthetic construct
  source 1..75: mol_type = other DNA
acatacagcgatccttgccagagcaatgggaatccccgctattgtgaaagcggcgattaccccgcaaaacgtccg

SEQ ID NO: 115482 - DNA, 75 bp, synthetic construct
  source 1..75: mol_type = other DNA
ctcaaggcaattgaaacgttggcgaaaaatcattttggtgaagctcacctgctcgcttcttcagagattccgcta

SEQ ID NO: 115483 - DNA, 75 bp, synthetic construct
  source 1..75: mol_type = other DNA
ccgcaaattcttggtgcagcgcaaatggaccctaaagtggtgttcgttacaacctgtttgattgcgggagttggc

SEQ ID NO: 115484 - DNA, 75 bp, synthetic construct
  source 1..75: mol_type = other DNA
aacggccagcaggtggaaacggtgggtattcctatccactggggctttgagggtgtcgcgcgtaaaggctatctc

SEQ ID NO: 115485 - DNA, 75 bp, synthetic construct
  source 1..75: mol_type = other DNA
aagctgagcagaaaaaagcctcaatgctggccgaagcgcaaagcgcaatcagcctgtggcagactgagctgcagc

SEQ ID NO: 115486 - DNA, 75 bp, synthetic construct
  source 1..75: mol_type = other DNA
ggcaaattaggtaaagagctacgtgaagaaattggccaggaggtcaatgatcagctgaaaacctactttggtgat

SEQ ID NO: 115487 - DNA, 75 bp, synthetic construct
  source 1..75: mol_type = other DNA
tgaatgtaaatggtcagcaggttgaaacggtgggtattccaatccactggggctttgagggtgtcgcgcgtaaag

SEQ ID NO: 115488 - DNA, 75 bp, synthetic construct
  source 1..75: mol_type = other DNA
aattatcgtcaacaatctggtgaggtgggaccggtggggattgcatcttatcaccgggcaacaggcagatagact

SEQ ID NO: 115489 - DNA, 75 bp, synthetic construct
  source 1..75: mol_type = other DNA
gatgaaccgggtttaaccgtggcaaaaggaatgaagctgcttgccagtgctttactgaaaagcaaggttaaaaat

SEQ ID NO: 115490 - DNA, 75 bp, synthetic construct
  source 1..75: mol_type = other DNA
ggtaaaccgtgggatccgaaacggatgctgatccagtggaacggcagcaagtggacgggtaacgatattcctgac

SEQ ID NO: 115491 - DNA, 75 bp, synthetic construct
  source 1..75: mol_type = other DNA
atctgccgcatctgctggcaagctggaagcattaccgtactttacgcgggctaccggttgataactttatgggtg

SEQ ID NO: 115492 - DNA, 75 bp, synthetic construct
  source 1..75: mol_type = other DNA
tagcactgctatgcctcagcactggcgcacgctggggtgaaggcagcacgctgcgcggtgagcaggttaatcacg

SEQ ID NO: 115493 - DNA, 75 bp, synthetic construct
  source 1..75: mol_type = other DNA
ggatattacgtcctcatctggcagcctttgagcgaacggattgagcaacaggagacaatgttgcagcagctggtg

SEQ ID NO: 115494 - DNA, 75 bp, synthetic construct
  source 1..75: mol_type = other DNA
gtctgaccgagcacttccactactggaccaaacacgcgctgttgaacgcgattttgcaaccagagcagtttgtgg

SEQ ID NO: 115495 - DNA, 75 bp, synthetic construct
  source 1..75: mol_type = other DNA
agatattgctgcgcagaaatacgatctctctattaatcgttataaagaagtggtgtatcaggcggaggagtatga

SEQ ID NO: 115496 - DNA, 75 bp, synthetic construct
  source 1..75: mol_type = other DNA
cggcactcacacgactgttttgcagtatccctttacccgtgagtagcgcggtcatgctggtttcttatctgcctt

SEQ ID NO: 115497 - DNA, 75 bp, synthetic construct
  source 1..75: mol_type = other DNA
cttcgtcctctgctcagtaacggcttattggtcgggattttactggctgttcttatggataaccttattccgtgg

SEQ ID NO: 115498 - DNA, 75 bp, synthetic construct
  source 1..75: mol_type = other DNA
ggtcaaacaactgcgtgatgagcgtcagggcaaaacaccaaaaagcctctccgataacaccagaacaaatcgaaa

SEQ ID NO: 115499 - DNA, 75 bp, synthetic construct
  source 1..75: mol_type = other DNA
gggtgacacaaattgatgtcagtgctgctgagaagcctgggatggtgaatgtgcagcggctggagtttggacggg

SEQ ID NO: 115500 - DNA, 75 bp, synthetic construct
  source 1..75: mol_type = other DNA
aagccatcacccggaatctcgatcgcgaactctggcgtgacctgatgcaacgttcagggatgctgtcattaatgg

SEQ ID NO: 115501 - DNA, 75 bp, synthetic construct
  source 1..75: mol_type = other DNA
cgctgagggcgttggcttgctgcgtaccgagtttttattccacgattctgcgacattacctgatgaggaagagca

SEQ ID NO: 115502 - DNA, 75 bp, synthetic construct
  source 1..75: mol_type = other DNA
ggatattacgtcctcatttggcaaccgctgagtgaacggattgagcaacaggagacaacgttgcaacaactggcg

SEQ ID NO: 115503 - DNA, 75 bp, synthetic construct
  source 1..75: mol_type = other DNA
ttggtctttccacgatgacggaatggttcaaacaactgcgtgatgagcgtcagggcaaacgccaaaagccttcct

SEQ ID NO: 115504 - DNA, 75 bp, synthetic construct
  source 1..75: mol_type = other DNA
tctcctggcagaccgggatgggcgcaatattctggggcgcagttgggctatttttgctcacgctgtttcgtatcc

SEQ ID NO: 115505 - DNA, 75 bp, synthetic construct
  source 1..75: mol_type = other DNA
gcgctgcgggtgacacaaattgatgttagtgcgggtgagaagccagggatggtgaatgtgcagcggttggagttg

SEQ ID NO: 115506 - DNA, 75 bp, synthetic construct
  source 1..75: mol_type = other DNA
cacggaacgcagcaattgcgggagaaaattgccagagcagtgaacaactcgctcaaaggtggacaatcccaaccg

SEQ ID NO: 115507 - DNA, 75 bp, synthetic construct
  source 1..75: mol_type = other DNA
catacgtaagagcaaaagacaagggtgaattaaccagagttgttaccaatcacccaaataatgagcttaaagatc

SEQ ID NO: 115508 - DNA, 75 bp, synthetic construct
  source 1..75: mol_type = other DNA
tgatgccgatcttcttgacctcaatcagtggccggtgatcaacgccaccagcggcgtgagcggtgcaggacgtaa

SEQ ID NO: 115509 - DNA, 75 bp, synthetic construct
  source 1..75: mol_type = other DNA
gggcaacaggcagatcgacttgccgatctggaaagaatgctacacctgttcagcggcaaaccgatccccgacaac

SEQ ID NO: 115510 - DNA, 75 bp, synthetic construct
  source 1..75: mol_type = other DNA
tgtaaaacagctgtttccctcggccaggatggttgaagggcaactgactaaggaagggttttattacgatttcgc

SEQ ID NO: 115511 - DNA, 75 bp, synthetic construct
  source 1..75: mol_type = other DNA
aggcctggctgctggcgggactgatgaaggccaaccgggtcctcgtggtcatctgccaggtgcttatgctgccta

SEQ ID NO: 115512 - DNA, 75 bp, synthetic construct
  source 1..75: mol_type = other DNA
tgaggtgaacagctttgtcgcgcgctaccgtgatagcagagaaccgttggtatcgctggaaacccggatgcgctt

SEQ ID NO: 115513 - DNA, 75 bp, synthetic construct
  source 1..75: mol_type = other DNA
ggcgctgatccgcgagcgtgaacacggcacggtggaacacttactggtgatgccgataacgccgtttgagatcat

SEQ ID NO: 115514 - DNA, 75 bp, synthetic construct
  source 1..75: mol_type = other DNA
tggagtatttctcacgccactatggccaggtgtatgttgaagaaggccgcgaattcaccgttaacgaagctctcg

SEQ ID NO: 115515 - DNA, 75 bp, synthetic construct
  source 1..75: mol_type = other DNA
ggattttcgctgcggttgctggctgatggagaaacctgaaacggcaatgaaagccattacccggaatcttgaccg

SEQ ID NO: 115516 - DNA, 75 bp, synthetic construct
  source 1..75: mol_type = other DNA
tcgatggcaatccggccaacctgcatccgtatggtcaggttgaaatgggtaaacgttatgtaaaagcgctgggcg

SEQ ID NO: 115517 - DNA, 75 bp, synthetic construct
  source 1..75: mol_type = other DNA
ctttcttagtcgaaaaactctcacccactaatcaacaacgtgtttcgctgctaacccatacgcttattttattgc

SEQ ID NO: 115518 - DNA, 75 bp, synthetic construct
  source 1..75: mol_type = other DNA
tgaccaggtagcgaaaaatctgcaagccaaaaactttgaacagcttggttatcaggctgagtccgccacctggcg

SEQ ID NO: 115519 - DNA, 75 bp, synthetic construct
  source 1..75: mol_type = other DNA
aatcaacaacgtgtttcgctgctaacccatacgctcattttattgctgtgtctggggctggcctggggcgctata

SEQ ID NO: 115520 - DNA, 75 bp, synthetic construct
  source 1..75: mol_type = other DNA
ggtttacgcgcgctggcggcggcgacgctttccaacttgatgagtgcgaccattgccgggttctttattggttta

SEQ ID NO: 115521 - DNA, 75 bp, synthetic construct
  source 1..75: mol_type = other DNA
taacccgaaccttgatcccgcgtggtttggcggggtgatggcgatcatcaacaacattaccatgctggcgattgt

SEQ ID NO: 115522 - DNA, 75 bp, synthetic construct
  source 1..75: mol_type = other DNA
aaaaaggctcagaaattgagagccaagagattacaacagttgattgagaaaatgggacgtgatcgtgtatcaccg

SEQ ID NO: 115523 - DNA, 75 bp, synthetic construct
  source 1..75: mol_type = other DNA
ctgcaggcattatcacacaggccaggaatatactggccagcgaagcacagagcctcctggaggccattccgacga

SEQ ID NO: 115524 - DNA, 75 bp, synthetic construct
  source 1..75: mol_type = other DNA
aggaactgctgatgatgaatcgttgccgtaattcaattgataagatcggtcgtaatttccattatatcattgtta

SEQ ID NO: 115525 - DNA, 75 bp, synthetic construct
  source 1..75: mol_type = other DNA
atgactccggctcaacacagtattcaacattccaatctggataaactacttaataggttagattcgatctcaagc

SEQ ID NO: 115526 - DNA, 75 bp, synthetic construct
  source 1..75: mol_type = other DNA
atgaaagccattacccggaatcttgatcgcgaaatctggcgtgacctgatgcaacattccgggatgctgtcatta

SEQ ID NO: 115527 - DNA, 75 bp, synthetic construct
  source 1..75: mol_type = other DNA
tgagagtctgtacatagatttgtgtaattgcctgtttttgatatgttcactccaacaccggagacaggcaaatta

SEQ ID NO: 115528 - DNA, 75 bp, synthetic construct
  source 1..75: mol_type = other DNA
gacgcaccaggtaaaactaaagccggttcggccatttgccggacagccgatttgaccgcctgggaatacgtcgcc

SEQ ID NO: 115529 - DNA, 75 bp, synthetic construct
  source 1..75: mol_type = other DNA
atcgtcaacaatctggtgagatgggaccatagatttcatcttatcaccgggcaacaggcagatcgacttgccgac

SEQ ID NO: 115530 - DNA, 75 bp, synthetic construct
  source 1..75: mol_type = other DNA
ggccagcctgattgcgtggatgaaatacattcaggcgctgaacgcggtcgacacctcaacggcaccggatatcga

SEQ ID NO: 115531 - DNA, 75 bp, synthetic construct
  source 1..75: mol_type = other DNA
cgcgtatgttatctggtgggatgaaacgccgtttaatgatcgcccgtgcgttaatgcatgaacctaaactgctga

SEQ ID NO: 115532 - DNA, 75 bp, synthetic construct
  source 1..75: mol_type = other DNA
gatgccccaccggatggaaaagacggttttgctatttgtcgaatgactggtcaggctggatgggaatatgttgta

SEQ ID NO: 115533 - DNA, 75 bp, synthetic construct
  source 1..75: mol_type = other DNA
ttaatgcatgaacctaaactactgattctcgacgaaccgaccgcaggcgtggatatcgaacttcgccgctcaatg

SEQ ID NO: 115534 - DNA, 75 bp, synthetic construct
  source 1..75: mol_type = other DNA
gtgatttttatgcgcttctcgggccgaacgggggccgggaaatcgaccactatcggtattatcagctctctggta

SEQ ID NO: 115535 - DNA, 75 bp, synthetic construct
  source 1..75: mol_type = other DNA
ttgctcaggcgttctgcggtcatcgtcgcgctattatggaagggccaggcggcctgtggtggggaactatcctca

SEQ ID NO: 115536 - DNA, 75 bp, synthetic construct
  source 1..75: mol_type = other DNA
attgccaccgtaccgctggacagtggagccagaccgacgctgggagaaccttctcgcggtcgcatttatgccgat

SEQ ID NO: 115537 - DNA, 75 bp, synthetic construct
  source 1..75: mol_type = other DNA
attgtcgtttaaatttggcgttgcttacggcaatgtttttggtcatcgcgggtttacccattcgctggtgtttgc

SEQ ID NO: 115538 - DNA, 75 bp, synthetic construct
  source 1..75: mol_type = other DNA
cccggaagagggcgttacgccaccacggtacagattgtcgatcctgaccgcctcagtaatcctcagcagaatttc

SEQ ID NO: 115539 - DNA, 75 bp, synthetic construct
  source 1..75: mol_type = other DNA
tatcttccagctatgccatcaagcctgtaacacaccaagggctatgggaggtggcgggttatgttgctgctttcg

SEQ ID NO: 115540 - DNA, 75 bp, synthetic construct
  source 1..75: mol_type = other DNA
ctggatgatggagaaaccagaaacagcaatgaaagccattacccggaatcttgagcgcgaaatctggcgtaacct

SEQ ID NO: 115541 - DNA, 75 bp, synthetic construct
  source 1..75: mol_type = other DNA
agaggactgagccgggattacaaaaccaggccgccctgcaaatttagtaataaaattatcatcaacaacctggtg

SEQ ID NO: 115542 - DNA, 75 bp, synthetic construct
  source 1..75: mol_type = other DNA
gttcccgattttcggtgcgggctgggatcgtttgatgggacgtcagaacgagacggtgaaagtgaccacctttaa

SEQ ID NO: 115543 - DNA, 75 bp, synthetic construct
  source 1..75: mol_type = other DNA
atttctgaactgatgtgggtatggttgccggggatggtgctaatgggaatgttatggtggagcaggcgtaaattg

SEQ ID NO: 115544 - DNA, 75 bp, synthetic construct
  source 1..75: mol_type = other DNA
acaggctcctgagcctccagcgagagattttcgctttggggtcagcaaccttaaaaaatactcgattacaacatt

SEQ ID NO: 115545 - DNA, 75 bp, synthetic construct
  source 1..75: mol_type = other DNA
acactgggaagtggtgcgttttgtgcgtgatttctatctggaattcaatacttctccggcgattcgtatgctggt

SEQ ID NO: 115546 - DNA, 75 bp, synthetic construct
  source 1..75: mol_type = other DNA
atttcagagctaatgtgggtatggctaccaggaataatagtgatgggaatattgtggtggagcaggcgtaaattg

SEQ ID NO: 115547 - DNA, 75 bp, synthetic construct
  source 1..75: mol_type = other DNA
tacggcaatgtttttggtcatcgcgggtttacccattcgctggtgtttgcgtttgttgtcccgctgttatgtgtg

SEQ ID NO: 115548 - DNA, 75 bp, synthetic construct
  source 1..75: mol_type = other DNA
atgtctgaaccacaaaagtctgaaccacaaaagtctgaaccacaaaacgggcgcggcgcgctcttcgccggtggg

SEQ ID NO: 115549 - DNA, 75 bp, synthetic construct
  source 1..75: mol_type = other DNA
gtttgttgtcccgctgttatgcgtgcttattgggcatcgatggttcaggacggggctgattcgctgctggctatt

SEQ ID NO: 115550 - DNA, 75 bp, synthetic construct
  source 1..75: mol_type = other DNA
gtgaatggttttcttgatccggtcgatttccgtgggcagctggtgacagttgtcgggccaatcaccggtacggtt

SEQ ID NO: 115551 - DNA, 75 bp, synthetic construct
  source 1..75: mol_type = other DNA
ccatcaaaatgacaagcattgaaatcgctgagttggtgggaagtcgtcatgacaaggtgaaacaatctattgaac

SEQ ID NO: 115552 - DNA, 75 bp, synthetic construct
  source 1..75: mol_type = other DNA
cattgcgccttgcggccgaccttgaagaccagaaggctgaactggagaaacagcttgctctcgcagcacctaaag

SEQ ID NO: 115553 - DNA, 75 bp, synthetic construct
  source 1..75: mol_type = other DNA
ccggccttccgcaacttatttctatgatccggagcgatttattaacccgctttgagcaggatacgctgcttcgtc

SEQ ID NO: 115554 - DNA, 75 bp, synthetic construct
  source 1..75: mol_type = other DNA
tctcctttgcctatccacgccgtgctgagtacttttctggcgagctggaaaccttcctgttgatggcacgtgcgg

SEQ ID NO: 115555 - DNA, 75 bp, synthetic construct
  source 1..75: mol_type = other DNA
gcccactggtggaaactattgccgccgttgggcagacttttccgcctgtcgcagtgctggcgattgccgttccgg

SEQ ID NO: 115556 - DNA, 75 bp, synthetic construct
  source 1..75: mol_type = other DNA
agctgaaccgggcactgacggacgcgtctgcccttatcgacagctatctgtcttcccgttacacgctgccgctgg

SEQ ID NO: 115557 - DNA, 75 bp, synthetic construct
  source 1..75: mol_type = other DNA
gagaatatcgacgattaaacgttatgtgaaagctttgggcggcgagttaagactggacgtgacattcccaccgga

SEQ ID NO: 115558 - DNA, 75 bp, synthetic construct
  source 1..75: mol_type = other DNA
ggttgcttaccacatcagggaggcccatatcggtgactggtggagcggggctaaaaccatgacgtggcagcgtat

SEQ ID NO: 115559 - DNA, 75 bp, synthetic construct
  source 1..75: mol_type = other DNA
tagaaaacaggattgtcgcctatcgtatggaacaaaaccgggctgagttgtctcccgaaaaccttagtaggcatc

SEQ ID NO: 115560 - DNA, 75 bp, synthetic construct
  source 1..75: mol_type = other DNA
tttgagcacatcacgacgaaagatgccgctgaatatgttcgtgacggtaatgaactgctggctgctaccattaca

SEQ ID NO: 115561 - DNA, 75 bp, synthetic construct
  source 1..75: mol_type = other DNA
gatataccaacaagagatgcagaagaaccctcaattggaacctctaccaattggcctattttgcgagcgagtatc

SEQ ID NO: 115562 - DNA, 75 bp, synthetic construct
  source 1..75: mol_type = other DNA
aatggggactttattcgatttgcgtttttaatttttgaagaaataaaggctacttacagcgatggtctaaaaata

SEQ ID NO: 115563 - DNA, 75 bp, synthetic construct
  source 1..75: mol_type = other DNA
gaccgcgttcgatgaagaaaagaccgaactgatcaaccagacggtgacctgtcatatcgacctgactgtttgcaa

SEQ ID NO: 115564 - DNA, 75 bp, synthetic construct
  source 1..75: mol_type = other DNA
ggtcacctttactctcagggaaaaattaagcgtgccggaaaaagcatcggcacgcagtggctcacagaaaacaat

SEQ ID NO: 115565 - DNA, 75 bp, synthetic construct
  source 1..75: mol_type = other DNA
gcaggagttccgtttcagtcactacagcaatcttggctcggatgagatgatggaagtggtgcgcgacggcgtctt

SEQ ID NO: 115566 - DNA, 75 bp, synthetic construct
  source 1..75: mol_type = other DNA
gaatgccggggatacaaaaaccatcctgggcctgtttgctgatgaaagttattcccagtggaatgataagttgac

SEQ ID NO: 115567 - DNA, 75 bp, synthetic construct
  source 1..75: mol_type = other DNA
tcgcgcggcgatgccgatatggtatcgatggcgcgaccgtttcttgctgatgcggagctgctgtcaaaagcgcaa

SEQ ID NO: 115568 - DNA, 75 bp, synthetic construct
  source 1..75: mol_type = other DNA
atcgcaccattaccgaagccgtacatcaggaaggcggcaaaatagccctgcaaattttgcataccgggcgctaca

SEQ ID NO: 115569 - DNA, 75 bp, synthetic construct
  source 1..75: mol_type = other DNA
tttttgcgctttctacgcccatggaaatacttaatcagggttgcaagcccgcgcatgactcgccaaaaatgtata

SEQ ID NO: 115570 - DNA, 75 bp, synthetic construct
  source 1..75: mol_type = other DNA
tccgcaggttgccgacgacattctctcgcgcggcgatgccgatatggtatcgatggcacgaccgtttcttgctga

SEQ ID NO: 115571 - DNA, 75 bp, synthetic construct
  source 1..75: mol_type = other DNA
gccggcaaaacacctaaagcctcccctatcacgccggagcaaattgagatacgtgagctgaagaaaaaacttcaa

SEQ ID NO: 115572 - DNA, 75 bp, synthetic construct
  source 1..75: mol_type = other DNA
cttattccgtgggaacgcggtagtgactccaacttactgatagtgttttatgttcagataatgcccgatgacctt

SEQ ID NO: 115573 - DNA, 75 bp, synthetic construct
  source 1..75: mol_type = other DNA
aaaatacgtgagctgaggaaaaagccacaacgcattgaaatggagaatgaaatattaaaaaaggtgaaccgcccc

SEQ ID NO: 115574 - DNA, 75 bp, synthetic construct
  source 1..75: mol_type = other DNA
tatttaaagtcatcaaagacaggttcgcgccgcagaaagagatgtctgccgctcacgttcgtgcctgctaccaac

SEQ ID NO: 115575 - DNA, 75 bp, synthetic construct
  source 1..75: mol_type = other DNA
gactccgcaccacatgcacgtcatcgcaaagagagtagctgcggttgtgcaggctgttttaatgcaccaacggcg

SEQ ID NO: 115576 - DNA, 75 bp, synthetic construct
  source 1..75: mol_type = other DNA
cagggcaaaacaccaaaagcctctccgatgacaccagaacaaatcgaaatacgtgagctgaggaaaaattttctt

SEQ ID NO: 115577 - DNA, 75 bp, synthetic construct
  source 1..75: mol_type = other DNA
taaccgatctttccgcattgccgtgcctggtcattaaagagcgcgatcatccttttggtgtctggcaattacgca

SEQ ID NO: 115578 - DNA, 75 bp, synthetic construct
  source 1..75: mol_type = other DNA
cgtattaccctaccttgtcctggcaaccattggcttactattctgcatgcccggaaacgcttaaggatatgagcg

SEQ ID NO: 115579 - DNA, 75 bp, synthetic construct
  source 1..75: mol_type = other DNA
gcactccagtctcggtcattacgtttttcgtaagctgtattgttcttatatatatacttaaaaaaatctatgcag

SEQ ID NO: 115580 - DNA, 75 bp, synthetic construct
  source 1..75: mol_type = other DNA
acaccatgctgggcgtgctgaaactggcgcaatgcgaagagaaagtatttaccactaccaatctgaatttactgc

SEQ ID NO: 115581 - DNA, 75 bp, synthetic construct
  source 1..75: mol_type = other DNA
gggcaacgtgcgtgagctggaaaacgtcatcgagcgagcggtattgctaacacgcggcaacgtgctgcagctgtc

SEQ ID NO: 115582 - DNA, 75 bp, synthetic construct
  source 1..75: mol_type = other DNA
ggagggtttggtggtcagttgcggggctggaatccaccaagcgaaagtgctgatgcggctcttctgcctaacttc

SEQ ID NO: 115583 - DNA, 75 bp, synthetic construct
  source 1..75: mol_type = other DNA
tccaaaccctaactacgatatgaataaacggctatctattgaacatgattatcaaatggtaaaaggagaagcaaa

SEQ ID NO: 115584 - DNA, 75 bp, synthetic construct
  source 1..75: mol_type = other DNA
gcaacgccgggtggctggcagttggttggtcatacctcactcagccctgagagatcccctcataatttccccaaa

SEQ ID NO: 115585 - DNA, 75 bp, synthetic construct
  source 1..75: mol_type = other DNA
ttttgcaagcatcattattcttatctgtataattaaaaagatatatgcagacagagttgtttttattcaacaaaa

SEQ ID NO: 115586 - DNA, 75 bp, synthetic construct
  source 1..75: mol_type = other DNA
acgtgaacggcaacccccttcgcgggagtatgagctatacaggtggcgggactggttttggcgggcagatgatcg

SEQ ID NO: 115587 - DNA, 75 bp, synthetic construct
  source 1..75: mol_type = other DNA
ggggtgatcaacgttttcagaggactgggctgggattacaaaaccaactcgccctgtaaatttggcagtaaaatt

SEQ ID NO: 115588 - DNA, 75 bp, synthetic construct
  source 1..75: mol_type = other DNA
aatgacgccagccagatcccacaccatcgcaccattaccgaagccgtacatcaggaaggcggcaaaatagccctg

SEQ ID NO: 115589 - DNA, 75 bp, synthetic construct
  source 1..75: mol_type = other DNA
accgatcctcggtttgcccatcggcctgatgtatgccgcttgtctgcccaccagcctcgttatcgcattctttga

SEQ ID NO: 115590 - DNA, 75 bp, synthetic construct
  source 1..75: mol_type = other DNA
gaccgagcagctcaacaatgttgatagtgaatttggcgagattattggtcgcagtgaagccatgtacagcgtgct

SEQ ID NO: 115591 - DNA, 75 bp, synthetic construct
  source 1..75: mol_type = other DNA
attccctgcaggccacgcagcttcagtcggccatcgtgaaggcgatgtatgcagccacaatcgaaagcgaactgg

SEQ ID NO: 115592 - DNA, 75 bp, synthetic construct
  source 1..75: mol_type = other DNA
gactacgaactgttatgtcgggaacgggataacttccgcattctggttgccatcaccaatgcggtactctcccgc

SEQ ID NO: 115593 - DNA, 75 bp, synthetic construct
  source 1..75: mol_type = other DNA
gcgctgcgggtgacacaaattgatgtcagtgcgggtgagaagcctgggatggtgaatgtgcagcgactggaattt

SEQ ID NO: 115594 - DNA, 75 bp, synthetic construct
  source 1..75: mol_type = other DNA
aaagagcgtgagaagctggaaggttatgcggaagcgaaagcgaaactgattgaacagcaggcggttatcgccgcg

SEQ ID NO: 115595 - DNA, 75 bp, synthetic construct
  source 1..75: mol_type = other DNA
aaaatctgccacaacaacgcctgcgcaggtatcgcgggtcatcagtgacagtgcttccgcgcactcggtggtcat

SEQ ID NO: 115596 - DNA, 75 bp, synthetic construct
  source 1..75: mol_type = other DNA
taaagagtgctatgaagatgagatgttcagcatcagatactttaagaaaggctccgcgcacatcacgttcaggaa

SEQ ID NO: 115597 - DNA, 75 bp, synthetic construct
  source 1..75: mol_type = other DNA
atgcacaggcacgtgatacatggtaccggtcactggaatacgataattttccggaaatcagtgaagagaatatac

SEQ ID NO: 115598 - DNA, 75 bp, synthetic construct
  source 1..75: mol_type = other DNA
tcagcggcaaaccaatccccgacaaccgggaaaacatcaccattcatctggatgaccacatccagtctgttcagg

SEQ ID NO: 115599 - DNA, 75 bp, synthetic construct
  source 1..75: mol_type = other DNA
ctgacggaaagtattggcggtaaaaccgcactggactgggcgatgaaacaggattttcgctgcggttgctggctg

SEQ ID NO: 115600 - DNA, 75 bp, synthetic construct
  source 1..75: mol_type = other DNA
cattctgagcacatttgaacaactacaccagaacaaggatgaggtgtttgagcgaggggtgatcaacgtcttcag

SEQ ID NO: 115601 - DNA, 75 bp, synthetic construct
  source 1..75: mol_type = other DNA
atacgataactttccggaaatcagcaaggcgaatatcctgagtacattcgaacaactgcaccggagtaaggatga

SEQ ID NO: 115602 - DNA, 75 bp, synthetic construct
  source 1..75: mol_type = other DNA
gaatggctccgcgcatatcacgttcagaaaaccggaactggttgaccgactgaatgatattattgcagaacacta

SEQ ID NO: 115603 - DNA, 75 bp, synthetic construct
  source 1..75: mol_type = other DNA
ttgacccgctggatatggtcgacggtatttcgctgccagaactgctggaaaaacgtaccggcaatatgatgcagc

SEQ ID NO: 115604 - DNA, 75 bp, synthetic construct
  source 1..75: mol_type = other DNA
ctgtttgcaggaatcagcggtttttgtggaatggcaaggttgttagataagatgccgtggaaccaacgagcttga

SEQ ID NO: 115605 - DNA, 75 bp, synthetic construct
  source 1..75: mol_type = other DNA
ttcctgcttatccatttgtacagtacagagatgatccgaatattgttgcgttctttgatgcatacaatgaaatcg

SEQ ID NO: 115606 - DNA, 75 bp, synthetic construct
  source 1..75: mol_type = other DNA
caaccgggaaaacatcactattcgtctggatgatcacattcagtctgttcagggtaaagagcgctatgaagacga

SEQ ID NO: 115607 - DNA, 75 bp, synthetic construct
  source 1..75: mol_type = other DNA
ccggaaatcagtaaagcgaacattctgagcacatttgaacaactgcaccagaataaggatgaggtgtttgagcga

SEQ ID NO: 115608 - DNA, 75 bp, synthetic construct
  source 1..75: mol_type = other DNA
gatgcaagaaatgatgtaattgctattactcacaaaaaaattactgacgggaatctatttgattcaaatttctat

SEQ ID NO: 115609 - DNA, 75 bp, synthetic construct
  source 1..75: mol_type = other DNA
gccatgttgatgatgcaatgaaaactgtaatcatgcagaatcgtggagggcaacaggtcattgaccgaattttga

SEQ ID NO: 115610 - DNA, 75 bp, synthetic construct
  source 1..75: mol_type = other DNA
acgatgcgtctcaggttgatgaagccgcactggccgacaccgagtggctgaaacaggcgatcgttgctgtacgta

SEQ ID NO: 115611 - DNA, 75 bp, synthetic construct
  source 1..75: mol_type = other DNA
agccgtcgttgctgcggttgatgcactcggcctgctggaagaaattaaaccgcacgacctgaccgttccttacgg

SEQ ID NO: 115612 - DNA, 75 bp, synthetic construct
  source 1..75: mol_type = other DNA
tcagccacggcaccaccggttctccggacaccattcgcgggatgtcggtcgaaatgctgttcgactttatggccg

SEQ ID NO: 115613 - DNA, 75 bp, synthetic construct
  source 1..75: mol_type = other DNA
tggataatacagtgtgcccttgaaactggattctcattgaaatggcttgttgatgggcaaggacttaataaaagt

SEQ ID NO: 115614 - DNA, 75 bp, synthetic construct
  source 1..75: mol_type = other DNA
tctgaacaccaaagataccaacgtctgggaaggtgattaccagatggtgggtcgccagggtcgcggtaaagcgga

SEQ ID NO: 115615 - DNA, 75 bp, synthetic construct
  source 1..75: mol_type = other DNA
gcgaacgatcggcaacaccgcctgcgggaagtgatgttttatctcaacttgtcggagcaggaaaaagatgcgttt

SEQ ID NO: 115616 - DNA, 75 bp, synthetic construct
  source 1..75: mol_type = other DNA
cgacctggaaaggatgctgcatctcttcagtggcatccccactcccgacaaccgggaaaatatcataattcgtct

SEQ ID NO: 115617 - DNA, 75 bp, synthetic construct
  source 1..75: mol_type = other DNA
gcgacaccagtaaagaaatagttttgggtgcatttcagcagtatctgcgcaatcagaatatgttctgcttttgga

SEQ ID NO: 115618 - DNA, 75 bp, synthetic construct
  source 1..75: mol_type = other DNA
atgacaaaggtccggtttccgttactaagatcgtcgacggtgctgagctgctgatcccgatggctggcctcatca

SEQ ID NO: 115619 - DNA, 75 bp, synthetic construct
  source 1..75: mol_type = other DNA
ctaccggaccgcgtggcggaaagaaagatggcgtagtacagactatggcgaaaagtgccgcccgccaggtcacga

SEQ ID NO: 115620 - DNA, 75 bp, synthetic construct
  source 1..75: mol_type = other DNA
gggctgattactggcgcaacggggacgggtaaaaccgttacgctgcaaaaactggcagagtctctatctgaaatc

SEQ ID NO: 115621 - DNA, 75 bp, synthetic construct
  source 1..75: mol_type = other DNA
ccagggagaactgtctattgcctgcctgccggtcttttcgcaatcttttttaccgcaactcctgcaaccctttct

SEQ ID NO: 115622 - DNA, 75 bp, synthetic construct
  source 1..75: mol_type = other DNA
ttctatcggtgttgtcgttggcgcattttcggctatttcgccaaaacgtgcgccggaaatcgcccagcttggttt

SEQ ID NO: 115623 - DNA, 75 bp, synthetic construct
  source 1..75: mol_type = other DNA
gcccggaactggtcaacggacatacggacgttatctgctcaaccagtatccgccacattctggctgtacgaaaga

SEQ ID NO: 115624 - DNA, 75 bp, synthetic construct
  source 1..75: mol_type = other DNA
cggcatgtttattttcccgtcgattatcgcgctgattgttggttttatcggtctgcgttacggcagcgactcccc

SEQ ID NO: 115625 - DNA, 75 bp, synthetic construct
  source 1..75: mol_type = other DNA
ccgggaaaacatcactattcgtctggatgatcacattcagtctgttcagggtaaagagagctatgaagatgagat

SEQ ID NO: 115626 - DNA, 75 bp, synthetic construct
  source 1..75: mol_type = other DNA
ggtgttgactatctgagtggggagctaacatacagaattaacggggaaaacaaatccgtagcatacaataacaac

SEQ ID NO: 115627 - DNA, 75 bp, synthetic construct
  source 1..75: mol_type = other DNA
aagctttgcagataaaagtcacgacaattgtaacagtgaatctcggcacctcaacagagaacctaaaaacccaaa

SEQ ID NO: 115628 - DNA, 75 bp, synthetic construct
  source 1..75: mol_type = other DNA
ttacttggtcaaagcgtaaactatttctttgtactgggcgtattactggtaagcagtattgccggggtaattgtg

SEQ ID NO: 115629 - DNA, 75 bp, synthetic construct
  source 1..75: mol_type = other DNA
atcacgttcagaaaaccggaactggttgacagactgaatgatattatcgcaaaacactatcctgacatgctggca

SEQ ID NO: 115630 - DNA, 75 bp, synthetic construct
  source 1..75: mol_type = other DNA
cggaagctgtcaacggacatacggacgttatctgctcaaccagtatccggcacgttgtgacggtacgaaatgaag

SEQ ID NO: 115631 - DNA, 75 bp, synthetic construct
  source 1..75: mol_type = other DNA
atatcgatccaagaagatatatttttacggcttgcttaaattacacattcaaaaacagtcttgctataaatgctc

SEQ ID NO: 115632 - DNA, 75 bp, synthetic construct
  source 1..75: mol_type = other DNA
ttcatttttggttcgctggttgggccgaaaatggatgtcctgtttgatggcgcgggctttatcttcgcctttcgc

SEQ ID NO: 115633 - DNA, 75 bp, synthetic construct
  source 1..75: mol_type = other DNA
tcatcatctgcggcatggcgaatcgcatctgcacaaaaatcgagacgacggttacgaatatattgcgcgaccacc

SEQ ID NO: 115634 - DNA, 75 bp, synthetic construct
  source 1..75: mol_type = other DNA
cgcccactatggcattctgctggcgctgtatgcgttgatgcaatttgcctgcgcacctgtgctggggcgcgctgt

SEQ ID NO: 115635 - DNA, 75 bp, synthetic construct
  source 1..75: mol_type = other DNA
cgcgggctttatcttcgcctttcgcgtactcccggcgattatcttcgtcactgcgctcatcagtctgctgtacta

SEQ ID NO: 115636 - DNA, 75 bp, synthetic construct
  source 1..75: mol_type = other DNA
tctgaatgagcacatccggtctgttcagggtaaagagtgctatgaagatgaaatgttcagcatcagatactttaa

SEQ ID NO: 115637 - DNA, 75 bp, synthetic construct
  source 1..75: mol_type = other DNA
cagagatgatccgaatgttgttgcgttctttgatgcatacaatgaaattgctcaggaatacctcgattcactcaa

SEQ ID NO: 115638 - DNA, 75 bp, synthetic construct
  source 1..75: mol_type = other DNA
gctgctgctggcgctgatctgttacctgctgctggaaacccaggcgaagaagctacgggcgaaaaatgaagcggc

SEQ ID NO: 115639 - DNA, 75 bp, synthetic construct
  source 1..75: mol_type = other DNA
gacgccttatccggcctacgagtggcgcggagaattgtaggcctgataagcgtagcgcatcaggcagtctggcgt

SEQ ID NO: 115640 - DNA, 75 bp, synthetic construct
  source 1..75: mol_type = other DNA
tatggcgatggtataggctattttctgaaagatgccattgaccagaaatatgtaaaactcccttttatttattcc

SEQ ID NO: 115641 - DNA, 75 bp, synthetic construct
  source 1..75: mol_type = other DNA
aatgaacatcgcgccgggtaaaccgctggagctgctgctgcgtggttgcagcgcggatgcagaacgtcgcgtaaa

SEQ ID NO: 115642 - DNA, 75 bp, synthetic construct
  source 1..75: mol_type = other DNA
ctcaggaatacctcgattcactcaacaatctggcattgccatgctggacatcggaatcaataaccgggcaattgc

SEQ ID NO: 115643 - DNA, 75 bp, synthetic construct
  source 1..75: mol_type = other DNA
tcgtcaggttaatggcgatgaaccctatatcgaaattatctgcatggattcagaagctgaaattcaaaaagcaga

SEQ ID NO: 115644 - DNA, 75 bp, synthetic construct
  source 1..75: mol_type = other DNA
ccggaaatcagcgaagcgaatatcctgagtacatttgaacagttgcatcagaataagggggaagtgtctgagcga

SEQ ID NO: 115645 - DNA, 75 bp, synthetic construct
  source 1..75: mol_type = other DNA
tatttatccgctttattgattttcgcggtgaactgttattacgagcatcagctattgacggagtagttccatctg

SEQ ID NO: 115646 - DNA, 75 bp, synthetic construct
  source 1..75: mol_type = other DNA
gagcttccgtaccagaccgttcgcgaagccattaacgaagctgaaaaagcgcgccaggctaatagcgatgaaccc

SEQ ID NO: 115647 - DNA, 75 bp, synthetic construct
  source 1..75: mol_type = other DNA
gaagggctccgcgcacatcacgttcaggaaaccagaactggttgatcggctaaatgatattatagccagacacta

SEQ ID NO: 115648 - DNA, 75 bp, synthetic construct
  source 1..75: mol_type = other DNA
atgtgagtgtgactgtatcggacagtgttttttctattcagataccagagtatggcgatggcataggctattttc

SEQ ID NO: 115649 - DNA, 75 bp, synthetic construct
  source 1..75: mol_type = other DNA
cggacgggcgaggtccgtttcagttcacggccagaatcggagaatatgaaacattcgcccgcgttccgtttaatc

SEQ ID NO: 115650 - DNA, 75 bp, synthetic construct
  source 1..75: mol_type = other DNA
gtaaggaagatgtagcgatgaagagtgataccctggaggtaagcgtgagcggaatgtccagagaagaacttgacg

SEQ ID NO: 115651 - DNA, 75 bp, synthetic construct
  source 1..75: mol_type = other DNA
tggctgcgccgtgaagcagcgggtgatatccggcgcgtgaataaaaaggtgaataccgatgacgataagctttaa

SEQ ID NO: 115652 - DNA, 75 bp, synthetic construct
  source 1..75: mol_type = other DNA
atgtttgtgaaacctgttaaagggcggtcagtgcctgaccctgcccgcggtgaccttttgcccaccgaagggcga

SEQ ID NO: 115653 - DNA, 75 bp, synthetic construct
  source 1..75: mol_type = other DNA
tttctattgcttgtgcggtatttgccaaaaatgccgaactgacgcccgtgctggcacagggtgactggtggcata

SEQ ID NO: 115654 - DNA, 75 bp, synthetic construct
  source 1..75: mol_type = other DNA
ctggtgacgccacctgccgcaaaagccgcacttgacctttacttccagcatcgcccgcaaaaacccattattgcc

SEQ ID NO: 115655 - DNA, 75 bp, synthetic construct
  source 1..75: mol_type = other DNA
ggtgcactatggtcatcttaaacccgtggaaacactggcgaatttgattggtctgacgcgggttactatcatccc

SEQ ID NO: 115656 - DNA, 75 bp, synthetic construct
  source 1..75: mol_type = other DNA
gtggaaacgctggcgaatctgattggtctgacgcaagtgactatcatccctaacaatgttcctccgcatcgtcca

SEQ ID NO: 115657 - DNA, 75 bp, synthetic construct
  source 1..75: mol_type = other DNA
tggaggcgtggaaacctaatttttatatatctgctgataataaaaacatcacggataaaataagaaaaggtttga

SEQ ID NO: 115658 - DNA, 75 bp, synthetic construct
  source 1..75: mol_type = other DNA
tctgagcacatttgaacaactgcaccagaacaacgatgaggtgtttgaccggggcgtgatcaacgtcttcatagg

SEQ ID NO: 115659 - DNA, 75 bp, synthetic construct
  source 1..75: mol_type = other DNA
tctgagcacatttgaacaactgcaccagaacaaggatgaggtgtttgagcggggcgtgatcaacgtcttcatagg

SEQ ID NO: 115660 - DNA, 75 bp, synthetic construct
  source 1..75: mol_type = other DNA
tctgagcacatttgaacaactgcaccagaagaacgatgaggtgtttgagcggggcgtgatcaacgtcttcatagg

SEQ ID NO: 115661 - DNA, 75 bp, synthetic construct
  source 1..75: mol_type = other DNA
tctgagcacatttgaacaactgcaccagaacaatgatgaggtgtttgatcggggcgtgatcaacgtcttcatagg

SEQ ID NO: 115662 - DNA, 75 bp, synthetic construct
  source 1..75: mol_type = other DNA
cggtatggatgccccattcattacccgagaacagcgctgttcgttggtcatcgcaaatgatcaataccttgcaga

SEQ ID NO: 115663 - DNA, 75 bp, synthetic construct
  source 1..75: mol_type = other DNA
tctgagcacatttgaacaactgcaccagaaaaacgatgaggtgtttgaacggggcgtgatcaacgtcttcatagg

SEQ ID NO: 115664 - DNA, 75 bp, synthetic construct
  source 1..75: mol_type = other DNA
tctgagcacatttgaacaactgcaccagaacaaagatgaggtgtttgaacggggcgtgatcaacgtcttcatagg

SEQ ID NO: 115665 - DNA, 75 bp, synthetic construct
  source 1..75: mol_type = other DNA
ggtaatcagataattgataaagggatatacatcgttgacggtgctagcagtggcggtgaaccccgggtagttgat

SEQ ID NO: 115666 - DNA, 75 bp, synthetic construct
  source 1..75: mol_type = other DNA
accctgtaaatttggcagtaaaattatcgtcaacaacctggtgaggtgggaccgatgggggtttcatcttatcac

SEQ ID NO: 115667 - DNA, 75 bp, synthetic construct
  source 1..75: mol_type = other DNA
atgaaacggatactcgaaggcattcttgcgatcatcatcgcaatactgtcttgtattatttttattaatatcatt

SEQ ID NO: 115668 - DNA, 75 bp, synthetic construct
  source 1..75: mol_type = other DNA
tcatgcttatgagaaatatatttatgaaaattttaaaaatggattgatattaagacgaaagaacttgaggagttc

SEQ ID NO: 115669 - DNA, 75 bp, synthetic construct
  source 1..75: mol_type = other DNA
atgaagatgagatgttcagcatcaaatattttaagaagggctccgcacacatcacgttcagaaaagagcaggttg

SEQ ID NO: 115670 - DNA, 75 bp, synthetic construct
  source 1..75: mol_type = other DNA
ccggaaatcagtgaagcgaacattctgagcacatttgaacaactacaccagaataaggatgaggtgtttgagcga

SEQ ID NO: 115671 - DNA, 75 bp, synthetic construct
  source 1..75: mol_type = other DNA
tgagcacatttgaacaactgcaccaggacaaagatgaggtgtttgagcggggggtgatcaatgttttcaggggac

SEQ ID NO: 115672 - DNA, 75 bp, synthetic construct
  source 1..75: mol_type = other DNA
gtattaccggcaattatcttcgtcaccgcactggtgagtattctctactacatcggtgtgatggggattttaatt

SEQ ID NO: 115673 - DNA, 75 bp, synthetic construct
  source 1..75: mol_type = other DNA
agcagccatgggaaaccgtctcgaacgagatgttaaccaatatgtccgccgacattggcaaattggtgagcggta

SEQ ID NO: 115674 - DNA, 75 bp, synthetic construct
  source 1..75: mol_type = other DNA
agcgacgtcactgtcagcaatatcgttgcaacaatagcgagcgataacgggctaaaacctcgcgtatcaaagcgg

SEQ ID NO: 115675 - DNA, 75 bp, synthetic construct
  source 1..75: mol_type = other DNA
cagggaaaacataactattcatctggacgaacatatccggtctcttcagggaaaagaatgctatgaagatgagat

SEQ ID NO: 115676 - DNA, 75 bp, synthetic construct
  source 1..75: mol_type = other DNA
catctctgaagccgatgttaaatccggaaaagttcaggtgattgctccagctggctttatggacgaagccatcag

SEQ ID NO: 115677 - DNA, 75 bp, synthetic construct
  source 1..75: mol_type = other DNA
ttaagacgaaagaacttgaggagttcaatggtaatgattcaataaacgttaattataatgagatagaaaacattg

SEQ ID NO: 115678 - DNA, 75 bp, synthetic construct
  source 1..75: mol_type = other DNA
atccggagccgacgtatctgatcaaataccacgatacggcaacagggcagattaaagaattgcgtacaggcagtg

SEQ ID NO: 115679 - DNA, 75 bp, synthetic construct
  source 1..75: mol_type = other DNA
taactcgtcgtgataactccagctggggctattcgagaaatggacaaagcggtgatagtggcggcggtggcgaaa

SEQ ID NO: 115680 - DNA, 75 bp, synthetic construct
  source 1..75: mol_type = other DNA
tctggtttcttgatcccgaacgccaaatacaccaccaccaactactttgagttctacctgccatattactggaac

SEQ ID NO: 115681 - DNA, 75 bp, synthetic construct
  source 1..75: mol_type = other DNA
tactaccagaatgatgttggtccgtttgatacgcgtatttacggccaggcagtgcactttgttaacaccagagac

SEQ ID NO: 115682 - DNA, 75 bp, synthetic construct
  source 1..75: mol_type = other DNA
gtcaggatatctccaacatcacctttatcgaaggtgataccgggattattgtcatcgacccgctggtgacgccac

SEQ ID NO: 115683 - DNA, 75 bp, synthetic construct
  source 1..75: mol_type = other DNA
aagcgatgacactcataaccacagcgttctgtttaaccgcgttcgcgacctgacggcagagatctggtttggccg

SEQ ID NO: 115684 - DNA, 75 bp, synthetic construct
  source 1..75: mol_type = other DNA
ggtacagggcgatactaacgacttacccgtgacgattaatgctgaccacgcaaaggggaattaccccgatgacgc

SEQ ID NO: 115685 - DNA, 75 bp, synthetic construct
  source 1..75: mol_type = other DNA
tgaaaacgtgctggcgggtaatatcatgagtcgccgtgcattttactcttacggcctgctactcccgcataatgc

SEQ ID NO: 115686 - DNA, 75 bp, synthetic construct
  source 1..75: mol_type = other DNA
gccttcggataaagtctatgaagatgaacatccagaagatagcaattcacgccgttggttgttctactggcaaca

SEQ ID NO: 115687 - DNA, 75 bp, synthetic construct
  source 1..75: mol_type = other DNA
tatctctgaagccgatgtgaaatccggtaaagtgcaggttatcgcccctgctggctttatggacgaagccatcag

SEQ ID NO: 115688 - DNA, 75 bp, synthetic construct
  source 1..75: mol_type = other DNA
agaatgtacttgggcagttgggaaatcgtgttcagcacgcccttcgcgcttttacgccgaaagatcaaaaagcgg

SEQ ID NO: 115689 - DNA, 75 bp, synthetic construct
  source 1..75: mol_type = other DNA
ccccaaccctgcatttgatacggaaaaggcgattcaggaactaggaaccggcgaagcgttgatctcttttctgga

SEQ ID NO: 115690 - DNA, 75 bp, synthetic construct
  source 1..75: mol_type = other DNA
gaggcgttgcggcacatcaggggctattaaagttcccgctggtggtactttctgtggcgcttggcggcatgattg

SEQ ID NO: 115691 - DNA, 75 bp, synthetic construct
  source 1..75: mol_type = other DNA
gccgtgaagatctgcacgccgtgctgaccggacaggcaaaaatggccgatctggtgaaagcgaagaaagccaaaa

SEQ ID NO: 115692 - DNA, 75 bp, synthetic construct
  source 1..75: mol_type = other DNA
tggatgttcatgatgtgggtgtttatggtcaggatcgctcgcgcattcttgaaccgggtatggctttgaccgtag

SEQ ID NO: 115693 - DNA, 75 bp, synthetic construct
  source 1..75: mol_type = other DNA
caggtgattgcgccgtggttgcacaatctcgaccagcatttgaagcactgggtctggttgattctggtcgtggtt

SEQ ID NO: 115694 - DNA, 75 bp, synthetic construct
  source 1..75: mol_type = other DNA
cgaacaagcaaggtgattaccgctggtcggcagaactgctgaaacaggtgattgccgccaacccgggtgaccagg

SEQ ID NO: 115695 - DNA, 75 bp, synthetic construct
  source 1..75: mol_type = other DNA
aaaagcgcgctgacgactttccagaccgccaatactgcattgtctaaagccgatcttttttccgccaccagcacc

SEQ ID NO: 115696 - DNA, 75 bp, synthetic construct
  source 1..75: mol_type = other DNA
aaaaatcagcttctcctcgacaaccgcctcttcagaggggaagcagacggaagaaatgcttaaatcaaactcacc

SEQ ID NO: 115697 - DNA, 75 bp, synthetic construct
  source 1..75: mol_type = other DNA
cgctcactctacgaacttgccagcgtattagacatacttgcccctaggaatgagcggggaatacagcaccgtttc

SEQ ID NO: 115698 - DNA, 75 bp, synthetic construct
  source 1..75: mol_type = other DNA
cgaccaccatcggcagcaacctgaccagttggctttcgacaacgggcattattaaagccgctaccgatggcgtta

SEQ ID NO: 115699 - DNA, 75 bp, synthetic construct
  source 1..75: mol_type = other DNA
aaagggcaaccaactggaacgttttatctgcatggcattatttgtctggtcggtatggatgccccattcattacc

SEQ ID NO: 115700 - DNA, 75 bp, synthetic construct
  source 1..75: mol_type = other DNA
atgcaggcagatcgcctggctgacctggaaagaatgttgcatctgctcagcggtaaaccgatccccgacaaccga

SEQ ID NO: 115701 - DNA, 75 bp, synthetic construct
  source 1..75: mol_type = other DNA
tgaaaacagcgcggttcgttggtcatcgcaaatgatcaataccttgcagatccagtttcatcgccttattaagca

SEQ ID NO: 115702 - DNA, 75 bp, synthetic construct
  source 1..75: mol_type = other DNA
actttatcaactacttaacggtctggatgtggtttaccatgcccagggcgaatatgcatatgctgatgaaatcgt

SEQ ID NO: 115703 - DNA, 75 bp, synthetic construct
  source 1..75: mol_type = other DNA
tcggcagcggtgaaaacggctgcattctgcactacaccgaaaacgagtgtgaactgcgtgacggtgacctggtgt

SEQ ID NO: 115704 - DNA, 75 bp, synthetic construct
  source 1..75: mol_type = other DNA
ggcactctggatgctaaaaccgtggcgattatttctttcgcgttgtgcggtttcgctaactttggttctatcggg

SEQ ID NO: 115705 - DNA, 75 bp, synthetic construct
  source 1..75: mol_type = other DNA
cgggtggattccggtcttaccccacttaacagctatgaaaaccgtgtctatcaatttcaggacgaagatcgtcga

SEQ ID NO: 115706 - DNA, 75 bp, synthetic construct
  source 1..75: mol_type = other DNA
agccacgcaagctgtttgaggacgctacactgataccttccgggttgaaagcggcattcctgaaagcgacagatg

SEQ ID NO: 115707 - DNA, 75 bp, synthetic construct
  source 1..75: mol_type = other DNA
tattatcttgcctggctaatgcggcgttgggctgatcccgcgttcccgaaaaatttcccgtggttaaccggggaa

SEQ ID NO: 115708 - DNA, 75 bp, synthetic construct
  source 1..75: mol_type = other DNA
gataatatcgatcagatggaagcggttgggcgttatttagggcgtatgcaccagacggggcgcaaacagcttttt

SEQ ID NO: 115709 - DNA, 75 bp, synthetic construct
  source 1..75: mol_type = other DNA
tctggctcattgctctgtttgtggtgctgattttctggctaccctatagccagccgctgttcggtgctttatttc

SEQ ID NO: 115710 - DNA, 75 bp, synthetic construct
  source 1..75: mol_type = other DNA
ctggatggtgagcatgacgaagaaaccggcgaaaacctgcgtgatatggctaagtccgtttctgcatgggcttca

SEQ ID NO: 115711 - DNA, 75 bp, synthetic construct
  source 1..75: mol_type = other DNA
gcgcgtcacgcgtctgaaagaagatgtgctgaaagaagccgtcaatctgatccagtcgctcgatccgcgccccgg

SEQ ID NO: 115712 - DNA, 75 bp, synthetic construct
  source 1..75: mol_type = other DNA
gtcgatgccgttgatgacaccggttatctgactgtcccgctggaagatattctcgaaagtatgggcgatgaagag

SEQ ID NO: 115713 - DNA, 75 bp, synthetic construct
  source 1..75: mol_type = other DNA
aaacttacggctgcggttccgctatcgcttccagctccctggtcaccgaatgggtgaaagggaagtctctcgacg

SEQ ID NO: 115714 - DNA, 75 bp, synthetic construct
  source 1..75: mol_type = other DNA
atgacaaagcccaaatcaccggggccggaagccctttatcttggtcgccagaacgaacacacgacgcagcgccag

SEQ ID NO: 115715 - DNA, 75 bp, synthetic construct
  source 1..75: mol_type = other DNA
agaaggagaagttagaagcactggaaaatgttatttcaaaaaacaatcggggtgtttttaaacgaattgatgaga

SEQ ID NO: 115716 - DNA, 75 bp, synthetic construct
  source 1..75: mol_type = other DNA
gctggctgctgcaacgccacgtcatcctctacagtccggcagagatgctgacgctgccgaaggaggagaaacggc

SEQ ID NO: 115717 - DNA, 75 bp, synthetic construct
  source 1..75: mol_type = other DNA
ctgttagccaatcacgacttccgcactttaatgcgcgtcacgcgtctgaaagaagatgtgctgaaagaagccgtc

SEQ ID NO: 115718 - DNA, 75 bp, synthetic construct
  source 1..75: mol_type = other DNA
cagggcaagggaaagaaggatcgggtcgttccggtggggcatgtggcactggagtgggtaacgcgctatctgcgc

SEQ ID NO: 115719 - DNA, 75 bp, synthetic construct
  source 1..75: mol_type = other DNA
gcgctgggatattacgtcagcgaggacggctattgcaccgccagatattccggcaggcttcgtggctgttttcaa

SEQ ID NO: 115720 - DNA, 75 bp, synthetic construct
  source 1..75: mol_type = other DNA
ctttaatgcgcgtcacgcgtctgaaagaagatgtgctgaaagaagccgtcaatctgatccagtcgctcgatccac

SEQ ID NO: 115721 - DNA, 75 bp, synthetic construct
  source 1..75: mol_type = other DNA
gtgttagtacgtaagcataacggtcgctggacggttgaactcaacagtgacagcattccgcgtctgcaaatcaac

SEQ ID NO: 115722 - DNA, 75 bp, synthetic construct
  source 1..75: mol_type = other DNA
ccagggcggactctggcgggcgtatgaaaaaacgcacgggatgcggggatgggaatgcctggttgacgggtggcg

SEQ ID NO: 115723 - DNA, 75 bp, synthetic construct
  source 1..75: mol_type = other DNA
tgtcttgttatttcaaattatgcgccacttactgaaactaacagtgtacttaaattagtcaagtttgatgcttgc

SEQ ID NO: 115724 - DNA, 75 bp, synthetic construct
  source 1..75: mol_type = other DNA
acgctgccgaaggaggagaaacggcttccggcgcaggtgttcagcgagcaggagacgcggcaggtgctgggcagt

SEQ ID NO: 115725 - DNA, 75 bp, synthetic construct
  source 1..75: mol_type = other DNA
ttcgtgcactgggcgaagaattcgccacggtgctggcggatttacagcacacatttgaggagaagatggccgcgc

SEQ ID NO: 115726 - DNA, 75 bp, synthetic construct
  source 1..75: mol_type = other DNA
gcgcagttgtcactaaaaatattcctgacaacgttattgtcggcggcaatccggccagaatcattaaaaagttgc

SEQ ID NO: 115727 - DNA, 75 bp, synthetic construct
  source 1..75: mol_type = other DNA
actgccgtttctggcgctgggctggtatctggcggcgctagtcgtcattttgttgaacaggctgcttgatggtct

SEQ ID NO: 115728 - DNA, 75 bp, synthetic construct
  source 1..75: mol_type = other DNA
ttgctggtgagttgtatcgctcagcagatgagactttatctcgtgatcgcctgcgcgctcatcagcttattcatc

SEQ ID NO: 115729 - DNA, 75 bp, synthetic construct
  source 1..75: mol_type = other DNA
acagataagcctggcggtgctggaagcgtaccagcgccatcttcgcagctaccgcaaggccgacggtaacacgct

SEQ ID NO: 115730 - DNA, 75 bp, synthetic construct
  source 1..75: mol_type = other DNA
gctactccaacattcaggctaaacattattgaggatggagatgataatgagatttatgaattgctggtaatgact

SEQ ID NO: 115731 - DNA, 75 bp, synthetic construct
  source 1..75: mol_type = other DNA
actttgtcatcagtctgagcctgccattggcaggctctggtgtccttttacgctaccatgctaataatcagcaca

SEQ ID NO: 115732 - DNA, 75 bp, synthetic construct
  source 1..75: mol_type = other DNA
tggtttgcgtggatatttggcgcgctgtgctggatgacgacctttacgcgggtgtggagtggatatctgacgctg

SEQ ID NO: 115733 - DNA, 75 bp, synthetic construct
  source 1..75: mol_type = other DNA
tataaagatttctatgatagcttatcgaatgattggatagcacatgtagaaagctatttggaacatcatggtgat

SEQ ID NO: 115734 - DNA, 75 bp, synthetic construct
  source 1..75: mol_type = other DNA
aggcgctggagctgctggtgaaagcgtgccccgcaggtctgtacaagaagcaggatgacggcagcgtgcgtttcg

SEQ ID NO: 115735 - DNA, 75 bp, synthetic construct
  source 1..75: mol_type = other DNA
tgacagagatacattaaatttagaaattaaacgaaataaccttggattcagtagaaagcatcgagagataaaaca

SEQ ID NO: 115736 - DNA, 75 bp, synthetic construct
  source 1..75: mol_type = other DNA
tagagttcaatcagaatacccttcaccagatatggatatcgattcccgtgatggttttcgcctttagccatacgc

SEQ ID NO: 115737 - DNA, 75 bp, synthetic construct
  source 1..75: mol_type = other DNA
tgcgtgaggcggcacagaacgcgaaagatttaggtgggattaagaattacaagcgaggcgagcaagctgttgccg

SEQ ID NO: 115738 - DNA, 75 bp, synthetic construct
  source 1..75: mol_type = other DNA
ggaacaaccaccgttcgatttaaatcacatgggtacaggcagtgataagtcggatgcgctcggcgtgccctatta

SEQ ID NO: 115739 - DNA, 75 bp, synthetic construct
  source 1..75: mol_type = other DNA
gatattcataatctggcggagctgcggggaattacgctggcggaagatggctcactacgtatcggctctgcaacg

SEQ ID NO: 115740 - DNA, 75 bp, synthetic construct
  source 1..75: mol_type = other DNA
gcctgcgttaatgcaggatatttcccgcgatttatgggatcagggtgataaacctgttccaccgctgcgccagtt

SEQ ID NO: 115741 - DNA, 75 bp, synthetic construct
  source 1..75: mol_type = other DNA
gtgtttgtccgctatttctttgcatggcctgtgttagcggtcgatgacgatggcgaaacgatggttgtcactgca

SEQ ID NO: 115742 - DNA, 75 bp, synthetic construct
  source 1..75: mol_type = other DNA
taagtcggtgacggcctgggcatcacgctggcgtatccggcagttccagcagattggcggggcgcctgtcaccgt

SEQ ID NO: 115743 - DNA, 75 bp, synthetic construct
  source 1..75: mol_type = other DNA
tttactatatgggggaagaaggctggctggaaggcgttgaatccagcgtgactgtcttccgtaacgatgtgaaag

SEQ ID NO: 115744 - DNA, 75 bp, synthetic construct
  source 1..75: mol_type = other DNA
tggaagactggtcattctatgtttctggtcactataccgggcagaaacgagccgacagcgcgacggctaaaacac

SEQ ID NO: 115745 - DNA, 75 bp, synthetic construct
  source 1..75: mol_type = other DNA
ctgtctacgtatctcattccagcccttaaaccctggcgctccatcggaaatctaattacgttgatcgtgggtatc

SEQ ID NO: 115746 - DNA, 75 bp, synthetic construct
  source 1..75: mol_type = other DNA
agatgaatggcggatcttcgagccgctggcgctgacgaccggcgtgcgtatggacgatcacgaaacctacggtga

SEQ ID NO: 115747 - DNA, 75 bp, synthetic construct
  source 1..75: mol_type = other DNA
tttttgtggaaggcgagactgagcttgaagttttcggcaatatgaagctatcagaacattttactcacctcaaac

SEQ ID NO: 115748 - DNA, 75 bp, synthetic construct
  source 1..75: mol_type = other DNA
cctatcgatcccgaaaaagggtcggctaccggctatatcgctaaatacatctccaaaaacatcgacggctatgcg

SEQ ID NO: 115749 - DNA, 75 bp, synthetic construct
  source 1..75: mol_type = other DNA
gtgcctgcccgggaagtgatccacgaccggtttaactgtttttttcatccgcttgtggggctgccgccggtgtat

SEQ ID NO: 115750 - DNA, 75 bp, synthetic construct
  source 1..75: mol_type = other DNA
gaggcagtgagccatattcctgttccgcgtgatggtcgtgactacgatccggatgttctgcagaaggcggtgaat

SEQ ID NO: 115751 - DNA, 75 bp, synthetic construct
  source 1..75: mol_type = other DNA
tccgatgcttgaacagatggtgaaggaggctgtaagcatatccctgttccgcgtgatggtcgtgactacgatccg

SEQ ID NO: 115752 - DNA, 75 bp, synthetic construct
  source 1..75: mol_type = other DNA
tgactacgatccggaagtactgcagaaggcggtgaatgatgcggtcgcaaatattccgcagccggcggacggtaa

SEQ ID NO: 115753 - DNA, 75 bp, synthetic construct
  source 1..75: mol_type = other DNA
ggtccggcagagcagtggccagtgtacggaaaaaacattttccctgccggtgatgctctaccgcggtgtgttcag

SEQ ID NO: 115754 - DNA, 75 bp, synthetic construct
  source 1..75: mol_type = other DNA
atgctggaacctagccaacaccacgccgtcaatgcctggcggcgtgaaacctttgcgcctggcagcccgtcagat

SEQ ID NO: 115755 - DNA, 75 bp, synthetic construct
  source 1..75: mol_type = other DNA
atgaaaccacttttatccgcaatgataaccgcgcttattgtcttttctgcgcaaggctttgcggaacaaaccacg

SEQ ID NO: 115756 - DNA, 75 bp, synthetic construct
  source 1..75: mol_type = other DNA
gcatcaggcattactgcgttacttcgatacagctgcacgtccgcagatgaaagagatcctggacggtgaggccag

SEQ ID NO: 115757 - DNA, 75 bp, synthetic construct
  source 1..75: mol_type = other DNA
agaacatgcgcgatatggccaaatccgtttctgcctgggcttcacgctggcgtatccgccagtttcaacagattg

SEQ ID NO: 115758 - DNA, 75 bp, synthetic construct
  source 1..75: mol_type = other DNA
tgaagaaaaactggcttctcagtctgtggtattacagaagtgcgtgacgggtgatgatgtgcgtccgatgcttga

SEQ ID NO: 115759 - DNA, 75 bp, synthetic construct
  source 1..75: mol_type = other DNA
atgaggatttgcagcaaccaaccctgtattgttttattgactgaaaaagatgtctggctaagagtgaatgggaaa

SEQ ID NO: 115760 - DNA, 75 bp, synthetic construct
  source 1..75: mol_type = other DNA
gtgttctcgccagagagctggttgccagtggcgatgtatacgactctggttacgggttattcccgtctgaacagg

SEQ ID NO: 115761 - DNA, 75 bp, synthetic construct
  source 1..75: mol_type = other DNA
tggtttgcgtgggtatttggtgcgctgtgttggatgacgacctttacgcgggtgtggagtgggtatctgacgctg

SEQ ID NO: 115762 - DNA, 75 bp, synthetic construct
  source 1..75: mol_type = other DNA
tggatgcctccaagatttttattaatgatgaacataatgggtggtatgttcatggaattcctggtgtaggtgatg

SEQ ID NO: 115763 - DNA, 75 bp, synthetic construct
  source 1..75: mol_type = other DNA
ggcagttttccgtcaccgccagtgattacgattatcatcagacgatagccggtgatgttgaggattatcagtaca

SEQ ID NO: 115764 - DNA, 75 bp, synthetic construct
  source 1..75: mol_type = other DNA
cggtcatggattttagtttccttgatgcggaatccgggttgattggcgatagccttattgttgatattattcttg

SEQ ID NO: 115765 - DNA, 75 bp, synthetic construct
  source 1..75: mol_type = other DNA
tgccagatcagtttacacgaacagtcatgatcgagattgatttggcaagtggcacagacgaagagattgcagagt

SEQ ID NO: 115766 - DNA, 75 bp, synthetic construct
  source 1..75: mol_type = other DNA
gcgtaaagtgcgtggcatagaaccagatgtaacggaagctattcgctttggttatggaacgattaagaaaatcat

SEQ ID NO: 115767 - DNA, 75 bp, synthetic construct
  source 1..75: mol_type = other DNA
tatcagaggttgcatcaattgttcaattgcaagctaatcaatcagtgaaactcgttgagcaagctcttggaaaaa

SEQ ID NO: 115768 - DNA, 75 bp, synthetic construct
  source 1..75: mol_type = other DNA
gaagcgaaggccgtaagcctctacatcgacaggatcttcaatggaaatccctttctcatcacagaaaagcattta

SEQ ID NO: 115769 - DNA, 75 bp, synthetic construct
  source 1..75: mol_type = other DNA
cgcagggggcaacaggtcttgagttatacgaggtgtataacaacggatatccaacagcgtatggaaatatcattc

SEQ ID NO: 115770 - DNA, 75 bp, synthetic construct
  source 1..75: mol_type = other DNA
ctgagacggcagcggaacagagcgcctcagctgcggcaggttcaaaaacagcggctgcattatctgccagtgccg

SEQ ID NO: 115771 - DNA, 75 bp, synthetic construct
  source 1..75: mol_type = other DNA
tacgggctctcaatttacttatggtgttcctgtaaactttaacgcttccagaacctggtctggtgccacaagcac

SEQ ID NO: 115772 - DNA, 75 bp, synthetic construct
  source 1..75: mol_type = other DNA
atgacatggttcggcgtggcgtgcgagctgcaccgtgactggcgtaatgatattgaaggactggcgacgttgttc

SEQ ID NO: 115773 - DNA, 75 bp, synthetic construct
  source 1..75: mol_type = other DNA
taaccatgtccagcagcgatattgctgagctggtggaatcacgacatgaccatgttaaacggtccattgaacgcc

SEQ ID NO: 115774 - DNA, 75 bp, synthetic construct
  source 1..75: mol_type = other DNA
tgatccggcgcgtgacgaacccatcttattacgtcctggagatagcgtgcgctttgtgccgcagaaggagggagt

SEQ ID NO: 115775 - DNA, 75 bp, synthetic construct
  source 1..75: mol_type = other DNA
aaataaggaacgtaatccacaatgctggctatatgatgattactcagatagctttatatgttgcaccattattta

SEQ ID NO: 115776 - DNA, 75 bp, synthetic construct
  source 1..75: mol_type = other DNA
tcagacggtagctggtgcggttgaggattaccagtacagtggcgagagtcagaatctgggcatgcagctgagccg

SEQ ID NO: 115777 - DNA, 75 bp, synthetic construct
  source 1..75: mol_type = other DNA
ccgaagtctgaaccgatcaaaggcgatctcctgaactacgatgaagtgatggagcgcatggatcacttcatggac

SEQ ID NO: 115778 - DNA, 75 bp, synthetic construct
  source 1..75: mol_type = other DNA
ctacaacggcggcatttataagaacgcctggtgggtaggcgcggcaaattgcccaggcgatgcgaaagaaaacga

SEQ ID NO: 115779 - DNA, 75 bp, synthetic construct
  source 1..75: mol_type = other DNA
gagtctacccgcaacaacggtaaaccggcgctgttccgcctgggcgatgcttctctttccgaagggctggagcaa

SEQ ID NO: 115780 - DNA, 75 bp, synthetic construct
  source 1..75: mol_type = other DNA
cgaaagcatggtccgcatccactgtgtacgtgaaaggtgatcgcgttgttgttgatgggcaggcttatgaagcgc

SEQ ID NO: 115781 - DNA, 75 bp, synthetic construct
  source 1..75: mol_type = other DNA
cgcctggatcaacacatccggcgatacatatgatatttacgttgagattggcaattatgcgacgagtgtaaatat

SEQ ID NO: 115782 - DNA, 75 bp, synthetic construct
  source 1..75: mol_type = other DNA
cggcgctgaatgccaaacgtgcagctatttatcaaatgcgagcaaggcaagaagtgtgtgatgaaacactggcta

SEQ ID NO: 115783 - DNA, 75 bp, synthetic construct
  source 1..75: mol_type = other DNA
ggcgtgaacgacgttcagggtgaagttttctatctctctgatgctcgtctggtcatgcaggatgcgcaaactcgc

SEQ ID NO: 115784 - DNA, 75 bp, synthetic construct
  source 1..75: mol_type = other DNA
gtgctgcaatgtcctgtcggtcgtacctccaccttcctggatgtgtacatcgaacgtgacctgaaagctggcaag

SEQ ID NO: 115785 - DNA, 75 bp, synthetic construct
  source 1..75: mol_type = other DNA
tagcagcgacgagctgaaaaatgcgccagagtttaatccagcgacgctttatgccagcgatacgctgattcgctt

SEQ ID NO: 115786 - DNA, 75 bp, synthetic construct
  source 1..75: mol_type = other DNA
ggatattgcgacagtccatcatttaccgcccacactgatggctcaatggtattttggcgcttctggcagtaaatt

SEQ ID NO: 115787 - DNA, 75 bp, synthetic construct
  source 1..75: mol_type = other DNA
agctcaggtcaaaatacctggggtgtacaaggctcagtaggtatgtctacgggggcgttagctaataccagtaca

SEQ ID NO: 115788 - DNA, 75 bp, synthetic construct
  source 1..75: mol_type = other DNA
cgcgtaggtacgccgaagaaagcgtggccgaaacacgtttatgcaccgtatgttgactttacgctgaatacgatc

SEQ ID NO: 115789 - DNA, 75 bp, synthetic construct
  source 1..75: mol_type = other DNA
tgatgcgtccggacttcaacaacgatgactacgctattgcttgctgcgtaagcccgatgatcgttggtaaacaaa

SEQ ID NO: 115790 - DNA, 75 bp, synthetic construct
  source 1..75: mol_type = other DNA
cggtgactccattaccgttgatttcaatcatccgctggccgggcagaccattcattttgatattgaagtgctgga

SEQ ID NO: 115791 - DNA, 75 bp, synthetic construct
  source 1..75: mol_type = other DNA
ccgcgtgatggtcgtgactacgatccggaagtactgcagaaggcggtgaatgatgcggtcgcaaatattccgcag

SEQ ID NO: 115792 - DNA, 75 bp, synthetic construct
  source 1..75: mol_type = other DNA
ttaacgcctgggataacgaagattttgtaaaagctgtcaaagcgacaggtaaaaaacagttaattattgccggtg

SEQ ID NO: 115793 - DNA, 75 bp, synthetic construct
  source 1..75: mol_type = other DNA
ggctcgctgtggcactgcaacagtatgaccggtgataaacccggagaagctcattcatcagcctggaccctggct

SEQ ID NO: 115794 - DNA, 75 bp, synthetic construct
  source 1..75: mol_type = other DNA
ggaacgcgcgggatgctggcaaccgatctcttttccacgctacagcgtattgttaacccggaagtgactgataaa

SEQ ID NO: 115795 - DNA, 75 bp, synthetic construct
  source 1..75: mol_type = other DNA
cgaatccattagccagttaatcgaccacgctaattcccatcctgcgccgattgcggcggttgatatcccttccgg

SEQ ID NO: 115796 - DNA, 75 bp, synthetic construct
  source 1..75: mol_type = other DNA
gaccggtgataaacccggagaagctcattcatcaggctgggccctggctgcaaaacgtgggcgggatgcaggagg

SEQ ID NO: 115797 - DNA, 75 bp, synthetic construct
  source 1..75: mol_type = other DNA
gcatgggatcgcatgtcgcaggcaggagctcagttgatgacgtggttcggcgtggcttgcgagctgcaccgcgac

SEQ ID NO: 115798 - DNA, 75 bp, synthetic construct
  source 1..75: mol_type = other DNA
agcgagtaagccttccggcgttaccgatggtgttgtttatacgatgtatagctcacaccagaaacctacaccatc

SEQ ID NO: 115799 - DNA, 75 bp, synthetic construct
  source 1..75: mol_type = other DNA
atacgcactctgttgcgattggctcacatggacacaccatcaccgttaacgctgctggtaacgcggaaaacaccg

SEQ ID NO: 115800 - DNA, 75 bp, synthetic construct
  source 1..75: mol_type = other DNA
gcagattcgttggggcttacactctatgaactgatgcttcgcgctggtgaagccgcatttcaggtgtgtcgttcg

SEQ ID NO: 115801 - DNA, 75 bp, synthetic construct
  source 1..75: mol_type = other DNA
tcctttcacgcggtgttttcttgcatttcgctgatatcccaggatatcgccaaaatgcgactgcgcctgatgcag

SEQ ID NO: 115802 - DNA, 75 bp, synthetic construct
  source 1..75: mol_type = other DNA
ggatttggggacgaaaaccacatcgtcgtttgattacggcactaaatccacgaataacaccggagcgcacaccca

SEQ ID NO: 115803 - DNA, 75 bp, synthetic construct
  source 1..75: mol_type = other DNA
acgttgttctctaaccacattcctgattatcgtaatttgatgaccagttatgacacgttaacgaagcagaaataa

SEQ ID NO: 115804 - DNA, 75 bp, synthetic construct
  source 1..75: mol_type = other DNA
ggttttgcaattattatggcggctgtgagtgcgcttgttaatgataagtttattgagcaggtcaataaacttatt

SEQ ID NO: 115805 - DNA, 75 bp, synthetic construct
  source 1..75: mol_type = other DNA
tctgacaccctgcttgcccgctatgccaaaaacatgaccgcagacgcccgtaacggcaggcttgacccggtactg

SEQ ID NO: 115806 - DNA, 75 bp, synthetic construct
  source 1..75: mol_type = other DNA
aacgccgcttcgacgggaaagaagtaaccaacgggcaaatcctgatatttggactgacaggagggcttatccctt

SEQ ID NO: 115807 - DNA, 75 bp, synthetic construct
  source 1..75: mol_type = other DNA
ggatgtatgatactttcccgtctaagaagaagatctgtgaactaaataaagaattgaggaagattaagattcctg

SEQ ID NO: 115808 - DNA, 75 bp, synthetic construct
  source 1..75: mol_type = other DNA
caaaaagtgctgccgctgcagagtccttaaaaagcgcggcggccaccagtgccgctgcggcaaaaacgtcagaaa

SEQ ID NO: 115809 - DNA, 75 bp, synthetic construct
  source 1..75: mol_type = other DNA
atccgtaacctcaaatcatgcattcagccaggcacgtttcacggcgaaaggcgtacgctggattggtggactgtg

SEQ ID NO: 115810 - DNA, 75 bp, synthetic construct
  source 1..75: mol_type = other DNA
aaccgccgcgcatgtggctgcttttgccagaagggcaacggatacatatgccgatgcggatgggggcgttccctg

SEQ ID NO: 115811 - DNA, 75 bp, synthetic construct
  source 1..75: mol_type = other DNA
atcaaaaagcgcggcagctaccagcgccagtgccgcgaaaacgtcagaaacgaatgccgcagcgtcacaacaatc

SEQ ID NO: 115812 - DNA, 75 bp, synthetic construct
  source 1..75: mol_type = other DNA
tggtctgttctaccgttcttcaagagacggttatggttttgaggaagactgggcagaagtttatacctcgaaaaa

SEQ ID NO: 115813 - DNA, 75 bp, synthetic construct
  source 1..75: mol_type = other DNA
gccaacatattcagcgagtaagccttccagcgttaccggtggtgttgtttatacgatgtatagctcacatcagaa

SEQ ID NO: 115814 - DNA, 75 bp, synthetic construct
  source 1..75: mol_type = other DNA
tttgttctcaccggtatctacatctggcgggcgaacggcgaattcgaccgtcttaataatgaagtcctgcatgag

SEQ ID NO: 115815 - DNA, 75 bp, synthetic construct
  source 1..75: mol_type = other DNA
agcaaggcaacgcatggtttttcatccccagcgccattctgcttggcgcgcttcatggactggagcccgggcact

SEQ ID NO: 115816 - DNA, 75 bp, synthetic construct
  source 1..75: mol_type = other DNA
ggatgtatgatactttcccgtctaagaaaaagatctgtgaactaaataaagaattgagaaagattaagattcctg

SEQ ID NO: 115817 - DNA, 75 bp, synthetic construct
  source 1..75: mol_type = other DNA
ttatattcgagccagacgttcgcatattgtgcttaaggaagatcacaaagcgatgctgaaattatgggaaaacag

SEQ ID NO: 115818 - DNA, 75 bp, synthetic construct
  source 1..75: mol_type = other DNA
atgccgacgtattatcgtttaaatttggcgttgcttacggcaacgtttttggtcatcgcgggtttacccattcag

SEQ ID NO: 115819 - DNA, 75 bp, synthetic construct
  source 1..75: mol_type = other DNA
atgaagcgtaagattattgtcgcttgcggaggcgcggttgcgacttctacgatggcggcggaagagattaaagag

SEQ ID NO: 115820 - DNA, 75 bp, synthetic construct
  source 1..75: mol_type = other DNA
catccgctggcggtaaaaaaggtattaacgccggatgattttcagggtgagaactacatcagcctttcccgtact

SEQ ID NO: 115821 - DNA, 75 bp, synthetic construct
  source 1..75: mol_type = other DNA
atttttgtttcaatattgccaggtgttttcgaatttattcgccacaaacgcgctgcggcacgcgccgcaaaataa

SEQ ID NO: 115822 - DNA, 75 bp, synthetic construct
  source 1..75: mol_type = other DNA
ggttaacccgctcaccgcactggattatgcggcaagcggtttagtggtgcggcggttcagtattgcggttccgtt

SEQ ID NO: 115823 - DNA, 75 bp, synthetic construct
  source 1..75: mol_type = other DNA
ctggaagatgagaaaagtaagctgaacgggcgcgtaacggcgatgccgaaaacccagcaggagattgtccgtctg

SEQ ID NO: 115824 - DNA, 75 bp, synthetic construct
  source 1..75: mol_type = other DNA
ctccggaattactcatggagtttaaagacgagttcacagacacacatcaaaaagttgagttagcaaaaaccttag

SEQ ID NO: 115825 - DNA, 75 bp, synthetic construct
  source 1..75: mol_type = other DNA
atctctttaaatagacttaacgaatactataagtactttggtttatctccggtcgcacttgcagataactcatct

SEQ ID NO: 115826 - DNA, 75 bp, synthetic construct
  source 1..75: mol_type = other DNA
acatctttgctgataaattaataaaaaagaaggatatgacactctttgaaaatgcatataatattgaacgttatt

SEQ ID NO: 115827 - DNA, 75 bp, synthetic construct
  source 1..75: mol_type = other DNA
agtggcggtaatggaagaacgcaaaatccgccgcgagaaaaaaaattcagcagttgacagtggcataaacgtaac

SEQ ID NO: 115828 - DNA, 75 bp, synthetic construct
  source 1..75: mol_type = other DNA
cttatctgacacgaaaatcgctgtgcgagattcgttacagagacggatacagggaggtgcggctttcatggctta

SEQ ID NO: 115829 - DNA, 75 bp, synthetic construct
  source 1..75: mol_type = other DNA
atgttttgtgtgatctatcgaagtagtaaacgtgaccagacctatttatatgttgaaaaaaaagacgacttttca

SEQ ID NO: 115830 - DNA, 75 bp, synthetic construct
  source 1..75: mol_type = other DNA
taatgctttcagagaaacggcagaaatctctttaaatagacttaacgaatactataagtactttggtttatctcc

SEQ ID NO: 115831 - DNA, 75 bp, synthetic construct
  source 1..75: mol_type = other DNA
cagccagaaggtgagcacagtgcacacgaaggtatggaaggcatggacatgagccacgcggaatccgcccattaa

SEQ ID NO: 115832 - DNA, 75 bp, synthetic construct
  source 1..75: mol_type = other DNA
agccctgcgtctgcgtcgtgaaaaagggctgaaagcgtttacggtgatgtcctgcgacaacgtgcgtgaaaacgg

SEQ ID NO: 115833 - DNA, 75 bp, synthetic construct
  source 1..75: mol_type = other DNA
cacgttgctggaaaaacgccgggcgctggaagaagagaaggccaagctgagcaaacgcgtgacggcgatgccgaa

SEQ ID NO: 115834 - DNA, 75 bp, synthetic construct
  source 1..75: mol_type = other DNA
accgcgcgcaccaggcgctgtatacccatcatctgctggaaagcaccgacagcgactggggtatctgcgaagtta

SEQ ID NO: 115835 - DNA, 75 bp, synthetic construct
  source 1..75: mol_type = other DNA
atgcagacccgggataaccttgagcgcatggtggttatcaaggcgcttatcgcggtacgggggctggacctgcgg

SEQ ID NO: 115836 - DNA, 75 bp, synthetic construct
  source 1..75: mol_type = other DNA
cgcaggaaccctggctggttgtcctgtatcaggatgatcacattatggtggtcaacaagccgagcggtttgttgt

SEQ ID NO: 115837 - DNA, 75 bp, synthetic construct
  source 1..75: mol_type = other DNA
ccctgcataccgttccctgttagataaacgagctacgttattaaaagaaaaggaacgtttaaatcaacaaattca

SEQ ID NO: 115838 - DNA, 75 bp, synthetic construct
  source 1..75: mol_type = other DNA
acggcgaatgatagtggaaacccacagcgccgcgtcaatctgcgcaatggttcgagcaggtgctggcgtttccgt

SEQ ID NO: 115839 - DNA, 75 bp, synthetic construct
  source 1..75: mol_type = other DNA
ctgcgccggtaaccggcaatgatgaaatcgatattggtcgtctggttgcaacggtggtggaggcccgctggtggg

SEQ ID NO: 115840 - DNA, 75 bp, synthetic construct
  source 1..75: mol_type = other DNA
ttgaaatttttcatgcagtcatgacagcaggaagcctgactgaagcggcacagctactgcacacctcacagccaa

SEQ ID NO: 115841 - DNA, 75 bp, synthetic construct
  source 1..75: mol_type = other DNA
ccatcagttttatgagaaacatggcggcaaaaccattattctcgcccgttttgtgccgatcgtcagaacgttcgc

SEQ ID NO: 115842 - DNA, 75 bp, synthetic construct
  source 1..75: mol_type = other DNA
aacattgtgccgcaggaatcgccgctacttgaagagtggctctcagcccagcgccatgatttaggcctcaccgag

SEQ ID NO: 115843 - DNA, 75 bp, synthetic construct
  source 1..75: mol_type = other DNA
ttcagcaatcccaattcgaaaattttccgtcgcagttatctcgacaaaacccatcagttttatgagaaacatggc

SEQ ID NO: 115844 - DNA, 75 bp, synthetic construct
  source 1..75: mol_type = other DNA
gtagaaaccagcctgagccgctttgagcagaatggcattgcggtgaaaggggttatcctcaactcgatcttccgc

SEQ ID NO: 115845 - DNA, 75 bp, synthetic construct
  source 1..75: mol_type = other DNA
atgctaagataactgcatttgttcatctcttagagttgtttccttatttattacttttattttacctcataaaag

SEQ ID NO: 115846 - DNA, 75 bp, synthetic construct
  source 1..75: mol_type = other DNA
cagcttaaccaaatacaccgccgtcgatgccggcgcagaaagtcaggactccagcaatggcgcattactcggcga

SEQ ID NO: 115847 - DNA, 75 bp, synthetic construct
  source 1..75: mol_type = other DNA
gatgccagtaccggcaagctggaaatcgcgaccgacaaactgcaaacggcactaaaaaagatgccgctggcatcg

SEQ ID NO: 115848 - DNA, 75 bp, synthetic construct
  source 1..75: mol_type = other DNA
aacgtttactgcgcggtctggtttatctgccggaagatcgccagtcatccggactgaatctcgatgcttcactgg

SEQ ID NO: 115849 - DNA, 75 bp, synthetic construct
  source 1..75: mol_type = other DNA
gtttaatgatgattatttccagccgctacgtgatgaactggctatggtggcagaggagttaaacgcgggctcgat

SEQ ID NO: 115850 - DNA, 75 bp, synthetic construct
  source 1..75: mol_type = other DNA
tagcgtgacggatgttgctaaaggcatgggaatgagccgtggtcagcgactgcgtaaggtagagctaccgctggc

SEQ ID NO: 115851 - DNA, 75 bp, synthetic construct
  source 1..75: mol_type = other DNA
tttggcttttataatttgtcacgataaagtgcttaaagctaaactaacaatcgatataccaacaattaaaagatt

SEQ ID NO: 115852 - DNA, 75 bp, synthetic construct
  source 1..75: mol_type = other DNA
gtgctgcccatcctgcaggtgacacttgccgggctgggagcgattgatcccagcgtgacagaagttgcgaaaggt

SEQ ID NO: 115853 - DNA, 75 bp, synthetic construct
  source 1..75: mol_type = other DNA
gtactggagcgaatggaaaaaatgggtatgccactgctggtacacggagaggtgacacacgccgacatcgacatt

SEQ ID NO: 115854 - DNA, 75 bp, synthetic construct
  source 1..75: mol_type = other DNA
ccagtaatggcgcattactcggtgactccacactgcgtaccatccagactcagcttaaaaccttgctcgccaata

SEQ ID NO: 115855 - DNA, 75 bp, synthetic construct
  source 1..75: mol_type = other DNA
ctatcaaaacgtcatccagcctctttgaagcgacatgtcagaacgatgatcaaagtggttcaacgactacatcgc

SEQ ID NO: 115856 - DNA, 75 bp, synthetic construct
  source 1..75: mol_type = other DNA
agctgaaccgggcgctgacggatgcgtctgcccttatcgacagttacctgtctgcccgttacacgctgccgctgg

SEQ ID NO: 115857 - DNA, 75 bp, synthetic construct
  source 1..75: mol_type = other DNA
acttagcgtcagcggcgacagcgccctggaaagttttatgggttacaacggaacgtcgggtgatagcagcaatgg

SEQ ID NO: 115858 - DNA, 75 bp, synthetic construct
  source 1..75: mol_type = other DNA
agttgcgggcgtggaacccatcgagtgaaagtgtggatgcagccctgctgcccaactttacccgtggcaatgccc

SEQ ID NO: 115859 - DNA, 75 bp, synthetic construct
  source 1..75: mol_type = other DNA
attggcacgtgcggaatacgacgaacagatacgaacgaaagttgccgctgctcgcgccgataagcggccggggat

SEQ ID NO: 115860 - DNA, 75 bp, synthetic construct
  source 1..75: mol_type = other DNA
atgaaatttatatgtgataaattatctgctgataaaggggagtgcaaagaagttacttttatagataaatatctt

SEQ ID NO: 115861 - DNA, 75 bp, synthetic construct
  source 1..75: mol_type = other DNA
gccatctgaaaaaataataaccataaaatttaaactgaacggagaagtaacaaaagaaacaaaaagtgcgcgagc

SEQ ID NO: 115862 - DNA, 75 bp, synthetic construct
  source 1..75: mol_type = other DNA
gaagaactgtttggtgaagagatcagcgaagaggacaaagagacggaatccacggatatgaccaagtggcagatc

SEQ ID NO: 115863 - DNA, 75 bp, synthetic construct
  source 1..75: mol_type = other DNA
gagctccagaatgcgaaagagtatgacatctttgctgataaattaataaaaaagaaggatatgacactctttgaa

SEQ ID NO: 115864 - DNA, 75 bp, synthetic construct
  source 1..75: mol_type = other DNA
gccgtggtcagatgaacgctttttcgctccctggcaggtgattaaagtcgcgccgtttgcattgtctcgttacac

SEQ ID NO: 115865 - DNA, 75 bp, synthetic construct
  source 1..75: mol_type = other DNA
gggagctgcttgctactggcgtgggtattgtttttatctcgcataagctgccggaaattcgccagattgccgatc

SEQ ID NO: 115866 - DNA, 75 bp, synthetic construct
  source 1..75: mol_type = other DNA
cggctatttcacagtgaaagaaacagcggtcaacacaaatcacggaatacagatatcgttcaccacaaaaatcac

SEQ ID NO: 115867 - DNA, 75 bp, synthetic construct
  source 1..75: mol_type = other DNA
ctgcactgaccgggcgcgatattaatgtcgagaccattatgcgcgttgccttcggcgatagtcagcgtcaggagg

SEQ ID NO: 115868 - DNA, 75 bp, synthetic construct
  source 1..75: mol_type = other DNA
tgacgctcaatgccggagaaattctgggcctggctgggctggtgggggccggacgcacagaactggccgagacgc

SEQ ID NO: 115869 - DNA, 75 bp, synthetic construct
  source 1..75: mol_type = other DNA
catgcaaaaaatgaagaacttgctggcggcgctgggctgccagtttgatctgcatagtctggcaggatcgctgga

SEQ ID NO: 115870 - DNA, 75 bp, synthetic construct
  source 1..75: mol_type = other DNA
tgaccttgaagaccagaaggctgaactggagaaacagcttgctctcgcagcacctaaagttgattttgccgatcg

SEQ ID NO: 115871 - DNA, 75 bp, synthetic construct
  source 1..75: mol_type = other DNA
ccttcacctccgcgatggcgacatgttaaaaactgtcgtgccgtataccagcgaaatttatggacgggctatcgt

SEQ ID NO: 115872 - DNA, 75 bp, synthetic construct
  source 1..75: mol_type = other DNA
gccatcgcgccggattatatgaccctgatgctttcacgcattttgaccagcctgaatcacggagcattttttggt

SEQ ID NO: 115873 - DNA, 75 bp, synthetic construct
  source 1..75: mol_type = other DNA
agcttacagtaatgagctttctgacagcgatgtggcaaacccggagtatttcctcactgcatatcaaaagcaact

SEQ ID NO: 115874 - DNA, 75 bp, synthetic construct
  source 1..75: mol_type = other DNA
agcgatgctgctttgtcttacgaatacgaacaggcgggcttcaccattaatttaatgcaacgctcggttcttctc

SEQ ID NO: 115875 - DNA, 75 bp, synthetic construct
  source 1..75: mol_type = other DNA
gggctgaccgtgctgcgcggacgcgggattattgaaacagcacaggggcgcgattctcgtgtagcacgccttaat

SEQ ID NO: 115876 - DNA, 75 bp, synthetic construct
  source 1..75: mol_type = other DNA
tgtgctggacgatattcttacgccactgcgggtttatgatgccagtgcgctggagtgcattttaaaccgctataa

SEQ ID NO: 115877 - DNA, 75 bp, synthetic construct
  source 1..75: mol_type = other DNA
gaataatatcacaatagcatacggaagtattataaaaatcaacgaagatttttattttactattagcgtagtatg

SEQ ID NO: 115878 - DNA, 75 bp, synthetic construct
  source 1..75: mol_type = other DNA
aggagcgtcagcgttatgccgggaataaataccggatgaaaccctctcttaaccgtgaattttatatccggtttg

SEQ ID NO: 115879 - DNA, 75 bp, synthetic construct
  source 1..75: mol_type = other DNA
tgatgccgagatctgtattatgactgatgatgtattaaatccagtctggacgttcagggttccatctcacgcaca

SEQ ID NO: 115880 - DNA, 75 bp, synthetic construct
  source 1..75: mol_type = other DNA
cacgcatgacggcgcaactggcctgcgatgccctgcagatggcgctgtggcggcgtaagaggccccggaacgtta

SEQ ID NO: 115881 - DNA, 75 bp, synthetic construct
  source 1..75: mol_type = other DNA
cgatgccagaaaactgctgcagatgaccggagaatggctgaatacaacaggggctgcccagcagtcaccggaaca

SEQ ID NO: 115882 - DNA, 75 bp, synthetic construct
  source 1..75: mol_type = other DNA
aggcttctcacaatcaggtgctggtgtttacactgcaatcattgaccgacctgatgtttaattcagtgtttgcca

SEQ ID NO: 115883 - DNA, 75 bp, synthetic construct
  source 1..75: mol_type = other DNA
ccggcgtataccagcgcagctcagcagcggcagacacgcattcattcacatattcgagccgctcgaggacggaca

SEQ ID NO: 115884 - DNA, 75 bp, synthetic construct
  source 1..75: mol_type = other DNA
gcggtgagcagcttaaagggcagtacgcggacgctggttttatgatgttgcaggagcatgcgacatggcctgatg

SEQ ID NO: 115885 - DNA, 75 bp, synthetic construct
  source 1..75: mol_type = other DNA
aactggcctcagcacgtatcagaacgaactggcgctgcagggacaggattacgaggaggttatggagcaacagga

SEQ ID NO: 115886 - DNA, 75 bp, synthetic construct
  source 1..75: mol_type = other DNA
aagcgtttctatgagcctgttgtcttctggattggcggcgagacaaacgagactgtaaccaaaacgactcaacgc

SEQ ID NO: 115887 - DNA, 75 bp, synthetic construct
  source 1..75: mol_type = other DNA
gatctcagccgtgatgactacagctataacgaagacggacgtcgttactttatggcagtggattatcgcttctga

SEQ ID NO: 115888 - DNA, 75 bp, synthetic construct
  source 1..75: mol_type = other DNA
caacgacaaggtgaaaggcggcggcttcgacacgcgctatatggcgcaggaaggggccagcggcgtgaacgacag

SEQ ID NO: 115889 - DNA, 75 bp, synthetic construct
  source 1..75: mol_type = other DNA
cgtcatgggctggctgtgcaaaagaggcgcgcaaggatggctggcgaataagcaaagacaaaacacgtgcttttg

SEQ ID NO: 115890 - DNA, 75 bp, synthetic construct
  source 1..75: mol_type = other DNA
caatctggtgctgggggataacggcccgatcattctgccgccgaacgccattgcctcgtttggcagcgacggcac

SEQ ID NO: 115891 - DNA, 75 bp, synthetic construct
  source 1..75: mol_type = other DNA
caaaactttgttggttttaccgcagacggtgtgccggtgttccgttattacaacgttaacaaagcacgtattcag

SEQ ID NO: 115892 - DNA, 75 bp, synthetic construct
  source 1..75: mol_type = other DNA
gtcccacgccgcaacaagatttagttcgggtgatgagtgcgccgcagctgtacgttggtcaggaggcacgctttg

SEQ ID NO: 115893 - DNA, 75 bp, synthetic construct
  source 1..75: mol_type = other DNA
gaaatcggtaagtatgtctttggttatcgtggtcaggaaggggcagtggtctggatgatgcgaatcgggccgaaa

SEQ ID NO: 115894 - DNA, 75 bp, synthetic construct
  source 1..75: mol_type = other DNA
cgcctacagtaatgagttatctgacagcgatgtagcaaatccggaacatttcctcacagcctatcagaatcaaca

SEQ ID NO: 115895 - DNA, 75 bp, synthetic construct
  source 1..75: mol_type = other DNA
gatggctggcgaataagcaaagacaaaacgcgtgcttttgcgcccgggcataaagttttgaggattaataaatga

SEQ ID NO: 115896 - DNA, 75 bp, synthetic construct
  source 1..75: mol_type = other DNA
ggatgtcctcaaagaagtgcctggcgtacaactgacgaacgaaggggataaccgtaagggcgttagtattcgtgg

SEQ ID NO: 115897 - DNA, 75 bp, synthetic construct
  source 1..75: mol_type = other DNA
atggccgttaaaactccgcttaaatgggtgggcagcaaagcccgcctcatgcctaagctgcgtccgcaccttcca

SEQ ID NO: 115898 - DNA, 75 bp, synthetic construct
  source 1..75: mol_type = other DNA
gaatacggattatgacgagtacctgatcgctgatgtgaatcctgatctggttaatctgtataagactatggccta

SEQ ID NO: 115899 - DNA, 75 bp, synthetic construct
  source 1..75: mol_type = other DNA
cacggcgtatacctccgctctcgcaccgatgatgattgccgctgcgctggcgatgccggaaatcccgctgccggt

SEQ ID NO: 115900 - DNA, 75 bp, synthetic construct
  source 1..75: mol_type = other DNA
ggcatttcctgacgctgactggtgctgatatgcgggcaaaatacgtcaggttccgttgcattgatggttattaca

SEQ ID NO: 115901 - DNA, 75 bp, synthetic construct
  source 1..75: mol_type = other DNA
tttatgccatggccggtatgcagactcgcctgcatctgatcgccaacgaacccggtacttatgacggtatctccg

SEQ ID NO: 115902 - DNA, 75 bp, synthetic construct
  source 1..75: mol_type = other DNA
cgactggccaaaccgcccgaaacagaaagtctgttacgaaacgggtaaacctgcgcagacggaatatgaagtggt

SEQ ID NO: 115903 - DNA, 75 bp, synthetic construct
  source 1..75: mol_type = other DNA
agcagcgcattcagtttgtgatgtgcgacgatggttcgctcaagcgtctgaagttctgcgacgagctgcgcgatc

SEQ ID NO: 115904 - DNA, 75 bp, synthetic construct
  source 1..75: mol_type = other DNA
gttgcggatatcaatgctaaaggtggtatcaaaggcaacaaactgcaaatcgtgaaatatgacgatgcctgtgac

SEQ ID NO: 115905 - DNA, 75 bp, synthetic construct
  source 1..75: mol_type = other DNA
ttttatggggcggcgaaaatttattgcgtcccggctggccacgcagatgttttcctgctggctggaagaggcact

SEQ ID NO: 115906 - DNA, 75 bp, synthetic construct
  source 1..75: mol_type = other DNA
agtcgccagcgaagcgccgggtctgtcatcatcggtgaatattggtgcctttaaccttggaaatgcattgggagc

SEQ ID NO: 115907 - DNA, 75 bp, synthetic construct
  source 1..75: mol_type = other DNA
atgttgattgtcgttattcccgcaatcttgatggctgttggtttcgcctggaagtaccgtgcgagcaataaagat

SEQ ID NO: 115908 - DNA, 75 bp, synthetic construct
  source 1..75: mol_type = other DNA
gccagaaggtgagcacagcgcacatgaaggtatggaaggtatggaaggcatggacatgagccacgcggaatccgc

SEQ ID NO: 115909 - DNA, 75 bp, synthetic construct
  source 1..75: mol_type = other DNA
gtgcatgaacattatggtactgtttattattattcacctggttatggtgttattggttccgcgtgcattgttatc

SEQ ID NO: 115910 - DNA, 75 bp, synthetic construct
  source 1..75: mol_type = other DNA
tgaagtgaaaaaagagctggcggtattaatgcgtccgcaggtgctgtctgcattgctgacgacggtactgggagc

SEQ ID NO: 115911 - DNA, 75 bp, synthetic construct
  source 1..75: mol_type = other DNA
gcaggatttggcgggcaaatggcggagtggttgccaccggcgcagagtgccgatgcggccctgctacccgcgttg

SEQ ID NO: 115912 - DNA, 75 bp, synthetic construct
  source 1..75: mol_type = other DNA
aaaggcgatctgaaaggctttgagttcggcgtatttgactggcacgccaacggcacggcgactgatgcgaagtaa

SEQ ID NO: 115913 - DNA, 75 bp, synthetic construct
  source 1..75: mol_type = other DNA
ggggggaagaccaagagcgcggcacgaatcgtcccagtacacagcaagctaatccccctcgtgaaatcattgctc

SEQ ID NO: 115914 - DNA, 75 bp, synthetic construct
  source 1..75: mol_type = other DNA
gaatcgtccctgtacacagcaagataatccctctcgtgaagtcgttgctcaagaccacacatagcggttttttgt

SEQ ID NO: 115915 - DNA, 75 bp, synthetic construct
  source 1..75: mol_type = other DNA
gtgattttatgcgtgactatgtgcagcgttcagtacaagggcagcagtctagtttgccttttgatcgcttggaag

SEQ ID NO: 115916 - DNA, 75 bp, synthetic construct
  source 1..75: mol_type = other DNA
cgaatgtgattacaatcggtggcggcggcacagttggtgtggcggcctcagtccggaacaatttgaaaacaagaa

SEQ ID NO: 115917 - DNA, 75 bp, synthetic construct
  source 1..75: mol_type = other DNA
gccatcatttgtcagtgccggccggttaatgaccgaacgggagcagcgctttctgcgccggctggacagggtgac

SEQ ID NO: 115918 - DNA, 75 bp, synthetic construct
  source 1..75: mol_type = other DNA
ggcggatgggaaacgctcaacgtggcatacgcagcagttcacaagggcaaagcgtaaagctcttggtgaacttgc

SEQ ID NO: 115919 - DNA, 75 bp, synthetic construct
  source 1..75: mol_type = other DNA
tcccttctattaaattgcagcgtatggagatctttaaacaggggattgagcaatcaattttagctttgcaatcaa

SEQ ID NO: 115920 - DNA, 75 bp, synthetic construct
  source 1..75: mol_type = other DNA
ggtacgtatgaattacttttgctcctggctgatgaacatcccgattaccagctagtaaagcgagaaaaaaatcag

SEQ ID NO: 115921 - DNA, 75 bp, synthetic construct
  source 1..75: mol_type = other DNA
atgaacataaagggtaaagcgttactggcaggatgtatcgcgctggcattcagcaatatggctctggcagaagat

SEQ ID NO: 115922 - DNA, 75 bp, synthetic construct
  source 1..75: mol_type = other DNA
tagaattgcgctactggtcggtcatgagcgcggagtcacagaaagcttcaagacttactcaaaaaatgccgtgtc

SEQ ID NO: 115923 - DNA, 75 bp, synthetic construct
  source 1..75: mol_type = other DNA
atggttggaaccgctatagcaagctttttggggatgttggcaatctcaacaatttacggcttagcgcatgctttt

SEQ ID NO: 115924 - DNA, 75 bp, synthetic construct
  source 1..75: mol_type = other DNA
tttggtttatctatggccgtgtctgttgtagcagacatcattaaggtaattctcgtcttaaccttcgctgactaa

SEQ ID NO: 115925 - DNA, 75 bp, synthetic construct
  source 1..75: mol_type = other DNA
gtaatgagttggatgaggtatttgtatcattaaaaaaactctggaatcatattataagcaaagatatcgatgccg

SEQ ID NO: 115926 - DNA, 75 bp, synthetic construct
  source 1..75: mol_type = other DNA
ataaaacaggctaccggtgacaaccgggaagcaaacctgatggctcacgcagtctggggagcgcttgctgcacaa

SEQ ID NO: 115927 - DNA, 75 bp, synthetic construct
  source 1..75: mol_type = other DNA
caacgctggacgtagttactcagaaggccaatgagttgggtgtgccggtcggtggtcggactcaggccttactgg

SEQ ID NO: 115928 - DNA, 75 bp, synthetic construct
  source 1..75: mol_type = other DNA
taaccggtttagccttctttctggagtacctgcgaaagctgtgcctctaggaggcaaaatgtggttaagaggtcc

SEQ ID NO: 115929 - DNA, 75 bp, synthetic construct
  source 1..75: mol_type = other DNA
atgcctgccgcaactggaaaacgcaggcatgttgcgcgcactggatttaagcgcagaagaaaaagcggctattcg

SEQ ID NO: 115930 - DNA, 75 bp, synthetic construct
  source 1..75: mol_type = other DNA
aaaaagcgcctgtggatctgatcccgctgctggaagtggcaggcggcgcttttcgtgaacgtttcgccagccgtg

SEQ ID NO: 115931 - DNA, 75 bp, synthetic construct
  source 1..75: mol_type = other DNA
ccggtgcggcaatcgacgtatttcccacggaaccggcgaccaacagcgatccgtttacctctccgctatgcgaat

SEQ ID NO: 115932 - DNA, 75 bp, synthetic construct
  source 1..75: mol_type = other DNA
accgatatttgacagggagaaagagcagaagcgtctgcaggaagcgcaggttatcagccagattagcggtcagat

SEQ ID NO: 115933 - DNA, 75 bp, synthetic construct
  source 1..75: mol_type = other DNA
ccggcaaactgtttctggcgattttcgccacctgcattgtcttattgatcacgatgcactgggcggtacgtatca

SEQ ID NO: 115934 - DNA, 75 bp, synthetic construct
  source 1..75: mol_type = other DNA
tggagaaaaaccaacagatgcgccgcgattttatggccgatatctcccacgagctgcgcacgcctttagcggtac

SEQ ID NO: 115935 - DNA, 75 bp, synthetic construct
  source 1..75: mol_type = other DNA
tggtcaatggtctggaagtcggcgcggtgatcgcctcccctgtcgagcggctgacccgcaataccgatatcaatt

SEQ ID NO: 115936 - DNA, 75 bp, synthetic construct
  source 1..75: mol_type = other DNA
ctccatcatcagcgcatcgatggatgcgctgcccaggaagtctggcgctggaggccacacaaccggataaagaaa

SEQ ID NO: 115937 - DNA, 75 bp, synthetic construct
  source 1..75: mol_type = other DNA
gacccatgtaatatggccgctgacgcatatccgatcatcactgaaaacaaaattagcaccatgtggatgacagcg

SEQ ID NO: 115938 - DNA, 75 bp, synthetic construct
  source 1..75: mol_type = other DNA
cgtgataccaccctgtcaggggctcaggtcagtggcgagaaagtcacagcagatgtcggcaacaacctgaccatt

SEQ ID NO: 115939 - DNA, 75 bp, synthetic construct
  source 1..75: mol_type = other DNA
ggtggtggatattccggcgctgtgtgacgcgctggcgagcaaacacctggcaggtgcggcaatcgatgtctttcc

SEQ ID NO: 115940 - DNA, 75 bp, synthetic construct
  source 1..75: mol_type = other DNA
ccgagcagggcgtcaacatcgccgcgcaatatctgcaaacttccgcccagatgggttatgtggttattgatattg

SEQ ID NO: 115941 - DNA, 75 bp, synthetic construct
  source 1..75: mol_type = other DNA
cattaattcaggtcagccagccgcgctcgccttgctataaactcaattaccattttgatatcagcgatatagcgc

SEQ ID NO: 115942 - DNA, 75 bp, synthetic construct
  source 1..75: mol_type = other DNA
agtggctggcagtgctgctggcgaatctggagccggctgctcgtcagcgcatgatgcgcgaactggcgcaagaac

SEQ ID NO: 115943 - DNA, 75 bp, synthetic construct
  source 1..75: mol_type = other DNA
ttttgccgaccgggtatcagcggctaatggaatcctgatcgggaactttgcaaaggtcgttggacttaagcaaaa

SEQ ID NO: 115944 - DNA, 75 bp, synthetic construct
  source 1..75: mol_type = other DNA
cgctggagttggtttcccgtgtcagcgatgtgaccgtgcaggaggctgccgccatcgcatggcatatgccgtttg

SEQ ID NO: 115945 - DNA, 75 bp, synthetic construct
  source 1..75: mol_type = other DNA
tgcacggtgggcgtcgtctgatgcacatccacgaaaaccgtccgggcgtgctaactgcgctgaacaaaatcttcg

SEQ ID NO: 115946 - DNA, 75 bp, synthetic construct
  source 1..75: mol_type = other DNA
aaaaagatttcagaagagattggcgtgcgagatatgaaaatctcgaaacgttctgtttcgagcggtggaggaaac

SEQ ID NO: 115947 - DNA, 75 bp, synthetic construct
  source 1..75: mol_type = other DNA
gaagatggtatctggatgaccattcctgtttcagacattgactatgaacaagtttatagattcgggggtgaataa

SEQ ID NO: 115948 - DNA, 75 bp, synthetic construct
  source 1..75: mol_type = other DNA
tgcgcggtgaactggaagccattcaggatggcgtgcgtaaattcacgccggagacggtggcgtctttacaggcgg

SEQ ID NO: 115949 - DNA, 75 bp, synthetic construct
  source 1..75: mol_type = other DNA
attatatcaattctctggtaggtcgtgaatttgttcaaggtgagaatgattgcaatctgattgcatgtaaaatca

SEQ ID NO: 115950 - DNA, 75 bp, synthetic construct
  source 1..75: mol_type = other DNA
gtgtccgttaaactcaggctacctcagagcgcttatccgatttttgatcgtattgaagaaatggcatgggctcgt

SEQ ID NO: 115951 - DNA, 75 bp, synthetic construct
  source 1..75: mol_type = other DNA
ccgtcatattttgcagattgttcgcgacaatgaagcggctgattacctggagcttaacgttggtgaaaactggcg

SEQ ID NO: 115952 - DNA, 75 bp, synthetic construct
  source 1..75: mol_type = other DNA
aaagcaacttctggaacagaaagcccaccagctaaatcagcagctggtggccgccgcccctaaagtcgattttgc

SEQ ID NO: 115953 - DNA, 75 bp, synthetic construct
  source 1..75: mol_type = other DNA
agtcctcgacggatgtttactaccgtatccaaagcggcattgatggcgatcgggcagggcgtcaggatggcggca

SEQ ID NO: 115954 - DNA, 75 bp, synthetic construct
  source 1..75: mol_type = other DNA
gatattgagtttggattctggctggattcagctgcgagcgacaaaaatgctctgtgcgctcactggctaactgag

SEQ ID NO: 115955 - DNA, 75 bp, synthetic construct
  source 1..75: mol_type = other DNA
aatatgcgccagttactgagcaaagtgctgccgaacccggacaacgtcgagctgatccgccagcgcgtgtatacc

SEQ ID NO: 115956 - DNA, 75 bp, synthetic construct
  source 1..75: mol_type = other DNA
agaagggaaacagtaaaggctccatgctgctgatttggcgaccgttcatcagtcctcgacgaatgtttactactg

SEQ ID NO: 115957 - DNA, 75 bp, synthetic construct
  source 1..75: mol_type = other DNA
atcatcatacctggtccaagtggggaacagccagttttgctagattctggaagacaaagggcaatgctgaaggtg

SEQ ID NO: 115958 - DNA, 75 bp, synthetic construct
  source 1..75: mol_type = other DNA
ttggagctgagctgtcaaatgctgcacgtcaggcccgaaccagctttggtggtcaggcatcggcacagctggcgg

SEQ ID NO: 115959 - DNA, 75 bp, synthetic construct
  source 1..75: mol_type = other DNA
gatgtcgagcgagctgcataaattgtatcgttcgctggaagcttcagtagaagaaaaaacccgtgatctccacga

SEQ ID NO: 115960 - DNA, 75 bp, synthetic construct
  source 1..75: mol_type = other DNA
tctgatgaaggcgctctcgcctatcaaaaagcaccggtagatttgatcccactgctggaagtggcgggaggcgca

SEQ ID NO: 115961 - DNA, 75 bp, synthetic construct
  source 1..75: mol_type = other DNA
atgttgtttactttgttagcggcgttttcaggctttgctcaggctgatgacgcggcaattcaacaaacgttagcc

SEQ ID NO: 115962 - DNA, 75 bp, synthetic construct
  source 1..75: mol_type = other DNA
gccgatagttcattattccagacgatgcttgctaggtattaatgagcctattaaaaaagaagttgagagattttt

SEQ ID NO: 115963 - DNA, 75 bp, synthetic construct
  source 1..75: mol_type = other DNA
ataaccacgacggcgtgctacgcgtgggcgatacgcaaggtcgtctgcgtagctggttcgcgcaacacaatgctt

SEQ ID NO: 115964 - DNA, 75 bp, synthetic construct
  source 1..75: mol_type = other DNA
acagaatattgccacgccggtatcgcgttttctggcgttattgcccctgatgttgttacccggaagaacagctga

SEQ ID NO: 115965 - DNA, 75 bp, synthetic construct
  source 1..75: mol_type = other DNA
aaaacagcgtaaccggaatttccttttctggtggcggttggctaacgaaatgtatattaatggtaataaattaca

SEQ ID NO: 115966 - DNA, 75 bp, synthetic construct
  source 1..75: mol_type = other DNA
cacaaacttgcggcgggcgattttaccactcgcgtgacgcccaccagcgaagatgaattaggaaaactggctcag

SEQ ID NO: 115967 - DNA, 75 bp, synthetic construct
  source 1..75: mol_type = other DNA
gccggtcaacggacgtacggtttatcaggggtatttgttcgtaatgaatcaactgctggccgaatccgggatgcg

SEQ ID NO: 115968 - DNA, 75 bp, synthetic construct
  source 1..75: mol_type = other DNA
cgcctccataccaaatgcgattaccggaagacttcagagcgcagctagaagaagctgctaaggccgatggcgaca

SEQ ID NO: 115969 - DNA, 75 bp, synthetic construct
  source 1..75: mol_type = other DNA
taacccaccgtacagcaatatcaggccgtgggtggaaaaagctgctgagcagtgcatacaacagcgacagacggt

SEQ ID NO: 115970 - DNA, 75 bp, synthetic construct
  source 1..75: mol_type = other DNA
aaaatgggtctggcaatggagttaattatgctgccgctggtacagcgattgatggaagggaagaaaatcgagtaa

SEQ ID NO: 115971 - DNA, 75 bp, synthetic construct
  source 1..75: mol_type = other DNA
ccccgtcttcagcgcatcggtggatgcgctgccccggtagtctggcgctggaggccacgcaaccggataaaagct

SEQ ID NO: 115972 - DNA, 75 bp, synthetic construct
  source 1..75: mol_type = other DNA
tggagggtctatcccacctaattttattgatgatgaaacaccgtctgatgtattgaaaatgggtaataatgcagc

SEQ ID NO: 115973 - DNA, 75 bp, synthetic construct
  source 1..75: mol_type = other DNA
aatatgatgcattgcttgaaaaagatatcagcagtgataaggcggtaatcgctgcatgcagtaatggacaggcag

SEQ ID NO: 115974 - DNA, 75 bp, synthetic construct
  source 1..75: mol_type = other DNA
tcggttaacttagtcttcacatctccaccatatgcacttcattttaagaaagaatatggtaatgtctgtcagaag

SEQ ID NO: 115975 - DNA, 75 bp, synthetic construct
  source 1..75: mol_type = other DNA
ctggcagagtatgctgaccgggcagccgaagccggaagagtctgcgaaaaacagtacgacaccctgaccagatag

SEQ ID NO: 115976 - DNA, 75 bp, synthetic construct
  source 1..75: mol_type = other DNA
tgcgcaggcggaagaagaccgcaaagccgaagaagaaaaagttcgtcagtactacgaacaggagaaagtgaccaa

SEQ ID NO: 115977 - DNA, 75 bp, synthetic construct
  source 1..75: mol_type = other DNA
aatgttcatggcagccgacagtatgacgccgggtatgcgcaggcaaagacagaccgtaaaaccgaagatgataaa

SEQ ID NO: 115978 - DNA, 75 bp, synthetic construct
  source 1..75: mol_type = other DNA
attggaaacagttggttatcatggcgatgcttgctgttctggtcatatcaggagttgtagcctggaatgcacacg

SEQ ID NO: 115979 - DNA, 75 bp, synthetic construct
  source 1..75: mol_type = other DNA
cagcatgctgatggttgcagtggtgatgttctttgcctttagctgcctgtttacgctgtctccggccaacatggc

SEQ ID NO: 115980 - DNA, 75 bp, synthetic construct
  source 1..75: mol_type = other DNA
aggtgccgggaacattcaccccatggcaacctttaccggaacccactgatgtactgttttatgaagggctacacg

SEQ ID NO: 115981 - DNA, 75 bp, synthetic construct
  source 1..75: mol_type = other DNA
agtgcatacaacagcgacagacggtagtgatgcttgtgccagaggattatgtcagtcggatggttcagcaaggct

SEQ ID NO: 115982 - DNA, 75 bp, synthetic construct
  source 1..75: mol_type = other DNA
agttgatgcaaaacacgggtaaagtggggtggttgtatagcgtgatagcgccagggaaagtgtctgcggacgcgc

SEQ ID NO: 115983 - DNA, 75 bp, synthetic construct
  source 1..75: mol_type = other DNA
gaagcactaaaacccgttacggtgaaggaagcgattaactactggctggaggaatacgcgaaggataaccgcaaa

SEQ ID NO: 115984 - DNA, 75 bp, synthetic construct
  source 1..75: mol_type = other DNA
taccgctcgctggaggcgtcagtagaagaaaaaacccgcgatctccacgaagcgaagcgccgtctggaagtgctg

SEQ ID NO: 115985 - DNA, 75 bp, synthetic construct
  source 1..75: mol_type = other DNA
atatatcaatgagttacaggcgaatccggcgaaaatcgctacccgtaaggcttcgcaaaatacgcttaacgctta

SEQ ID NO: 115986 - DNA, 75 bp, synthetic construct
  source 1..75: mol_type = other DNA
gagattggctatacgccaggcgttgaaaccaccaccggcccgcttggacaaggtttggcgaacgccgtcggactg

SEQ ID NO: 115987 - DNA, 75 bp, synthetic construct
  source 1..75: mol_type = other DNA
actgaccacgaatcactgaaaagccgtatcaataagcacataatcagccagattggtgctatgccgctggataaa

SEQ ID NO: 115988 - DNA, 75 bp, synthetic construct
  source 1..75: mol_type = other DNA
acctatggatctcttaatcagttcaccgcggttcaggaccttaacagccatgatatccccagtcaggtattcggt

SEQ ID NO: 115989 - DNA, 75 bp, synthetic construct
  source 1..75: mol_type = other DNA
aggagtgggattttaaagaaatgctctggacagtaccgaaggagcacagcaaaacgaaggtcgccatattcaggc

SEQ ID NO: 115990 - DNA, 75 bp, synthetic construct
  source 1..75: mol_type = other DNA
tatgtcgcacagggtaaaaatattttatgccgtgaatgtggttacttgtttccagtgatatctgaacagtcgctt

SEQ ID NO: 115991 - DNA, 75 bp, synthetic construct
  source 1..75: mol_type = other DNA
cgccgaattttagcacctggcgaccgtgtgatcaggtggaagctgcggtgggctggaagctggcggtcgagcgtc

SEQ ID NO: 115992 - DNA, 75 bp, synthetic construct
  source 1..75: mol_type = other DNA
cgaactggagctgaatgctcagccgggtaacgtgcagctggtagataacaaaggtcagcgttacaccgccgatga

SEQ ID NO: 115993 - DNA, 75 bp, synthetic construct
  source 1..75: mol_type = other DNA
aggggaaactcccgcccgccgtttactggctgacattgccctggcgcatcgggatgtggctgtctatgcgttggt

SEQ ID NO: 115994 - DNA, 75 bp, synthetic construct
  source 1..75: mol_type = other DNA
tttatgggcgacggctgcctgatggaaggtatttctcacgaagtctgttcgctggcgggcacgctggggctgggc

SEQ ID NO: 115995 - DNA, 75 bp, synthetic construct
  source 1..75: mol_type = other DNA
tctggatcttttatatgggttttcgttgttcgtttgtagttcgacattcgaacagcgccgactggttcaccggct

SEQ ID NO: 115996 - DNA, 75 bp, synthetic construct
  source 1..75: mol_type = other DNA
cgaactggagctgaatgcgcaaccgggtaatgtacagttagtcgacaataaaggtcagcgttacaccgctgatga

SEQ ID NO: 115997 - DNA, 75 bp, synthetic construct
  source 1..75: mol_type = other DNA
tttaacctggtatttcacttacagggccggaacgggaaggggggcaccaccggaacgcattaagctgggaaatta

SEQ ID NO: 115998 - DNA, 75 bp, synthetic construct
  source 1..75: mol_type = other DNA
tttattactggcgccgcccggcgatgcggcgacaaatgcagacgctgggggaagcgcaccagcgtctgagcggcg

SEQ ID NO: 115999 - DNA, 75 bp, synthetic construct
  source 1..75: mol_type = other DNA
gtgatggaagagggacaggtggttgagcagggtactcatgcgcaattgctctcacatcatggacgttatcaggcg

SEQ ID NO: 116000 - DNA, 75 bp, synthetic construct
  source 1..75: mol_type = other DNA
atgagcagagcacttaacaaactgagtgacacacagctaaggaaaatcaacggcacacccgcccaaaaaacagcc

SEQ ID NO: 116001 - DNA, 75 bp, synthetic construct
  source 1..75: mol_type = other DNA
cttgaagattttacctatctttttttagaacggctttacactgaacctcaacgccttatcgaagccaagacaagg

SEQ ID NO: 116002 - DNA, 75 bp, synthetic construct
  source 1..75: mol_type = other DNA
atgcactcctacgacgactcgtttacctggccattaatcaaatttgagcgagttgctcatattcatctggcaaat

SEQ ID NO: 116003 - DNA, 75 bp, synthetic construct
  source 1..75: mol_type = other DNA
ttgaatcccctcgcggaggagccacaaaagatcgactctatttttgtgtaccgatgctggatctggtggttccgg

SEQ ID NO: 116004 - DNA, 75 bp, synthetic construct
  source 1..75: mol_type = other DNA
taaagaactgggcgaattattgcaggcactggacaaaaaaatattttccccttactacgtcgcactaatccgcct

SEQ ID NO: 116005 - DNA, 75 bp, synthetic construct
  source 1..75: mol_type = other DNA
tggagctggctaaagacggaacagtatccaaagatacccatgccagccggattggtcaggcggtatggagactgg

SEQ ID NO: 116006 - DNA, 75 bp, synthetic construct
  source 1..75: mol_type = other DNA
tggagctaatgatgatggttcagttatggtggtcagtctggttatgttggccagtattatcgctactcattattg

SEQ ID NO: 116007 - DNA, 75 bp, synthetic construct
  source 1..75: mol_type = other DNA
cgccgcgcggatggcggcactgatgaaagcgcggcagattatggtttatacccacgactcaattggcttagggga

SEQ ID NO: 116008 - DNA, 75 bp, synthetic construct
  source 1..75: mol_type = other DNA
ccgtggtcatctggcgcaggctacccatgagttgcgcctgcgacttggcaagcagttacgccgcgtgccgctgga

SEQ ID NO: 116009 - DNA, 75 bp, synthetic construct
  source 1..75: mol_type = other DNA
gtggtcgcaccgctgaatcaactggtcaccgccagccagcgtattgaacacggtcagtttaactcaccgccgctg

SEQ ID NO: 116010 - DNA, 75 bp, synthetic construct
  source 1..75: mol_type = other DNA
tggggatcattgctgtttatcgtggtggtcagctgcgttcttctggctatcgtgattgtaattaacgtctttatg

SEQ ID NO: 116011 - DNA, 75 bp, synthetic construct
  source 1..75: mol_type = other DNA
cgtatgcctgaaccggaggatgcctgggatgttgaatcgaatcgcggtcaactggatatgtggtttgataacgga

SEQ ID NO: 116012 - DNA, 75 bp, synthetic construct
  source 1..75: mol_type = other DNA
aaaaatttggcagccttgatgctctcctcatggaattaaaccgggctggccatcctgatgatcagatatggtttt

SEQ ID NO: 116013 - DNA, 75 bp, synthetic construct
  source 1..75: mol_type = other DNA
tcaggaccttttttgtgaaattttcgaacccggagcgatttacgatttacctgataatgagtttaacagaaagat

SEQ ID NO: 116014 - DNA, 75 bp, synthetic construct
  source 1..75: mol_type = other DNA
ctgtcagcaaagtgttagatgaaatgcgcacacgcccgattcctctgggtgtatctaaccgccatattcatctct

SEQ ID NO: 116015 - DNA, 75 bp, synthetic construct
  source 1..75: mol_type = other DNA
ggtgctgccattgatgattttccatcagatccaactgatggtttgcgcggtactggcgcgtcgttacaagcgcca

SEQ ID NO: 116016 - DNA, 75 bp, synthetic construct
  source 1..75: mol_type = other DNA
ttcttgatccaaaagccggtgagagcgtttacgaccctgcttgtggtactggcggtatgttgctcgagactattc

SEQ ID NO: 116017 - DNA, 75 bp, synthetic construct
  source 1..75: mol_type = other DNA
aaaccgcccgtattgaccatgtcgtccataagctgacggctatccgtgagcatgataaatatcagaattcgccgg

SEQ ID NO: 116018 - DNA, 75 bp, synthetic construct
  source 1..75: mol_type = other DNA
cattgaacgcgctgttggttttacagcaggttataaccttcgctttatgttcattcttcagaatgaaggacaagg

SEQ ID NO: 116019 - DNA, 75 bp, synthetic construct
  source 1..75: mol_type = other DNA
cctgtggccagagtcataatagttaccgatgcgggtgttcttacccccttatttccagacaggggctgtatctta

SEQ ID NO: 116020 - DNA, 75 bp, synthetic construct
  source 1..75: mol_type = other DNA
attcgatctctgagcttaatattttcgaacagatttatgtttatgagacatggttctcgctaattaaatgccctg

SEQ ID NO: 116021 - DNA, 75 bp, synthetic construct
  source 1..75: mol_type = other DNA
aagaaggagttttgcacgaggagtcattctccattgatttactggaaatagcagagagtaaaagtggtatgctgt

SEQ ID NO: 116022 - DNA, 75 bp, synthetic construct
  source 1..75: mol_type = other DNA
gccagaggcgatttcgtccccttctttgaaaatctgaccaccgcagcgattgccctgctgttctttatgcacggc

SEQ ID NO: 116023 - DNA, 75 bp, synthetic construct
  source 1..75: mol_type = other DNA
gaacccggagcgatttatgatttacctgataatgaatttaacagaaagattgtttactggttaagccagtattta

SEQ ID NO: 116024 - DNA, 75 bp, synthetic construct
  source 1..75: mol_type = other DNA
acgacaaatcccgttatattaatgcgcctaagcgtactgaagtaatccatcgctccgggcttcaaggcctgaaag

SEQ ID NO: 116025 - DNA, 75 bp, synthetic construct
  source 1..75: mol_type = other DNA
taaacaaatcagcgggatgatgacattaggtcagatgtttcagttaatcacgattgacaacaataccgcctcgct

SEQ ID NO: 116026 - DNA, 75 bp, synthetic construct
  source 1..75: mol_type = other DNA
atattgaggatgcggaacaaaaaacgattggggatattgtcgcgctttatgccgatccctttcctgtcatcggcg

SEQ ID NO: 116027 - DNA, 75 bp, synthetic construct
  source 1..75: mol_type = other DNA
gcctcagtatgactggaacagcggtgatcggatgtggatctgtgactggattgcgccttttggacatacgccgga

SEQ ID NO: 116028 - DNA, 75 bp, synthetic construct
  source 1..75: mol_type = other DNA
agagagattacacgactgattagcgatgcccaaaatgatttgtcacctgagcatctcccctgcgatgtagttctt

SEQ ID NO: 116029 - DNA, 75 bp, synthetic construct
  source 1..75: mol_type = other DNA
ttatgggagtgggttaaaaataatgcagtcataattaatgaagaatatggttcaatcaagcattctaatgttgat

SEQ ID NO: 116030 - DNA, 75 bp, synthetic construct
  source 1..75: mol_type = other DNA
agctcgcggataaagttgatgccatccaaaatatttgatgtcgtcaaatttacgccatcgcaacatactgagaga

SEQ ID NO: 116031 - DNA, 75 bp, synthetic construct
  source 1..75: mol_type = other DNA
ccttcaaatgtttctgcccgcgtggcagtagaagcgggtattgccgattactggtacaaatatgttggcctgaaa

SEQ ID NO: 116032 - DNA, 75 bp, synthetic construct
  source 1..75: mol_type = other DNA
actggcaacaattgcccgtcgattacgttggcgtggacagccacgcaggtgtccgggaagctacggaatatctca

SEQ ID NO: 116033 - DNA, 75 bp, synthetic construct
  source 1..75: mol_type = other DNA
cttttggcgcggaatcggcgttaggcgaaagaggggtgcttgccggaaaagatatttcgctgattggtaatgacg

SEQ ID NO: 116034 - DNA, 75 bp, synthetic construct
  source 1..75: mol_type = other DNA
gcgaagttgtcgcgagaggccattattgcaggcggtagtcactggcgactgcatttgtgggtgatgtgcagtacc

SEQ ID NO: 116035 - DNA, 75 bp, synthetic construct
  source 1..75: mol_type = other DNA
gaagctgagcacgtcactgtagcagctgaaaatgtcgctactgagaccgccgttcacccaatgaacccgcgaaat

SEQ ID NO: 116036 - DNA, 75 bp, synthetic construct
  source 1..75: mol_type = other DNA
ggagggaccaaaaggtaaattgcacaacgttcgcttgttggggccgctacgcaatgcaagccaggtggaaatttc

SEQ ID NO: 116037 - DNA, 75 bp, synthetic construct
  source 1..75: mol_type = other DNA
agcgggtaacattaaccgatgttgcacgtgcggctggcgtttcgaaatcgaccgtgtcgctggtactcaacgaca

SEQ ID NO: 116038 - DNA, 75 bp, synthetic construct
  source 1..75: mol_type = other DNA
tggttgagtttcttaagaagagggatgctgtgtaaggcaaataaatggccgccgtttaaaagtattgctaacttg

SEQ ID NO: 116039 - DNA, 75 bp, synthetic construct
  source 1..75: mol_type = other DNA
ttttgccgtgtcgctggcggaaaaccagcgattgcgtggcagtgcgttcgcgcaacggcaaggcatttcgctggc

SEQ ID NO: 116040 - DNA, 75 bp, synthetic construct
  source 1..75: mol_type = other DNA
ttatcactctcgaacagcgtactgaaaacgggctgcgttgttgccgtgtccgcttacctgcggtgattgccgtgc

SEQ ID NO: 116041 - DNA, 75 bp, synthetic construct
  source 1..75: mol_type = other DNA
cagtgttgtcacaaaagctggaagtggataaacaggaaggacgcgtggcgctgtttgaattgctgattaacacac

SEQ ID NO: 116042 - DNA, 75 bp, synthetic construct
  source 1..75: mol_type = other DNA
aatgttctgccattgattaagataattcaacagttatcagaggattctagattcaagtatgttgttgatttaaat

SEQ ID NO: 116043 - DNA, 75 bp, synthetic construct
  source 1..75: mol_type = other DNA
gctactggctgccaggttagcggcggaaggtgtaacgcgttttattgtcgcaggcggtgaaacttccggagtggt

SEQ ID NO: 116044 - DNA, 75 bp, synthetic construct
  source 1..75: mol_type = other DNA
acggcgatatcgttgtcgccagcatgcagggggagtttacggtgaaacggcttctgctgacgccgcgactgacgc

SEQ ID NO: 116045 - DNA, 75 bp, synthetic construct
  source 1..75: mol_type = other DNA
ttactgcgggcggtatcgctgcgccgctgattgcaacaactggcgtcagcccagagttgatggttatcgcggttg

SEQ ID NO: 116046 - DNA, 75 bp, synthetic construct
  source 1..75: mol_type = other DNA
agtgcatacaacaacgacagacggtagtgatgcttgtgccagaggatatgtctgtcggatggttcagcaaggctc

SEQ ID NO: 116047 - DNA, 75 bp, synthetic construct
  source 1..75: mol_type = other DNA
ttcaaacacatatcaataaaagaaaaggaagttattggaagagtttatgactctttgagaaaaataactaaaggg

SEQ ID NO: 116048 - DNA, 75 bp, synthetic construct
  source 1..75: mol_type = other DNA
accggaggtgcgttatgcagagcggcagttgttaggttataacgataaaattttgtcattatcgcaagacgtatt

SEQ ID NO: 116049 - DNA, 75 bp, synthetic construct
  source 1..75: mol_type = other DNA
ctaattttaatgctttacttacacgccgcatttcagaacagtaccctaatgcaagaatagtaatttttgatatta

SEQ ID NO: 116050 - DNA, 75 bp, synthetic construct
  source 1..75: mol_type = other DNA
caccggtattgccggaattactcaagagcgagaatggcctgattctggtgacgggagcgacggggagcggcaaat

SEQ ID NO: 116051 - DNA, 75 bp, synthetic construct
  source 1..75: mol_type = other DNA
ctcgaacagcttggcgcaccaccggtattgccggaattactcaagagcgagaatggcctgattctggtgacgggg

SEQ ID NO: 116052 - DNA, 75 bp, synthetic construct
  source 1..75: mol_type = other DNA
tatgcgatggaaagtggaaatgagttaatgattcggcagatttctgggcttccaagaggagatgcaatagcgttt

SEQ ID NO: 116053 - DNA, 75 bp, synthetic construct
  source 1..75: mol_type = other DNA
ctgttcagttcgctgtggttgattctggtattcttatttccaaaccgtatccgcattattgctgccgtgataggc

SEQ ID NO: 116054 - DNA, 75 bp, synthetic construct
  source 1..75: mol_type = other DNA
ataacctggcttcacgcatggaacctgcggctccgtggcagtttatttccggctattatcaatatcgtcagcaac

SEQ ID NO: 116055 - DNA, 75 bp, synthetic construct
  source 1..75: mol_type = other DNA
ttgtatcgttaatttcagcaggagcatttgcaaaaattgatcctctacaatggaatgtgattgaagatagagggg

SEQ ID NO: 116056 - DNA, 75 bp, synthetic construct
  source 1..75: mol_type = other DNA
gatttggcgaccgttcatcagtcctcgacggatgtttactaccgtatccaaagcggcattgatggcgatcgggca

SEQ ID NO: 116057 - DNA, 75 bp, synthetic construct
  source 1..75: mol_type = other DNA
ctccggcatttagtattgtgtcatggatagctcttgttggtggtatcgttacctatctattagggctatggaatg

SEQ ID NO: 116058 - DNA, 75 bp, synthetic construct
  source 1..75: mol_type = other DNA
aggcatacctaccacccccatttattatatgacttgcctgacggtctttattatctctgttgcgttgttgctggt

SEQ ID NO: 116059 - DNA, 75 bp, synthetic construct
  source 1..75: mol_type = other DNA
gtgctttcttacttacgtatccagttgacgttacttaaacgttcgataccggaagataacgccaccgcacaaaat

SEQ ID NO: 116060 - DNA, 75 bp, synthetic construct
  source 1..75: mol_type = other DNA
cgcttgcctgcggtgattgccgtgcgtcagtgtggtgaagtggccttgccagtaccgggaatgcgccagcgaatg

SEQ ID NO: 116061 - DNA, 75 bp, synthetic construct
  source 1..75: mol_type = other DNA
gagcgtttcactctcgacgcgctgtttatcaccctcgaacagcgtactgaacatggtttgcgttgttgccgggtt

SEQ ID NO: 116062 - DNA, 75 bp, synthetic construct
  source 1..75: mol_type = other DNA
gtcagtgtggtgaagtggccttgccagtaccgggaatgcgccagcgatacagtgcctgcaactggcaaggccaga

SEQ ID NO: 116063 - DNA, 75 bp, synthetic construct
  source 1..75: mol_type = other DNA
tttctgcaattggttatgttgttggtttggaaggtgagaaaataaggattaaccttcatgaaggtctacaaggaa

SEQ ID NO: 116064 - DNA, 75 bp, synthetic construct
  source 1..75: mol_type = other DNA
ttccaacaggtaaaatgccggaagcaatcgacgcactggtgatcagcctgaaaacgcgctcctgtccggtggttg

SEQ ID NO: 116065 - DNA, 75 bp, synthetic construct
  source 1..75: mol_type = other DNA
atgattttaccggcgcgacggatatcgccagttttctggtggaaaatagtctgccaacggtgcaaatcaacggtg

SEQ ID NO: 116066 - DNA, 75 bp, synthetic construct
  source 1..75: mol_type = other DNA
ccgaaccggatgccggaatgctggcggaaaaagagtggcaggttgctgctacggcaaattatgggccggatgttt

SEQ ID NO: 116067 - DNA, 75 bp, synthetic construct
  source 1..75: mol_type = other DNA
gacgctggagtcggtcacgctgccagccgatcttgtgggctggctggatgggcgttcctcactggcgcgtctggg

SEQ ID NO: 116068 - DNA, 75 bp, synthetic construct
  source 1..75: mol_type = other DNA
ccactgattatgctgagcatgaactggatctgaacagctattgcatcagcagacctgcagccactttctttctgc

SEQ ID NO: 116069 - DNA, 75 bp, synthetic construct
  source 1..75: mol_type = other DNA
gaagaagagatcaaagtgcttttccgtctattggaaattggcgggattgaaaaccctttccataaggaagtacag

SEQ ID NO: 116070 - DNA, 75 bp, synthetic construct
  source 1..75: mol_type = other DNA
acccgccgtacctgccgttcctgaactgccgaaaagtaccgcaccagccgccaaaggccgcaatgccagtgcgcg

SEQ ID NO: 116071 - DNA, 75 bp, synthetic construct
  source 1..75: mol_type = other DNA
tcaaccatttgctgtcaatgcgtcagaactggagtcagtaccagactaaaaaaacacagatggcgaccccggaag

SEQ ID NO: 116072 - DNA, 75 bp, synthetic construct
  source 1..75: mol_type = other DNA
gtggacagtgctgaaaagccgcggcacggcgatatcgttgtcgccagcgtacagggggagtttacggtgaaacgg

SEQ ID NO: 116073 - DNA, 75 bp, synthetic construct
  source 1..75: mol_type = other DNA
cacggtgaaagcgtcaacccgtgtcaccctggacacaccggaagtggtctgcactaacaaactgactaccggcac

SEQ ID NO: 116074 - DNA, 75 bp, synthetic construct
  source 1..75: mol_type = other DNA
acatatcaagtacaagtaccgttacccggaagatcagggcaagtttgatggcaataccgatcatgtcccgccggg

SEQ ID NO: 116075 - DNA, 75 bp, synthetic construct
  source 1..75: mol_type = other DNA
ggaacaggtaaacgggtttatacggcgagccgtgtccgggtgacctttgatggtctgcagggcgaaacgcctgac

SEQ ID NO: 116076 - DNA, 75 bp, synthetic construct
  source 1..75: mol_type = other DNA
gattgttcgtaatggttatccgctgaaggcagggaattattataccatattacggtttatagtgaattatgaata

SEQ ID NO: 116077 - DNA, 75 bp, synthetic construct
  source 1..75: mol_type = other DNA
tttcagcttatgagaaggtgatatcaacactgaaacgagcaagtccaaagctatataatctttcaggtcataggt

SEQ ID NO: 116078 - DNA, 75 bp, synthetic construct
  source 1..75: mol_type = other DNA
gcaactttctttgtccgggccataggtgattcgatgcagaatatggggttgcactccggtgatctgatggtggtc

SEQ ID NO: 116079 - DNA, 75 bp, synthetic construct
  source 1..75: mol_type = other DNA
ggttctctggtatctgggcgcaaatcaaaaccgcattcagcggtgggattggcggcgtggcaaagctgattacca

SEQ ID NO: 116080 - DNA, 75 bp, synthetic construct
  source 1..75: mol_type = other DNA
cttggtcaggcagaaggtatcaatctgcagatactggataaccaggggtatccaactcgtgtcggtaaagttatg

SEQ ID NO: 116081 - DNA, 75 bp, synthetic construct
  source 1..75: mol_type = other DNA
gtcgtccggggtgaatgtcaccttcgcgccgcaaatcactatcaaaggcgcagcctcaacgaccgaaggtgaaat

SEQ ID NO: 116082 - DNA, 75 bp, synthetic construct
  source 1..75: mol_type = other DNA
catggtgaaagcatcaacccgcgtcaccctggacacaccggaggtggtctgcaccaacaggctgattaccggcac

SEQ ID NO: 116083 - DNA, 75 bp, synthetic construct
  source 1..75: mol_type = other DNA
gttttgccctgttctatgaagtgggcttcgtgctgatgctgccgctggtgtttaccatcgcggcttccgcgaata

SEQ ID NO: 116084 - DNA, 75 bp, synthetic construct
  source 1..75: mol_type = other DNA
gttttgccctgttctatgaagtgggcttcgtgctgatgctgccgctggtgtttaccatcgcagcggcagctaaca

SEQ ID NO: 116085 - DNA, 75 bp, synthetic construct
  source 1..75: mol_type = other DNA
gctgagctggacaagctgattgaacgggatgacacgctttcccgacttgcttttcccacgctaagagaattgagt

SEQ ID NO: 116086 - DNA, 75 bp, synthetic construct
  source 1..75: mol_type = other DNA
gtccgactgcgattgccaccatcttccaggccgatatgggtaaaaccctgctgtacggtactattctggcgatcc

SEQ ID NO: 116087 - DNA, 75 bp, synthetic construct
  source 1..75: mol_type = other DNA
gcagtttgaagataaggtgcagcgcattgcccgcgttcaccattatggcctgcgtgatcgagttagatataaggg

SEQ ID NO: 116088 - DNA, 75 bp, synthetic construct
  source 1..75: mol_type = other DNA
agttattagaaattgaaggaagccaaaatcctttccagaaggatgttcaagtgagaaacagactaatttttacct

SEQ ID NO: 116089 - DNA, 75 bp, synthetic construct
  source 1..75: mol_type = other DNA
accggaggtccgttacgcagagcgtcgcctgctgggtgtaaatgatgatttatactttttaacacgccgcatttt

SEQ ID NO: 116090 - DNA, 75 bp, synthetic construct
  source 1..75: mol_type = other DNA
cattcatgatggcgatgtgctggtcgtcgatcgggcagaagagccccggcacggcagcatcgtgattgccagcat

SEQ ID NO: 116091 - DNA, 75 bp, synthetic construct
  source 1..75: mol_type = other DNA
cggcaatcctctggcctccggtgttactgggaagccagttcgtttttaatattggcttttacgcggtcgttcctt

SEQ ID NO: 116092 - DNA, 75 bp, synthetic construct
  source 1..75: mol_type = other DNA
cgagtggtttgcgctgtttgcggtatgcggtgaactgggagcggtgatcggcccggtggccggaggcgtgctgag

SEQ ID NO: 116093 - DNA, 75 bp, synthetic construct
  source 1..75: mol_type = other DNA
atcgctctcgtcctcgtggcgcttgctgttggattaatgcaagggatgccgctggataaagttattggctccatc

SEQ ID NO: 116094 - DNA, 75 bp, synthetic construct
  source 1..75: mol_type = other DNA
gttagcccggagctgatggttattgcggttggttccggtagtgtgattttctctcacgtgaacgatccgggcttc

SEQ ID NO: 116095 - DNA, 75 bp, synthetic construct
  source 1..75: mol_type = other DNA
tcggtgacccggtaatggcaacgctgattgccgtgctgattgcgatgttcacctttggtctgaaccgtggtcgtt

SEQ ID NO: 116096 - DNA, 75 bp, synthetic construct
  source 1..75: mol_type = other DNA
attttgccgtactggtattaggactgttttctgcggcgtcttatcaaaagaccgttcgggacaagtatgaaggca

SEQ ID NO: 116097 - DNA, 75 bp, synthetic construct
  source 1..75: mol_type = other DNA
ttacacgggtgcatggtttgcgagcatctcagtgaattcgaatgcagccggatgcttgtcgataccgtcgctcat

SEQ ID NO: 116098 - DNA, 75 bp, synthetic construct
  source 1..75: mol_type = other DNA
ttgagtatgatgaagaggacgaatttgccggtattaagaacacatatcctgatgaaatgctgaaagagttggttg

SEQ ID NO: 116099 - DNA, 75 bp, synthetic construct
  source 1..75: mol_type = other DNA
aaaacttgccacccgcctggatgcagcaaagcacaccacagatcttgccgttgccgtcagacgcaaaacagtcgg

SEQ ID NO: 116100 - DNA, 75 bp, synthetic construct
  source 1..75: mol_type = other DNA
caggatgcagcgcaaccctgacggcagcagctatgaaccgcgacgggtaacagcacgcagtaaaaaggggcgcat

SEQ ID NO: 116101 - DNA, 75 bp, synthetic construct
  source 1..75: mol_type = other DNA
atgcactccacaggatttggttctggcattgccgtaccacacggtaaaagagcctgcgttaaactacccttcgtg

SEQ ID NO: 116102 - DNA, 75 bp, synthetic construct
  source 1..75: mol_type = other DNA
tctgtgcgctcactggctaactgaggtcgacgacgcgctcaattctgagtgggtaagccacggtgcaatctggaa

SEQ ID NO: 116103 - DNA, 75 bp, synthetic construct
  source 1..75: mol_type = other DNA
gacgaacgctacatcgcaggagtgacttgtcaacagatctatgaatctttaagagataaaaagcatcaaatgtag

SEQ ID NO: 116104 - DNA, 75 bp, synthetic construct
  source 1..75: mol_type = other DNA
gatcgttgaaggtaaccttcctacaggtcaccgtaccactatccgctcaggcctgccgtcagcaacatggcgtct

SEQ ID NO: 116105 - DNA, 75 bp, synthetic construct
  source 1..75: mol_type = other DNA
accggaggtccgttacattgcacggcggctattaggggtaaatgaccaagtgccatctgtcttgaaagaaattct

SEQ ID NO: 116106 - DNA, 75 bp, synthetic construct
  source 1..75: mol_type = other DNA
gaaaggttatattctcaatctcaccattcgcggtcagggggggggggggggaaaatcagggacgagaatttgtct

SEQ ID NO: 116107 - DNA, 75 bp, synthetic construct
  source 1..75: mol_type = other DNA
atggctgttaaaggcttaactgcgctgacgctggcagactggggcaagcgcatcgacccgaacgggaaagtcgat

SEQ ID NO: 116108 - DNA, 75 bp, synthetic construct
  source 1..75: mol_type = other DNA
cagggttatctcttccgctgtctccactgcggcaagctgagactgtgtgaaccgccccgggaatcctggagacta

SEQ ID NO: 116109 - DNA, 75 bp, synthetic construct
  source 1..75: mol_type = other DNA
gccgctttggctttttgatgcactggatattgagtttggattctggctggattcagctgcgagcgacaaaaacgc

SEQ ID NO: 116110 - DNA, 75 bp, synthetic construct
  source 1..75: mol_type = other DNA
ggccaccgtactaccgtgcgctctggtttgccatctgctacctggcgtttgcttaactacggcgtgcagccaagc

SEQ ID NO: 116111 - DNA, 75 bp, synthetic construct
  source 1..75: mol_type = other DNA
ttgccggttgtgattgcaggcgatcttagctggtctggtttccgcccggacatgatcaaccgtctgcatccagca

SEQ ID NO: 116112 - DNA, 75 bp, synthetic construct
  source 1..75: mol_type = other DNA
atacatcgacatgctgatcccgcgcggcggggctggtttgcataaactgtgccgcgaacagtcgacaatcccggt

SEQ ID NO: 116113 - DNA, 75 bp, synthetic construct
  source 1..75: mol_type = other DNA
cgcacaatacctgttttcactggaacaggagcttatcaaactgggaatgcaggacgatgggctgaatgatttgct

SEQ ID NO: 116114 - DNA, 75 bp, synthetic construct
  source 1..75: mol_type = other DNA
caggagcttatcaaactgggaatgcaggacgatgggctgaatgatttgctggtatcggtaaaaaaactgctggcg

SEQ ID NO: 116115 - DNA, 75 bp, synthetic construct
  source 1..75: mol_type = other DNA
ggtacactggttggatggcatcgcgcgttttgcctgcgcctgaccgccgggcgcgggactgcgcaccagccggga

SEQ ID NO: 116116 - DNA, 75 bp, synthetic construct
  source 1..75: mol_type = other DNA
ggcgcggcaccgatcaacgtcaccaaccagatgctgttaaagcaactgaatgcgctggaaaaagagatgattatc

SEQ ID NO: 116117 - DNA, 75 bp, synthetic construct
  source 1..75: mol_type = other DNA
tcactgatgatggtaaacatatcattcagggaccaatgtatgacgttagcggaacgactccggtcaatgtcacta

SEQ ID NO: 116118 - DNA, 75 bp, synthetic construct
  source 1..75: mol_type = other DNA
actgacgctgcccgtcagtctgttgcctgctgcccggctgggaaaacagcgcgtacagattagccgtaccggcat

SEQ ID NO: 116119 - DNA, 75 bp, synthetic construct
  source 1..75: mol_type = other DNA
cactttcgaagcctacaaaaaagcggcgctggatgctgaatttgcatccctgtttgacactctggacaccaccaa

SEQ ID NO: 116120 - DNA, 75 bp, synthetic construct
  source 1..75: mol_type = other DNA
aaccgaagagcagctgcgtgagccgcaaaatatgcgcaagctgttaagcaaagtgctgcctaatccggacaatgt

SEQ ID NO: 116121 - DNA, 75 bp, synthetic construct
  source 1..75: mol_type = other DNA
cgcgatcacgccaaagcgatgattgacctgtccgtgacggcgggcaacgtgctggctccgccgaaacgctggcag

SEQ ID NO: 116122 - DNA, 75 bp, synthetic construct
  source 1..75: mol_type = other DNA
agtggctggcggccttgctggcgaatctggagcctgccacacgccagcgtatgatgcgggaactggcgcaggagt

SEQ ID NO: 116123 - DNA, 75 bp, synthetic construct
  source 1..75: mol_type = other DNA
ggcttcgctggcggcgacgctggcttgtcgacctgatgagggaccggtgtggatcttcggttatggatcgttgat

SEQ ID NO: 116124 - DNA, 75 bp, synthetic construct
  source 1..75: mol_type = other DNA
gattagtgaagggaaaccaaaccccgaattgccgatgcagattttaccggtaacgatgcaagagacggtttacgg

SEQ ID NO: 116125 - DNA, 75 bp, synthetic construct
  source 1..75: mol_type = other DNA
agtccggcgctggagtttatcgagtcctgtaccggtacgctggttgggtggcaccgggcgttctgtctgcgtctg

SEQ ID NO: 116126 - DNA, 75 bp, synthetic construct
  source 1..75: mol_type = other DNA
ttgtgcgtcattcaccagatacgtaactcgattaaatatgtggcgtcaaaacaccataaagcgttcatggccgac

SEQ ID NO: 116127 - DNA, 75 bp, synthetic construct
  source 1..75: mol_type = other DNA
atgatctggcagcctgagttcacagataaaacactctccaggaaacccggggcggttcacgacaaggactgctgg

SEQ ID NO: 116128 - DNA, 75 bp, synthetic construct
  source 1..75: mol_type = other DNA
ttacctgggactgatgaatgcgcagaaaaaatggacaatgccagttcagagctggaatttgacattgtcacagtt

SEQ ID NO: 116129 - DNA, 75 bp, synthetic construct
  source 1..75: mol_type = other DNA
ggaaaatctgtcagcgtacttccgctatccggcgaatatccgcaaggtgatctacacaaccaacgcgatagaatc

SEQ ID NO: 116130 - DNA, 75 bp, synthetic construct
  source 1..75: mol_type = other DNA
cgctcaccggccgttttctgcaggcaagtgtcattgaaccgaattgtagcctgcgtgcacagtatctggcgtcac

SEQ ID NO: 116131 - DNA, 75 bp, synthetic construct
  source 1..75: mol_type = other DNA
acagtaacccttgcgtttctgactctcttcgcctgtgtactggcatttatccctgttaaaaccgtccgttatatc

SEQ ID NO: 116132 - DNA, 75 bp, synthetic construct
  source 1..75: mol_type = other DNA
gttgtctggcggcaattttgctgatggatcctgttgccattctctcgcaaagtttatgctctctgccgctgcggt

SEQ ID NO: 116133 - DNA, 75 bp, synthetic construct
  source 1..75: mol_type = other DNA
cgctgcgcaatatcttttttgccagtacggaagtgaagaaagatcccggcagtgatgcgccgcctgcgccattaa

SEQ ID NO: 116134 - DNA, 75 bp, synthetic construct
  source 1..75: mol_type = other DNA
gcgtaccgctgggcgtgattggcgtgatttatgaagcgcggccgaacgtgacggttgatgtcgcttcgctgtgcc

SEQ ID NO: 116135 - DNA, 75 bp, synthetic construct
  source 1..75: mol_type = other DNA
ttaatttcgggaacaacggattatcgcggctttgcccatcgtgacttaattattgaagcggtgtttgaaaatctc

SEQ ID NO: 116136 - DNA, 75 bp, synthetic construct
  source 1..75: mol_type = other DNA
agtatggttcccgttttaccccttgcgagcgtttagtcgagatgagcaagcgtggggaaagtttttggaaaacaa

SEQ ID NO: 116137 - DNA, 75 bp, synthetic construct
  source 1..75: mol_type = other DNA
gcacattgatgccgcgttagtgaaatttggttttccggtaggtccaatccaacttttggatgaggtaggaatcga

SEQ ID NO: 116138 - DNA, 75 bp, synthetic construct
  source 1..75: mol_type = other DNA
cgaccgttcatcagtcctcgacggatgtttactaccgtatccaaagcggcattgatggcgatcgggcagggcgtc

SEQ ID NO: 116139 - DNA, 75 bp, synthetic construct
  source 1..75: mol_type = other DNA
agtgatgcgccgcctgcgccattaaacagcgtgggaattttaggtggtggcttgatgggcggcggtattgcttat

SEQ ID NO: 116140 - DNA, 75 bp, synthetic construct
  source 1..75: mol_type = other DNA
taacgatgtgaaccctgatacttctgcagcaacgccaactgaggagcaagcatcatccgaaggctctcaagaaga

SEQ ID NO: 116141 - DNA, 75 bp, synthetic construct
  source 1..75: mol_type = other DNA
caaatggcggaaagtggcgtgacgttacacgctgatgcaggtgcactggcgcagttgcagacaggccccgcgaag

SEQ ID NO: 116142 - DNA, 75 bp, synthetic construct
  source 1..75: mol_type = other DNA
atgaaaataatgaaacgttttttttatgtgatgtccctgaactggatactggtgttcgttgataaacatatcacc

SEQ ID NO: 116143 - DNA, 75 bp, synthetic construct
  source 1..75: mol_type = other DNA
accggaggtccgttatgcagagcgtcgtctcctaggcgtaaatgatgatgtggaaactgtcattcaggatgcttt

SEQ ID NO: 116144 - DNA, 75 bp, synthetic construct
  source 1..75: mol_type = other DNA
atggctgttaaaggcttaactgcgctaacgctggctgactggggtaagcgcgtcgatccagatgggaaagtcgat

SEQ ID NO: 116145 - DNA, 75 bp, synthetic construct
  source 1..75: mol_type = other DNA
atgcctataactagctctgaatttttatcttctgcggagcgttgctttgcggaagattctgaggttggttatcgt

SEQ ID NO: 116146 - DNA, 75 bp, synthetic construct
  source 1..75: mol_type = other DNA
gcgaatatcgcaaaactgatgattcgtgcccttcatcgaatcccaaatcgtgggatgggacgtcctgttttctac

SEQ ID NO: 116147 - DNA, 75 bp, synthetic construct
  source 1..75: mol_type = other DNA
caggatgcagcgcaatcctgatggcagcagttatgagccgcgcagggtaacagcacgcagcaaaaaggggcgcat

SEQ ID NO: 116148 - DNA, 75 bp, synthetic construct
  source 1..75: mol_type = other DNA
actggctgacggcgctgcttgcgaatctggaaccggcagcccgcaaacgtatgatgcgacagctggcgcaacagc

SEQ ID NO: 116149 - DNA, 75 bp, synthetic construct
  source 1..75: mol_type = other DNA
cacgacaaggactgctggcaaacgccgctttggctttttgatgcactggatattgagtttggattctggctggat

SEQ ID NO: 116150 - DNA, 75 bp, synthetic construct
  source 1..75: mol_type = other DNA
ggcgttactgaaggaacacagtgtgatactggcgagggagtttttcctgccggagaaccgccgttatatcccgga

SEQ ID NO: 116151 - DNA, 75 bp, synthetic construct
  source 1..75: mol_type = other DNA
attgcccgtgttcaccattacggcttgcgcgatcgcgtcagtcgcaaaggacctgaggtccgttacgcagagcgt

SEQ ID NO: 116152 - DNA, 75 bp, synthetic construct
  source 1..75: mol_type = other DNA
tattgcgactaataccaccctcgatcgttctttagttcagggaatgaaaaattgcgatcaaaccggtggcttaag

SEQ ID NO: 116153 - DNA, 75 bp, synthetic construct
  source 1..75: mol_type = other DNA
gcgaccgttcatcagtcctcgacggatgtttactaccgtatccaaagcggcattgatggcgatcgggcagggcgt

SEQ ID NO: 116154 - DNA, 75 bp, synthetic construct
  source 1..75: mol_type = other DNA
gatttatgaagcgcgcccgaacgtgacggtagatgtcgcttcgctgtgcctgaaaacaggtaacgcggtgatcct

SEQ ID NO: 116155 - DNA, 75 bp, synthetic construct
  source 1..75: mol_type = other DNA
tcaccaaacgatgaagtctctgttgaagagtttatgcaggcgctgctggaagccaaaaaacaagggctgacgcgt

SEQ ID NO: 116156 - DNA, 75 bp, synthetic construct
  source 1..75: mol_type = other DNA
actgatcggttatcaccctgaaacgcgaatctctctgtacgttggtttcgcgtggattgttctgctgttgattgg

SEQ ID NO: 116157 - DNA, 75 bp, synthetic construct
  source 1..75: mol_type = other DNA
cgcggtattccgtgggttacggtgctggtgatgactaccgcgctgctgtttgcggtgtatctgaactacatcatg

SEQ ID NO: 116158 - DNA, 75 bp, synthetic construct
  source 1..75: mol_type = other DNA
ttgtccgccattggctgaaagcgccgtggagtatggacggctggcggctggatgtggtgcatatgctgggggagg

SEQ ID NO: 116159 - DNA, 75 bp, synthetic construct
  source 1..75: mol_type = other DNA
cagttaatttacagcttgatgctgaagataaaaaagcgatcgctgcactggattgcaacgaccgcctggtaagcc

SEQ ID NO: 116160 - DNA, 75 bp, synthetic construct
  source 1..75: mol_type = other DNA
tcaccgtcacaggacataaaccgctaatcggcgctattgcgaagacggtcgaagcaatccaggccgaacagcgtg

SEQ ID NO: 116161 - DNA, 75 bp, synthetic construct
  source 1..75: mol_type = other DNA
atgactcagattatcaatgatgaattatatcttgatggcaacgctcgtcagaacctggccactttctgccagacc

SEQ ID NO: 116162 - DNA, 75 bp, synthetic construct
  source 1..75: mol_type = other DNA
gtcgcgcaatggcaacgcaaggaagggcatggacaattggcggaagggattctggtgttgcctgcaatttcggcc

SEQ ID NO: 116163 - DNA, 75 bp, synthetic construct
  source 1..75: mol_type = other DNA
atgaatactgctcgtctgaaccagggcacgccattgttgctcaatgcagtaagcaaacattacgcggaaaatatc

SEQ ID NO: 116164 - DNA, 75 bp, synthetic construct
  source 1..75: mol_type = other DNA
tatggcggcgatctggacggtattagtgataacttgccgtatctgaaaaaacttggtgtaacggcgctgtatctt

SEQ ID NO: 116165 - DNA, 75 bp, synthetic construct
  source 1..75: mol_type = other DNA
ggcatcccggcggtttgcttcaaactgaaagatggtgaagatccgggatacaccctgtacgacctctctgaacgt

SEQ ID NO: 116166 - DNA, 75 bp, synthetic construct
  source 1..75: mol_type = other DNA
cgtatctcgctgtatgtcggtttcgcgtggattgttgtgctgttgattggctggatgtttaaacgccgccacgat

SEQ ID NO: 116167 - DNA, 75 bp, synthetic construct
  source 1..75: mol_type = other DNA
tgctgctgttggcgctgaaaacatcgctactaaccagattgaactctctccttatctgcaaaaccgtaaagtggt

SEQ ID NO: 116168 - DNA, 75 bp, synthetic construct
  source 1..75: mol_type = other DNA
gttggattaggtcttaaaggcaactggcgcgatgcagcgcgtcaggcgctggctgcggtagggctggagaatcgc

SEQ ID NO: 116169 - DNA, 75 bp, synthetic construct
  source 1..75: mol_type = other DNA
acttcctatatgacgctggcgtatggtaaggccctgaaagtatcgcagctaaacacaatgcgactccggcacaag

SEQ ID NO: 116170 - DNA, 75 bp, synthetic construct
  source 1..75: mol_type = other DNA
acctggccactttctgccagacctgggacgacgagaatgtccataaattgatggatttatctataaagaaaaact

SEQ ID NO: 116171 - DNA, 75 bp, synthetic construct
  source 1..75: mol_type = other DNA
aaagaagaatatccgcaatctgcagcaatcgacctgcgttgcgtaaacatggttgccgatctgtggcatgcgcct

SEQ ID NO: 116172 - DNA, 75 bp, synthetic construct
  source 1..75: mol_type = other DNA
agataaaaaagcgatcgccgcactggattgcaacgtccgtctggttagcccggaaggtctggctcctgaatggga

SEQ ID NO: 116173 - DNA, 75 bp, synthetic construct
  source 1..75: mol_type = other DNA
acctggccactttctgccagacctgggacgacgagaacgtccataaattgatggatttctccataaagaaaaact

SEQ ID NO: 116174 - DNA, 75 bp, synthetic construct
  source 1..75: mol_type = other DNA
gcgacaccctgctcccgaaactcatctccggtgagctatccctggaagatcttccggatctcaccaccgatacag

SEQ ID NO: 116175 - DNA, 75 bp, synthetic construct
  source 1..75: mol_type = other DNA
ctgcaggaagaagcaatgccactttacctcaacatggggctaaaccgccgccagattgaaatcatcgcgtcagca

SEQ ID NO: 116176 - DNA, 75 bp, synthetic construct
  source 1..75: mol_type = other DNA
cgcgaagtttctaccgataaagacactacgctgaatctcattgaaaaatttaagcatgagatcagcataattcag

SEQ ID NO: 116177 - DNA, 75 bp, synthetic construct
  source 1..75: mol_type = other DNA
acctggccactttctgccagacctgggacgacgagaaagtccataaattgatggatttatcgataaagaaaaact

SEQ ID NO: 116178 - DNA, 75 bp, synthetic construct
  source 1..75: mol_type = other DNA
cgtttaagcctggagaacgtcaaagagatcgtgattgcagcgggtttgaccgtgggcgatatcgtgaagatgacg

SEQ ID NO: 116179 - DNA, 75 bp, synthetic construct
  source 1..75: mol_type = other DNA
gaaagtggtgtgcaacgtaatgaactctatatcaccactaaaatctggattgaaaatctcaataaagacaaattg

SEQ ID NO: 116180 - DNA, 75 bp, synthetic construct
  source 1..75: mol_type = other DNA
acctggccactttctgccagacctgggacgacgagaaagtccataaattgatggatttgtcaataaagaaaaact

SEQ ID NO: 116181 - DNA, 75 bp, synthetic construct
  source 1..75: mol_type = other DNA
acactgaatttggccacctgaacagaggtgatatgctcacctcagaacaacacaggtgctccaatgaaaaaaaga

SEQ ID NO: 116182 - DNA, 75 bp, synthetic construct
  source 1..75: mol_type = other DNA
ttcttctactaaacgtaaaaacctggaaagtaatcttaaggcacaaaatttacagcttgatgccgaagataaaaa

SEQ ID NO: 116183 - DNA, 75 bp, synthetic construct
  source 1..75: mol_type = other DNA
tgttatttcatctgtgaaaacggcgcttgaacttggttatcgcgcaattgataccgcacaaatctatgataacga

SEQ ID NO: 116184 - DNA, 75 bp, synthetic construct
  source 1..75: mol_type = other DNA
tgactatcacttctaacgtggtgtacggacagaaaaccggtaacacaccggacggtcgccgcgcgggtacgccgt

SEQ ID NO: 116185 - DNA, 75 bp, synthetic construct
  source 1..75: mol_type = other DNA
cggcggcgttatagtttcaaattgctgtggcacgatcgccagcgttggtttacaccgcagggcttcagccgaatg

SEQ ID NO: 116186 - DNA, 75 bp, synthetic construct
  source 1..75: mol_type = other DNA
atgatgttaaatgcatggcacctgccggtgcccccatttgttaaacaaagcaaagatcaactgctcattacactg

SEQ ID NO: 116187 - DNA, 75 bp, synthetic construct
  source 1..75: mol_type = other DNA
gctgcacgatcgtgatgtttatcgcacgatggcatgcggcatcgcgggcctgtcggtggcgacggactccctgtc

SEQ ID NO: 116188 - DNA, 75 bp, synthetic construct
  source 1..75: mol_type = other DNA
ggcagaacagaaatgctcgaagatccttgcattcgcacacatcatgatggtgctgaccgtaatgttcttcgtctt

SEQ ID NO: 116189 - DNA, 75 bp, synthetic construct
  source 1..75: mol_type = other DNA
acaaatactgcttctcgctggataacaataacaccagcttccccatccgtcttgccaagccaaggctcgattcga

SEQ ID NO: 116190 - DNA, 75 bp, synthetic construct
  source 1..75: mol_type = other DNA
ttttatcagatcttcccggatcgttttgcccgtagtttgccacgcgaagccgggcaggatcatgtctattatcat

SEQ ID NO: 116191 - DNA, 75 bp, synthetic construct
  source 1..75: mol_type = other DNA
gccgcagcccattatgcgtcaacaaattgttgccgataatattcacgggaaaccggactggatggcccggtattc

SEQ ID NO: 116192 - DNA, 75 bp, synthetic construct
  source 1..75: mol_type = other DNA
actaaatatggttttgttttaaaggcgaggaaaaatctttctacgattaatgggcaagaaggtgtatactttaaa

SEQ ID NO: 116193 - DNA, 75 bp, synthetic construct
  source 1..75: mol_type = other DNA
taactatgagttcccgcaaccgctgcacgatgcgctggataaattccaggccgacaccggtatcgacatcgacat

SEQ ID NO: 116194 - DNA, 75 bp, synthetic construct
  source 1..75: mol_type = other DNA
gagctggattgacaaaaaagcgttcaccagcgtcaaaggaatgaatgaacctgctgatagtgccatgaatcttgt

SEQ ID NO: 116195 - DNA, 75 bp, synthetic construct
  source 1..75: mol_type = other DNA
cagaccgcactgctttacctgatgacccgtgaacaacgagcggtcaggcaccagggcgagagtgatatggcagga

SEQ ID NO: 116196 - DNA, 75 bp, synthetic construct
  source 1..75: mol_type = other DNA
agccttcacgaagacttttcgtcggtgattcagtcacgacgcgcctggtttagcgccgtgggaggccaacagtga

SEQ ID NO: 116197 - DNA, 75 bp, synthetic construct
  source 1..75: mol_type = other DNA
gagcgcgtagacagcattgcctgcgatctggttgaacgctttatgaagaaaattaaagcgctgccaacctatcgc

SEQ ID NO: 116198 - DNA, 75 bp, synthetic construct
  source 1..75: mol_type = other DNA
agacagtattgtccgccactggctgaaagcgccgtggaatatggacggctggcggctggatgtggtgcatatgct

SEQ ID NO: 116199 - DNA, 75 bp, synthetic construct
  source 1..75: mol_type = other DNA
gtcaaattggtactttcgccatcaacttctcccgcccggcgggtcaggtaattgcacagtactatgaattcctgc

SEQ ID NO: 116200 - DNA, 75 bp, synthetic construct
  source 1..75: mol_type = other DNA
tttgctgaactgttgctggaagactacaaagcctccctgaaatatctcagcgatcacccgaaactgcagggtatt

SEQ ID NO: 116201 - DNA, 75 bp, synthetic construct
  source 1..75: mol_type = other DNA
gttccggccttcactctcggcggtgaagccaccgacatcgtggtgatgcgcattatgtgtcgtcgcggcttcgaa

SEQ ID NO: 116202 - DNA, 75 bp, synthetic construct
  source 1..75: mol_type = other DNA
catgctccttgtgacggctacgagcattttgaaaccggcgaactttatggcaaagggcagtttatcgtcatgcct

SEQ ID NO: 116203 - DNA, 75 bp, synthetic construct
  source 1..75: mol_type = other DNA
aaagcgatgataaaaggcgtgaaaatggtcgagtctggttttggtcacagtattcgcctagttccgaaaatgatt

SEQ ID NO: 116204 - DNA, 75 bp, synthetic construct
  source 1..75: mol_type = other DNA
ttgctcgtagccttcctcgcgaagctgggcaggatcgtgtctattaccatcatgcggccgggcgggagattatcc

SEQ ID NO: 116205 - DNA, 75 bp, synthetic construct
  source 1..75: mol_type = other DNA
acctggcctggtgtaccgtgcatttattacggtgatgaagtgggactggatggcaaaaacgatccgttttgccgt

SEQ ID NO: 116206 - DNA, 75 bp, synthetic construct
  source 1..75: mol_type = other DNA
ggatcgacaaagaagaatatccgcaatccgcagccatcgacctgcgttgcgtaaacatggttgccgatctgtggc

SEQ ID NO: 116207 - DNA, 75 bp, synthetic construct
  source 1..75: mol_type = other DNA
tgatgaaatattgaaaggtctggctaatcaggggctgcttgatgtttctcaacaagctaatggtttcagtagtgt

SEQ ID NO: 116208 - DNA, 75 bp, synthetic construct
  source 1..75: mol_type = other DNA
tttccggttaaggtcaaccatggctatcgttctgctggatacagtgccagtgatgaaatcttgaaaggtctggct

SEQ ID NO: 116209 - DNA, 75 bp, synthetic construct
  source 1..75: mol_type = other DNA
ctcatcaacagcaattacgtatgtttaatcagctcgacagccacgatactgcgcgatttaaaacgctgctcggtc

SEQ ID NO: 116210 - DNA, 75 bp, synthetic construct
  source 1..75: mol_type = other DNA
gcggctgggttatctggcgtgacgaagaagcgctgccgcaggaactggtgttcaacgttgactacctgggtggtc

SEQ ID NO: 116211 - DNA, 75 bp, synthetic construct
  source 1..75: mol_type = other DNA
gggcaaaatgttgagttttggaaccgggcagaaggtgcgtgtattggtcatcgtgaagttgatgaagtgaaggaa

SEQ ID NO: 116212 - DNA, 75 bp, synthetic construct
  source 1..75: mol_type = other DNA
atgaccatcgttcgcttcggtgagcagatgatcgttaaagcgatgagtattctggtattcccgtttgttggcgta

SEQ ID NO: 116213 - DNA, 75 bp, synthetic construct
  source 1..75: mol_type = other DNA
taaggccattggcaaacttggcaatggctggatgatgcacgttgacgccatgcgtaatcctgcaccgtcatacag

SEQ ID NO: 116214 - DNA, 75 bp, synthetic construct
  source 1..75: mol_type = other DNA
ggagaagatcagcaactacttctttggcctgatcaacgtcaccttgtttggcattattttctttcagattcagct

SEQ ID NO: 116215 - DNA, 75 bp, synthetic construct
  source 1..75: mol_type = other DNA
tcccgttctgggattcatgcatgatggtgttatctatcgtggcaatgattctgatgacgcgtaagtatgtggaaa

SEQ ID NO: 116216 - DNA, 75 bp, synthetic construct
  source 1..75: mol_type = other DNA
atgccggaattacaaccggacgccttcccgttctgggattcctgcatgatggtactctccatcgtggcaatgatt

SEQ ID NO: 116217 - DNA, 75 bp, synthetic construct
  source 1..75: mol_type = other DNA
atggatttttttagtgtgcagaatatcctggtacatataccaataggggcaggcggttatgatctctcatggatc

SEQ ID NO: 116218 - DNA, 75 bp, synthetic construct
  source 1..75: mol_type = other DNA
cagcatcgcttcctgacaggtaaccagctcaccgaagccgatattcgcctgtggaccacattgatccgttttgat

SEQ ID NO: 116219 - DNA, 75 bp, synthetic construct
  source 1..75: mol_type = other DNA
gatccgaactactcgattcacgttttggcgcgaagccgatttcgactatcgcagaatcaaaacggtttccgctgc

SEQ ID NO: 116220 - DNA, 75 bp, synthetic construct
  source 1..75: mol_type = other DNA
gcacagtactatgaattcctgcgcctcggtcgtgaaggctatacaaaagtacagaacgcgtccgagcgcacgttc

SEQ ID NO: 116221 - DNA, 75 bp, synthetic construct
  source 1..75: mol_type = other DNA
gcacagtactatgaattcctgcgcctcggtcgtgaaggctatacaaaagtacagaacgcgtcccaccgcacgttc

SEQ ID NO: 116222 - DNA, 75 bp, synthetic construct
  source 1..75: mol_type = other DNA
atcatcgccgcttcaatgggttctacgctgacagtacgcaaagagagcaaaataaaagaattagacattaattaa

SEQ ID NO: 116223 - DNA, 75 bp, synthetic construct
  source 1..75: mol_type = other DNA
gcacagtactatgaattcctgcgcctcggtcgtgaaggctatacaaaagtacagaacgcgtccaaacgcacgttc

SEQ ID NO: 116224 - DNA, 75 bp, synthetic construct
  source 1..75: mol_type = other DNA
ggcccgcgcggactgccagaggacaccaccgtggtgtacctggtgacggaaggcccggtttcccgcgccctgctg

SEQ ID NO: 116225 - DNA, 75 bp, synthetic construct
  source 1..75: mol_type = other DNA
cgccgcgttccagcatgactggctcggcccgcgtggtctggcggaggacaccaccgtggtgtacctggtgacgga

SEQ ID NO: 116226 - DNA, 75 bp, synthetic construct
  source 1..75: mol_type = other DNA
ggtctgctcaacgttactctgtttggtattattttctttcaaattcaactctatgccagtttgctgctgcaggtg

SEQ ID NO: 116227 - DNA, 75 bp, synthetic construct
  source 1..75: mol_type = other DNA
tcctgctaccgctggggcaagacgtttcccatgtcgatttaaccggctggcactggcactgggggccggggcttg

SEQ ID NO: 116228 - DNA, 75 bp, synthetic construct
  source 1..75: mol_type = other DNA
ccaccagccagcaagcctacgacgaggcggtggcgaaagtgtttgaatcgctggcgcgactggagcagattttag

SEQ ID NO: 116229 - DNA, 75 bp, synthetic construct
  source 1..75: mol_type = other DNA
acactctacgtctgttatttgctaaacctcgttatgttaaaccggtcggtacgttatgccgcgcgaaaaaagcca

SEQ ID NO: 116230 - DNA, 75 bp, synthetic construct
  source 1..75: mol_type = other DNA
caagcgtatggaagccgcaggtaaaccgaccaacaaaccaaacctggtgtgcggtccggtacaaatctgctggca

SEQ ID NO: 116231 - DNA, 75 bp, synthetic construct
  source 1..75: mol_type = other DNA
cccggtcagttgtttatggacccgaaacgcatgattgaagcctgcgacgaaaacaccatcggcgtggtgccgact

SEQ ID NO: 116232 - DNA, 75 bp, synthetic construct
  source 1..75: mol_type = other DNA
tatcaatgatgaattatatcttgatggcaacgctcgtcagaacctggccactttctgccagacctgggacgacga

SEQ ID NO: 116233 - DNA, 75 bp, synthetic construct
  source 1..75: mol_type = other DNA
acggtggcaggcagtggtgaattacgtctgaacggcgcaatcccggaacggtggcaaatatcgttgccgataagt

SEQ ID NO: 116234 - DNA, 75 bp, synthetic construct
  source 1..75: mol_type = other DNA
ggtccgaactactcgattcacgttttggcgcaaagccgatttcgactatcgcagaatcaaaacgctttccgctgc

SEQ ID NO: 116235 - DNA, 75 bp, synthetic construct
  source 1..75: mol_type = other DNA
ggtccgaactactcgattcacgttttggcgccaagccgatttcgactatcgcagaatcaaaacgatttccgctgc

SEQ ID NO: 116236 - DNA, 75 bp, synthetic construct
  source 1..75: mol_type = other DNA
gctggacgtctccgccagcaagggcgggcacatcctggagccaatgcgcattgtccgcgaagagaaaaagacgac

SEQ ID NO: 116237 - DNA, 75 bp, synthetic construct
  source 1..75: mol_type = other DNA
cactggcaaaggcggttttgccgcagagaaagatcgttatcatctctatgtttcactcgcctgcccgtgggcgca

SEQ ID NO: 116238 - DNA, 75 bp, synthetic construct
  source 1..75: mol_type = other DNA
gtgcgtgcaatttattttggaatggtctttctttatactcttgatcttatcgatttcgatgagccatatgtgata

SEQ ID NO: 116239 - DNA, 75 bp, synthetic construct
  source 1..75: mol_type = other DNA
gctccgaactactcgattcacgttttggcgctaagccgatttcgactatcgcagaatcaaaacgttttccgctgc

SEQ ID NO: 116240 - DNA, 75 bp, synthetic construct
  source 1..75: mol_type = other DNA
cggtcgcgctcacccgctatgccgcacagatgttatatgccccgctacgcaccgtagagcctttgccgggcgctc

SEQ ID NO: 116241 - DNA, 75 bp, synthetic construct
  source 1..75: mol_type = other DNA
ggcatgacacctggtacgataccaaatctaccggcggtaaatttcaacgttcagcttccgcatttcgtaactggc

SEQ ID NO: 116242 - DNA, 75 bp, synthetic construct
  source 1..75: mol_type = other DNA
gagaaagatcgttatcatctctatgtttcactcgcctgcccgtgggcgcaccgcacgctgatcatgcgtaaactc

SEQ ID NO: 116243 - DNA, 75 bp, synthetic construct
  source 1..75: mol_type = other DNA
ccgattcaatcgcaacaattaaacaactgtctgaaacatacggtgatggttgggttgatgaatggctacgcacta

SEQ ID NO: 116244 - DNA, 75 bp, synthetic construct
  source 1..75: mol_type = other DNA
agcgacatctgtagcaaccgcatctgcgacggaagatgaaggtctggatgacctactgagagagctggactctct

SEQ ID NO: 116245 - DNA, 75 bp, synthetic construct
  source 1..75: mol_type = other DNA
gatggttgggttgatgaatggctacgcactaaaggactggacttaaatgattacgagtatgaggttgctgcatga

SEQ ID NO: 116246 - DNA, 75 bp, synthetic construct
  source 1..75: mol_type = other DNA
gggtgtggcgcaggctgctgacgtaacagctcaggctgtagcgacctgtgaggtgtactgccaaaaaagacacca

SEQ ID NO: 116247 - DNA, 75 bp, synthetic construct
  source 1..75: mol_type = other DNA
gcacagtactatgaattcctgcgcctcggtcgtgaaggctatacaaaagtacagaacgcttcctaacgcacgttc

SEQ ID NO: 116248 - DNA, 75 bp, synthetic construct
  source 1..75: mol_type = other DNA
ccggcatgatgtttgtgacccgtaatatcgactggtatgcgttttcactgccgaaaatgaaagccagtaaagaag

SEQ ID NO: 116249 - DNA, 75 bp, synthetic construct
  source 1..75: mol_type = other DNA
gcacagtactatgaattcctgcgcctcggtcgtgaaggctatacaaaagtacagaacgcatccgaacgcacgttc

SEQ ID NO: 116250 - DNA, 75 bp, synthetic construct
  source 1..75: mol_type = other DNA
tgaactgttgctggaagactacaaagcctccctgaaatatctcagcgaccacccgaaactgcagggtattgccca

SEQ ID NO: 116251 - DNA, 75 bp, synthetic construct
  source 1..75: mol_type = other DNA
ggcgtgatgaagaagcgctgccgcaggaactggtgttcaacgttgactacctcggtggtcagattggtactttcg

SEQ ID NO: 116252 - DNA, 75 bp, synthetic construct
  source 1..75: mol_type = other DNA
ccaggttgccgcttatctggcggatgaaatcgccaaactggggccgtatgagttcatctgtaccggtcgcccgga

SEQ ID NO: 116253 - DNA, 75 bp, synthetic construct
  source 1..75: mol_type = other DNA
cagactttcggtatgcactacgttaagtatcagaacgaggaaggtaaagaagcaaccatcgcttatatttgtgag

SEQ ID NO: 116254 - DNA, 75 bp, synthetic construct
  source 1..75: mol_type = other DNA
gatttgtcgatcaataaaaactggatcgacaaagaagaatatccgcaatctgcagccatcgacctgcgttgcgta

SEQ ID NO: 116255 - DNA, 75 bp, synthetic construct
  source 1..75: mol_type = other DNA
acctggccactttctgccagacctgggacgacgagaaggtccataaattgatggatttatcaataaagaaaaact

SEQ ID NO: 116256 - DNA, 75 bp, synthetic construct
  source 1..75: mol_type = other DNA
gagagcttgtctcatttcgcattaataaagcgattggcagactcggcaacggctggatgatgcacgttgatgcaa

SEQ ID NO: 116257 - DNA, 75 bp, synthetic construct
  source 1..75: mol_type = other DNA
cattgatgaatcaatgccccgtaagctgatagtaaaaaatgttgcgcactttgaggaccgcgtaggctacacaac

SEQ ID NO: 116258 - DNA, 75 bp, synthetic construct
  source 1..75: mol_type = other DNA
aggggtacatgacgttagccgggcatcaagcctttcaacagcgaaagcacagattgaactagtggcgcaggaaat

SEQ ID NO: 116259 - DNA, 75 bp, synthetic construct
  source 1..75: mol_type = other DNA
taattatcctgaagacagataaaaaccacgatctgttgagctggaacgaaaagcggacagataacggcttactca

SEQ ID NO: 116260 - DNA, 75 bp, synthetic construct
  source 1..75: mol_type = other DNA
atgattgaagcctgtgacgaaaacaccatcggcgtggtgccgactttcggcgtgacctacactggtaactatgag

SEQ ID NO: 116261 - DNA, 75 bp, synthetic construct
  source 1..75: mol_type = other DNA
gttcatttattttcagaatacaggcgaccggggtattgcgccatgtgaaggacggacagccggtgtatgtcggcg

SEQ ID NO: 116262 - DNA, 75 bp, synthetic construct
  source 1..75: mol_type = other DNA
gcacagtactatgaattcctgcgcctcggtcgtgaaggctatacaaaagtacagaacgcctccgaccgcacgttc

SEQ ID NO: 116263 - DNA, 75 bp, synthetic construct
  source 1..75: mol_type = other DNA
tggctgcagacaatgacagtcagtggttattcgggagtgagtcatttcagtgatgcctccctgcgtcaggttgaa

SEQ ID NO: 116264 - DNA, 75 bp, synthetic construct
  source 1..75: mol_type = other DNA
tgtactggcctggaacacgccgggagaagatttcagcggagagcttaagctggaaggcccggtgaccagcacccg

SEQ ID NO: 116265 - DNA, 75 bp, synthetic construct
  source 1..75: mol_type = other DNA
acgtgggcagtatgattgacggattcgctttcaatttgcagccgtgggctcgcgagcatttacagaacaacactc

SEQ ID NO: 116266 - DNA, 75 bp, synthetic construct
  source 1..75: mol_type = other DNA
tattgctgacttcatgacctttgagattgaacacctcatgaacatggatcagaaatacgcgctgccggtgctgct

SEQ ID NO: 116267 - DNA, 75 bp, synthetic construct
  source 1..75: mol_type = other DNA
actgtccgaaacatacggtgatggctgggtagatgaatggctacgcactaagggtctggacttaaatgattatga

SEQ ID NO: 116268 - DNA, 75 bp, synthetic construct
  source 1..75: mol_type = other DNA
atggaacgttttcttgaaaatgcaatgtatgcttctcgctggctgcttgcccccgtgtactttggcctttcgctg

SEQ ID NO: 116269 - DNA, 75 bp, synthetic construct
  source 1..75: mol_type = other DNA
ctacgctgaatctcattgaaaaatttaaacatgagatcagcataattcaggcaaacctttcgcaggctgtttcga

SEQ ID NO: 116270 - DNA, 75 bp, synthetic construct
  source 1..75: mol_type = other DNA
accccaaattgcaaccgtgggttttgttcactcgcatagagacaaataaaccgacgaaagtaaaagatgccatcg

SEQ ID NO: 116271 - DNA, 75 bp, synthetic construct
  source 1..75: mol_type = other DNA
gtaaacatggttgctgacttgtggcatgcgcctgcaccgaaaaatggtcaggccgttggcaccaacaccattggt

SEQ ID NO: 116272 - DNA, 75 bp, synthetic construct
  source 1..75: mol_type = other DNA
gtgaacaaaccgcagtccctgcgcagcgccctgaataaagcggtggcgtatgtccgcaacaacccggataagctg

SEQ ID NO: 116273 - DNA, 75 bp, synthetic construct
  source 1..75: mol_type = other DNA
ctcagtcagcgtctggttcagctgatatgtccccactgtcgtcatccatggaatgacgtagcatcccgtcgtact

SEQ ID NO: 116274 - DNA, 75 bp, synthetic construct
  source 1..75: mol_type = other DNA
ggcgataaaagccgccatgaccgggcatctgatgctgaccaccatccatgccaacgacccgattaatatcctcga

SEQ ID NO: 116275 - DNA, 75 bp, synthetic construct
  source 1..75: mol_type = other DNA
tcaggcaattattggtaatgcgcgggcgtacctgcaaatggaacagaacggcgaaccgtttgccgactttgtttg

SEQ ID NO: 116276 - DNA, 75 bp, synthetic construct
  source 1..75: mol_type = other DNA
tcaacgcatttttgttgttgtcgggggggggaagagtaaaggcatttgcctcgctcagggattcagccaggtgct

SEQ ID NO: 116277 - DNA, 75 bp, synthetic construct
  source 1..75: mol_type = other DNA
gacgtttaaagcggaagtggagcgtcgcgcggggatcaaatttgaaccgatccgtccgtatgagttcaccggacg

SEQ ID NO: 116278 - DNA, 75 bp, synthetic construct
  source 1..75: mol_type = other DNA
accgatgaagaaccgatcctcggtcagacttatttgccgcgtaaattcaaaaccacggtagtgatcccgccgcag

SEQ ID NO: 116279 - DNA, 75 bp, synthetic construct
  source 1..75: mol_type = other DNA
taaaaatgccaaaaccaaatacacgctggagcgcgtgggggttgagacgtttaaagcggaagttgaacgtcgcgc

SEQ ID NO: 116280 - DNA, 75 bp, synthetic construct
  source 1..75: mol_type = other DNA
gatcgtaaaaatgccaaaaccaaatacacgctggagcgcgtgggggttgagacgtttaaagcggaagtcgaacgt

SEQ ID NO: 116281 - DNA, 75 bp, synthetic construct
  source 1..75: mol_type = other DNA
cgtgttgctgtggctcagagagaaccagccggacgccatcaacaacccggagctgcgcgaaaaactgttcacctt

SEQ ID NO: 116282 - DNA, 75 bp, synthetic construct
  source 1..75: mol_type = other DNA
ggcttcggcgactttacggtgcgtgcggacatcattcgcccggtgctcgatccggcgcgcgatttgtgggattaa

SEQ ID NO: 116283 - DNA, 75 bp, synthetic construct
  source 1..75: mol_type = other DNA
cagcgccctgaaggcattatcacgctctcaggccccaccggctcaggaaaatccaccacgctgagaaccgcctct

SEQ ID NO: 116284 - DNA, 75 bp, synthetic construct
  source 1..75: mol_type = other DNA
aacgtggtgatagaggatttcagcggcgaccaaaatctgctgatggccccggttttactgtggcttcgggataac

SEQ ID NO: 116285 - DNA, 75 bp, synthetic construct
  source 1..75: mol_type = other DNA
cggattttgtcgctaaacgtcttgctccggcattaccggctaatgacggtaagcaaacccccatgcgcgggcatc

SEQ ID NO: 116286 - DNA, 75 bp, synthetic construct
  source 1..75: mol_type = other DNA
tcccgaccttcagtatgctgggctaccaccctgagcaggagcgcaccctgcgacgtattctgcaacgtcctgaag

SEQ ID NO: 116287 - DNA, 75 bp, synthetic construct
  source 1..75: mol_type = other DNA
attatggaggtacagttctgataaagaatgactggactatcgatatgggcttgtttaataaatccaaaacagaag

SEQ ID NO: 116288 - DNA, 75 bp, synthetic construct
  source 1..75: mol_type = other DNA
tatcggtaagttctacgtgctggcggtcggtgtccaggcacacttgtggtggctggtgggtgccgtggttgttgg

SEQ ID NO: 116289 - DNA, 75 bp, synthetic construct
  source 1..75: mol_type = other DNA
ggctggtgggcgcggtggttgtcggttcggcaatcggcctctactactacctgcgcgtggcggtgagcctgtatc

SEQ ID NO: 116290 - DNA, 75 bp, synthetic construct
  source 1..75: mol_type = other DNA
tcacaaatatgacaatactcttattaatggaagcatattatctaaattctctgtttcgccgaatacacctcttat

SEQ ID NO: 116291 - DNA, 75 bp, synthetic construct
  source 1..75: mol_type = other DNA
ttaaaatgagtgttcacatatgttatgagggattatttcctgaggctaaatttcgaagaaaagacatgtccattg

SEQ ID NO: 116292 - DNA, 75 bp, synthetic construct
  source 1..75: mol_type = other DNA
tgccgcaccgtggcaattcctgaccggctattatcagtatcgtcagcaactaaactcgctaacaaagctactgaa

SEQ ID NO: 116293 - DNA, 75 bp, synthetic construct
  source 1..75: mol_type = other DNA
ggaacagttcttatagacaaggattggaaaattgatatgaacctattcaaaaggtcaaaaacggagcctttttta

SEQ ID NO: 116294 - DNA, 75 bp, synthetic construct
  source 1..75: mol_type = other DNA
ctacctgtgactgatatacctgctttaaatttatttattttaaatttgtttcccaccatcattttcaaattcaac

SEQ ID NO: 116295 - DNA, 75 bp, synthetic construct
  source 1..75: mol_type = other DNA
gtcgcagtgctatctgaaaccaacggcgatatacgggtgaaggttgtggaagccaaaaaacacataccatctgta

SEQ ID NO: 116296 - DNA, 75 bp, synthetic construct
  source 1..75: mol_type = other DNA
aaatgcatcaagtacgtgattttatcgctgcaaactggagcctgtttacttcgcacatccgcgagaaaagcatga

SEQ ID NO: 116297 - DNA, 75 bp, synthetic construct
  source 1..75: mol_type = other DNA
cactgacggcactgtgtccagcgttgaagctgtagcggaacccgatgaacctgaagaagtgtggacggtgaaacg

SEQ ID NO: 116298 - DNA, 75 bp, synthetic construct
  source 1..75: mol_type = other DNA
catacccagattgttgtatgccttatttgcggggcgaaaggggatgcctgccattgcgcgatattttatggatga

SEQ ID NO: 116299 - DNA, 75 bp, synthetic construct
  source 1..75: mol_type = other DNA
ctgcgcgtggcggtgagcctgtaccttcatggttcagaacagccaaaccgtgatgcgccgtcagactggcagtac

SEQ ID NO: 116300 - DNA, 75 bp, synthetic construct
  source 1..75: mol_type = other DNA
aattgacggaacgtgtgctggtcagtactgacggcagtgtgtcgagtgttgaagctgtagcagaacccgatgaac

SEQ ID NO: 116301 - DNA, 75 bp, synthetic construct
  source 1..75: mol_type = other DNA
attccggcacagaatgcggttctggacgtcacctttgaattccctcgcggacgagcgacaaaagatcgactctat

SEQ ID NO: 116302 - DNA, 75 bp, synthetic construct
  source 1..75: mol_type = other DNA
cactcggtgcgctggacgctttaacgcgactcgagatgatcagacatgagataaatgaagggggatccgtgagat

SEQ ID NO: 116303 - DNA, 75 bp, synthetic construct
  source 1..75: mol_type = other DNA
ccagcctggcccgggcctttttttatattgtgctgctgtcgattctttccactggaattgccctgctgactctgg

SEQ ID NO: 116304 - DNA, 75 bp, synthetic construct
  source 1..75: mol_type = other DNA
gtctgaaatatattacagccgcaggactggtctgaatgaattatcggaaatatcagagggaacttataatgagag

SEQ ID NO: 116305 - DNA, 75 bp, synthetic construct
  source 1..75: mol_type = other DNA
cctgattgttttcggatgccggacggtagaactgaggttatcggagatcagcgagtgggattttaccgaaatgct

SEQ ID NO: 116306 - DNA, 75 bp, synthetic construct
  source 1..75: mol_type = other DNA
acgtcatgagcttaattacaccgtacaggaagcgttaaagccggtaacggttggcgatgcgctcacctactggct

SEQ ID NO: 116307 - DNA, 75 bp, synthetic construct
  source 1..75: mol_type = other DNA
tgtcaaaggccgtctgcatgcgccgaaaggcaaagatttcgacgacgccgttgcctactggaaaaccctgcaaac

SEQ ID NO: 116308 - DNA, 75 bp, synthetic construct
  source 1..75: mol_type = other DNA
agtgaatggtggcggcgcatatttaggtagttcaatcaagcatgaggatccaaccgcatcagtagcaggctcgat

SEQ ID NO: 116309 - DNA, 75 bp, synthetic construct
  source 1..75: mol_type = other DNA
tgtagatacacacgatgctcagcgtcagatgctggttggaatggtgcatggtatctattgcgatccaaatacatc

SEQ ID NO: 116310 - DNA, 75 bp, synthetic construct
  source 1..75: mol_type = other DNA
gaaagacagcggcggcaagccggatattattttgattgccactggttcagagatggaaatcaccctgcaagcggc

SEQ ID NO: 116311 - DNA, 75 bp, synthetic construct
  source 1..75: mol_type = other DNA
cgtgacttgctcgtggaagtttttctcgacggacgcggcaacgctctgaatcacgaatcccctttcctgttttcc

SEQ ID NO: 116312 - DNA, 75 bp, synthetic construct
  source 1..75: mol_type = other DNA
atatattacagccgcaggactggtctgaatgaatcatcggaaatatcagagggaacttataatgagagaaaataa

SEQ ID NO: 116313 - DNA, 75 bp, synthetic construct
  source 1..75: mol_type = other DNA
gccatggaaatcggtgattgataacgttgggttaggccttaaaggccagtggcgcgatgccgcgcgtcgggcgtt

SEQ ID NO: 116314 - DNA, 75 bp, synthetic construct
  source 1..75: mol_type = other DNA
ctcgaaaggaatggcagaatatgggttgtcagcatcgacactagctacatcgatgtcaaaggataataaattacc

SEQ ID NO: 116315 - DNA, 75 bp, synthetic construct
  source 1..75: mol_type = other DNA
aaatgcctggtcattcgcctgtaaaaccgccaatggtacggctattcctattggcggcggtagcgccaatgtcta

SEQ ID NO: 116316 - DNA, 75 bp, synthetic construct
  source 1..75: mol_type = other DNA
ggaatcggttcagatggtttacggcgacgcccatgttgaggcagtggaatttgtacccggtgagaacgccaatga

SEQ ID NO: 116317 - DNA, 75 bp, synthetic construct
  source 1..75: mol_type = other DNA
acggcaaattagcttgcgccatgctggaatcggttcagatggtgtacggcgatgccagggtcgaggcagttgaat

SEQ ID NO: 116318 - DNA, 75 bp, synthetic construct
  source 1..75: mol_type = other DNA
caccaaacagtggcaggcgatcgacaaatttgcagtggaaaacaccatttacggtagcattcgcctgaccaaccg

SEQ ID NO: 116319 - DNA, 75 bp, synthetic construct
  source 1..75: mol_type = other DNA
gcggtactgattcagatcccggacgccagcccgctggcgattcagggactgggggcggcgctgggcattgccggt

SEQ ID NO: 116320 - DNA, 75 bp, synthetic construct
  source 1..75: mol_type = other DNA
gcgtgagaatccgccagtcgaaaccgtagcatggaaagacgctgttgagtgggttatcgaagaggcttgtcaggc

SEQ ID NO: 116321 - DNA, 75 bp, synthetic construct
  source 1..75: mol_type = other DNA
gtcatgggagtaccgctataccctgaacgtggtgatagaggatttcagtggcgaccagaatctgctgatggcccc

SEQ ID NO: 116322 - DNA, 75 bp, synthetic construct
  source 1..75: mol_type = other DNA
ggccgggtcattaattgccgtgcttattttgcgccagacgaataactataacggcgacgattttcagttcgtctg

SEQ ID NO: 116323 - DNA, 75 bp, synthetic construct
  source 1..75: mol_type = other DNA
tccaccagcaaccgtaactttgaaggccgccaggggcgtggcgggcgcacgcatctggtcagcccggcaatggct

SEQ ID NO: 116324 - DNA, 75 bp, synthetic construct
  source 1..75: mol_type = other DNA
cagactatgtcacactgcaacgaggctcggcttatggcggcgtgttatctaatttttccgggaccgtaaaatata

SEQ ID NO: 116325 - DNA, 75 bp, synthetic construct
  source 1..75: mol_type = other DNA
gaatggcgcttgcctggctgctcaatgtgtctggcgatgaacaacgaccgtctgaatccgggcgaacgttgtgcc

SEQ ID NO: 116326 - DNA, 75 bp, synthetic construct
  source 1..75: mol_type = other DNA
caggcgtgtaaacaggcgcttaagttctgccgaaaacgtcgctacgcagtcagtaacgttctggatgatctcaac

SEQ ID NO: 116327 - DNA, 75 bp, synthetic construct
  source 1..75: mol_type = other DNA
cgcggaagcgtatgaatgggcgaagaaaatttctgagcacctgctgccacgtactcgtgcatatgcggagatttg

SEQ ID NO: 116328 - DNA, 75 bp, synthetic construct
  source 1..75: mol_type = other DNA
tgaccgaagtggctatcgacaaagtgtttatcggttcctgcaccaactcacgtattgaagatttacgcgcggcgg

SEQ ID NO: 116329 - DNA, 75 bp, synthetic construct
  source 1..75: mol_type = other DNA
aaggtgcgaaagaagcaggcaaaatgcgtgcagaaggcaaagattacatcgttaaagatggcgatgtaatgaact

SEQ ID NO: 116330 - DNA, 75 bp, synthetic construct
  source 1..75: mol_type = other DNA
gaacattgtgattgtacaggttggcctttattttaaaaaagtaggtgtcagaggtaatttttatacggatctcaa

SEQ ID NO: 116331 - DNA, 75 bp, synthetic construct
  source 1..75: mol_type = other DNA
caaaattgcaggcgaaatggtgtcgctggaaatggtggaacaactggcacttggtgtttcgccagataaagtcca

SEQ ID NO: 116332 - DNA, 75 bp, synthetic construct
  source 1..75: mol_type = other DNA
gtgattgatagccttggctatgcgtgggccgatcaggcattgctggaagtggtcaatcgctttcgtgaaaaactc

SEQ ID NO: 116333 - DNA, 75 bp, synthetic construct
  source 1..75: mol_type = other DNA
cggcggcattctggcaacggcggactggctttcgcgcaacgcggtcgccagcggcaaagcgccgttgaccatgaa

SEQ ID NO: 116334 - DNA, 75 bp, synthetic construct
  source 1..75: mol_type = other DNA
acggtattccaaaactggtcgataaattcaaaatcaacctcgcgcgccagttcccgactcgacagcagcagcgca

SEQ ID NO: 116335 - DNA, 75 bp, synthetic construct
  source 1..75: mol_type = other DNA
gggctttgtgcagattcagggccgcgcaaaacgctttgccaaaattgcaggcgaaatggtgtcgctggaaatggt

SEQ ID NO: 116336 - DNA, 75 bp, synthetic construct
  source 1..75: mol_type = other DNA
agacaacgttgcgcaagataaacgcatcgacgccctgcgcgagaagatcaattgctttgaagatccggcgtttac

SEQ ID NO: 116337 - DNA, 75 bp, synthetic construct
  source 1..75: mol_type = other DNA
tgacaaactcgggctgcgcaaatacctgctgtggattattaccggcatgttagtgatgtttgcgccgttctttat

SEQ ID NO: 116338 - DNA, 75 bp, synthetic construct
  source 1..75: mol_type = other DNA
ttctgggaaaaccagctcggctttgcaccgctgaatcgcggctttgtggcgctgttcctgttgctgctgatggct

SEQ ID NO: 116339 - DNA, 75 bp, synthetic construct
  source 1..75: mol_type = other DNA
gtctggttaaacgtcgcttgttcccgcaaattactctgcatattttgccaccaacgcaggtggagatgccggatg

SEQ ID NO: 116340 - DNA, 75 bp, synthetic construct
  source 1..75: mol_type = other DNA
atgaagtctgaaggtttaactccggcacaactggcagagcgtaatgctaactatgtgacagaaatttaccgactt

SEQ ID NO: 116341 - DNA, 75 bp, synthetic construct
  source 1..75: mol_type = other DNA
gcgtggggggacggtcagtcgctgcgcacttaccgccatgcaccgaataccggcacacgtaaatcctgggcagca

SEQ ID NO: 116342 - DNA, 75 bp, synthetic construct
  source 1..75: mol_type = other DNA
acaatgttccagcgtgccgaacagtggctatatctgttgacgacaacggcatcgttacccatacacaggaaattc

SEQ ID NO: 116343 - DNA, 75 bp, synthetic construct
  source 1..75: mol_type = other DNA
gcgtaaatcagataccacatggacgttaggcttgtttggtacggcaatcggcgccggggtgctgttcttccctat

SEQ ID NO: 116344 - DNA, 75 bp, synthetic construct
  source 1..75: mol_type = other DNA
ggtcgaaccgaacttgccgaaacgctttacggattacgtccgttaaggggggggagcattgtacttggtgatctg

SEQ ID NO: 116345 - DNA, 75 bp, synthetic construct
  source 1..75: mol_type = other DNA
tgtgccgtgttttgtatcgcgttcgcgttacgggtgacacccaggcactgaagggcgagcgcgttctaatcacgc

SEQ ID NO: 116346 - DNA, 75 bp, synthetic construct
  source 1..75: mol_type = other DNA
acagttatgtgaaaacatggggttgcggaggttttttgaatgagacgaacatttacagcagaggaaaaagcctct

SEQ ID NO: 116347 - DNA, 75 bp, synthetic construct
  source 1..75: mol_type = other DNA
gcgatccaatctgggctacggaagtgatcggcgggatggggctggatggccgcacactggtgaccaaaaactcct

SEQ ID NO: 116348 - DNA, 75 bp, synthetic construct
  source 1..75: mol_type = other DNA
cgcccggacgaaggcatcccggcggtttgcttcaaactgaaagatggtgaagatccaggatacaccctgtacgac

SEQ ID NO: 116349 - DNA, 75 bp, synthetic construct
  source 1..75: mol_type = other DNA
tggtgtgcggtccggtacaaatctgctggcataaattcgcccgctactgggatgtggagctgcgtgagatcccta

SEQ ID NO: 116350 - DNA, 75 bp, synthetic construct
  source 1..75: mol_type = other DNA
gcacatcgacgccgccagcggtggcttcctggcaccgttcgtcgccccggatatcgtctgggacttccgcctgcc

SEQ ID NO: 116351 - DNA, 75 bp, synthetic construct
  source 1..75: mol_type = other DNA
gcgttttattagaattatgtttcaatttgctatgagaaacaaactaaaagaagtatatgttactatatttgataa

SEQ ID NO: 116352 - DNA, 75 bp, synthetic construct
  source 1..75: mol_type = other DNA
ggtagctggctgggtggccgaaaaccagatcgcactgctctacctgatgacccgcgaacagcgggcggtcagaca

SEQ ID NO: 116353 - DNA, 75 bp, synthetic construct
  source 1..75: mol_type = other DNA
gatgcgctggataaattccaggccgataccggtatcgacatcgacatgcacgtcgacgctgccagcggtggcttc

SEQ ID NO: 116354 - DNA, 75 bp, synthetic construct
  source 1..75: mol_type = other DNA
tgctacggcgattaagagcgatatcagcaagggcgaggcgttggtactgttcaccactgatagcgaactaacgcg

SEQ ID NO: 116355 - DNA, 75 bp, synthetic construct
  source 1..75: mol_type = other DNA
tttacgccgctgttgaccggcgcagaagtgtttctttaccccagtccgctgcattaccgcattgtaccggagctg

SEQ ID NO: 116356 - DNA, 75 bp, synthetic construct
  source 1..75: mol_type = other DNA
aataaatacgtctttttattgattatcaatctattgctgctggtgcttggcatgttccttgaaggtagtgccatt

SEQ ID NO: 116357 - DNA, 75 bp, synthetic construct
  source 1..75: mol_type = other DNA
ctacaaagcctccctgaaatatctcagcgaccacccgaaactgcagggtattgcccagcagaacagctttaaaca

SEQ ID NO: 116358 - DNA, 75 bp, synthetic construct
  source 1..75: mol_type = other DNA
atgagtgaactactaaaaaatatggcgctcaatggacttggtattgcctggcttccactctggtcaattgctgat

SEQ ID NO: 116359 - DNA, 75 bp, synthetic construct
  source 1..75: mol_type = other DNA
gccagcgttaaaggaatgaatgaacctgctgatagtgcaatgaatcttgttaaaaccagtaatggttggaaagct

SEQ ID NO: 116360 - DNA, 75 bp, synthetic construct
  source 1..75: mol_type = other DNA
gcctcgccacctgtactttcgcctacccgtggcttgaaggctataacgacaacaaggatgagttctacctgttgg

SEQ ID NO: 116361 - DNA, 75 bp, synthetic construct
  source 1..75: mol_type = other DNA
catctgtttgtggataacggttcgttggttgccacgggggccagctccatgtcatgggagtaccgctataccctg

SEQ ID NO: 116362 - DNA, 75 bp, synthetic construct
  source 1..75: mol_type = other DNA
tctgtttctgttgtgttttttgtgggggcaattgtgggatggatttcggtgtctgaaatatattacagccgcatg

SEQ ID NO: 116363 - DNA, 75 bp, synthetic construct
  source 1..75: mol_type = other DNA
acaaagcctccctgaaatatctcagcgatcacccgaaactgcagggtattgcccagcagaacagctttaaacaca

SEQ ID NO: 116364 - DNA, 75 bp, synthetic construct
  source 1..75: mol_type = other DNA
cgaaatgggttacccgtcagccctgaccgcgccggtatggggcttctacgacgtctcctttaaaggtgaatcgtt

SEQ ID NO: 116365 - DNA, 75 bp, synthetic construct
  source 1..75: mol_type = other DNA
cgaaatgggttacccgtcagccctgaccgcgccggtgtggggcttctacgacgtctcctttaaaggtgagtcgtt

SEQ ID NO: 116366 - DNA, 75 bp, synthetic construct
  source 1..75: mol_type = other DNA
tacgaaatcagctctaaagtggcctacgacaccgcacattactgcctgctcgacacgctcggctgcggtctggaa

SEQ ID NO: 116367 - DNA, 75 bp, synthetic construct
  source 1..75: mol_type = other DNA
tgatctctttgccgctgtttggcctggtcggttacgctttccgccagaaacgttcgctggaagccagtatcaaat

SEQ ID NO: 116368 - DNA, 75 bp, synthetic construct
  source 1..75: mol_type = other DNA
tggacgccagacgtataccagggcgcgcctgcgccggtttccactttcctggcgacggcgagtaaaatcgctatc

SEQ ID NO: 116369 - DNA, 75 bp, synthetic construct
  source 1..75: mol_type = other DNA
tactgacggcagtgtgtcgagtgttgaagctgtagcagaacccgatgaacctgaagaaatgtggacggtgaaacg

SEQ ID NO: 116370 - DNA, 75 bp, synthetic construct
  source 1..75: mol_type = other DNA
gaaggcttagctaagcttgttcttggtgaaatcgaagaggggtgctctctctgtgaacaagggttgagactcgct

SEQ ID NO: 116371 - DNA, 75 bp, synthetic construct
  source 1..75: mol_type = other DNA
tgatgattgtcggcctcggcttcaagctctctctggtgccgttccacctgtggacaccagacgtataccagggcg

SEQ ID NO: 116372 - DNA, 75 bp, synthetic construct
  source 1..75: mol_type = other DNA
ggtcagattggtactttcgccatcaacttctcccgcccggcgggtcaggtgattgcacagtactatgaattcctg

SEQ ID NO: 116373 - DNA, 75 bp, synthetic construct
  source 1..75: mol_type = other DNA
aaaaaataaaaaccggcacccaaaagatcgctaaggtttttaattttggatggggtaacacaacaaatattaaac

SEQ ID NO: 116374 - DNA, 75 bp, synthetic construct
  source 1..75: mol_type = other DNA
agcgcgggcggtatcgtggtattgatctccgcactgttggtactggtgctgggtgtatggccacaaccgctgatt

SEQ ID NO: 116375 - DNA, 75 bp, synthetic construct
  source 1..75: mol_type = other DNA
aaggaatacggctgtatgcttttcaacctgccaatgatgatgattcaagtagaaaatattcaattgtaaaaatta

SEQ ID NO: 116376 - DNA, 75 bp, synthetic construct
  source 1..75: mol_type = other DNA
ggtgttcacactatctcagcgcaaaaaaatatagagtgggaccctgcaacacagatcatgtattcaaattctaat

SEQ ID NO: 116377 - DNA, 75 bp, synthetic construct
  source 1..75: mol_type = other DNA
atgatgatgtggctctgatcggtccaagaaaatacattgacactaccgaatataattatttagagttccttgaag

SEQ ID NO: 116378 - DNA, 75 bp, synthetic construct
  source 1..75: mol_type = other DNA
taattgtgcagacaatattgtgcgttgtgtagatagcgcattgaatcaaacaatcactgacttagaagtatgcat

SEQ ID NO: 116379 - DNA, 75 bp, synthetic construct
  source 1..75: mol_type = other DNA
cgagcagattaaaacgattgccgacttcaccaccaacgatcgctttatgtcggcgttaccgctgtttcactcctt

SEQ ID NO: 116380 - DNA, 75 bp, synthetic construct
  source 1..75: mol_type = other DNA
aacgactgcactttcttattaatatctacggtgcaaaagaagacggtggcgaagtggttttaagaccatttattg

SEQ ID NO: 116381 - DNA, 75 bp, synthetic construct
  source 1..75: mol_type = other DNA
cattgacgccagaaccaaacagccaatgtttacaccgtatttaattaaagataccgaagtggtcgataaaggtaa

SEQ ID NO: 116382 - DNA, 75 bp, synthetic construct
  source 1..75: mol_type = other DNA
ggactggtacgcaccgcaagcctgattaacgatgcccgcaatgaagtcaaaaatagcgtgctggtggataacggc

SEQ ID NO: 116383 - DNA, 75 bp, synthetic construct
  source 1..75: mol_type = other DNA
cctatgcgccccggtcagttgtttatggacccgaaacgcatgattgaagcctgcgacgaaaacaccatcggcgtg

SEQ ID NO: 116384 - DNA, 75 bp, synthetic construct
  source 1..75: mol_type = other DNA
actgccagaagagacgctggagcaggaactaaccctgctgtggaagcgtgagatgattaccggctgttatctgcc

SEQ ID NO: 116385 - DNA, 75 bp, synthetic construct
  source 1..75: mol_type = other DNA
ggcttaaccaaattcaacagggataaaatagtgcaaataaccgaagtattacttgcagaatcgggggaagcatcc

SEQ ID NO: 116386 - DNA, 75 bp, synthetic construct
  source 1..75: mol_type = other DNA
gtaagcaaacccccatgcgcgggcatccggtttttatcgctcaacacgccaccgcgagtttccgctccctgcatt

SEQ ID NO: 116387 - DNA, 75 bp, synthetic construct
  source 1..75: mol_type = other DNA
ctataaagcctccctgaaatatctcagcgatcacccgaaactgcagggtattgcccagcagaacagctttaaaca

SEQ ID NO: 116388 - DNA, 75 bp, synthetic construct
  source 1..75: mol_type = other DNA
ctggtactgatgctgagtttgacgggacttatctcaagaactcgcttgtcgtatgggacgcagattctatcgctg

SEQ ID NO: 116389 - DNA, 75 bp, synthetic construct
  source 1..75: mol_type = other DNA
ttcaaacacatatcaatgaaagaaaaggaagttattggaagagtttatgactctttgaggaaaataactaaaggg

SEQ ID NO: 116390 - DNA, 75 bp, synthetic construct
  source 1..75: mol_type = other DNA
tgtttatggttctgacgcggtggccagcaaaggggttaaagtcgttgcgaccttcccggaagattcccataaaaa

SEQ ID NO: 116391 - DNA, 75 bp, synthetic construct
  source 1..75: mol_type = other DNA
taaaaaagcgatcgatacggcttcgcgccagacactgctcggcaatagcctggtcgttgtagcaccgaaagccag

SEQ ID NO: 116392 - DNA, 75 bp, synthetic construct
  source 1..75: mol_type = other DNA
atgcaaaagctaaaacagcaggtgtttgaagccaacatggatctgccgcgctatgggctggtggtgatcaagccc

SEQ ID NO: 116393 - DNA, 75 bp, synthetic construct
  source 1..75: mol_type = other DNA
gataaatgcgcacaagaggcggatacagcagcgttttcccgacttaactggacaacgatgctgattgttgccttt

SEQ ID NO: 116394 - DNA, 75 bp, synthetic construct
  source 1..75: mol_type = other DNA
ggcgctaaggcagaactggcgctggcggcgaaactggggcatgaggttgtatttcaggaggtaagcagtgagaaa

SEQ ID NO: 116395 - DNA, 75 bp, synthetic construct
  source 1..75: mol_type = other DNA
tcctatcgcatctcgttataaaaaggctgatgaagaactaaatgttattgccaataacatattgaatagaaaatt

SEQ ID NO: 116396 - DNA, 75 bp, synthetic construct
  source 1..75: mol_type = other DNA
taaaatggcaaaaagcccattcaaaaagatactctgaattttatcttgagctgatcgacttattctttagagttc

SEQ ID NO: 116397 - DNA, 75 bp, synthetic construct
  source 1..75: mol_type = other DNA
taaaaaagggattgataccgccacgcgtcagacattgctcggcaatagcctggtcgttgtagcaccgaaatccag

SEQ ID NO: 116398 - DNA, 75 bp, synthetic construct
  source 1..75: mol_type = other DNA
tgtctacggttctgacgcagttgccagcaaaggggtaaaagtggttgccaccttcccggaagattcacataaaaa

SEQ ID NO: 116399 - DNA, 75 bp, synthetic construct
  source 1..75: mol_type = other DNA
ctgtacggagatataatttttggccttgacggaaatgatatattacgtagtgccggaggagaagggggaagtctt

SEQ ID NO: 116400 - DNA, 75 bp, synthetic construct
  source 1..75: mol_type = other DNA
ctgggcgacgccgagccgctgcatacgccgggaattgtggtgtatcagcacgggccgttcgcctgggggaaagat

SEQ ID NO: 116401 - DNA, 75 bp, synthetic construct
  source 1..75: mol_type = other DNA
ggagtatcgtccgtcttccgacaccgcgacgcatctcgaactctaccgtcgttacccgtcgcttggcggcattgt

SEQ ID NO: 116402 - DNA, 75 bp, synthetic construct
  source 1..75: mol_type = other DNA
agaaatggatggattatgcggttgataaaaaagcgatcgatacggcctcgcgtcagactctactcggtaatagcc

SEQ ID NO: 116403 - DNA, 75 bp, synthetic construct
  source 1..75: mol_type = other DNA
tcacttcaatgcccgccaggttaaaaataaagtgtgcggattgttagcggagctgggcctgagcctcaatcaacg

SEQ ID NO: 116404 - DNA, 75 bp, synthetic construct
  source 1..75: mol_type = other DNA
tggattaaatattgatacagcatgtaccggaaaagacaccttatttactataggtatacccacaagaaaattcgt

SEQ ID NO: 116405 - DNA, 75 bp, synthetic construct
  source 1..75: mol_type = other DNA
agccttgcaaaccattatgcgtctcagtttgtctcatctatcttacgcaaaaaaaatagaactaatatcaagcgg

SEQ ID NO: 116406 - DNA, 75 bp, synthetic construct
  source 1..75: mol_type = other DNA
gataacgatgctgattgttgcctcttcgtatgcggtgattgcgtttctctgtacttacctggcgcaaggcgcgat

SEQ ID NO: 116407 - DNA, 75 bp, synthetic construct
  source 1..75: mol_type = other DNA
tctgccgtttagtttgttaatgcagtacgtcattctgttcttctattccgctttctcattatttatgaccaaagc

SEQ ID NO: 116408 - DNA, 75 bp, synthetic construct
  source 1..75: mol_type = other DNA
aagacacttgagccgttaagtgccaaatataaaaacatccctggcgttgaagaaaaattaacctttaccgatacc

SEQ ID NO: 116409 - DNA, 75 bp, synthetic construct
  source 1..75: mol_type = other DNA
agaaaatttcggattgggatttgaaaatgtttgtaaatcgttagccgaggtggcatataaatatactaacgtaaa

SEQ ID NO: 116410 - DNA, 75 bp, synthetic construct
  source 1..75: mol_type = other DNA
gaacgccgggtagaaacaacgaaagaggccagcaatgtacagcagagtgttaaccatatgcttggcgacgatgtt

SEQ ID NO: 116411 - DNA, 75 bp, synthetic construct
  source 1..75: mol_type = other DNA
accattatgcgtctcagtttgtctcatctatcttacgcaaaaaaaaatagaactaatatcaagcggcgctatatt

SEQ ID NO: 116412 - DNA, 75 bp, synthetic construct
  source 1..75: mol_type = other DNA
aaggtactgaagcaaacttctgaaaataaaattatgtactcttctatcaacgctgcaaataaagaagaggccgcg

SEQ ID NO: 116413 - DNA, 75 bp, synthetic construct
  source 1..75: mol_type = other DNA
gctttgcggtgtatgagtttttcaatgcgaaatcccggcagcaaccgcagcccgttgccagtaaaaatgaagaag

SEQ ID NO: 116414 - DNA, 75 bp, synthetic construct
  source 1..75: mol_type = other DNA
caatgccatgttcggttttttcatcacgtcgccctatgacccgaaactgacagaagatctgatgagtgacgcgga

SEQ ID NO: 116415 - DNA, 75 bp, synthetic construct
  source 1..75: mol_type = other DNA
aagaggcggatacggcagcgttttcccggcttaactggacaacgatgctcatcgtcgcttcagcgtatgcggtga

SEQ ID NO: 116416 - DNA, 75 bp, synthetic construct
  source 1..75: mol_type = other DNA
agttggcagcatcacctccgcccgataatcgtttgtaccctaactggcgctattctcggtgatattcagactggc

SEQ ID NO: 116417 - DNA, 75 bp, synthetic construct
  source 1..75: mol_type = other DNA
tgttgctggtctgcacattgttctcaggtcagttaatggcgggacacaaagggcatgagtttttgtgggtgaaga

SEQ ID NO: 116418 - DNA, 75 bp, synthetic construct
  source 1..75: mol_type = other DNA
atcgacaccacgactgcgtccggtcgcatggtgttcggaatcttcgccaccttggccgagttcgagcgggatctg

SEQ ID NO: 116419 - DNA, 75 bp, synthetic construct
  source 1..75: mol_type = other DNA
acgtgtatataccatgcatgatgctgaccgccatcaggatcatcttgcagtctatcaagcctcaatggttgcctg

SEQ ID NO: 116420 - DNA, 75 bp, synthetic construct
  source 1..75: mol_type = other DNA
aaattccttctgatgttgaaatcatgcgggtatataccatgcatgatgccgaccgccatcaggatcatctcgctg

SEQ ID NO: 116421 - DNA, 75 bp, synthetic construct
  source 1..75: mol_type = other DNA
gagcgaaaaatggcgtaatcggttgcggtcctgacattccttggtctgccaaaggggaacagcttcttttcaaag

SEQ ID NO: 116422 - DNA, 75 bp, synthetic construct
  source 1..75: mol_type = other DNA
tttcggcctgtttggttgtgaaggacgtattcctaccgccaactacagcctggaagatgccatcgccgataacaa

SEQ ID NO: 116423 - DNA, 75 bp, synthetic construct
  source 1..75: mol_type = other DNA
atgacaaaaaagggcgctttcactagcgccttttttattgaaacgttgccggagcgcgaaaaactggtattaacc

SEQ ID NO: 116424 - DNA, 75 bp, synthetic construct
  source 1..75: mol_type = other DNA
ttaattttgctgacacccgcgctcatttacagctcaatgatatgatttccgccctggaagacatcattaaaaatc

SEQ ID NO: 116425 - DNA, 75 bp, synthetic construct
  source 1..75: mol_type = other DNA
ttggccagccggaactggcgacaaaactgtctgaacgcaatatggaagtccgtgaagtcgttcagcgctgtgagg

SEQ ID NO: 116426 - DNA, 75 bp, synthetic construct
  source 1..75: mol_type = other DNA
caatggaagacaacgatgtgaaagggaaaaccctgaaggcagcagcgattgccgaagccattatcagtaccatcg

SEQ ID NO: 116427 - DNA, 75 bp, synthetic construct
  source 1..75: mol_type = other DNA
atgcagtagtgtcgaggaaaggaatttcaagctcaaatgaaaatgtattagtctttccttcaatagaaatcgctt

SEQ ID NO: 116428 - DNA, 75 bp, synthetic construct
  source 1..75: mol_type = other DNA
gtgatgacatcgggtaattccggcgtgagtgaaataattaatcgacatcaagaatcactcgaagcattaaacatt

SEQ ID NO: 116429 - DNA, 75 bp, synthetic construct
  source 1..75: mol_type = other DNA
atgcgctcacgcaactggtccagaaccttgaccgaacgcagcggtggtaacggcgcagtggcggttttcatggct

SEQ ID NO: 116430 - DNA, 75 bp, synthetic construct
  source 1..75: mol_type = other DNA
ttgatgttatggagcagcaacgatgttacgcagcagggcagtcgccctaaaacaaagttagccattaagggagtt

SEQ ID NO: 116431 - DNA, 75 bp, synthetic construct
  source 1..75: mol_type = other DNA
aggcggggttcagccacgttctggtgattgaggaggcccacagtctgccctttccgacactgaaacacctcaaac

SEQ ID NO: 116432 - DNA, 75 bp, synthetic construct
  source 1..75: mol_type = other DNA
aggcggggttcagccacgttctggtgattgaggatgcccacagtctgcccgttccgacactgaaacacctcaaac

SEQ ID NO: 116433 - DNA, 75 bp, synthetic construct
  source 1..75: mol_type = other DNA
gctgtctggtcaagctgcgcaactacaccgaattgatggtacgttggttataccgtcaggaacgactgcccgaag

SEQ ID NO: 116434 - DNA, 75 bp, synthetic construct
  source 1..75: mol_type = other DNA
gcttcgtgctgtccaacggccacggctccatgctgatctacagcctgctgcacctcactggttatgatctgccga

SEQ ID NO: 116435 - DNA, 75 bp, synthetic construct
  source 1..75: mol_type = other DNA
ttgccggagcggcgctctctttaactcttgcaggcaatgcgctggcagacgaagggaagattacagtttttgcgg

SEQ ID NO: 116436 - DNA, 75 bp, synthetic construct
  source 1..75: mol_type = other DNA
ggcggaagatgttcgtggcgcgctggcgttggtcgaacgcaatgaagcgccgctgggcatagtttacggttctga

SEQ ID NO: 116437 - DNA, 75 bp, synthetic construct
  source 1..75: mol_type = other DNA
gactggttatatggtgggggaggtaatgattatctgtatggtggtactggtcatgatgtcttcgtctttgatgct

SEQ ID NO: 116438 - DNA, 75 bp, synthetic construct
  source 1..75: mol_type = other DNA
tggcgctcgatttgttcggctcgccgggctggagcgccgataaagaaatacagcggctgtatgcgctcagtaatc

SEQ ID NO: 116439 - DNA, 75 bp, synthetic construct
  source 1..75: mol_type = other DNA
tcatgatgtcttcgtctttgatgctgcttgtgaagggaattcatttatcatggattttaataaacataagggtga

SEQ ID NO: 116440 - DNA, 75 bp, synthetic construct
  source 1..75: mol_type = other DNA
ttatccgcaggaagctgctgaatttacccgccgtatgaaaggcgaaatgccgtctgacttcgacgcgaaagcgaa

SEQ ID NO: 116441 - DNA, 75 bp, synthetic construct
  source 1..75: mol_type = other DNA
acaacctactgcaaccggcgacggttatgcggattacgtcttgtgggatgaggcgcataaaccgcttgcggtagt

SEQ ID NO: 116442 - DNA, 75 bp, synthetic construct
  source 1..75: mol_type = other DNA
ttttttgcaactgcgtccgaccagtacgcacacgatggcgggggataccatgaaactgttctctacacgagacag

SEQ ID NO: 116443 - DNA, 75 bp, synthetic construct
  source 1..75: mol_type = other DNA
gtgagggtgagggtttatatcgctggtccgatgaccgggtataaaaatttcaaccgtgaggcgttccacaatgcg

SEQ ID NO: 116444 - DNA, 75 bp, synthetic construct
  source 1..75: mol_type = other DNA
cagaacgccaggatctacatcgctacctatcctggcatgatgaaaatcatggaccatttcgatgtcggttatttc

SEQ ID NO: 116445 - DNA, 75 bp, synthetic construct
  source 1..75: mol_type = other DNA
cccttttccagctcgatccagagcgcgctcatgagtttacttttcagcaattacgccgtattaccggaacgccgt

SEQ ID NO: 116446 - DNA, 75 bp, synthetic construct
  source 1..75: mol_type = other DNA
cggactgctgctggaaaatggcggcagctttacggttaatgccggaggactggccagcaacaccactgtcggaca

SEQ ID NO: 116447 - DNA, 75 bp, synthetic construct
  source 1..75: mol_type = other DNA
gaggaaatcaaagattttctggatctgacagatgagcagttgctgcaggctctggattacgtcccggtgcagcgt

SEQ ID NO: 116448 - DNA, 75 bp, synthetic construct
  source 1..75: mol_type = other DNA
gaggctttagaacgtctggccactgtcgtaaatgttacacctgaatggtttacgcgccctctgttgaaggggatg

SEQ ID NO: 116449 - DNA, 75 bp, synthetic construct
  source 1..75: mol_type = other DNA
agcaaagcgtacagcgcggacagcatcgtagattataacgatgcacattataaaacttctgtcgatcaagacgca

SEQ ID NO: 116450 - DNA, 75 bp, synthetic construct
  source 1..75: mol_type = other DNA
tgtgcatgaacgaggaataatgagccctgcatacatccgtgtttcagcgagttcaaatagcatctacccaaggtt

SEQ ID NO: 116451 - DNA, 75 bp, synthetic construct
  source 1..75: mol_type = other DNA
atctggcaacgggtatacaccgtcgcgaagcatctgcaacgagcagggtattgccggggaacctgtttgggtgaa

SEQ ID NO: 116452 - DNA, 75 bp, synthetic construct
  source 1..75: mol_type = other DNA
gcagaaagtttctccttctgacagcaacccgtggcgtgtttttgttgactggaccggaaccaaagaacgtgtagg

SEQ ID NO: 116453 - DNA, 75 bp, synthetic construct
  source 1..75: mol_type = other DNA
atctggcagacgcgacgcgcctttaagtttgaagccctggatgatctgaacagcgagcacaccttcaagaataac

SEQ ID NO: 116454 - DNA, 75 bp, synthetic construct
  source 1..75: mol_type = other DNA
atctggctgcgggtctacaccgttgcgaagcatcttcaaagggctggttattgtcatggtaactgcactggtgaa

SEQ ID NO: 116455 - DNA, 75 bp, synthetic construct
  source 1..75: mol_type = other DNA
tgggtggaggagttcgtcagaacctaacagctggtgatcttttagaaatacctgttccactgattgatatttcat

SEQ ID NO: 116456 - DNA, 75 bp, synthetic construct
  source 1..75: mol_type = other DNA
agcccgggaaaaacgctggaaggtctggtggggggcgtaatcaccaccatgattgcgtcactgattattggaccg

SEQ ID NO: 116457 - DNA, 75 bp, synthetic construct
  source 1..75: mol_type = other DNA
cgggcttttcaccatgagcgccagaaaggccatgctggcgcatcccgaactggactataacctgcagtacagcca

SEQ ID NO: 116458 - DNA, 75 bp, synthetic construct
  source 1..75: mol_type = other DNA
ttattcgctactgctgttactgaaggaaaatagagaaaatggaaaattcacgcatccctggggaacattttttta

SEQ ID NO: 116459 - DNA, 75 bp, synthetic construct
  source 1..75: mol_type = other DNA
cggttaccggagagaaaaggggatgaagttacattacgtattcgtacctggtggggcatcgtcatttgtttttca

SEQ ID NO: 116460 - DNA, 75 bp, synthetic construct
  source 1..75: mol_type = other DNA
cacccacctctacaccactgagcggcggatgaattcaccggtggcgggtccccggcgtatcgggcgtatcagtac

SEQ ID NO: 116461 - DNA, 75 bp, synthetic construct
  source 1..75: mol_type = other DNA
aactcagcaaaagttcgatttattcaacaaagccgcttatatccatacattttccgcggtggttatattgggtta

SEQ ID NO: 116462 - DNA, 75 bp, synthetic construct
  source 1..75: mol_type = other DNA
aaatggattatggaaaacatgagtatggcgcaggccggactggtgatcagcattctgaaaggcgagcagaaaaaa

SEQ ID NO: 116463 - DNA, 75 bp, synthetic construct
  source 1..75: mol_type = other DNA
gaagaacagccactgccagatattcttggtgttctgcaggagaaaacgggcctgacaagacgcagtttatgcacc

SEQ ID NO: 116464 - DNA, 75 bp, synthetic construct
  source 1..75: mol_type = other DNA
agcaatggtcagtttcagcaaagcaacaatcaaacaaagtcaatctggacttgatgtcaaagctcagtctaatgg

SEQ ID NO: 116465 - DNA, 75 bp, synthetic construct
  source 1..75: mol_type = other DNA
gaaatcactttctgaaatgcagcctgtagcaaaagcaatggtcagtttcagcaaagcaacgatcaaacaaagtca

SEQ ID NO: 116466 - DNA, 75 bp, synthetic construct
  source 1..75: mol_type = other DNA
gggatacaggataagtgagatccgcacgggtaaagaaggttatcttacgctagaaacgccttctaatacatacta

SEQ ID NO: 116467 - DNA, 75 bp, synthetic construct
  source 1..75: mol_type = other DNA
acattccgcgatgtatcaacgcaggaaggcgagaaccgaacctttcagctgttcaatccaaacggaggactttag

SEQ ID NO: 116468 - DNA, 75 bp, synthetic construct
  source 1..75: mol_type = other DNA
ataatgctgatgagcgtaaagtaatcaaataccggaaagaggtcttaaacagccctgaattcgaagcgttatggc

SEQ ID NO: 116469 - DNA, 75 bp, synthetic construct
  source 1..75: mol_type = other DNA
ctgaaatgaatccaaccgaggtgtttcatattgatcaccttcacccaagaaatcacttctcaaagaaatatcttg

SEQ ID NO: 116470 - DNA, 75 bp, synthetic construct
  source 1..75: mol_type = other DNA
gtttgataccttactgatgcagtggattgaactactggcaacagaaacagacaaatgtcgcaatatgaactcggt

SEQ ID NO: 116471 - DNA, 75 bp, synthetic construct
  source 1..75: mol_type = other DNA
gtgagggtgagagtctatattgccggtccaatgacagggtataaaaatttcaaccgtgaggcgttccacaaggca

SEQ ID NO: 116472 - DNA, 75 bp, synthetic construct
  source 1..75: mol_type = other DNA
atattcatctgtcgaccactgccggtggtgtgacgtcaggtcatacctggaaaaaccttcattttacgcccgtaa

SEQ ID NO: 116473 - DNA, 75 bp, synthetic construct
  source 1..75: mol_type = other DNA
gatattcacggtgatccacacatggggcgtaaccagcagtggcatccgcatatccatttatcgacaactgccggt

SEQ ID NO: 116474 - DNA, 75 bp, synthetic construct
  source 1..75: mol_type = other DNA
aaaaatgttatcagcggtactgttcttgttgatatagccgataaaaaagggaacgtaaatcgttcagagattacc

SEQ ID NO: 116475 - DNA, 75 bp, synthetic construct
  source 1..75: mol_type = other DNA
tacagggaaagatttaccctgcacttgatagcctggctattgttgctgacgcttgcggggtatctctgacttggc

SEQ ID NO: 116476 - DNA, 75 bp, synthetic construct
  source 1..75: mol_type = other DNA
aaaaaattgcgattcaggttcgggtattgatcaggcgcttagctctctaagcccccaagagaagcaattaatcct

SEQ ID NO: 116477 - DNA, 75 bp, synthetic construct
  source 1..75: mol_type = other DNA
ggtccctggtgttccacaaccggtggttactggcagagatgagccgcattgcagctgatgtgatactggaaatct

SEQ ID NO: 116478 - DNA, 75 bp, synthetic construct
  source 1..75: mol_type = other DNA
tggctggcagcggtcggcgggtgctaaggcagaactggcgctggcggagaagctggggcatgcggttattttaca

SEQ ID NO: 116479 - DNA, 75 bp, synthetic construct
  source 1..75: mol_type = other DNA
ccttgatgataataaatataaaaaaatgtcacgagcgcataatccatacggagatggtttagcatctgttagaat

SEQ ID NO: 116480 - DNA, 75 bp, synthetic construct
  source 1..75: mol_type = other DNA
catattgttgcccgtctggttaacagcaaaccctggatggcatatatcctggctcaggttatttcggctgttctg

SEQ ID NO: 116481 - DNA, 75 bp, synthetic construct
  source 1..75: mol_type = other DNA
gctgggagggcaaagttcctcattaacccgggcagaacgggtggggggctattgtgcaactctactaaaatttgg

SEQ ID NO: 116482 - DNA, 75 bp, synthetic construct
  source 1..75: mol_type = other DNA
acacaaattgcaacattatatgcttcaaagaaaaaaaatacctatagagacccactttctaccgtcagtattgca

SEQ ID NO: 116483 - DNA, 75 bp, synthetic construct
  source 1..75: mol_type = other DNA
tcacggcgcttttacgtcataacccgaccatcagtgctgtggtttgctataacgaaactattgcgatgggggcat

SEQ ID NO: 116484 - DNA, 75 bp, synthetic construct
  source 1..75: mol_type = other DNA
cagttgttgacggagcatctcattcgcaatgggcatcagcgtatcgcctggctgggagggcaaagttcctcatta

SEQ ID NO: 116485 - DNA, 75 bp, synthetic construct
  source 1..75: mol_type = other DNA
atacagtcttaaacccggcagtacttccggacgggctgacacagccgcactacatggatatttgcatgtcaatga

SEQ ID NO: 116486 - DNA, 75 bp, synthetic construct
  source 1..75: mol_type = other DNA
aactggcgatatccagtctggtaaacagcctcaaaggcgtatcgggtaggttactgcgacgagatcgaccagata

SEQ ID NO: 116487 - DNA, 75 bp, synthetic construct
  source 1..75: mol_type = other DNA
gtggagtcctggctattttgtcagtagctgcatcttaacgtatcaactagatttaataacaacgatatccgcacc

SEQ ID NO: 116488 - DNA, 75 bp, synthetic construct
  source 1..75: mol_type = other DNA
acaacagcaaacacctggtcaggtggaaaaccgcgccgtatatccccgccctgaaggacggggttttacggcgca

SEQ ID NO: 116489 - DNA, 75 bp, synthetic construct
  source 1..75: mol_type = other DNA
cccgccttgatattacaggtgtatgggtgttctccctggggctctggtttcatatcgttgcccgtctggtttaca

SEQ ID NO: 116490 - DNA, 75 bp, synthetic construct
  source 1..75: mol_type = other DNA
cccggcttgatattacgggaatgtgggtattttccctgggggtctggtttcatatcgtcgcccgtcttgtttaca

SEQ ID NO: 116491 - DNA, 75 bp, synthetic construct
  source 1..75: mol_type = other DNA
acgggtatcgctctgctaactctggcgagcagtttgcgcgacgctgaggctatcaatattgccggatcgctacgt

SEQ ID NO: 116492 - DNA, 75 bp, synthetic construct
  source 1..75: mol_type = other DNA
gcgattgcggcaactggcgcaacaaaccggctcgctgaagtcatcaaccgaacagaaagttattaccacaacgaa

SEQ ID NO: 116493 - DNA, 75 bp, synthetic construct
  source 1..75: mol_type = other DNA
aaatgcagacgaatccgcagaatcagcaacagcgtgataacgcccgtcagcgcattcaatcagctacgcctgagc

SEQ ID NO: 116494 - DNA, 75 bp, synthetic construct
  source 1..75: mol_type = other DNA
aacgttgccgggctgaatatctctgttgcaaccggcgttttgcttggtgaatggtggcgtcagaataaagcctga

SEQ ID NO: 116495 - DNA, 75 bp, synthetic construct
  source 1..75: mol_type = other DNA
gcctgaacaacgccaggcgtttcgcgagaaaatgaacgaacacccattaagccagcaacaaagagattcggttcg

SEQ ID NO: 116496 - DNA, 75 bp, synthetic construct
  source 1..75: mol_type = other DNA
tcgtgctgacggtggccgtcgccccgcccgcgatgacaaacagagtcagccccgtgaccgcaagtgggaagattc

SEQ ID NO: 116497 - DNA, 75 bp, synthetic construct
  source 1..75: mol_type = other DNA
tggccatcagggttgacagcgacgggaaaagtgtccgccttttcttcaaaaagggggactacaacaccggatctc

SEQ ID NO: 116498 - DNA, 75 bp, synthetic construct
  source 1..75: mol_type = other DNA
tcttaactatttgtttatcggttttaattgctttgagctgtatctattatttatacctttggctgggtttctaat

SEQ ID NO: 116499 - DNA, 75 bp, synthetic construct
  source 1..75: mol_type = other DNA
tacaggcattattagcgggtttgttaattggtattagtggtttttgcggcgatgtcgtgatgtcagccatcaaac

SEQ ID NO: 116500 - DNA, 75 bp, synthetic construct
  source 1..75: mol_type = other DNA
ggtgtgcgcaaactgccggagcgttgtgtgcctgttcatatgctgttgttagcgcaggtacacgactttagagca

SEQ ID NO: 116501 - DNA, 75 bp, synthetic construct
  source 1..75: mol_type = other DNA
ttccaacttacaagcgtcctgctagtcttaaaaaattaattaatagtttaaatactcaaatagatacagctttca

SEQ ID NO: 116502 - DNA, 75 bp, synthetic construct
  source 1..75: mol_type = other DNA
ggcagtccgcgagaaaatgcagactaacccacagatccagcagcgaagagacgcagcgcgtgagcgtattcagtc

SEQ ID NO: 116503 - DNA, 75 bp, synthetic construct
  source 1..75: mol_type = other DNA
tgatggtacaggcaacgttgccgggctgaatatctctgtcgcaaccggcgttttgcttgccgaatggtggcggca

SEQ ID NO: 116504 - DNA, 75 bp, synthetic construct
  source 1..75: mol_type = other DNA
tatccccgccctgaaggacggggttttacggcgcaccggataaataaaaaacggcaggggtatctctcctgccgt

SEQ ID NO: 116505 - DNA, 75 bp, synthetic construct
  source 1..75: mol_type = other DNA
ctggtctttgtcaccagataccgacgtcagatttttgaccatgacgcgacagaaaaactacgcacttacttttca

SEQ ID NO: 116506 - DNA, 75 bp, synthetic construct
  source 1..75: mol_type = other DNA
ggtgacccctctggttttctgcataccgtgagcgccattttttgtggctggataatgaccgttttcgccttgagt

SEQ ID NO: 116507 - DNA, 75 bp, synthetic construct
  source 1..75: mol_type = other DNA
aacgcgctggttagcgaaaccatcaaagccaaccagttgtggagtgaagtgctggataacgcggcgttcgaagcc

SEQ ID NO: 116508 - DNA, 75 bp, synthetic construct
  source 1..75: mol_type = other DNA
gcctttattgcttcgtttggtcaaggcaaaccggttatcgccctgctgggggaatatgacgccctggcaggttaa

SEQ ID NO: 116509 - DNA, 75 bp, synthetic construct
  source 1..75: mol_type = other DNA
cgttggaagcggcgcatataaaatggaaacagcaaggaggtccttgtgaaattcctaatggcctggcgctttgcg

SEQ ID NO: 116510 - DNA, 75 bp, synthetic construct
  source 1..75: mol_type = other DNA
aggatcttgaagcagaacgctttgaggaatggttttctgagcagtatccggatgcacagactggtggtgaagaat

SEQ ID NO: 116511 - DNA, 75 bp, synthetic construct
  source 1..75: mol_type = other DNA
tcttcggtctggtgctggcgatatataccacgcgcatcgctaaacgcagcgccgtaatcggccgcatcttttcca

SEQ ID NO: 116512 - DNA, 75 bp, synthetic construct
  source 1..75: mol_type = other DNA
cgtgggggacgtgcggcagctgcgtggcggcgggctgggttatggcttagcagggaggggggtggcctgttgctc

SEQ ID NO: 116513 - DNA, 75 bp, synthetic construct
  source 1..75: mol_type = other DNA
ctcagcacagcagttgcagaatgccctgcagaaagtgtcagaactgattgatgcggcagatctgtcgatgcggca

SEQ ID NO: 116514 - DNA, 75 bp, synthetic construct
  source 1..75: mol_type = other DNA
caaagtgtcgggtaacgagctcctggtgtggaccgcgggtaaaaaacagggtgaagcgaagccgggatcagagat

SEQ ID NO: 116515 - DNA, 75 bp, synthetic construct
  source 1..75: mol_type = other DNA
ggttgccagtgggcaatgtgtagaggtggagctgtttgcccgctatccgctgaagaaaatcacagcggaaaagag

SEQ ID NO: 116516 - DNA, 75 bp, synthetic construct
  source 1..75: mol_type = other DNA
aattcatatccagatcattgctatcattaaacctgatggtcatgagaaggtaaaaaaactattgccagccatcat

SEQ ID NO: 116517 - DNA, 75 bp, synthetic construct
  source 1..75: mol_type = other DNA
ttataaccgtcatgcgacatgtagcggcgcggcaaccgcaaagtttgtccgttcacccgataaaggccatcttac

SEQ ID NO: 116518 - DNA, 75 bp, synthetic construct
  source 1..75: mol_type = other DNA
ccgcagccgggtaacatctatattcctctcggcaaacaagagccgggactgtacctcgtcgaggcgatggtcggt

SEQ ID NO: 116519 - DNA, 75 bp, synthetic construct
  source 1..75: mol_type = other DNA
tgactggtgtatggctctccttttttatagacagcgcaccagcaccaacgattgttatcttattcacggttgtat

SEQ ID NO: 116520 - DNA, 75 bp, synthetic construct
  source 1..75: mol_type = other DNA
ttaacttcccgcctgggccgtggccgctgtacggcaacccgaacgccctggaaagtgcgctggaaaacattgttc

SEQ ID NO: 116521 - DNA, 75 bp, synthetic construct
  source 1..75: mol_type = other DNA
ttgccaatgcctttttaatcgtcgtggtgcagtcactggctgacttcagtaacccgctggtgcttggcggcaact

SEQ ID NO: 116522 - DNA, 75 bp, synthetic construct
  source 1..75: mol_type = other DNA
cccgacgcggcagcgacctgaaaaaagatcaatactggtttatcacccgccgtgatgcggactacccattcaagc

SEQ ID NO: 116523 - DNA, 75 bp, synthetic construct
  source 1..75: mol_type = other DNA
ggcggggcccggagcgcgctttacctggtggggtgaagatggcaatggcgacgccttcctgacggcatgggcatg

SEQ ID NO: 116524 - DNA, 75 bp, synthetic construct
  source 1..75: mol_type = other DNA
atttctcttctcattgcgcctggtgccattgcggtactcctgacacaacgctttcatattgcgctcctgctggcg

SEQ ID NO: 116525 - DNA, 75 bp, synthetic construct
  source 1..75: mol_type = other DNA
tatagacagcgcaccagcaccaacgattgttatcttattcacggttgtattcatcctgacgtttaccgcttccag

SEQ ID NO: 116526 - DNA, 75 bp, synthetic construct
  source 1..75: mol_type = other DNA
taacagcgcgatggccgaccaggagagccttgataagctcaaaaagacgctgacggatacccggcgcggcggtgc

SEQ ID NO: 116527 - DNA, 75 bp, synthetic construct
  source 1..75: mol_type = other DNA
cctggattgagtctgatattctgtcaacaacatactcaccggttttagatgtcaatatgttacttattttcggta

SEQ ID NO: 116528 - DNA, 75 bp, synthetic construct
  source 1..75: mol_type = other DNA
ttggcagaaaaaggtattgaactgaaagtgggacaggcagcggccactgcctgccccgataccgcatccacaagg

SEQ ID NO: 116529 - DNA, 75 bp, synthetic construct
  source 1..75: mol_type = other DNA
cagctttgtgcgggctatcacgacggtcagcgccatcgtctttctcgtcacgccggacacccgcgtggcaaccgc

SEQ ID NO: 116530 - DNA, 75 bp, synthetic construct
  source 1..75: mol_type = other DNA
gctggcgattattttcctctttgactggctgatcggagaagcacgtatctcccgttctaaagctaaaaaccaggc

SEQ ID NO: 116531 - DNA, 75 bp, synthetic construct
  source 1..75: mol_type = other DNA
cgtggcggataaaacgctgtaccagccaggcgaaaccgcgaagatgctgattaccttcccggagccaattgatga

SEQ ID NO: 116532 - DNA, 75 bp, synthetic construct
  source 1..75: mol_type = other DNA
atcagcgccaccgtggctggacgcggtttaggctacgccgccatcgtgctgtttgttgaactaggcgcgattatg

SEQ ID NO: 116533 - DNA, 75 bp, synthetic construct
  source 1..75: mol_type = other DNA
atattcaacagaaattaatgggtattaccgcagaaacctacggctttggcattcgtttctttactatcgaaaaaa

SEQ ID NO: 116534 - DNA, 75 bp, synthetic construct
  source 1..75: mol_type = other DNA
aacggcagccacgcaggcttcatcatgtacatgaccgacgccgcacagaaccaggaggatgtgaacaacatccgc

SEQ ID NO: 116535 - DNA, 75 bp, synthetic construct
  source 1..75: mol_type = other DNA
cgaagtacacccgccgtggtgtggagccggatgtgtactggtttgtgcagacgggcgagcaggatcacgagttcc

SEQ ID NO: 116536 - DNA, 75 bp, synthetic construct
  source 1..75: mol_type = other DNA
atcaccttatcgtccgctccggctttgcgcagttgctggggctggaacctgatttgcaggtagttgccgagtttg

SEQ ID NO: 116537 - DNA, 75 bp, synthetic construct
  source 1..75: mol_type = other DNA
tgttaacttacatcattcatttaatttgtgttatagagggagggatatgacaacatatgctatacgagatgcgag

SEQ ID NO: 116538 - DNA, 75 bp, synthetic construct
  source 1..75: mol_type = other DNA
tcccggttgttggtgtcgtgccggcgattaaacctgctgcacgtctgacggcaaatggcattgtcggattactgg

SEQ ID NO: 116539 - DNA, 75 bp, synthetic construct
  source 1..75: mol_type = other DNA
ttactggcatgatgtgggggagttgaaagagcttgtggaagatctgattaagaaccacgactttcacaataacag

SEQ ID NO: 116540 - DNA, 75 bp, synthetic construct
  source 1..75: mol_type = other DNA
ttattagataaaattgagattaataaaggaaaggaagctgacttaagagtacttatgcgaggttcattccaacgg

SEQ ID NO: 116541 - DNA, 75 bp, synthetic construct
  source 1..75: mol_type = other DNA
aaacgctgtagtccagatgagttgatcgccgccgtgcatacggttgctgctggtgggtgttacctgacaccggat

SEQ ID NO: 116542 - DNA, 75 bp, synthetic construct
  source 1..75: mol_type = other DNA
atcgcgcgctgcgtgaaatccacgaacgtgccgatgccgttcgtcgtcagcgtttccaggcgatggctgccgaag

SEQ ID NO: 116543 - DNA, 75 bp, synthetic construct
  source 1..75: mol_type = other DNA
ccgtctggccggtgctgtcttatgccgatatcaaagcaggtcatgttactgcagagcagcgcgaacagattaaac

SEQ ID NO: 116544 - DNA, 75 bp, synthetic construct
  source 1..75: mol_type = other DNA
atggctaccaaactgcaggacgggaatacaccttgtctggcagctacaccttctgaaccacgtcccaccgtgctg

SEQ ID NO: 116545 - DNA, 75 bp, synthetic construct
  source 1..75: mol_type = other DNA
tataaaagtttatctttgaaaggggttggtgcacaggggttaactgaaaatagttatcttgtttttggttgggat

SEQ ID NO: 116546 - DNA, 75 bp, synthetic construct
  source 1..75: mol_type = other DNA
aggatatctatgatttctaccaggatggtggtacgttagcatcactgacaaatttgacgcaacaagatctcaatg

SEQ ID NO: 116547 - DNA, 75 bp, synthetic construct
  source 1..75: mol_type = other DNA
ctccttttatccttctgggtctggatgcagatagctttcacaatgacaagttaatgaagatgttccgtgaacgtg

SEQ ID NO: 116548 - DNA, 75 bp, synthetic construct
  source 1..75: mol_type = other DNA
accctcgctaaaccaggactggattgacctggccggcggcaaaaatatcgctgaaaattggtttggcgagcatca

SEQ ID NO: 116549 - DNA, 75 bp, synthetic construct
  source 1..75: mol_type = other DNA
gagcggcggagcagggaaggtggcaatcctgagctataccatgccgttctgggtggtgattctcgcggcgctgtt

SEQ ID NO: 116550 - DNA, 75 bp, synthetic construct
  source 1..75: mol_type = other DNA
cttcatccacatctttaaaatggatggattataattttatgccagcaattggaatatataacagtgagcaaagac

SEQ ID NO: 116551 - DNA, 75 bp, synthetic construct
  source 1..75: mol_type = other DNA
catattcggcatctttaagtattcctttattgggatggacaagtactctgggatatagtgacacttatagtgaat

SEQ ID NO: 116552 - DNA, 75 bp, synthetic construct
  source 1..75: mol_type = other DNA
acgaagaagcagcactgaccgcagggcaaggtggttttattaacgaaactggcgctcatatcattaccattactg

SEQ ID NO: 116553 - DNA, 75 bp, synthetic construct
  source 1..75: mol_type = other DNA
caaagacaaagacaatcgcagcaaaaacgtaaacccgaatcacacggacgccccaggttactggcagtacggcag

SEQ ID NO: 116554 - DNA, 75 bp, synthetic construct
  source 1..75: mol_type = other DNA
cgctgatgcgctcaggaaagaatcgtcgctcagtgcattcacatttgatggtccttatcgcctgaccgggcatga

SEQ ID NO: 116555 - DNA, 75 bp, synthetic construct
  source 1..75: mol_type = other DNA
gcggcgcttcaccctcattagagagttggaactgtcaaaagtctggtatcaaattctactggatgaagagttctc

SEQ ID NO: 116556 - DNA, 75 bp, synthetic construct
  source 1..75: mol_type = other DNA
tggacgacgatggtcctggcgttagcccggaagatcgcgaacagattttccgtccgttctatcggaccgatgaag

SEQ ID NO: 116557 - DNA, 75 bp, synthetic construct
  source 1..75: mol_type = other DNA
ttacgcaatggaaaaactgccaaattaccttgggaacaaaaagattagtaacgcctccgagctattagagtcgat

SEQ ID NO: 116558 - DNA, 75 bp, synthetic construct
  source 1..75: mol_type = other DNA
taaaaaaactattgccagccatcattgatataactgaaaaaagattccaatctctaaatgagagggagcttaact

SEQ ID NO: 116559 - DNA, 75 bp, synthetic construct
  source 1..75: mol_type = other DNA
atgatggcattattactggagccactgcagttcacctttatgagtcacgcactgctgatttcactggtagtttcc

SEQ ID NO: 116560 - DNA, 75 bp, synthetic construct
  source 1..75: mol_type = other DNA
gacaggaaccacacaatcttatatcaaaaatacagataagtttatcgcatcccctgtaactgttatgttaactaa

SEQ ID NO: 116561 - DNA, 75 bp, synthetic construct
  source 1..75: mol_type = other DNA
tggttacattgttcttgctgcatggatcgccttaactgtttgtggttgcgcagagcagatttttgaatggtggat

SEQ ID NO: 116562 - DNA, 75 bp, synthetic construct
  source 1..75: mol_type = other DNA
ccgctgataaaccaagccgttatttgttaaccgtctccgccagtgacggtgcggcgtatcgtgtcaccaccacca

SEQ ID NO: 116563 - DNA, 75 bp, synthetic construct
  source 1..75: mol_type = other DNA
accgcggcatggataccgtcgctaaccacggataaacaaggcaaagcgtactttacattcctgatgccggattcg

SEQ ID NO: 116564 - DNA, 75 bp, synthetic construct
  source 1..75: mol_type = other DNA
accgctggggggcatgggctgctgcagaaaacagtggtgtggactggcaaccggtagctgctggcttcaagcggc

SEQ ID NO: 116565 - DNA, 75 bp, synthetic construct
  source 1..75: mol_type = other DNA
tattgcgcagacaacgggcgatactacgaaacccccattgactggtatggcctcgcccgtcagtttggctatgcg

SEQ ID NO: 116566 - DNA, 75 bp, synthetic construct
  source 1..75: mol_type = other DNA
cgttcttctgacagaacagcgtcagcatctgggtgatgaaggctgggtatttccgggcaaggggaccgataatcc

SEQ ID NO: 116567 - DNA, 75 bp, synthetic construct
  source 1..75: mol_type = other DNA
acagcgggtaccacagataaaacgagcctcagtgaggaagagaatatgttactcaaaaaacaggtgttatttcca

SEQ ID NO: 116568 - DNA, 75 bp, synthetic construct
  source 1..75: mol_type = other DNA
cgttcttctgacagaacagcgtcagtatctgggtgatgaaggctgggtatttccgggcaaggggaccgacaatcc

SEQ ID NO: 116569 - DNA, 75 bp, synthetic construct
  source 1..75: mol_type = other DNA
gggcacggcaaagccgaatatttctcgagtgctttcgaaggatttctgatcctattggcggcagccagtatcgcc

SEQ ID NO: 116570 - DNA, 75 bp, synthetic construct
  source 1..75: mol_type = other DNA
tgcttttgctgctggcagccatcagcatcacttttgctgccgtaagtggggcttatcacctcgatatgcagcagt

SEQ ID NO: 116571 - DNA, 75 bp, synthetic construct
  source 1..75: mol_type = other DNA
ccggacggcgcgatccacgcgatcgccgatgtgctgggtattccggcgagcgatgtcgaaggcgtggcaacgttc

SEQ ID NO: 116572 - DNA, 75 bp, synthetic construct
  source 1..75: mol_type = other DNA
tgaattgtatcgcgtcattactagtcttagtgactatctctggttgtcatcagtcaccctccatccataagcagg

SEQ ID NO: 116573 - DNA, 75 bp, synthetic construct
  source 1..75: mol_type = other DNA
gataactgaggaagcacaaagatgtcaacgacggatgaaaagtgatccacttatatctccaccaacggcccaata

SEQ ID NO: 116574 - DNA, 75 bp, synthetic construct
  source 1..75: mol_type = other DNA
ctgacagacattatggacgccagtgcggtggatgccatccgtgcccgcctgagtaatccgggcagcacccgtaaa

SEQ ID NO: 116575 - DNA, 75 bp, synthetic construct
  source 1..75: mol_type = other DNA
actcaaaaaacaggtgttatttccagcaaccaaaaaagcgtttggtcttttccgtgacccgttcgccgatgaagc

SEQ ID NO: 116576 - DNA, 75 bp, synthetic construct
  source 1..75: mol_type = other DNA
catttaggtgtgatagcaagacatctacatcaaacaggacgttacgctgttcagcagcttatttatgagcatacc

SEQ ID NO: 116577 - DNA, 75 bp, synthetic construct
  source 1..75: mol_type = other DNA
aacttgcggtagcggaaatgcttcacgatgccgaaatgtggagcgccgcaaataaagccttgtatgtagtgctaa

SEQ ID NO: 116578 - DNA, 75 bp, synthetic construct
  source 1..75: mol_type = other DNA
tggccgtcagtaatctggttattgcagccatgaatctggctgctgaaattggtattccgcaggtcactgctgatg

SEQ ID NO: 116579 - DNA, 75 bp, synthetic construct
  source 1..75: mol_type = other DNA
aatttattgtccgcaaaagtattcgcggaaagaatatctacgttgccgtaggaggctacccggaaatttcaatta

SEQ ID NO: 116580 - DNA, 75 bp, synthetic construct
  source 1..75: mol_type = other DNA
gcgtctgacgcgtccgtggggagaaactaccgcacgactggtgtctgatgaggtggggaaaaatctctataaaga

SEQ ID NO: 116581 - DNA, 75 bp, synthetic construct
  source 1..75: mol_type = other DNA
accaccccggacattcgctacgtgcgtgaggcgctgtaccagacagcccgtcatggcgggtttatggccgtcatc

SEQ ID NO: 116582 - DNA, 75 bp, synthetic construct
  source 1..75: mol_type = other DNA
actttccgacgatgaagccagctcgctggggctgaatgttgcgcgcctgaggttagggttgattatctgcgccac

SEQ ID NO: 116583 - DNA, 75 bp, synthetic construct
  source 1..75: mol_type = other DNA
gcaaggtaaatcaaccgaaaccaatccgctttactggctgcgggcgatggattgtgctgatcgtttaatgcctgc

SEQ ID NO: 116584 - DNA, 75 bp, synthetic construct
  source 1..75: mol_type = other DNA
gtcatgacttccggtgattctggtgtaaatgatattattgatcgccatgaagaatcacgcgaagcattaatgatg

SEQ ID NO: 116585 - DNA, 75 bp, synthetic construct
  source 1..75: mol_type = other DNA
tatcaaccgcgagaatgcgccggtgattgttatcgagccatacatcatcgcgatggaagacaacgatgtgaaagg

SEQ ID NO: 116586 - DNA, 75 bp, synthetic construct
  source 1..75: mol_type = other DNA
atggaataatcgatcgccatgaagaatcgcgcaacgccctaaagatattagggtgccaccaaactattcatctta

SEQ ID NO: 116587 - DNA, 75 bp, synthetic construct
  source 1..75: mol_type = other DNA
accacgccggacattcgctacgtgcgtgaggcgctgtaccagacagcccgtcatggggggtttatggccgtcatc

SEQ ID NO: 116588 - DNA, 75 bp, synthetic construct
  source 1..75: mol_type = other DNA
gaaagagttctttgattattaccgcatgccgcgtggtttccatgcgcgttcggtcaactcaaccagtgcctggaa

SEQ ID NO: 116589 - DNA, 75 bp, synthetic construct
  source 1..75: mol_type = other DNA
atgcaatacaaccccttaggaaaaaccgacctcgcgttcccgtactttgtcctcggctgtatgacctttggcgag

SEQ ID NO: 116590 - DNA, 75 bp, synthetic construct
  source 1..75: mol_type = other DNA
ggcataaatttctttgataccgccaatagctattccgatggcagcagcgaagagatcgtcggtcgcgcactgcgg

SEQ ID NO: 116591 - DNA, 75 bp, synthetic construct
  source 1..75: mol_type = other DNA
accacaccggacattcgctacgtgcgtgaggcgctgtaccagacagcccgtcatggagggtttatggccgtcatc

SEQ ID NO: 116592 - DNA, 75 bp, synthetic construct
  source 1..75: mol_type = other DNA
taatgcctgcgcagtcgcgtcagcaagctcgccaatatgacgacggcagctggcaaaatacctttaaacaaggga

SEQ ID NO: 116593 - DNA, 75 bp, synthetic construct
  source 1..75: mol_type = other DNA
accactccggacattcgctacgtgcgtgaggcgctgtaccagacagcccgtcatggtgggtttatggccgtcatc

SEQ ID NO: 116594 - DNA, 75 bp, synthetic construct
  source 1..75: mol_type = other DNA
ccgatgtgctgggtattccggcaagcgacgtcgaaggtgtggcaacgttctacagccagatcttccgccagccgg

SEQ ID NO: 116595 - DNA, 75 bp, synthetic construct
  source 1..75: mol_type = other DNA
gcaatctggcttgctaagcgcagaactgcaacaaaatgggcaagtgcaggacagcattagcacaaaactgtcttt

SEQ ID NO: 116596 - DNA, 75 bp, synthetic construct
  source 1..75: mol_type = other DNA
taacattagatagcttgcttttaattaaacaacgctatggtatttccgttgcggcaagtatcatgcgtttacatg

SEQ ID NO: 116597 - DNA, 75 bp, synthetic construct
  source 1..75: mol_type = other DNA
aatacatgcgacgcggaagcgatcttgaatcatggtggtatgtgcaggatggtaaggacgcgtttcagtttcgcc

SEQ ID NO: 116598 - DNA, 75 bp, synthetic construct
  source 1..75: mol_type = other DNA
tacgtaccggctggaccgcgttcgatgaagaaaagaccgaactgatcaaccagacggtgacctgtcatatcgacc

SEQ ID NO: 116599 - DNA, 75 bp, synthetic construct
  source 1..75: mol_type = other DNA
aagaggcccgcatcccgcaggcggtggtggcaagagccgtcgccgtttccgaggccacgctggcccagattgtga

SEQ ID NO: 116600 - DNA, 75 bp, synthetic construct
  source 1..75: mol_type = other DNA
ggcctgcccggctatctttctgccatcccatccgctttgctcaacgagtccgccacgctgttccgccggaagtat

SEQ ID NO: 116601 - DNA, 75 bp, synthetic construct
  source 1..75: mol_type = other DNA
tatgccgaataatgttgggggttttggggatgtggagaaggctagtaaggtttttgtacgtaatgaactattgcc

SEQ ID NO: 116602 - DNA, 75 bp, synthetic construct
  source 1..75: mol_type = other DNA
cgaaaggcagcatttttcatctgatggaaccggacatcaaccaggagatctacggcctgcccggttatctttctg

SEQ ID NO: 116603 - DNA, 75 bp, synthetic construct
  source 1..75: mol_type = other DNA
cgcgcagaaccaggaggatgtgaacaacctccgcaacgcgatgaaaagcgccaaaggccctggcaacttccgcaa

SEQ ID NO: 116604 - DNA, 75 bp, synthetic construct
  source 1..75: mol_type = other DNA
ctttcatattgcgctcctactggcgactggcatatcggtaatagtgtcaatgactggtgtctggttgtccttttt

SEQ ID NO: 116605 - DNA, 75 bp, synthetic construct
  source 1..75: mol_type = other DNA
aaagacagcgagggtaactatctgtggcgtccggggctggaactggggcagccgtcctctctggcgggttacggt

SEQ ID NO: 116606 - DNA, 75 bp, synthetic construct
  source 1..75: mol_type = other DNA
tgctggatattattttcagcctcgattcagtgattaccgccgtgggtctgtcggatcatctgtttattatgatgg

SEQ ID NO: 116607 - DNA, 75 bp, synthetic construct
  source 1..75: mol_type = other DNA
ctatgtggaatgcgtacagatggaccgttggtatgagccaccagtgagttttgatggactggcgcgaaccttccg

SEQ ID NO: 116608 - DNA, 75 bp, synthetic construct
  source 1..75: mol_type = other DNA
tcgcgctgccgtgcatcacagttcaccaattgcggtgaaatgcaacattctgaccagtacctacatccctcaccc

SEQ ID NO: 116609 - DNA, 75 bp, synthetic construct
  source 1..75: mol_type = other DNA
ggaatcttcaaaacaggttcctgttacgtatgaatggttgcgtctcgaagaccgcacgagccacagcggagatct

SEQ ID NO: 116610 - DNA, 75 bp, synthetic construct
  source 1..75: mol_type = other DNA
gataattgccgtgccgagcagggaaaatgaattcaggaagctttctctcgagcaagagaaaaagcaaattaagat

SEQ ID NO: 116611 - DNA, 75 bp, synthetic construct
  source 1..75: mol_type = other DNA
ccgctggcaaacctttagcggtgtgtttgtgccgttgttaaagcccgcgcttgccaatgcctttttaatcgtcgt

SEQ ID NO: 116612 - DNA, 75 bp, synthetic construct
  source 1..75: mol_type = other DNA
tttggcctgctcatcgcctgggtggtggtgcgtcaacaattcaaaggcaaaaagaccatcgagttcaccaccatg

SEQ ID NO: 116613 - DNA, 75 bp, synthetic construct
  source 1..75: mol_type = other DNA
cgtagtgattgtctacctgatttttgacagctggcggcatcgtcacgacccagccgtcacctttactcccgatgc

SEQ ID NO: 116614 - DNA, 75 bp, synthetic construct
  source 1..75: mol_type = other DNA
aagaggcccgtatcccacaggcggtggtggcgagagctgtcgatgtttctgaggccacgctggcccagattgtga

SEQ ID NO: 116615 - DNA, 75 bp, synthetic construct
  source 1..75: mol_type = other DNA
aagctattgctgatagcttgggagtgtcagtaaaaacagtctcaagttataaaaatgacttaatgaaaaggttaa

SEQ ID NO: 116616 - DNA, 75 bp, synthetic construct
  source 1..75: mol_type = other DNA
aacaactggtcggcctttccgggcaggcctacaaaagtggcatgtcggtgatgggctgggaagtcacctctgcag

SEQ ID NO: 116617 - DNA, 75 bp, synthetic construct
  source 1..75: mol_type = other DNA
tgtcatggaggccatgaagcatgtcaatgaatggctggggatcgaggtgatgcgctttaatccctatgcacttct

SEQ ID NO: 116618 - DNA, 75 bp, synthetic construct
  source 1..75: mol_type = other DNA
acagcctcgaagagtttctgacgttcaaactgcaacgtgccggtaagcagctggccgacatcatggacgccagcg

SEQ ID NO: 116619 - DNA, 75 bp, synthetic construct
  source 1..75: mol_type = other DNA
tggagcaaatgattatctggtgaaacctttttcattttctgagttactggcaagagtcagggcgcaattgagaca

SEQ ID NO: 116620 - DNA, 75 bp, synthetic construct
  source 1..75: mol_type = other DNA
ggcatgccggaatatcttggcgcattactctcggccagcctttctcattcggcggacatgttcagaaaactgtat

SEQ ID NO: 116621 - DNA, 75 bp, synthetic construct
  source 1..75: mol_type = other DNA
aataagaactcttattgaaaaatacagcagcgagttggaaaaagtatcaggagcaggtgatgctgccaacttact

SEQ ID NO: 116622 - DNA, 75 bp, synthetic construct
  source 1..75: mol_type = other DNA
ggtagcggtaaaacatcatttgttaagatgttaaaatcagaattagaattaactaatagtgaatatatagatgtt

SEQ ID NO: 116623 - DNA, 75 bp, synthetic construct
  source 1..75: mol_type = other DNA
tcgcagacttcgcgcgaaggttgatgatccttttaatgaaaagttaattgcaacgatcagagggatgggatattc

SEQ ID NO: 116624 - DNA, 75 bp, synthetic construct
  source 1..75: mol_type = other DNA
tagcctggcgtcaggcaattgtcattgagcctaatggccgccgcaccgtgacaacgtccggttttatccgggaac

SEQ ID NO: 116625 - DNA, 75 bp, synthetic construct
  source 1..75: mol_type = other DNA
ttgtctctgataccgtggcgcttagcaaagtgtcgggtaacgagctcctggtgtggaccgcgggtaaaaaacagg

SEQ ID NO: 116626 - DNA, 75 bp, synthetic construct
  source 1..75: mol_type = other DNA
ttcatctgctgggtacgcatatcaagtacaagtaccgttatccggaagatcagggcaaatttgacggtaatacag

SEQ ID NO: 116627 - DNA, 75 bp, synthetic construct
  source 1..75: mol_type = other DNA
gagcaagataaaaagttggcgctagatttaggcgttgcatcctctgaaaaacaagtcgttattcataacggaatg

SEQ ID NO: 116628 - DNA, 75 bp, synthetic construct
  source 1..75: mol_type = other DNA
tacatggctgaactggctgaccacccgagccggtcgttcgcggacgtggtgggctccctcggtcggtgagcaggt

SEQ ID NO: 116629 - DNA, 75 bp, synthetic construct
  source 1..75: mol_type = other DNA
aactggtgcgtggcgttgaacgcagctgcttcgaacgcggttatagtctcgtcctttgcaataccgaaggcgatg

SEQ ID NO: 116630 - DNA, 75 bp, synthetic construct
  source 1..75: mol_type = other DNA
aaaagtgatgggccgcgagttccacgacccgttgcattcatcccccatcgtcagcgccccggcgaagctttcagt

SEQ ID NO: 116631 - DNA, 75 bp, synthetic construct
  source 1..75: mol_type = other DNA
tttggataagataattactgtttccgagcaagataaaaagttggcgctagatttaggcgttgcatcctctgaaaa

SEQ ID NO: 116632 - DNA, 75 bp, synthetic construct
  source 1..75: mol_type = other DNA
tgacccggcagagaaagaggcccgtcgtttgcatctgcagggcatgacggttccggattatacggtgaaggtgag

SEQ ID NO: 116633 - DNA, 75 bp, synthetic construct
  source 1..75: mol_type = other DNA
cagttaacaacgaacaaactggctgccctgtaccgggtttctgccgaccagattcatcatcacctctctgcaatt

SEQ ID NO: 116634 - DNA, 75 bp, synthetic construct
  source 1..75: mol_type = other DNA
caccgggaattgtggtgtatcagcacggaccatttgcctgggggaaagatgctcacgatgcggtgcataacgcgg

SEQ ID NO: 116635 - DNA, 75 bp, synthetic construct
  source 1..75: mol_type = other DNA
aggcgcacgacggtatttttgcttttagtgtgctggatatggtgttgatgggcctggcccccaccataggcgctt

SEQ ID NO: 116636 - DNA, 75 bp, synthetic construct
  source 1..75: mol_type = other DNA
cgtaacacaaggcttaccggctgaacaactgacaatggacaaactggcagccctgtatcgggtttccgccgccca

SEQ ID NO: 116637 - DNA, 75 bp, synthetic construct
  source 1..75: mol_type = other DNA
ggtgctatccctttgttaagcggcgagattttgttggatagcatatccattcagaaaatgagccctcgccagcgc

SEQ ID NO: 116638 - DNA, 75 bp, synthetic construct
  source 1..75: mol_type = other DNA
taaaaaaacttgcatctgatttgaatattgcaaataatattctctttcttggggaaagagatgatgtcgataatt

SEQ ID NO: 116639 - DNA, 75 bp, synthetic construct
  source 1..75: mol_type = other DNA
gcaaatctcgccgcgtgatgcagcgtactttctcttctcagtcacggcagaatgtgactcaggcgttacccgaat

SEQ ID NO: 116640 - DNA, 75 bp, synthetic construct
  source 1..75: mol_type = other DNA
atatccacggtatggctgatttcatcagccagtatcctggtgttgatagcacccgtattggtttgttggggattt

SEQ ID NO: 116641 - DNA, 75 bp, synthetic construct
  source 1..75: mol_type = other DNA
tgctgatgacggcggtagtcggtatcacctcagccaatgcagcagattacaaaaagaacccatttactctcgttt

SEQ ID NO: 116642 - DNA, 75 bp, synthetic construct
  source 1..75: mol_type = other DNA
cgcttgacaaagcattaaaaccggtcggactgagcggcatgttcggtaaaggcgggtatatggatggccctggcg

SEQ ID NO: 116643 - DNA, 75 bp, synthetic construct
  source 1..75: mol_type = other DNA
gctttcgcaagtgctgatggcatcgacctatccggcaaatgtcgcccaggccgtgcagtggtcgcacgataaccc

SEQ ID NO: 116644 - DNA, 75 bp, synthetic construct
  source 1..75: mol_type = other DNA
agaagcggcacgtcagcgtattcagtccgcgtcgcctgagcagcgccaggcggttcgcgagaaaatgcagactaa

SEQ ID NO: 116645 - DNA, 75 bp, synthetic construct
  source 1..75: mol_type = other DNA
gtgtccaacaacgtacgagttgtacgaaggtgacgctgcctacaaagctgcgcttgacaaagcattaaaaccggt

SEQ ID NO: 116646 - DNA, 75 bp, synthetic construct
  source 1..75: mol_type = other DNA
ctgtcgcgctgtaccccgactctctgctttcacaagtgttaatggcatcaacctatccgacaaacgttgcgcaag

SEQ ID NO: 116647 - DNA, 75 bp, synthetic construct
  source 1..75: mol_type = other DNA
cctgatcgatggcgctacccatattgagacctattgggtgcctgaatacgttgaccaggcgacgcaaaaattaga

SEQ ID NO: 116648 - DNA, 75 bp, synthetic construct
  source 1..75: mol_type = other DNA
aaaccaacgcgctggccgtcgccaacaagcaagtggatgtggcgaccaacaacaccgaaaacctcgacaagctga

SEQ ID NO: 116649 - DNA, 75 bp, synthetic construct
  source 1..75: mol_type = other DNA
gggctgggcgccgttccgcgcctccagcgacctgcaactggtgccgattcgccagctcgcactgtttaaagagat

SEQ ID NO: 116650 - DNA, 75 bp, synthetic construct
  source 1..75: mol_type = other DNA
cgatcaggcgctctccagcgagccggttgcgcctggcgcgactaaccgcagcgagcggcgagtaaaaatgcttga

SEQ ID NO: 116651 - DNA, 75 bp, synthetic construct
  source 1..75: mol_type = other DNA
caacgtttaaatacaccacaagtagtttgctggatctgatgagctttgacgtgacagaccatatcgatctcatca

SEQ ID NO: 116652 - DNA, 75 bp, synthetic construct
  source 1..75: mol_type = other DNA
gcgggaaactcacctctaacggcgtgcaggttgatgaccatgaccacggtaatgtccagagcggcggtagctgga

SEQ ID NO: 116653 - DNA, 75 bp, synthetic construct
  source 1..75: mol_type = other DNA
taccggggtatacagcagggcgtgggggcggcaggaggagccgtcggaaaatatcggaactgaaaatccgttgca

SEQ ID NO: 116654 - DNA, 75 bp, synthetic construct
  source 1..75: mol_type = other DNA
accgccgccgaattttaaaggcagcgttattacgccaccagcgtaaaacgggcagtaactgccttgttattaagc

SEQ ID NO: 116655 - DNA, 75 bp, synthetic construct
  source 1..75: mol_type = other DNA
gggaaaagtgctgcccgcgttgtggtactggggtatacagcaggggggggggggggctgcaggaaggcaactgga

SEQ ID NO: 116656 - DNA, 75 bp, synthetic construct
  source 1..75: mol_type = other DNA
actgcaatgttaaaacagagcaattgcagcagtttattaaaataatggaacaaaaagcgcaactaccaatctata

SEQ ID NO: 116657 - DNA, 75 bp, synthetic construct
  source 1..75: mol_type = other DNA
tatcgataaaaaagccaatgacagtaccgataaacaagccagtgacagtatcgagaaacaagccaatgacagtac

SEQ ID NO: 116658 - DNA, 75 bp, synthetic construct
  source 1..75: mol_type = other DNA
tatttggccgcgtttattcggagaaagactttagcatcaatattgccatatgtctatccgggatagttggactga

SEQ ID NO: 116659 - DNA, 75 bp, synthetic construct
  source 1..75: mol_type = other DNA
ttggctggggcgcgttcctgctgccattactggtgctgattgtcggcccaaccgaatttattaccaacagcatca

SEQ ID NO: 116660 - DNA, 75 bp, synthetic construct
  source 1..75: mol_type = other DNA
gcacgcttcactcttgatgcgatggagatcctcaattactggaatctgccgatgaactgcgtggaggtgcactga

SEQ ID NO: 116661 - DNA, 75 bp, synthetic construct
  source 1..75: mol_type = other DNA
atttacgcatcccattattgaagtttttgttctctggtaaaccggttgttaagcgtgagaacgataaagcacctg

SEQ ID NO: 116662 - DNA, 75 bp, synthetic construct
  source 1..75: mol_type = other DNA
cttgcgataattctgtacgaaattcatttacgcatcccattgttgaagtttttgttctcaggcaagccgatcgtg

SEQ ID NO: 116663 - DNA, 75 bp, synthetic construct
  source 1..75: mol_type = other DNA
gccaataacagtaccgataaacaagccaagaacagtaccgagcaacaggacagtaccagttttaatcaagcccgt

SEQ ID NO: 116664 - DNA, 75 bp, synthetic construct
  source 1..75: mol_type = other DNA
ccgtggtttgaacatgaccagatgactgtcgctgagaaaatcctgctgcgatgtacctggcttgacccggcagag

SEQ ID NO: 116665 - DNA, 75 bp, synthetic construct
  source 1..75: mol_type = other DNA
cgaattctgaactgttatatggcgaatgacagcaaaggccattttgttacggcgaaagaagcagcgaagcacaac

SEQ ID NO: 116666 - DNA, 75 bp, synthetic construct
  source 1..75: mol_type = other DNA
cgttgggcggtgaaacggctgttcaacaagttctgatgtcgttgccagccggtaaattgttccttgccgcttatc

SEQ ID NO: 116667 - DNA, 75 bp, synthetic construct
  source 1..75: mol_type = other DNA
gcatgggcgcaggcggggctggcgatcccggcgttaggcaccacgcacgccgactacttctttggcgacattccg

SEQ ID NO: 116668 - DNA, 75 bp, synthetic construct
  source 1..75: mol_type = other DNA
atcttgaatatatagatttcacaacagtgactctatatgaaacacctgcaacacctgcaacatctgatacatctg

SEQ ID NO: 116669 - DNA, 75 bp, synthetic construct
  source 1..75: mol_type = other DNA
gatttagcgaaatcatccggctgatagggctggaagcaatggtgcgcatgcagcgccaactgctacgtcagttta

SEQ ID NO: 116670 - DNA, 75 bp, synthetic construct
  source 1..75: mol_type = other DNA
acacatagatttcacaacagtgattctatatgaaacatctaaaatacctgcaacactagcaacactagcaacact

SEQ ID NO: 116671 - DNA, 75 bp, synthetic construct
  source 1..75: mol_type = other DNA
aataatggaacaaaaagcgcaactaccaatctatattgacaagaacaatttgaaagagagcattttctctgtttt

SEQ ID NO: 116672 - DNA, 75 bp, synthetic construct
  source 1..75: mol_type = other DNA
agcacgggctggtggtgatcaagcccagcggtgtcgcctacgaaaccatgaaagcggacgatatggtggtggtcg

SEQ ID NO: 116673 - DNA, 75 bp, synthetic construct
  source 1..75: mol_type = other DNA
tggtacgccagatgagcagcgtgttgctgatgcctggaaggcggcaatggaagatgtgctgaaagtgaaggatca

SEQ ID NO: 116674 - DNA, 75 bp, synthetic construct
  source 1..75: mol_type = other DNA
gctggaagtgcagaagggcgggaagatgcacggcaacatcgagcataccggtggtgaactctcatcaaacggtaa

SEQ ID NO: 116675 - DNA, 75 bp, synthetic construct
  source 1..75: mol_type = other DNA
cccttcctcgtcattttactggtgaaagtcggtggatttattcgctggctgaaacaggattacgccgacattccg

SEQ ID NO: 116676 - DNA, 75 bp, synthetic construct
  source 1..75: mol_type = other DNA
attaccggcgttcgcccgcaaggcccgtggggaaaactggtcgatttgatgttcctgatcgccactgtcggcgca

SEQ ID NO: 116677 - DNA, 75 bp, synthetic construct
  source 1..75: mol_type = other DNA
cggcgttacaagtgcatttaccgcagcacagtttgtttatgaccccgctggcgatcgccagtagtgggcgagaga

SEQ ID NO: 116678 - DNA, 75 bp, synthetic construct
  source 1..75: mol_type = other DNA
cggacattgtcgcccggcatattgaagggcagggcattactgatttatggctggcgggcggctcttgtatgcaac

SEQ ID NO: 116679 - DNA, 75 bp, synthetic construct
  source 1..75: mol_type = other DNA
tgtgatctgcgtaatgcaaaattcgaaaacgcctcattagaaaataatgattttcgtaaagttcgccacttgact

SEQ ID NO: 116680 - DNA, 75 bp, synthetic construct
  source 1..75: mol_type = other DNA
agttctcactggcgttaattttactggaagtgaccttagtaacgcttatcttgaacacatagatttcacaacagt

SEQ ID NO: 116681 - DNA, 75 bp, synthetic construct
  source 1..75: mol_type = other DNA
gtacgccgactggcaggccagccaggcgctcggcgtaacgcagcaaccggaatactggcagcatatgctcgacag

SEQ ID NO: 116682 - DNA, 75 bp, synthetic construct
  source 1..75: mol_type = other DNA
ccgtgctaatcatcgctatcctggttgtgggctccatttggattatgtggaacctcaactacaacatgatgatgc

SEQ ID NO: 116683 - DNA, 75 bp, synthetic construct
  source 1..75: mol_type = other DNA
tctgctttctgccgattgttctctactccggcgcgttggcgctcaacagcctgtttcacgtcggggaatcgctac

SEQ ID NO: 116684 - DNA, 75 bp, synthetic construct
  source 1..75: mol_type = other DNA
gcttcacgaccatcaatgtgttttatccagccaagaacagaaacccagcaggctatgagggcattacaccgggtc

SEQ ID NO: 116685 - DNA, 75 bp, synthetic construct
  source 1..75: mol_type = other DNA
agtagaaaccattgcgctggaacaactggtcggtagagtatcggcaaatatgatcctgccttatccacccggcgt

SEQ ID NO: 116686 - DNA, 75 bp, synthetic construct
  source 1..75: mol_type = other DNA
aatatctgagccgccttttggtgaggttgcatacccactacttttaccttgttgagcaaatagcagagctggaat

SEQ ID NO: 116687 - DNA, 75 bp, synthetic construct
  source 1..75: mol_type = other DNA
gggttcgggagcaactcaacaagaagcattcgaatgtggttacctgcgctctggcaaataaactggctcgaattg

SEQ ID NO: 116688 - DNA, 75 bp, synthetic construct
  source 1..75: mol_type = other DNA
aaaaaacgcgaaaactatcgcgcctgctttcatcagttcgatccggtgaaggtggctgcaatgcaggaagaggat

SEQ ID NO: 116689 - DNA, 75 bp, synthetic construct
  source 1..75: mol_type = other DNA
gatacgtaccggcgtcgtcgtcgaagttgacctcgatgacgggcgctgtcgcgtccagactggcggcattgttac

SEQ ID NO: 116690 - DNA, 75 bp, synthetic construct
  source 1..75: mol_type = other DNA
atgcgtttgcggtggacatgaaaccgtggaaaaacgtcaagatcgcgtcaattggcatcctgttcgcgatgattg

SEQ ID NO: 116691 - DNA, 75 bp, synthetic construct
  source 1..75: mol_type = other DNA
cgtctaatggtgtcgttgtccattctcacaaacatagcggcgtccagtacggtggtagtaatacaggtggcccgg

SEQ ID NO: 116692 - DNA, 75 bp, synthetic construct
  source 1..75: mol_type = other DNA
atgacaacattatcacgtatacaagaaatttcacgcctccttcgcaacctgatacgcaccggcgtcgtcgtcgaa

SEQ ID NO: 116693 - DNA, 75 bp, synthetic construct
  source 1..75: mol_type = other DNA
tctccgcaattcgtgcgtccatttgtcaaaagcaataagaatgattttattgatgcagaagccatatgcgaagcg

SEQ ID NO: 116694 - DNA, 75 bp, synthetic construct
  source 1..75: mol_type = other DNA
atgtctggtgatatcgagcacagcggcggctcattctcttctaacggcaaggtactccacacccatagacaccct

SEQ ID NO: 116695 - DNA, 75 bp, synthetic construct
  source 1..75: mol_type = other DNA
cgcgccgtggatcgccaacgcgccgcaggggctgtatagctggatgaaacagctcaacggtatttacaacgtgcc

SEQ ID NO: 116696 - DNA, 75 bp, synthetic construct
  source 1..75: mol_type = other DNA
tgaaggctggaacatgacggcgtttgtcttcaccgtgctaatcatcgctatcctggttgtaggctccatctggat

SEQ ID NO: 116697 - DNA, 75 bp, synthetic construct
  source 1..75: mol_type = other DNA
tgacctttgatggtctgcagggcgaaacgcctgacaaattctcgctgaccggtcaggcagaaggtatcagtctgc

SEQ ID NO: 116698 - DNA, 75 bp, synthetic construct
  source 1..75: mol_type = other DNA
cgactggcttcagtggctgacccatcgcgccggtcgttcgcgcacatggtgggcaccttccgtgggggaacaggt

SEQ ID NO: 116699 - DNA, 75 bp, synthetic construct
  source 1..75: mol_type = other DNA
gacgcgtaccgatgagtacgtacaggctgctcacgagctgtttgttcctgagacaaattgcgctgaggtctacta

SEQ ID NO: 116700 - DNA, 75 bp, synthetic construct
  source 1..75: mol_type = other DNA
agcagttatgaaccgcgcagggtcacagcacgcagcaagaaggggcgcatcaaacgtcagatgtttacaaagctg

SEQ ID NO: 116701 - DNA, 75 bp, synthetic construct
  source 1..75: mol_type = other DNA
atgaatataaatcactcattacaagagcttgcgcgtgcactgcgcaacatgatccgcaccggtattattgtcgaa

SEQ ID NO: 116702 - DNA, 75 bp, synthetic construct
  source 1..75: mol_type = other DNA
gaacacaccggcggtgaactctcatcaaacggtaaggtactgcatacccataaacaccccggcgacagcggcggc

SEQ ID NO: 116703 - DNA, 75 bp, synthetic construct
  source 1..75: mol_type = other DNA
tctggagccagccgcaagaagccgtatgatgcgccagctggcgcaggaactgcgccggacacagcagcagaatat

SEQ ID NO: 116704 - DNA, 75 bp, synthetic construct
  source 1..75: mol_type = other DNA
gcggctcattctcttctaacggcaaggtactccacacccatagacaccctggcgacagcggcggacagacggggg

SEQ ID NO: 116705 - DNA, 75 bp, synthetic construct
  source 1..75: mol_type = other DNA
tgcaggtgttgaatcaatatatgcagagtatgggcgacagcatgaaaaggtatactgggatattttagtttcaat

SEQ ID NO: 116706 - DNA, 75 bp, synthetic construct
  source 1..75: mol_type = other DNA
caaagggaaggtaaattaaaggaactttataaacatgtcgttccaaatcacataataaaatcttttgataaagta

SEQ ID NO: 116707 - DNA, 75 bp, synthetic construct
  source 1..75: mol_type = other DNA
aaaccgaccttaacgccggtcgctgccgtgtgcagaccggcggcatgtgcaccgactggcttcagtggctgaccc

SEQ ID NO: 116708 - DNA, 75 bp, synthetic construct
  source 1..75: mol_type = other DNA
gcaccaacaagctgactaccggcacgctggaagtgcagaagggcgggaagatgcacggcaacatcgagcataccg

SEQ ID NO: 116709 - DNA, 75 bp, synthetic construct
  source 1..75: mol_type = other DNA
taacgtttttttggtgtgaggtggtacaggctctgccgtcaccctcttttctccctccgggaacgaacctgtctg

SEQ ID NO: 116710 - DNA, 75 bp, synthetic construct
  source 1..75: mol_type = other DNA
aacgcgtgagtggtatcagcgcgcaaaattgcatgtcgtcaaagttcgacgcagtataagcagcaacggcggcac

SEQ ID NO: 116711 - DNA, 75 bp, synthetic construct
  source 1..75: mol_type = other DNA
agtctcagattaccagtacaggaggggatatcgtcgctgtggatggcgaagctgccattaagctggggacgggcg

SEQ ID NO: 116712 - DNA, 75 bp, synthetic construct
  source 1..75: mol_type = other DNA
gccagtaaacattaacggtacagtctggttccagggcgacggttgcaaagccaatacctgcggctgggactttat

SEQ ID NO: 116713 - DNA, 75 bp, synthetic construct
  source 1..75: mol_type = other DNA
aactcgcgcgcgcactgcgcaacatgattcgcaccggccttgtcgtcgaaaccaaccttaaagccggtcgctgcc

SEQ ID NO: 116714 - DNA, 75 bp, synthetic construct
  source 1..75: mol_type = other DNA
caacattgatttcactgccggtaccgataatatcggcgtctgggttgataacggccgctttgaaaatacaggaag

SEQ ID NO: 116715 - DNA, 75 bp, synthetic construct
  source 1..75: mol_type = other DNA
ggaactctgaagctgggtaccagtagctttgctctggaagggctgaatacgagcgggttaacccatgcaatgctg

SEQ ID NO: 116716 - DNA, 75 bp, synthetic construct
  source 1..75: mol_type = other DNA
gtggtgaactctcatcaaacggtaaggtactgcatacccataaacaccccggcgacagtggcggcacaacagggg

SEQ ID NO: 116717 - DNA, 75 bp, synthetic construct
  source 1..75: mol_type = other DNA
ccttatccaccgggcgtaccgctgctgatgccaggagaaatgctgaccaaagagagccgcacagtactcgatttt

SEQ ID NO: 116718 - DNA, 75 bp, synthetic construct
  source 1..75: mol_type = other DNA
agcgaagagacgcagcgcgtgagcgtattcagtccgcatcaccagagcagcgccaggtgtttaaggaaaaagtac

SEQ ID NO: 116719 - DNA, 75 bp, synthetic construct
  source 1..75: mol_type = other DNA
aggatgttgatcgtaaatacagcctggcggaactgatccacacctggtcagatttggcaggcttatcttacgacg

SEQ ID NO: 116720 - DNA, 75 bp, synthetic construct
  source 1..75: mol_type = other DNA
catgtggcaggctactggccatatctgttactgctgctttgtccgctcatgcatcttttccacggtcacgggggg

SEQ ID NO: 116721 - DNA, 75 bp, synthetic construct
  source 1..75: mol_type = other DNA
cacatcgacgccgccagcggtggcttcctggcaccgttcgtcgccccggatatcgtctgggacttccgcctgccg

SEQ ID NO: 116722 - DNA, 75 bp, synthetic construct
  source 1..75: mol_type = other DNA
atggataagaagcaagtaacggatttaaggtcggaactactcgattcacgttttggggctaagtctatttctact

SEQ ID NO: 116723 - DNA, 75 bp, synthetic construct
  source 1..75: mol_type = other DNA
tgtgcgaagaacttcgtcctgatgttgactggtcatacttacgacgctcgtcatgctattcgctgaatatgttga

SEQ ID NO: 116724 - DNA, 75 bp, synthetic construct
  source 1..75: mol_type = other DNA
gaacgtgcaacaagaggtgaggttctgtgcgaagagcttcgtcctgatattgactggtcatatttacgacgttcg

SEQ ID NO: 116725 - DNA, 75 bp, synthetic construct
  source 1..75: mol_type = other DNA
ggttactgaagaatgatattactggctccggcgctctggtgaaacagggggcgggtaatctgattattaatcatg

SEQ ID NO: 116726 - DNA, 75 bp, synthetic construct
  source 1..75: mol_type = other DNA
ttgcattgaaagagcttgagagaaagttagttcagtctatttctgatcgtaaacaccttattgctcgttacgggg

SEQ ID NO: 116727 - DNA, 75 bp, synthetic construct
  source 1..75: mol_type = other DNA
gcggcccggtacaaatctgctggcataaattcgcccgttactgggatgtggaactgcgtgaaatccctatgcgcc

SEQ ID NO: 116728 - DNA, 75 bp, synthetic construct
  source 1..75: mol_type = other DNA
ctgccaccggcgctgccggggaagggtgtaacgaaaaaagcagctttcattacaccagaagtcagaaggctgaaa

SEQ ID NO: 116729 - DNA, 75 bp, synthetic construct
  source 1..75: mol_type = other DNA
aaatagatattcagcgcgacgagcatgatttagagactgtgcgacaaatacaggctttccacatgcgagaattgc

SEQ ID NO: 116730 - DNA, 75 bp, synthetic construct
  source 1..75: mol_type = other DNA
aactggatcgacaaagaagaatatccgcaatccgcagccatcgacctgcgttgcgtaaacatggttgccgatctg

SEQ ID NO: 116731 - DNA, 75 bp, synthetic construct
  source 1..75: mol_type = other DNA
tgtttgctggttttatgcgtaaccatcttaacggtaatggcgtagagattatcgatatctcgccaatgggctgcc

SEQ ID NO: 116732 - DNA, 75 bp, synthetic construct
  source 1..75: mol_type = other DNA
tgcgcgtagcattctggagcgcgatgtacgcattaacagtaatgaagaactggcactgccaaaagagaagttgca

SEQ ID NO: 116733 - DNA, 75 bp, synthetic construct
  source 1..75: mol_type = other DNA
atggataagaagcaagtaacggatttaaggtcggaactactcgattcacgttttggagctaagtccatttcaact

SEQ ID NO: 116734 - DNA, 75 bp, synthetic construct
  source 1..75: mol_type = other DNA
ggtaatgcgggtggtactgacggtaactggtatctgcgttctgaattgccgccagaaccacaaccgcagccgcag

SEQ ID NO: 116735 - DNA, 75 bp, synthetic construct
  source 1..75: mol_type = other DNA
atggataagaagcaagtaacggatttaaggtcggaactactcgattcacgttttggtgctaagtcaatttctact

SEQ ID NO: 116736 - DNA, 75 bp, synthetic construct
  source 1..75: mol_type = other DNA
atttttttgggcaggggggctcaggggaactacggaatcctggcaaaggatgccgggactgttgatgtggtaaat

SEQ ID NO: 116737 - DNA, 75 bp, synthetic construct
  source 1..75: mol_type = other DNA
tgctggaagactacaaagcctccctgaaatatctcagcgatcacccgaaactgcagggtattgcccagcagaaca

SEQ ID NO: 116738 - DNA, 75 bp, synthetic construct
  source 1..75: mol_type = other DNA
tgccagtgttgctccccgtacagactggcagcagtttgcacggcagagagccgaacgctgtcagcgacggagata

SEQ ID NO: 116739 - DNA, 75 bp, synthetic construct
  source 1..75: mol_type = other DNA
gcgtgccggaagccgggccgttattctggaagtcagtggacgctggatggaagcggcagaagcatggcgacgggc

SEQ ID NO: 116740 - DNA, 75 bp, synthetic construct
  source 1..75: mol_type = other DNA
aatatccgcaatccgcagccatcgacctgcgttgcgtaaatatggttgccgatctgtggcatgcgcctgcgccga

SEQ ID NO: 116741 - DNA, 75 bp, synthetic construct
  source 1..75: mol_type = other DNA
acctggccactttctgccagacctgggacgacgagaaagtccataaattgatggatttatcgatgaaaaaaaact

SEQ ID NO: 116742 - DNA, 75 bp, synthetic construct
  source 1..75: mol_type = other DNA
acctggccactttctgccagacctgggacgacgagaacgtccataaattgatggatttttcgattaaaaaaaact

SEQ ID NO: 116743 - DNA, 75 bp, synthetic construct
  source 1..75: mol_type = other DNA
gcacgatgcgctggataaattccaggccgacaccggtatcgacatcgacatgcacatcgacgccgccagcggtgg

SEQ ID NO: 116744 - DNA, 75 bp, synthetic construct
  source 1..75: mol_type = other DNA
ctcccgtccggcgggccaggtaattgcacagtactacgagttcttgcgcctcggtcgtgaaggctataccaaagt

SEQ ID NO: 116745 - DNA, 75 bp, synthetic construct
  source 1..75: mol_type = other DNA
tgggtctgggaagaagacggtaagcttctcggttttgtcagcattatggaaggccgatttctggcagcaatgttt

SEQ ID NO: 116746 - DNA, 75 bp, synthetic construct
  source 1..75: mol_type = other DNA
cggaagtggccaacgggcatacggacgttatctgctcaaccagtatccgccacattctggctgtacgaaagagta

SEQ ID NO: 116747 - DNA, 75 bp, synthetic construct
  source 1..75: mol_type = other DNA
gctctgaactactcgattcacgttttggtgccaaggccatttcgactatcgcagaatcaaaacgctttccgctgc

SEQ ID NO: 116748 - DNA, 75 bp, synthetic construct
  source 1..75: mol_type = other DNA
tcccccgggccaatgtgagcgtaacccgttttcattgtggcatgacgcttgagcagatccgaatgttcatttcag

SEQ ID NO: 116749 - DNA, 75 bp, synthetic construct
  source 1..75: mol_type = other DNA
cgttatctgctccacctcagtcagccacattctggctgtacgaaagagtacactgctgcaaatcgacacacttat

SEQ ID NO: 116750 - DNA, 75 bp, synthetic construct
  source 1..75: mol_type = other DNA
gttcggaactactcgattcacgttttggtgcaaaggccatttcgactatcgcagaatcaaaacgctttccgctgc

SEQ ID NO: 116751 - DNA, 75 bp, synthetic construct
  source 1..75: mol_type = other DNA
acctggccactttctgccagacctgggacgacgagaaggtccataaattgatggatttgtcgatcaaaaaaaact

SEQ ID NO: 116752 - DNA, 75 bp, synthetic construct
  source 1..75: mol_type = other DNA
gatctgaactactcgattcacgttttggtgcaaaggccatttcgactatcgcagaatcaaaacgctttccgctgc

SEQ ID NO: 116753 - DNA, 75 bp, synthetic construct
  source 1..75: mol_type = other DNA
gttcagaactactcgattcacgttttggtgcgaaggccatttcgactatcgcagaatcaaaacgctttccgctgc

SEQ ID NO: 116754 - DNA, 75 bp, synthetic construct
  source 1..75: mol_type = other DNA
tacaacaacaatggtctgaaataaaatcctgtatcaaggagacctttattcttatcaggcgattcggcatcaatc

SEQ ID NO: 116755 - DNA, 75 bp, synthetic construct
  source 1..75: mol_type = other DNA
acctgaaaggtaagagtgcgtctgatgacaataaggcgcatcagttcgagccttttgtggaggttaactggatcc

SEQ ID NO: 116756 - DNA, 75 bp, synthetic construct
  source 1..75: mol_type = other DNA
ggcaatcttattaatccaaaagacaagactacattattaacagcaggtgctcagctgagctcttctcaggataaa

SEQ ID NO: 116757 - DNA, 75 bp, synthetic construct
  source 1..75: mol_type = other DNA
atgccctgattgatgttctggtgaatgcccgcagctacggtgaagcgtgggccagttatcctgtcctcaagcgtt

SEQ ID NO: 116758 - DNA, 75 bp, synthetic construct
  source 1..75: mol_type = other DNA
atgagaaccgtaaacggatgtattttgctgctggcagctatcagtatcacttttgccgccgtaagtggggcttat

SEQ ID NO: 116759 - DNA, 75 bp, synthetic construct
  source 1..75: mol_type = other DNA
attcatcccgcactggcagcggctggagttgcccgacggcgactttgtcgatctcgcgtggagtgaagaccccac

SEQ ID NO: 116760 - DNA, 75 bp, synthetic construct
  source 1..75: mol_type = other DNA
atgcgtgatgatcgttttaatgccctgaaacaggaatttgatggcgcaccagaacacacaggcgatgcgttgtta

SEQ ID NO: 116761 - DNA, 75 bp, synthetic construct
  source 1..75: mol_type = other DNA
tttcgccgtgcgctgtcgctttctggtgggtcactcgactttctgtatacccgaccgatcactctggcattgctg

SEQ ID NO: 116762 - DNA, 75 bp, synthetic construct
  source 1..75: mol_type = other DNA
ttatcctggcactgttgtttattatcaacaacgtctttacttcgccgcatcgactgcgttccctcagactatctg

SEQ ID NO: 116763 - DNA, 75 bp, synthetic construct
  source 1..75: mol_type = other DNA
atgagctgatgcttcgcgctggcgaggccgcattccaggtgtgtcgttcggcgtatcctgacgcccgccactggc

SEQ ID NO: 116764 - DNA, 75 bp, synthetic construct
  source 1..75: mol_type = other DNA
atgaataaaatatataaagtgatatggaatcacagcacacagaagtgggacgtggtttcagaattgacgggttgt

SEQ ID NO: 116765 - DNA, 75 bp, synthetic construct
  source 1..75: mol_type = other DNA
gcggtcggtcacgggattgagaaccgtgcagaaattgaaggcattcagttaaccaatacgactgaaattaatgtg

SEQ ID NO: 116766 - DNA, 75 bp, synthetic construct
  source 1..75: mol_type = other DNA
attaccaacatgttcggtaataccttcctgcacagcttcgacaaagatccgatgtttgccagcagcttcatcgtg

SEQ ID NO: 116767 - DNA, 75 bp, synthetic construct
  source 1..75: mol_type = other DNA
tattgacagtaagggactaacccgggggatcagtgtgggtgacggaggttcctttaccaatgcatccactggcaa

SEQ ID NO: 116768 - DNA, 75 bp, synthetic construct
  source 1..75: mol_type = other DNA
ggctgattttcgcaggttactccgtggttctggccttcgcattcatggcgatgtttaaatacaaacacgttcgtg

SEQ ID NO: 116769 - DNA, 75 bp, synthetic construct
  source 1..75: mol_type = other DNA
ttacggggcttggcattattggcgctgttgatggcgatgatccggctgtattcagaccaatacaaaaatacatca

SEQ ID NO: 116770 - DNA, 75 bp, synthetic construct
  source 1..75: mol_type = other DNA
gggatacaggataagtgagatccgcacgggcaaagaaggctatctgacactggatacgccttctaatacctacta

SEQ ID NO: 116771 - DNA, 75 bp, synthetic construct
  source 1..75: mol_type = other DNA
ttcttgatgtttatgctaatagtcagcatgtattccgtttccagaatggcgtggctattgctttaaaaaacattc

SEQ ID NO: 116772 - DNA, 75 bp, synthetic construct
  source 1..75: mol_type = other DNA
agcggttaaggcggtaatggatgaaacgaacaagaaagcgcccttaaacagtcctgcgttgaccggaacaccaac

SEQ ID NO: 116773 - DNA, 75 bp, synthetic construct
  source 1..75: mol_type = other DNA
actattcaggaaagcggcggaacacgtaacgctatagaaaaaggtatttccttcattctcgacatgctcccggaa

SEQ ID NO: 116774 - DNA, 75 bp, synthetic construct
  source 1..75: mol_type = other DNA
cagatccggatgtttatttcggacctggcctatcagatgcctttgtacaacaaccaagaccacttcgttaaactc

SEQ ID NO: 116775 - DNA, 75 bp, synthetic construct
  source 1..75: mol_type = other DNA
aatatatatccaagaaagggattatagcgattggagctcatcctgatgatattgagttaggatgtggtgcatcat

SEQ ID NO: 116776 - DNA, 75 bp, synthetic construct
  source 1..75: mol_type = other DNA
aaccttatccgacctcattacgaattgtaaattgggtgaagtatatattatcaaataatattaatgatgaaaata

SEQ ID NO: 116777 - DNA, 75 bp, synthetic construct
  source 1..75: mol_type = other DNA
ccgataacattggtggcgtatattacaggccggtgcagaaatacattaacgggacatggtataacgtggtgcagg

SEQ ID NO: 116778 - DNA, 75 bp, synthetic construct
  source 1..75: mol_type = other DNA
ataaaaagttatatttaatatttcacactgtaaagtatatgaagttacgacagattataaacaggttaattagaa

SEQ ID NO: 116779 - DNA, 75 bp, synthetic construct
  source 1..75: mol_type = other DNA
aaaaataaagagaagcttttgagtttctcgaatccggtgaggtttattttttcacactctgctttgaaagaaggc

SEQ ID NO: 116780 - DNA, 75 bp, synthetic construct
  source 1..75: mol_type = other DNA
acagccatgattttactgtcgagatggaaacagggacaggtaaaacgtatgtttatcttcgcaccatgctggagc

SEQ ID NO: 116781 - DNA, 75 bp, synthetic construct
  source 1..75: mol_type = other DNA
cacgggctaatgtcagcgaaactggcttcaactgcggcatgacgtttgaccagatccggatgtttatttcggacc

SEQ ID NO: 116782 - DNA, 75 bp, synthetic construct
  source 1..75: mol_type = other DNA
attttatgtcactcaaagatcagttgattaatcctgctagatacatgcgctctaccaatctaaatgaggttgtga

SEQ ID NO: 116783 - DNA, 75 bp, synthetic construct
  source 1..75: mol_type = other DNA
atggataagaagcaagtaacggatttaaggtcggaactactcgattcacgttttggcgccaagtcgatttctact

SEQ ID NO: 116784 - DNA, 75 bp, synthetic construct
  source 1..75: mol_type = other DNA
cacagcaatattatggcgtgaacaactggcaaacatggaatttccagtgcccgtcaggtcatgtattgactggta

SEQ ID NO: 116785 - DNA, 75 bp, synthetic construct
  source 1..75: mol_type = other DNA
ttccggccttcgccctcagcggtgaagcctctgacatcgtggtgatgcgcattatgtgccgtcgtggtttcgaaa

SEQ ID NO: 116786 - DNA, 75 bp, synthetic construct
  source 1..75: mol_type = other DNA
caccctctacgacctctctgaacgtctgcgtctgcgcggctggcaggttccggccttcactctcggcggtgaagc

SEQ ID NO: 116787 - DNA, 75 bp, synthetic construct
  source 1..75: mol_type = other DNA
cagcattacctgttggggtgcctgttccgtggccttcagccacaccgccaacaggctggctgaaatgcaatggtg

SEQ ID NO: 116788 - DNA, 75 bp, synthetic construct
  source 1..75: mol_type = other DNA
ggtctgaactactcgattcacgttttggtgcgaaggccatttcgactatcgcagaatcaaaacgctttccgctgc

SEQ ID NO: 116789 - DNA, 75 bp, synthetic construct
  source 1..75: mol_type = other DNA
gggaaattgcgctatgacctgtctaatggtctggcaacgagtgcattttcatttttctcccagtcaggctggtat

SEQ ID NO: 116790 - DNA, 75 bp, synthetic construct
  source 1..75: mol_type = other DNA
tagaattacatactcatcaggggcagatattcagagtcagtgattatcgtacaaaagaaataccagcatcagaag

SEQ ID NO: 116791 - DNA, 75 bp, synthetic construct
  source 1..75: mol_type = other DNA
gtttgattccatcatgcgagactacccgataaactctttcatgatgtgggatatccgtagtgccagtattaaaaa

SEQ ID NO: 116792 - DNA, 75 bp, synthetic construct
  source 1..75: mol_type = other DNA
cactggcagggtgatttcagaagagaactggatgaactaacaaaaaacattcatcagaataatgaaatggggttt

SEQ ID NO: 116793 - DNA, 75 bp, synthetic construct
  source 1..75: mol_type = other DNA
tccgctcagaactactcgattcacgttttggtgccaaggctatttctactatcgctgactcaaaacgatttccgc

SEQ ID NO: 116794 - DNA, 75 bp, synthetic construct
  source 1..75: mol_type = other DNA
atggctggccagtatgaaaaagcaataacgataaaacaagcgatagattcaattaatttacgccactatcttctg

SEQ ID NO: 116795 - DNA, 75 bp, synthetic construct
  source 1..75: mol_type = other DNA
tccgctcagaactactcgattcacgttttggtgccaagaccatttcaactatcgctgactcaaaacgatttccgc

SEQ ID NO: 116796 - DNA, 75 bp, synthetic construct
  source 1..75: mol_type = other DNA
tccgctcagaactactcgattcacgttttggtgccaagtctatttcgactatcgctgactcaaaacgatttccgc

SEQ ID NO: 116797 - DNA, 75 bp, synthetic construct
  source 1..75: mol_type = other DNA
tccgctcagaactactcgattcacgttttggtgccaagccgatttccactatcgctgactcaaaacgatttccgc

SEQ ID NO: 116798 - DNA, 75 bp, synthetic construct
  source 1..75: mol_type = other DNA
gccgggccattgcggggctgaatgtatcagggctgaagaaaaacgcgcggggtatcagtctgctgaggtatatgc

SEQ ID NO: 116799 - DNA, 75 bp, synthetic construct
  source 1..75: mol_type = other DNA
gtgggcgcgataccattgctccagcggggatgactggtgggcactctcgcgcgctgacggatcgccttgccagta

SEQ ID NO: 116800 - DNA, 75 bp, synthetic construct
  source 1..75: mol_type = other DNA
atgacgcagataacggcaaccgatctcaacgacgccagcagcagtgctgagttcacccccatgcgcggtttcagt

SEQ ID NO: 116801 - DNA, 75 bp, synthetic construct
  source 1..75: mol_type = other DNA
ttcctgatgttgccgcagtacagcggcccggcgttgggttttgccgattgcagcgtagtgccgcaaccaacggcg

SEQ ID NO: 116802 - DNA, 75 bp, synthetic construct
  source 1..75: mol_type = other DNA
cttcgtcagtttgcgctcagccacggcgtggcgatggatggggtgcaggtcattgacccacacagcaatattgcg

SEQ ID NO: 116803 - DNA, 75 bp, synthetic construct
  source 1..75: mol_type = other DNA
ccagcgccgaaacctggcgcgccatcaccggagaagagccgcgcgtggcgatgctgtcgttttccagcaacggta

SEQ ID NO: 116804 - DNA, 75 bp, synthetic construct
  source 1..75: mol_type = other DNA
ggcattgttacttacgataccccgctttctgatcagcaaatgagtgagtacgacctgaagttattgcctcgcgag

SEQ ID NO: 116805 - DNA, 75 bp, synthetic construct
  source 1..75: mol_type = other DNA
cacgccaaagacgatccgtttatggatcatcagggtgatcccgaaaccggaaagtctccccccgcaggtggagta

SEQ ID NO: 116806 - DNA, 75 bp, synthetic construct
  source 1..75: mol_type = other DNA
ggctggctgggcgtggtgatgcattttcgcggttgcagcggtgaaccaaaccggatgcaccgcatttatcactct

SEQ ID NO: 116807 - DNA, 75 bp, synthetic construct
  source 1..75: mol_type = other DNA
acctgaaccagcggaggataccggtagctcttcgcctgaaccagaagtctctgtaggtgcatatcgatatgccct

SEQ ID NO: 116808 - DNA, 75 bp, synthetic construct
  source 1..75: mol_type = other DNA
tctgaagaatgggccgcttcgccacatggcgatagaggacaagtcatctggcacaggcctgatacagaacatccg

SEQ ID NO: 116809 - DNA, 75 bp, synthetic construct
  source 1..75: mol_type = other DNA
ggatgcgttttaaggcggggaatgcagcgtctcaggcggctgacggcaatgttgatatcaacaacaactattcgc

SEQ ID NO: 116810 - DNA, 75 bp, synthetic construct
  source 1..75: mol_type = other DNA
gctgcctcatcgctaactttgcaacagtgccaaacgggggatgtggcccagagcggcgcacgcgcgatcggcggc

SEQ ID NO: 116811 - DNA, 75 bp, synthetic construct
  source 1..75: mol_type = other DNA
gtttaaagcctataaagcgggtaatgtatcggaatatctggtccaaccagaagaacataaaccggaaacgtcgaa

SEQ ID NO: 116812 - DNA, 75 bp, synthetic construct
  source 1..75: mol_type = other DNA
catcgcgggttgtatgtagacagctggtatcagtatggcttctataacaacagtgtgcaaaatggcagtgagggg

SEQ ID NO: 116813 - DNA, 75 bp, synthetic construct
  source 1..75: mol_type = other DNA
cctcgaaaatgtttatcgtcggtaagccaaccatcatgggagaacgcctgtgccgcatcacgcaagagagcctgt

SEQ ID NO: 116814 - DNA, 75 bp, synthetic construct
  source 1..75: mol_type = other DNA
tatcgttaacattgatgtcaccgtaatcaaagatggtttccacggcgatacctcgaaaatgtttatcgtcggtaa

SEQ ID NO: 116815 - DNA, 75 bp, synthetic construct
  source 1..75: mol_type = other DNA
actctaacagtccgggtaaccacgagaaagttttgcaactacagtttattgacccggatgtacggctgataagct

SEQ ID NO: 116816 - DNA, 75 bp, synthetic construct
  source 1..75: mol_type = other DNA
cggattggttttctctgtgatatccgccaggtgatcttcaaccctaatttgttcccttatgagaacatggaaggc

SEQ ID NO: 116817 - DNA, 75 bp, synthetic construct
  source 1..75: mol_type = other DNA
cttgtctaaaatggttctaaggaatgtcaattttaatggcagcattcttagaaatgccaagttctccggtacgat

SEQ ID NO: 116818 - DNA, 75 bp, synthetic construct
  source 1..75: mol_type = other DNA
gaaattgacgatctaaaaataatatttaatcgacaagatgataatgaaagcgtattaactgttaaagataaagat

SEQ ID NO: 116819 - DNA, 75 bp, synthetic construct
  source 1..75: mol_type = other DNA
tggctacaatctcggagtatatgcgacctggtttgctgatgcgcaaaaccatcaaggggtttatgtcgatagctg

SEQ ID NO: 116820 - DNA, 75 bp, synthetic construct
  source 1..75: mol_type = other DNA
ggttcgctttctgttgcccgtcaactggatggtacggcgattgggatgtgtgcattacccaacggcaaacgctgt

SEQ ID NO: 116821 - DNA, 75 bp, synthetic construct
  source 1..75: mol_type = other DNA
atgatgaaaatgcaatcgcgtaaaatctggtactaccgtgccaccatcatcatcctgttgatcgcttcgctgctg

SEQ ID NO: 116822 - DNA, 75 bp, synthetic construct
  source 1..75: mol_type = other DNA
ccagtgccgaaacctggcgcgccatcacccggagaagagccgcgcgtggcgatgctgtcgttttccagcaatggt

SEQ ID NO: 116823 - DNA, 75 bp, synthetic construct
  source 1..75: mol_type = other DNA
cgctgaaattggccgggcacgtaacgttaacgggctgccggtcctgccagccattattccgctcagtgatggtca

SEQ ID NO: 116824 - DNA, 75 bp, synthetic construct
  source 1..75: mol_type = other DNA
aaataatttaaactggagattaaccttagtaggtaaaggcccacttttagaatactataagacgttggctcgaaa

SEQ ID NO: 116825 - DNA, 75 bp, synthetic construct
  source 1..75: mol_type = other DNA
atgaatccagtacccgcgcagcgtgaatatttcctcgactccatccgcgcatggttgatgttgttagggatccct

SEQ ID NO: 116826 - DNA, 75 bp, synthetic construct
  source 1..75: mol_type = other DNA
cagtcggcacgggtaacttattttgtcaacgcgtcgctgtttatctacctggttcaccacccgttaacgctcttt

SEQ ID NO: 116827 - DNA, 75 bp, synthetic construct
  source 1..75: mol_type = other DNA
agacgcacaaattcaagaatatctccccgcattacagcgcattaaagcgttcaaaaccctcgggtaaatgccctc

SEQ ID NO: 116828 - DNA, 75 bp, synthetic construct
  source 1..75: mol_type = other DNA
ccactccgtcgcaccggtaaataatcaacaaggctgggggaacgtgatgtatatccctgccgcgccgatgtgtga

SEQ ID NO: 116829 - DNA, 75 bp, synthetic construct
  source 1..75: mol_type = other DNA
ccgtctggtggcactgcgatgtgattcactccgtcgcgccagtagacaatcaacagggttggggcaacgtgatgt

SEQ ID NO: 116830 - DNA, 75 bp, synthetic construct
  source 1..75: mol_type = other DNA
aggaaaagttaccggcagtggtctgctgaatgtatataacgaactctatattacgcagattagtgatctcagtgg

SEQ ID NO: 116831 - DNA, 75 bp, synthetic construct
  source 1..75: mol_type = other DNA
gctggacgcaaccatcaatattgcagactctggcaatgtttttagcattttcactaccaatctgggcagcggtaa

SEQ ID NO: 116832 - DNA, 75 bp, synthetic construct
  source 1..75: mol_type = other DNA
tgctgcatcgggtgtgctcgacgggttgagacaagttgcgagttcgtataatcgtggcgcgatgtttgataaacc

SEQ ID NO: 116833 - DNA, 75 bp, synthetic construct
  source 1..75: mol_type = other DNA
ctcgacgggctgagacaagttgcgagttcgtacaaccgtggtgcaatgtttgataaaccagcggcggcggggtga

SEQ ID NO: 116834 - DNA, 75 bp, synthetic construct
  source 1..75: mol_type = other DNA
ccactccattcagatgatgtgcaacggcaaaaagcattgttcgcaaatgtctttagattatatgaacttttacag

SEQ ID NO: 116835 - DNA, 75 bp, synthetic construct
  source 1..75: mol_type = other DNA
atataaagcaacggggcttgatttactgaatattgccgccgattatgcggaatatgtggcagaagtagatttaag

SEQ ID NO: 116836 - DNA, 75 bp, synthetic construct
  source 1..75: mol_type = other DNA
ttcgaagaaatacaatattccgtccattttgattgaaaaagaattgataattcctgaaggcgaagttttcctaat

SEQ ID NO: 116837 - DNA, 75 bp, synthetic construct
  source 1..75: mol_type = other DNA
aagcggacaggttaaaccgctcagttacggcttcatcagccaggacgatctggcgaagcagtttctctatgtttc

SEQ ID NO: 116838 - DNA, 75 bp, synthetic construct
  source 1..75: mol_type = other DNA
tacggtcaactggaactctgcaaatgaattttattttcaggcagctgcaacagcggcaaatggtcttacatatac

SEQ ID NO: 116839 - DNA, 75 bp, synthetic construct
  source 1..75: mol_type = other DNA
atgacttttacccatgagacgctgccaacagatgcgaaaacggctatccgtgagatgaaagcggagctgcggcaa

SEQ ID NO: 116840 - DNA, 75 bp, synthetic construct
  source 1..75: mol_type = other DNA
cgtttttgccaatgtgtttaatggtaatttcgatgattacgatccctgggattgctgcacaccggaccgatgtcg

SEQ ID NO: 116841 - DNA, 75 bp, synthetic construct
  source 1..75: mol_type = other DNA
attgaaatcaatattatcggagcggcagatccacaatcaacacagcaggctgctgcatcaggtgtgctcgacggg

SEQ ID NO: 116842 - DNA, 75 bp, synthetic construct
  source 1..75: mol_type = other DNA
taaaacattaaacatttctgaacatctcaggattttgtatggagatactttgattctttcaaatataaaagatga

SEQ ID NO: 116843 - DNA, 75 bp, synthetic construct
  source 1..75: mol_type = other DNA
attttaatggcagcattcttagaaatgcggatttctccggtacgatctgtgaaggcgtggattttactgattgtg

SEQ ID NO: 116844 - DNA, 75 bp, synthetic construct
  source 1..75: mol_type = other DNA
acaagccaatgacagtatcgataaacaagctaatgacagtacggtgcaacaatccattgacagtacggtgcaaca

SEQ ID NO: 116845 - DNA, 75 bp, synthetic construct
  source 1..75: mol_type = other DNA
agtcctacggtgttggcatcgaaaaatacgctgcgtgggaaaatattggtaaagctgcgggcctgaacggcgaaa

SEQ ID NO: 116846 - DNA, 75 bp, synthetic construct
  source 1..75: mol_type = other DNA
acgagcatactattgtggtgactgataacggctgcgaaattctgacgctacgcaaggatgacaccatcccggcga

SEQ ID NO: 116847 - DNA, 75 bp, synthetic construct
  source 1..75: mol_type = other DNA
acaagccaatgacagtaccgataaacaagccaatgacaatatcgataaacaggtcaatgacagtaccgataaaca

SEQ ID NO: 116848 - DNA, 75 bp, synthetic construct
  source 1..75: mol_type = other DNA
caacggtgtatcgaagggttgaatttagcgggaatggatttaaccggcatagacttgtctaaaatggttctaagg

SEQ ID NO: 116849 - DNA, 75 bp, synthetic construct
  source 1..75: mol_type = other DNA
caatgacagtacggtgcaacaatccattgacagtacggtgcaacaagccaatgacagtaccgataaacaagccaa

SEQ ID NO: 116850 - DNA, 75 bp, synthetic construct
  source 1..75: mol_type = other DNA
caacagaacaaatcatcggcagaaccaaaagaaatggtttacatgagtttgacgttggcgatctaaaaataatat

SEQ ID NO: 116851 - DNA, 75 bp, synthetic construct
  source 1..75: mol_type = other DNA
ctgacagacatcacaaatccccgggtggggatttgtgtataagagacagcgataagggggcgagcctgaaagctc

SEQ ID NO: 116852 - DNA, 75 bp, synthetic construct
  source 1..75: mol_type = other DNA
atgggctccctaaacatataccaggatattgccccaacactcggcatgtattcgggactaaaagcttgccatgaa

SEQ ID NO: 116853 - DNA, 75 bp, synthetic construct
  source 1..75: mol_type = other DNA
aacgctaatttaacaaattgtgaactctctaatgcaaacttttcgaatgcaaaattctacaatactaattgtact

SEQ ID NO: 116854 - DNA, 75 bp, synthetic construct
  source 1..75: mol_type = other DNA
cgttacttgctgaacctgttaaaagccaatgccgcgcgcaagctggcagcctaccccggaacgctgccgattaat

SEQ ID NO: 116855 - DNA, 75 bp, synthetic construct
  source 1..75: mol_type = other DNA
cagataaaaatctttcagacaaagatcttactaatattagctgcatgtataccaatttttcaaacgctaatttaa

SEQ ID NO: 116856 - DNA, 75 bp, synthetic construct
  source 1..75: mol_type = other DNA
atctcgcgtggagtgaagaccccacacaagcgaagcataaaccgcgtctggtggtcttccacggtctcgaaggca

SEQ ID NO: 116857 - DNA, 75 bp, synthetic construct
  source 1..75: mol_type = other DNA
gcgccggatttatcgggatggaaatctacgaattccatcacctgattgttaacggcatgggcccggatcgcagcg

SEQ ID NO: 116858 - DNA, 75 bp, synthetic construct
  source 1..75: mol_type = other DNA
ttcaatgtgatctgaacacgacaaatgacctcaccgttcaatttacggcgatgctaaacccggatgagcgggtga

SEQ ID NO: 116859 - DNA, 75 bp, synthetic construct
  source 1..75: mol_type = other DNA
cgggccgcacgacaacttccacccgagtaactcgcacgtgatccctgcattgctgcgtcgcttccacgaggcgac

SEQ ID NO: 116860 - DNA, 75 bp, synthetic construct
  source 1..75: mol_type = other DNA
aaagaggtgactggtgtgacatctggggtaacgaggatgtatctgtgtggtggaaccgtctgtgtgacaacgtcc

SEQ ID NO: 116861 - DNA, 75 bp, synthetic construct
  source 1..75: mol_type = other DNA
tcaaacccacgctcacgggcagcctggagaaagtacgcgagcaggtgcaggcggcgcacgcgctggggctgacgg

SEQ ID NO: 116862 - DNA, 75 bp, synthetic construct
  source 1..75: mol_type = other DNA
ttcagctgcacgctggagcactggtatgccgaacagggctgtgatttctgtggctggcagttgtatgagcgcgga

SEQ ID NO: 116863 - DNA, 75 bp, synthetic construct
  source 1..75: mol_type = other DNA
ggctgccggacgtggtgctgtatcgacggaaaatatcgcgttcacccgctggctgacacacctgcagaacggtgt

SEQ ID NO: 116864 - DNA, 75 bp, synthetic construct
  source 1..75: mol_type = other DNA
aaccgtgcgcggctggcgtgggcgatggacttcgctgactggtcgcaattgaccggggcgttgaccggacatatg

SEQ ID NO: 116865 - DNA, 75 bp, synthetic construct
  source 1..75: mol_type = other DNA
gtcgcggcctcactgacaacatcaaacttggcgcgggtggcattcgcgaaattgaatttatcgtccaggtgttcc

SEQ ID NO: 116866 - DNA, 75 bp, synthetic construct
  source 1..75: mol_type = other DNA
tatcgccgcaatgaatcatgttggggtggcgatgggaagaaaacgcctggtacaaaaaaggcttgccagtggtga

SEQ ID NO: 116867 - DNA, 75 bp, synthetic construct
  source 1..75: mol_type = other DNA
ccagtgtgcagtcctgaatatgcccaacgccatgctttaacaaacgcggtaattaatttgcgtcactgtactctg

SEQ ID NO: 116868 - DNA, 75 bp, synthetic construct
  source 1..75: mol_type = other DNA
taacccgactgttgaagccgaagtacacctggagggtggtttcgtcggtatggcagctgctccgtcaggtgcttc

SEQ ID NO: 116869 - DNA, 75 bp, synthetic construct
  source 1..75: mol_type = other DNA
ggtatgacctgaatatcagcagtcagggagaaaacttcattcaggtggatttcgacacgccgtggtgtcagccgg

SEQ ID NO: 116870 - DNA, 75 bp, synthetic construct
  source 1..75: mol_type = other DNA
aaaaacgaggcctggacgtgggaacatcaggcactggttcgtgcgcgtgtggtatatggcgatccacagctcact

SEQ ID NO: 116871 - DNA, 75 bp, synthetic construct
  source 1..75: mol_type = other DNA
gccctacggtgaaatgctggttggttcacgacgtatctctcaggacatcagcacccgtgatgaaggcggagacgg

SEQ ID NO: 116872 - DNA, 75 bp, synthetic construct
  source 1..75: mol_type = other DNA
atggtcaagtctcaaccgattttgagatatatcttgcgcgggattcccgcaattgcagtagcagttctgctttct

SEQ ID NO: 116873 - DNA, 75 bp, synthetic construct
  source 1..75: mol_type = other DNA
atgtgacgcctggattgaggatgtttatatctttcaagtgtttaaagaagcctggcaatttcaaaacgataacag

SEQ ID NO: 116874 - DNA, 75 bp, synthetic construct
  source 1..75: mol_type = other DNA
cgaaagtgacaccatgccgctctatatcggcaaaagcgttaatatccgcagtcgggtgctttctcatttacgcac

SEQ ID NO: 116875 - DNA, 75 bp, synthetic construct
  source 1..75: mol_type = other DNA
ccaccagcagtggtgtaattatttccagcatgaatgagccgtactggaagaagcgttacaacgaagcacgtcggg

SEQ ID NO: 116876 - DNA, 75 bp, synthetic construct
  source 1..75: mol_type = other DNA
gaaattgatcccaataataaccccagctatggcgttctatgtggaatgtcagtgatggggttcagtttagtactg

SEQ ID NO: 116877 - DNA, 75 bp, synthetic construct
  source 1..75: mol_type = other DNA
ccgatctttctgtgtgtaatcgtgacaagttatgggcaaaaaccagtaaggctggcctggagtttcagttattag

SEQ ID NO: 116878 - DNA, 75 bp, synthetic construct
  source 1..75: mol_type = other DNA
gtgacgtattttgcgaagccgggggcgcaggccgtgatgccggtgacgtttccgctggtgtttgtgttcagtgcc

SEQ ID NO: 116879 - DNA, 75 bp, synthetic construct
  source 1..75: mol_type = other DNA
acggtggtgttctggacggtgttccttctgcatatcactggtatacggaacggtatggcgtgaagtggccttgtg

SEQ ID NO: 116880 - DNA, 75 bp, synthetic construct
  source 1..75: mol_type = other DNA
tttgctggtgctgctggccttgagggattgcagcgatataatctcacattaaatattgggttaatttccagtaat

SEQ ID NO: 116881 - DNA, 75 bp, synthetic construct
  source 1..75: mol_type = other DNA
ccgggaaaatgcccgtctgggtctggcagcggccacgctgcagtcggatatggaaaaagccggtgaactggcggc

SEQ ID NO: 116882 - DNA, 75 bp, synthetic construct
  source 1..75: mol_type = other DNA
gcatgtagtgcaaataacaccgcaaagaatatgcatcctgagacacgtgcagtgggtagtgaaacatcatcactg

SEQ ID NO: 116883 - DNA, 75 bp, synthetic construct
  source 1..75: mol_type = other DNA
caagccttgtcggtactgatcccttcacaggcgtggatattacgattgccaactgcaaatcggcatactgggatg

SEQ ID NO: 116884 - DNA, 75 bp, synthetic construct
  source 1..75: mol_type = other DNA
cactactgcaaatcgacacacttatccggcaactggctgaaatatcagcaatgacagaaagtattggcggtaaag

SEQ ID NO: 116885 - DNA, 75 bp, synthetic construct
  source 1..75: mol_type = other DNA
gcggtactggacagcgtcgctgggaaggattaccggatgatgtcagggaaatcatcactgtgcttttcaccgcaa

SEQ ID NO: 116886 - DNA, 75 bp, synthetic construct
  source 1..75: mol_type = other DNA
agattgctgcgattaaacgactggccagcggtgccgtcacaccgttttatcgccgcaccacaaatgaaggtattc

SEQ ID NO: 116887 - DNA, 75 bp, synthetic construct
  source 1..75: mol_type = other DNA
gggattccgccgtcagatgaacgaaggctggtaccagatacgtattgccggtgatgacacggcaccggaggcggt

SEQ ID NO: 116888 - DNA, 75 bp, synthetic construct
  source 1..75: mol_type = other DNA
gctactggatgaacaaaactgcctgatgctgcatgaactctgctgcagagcggtactggacagcgtcgctgggaa

SEQ ID NO: 116889 - DNA, 75 bp, synthetic construct
  source 1..75: mol_type = other DNA
aatggctttaacggtggtgttctgaacggtgttccttctgcatatcactggtatacggaacggtatggcgtgaag

SEQ ID NO: 116890 - DNA, 75 bp, synthetic construct
  source 1..75: mol_type = other DNA
cccggactgacggatgccggacgtggtgttgtatcgccggagaatatcgcgttcacccgctggctgacacacctg

SEQ ID NO: 116891 - DNA, 75 bp, synthetic construct
  source 1..75: mol_type = other DNA
ggatctcgtgtattcgcattaatcgatatgattaacgacgagatcgacacgttcaccaatggcgctgttttcgat

SEQ ID NO: 116892 - DNA, 75 bp, synthetic construct
  source 1..75: mol_type = other DNA
gcgcggagagctcgttgatgtgctgtggggggagctggaatggtcttccccgacagatgacgatgagctgccgga

SEQ ID NO: 116893 - DNA, 75 bp, synthetic construct
  source 1..75: mol_type = other DNA
cctgagcaaagatccggctgatggtcgtaaggtcaaaggcgttatccactgggtaagtgcggcacatgcgctacc

SEQ ID NO: 116894 - DNA, 75 bp, synthetic construct
  source 1..75: mol_type = other DNA
aggcaaaaacaccggattaccgcgcaacggataacggcagacagaacacgtacttttcctcactggacaacatga

SEQ ID NO: 116895 - DNA, 75 bp, synthetic construct
  source 1..75: mol_type = other DNA
ctgcggatgatttcctgtcggtgattaacccggaatcgctggtgatcaaacagggctttgctgaaccgtctctga

SEQ ID NO: 116896 - DNA, 75 bp, synthetic construct
  source 1..75: mol_type = other DNA
ttcctgggcggcggaagcgctggcgcgtacggggattggcgcaatcacgcttattgatatggatgatgtatgcgt

SEQ ID NO: 116897 - DNA, 75 bp, synthetic construct
  source 1..75: mol_type = other DNA
ggtttgaaccgtgccccggactgacggctgccggacgtggtgttgtatcgccggagaatatcgcgttcacccgct

SEQ ID NO: 116898 - DNA, 75 bp, synthetic construct
  source 1..75: mol_type = other DNA
cgatgttgcgcgatgaatttgaacagaccttgtcctctgccgacggaactcatctctggaaacttcccgtcaccc

SEQ ID NO: 116899 - DNA, 75 bp, synthetic construct
  source 1..75: mol_type = other DNA
acggtgaaatgctggttggttcacgacggatatcccaggacatcagcacccgtgatgagggcggtgacgggaaag

SEQ ID NO: 116900 - DNA, 75 bp, synthetic construct
  source 1..75: mol_type = other DNA
gcacgcatctgccttcacggggatttacaacgatttggccgccgcctcagcctgtatgtgaacacggcagcggaa

SEQ ID NO: 116901 - DNA, 75 bp, synthetic construct
  source 1..75: mol_type = other DNA
tccgccgttacatcgatttcagcgtcatccagtcgctgcgcaacatgaaagggatgattgcccgcgaagtgcgtc

SEQ ID NO: 116902 - DNA, 75 bp, synthetic construct
  source 1..75: mol_type = other DNA
aaagaggtgactggtgcgacatctggagtaacgaggatgtatcggtgtggtggaaccgtctgtgtgacaacgtcc

SEQ ID NO: 116903 - DNA, 75 bp, synthetic construct
  source 1..75: mol_type = other DNA
ggcgagaaagtggcgaaggtcaaagtgggattgtacgaagccgtgcgcgacggcatggtggtgaatctgttgctg

SEQ ID NO: 116904 - DNA, 75 bp, synthetic construct
  source 1..75: mol_type = other DNA
gatgaatataacggactgagtatcgatttctatattgcaagttctgaggttcctgcacttatacaggccgatgaa

SEQ ID NO: 116905 - DNA, 75 bp, synthetic construct
  source 1..75: mol_type = other DNA
tcggtactggacagcgtcgctgggaaggattaccggacgatgtcagggataccatcaccgcacttttcaccgcaa

SEQ ID NO: 116906 - DNA, 75 bp, synthetic construct
  source 1..75: mol_type = other DNA
cggcgagcgggaaatcgacggacgacagttttatctgcgtctggcgcaacgcattatgcacctgttcagcacgcg

SEQ ID NO: 116907 - DNA, 75 bp, synthetic construct
  source 1..75: mol_type = other DNA
gttccgtcggcgcattatggtgcgtattgcctgggcgcaaacactggcgctggttgcggaagagaacattttgca

SEQ ID NO: 116908 - DNA, 75 bp, synthetic construct
  source 1..75: mol_type = other DNA
gtggtactggccagcgtcgctgggaaggattaccggatgagatcagggaaaccatcaccgtgtatttcaccgcca

SEQ ID NO: 116909 - DNA, 75 bp, synthetic construct
  source 1..75: mol_type = other DNA
tgttccttctgcatatcactggtatacagaacggtatggcgtgaagtggccttgtgggtatgacctgaatatcag

SEQ ID NO: 116910 - DNA, 75 bp, synthetic construct
  source 1..75: mol_type = other DNA
gcatctacccgaaactggcaaaacagccgatggcagaaagcgagttattgcagggcacgctggagccgaccaacg

SEQ ID NO: 116911 - DNA, 75 bp, synthetic construct
  source 1..75: mol_type = other DNA
atcgcctgggcgcaaactctggcactggttactgaagagagcattttgcagcagctcagccatctggcggagacg

SEQ ID NO: 116912 - DNA, 75 bp, synthetic construct
  source 1..75: mol_type = other DNA
ggaagattattaccaggagcaggggcgcgactgggagcgttacgcgatggtcaaggcgcggattatgggcgatag

SEQ ID NO: 116913 - DNA, 75 bp, synthetic construct
  source 1..75: mol_type = other DNA
tgtctcgacagtcgccattccactgcggaaaaaccagtatttaaccgcaccgttgggctgcgtgatacctgggcg

SEQ ID NO: 116914 - DNA, 75 bp, synthetic construct
  source 1..75: mol_type = other DNA
attccggcggcgcattatggtgcgcatcgcctgggcgcaaacgctggcactggttactgaagagagcattttgca

SEQ ID NO: 116915 - DNA, 75 bp, synthetic construct
  source 1..75: mol_type = other DNA
ccacagtcatcccggtgggctgccctggctgagcgaggctgaccggcggctgcagataaagagcgcactgccctg
